United States Patent Application Publication US 2007/0048756 A1 - sequence listing, part 11

SEQ ID NO: 362902 - DNA, 33 bp, Homo sapien
tggtggtttgtgcagcgataaattaaaaggcat

SEQ ID NO: 362903 - DNA, 33 bp, Homo sapien
caatcaaatacccaaagagctaggagagaaatg

SEQ ID NO: 362904 - DNA, 33 bp, Homo sapien
caatcaaatacccaaatagctaggagagaaatg

SEQ ID NO: 362905 - DNA, 33 bp, Homo sapien
acacgtctgaccaccaagaatacaggtagcagg

SEQ ID NO: 362906 - DNA, 33 bp, Homo sapien
acacgtctgaccaccatgaatacaggtagcagg

SEQ ID NO: 362907 - DNA, 33 bp, Homo sapien
agcttcctttctcaaaaatacagacaagtatta

SEQ ID NO: 362908 - DNA, 33 bp, Homo sapien
agcttcctttctcaaacatacagacaagtatta

SEQ ID NO: 362909 - DNA, 33 bp, Homo sapien
gctcatctggaacaaaaggtcttacaaatcctg

SEQ ID NO: 362910 - DNA, 33 bp, Homo sapien
gctcatctggaacaaacggtcttacaaatcctg

SEQ ID NO: 362911 - DNA, 33 bp, Homo sapien
caaggccgagcacctacagaaggtcaagttgca

SEQ ID NO: 362912 - DNA, 33 bp, Homo sapien
caaggccgagcacctagagaaggtcaagttgca

SEQ ID NO: 362913 - DNA, 33 bp, Homo sapien
atgcattaaataaatacgcctgaaaaggttatt

SEQ ID NO: 362914 - DNA, 33 bp, Homo sapien
atgcattaaataaataggcctgaaaaggttatt

SEQ ID NO: 362915 - DNA, 33 bp, Homo sapien
ctgcaaactccctgaaagcacacctaagctggg

SEQ ID NO: 362916 - DNA, 33 bp, Homo sapien
ctgcaaactccctgaaggcacacctaagctggg

SEQ ID NO: 362917 - DNA, 33 bp, Homo sapien
tctctcttccttgaaaatgacagctttccccat

SEQ ID NO: 362918 - DNA, 33 bp, Homo sapien
tctctcttccttgaaactgacagctttccccat

SEQ ID NO: 362919 - DNA, 33 bp, Homo sapien
ggaccctggagtttaactacatccactgcttga

SEQ ID NO: 362920 - DNA, 33 bp, Homo sapien
ggaccctggagtttaagtacatccactgcttga

SEQ ID NO: 362921 - DNA, 33 bp, Homo sapien
ctcgatatgacatgatgaaaggggcactttatc

SEQ ID NO: 362922 - DNA, 33 bp, Homo sapien
ctcgatatgacatgattaaaggggcactttatc

SEQ ID NO: 362923 - DNA, 33 bp, Homo sapien
caggggacaggtggacaccagaaggcaattgga

SEQ ID NO: 362924 - DNA, 33 bp, Homo sapien
caggggacaggtggacgccagaaggcaattgga

SEQ ID NO: 362925 - DNA, 33 bp, Homo sapien
agacatgttggagaagaatagcattgcagtgca

SEQ ID NO: 362926 - DNA, 33 bp, Homo sapien
agacatgttggagaaggatagcattgcagtgca

SEQ ID NO: 362927 - DNA, 33 bp, Homo sapien
gcatgagcttactccacagagcctggctgcctc

SEQ ID NO: 362928 - DNA, 33 bp, Homo sapien
gcatgagcttactccagagagcctggctgcctc

SEQ ID NO: 362929 - DNA, 33 bp, Homo sapien
ctccttaaaagtgaataaaggagcatgagctta

SEQ ID NO: 362930 - DNA, 33 bp, Homo sapien
ctccttaaaagtgaatgaaggagcatgagctta

SEQ ID NO: 362931 - DNA, 33 bp, Homo sapien
gggtacaaacaaagaaagaataagatctcatct

SEQ ID NO: 362932 - DNA, 33 bp, Homo sapien
gggtacaaacaaagaaggaataagatctcatct

SEQ ID NO: 362933 - DNA, 33 bp, Homo sapien
tattcacaacagcctacagaatcaacctcagtg

SEQ ID NO: 362934 - DNA, 33 bp, Homo sapien
tattcacaacagcctatagaatcaacctcagtg

SEQ ID NO: 362935 - DNA, 33 bp, Homo sapien
cagcctagagcccacactcttaacacaacagtt

SEQ ID NO: 362936 - DNA, 33 bp, Homo sapien
cagcctagagcccacagtcttaacacaacagtt

SEQ ID NO: 362937 - DNA, 33 bp, Homo sapien
tgctaaaagcctgaaagcaaggtgtctgcatgg

SEQ ID NO: 362938 - DNA, 33 bp, Homo sapien
tgctaaaagcctgaaatcaaggtgtctgcatgg

SEQ ID NO: 362939 - DNA, 33 bp, Homo sapien
attagcccagcacataccataagccctattaaa

SEQ ID NO: 362940 - DNA, 33 bp, Homo sapien
attagcccagcacatatcataagccctattaaa

SEQ ID NO: 362941 - DNA, 33 bp, Homo sapien
cttatctctgccgtcaagaatatttattggggg

SEQ ID NO: 362942 - DNA, 33 bp, Homo sapien
cttatctctgccgtcaggaatatttattggggg

SEQ ID NO: 362943 - DNA, 33 bp, Homo sapien
caaatatagtgacttacgccaacaaaaaattta

SEQ ID NO: 362944 - DNA, 33 bp, Homo sapien
caaatatagtgacttatgccaacaaaaaattta

SEQ ID NO: 362945 - DNA, 33 bp, Homo sapien
tggattatccaagtgaactcaatctaattacat

SEQ ID NO: 362946 - DNA, 33 bp, Homo sapien
tggattatccaagtgagctcaatctaattacat

SEQ ID NO: 362947 - DNA, 33 bp, Homo sapien
gatctggagaaattcacggtatctctgtggttc

SEQ ID NO: 362948 - DNA, 33 bp, Homo sapien
gatctggagaaattcatggtatctctgtggttc

SEQ ID NO: 362949 - DNA, 33 bp, Homo sapien
ctttgtgcctttggggacaggatatgactgctc

SEQ ID NO: 362950 - DNA, 33 bp, Homo sapien
ctttgtgcctttggggtcaggatatgactgctc

SEQ ID NO: 362951 - DNA, 33 bp, Homo sapien
gactaaggcttttagacgaaaaatgaggaggat

SEQ ID NO: 362952 - DNA, 33 bp, Homo sapien
gactaaggcttttagatgaaaaatgaggaggat

SEQ ID NO: 362953 - DNA, 33 bp, Homo sapien
ccttgcacaattcttacatctagggtaactgct

SEQ ID NO: 362954 - DNA, 33 bp, Homo sapien
ccttgcacaattcttatatctagggtaactgct

SEQ ID NO: 362955 - DNA, 33 bp, Homo sapien
taattggtgtgccatacatcagaccaaccaaca

SEQ ID NO: 362956 - DNA, 33 bp, Homo sapien
taattggtgtgccatatatcagaccaaccaaca

SEQ ID NO: 362957 - DNA, 33 bp, Homo sapien
tgtcagaatcacctgaagcgtttgttaaaaatc

SEQ ID NO: 362958 - DNA, 33 bp, Homo sapien
tgtcagaatcacctgacgcgtttgttaaaaatc

SEQ ID NO: 362959 - DNA, 33 bp, Homo sapien
ctactctctgtatcaactgttgtaagcagtgta

SEQ ID NO: 362960 - DNA, 33 bp, Homo sapien
ctactctctgtatcaattgttgtaagcagtgta

SEQ ID NO: 362961 - DNA, 33 bp, Homo sapien
acatgggtaagtctcaaaatctttatgctcagt

SEQ ID NO: 362962 - DNA, 33 bp, Homo sapien
acatgggtaagtctcagaatctttatgctcagt

SEQ ID NO: 362963 - DNA, 33 bp, Homo sapien
acaattaagttattatcaactatggtcactata

SEQ ID NO: 362964 - DNA, 33 bp, Homo sapien
acaattaagttattatgaactatggtcactata

SEQ ID NO: 362965 - DNA, 33 bp, Homo sapien
tcaaccttctctcagtaaaaacacctgagcatt

SEQ ID NO: 362966 - DNA, 33 bp, Homo sapien
tcaaccttctctcagtgaaaacacctgagcatt

SEQ ID NO: 362967 - DNA, 33 bp, Homo sapien
ggatgtctcttttcagaatactatctacaaacc

SEQ ID NO: 362968 - DNA, 33 bp, Homo sapien
ggatgtctcttttcaggatactatctacaaacc

SEQ ID NO: 362969 - DNA, 33 bp, Homo sapien
catttcaccctggaaaagacctgaagtttggtt

SEQ ID NO: 362970 - DNA, 33 bp, Homo sapien
catttcaccctggaaatgacctgaagtttggtt

SEQ ID NO: 362971 - DNA, 33 bp, Homo sapien
cttagttcaatttcaccgtaacacgacacagtc

SEQ ID NO: 362972 - DNA, 33 bp, Homo sapien
cttagttcaatttcacggtaacacgacacagtc

SEQ ID NO: 362973 - DNA, 33 bp, Homo sapien
aggctcctctgcagacagaatgtatgtaaccgc

SEQ ID NO: 362974 - DNA, 33 bp, Homo sapien
aggctcctctgcagaccgaatgtatgtaaccgc

SEQ ID NO: 362975 - DNA, 33 bp, Homo sapien
aacgttgcctctgggaactcaagccatagaaca

SEQ ID NO: 362976 - DNA, 33 bp, Homo sapien
aacgttgcctctgggagctcaagccatagaaca

SEQ ID NO: 362977 - DNA, 33 bp, Homo sapien
ctcctcgatgctcagacctctaaggggaacttg

SEQ ID NO: 362978 - DNA, 33 bp, Homo sapien
ctcctcgatgctcagatctctaaggggaacttg

SEQ ID NO: 362979 - DNA, 33 bp, Homo sapien
taaggtagtttgtacaaggtacaagtgaaatgg

SEQ ID NO: 362980 - DNA, 33 bp, Homo sapien
taaggtagtttgtacagggtacaagtgaaatgg

SEQ ID NO: 362981 - DNA, 33 bp, Homo sapien
cttagtgaccagagacactcctgagatccttac

SEQ ID NO: 362982 - DNA, 33 bp, Homo sapien
cttagtgaccagagaccctcctgagatccttac

SEQ ID NO: 362983 - DNA, 33 bp, Homo sapien
ccccttgacaaggaaaagaaagggaccaattca

SEQ ID NO: 362984 - DNA, 33 bp, Homo sapien
ccccttgacaaggaaaggaaagggaccaattca

SEQ ID NO: 362985 - DNA, 33 bp, Homo sapien
catggagcttgctcaaaactgaaactattctca

SEQ ID NO: 362986 - DNA, 33 bp, Homo sapien
catggagcttgctcaagactgaaactattctca

SEQ ID NO: 362987 - DNA, 33 bp, Homo sapien
tttataaattccatgacgtacatcttaaggatc

SEQ ID NO: 362988 - DNA, 33 bp, Homo sapien
tttataaattccatgaggtacatcttaaggatc

SEQ ID NO: 362989 - DNA, 33 bp, Homo sapien
acatcaatgtttactacgatccttaagatgtac

SEQ ID NO: 362990 - DNA, 33 bp, Homo sapien
acatcaatgtttactatgatccttaagatgtac

SEQ ID NO: 362991 - DNA, 33 bp, Homo sapien
ggaatccatttgggaaatgataaaacccaaagt

SEQ ID NO: 362992 - DNA, 33 bp, Homo sapien
ggaatccatttgggaattgataaaacccaaagt

SEQ ID NO: 362993 - DNA, 33 bp, Homo sapien
tcctgccctgaggatgaacatagtcacagtgtt

SEQ ID NO: 362994 - DNA, 33 bp, Homo sapien
tcctgccctgaggatggacatagtcacagtgtt

SEQ ID NO: 362995 - DNA, 33 bp, Homo sapien
attctctttgccatataagatgtgactttcgcc

SEQ ID NO: 362996 - DNA, 33 bp, Homo sapien
attctctttgccatatgagatgtgactttcgcc

SEQ ID NO: 362997 - DNA, 33 bp, Homo sapien
tgtgattatacatcaacggtctatcttccgaca

SEQ ID NO: 362998 - DNA, 33 bp, Homo sapien
tgtgattatacatcaatggtctatcttccgaca

SEQ ID NO: 362999 - DNA, 33 bp, Homo sapien
tgtcaagcatccttccacgtacagaagagcctc

SEQ ID NO: 363000 - DNA, 33 bp, Homo sapien
tgtcaagcatccttccgcgtacagaagagcctc

SEQ ID NO: 363001 - DNA, 33 bp, Homo sapien
agtgtgccatgatcaaacacgttaatattcctg

SEQ ID NO: 363002 - DNA, 33 bp, Homo sapien
agtgtgccatgatcaagcacgttaatattcctg

SEQ ID NO: 363003 - DNA, 33 bp, Homo sapien
ctcagtaaatagtgcaagtagccagacaggtgc

SEQ ID NO: 363004 - DNA, 33 bp, Homo sapien
ctcagtaaatagtgcaggtagccagacaggtgc

SEQ ID NO: 363005 - DNA, 33 bp, Homo sapien
gaggagtgatgagaaacaggagattaggaagta

SEQ ID NO: 363006 - DNA, 33 bp, Homo sapien
gaggagtgatgagaaagaggagattaggaagta

SEQ ID NO: 363007 - DNA, 33 bp, Homo sapien
ctgtcagaaaaaaaaacgcacataggagtccaa

SEQ ID NO: 363008 - DNA, 33 bp, Homo sapien
ctgtcagaaaaaaaaatgcacataggagtccaa

SEQ ID NO: 363009 - DNA, 33 bp, Homo sapien
actcggtctgaactggcagaatttttaagcaga

SEQ ID NO: 363010 - DNA, 33 bp, Homo sapien
actcggtctgaactgggagaatttttaagcaga

SEQ ID NO: 363011 - DNA, 33 bp, Homo sapien
acagttgccaattcaccgaatcaagaaacaggc

SEQ ID NO: 363012 - DNA, 33 bp, Homo sapien
acagttgccaattcactgaatcaagaaacaggc

SEQ ID NO: 363013 - DNA, 33 bp, Homo sapien
aacaaatagctacaggccaagggcaaccatgga

SEQ ID NO: 363014 - DNA, 33 bp, Homo sapien
aacaaatagctacaggtcaagggcaaccatgga

SEQ ID NO: 363015 - DNA, 33 bp, Homo sapien
gtgagactatgggatagcccgatgaaagggctg

SEQ ID NO: 363016 - DNA, 33 bp, Homo sapien
gtgagactatgggatatcccgatgaaagggctg

SEQ ID NO: 363017 - DNA, 33 bp, Homo sapien
tcacctgggtggattcaagaactgcagatcctt

SEQ ID NO: 363018 - DNA, 33 bp, Homo sapien
tcacctgggtggattcgagaactgcagatcctt

SEQ ID NO: 363019 - DNA, 33 bp, Homo sapien
tatctacttgagtcagaagtaaatgaaataaca

SEQ ID NO: 363020 - DNA, 33 bp, Homo sapien
tatctacttgagtcaggagtaaatgaaataaca

SEQ ID NO: 363021 - DNA, 33 bp, Homo sapien
cacgccccgaatcacaatacggcagccaagagc

SEQ ID NO: 363022 - DNA, 33 bp, Homo sapien
cacgccccgaatcacagtacggcagccaagagc

SEQ ID NO: 363023 - DNA, 33 bp, Homo sapien
cagatcttctctgtacgcctcaagaattttcat

SEQ ID NO: 363024 - DNA, 33 bp, Homo sapien
cagatcttctctgtactcctcaagaattttcat

SEQ ID NO: 363025 - DNA, 33 bp, Homo sapien
tgatcttacttgggaaactagctaccagatgaa

SEQ ID NO: 363026 - DNA, 33 bp, Homo sapien
tgatcttacttgggaacctagctaccagatgaa

SEQ ID NO: 363027 - DNA, 33 bp, Homo sapien
ggaagaaaagagaataaaggatctaggcaacca

SEQ ID NO: 363028 - DNA, 33 bp, Homo sapien
ggaagaaaagagaatagaggatctaggcaacca

SEQ ID NO: 363029 - DNA, 33 bp, Homo sapien
agattccagtttgcacaaagggtcagtatagct

SEQ ID NO: 363030 - DNA, 33 bp, Homo sapien
agattccagtttgcacgaagggtcagtatagct

SEQ ID NO: 363031 - DNA, 33 bp, Homo sapien
ctaagcactggggaaacggagccatctcagaca

SEQ ID NO: 363032 - DNA, 33 bp, Homo sapien
ctaagcactggggaaatggagccatctcagaca

SEQ ID NO: 363033 - DNA, 33 bp, Homo sapien
ccccccttctatactcaaggcagacattactaa

SEQ ID NO: 363034 - DNA, 33 bp, Homo sapien
ccccccttctatactccaggcagacattactaa

SEQ ID NO: 363035 - DNA, 33 bp, Homo sapien
attgtctgagcgcataccttgtgaattgtcata

SEQ ID NO: 363036 - DNA, 33 bp, Homo sapien
attgtctgagcgcatatcttgtgaattgtcata

SEQ ID NO: 363037 - DNA, 33 bp, Homo sapien
cacctcagtgcctgcacgtgtaagagcacagaa

SEQ ID NO: 363038 - DNA, 33 bp, Homo sapien
cacctcagtgcctgcaggtgtaagagcacagaa

SEQ ID NO: 363039 - DNA, 33 bp, Homo sapien
ggaagatttgtccatgccaacaactgtttcccg

SEQ ID NO: 363040 - DNA, 33 bp, Homo sapien
ggaagatttgtccatgtcaacaactgtttcccg

SEQ ID NO: 363041 - DNA, 33 bp, Homo sapien
aggggaacaagcctgacgattggagaacacaga

SEQ ID NO: 363042 - DNA, 33 bp, Homo sapien
aggggaacaagcctgatgattggagaacacaga

SEQ ID NO: 363043 - DNA, 33 bp, Homo sapien
agtacagagaagggaaacagcttactcaggtct

SEQ ID NO: 363044 - DNA, 33 bp, Homo sapien
agtacagagaagggaagcagcttactcaggtct

SEQ ID NO: 363045 - DNA, 33 bp, Homo sapien
actgccttcacggaaaatcagtgaaaggacatg

SEQ ID NO: 363046 - DNA, 33 bp, Homo sapien
actgccttcacggaaactcagtgaaaggacatg

SEQ ID NO: 363047 - DNA, 33 bp, Homo sapien
tgctggaacccgaggacctttgcgtacattttt

SEQ ID NO: 363048 - DNA, 33 bp, Homo sapien
tgctggaacccgaggagctttgcgtacattttt

SEQ ID NO: 363049 - DNA, 33 bp, Homo sapien
gtttgtcatgcttctcaaaatggtgggacatta

SEQ ID NO: 363050 - DNA, 33 bp, Homo sapien
gtttgtcatgcttctccaaatggtgggacatta

SEQ ID NO: 363051 - DNA, 33 bp, Homo sapien
caaaggatttataccactggcagtcctggttga

SEQ ID NO: 363052 - DNA, 33 bp, Homo sapien
caaaggatttataccagtggcagtcctggttga

SEQ ID NO: 363053 - DNA, 33 bp, Homo sapien
ttattctgacattagaatccattcttcctttgc

SEQ ID NO: 363054 - DNA, 33 bp, Homo sapien
ttattctgacattagactccattcttcctttgc

SEQ ID NO: 363055 - DNA, 33 bp, Homo sapien
ggtaggggaaggcaataatcaagtagcttccgt

SEQ ID NO: 363056 - DNA, 33 bp, Homo sapien
ggtaggggaaggcaatgatcaagtagcttccgt

SEQ ID NO: 363057 - DNA, 33 bp, Homo sapien
agttttcttagccacactggagaaagttacgga

SEQ ID NO: 363058 - DNA, 33 bp, Homo sapien
agttttcttagccacagtggagaaagttacgga

SEQ ID NO: 363059 - DNA, 33 bp, Homo sapien
tccacaagaatcagtaaaatggtgactctcaaa

SEQ ID NO: 363060 - DNA, 33 bp, Homo sapien
tccacaagaatcagtagaatggtgactctcaaa

SEQ ID NO: 363061 - DNA, 33 bp, Homo sapien
ctgagatacattgcagaaactcagccgtgtctc

SEQ ID NO: 363062 - DNA, 33 bp, Homo sapien
ctgagatacattgcaggaactcagccgtgtctc

SEQ ID NO: 363063 - DNA, 33 bp, Homo sapien
atgattccatttatataaagcatctagaatagg

SEQ ID NO: 363064 - DNA, 33 bp, Homo sapien
atgattccatttatatgaagcatctagaatagg

SEQ ID NO: 363065 - DNA, 33 bp, Homo sapien
agcacttttggaaaataaacagtatctctcaga

SEQ ID NO: 363066 - DNA, 33 bp, Homo sapien
agcacttttggaaaatgaacagtatctctcaga

SEQ ID NO: 363067 - DNA, 33 bp, Homo sapien
agtccacactcaaaaaaaatcatagaacatgtt

SEQ ID NO: 363068 - DNA, 33 bp, Homo sapien
agtccacactcaaaaacaatcatagaacatgtt

SEQ ID NO: 363069 - DNA, 33 bp, Homo sapien
tcttacccgcatgaaacgggtgaaaactatcaa

SEQ ID NO: 363070 - DNA, 33 bp, Homo sapien
tcttacccgcatgaaatgggtgaaaactatcaa

SEQ ID NO: 363071 - DNA, 33 bp, Homo sapien
gccacagtaagttgtacgtatccactgtagaaa

SEQ ID NO: 363072 - DNA, 33 bp, Homo sapien
gccacagtaagttgtatgtatccactgtagaaa

SEQ ID NO: 363073 - DNA, 33 bp, Homo sapien
agtaatctgatatgcaacaaactccctaagggt

SEQ ID NO: 363074 - DNA, 33 bp, Homo sapien
agtaatctgatatgcagcaaactccctaagggt

SEQ ID NO: 363075 - DNA, 33 bp, Homo sapien
actgactcttggtccaaacggtcctaattcctt

SEQ ID NO: 363076 - DNA, 33 bp, Homo sapien
actgactcttggtccacacggtcctaattcctt

SEQ ID NO: 363077 - DNA, 33 bp, Homo sapien
tgctgaaagccagagacaggaaggaaatccaca

SEQ ID NO: 363078 - DNA, 33 bp, Homo sapien
tgctgaaagccagagagaggaaggaaatccaca

SEQ ID NO: 363079 - DNA, 33 bp, Homo sapien
gccccttccacttgacagaacaaccaggtctgg

SEQ ID NO: 363080 - DNA, 33 bp, Homo sapien
gccccttccacttgacggaacaaccaggtctgg

SEQ ID NO: 363081 - DNA, 33 bp, Homo sapien
ccaaaaatgtgttttcactctctttctatgtgt

SEQ ID NO: 363082 - DNA, 33 bp, Homo sapien
ccaaaaatgtgttttctctctctttctatgtgt

SEQ ID NO: 363083 - DNA, 33 bp, Homo sapien
gttgagtatcactagaaaataggtagttctgca

SEQ ID NO: 363084 - DNA, 33 bp, Homo sapien
gttgagtatcactagagaataggtagttctgca

SEQ ID NO: 363085 - DNA, 33 bp, Homo sapien
ctctgctgtatccatacaagttaatctagtgtc

SEQ ID NO: 363086 - DNA, 33 bp, Homo sapien
ctctgctgtatccatagaagttaatctagtgtc

SEQ ID NO: 363087 - DNA, 33 bp, Homo sapien
tcacttgcctacgccgcataatagattcctgtg

SEQ ID NO: 363088 - DNA, 33 bp, Homo sapien
tcacttgcctacgccggataatagattcctgtg

SEQ ID NO: 363089 - DNA, 33 bp, Homo sapien
ggatggacagattcacagaagaagagcgatggc

SEQ ID NO: 363090 - DNA, 33 bp, Homo sapien
ggatggacagattcacggaagaagagcgatggc

SEQ ID NO: 363091 - DNA, 33 bp, Homo sapien
attggactctaccacaagttttctgggtgacat

SEQ ID NO: 363092 - DNA, 33 bp, Homo sapien
attggactctaccacacgttttctgggtgacat

SEQ ID NO: 363093 - DNA, 33 bp, Homo sapien
ggcagaggagaaggaaaatatgtgtggggggta

SEQ ID NO: 363094 - DNA, 33 bp, Homo sapien
ggcagaggagaaggaagatatgtgtggggggta

SEQ ID NO: 363095 - DNA, 33 bp, Homo sapien
gtacaaaaacacatgacctgtgcttgcaggggc

SEQ ID NO: 363096 - DNA, 33 bp, Homo sapien
gtacaaaaacacatgagctgtgcttgcaggggc

SEQ ID NO: 363097 - DNA, 33 bp, Homo sapien
tttcattaagccacaccgcacccaaatcgtgaa

SEQ ID NO: 363098 - DNA, 33 bp, Homo sapien
tttcattaagccacactgcacccaaatcgtgaa

SEQ ID NO: 363099 - DNA, 33 bp, Homo sapien
agagcaattccaggtacacagtggagtccctta

SEQ ID NO: 363100 - DNA, 33 bp, Homo sapien
agagcaattccaggtatacagtggagtccctta

SEQ ID NO: 363101 - DNA, 33 bp, Homo sapien
catctcagaccactcacattcactcttcttcag

SEQ ID NO: 363102 - DNA, 33 bp, Homo sapien
catctcagaccactcatattcactcttcttcag

SEQ ID NO: 363103 - DNA, 33 bp, Homo sapien
attgtaagcagtctgactatttttcttggagta

SEQ ID NO: 363104 - DNA, 33 bp, Homo sapien
attgtaagcagtctgagtatttttcttggagta

SEQ ID NO: 363105 - DNA, 33 bp, Homo sapien
atgggaaggcttttaacggatgcaaatttgcaa

SEQ ID NO: 363106 - DNA, 33 bp, Homo sapien
atgggaaggcttttaatggatgcaaatttgcaa

SEQ ID NO: 363107 - DNA, 33 bp, Homo sapien
gaaacctagacggaccaattgtcaaattgtatg

SEQ ID NO: 363108 - DNA, 33 bp, Homo sapien
gaaacctagacggaccgattgtcaaattgtatg

SEQ ID NO: 363109 - DNA, 33 bp, Homo sapien
ggggtatttggtttcccgcgttatgatgtgaat

SEQ ID NO: 363110 - DNA, 33 bp, Homo sapien
ggggtatttggtttcctgcgttatgatgtgaat

SEQ ID NO: 363111 - DNA, 33 bp, Homo sapien
tcccagctgagatgaactggtctcataagcaga

SEQ ID NO: 363112 - DNA, 33 bp, Homo sapien
tcccagctgagatgaattggtctcataagcaga

SEQ ID NO: 363113 - DNA, 33 bp, Homo sapien
agaagtgagtgttgtacggactgagtgcctcca

SEQ ID NO: 363114 - DNA, 33 bp, Homo sapien
agaagtgagtgttgtatggactgagtgcctcca

SEQ ID NO: 363115 - DNA, 33 bp, Homo sapien
gcatggtcaggtttcaaatccaattcaggagaa

SEQ ID NO: 363116 - DNA, 33 bp, Homo sapien
gcatggtcaggtttcacatccaattcaggagaa

SEQ ID NO: 363117 - DNA, 33 bp, Homo sapien
tgaatatttgttaattcaatgttcatggcaact

SEQ ID NO: 363118 - DNA, 33 bp, Homo sapien
tgaatatttgttaattgaatgttcatggcaact

SEQ ID NO: 363119 - DNA, 33 bp, Homo sapien
ttggagctgtaatacacagagtctcagttggga

SEQ ID NO: 363120 - DNA, 33 bp, Homo sapien
ttggagctgtaatacatagagtctcagttggga

SEQ ID NO: 363121 - DNA, 33 bp, Homo sapien
caaagaactactagataaggcactgagctcccc

SEQ ID NO: 363122 - DNA, 33 bp, Homo sapien
caaagaactactagatgaggcactgagctcccc

SEQ ID NO: 363123 - DNA, 33 bp, Homo sapien
gaatgaggtactgaaacaggctacaccatgaat

SEQ ID NO: 363124 - DNA, 33 bp, Homo sapien
gaatgaggtactgaaataggctacaccatgaat

SEQ ID NO: 363125 - DNA, 33 bp, Homo sapien
ttgtggtatcatcaggacaagaagaaatgggga

SEQ ID NO: 363126 - DNA, 33 bp, Homo sapien
ttgtggtatcatcagggcaagaagaaatgggga

SEQ ID NO: 363127 - DNA, 33 bp, Homo sapien
ctccaaagctgaaacaacatagtctggcagggg

SEQ ID NO: 363128 - DNA, 33 bp, Homo sapien
ctccaaagctgaaacagcatagtctggcagggg

SEQ ID NO: 363129 - DNA, 33 bp, Homo sapien
acaatatattctcccaagaagtcccttaactct

SEQ ID NO: 363130 - DNA, 33 bp, Homo sapien
acaatatattctcccacgaagtcccttaactct

SEQ ID NO: 363131 - DNA, 33 bp, Homo sapien
ttgaggtctgttttaacaataagcttctataac

SEQ ID NO: 363132 - DNA, 33 bp, Homo sapien
ttgaggtctgttttaataataagcttctataac

SEQ ID NO: 363133 - DNA, 33 bp, Homo sapien
gtgcccctctttcataacaaagttgcaattata

SEQ ID NO: 363134 - DNA, 33 bp, Homo sapien
gtgcccctctttcatagcaaagttgcaattata

SEQ ID NO: 363135 - DNA, 33 bp, Homo sapien
acctgccgaccctccaatgaaccaaactccatc

SEQ ID NO: 363136 - DNA, 33 bp, Homo sapien
acctgccgaccctccagtgaaccaaactccatc

SEQ ID NO: 363137 - DNA, 33 bp, Homo sapien
gggcttaacctgggcaaaataatcatggcaata

SEQ ID NO: 363138 - DNA, 33 bp, Homo sapien
gggcttaacctgggcataataatcatggcaata

SEQ ID NO: 363139 - DNA, 33 bp, Homo sapien
agctgctggataaaacagtaataatttggataa

SEQ ID NO: 363140 - DNA, 33 bp, Homo sapien
agctgctggataaaacggtaataatttggataa

SEQ ID NO: 363141 - DNA, 33 bp, Homo sapien
ataaatgagccaaatgaaaccctagccacctca

SEQ ID NO: 363142 - DNA, 33 bp, Homo sapien
ataaatgagccaaatggaaccctagccacctca

SEQ ID NO: 363143 - DNA, 33 bp, Homo sapien
gattttgcaaaatggacaccagtgggtcaaaaa

SEQ ID NO: 363144 - DNA, 33 bp, Homo sapien
gattttgcaaaatggataccagtgggtcaaaaa

SEQ ID NO: 363145 - DNA, 33 bp, Homo sapien
ctagccactacggatacgataataagcaaagcc

SEQ ID NO: 363146 - DNA, 33 bp, Homo sapien
ctagccactacggatatgataataagcaaagcc

SEQ ID NO: 363147 - DNA, 33 bp, Homo sapien
tattcaaagggttcaccacatggttaattattg

SEQ ID NO: 363148 - DNA, 33 bp, Homo sapien
tattcaaagggttcacgacatggttaattattg

SEQ ID NO: 363149 - DNA, 33 bp, Homo sapien
tgggctcttcctggaacctcttattttctgaaa

SEQ ID NO: 363150 - DNA, 33 bp, Homo sapien
tgggctcttcctggaatctcttattttctgaaa

SEQ ID NO: 363151 - DNA, 33 bp, Homo sapien
tacaagttcaagttcaggagataacgtgtttct

SEQ ID NO: 363152 - DNA, 33 bp, Homo sapien
tacaagttcaagttcatgagataacgtgtttct

SEQ ID NO: 363153 - DNA, 33 bp, Homo sapien
tcataaaaatgacatacgcaaaaaatcaaagag

SEQ ID NO: 363154 - DNA, 33 bp, Homo sapien
tcataaaaatgacatatgcaaaaaatcaaagag

SEQ ID NO: 363155 - DNA, 33 bp, Homo sapien
catagaagaggaaagacgagagtgagagcaaga

SEQ ID NO: 363156 - DNA, 33 bp, Homo sapien
catagaagaggaaagatgagagtgagagcaaga

SEQ ID NO: 363157 - DNA, 33 bp, Homo sapien
gttcttgagacccaaccgaaatatttccctact

SEQ ID NO: 363158 - DNA, 33 bp, Homo sapien
gttcttgagacccaactgaaatatttccctact

SEQ ID NO: 363159 - DNA, 33 bp, Homo sapien
agaatgtgatgactcacgggatctattatgggg

SEQ ID NO: 363160 - DNA, 33 bp, Homo sapien
agaatgtgatgactcatgggatctattatgggg

SEQ ID NO: 363161 - DNA, 33 bp, Homo sapien
tgccaggcagcaaagacgatgggtgcataatca

SEQ ID NO: 363162 - DNA, 33 bp, Homo sapien
tgccaggcagcaaagaggatgggtgcataatca

SEQ ID NO: 363163 - DNA, 33 bp, Homo sapien
actcactccactgcacacaattctttaaaacat

SEQ ID NO: 363164 - DNA, 33 bp, Homo sapien
actcactccactgcacgcaattctttaaaacat

SEQ ID NO: 363165 - DNA, 33 bp, Homo sapien
gaggaggaagaggtaacgaaataaagagcatta

SEQ ID NO: 363166 - DNA, 33 bp, Homo sapien
gaggaggaagaggtaatgaaataaagagcatta

SEQ ID NO: 363167 - DNA, 33 bp, Homo sapien
gagaccaatcatgatacagcatttggagctggg

SEQ ID NO: 363168 - DNA, 33 bp, Homo sapien
gagaccaatcatgatatagcatttggagctggg

SEQ ID NO: 363169 - DNA, 33 bp, Homo sapien
gatacaattagactcagcgcgatcatctatccc

SEQ ID NO: 363170 - DNA, 33 bp, Homo sapien
gatacaattagactcatcgcgatcatctatccc

SEQ ID NO: 363171 - DNA, 33 bp, Homo sapien
tagaccaaagatctcaaaatcagacctcagaca

SEQ ID NO: 363172 - DNA, 33 bp, Homo sapien
tagaccaaagatctcacaatcagacctcagaca

SEQ ID NO: 363173 - DNA, 33 bp, Homo sapien
gacatctcttccctcaagcataatcctcatggt

SEQ ID NO: 363174 - DNA, 33 bp, Homo sapien
gacatctcttccctcaggcataatcctcatggt

SEQ ID NO: 363175 - DNA, 33 bp, Homo sapien
cctctgtgcctggaagaaatcttatttcaggag

SEQ ID NO: 363176 - DNA, 33 bp, Homo sapien
cctctgtgcctggaaggaatcttatttcaggag

SEQ ID NO: 363177 - DNA, 33 bp, Homo sapien
gggtttgatgagttttcaaaaatgtgtaagatc

SEQ ID NO: 363178 - DNA, 33 bp, Homo sapien
gggtttgatgagttttgaaaaatgtgtaagatc

SEQ ID NO: 363179 - DNA, 33 bp, Homo sapien
aaagaagagataggaaaggaataaagaggtaag

SEQ ID NO: 363180 - DNA, 33 bp, Homo sapien
aaagaagagataggaagggaataaagaggtaag

SEQ ID NO: 363181 - DNA, 33 bp, Homo sapien
cgtttctgtgcctgaactgtctgtggtcacaga

SEQ ID NO: 363182 - DNA, 33 bp, Homo sapien
cgtttctgtgcctgaagtgtctgtggtcacaga

SEQ ID NO: 363183 - DNA, 33 bp, Homo sapien
atttcagaactaacaccgtctgggtttgagtaa

SEQ ID NO: 363184 - DNA, 33 bp, Homo sapien
atttcagaactaacactgtctgggtttgagtaa

SEQ ID NO: 363185 - DNA, 33 bp, Homo sapien
aaatgtacctgtaacccatatatctcctctcct

SEQ ID NO: 363186 - DNA, 33 bp, Homo sapien
aaatgtacctgtaacctatatatctcctctcct

SEQ ID NO: 363187 - DNA, 33 bp, Homo sapien
gtttattacgctaagaacacttaaaacgagatc

SEQ ID NO: 363188 - DNA, 33 bp, Homo sapien
gtttattacgctaagatcacttaaaacgagatc

SEQ ID NO: 363189 - DNA, 33 bp, Homo sapien
tgagtaggggtttcagaagcatgccagatgagt

SEQ ID NO: 363190 - DNA, 33 bp, Homo sapien
tgagtaggggtttcaggagcatgccagatgagt

SEQ ID NO: 363191 - DNA, 33 bp, Homo sapien
agtcagagcgacagcaaaggaaacgggttcaag

SEQ ID NO: 363192 - DNA, 33 bp, Homo sapien
agtcagagcgacagcagaggaaacgggttcaag

SEQ ID NO: 363193 - DNA, 33 bp, Homo sapien
acagattgggtgaggcaaagactgggagaccag

SEQ ID NO: 363194 - DNA, 33 bp, Homo sapien
acagattgggtgaggccaagactgggagaccag

SEQ ID NO: 363195 - DNA, 33 bp, Homo sapien
ataaccaacaccctatcagttgaaatgatgtgt

SEQ ID NO: 363196 - DNA, 33 bp, Homo sapien
ataaccaacaccctatgagttgaaatgatgtgt

SEQ ID NO: 363197 - DNA, 33 bp, Homo sapien
ttctcttgggtctcaaacaatgagaagctctga

SEQ ID NO: 363198 - DNA, 33 bp, Homo sapien
ttctcttgggtctcaagcaatgagaagctctga

SEQ ID NO: 363199 - DNA, 33 bp, Homo sapien
atggagggtcagccacgcttttgccacagtggg

SEQ ID NO: 363200 - DNA, 33 bp, Homo sapien
atggagggtcagccactcttttgccacagtggg

SEQ ID NO: 363201 - DNA, 33 bp, Homo sapien
ttagcctaacttcctaaccacgaaggcaaggtt

SEQ ID NO: 363202 - DNA, 33 bp, Homo sapien
ttagcctaacttcctatccacgaaggcaaggtt

SEQ ID NO: 363203 - DNA, 33 bp, Homo sapien
ttacatatcaaataaaacacctgactttgttag

SEQ ID NO: 363204 - DNA, 33 bp, Homo sapien
ttacatatcaaataaagcacctgactttgttag

SEQ ID NO: 363205 - DNA, 33 bp, Homo sapien
agaaaataaagataagcactcagcaatttcaca

SEQ ID NO: 363206 - DNA, 33 bp, Homo sapien
agaaaataaagataagtactcagcaatttcaca

SEQ ID NO: 363207 - DNA, 33 bp, Homo sapien
actgcccccatgtttgaattacctctcaccggg

SEQ ID NO: 363208 - DNA, 33 bp, Homo sapien
actgcccccatgtttgcattacctctcaccggg

SEQ ID NO: 363209 - DNA, 33 bp, Homo sapien
tggggacacagcaaaccctatcaggctctttgg

SEQ ID NO: 363210 - DNA, 33 bp, Homo sapien
tggggacacagcaaactctatcaggctctttgg

SEQ ID NO: 363211 - DNA, 33 bp, Homo sapien
tgaaaacactcactccaagggaatattttgaaa

SEQ ID NO: 363212 - DNA, 33 bp, Homo sapien
tgaaaacactcactccgagggaatattttgaaa

SEQ ID NO: 363213 - DNA, 33 bp, Homo sapien
ctgatcgttggggctaaatcgcttttcaaatcc

SEQ ID NO: 363214 - DNA, 33 bp, Homo sapien
ctgatcgttggggctacatcgcttttcaaatcc

SEQ ID NO: 363215 - DNA, 33 bp, Homo sapien
ccagtctaagacaacactgtggtttataaaagg

SEQ ID NO: 363216 - DNA, 33 bp, Homo sapien
ccagtctaagacaacattgtggtttataaaagg

SEQ ID NO: 363217 - DNA, 33 bp, Homo sapien
cacgtcatggagcagccaatagctcagagttct

SEQ ID NO: 363218 - DNA, 33 bp, Homo sapien
cacgtcatggagcagcgaatagctcagagttct

SEQ ID NO: 363219 - DNA, 33 bp, Homo sapien
gctctcagtataggtacgtgctagagacttgta

SEQ ID NO: 363220 - DNA, 33 bp, Homo sapien
gctctcagtataggtatgtgctagagacttgta

SEQ ID NO: 363221 - DNA, 33 bp, Homo sapien
taaactcaagagtgcagaagaggtacctgagga

SEQ ID NO: 363222 - DNA, 33 bp, Homo sapien
taaactcaagagtgcataagaggtacctgagga

SEQ ID NO: 363223 - DNA, 33 bp, Homo sapien
cagcagcaatggatgacgtcagggcattagagc

SEQ ID NO: 363224 - DNA, 33 bp, Homo sapien
cagcagcaatggatgaggtcagggcattagagc

SEQ ID NO: 363225 - DNA, 33 bp, Homo sapien
aatatttcaccaaataccttagcattccctaat

SEQ ID NO: 363226 - DNA, 33 bp, Homo sapien
aatatttcaccaaatatcttagcattccctaat

SEQ ID NO: 363227 - DNA, 33 bp, Homo sapien
tgtcacgaagaggcagcatagtataggtatgtt

SEQ ID NO: 363228 - DNA, 33 bp, Homo sapien
tgtcacgaagaggcaggatagtataggtatgtt

SEQ ID NO: 363229 - DNA, 33 bp, Homo sapien
gagacgggacattcaacggtccttgctatgtgg

SEQ ID NO: 363230 - DNA, 33 bp, Homo sapien
gagacgggacattcaatggtccttgctatgtgg

SEQ ID NO: 363231 - DNA, 33 bp, Homo sapien
ccaccgccatccttgacgatccttccattttct

SEQ ID NO: 363232 - DNA, 33 bp, Homo sapien
ccaccgccatccttgatgatccttccattttct

SEQ ID NO: 363233 - DNA, 33 bp, Homo sapien
gccaagatgtctgcaacttcctgaaaaaatctg

SEQ ID NO: 363234 - DNA, 33 bp, Homo sapien
gccaagatgtctgcaatttcctgaaaaaatctg

SEQ ID NO: 363235 - DNA, 33 bp, Homo sapien
attcccactgtcattacgttagaccacatcacc

SEQ ID NO: 363236 - DNA, 33 bp, Homo sapien
attcccactgtcattatgttagaccacatcacc

SEQ ID NO: 363237 - DNA, 33 bp, Homo sapien
caagaggtagcaaacaaagttggaaaggaagaa

SEQ ID NO: 363238 - DNA, 33 bp, Homo sapien
caagaggtagcaaacatagttggaaaggaagaa

SEQ ID NO: 363239 - DNA, 33 bp, Homo sapien
agaatacaagaatgacacgtatatgggaaaggc

SEQ ID NO: 363240 - DNA, 33 bp, Homo sapien
agaatacaagaatgacccgtatatgggaaaggc

SEQ ID NO: 363241 - DNA, 33 bp, Homo sapien
tctgtacggtctctgcaccttggacaatggaaa

SEQ ID NO: 363242 - DNA, 33 bp, Homo sapien
tctgtacggtctctgcgccttggacaatggaaa

SEQ ID NO: 363243 - DNA, 33 bp, Homo sapien
aattggccttgtcccacgttctcttttatcagc

SEQ ID NO: 363244 - DNA, 33 bp, Homo sapien
aattggccttgtcccaggttctcttttatcagc

SEQ ID NO: 363245 - DNA, 33 bp, Homo sapien
tacttcccgttttccaaacctcaggctatgtcc

SEQ ID NO: 363246 - DNA, 33 bp, Homo sapien
tacttcccgttttccagacctcaggctatgtcc

SEQ ID NO: 363247 - DNA, 33 bp, Homo sapien
caaattcaattatgtacctgaaagcactgtgtg

SEQ ID NO: 363248 - DNA, 33 bp, Homo sapien
caaattcaattatgtatctgaaagcactgtgtg

SEQ ID NO: 363249 - DNA, 33 bp, Homo sapien
ggatatgaaactgacgcagaatcatttcttgac

SEQ ID NO: 363250 - DNA, 33 bp, Homo sapien
ggatatgaaactgacgtagaatcatttcttgac

SEQ ID NO: 363251 - DNA, 33 bp, Homo sapien
aagggatccaatggcaataggacgtcttccttg

SEQ ID NO: 363252 - DNA, 33 bp, Homo sapien
aagggatccaatggcactaggacgtcttccttg

SEQ ID NO: 363253 - DNA, 33 bp, Homo sapien
cttgtcttgaactttaccaggatgtatggacac

SEQ ID NO: 363254 - DNA, 33 bp, Homo sapien
cttgtcttgaactttatcaggatgtatggacac

SEQ ID NO: 363255 - DNA, 33 bp, Homo sapien
taaacacaatgtagtcactatccatacagtgga

SEQ ID NO: 363256 - DNA, 33 bp, Homo sapien
taaacacaatgtagtctctatccatacagtgga

SEQ ID NO: 363257 - DNA, 33 bp, Homo sapien
acaattggttaaaatccattaggcttggttgga

SEQ ID NO: 363258 - DNA, 33 bp, Homo sapien
acaattggttaaaatctattaggcttggttgga

SEQ ID NO: 363259 - DNA, 33 bp, Homo sapien
tagtccagcgtcagtacaacgtaagtcttccaa

SEQ ID NO: 363260 - DNA, 33 bp, Homo sapien
tagtccagcgtcagtagaacgtaagtcttccaa

SEQ ID NO: 363261 - DNA, 33 bp, Homo sapien
cttgacatttcctatccaagttgtgtctccagg

SEQ ID NO: 363262 - DNA, 33 bp, Homo sapien
cttgacatttcctatcgaagttgtgtctccagg

SEQ ID NO: 363263 - DNA, 33 bp, Homo sapien
aaataactgaataccagatggcaagtacataaa

SEQ ID NO: 363264 - DNA, 33 bp, Homo sapien
aaataactgaataccatatggcaagtacataaa

SEQ ID NO: 363265 - DNA, 33 bp, Homo sapien
tatcgactattccctcaatagaacacttcacat

SEQ ID NO: 363266 - DNA, 33 bp, Homo sapien
tatcgactattccctcgatagaacacttcacat

SEQ ID NO: 363267 - DNA, 33 bp, Homo sapien
caaggtaatttctccacattctgattcccctgt

SEQ ID NO: 363268 - DNA, 33 bp, Homo sapien
caaggtaatttctccagattctgattcccctgt

SEQ ID NO: 363269 - DNA, 33 bp, Homo sapien
tatacttatgctaaacaaatggttgctgtgtat

SEQ ID NO: 363270 - DNA, 33 bp, Homo sapien
tatacttatgctaaacgaatggttgctgtgtat

SEQ ID NO: 363271 - DNA, 33 bp, Homo sapien
ctcgatgctgaaatgacaactgggctgcatcag

SEQ ID NO: 363272 - DNA, 33 bp, Homo sapien
ctcgatgctgaaatgagaactgggctgcatcag

SEQ ID NO: 363273 - DNA, 33 bp, Homo sapien
aggcctggaagagtgacaaggaaatggaaccgc

SEQ ID NO: 363274 - DNA, 33 bp, Homo sapien
aggcctggaagagtgagaaggaaatggaaccgc

SEQ ID NO: 363275 - DNA, 33 bp, Homo sapien
atgatagttctgttaaaatcaaagtcgcaatgt

SEQ ID NO: 363276 - DNA, 33 bp, Homo sapien
atgatagttctgttaagatcaaagtcgcaatgt

SEQ ID NO: 363277 - DNA, 33 bp, Homo sapien
atgcggtttatgtgcacggctgggctgtttgca

SEQ ID NO: 363278 - DNA, 33 bp, Homo sapien
atgcggtttatgtgcatggctgggctgtttgca

SEQ ID NO: 363279 - DNA, 33 bp, Homo sapien
ccctttctctcactccactcattactccaggag

SEQ ID NO: 363280 - DNA, 33 bp, Homo sapien
ccctttctctcactccgctcattactccaggag

SEQ ID NO: 363281 - DNA, 33 bp, Homo sapien
aaggctgaggctccaaacttcaccccaagaagc

SEQ ID NO: 363282 - DNA, 33 bp, Homo sapien
aaggctgaggctccaaccttcaccccaagaagc

SEQ ID NO: 363283 - DNA, 33 bp, Homo sapien
gaaattatggaaagtcagaagagattgcacagt

SEQ ID NO: 363284 - DNA, 33 bp, Homo sapien
gaaattatggaaagtcggaagagattgcacagt

SEQ ID NO: 363285 - DNA, 33 bp, Homo sapien
atcaacttcttcagaaatatcaagtatatagta

SEQ ID NO: 363286 - DNA, 33 bp, Homo sapien
atcaacttcttcagaactatcaagtatatagta

SEQ ID NO: 363287 - DNA, 33 bp, Homo sapien
taaccttgcacctagcagcagaaagtaaccagg

SEQ ID NO: 363288 - DNA, 33 bp, Homo sapien
taaccttgcacctagccgcagaaagtaaccagg

SEQ ID NO: 363289 - DNA, 33 bp, Homo sapien
caccttaccccaaagacagcaggttacaatggg

SEQ ID NO: 363290 - DNA, 33 bp, Homo sapien
caccttaccccaaagatagcaggttacaatggg

SEQ ID NO: 363291 - DNA, 33 bp, Homo sapien
ccaactctaagccagacgttcccattgaatata

SEQ ID NO: 363292 - DNA, 33 bp, Homo sapien
ccaactctaagccagatgttcccattgaatata

SEQ ID NO: 363293 - DNA, 33 bp, Homo sapien
atgagtcatgggtcaacgtccttctccacaaca

SEQ ID NO: 363294 - DNA, 33 bp, Homo sapien
atgagtcatgggtcaatgtccttctccacaaca

SEQ ID NO: 363295 - DNA, 33 bp, Homo sapien
aataagcccagaagaacgaccatcaaagatgct

SEQ ID NO: 363296 - DNA, 33 bp, Homo sapien
aataagcccagaagaatgaccatcaaagatgct

SEQ ID NO: 363297 - DNA, 33 bp, Homo sapien
ccacacagtggctcagcagtgagagtgaccggc

SEQ ID NO: 363298 - DNA, 33 bp, Homo sapien
ccacacagtggctcaggagtgagagtgaccggc

SEQ ID NO: 363299 - DNA, 33 bp, Homo sapien
cagtaggatataaataactccacatgcttaggg

SEQ ID NO: 363300 - DNA, 33 bp, Homo sapien
cagtaggatataaatacctccacatgcttaggg

SEQ ID NO: 363301 - DNA, 33 bp, Homo sapien
tgaagggaattaggaagtgtaggaatgcttaat

SEQ ID NO: 363302 - DNA, 33 bp, Homo sapien
tgaagggaattaggaattgtaggaatgcttaat

SEQ ID NO: 363303 - DNA, 33 bp, Homo sapien
acagcaagctttcaaaacaacaggtctcgatga

SEQ ID NO: 363304 - DNA, 33 bp, Homo sapien
acagcaagctttcaaagcaacaggtctcgatga

SEQ ID NO: 363305 - DNA, 33 bp, Homo sapien
gagactgtcacttaaacgttcaagaaattacaa

SEQ ID NO: 363306 - DNA, 33 bp, Homo sapien
gagactgtcacttaaatgttcaagaaattacaa

SEQ ID NO: 363307 - DNA, 33 bp, Homo sapien
tgttctcactgctgccactataaccaccaccac

SEQ ID NO: 363308 - DNA, 33 bp, Homo sapien
tgttctcactgctgccgctataaccaccaccac

SEQ ID NO: 363309 - DNA, 33 bp, Homo sapien
cgcaatcttctcctgaaaaatgttgctgataca

SEQ ID NO: 363310 - DNA, 33 bp, Homo sapien
cgcaatcttctcctgataaatgttgctgataca

SEQ ID NO: 363311 - DNA, 33 bp, Homo sapien
gatacactttggagaaacttcgtgactatgcct

SEQ ID NO: 363312 - DNA, 33 bp, Homo sapien
gatacactttggagaaccttcgtgactatgcct

SEQ ID NO: 363313 - DNA, 33 bp, Homo sapien
actaattacattagaaggacaaggccaggaaga

SEQ ID NO: 363314 - DNA, 33 bp, Homo sapien
actaattacattagaatgacaaggccaggaaga

SEQ ID NO: 363315 - DNA, 33 bp, Homo sapien
tcaaattcctcactcaaaacaattagagcagtc

SEQ ID NO: 363316 - DNA, 33 bp, Homo sapien
tcaaattcctcactcataacaattagagcagtc

SEQ ID NO: 363317 - DNA, 33 bp, Homo sapien
atgttctctttcagaacttccgctatgctaatg

SEQ ID NO: 363318 - DNA, 33 bp, Homo sapien
atgttctctttcagaatttccgctatgctaatg

SEQ ID NO: 363319 - DNA, 33 bp, Homo sapien
cagctagtaggtggaacagttcagagcagcagc

SEQ ID NO: 363320 - DNA, 33 bp, Homo sapien
cagctagtaggtggaagagttcagagcagcagc

SEQ ID NO: 363321 - DNA, 33 bp, Homo sapien
agagggcagtaagtgagagtttgtcccacaaga

SEQ ID NO: 363322 - DNA, 33 bp, Homo sapien
agagggcagtaagtgatagtttgtcccacaaga

SEQ ID NO: 363323 - DNA, 33 bp, Homo sapien
atcatacaaacagacacaaacatgatgagatct

SEQ ID NO: 363324 - DNA, 33 bp, Homo sapien
atcatacaaacagacagaaacatgatgagatct

SEQ ID NO: 363325 - DNA, 33 bp, Homo sapien
ctgaaagctatggcgacagttcctttgatggcc

SEQ ID NO: 363326 - DNA, 33 bp, Homo sapien
ctgaaagctatggcgagagttcctttgatggcc

SEQ ID NO: 363327 - DNA, 33 bp, Homo sapien
ggaaggttgcgatgaacgggtccagacaaaggt

SEQ ID NO: 363328 - DNA, 33 bp, Homo sapien
ggaaggttgcgatgaatgggtccagacaaaggt

SEQ ID NO: 363329 - DNA, 33 bp, Homo sapien
ggtgaattataaaagggaaccccaacagtaagg

SEQ ID NO: 363330 - DNA, 33 bp, Homo sapien
ggtgaattataaaaggtaaccccaacagtaagg

SEQ ID NO: 363331 - DNA, 33 bp, Homo sapien
ccttgagcttaagctaagagttatatttcatcc

SEQ ID NO: 363332 - DNA, 33 bp, Homo sapien
ccttgagcttaagctaggagttatatttcatcc

SEQ ID NO: 363333 - DNA, 33 bp, Homo sapien
tctgtagtgatgaaaacgtcctataaccttgct

SEQ ID NO: 363334 - DNA, 33 bp, Homo sapien
tctgtagtgatgaaaatgtcctataaccttgct

SEQ ID NO: 363335 - DNA, 33 bp, Homo sapien
ttttcagcagagacgaaatgataagcaaaagca

SEQ ID NO: 363336 - DNA, 33 bp, Homo sapien
ttttcagcagagacgagatgataagcaaaagca

SEQ ID NO: 363337 - DNA, 33 bp, Homo sapien
ggataagtcgcttctacgtggagaaccaaagaa

SEQ ID NO: 363338 - DNA, 33 bp, Homo sapien
ggataagtcgcttctaggtggagaaccaaagaa

SEQ ID NO: 363339 - DNA, 33 bp, Homo sapien
tgccatgagtcagaaaatattccagaaaattta

SEQ ID NO: 363340 - DNA, 33 bp, Homo sapien
tgccatgagtcagaaagtattccagaaaattta

SEQ ID NO: 363341 - DNA, 33 bp, Homo sapien
acatggacactttgacacgtatcgaagtgacca

SEQ ID NO: 363342 - DNA, 33 bp, Homo sapien
acatggacactttgacgcgtatcgaagtgacca

SEQ ID NO: 363343 - DNA, 33 bp, Homo sapien
agaataggcatagtcacgcatgacttctcagag

SEQ ID NO: 363344 - DNA, 33 bp, Homo sapien
agaataggcatagtcaggcatgacttctcagag

SEQ ID NO: 363345 - DNA, 33 bp, Homo sapien
catctggtccataaaacaacttaagctcatttg

SEQ ID NO: 363346 - DNA, 33 bp, Homo sapien
catctggtccataaaataacttaagctcatttg

SEQ ID NO: 363347 - DNA, 33 bp, Homo sapien
tccttcctggggcacacagaaacatctaagtca

SEQ ID NO: 363348 - DNA, 33 bp, Homo sapien
tccttcctggggcacagagaaacatctaagtca

SEQ ID NO: 363349 - DNA, 33 bp, Homo sapien
tttcctctaagctgggcatatgtcaccttcggg

SEQ ID NO: 363350 - DNA, 33 bp, Homo sapien
tttcctctaagctgggtatatgtcaccttcggg

SEQ ID NO: 363351 - DNA, 33 bp, Homo sapien
ccccagtttggtgaatcagccactcaaagcatc

SEQ ID NO: 363352 - DNA, 33 bp, Homo sapien
ccccagtttggtgaatgagccactcaaagcatc

SEQ ID NO: 363353 - DNA, 33 bp, Homo sapien
ctcaaatcatgtggaagaaaatattaatagatg

SEQ ID NO: 363354 - DNA, 33 bp, Homo sapien
ctcaaatcatgtggaataaaatattaatagatg

SEQ ID NO: 363355 - DNA, 33 bp, Homo sapien
gagagaaagggtcacaggctataggactccatg

SEQ ID NO: 363356 - DNA, 33 bp, Homo sapien
gagagaaagggtcacatgctataggactccatg

SEQ ID NO: 363357 - DNA, 33 bp, Homo sapien
actgatatatgtttcaatatggatgaaccttga

SEQ ID NO: 363358 - DNA, 33 bp, Homo sapien
actgatatatgtttcagtatggatgaaccttga

SEQ ID NO: 363359 - DNA, 33 bp, Homo sapien
acaagggggtgaacaacggctatccatagctga

SEQ ID NO: 363360 - DNA, 33 bp, Homo sapien
acaagggggtgaacaagggctatccatagctga

SEQ ID NO: 363361 - DNA, 33 bp, Homo sapien
aatgagcacacaattaaaagttgaaaggtacat

SEQ ID NO: 363362 - DNA, 33 bp, Homo sapien
aatgagcacacaattacaagttgaaaggtacat

SEQ ID NO: 363363 - DNA, 33 bp, Homo sapien
tacctagcactcactacgactgtataatcctgt

SEQ ID NO: 363364 - DNA, 33 bp, Homo sapien
tacctagcactcactatgactgtataatcctgt

SEQ ID NO: 363365 - DNA, 33 bp, Homo sapien
aggaaggatgcccagacggtctgagcaggatat

SEQ ID NO: 363366 - DNA, 33 bp, Homo sapien
aggaaggatgcccagatggtctgagcaggatat

SEQ ID NO: 363367 - DNA, 33 bp, Homo sapien
gttgggtgagtgaataaaatggcagtgcccctg

SEQ ID NO: 363368 - DNA, 33 bp, Homo sapien
gttgggtgagtgaatacaatggcagtgcccctg

SEQ ID NO: 363369 - DNA, 33 bp, Homo sapien
aatcaacctgcattccactggtaactacattaa

SEQ ID NO: 363370 - DNA, 33 bp, Homo sapien
aatcaacctgcattccgctggtaactacattaa

SEQ ID NO: 363371 - DNA, 33 bp, Homo sapien
ttccaggtggtatgatgaataaaggagcaaaga

SEQ ID NO: 363372 - DNA, 33 bp, Homo sapien
ttccaggtggtatgattaataaaggagcaaaga

SEQ ID NO: 363373 - DNA, 33 bp, Homo sapien
tggagaaagcacagacaaaaaataaggaaaacc

SEQ ID NO: 363374 - DNA, 33 bp, Homo sapien
tggagaaagcacagacgaaaaataaggaaaacc

SEQ ID NO: 363375 - DNA, 33 bp, Homo sapien
tacagcagcacaagaacggccgaatatagccag

SEQ ID NO: 363376 - DNA, 33 bp, Homo sapien
tacagcagcacaagaatggccgaatatagccag

SEQ ID NO: 363377 - DNA, 33 bp, Homo sapien
tatatgttacttatgactactttgctttataaa

SEQ ID NO: 363378 - DNA, 33 bp, Homo sapien
tatatgttacttatgattactttgctttataaa

SEQ ID NO: 363379 - DNA, 33 bp, Homo sapien
ggatttattacatttgcagttgttatgttgact

SEQ ID NO: 363380 - DNA, 33 bp, Homo sapien
ggatttattacatttgtagttgttatgttgact

SEQ ID NO: 363381 - DNA, 33 bp, Homo sapien
gtggagagggtgagaaacacgtgcagctcccag

SEQ ID NO: 363382 - DNA, 33 bp, Homo sapien
gtggagagggtgagaaccacgtgcagctcccag

SEQ ID NO: 363383 - DNA, 33 bp, Homo sapien
tagagttcatgtgtgacatagatctaattgctc

SEQ ID NO: 363384 - DNA, 33 bp, Homo sapien
tagagttcatgtgtgatatagatctaattgctc

SEQ ID NO: 363385 - DNA, 33 bp, Homo sapien
tacaggagattcatcacggctaagtttggataa

SEQ ID NO: 363386 - DNA, 33 bp, Homo sapien
tacaggagattcatcatggctaagtttggataa

SEQ ID NO: 363387 - DNA, 33 bp, Homo sapien
cttaaacttcacttcgcagggctcagaaaatgc

SEQ ID NO: 363388 - DNA, 33 bp, Homo sapien
cttaaacttcacttcgtagggctcagaaaatgc

SEQ ID NO: 363389 - DNA, 33 bp, Homo sapien
ctccaatccaaagatacagaaggtcagatgtgg

SEQ ID NO: 363390 - DNA, 33 bp, Homo sapien
ctccaatccaaagatatagaaggtcagatgtgg

SEQ ID NO: 363391 - DNA, 33 bp, Homo sapien
cagttaagtttcaccacgtagaaattaaaatgc

SEQ ID NO: 363392 - DNA, 33 bp, Homo sapien
cagttaagtttcaccatgtagaaattaaaatgc

SEQ ID NO: 363393 - DNA, 33 bp, Homo sapien
gggcggcagaacggtacagatggtaatgacctc

SEQ ID NO: 363394 - DNA, 33 bp, Homo sapien
gggcggcagaacggtatagatggtaatgacctc

SEQ ID NO: 363395 - DNA, 33 bp, Homo sapien
atcagtggtaacacgtaacaggaggcaggggtg

SEQ ID NO: 363396 - DNA, 33 bp, Homo sapien
atcagtggtaacacgtgacaggaggcaggggtg

SEQ ID NO: 363397 - DNA, 33 bp, Homo sapien
catcctgtctaaaactaaaagagatacggaaca

SEQ ID NO: 363398 - DNA, 33 bp, Homo sapien
catcctgtctaaaactgaaagagatacggaaca

SEQ ID NO: 363399 - DNA, 33 bp, Homo sapien
cttgcagtgatttgtcagaagagagaagggtgt

SEQ ID NO: 363400 - DNA, 33 bp, Homo sapien
cttgcagtgatttgtcggaagagagaagggtgt

SEQ ID NO: 363401 - DNA, 33 bp, Homo sapien
tgtaattcgagcaaagcccttcacagtatgtgt

SEQ ID NO: 363402 - DNA, 33 bp, Homo sapien
tgtaattcgagcaaagtccttcacagtatgtgt

SEQ ID NO: 363403 - DNA, 33 bp, Homo sapien
taatcaccgtgcaacacgaccttgtatgcattg

SEQ ID NO: 363404 - DNA, 33 bp, Homo sapien
taatcaccgtgcaacatgaccttgtatgcattg

SEQ ID NO: 363405 - DNA, 33 bp, Homo sapien
tgatatgcctgatgcaatacttggcatatcaga

SEQ ID NO: 363406 - DNA, 33 bp, Homo sapien
tgatatgcctgatgcagtacttggcatatcaga

SEQ ID NO: 363407 - DNA, 33 bp, Homo sapien
tgtcctttctgagaaacgtattagaccttaggt

SEQ ID NO: 363408 - DNA, 33 bp, Homo sapien
tgtcctttctgagaaatgtattagaccttaggt

SEQ ID NO: 363409 - DNA, 33 bp, Homo sapien
caaatgcggaagtttacatttcgttcaaatgta

SEQ ID NO: 363410 - DNA, 33 bp, Homo sapien
caaatgcggaagtttatatttcgttcaaatgta

SEQ ID NO: 363411 - DNA, 33 bp, Homo sapien
tgatacaagggttttcaactttggcagtgttga

SEQ ID NO: 363412 - DNA, 33 bp, Homo sapien
tgatacaagggttttcgactttggcagtgttga

SEQ ID NO: 363413 - DNA, 33 bp, Homo sapien
cacatctgtggaaccacagtacagattcaaccc

SEQ ID NO: 363414 - DNA, 33 bp, Homo sapien
cacatctgtggaaccagagtacagattcaaccc

SEQ ID NO: 363415 - DNA, 33 bp, Homo sapien
atggatggcagagatacggaagaaaaggatggg

SEQ ID NO: 363416 - DNA, 33 bp, Homo sapien
atggatggcagagatatggaagaaaaggatggg

SEQ ID NO: 363417 - DNA, 33 bp, Homo sapien
tctgttgttggacaaaatgcactgatattcctt

SEQ ID NO: 363418 - DNA, 33 bp, Homo sapien
tctgttgttggacaaagtgcactgatattcctt

SEQ ID NO: 363419 - DNA, 33 bp, Homo sapien
gaattccagggatttgcagattactccagagta

SEQ ID NO: 363420 - DNA, 33 bp, Homo sapien
gaattccagggatttgtagattactccagagta

SEQ ID NO: 363421 - DNA, 33 bp, Homo sapien
taagataataatggagaaaatggtcattgaaac

SEQ ID NO: 363422 - DNA, 33 bp, Homo sapien
taagataataatggaggaaatggtcattgaaac

SEQ ID NO: 363423 - DNA, 33 bp, Homo sapien
tgcctgtggtaaagcaaatacgccttacaaatc

SEQ ID NO: 363424 - DNA, 33 bp, Homo sapien
tgcctgtggtaaagcacatacgccttacaaatc

SEQ ID NO: 363425 - DNA, 33 bp, Homo sapien
aggaacaacatatacaaaagattggatacaaca

SEQ ID NO: 363426 - DNA, 33 bp, Homo sapien
aggaacaacatatacagaagattggatacaaca

SEQ ID NO: 363427 - DNA, 33 bp, Homo sapien
tgtgaattttagaatacagagtgtcagagatga

SEQ ID NO: 363428 - DNA, 33 bp, Homo sapien
tgtgaattttagaatatagagtgtcagagatga

SEQ ID NO: 363429 - DNA, 33 bp, Homo sapien
gaagaaataggtatgacatttacaacgtggtaa

SEQ ID NO: 363430 - DNA, 33 bp, Homo sapien
gaagaaataggtatgatatttacaacgtggtaa

SEQ ID NO: 363431 - DNA, 33 bp, Homo sapien
agactgtatggtgttacgaagatatgttcataa

SEQ ID NO: 363432 - DNA, 33 bp, Homo sapien
agactgtatggtgttatgaagatatgttcataa

SEQ ID NO: 363433 - DNA, 33 bp, Homo sapien
gaaatggtttgagtaacaccgtcttgtttcttc

SEQ ID NO: 363434 - DNA, 33 bp, Homo sapien
gaaatggtttgagtaataccgtcttgtttcttc

SEQ ID NO: 363435 - DNA, 33 bp, Homo sapien
tcccagctggttttccactgatttcaacccact

SEQ ID NO: 363436 - DNA, 33 bp, Homo sapien
tcccagctggttttccgctgatttcaacccact

SEQ ID NO: 363437 - DNA, 33 bp, Homo sapien
ttaggattcaaaactaaccaaatcatgtgccct

SEQ ID NO: 363438 - DNA, 33 bp, Homo sapien
ttaggattcaaaactacccaaatcatgtgccct

SEQ ID NO: 363439 - DNA, 33 bp, Homo sapien
tataacccagtcatctcagacacgctttcttag

SEQ ID NO: 363440 - DNA, 33 bp, Homo sapien
tataacccagtcatcttagacacgctttcttag

SEQ ID NO: 363441 - DNA, 33 bp, Homo sapien
tccctggatctagcacagattcggtgggagacg

SEQ ID NO: 363442 - DNA, 33 bp, Homo sapien
tccctggatctagcacggattcggtgggagacg

SEQ ID NO: 363443 - DNA, 33 bp, Homo sapien
agatgtcttttggaaacgaaggtggctctgaag

SEQ ID NO: 363444 - DNA, 33 bp, Homo sapien
agatgtcttttggaaatgaaggtggctctgaag

SEQ ID NO: 363445 - DNA, 33 bp, Homo sapien
ttgtggctaagaagagcagaatttgagagccaa

SEQ ID NO: 363446 - DNA, 33 bp, Homo sapien
ttgtggctaagaagaggagaatttgagagccaa

SEQ ID NO: 363447 - DNA, 33 bp, Homo sapien
tactaccttaagacaacaaaatatcctagaagg

SEQ ID NO: 363448 - DNA, 33 bp, Homo sapien
tactaccttaagacaagaaaatatcctagaagg

SEQ ID NO: 363449 - DNA, 33 bp, Homo sapien
catgcattcatttacacttactgacaacagaac

SEQ ID NO: 363450 - DNA, 33 bp, Homo sapien
catgcattcatttacagttactgacaacagaac

SEQ ID NO: 363451 - DNA, 33 bp, Homo sapien
gaggcttcattaaatacgtttgattgattccat

SEQ ID NO: 363452 - DNA, 33 bp, Homo sapien
gaggcttcattaaataggtttgattgattccat

SEQ ID NO: 363453 - DNA, 33 bp, Homo sapien
gtgaccaccagctgtaggaaaacagacatcccc

SEQ ID NO: 363454 - DNA, 33 bp, Homo sapien
gtgaccaccagctgtatgaaaacagacatcccc

SEQ ID NO: 363455 - DNA, 33 bp, Homo sapien
atttctgagcaggttacgggcatgtcaaagtaa

SEQ ID NO: 363456 - DNA, 33 bp, Homo sapien
atttctgagcaggttatgggcatgtcaaagtaa

SEQ ID NO: 363457 - DNA, 33 bp, Homo sapien
atcttggttgatttaccaaatgaagcattaatt

SEQ ID NO: 363458 - DNA, 33 bp, Homo sapien
atcttggttgatttactaaatgaagcattaatt

SEQ ID NO: 363459 - DNA, 33 bp, Homo sapien
taagggaggattctgactaaatgaactaacaag

SEQ ID NO: 363460 - DNA, 33 bp, Homo sapien
taagggaggattctgagtaaatgaactaacaag

SEQ ID NO: 363461 - DNA, 33 bp, Homo sapien
cttgaacaacgtcagacacgaagcatggaggtg

SEQ ID NO: 363462 - DNA, 33 bp, Homo sapien
cttgaacaacgtcagatacgaagcatggaggtg

SEQ ID NO: 363463 - DNA, 33 bp, Homo sapien
ttgtttctgagatgtgaaaagtcaattgtaaga

SEQ ID NO: 363464 - DNA, 33 bp, Homo sapien
ttgtttctgagatgtggaaagtcaattgtaaga

SEQ ID NO: 363465 - DNA, 33 bp, Homo sapien
aggaggtttgttttaacagcaattttccataga

SEQ ID NO: 363466 - DNA, 33 bp, Homo sapien
aggaggtttgttttaagagcaattttccataga

SEQ ID NO: 363467 - DNA, 33 bp, Homo sapien
accaacaaaatgttcaatctcagattcagatac

SEQ ID NO: 363468 - DNA, 33 bp, Homo sapien
accaacaaaatgttcagtctcagattcagatac

SEQ ID NO: 363469 - DNA, 33 bp, Homo sapien
aaaaatcccccaaaaaagtctcataaggttgta

SEQ ID NO: 363470 - DNA, 33 bp, Homo sapien
aaaaatcccccaaaaacgtctcataaggttgta

SEQ ID NO: 363471 - DNA, 33 bp, Homo sapien
gactggctctagaacacgggtgtccagtctttt

SEQ ID NO: 363472 - DNA, 33 bp, Homo sapien
gactggctctagaacaggggtgtccagtctttt

SEQ ID NO: 363473 - DNA, 33 bp, Homo sapien
tagttacaagccaaaccgatatcctcagggtat

SEQ ID NO: 363474 - DNA, 33 bp, Homo sapien
tagttacaagccaaactgatatcctcagggtat

SEQ ID NO: 363475 - DNA, 33 bp, Homo sapien
gaaagaaataaacttcaacagcatatctaggaa

SEQ ID NO: 363476 - DNA, 33 bp, Homo sapien
gaaagaaataaacttccacagcatatctaggaa

SEQ ID NO: 363477 - DNA, 33 bp, Homo sapien
gagaaagtcttgccaggaggagaggtctggatc

SEQ ID NO: 363478 - DNA, 33 bp, Homo sapien
gagaaagtcttgccagtaggagaggtctggatc

SEQ ID NO: 363479 - DNA, 33 bp, Homo sapien
gcagaacactcgcatgaaaaatgtgagagatgg

SEQ ID NO: 363480 - DNA, 33 bp, Homo sapien
gcagaacactcgcatggaaaatgtgagagatgg

SEQ ID NO: 363481 - DNA, 33 bp, Homo sapien
ctggcaggcgttctaacgtcataatacctagtg

SEQ ID NO: 363482 - DNA, 33 bp, Homo sapien
ctggcaggcgttctaatgtcataatacctagtg

SEQ ID NO: 363483 - DNA, 33 bp, Homo sapien
ggtagatcccgattaaatgagtagcaggatatt

SEQ ID NO: 363484 - DNA, 33 bp, Homo sapien
ggtagatcccgattaactgagtagcaggatatt

SEQ ID NO: 363485 - DNA, 33 bp, Homo sapien
cctctaatattggccaatctttcacctaccttt

SEQ ID NO: 363486 - DNA, 33 bp, Homo sapien
cctctaatattggccagtctttcacctaccttt

SEQ ID NO: 363487 - DNA, 33 bp, Homo sapien
tgctgtaataaatgataacattcttagtggctt

SEQ ID NO: 363488 - DNA, 33 bp, Homo sapien
tgctgtaataaatgatcacattcttagtggctt

SEQ ID NO: 363489 - DNA, 33 bp, Homo sapien
aaagcatcatggttcaaatcttggtttcaactt

SEQ ID NO: 363490 - DNA, 33 bp, Homo sapien
aaagcatcatggttcatatcttggtttcaactt

SEQ ID NO: 363491 - DNA, 33 bp, Homo sapien
gaattcttggtctcaacagatcttcccacctca

SEQ ID NO: 363492 - DNA, 33 bp, Homo sapien
gaattcttggtctcaagagatcttcccacctca

SEQ ID NO: 363493 - DNA, 33 bp, Homo sapien
attacctaaaaaagcgacatgatttctcttttg

SEQ ID NO: 363494 - DNA, 33 bp, Homo sapien
attacctaaaaaagcggcatgatttctcttttg

SEQ ID NO: 363495 - DNA, 33 bp, Homo sapien
tattccaagttctccagtgctgggagtttaaga

SEQ ID NO: 363496 - DNA, 33 bp, Homo sapien
tattccaagttctccattgctgggagtttaaga

SEQ ID NO: 363497 - DNA, 33 bp, Homo sapien
tcactaactgtgggcccaccttcatatttgtca

SEQ ID NO: 363498 - DNA, 33 bp, Homo sapien
tcactaactgtgggcctaccttcatatttgtca

SEQ ID NO: 363499 - DNA, 33 bp, Homo sapien
tatctccatcgtcttaaactctgaaagggccac

SEQ ID NO: 363500 - DNA, 33 bp, Homo sapien
tatctccatcgtcttacactctgaaagggccac

SEQ ID NO: 363501 - DNA, 33 bp, Homo sapien
ttattaagcacttgagccaatcacttttcctcc

SEQ ID NO: 363502 - DNA, 33 bp, Homo sapien
ttattaagcacttgagtcaatcacttttcctcc

SEQ ID NO: 363503 - DNA, 33 bp, Homo sapien
ctcagggtagtgtagcagagtggttatagaaga

SEQ ID NO: 363504 - DNA, 33 bp, Homo sapien
ctcagggtagtgtagcggagtggttatagaaga

SEQ ID NO: 363505 - DNA, 33 bp, Homo sapien
atgccctcatgatctccctctctcgcccatcct

SEQ ID NO: 363506 - DNA, 33 bp, Homo sapien
atgccctcatgatctctctctctcgcccatcct

SEQ ID NO: 363507 - DNA, 33 bp, Homo sapien
tgagttaaggagtttccaagaaagtttgtcatt

SEQ ID NO: 363508 - DNA, 33 bp, Homo sapien
tgagttaaggagtttctaagaaagtttgtcatt

SEQ ID NO: 363509 - DNA, 33 bp, Homo sapien
gtcagaaattcagacaaacattagtggtatgat

SEQ ID NO: 363510 - DNA, 33 bp, Homo sapien
gtcagaaattcagacatacattagtggtatgat

SEQ ID NO: 363511 - DNA, 33 bp, Homo sapien
taaatggaaaatgagacagattaagttttagcg

SEQ ID NO: 363512 - DNA, 33 bp, Homo sapien
taaatggaaaatgagagagattaagttttagcg

SEQ ID NO: 363513 - DNA, 33 bp, Homo sapien
agaacttaatggttaactggctccagctagcta

SEQ ID NO: 363514 - DNA, 33 bp, Homo sapien
agaacttaatggttaattggctccagctagcta

SEQ ID NO: 363515 - DNA, 33 bp, Homo sapien
tggagtctacaatccaatccggactagccacat

SEQ ID NO: 363516 - DNA, 33 bp, Homo sapien
tggagtctacaatccagtccggactagccacat

SEQ ID NO: 363517 - DNA, 33 bp, Homo sapien
aataagatattactagaaatttagagacatggg

SEQ ID NO: 363518 - DNA, 33 bp, Homo sapien
aataagatattactaggaatttagagacatggg

SEQ ID NO: 363519 - DNA, 33 bp, Homo sapien
tggaaacgaaggtgaaactgtcttctgagtttt

SEQ ID NO: 363520 - DNA, 33 bp, Homo sapien
tggaaacgaaggtgaagctgtcttctgagtttt

SEQ ID NO: 363521 - DNA, 33 bp, Homo sapien
gtggccattcagatgccattaggccagaatggc

SEQ ID NO: 363522 - DNA, 33 bp, Homo sapien
gtggccattcagatgctattaggccagaatggc

SEQ ID NO: 363523 - DNA, 33 bp, Homo sapien
agaacacataaattcactctactcagggtcaaa

SEQ ID NO: 363524 - DNA, 33 bp, Homo sapien
agaacacataaattcattctactcagggtcaaa

SEQ ID NO: 363525 - DNA, 33 bp, Homo sapien
gtgctaccacatggctcaacttcaaaaaaactc

SEQ ID NO: 363526 - DNA, 33 bp, Homo sapien
gtgctaccacatggctgaacttcaaaaaaactc

SEQ ID NO: 363527 - DNA, 33 bp, Homo sapien
gaaataatgaaaacaacgcaaatgctaatcaac

SEQ ID NO: 363528 - DNA, 33 bp, Homo sapien
gaaataatgaaaacaatgcaaatgctaatcaac

SEQ ID NO: 363529 - DNA, 33 bp, Homo sapien
agaaataaatctgcagcaagaacaagctgtttc

SEQ ID NO: 363530 - DNA, 33 bp, Homo sapien
agaaataaatctgcaggaagaacaagctgtttc

SEQ ID NO: 363531 - DNA, 33 bp, Homo sapien
gccatgtacccaaagcagacaaacaagatgctc

SEQ ID NO: 363532 - DNA, 33 bp, Homo sapien
gccatgtacccaaagcggacaaacaagatgctc

SEQ ID NO: 363533 - DNA, 33 bp, Homo sapien
atattgtttatcctacaatgcctaaaaatgaat

SEQ ID NO: 363534 - DNA, 33 bp, Homo sapien
atattgtttatcctaccatgcctaaaaatgaat

SEQ ID NO: 363535 - DNA, 33 bp, Homo sapien
tatcttcctcatgaataaaccatttgatcattc

SEQ ID NO: 363536 - DNA, 33 bp, Homo sapien
tatcttcctcatgaattaaccatttgatcattc

SEQ ID NO: 363537 - DNA, 33 bp, Homo sapien
taaagccagtaatagacaaatctgcagtcatag

SEQ ID NO: 363538 - DNA, 33 bp, Homo sapien
taaagccagtaatagataaatctgcagtcatag

SEQ ID NO: 363539 - DNA, 33 bp, Homo sapien
tttataatgtatatgacattcatccacatcagt

SEQ ID NO: 363540 - DNA, 33 bp, Homo sapien
tttataatgtatatgagattcatccacatcagt

SEQ ID NO: 363541 - DNA, 33 bp, Homo sapien
gcagcctttgacaatacgtagataaatcagtac

SEQ ID NO: 363542 - DNA, 33 bp, Homo sapien
gcagcctttgacaatatgtagataaatcagtac

SEQ ID NO: 363543 - DNA, 33 bp, Homo sapien
tgaagctagtaaaaagacaccatttcaaattag

SEQ ID NO: 363544 - DNA, 33 bp, Homo sapien
tgaagctagtaaaaaggcaccatttcaaattag

SEQ ID NO: 363545 - DNA, 33 bp, Homo sapien
ccttcctggctttaaaaaggcaaacatgccaca

SEQ ID NO: 363546 - DNA, 33 bp, Homo sapien
ccttcctggctttaaagaggcaaacatgccaca

SEQ ID NO: 363547 - DNA, 33 bp, Homo sapien
atcagtagttttcaggccaactaagcatgaggc

SEQ ID NO: 363548 - DNA, 33 bp, Homo sapien
atcagtagttttcagggcaactaagcatgaggc

SEQ ID NO: 363549 - DNA, 33 bp, Homo sapien
cttctttctcctttcaatctatcaacaaattgt

SEQ ID NO: 363550 - DNA, 33 bp, Homo sapien
cttctttctcctttcagtctatcaacaaattgt

SEQ ID NO: 363551 - DNA, 33 bp, Homo sapien
ataaagggggacaggaataacacctctctgtga

SEQ ID NO: 363552 - DNA, 33 bp, Homo sapien
ataaagggggacaggagtaacacctctctgtga

SEQ ID NO: 363553 - DNA, 33 bp, Homo sapien
agctcttaaaaccatccacttatttcctttctg

SEQ ID NO: 363554 - DNA, 33 bp, Homo sapien
agctcttaaaaccatcgacttatttcctttctg

SEQ ID NO: 363555 - DNA, 33 bp, Homo sapien
actgctttggacattacaatctgccatctcttc

SEQ ID NO: 363556 - DNA, 33 bp, Homo sapien
actgctttggacattataatctgccatctcttc

SEQ ID NO: 363557 - DNA, 33 bp, Homo sapien
catactgatactaaggaaaaatattcattgact

SEQ ID NO: 363558 - DNA, 33 bp, Homo sapien
catactgatactaagggaaaatattcattgact

SEQ ID NO: 363559 - DNA, 33 bp, Homo sapien
ataagtgccttgacacacattctctggtcttta

SEQ ID NO: 363560 - DNA, 33 bp, Homo sapien
ataagtgccttgacactcattctctggtcttta

SEQ ID NO: 363561 - DNA, 33 bp, Homo sapien
agaatcagaatccaaacgcttaagttaaaacaa

SEQ ID NO: 363562 - DNA, 33 bp, Homo sapien
agaatcagaatccaaatgcttaagttaaaacaa

SEQ ID NO: 363563 - DNA, 33 bp, Homo sapien
ggaactctcattttgaactcttttgagtgagac

SEQ ID NO: 363564 - DNA, 33 bp, Homo sapien
ggaactctcattttgagctcttttgagtgagac

SEQ ID NO: 363565 - DNA, 33 bp, Homo sapien
accagacctattgctaaaacgtcttccacctca

SEQ ID NO: 363566 - DNA, 33 bp, Homo sapien
accagacctattgctataacgtcttccacctca

SEQ ID NO: 363567 - DNA, 33 bp, Homo sapien
aggttgaagtccatgacgtaatgagagactatg

SEQ ID NO: 363568 - DNA, 33 bp, Homo sapien
aggttgaagtccatgaggtaatgagagactatg

SEQ ID NO: 363569 - DNA, 33 bp, Homo sapien
cttgaaattggtgttacagattgatatgttgac

SEQ ID NO: 363570 - DNA, 33 bp, Homo sapien
cttgaaattggtgttatagattgatatgttgac

SEQ ID NO: 363571 - DNA, 33 bp, Homo sapien
ttgccacggctggaagcaacctacaaccagaga

SEQ ID NO: 363572 - DNA, 33 bp, Homo sapien
ttgccacggctggaaggaacctacaaccagaga

SEQ ID NO: 363573 - DNA, 33 bp, Homo sapien
ctttctggaaacatcccccgtaattgccaatga

SEQ ID NO: 363574 - DNA, 33 bp, Homo sapien
ctttctggaaacatcctccgtaattgccaatga

SEQ ID NO: 363575 - DNA, 33 bp, Homo sapien
taaaagtctgtgataacgacatggttgatgagc

SEQ ID NO: 363576 - DNA, 33 bp, Homo sapien
taaaagtctgtgataatgacatggttgatgagc

SEQ ID NO: 363577 - DNA, 33 bp, Homo sapien
atcattacagttcaacagtatcactgactagat

SEQ ID NO: 363578 - DNA, 33 bp, Homo sapien
atcattacagttcaacggtatcactgactagat

SEQ ID NO: 363579 - DNA, 33 bp, Homo sapien
gagttaaactacagtcacctccattgctgaact

SEQ ID NO: 363580 - DNA, 33 bp, Homo sapien
gagttaaactacagtcgcctccattgctgaact

SEQ ID NO: 363581 - DNA, 33 bp, Homo sapien
acacatttatttagagcctaattttcacatggc

SEQ ID NO: 363582 - DNA, 33 bp, Homo sapien
acacatttatttagaggctaattttcacatggc

SEQ ID NO: 363583 - DNA, 33 bp, Homo sapien
catctattgtgtatctcaaggcaaagcaacctg

SEQ ID NO: 363584 - DNA, 33 bp, Homo sapien
catctattgtgtatctgaaggcaaagcaacctg

SEQ ID NO: 363585 - DNA, 33 bp, Homo sapien
ggtgggacatctgacaaagcagtgattctcaag

SEQ ID NO: 363586 - DNA, 33 bp, Homo sapien
ggtgggacatctgacagagcagtgattctcaag

SEQ ID NO: 363587 - DNA, 33 bp, Homo sapien
aatgtacatttaatacccgggaatgatgtcagt

SEQ ID NO: 363588 - DNA, 33 bp, Homo sapien
aatgtacatttaatactcgggaatgatgtcagt

SEQ ID NO: 363589 - DNA, 33 bp, Homo sapien
ccatcttattgagagaccatgttgtgcagcagt

SEQ ID NO: 363590 - DNA, 33 bp, Homo sapien
ccatcttattgagagatcatgttgtgcagcagt

SEQ ID NO: 363591 - DNA, 33 bp, Homo sapien
tctctaaaacagccccaacttccttttccttga

SEQ ID NO: 363592 - DNA, 33 bp, Homo sapien
tctctaaaacagccccgacttccttttccttga

SEQ ID NO: 363593 - DNA, 33 bp, Homo sapien
gaaacacaaagctcacagaggaatagggcaaat

SEQ ID NO: 363594 - DNA, 33 bp, Homo sapien
gaaacacaaagctcacggaggaatagggcaaat

SEQ ID NO: 363595 - DNA, 33 bp, Homo sapien
atccaaacaaggaaaccgatactagtgcaatct

SEQ ID NO: 363596 - DNA, 33 bp, Homo sapien
atccaaacaaggaaactgatactagtgcaatct

SEQ ID NO: 363597 - DNA, 33 bp, Homo sapien
gagtctgtaaggagcaaattatattccatatcc

SEQ ID NO: 363598 - DNA, 33 bp, Homo sapien
gagtctgtaaggagcacattatattccatatcc

SEQ ID NO: 363599 - DNA, 33 bp, Homo sapien
actaccactatcttaacgactgcagaactgttc

SEQ ID NO: 363600 - DNA, 33 bp, Homo sapien
actaccactatcttaatgactgcagaactgttc

SEQ ID NO: 363601 - DNA, 33 bp, Homo sapien
gatgactttgcagagacctaaaatgatggcgat

SEQ ID NO: 363602 - DNA, 33 bp, Homo sapien
gatgactttgcagagagctaaaatgatggcgat

SEQ ID NO: 363603 - DNA, 33 bp, Homo sapien
cacctactttgacacaagctgtgggctacgcaa

SEQ ID NO: 363604 - DNA, 33 bp, Homo sapien
cacctactttgacacaggctgtgggctacgcaa

SEQ ID NO: 363605 - DNA, 33 bp, Homo sapien
aaatgtcttcctaccacagaaaataaaccaagt

SEQ ID NO: 363606 - DNA, 33 bp, Homo sapien
aaatgtcttcctaccatagaaaataaaccaagt

SEQ ID NO: 363607 - DNA, 33 bp, Homo sapien
tatttgttacagataagagactgctatgtggaa

SEQ ID NO: 363608 - DNA, 33 bp, Homo sapien
tatttgttacagataatagactgctatgtggaa

SEQ ID NO: 363609 - DNA, 33 bp, Homo sapien
aaaacttaggtggagaagtcctaataatgtgtg

SEQ ID NO: 363610 - DNA, 33 bp, Homo sapien
aaaacttaggtggagacgtcctaataatgtgtg

SEQ ID NO: 363611 - DNA, 33 bp, Homo sapien
tcctacaaatctcacaactactcatggaatgca

SEQ ID NO: 363612 - DNA, 33 bp, Homo sapien
tcctacaaatctcacatctactcatggaatgca

SEQ ID NO: 363613 - DNA, 33 bp, Homo sapien
caattgatatattgccacagaattaaacacgct

SEQ ID NO: 363614 - DNA, 33 bp, Homo sapien
caattgatatattgccgcagaattaaacacgct

SEQ ID NO: 363615 - DNA, 33 bp, Homo sapien
tagtaccaaaatagtacgtcaaagcaaaagcaa

SEQ ID NO: 363616 - DNA, 33 bp, Homo sapien
tagtaccaaaatagtaggtcaaagcaaaagcaa

SEQ ID NO: 363617 - DNA, 33 bp, Homo sapien
caaattggagaggaaactgtcacaaaaggcata

SEQ ID NO: 363618 - DNA, 33 bp, Homo sapien
caaattggagaggaaattgtcacaaaaggcata

SEQ ID NO: 363619 - DNA, 33 bp, Homo sapien
aatctcaaaggaaaagaaaatagccacatactc

SEQ ID NO: 363620 - DNA, 33 bp, Homo sapien
aatctcaaaggaaaaggaaatagccacatactc

SEQ ID NO: 363621 - DNA, 33 bp, Homo sapien
aattcatacttccagaaatagtcttaaactttc

SEQ ID NO: 363622 - DNA, 33 bp, Homo sapien
aattcatacttccagatatagtcttaaactttc

SEQ ID NO: 363623 - DNA, 33 bp, Homo sapien
agagctcgactgacatcaaagtcatggcgtcca

SEQ ID NO: 363624 - DNA, 33 bp, Homo sapien
agagctcgactgacatgaaagtcatggcgtcca

SEQ ID NO: 363625 - DNA, 33 bp, Homo sapien
tagatgagcctcatgaacctgtgaataatctag

SEQ ID NO: 363626 - DNA, 33 bp, Homo sapien
tagatgagcctcatgatcctgtgaataatctag

SEQ ID NO: 363627 - DNA, 33 bp, Homo sapien
catcaactctacatgactcatatgcacaacata

SEQ ID NO: 363628 - DNA, 33 bp, Homo sapien
catcaactctacatgattcatatgcacaacata

SEQ ID NO: 363629 - DNA, 33 bp, Homo sapien
cactttgggtagcaagaattttaaacaaataag

SEQ ID NO: 363630 - DNA, 33 bp, Homo sapien
cactttgggtagcaaggattttaaacaaataag

SEQ ID NO: 363631 - DNA, 33 bp, Homo sapien
atgtatgatgcatggaacttatttgtttaaaat

SEQ ID NO: 363632 - DNA, 33 bp, Homo sapien
atgtatgatgcatggaccttatttgtttaaaat

SEQ ID NO: 363633 - DNA, 33 bp, Homo sapien
agcctcattttactccactgctattcaagatgg

SEQ ID NO: 363634 - DNA, 33 bp, Homo sapien
agcctcattttactccgctgctattcaagatgg

SEQ ID NO: 363635 - DNA, 33 bp, Homo sapien
tgctctgattcaaacaactctgacattcttgct

SEQ ID NO: 363636 - DNA, 33 bp, Homo sapien
tgctctgattcaaacacctctgacattcttgct

SEQ ID NO: 363637 - DNA, 33 bp, Homo sapien
ttatcatagagggcagcaatggaataacaaggc

SEQ ID NO: 363638 - DNA, 33 bp, Homo sapien
ttatcatagagggcaggaatggaataacaaggc

SEQ ID NO: 363639 - DNA, 33 bp, Homo sapien
tacccattttccagataagtatagtgaggctgc

SEQ ID NO: 363640 - DNA, 33 bp, Homo sapien
tacccattttccagatgagtatagtgaggctgc

SEQ ID NO: 363641 - DNA, 33 bp, Homo sapien
gccactcatctcaaaacgctatttttagaatta

SEQ ID NO: 363642 - DNA, 33 bp, Homo sapien
gccactcatctcaaaaggctatttttagaatta

SEQ ID NO: 363643 - DNA, 33 bp, Homo sapien
tcctatatctgagagacgttgctttgtaaacct

SEQ ID NO: 363644 - DNA, 33 bp, Homo sapien
tcctatatctgagagatgttgctttgtaaacct

SEQ ID NO: 363645 - DNA, 33 bp, Homo sapien
gagagaaattgtgcaacaggtttacaaagcaac

SEQ ID NO: 363646 - DNA, 33 bp, Homo sapien
gagagaaattgtgcaataggtttacaaagcaac

SEQ ID NO: 363647 - DNA, 33 bp, Homo sapien
gaatctctctttggggaacgctcatcacagaga

SEQ ID NO: 363648 - DNA, 33 bp, Homo sapien
gaatctctctttgggggacgctcatcacagaga

SEQ ID NO: 363649 - DNA, 33 bp, Homo sapien
gaagtgagtttcagcactaaaagtcaggaggtg

SEQ ID NO: 363650 - DNA, 33 bp, Homo sapien
gaagtgagtttcagcattaaaagtcaggaggtg

SEQ ID NO: 363651 - DNA, 33 bp, Homo sapien
ctatgttcagaacagacgaaacctcaccctatc

SEQ ID NO: 363652 - DNA, 33 bp, Homo sapien
ctatgttcagaacagatgaaacctcaccctatc

SEQ ID NO: 363653 - DNA, 33 bp, Homo sapien
cataggatgactaagccgatagttccttctttc

SEQ ID NO: 363654 - DNA, 33 bp, Homo sapien
cataggatgactaagctgatagttccttctttc

SEQ ID NO: 363655 - DNA, 33 bp, Homo sapien
gaagtggcaacggagcggacatcgtaaaggtga

SEQ ID NO: 363656 - DNA, 33 bp, Homo sapien
gaagtggcaacggagctgacatcgtaaaggtga

SEQ ID NO: 363657 - DNA, 33 bp, Homo sapien
caccatttcaaccactgaatagctctatctatt

SEQ ID NO: 363658 - DNA, 33 bp, Homo sapien
caccatttcaaccacttaatagctctatctatt

SEQ ID NO: 363659 - DNA, 33 bp, Homo sapien
acttaagtagcagagacgggactactttgcagg

SEQ ID NO: 363660 - DNA, 33 bp, Homo sapien
acttaagtagcagagatgggactactttgcagg

SEQ ID NO: 363661 - DNA, 33 bp, Homo sapien
gctccagtctcttacacgattttagcaggagcg

SEQ ID NO: 363662 - DNA, 33 bp, Homo sapien
gctccagtctcttacaggattttagcaggagcg

SEQ ID NO: 363663 - DNA, 33 bp, Homo sapien
caccttacatagttaaacctgctaagagaatag

SEQ ID NO: 363664 - DNA, 33 bp, Homo sapien
caccttacatagttaaccctgctaagagaatag

SEQ ID NO: 363665 - DNA, 33 bp, Homo sapien
tggatgcatttatctaactcttcattcttccat

SEQ ID NO: 363666 - DNA, 33 bp, Homo sapien
tggatgcatttatctatctcttcattcttccat

SEQ ID NO: 363667 - DNA, 33 bp, Homo sapien
tcccaagccttagttactaacattgtctttgtt

SEQ ID NO: 363668 - DNA, 33 bp, Homo sapien
tcccaagccttagttagtaacattgtctttgtt

SEQ ID NO: 363669 - DNA, 33 bp, Homo sapien
attcccagatacgtaaataagaagtccctggag

SEQ ID NO: 363670 - DNA, 33 bp, Homo sapien
attcccagatacgtaagtaagaagtccctggag

SEQ ID NO: 363671 - DNA, 33 bp, Homo sapien
cagctacttgattgccccttgtaggataaagaa

SEQ ID NO: 363672 - DNA, 33 bp, Homo sapien
cagctacttgattgcctcttgtaggataaagaa

SEQ ID NO: 363673 - DNA, 33 bp, Homo sapien
aatacaacgaactgaccgtaaatgagcaaatcc

SEQ ID NO: 363674 - DNA, 33 bp, Homo sapien
aatacaacgaactgactgtaaatgagcaaatcc

SEQ ID NO: 363675 - DNA, 33 bp, Homo sapien
catctcagatcggtcaagaagagaggctcctgg

SEQ ID NO: 363676 - DNA, 33 bp, Homo sapien
catctcagatcggtcacgaagagaggctcctgg

SEQ ID NO: 363677 - DNA, 33 bp, Homo sapien
ggggtcttactttctccagaggaaacaaatatt

SEQ ID NO: 363678 - DNA, 33 bp, Homo sapien
ggggtcttactttctctagaggaaacaaatatt

SEQ ID NO: 363679 - DNA, 33 bp, Homo sapien
caaattactcaccccagattcgctgctaagaag

SEQ ID NO: 363680 - DNA, 33 bp, Homo sapien
caaattactcaccccatattcgctgctaagaag

SEQ ID NO: 363681 - DNA, 33 bp, Homo sapien
gtgggaaggtattcaactgaagaggtggggaaa

SEQ ID NO: 363682 - DNA, 33 bp, Homo sapien
gtgggaaggtattcaagtgaagaggtggggaaa

SEQ ID NO: 363683 - DNA, 33 bp, Homo sapien
ctaattactagaatatcagtcagtaggttctaa

SEQ ID NO: 363684 - DNA, 33 bp, Homo sapien
ctaattactagaatatgagtcagtaggttctaa

SEQ ID NO: 363685 - DNA, 33 bp, Homo sapien
ttcactttcaaaagtacggaacaatttgaacct

SEQ ID NO: 363686 - DNA, 33 bp, Homo sapien
ttcactttcaaaagtagggaacaatttgaacct

SEQ ID NO: 363687 - DNA, 33 bp, Homo sapien
aggactgctttctggtaacacttttaacgattc

SEQ ID NO: 363688 - DNA, 33 bp, Homo sapien
aggactgctttctggtgacacttttaacgattc

SEQ ID NO: 363689 - DNA, 33 bp, Homo sapien
tgaatacaaaatgtcaaggtgattagcatagac

SEQ ID NO: 363690 - DNA, 33 bp, Homo sapien
tgaatacaaaatgtcacggtgattagcatagac

SEQ ID NO: 363691 - DNA, 33 bp, Homo sapien
acagcctaatttagtaagtgaactaagtgaaag

SEQ ID NO: 363692 - DNA, 33 bp, Homo sapien
acagcctaatttagtatgtgaactaagtgaaag

SEQ ID NO: 363693 - DNA, 33 bp, Homo sapien
aaataatgaggatcaaagaaaggctcaaattgt

SEQ ID NO: 363694 - DNA, 33 bp, Homo sapien
aaataatgaggatcaatgaaaggctcaaattgt

SEQ ID NO: 363695 - DNA, 33 bp, Homo sapien
cgtcagcacgtggaacacatacacaggttatgc

SEQ ID NO: 363696 - DNA, 33 bp, Homo sapien
cgtcagcacgtggaacgcatacacaggttatgc

SEQ ID NO: 363697 - DNA, 33 bp, Homo sapien
cagtgacataatgtccagcttacaattcagcat

SEQ ID NO: 363698 - DNA, 33 bp, Homo sapien
cagtgacataatgtcctgcttacaattcagcat

SEQ ID NO: 363699 - DNA, 33 bp, Homo sapien
tcccttagttatccctcacaaacatatatacat

SEQ ID NO: 363700 - DNA, 33 bp, Homo sapien
tcccttagttatccctgacaaacatatatacat

SEQ ID NO: 363701 - DNA, 33 bp, Homo sapien
agtttttcactatcacacattttctacaccttc

SEQ ID NO: 363702 - DNA, 33 bp, Homo sapien
agtttttcactatcacgcattttctacaccttc

SEQ ID NO: 363703 - DNA, 33 bp, Homo sapien
ctctcagatatctccactaaaaactttctcact

SEQ ID NO: 363704 - DNA, 33 bp, Homo sapien
ctctcagatatctccagtaaaaactttctcact

SEQ ID NO: 363705 - DNA, 33 bp, Homo sapien
ggaaaagacccctgtggattctctgccccttct

SEQ ID NO: 363706 - DNA, 33 bp, Homo sapien
ggaaaagacccctgtgtattctctgccccttct

SEQ ID NO: 363707 - DNA, 33 bp, Homo sapien
tctgacggagcgagaacgagtacccagaggttt

SEQ ID NO: 363708 - DNA, 33 bp, Homo sapien
tctgacggagcgagaatgagtacccagaggttt

SEQ ID NO: 363709 - DNA, 33 bp, Homo sapien
catagaggacaggtgacgtgaacagacaccaat

SEQ ID NO: 363710 - DNA, 33 bp, Homo sapien
catagaggacaggtgatgtgaacagacaccaat

SEQ ID NO: 363711 - DNA, 33 bp, Homo sapien
cgttggggaagcttcactctgttatgtgtggcc

SEQ ID NO: 363712 - DNA, 33 bp, Homo sapien
cgttggggaagcttcattctgttatgtgtggcc

SEQ ID NO: 363713 - DNA, 33 bp, Homo sapien
agctccatctgccgcacactcgggcacagctgc

SEQ ID NO: 363714 - DNA, 33 bp, Homo sapien
agctccatctgccgcatactcgggcacagctgc

SEQ ID NO: 363715 - DNA, 33 bp, Homo sapien
gtgagtttcattcctacgctccacatggtgcca

SEQ ID NO: 363716 - DNA, 33 bp, Homo sapien
gtgagtttcattcctatgctccacatggtgcca

SEQ ID NO: 363717 - DNA, 33 bp, Homo sapien
ttccatattgccacaaatgatggaatttccttt

SEQ ID NO: 363718 - DNA, 33 bp, Homo sapien
ttccatattgccacaagtgatggaatttccttt

SEQ ID NO: 363719 - DNA, 33 bp, Homo sapien
ggtccacttagtccaactgctgttctaggaacc

SEQ ID NO: 363720 - DNA, 33 bp, Homo sapien
ggtccacttagtccaattgctgttctaggaacc

SEQ ID NO: 363721 - DNA, 33 bp, Homo sapien
aggagaaatcaagctacggactggtaaggctca

SEQ ID NO: 363722 - DNA, 33 bp, Homo sapien
aggagaaatcaagctatggactggtaaggctca

SEQ ID NO: 363723 - DNA, 33 bp, Homo sapien
ttgtttggttaggtggaataggcaatattctga

SEQ ID NO: 363724 - DNA, 33 bp, Homo sapien
ttgtttggttaggtggtataggcaatattctga

SEQ ID NO: 363725 - DNA, 33 bp, Homo sapien
aactttgaccttgagacacatgatttcgcatat

SEQ ID NO: 363726 - DNA, 33 bp, Homo sapien
aactttgaccttgagagacatgatttcgcatat

SEQ ID NO: 363727 - DNA, 33 bp, Homo sapien
tacaaaaaattcagaaattaaccaggcttggtg

SEQ ID NO: 363728 - DNA, 33 bp, Homo sapien
tacaaaaaattcagaagttaaccaggcttggtg

SEQ ID NO: 363729 - DNA, 33 bp, Homo sapien
atcacagggttattgacggatttactagataca

SEQ ID NO: 363730 - DNA, 33 bp, Homo sapien
atcacagggttattgatggatttactagataca

SEQ ID NO: 363731 - DNA, 33 bp, Homo sapien
tccgaagtttattctaccccagagaccagtggg

SEQ ID NO: 363732 - DNA, 33 bp, Homo sapien
tccgaagtttattctatcccagagaccagtggg

SEQ ID NO: 363733 - DNA, 33 bp, Homo sapien
ctccaaatggtacccaaatgaaagcaaagtact

SEQ ID NO: 363734 - DNA, 33 bp, Homo sapien
ctccaaatggtacccagatgaaagcaaagtact

SEQ ID NO: 363735 - DNA, 33 bp, Homo sapien
gttcatcctgttcctacgctcggtcaatttttg

SEQ ID NO: 363736 - DNA, 33 bp, Homo sapien
gttcatcctgttcctatgctcggtcaatttttg

SEQ ID NO: 363737 - DNA, 33 bp, Homo sapien
caacaacatggtgttacggttgaatatcaatga

SEQ ID NO: 363738 - DNA, 33 bp, Homo sapien
caacaacatggtgttatggttgaatatcaatga

SEQ ID NO: 363739 - DNA, 33 bp, Homo sapien
taaagatccagaactcaccctgatgaaaatttc

SEQ ID NO: 363740 - DNA, 33 bp, Homo sapien
taaagatccagaactcgccctgatgaaaatttc

SEQ ID NO: 363741 - DNA, 33 bp, Homo sapien
cttattagagtgtctaagaagtgtcctctgttc

SEQ ID NO: 363742 - DNA, 33 bp, Homo sapien
cttattagagtgtctatgaagtgtcctctgttc

SEQ ID NO: 363743 - DNA, 33 bp, Homo sapien
tctctggtgagattcacgtttctaactcgtata

SEQ ID NO: 363744 - DNA, 33 bp, Homo sapien
tctctggtgagattcatgtttctaactcgtata

SEQ ID NO: 363745 - DNA, 33 bp, Homo sapien
aaagagtgcattgaatcagagccattttgttgg

SEQ ID NO: 363746 - DNA, 33 bp, Homo sapien
aaagagtgcattgaatgagagccattttgttgg

SEQ ID NO: 363747 - DNA, 33 bp, Homo sapien
ggatcttttgatgtgactactggaagaacaaga

SEQ ID NO: 363748 - DNA, 33 bp, Homo sapien
ggatcttttgatgtgagtactggaagaacaaga

SEQ ID NO: 363749 - DNA, 33 bp, Homo sapien
gtagatgagagactgacaaatacctgattctta

SEQ ID NO: 363750 - DNA, 33 bp, Homo sapien
gtagatgagagactgagaaatacctgattctta

SEQ ID NO: 363751 - DNA, 33 bp, Homo sapien
tttccattttgtgaagaaccttggaaaggtgga

SEQ ID NO: 363752 - DNA, 33 bp, Homo sapien
tttccattttgtgaagcaccttggaaaggtgga

SEQ ID NO: 363753 - DNA, 33 bp, Homo sapien
tggatgaggatcagaactactggccatggccac

SEQ ID NO: 363754 - DNA, 33 bp, Homo sapien
tggatgaggatcagaattactggccatggccac

SEQ ID NO: 363755 - DNA, 33 bp, Homo sapien
atagtcagacatcctgcaaggcatggggtagga

SEQ ID NO: 363756 - DNA, 33 bp, Homo sapien
atagtcagacatcctggaaggcatggggtagga

SEQ ID NO: 363757 - DNA, 33 bp, Homo sapien
gtcgggtgattttaccagcttaataaaatcaag

SEQ ID NO: 363758 - DNA, 33 bp, Homo sapien
gtcgggtgattttaccggcttaataaaatcaag

SEQ ID NO: 363759 - DNA, 33 bp, Homo sapien
accttacaggatacacagatacatcaaacaggt

SEQ ID NO: 363760 - DNA, 33 bp, Homo sapien
accttacaggatacacggatacatcaaacaggt

SEQ ID NO: 363761 - DNA, 33 bp, Homo sapien
ccaactttctctgataacaatacagtgtttgtt

SEQ ID NO: 363762 - DNA, 33 bp, Homo sapien
ccaactttctctgatagcaatacagtgtttgtt

SEQ ID NO: 363763 - DNA, 33 bp, Homo sapien
tttattagctttatcaaagtatcgtgtaggaag

SEQ ID NO: 363764 - DNA, 33 bp, Homo sapien
tttattagctttatcagagtatcgtgtaggaag

SEQ ID NO: 363765 - DNA, 33 bp, Homo sapien
gagaagtaccacgtgacgcttcctgggcttagg

SEQ ID NO: 363766 - DNA, 33 bp, Homo sapien
gagaagtaccacgtgatgcttcctgggcttagg

SEQ ID NO: 363767 - DNA, 33 bp, Homo sapien
ataaaacaggggctccaagggtgtaaatggtgg

SEQ ID NO: 363768 - DNA, 33 bp, Homo sapien
ataaaacaggggctccgagggtgtaaatggtgg

SEQ ID NO: 363769 - DNA, 33 bp, Homo sapien
tggtgggatttgaaggaaggtgagtacaaagat

SEQ ID NO: 363770 - DNA, 33 bp, Homo sapien
tggtgggatttgaagggaggtgagtacaaagat

SEQ ID NO: 363771 - DNA, 33 bp, Homo sapien
ctcacacttacccccaacatcatctttgtactc

SEQ ID NO: 363772 - DNA, 33 bp, Homo sapien
ctcacacttacccccagcatcatctttgtactc

SEQ ID NO: 363773 - DNA, 33 bp, Homo sapien
tagatgctatataaaacgaatactggccaggca

SEQ ID NO: 363774 - DNA, 33 bp, Homo sapien
tagatgctatataaaatgaatactggccaggca

SEQ ID NO: 363775 - DNA, 33 bp, Homo sapien
cacaccatctattagaaatgactggaatgaggc

SEQ ID NO: 363776 - DNA, 33 bp, Homo sapien
cacaccatctattagagatgactggaatgaggc

SEQ ID NO: 363777 - DNA, 33 bp, Homo sapien
atgcctgggcaagtgacgggattgtcgaggaat

SEQ ID NO: 363778 - DNA, 33 bp, Homo sapien
atgcctgggcaagtgatgggattgtcgaggaat

SEQ ID NO: 363779 - DNA, 33 bp, Homo sapien
agagctcgttcccttaggatgtctgggtcctat

SEQ ID NO: 363780 - DNA, 33 bp, Homo sapien
agagctcgttcccttatgatgtctgggtcctat

SEQ ID NO: 363781 - DNA, 33 bp, Homo sapien
cttgtgccttatttcactagctatgtgacctgg

SEQ ID NO: 363782 - DNA, 33 bp, Homo sapien
cttgtgccttatttcagtagctatgtgacctgg

SEQ ID NO: 363783 - DNA, 33 bp, Homo sapien
gtatgagagaataataagggacggaacatggaa

SEQ ID NO: 363784 - DNA, 33 bp, Homo sapien
gtatgagagaataataggggacggaacatggaa

SEQ ID NO: 363785 - DNA, 33 bp, Homo sapien
tgagagacctgaacaacctaaccacgatgtatt

SEQ ID NO: 363786 - DNA, 33 bp, Homo sapien
tgagagacctgaacaatctaaccacgatgtatt

SEQ ID NO: 363787 - DNA, 33 bp, Homo sapien
ggaggggccgtgtttgcacacagttactgctgg

SEQ ID NO: 363788 - DNA, 33 bp, Homo sapien
ggaggggccgtgtttggacacagttactgctgg

SEQ ID NO: 363789 - DNA, 33 bp, Homo sapien
aatgagtctggttctacggctatcttcattaat

SEQ ID NO: 363790 - DNA, 33 bp, Homo sapien
aatgagtctggttctatggctatcttcattaat

SEQ ID NO: 363791 - DNA, 33 bp, Homo sapien
tttgatcaacttaggaaacgatactggatgtca

SEQ ID NO: 363792 - DNA, 33 bp, Homo sapien
tttgatcaacttaggatacgatactggatgtca

SEQ ID NO: 363793 - DNA, 33 bp, Homo sapien
gccacatggtcaggaacagtttgatcaacttag

SEQ ID NO: 363794 - DNA, 33 bp, Homo sapien
gccacatggtcaggaagagtttgatcaacttag

SEQ ID NO: 363795 - DNA, 33 bp, Homo sapien
ttgaagattccactagaaattaagtgctttgga

SEQ ID NO: 363796 - DNA, 33 bp, Homo sapien
ttgaagattccactagtaattaagtgctttgga

SEQ ID NO: 363797 - DNA, 33 bp, Homo sapien
taccaatgtctttagaatcaatacttaaaaaat

SEQ ID NO: 363798 - DNA, 33 bp, Homo sapien
taccaatgtctttagagtcaatacttaaaaaat

SEQ ID NO: 363799 - DNA, 33 bp, Homo sapien
cgtcgggaagacttcaaattgctccaattttgt

SEQ ID NO: 363800 - DNA, 33 bp, Homo sapien
cgtcgggaagacttcatattgctccaattttgt

SEQ ID NO: 363801 - DNA, 33 bp, Homo sapien
tttcactgttcctgataaatgtgaatcaaattt

SEQ ID NO: 363802 - DNA, 33 bp, Homo sapien
tttcactgttcctgattaatgtgaatcaaattt

SEQ ID NO: 363803 - DNA, 33 bp, Homo sapien
attgtacagggttctgcataagcgaaagtctaa

SEQ ID NO: 363804 - DNA, 33 bp, Homo sapien
attgtacagggttctggataagcgaaagtctaa

SEQ ID NO: 363805 - DNA, 33 bp, Homo sapien
atccatcagtctacaaggatcacctagcctctc

SEQ ID NO: 363806 - DNA, 33 bp, Homo sapien
atccatcagtctacaatgatcacctagcctctc

SEQ ID NO: 363807 - DNA, 33 bp, Homo sapien
tgattttgcatcatgaacctagtcacagtatcc

SEQ ID NO: 363808 - DNA, 33 bp, Homo sapien
tgattttgcatcatgatcctagtcacagtatcc

SEQ ID NO: 363809 - DNA, 33 bp, Homo sapien
catcagtaattttgcacggtatatatatgtacc

SEQ ID NO: 363810 - DNA, 33 bp, Homo sapien
catcagtaattttgcatggtatatatatgtacc

SEQ ID NO: 363811 - DNA, 33 bp, Homo sapien
attgttcctctattaacgaaatacaatgatatt

SEQ ID NO: 363812 - DNA, 33 bp, Homo sapien
attgttcctctattaatgaaatacaatgatatt

SEQ ID NO: 363813 - DNA, 33 bp, Homo sapien
ggctatctgaaagagaagacagaccagttagct

SEQ ID NO: 363814 - DNA, 33 bp, Homo sapien
ggctatctgaaagagaggacagaccagttagct

SEQ ID NO: 363815 - DNA, 33 bp, Homo sapien
agttcttctcctgaagccaagatatgcatggta

SEQ ID NO: 363816 - DNA, 33 bp, Homo sapien
agttcttctcctgaagtcaagatatgcatggta

SEQ ID NO: 363817 - DNA, 33 bp, Homo sapien
aaatcatgtcctaacaaccaacttatttcctag

SEQ ID NO: 363818 - DNA, 33 bp, Homo sapien
aaatcatgtcctaacagccaacttatttcctag

SEQ ID NO: 363819 - DNA, 33 bp, Homo sapien
gatgaaaaatacacccaatccaatcaaaatgaa

SEQ ID NO: 363820 - DNA, 33 bp, Homo sapien
gatgaaaaatacacccgatccaatcaaaatgaa

SEQ ID NO: 363821 - DNA, 33 bp, Homo sapien
accacatccttttacccgactcctttgtaatct

SEQ ID NO: 363822 - DNA, 33 bp, Homo sapien
accacatccttttaccggactcctttgtaatct

SEQ ID NO: 363823 - DNA, 33 bp, Homo sapien
atcatataaatggtcagtgaatatcctctagtg

SEQ ID NO: 363824 - DNA, 33 bp, Homo sapien
atcatataaatggtcattgaatatcctctagtg

SEQ ID NO: 363825 - DNA, 33 bp, Homo sapien
catggaaaagagccaacgtgaagaggcaattga

SEQ ID NO: 363826 - DNA, 33 bp, Homo sapien
catggaaaagagccaaggtgaagaggcaattga

SEQ ID NO: 363827 - DNA, 33 bp, Homo sapien
atctttgtgaggagaaaaacaacatcttgacat

SEQ ID NO: 363828 - DNA, 33 bp, Homo sapien
atctttgtgaggagaataacaacatcttgacat

SEQ ID NO: 363829 - DNA, 33 bp, Homo sapien
ctgcttgatgagttcacaggtctttctgctgag

SEQ ID NO: 363830 - DNA, 33 bp, Homo sapien
ctgcttgatgagttcagaggtctttctgctgag

SEQ ID NO: 363831 - DNA, 33 bp, Homo sapien
tggctttagctagtaggaggatgtagagaaatt

SEQ ID NO: 363832 - DNA, 33 bp, Homo sapien
tggctttagctagtagtaggatgtagagaaatt

SEQ ID NO: 363833 - DNA, 33 bp, Homo sapien
ggtggactgtggagaagctcagaatcgacatac

SEQ ID NO: 363834 - DNA, 33 bp, Homo sapien
ggtggactgtggagaatctcagaatcgacatac

SEQ ID NO: 363835 - DNA, 33 bp, Homo sapien
ttgctaactgctttgcgagaatcaggaatcttt

SEQ ID NO: 363836 - DNA, 33 bp, Homo sapien
ttgctaactgctttgctagaatcaggaatcttt

SEQ ID NO: 363837 - DNA, 33 bp, Homo sapien
ctcacctttgatgttgaatttgtcagtataaac

SEQ ID NO: 363838 - DNA, 33 bp, Homo sapien
ctcacctttgatgttgcatttgtcagtataaac

SEQ ID NO: 363839 - DNA, 33 bp, Homo sapien
ggcactggtttcctacagaatcaagatattatc

SEQ ID NO: 363840 - DNA, 33 bp, Homo sapien
ggcactggtttcctactgaatcaagatattatc

SEQ ID NO: 363841 - DNA, 33 bp, Homo sapien
gtgcagctctttgtagaagtgtctatttcataa

SEQ ID NO: 363842 - DNA, 33 bp, Homo sapien
gtgcagctctttgtaggagtgtctatttcataa

SEQ ID NO: 363843 - DNA, 33 bp, Homo sapien
acactttcaactgctacagcacatttacaaaca

SEQ ID NO: 363844 - DNA, 33 bp, Homo sapien
acactttcaactgctagagcacatttacaaaca

SEQ ID NO: 363845 - DNA, 33 bp, Homo sapien
gtcaaatgaaatgagaatagtcaggtgatacta

SEQ ID NO: 363846 - DNA, 33 bp, Homo sapien
gtcaaatgaaatgagagtagtcaggtgatacta

SEQ ID NO: 363847 - DNA, 33 bp, Homo sapien
acgtttttactctgccaaatctcctaacacttt

SEQ ID NO: 363848 - DNA, 33 bp, Homo sapien
acgtttttactctgccgaatctcctaacacttt

SEQ ID NO: 363849 - DNA, 33 bp, Homo sapien
tcttttttaaacactccaattaattcatccagt

SEQ ID NO: 363850 - DNA, 33 bp, Homo sapien
tcttttttaaacactcgaattaattcatccagt

SEQ ID NO: 363851 - DNA, 33 bp, Homo sapien
aaagacaaatggctccacttgtcccaatcataa

SEQ ID NO: 363852 - DNA, 33 bp, Homo sapien
aaagacaaatggctccgcttgtcccaatcataa

SEQ ID NO: 363853 - DNA, 33 bp, Homo sapien
taattagtctgagtcgaatcatcaatcaagaga

SEQ ID NO: 363854 - DNA, 33 bp, Homo sapien
taattagtctgagtcgtatcatcaatcaagaga

SEQ ID NO: 363855 - DNA, 33 bp, Homo sapien
gacaagtattgctgtaccatgaatgaccgcctt

SEQ ID NO: 363856 - DNA, 33 bp, Homo sapien
gacaagtattgctgtagcatgaatgaccgcctt

SEQ ID NO: 363857 - DNA, 33 bp, Homo sapien
ccagtcctcaagataacggggtttccacatcat

SEQ ID NO: 363858 - DNA, 33 bp, Homo sapien
ccagtcctcaagataagggggtttccacatcat

SEQ ID NO: 363859 - DNA, 33 bp, Homo sapien
catagagaaatccatgcaaatcaacacacaggt

SEQ ID NO: 363860 - DNA, 33 bp, Homo sapien
catagagaaatccatgtaaatcaacacacaggt

SEQ ID NO: 363861 - DNA, 33 bp, Homo sapien
gggaggataaaagtgccgaagacaaagataaca

SEQ ID NO: 363862 - DNA, 33 bp, Homo sapien
gggaggataaaagtgctgaagacaaagataaca

SEQ ID NO: 363863 - DNA, 33 bp, Homo sapien
tatctaataaccaaaaaggaccagaaagttgaa

SEQ ID NO: 363864 - DNA, 33 bp, Homo sapien
tatctaataaccaaaagggaccagaaagttgaa

SEQ ID NO: 363865 - DNA, 33 bp, Homo sapien
atttataacatcaaaacggattacatgagaaca

SEQ ID NO: 363866 - DNA, 33 bp, Homo sapien
atttataacatcaaaagggattacatgagaaca

SEQ ID NO: 363867 - DNA, 33 bp, Homo sapien
ttacatgagaacaaaggaattatccttcgtgta

SEQ ID NO: 363868 - DNA, 33 bp, Homo sapien
ttacatgagaacaaagtaattatccttcgtgta

SEQ ID NO: 363869 - DNA, 33 bp, Homo sapien
agcaccaaccagtgagcaagtgatctccattcc

SEQ ID NO: 363870 - DNA, 33 bp, Homo sapien
agcaccaaccagtgaggaagtgatctccattcc

SEQ ID NO: 363871 - DNA, 33 bp, Homo sapien
ctagatggcaggcattaaaaactgtcaacacca

SEQ ID NO: 363872 - DNA, 33 bp, Homo sapien
ctagatggcaggcattgaaaactgtcaacacca

SEQ ID NO: 363873 - DNA, 33 bp, Homo sapien
gtggttctggactctacacttgacacagcctcc

SEQ ID NO: 363874 - DNA, 33 bp, Homo sapien
gtggttctggactctatacttgacacagcctcc

SEQ ID NO: 363875 - DNA, 33 bp, Homo sapien
aaagcaagtcttttcaacaaataatcctggacc

SEQ ID NO: 363876 - DNA, 33 bp, Homo sapien
aaagcaagtcttttcagcaaataatcctggacc

SEQ ID NO: 363877 - DNA, 33 bp, Homo sapien
gctgtggcttaaagccgcaaaaatgtccatggg

SEQ ID NO: 363878 - DNA, 33 bp, Homo sapien
gctgtggcttaaagcctcaaaaatgtccatggg

SEQ ID NO: 363879 - DNA, 33 bp, Homo sapien
tgcctttgggaatggacatcttgttcatagcag

SEQ ID NO: 363880 - DNA, 33 bp, Homo sapien
tgcctttgggaatggatatcttgttcatagcag

SEQ ID NO: 363881 - DNA, 33 bp, Homo sapien
gagacaggaaagtattcaaagactcttgaggat

SEQ ID NO: 363882 - DNA, 33 bp, Homo sapien
gagacaggaaagtattgaaagactcttgaggat

SEQ ID NO: 363883 - DNA, 33 bp, Homo sapien
ccaaattattctaagactctgaaaatgttatca

SEQ ID NO: 363884 - DNA, 33 bp, Homo sapien
ccaaattattctaagattctgaaaatgttatca

SEQ ID NO: 363885 - DNA, 33 bp, Homo sapien
ttctggtgcacgaaccagcatcaggaacaacac

SEQ ID NO: 363886 - DNA, 33 bp, Homo sapien
ttctggtgcacgaaccggcatcaggaacaacac

SEQ ID NO: 363887 - DNA, 33 bp, Homo sapien
aaagaaccgcatattaacaaacaagacagaggc

SEQ ID NO: 363888 - DNA, 33 bp, Homo sapien
aaagaaccgcatattagcaaacaagacagaggc

SEQ ID NO: 363889 - DNA, 33 bp, Homo sapien
aatagtaagtttggcaccattttacattggcta

SEQ ID NO: 363890 - DNA, 33 bp, Homo sapien
aatagtaagtttggcatcattttacattggcta

SEQ ID NO: 363891 - DNA, 33 bp, Homo sapien
ttctcggcagatcactcacttacctattcactg

SEQ ID NO: 363892 - DNA, 33 bp, Homo sapien
ttctcggcagatcactgacttacctattcactg

SEQ ID NO: 363893 - DNA, 33 bp, Homo sapien
tgatgccaggcctaaacctctttcaacttgagt

SEQ ID NO: 363894 - DNA, 33 bp, Homo sapien
tgatgccaggcctaaagctctttcaacttgagt

SEQ ID NO: 363895 - DNA, 33 bp, Homo sapien
aaacaatacgtttttaggccaagcttgtccaac

SEQ ID NO: 363896 - DNA, 33 bp, Homo sapien
aaacaatacgtttttatgccaagcttgtccaac

SEQ ID NO: 363897 - DNA, 33 bp, Homo sapien
gaggcatggaaattcaacctttcctctcctgct

SEQ ID NO: 363898 - DNA, 33 bp, Homo sapien
gaggcatggaaattcatcctttcctctcctgct

SEQ ID NO: 363899 - DNA, 33 bp, Homo sapien
tttcattttgcacagacattaaactgttatgtt

SEQ ID NO: 363900 - DNA, 33 bp, Homo sapien
tttcattttgcacagatattaaactgttatgtt

SEQ ID NO: 363901 - DNA, 33 bp, Homo sapien
atttcttaaacccctacagctaccacatatgta

SEQ ID NO: 363902 - DNA, 33 bp, Homo sapien
atttcttaaacccctagagctaccacatatgta

SEQ ID NO: 363903 - DNA, 33 bp, Homo sapien
tgttcttcaagtgacactatctctttggaatta

SEQ ID NO: 363904 - DNA, 33 bp, Homo sapien
tgttcttcaagtgacagtatctctttggaatta

SEQ ID NO: 363905 - DNA, 33 bp, Homo sapien
tctaaaattcaatctgcaaaatgacaagaatgt

SEQ ID NO: 363906 - DNA, 33 bp, Homo sapien
tctaaaattcaatctggaaaatgacaagaatgt

SEQ ID NO: 363907 - DNA, 33 bp, Homo sapien
caatgtccttccaacacgacaggtgactcaagt

SEQ ID NO: 363908 - DNA, 33 bp, Homo sapien
caatgtccttccaacatgacaggtgactcaagt

SEQ ID NO: 363909 - DNA, 33 bp, Homo sapien
gctgccccagctgatggactgaaccaccacctc

SEQ ID NO: 363910 - DNA, 33 bp, Homo sapien
gctgccccagctgatgtactgaaccaccacctc

SEQ ID NO: 363911 - DNA, 33 bp, Homo sapien
gagtgctgggaacttaccagtgaacaaaataaa

SEQ ID NO: 363912 - DNA, 33 bp, Homo sapien
gagtgctgggaacttagcagtgaacaaaataaa

SEQ ID NO: 363913 - DNA, 33 bp, Homo sapien
ttttaagacccttagaagaatgaacagttcaga

SEQ ID NO: 363914 - DNA, 33 bp, Homo sapien
ttttaagacccttagaggaatgaacagttcaga

SEQ ID NO: 363915 - DNA, 33 bp, Homo sapien
aggagggtgagccataccatttcaatgtcctca

SEQ ID NO: 363916 - DNA, 33 bp, Homo sapien
aggagggtgagccatagcatttcaatgtcctca

SEQ ID NO: 363917 - DNA, 33 bp, Homo sapien
tttccttccaactctccagtttgtatcagtcgg

SEQ ID NO: 363918 - DNA, 33 bp, Homo sapien
tttccttccaactctctagtttgtatcagtcgg

SEQ ID NO: 363919 - DNA, 33 bp, Homo sapien
gagatctgtttaattcactgcggtgggctgggt

SEQ ID NO: 363920 - DNA, 33 bp, Homo sapien
gagatctgtttaattccctgcggtgggctgggt

SEQ ID NO: 363921 - DNA, 33 bp, Homo sapien
ccatcatcagaagcaacgtttgttatgatcaat

SEQ ID NO: 363922 - DNA, 33 bp, Homo sapien
ccatcatcagaagcaatgtttgttatgatcaat

SEQ ID NO: 363923 - DNA, 33 bp, Homo sapien
tgtaatgtgggaagaagtattcctggcaacatc

SEQ ID NO: 363924 - DNA, 33 bp, Homo sapien
tgtaatgtgggaagaattattcctggcaacatc

SEQ ID NO: 363925 - DNA, 33 bp, Homo sapien
ataatacacagtgtgccaactcttagacaaaga

SEQ ID NO: 363926 - DNA, 33 bp, Homo sapien
ataatacacagtgtgcgaactcttagacaaaga

SEQ ID NO: 363927 - DNA, 33 bp, Homo sapien
ttaggatagtgaataacgtgagagactttggag

SEQ ID NO: 363928 - DNA, 33 bp, Homo sapien
ttaggatagtgaataaggtgagagactttggag

SEQ ID NO: 363929 - DNA, 33 bp, Homo sapien
tttaatgtccagggaacatttgcctacaacaga

SEQ ID NO: 363930 - DNA, 33 bp, Homo sapien
tttaatgtccagggaagatttgcctacaacaga

SEQ ID NO: 363931 - DNA, 33 bp, Homo sapien
actgattataacaccacctggtaaacttacacc

SEQ ID NO: 363932 - DNA, 33 bp, Homo sapien
actgattataacaccatctggtaaacttacacc

SEQ ID NO: 363933 - DNA, 33 bp, Homo sapien
gggttaaaatcatgcgaaatcacagagaaaaaa

SEQ ID NO: 363934 - DNA, 33 bp, Homo sapien
gggttaaaatcatgcggaatcacagagaaaaaa

SEQ ID NO: 363935 - DNA, 33 bp, Homo sapien
cttctcttcatgatagaattcctggttttcaaa

SEQ ID NO: 363936 - DNA, 33 bp, Homo sapien
cttctcttcatgatagcattcctggttttcaaa

SEQ ID NO: 363937 - DNA, 33 bp, Homo sapien
ttgaggctgatgcagaaactaaaaatgccagga

SEQ ID NO: 363938 - DNA, 33 bp, Homo sapien
ttgaggctgatgcagacactaaaaatgccagga

SEQ ID NO: 363939 - DNA, 33 bp, Homo sapien
aggattactgggagataacaagaacattagttt

SEQ ID NO: 363940 - DNA, 33 bp, Homo sapien
aggattactgggagatgacaagaacattagttt

SEQ ID NO: 363941 - DNA, 33 bp, Homo sapien
acaaccattagaggacccctggctgactgcaaa

SEQ ID NO: 363942 - DNA, 33 bp, Homo sapien
acaaccattagaggactcctggctgactgcaaa

SEQ ID NO: 363943 - DNA, 33 bp, Homo sapien
attaccctttttctaaccatcagtgcacccaag

SEQ ID NO: 363944 - DNA, 33 bp, Homo sapien
attaccctttttctaatcatcagtgcacccaag

SEQ ID NO: 363945 - DNA, 33 bp, Homo sapien
ttagatctgtaaagaacaattcagctaagacca

SEQ ID NO: 363946 - DNA, 33 bp, Homo sapien
ttagatctgtaaagaataattcagctaagacca

SEQ ID NO: 363947 - DNA, 33 bp, Homo sapien
gccctgagacaagtaacctgggtcaatcttgtt

SEQ ID NO: 363948 - DNA, 33 bp, Homo sapien
gccctgagacaagtaagctgggtcaatcttgtt

SEQ ID NO: 363949 - DNA, 33 bp, Homo sapien
taccccaagaggctcaaaatcatggagtgtgga

SEQ ID NO: 363950 - DNA, 33 bp, Homo sapien
taccccaagaggctcagaatcatggagtgtgga

SEQ ID NO: 363951 - DNA, 33 bp, Homo sapien
ttagggttaacatctgaatcattggctgccttt

SEQ ID NO: 363952 - DNA, 33 bp, Homo sapien
ttagggttaacatctggatcattggctgccttt

SEQ ID NO: 363953 - DNA, 33 bp, Homo sapien
gagctgagacacatcacaaagtgtgggatcaaa

SEQ ID NO: 363954 - DNA, 33 bp, Homo sapien
gagctgagacacatcataaagtgtgggatcaaa

SEQ ID NO: 363955 - DNA, 33 bp, Homo sapien
aatgttatagggctgacaattatacgtgtgtgt

SEQ ID NO: 363956 - DNA, 33 bp, Homo sapien
aatgttatagggctgagaattatacgtgtgtgt

SEQ ID NO: 363957 - DNA, 33 bp, Homo sapien
ctcaacagttttggaaccttaggcaggcaggtt

SEQ ID NO: 363958 - DNA, 33 bp, Homo sapien
ctcaacagttttggaagcttaggcaggcaggtt

SEQ ID NO: 363959 - DNA, 33 bp, Homo sapien
taaggttttaggtcaacctcatagctgtttcca

SEQ ID NO: 363960 - DNA, 33 bp, Homo sapien
taaggttttaggtcaagctcatagctgtttcca

SEQ ID NO: 363961 - DNA, 33 bp, Homo sapien
tagtatcctgtggggaaaagcctatcttttgag

SEQ ID NO: 363962 - DNA, 33 bp, Homo sapien
tagtatcctgtggggagaagcctatcttttgag

SEQ ID NO: 363963 - DNA, 33 bp, Homo sapien
ttcagtagaataagcaacttgtagagtaacata

SEQ ID NO: 363964 - DNA, 33 bp, Homo sapien
ttcagtagaataagcagcttgtagagtaacata

SEQ ID NO: 363965 - DNA, 33 bp, Homo sapien
tgggtctatcactccaatctctggctttatctt

SEQ ID NO: 363966 - DNA, 33 bp, Homo sapien
tgggtctatcactccagtctctggctttatctt

SEQ ID NO: 363967 - DNA, 33 bp, Homo sapien
agcagagttttgcaacagagaccttatgtcctg

SEQ ID NO: 363968 - DNA, 33 bp, Homo sapien
agcagagttttgcaaccgagaccttatgtcctg

SEQ ID NO: 363969 - DNA, 33 bp, Homo sapien
gatggccatgtggttacagacagggctggagga

SEQ ID NO: 363970 - DNA, 33 bp, Homo sapien
gatggccatgtggttatagacagggctggagga

SEQ ID NO: 363971 - DNA, 33 bp, Homo sapien
tatttatagaagaagacactgaaacacaggaag

SEQ ID NO: 363972 - DNA, 33 bp, Homo sapien
tatttatagaagaagatactgaaacacaggaag

SEQ ID NO: 363973 - DNA, 33 bp, Homo sapien
tactcgtttcgaggagaagagaatcagaataca

SEQ ID NO: 363974 - DNA, 33 bp, Homo sapien
tactcgtttcgaggaggagagaatcagaataca

SEQ ID NO: 363975 - DNA, 33 bp, Homo sapien
cagataaagaacataccatttaaagaccacaca

SEQ ID NO: 363976 - DNA, 33 bp, Homo sapien
cagataaagaacatacgatttaaagaccacaca

SEQ ID NO: 363977 - DNA, 33 bp, Homo sapien
ccattccagaagcttacattgtagtaaggcaat

SEQ ID NO: 363978 - DNA, 33 bp, Homo sapien
ccattccagaagcttatattgtagtaaggcaat

SEQ ID NO: 363979 - DNA, 33 bp, Homo sapien
gggcctgagaaggacaatgaaacccaaatgaca

SEQ ID NO: 363980 - DNA, 33 bp, Homo sapien
gggcctgagaaggacagtgaaacccaaatgaca

SEQ ID NO: 363981 - DNA, 33 bp, Homo sapien
aaattagctctgatcccatgtaaagtttacgtt

SEQ ID NO: 363982 - DNA, 33 bp, Homo sapien
aaattagctctgatcctatgtaaagtttacgtt

SEQ ID NO: 363983 - DNA, 33 bp, Homo sapien
ggcaaaaatagatacacacactcaacagggatt

SEQ ID NO: 363984 - DNA, 33 bp, Homo sapien
ggcaaaaatagatacatacactcaacagggatt

SEQ ID NO: 363985 - DNA, 33 bp, Homo sapien
tgcaggtcgaaactgaagccaattgataaaatg

SEQ ID NO: 363986 - DNA, 33 bp, Homo sapien
tgcaggtcgaaactgaggccaattgataaaatg

SEQ ID NO: 363987 - DNA, 33 bp, Homo sapien
gctcatggacattcaccctcagtgacccagaga

SEQ ID NO: 363988 - DNA, 33 bp, Homo sapien
gctcatggacattcacgctcagtgacccagaga

SEQ ID NO: 363989 - DNA, 33 bp, Homo sapien
agacctatgaccattaaccttaccatcatcaac

SEQ ID NO: 363990 - DNA, 33 bp, Homo sapien
agacctatgaccattatccttaccatcatcaac

SEQ ID NO: 363991 - DNA, 33 bp, Homo sapien
ggaagtgaaggatcacagagatgcagtaactgt

SEQ ID NO: 363992 - DNA, 33 bp, Homo sapien
ggaagtgaaggatcacggagatgcagtaactgt

SEQ ID NO: 363993 - DNA, 33 bp, Homo sapien
tccagctttccttctaaagaaacccgatgcagt

SEQ ID NO: 363994 - DNA, 33 bp, Homo sapien
tccagctttccttctacagaaacccgatgcagt

SEQ ID NO: 363995 - DNA, 33 bp, Homo sapien
gggctggaaaaaagcacgtcccaggaagaagcc

SEQ ID NO: 363996 - DNA, 33 bp, Homo sapien
gggctggaaaaaagcatgtcccaggaagaagcc

SEQ ID NO: 363997 - DNA, 33 bp, Homo sapien
aacatagtaccgagaaaggcatccctgtttcag

SEQ ID NO: 363998 - DNA, 33 bp, Homo sapien
aacatagtaccgagaacggcatccctgtttcag

SEQ ID NO: 363999 - DNA, 33 bp, Homo sapien
atatgaagatgactcacgatgtaagagctattt

SEQ ID NO: 364000 - DNA, 33 bp, Homo sapien
atatgaagatgactcaggatgtaagagctattt

SEQ ID NO: 364001 - DNA, 33 bp, Homo sapien
aaataagcaaagaaaaatacccagattctcagg

SEQ ID NO: 364002 - DNA, 33 bp, Homo sapien
aaataagcaaagaaaagtacccagattctcagg

SEQ ID NO: 364003 - DNA, 33 bp, Homo sapien
ttaagtcacttgcccaagattattcaggacgta

SEQ ID NO: 364004 - DNA, 33 bp, Homo sapien
ttaagtcacttgcccaggattattcaggacgta

SEQ ID NO: 364005 - DNA, 33 bp, Homo sapien
ccttggtgtaggtcagcaaatacaaatgcacct

SEQ ID NO: 364006 - DNA, 33 bp, Homo sapien
ccttggtgtaggtcaggaaatacaaatgcacct

SEQ ID NO: 364007 - DNA, 33 bp, Homo sapien
aattcattatttcctacctggacttggcaggca

SEQ ID NO: 364008 - DNA, 33 bp, Homo sapien
aattcattatttcctatctggacttggcaggca

SEQ ID NO: 364009 - DNA, 33 bp, Homo sapien
gagcagactcattgagcaccccgagataatacc

SEQ ID NO: 364010 - DNA, 33 bp, Homo sapien
gagcagactcattgaggaccccgagataatacc

SEQ ID NO: 364011 - DNA, 33 bp, Homo sapien
tgaaagaggaaagtacaactaacatctcatttt

SEQ ID NO: 364012 - DNA, 33 bp, Homo sapien
tgaaagaggaaagtacgactaacatctcatttt

SEQ ID NO: 364013 - DNA, 33 bp, Homo sapien
ggaggcaggtaaaaagacgcagagcttctaaaa

SEQ ID NO: 364014 - DNA, 33 bp, Homo sapien
ggaggcaggtaaaaagtcgcagagcttctaaaa

SEQ ID NO: 364015 - DNA, 33 bp, Homo sapien
aaatccaaaacataagcaaaacaggcatgcccc

SEQ ID NO: 364016 - DNA, 33 bp, Homo sapien
aaatccaaaacataaggaaaacaggcatgcccc

SEQ ID NO: 364017 - DNA, 33 bp, Homo sapien
tagatagacagacagacatagattttccttact

SEQ ID NO: 364018 - DNA, 33 bp, Homo sapien
tagatagacagacagagatagattttccttact

SEQ ID NO: 364019 - DNA, 33 bp, Homo sapien
taagagaagaagcaaacacttgttggaggaagt

SEQ ID NO: 364020 - DNA, 33 bp, Homo sapien
taagagaagaagcaaagacttgttggaggaagt

SEQ ID NO: 364021 - DNA, 33 bp, Homo sapien
atagaaacaccattcaaattggcttaagctaag

SEQ ID NO: 364022 - DNA, 33 bp, Homo sapien
atagaaacaccattcacattggcttaagctaag

SEQ ID NO: 364023 - DNA, 33 bp, Homo sapien
gtccacgtaaagctgacgcttgtccaaagttcc

SEQ ID NO: 364024 - DNA, 33 bp, Homo sapien
gtccacgtaaagctgatgcttgtccaaagttcc

SEQ ID NO: 364025 - DNA, 33 bp, Homo sapien
tccaggtatgtctgaccgcaaagctccatctct

SEQ ID NO: 364026 - DNA, 33 bp, Homo sapien
tccaggtatgtctgactgcaaagctccatctct

SEQ ID NO: 364027 - DNA, 33 bp, Homo sapien
gcagccctagaagtaactgatagctccatgcct

SEQ ID NO: 364028 - DNA, 33 bp, Homo sapien
gcagccctagaagtaattgatagctccatgcct

SEQ ID NO: 364029 - DNA, 33 bp, Homo sapien
catctagctgtatttacgtcctgtatggttttt

SEQ ID NO: 364030 - DNA, 33 bp, Homo sapien
catctagctgtatttatgtcctgtatggttttt

SEQ ID NO: 364031 - DNA, 33 bp, Homo sapien
cctgtatggtttttcaaagttgcagcggccggg

SEQ ID NO: 364032 - DNA, 33 bp, Homo sapien
cctgtatggtttttcatagttgcagcggccggg

SEQ ID NO: 364033 - DNA, 33 bp, Homo sapien
catgttatttctctccaccgtattttcaaaaca

SEQ ID NO: 364034 - DNA, 33 bp, Homo sapien
catgttatttctctccgccgtattttcaaaaca

SEQ ID NO: 364035 - DNA, 33 bp, Homo sapien
tcagcctgtctatgacaatgtctactataaaca

SEQ ID NO: 364036 - DNA, 33 bp, Homo sapien
tcagcctgtctatgactatgtctactataaaca

SEQ ID NO: 364037 - DNA, 33 bp, Homo sapien
atttctctagtcaatccctgaatatcttcaagc

SEQ ID NO: 364038 - DNA, 33 bp, Homo sapien
atttctctagtcaatctctgaatatcttcaagc

SEQ ID NO: 364039 - DNA, 33 bp, Homo sapien
ctgcctcggtgaataacagatggagaagtggca

SEQ ID NO: 364040 - DNA, 33 bp, Homo sapien
ctgcctcggtgaataatagatggagaagtggca

SEQ ID NO: 364041 - DNA, 33 bp, Homo sapien
atttgagaacggcttgcaggacagcaggtggga

SEQ ID NO: 364042 - DNA, 33 bp, Homo sapien
atttgagaacggcttggaggacagcaggtggga

SEQ ID NO: 364043 - DNA, 33 bp, Homo sapien
atgtgtccatagcgtacgaagactctagaacaa

SEQ ID NO: 364044 - DNA, 33 bp, Homo sapien
atgtgtccatagcgtatgaagactctagaacaa

SEQ ID NO: 364045 - DNA, 33 bp, Homo sapien
ttggtgtttgttactgaagtgcccaaccagtca

SEQ ID NO: 364046 - DNA, 33 bp, Homo sapien
ttggtgtttgttactggagtgcccaaccagtca

SEQ ID NO: 364047 - DNA, 33 bp, Homo sapien
taacaaacaccaaagcaagtgatatgtcataac

SEQ ID NO: 364048 - DNA, 33 bp, Homo sapien
taacaaacaccaaagcgagtgatatgtcataac

SEQ ID NO: 364049 - DNA, 33 bp, Homo sapien
ctttaaactgtacgacaggaagagtgtttttgt

SEQ ID NO: 364050 - DNA, 33 bp, Homo sapien
ctttaaactgtacgacgggaagagtgtttttgt

SEQ ID NO: 364051 - DNA, 33 bp, Homo sapien
gttaagtatagaaatacctacagacatacatac

SEQ ID NO: 364052 - DNA, 33 bp, Homo sapien
gttaagtatagaaatagctacagacatacatac

SEQ ID NO: 364053 - DNA, 33 bp, Homo sapien
ggctgcttttaggactcagctatgaaatataca

SEQ ID NO: 364054 - DNA, 33 bp, Homo sapien
ggctgcttttaggactgagctatgaaatataca

SEQ ID NO: 364055 - DNA, 33 bp, Homo sapien
caacaacaacaaagccactgtgatagagtatgt

SEQ ID NO: 364056 - DNA, 33 bp, Homo sapien
caacaacaacaaagccgctgtgatagagtatgt

SEQ ID NO: 364057 - DNA, 33 bp, Homo sapien
tctgatttaggaaaaaatgatggaaagtaagaa

SEQ ID NO: 364058 - DNA, 33 bp, Homo sapien
tctgatttaggaaaaactgatggaaagtaagaa

SEQ ID NO: 364059 - DNA, 33 bp, Homo sapien
tcttctgcctagagccaggataatcttttcctt

SEQ ID NO: 364060 - DNA, 33 bp, Homo sapien
tcttctgcctagagccgggataatcttttcctt

SEQ ID NO: 364061 - DNA, 33 bp, Homo sapien
atttagagctgaataacgctgtgctgtaggggt

SEQ ID NO: 364062 - DNA, 33 bp, Homo sapien
atttagagctgaataatgctgtgctgtaggggt

SEQ ID NO: 364063 - DNA, 33 bp, Homo sapien
tgtttcagttttgacaacaccttctggaaaagc

SEQ ID NO: 364064 - DNA, 33 bp, Homo sapien
tgtttcagttttgacaccaccttctggaaaagc

SEQ ID NO: 364065 - DNA, 33 bp, Homo sapien
aacccagctgagaaaacgatgatatcttcctgt

SEQ ID NO: 364066 - DNA, 33 bp, Homo sapien
aacccagctgagaaaaggatgatatcttcctgt

SEQ ID NO: 364067 - DNA, 33 bp, Homo sapien
gagagtcttccagctacgtactcaagatcttag

SEQ ID NO: 364068 - DNA, 33 bp, Homo sapien
gagagtcttccagctatgtactcaagatcttag

SEQ ID NO: 364069 - DNA, 33 bp, Homo sapien
atggtctaatctgaacgcttaaatgttgacttt

SEQ ID NO: 364070 - DNA, 33 bp, Homo sapien
atggtctaatctgaactcttaaatgttgacttt

SEQ ID NO: 364071 - DNA, 33 bp, Homo sapien
tgtcagaattgcaggagagtgagtctcacctct

SEQ ID NO: 364072 - DNA, 33 bp, Homo sapien
tgtcagaattgcaggatagtgagtctcacctct

SEQ ID NO: 364073 - DNA, 33 bp, Homo sapien
attaaactcctggctcacgctaataaatcagtg

SEQ ID NO: 364074 - DNA, 33 bp, Homo sapien
attaaactcctggctcgcgctaataaatcagtg

SEQ ID NO: 364075 - DNA, 33 bp, Homo sapien
aaggtgatacaatgaccgtaagaagtgacactg

SEQ ID NO: 364076 - DNA, 33 bp, Homo sapien
aaggtgatacaatgactgtaagaagtgacactg

SEQ ID NO: 364077 - DNA, 33 bp, Homo sapien
tttcaaagccattaaactaattgtaggtcatta

SEQ ID NO: 364078 - DNA, 33 bp, Homo sapien
tttcaaagccattaaagtaattgtaggtcatta

SEQ ID NO: 364079 - DNA, 33 bp, Homo sapien
gtggccagagaagaaccgatgaatttttagata

SEQ ID NO: 364080 - DNA, 33 bp, Homo sapien
gtggccagagaagaactgatgaatttttagata

SEQ ID NO: 364081 - DNA, 33 bp, Homo sapien
gttgactgtattaacaaaaatgaatgctggtaa

SEQ ID NO: 364082 - DNA, 33 bp, Homo sapien
gttgactgtattaacagaaatgaatgctggtaa

SEQ ID NO: 364083 - DNA, 33 bp, Homo sapien
cttctgttgaaatggaaatactaaactaaggag

SEQ ID NO: 364084 - DNA, 33 bp, Homo sapien
cttctgttgaaatggagatactaaactaaggag

SEQ ID NO: 364085 - DNA, 33 bp, Homo sapien
gcagaattctagctgcaagtatctgtgtctcag

SEQ ID NO: 364086 - DNA, 33 bp, Homo sapien
gcagaattctagctgcgagtatctgtgtctcag

SEQ ID NO: 364087 - DNA, 33 bp, Homo sapien
caaggattttagaaaacgttgttcattttggaa

SEQ ID NO: 364088 - DNA, 33 bp, Homo sapien
caaggattttagaaaaggttgttcattttggaa

SEQ ID NO: 364089 - DNA, 33 bp, Homo sapien
tggccaagaatccacaatgaaattccagctcca

SEQ ID NO: 364090 - DNA, 33 bp, Homo sapien
tggccaagaatccacagtgaaattccagctcca

SEQ ID NO: 364091 - DNA, 33 bp, Homo sapien
ccagctccagaattcaccgtctcggccccaggc

SEQ ID NO: 364092 - DNA, 33 bp, Homo sapien
ccagctccagaattcagcgtctcggccccaggc

SEQ ID NO: 364093 - DNA, 33 bp, Homo sapien
tgatgtgagggcttagcaaataaatacagttgg

SEQ ID NO: 364094 - DNA, 33 bp, Homo sapien
tgatgtgagggcttaggaaataaatacagttgg

SEQ ID NO: 364095 - DNA, 33 bp, Homo sapien
aaagtgacttgaagaaatattttaccaaagagg

SEQ ID NO: 364096 - DNA, 33 bp, Homo sapien
aaagtgacttgaagaagtattttaccaaagagg

SEQ ID NO: 364097 - DNA, 33 bp, Homo sapien
acaaatgaaaaactggaaaatcatttactgtat

SEQ ID NO: 364098 - DNA, 33 bp, Homo sapien
acaaatgaaaaactgggaaatcatttactgtat

SEQ ID NO: 364099 - DNA, 33 bp, Homo sapien
ggcgggtagggactgacgatatgtcacaattca

SEQ ID NO: 364100 - DNA, 33 bp, Homo sapien
ggcgggtagggactgaggatatgtcacaattca

SEQ ID NO: 364101 - DNA, 33 bp, Homo sapien
ccctgtcccagcataactgcaggtgttttaaac

SEQ ID NO: 364102 - DNA, 33 bp, Homo sapien
ccctgtcccagcataattgcaggtgttttaaac

SEQ ID NO: 364103 - DNA, 33 bp, Homo sapien
gtgcagacttctagtgaaaatactgacttttgg

SEQ ID NO: 364104 - DNA, 33 bp, Homo sapien
gtgcagacttctagtgcaaatactgacttttgg

SEQ ID NO: 364105 - DNA, 33 bp, Homo sapien
aaatttagtcctggtacaagaactccattaaac

SEQ ID NO: 364106 - DNA, 33 bp, Homo sapien
aaatttagtcctggtagaagaactccattaaac

SEQ ID NO: 364107 - DNA, 33 bp, Homo sapien
tcctgttagtgagaagcaaagtcattggaaaaa

SEQ ID NO: 364108 - DNA, 33 bp, Homo sapien
tcctgttagtgagaagtaaagtcattggaaaaa

SEQ ID NO: 364109 - DNA, 33 bp, Homo sapien
tgtggtctttctaggaagttggccacattctca

SEQ ID NO: 364110 - DNA, 33 bp, Homo sapien
tgtggtctttctaggaggttggccacattctca

SEQ ID NO: 364111 - DNA, 33 bp, Homo sapien
tgtcagtgacacaaaacgatgtgcttgggtctg

SEQ ID NO: 364112 - DNA, 33 bp, Homo sapien
tgtcagtgacacaaaatgatgtgcttgggtctg

SEQ ID NO: 364113 - DNA, 33 bp, Homo sapien
gtgtctccactacccccgattcaaatgctcaaa

SEQ ID NO: 364114 - DNA, 33 bp, Homo sapien
gtgtctccactacccctgattcaaatgctcaaa

SEQ ID NO: 364115 - DNA, 33 bp, Homo sapien
tcatttcacaatgctacgaagaaaaaataaaac

SEQ ID NO: 364116 - DNA, 33 bp, Homo sapien
tcatttcacaatgctaggaagaaaaaataaaac

SEQ ID NO: 364117 - DNA, 33 bp, Homo sapien
taagaaactgtcaggccaagaaactggattttt

SEQ ID NO: 364118 - DNA, 33 bp, Homo sapien
taagaaactgtcaggctaagaaactggattttt

SEQ ID NO: 364119 - DNA, 33 bp, Homo sapien
gacctctccttagcaacaataactccactccct

SEQ ID NO: 364120 - DNA, 33 bp, Homo sapien
gacctctccttagcaagaataactccactccct

SEQ ID NO: 364121 - DNA, 33 bp, Homo sapien
agttttgcccagcctaaaaacagtgacctctcc

SEQ ID NO: 364122 - DNA, 33 bp, Homo sapien
agttttgcccagcctagaaacagtgacctctcc

SEQ ID NO: 364123 - DNA, 33 bp, Homo sapien
cattgtgcggcggaaacaatagagaatgctagg

SEQ ID NO: 364124 - DNA, 33 bp, Homo sapien
cattgtgcggcggaaagaatagagaatgctagg

SEQ ID NO: 364125 - DNA, 33 bp, Homo sapien
tttccagaaacactcacaggacataaacccaaa

SEQ ID NO: 364126 - DNA, 33 bp, Homo sapien
tttccagaaacactcataggacataaacccaaa

SEQ ID NO: 364127 - DNA, 33 bp, Homo sapien
gcctgcgtttaaaaccagatcatctcattctga

SEQ ID NO: 364128 - DNA, 33 bp, Homo sapien
gcctgcgtttaaaaccggatcatctcattctga

SEQ ID NO: 364129 - DNA, 33 bp, Homo sapien
gtttgttatgtagttactaaagtggcaataata

SEQ ID NO: 364130 - DNA, 33 bp, Homo sapien
gtttgttatgtagttattaaagtggcaataata

SEQ ID NO: 364131 - DNA, 33 bp, Homo sapien
catgtgtgttgaatacaattatttccattttac

SEQ ID NO: 364132 - DNA, 33 bp, Homo sapien
catgtgtgttgaatactattatttccattttac

SEQ ID NO: 364133 - DNA, 33 bp, Homo sapien
ttgttgcagataggaaaactaataataggagat

SEQ ID NO: 364134 - DNA, 33 bp, Homo sapien
ttgttgcagataggaagactaataataggagat

SEQ ID NO: 364135 - DNA, 33 bp, Homo sapien
caagcacgtatgcccgcaagactgtgcccacac

SEQ ID NO: 364136 - DNA, 33 bp, Homo sapien
caagcacgtatgcccggaagactgtgcccacac

SEQ ID NO: 364137 - DNA, 33 bp, Homo sapien
agttttaattaaataaggtgctaatcactgtgg

SEQ ID NO: 364138 - DNA, 33 bp, Homo sapien
agttttaattaaataatgtgctaatcactgtgg

SEQ ID NO: 364139 - DNA, 33 bp, Homo sapien
ggcaacaagtctgatacacgaatgaaaaacaaa

SEQ ID NO: 364140 - DNA, 33 bp, Homo sapien
ggcaacaagtctgatatacgaatgaaaaacaaa

SEQ ID NO: 364141 - DNA, 33 bp, Homo sapien
gactgaattactggcaacaattcttccattctt

SEQ ID NO: 364142 - DNA, 33 bp, Homo sapien
gactgaattactggcagcaattcttccattctt

SEQ ID NO: 364143 - DNA, 33 bp, Homo sapien
taattcagtcgaccacagcataactacaagagg

SEQ ID NO: 364144 - DNA, 33 bp, Homo sapien
taattcagtcgaccacggcataactacaagagg

SEQ ID NO: 364145 - DNA, 33 bp, Homo sapien
cacacatacacatacaccttctctttcattctt

SEQ ID NO: 364146 - DNA, 33 bp, Homo sapien
cacacatacacatacatcttctctttcattctt

SEQ ID NO: 364147 - DNA, 33 bp, Homo sapien
catgtagccactacaaactagaagaatagactc

SEQ ID NO: 364148 - DNA, 33 bp, Homo sapien
catgtagccactacaagctagaagaatagactc

SEQ ID NO: 364149 - DNA, 33 bp, Homo sapien
gaacggaagacagcaacaacacagaggcagaga

SEQ ID NO: 364150 - DNA, 33 bp, Homo sapien
gaacggaagacagcaagaacacagaggcagaga

SEQ ID NO: 364151 - DNA, 33 bp, Homo sapien
ggacagctagtttccaacatgcacctttcctgg

SEQ ID NO: 364152 - DNA, 33 bp, Homo sapien
ggacagctagtttccagcatgcacctttcctgg

SEQ ID NO: 364153 - DNA, 33 bp, Homo sapien
agggatagaactgtgtaaagggtaacaccagag

SEQ ID NO: 364154 - DNA, 33 bp, Homo sapien
agggatagaactgtgtgaagggtaacaccagag

SEQ ID NO: 364155 - DNA, 33 bp, Homo sapien
aattaatgaattgagacagctgaatagtaagtg

SEQ ID NO: 364156 - DNA, 33 bp, Homo sapien
aattaatgaattgagagagctgaatagtaagtg

SEQ ID NO: 364157 - DNA, 33 bp, Homo sapien
tgaacagctacagttaccgctgtgtctgtgtgt

SEQ ID NO: 364158 - DNA, 33 bp, Homo sapien
tgaacagctacagttagcgctgtgtctgtgtgt

SEQ ID NO: 364159 - DNA, 33 bp, Homo sapien
tttattgcagtctgaaattattattgtttttca

SEQ ID NO: 364160 - DNA, 33 bp, Homo sapien
tttattgcagtctgaatttattattgtttttca

SEQ ID NO: 364161 - DNA, 33 bp, Homo sapien
ggaggccatgacagcaagattatttgaggccag

SEQ ID NO: 364162 - DNA, 33 bp, Homo sapien
ggaggccatgacagcaggattatttgaggccag

SEQ ID NO: 364163 - DNA, 33 bp, Homo sapien
tgacatccagtctttcgattcttgggaattgtc

SEQ ID NO: 364164 - DNA, 33 bp, Homo sapien
tgacatccagtctttctattcttgggaattgtc

SEQ ID NO: 364165 - DNA, 33 bp, Homo sapien
cagcatattcaatggacaatgaatgacttgttg

SEQ ID NO: 364166 - DNA, 33 bp, Homo sapien
cagcatattcaatggagaatgaatgacttgttg

SEQ ID NO: 364167 - DNA, 33 bp, Homo sapien
aatttacttcatagaacataggctcatttcagg

SEQ ID NO: 364168 - DNA, 33 bp, Homo sapien
aatttacttcatagaatataggctcatttcagg

SEQ ID NO: 364169 - DNA, 33 bp, Homo sapien
acacacaagggtaggacagatagaagagagaat

SEQ ID NO: 364170 - DNA, 33 bp, Homo sapien
acacacaagggtaggagagatagaagagagaat

SEQ ID NO: 364171 - DNA, 33 bp, Homo sapien
cttggggaagtggaaggatttacattgtagcaa

SEQ ID NO: 364172 - DNA, 33 bp, Homo sapien
cttggggaagtggaagtatttacattgtagcaa

SEQ ID NO: 364173 - DNA, 33 bp, Homo sapien
ctagaaatttcttatccctctgatatggtggct

SEQ ID NO: 364174 - DNA, 33 bp, Homo sapien
ctagaaatttcttatctctctgatatggtggct

SEQ ID NO: 364175 - DNA, 33 bp, Homo sapien
tgctagtcaggttagacagcttcagacacgtga

SEQ ID NO: 364176 - DNA, 33 bp, Homo sapien
tgctagtcaggttagatagcttcagacacgtga

SEQ ID NO: 364177 - DNA, 33 bp, Homo sapien
actaataataagaatacagtacgatccttgaag

SEQ ID NO: 364178 - DNA, 33 bp, Homo sapien
actaataataagaatagagtacgatccttgaag

SEQ ID NO: 364179 - DNA, 33 bp, Homo sapien
ttgaggtcgtagccaacggcattaagaatgctt

SEQ ID NO: 364180 - DNA, 33 bp, Homo sapien
ttgaggtcgtagccaatggcattaagaatgctt

SEQ ID NO: 364181 - DNA, 33 bp, Homo sapien
cagcacaagatgaaaccatcatgcatgaagcct

SEQ ID NO: 364182 - DNA, 33 bp, Homo sapien
cagcacaagatgaaactatcatgcatgaagcct

SEQ ID NO: 364183 - DNA, 33 bp, Homo sapien
tacttacatatttgaactatggacaccttttca

SEQ ID NO: 364184 - DNA, 33 bp, Homo sapien
tacttacatatttgaagtatggacaccttttca

SEQ ID NO: 364185 - DNA, 33 bp, Homo sapien
tttaatcctcccgacaaccctagaagttgatgc

SEQ ID NO: 364186 - DNA, 33 bp, Homo sapien
tttaatcctcccgacatccctagaagttgatgc

SEQ ID NO: 364187 - DNA, 33 bp, Homo sapien
ttcctggcacatgaaacaaaggtttatttgagt

SEQ ID NO: 364188 - DNA, 33 bp, Homo sapien
ttcctggcacatgaaagaaaggtttatttgagt

SEQ ID NO: 364189 - DNA, 33 bp, Homo sapien
gaactacagagaaatacacatattgactttgaa

SEQ ID NO: 364190 - DNA, 33 bp, Homo sapien
gaactacagagaaatagacatattgactttgaa

SEQ ID NO: 364191 - DNA, 33 bp, Homo sapien
actcgtgcctcacagaaaacaggttcaacaaca

SEQ ID NO: 364192 - DNA, 33 bp, Homo sapien
actcgtgcctcacagagaacaggttcaacaaca

SEQ ID NO: 364193 - DNA, 33 bp, Homo sapien
tccttgcttgtagatacgtcacctgaatctcca

SEQ ID NO: 364194 - DNA, 33 bp, Homo sapien
tccttgcttgtagatatgtcacctgaatctcca

SEQ ID NO: 364195 - DNA, 33 bp, Homo sapien
ctgaactgcacggatgcagggatgcagagaagt

SEQ ID NO: 364196 - DNA, 33 bp, Homo sapien
ctgaactgcacggatgtagggatgcagagaagt

SEQ ID NO: 364197 - DNA, 33 bp, Homo sapien
actaatttagtccccacaatagccttgtgaggc

SEQ ID NO: 364198 - DNA, 33 bp, Homo sapien
actaatttagtccccataatagccttgtgaggc

SEQ ID NO: 364199 - DNA, 33 bp, Homo sapien
gagtctgaaggccacaatgctggctttgaagat

SEQ ID NO: 364200 - DNA, 33 bp, Homo sapien
gagtctgaaggccacactgctggctttgaagat

SEQ ID NO: 364201 - DNA, 33 bp, Homo sapien
ggcatctttggcatgaaacaagattctgtctat

SEQ ID NO: 364202 - DNA, 33 bp, Homo sapien
ggcatctttggcatgagacaagattctgtctat

SEQ ID NO: 364203 - DNA, 33 bp, Homo sapien
tagatcaacagaagacagatggctgcaggtaat

SEQ ID NO: 364204 - DNA, 33 bp, Homo sapien
tagatcaacagaagaccgatggctgcaggtaat

SEQ ID NO: 364205 - DNA, 33 bp, Homo sapien
tgcccaactccctacacgattctggaagtatgg

SEQ ID NO: 364206 - DNA, 33 bp, Homo sapien
tgcccaactccctacatgattctggaagtatgg

SEQ ID NO: 364207 - DNA, 33 bp, Homo sapien
cacagcaaaaccatcacatcctacgtctgagaa

SEQ ID NO: 364208 - DNA, 33 bp, Homo sapien
cacagcaaaaccatcagatcctacgtctgagaa

SEQ ID NO: 364209 - DNA, 33 bp, Homo sapien
agactcaatagcttcccacagtggacttaaccg

SEQ ID NO: 364210 - DNA, 33 bp, Homo sapien
agactcaatagcttcctacagtggacttaaccg

SEQ ID NO: 364211 - DNA, 33 bp, Homo sapien
taagaaatcccataaaccatcgtgacctacaca

SEQ ID NO: 364212 - DNA, 33 bp, Homo sapien
taagaaatcccataaatcatcgtgacctacaca

SEQ ID NO: 364213 - DNA, 33 bp, Homo sapien
gtggctgtgatctagtgacgcagggtcctattt

SEQ ID NO: 364214 - DNA, 33 bp, Homo sapien
gtggctgtgatctagttacgcagggtcctattt

SEQ ID NO: 364215 - DNA, 33 bp, Homo sapien
tggtcaagaaacattacctcttgggccaggcgc

SEQ ID NO: 364216 - DNA, 33 bp, Homo sapien
tggtcaagaaacattagctcttgggccaggcgc

SEQ ID NO: 364217 - DNA, 33 bp, Homo sapien
gtcttatggatctggaatcaatctggattttta

SEQ ID NO: 364218 - DNA, 33 bp, Homo sapien
gtcttatggatctggattcaatctggattttta

SEQ ID NO: 364219 - DNA, 33 bp, Homo sapien
gaggtaggtacttgcacctcattattttgcagg

SEQ ID NO: 364220 - DNA, 33 bp, Homo sapien
gaggtaggtacttgcatctcattattttgcagg

SEQ ID NO: 364221 - DNA, 33 bp, Homo sapien
gtcttatttctgagttcaacgttctttcctcaa

SEQ ID NO: 364222 - DNA, 33 bp, Homo sapien
gtcttatttctgagttgaacgttctttcctcaa

SEQ ID NO: 364223 - DNA, 33 bp, Homo sapien
gtggtggtggttttaactggctgatttttttgt

SEQ ID NO: 364224 - DNA, 33 bp, Homo sapien
gtggtggtggttttaagtggctgatttttttgt

SEQ ID NO: 364225 - DNA, 33 bp, Homo sapien
gactttccgacctccaaaatcataactgagtaa

SEQ ID NO: 364226 - DNA, 33 bp, Homo sapien
gactttccgacctccagaatcataactgagtaa

SEQ ID NO: 364227 - DNA, 33 bp, Homo sapien
accattcaagtgatacacaaagcgtggcccctt

SEQ ID NO: 364228 - DNA, 33 bp, Homo sapien
accattcaagtgatacccaaagcgtggcccctt

SEQ ID NO: 364229 - DNA, 33 bp, Homo sapien
atcaaagacttggagacatcgtctgaaactacc

SEQ ID NO: 364230 - DNA, 33 bp, Homo sapien
atcaaagacttggagagatcgtctgaaactacc

SEQ ID NO: 364231 - DNA, 33 bp, Homo sapien
aaggtcacaccactaactaatggcatagctgga

SEQ ID NO: 364232 - DNA, 33 bp, Homo sapien
aaggtcacaccactaattaatggcatagctgga

SEQ ID NO: 364233 - DNA, 33 bp, Homo sapien
tatatcctggaatttagcttttgtagcttttat

SEQ ID NO: 364234 - DNA, 33 bp, Homo sapien
tatatcctggaatttatcttttgtagcttttat

SEQ ID NO: 364235 - DNA, 33 bp, Homo sapien
atgaaggtgctttttacaggcttgtttctatat

SEQ ID NO: 364236 - DNA, 33 bp, Homo sapien
atgaaggtgctttttataggcttgtttctatat

SEQ ID NO: 364237 - DNA, 33 bp, Homo sapien
gggaaggagctacctaagctgaggatgaagaca

SEQ ID NO: 364238 - DNA, 33 bp, Homo sapien
gggaaggagctacctacgctgaggatgaagaca

SEQ ID NO: 364239 - DNA, 33 bp, Homo sapien
gcagaatgctctatcacaacagatgctaaagga

SEQ ID NO: 364240 - DNA, 33 bp, Homo sapien
gcagaatgctctatcataacagatgctaaagga

SEQ ID NO: 364241 - DNA, 33 bp, Homo sapien
tgttacactttattacagccttgttgacagaga

SEQ ID NO: 364242 - DNA, 33 bp, Homo sapien
tgttacactttattaccgccttgttgacagaga

SEQ ID NO: 364243 - DNA, 33 bp, Homo sapien
ttgtaaatgggacctgcacagattgctaagtct

SEQ ID NO: 364244 - DNA, 33 bp, Homo sapien
ttgtaaatgggacctggacagattgctaagtct

SEQ ID NO: 364245 - DNA, 33 bp, Homo sapien
aactccagcagcaaaagactttggggaataatt

SEQ ID NO: 364246 - DNA, 33 bp, Homo sapien
aactccagcagcaaaatactttggggaataatt

SEQ ID NO: 364247 - DNA, 33 bp, Homo sapien
ttccagtgaatacttgaatttgtcaagagtaag

SEQ ID NO: 364248 - DNA, 33 bp, Homo sapien
ttccagtgaatacttgcatttgtcaagagtaag

SEQ ID NO: 364249 - DNA, 33 bp, Homo sapien
ttgagctcttcaatcagcatatccctgactgta

SEQ ID NO: 364250 - DNA, 33 bp, Homo sapien
ttgagctcttcaatcatcatatccctgactgta

SEQ ID NO: 364251 - DNA, 33 bp, Homo sapien
ttactgtgcctgtcaacctgtcatcaacgtatt

SEQ ID NO: 364252 - DNA, 33 bp, Homo sapien
ttactgtgcctgtcaagctgtcatcaacgtatt

SEQ ID NO: 364253 - DNA, 33 bp, Homo sapien
atcaaaagaaaaagtactaccatgtgaacacac

SEQ ID NO: 364254 - DNA, 33 bp, Homo sapien
atcaaaagaaaaagtattaccatgtgaacacac

SEQ ID NO: 364255 - DNA, 33 bp, Homo sapien
gaaaaacagctttaataaaatggaggtggcagg

SEQ ID NO: 364256 - DNA, 33 bp, Homo sapien
gaaaaacagctttaatgaaatggaggtggcagg

SEQ ID NO: 364257 - DNA, 33 bp, Homo sapien
ccagcctacatcacagcacacatacttctgagc

SEQ ID NO: 364258 - DNA, 33 bp, Homo sapien
ccagcctacatcacaggacacatacttctgagc

SEQ ID NO: 364259 - DNA, 33 bp, Homo sapien
gatctgtgaaatatgacggtatcaatgtcacct

SEQ ID NO: 364260 - DNA, 33 bp, Homo sapien
gatctgtgaaatatgatggtatcaatgtcacct

SEQ ID NO: 364261 - DNA, 33 bp, Homo sapien
atgctcagtagtgctgcaggatgtaggcttttt

SEQ ID NO: 364262 - DNA, 33 bp, Homo sapien
atgctcagtagtgctgtaggatgtaggcttttt

SEQ ID NO: 364263 - DNA, 33 bp, Homo sapien
aaatgaaatttaaaaactggagatatgcaggtt

SEQ ID NO: 364264 - DNA, 33 bp, Homo sapien
aaatgaaatttaaaaattggagatatgcaggtt

SEQ ID NO: 364265 - DNA, 33 bp, Homo sapien
caaagccgacattcagaaagtgtattttaagcc

SEQ ID NO: 364266 - DNA, 33 bp, Homo sapien
caaagccgacattcaggaagtgtattttaagcc

SEQ ID NO: 364267 - DNA, 33 bp, Homo sapien
tcaaggaacttgaggacgaaatatgtaacagta

SEQ ID NO: 364268 - DNA, 33 bp, Homo sapien
tcaaggaacttgaggatgaaatatgtaacagta

SEQ ID NO: 364269 - DNA, 33 bp, Homo sapien
cgaaaggcttcttctaaaactcaactctatagg

SEQ ID NO: 364270 - DNA, 33 bp, Homo sapien
cgaaaggcttcttctacaactcaactctatagg

SEQ ID NO: 364271 - DNA, 33 bp, Homo sapien
acacacacttctaaaaactaggaaaccaggaac

SEQ ID NO: 364272 - DNA, 33 bp, Homo sapien
acacacacttctaaaacctaggaaaccaggaac

SEQ ID NO: 364273 - DNA, 33 bp, Homo sapien
tcaggaggatatagaaacctaagtggctgtctt

SEQ ID NO: 364274 - DNA, 33 bp, Homo sapien
tcaggaggatatagaaccctaagtggctgtctt

SEQ ID NO: 364275 - DNA, 33 bp, Homo sapien
tggcagggaaggtttccagacagaagaggaata

SEQ ID NO: 364276 - DNA, 33 bp, Homo sapien
tggcagggaaggtttcgagacagaagaggaata

SEQ ID NO: 364277 - DNA, 33 bp, Homo sapien
tgcaggcttctaggcaatcaaactgtgccaagt

SEQ ID NO: 364278 - DNA, 33 bp, Homo sapien
tgcaggcttctaggcagtcaaactgtgccaagt

SEQ ID NO: 364279 - DNA, 33 bp, Homo sapien
gtagccagggttgtaactaagactgtagactgg

SEQ ID NO: 364280 - DNA, 33 bp, Homo sapien
gtagccagggttgtaagtaagactgtagactgg

SEQ ID NO: 364281 - DNA, 33 bp, Homo sapien
aaatgcttcaaataaccaggaagtccatcccaa

SEQ ID NO: 364282 - DNA, 33 bp, Homo sapien
aaatgcttcaaataacgaggaagtccatcccaa

SEQ ID NO: 364283 - DNA, 33 bp, Homo sapien
gcagacagcatcacaactgtcagaggtttatga

SEQ ID NO: 364284 - DNA, 33 bp, Homo sapien
gcagacagcatcacaattgtcagaggtttatga

SEQ ID NO: 364285 - DNA, 33 bp, Homo sapien
tccagtccactgtcaacttatgaaaagaagaaa

SEQ ID NO: 364286 - DNA, 33 bp, Homo sapien
tccagtccactgtcaagttatgaaaagaagaaa

SEQ ID NO: 364287 - DNA, 33 bp, Homo sapien
gaatgagcatctcagcaaagattttcccatcat

SEQ ID NO: 364288 - DNA, 33 bp, Homo sapien
gaatgagcatctcagcgaagattttcccatcat

SEQ ID NO: 364289 - DNA, 33 bp, Homo sapien
gagtgagtgaattcctaaaaccgtaaagatagg

SEQ ID NO: 364290 - DNA, 33 bp, Homo sapien
gagtgagtgaattcctgaaaccgtaaagatagg

SEQ ID NO: 364291 - DNA, 33 bp, Homo sapien
ctcagaactttgtaagcagctgacaattgattt

SEQ ID NO: 364292 - DNA, 33 bp, Homo sapien
ctcagaactttgtaaggagctgacaattgattt

SEQ ID NO: 364293 - DNA, 33 bp, Homo sapien
attttatgacatattacaaacattggatacatt

SEQ ID NO: 364294 - DNA, 33 bp, Homo sapien
attttatgacatattagaaacattggatacatt

SEQ ID NO: 364295 - DNA, 33 bp, Homo sapien
tactttcctagcagcacagttaaaattgagcaa

SEQ ID NO: 364296 - DNA, 33 bp, Homo sapien
tactttcctagcagcatagttaaaattgagcaa

SEQ ID NO: 364297 - DNA, 33 bp, Homo sapien
tcagagcttagaatggaaaagctgcctgaactc

SEQ ID NO: 364298 - DNA, 33 bp, Homo sapien
tcagagcttagaatgggaaagctgcctgaactc

SEQ ID NO: 364299 - DNA, 33 bp, Homo sapien
ttcttcaccatatttaccattaccctactcaat

SEQ ID NO: 364300 - DNA, 33 bp, Homo sapien
ttcttcaccatatttagcattaccctactcaat

SEQ ID NO: 364301 - DNA, 33 bp, Homo sapien
gaggtagcttaagggacggatagatggataacc

SEQ ID NO: 364302 - DNA, 33 bp, Homo sapien
gaggtagcttaagggatggatagatggataacc

SEQ ID NO: 364303 - DNA, 33 bp, Homo sapien
tagaggctagaacttcaatgtatgacttttgtc

SEQ ID NO: 364304 - DNA, 33 bp, Homo sapien
tagaggctagaacttccatgtatgacttttgtc

SEQ ID NO: 364305 - DNA, 33 bp, Homo sapien
ctagggctaccgtaacaaagtaccgtggaccag

SEQ ID NO: 364306 - DNA, 33 bp, Homo sapien
ctagggctaccgtaaccaagtaccgtggaccag

SEQ ID NO: 364307 - DNA, 33 bp, Homo sapien
catcaggatgaactatcaagttcggggggcttt

SEQ ID NO: 364308 - DNA, 33 bp, Homo sapien
catcaggatgaactattaagttcggggggcttt

SEQ ID NO: 364309 - DNA, 33 bp, Homo sapien
aatcagatggacgcagaaatcctctattgttcg

SEQ ID NO: 364310 - DNA, 33 bp, Homo sapien
aatcagatggacgcagcaatcctctattgttcg

SEQ ID NO: 364311 - DNA, 33 bp, Homo sapien
ccgtgtggtccttttaaggatgatctgatggag

SEQ ID NO: 364312 - DNA, 33 bp, Homo sapien
ccgtgtggtccttttagggatgatctgatggag

SEQ ID NO: 364313 - DNA, 33 bp, Homo sapien
catgggtttttctgaacctgcttctgcagcaaa

SEQ ID NO: 364314 - DNA, 33 bp, Homo sapien
catgggtttttctgaatctgcttctgcagcaaa

SEQ ID NO: 364315 - DNA, 33 bp, Homo sapien
tgcaacatggcggctacaggtaatcacagcgta

SEQ ID NO: 364316 - DNA, 33 bp, Homo sapien
tgcaacatggcggctataggtaatcacagcgta

SEQ ID NO: 364317 - DNA, 33 bp, Homo sapien
cttagacaggaggaatgagttcatcagatctac

SEQ ID NO: 364318 - DNA, 33 bp, Homo sapien
cttagacaggaggaattagttcatcagatctac

SEQ ID NO: 364319 - DNA, 33 bp, Homo sapien
tacaacagaagaagagccacgagagagtcaaac

SEQ ID NO: 364320 - DNA, 33 bp, Homo sapien
tacaacagaagaagaggcacgagagagtcaaac

SEQ ID NO: 364321 - DNA, 33 bp, Homo sapien
atctgggtggacccaaagtaatcacatgaaccc

SEQ ID NO: 364322 - DNA, 33 bp, Homo sapien
atctgggtggacccaacgtaatcacatgaaccc

SEQ ID NO: 364323 - DNA, 33 bp, Homo sapien
gatgcttcttgcttacccaggccgtgaaaggaa

SEQ ID NO: 364324 - DNA, 33 bp, Homo sapien
gatgcttcttgcttactcaggccgtgaaaggaa

SEQ ID NO: 364325 - DNA, 33 bp, Homo sapien
tgagatgaagaatttacaagttggggatgagga

SEQ ID NO: 364326 - DNA, 33 bp, Homo sapien
tgagatgaagaatttagaagttggggatgagga

SEQ ID NO: 364327 - DNA, 33 bp, Homo sapien
gttcattgactcagtacaaattgatcatctcac

SEQ ID NO: 364328 - DNA, 33 bp, Homo sapien
gttcattgactcagtataaattgatcatctcac

SEQ ID NO: 364329 - DNA, 33 bp, Homo sapien
ctggttggatattttaactactgcaacattgaa

SEQ ID NO: 364330 - DNA, 33 bp, Homo sapien
ctggttggatattttagctactgcaacattgaa

SEQ ID NO: 364331 - DNA, 33 bp, Homo sapien
tataattaatgtatcaaaatggcattcaatttc

SEQ ID NO: 364332 - DNA, 33 bp, Homo sapien
tataattaatgtatcacaatggcattcaatttc

SEQ ID NO: 364333 - DNA, 33 bp, Homo sapien
aaaaaatggttttgaactgaatatttgaatata

SEQ ID NO: 364334 - DNA, 33 bp, Homo sapien
aaaaaatggttttgaattgaatatttgaatata

SEQ ID NO: 364335 - DNA, 33 bp, Homo sapien
agtgtgggaggtgttacaatccctgtactctgg

SEQ ID NO: 364336 - DNA, 33 bp, Homo sapien
agtgtgggaggtgttataatccctgtactctgg

SEQ ID NO: 364337 - DNA, 33 bp, Homo sapien
aatatatatcctagtggagtttagccaataaag

SEQ ID NO: 364338 - DNA, 33 bp, Homo sapien
aatatatatcctagtgtagtttagccaataaag

SEQ ID NO: 364339 - DNA, 33 bp, Homo sapien
aaggtaagtgaaacaccactcaaaatgtaaaat

SEQ ID NO: 364340 - DNA, 33 bp, Homo sapien
aaggtaagtgaaacactactcaaaatgtaaaat

SEQ ID NO: 364341 - DNA, 33 bp, Homo sapien
agtgaaggagacagataaaacacaacacaataa

SEQ ID NO: 364342 - DNA, 33 bp, Homo sapien
agtgaaggagacagatgaaacacaacacaataa

SEQ ID NO: 364343 - DNA, 33 bp, Homo sapien
gtggagactcaaagggaatatgtaggctgagat

SEQ ID NO: 364344 - DNA, 33 bp, Homo sapien
gtggagactcaaaggggatatgtaggctgagat

SEQ ID NO: 364345 - DNA, 33 bp, Homo sapien
agtccaaagatgacagacagtcagaaccaggtg

SEQ ID NO: 364346 - DNA, 33 bp, Homo sapien
agtccaaagatgacaggcagtcagaaccaggtg

SEQ ID NO: 364347 - DNA, 33 bp, Homo sapien
gactcaatttctcggacctatttttctccgtgt

SEQ ID NO: 364348 - DNA, 33 bp, Homo sapien
gactcaatttctcggatctatttttctccgtgt

SEQ ID NO: 364349 - DNA, 33 bp, Homo sapien
gctgttaccagaaagcgaaatgaatcctggttt

SEQ ID NO: 364350 - DNA, 33 bp, Homo sapien
gctgttaccagaaagctaaatgaatcctggttt

SEQ ID NO: 364351 - DNA, 33 bp, Homo sapien
gtgtgtgttacatttcaataaagtaaagtatgc

SEQ ID NO: 364352 - DNA, 33 bp, Homo sapien
gtgtgtgttacatttccataaagtaaagtatgc

SEQ ID NO: 364353 - DNA, 33 bp, Homo sapien
ccaagaaagatcctacaaggagaagctggtaca

SEQ ID NO: 364354 - DNA, 33 bp, Homo sapien
ccaagaaagatcctacgaggagaagctggtaca

SEQ ID NO: 364355 - DNA, 33 bp, Homo sapien
ctgtgtcaagggtgcaaccttaacctcagcaaa

SEQ ID NO: 364356 - DNA, 33 bp, Homo sapien
ctgtgtcaagggtgcatccttaacctcagcaaa

SEQ ID NO: 364357 - DNA, 33 bp, Homo sapien
gatacactttggtacacccggtctctttctgaa

SEQ ID NO: 364358 - DNA, 33 bp, Homo sapien
gatacactttggtacagccggtctctttctgaa

SEQ ID NO: 364359 - DNA, 33 bp, Homo sapien
cttttccaaaagcaccactgttcaatatgtgat

SEQ ID NO: 364360 - DNA, 33 bp, Homo sapien
cttttccaaaagcaccgctgttcaatatgtgat

SEQ ID NO: 364361 - DNA, 33 bp, Homo sapien
cttaactggaatccgacgagtgtgagtaagagg

SEQ ID NO: 364362 - DNA, 33 bp, Homo sapien
cttaactggaatccgatgagtgtgagtaagagg

SEQ ID NO: 364363 - DNA, 33 bp, Homo sapien
aaactcaaaacagttaaagttctggaaatcaaa

SEQ ID NO: 364364 - DNA, 33 bp, Homo sapien
aaactcaaaacagttacagttctggaaatcaaa

SEQ ID NO: 364365 - DNA, 33 bp, Homo sapien
cattgtggaaatcctacgatgtgtgagctccat

SEQ ID NO: 364366 - DNA, 33 bp, Homo sapien
cattgtggaaatcctatgatgtgtgagctccat

SEQ ID NO: 364367 - DNA, 33 bp, Homo sapien
cctgccaccaagaagcacaaaatttttaaggag

SEQ ID NO: 364368 - DNA, 33 bp, Homo sapien
cctgccaccaagaagctcaaaatttttaaggag

SEQ ID NO: 364369 - DNA, 33 bp, Homo sapien
aaatttccactagtgccatcagaggatcaaaga

SEQ ID NO: 364370 - DNA, 33 bp, Homo sapien
aaatttccactagtgctatcagaggatcaaaga

SEQ ID NO: 364371 - DNA, 33 bp, Homo sapien
cccactttacagttgactacattgaggggttga

SEQ ID NO: 364372 - DNA, 33 bp, Homo sapien
cccactttacagttgagtacattgaggggttga

SEQ ID NO: 364373 - DNA, 33 bp, Homo sapien
atattctatgggaacccgactttgcagacggag

SEQ ID NO: 364374 - DNA, 33 bp, Homo sapien
atattctatgggaacctgactttgcagacggag

SEQ ID NO: 364375 - DNA, 33 bp, Homo sapien
tctggtttaaaacacacaggataagctgataaa

SEQ ID NO: 364376 - DNA, 33 bp, Homo sapien
tctggtttaaaacacagaggataagctgataaa

SEQ ID NO: 364377 - DNA, 33 bp, Homo sapien
ccaggatactcagacactgctttatctggttta

SEQ ID NO: 364378 - DNA, 33 bp, Homo sapien
ccaggatactcagacattgctttatctggttta

SEQ ID NO: 364379 - DNA, 33 bp, Homo sapien
tgagccatttcaatccaagcaaatacttagtaa

SEQ ID NO: 364380 - DNA, 33 bp, Homo sapien
tgagccatttcaatcctagcaaatacttagtaa

SEQ ID NO: 364381 - DNA, 33 bp, Homo sapien
caataattcagggtgacaagtcagcttatcaat

SEQ ID NO: 364382 - DNA, 33 bp, Homo sapien
caataattcagggtgagaagtcagcttatcaat

SEQ ID NO: 364383 - DNA, 33 bp, Homo sapien
cctataatagctccacactgtttatggaaaata

SEQ ID NO: 364384 - DNA, 33 bp, Homo sapien
cctataatagctccacgctgtttatggaaaata

SEQ ID NO: 364385 - DNA, 33 bp, Homo sapien
ggttttcatgaagccaaatcgtaaaggtctgag

SEQ ID NO: 364386 - DNA, 33 bp, Homo sapien
ggttttcatgaagccagatcgtaaaggtctgag

SEQ ID NO: 364387 - DNA, 33 bp, Homo sapien
aagtcctacctacataaagcttatattctaatg

SEQ ID NO: 364388 - DNA, 33 bp, Homo sapien
aagtcctacctacatagagcttatattctaatg

SEQ ID NO: 364389 - DNA, 33 bp, Homo sapien
tcagttgacaggtacactcaaagccaagccttc

SEQ ID NO: 364390 - DNA, 33 bp, Homo sapien
tcagttgacaggtacattcaaagccaagccttc

SEQ ID NO: 364391 - DNA, 33 bp, Homo sapien
ggatatgactgcaaacaattaaggtttaattta

SEQ ID NO: 364392 - DNA, 33 bp, Homo sapien
ggatatgactgcaaacgattaaggtttaattta

SEQ ID NO: 364393 - DNA, 33 bp, Homo sapien
gagaatgctgaataacaattttatgctttcgga

SEQ ID NO: 364394 - DNA, 33 bp, Homo sapien
gagaatgctgaataacgattttatgctttcgga

SEQ ID NO: 364395 - DNA, 33 bp, Homo sapien
tctctgatatccccagcaagctagcctggttca

SEQ ID NO: 364396 - DNA, 33 bp, Homo sapien
tctctgatatccccagtaagctagcctggttca

SEQ ID NO: 364397 - DNA, 33 bp, Homo sapien
tgttctaatttacagaaacaagagtccagaaac

SEQ ID NO: 364398 - DNA, 33 bp, Homo sapien
tgttctaatttacagagacaagagtccagaaac

SEQ ID NO: 364399 - DNA, 33 bp, Homo sapien
acagggaaataaacacaaactcagaaattcctt

SEQ ID NO: 364400 - DNA, 33 bp, Homo sapien
acagggaaataaacacgaactcagaaattcctt

SEQ ID NO: 364401 - DNA, 33 bp, Homo sapien
aatagaggctaactcactgaaatattgagtatt

SEQ ID NO: 364402 - DNA, 33 bp, Homo sapien
aatagaggctaactcattgaaatattgagtatt

SEQ ID NO: 364403 - DNA, 33 bp, Homo sapien
aacatgactcattaaagaagaccaagggtttca

SEQ ID NO: 364404 - DNA, 33 bp, Homo sapien
aacatgactcattaaataagaccaagggtttca

SEQ ID NO: 364405 - DNA, 33 bp, Homo sapien
agtagctcttaccttccaggatcttatagtacc

SEQ ID NO: 364406 - DNA, 33 bp, Homo sapien
agtagctcttaccttctaggatcttatagtacc

SEQ ID NO: 364407 - DNA, 33 bp, Homo sapien
atatctctctagtttgcaaaaatgattgtttaa

SEQ ID NO: 364408 - DNA, 33 bp, Homo sapien
atatctctctagtttgtaaaaatgattgtttaa

SEQ ID NO: 364409 - DNA, 33 bp, Homo sapien
catggatagacggatacactccatttctcctct

SEQ ID NO: 364410 - DNA, 33 bp, Homo sapien
catggatagacggatagactccatttctcctct

SEQ ID NO: 364411 - DNA, 33 bp, Homo sapien
cgtctaccaagtactacgcccaccacctgggtg

SEQ ID NO: 364412 - DNA, 33 bp, Homo sapien
cgtctaccaagtactatgcccaccacctgggtg

SEQ ID NO: 364413 - DNA, 33 bp, Homo sapien
aattgttgatctaacacaccccaggcagtattt

SEQ ID NO: 364414 - DNA, 33 bp, Homo sapien
aattgttgatctaacagaccccaggcagtattt

SEQ ID NO: 364415 - DNA, 33 bp, Homo sapien
gcgtgtgaaaaagatccgaagttgagatgtaaa

SEQ ID NO: 364416 - DNA, 33 bp, Homo sapien
gcgtgtgaaaaagatctgaagttgagatgtaaa

SEQ ID NO: 364417 - DNA, 33 bp, Homo sapien
gaagaaaatatcctgaaagtgagccacgtaatg

SEQ ID NO: 364418 - DNA, 33 bp, Homo sapien
gaagaaaatatcctgacagtgagccacgtaatg

SEQ ID NO: 364419 - DNA, 33 bp, Homo sapien
agttgaaggatgacgaacaagtaaagacattag

SEQ ID NO: 364420 - DNA, 33 bp, Homo sapien
agttgaaggatgacgaccaagtaaagacattag

SEQ ID NO: 364421 - DNA, 33 bp, Homo sapien
tttttctctttatctccattctcgtcatttaaa

SEQ ID NO: 364422 - DNA, 33 bp, Homo sapien
tttttctctttatctctattctcgtcatttaaa

SEQ ID NO: 364423 - DNA, 33 bp, Homo sapien
agctctagtgctgtaaaagagacaagtgaaaga

SEQ ID NO: 364424 - DNA, 33 bp, Homo sapien
agctctagtgctgtaagagagacaagtgaaaga

SEQ ID NO: 364425 - DNA, 33 bp, Homo sapien
gccttgagttgttagaaagtcttcctcttgtta

SEQ ID NO: 364426 - DNA, 33 bp, Homo sapien
gccttgagttgttagatagtcttcctcttgtta

SEQ ID NO: 364427 - DNA, 33 bp, Homo sapien
gcaaacacagctcctcagaagtctctaccaatg

SEQ ID NO: 364428 - DNA, 33 bp, Homo sapien
gcaaacacagctcctcggaagtctctaccaatg

SEQ ID NO: 364429 - DNA, 33 bp, Homo sapien
attcttagtaggtacacagccttagcaaaggac

SEQ ID NO: 364430 - DNA, 33 bp, Homo sapien
attcttagtaggtacagagccttagcaaaggac

SEQ ID NO: 364431 - DNA, 33 bp, Homo sapien
cagaaaccctcactagaaaaactcacttatttc

SEQ ID NO: 364432 - DNA, 33 bp, Homo sapien
cagaaaccctcactaggaaaactcacttatttc

SEQ ID NO: 364433 - DNA, 33 bp, Homo sapien
agtagggcacccataaataattcctaagttact

SEQ ID NO: 364434 - DNA, 33 bp, Homo sapien
agtagggcacccataagtaattcctaagttact

SEQ ID NO: 364435 - DNA, 33 bp, Homo sapien
attgatgaaatttcctcaactgtgtgccatttt

SEQ ID NO: 364436 - DNA, 33 bp, Homo sapien
attgatgaaatttccttaactgtgtgccatttt

SEQ ID NO: 364437 - DNA, 33 bp, Homo sapien
taaaacttgaaaaaaaagtcctcagcttattct

SEQ ID NO: 364438 - DNA, 33 bp, Homo sapien
taaaacttgaaaaaaaggtcctcagcttattct

SEQ ID NO: 364439 - DNA, 33 bp, Homo sapien
taaaatttatatactaggtgtgaaaagccccct

SEQ ID NO: 364440 - DNA, 33 bp, Homo sapien
taaaatttatatactatgtgtgaaaagccccct

SEQ ID NO: 364441 - DNA, 33 bp, Homo sapien
gcactttccatgtgagaaactaaaggatttgac

SEQ ID NO: 364442 - DNA, 33 bp, Homo sapien
gcactttccatgtgagtaactaaaggatttgac

SEQ ID NO: 364443 - DNA, 33 bp, Homo sapien
gctcctccccctttaacgtggattcagaaatgt

SEQ ID NO: 364444 - DNA, 33 bp, Homo sapien
gctcctccccctttaatgtggattcagaaatgt

SEQ ID NO: 364445 - DNA, 33 bp, Homo sapien
gcccctttactggaaaaggtttccgatccttgt

SEQ ID NO: 364446 - DNA, 33 bp, Homo sapien
gcccctttactggaaacggtttccgatccttgt

SEQ ID NO: 364447 - DNA, 33 bp, Homo sapien
tttagtattgtagaacagtgcaaagaacacgac

SEQ ID NO: 364448 - DNA, 33 bp, Homo sapien
tttagtattgtagaactgtgcaaagaacacgac

SEQ ID NO: 364449 - DNA, 33 bp, Homo sapien
gtgtggtatctgtaaccgaacttctcttagcct

SEQ ID NO: 364450 - DNA, 33 bp, Homo sapien
gtgtggtatctgtaactgaacttctcttagcct

SEQ ID NO: 364451 - DNA, 33 bp, Homo sapien
tgttagaaaggattgcaaaagatttacttgggg

SEQ ID NO: 364452 - DNA, 33 bp, Homo sapien
tgttagaaaggattgcgaaagatttacttgggg

SEQ ID NO: 364453 - DNA, 33 bp, Homo sapien
gggcagagacctgatacgaatggtacctaaaac

SEQ ID NO: 364454 - DNA, 33 bp, Homo sapien
gggcagagacctgatatgaatggtacctaaaac

SEQ ID NO: 364455 - DNA, 33 bp, Homo sapien
acagcactttaagaatcaactcacagagagaac

SEQ ID NO: 364456 - DNA, 33 bp, Homo sapien
acagcactttaagaattaactcacagagagaac

SEQ ID NO: 364457 - DNA, 33 bp, Homo sapien
ctttaagttaaaatgaagaaactgttgtacatc

SEQ ID NO: 364458 - DNA, 33 bp, Homo sapien
ctttaagttaaaatgaggaaactgttgtacatc

SEQ ID NO: 364459 - DNA, 33 bp, Homo sapien
aaccctctatacctcaatactacacctaccctc

SEQ ID NO: 364460 - DNA, 33 bp, Homo sapien
aaccctctatacctcagtactacacctaccctc

SEQ ID NO: 364461 - DNA, 33 bp, Homo sapien
aaacttgctctacaaacctagaaccatgcaagg

SEQ ID NO: 364462 - DNA, 33 bp, Homo sapien
aaacttgctctacaaagctagaaccatgcaagg

SEQ ID NO: 364463 - DNA, 33 bp, Homo sapien
catattcgccatttcagtcatttttggtaacag

SEQ ID NO: 364464 - DNA, 33 bp, Homo sapien
catattcgccatttcattcatttttggtaacag

SEQ ID NO: 364465 - DNA, 33 bp, Homo sapien
ttacagttgtccaccaaagagaattcttagggc

SEQ ID NO: 364466 - DNA, 33 bp, Homo sapien
ttacagttgtccaccacagagaattcttagggc

SEQ ID NO: 364467 - DNA, 33 bp, Homo sapien
gcaggctgccgctagactctagaaaaggcaaga

SEQ ID NO: 364468 - DNA, 33 bp, Homo sapien
gcaggctgccgctagagtctagaaaaggcaaga

SEQ ID NO: 364469 - DNA, 33 bp, Homo sapien
ccagcaaccatggtagacagctcagaatattag

SEQ ID NO: 364470 - DNA, 33 bp, Homo sapien
ccagcaaccatggtagtcagctcagaatattag

SEQ ID NO: 364471 - DNA, 33 bp, Homo sapien
ggagaaaccagagaacactagaatgaaggacag

SEQ ID NO: 364472 - DNA, 33 bp, Homo sapien
ggagaaaccagagaacgctagaatgaaggacag

SEQ ID NO: 364473 - DNA, 33 bp, Homo sapien
attcattttcttcatccctaaagacaacggcta

SEQ ID NO: 364474 - DNA, 33 bp, Homo sapien
attcattttcttcatcgctaaagacaacggcta

SEQ ID NO: 364475 - DNA, 33 bp, Homo sapien
gaatgaagggccggaacgtgaccagaggaaccc

SEQ ID NO: 364476 - DNA, 33 bp, Homo sapien
gaatgaagggccggaatgtgaccagaggaaccc

SEQ ID NO: 364477 - DNA, 33 bp, Homo sapien
aataatgacatggaaactatgacagcaaaacag

SEQ ID NO: 364478 - DNA, 33 bp, Homo sapien
aataatgacatggaaagtatgacagcaaaacag

SEQ ID NO: 364479 - DNA, 33 bp, Homo sapien
cctttttccaattgcactacactcaccaagatt

SEQ ID NO: 364480 - DNA, 33 bp, Homo sapien
cctttttccaattgcattacactcaccaagatt

SEQ ID NO: 364481 - DNA, 33 bp, Homo sapien
agtcaagtgttccataaaattattctcaaaata

SEQ ID NO: 364482 - DNA, 33 bp, Homo sapien
agtcaagtgttccatagaattattctcaaaata

SEQ ID NO: 364483 - DNA, 33 bp, Homo sapien
tccctaaccacctcaaaacactgtcaggatcag

SEQ ID NO: 364484 - DNA, 33 bp, Homo sapien
tccctaaccacctcaatacactgtcaggatcag

SEQ ID NO: 364485 - DNA, 33 bp, Homo sapien
atgcagattacacggaacaatatctggggcaga

SEQ ID NO: 364486 - DNA, 33 bp, Homo sapien
atgcagattacacggagcaatatctggggcaga

SEQ ID NO: 364487 - DNA, 33 bp, Homo sapien
accattgcctgacattaaagattcacaaaatgt

SEQ ID NO: 364488 - DNA, 33 bp, Homo sapien
accattgcctgacattcaagattcacaaaatgt

SEQ ID NO: 364489 - DNA, 33 bp, Homo sapien
cacggtaagctcccatcatactccaagggaatg

SEQ ID NO: 364490 - DNA, 33 bp, Homo sapien
cacggtaagctcccatgatactccaagggaatg

SEQ ID NO: 364491 - DNA, 33 bp, Homo sapien
actgtctcaatctcacccctgcaaaatgaagta

SEQ ID NO: 364492 - DNA, 33 bp, Homo sapien
actgtctcaatctcactcctgcaaaatgaagta

SEQ ID NO: 364493 - DNA, 33 bp, Homo sapien
cccaaactttcaactacgctcatcaattactct

SEQ ID NO: 364494 - DNA, 33 bp, Homo sapien
cccaaactttcaactatgctcatcaattactct

SEQ ID NO: 364495 - DNA, 33 bp, Homo sapien
aatacactcactctcaaaaacaatgggaaatcc

SEQ ID NO: 364496 - DNA, 33 bp, Homo sapien
aatacactcactctcagaaacaatgggaaatcc

SEQ ID NO: 364497 - DNA, 33 bp, Homo sapien
agtgcccagacacatacccaattgttgcttcgc

SEQ ID NO: 364498 - DNA, 33 bp, Homo sapien
agtgcccagacacatatccaattgttgcttcgc

SEQ ID NO: 364499 - DNA, 33 bp, Homo sapien
ttgcacgacaaccttaaaaggaacaaagaggta

SEQ ID NO: 364500 - DNA, 33 bp, Homo sapien
ttgcacgacaaccttataaggaacaaagaggta

SEQ ID NO: 364501 - DNA, 33 bp, Homo sapien
tgcagtgttccatttacaggcattggttggtgg

SEQ ID NO: 364502 - DNA, 33 bp, Homo sapien
tgcagtgttccatttataggcattggttggtgg

SEQ ID NO: 364503 - DNA, 33 bp, Homo sapien
tagatgtggtgagctaactttattcacctcagt

SEQ ID NO: 364504 - DNA, 33 bp, Homo sapien
tagatgtggtgagctacctttattcacctcagt

SEQ ID NO: 364505 - DNA, 33 bp, Homo sapien
agggtggcctcctcacagcaaagaattgtctgg

SEQ ID NO: 364506 - DNA, 33 bp, Homo sapien
agggtggcctcctcaccgcaaagaattgtctgg

SEQ ID NO: 364507 - DNA, 33 bp, Homo sapien
gctcaattcaggacgacgtgaaagaacattaat

SEQ ID NO: 364508 - DNA, 33 bp, Homo sapien
gctcaattcaggacgatgtgaaagaacattaat

SEQ ID NO: 364509 - DNA, 33 bp, Homo sapien
gtgaacgatagtagtccattcctgattcattct

SEQ ID NO: 364510 - DNA, 33 bp, Homo sapien
gtgaacgatagtagtcgattcctgattcattct

SEQ ID NO: 364511 - DNA, 33 bp, Homo sapien
tcattccattccgaaacaaaatctgtacctatt

SEQ ID NO: 364512 - DNA, 33 bp, Homo sapien
tcattccattccgaaagaaaatctgtacctatt

SEQ ID NO: 364513 - DNA, 33 bp, Homo sapien
gggtgacaacaatcaccggtgtggagagggaaa

SEQ ID NO: 364514 - DNA, 33 bp, Homo sapien
gggtgacaacaatcactggtgtggagagggaaa

SEQ ID NO: 364515 - DNA, 33 bp, Homo sapien
atgtagcctattttagcagtccaggaaagcagg

SEQ ID NO: 364516 - DNA, 33 bp, Homo sapien
atgtagcctattttagtagtccaggaaagcagg

SEQ ID NO: 364517 - DNA, 33 bp, Homo sapien
ttctatttaaaagaatgatcccagctcttctat

SEQ ID NO: 364518 - DNA, 33 bp, Homo sapien
ttctatttaaaagaattatcccagctcttctat

SEQ ID NO: 364519 - DNA, 33 bp, Homo sapien
ggcctgctgtctaccacgtattgtgttcaacag

SEQ ID NO: 364520 - DNA, 33 bp, Homo sapien
ggcctgctgtctaccatgtattgtgttcaacag

SEQ ID NO: 364521 - DNA, 33 bp, Homo sapien
ggtagacagcaggccgccgatcagcacttgtta

SEQ ID NO: 364522 - DNA, 33 bp, Homo sapien
ggtagacagcaggccgtcgatcagcacttgtta

SEQ ID NO: 364523 - DNA, 33 bp, Homo sapien
aacaatcggatgtccacaatgcaaactatacat

SEQ ID NO: 364524 - DNA, 33 bp, Homo sapien
aacaatcggatgtccagaatgcaaactatacat

SEQ ID NO: 364525 - DNA, 33 bp, Homo sapien
attagctttgcccttaataagactccattaggc

SEQ ID NO: 364526 - DNA, 33 bp, Homo sapien
attagctttgcccttagtaagactccattaggc

SEQ ID NO: 364527 - DNA, 33 bp, Homo sapien
aataaaccttgttgtcaattagctttgccctta

SEQ ID NO: 364528 - DNA, 33 bp, Homo sapien
aataaaccttgttgtctattagctttgccctta

SEQ ID NO: 364529 - DNA, 33 bp, Homo sapien
gtcaagccagtcaagacggaaatttgtccattg

SEQ ID NO: 364530 - DNA, 33 bp, Homo sapien
gtcaagccagtcaagatggaaatttgtccattg

SEQ ID NO: 364531 - DNA, 33 bp, Homo sapien
taatttccatgcaacccctctcttctcatgata

SEQ ID NO: 364532 - DNA, 33 bp, Homo sapien
taatttccatgcaacctctctcttctcatgata

SEQ ID NO: 364533 - DNA, 33 bp, Homo sapien
gtatgaagcatttaaccatgaagtcttctgttg

SEQ ID NO: 364534 - DNA, 33 bp, Homo sapien
gtatgaagcatttaacgatgaagtcttctgttg

SEQ ID NO: 364535 - DNA, 33 bp, Homo sapien
aaagaggcagagttgacataggaagccagttgg

SEQ ID NO: 364536 - DNA, 33 bp, Homo sapien
aaagaggcagagttgagataggaagccagttgg

SEQ ID NO: 364537 - DNA, 33 bp, Homo sapien
agtggcttaattttcacgatagccagaacagat

SEQ ID NO: 364538 - DNA, 33 bp, Homo sapien
agtggcttaattttcatgatagccagaacagat

SEQ ID NO: 364539 - DNA, 33 bp, Homo sapien
aataaatagtagtgccaagactgagatgccaga

SEQ ID NO: 364540 - DNA, 33 bp, Homo sapien
aataaatagtagtgccgagactgagatgccaga

SEQ ID NO: 364541 - DNA, 33 bp, Homo sapien
atggaatggtctggaaaacgtggcaacttggac

SEQ ID NO: 364542 - DNA, 33 bp, Homo sapien
atggaatggtctggaacacgtggcaacttggac

SEQ ID NO: 364543 - DNA, 33 bp, Homo sapien
tggaagcatgccaaaaatacaatcttacttaag

SEQ ID NO: 364544 - DNA, 33 bp, Homo sapien
tggaagcatgccaaaactacaatcttacttaag

SEQ ID NO: 364545 - DNA, 33 bp, Homo sapien
taaagttccctttctccaggagcattgcaactg

SEQ ID NO: 364546 - DNA, 33 bp, Homo sapien
taaagttccctttctctaggagcattgcaactg

SEQ ID NO: 364547 - DNA, 33 bp, Homo sapien
ggcttaagcagcaacactggttgaatactgaat

SEQ ID NO: 364548 - DNA, 33 bp, Homo sapien
ggcttaagcagcaacattggttgaatactgaat

SEQ ID NO: 364549 - DNA, 33 bp, Homo sapien
ggcccatcatgagcagaagtgggaacaaggaaa

SEQ ID NO: 364550 - DNA, 33 bp, Homo sapien
ggcccatcatgagcagtagtgggaacaaggaaa

SEQ ID NO: 364551 - DNA, 33 bp, Homo sapien
acaacaattaaatggacatacagcacctagaaa

SEQ ID NO: 364552 - DNA, 33 bp, Homo sapien
acaacaattaaatggagatacagcacctagaaa

SEQ ID NO: 364553 - DNA, 33 bp, Homo sapien
tagaacagtggtcttacatgtctctctagatcc

SEQ ID NO: 364554 - DNA, 33 bp, Homo sapien
tagaacagtggtcttatatgtctctctagatcc

SEQ ID NO: 364555 - DNA, 33 bp, Homo sapien
cagttctgccatccaccagacaggaaagttata

SEQ ID NO: 364556 - DNA, 33 bp, Homo sapien
cagttctgccatccacgagacaggaaagttata

SEQ ID NO: 364557 - DNA, 33 bp, Homo sapien
atcacagggaccctatcagagagctggtaatat

SEQ ID NO: 364558 - DNA, 33 bp, Homo sapien
atcacagggaccctatgagagagctggtaatat

SEQ ID NO: 364559 - DNA, 33 bp, Homo sapien
tctcgttgggaactcagactttaccctaaggac

SEQ ID NO: 364560 - DNA, 33 bp, Homo sapien
tctcgttgggaactcatactttaccctaaggac

SEQ ID NO: 364561 - DNA, 33 bp, Homo sapien
gcattcagacagaggaaacatccagaaatgact

SEQ ID NO: 364562 - DNA, 33 bp, Homo sapien
gcattcagacagaggagacatccagaaatgact

SEQ ID NO: 364563 - DNA, 33 bp, Homo sapien
gagtccaaggtctgcacatgagagctcttgaga

SEQ ID NO: 364564 - DNA, 33 bp, Homo sapien
gagtccaaggtctgcatatgagagctcttgaga

SEQ ID NO: 364565 - DNA, 33 bp, Homo sapien
gccatcgtccttcagtaaacagttgtgaaactg

SEQ ID NO: 364566 - DNA, 33 bp, Homo sapien
gccatcgtccttcagtgaacagttgtgaaactg

SEQ ID NO: 364567 - DNA, 33 bp, Homo sapien
ccccagctgagagtgcaatccctgactgggagg

SEQ ID NO: 364568 - DNA, 33 bp, Homo sapien
ccccagctgagagtgcgatccctgactgggagg

SEQ ID NO: 364569 - DNA, 33 bp, Homo sapien
ttttctcaaaggtagacgtgatcactagtttga

SEQ ID NO: 364570 - DNA, 33 bp, Homo sapien
ttttctcaaaggtagaggtgatcactagtttga

SEQ ID NO: 364571 - DNA, 33 bp, Homo sapien
tctcctgtttctctcactaaatgatgttcccag

SEQ ID NO: 364572 - DNA, 33 bp, Homo sapien
tctcctgtttctctcagtaaatgatgttcccag

SEQ ID NO: 364573 - DNA, 33 bp, Homo sapien
ctcaagtagttgatcccaatgcttttgtgcaat

SEQ ID NO: 364574 - DNA, 33 bp, Homo sapien
ctcaagtagttgatcctaatgcttttgtgcaat

SEQ ID NO: 364575 - DNA, 33 bp, Homo sapien
gaagccccagaatttcaatgttctcaggaatca

SEQ ID NO: 364576 - DNA, 33 bp, Homo sapien
gaagccccagaatttcgatgttctcaggaatca

SEQ ID NO: 364577 - DNA, 33 bp, Homo sapien
tcttccgaccctgacacaatactttttagcatt

SEQ ID NO: 364578 - DNA, 33 bp, Homo sapien
tcttccgaccctgacataatactttttagcatt

SEQ ID NO: 364579 - DNA, 33 bp, Homo sapien
gtaagaacacctaacaatgataagggaaggtac

SEQ ID NO: 364580 - DNA, 33 bp, Homo sapien
gtaagaacacctaacagtgataagggaaggtac

SEQ ID NO: 364581 - DNA, 33 bp, Homo sapien
ataagggaaggtaccactgggcagtttcagacc

SEQ ID NO: 364582 - DNA, 33 bp, Homo sapien
ataagggaaggtaccattgggcagtttcagacc

SEQ ID NO: 364583 - DNA, 33 bp, Homo sapien
ttctttagtgaaagataacctgttctggaaagc

SEQ ID NO: 364584 - DNA, 33 bp, Homo sapien
ttctttagtgaaagattacctgttctggaaagc

SEQ ID NO: 364585 - DNA, 33 bp, Homo sapien
tgaaatcccacaaggaaaggcaacttccagaaa

SEQ ID NO: 364586 - DNA, 33 bp, Homo sapien
tgaaatcccacaaggataggcaacttccagaaa

SEQ ID NO: 364587 - DNA, 33 bp, Homo sapien
ttcttctccctccataaaccctaagactattaa

SEQ ID NO: 364588 - DNA, 33 bp, Homo sapien
ttcttctccctccatagaccctaagactattaa

SEQ ID NO: 364589 - DNA, 33 bp, Homo sapien
ccctggcctttccccacgagacactagtaacac

SEQ ID NO: 364590 - DNA, 33 bp, Homo sapien
ccctggcctttccccatgagacactagtaacac

SEQ ID NO: 364591 - DNA, 33 bp, Homo sapien
aatccagcattcctgacagggagaagatctcat

SEQ ID NO: 364592 - DNA, 33 bp, Homo sapien
aatccagcattcctgagagggagaagatctcat

SEQ ID NO: 364593 - DNA, 33 bp, Homo sapien
cccctaaatctttccaactgtgggaactcatgg

SEQ ID NO: 364594 - DNA, 33 bp, Homo sapien
cccctaaatctttccagctgtgggaactcatgg

SEQ ID NO: 364595 - DNA, 33 bp, Homo sapien
ctcttccgtggtggaaaggagtatgaatttgct

SEQ ID NO: 364596 - DNA, 33 bp, Homo sapien
ctcttccgtggtggaagggagtatgaatttgct

SEQ ID NO: 364597 - DNA, 33 bp, Homo sapien
ggggatggagatacagaatgtcaagggtgtttc

SEQ ID NO: 364598 - DNA, 33 bp, Homo sapien
ggggatggagatacagcatgtcaagggtgtttc

SEQ ID NO: 364599 - DNA, 33 bp, Homo sapien
catttcatttgggctacatcctcacaaactatg

SEQ ID NO: 364600 - DNA, 33 bp, Homo sapien
catttcatttgggctagatcctcacaaactatg

SEQ ID NO: 364601 - DNA, 33 bp, Homo sapien
atatctcattaatctgcaatgtaagctccatgt

SEQ ID NO: 364602 - DNA, 33 bp, Homo sapien
atatctcattaatctggaatgtaagctccatgt

SEQ ID NO: 364603 - DNA, 33 bp, Homo sapien
agatacagtgctcaaccacgaaaggacatggag

SEQ ID NO: 364604 - DNA, 33 bp, Homo sapien
agatacagtgctcaactacgaaaggacatggag

SEQ ID NO: 364605 - DNA, 33 bp, Homo sapien
ttattttatctgataccaggtgaaggaaatgct

SEQ ID NO: 364606 - DNA, 33 bp, Homo sapien
ttattttatctgatacgaggtgaaggaaatgct

SEQ ID NO: 364607 - DNA, 33 bp, Homo sapien
ggtccctgacttgcgacggggtcacatctggat

SEQ ID NO: 364608 - DNA, 33 bp, Homo sapien
ggtccctgacttgcgatggggtcacatctggat

SEQ ID NO: 364609 - DNA, 33 bp, Homo sapien
ccaaatttaatgtggacgacaatatagtctcca

SEQ ID NO: 364610 - DNA, 33 bp, Homo sapien
ccaaatttaatgtggatgacaatatagtctcca

SEQ ID NO: 364611 - DNA, 33 bp, Homo sapien
cttgcaataacggctccgacattcccttaaact

SEQ ID NO: 364612 - DNA, 33 bp, Homo sapien
cttgcaataacggctctgacattcccttaaact

SEQ ID NO: 364613 - DNA, 33 bp, Homo sapien
cccaaggaaacaccctaagaaagacagagagta

SEQ ID NO: 364614 - DNA, 33 bp, Homo sapien
cccaaggaaacaccctgagaaagacagagagta

SEQ ID NO: 364615 - DNA, 33 bp, Homo sapien
cgttgagctctattcaatattgttgggggagat

SEQ ID NO: 364616 - DNA, 33 bp, Homo sapien
cgttgagctctattcagtattgttgggggagat

SEQ ID NO: 364617 - DNA, 33 bp, Homo sapien
cccaacagtccttagacgtaaaggaatacaaat

SEQ ID NO: 364618 - DNA, 33 bp, Homo sapien
cccaacagtccttagaggtaaaggaatacaaat

SEQ ID NO: 364619 - DNA, 33 bp, Homo sapien
tgctccaatcccagcactcgtgatctatggggc

SEQ ID NO: 364620 - DNA, 33 bp, Homo sapien
tgctccaatcccagcattcgtgatctatggggc

SEQ ID NO: 364621 - DNA, 33 bp, Homo sapien
cctgagggcatcacaacagtaggaaaagcctgc

SEQ ID NO: 364622 - DNA, 33 bp, Homo sapien
cctgagggcatcacaatagtaggaaaagcctgc

SEQ ID NO: 364623 - DNA, 33 bp, Homo sapien
taattgaattctctgccaaaccctgtccgccgt

SEQ ID NO: 364624 - DNA, 33 bp, Homo sapien
taattgaattctctgcgaaaccctgtccgccgt

SEQ ID NO: 364625 - DNA, 33 bp, Homo sapien
aacggagaagataccacgtaaaacagccatccc

SEQ ID NO: 364626 - DNA, 33 bp, Homo sapien
aacggagaagataccaggtaaaacagccatccc

SEQ ID NO: 364627 - DNA, 33 bp, Homo sapien
tccttaagcccccaccaaaattcatggaaaatg

SEQ ID NO: 364628 - DNA, 33 bp, Homo sapien
tccttaagcccccacccaaattcatggaaaatg

SEQ ID NO: 364629 - DNA, 33 bp, Homo sapien
tcagcaatactttgaacgggctgcaaatacatg

SEQ ID NO: 364630 - DNA, 33 bp, Homo sapien
tcagcaatactttgaatgggctgcaaatacatg

SEQ ID NO: 364631 - DNA, 33 bp, Homo sapien
gaatggctaacagctcacaaccagctacatcct

SEQ ID NO: 364632 - DNA, 33 bp, Homo sapien
gaatggctaacagctcgcaaccagctacatcct

SEQ ID NO: 364633 - DNA, 33 bp, Homo sapien
gcaacgagcttaaatcaaaaaccaaatcaattg

SEQ ID NO: 364634 - DNA, 33 bp, Homo sapien
gcaacgagcttaaatcgaaaaccaaatcaattg

SEQ ID NO: 364635 - DNA, 33 bp, Homo sapien
catttctttggtgatccatttacttaggatatc

SEQ ID NO: 364636 - DNA, 33 bp, Homo sapien
catttctttggtgatctatttacttaggatatc

SEQ ID NO: 364637 - DNA, 33 bp, Homo sapien
cttttcccaactgactaaagtaatgtcatttct

SEQ ID NO: 364638 - DNA, 33 bp, Homo sapien
cttttcccaactgacttaagtaatgtcatttct

SEQ ID NO: 364639 - DNA, 33 bp, Homo sapien
tcggctccagtcaaccaggtgagtaggaggctt

SEQ ID NO: 364640 - DNA, 33 bp, Homo sapien
tcggctccagtcaaccgggtgagtaggaggctt

SEQ ID NO: 364641 - DNA, 33 bp, Homo sapien
tggtactttactctcccatgccctaaataccca

SEQ ID NO: 364642 - DNA, 33 bp, Homo sapien
tggtactttactctcctatgccctaaataccca

SEQ ID NO: 364643 - DNA, 33 bp, Homo sapien
agtgtgagtccgaaaccctcccatacttttcct

SEQ ID NO: 364644 - DNA, 33 bp, Homo sapien
agtgtgagtccgaaacgctcccatacttttcct

SEQ ID NO: 364645 - DNA, 33 bp, Homo sapien
atacacacggtttgccccttgatgcagcctcga

SEQ ID NO: 364646 - DNA, 33 bp, Homo sapien
atacacacggtttgcctcttgatgcagcctcga

SEQ ID NO: 364647 - DNA, 33 bp, Homo sapien
acccccttggacagaaaaagtcattaagtctca

SEQ ID NO: 364648 - DNA, 33 bp, Homo sapien
acccccttggacagaagaagtcattaagtctca

SEQ ID NO: 364649 - DNA, 33 bp, Homo sapien
aaagccaattgcattaccttgccatgagcagcc

SEQ ID NO: 364650 - DNA, 33 bp, Homo sapien
aaagccaattgcattatcttgccatgagcagcc

SEQ ID NO: 364651 - DNA, 33 bp, Homo sapien
acaactcaagtcagtgcatgcaaagtgatgact

SEQ ID NO: 364652 - DNA, 33 bp, Homo sapien
acaactcaagtcagtgtatgcaaagtgatgact

SEQ ID NO: 364653 - DNA, 33 bp, Homo sapien
ctgcacatggtgggaaatatggctgctaataga

SEQ ID NO: 364654 - DNA, 33 bp, Homo sapien
ctgcacatggtgggaagtatggctgctaataga

SEQ ID NO: 364655 - DNA, 33 bp, Homo sapien
tgaggcctttcccagcaagaccaggatgatttt

SEQ ID NO: 364656 - DNA, 33 bp, Homo sapien
tgaggcctttcccagcgagaccaggatgatttt

SEQ ID NO: 364657 - DNA, 33 bp, Homo sapien
tgtcctggcaataagaaaacatgcaatggcagc

SEQ ID NO: 364658 - DNA, 33 bp, Homo sapien
tgtcctggcaataagagaacatgcaatggcagc

SEQ ID NO: 364659 - DNA, 33 bp, Homo sapien
gttgatatatttgttgcaatgtatttgaaactc

SEQ ID NO: 364660 - DNA, 33 bp, Homo sapien
gttgatatatttgttggaatgtatttgaaactc

SEQ ID NO: 364661 - DNA, 33 bp, Homo sapien
caaatgatgctagtaacggaagacgggaaatga

SEQ ID NO: 364662 - DNA, 33 bp, Homo sapien
caaatgatgctagtaagggaagacgggaaatga

SEQ ID NO: 364663 - DNA, 33 bp, Homo sapien
tgtaagctcattgaagcctgtggccatgtacag

SEQ ID NO: 364664 - DNA, 33 bp, Homo sapien
tgtaagctcattgaaggctgtggccatgtacag

SEQ ID NO: 364665 - DNA, 33 bp, Homo sapien
gagagtaacaagcacagtgaagtgaaatatgcc

SEQ ID NO: 364666 - DNA, 33 bp, Homo sapien
gagagtaacaagcacattgaagtgaaatatgcc

SEQ ID NO: 364667 - DNA, 33 bp, Homo sapien
gaaggaaatggaagtaccgttgtagaaaattaa

SEQ ID NO: 364668 - DNA, 33 bp, Homo sapien
gaaggaaatggaagtagcgttgtagaaaattaa

SEQ ID NO: 364669 - DNA, 33 bp, Homo sapien
tgaaaacaagtttcaacgcccaaatgagatgac

SEQ ID NO: 364670 - DNA, 33 bp, Homo sapien
tgaaaacaagtttcaatgcccaaatgagatgac

SEQ ID NO: 364671 - DNA, 33 bp, Homo sapien
gtccccttgtatagcaccttgcatttccctcca

SEQ ID NO: 364672 - DNA, 33 bp, Homo sapien
gtccccttgtatagcatcttgcatttccctcca

SEQ ID NO: 364673 - DNA, 33 bp, Homo sapien
catttgaatccgcttgcaactgaggtatgcccg

SEQ ID NO: 364674 - DNA, 33 bp, Homo sapien
catttgaatccgcttgtaactgaggtatgcccg

SEQ ID NO: 364675 - DNA, 33 bp, Homo sapien
ttattgccatttctgcacttccctacacgtcct

SEQ ID NO: 364676 - DNA, 33 bp, Homo sapien
ttattgccatttctgcgcttccctacacgtcct

SEQ ID NO: 364677 - DNA, 33 bp, Homo sapien
ggattacattttaaaacggtcatctcagaatta

SEQ ID NO: 364678 - DNA, 33 bp, Homo sapien
ggattacattttaaaagggtcatctcagaatta

SEQ ID NO: 364679 - DNA, 33 bp, Homo sapien
aaatatattcctttccagattcttcaagaacac

SEQ ID NO: 364680 - DNA, 33 bp, Homo sapien
aaatatattcctttccggattcttcaagaacac

SEQ ID NO: 364681 - DNA, 33 bp, Homo sapien
accatctcccagcaagaagaaatttggaaatag

SEQ ID NO: 364682 - DNA, 33 bp, Homo sapien
accatctcccagcaaggagaaatttggaaatag

SEQ ID NO: 364683 - DNA, 33 bp, Homo sapien
tctgccatagcagaaaacagtgcggttgatgat

SEQ ID NO: 364684 - DNA, 33 bp, Homo sapien
tctgccatagcagaaagcagtgcggttgatgat

SEQ ID NO: 364685 - DNA, 33 bp, Homo sapien
cattctctctgtgaaagaagtcaaactacaaat

SEQ ID NO: 364686 - DNA, 33 bp, Homo sapien
cattctctctgtgaaataagtcaaactacaaat

SEQ ID NO: 364687 - DNA, 33 bp, Homo sapien
aggtaaactttgttgaatatttagcagttgttc

SEQ ID NO: 364688 - DNA, 33 bp, Homo sapien
aggtaaactttgttgagtatttagcagttgttc

SEQ ID NO: 364689 - DNA, 33 bp, Homo sapien
tagccatctagctatcaatccatacagccatcc

SEQ ID NO: 364690 - DNA, 33 bp, Homo sapien
tagccatctagctatcgatccatacagccatcc

SEQ ID NO: 364691 - DNA, 33 bp, Homo sapien
gacagtgaggtaatgaggaaatgtatttgaaaa

SEQ ID NO: 364692 - DNA, 33 bp, Homo sapien
gacagtgaggtaatgatgaaatgtatttgaaaa

SEQ ID NO: 364693 - DNA, 33 bp, Homo sapien
accctagcactgagaaacccctctgtgtcatcc

SEQ ID NO: 364694 - DNA, 33 bp, Homo sapien
accctagcactgagaaccccctctgtgtcatcc

SEQ ID NO: 364695 - DNA, 33 bp, Homo sapien
gtctctggacatggccaaatgcaccctggggac

SEQ ID NO: 364696 - DNA, 33 bp, Homo sapien
gtctctggacatggccgaatgcaccctggggac

SEQ ID NO: 364697 - DNA, 33 bp, Homo sapien
ctgaaaagggactcagaaggtgtcaggtaacaa

SEQ ID NO: 364698 - DNA, 33 bp, Homo sapien
ctgaaaagggactcagtaggtgtcaggtaacaa

SEQ ID NO: 364699 - DNA, 33 bp, Homo sapien
atttccttgcattttccagtttctagaggccac

SEQ ID NO: 364700 - DNA, 33 bp, Homo sapien
atttccttgcattttctagtttctagaggccac

SEQ ID NO: 364701 - DNA, 33 bp, Homo sapien
ctttgcagtgcatttacacatgaagaaaagccc

SEQ ID NO: 364702 - DNA, 33 bp, Homo sapien
ctttgcagtgcatttagacatgaagaaaagccc

SEQ ID NO: 364703 - DNA, 33 bp, Homo sapien
aaataatcgaaaccagaaacaactggcaacagc

SEQ ID NO: 364704 - DNA, 33 bp, Homo sapien
aaataatcgaaaccaggaacaactggcaacagc

SEQ ID NO: 364705 - DNA, 33 bp, Homo sapien
attacgttcgtttggacggtcttaataaggagc

SEQ ID NO: 364706 - DNA, 33 bp, Homo sapien
attacgttcgtttggatggtcttaataaggagc

SEQ ID NO: 364707 - DNA, 33 bp, Homo sapien
ttcttcttgtctgtgacagtttctcagattttc

SEQ ID NO: 364708 - DNA, 33 bp, Homo sapien
ttcttcttgtctgtgatagtttctcagattttc

SEQ ID NO: 364709 - DNA, 33 bp, Homo sapien
agaaacttcagagtcaaggccgcccagatgcca

SEQ ID NO: 364710 - DNA, 33 bp, Homo sapien
agaaacttcagagtcacggccgcccagatgcca

SEQ ID NO: 364711 - DNA, 33 bp, Homo sapien
ggacattagatgaaaactaaagcaatcgaagta

SEQ ID NO: 364712 - DNA, 33 bp, Homo sapien
ggacattagatgaaaagtaaagcaatcgaagta

SEQ ID NO: 364713 - DNA, 33 bp, Homo sapien
atgaatacatcacgatcaactacagcctatact

SEQ ID NO: 364714 - DNA, 33 bp, Homo sapien
atgaatacatcacgattaactacagcctatact

SEQ ID NO: 364715 - DNA, 33 bp, Homo sapien
atagaatgctttgtatcactaagtgagaaacgc

SEQ ID NO: 364716 - DNA, 33 bp, Homo sapien
atagaatgctttgtattactaagtgagaaacgc

SEQ ID NO: 364717 - DNA, 33 bp, Homo sapien
ccacacatccctgaatcacttgttaaaacctag

SEQ ID NO: 364718 - DNA, 33 bp, Homo sapien
ccacacatccctgaatgacttgttaaaacctag

SEQ ID NO: 364719 - DNA, 33 bp, Homo sapien
tacccagcaatggttacgttaattttccagtgc

SEQ ID NO: 364720 - DNA, 33 bp, Homo sapien
tacccagcaatggttatgttaattttccagtgc

SEQ ID NO: 364721 - DNA, 33 bp, Homo sapien
gccagtggaaatgggacagtaagcactgagtaa

SEQ ID NO: 364722 - DNA, 33 bp, Homo sapien
gccagtggaaatgggatagtaagcactgagtaa

SEQ ID NO: 364723 - DNA, 33 bp, Homo sapien
gaaggtcctgagaataccaacagcagtggatct

SEQ ID NO: 364724 - DNA, 33 bp, Homo sapien
gaaggtcctgagaatagcaacagcagtggatct

SEQ ID NO: 364725 - DNA, 33 bp, Homo sapien
ctattggcatatcgtcactgcagtcaacttttt

SEQ ID NO: 364726 - DNA, 33 bp, Homo sapien
ctattggcatatcgtctctgcagtcaacttttt

SEQ ID NO: 364727 - DNA, 33 bp, Homo sapien
gtaagtaggtcaatgcaacactgtcacaagtcc

SEQ ID NO: 364728 - DNA, 33 bp, Homo sapien
gtaagtaggtcaatgcgacactgtcacaagtcc

SEQ ID NO: 364729 - DNA, 33 bp, Homo sapien
ccagtgcactatgggaaaaaggtataaatcccc

SEQ ID NO: 364730 - DNA, 33 bp, Homo sapien
ccagtgcactatgggagaaaggtataaatcccc

SEQ ID NO: 364731 - DNA, 33 bp, Homo sapien
tttatcttcaagagaaacttccactttgcctat

SEQ ID NO: 364732 - DNA, 33 bp, Homo sapien
tttatcttcaagagaatcttccactttgcctat

SEQ ID NO: 364733 - DNA, 33 bp, Homo sapien
aataggtatatcttacaacaatgactctgacac

SEQ ID NO: 364734 - DNA, 33 bp, Homo sapien
aataggtatatcttacgacaatgactctgacac

SEQ ID NO: 364735 - DNA, 33 bp, Homo sapien
gggcagttagcaaggagtaaacaaaggaaagtt

SEQ ID NO: 364736 - DNA, 33 bp, Homo sapien
gggcagttagcaaggattaaacaaaggaaagtt

SEQ ID NO: 364737 - DNA, 33 bp, Homo sapien
attttgaatctcattgcaatctctctttttttt

SEQ ID NO: 364738 - DNA, 33 bp, Homo sapien
attttgaatctcattggaatctctctttttttt

SEQ ID NO: 364739 - DNA, 33 bp, Homo sapien
aagaggatagtgagagactaggccaacagaggc

SEQ ID NO: 364740 - DNA, 33 bp, Homo sapien
aagaggatagtgagaggctaggccaacagaggc

SEQ ID NO: 364741 - DNA, 33 bp, Homo sapien
tcaagcctgcacatccccagtgcctgaaaccat

SEQ ID NO: 364742 - DNA, 33 bp, Homo sapien
tcaagcctgcacatccgcagtgcctgaaaccat

SEQ ID NO: 364743 - DNA, 33 bp, Homo sapien
ccatgatcgggagttacgactttatcctaagaa

SEQ ID NO: 364744 - DNA, 33 bp, Homo sapien
ccatgatcgggagttatgactttatcctaagaa

SEQ ID NO: 364745 - DNA, 33 bp, Homo sapien
cttggtgcatgaaggaaaactacacaaagatgt

SEQ ID NO: 364746 - DNA, 33 bp, Homo sapien
cttggtgcatgaaggagaactacacaaagatgt

SEQ ID NO: 364747 - DNA, 33 bp, Homo sapien
gcaaacatttggatagaacttgagaaggaatat

SEQ ID NO: 364748 - DNA, 33 bp, Homo sapien
gcaaacatttggatagcacttgagaaggaatat

SEQ ID NO: 364749 - DNA, 33 bp, Homo sapien
aaggatggacctaggcaagttacatcaggtacc

SEQ ID NO: 364750 - DNA, 33 bp, Homo sapien
aaggatggacctaggcgagttacatcaggtacc

SEQ ID NO: 364751 - DNA, 33 bp, Homo sapien
atcacagtttgctcctcacactttatatttggc

SEQ ID NO: 364752 - DNA, 33 bp, Homo sapien
atcacagtttgctcctgacactttatatttggc

SEQ ID NO: 364753 - DNA, 33 bp, Homo sapien
ttattgatttgttcaaacacaatagggcactac

SEQ ID NO: 364754 - DNA, 33 bp, Homo sapien
ttattgatttgttcaaccacaatagggcactac

SEQ ID NO: 364755 - DNA, 33 bp, Homo sapien
taggcacaacggattcaatagcaaaccagacca

SEQ ID NO: 364756 - DNA, 33 bp, Homo sapien
taggcacaacggattcgatagcaaaccagacca

SEQ ID NO: 364757 - DNA, 33 bp, Homo sapien
tctgagaaagaaaataactcatgctaagctttc

SEQ ID NO: 364758 - DNA, 33 bp, Homo sapien
tctgagaaagaaaatagctcatgctaagctttc

SEQ ID NO: 364759 - DNA, 33 bp, Homo sapien
tgtgtgggagtgaagacggggtctgattttaat

SEQ ID NO: 364760 - DNA, 33 bp, Homo sapien
tgtgtgggagtgaagagggggtctgattttaat

SEQ ID NO: 364761 - DNA, 33 bp, Homo sapien
ctttacaaacctagctcaatcttgtcagcaaac

SEQ ID NO: 364762 - DNA, 33 bp, Homo sapien
ctttacaaacctagcttaatcttgtcagcaaac

SEQ ID NO: 364763 - DNA, 33 bp, Homo sapien
gaggatcctctgataaccccaattgaagtacac

SEQ ID NO: 364764 - DNA, 33 bp, Homo sapien
gaggatcctctgataagcccaattgaagtacac

SEQ ID NO: 364765 - DNA, 33 bp, Homo sapien
taggttggggacaccacacttccaaaggaataa

SEQ ID NO: 364766 - DNA, 33 bp, Homo sapien
taggttggggacaccatacttccaaaggaataa

SEQ ID NO: 364767 - DNA, 33 bp, Homo sapien
tggggtcagcctctgaacagggatttaggagat

SEQ ID NO: 364768 - DNA, 33 bp, Homo sapien
tggggtcagcctctgagcagggatttaggagat

SEQ ID NO: 364769 - DNA, 33 bp, Homo sapien
caaacatagcctcatacgtttaggaattaaaaa

SEQ ID NO: 364770 - DNA, 33 bp, Homo sapien
caaacatagcctcataggtttaggaattaaaaa

SEQ ID NO: 364771 - DNA, 33 bp, Homo sapien
tggaagtctagtgtgacaggcagacacagaaat

SEQ ID NO: 364772 - DNA, 33 bp, Homo sapien
tggaagtctagtgtgagaggcagacacagaaat

SEQ ID NO: 364773 - DNA, 33 bp, Homo sapien
gtaatttggaggagggaatcttcgtcaacaaca

SEQ ID NO: 364774 - DNA, 33 bp, Homo sapien
gtaatttggaggaggggatcttcgtcaacaaca

SEQ ID NO: 364775 - DNA, 33 bp, Homo sapien
gtattactgttaatggaaagtttatgttgttga

SEQ ID NO: 364776 - DNA, 33 bp, Homo sapien
gtattactgttaatggcaagtttatgttgttga

SEQ ID NO: 364777 - DNA, 33 bp, Homo sapien
atatttatgcagtacacagtgcaaatatacaac

SEQ ID NO: 364778 - DNA, 33 bp, Homo sapien
atatttatgcagtacagagtgcaaatatacaac

SEQ ID NO: 364779 - DNA, 33 bp, Homo sapien
acagaagtggaaggaggcgtttcacagtaaacg

SEQ ID NO: 364780 - DNA, 33 bp, Homo sapien
acagaagtggaaggagtcgtttcacagtaaacg

SEQ ID NO: 364781 - DNA, 33 bp, Homo sapien
ttcagttcttctcctcagagactgcactgtagc

SEQ ID NO: 364782 - DNA, 33 bp, Homo sapien
ttcagttcttctcctccgagactgcactgtagc

SEQ ID NO: 364783 - DNA, 33 bp, Homo sapien
aagagacagatataccaattttagcatccacaa

SEQ ID NO: 364784 - DNA, 33 bp, Homo sapien
aagagacagatataccgattttagcatccacaa

SEQ ID NO: 364785 - DNA, 33 bp, Homo sapien
gagtcagccaggcaataatattcagggggcaga

SEQ ID NO: 364786 - DNA, 33 bp, Homo sapien
gagtcagccaggcaatcatattcagggggcaga

SEQ ID NO: 364787 - DNA, 33 bp, Homo sapien
agtgctgcaggcagaaaaagacgaacatcccct

SEQ ID NO: 364788 - DNA, 33 bp, Homo sapien
agtgctgcaggcagaacaagacgaacatcccct

SEQ ID NO: 364789 - DNA, 33 bp, Homo sapien
aatccgcagatgaaaacgagtccacgcttgaaa

SEQ ID NO: 364790 - DNA, 33 bp, Homo sapien
aatccgcagatgaaaatgagtccacgcttgaaa

SEQ ID NO: 364791 - DNA, 33 bp, Homo sapien
catctgggagctgtgcaaaaaatacccaatgcc

SEQ ID NO: 364792 - DNA, 33 bp, Homo sapien
catctgggagctgtgcgaaaaatacccaatgcc

SEQ ID NO: 364793 - DNA, 33 bp, Homo sapien
aaagaagacatttgtcccaacccatatgcccca

SEQ ID NO: 364794 - DNA, 33 bp, Homo sapien
aaagaagacatttgtcgcaacccatatgcccca

SEQ ID NO: 364795 - DNA, 33 bp, Homo sapien
agacataaaaatgcaaatgagttatgaaaaccc

SEQ ID NO: 364796 - DNA, 33 bp, Homo sapien
agacataaaaatgcaactgagttatgaaaaccc

SEQ ID NO: 364797 - DNA, 33 bp, Homo sapien
aaaagtacaaggtaaactgcagaggatgggaaa

SEQ ID NO: 364798 - DNA, 33 bp, Homo sapien
aaaagtacaaggtaaattgcagaggatgggaaa

SEQ ID NO: 364799 - DNA, 33 bp, Homo sapien
gttttccttgaatccaactgaatgcttcaacct

SEQ ID NO: 364800 - DNA, 33 bp, Homo sapien
gttttccttgaatccagctgaatgcttcaacct

SEQ ID NO: 364801 - DNA, 33 bp, Homo sapien
ctctcttcccatgcataaagataagcagtagac

SEQ ID NO: 364802 - DNA, 33 bp, Homo sapien
ctctcttcccatgcatgaagataagcagtagac

SEQ ID NO: 364803 - DNA, 33 bp, Homo sapien
caatctcaattccaagaaaaagcaaatctatta

SEQ ID NO: 364804 - DNA, 33 bp, Homo sapien
caatctcaattccaaggaaaagcaaatctatta

SEQ ID NO: 364805 - DNA, 33 bp, Homo sapien
tcaccatgccagaacaacaccaggctaagcatg

SEQ ID NO: 364806 - DNA, 33 bp, Homo sapien
tcaccatgccagaacaccaccaggctaagcatg

SEQ ID NO: 364807 - DNA, 33 bp, Homo sapien
cagattgatgtacgtacagacaaatagagtgat

SEQ ID NO: 364808 - DNA, 33 bp, Homo sapien
cagattgatgtacgtatagacaaatagagtgat

SEQ ID NO: 364809 - DNA, 33 bp, Homo sapien
aggaacagcaaaagaagctacaacataagacta

SEQ ID NO: 364810 - DNA, 33 bp, Homo sapien
aggaacagcaaaagaatctacaacataagacta

SEQ ID NO: 364811 - DNA, 33 bp, Homo sapien
taatgatgcatgtacaatggttttaaaagttaa

SEQ ID NO: 364812 - DNA, 33 bp, Homo sapien
taatgatgcatgtacagtggttttaaaagttaa

SEQ ID NO: 364813 - DNA, 33 bp, Homo sapien
ggcatggtaaatttaacgctgaaaattgagctc

SEQ ID NO: 364814 - DNA, 33 bp, Homo sapien
ggcatggtaaatttaatgctgaaaattgagctc

SEQ ID NO: 364815 - DNA, 33 bp, Homo sapien
accttagtgaatttaacgatgtggtgattgtat

SEQ ID NO: 364816 - DNA, 33 bp, Homo sapien
accttagtgaatttaatgatgtggtgattgtat

SEQ ID NO: 364817 - DNA, 33 bp, Homo sapien
atcactatgctgaacaactctgtgctattattg

SEQ ID NO: 364818 - DNA, 33 bp, Homo sapien
atcactatgctgaacatctctgtgctattattg

SEQ ID NO: 364819 - DNA, 33 bp, Homo sapien
aagaacgttccagagaaatcctacagaacgtgg

SEQ ID NO: 364820 - DNA, 33 bp, Homo sapien
aagaacgttccagagagatcctacagaacgtgg

SEQ ID NO: 364821 - DNA, 33 bp, Homo sapien
taaactggggacaagtaaattccagatgcagaa

SEQ ID NO: 364822 - DNA, 33 bp, Homo sapien
taaactggggacaagttaattccagatgcagaa

SEQ ID NO: 364823 - DNA, 33 bp, Homo sapien
aaccactcagggcaacaaatgggagaagggcaa

SEQ ID NO: 364824 - DNA, 33 bp, Homo sapien
aaccactcagggcaacgaatgggagaagggcaa

SEQ ID NO: 364825 - DNA, 33 bp, Homo sapien
tagacctttgggttacaatttcttatgccgtgt

SEQ ID NO: 364826 - DNA, 33 bp, Homo sapien
tagacctttgggttaccatttcttatgccgtgt

SEQ ID NO: 364827 - DNA, 33 bp, Homo sapien
attgcttataacgtggaatttcaactccttatt

SEQ ID NO: 364828 - DNA, 33 bp, Homo sapien
attgcttataacgtggtatttcaactccttatt

SEQ ID NO: 364829 - DNA, 33 bp, Homo sapien
gatcatttatggataacgtatggtaatgatcac

SEQ ID NO: 364830 - DNA, 33 bp, Homo sapien
gatcatttatggataatgtatggtaatgatcac

SEQ ID NO: 364831 - DNA, 33 bp, Homo sapien
gctatgatgctatgaaatctccttaaatgtgat

SEQ ID NO: 364832 - DNA, 33 bp, Homo sapien
gctatgatgctatgaagtctccttaaatgtgat

SEQ ID NO: 364833 - DNA, 33 bp, Homo sapien
taggacagacagcagacgtggaaacaagatgca

SEQ ID NO: 364834 - DNA, 33 bp, Homo sapien
taggacagacagcagatgtggaaacaagatgca

SEQ ID NO: 364835 - DNA, 33 bp, Homo sapien
ggctgaattcgaaaaaggtgtgtctcaagaaat

SEQ ID NO: 364836 - DNA, 33 bp, Homo sapien
ggctgaattcgaaaaatgtgtgtctcaagaaat

SEQ ID NO: 364837 - DNA, 33 bp, Homo sapien
aggctgagctttatcaaatatgcagcttctact

SEQ ID NO: 364838 - DNA, 33 bp, Homo sapien
aggctgagctttatcagatatgcagcttctact

SEQ ID NO: 364839 - DNA, 33 bp, Homo sapien
agcacatagcaaatgccaaggctgagctttatc

SEQ ID NO: 364840 - DNA, 33 bp, Homo sapien
agcacatagcaaatgcgaaggctgagctttatc

SEQ ID NO: 364841 - DNA, 33 bp, Homo sapien
agattcaaggagagggaaaaagactccaccttt

SEQ ID NO: 364842 - DNA, 33 bp, Homo sapien
agattcaaggagaggggaaaagactccaccttt

SEQ ID NO: 364843 - DNA, 33 bp, Homo sapien
tgtgttttcttcaaaaagtatcatggtggactc

SEQ ID NO: 364844 - DNA, 33 bp, Homo sapien
tgtgttttcttcaaaaggtatcatggtggactc

SEQ ID NO: 364845 - DNA, 33 bp, Homo sapien
ctcatccatttaagcacgttactttgggtgatc

SEQ ID NO: 364846 - DNA, 33 bp, Homo sapien
ctcatccatttaagcatgttactttgggtgatc

SEQ ID NO: 364847 - DNA, 33 bp, Homo sapien
gaaagacgagagaggactcattatcagaatggt

SEQ ID NO: 364848 - DNA, 33 bp, Homo sapien
gaaagacgagagaggagtcattatcagaatggt

SEQ ID NO: 364849 - DNA, 33 bp, Homo sapien
acatacatgataataacagaagtagtggcagct

SEQ ID NO: 364850 - DNA, 33 bp, Homo sapien
acatacatgataataatagaagtagtggcagct

SEQ ID NO: 364851 - DNA, 33 bp, Homo sapien
catatttaaggacaagcacaaagaactcttagt

SEQ ID NO: 364852 - DNA, 33 bp, Homo sapien
catatttaaggacaaggacaaagaactcttagt

SEQ ID NO: 364853 - DNA, 33 bp, Homo sapien
ttgctcctttctgctacgacatcttctgcgtca

SEQ ID NO: 364854 - DNA, 33 bp, Homo sapien
ttgctcctttctgctatgacatcttctgcgtca

SEQ ID NO: 364855 - DNA, 33 bp, Homo sapien
ggattttcaatgcaaacggacatatatttccta

SEQ ID NO: 364856 - DNA, 33 bp, Homo sapien
ggattttcaatgcaaatggacatatatttccta

SEQ ID NO: 364857 - DNA, 33 bp, Homo sapien
tgccaagtttcccagcaaagagatttctaaggt

SEQ ID NO: 364858 - DNA, 33 bp, Homo sapien
tgccaagtttcccagctaagagatttctaaggt

SEQ ID NO: 364859 - DNA, 33 bp, Homo sapien
tatgcctaagactggaatcaatcagttgtgtca

SEQ ID NO: 364860 - DNA, 33 bp, Homo sapien
tatgcctaagactggattcaatcagttgtgtca

SEQ ID NO: 364861 - DNA, 33 bp, Homo sapien
atagcagctcagttacaatgtgtgaacggaatg

SEQ ID NO: 364862 - DNA, 33 bp, Homo sapien
atagcagctcagttacgatgtgtgaacggaatg

SEQ ID NO: 364863 - DNA, 33 bp, Homo sapien
gtggactgggagaacacggttaaagtaaaggtt

SEQ ID NO: 364864 - DNA, 33 bp, Homo sapien
gtggactgggagaacatggttaaagtaaaggtt

SEQ ID NO: 364865 - DNA, 33 bp, Homo sapien
gacccagtacgtttagaattagagccaaatgct

SEQ ID NO: 364866 - DNA, 33 bp, Homo sapien
gacccagtacgtttagtattagagccaaatgct

SEQ ID NO: 364867 - DNA, 33 bp, Homo sapien
tgacttgatttacctaaggctgctatattcttt

SEQ ID NO: 364868 - DNA, 33 bp, Homo sapien
tgacttgatttacctacggctgctatattcttt

SEQ ID NO: 364869 - DNA, 33 bp, Homo sapien
ctacctacctttataaactcatttcaaacactt

SEQ ID NO: 364870 - DNA, 33 bp, Homo sapien
ctacctacctttataacctcatttcaaacactt

SEQ ID NO: 364871 - DNA, 33 bp, Homo sapien
aggacataagtagaaaagctgtggaaatttcag

SEQ ID NO: 364872 - DNA, 33 bp, Homo sapien
aggacataagtagaaaggctgtggaaatttcag

SEQ ID NO: 364873 - DNA, 33 bp, Homo sapien
ctaatcaatcagagcactgcagagcatgttgga

SEQ ID NO: 364874 - DNA, 33 bp, Homo sapien
ctaatcaatcagagcattgcagagcatgttgga

SEQ ID NO: 364875 - DNA, 33 bp, Homo sapien
aatatccattaagcacaaagtatgcaattccag

SEQ ID NO: 364876 - DNA, 33 bp, Homo sapien
aatatccattaagcactaagtatgcaattccag

SEQ ID NO: 364877 - DNA, 33 bp, Homo sapien
cagacaatctggtgtacaagaaacagaactagc

SEQ ID NO: 364878 - DNA, 33 bp, Homo sapien
cagacaatctggtgtagaagaaacagaactagc

SEQ ID NO: 364879 - DNA, 33 bp, Homo sapien
actttgcgggcctttcacttttcatctaccctc

SEQ ID NO: 364880 - DNA, 33 bp, Homo sapien
actttgcgggcctttcgcttttcatctaccctc

SEQ ID NO: 364881 - DNA, 33 bp, Homo sapien
gaagagacaagtagaaaggagatgcaggcattt

SEQ ID NO: 364882 - DNA, 33 bp, Homo sapien
gaagagacaagtagaagggagatgcaggcattt

SEQ ID NO: 364883 - DNA, 33 bp, Homo sapien
aaggccaacctatacaacaatttaacacaaaag

SEQ ID NO: 364884 - DNA, 33 bp, Homo sapien
aaggccaacctatacatcaatttaacacaaaag

SEQ ID NO: 364885 - DNA, 33 bp, Homo sapien
aattacctgtcccactcagaaatcaaggccaac

SEQ ID NO: 364886 - DNA, 33 bp, Homo sapien
aattacctgtcccactgagaaatcaaggccaac

SEQ ID NO: 364887 - DNA, 33 bp, Homo sapien
atcacacagctttggacgtagttaatgcctcat

SEQ ID NO: 364888 - DNA, 33 bp, Homo sapien
atcacacagctttggatgtagttaatgcctcat

SEQ ID NO: 364889 - DNA, 33 bp, Homo sapien
ttatttgtttgccgacagagctcaaatgaaaaa

SEQ ID NO: 364890 - DNA, 33 bp, Homo sapien
ttatttgtttgccgacggagctcaaatgaaaaa

SEQ ID NO: 364891 - DNA, 33 bp, Homo sapien
agaagtgtagcatgggaatcaccaggtttacaa

SEQ ID NO: 364892 - DNA, 33 bp, Homo sapien
agaagtgtagcatgggtatcaccaggtttacaa

SEQ ID NO: 364893 - DNA, 33 bp, Homo sapien
gtggctttctgtggaaaacaacataatgacccc

SEQ ID NO: 364894 - DNA, 33 bp, Homo sapien
gtggctttctgtggaagacaacataatgacccc

SEQ ID NO: 364895 - DNA, 33 bp, Homo sapien
gctaggtagctctgcaataaaactctagtttca

SEQ ID NO: 364896 - DNA, 33 bp, Homo sapien
gctaggtagctctgcagtaaaactctagtttca

SEQ ID NO: 364897 - DNA, 33 bp, Homo sapien
actaatcctggtgaaactggattttgatatcga

SEQ ID NO: 364898 - DNA, 33 bp, Homo sapien
actaatcctggtgaaattggattttgatatcga

SEQ ID NO: 364899 - DNA, 33 bp, Homo sapien
taagaaaaattctgccacacagatcccgcctcc

SEQ ID NO: 364900 - DNA, 33 bp, Homo sapien
taagaaaaattctgccgcacagatcccgcctcc

SEQ ID NO: 364901 - DNA, 33 bp, Homo sapien
aagtagggactgtggacattgaagcagaggatg

SEQ ID NO: 364902 - DNA, 33 bp, Homo sapien
aagtagggactgtggagattgaagcagaggatg

SEQ ID NO: 364903 - DNA, 33 bp, Homo sapien
cagcactttggagaaacctttgcattgtttcct

SEQ ID NO: 364904 - DNA, 33 bp, Homo sapien
cagcactttggagaaatctttgcattgtttcct

SEQ ID NO: 364905 - DNA, 33 bp, Homo sapien
tacaatcaatgtcgccaccttcatgtgatagtc

SEQ ID NO: 364906 - DNA, 33 bp, Homo sapien
tacaatcaatgtcgccgccttcatgtgatagtc

SEQ ID NO: 364907 - DNA, 33 bp, Homo sapien
gacaccaatagagaaaaacaatcataaatagaa

SEQ ID NO: 364908 - DNA, 33 bp, Homo sapien
gacaccaatagagaaagacaatcataaatagaa

SEQ ID NO: 364909 - DNA, 33 bp, Homo sapien
ggtatgtattcaataaatggaaagtgacgaaat

SEQ ID NO: 364910 - DNA, 33 bp, Homo sapien
ggtatgtattcaataactggaaagtgacgaaat

SEQ ID NO: 364911 - DNA, 33 bp, Homo sapien
gggaacaaatgcttccaatgagtagaaagtaaa

SEQ ID NO: 364912 - DNA, 33 bp, Homo sapien
gggaacaaatgcttccgatgagtagaaagtaaa

SEQ ID NO: 364913 - DNA, 33 bp, Homo sapien
tagccatatatcttgcacaaggaatgttccatc

SEQ ID NO: 364914 - DNA, 33 bp, Homo sapien
tagccatatatcttgcccaaggaatgttccatc

SEQ ID NO: 364915 - DNA, 33 bp, Homo sapien
cacgtttcaaaacaggaagtatgggctctagaa

SEQ ID NO: 364916 - DNA, 33 bp, Homo sapien
cacgtttcaaaacagggagtatgggctctagaa

SEQ ID NO: 364917 - DNA, 33 bp, Homo sapien
aagcactgatcacaaccgctgataccatcatga

SEQ ID NO: 364918 - DNA, 33 bp, Homo sapien
aagcactgatcacaactgctgataccatcatga

SEQ ID NO: 364919 - DNA, 33 bp, Homo sapien
caatgggctgaaatcactatctctcaacatttg

SEQ ID NO: 364920 - DNA, 33 bp, Homo sapien
caatgggctgaaatcagtatctctcaacatttg

SEQ ID NO: 364921 - DNA, 33 bp, Homo sapien
ttatcacaaagtgtaagggattctgttttgctt

SEQ ID NO: 364922 - DNA, 33 bp, Homo sapien
ttatcacaaagtgtaatggattctgttttgctt

SEQ ID NO: 364923 - DNA, 33 bp, Homo sapien
atttatattctctcccagcaagaaaagaaaatc

SEQ ID NO: 364924 - DNA, 33 bp, Homo sapien
atttatattctctcccggcaagaaaagaaaatc

SEQ ID NO: 364925 - DNA, 33 bp, Homo sapien
caggaggactagactcaaatcaatggccatagg

SEQ ID NO: 364926 - DNA, 33 bp, Homo sapien
caggaggactagactcgaatcaatggccatagg

SEQ ID NO: 364927 - DNA, 33 bp, Homo sapien
agttctgtgatttggcaaatgaggtaagctttc

SEQ ID NO: 364928 - DNA, 33 bp, Homo sapien
agttctgtgatttggcgaatgaggtaagctttc

SEQ ID NO: 364929 - DNA, 33 bp, Homo sapien
ctgcagggttgctgaacagttgataatctgctc

SEQ ID NO: 364930 - DNA, 33 bp, Homo sapien
ctgcagggttgctgaatagttgataatctgctc

SEQ ID NO: 364931 - DNA, 33 bp, Homo sapien
tgttataacaattccacggaagttctagaaatg

SEQ ID NO: 364932 - DNA, 33 bp, Homo sapien
tgttataacaattccatggaagttctagaaatg

SEQ ID NO: 364933 - DNA, 33 bp, Homo sapien
gaaaaactcattagaacgtagcatacggcataa

SEQ ID NO: 364934 - DNA, 33 bp, Homo sapien
gaaaaactcattagaatgtagcatacggcataa

SEQ ID NO: 364935 - DNA, 33 bp, Homo sapien
atacatttaaatctgacgcaaaggttaatcgat

SEQ ID NO: 364936 - DNA, 33 bp, Homo sapien
atacatttaaatctgatgcaaaggttaatcgat

SEQ ID NO: 364937 - DNA, 33 bp, Homo sapien
ttccaggggatgcagacggtgctgacaacagta

SEQ ID NO: 364938 - DNA, 33 bp, Homo sapien
ttccaggggatgcagatggtgctgacaacagta

SEQ ID NO: 364939 - DNA, 33 bp, Homo sapien
attgaagcatagagaactctttttccttgcctg

SEQ ID NO: 364940 - DNA, 33 bp, Homo sapien
attgaagcatagagaagtctttttccttgcctg

SEQ ID NO: 364941 - DNA, 33 bp, Homo sapien
gaaaattttaatgactcactccaactgttcact

SEQ ID NO: 364942 - DNA, 33 bp, Homo sapien
gaaaattttaatgacttactccaactgttcact

SEQ ID NO: 364943 - DNA, 33 bp, Homo sapien
acatttttaaaaacaactctccacttctaccct

SEQ ID NO: 364944 - DNA, 33 bp, Homo sapien
acatttttaaaaacaagtctccacttctaccct

SEQ ID NO: 364945 - DNA, 33 bp, Homo sapien
aggaaggctaggtaaacggtacagcgatcagat

SEQ ID NO: 364946 - DNA, 33 bp, Homo sapien
aggaaggctaggtaaatggtacagcgatcagat

SEQ ID NO: 364947 - DNA, 33 bp, Homo sapien
gactcaactcttgttacagcttgaaagtagcca

SEQ ID NO: 364948 - DNA, 33 bp, Homo sapien
gactcaactcttgttatagcttgaaagtagcca

SEQ ID NO: 364949 - DNA, 33 bp, Homo sapien
tttgatcaagatacagcaattgggtggttagtt

SEQ ID NO: 364950 - DNA, 33 bp, Homo sapien
tttgatcaagatacaggaattgggtggttagtt

SEQ ID NO: 364951 - DNA, 33 bp, Homo sapien
ctaagttaatatcagaactagtaaaagcctctt

SEQ ID NO: 364952 - DNA, 33 bp, Homo sapien
ctaagttaatatcagagctagtaaaagcctctt

SEQ ID NO: 364953 - DNA, 33 bp, Homo sapien
taaggagtcactagaggatgcttttgctttgtg

SEQ ID NO: 364954 - DNA, 33 bp, Homo sapien
taaggagtcactagagtatgcttttgctttgtg

SEQ ID NO: 364955 - DNA, 33 bp, Homo sapien
tgatggtgtacttttacagtcctagctactgga

SEQ ID NO: 364956 - DNA, 33 bp, Homo sapien
tgatggtgtacttttatagtcctagctactgga

SEQ ID NO: 364957 - DNA, 33 bp, Homo sapien
tggtggaccactcctgaatggtagttccttagt

SEQ ID NO: 364958 - DNA, 33 bp, Homo sapien
tggtggaccactcctggatggtagttccttagt

SEQ ID NO: 364959 - DNA, 33 bp, Homo sapien
ctttgggaacaccagactcgttgctcagagtaa

SEQ ID NO: 364960 - DNA, 33 bp, Homo sapien
ctttgggaacaccagagtcgttgctcagagtaa

SEQ ID NO: 364961 - DNA, 33 bp, Homo sapien
tccagggcatctggcaatctcatgcaaattcaa

SEQ ID NO: 364962 - DNA, 33 bp, Homo sapien
tccagggcatctggcagtctcatgcaaattcaa

SEQ ID NO: 364963 - DNA, 33 bp, Homo sapien
agtgtggaagaatggacgcttttattatttgcc

SEQ ID NO: 364964 - DNA, 33 bp, Homo sapien
agtgtggaagaatggatgcttttattatttgcc

SEQ ID NO: 364965 - DNA, 33 bp, Homo sapien
ccagcattcagtctcaaagagaatttacataac

SEQ ID NO: 364966 - DNA, 33 bp, Homo sapien
ccagcattcagtctcagagagaatttacataac

SEQ ID NO: 364967 - DNA, 33 bp, Homo sapien
gggcagatatatcccccactctcgcttaagcaa

SEQ ID NO: 364968 - DNA, 33 bp, Homo sapien
gggcagatatatccccgactctcgcttaagcaa

SEQ ID NO: 364969 - DNA, 33 bp, Homo sapien
gagcaagactccatctcaaaaataactcatgtg

SEQ ID NO: 364970 - DNA, 33 bp, Homo sapien
gagcaagactccatctgaaaaataactcatgtg

SEQ ID NO: 364971 - DNA, 33 bp, Homo sapien
ctatctttcctataccccaaataatatagagtc

SEQ ID NO: 364972 - DNA, 33 bp, Homo sapien
ctatctttcctatacctcaaataatatagagtc

SEQ ID NO: 364973 - DNA, 33 bp, Homo sapien
ggacacactgaaagaactgacttggaccacaca

SEQ ID NO: 364974 - DNA, 33 bp, Homo sapien
ggacacactgaaagaattgacttggaccacaca

SEQ ID NO: 364975 - DNA, 33 bp, Homo sapien
atgtgattgacaaacaatacaagtacctttgca

SEQ ID NO: 364976 - DNA, 33 bp, Homo sapien
atgtgattgacaaacagtacaagtacctttgca

SEQ ID NO: 364977 - DNA, 33 bp, Homo sapien
atagataaattaaccaaggaacagttaggagag

SEQ ID NO: 364978 - DNA, 33 bp, Homo sapien
atagataaattaaccacggaacagttaggagag

SEQ ID NO: 364979 - DNA, 33 bp, Homo sapien
aaagctcaaacaagccaaatacatactatttct

SEQ ID NO: 364980 - DNA, 33 bp, Homo sapien
aaagctcaaacaagccgaatacatactatttct

SEQ ID NO: 364981 - DNA, 33 bp, Homo sapien
cacaatgagaaagctacactagttcttctttgg

SEQ ID NO: 364982 - DNA, 33 bp, Homo sapien
cacaatgagaaagctagactagttcttctttgg

SEQ ID NO: 364983 - DNA, 33 bp, Homo sapien
ctgctcagtagggtaaactgattgccatgcttt

SEQ ID NO: 364984 - DNA, 33 bp, Homo sapien
ctgctcagtagggtaacctgattgccatgcttt

SEQ ID NO: 364985 - DNA, 33 bp, Homo sapien
gccagttttgtgcctccatgtcaagcctatttg

SEQ ID NO: 364986 - DNA, 33 bp, Homo sapien
gccagttttgtgcctcgatgtcaagcctatttg

SEQ ID NO: 364987 - DNA, 33 bp, Homo sapien
ctccaggtagaattcaataatgggtcgggagga

SEQ ID NO: 364988 - DNA, 33 bp, Homo sapien
ctccaggtagaattcagtaatgggtcgggagga

SEQ ID NO: 364989 - DNA, 33 bp, Homo sapien
catccaaaagcagtgacatgaccattcaagagc

SEQ ID NO: 364990 - DNA, 33 bp, Homo sapien
catccaaaagcagtgagatgaccattcaagagc

SEQ ID NO: 364991 - DNA, 33 bp, Homo sapien
ggaaggtatcggggaaaattgtaaataactatg

SEQ ID NO: 364992 - DNA, 33 bp, Homo sapien
ggaaggtatcggggaagattgtaaataactatg

SEQ ID NO: 364993 - DNA, 33 bp, Homo sapien
tgtaaggatcacaaggcatcttgcatatgaagc

SEQ ID NO: 364994 - DNA, 33 bp, Homo sapien
tgtaaggatcacaaggtatcttgcatatgaagc

SEQ ID NO: 364995 - DNA, 33 bp, Homo sapien
ctggttgttttactcaaagcataccaaaaagct

SEQ ID NO: 364996 - DNA, 33 bp, Homo sapien
ctggttgttttactcacagcataccaaaaagct

SEQ ID NO: 364997 - DNA, 33 bp, Homo sapien
atatttcttaaacttacggtcatcaaagacctc

SEQ ID NO: 364998 - DNA, 33 bp, Homo sapien
atatttcttaaacttatggtcatcaaagacctc

SEQ ID NO: 364999 - DNA, 33 bp, Homo sapien
atttgacttgccgtccccagtcaccatagtgga

SEQ ID NO: 365000 - DNA, 33 bp, Homo sapien
atttgacttgccgtccgcagtcaccatagtgga

SEQ ID NO: 365001 - DNA, 33 bp, Homo sapien
ttctggaacaacagaaaaatagaggtaagattc

SEQ ID NO: 365002 - DNA, 33 bp, Homo sapien
ttctggaacaacagaagaatagaggtaagattc

SEQ ID NO: 365003 - DNA, 33 bp, Homo sapien
agtagatttgggtaacagctgctctggtgtggt

SEQ ID NO: 365004 - DNA, 33 bp, Homo sapien
agtagatttgggtaacggctgctctggtgtggt

SEQ ID NO: 365005 - DNA, 33 bp, Homo sapien
aaaacacaaggagaaacgtgactcaggaatgta

SEQ ID NO: 365006 - DNA, 33 bp, Homo sapien
aaaacacaaggagaaatgtgactcaggaatgta

SEQ ID NO: 365007 - DNA, 33 bp, Homo sapien
ctacaaacataagccaacttttatttgtaatgt

SEQ ID NO: 365008 - DNA, 33 bp, Homo sapien
ctacaaacataagccagcttttatttgtaatgt

SEQ ID NO: 365009 - DNA, 33 bp, Homo sapien
tcatcaaagccatgtacacatcacattttccca

SEQ ID NO: 365010 - DNA, 33 bp, Homo sapien
tcatcaaagccatgtagacatcacattttccca

SEQ ID NO: 365011 - DNA, 33 bp, Homo sapien
gtctgtctggggagataacactttcatcaaagc

SEQ ID NO: 365012 - DNA, 33 bp, Homo sapien
gtctgtctggggagatgacactttcatcaaagc

SEQ ID NO: 365013 - DNA, 33 bp, Homo sapien
tagttcagcttgtacaatcttttgtgcataagg

SEQ ID NO: 365014 - DNA, 33 bp, Homo sapien
tagttcagcttgtacagtcttttgtgcataagg

SEQ ID NO: 365015 - DNA, 33 bp, Homo sapien
tatatcatcggataagaactccaattaaaatgg

SEQ ID NO: 365016 - DNA, 33 bp, Homo sapien
tatatcatcggataaggactccaattaaaatgg

SEQ ID NO: 365017 - DNA, 33 bp, Homo sapien
ctaactaaaacctggacgtgcttttctagacac

SEQ ID NO: 365018 - DNA, 33 bp, Homo sapien
ctaactaaaacctggatgtgcttttctagacac

SEQ ID NO: 365019 - DNA, 33 bp, Homo sapien
ttcatagggctttgcacgtatattctcaacaga

SEQ ID NO: 365020 - DNA, 33 bp, Homo sapien
ttcatagggctttgcatgtatattctcaacaga

SEQ ID NO: 365021 - DNA, 33 bp, Homo sapien
ttctgctcatggatcaacttaggccaccacaca

SEQ ID NO: 365022 - DNA, 33 bp, Homo sapien
ttctgctcatggatcagcttaggccaccacaca

SEQ ID NO: 365023 - DNA, 33 bp, Homo sapien
aaataatgagaagtgaccagaatctttgcccat

SEQ ID NO: 365024 - DNA, 33 bp, Homo sapien
aaataatgagaagtgagcagaatctttgcccat

SEQ ID NO: 365025 - DNA, 33 bp, Homo sapien
aggtcttttggttttgaaaccaggacattggca

SEQ ID NO: 365026 - DNA, 33 bp, Homo sapien
aggtcttttggttttgtaaccaggacattggca

SEQ ID NO: 365027 - DNA, 33 bp, Homo sapien
ggggttaagagggaaactgcaggaccatcagca

SEQ ID NO: 365028 - DNA, 33 bp, Homo sapien
ggggttaagagggaaattgcaggaccatcagca

SEQ ID NO: 365029 - DNA, 33 bp, Homo sapien
ccactacccacattctaaacagcactactgtaa

SEQ ID NO: 365030 - DNA, 33 bp, Homo sapien
ccactacccacattcttaacagcactactgtaa

SEQ ID NO: 365031 - DNA, 33 bp, Homo sapien
aacaactttgtcatccaactcaaaatactagtt

SEQ ID NO: 365032 - DNA, 33 bp, Homo sapien
aacaactttgtcatccgactcaaaatactagtt

SEQ ID NO: 365033 - DNA, 33 bp, Homo sapien
gctgttgggtttcagaataggaagaggttttca

SEQ ID NO: 365034 - DNA, 33 bp, Homo sapien
gctgttgggtttcagagtaggaagaggttttca

SEQ ID NO: 365035 - DNA, 33 bp, Homo sapien
aaacagccaaatggcaccaagaaaatgcatggg

SEQ ID NO: 365036 - DNA, 33 bp, Homo sapien
aaacagccaaatggcagcaagaaaatgcatggg

SEQ ID NO: 365037 - DNA, 33 bp, Homo sapien
aaaattatgttaaaaccctggtgtggagtacca

SEQ ID NO: 365038 - DNA, 33 bp, Homo sapien
aaaattatgttaaaactctggtgtggagtacca

SEQ ID NO: 365039 - DNA, 33 bp, Homo sapien
tgttaaagtgctttatcaactctactgagacac

SEQ ID NO: 365040 - DNA, 33 bp, Homo sapien
tgttaaagtgctttattaactctactgagacac

SEQ ID NO: 365041 - DNA, 33 bp, Homo sapien
tgttggagcaaaatgaataagtatgcagcctct

SEQ ID NO: 365042 - DNA, 33 bp, Homo sapien
tgttggagcaaaatgactaagtatgcagcctct

SEQ ID NO: 365043 - DNA, 33 bp, Homo sapien
tcagctcaaactgaaaacaaggaggcttctttt

SEQ ID NO: 365044 - DNA, 33 bp, Homo sapien
tcagctcaaactgaaagcaaggaggcttctttt

SEQ ID NO: 365045 - DNA, 33 bp, Homo sapien
aaaaccattggattctaaaggtagaggtcaccc

SEQ ID NO: 365046 - DNA, 33 bp, Homo sapien
aaaaccattggattctgaaggtagaggtcaccc

SEQ ID NO: 365047 - DNA, 33 bp, Homo sapien
tgattcaccctatttcacttgaatggtgacagc

SEQ ID NO: 365048 - DNA, 33 bp, Homo sapien
tgattcaccctatttcccttgaatggtgacagc

SEQ ID NO: 365049 - DNA, 33 bp, Homo sapien
caaaattagaaatataataacttacatgcacta

SEQ ID NO: 365050 - DNA, 33 bp, Homo sapien
caaaattagaaatatagtaacttacatgcacta

SEQ ID NO: 365051 - DNA, 33 bp, Homo sapien
acaaggtggcacttaacgatttcctttttctaa

SEQ ID NO: 365052 - DNA, 33 bp, Homo sapien
acaaggtggcacttaatgatttcctttttctaa

SEQ ID NO: 365053 - DNA, 33 bp, Homo sapien
ctgcacctcaggatcaactcactgacctaatat

SEQ ID NO: 365054 - DNA, 33 bp, Homo sapien
ctgcacctcaggatcatctcactgacctaatat

SEQ ID NO: 365055 - DNA, 33 bp, Homo sapien
gattaagataacggtaataagtcccacttgctg

SEQ ID NO: 365056 - DNA, 33 bp, Homo sapien
gattaagataacggtagtaagtcccacttgctg

SEQ ID NO: 365057 - DNA, 33 bp, Homo sapien
agatctagtgtctttccatcagcttagaagagt

SEQ ID NO: 365058 - DNA, 33 bp, Homo sapien
agatctagtgtctttctatcagcttagaagagt

SEQ ID NO: 365059 - DNA, 33 bp, Homo sapien
tccatcctacaccttaaactcagttacagcatc

SEQ ID NO: 365060 - DNA, 33 bp, Homo sapien
tccatcctacaccttagactcagttacagcatc

SEQ ID NO: 365061 - DNA, 33 bp, Homo sapien
tagatgcctgctaccaagaaggaatgtggacac

SEQ ID NO: 365062 - DNA, 33 bp, Homo sapien
tagatgcctgctaccaggaaggaatgtggacac

SEQ ID NO: 365063 - DNA, 33 bp, Homo sapien
tataagtatagtcagaaacatttgaaatgtgtc

SEQ ID NO: 365064 - DNA, 33 bp, Homo sapien
tataagtatagtcagagacatttgaaatgtgtc

SEQ ID NO: 365065 - DNA, 33 bp, Homo sapien
attgcctgcatctttcaaggaaaactcatgaat

SEQ ID NO: 365066 - DNA, 33 bp, Homo sapien
attgcctgcatctttccaggaaaactcatgaat

SEQ ID NO: 365067 - DNA, 33 bp, Homo sapien
ctaagtatactcaactaagcaacccatgccgct

SEQ ID NO: 365068 - DNA, 33 bp, Homo sapien
ctaagtatactcaactgagcaacccatgccgct

SEQ ID NO: 365069 - DNA, 33 bp, Homo sapien
tggtctgaaaagcaaagccttggaagtttcccc

SEQ ID NO: 365070 - DNA, 33 bp, Homo sapien
tggtctgaaaagcaaatccttggaagtttcccc

SEQ ID NO: 365071 - DNA, 33 bp, Homo sapien
ttgattagaaagggaaacttcatttaagcagca

SEQ ID NO: 365072 - DNA, 33 bp, Homo sapien
ttgattagaaagggaatcttcatttaagcagca

SEQ ID NO: 365073 - DNA, 33 bp, Homo sapien
gttgccactaagcatacaaattgagaagtttga

SEQ ID NO: 365074 - DNA, 33 bp, Homo sapien
gttgccactaagcatagaaattgagaagtttga

SEQ ID NO: 365075 - DNA, 33 bp, Homo sapien
cttagtggcaacgtcagtagctggtaaagttgg

SEQ ID NO: 365076 - DNA, 33 bp, Homo sapien
cttagtggcaacgtcattagctggtaaagttgg

SEQ ID NO: 365077 - DNA, 33 bp, Homo sapien
aaaccttgaagaaacgaagaccacagacattgc

SEQ ID NO: 365078 - DNA, 33 bp, Homo sapien
aaaccttgaagaaacggagaccacagacattgc

SEQ ID NO: 365079 - DNA, 33 bp, Homo sapien
aattgttgctggaaaaaatgaaagacttcattg

SEQ ID NO: 365080 - DNA, 33 bp, Homo sapien
aattgttgctggaaaacatgaaagacttcattg

SEQ ID NO: 365081 - DNA, 33 bp, Homo sapien
ccatgctgtaagggtccatttgtggccctatgt

SEQ ID NO: 365082 - DNA, 33 bp, Homo sapien
ccatgctgtaagggtctatttgtggccctatgt

SEQ ID NO: 365083 - DNA, 33 bp, Homo sapien
gcatgaagacacatgactaggaccttccagaca

SEQ ID NO: 365084 - DNA, 33 bp, Homo sapien
gcatgaagacacatgagtaggaccttccagaca

SEQ ID NO: 365085 - DNA, 33 bp, Homo sapien
aaataaccagatcttaggtgagctagcagagta

SEQ ID NO: 365086 - DNA, 33 bp, Homo sapien
aaataaccagatcttatgtgagctagcagagta

SEQ ID NO: 365087 - DNA, 33 bp, Homo sapien
tcctatattcatcgcaccattatttttgagaca

SEQ ID NO: 365088 - DNA, 33 bp, Homo sapien
tcctatattcatcgcagcattatttttgagaca

SEQ ID NO: 365089 - DNA, 33 bp, Homo sapien
taaaagtttgagggcactatacttgttttgatc

SEQ ID NO: 365090 - DNA, 33 bp, Homo sapien
taaaagtttgagggcagtatacttgttttgatc

SEQ ID NO: 365091 - DNA, 33 bp, Homo sapien
tatattggtttaactccactcatgttcaatgtc

SEQ ID NO: 365092 - DNA, 33 bp, Homo sapien
tatattggtttaactctactcatgttcaatgtc

SEQ ID NO: 365093 - DNA, 33 bp, Homo sapien
gtaatatggaaattgcaatgttattttatttgt

SEQ ID NO: 365094 - DNA, 33 bp, Homo sapien
gtaatatggaaattgctatgttattttatttgt

SEQ ID NO: 365095 - DNA, 33 bp, Homo sapien
agaggctaggcagccaaaaagttaggtttttaa

SEQ ID NO: 365096 - DNA, 33 bp, Homo sapien
agaggctaggcagccagaaagttaggtttttaa

SEQ ID NO: 365097 - DNA, 33 bp, Homo sapien
aatctgagcctttaacacctatgctattatact

SEQ ID NO: 365098 - DNA, 33 bp, Homo sapien
aatctgagcctttaacccctatgctattatact

SEQ ID NO: 365099 - DNA, 33 bp, Homo sapien
ggtttcgatggatgtacagacaaataagctcag

SEQ ID NO: 365100 - DNA, 33 bp, Homo sapien
ggtttcgatggatgtatagacaaataagctcag

SEQ ID NO: 365101 - DNA, 33 bp, Homo sapien
ggtcccaactaaaaagcctgtaactgttttgta

SEQ ID NO: 365102 - DNA, 33 bp, Homo sapien
ggtcccaactaaaaaggctgtaactgttttgta

SEQ ID NO: 365103 - DNA, 33 bp, Homo sapien
ttgaagagggtatgccaataattctaagtatgt

SEQ ID NO: 365104 - DNA, 33 bp, Homo sapien
ttgaagagggtatgccgataattctaagtatgt

SEQ ID NO: 365105 - DNA, 33 bp, Homo sapien
gacttatttactactacgaggacagtgtggggg

SEQ ID NO: 365106 - DNA, 33 bp, Homo sapien
gacttatttactactatgaggacagtgtggggg

SEQ ID NO: 365107 - DNA, 33 bp, Homo sapien; identical to SEQ ID NO: 365105

SEQ ID NO: 365108 - DNA, 33 bp, Homo sapien; identical to SEQ ID NO: 365106

SEQ ID NO: 365109 - DNA, 33 bp, Homo sapien
agcaaagttctgtttacaaagcggataatagcc

SEQ ID NO: 365110 - DNA, 33 bp, Homo sapien
agcaaagttctgtttagaaagcggataatagcc

SEQ ID NO: 365111 - DNA, 33 bp, Homo sapien
gaactgtgactcataaacttcgtagctttcaga

SEQ ID NO: 365112 - DNA, 33 bp, Homo sapien
gaactgtgactcataagcttcgtagctttcaga

SEQ ID NO: 365113 - DNA, 33 bp, Homo sapien
aaaataaagagatttacaccctgaagagagatc

SEQ ID NO: 365114 - DNA, 33 bp, Homo sapien
aaaataaagagatttagaccctgaagagagatc

SEQ ID NO: 365115 - DNA, 33 bp, Homo sapien
aatatatagcaaacgacaaggtagccaggaatt

SEQ ID NO: 365116 - DNA, 33 bp, Homo sapien
aatatatagcaaacgataaggtagccaggaatt

SEQ ID NO: 365117 - DNA, 33 bp, Homo sapien
ataggtagaaacacatcaagggatagccttggg

SEQ ID NO: 365118 - DNA, 33 bp, Homo sapien
ataggtagaaacacattaagggatagccttggg

SEQ ID NO: 365119 - DNA, 33 bp, Homo sapien
tgtgtttctacctataccaatagcaatcttgtc

SEQ ID NO: 365120 - DNA, 33 bp, Homo sapien
tgtgtttctacctatatcaatagcaatcttgtc

SEQ ID NO: 365121 - DNA, 33 bp, Homo sapien
tgtctctgcaagcttacatgactctcccaacag

SEQ ID NO: 365122 - DNA, 33 bp, Homo sapien
tgtctctgcaagcttagatgactctcccaacag

SEQ ID NO: 365123 - DNA, 33 bp, Homo sapien
attcaactccatagtaaaagctgctacgtggtc

SEQ ID NO: 365124 - DNA, 33 bp, Homo sapien
attcaactccatagtacaagctgctacgtggtc

SEQ ID NO: 365125 - DNA, 33 bp, Homo sapien
acagccatgtttaatgaaagtctctcacctagt

SEQ ID NO: 365126 - DNA, 33 bp, Homo sapien
acagccatgtttaatggaagtctctcacctagt

SEQ ID NO: 365127 - DNA, 33 bp, Homo sapien
ggggataatcaaaaaaagcaataaagtgtcctg

SEQ ID NO: 365128 - DNA, 33 bp, Homo sapien
ggggataatcaaaaaaggcaataaagtgtcctg

SEQ ID NO: 365129 - DNA, 33 bp, Homo sapien
ttcctcattcctgaaaaaaagagatgtagaata

SEQ ID NO: 365130 - DNA, 33 bp, Homo sapien
ttcctcattcctgaaagaaagagatgtagaata

SEQ ID NO: 365131 - DNA, 33 bp, Homo sapien
ccaggttgaatcaaaccagaaagactggcaaca

SEQ ID NO: 365132 - DNA, 33 bp, Homo sapien
ccaggttgaatcaaacgagaaagactggcaaca

SEQ ID NO: 365133 - DNA, 33 bp, Homo sapien
gcccttgagctaagaacgctttgttttttatgt

SEQ ID NO: 365134 - DNA, 33 bp, Homo sapien
gcccttgagctaagaatgctttgttttttatgt

SEQ ID NO: 365135 - DNA, 33 bp, Homo sapien
tgttatttgcctattaagggatttttgtgtatt

SEQ ID NO: 365136 - DNA, 33 bp, Homo sapien
tgttatttgcctattaggggatttttgtgtatt

SEQ ID NO: 365137 - DNA, 33 bp, Homo sapien
cgcaatatttttcttcccgactcaatctatatt

SEQ ID NO: 365138 - DNA, 33 bp, Homo sapien
cgcaatatttttcttctcgactcaatctatatt

SEQ ID NO: 365139 - DNA, 33 bp, Homo sapien
acttagtcaagaaatacagtcttaattcaagga

SEQ ID NO: 365140 - DNA, 33 bp, Homo sapien
acttagtcaagaaatagagtcttaattcaagga

SEQ ID NO: 365141 - DNA, 33 bp, Homo sapien
ctttcttttggaggaaggttctgaattaatttt

SEQ ID NO: 365142 - DNA, 33 bp, Homo sapien
ctttcttttggaggaatgttctgaattaatttt

SEQ ID NO: 365143 - DNA, 33 bp, Homo sapien
gaaacaaaatgcaaaaagagcaaaatgatcata

SEQ ID NO: 365144 - DNA, 33 bp, Homo sapien
gaaacaaaatgcaaaaggagcaaaatgatcata

SEQ ID NO: 365145 - DNA, 33 bp, Homo sapien
ttcagtttggagagccaacatactacctaactg

SEQ ID NO: 365146 - DNA, 33 bp, Homo sapien
ttcagtttggagagccgacatactacctaactg

SEQ ID NO: 365147 - DNA, 33 bp, Homo sapien
agtaaatacctaggaactgctgaatcgtcggat

SEQ ID NO: 365148 - DNA, 33 bp, Homo sapien
agtaaatacctaggaattgctgaatcgtcggat

SEQ ID NO: 365149 - DNA, 33 bp, Homo sapien
tatcaaactgttttgcaaagtggctaaattatt

SEQ ID NO: 365150 - DNA, 33 bp, Homo sapien
tatcaaactgttttgcgaagtggctaaattatt

SEQ ID NO: 365151 - DNA, 33 bp, Homo sapien
gataactcttgtatctcaaaactcaacctactc

SEQ ID NO: 365152 - DNA, 33 bp, Homo sapien
gataactcttgtatcttaaaactcaacctactc

SEQ ID NO: 365153 - DNA, 33 bp, Homo sapien
atgtgttattaattccagatgtgacattactac

SEQ ID NO: 365154 - DNA, 33 bp, Homo sapien
atgtgttattaattccggatgtgacattactac

SEQ ID NO: 365155 - DNA, 33 bp, Homo sapien
ttattctcctgttgtacggagatgtattgcaat

SEQ ID NO: 365156 - DNA, 33 bp, Homo sapien
ttattctcctgttgtatggagatgtattgcaat

SEQ ID NO: 365157 - DNA, 33 bp, Homo sapien
tccatgttgttgcatacggtaggatctcctttt

SEQ ID NO: 365158 - DNA, 33 bp, Homo sapien
tccatgttgttgcatatggtaggatctcctttt

SEQ ID NO: 365159 - DNA, 33 bp, Homo sapien
tgtgtcctgtggtttacgtgagatctaacacaa

SEQ ID NO: 365160 - DNA, 33 bp, Homo sapien
tgtgtcctgtggtttatgtgagatctaacacaa

SEQ ID NO: 365161 - DNA, 33 bp, Homo sapien
atcaaagtgagtcaaactgagttggatctaatt

SEQ ID NO: 365162 - DNA, 33 bp, Homo sapien
atcaaagtgagtcaaattgagttggatctaatt

SEQ ID NO: 365163 - DNA, 33 bp, Homo sapien
cagaggaagttccgataaatttcttgctgattc

SEQ ID NO: 365164 - DNA, 33 bp, Homo sapien
cagaggaagttccgatgaatttcttgctgattc

SEQ ID NO: 365165 - DNA, 33 bp, Homo sapien
aagaatttctactagaataactgctaaaataca

SEQ ID NO: 365166 - DNA, 33 bp, Homo sapien
aagaatttctactagactaactgctaaaataca

SEQ ID NO: 365167 - DNA, 33 bp, Homo sapien
accacagtcttggccacgtaaaaagtggaggta

SEQ ID NO: 365168 - DNA, 33 bp, Homo sapien
accacagtcttggccatgtaaaaagtggaggta

SEQ ID NO: 365169 - DNA, 33 bp, Homo sapien
atgtgaggagcaaatcagagtcagagagatact

SEQ ID NO: 365170 - DNA, 33 bp, Homo sapien
atgtgaggagcaaatccgagtcagagagatact

SEQ ID NO: 365171 - DNA, 33 bp, Homo sapien
ggaatcagttatcatacagtcaattattactga

SEQ ID NO: 365172 - DNA, 33 bp, Homo sapien
ggaatcagttatcatatagtcaattattactga

SEQ ID NO: 365173 - DNA, 33 bp, Homo sapien
tcccctgctccactcaacttttgcctaatctac

SEQ ID NO: 365174 - DNA, 33 bp, Homo sapien
tcccctgctccactcagcttttgcctaatctac

SEQ ID NO: 365175 - DNA, 33 bp, Homo sapien
gccttgtaattcagtcccctcatctactctaca

SEQ ID NO: 365176 - DNA, 33 bp, Homo sapien
gccttgtaattcagtctcctcatctactctaca

SEQ ID NO: 365177 - DNA, 33 bp, Homo sapien
cttaggcccatgcatcaagatttaagcaacaga

SEQ ID NO: 365178 - DNA, 33 bp, Homo sapien
cttaggcccatgcatcgagatttaagcaacaga

SEQ ID NO: 365179 - DNA, 33 bp, Homo sapien
cagagttcagcattgaaagtacatggagaactg

SEQ ID NO: 365180 - DNA, 33 bp, Homo sapien
cagagttcagcattgagagtacatggagaactg

SEQ ID NO: 365181 - DNA, 33 bp, Homo sapien
acggacggtccataaaatgcagctgctactcag

SEQ ID NO: 365182 - DNA, 33 bp, Homo sapien
acggacggtccataaactgcagctgctactcag

SEQ ID NO: 365183 - DNA, 33 bp, Homo sapien
aacacttagtgattcgaaaccaacaaaagttta

SEQ ID NO: 365184 - DNA, 33 bp, Homo sapien
aacacttagtgattcgtaaccaacaaaagttta

SEQ ID NO: 365185 - DNA, 33 bp, Homo sapien
aggctagacacataggaattgtttaggaattac

SEQ ID NO: 365186 - DNA, 33 bp, Homo sapien
aggctagacacataggtattgtttaggaattac

SEQ ID NO: 365187 - DNA, 33 bp, Homo sapien
ccaatttaaagaaggccgatcttttccacttag

SEQ ID NO: 365188 - DNA, 33 bp, Homo sapien
ccaatttaaagaaggctgatcttttccacttag

SEQ ID NO: 365189 - DNA, 33 bp, Homo sapien
aaatgtgtgctttaacaaaaaatagagctcatg

SEQ ID NO: 365190 - DNA, 33 bp, Homo sapien
aaatgtgtgctttaacgaaaaatagagctcatg

SEQ ID NO: 365191 - DNA, 33 bp, Homo sapien
ctatagtttatcatgcaaatattacatagaagc

SEQ ID NO: 365192 - DNA, 33 bp, Homo sapien
ctatagtttatcatgcgaatattacatagaagc

SEQ ID NO: 365193 - DNA, 33 bp, Homo sapien
gatgaaatgtgaaatcgaaccgttcagactaaa

SEQ ID NO: 365194 - DNA, 33 bp, Homo sapien
gatgaaatgtgaaatctaaccgttcagactaaa

SEQ ID NO: 365195 - DNA, 33 bp, Homo sapien
gttaatctctcaatgacccttgtagcaacctgt

SEQ ID NO: 365196 - DNA, 33 bp, Homo sapien
gttaatctctcaatgatccttgtagcaacctgt

SEQ ID NO: 365197 - DNA, 33 bp, Homo sapien
gaaaaaataagctagacagaatgaaaaacaatt

SEQ ID NO: 365198 - DNA, 33 bp, Homo sapien
gaaaaaataagctagagagaatgaaaaacaatt

SEQ ID NO: 365199 - DNA, 33 bp, Homo sapien
acatttatgccaatgaaaattcactgcttaaaa

SEQ ID NO: 365200 - DNA, 33 bp, Homo sapien
acatttatgccaatgataattcactgcttaaaa

SEQ ID NO: 365201 - DNA, 33 bp, Homo sapien
tagaatccagctttcccgacttgaagtacaaat

SEQ ID NO: 365202 - DNA, 33 bp, Homo sapien
tagaatccagctttcctgacttgaagtacaaat

SEQ ID NO: 365203 - DNA, 33 bp, Homo sapien
aagactgtttgatgtccaaaaagcatagggtgt

SEQ ID NO: 365204 - DNA, 33 bp, Homo sapien
aagactgtttgatgtctaaaaagcatagggtgt

SEQ ID NO: 365205 - DNA, 33 bp, Homo sapien
tgtttcttccagaaatcaagagtgtaatactag

SEQ ID NO: 365206 - DNA, 33 bp, Homo sapien
tgtttcttccagaaatgaagagtgtaatactag

SEQ ID NO: 365207 - DNA, 33 bp, Homo sapien
ggatagtctgtttttcccattagtttctgcttt

SEQ ID NO: 365208 - DNA, 33 bp, Homo sapien
ggatagtctgtttttctcattagtttctgcttt

SEQ ID NO: 365209 - DNA, 33 bp, Homo sapien
ggcttccaaatgtggcaaagttcatcagaaaaa

SEQ ID NO: 365210 - DNA, 33 bp, Homo sapien
ggcttccaaatgtggcgaagttcatcagaaaaa

SEQ ID NO: 365211 - DNA, 33 bp, Homo sapien
atgcttgaggtgacgaatatcccaattaccctg

SEQ ID NO: 365212 - DNA, 33 bp, Homo sapien
atgcttgaggtgacgagtatcccaattaccctg

SEQ ID NO: 365213 - DNA, 33 bp, Homo sapien
tttttgtatccgttaaccatcctctgtttattt

SEQ ID NO: 365214 - DNA, 33 bp, Homo sapien
tttttgtatccgttaatcatcctctgtttattt

SEQ ID NO: 365215 - DNA, 33 bp, Homo sapien
ggaacggcagtgaggaaggggaaataaacagag

SEQ ID NO: 365216 - DNA, 33 bp, Homo sapien
ggaacggcagtgaggagggggaaataaacagag

SEQ ID NO: 365217 - DNA, 33 bp, Homo sapien
tgtggcaaaaaccaaaagagttcaattcagcat

SEQ ID NO: 365218 - DNA, 33 bp, Homo sapien
tgtggcaaaaaccaaaggagttcaattcagcat

SEQ ID NO: 365219 - DNA, 33 bp, Homo sapien
ggagagaaaagactcacgtaagtccagacattc

SEQ ID NO: 365220 - DNA, 33 bp, Homo sapien
ggagagaaaagactcatgtaagtccagacattc

SEQ ID NO: 365221 - DNA, 33 bp, Homo sapien
aaaatggctctagagaaaggaagcaactcgcag

SEQ ID NO: 365222 - DNA, 33 bp, Homo sapien
aaaatggctctagagagaggaagcaactcgcag

SEQ ID NO: 365223 - DNA, 33 bp, Homo sapien
atgagttggaggaagaaaacctagtggcctact

SEQ ID NO: 365224 - DNA, 33 bp, Homo sapien
atgagttggaggaagacaacctagtggcctact

SEQ ID NO: 365225 - DNA, 33 bp, Homo sapien
tagttcaggaaactaacattaaaagaaattaaa

SEQ ID NO: 365226 - DNA, 33 bp, Homo sapien
tagttcaggaaactaagattaaaagaaattaaa

SEQ ID NO: 365227 - DNA, 33 bp, Homo sapien
aacaggtgaagttttcaaatggtccctggcata

SEQ ID NO: 365228 - DNA, 33 bp, Homo sapien
aacaggtgaagttttccaatggtccctggcata

SEQ ID NO: 365229 - DNA, 33 bp, Homo sapien
tactctgcttttcccaaaatgagctccagttga

SEQ ID NO: 365230 - DNA, 33 bp, Homo sapien
tactctgcttttcccagaatgagctccagttga

SEQ ID NO: 365231 - DNA, 33 bp, Homo sapien
cttatgggtgaaatacactcagcatacaaagcc

SEQ ID NO: 365232 - DNA, 33 bp, Homo sapien
cttatgggtgaaatacgctcagcatacaaagcc

SEQ ID NO: 365233 - DNA, 33 bp, Homo sapien
cctgattgcttataaacatgacagaaataagga

SEQ ID NO: 365234 - DNA, 33 bp, Homo sapien
cctgattgcttataaagatgacagaaataagga

SEQ ID NO: 365235 - DNA, 33 bp, Homo sapien
tccctgactcagcttcgcaatgacacaatagaa

SEQ ID NO: 365236 - DNA, 33 bp, Homo sapien
tccctgactcagcttctcaatgacacaatagaa

SEQ ID NO: 365237 - DNA, 33 bp, Homo sapien
caattgaacgcctaacgataatattctactgca

SEQ ID NO: 365238 - DNA, 33 bp, Homo sapien
caattgaacgcctaactataatattctactgca

SEQ ID NO: 365239 - DNA, 33 bp, Homo sapien
gaatttagattatcccactaaccaatcatgtgg

SEQ ID NO: 365240 - DNA, 33 bp, Homo sapien
gaatttagattatcccgctaaccaatcatgtgg

SEQ ID NO: 365241 - DNA, 33 bp, Homo sapien
attattggtagttctggatcaaatcagtatatc

SEQ ID NO: 365242 - DNA, 33 bp, Homo sapien
attattggtagttctgtatcaaatcagtatatc

SEQ ID NO: 365243 - DNA, 33 bp, Homo sapien
aatgtccaattatttaacatctccaggtttgtc

SEQ ID NO: 365244 - DNA, 33 bp, Homo sapien
aatgtccaattatttagcatctccaggtttgtc

SEQ ID NO: 365245 - DNA, 33 bp, Homo sapien
aaatagggagagtaaacagaaagttgcatcaaa

SEQ ID NO: 365246 - DNA, 33 bp, Homo sapien
aaatagggagagtaaagagaaagttgcatcaaa

SEQ ID NO: 365247 - DNA, 33 bp, Homo sapien
atcatctttcaaacaaacattattgattgaata

SEQ ID NO: 365248 - DNA, 33 bp, Homo sapien
atcatctttcaaacaagcattattgattgaata

SEQ ID NO: 365249 - DNA, 33 bp, Homo sapien
gtcataagacttttcacgagaaatggctgagat

SEQ ID NO: 365250 - DNA, 33 bp, Homo sapien
gtcataagacttttcatgagaaatggctgagat

SEQ ID NO: 365251 - DNA, 33 bp, Homo sapien
atcttgaattctacgcaaagcacccttctctaa

SEQ ID NO: 365252 - DNA, 33 bp, Homo sapien
atcttgaattctacgcgaagcacccttctctaa

SEQ ID NO: 365253 - DNA, 33 bp, Homo sapien
tgctaagtaagcaaataaatgcatgccacagca

SEQ ID NO: 365254 - DNA, 33 bp, Homo sapien
tgctaagtaagcaaatgaatgcatgccacagca

SEQ ID NO: 365255 - DNA, 33 bp, Homo sapien
tgcctatcttttctgccaatgaatcctaagacg

SEQ ID NO: 365256 - DNA, 33 bp, Homo sapien
tgcctatcttttctgctaatgaatcctaagacg

SEQ ID NO: 365257 - DNA, 33 bp, Homo sapien
cttctgactttgctgactcaattcattcaacaa

SEQ ID NO: 365258 - DNA, 33 bp, Homo sapien
cttctgactttgctgattcaattcattcaacaa

SEQ ID NO: 365259 - DNA, 33 bp, Homo sapien
gcaaactgactttgcaacataaagcaaaaccat

SEQ ID NO: 365260 - DNA, 33 bp, Homo sapien
gcaaactgactttgcagcataaagcaaaaccat

SEQ ID NO: 365261 - DNA, 33 bp, Homo sapien
tgattcaatctgtgcactcagaatccactgaat

SEQ ID NO: 365262 - DNA, 33 bp, Homo sapien
tgattcaatctgtgcattcagaatccactgaat

SEQ ID NO: 365263 - DNA, 33 bp, Homo sapien
agggataaaaatagcaacttcctgaatggattg

SEQ ID NO: 365264 - DNA, 33 bp, Homo sapien
agggataaaaatagcaccttcctgaatggattg

SEQ ID NO: 365265 - DNA, 33 bp, Homo sapien
tacagacggaattcaacgcaaaatgagcaggtt

SEQ ID NO: 365266 - DNA, 33 bp, Homo sapien
tacagacggaattcaatgcaaaatgagcaggtt

SEQ ID NO: 365267 - DNA, 33 bp, Homo sapien
acatgaaaccatgatgcaaattttttacgtgcc

SEQ ID NO: 365268 - DNA, 33 bp, Homo sapien
acatgaaaccatgatggaaattttttacgtgcc

SEQ ID NO: 365269 - DNA, 33 bp, Homo sapien
taaactttctgctagaagctaaataaatacctc

SEQ ID NO: 365270 - DNA, 33 bp, Homo sapien
taaactttctgctagatgctaaataaatacctc

SEQ ID NO: 365271 - DNA, 33 bp, Homo sapien
gcagaaagtttaattaagaatggatcaccttca

SEQ ID NO: 365272 - DNA, 33 bp, Homo sapien
gcagaaagtttaattatgaatggatcaccttca

SEQ ID NO: 365273 - DNA, 33 bp, Homo sapien
cattaactgctgattgaataagtaaaatgcagt

SEQ ID NO: 365274 - DNA, 33 bp, Homo sapien
cattaactgctgattggataagtaaaatgcagt

SEQ ID NO: 365275 - DNA, 33 bp, Homo sapien
catatctttgatttcaccatctgtaaagtgagc

SEQ ID NO: 365276 - DNA, 33 bp, Homo sapien
catatctttgatttcagcatctgtaaagtgagc

SEQ ID NO: 365277 - DNA, 33 bp, Homo sapien
gaggtaatagcaagcacgtagtttgcacacagt

SEQ ID NO: 365278 - DNA, 33 bp, Homo sapien
gaggtaatagcaagcaggtagtttgcacacagt

SEQ ID NO: 365279 - DNA, 33 bp, Homo sapien
aaaatatagaacccaacttgatgcaaaattatg

SEQ ID NO: 365280 - DNA, 33 bp, Homo sapien
aaaatatagaacccaagttgatgcaaaattatg

SEQ ID NO: 365281 - DNA, 33 bp, Homo sapien
tgtctcaaaaataagaccgattaattaacaata

SEQ ID NO: 365282 - DNA, 33 bp, Homo sapien
tgtctcaaaaataagagcgattaattaacaata

SEQ ID NO: 365283 - DNA, 33 bp, Homo sapien
accaacttgcagggaacggaccaagtatttatt

SEQ ID NO: 365284 - DNA, 33 bp, Homo sapien
accaacttgcagggaatggaccaagtatttatt

SEQ ID NO: 365285 - DNA, 33 bp, Homo sapien
acatgacgccagaatcagagacactgagagaat

SEQ ID NO: 365286 - DNA, 33 bp, Homo sapien
acatgacgccagaatctgagacactgagagaat

SEQ ID NO: 365287 - DNA, 33 bp, Homo sapien
gctttgtcctggtccaatcatctccatatttaa

SEQ ID NO: 365288 - DNA, 33 bp, Homo sapien
gctttgtcctggtccagtcatctccatatttaa

SEQ ID NO: 365289 - DNA, 33 bp, Homo sapien
ggaaacaaaaccaggacatttggagtgactccc

SEQ ID NO: 365290 - DNA, 33 bp, Homo sapien
ggaaacaaaaccaggagatttggagtgactccc

SEQ ID NO: 365291 - DNA, 33 bp, Homo sapien
tgctcattcctaaagccgcctctgaacacataa

SEQ ID NO: 365292 - DNA, 33 bp, Homo sapien
tgctcattcctaaagctgcctctgaacacataa

SEQ ID NO: 365293 - DNA, 33 bp, Homo sapien
caaaatggcctcttgacatggtattcattggtt

SEQ ID NO: 365294 - DNA, 33 bp, Homo sapien
caaaatggcctcttgatatggtattcattggtt

SEQ ID NO: 365295 - DNA, 33 bp, Homo sapien
tgatacagatggagaaaaatgaaggagtgtaat

SEQ ID NO: 365296 - DNA, 33 bp, Homo sapien
tgatacagatggagaacaatgaaggagtgtaat

SEQ ID NO: 365297 - DNA, 33 bp, Homo sapien
ctgtaaaatgggaaaactgtagccgtacttgct

SEQ ID NO: 365298 - DNA, 33 bp, Homo sapien
ctgtaaaatgggaaaagtgtagccgtacttgct

SEQ ID NO: 365299 - DNA, 33 bp, Homo sapien
gattctcatgcctcaacttctcaagtagctggg

SEQ ID NO: 365300 - DNA, 33 bp, Homo sapien
gattctcatgcctcaagttctcaagtagctggg

SEQ ID NO: 365301 - DNA, 33 bp, Homo sapien
cctgatgggattcaaactgagatgggtggataa

SEQ ID NO: 365302 - DNA, 33 bp, Homo sapien
cctgatgggattcaaagtgagatgggtggataa

SEQ ID NO: 365303 - DNA, 33 bp, Homo sapien
tctaattgacacataaaaaaatactggaataag

SEQ ID NO: 365304 - DNA, 33 bp, Homo sapien
tctaattgacacataacaaaatactggaataag

SEQ ID NO: 365305 - DNA, 33 bp, Homo sapien
tggctgctttccctcaaaataatgcatttgaaa

SEQ ID NO: 365306 - DNA, 33 bp, Homo sapien
tggctgctttccctcagaataatgcatttgaaa

SEQ ID NO: 365307 - DNA, 33 bp, Homo sapien
caaatcactggtttccaagagctgaggatgggg

SEQ ID NO: 365308 - DNA, 33 bp, Homo sapien
caaatcactggtttccgagagctgaggatgggg

SEQ ID NO: 365309 - DNA, 33 bp, Homo sapien
accacagtggctaacaatgacagaagttcaggt

SEQ ID NO: 365310 - DNA, 33 bp, Homo sapien
accacagtggctaacagtgacagaagttcaggt

SEQ ID NO: 365311 - DNA, 33 bp, Homo sapien
cacactggcagtctccaacctcaacttcaactc

SEQ ID NO: 365312 - DNA, 33 bp, Homo sapien
cacactggcagtctcctacctcaacttcaactc

SEQ ID NO: 365313 - DNA, 33 bp, Homo sapien
aaaagtctggctagaaccccctgaccaggcaag

SEQ ID NO: 365314 - DNA, 33 bp, Homo sapien
aaaagtctggctagaatcccctgaccaggcaag

SEQ ID NO: 365315 - DNA, 33 bp, Homo sapien
attactttttaacagaccatgtggtatagacgg

SEQ ID NO: 365316 - DNA, 33 bp, Homo sapien
attactttttaacagatcatgtggtatagacgg

SEQ ID NO: 365317 - DNA, 33 bp, Homo sapien
taaagtgtcaaatagacgctggagattaattaa

SEQ ID NO: 365318 - DNA, 33 bp, Homo sapien
taaagtgtcaaatagatgctggagattaattaa

SEQ ID NO: 365319 - DNA, 33 bp, Homo sapien
cctccatgaggccacaagttctcatcattcagc

SEQ ID NO: 365320 - DNA, 33 bp, Homo sapien
cctccatgaggccacaggttctcatcattcagc

SEQ ID NO: 365321 - DNA, 33 bp, Homo sapien
ggcatgggtcccttccagacagaagctttaaag

SEQ ID NO: 365322 - DNA, 33 bp, Homo sapien
ggcatgggtcccttccggacagaagctttaaag

SEQ ID NO: 365323 - DNA, 33 bp, Homo sapien
tgtgccccttcctcccacctctgacagtgagga

SEQ ID NO: 365324 - DNA, 33 bp, Homo sapien
tgtgccccttcctcccgcctctgacagtgagga

SEQ ID NO: 365325 - DNA, 33 bp, Homo sapien
cagtgaggagcagagaaatggagtctttttcaa

SEQ ID NO: 365326 - DNA, 33 bp, Homo sapien
cagtgaggagcagagagatggagtctttttcaa

SEQ ID NO: 365327 - DNA, 33 bp, Homo sapien
gagatgggtgtgaggacggctcaacttattgtg

SEQ ID NO: 365328 - DNA, 33 bp, Homo sapien
gagatgggtgtgaggagggctcaacttattgtg

SEQ ID NO: 365329 - DNA, 33 bp, Homo sapien
cttgtacatatccaccagaactcttgggtgatt

SEQ ID NO: 365330 - DNA, 33 bp, Homo sapien
cttgtacatatccaccggaactcttgggtgatt

SEQ ID NO: 365331 - DNA, 33 bp, Homo sapien
agaagttgaggccgacggtcacggataagttag

SEQ ID NO: 365332 - DNA, 33 bp, Homo sapien
agaagttgaggccgactgtcacggataagttag

SEQ ID NO: 365333 - DNA, 33 bp, Homo sapien
atttgtcagtcctttcaaaccctaccactgctt

SEQ ID NO: 365334 - DNA, 33 bp, Homo sapien
atttgtcagtcctttccaaccctaccactgctt

SEQ ID NO: 365335 - DNA, 33 bp, Homo sapien
aataataacaaccttaaccccaactatctgttc

SEQ ID NO: 365336 - DNA, 33 bp, Homo sapien
aataataacaaccttagccccaactatctgttc

SEQ ID NO: 365337 - DNA, 33 bp, Homo sapien
aacccaactgtggtcaataagacattcagaagg

SEQ ID NO: 365338 - DNA, 33 bp, Homo sapien
aacccaactgtggtcagtaagacattcagaagg

SEQ ID NO: 365339 - DNA, 33 bp, Homo sapien
taggccactggagcatgagtcctgagaaccggc

SEQ ID NO: 365340 - DNA, 33 bp, Homo sapien
taggccactggagcattagtcctgagaaccggc

SEQ ID NO: 365341 - DNA, 33 bp, Homo sapien
ggcagagccttgcggaggcacagtttggaagca

SEQ ID NO: 365342 - DNA, 33 bp, Homo sapien
ggcagagccttgcggatgcacagtttggaagca

SEQ ID NO: 365343 - DNA, 33 bp, Homo sapien
cttgaggaagcccaccaacttctctgcagagtt

SEQ ID NO: 365344 - DNA, 33 bp, Homo sapien
cttgaggaagcccaccgacttctctgcagagtt

SEQ ID NO: 365345 - DNA, 33 bp, Homo sapien
gcaacaaaagtttccactcaaccctgagctctg

SEQ ID NO: 365346 - DNA, 33 bp, Homo sapien
gcaacaaaagtttccattcaaccctgagctctg

SEQ ID NO: 365347 - DNA, 33 bp, Homo sapien
ggaatatatggctatcacagtaggatctttcct

SEQ ID NO: 365348 - DNA, 33 bp, Homo sapien
ggaatatatggctatcgcagtaggatctttcct

SEQ ID NO: 365349 - DNA, 33 bp, Homo sapien
aatatctatgaggaagaacaggccaatgctttt

SEQ ID NO: 365350 - DNA, 33 bp, Homo sapien
aatatctatgaggaagcacaggccaatgctttt

SEQ ID NO: 365351 - DNA, 33 bp, Homo sapien
ctgttaatttagccgtcaaacacatcagtttac

SEQ ID NO: 365352 - DNA, 33 bp, Homo sapien
ctgttaatttagccgtgaaacacatcagtttac

SEQ ID NO: 365353 - DNA, 33 bp, Homo sapien
tacaatggttcagctacggtttttcaactttat

SEQ ID NO: 365354 - DNA, 33 bp, Homo sapien
tacaatggttcagctatggtttttcaactttat

SEQ ID NO: 365355 - DNA, 33 bp, Homo sapien
tggttaggctacgctacgatgtttggttacgaa

SEQ ID NO: 365356 - DNA, 33 bp, Homo sapien
tggttaggctacgctatgatgtttggttacgaa

SEQ ID NO: 365357 - DNA, 33 bp, Homo sapien
gaaaacattttcatacactccgaaaattattgt

SEQ ID NO: 365358 - DNA, 33 bp, Homo sapien
gaaaacattttcatacgctccgaaaattattgt

SEQ ID NO: 365359 - DNA, 33 bp, Homo sapien
tcggctgggtaaaataaagtaaaagcatttaga

SEQ ID NO: 365360 - DNA, 33 bp, Homo sapien
tcggctgggtaaaatacagtaaaagcatttaga

SEQ ID NO: 365361 - DNA, 33 bp, Homo sapien
gcaattacttttgggccaacctaatgcattcac

SEQ ID NO: 365362 - DNA, 33 bp, Homo sapien
gcaattacttttgggctaacctaatgcattcac

SEQ ID NO: 365363 - DNA, 33 bp, Homo sapien
tagaggcatgaatgggcaaatctctccactgag

SEQ ID NO: 365364 - DNA, 33 bp, Homo sapien
tagaggcatgaatgggtaaatctctccactgag

SEQ ID NO: 365365 - DNA, 33 bp, Homo sapien
aggtaattgtgttttgcagcagttcgtaagtct

SEQ ID NO: 365366 - DNA, 33 bp, Homo sapien
aggtaattgtgttttgtagcagttcgtaagtct

SEQ ID NO: 365367 - DNA, 33 bp, Homo sapien
aagtctgggcatttacactggcaattccagatt

SEQ ID NO: 365368 - DNA, 33 bp, Homo sapien
aagtctgggcatttacgctggcaattccagatt

SEQ ID NO: 365369 - DNA, 33 bp, Homo sapien
acatggtgctgtgtcaaaaacgtgcatttaaca

SEQ ID NO: 365370 - DNA, 33 bp, Homo sapien
acatggtgctgtgtcagaaacgtgcatttaaca

SEQ ID NO: 365371 - DNA, 33 bp, Homo sapien
tggcttagttctgcaaattattagcttagtacc

SEQ ID NO: 365372 - DNA, 33 bp, Homo sapien
tggcttagttctgcaacttattagcttagtacc

SEQ ID NO: 365373 - DNA, 33 bp, Homo sapien
ttttgaacttgacatccgagtcacattctccac

SEQ ID NO: 365374 - DNA, 33 bp, Homo sapien
ttttgaacttgacatctgagtcacattctccac

SEQ ID NO: 365375 - DNA, 33 bp, Homo sapien
actttcttctgtagacaaatgtggttgaaaagt

SEQ ID NO: 365376 - DNA, 33 bp, Homo sapien
actttcttctgtagacgaatgtggttgaaaagt

SEQ ID NO: 365377 - DNA, 33 bp, Homo sapien
tacctcagcaatcttgcaactttgggaatgcat

SEQ ID NO: 365378 - DNA, 33 bp, Homo sapien
tacctcagcaatcttggaactttgggaatgcat

SEQ ID NO: 365379 - DNA, 33 bp, Homo sapien
tcttgcgctgcaaggcaaatcagatcgcagaga

SEQ ID NO: 365380 - DNA, 33 bp, Homo sapien
tcttgcgctgcaaggcgaatcagatcgcagaga

SEQ ID NO: 365381 - DNA, 33 bp, Homo sapien
atcctcttattaagaacgctgtgtttagaaatc

SEQ ID NO: 365382 - DNA, 33 bp, Homo sapien
atcctcttattaagaatgctgtgtttagaaatc

SEQ ID NO: 365383 - DNA, 33 bp, Homo sapien
accagctggatattccacagataattcaagttt

SEQ ID NO: 365384 - DNA, 33 bp, Homo sapien
accagctggatattccgcagataattcaagttt

SEQ ID NO: 365385 - DNA, 33 bp, Homo sapien
aaagcttaattagaaacggagcagcagaaacag

SEQ ID NO: 365386 - DNA, 33 bp, Homo sapien
aaagcttaattagaaatggagcagcagaaacag

SEQ ID NO: 365387 - DNA, 33 bp, Homo sapien
atttcctttaaacgccagattcaatagggagat

SEQ ID NO: 365388 - DNA, 33 bp, Homo sapien
atttcctttaaacgccggattcaatagggagat

SEQ ID NO: 365389 - DNA, 33 bp, Homo sapien
atttacatgcataatcacctggtaagtaaggaa

SEQ ID NO: 365390 - DNA, 33 bp, Homo sapien
atttacatgcataatcccctggtaagtaaggaa

SEQ ID NO: 365391 - DNA, 33 bp, Homo sapien
tatctatttttctacaaagaatcctaatggtat

SEQ ID NO: 365392 - DNA, 33 bp, Homo sapien
tatctatttttctacagagaatcctaatggtat

SEQ ID NO: 365393 - DNA, 33 bp, Homo sapien
gcataaaggcaacacactgacaaacaaaacatt

SEQ ID NO: 365394 - DNA, 33 bp, Homo sapien
gcataaaggcaacacattgacaaacaaaacatt

SEQ ID NO: 365395 - DNA, 33 bp, Homo sapien
ctttgggatgagtgaaagctgagcaaagtggag

SEQ ID NO: 365396 - DNA, 33 bp, Homo sapien
ctttgggatgagtgaaggctgagcaaagtggag

SEQ ID NO: 365397 - DNA, 33 bp, Homo sapien
aatagtttatttgaaccagcaacattttccttc

SEQ ID NO: 365398 - DNA, 33 bp, Homo sapien
aatagtttatttgaacgagcaacattttccttc

SEQ ID NO: 365399 - DNA, 33 bp, Homo sapien
taaatttctttaggaaactattctgatgatcaa

SEQ ID NO: 365400 - DNA, 33 bp, Homo sapien
taaatttctttaggaagctattctgatgatcaa

SEQ ID NO: 365401 - DNA, 33 bp, Homo sapien
cccagacctagggcatcaagtttaaattaagct

SEQ ID NO: 365402 - DNA, 33 bp, Homo sapien
cccagacctagggcatgaagtttaaattaagct

SEQ ID NO: 365403 - DNA, 33 bp, Homo sapien
atgcaacactctatatcagcaaggtgattttta

SEQ ID NO: 365404 - DNA, 33 bp, Homo sapien
atgcaacactctatattagcaaggtgattttta

SEQ ID NO: 365405 - DNA, 33 bp, Homo sapien
gactgtttctctagaactctgcaggaagaggtg

SEQ ID NO: 365406 - DNA, 33 bp, Homo sapien
gactgtttctctagaattctgcaggaagaggtg

SEQ ID NO: 365407 - DNA, 33 bp, Homo sapien
tgatctggaataactgaacttctgctaagcctg

SEQ ID NO: 365408 - DNA, 33 bp, Homo sapien
tgatctggaataactggacttctgctaagcctg

SEQ ID NO: 365409 - DNA, 33 bp, Homo sapien
ctacaacggactctgcaagatgttgaagagcac

SEQ ID NO: 365410 - DNA, 33 bp, Homo sapien
ctacaacggactctgccagatgttgaagagcac

SEQ ID NO: 365411 - DNA, 33 bp, Homo sapien
ttttgtttagaatgaacaaaggttaggcagggc

SEQ ID NO: 365412 - DNA, 33 bp, Homo sapien
ttttgtttagaatgaagaaaggttaggcagggc

SEQ ID NO: 365413 - DNA, 33 bp, Homo sapien
tactcccaggaagtcaaccggcagtctttggga

SEQ ID NO: 365414 - DNA, 33 bp, Homo sapien
tactcccaggaagtcagccggcagtctttggga

SEQ ID NO: 365415 - DNA, 33 bp, Homo sapien
atggaaaatggagggtgaaagaaggtggataac

SEQ ID NO: 365416 - DNA, 33 bp, Homo sapien
atggaaaatggagggttaaagaaggtggataac

SEQ ID NO: 365417 - DNA, 33 bp, Homo sapien
gttcccataactttaccattcaagaaactctat

SEQ ID NO: 365418 - DNA, 33 bp, Homo sapien
gttcccataactttacgattcaagaaactctat

SEQ ID NO: 365419 - DNA, 33 bp, Homo sapien
ctctacatgaaataacaactactgaagtttcaa

SEQ ID NO: 365420 - DNA, 33 bp, Homo sapien
ctctacatgaaataaccactactgaagtttcaa

SEQ ID NO: 365421 - DNA, 33 bp, Homo sapien
aggaggtacaatttgaccttatacttgaaagtt

SEQ ID NO: 365422 - DNA, 33 bp, Homo sapien
aggaggtacaatttgagcttatacttgaaagtt

SEQ ID NO: 365423 - DNA, 33 bp, Homo sapien
gctttgtgagctgttaaatggatataaccaaga

SEQ ID NO: 365424 - DNA, 33 bp, Homo sapien
gctttgtgagctgttacatggatataaccaaga

SEQ ID NO: 365425 - DNA, 33 bp, Homo sapien
aagacatcctcccctaccttgaacaccagtgta

SEQ ID NO: 365426 - DNA, 33 bp, Homo sapien
aagacatcctcccctatcttgaacaccagtgta

SEQ ID NO: 365427 - DNA, 33 bp, Homo sapien
caaacacagaaacatacagcttgcctttcagcc

SEQ ID NO: 365428 - DNA, 33 bp, Homo sapien
caaacacagaaacatatagcttgcctttcagcc

SEQ ID NO: 365429 - DNA, 33 bp, Homo sapien
aataaataaaaacacgcagtcagctagagcact

SEQ ID NO: 365430 - DNA, 33 bp, Homo sapien
aataaataaaaacacgtagtcagctagagcact

SEQ ID NO: 365431 - DNA, 33 bp, Homo sapien
gtcaatggtaaagtcagatttcaaaggctagcc

SEQ ID NO: 365432 - DNA, 33 bp, Homo sapien
gtcaatggtaaagtcatatttcaaaggctagcc

SEQ ID NO: 365433 - DNA, 33 bp, Homo sapien
ctcctgaattcctcaacgtagaggattaatgcc

SEQ ID NO: 365434 - DNA, 33 bp, Homo sapien
ctcctgaattcctcaaggtagaggattaatgcc

SEQ ID NO: 365435 - DNA, 33 bp, Homo sapien
ctacatgaaaaagtctaaaagatcacaaattga

SEQ ID NO: 365436 - DNA, 33 bp, Homo sapien
ctacatgaaaaagtctgaaagatcacaaattga

SEQ ID NO: 365437 - DNA, 33 bp, Homo sapien
tggtagcaaaagatggaaagatccccaacatat

SEQ ID NO: 365438 - DNA, 33 bp, Homo sapien
tggtagcaaaagatggtaagatccccaacatat

SEQ ID NO: 365439 - DNA, 33 bp, Homo sapien
ttaaaagcagctgaaacgaggttaaaagctttg

SEQ ID NO: 365440 - DNA, 33 bp, Homo sapien
ttaaaagcagctgaaaggaggttaaaagctttg

SEQ ID NO: 365441 - DNA, 33 bp, Homo sapien
acaaatgatgtccttcccagaactaattatttc

SEQ ID NO: 365442 - DNA, 33 bp, Homo sapien
acaaatgatgtccttctcagaactaattatttc

SEQ ID NO: 365443 - DNA, 33 bp, Homo sapien
gctcctgaaagaagaactgggcactgttaccaa

SEQ ID NO: 365444 - DNA, 33 bp, Homo sapien
gctcctgaaagaagaattgggcactgttaccaa

SEQ ID NO: 365445 - DNA, 33 bp, Homo sapien
tgtgatcgaggctgacaaatcaaatccagagag

SEQ ID NO: 365446 - DNA, 33 bp, Homo sapien
tgtgatcgaggctgaccaatcaaatccagagag

SEQ ID NO: 365447 - DNA, 33 bp, Homo sapien
ctatgtcttttctagagctaaactctctctgga

SEQ ID NO: 365448 - DNA, 33 bp, Homo sapien
ctatgtcttttctagatctaaactctctctgga

SEQ ID NO: 365449 - DNA, 33 bp, Homo sapien
taggcctctcctcataaggtggtaagaaaggcc

SEQ ID NO: 365450 - DNA, 33 bp, Homo sapien
taggcctctcctcatatggtggtaagaaaggcc

SEQ ID NO: 365451 - DNA, 33 bp, Homo sapien
ttgctggctatgaagaatccaagaaccattatg

SEQ ID NO: 365452 - DNA, 33 bp, Homo sapien
ttgctggctatgaagagtccaagaaccattatg

SEQ ID NO: 365453 - DNA, 33 bp, Homo sapien
agaaccagattttaccaacaacttgaaggagct

SEQ ID NO: 365454 - DNA, 33 bp, Homo sapien
agaaccagattttaccgacaacttgaaggagct

SEQ ID NO: 365455 - DNA, 33 bp, Homo sapien
gggttttgcaaagttacgatcaaaatattgtcc

SEQ ID NO: 365456 - DNA, 33 bp, Homo sapien
gggttttgcaaagttatgatcaaaatattgtcc

SEQ ID NO: 365457 - DNA, 33 bp, Homo sapien
ccctgtgcaaaagacccggccaagtttctcctg

SEQ ID NO: 365458 - DNA, 33 bp, Homo sapien
ccctgtgcaaaagacctggccaagtttctcctg

SEQ ID NO: 365459 - DNA, 33 bp, Homo sapien
taaattaccactttgccgacagtctgaaatgaa

SEQ ID NO: 365460 - DNA, 33 bp, Homo sapien
taaattaccactttgctgacagtctgaaatgaa

SEQ ID NO: 365461 - DNA, 33 bp, Homo sapien
accttcacttctctaaactcccgtttccctgtt

SEQ ID NO: 365462 - DNA, 33 bp, Homo sapien
accttcacttctctaagctcccgtttccctgtt

SEQ ID NO: 365463 - DNA, 33 bp, Homo sapien
agtcttataaccaaaactgcatcctgtgtctac

SEQ ID NO: 365464 - DNA, 33 bp, Homo sapien
agtcttataaccaaaagtgcatcctgtgtctac

SEQ ID NO: 365465 - DNA, 33 bp, Homo sapien
accagcagtgacaacaccctttgtcaaagtcac

SEQ ID NO: 365466 - DNA, 33 bp, Homo sapien
accagcagtgacaacagcctttgtcaaagtcac

SEQ ID NO: 365467 - DNA, 33 bp, Homo sapien
gcagctcctgaaacgaaacagtgttcagcctgt

SEQ ID NO: 365468 - DNA, 33 bp, Homo sapien
gcagctcctgaaacgagacagtgttcagcctgt

SEQ ID NO: 365469 - DNA, 33 bp, Homo sapien
ttaacaagctctgtgaacctaaggctggaaatc

SEQ ID NO: 365470 - DNA, 33 bp, Homo sapien
ttaacaagctctgtgatcctaaggctggaaatc

SEQ ID NO: 365471 - DNA, 33 bp, Homo sapien
tgcatttcgtccttgacaatcccaaattgaata

SEQ ID NO: 365472 - DNA, 33 bp, Homo sapien
tgcatttcgtccttgataatcccaaattgaata

SEQ ID NO: 365473 - DNA, 33 bp, Homo sapien
ggttcagactgtaagaaacatcctgcccatctg

SEQ ID NO: 365474 - DNA, 33 bp, Homo sapien
ggttcagactgtaagagacatcctgcccatctg

SEQ ID NO: 365475 - DNA, 33 bp, Homo sapien
cacacttttggggaggaaccaagctatggggta

SEQ ID NO: 365476 - DNA, 33 bp, Homo sapien
cacacttttggggaggcaccaagctatggggta

SEQ ID NO: 365477 - DNA, 33 bp, Homo sapien
atattatgtgttaggccctggactaggagctgg

SEQ ID NO: 365478 - DNA, 33 bp, Homo sapien
atattatgtgttaggctctggactaggagctgg

SEQ ID NO: 365479 - DNA, 33 bp, Homo sapien
gctctgtaagaacttacaaaagaaggcacacca

SEQ ID NO: 365480 - DNA, 33 bp, Homo sapien
gctctgtaagaacttagaaaagaaggcacacca

SEQ ID NO: 365481 - DNA, 33 bp, Homo sapien
gggatcttggcaagtcacatgatcccttagact

SEQ ID NO: 365482 - DNA, 33 bp, Homo sapien
gggatcttggcaagtcgcatgatcccttagact

SEQ ID NO: 365483 - DNA, 33 bp, Homo sapien
cccaacttacaaagagcataaaccttcaaggtt

SEQ ID NO: 365484 - DNA, 33 bp, Homo sapien
cccaacttacaaagaggataaaccttcaaggtt

SEQ ID NO: 365485 - DNA, 33 bp, Homo sapien
gtttgggccaattgaacatttcggatttcctgt

SEQ ID NO: 365486 - DNA, 33 bp, Homo sapien
gtttgggccaattgaagatttcggatttcctgt

SEQ ID NO: 365487 - DNA, 33 bp, Homo sapien
gttttgattcaaatcactctcaaggttgggaaa

SEQ ID NO: 365488 - DNA, 33 bp, Homo sapien
gttttgattcaaatcattctcaaggttgggaaa

SEQ ID NO: 365489 - DNA, 33 bp, Homo sapien
gtgtgaaggaaacttaccagagcatctgtttgg

SEQ ID NO: 365490 - DNA, 33 bp, Homo sapien
gtgtgaaggaaacttatcagagcatctgtttgg

SEQ ID NO: 365491 - DNA, 33 bp, Homo sapien
cagcttcattacttaaaagcattgcgatcttac

SEQ ID NO: 365492 - DNA, 33 bp, Homo sapien
cagcttcattacttaacagcattgcgatcttac

SEQ ID NO: 365493 - DNA, 33 bp, Homo sapien
ccacacaggctcaggaaagaaagtggtgaaagt

SEQ ID NO: 365494 - DNA, 33 bp, Homo sapien
ccacacaggctcaggagagaaagtggtgaaagt

SEQ ID NO: 365495 - DNA, 33 bp, Homo sapien
tgctgtgtaccactcaagtatagaatagttcct

SEQ ID NO: 365496 - DNA, 33 bp, Homo sapien
tgctgtgtaccactcatgtatagaatagttcct

SEQ ID NO: 365497 - DNA, 33 bp, Homo sapien
tactttcttatcactacgtgagattagccaatt

SEQ ID NO: 365498 - DNA, 33 bp, Homo sapien
tactttcttatcactatgtgagattagccaatt

SEQ ID NO: 365499 - DNA, 33 bp, Homo sapien
atcctctcagaacacacgaatagcttccctggg

SEQ ID NO: 365500 - DNA, 33 bp, Homo sapien
atcctctcagaacacatgaatagcttccctggg

SEQ ID NO: 365501 - DNA, 33 bp, Homo sapien
ctttgacgagtttgaactgttttttgtgttttt

SEQ ID NO: 365502 - DNA, 33 bp, Homo sapien
ctttgacgagtttgaattgttttttgtgttttt

SEQ ID NO: 365503 - DNA, 33 bp, Homo sapien
ttcactgaaactttacacccatggatgagcaag

SEQ ID NO: 365504 - DNA, 33 bp, Homo sapien
ttcactgaaactttacgcccatggatgagcaag

SEQ ID NO: 365505 - DNA, 33 bp, Homo sapien
ctgatgctaatctctcccaaaaacaccatccgt

SEQ ID NO: 365506 - DNA, 33 bp, Homo sapien
ctgatgctaatctctcgcaaaaacaccatccgt

SEQ ID NO: 365507 - DNA, 33 bp, Homo sapien
agctttctttgtaatacggctgaaatgtctgct

SEQ ID NO: 365508 - DNA, 33 bp, Homo sapien
agctttctttgtaatatggctgaaatgtctgct

SEQ ID NO: 365509 - DNA, 33 bp, Homo sapien
tggactcacagttccacaaggagtcagttccac

SEQ ID NO: 365510 - DNA, 33 bp, Homo sapien
tggactcacagttccataaggagtcagttccac

SEQ ID NO: 365511 - DNA, 33 bp, Homo sapien
caccattctcagaaaggcttatgtattagtctg

SEQ ID NO: 365512 - DNA, 33 bp, Homo sapien
caccattctcagaaagtcttatgtattagtctg

SEQ ID NO: 365513 - DNA, 33 bp, Homo sapien
gtgaggggtggctagaaacagtggaaggaggtt

SEQ ID NO: 365514 - DNA, 33 bp, Homo sapien
gtgaggggtggctagagacagtggaaggaggtt

SEQ ID NO: 365515 - DNA, 33 bp, Homo sapien
aaagtgtaaagaaccaatggtgaaaagcaagca

SEQ ID NO: 365516 - DNA, 33 bp, Homo sapien
aaagtgtaaagaaccagtggtgaaaagcaagca

SEQ ID NO: 365517 - DNA, 33 bp, Homo sapien
cgggctaactgaagccaacagagctctaattaa

SEQ ID NO: 365518 - DNA, 33 bp, Homo sapien
cgggctaactgaagccgacagagctctaattaa

SEQ ID NO: 365519 - DNA, 33 bp, Homo sapien
aagtgctgtagcggcacagttattcttttttaa

SEQ ID NO: 365520 - DNA, 33 bp, Homo sapien
aagtgctgtagcggcatagttattcttttttaa

SEQ ID NO: 365521 - DNA, 33 bp, Homo sapien
ctgctaagccaaattaccaggatggcaaacctg

SEQ ID NO: 365522 - DNA, 33 bp, Homo sapien
ctgctaagccaaattatcaggatggcaaacctg

SEQ ID NO: 365523 - DNA, 33 bp, Homo sapien
ttggagaaataagttgaaaagttgatagtactg

SEQ ID NO: 365524 - DNA, 33 bp, Homo sapien
ttggagaaataagttggaaagttgatagtactg

SEQ ID NO: 365525 - DNA, 33 bp, Homo sapien
aaaatagatccacctgaaatgcctcgtcagatc

SEQ ID NO: 365526 - DNA, 33 bp, Homo sapien
aaaatagatccacctgcaatgcctcgtcagatc

SEQ ID NO: 365527 - DNA, 33 bp, Homo sapien
aataaggtgctgctgacctctctccttcttgtc

SEQ ID NO: 365528 - DNA, 33 bp, Homo sapien
aataaggtgctgctgatctctctccttcttgtc

SEQ ID NO: 365529 - DNA, 33 bp, Homo sapien
tgataaggataatagaagttgaacctgaagtat

SEQ ID NO: 365530 - DNA, 33 bp, Homo sapien
tgataaggataatagacgttgaacctgaagtat

SEQ ID NO: 365531 - DNA, 33 bp, Homo sapien
aggttgctattgtgacagatggttctgttggaa

SEQ ID NO: 365532 - DNA, 33 bp, Homo sapien
aggttgctattgtgacggatggttctgttggaa

SEQ ID NO: 365533 - DNA, 33 bp, Homo sapien
tgagatgacttgggaccaaactccagggctcca

SEQ ID NO: 365534 - DNA, 33 bp, Homo sapien
tgagatgacttgggacgaaactccagggctcca

SEQ ID NO: 365535 - DNA, 33 bp, Homo sapien
taacataaattaaggaacactactatcagttta

SEQ ID NO: 365536 - DNA, 33 bp, Homo sapien
taacataaattaaggaccactactatcagttta

SEQ ID NO: 365537 - DNA, 33 bp, Homo sapien
tatctggacagcaccccatgcaccccatggctt

SEQ ID NO: 365538 - DNA, 33 bp, Homo sapien
tatctggacagcaccctatgcaccccatggctt

SEQ ID NO: 365539 - DNA, 33 bp, Homo sapien
gttttctattcatcaacaaagtcatgaagacct

SEQ ID NO: 365540 - DNA, 33 bp, Homo sapien
gttttctattcatcaagaaagtcatgaagacct

SEQ ID NO: 365541 - DNA, 33 bp, Homo sapien
catacatatacacatacgccaagctcgtggaca

SEQ ID NO: 365542 - DNA, 33 bp, Homo sapien
catacatatacacatatgccaagctcgtggaca

SEQ ID NO: 365543 - DNA, 33 bp, Homo sapien
gagtgaaaacagaaacagagaatcaaaacacaa

SEQ ID NO: 365544 - DNA, 33 bp, Homo sapien
gagtgaaaacagaaacggagaatcaaaacacaa

SEQ ID NO: 365545 - DNA, 33 bp, Homo sapien
ttgtgaacttgggagacagccttgatgaattgt

SEQ ID NO: 365546 - DNA, 33 bp, Homo sapien
ttgtgaacttgggagagagccttgatgaattgt

SEQ ID NO: 365547 - DNA, 33 bp, Homo sapien
gaagaagggattgagacgcggtattgtagatga

SEQ ID NO: 365548 - DNA, 33 bp, Homo sapien
gaagaagggattgagatgcggtattgtagatga

SEQ ID NO: 365549 - DNA, 33 bp, Homo sapien
tctgacttcttcgagaaattgccaaactgcttt

SEQ ID NO: 365550 - DNA, 33 bp, Homo sapien
tctgacttcttcgagatattgccaaactgcttt

SEQ ID NO: 365551 - DNA, 33 bp, Homo sapien
taaaatgggaagaaaacaacacaactatgacgg

SEQ ID NO: 365552 - DNA, 33 bp, Homo sapien
taaaatgggaagaaaagaacacaactatgacgg

SEQ ID NO: 365553 - DNA, 33 bp, Homo sapien
atactcacaagtctagaaagtgggtaatattgt

SEQ ID NO: 365554 - DNA, 33 bp, Homo sapien
atactcacaagtctaggaagtgggtaatattgt

SEQ ID NO: 365555 - DNA, 33 bp, Homo sapien
tgtcagcacatctagacaggaaatagcaaccag

SEQ ID NO: 365556 - DNA, 33 bp, Homo sapien
tgtcagcacatctagagaggaaatagcaaccag

SEQ ID NO: 365557 - DNA, 33 bp, Homo sapien
tcactaatcaagttgacgaggtcagcaacagtc

SEQ ID NO: 365558 - DNA, 33 bp, Homo sapien
tcactaatcaagttgatgaggtcagcaacagtc

SEQ ID NO: 365559 - DNA, 33 bp, Homo sapien
acatcttccttcctcacaatgcttcctttctca

SEQ ID NO: 365560 - DNA, 33 bp, Homo sapien
acatcttccttcctcataatgcttcctttctca

SEQ ID NO: 365561 - DNA, 33 bp, Homo sapien
cttaaaaatgttcagaaaaggcaacgttgctct

SEQ ID NO: 365562 - DNA, 33 bp, Homo sapien
cttaaaaatgttcagagaaggcaacgttgctct

SEQ ID NO: 365563 - DNA, 33 bp, Homo sapien
cctgcaataaaagcaaacttataggtatctgaa

SEQ ID NO: 365564 - DNA, 33 bp, Homo sapien
cctgcaataaaagcaagcttataggtatctgaa

SEQ ID NO: 365565 - DNA, 33 bp, Homo sapien
gcttcatgatgtctcccgattctatttctgtgc

SEQ ID NO: 365566 - DNA, 33 bp, Homo sapien
gcttcatgatgtctcctgattctatttctgtgc

SEQ ID NO: 365567 - DNA, 33 bp, Homo sapien
agaaactcaaaccaacaccagtgactctagaag

SEQ ID NO: 365568 - DNA, 33 bp, Homo sapien
agaaactcaaaccaactccagtgactctagaag

SEQ ID NO: 365569 - DNA, 33 bp, Homo sapien
ggcctattcagagatgcagatttgaaatccggt

SEQ ID NO: 365570 - DNA, 33 bp, Homo sapien
ggcctattcagagatggagatttgaaatccggt

SEQ ID NO: 365571 - DNA, 33 bp, Homo sapien
tgataaacaccaattgcagaagagtagttacct

SEQ ID NO: 365572 - DNA, 33 bp, Homo sapien
tgataaacaccaattgtagaagagtagttacct

SEQ ID NO: 365573 - DNA, 33 bp, Homo sapien
aatctctttgcttggaacttcttacataatact

SEQ ID NO: 365574 - DNA, 33 bp, Homo sapien
aatctctttgcttggagcttcttacataatact

SEQ ID NO: 365575 - DNA, 33 bp, Homo sapien
atcctgcagtctccccacagggatcatttcaat

SEQ ID NO: 365576 - DNA, 33 bp, Homo sapien
atcctgcagtctccccgcagggatcatttcaat

SEQ ID NO: 365577 - DNA, 33 bp, Homo sapien
catgccagccatatgaacaaggcgggactgatg

SEQ ID NO: 365578 - DNA, 33 bp, Homo sapien
catgccagccatatgagcaaggcgggactgatg

SEQ ID NO: 365579 - DNA, 33 bp, Homo sapien
gatagaaccatggtgacgtttcgatagaatagc

SEQ ID NO: 365580 - DNA, 33 bp, Homo sapien
gatagaaccatggtgatgtttcgatagaatagc

SEQ ID NO: 365581 - DNA, 33 bp, Homo sapien
gtatttcccaacaggtaaagaagagaaatacac

SEQ ID NO: 365582 - DNA, 33 bp, Homo sapien
gtatttcccaacaggttaagaagagaaatacac

SEQ ID NO: 365583 - DNA, 33 bp, Homo sapien
aaatacaaagtatagacagtccctgaaacctcg

SEQ ID NO: 365584 - DNA, 33 bp, Homo sapien
aaatacaaagtatagatagtccctgaaacctcg

SEQ ID NO: 365585 - DNA, 33 bp, Homo sapien
catatctttccagtaaagtaaacaatgagtcag

SEQ ID NO: 365586 - DNA, 33 bp, Homo sapien
catatctttccagtaaggtaaacaatgagtcag

SEQ ID NO: 365587 - DNA, 33 bp, Homo sapien
gccgattaatgatctaccttgcctaattcagcc

SEQ ID NO: 365588 - DNA, 33 bp, Homo sapien
gccgattaatgatctatcttgcctaattcagcc

SEQ ID NO: 365589 - DNA, 33 bp, Homo sapien
gaaaccagacttgaaacccagtgaaatctgtac

SEQ ID NO: 365590 - DNA, 33 bp, Homo sapien
gaaaccagacttgaaatccagtgaaatctgtac

SEQ ID NO: 365591 - DNA, 33 bp, Homo sapien
aactgttattagtccaagccagatatttattaa

SEQ ID NO: 365592 - DNA, 33 bp, Homo sapien
aactgttattagtccatgccagatatttattaa

SEQ ID NO: 365593 - DNA, 33 bp, Homo sapien
ttgaaagagctttgcaatatcatctcagtggac

SEQ ID NO: 365594 - DNA, 33 bp, Homo sapien
ttgaaagagctttgcagtatcatctcagtggac

SEQ ID NO: 365595 - DNA, 33 bp, Homo sapien
gttaagtgagttctataataagggcacaaaaag

SEQ ID NO: 365596 - DNA, 33 bp, Homo sapien
gttaagtgagttctatgataagggcacaaaaag

SEQ ID NO: 365597 - DNA, 33 bp, Homo sapien
ttgatatctaaaccaaagaggaaatctgttctg

SEQ ID NO: 365598 - DNA, 33 bp, Homo sapien
ttgatatctaaaccaaggaggaaatctgttctg

SEQ ID NO: 365599 - DNA, 33 bp, Homo sapien
attttgctaaaacacccaagttgtcgagtgtga

SEQ ID NO: 365600 - DNA, 33 bp, Homo sapien
attttgctaaaacaccgaagttgtcgagtgtga

SEQ ID NO: 365601 - DNA, 33 bp, Homo sapien
tctagaggcacgtattaaagaagttaacacctg

SEQ ID NO: 365602 - DNA, 33 bp, Homo sapien
tctagaggcacgtattgaagaagttaacacctg

SEQ ID NO: 365603 - DNA, 33 bp, Homo sapien
tgcagtttgctctgaacgtaagcagttctgatt

SEQ ID NO: 365604 - DNA, 33 bp, Homo sapien
tgcagtttgctctgaatgtaagcagttctgatt

SEQ ID NO: 365605 - DNA, 33 bp, Homo sapien
cccagattaaacagaaatgacttgatcaaccta

SEQ ID NO: 365606 - DNA, 33 bp, Homo sapien
cccagattaaacagaactgacttgatcaaccta

SEQ ID NO: 365607 - DNA, 33 bp, Homo sapien
gtgggattgctgaatccgacttcttttatttta

SEQ ID NO: 365608 - DNA, 33 bp, Homo sapien
gtgggattgctgaatctgacttcttttatttta

SEQ ID NO: 365609 - DNA, 33 bp, Homo sapien
acagtcctgcaaattcacaaagtcctcctctag

SEQ ID NO: 365610 - DNA, 33 bp, Homo sapien
acagtcctgcaaattcgcaaagtcctcctctag

SEQ ID NO: 365611 - DNA, 33 bp, Homo sapien
gtcagggaaaggtaagactcgaactgagaaatg

SEQ ID NO: 365612 - DNA, 33 bp, Homo sapien
gtcagggaaaggtaagtctcgaactgagaaatg

SEQ ID NO: 365613 - DNA, 33 bp, Homo sapien
gagatatttttgctaacatttcaacaatgataa

SEQ ID NO: 365614 - DNA, 33 bp, Homo sapien
gagatatttttgctaagatttcaacaatgataa

SEQ ID NO: 365615 - DNA, 33 bp, Homo sapien
gagtcaaccatgcaaacgaagagtcagtagagt

SEQ ID NO: 365616 - DNA, 33 bp, Homo sapien
gagtcaaccatgcaaatgaagagtcagtagagt

SEQ ID NO: 365617 - DNA, 33 bp, Homo sapien
aaccgacttgcaaacaatgctgtcttcctcgtc

SEQ ID NO: 365618 - DNA, 33 bp, Homo sapien
aaccgacttgcaaacagtgctgtcttcctcgtc

SEQ ID NO: 365619 - DNA, 33 bp, Homo sapien
gagcatttgtaactcaacttctgtttctaaatc

SEQ ID NO: 365620 - DNA, 33 bp, Homo sapien
gagcatttgtaactcagcttctgtttctaaatc

SEQ ID NO: 365621 - DNA, 33 bp, Homo sapien
aataggcatcacataactggaaactggaaagat

SEQ ID NO: 365622 - DNA, 33 bp, Homo sapien
aataggcatcacataattggaaactggaaagat

SEQ ID NO: 365623 - DNA, 33 bp, Homo sapien
tagaaaacgttttataaggctgaaacaatgaaa

SEQ ID NO: 365624 - DNA, 33 bp, Homo sapien
tagaaaacgttttatatggctgaaacaatgaaa

SEQ ID NO: 365625 - DNA, 33 bp, Homo sapien
tttgtctatccactgcactgaattccctacaga

SEQ ID NO: 365626 - DNA, 33 bp, Homo sapien
tttgtctatccactgcgctgaattccctacaga

SEQ ID NO: 365627 - DNA, 33 bp, Homo sapien
tatttctctatcatcaaagatgttgactcttat

SEQ ID NO: 365628 - DNA, 33 bp, Homo sapien
tatttctctatcatcagagatgttgactcttat

SEQ ID NO: 365629 - DNA, 33 bp, Homo sapien
ttcctattatgttctacgcacaatgctaaatat

SEQ ID NO: 365630 - DNA, 33 bp, Homo sapien
ttcctattatgttctaggcacaatgctaaatat

SEQ ID NO: 365631 - DNA, 33 bp, Homo sapien
aaaagcaattttacaaaggaaacagttattaca

SEQ ID NO: 365632 - DNA, 33 bp, Homo sapien
aaaagcaattttacaagggaaacagttattaca

SEQ ID NO: 365633 - DNA, 33 bp, Homo sapien
tagaaaacttgagaacacaaatattttgacaat

SEQ ID NO: 365634 - DNA, 33 bp, Homo sapien
tagaaaacttgagaacgcaaatattttgacaat

SEQ ID NO: 365635 - DNA, 33 bp, Homo sapien
tctttctgattcccagcacataccttatcaagg

SEQ ID NO: 365636 - DNA, 33 bp, Homo sapien
tctttctgattcccaggacataccttatcaagg

SEQ ID NO: 365637 - DNA, 33 bp, Homo sapien
cagctatacattttccagcagaaatatcctgaa

SEQ ID NO: 365638 - DNA, 33 bp, Homo sapien
cagctatacattttcctgcagaaatatcctgaa

SEQ ID NO: 365639 - DNA, 33 bp, Homo sapien
ttggagaaatgcttagcatggaatgggtattat

SEQ ID NO: 365640 - DNA, 33 bp, Homo sapien
ttggagaaatgcttaggatggaatgggtattat

SEQ ID NO: 365641 - DNA, 33 bp, Homo sapien
catgtgtgttgagggaaggaggttgatgattaa

SEQ ID NO: 365642 - DNA, 33 bp, Homo sapien
catgtgtgttgagggagggaggttgatgattaa

SEQ ID NO: 365643 - DNA, 33 bp, Homo sapien
caggggaaccttagcccggatacctatgtcaca

SEQ ID NO: 365644 - DNA, 33 bp, Homo sapien
caggggaaccttagcctggatacctatgtcaca

SEQ ID NO: 365645 - DNA, 33 bp, Homo sapien
taagctagtagtcatcaaggaagagcacccatt

SEQ ID NO: 365646 - DNA, 33 bp, Homo sapien
taagctagtagtcatcgaggaagagcacccatt

SEQ ID NO: 365647 - DNA, 33 bp, Homo sapien
ttcaaagtgtttagaggagaaccttccagtggg

SEQ ID NO: 365648 - DNA, 33 bp, Homo sapien
ttcaaagtgtttagagtagaaccttccagtggg

SEQ ID NO: 365649 - DNA, 33 bp, Homo sapien
ttgaaagagctcatgaagaagagtcaaatacaa

SEQ ID NO: 365650 - DNA, 33 bp, Homo sapien
ttgaaagagctcatgaggaagagtcaaatacaa

SEQ ID NO: 365651 - DNA, 33 bp, Homo sapien
gtcaaatacaaaaaaaagagcaaaaggatgtaa

SEQ ID NO: 365652 - DNA, 33 bp, Homo sapien
gtcaaatacaaaaaaaggagcaaaaggatgtaa

SEQ ID NO: 365653 - DNA, 33 bp, Homo sapien
aattacggattactcacaaaagggccaatattt

SEQ ID NO: 365654 - DNA, 33 bp, Homo sapien
aattacggattactcagaaaagggccaatattt

SEQ ID NO: 365655 - DNA, 33 bp, Homo sapien
tgcaggtccgtcggtgcagacattttgggatag

SEQ ID NO: 365656 - DNA, 33 bp, Homo sapien
tgcaggtccgtcggtggagacattttgggatag

SEQ ID NO: 365657 - DNA, 33 bp, Homo sapien
tacagtaacttcctacactaattcaactacctt

SEQ ID NO: 365658 - DNA, 33 bp, Homo sapien
tacagtaacttcctacgctaattcaactacctt

SEQ ID NO: 365659 - DNA, 33 bp, Homo sapien
gtagctgtgaatacacacacagtcatttcatag

SEQ ID NO: 365660 - DNA, 33 bp, Homo sapien
gtagctgtgaatacacgcacagtcatttcatag

SEQ ID NO: 365661 - DNA, 33 bp, Homo sapien
cttcaagaagtgacttaaaaaatgggcataact

SEQ ID NO: 365662 - DNA, 33 bp, Homo sapien
cttcaagaagtgactttaaaaatgggcataact

SEQ ID NO: 365663 - DNA, 33 bp, Homo sapien
ccttcatttttcttaactccctgggtgataaac

SEQ ID NO: 365664 - DNA, 33 bp, Homo sapien
ccttcatttttcttaattccctgggtgataaac

SEQ ID NO: 365665 - DNA, 33 bp, Homo sapien
agagagataatgctaccatccccactttacaga

SEQ ID NO: 365666 - DNA, 33 bp, Homo sapien
agagagataatgctactatccccactttacaga

SEQ ID NO: 365667 - DNA, 33 bp, Homo sapien
agtccgctcagacaagaaaatcatcctgggata

SEQ ID NO: 365668 - DNA, 33 bp, Homo sapien
agtccgctcagacaaggaaatcatcctgggata

SEQ ID NO: 365669 - DNA, 33 bp, Homo sapien
ctacttgatactgcaacttgcacgtattttagg

SEQ ID NO: 365670 - DNA, 33 bp, Homo sapien
ctacttgatactgcaagttgcacgtattttagg

SEQ ID NO: 365671 - DNA, 33 bp, Homo sapien
aacatgataagtcacaaaactagtgagtagcag

SEQ ID NO: 365672 - DNA, 33 bp, Homo sapien
aacatgataagtcacacaactagtgagtagcag

SEQ ID NO: 365673 - DNA, 33 bp, Homo sapien
gacccagatgaaacctcaccataagctgccatg

SEQ ID NO: 365674 - DNA, 33 bp, Homo sapien
gacccagatgaaaccttaccataagctgccatg

SEQ ID NO: 365675 - DNA, 33 bp, Homo sapien
agaaacactgcacttaccacttagtaattaggc

SEQ ID NO: 365676 - DNA, 33 bp, Homo sapien
agaaacactgcacttatcacttagtaattaggc

SEQ ID NO: 365677 - DNA, 33 bp, Homo sapien
ggattcttgaatccaacggtagctctgttttta

SEQ ID NO: 365678 - DNA, 33 bp, Homo sapien
ggattcttgaatccaatggtagctctgttttta

SEQ ID NO: 365679 - DNA, 33 bp, Homo sapien
accagagagggcagaaacctacttccagctcca

SEQ ID NO: 365680 - DNA, 33 bp, Homo sapien
accagagagggcagaatcctacttccagctcca

SEQ ID NO: 365681 - DNA, 33 bp, Homo sapien
ggtgggtcctagattgacaagaattaagacaag

SEQ ID NO: 365682 - DNA, 33 bp, Homo sapien
ggtgggtcctagattggcaagaattaagacaag

SEQ ID NO: 365683 - DNA, 33 bp, Homo sapien
cctaagaaagaggctacgttgatgggaaaaggc

SEQ ID NO: 365684 - DNA, 33 bp, Homo sapien
cctaagaaagaggctatgttgatgggaaaaggc

SEQ ID NO: 365685 - DNA, 33 bp, Homo sapien
cgtcaccccactctcccattctgctgcagaaga

SEQ ID NO: 365686 - DNA, 33 bp, Homo sapien
cgtcaccccactctcctattctgctgcagaaga

SEQ ID NO: 365687 - DNA, 33 bp, Homo sapien
atagtccatgagaaaactgaatagtctgtgaag

SEQ ID NO: 365688 - DNA, 33 bp, Homo sapien
atagtccatgagaaaattgaatagtctgtgaag

SEQ ID NO: 365689 - DNA, 33 bp, Homo sapien
gagacctggatgacatcaagaagccagccgtgg

SEQ ID NO: 365690 - DNA, 33 bp, Homo sapien
gagacctggatgacatgaagaagccagccgtgg

SEQ ID NO: 365691 - DNA, 33 bp, Homo sapien
gtgaccatgtatcaaaggctccgacatgaacca

SEQ ID NO: 365692 - DNA, 33 bp, Homo sapien
gtgaccatgtatcaaatgctccgacatgaacca

SEQ ID NO: 365693 - DNA, 33 bp, Homo sapien
ttcattgagttttccacagaccagcttaccgaa

SEQ ID NO: 365694 - DNA, 33 bp, Homo sapien
ttcattgagttttccatagaccagcttaccgaa

SEQ ID NO: 365695 - DNA, 33 bp, Homo sapien
tatcatatggtgtgaaactacaatctggtttta

SEQ ID NO: 365696 - DNA, 33 bp, Homo sapien
tatcatatggtgtgaagctacaatctggtttta

SEQ ID NO: 365697 - DNA, 33 bp, Homo sapien
gaagcctgccctgatacctctcattagatcaag

SEQ ID NO: 365698 - DNA, 33 bp, Homo sapien
gaagcctgccctgatatctctcattagatcaag

SEQ ID NO: 365699 - DNA, 33 bp, Homo sapien
tgaaccacttatgtctaactcaagagccctcac

SEQ ID NO: 365700 - DNA, 33 bp, Homo sapien
tgaaccacttatgtcttactcaagagccctcac

SEQ ID NO: 365701 - DNA, 33 bp, Homo sapien
gcaatataggcctgatgaaacaaaagacaagac

SEQ ID NO: 365702 - DNA, 33 bp, Homo sapien
gcaatataggcctgattaaacaaaagacaagac

SEQ ID NO: 365703 - DNA, 33 bp, Homo sapien
gcaaaaggtcacagtacagaaacagatacacag

SEQ ID NO: 365704 - DNA, 33 bp, Homo sapien
gcaaaaggtcacagtagagaaacagatacacag

SEQ ID NO: 365705 - DNA, 33 bp, Homo sapien
aatggctgtgctctaacgtcctacctgctcctg

SEQ ID NO: 365706 - DNA, 33 bp, Homo sapien
aatggctgtgctctaaggtcctacctgctcctg

SEQ ID NO: 365707 - DNA, 33 bp, Homo sapien
gctgtaacttatgcaacggccacaacaaccctg

SEQ ID NO: 365708 - DNA, 33 bp, Homo sapien
gctgtaacttatgcaatggccacaacaaccctg

SEQ ID NO: 365709 - DNA, 33 bp, Homo sapien
gtcttaaggatgaggaagttgagggacgaagag

SEQ ID NO: 365710 - DNA, 33 bp, Homo sapien
gtcttaaggatgaggaggttgagggacgaagag

SEQ ID NO: 365711 - DNA, 33 bp, Homo sapien
ctactgatgcagggtaagttcttggcttagccc

SEQ ID NO: 365712 - DNA, 33 bp, Homo sapien
ctactgatgcagggtaggttcttggcttagccc

SEQ ID NO: 365713 - DNA, 33 bp, Homo sapien
tccctccttgtgaatcagaacaggctgtaactg

SEQ ID NO: 365714 - DNA, 33 bp, Homo sapien
tccctccttgtgaatctgaacaggctgtaactg

SEQ ID NO: 365715 - DNA, 33 bp, Homo sapien
gaaaagcggtctttaccggtgtaattactatag

SEQ ID NO: 365716 - DNA, 33 bp, Homo sapien
gaaaagcggtctttactggtgtaattactatag

SEQ ID NO: 365717 - DNA, 33 bp, Homo sapien
cagaagtttccagaacagagacgcaaagcccgg

SEQ ID NO: 365718 - DNA, 33 bp, Homo sapien
cagaagtttccagaacggagacgcaaagcccgg

SEQ ID NO: 365719 - DNA, 33 bp, Homo sapien
ctgagacccgcatgaaaaacctgtaggtaggga

SEQ ID NO: 365720 - DNA, 33 bp, Homo sapien
ctgagacccgcatgaagaacctgtaggtaggga

SEQ ID NO: 365721 - DNA, 33 bp, Homo sapien
gaacagtctctgacacagtaggtatctggcaag

SEQ ID NO: 365722 - DNA, 33 bp, Homo sapien
gaacagtctctgacactgtaggtatctggcaag

SEQ ID NO: 365723 - DNA, 33 bp, Homo sapien
acccatcccaaaataaagcacctattagatgct

SEQ ID NO: 365724 - DNA, 33 bp, Homo sapien
acccatcccaaaataatgcacctattagatgct

SEQ ID NO: 365725 - DNA, 33 bp, Homo sapien
tagacaaatatactgccaattatgattgtgggg

SEQ ID NO: 365726 - DNA, 33 bp, Homo sapien
tagacaaatatactgctaattatgattgtgggg

SEQ ID NO: 365727 - DNA, 33 bp, Homo sapien
gccatcttggaagtagaccctccagctccagca

SEQ ID NO: 365728 - DNA, 33 bp, Homo sapien
gccatcttggaagtaggccctccagctccagca

SEQ ID NO: 365729 - DNA, 33 bp, Homo sapien
gtcatcatgaaacacaactcagaacatgtcatt

SEQ ID NO: 365730 - DNA, 33 bp, Homo sapien
gtcatcatgaaacacagctcagaacatgtcatt

SEQ ID NO: 365731 - DNA, 33 bp, Homo sapien
tggatcctgtacttaacagctgtgtgatattga

SEQ ID NO: 365732 - DNA, 33 bp, Homo sapien
tggatcctgtacttaatagctgtgtgatattga

SEQ ID NO: 365733 - DNA, 33 bp, Homo sapien
cctcagtcaatattaactcatatggcctgacaa

SEQ ID NO: 365734 - DNA, 33 bp, Homo sapien
cctcagtcaatattaagtcatatggcctgacaa

SEQ ID NO: 365735 - DNA, 33 bp, Homo sapien
gaattcttcctaacacagtatgatttattgagc

SEQ ID NO: 365736 - DNA, 33 bp, Homo sapien
gaattcttcctaacactgtatgatttattgagc

SEQ ID NO: 365737 - DNA, 33 bp, Homo sapien
ctggagactaatcccaaagaagaatctgattgg

SEQ ID NO: 365738 - DNA, 33 bp, Homo sapien
ctggagactaatcccatagaagaatctgattgg

SEQ ID NO: 365739 - DNA, 33 bp, Homo sapien
ccatagaacagagtccacttaattcagcctgct

SEQ ID NO: 365740 - DNA, 33 bp, Homo sapien
ccatagaacagagtccgcttaattcagcctgct

SEQ ID NO: 365741 - DNA, 33 bp, Homo sapien
agtcaatgcctccctacctgaaatgccttccct

SEQ ID NO: 365742 - DNA, 33 bp, Homo sapien
agtcaatgcctccctatctgaaatgccttccct

SEQ ID NO: 365743 - DNA, 33 bp, Homo sapien
gcctaatactgtggcaagaacagagatgaaata

SEQ ID NO: 365744 - DNA, 33 bp, Homo sapien
gcctaatactgtggcaggaacagagatgaaata

SEQ ID NO: 365745 - DNA, 33 bp, Homo sapien
ggggcagtggctctggaatatgaactcatgtcc

SEQ ID NO: 365746 - DNA, 33 bp, Homo sapien
ggggcagtggctctgggatatgaactcatgtcc

SEQ ID NO: 365747 - DNA, 33 bp, Homo sapien
aaatccaaagttcttacaatgtcacaaaagttc

SEQ ID NO: 365748 - DNA, 33 bp, Homo sapien
aaatccaaagttcttagaatgtcacaaaagttc

SEQ ID NO: 365749 - DNA, 33 bp, Homo sapien
ttggcccttttctcaacctatatattcagtgac

SEQ ID NO: 365750 - DNA, 33 bp, Homo sapien
ttggcccttttctcaatctatatattcagtgac

SEQ ID NO: 365751 - DNA, 33 bp, Homo sapien
cagaggctttctgaaactctgcaggcaagaaaa

SEQ ID NO: 365752 - DNA, 33 bp, Homo sapien
cagaggctttctgaaattctgcaggcaagaaaa

SEQ ID NO: 365753 - DNA, 33 bp, Homo sapien
agcatggatgacggtaacacccgtgataataaa

SEQ ID NO: 365754 - DNA, 33 bp, Homo sapien
agcatggatgacggtagcacccgtgataataaa

SEQ ID NO: 365755 - DNA, 33 bp, Homo sapien
agggccgaagggcctacggtgcgcaaagtgcta

SEQ ID NO: 365756 - DNA, 33 bp, Homo sapien
agggccgaagggcctatggtgcgcaaagtgcta

SEQ ID NO: 365757 - DNA, 33 bp, Homo sapien
gggatgatttgccctccgaacttttctctgagt

SEQ ID NO: 365758 - DNA, 33 bp, Homo sapien
gggatgatttgccctctgaacttttctctgagt

SEQ ID NO: 365759 - DNA, 33 bp, Homo sapien
aagatcttcctgctatgaacatatctccgtctt

SEQ ID NO: 365760 - DNA, 33 bp, Homo sapien
aagatcttcctgctattaacatatctccgtctt

SEQ ID NO: 365761 - DNA, 33 bp, Homo sapien
gggctcagtaatcccacgtcataggagactgtc

SEQ ID NO: 365762 - DNA, 33 bp, Homo sapien
gggctcagtaatcccatgtcataggagactgtc

SEQ ID NO: 365763 - DNA, 33 bp, Homo sapien
cactgggctaggcaataatctttcctctttcct

SEQ ID NO: 365764 - DNA, 33 bp, Homo sapien
cactgggctaggcaatgatctttcctctttcct

SEQ ID NO: 365765 - DNA, 33 bp, Homo sapien
gatacttgtgaagaaaactgtcagcatgtggaa

SEQ ID NO: 365766 - DNA, 33 bp, Homo sapien
gatacttgtgaagaaagctgtcagcatgtggaa

SEQ ID NO: 365767 - DNA, 33 bp, Homo sapien
tcaagtccaaattcaacatcatgggtcacctgg

SEQ ID NO: 365768 - DNA, 33 bp, Homo sapien
tcaagtccaaattcaagatcatgggtcacctgg

SEQ ID NO: 365769 - DNA, 33 bp, Homo sapien
aggtgtctgtctactcgccattcagcttccagg

SEQ ID NO: 365770 - DNA, 33 bp, Homo sapien
aggtgtctgtctactctccattcagcttccagg

SEQ ID NO: 365771 - DNA, 33 bp, Homo sapien
gacgcacatctggacgcaaagtgtttgccgaga

SEQ ID NO: 365772 - DNA, 33 bp, Homo sapien
gacgcacatctggacggaaagtgtttgccgaga

SEQ ID NO: 365773 - DNA, 33 bp, Homo sapien
taaccccatgtttggacacttaggttttggagc

SEQ ID NO: 365774 - DNA, 33 bp, Homo sapien
taaccccatgtttggagacttaggttttggagc

SEQ ID NO: 365775 - DNA, 33 bp, Homo sapien
ataatagaagaaacaacacaaatgacgttgaac

SEQ ID NO: 365776 - DNA, 33 bp, Homo sapien
ataatagaagaaacaatacaaatgacgttgaac

SEQ ID NO: 365777 - DNA, 33 bp, Homo sapien
ctgtgtgtcccaaaccagaactcaggtgttagg

SEQ ID NO: 365778 - DNA, 33 bp, Homo sapien
ctgtgtgtcccaaaccggaactcaggtgttagg

SEQ ID NO: 365779 - DNA, 33 bp, Homo sapien
tgcgtaattctttccactcatcacagttagtac

SEQ ID NO: 365780 - DNA, 33 bp, Homo sapien
tgcgtaattctttccattcatcacagttagtac

SEQ ID NO: 365781 - DNA, 33 bp, Homo sapien
aataacaatactggccaccgtttattgagcacc

SEQ ID NO: 365782 - DNA, 33 bp, Homo sapien
aataacaatactggccgccgtttattgagcacc

SEQ ID NO: 365783 - DNA, 33 bp, Homo sapien
tttaaggtttacactcactttaggtgtatgtca

SEQ ID NO: 365784 - DNA, 33 bp, Homo sapien
tttaaggtttacactcgctttaggtgtatgtca

SEQ ID NO: 365785 - DNA, 33 bp, Homo sapien
aatttattacctgttgaaatgatgagattttga

SEQ ID NO: 365786 - DNA, 33 bp, Homo sapien
aatttattacctgttggaatgatgagattttga

SEQ ID NO: 365787 - DNA, 33 bp, Homo sapien
tggacttggcaatcagaaagatgtaggggctta

SEQ ID NO: 365788 - DNA, 33 bp, Homo sapien
tggacttggcaatcagcaagatgtaggggctta

SEQ ID NO: 365789 - DNA, 33 bp, Homo sapien
tttatgttttatttggccaaaaagatccttcca

SEQ ID NO: 365790 - DNA, 33 bp, Homo sapien
tttatgttttatttggtcaaaaagatccttcca

SEQ ID NO: 365791 - DNA, 33 bp, Homo sapien
cacatcttgtggctgaatagaagttcattttga

SEQ ID NO: 365792 - DNA, 33 bp, Homo sapien
cacatcttgtggctgattagaagttcattttga

SEQ ID NO: 365793 - DNA, 33 bp, Homo sapien
atttgtactgaggttacgtaagagaacattctt

SEQ ID NO: 365794 - DNA, 33 bp, Homo sapien
atttgtactgaggttatgtaagagaacattctt

SEQ ID NO: 365795 - DNA, 33 bp, Homo sapien
agtttcgaggattacaagcggctgtggaactat

SEQ ID NO: 365796 - DNA, 33 bp, Homo sapien
agtttcgaggattacaggcggctgtggaactat

SEQ ID NO: 365797 - DNA, 33 bp, Homo sapien
agttacattaatacacactggccctggtgctgt

SEQ ID NO: 365798 - DNA, 33 bp, Homo sapien
agttacattaatacactctggccctggtgctgt

SEQ ID NO: 365799 - DNA, 33 bp, Homo sapien
aagttggaatcagaagaactaatttaagaatta

SEQ ID NO: 365800 - DNA, 33 bp, Homo sapien
aagttggaatcagaaggactaatttaagaatta

SEQ ID NO: 365801 - DNA, 33 bp, Homo sapien
acagtatgcatcatcaacgctatgagactgagg

SEQ ID NO: 365802 - DNA, 33 bp, Homo sapien
acagtatgcatcatcagcgctatgagactgagg

SEQ ID NO: 365803 - DNA, 33 bp, Homo sapien
agaagtatttgcctccaaggagtagataagacg

SEQ ID NO: 365804 - DNA, 33 bp, Homo sapien
agaagtatttgcctcccaggagtagataagacg

SEQ ID NO: 365805 - DNA, 33 bp, Homo sapien
aacagacagggcttcaaatccaagcctccgaat

SEQ ID NO: 365806 - DNA, 33 bp, Homo sapien
aacagacagggcttcacatccaagcctccgaat

SEQ ID NO: 365807 - DNA, 33 bp, Homo sapien
caatcctgcagattaccgaaaggatctatggaa

SEQ ID NO: 365808 - DNA, 33 bp, Homo sapien
caatcctgcagattactgaaaggatctatggaa

SEQ ID NO: 365809 - DNA, 33 bp, Homo sapien
tttattcattcatccactgatcgacatctgggc

SEQ ID NO: 365810 - DNA, 33 bp, Homo sapien
tttattcattcatccattgatcgacatctgggc

SEQ ID NO: 365811 - DNA, 33 bp, Homo sapien
attaggcacctgttatcagcaaggcactgcatc

SEQ ID NO: 365812 - DNA, 33 bp, Homo sapien
attaggcacctgttatgagcaaggcactgcatc

SEQ ID NO: 365813 - DNA, 33 bp, Homo sapien
ttagcacaatatatttcaaacaattggaagagt

SEQ ID NO: 365814 - DNA, 33 bp, Homo sapien
ttagcacaatatatttgaaacaattggaagagt

SEQ ID NO: 365815 - DNA, 33 bp, Homo sapien
tttattctgtgaactacgtcatttttattcatg

SEQ ID NO: 365816 - DNA, 33 bp, Homo sapien
tttattctgtgaactaggtcatttttattcatg

SEQ ID NO: 365817 - DNA, 33 bp, Homo sapien
atgttcgtagcacaaacgcatcaatggcaaccg

SEQ ID NO: 365818 - DNA, 33 bp, Homo sapien
atgttcgtagcacaaatgcatcaatggcaaccg

SEQ ID NO: 365819 - DNA, 33 bp, Homo sapien
catgaagaggaatgacacatgaatggtgctgtc

SEQ ID NO: 365820 - DNA, 33 bp, Homo sapien
catgaagaggaatgactcatgaatggtgctgtc

SEQ ID NO: 365821 - DNA, 33 bp, Homo sapien
ttgggacaggatcatacgacagagatgggagag

SEQ ID NO: 365822 - DNA, 33 bp, Homo sapien
ttgggacaggatcatatgacagagatgggagag

SEQ ID NO: 365823 - DNA, 33 bp, Homo sapien
catgaaataggttcagaaagaccagtgagcctc

SEQ ID NO: 365824 - DNA, 33 bp, Homo sapien
catgaaataggttcaggaagaccagtgagcctc

SEQ ID NO: 365825 - DNA, 33 bp, Homo sapien
ggtgtctccttaggaaagctcagatgtcctgga

SEQ ID NO: 365826 - DNA, 33 bp, Homo sapien
ggtgtctccttaggaaggctcagatgtcctgga

SEQ ID NO: 365827 - DNA, 33 bp, Homo sapien
agaagaaccagcattacctgtgaagggacaggc

SEQ ID NO: 365828 - DNA, 33 bp, Homo sapien
agaagaaccagcattatctgtgaagggacaggc

SEQ ID NO: 365829 - DNA, 33 bp, Homo sapien
tcaaagactacagatacgggaggacaggtggcc

SEQ ID NO: 365830 - DNA, 33 bp, Homo sapien
tcaaagactacagatatgggaggacaggtggcc

SEQ ID NO: 365831 - DNA, 33 bp, Homo sapien
tttcccatgtaaccaaagtttcacaactctttt

SEQ ID NO: 365832 - DNA, 33 bp, Homo sapien
tttcccatgtaaccaatgtttcacaactctttt

SEQ ID NO: 365833 - DNA, 33 bp, Homo sapien
tatcttttgacaccaaattcagacatcccccct

SEQ ID NO: 365834 - DNA, 33 bp, Homo sapien
tatcttttgacaccaatttcagacatcccccct

SEQ ID NO: 365835 - DNA, 33 bp, Homo sapien
ggcagctacagcaggaaatactggatgctcatg

SEQ ID NO: 365836 - DNA, 33 bp, Homo sapien
ggcagctacagcaggagatactggatgctcatg

SEQ ID NO: 365837 - DNA, 33 bp, Homo sapien
tactcaacaagcgttcactgaggaggtgagttg

SEQ ID NO: 365838 - DNA, 33 bp, Homo sapien
tactcaacaagcgttcgctgaggaggtgagttg

SEQ ID NO: 365839 - DNA, 33 bp, Homo sapien
gaaaataggtaagcaaataagttgcaaaagcac

SEQ ID NO: 365840 - DNA, 33 bp, Homo sapien
gaaaataggtaagcaagtaagttgcaaaagcac

SEQ ID NO: 365841 - DNA, 33 bp, Homo sapien
attaccaggcagatgacaccgaaatgcttaaag

SEQ ID NO: 365842 - DNA, 33 bp, Homo sapien
attaccaggcagatgataccgaaatgcttaaag

SEQ ID NO: 365843 - DNA, 33 bp, Homo sapien
caggcgccaagtgctacgacagaggtgtgaata

SEQ ID NO: 365844 - DNA, 33 bp, Homo sapien
caggcgccaagtgctatgacagaggtgtgaata

SEQ ID NO: 365845 - DNA, 33 bp, Homo sapien
gccccagcccccaaaaaagcatgtctcaggaac

SEQ ID NO: 365846 - DNA, 33 bp, Homo sapien
gccccagcccccaaaagagcatgtctcaggaac

SEQ ID NO: 365847 - DNA, 33 bp, Homo sapien
ccttgaaattcttctacctaaagccccagcccc

SEQ ID NO: 365848 - DNA, 33 bp, Homo sapien
ccttgaaattcttctagctaaagccccagcccc

SEQ ID NO: 365849 - DNA, 33 bp, Homo sapien
ctgaaccttattctgcaaaaaaaggatgattat

SEQ ID NO: 365850 - DNA, 33 bp, Homo sapien
ctgaaccttattctgccaaaaaaggatgattat

SEQ ID NO: 365851 - DNA, 33 bp, Homo sapien
gactctgcccggagttcaaagggaccctgttgc

SEQ ID NO: 365852 - DNA, 33 bp, Homo sapien
gactctgcccggagtttaaagggaccctgttgc

SEQ ID NO: 365853 - DNA, 33 bp, Homo sapien
agtctcatttttggtaaccagcataggaaggag

SEQ ID NO: 365854 - DNA, 33 bp, Homo sapien
agtctcatttttggtacccagcataggaaggag

SEQ ID NO: 365855 - DNA, 33 bp, Homo sapien
gcaggctgggaatttcggaaatacattactaga

SEQ ID NO: 365856 - DNA, 33 bp, Homo sapien
gcaggctgggaatttctgaaatacattactaga

SEQ ID NO: 365857 - DNA, 33 bp, Homo sapien
tgtacaggtttaggaaaaaggctctaagcaagt

SEQ ID NO: 365858 - DNA, 33 bp, Homo sapien
tgtacaggtttaggaagaaggctctaagcaagt

SEQ ID NO: 365859 - DNA, 33 bp, Homo sapien
cagaaagcctgagagccgagcttggaaatccac

SEQ ID NO: 365860 - DNA, 33 bp, Homo sapien
cagaaagcctgagagctgagcttggaaatccac

SEQ ID NO: 365861 - DNA, 33 bp, Homo sapien
aaatcggattaattgccatcatgtaaaagtctg

SEQ ID NO: 365862 - DNA, 33 bp, Homo sapien
aaatcggattaattgctatcatgtaaaagtctg

SEQ ID NO: 365863 - DNA, 33 bp, Homo sapien
taactacatgccccacaacggccaggcagatgc

SEQ ID NO: 365864 - DNA, 33 bp, Homo sapien
taactacatgccccacgacggccaggcagatgc

SEQ ID NO: 365865 - DNA, 33 bp, Homo sapien
aaaggtactttgtaaactgggaagcaatgaata

SEQ ID NO: 365866 - DNA, 33 bp, Homo sapien
aaaggtactttgtaaagtgggaagcaatgaata

SEQ ID NO: 365867 - DNA, 33 bp, Homo sapien
tctctacttactggcacagttttgtctccaaag

SEQ ID NO: 365868 - DNA, 33 bp, Homo sapien
tctctacttactggcatagttttgtctccaaag

SEQ ID NO: 365869 - DNA, 33 bp, Homo sapien
tgatgggggaaattgacaactgggctgtttttc

SEQ ID NO: 365870 - DNA, 33 bp, Homo sapien
tgatgggggaaattgataactgggctgtttttc

SEQ ID NO: 365871 - DNA, 33 bp, Homo sapien
aggtttgttcttaatgacagttacatatggttt

SEQ ID NO: 365872 - DNA, 33 bp, Homo sapien
aggtttgttcttaatggcagttacatatggttt

SEQ ID NO: 365873 - DNA, 33 bp, Homo sapien
tgcttgagtgcactgacagccaaattacccaaa

SEQ ID NO: 365874 - DNA, 33 bp, Homo sapien
tgcttgagtgcactgatagccaaattacccaaa

SEQ ID NO: 365875 - DNA, 33 bp, Homo sapien
catgtagctgtaaaaacagtccatgtggaccca

SEQ ID NO: 365876 - DNA, 33 bp, Homo sapien
catgtagctgtaaaaagagtccatgtggaccca

SEQ ID NO: 365877 - DNA, 33 bp, Homo sapien
cctacatcgcttctaaaatgctacctgccttcc

SEQ ID NO: 365878 - DNA, 33 bp, Homo sapien
cctacatcgcttctaacatgctacctgccttcc

SEQ ID NO: 365879 - DNA, 33 bp, Homo sapien
gctctttcaggactcaaggctaaggagggcaca

SEQ ID NO: 365880 - DNA, 33 bp, Homo sapien
gctctttcaggactcatggctaaggagggcaca

SEQ ID NO: 365881 - DNA, 33 bp, Homo sapien
gacggcccaaacctccacgcatcagcacccagc

SEQ ID NO: 365882 - DNA, 33 bp, Homo sapien
gacggcccaaacctccgcgcatcagcacccagc

SEQ ID NO: 365883 - DNA, 33 bp, Homo sapien
ccacgttagagccgacaccttcatattcaatgt

SEQ ID NO: 365884 - DNA, 33 bp, Homo sapien
ccacgttagagccgaccccttcatattcaatgt

SEQ ID NO: 365885 - DNA, 33 bp, Homo sapien
acagcagaaatgctacagagaaaaagccagcag

SEQ ID NO: 365886 - DNA, 33 bp, Homo sapien
acagcagaaatgctacggagaaaaagccagcag

SEQ ID NO: 365887 - DNA, 33 bp, Homo sapien
cttgaactcttatccccctgccttctatcatcc

SEQ ID NO: 365888 - DNA, 33 bp, Homo sapien
cttgaactcttatccctctgccttctatcatcc

SEQ ID NO: 365889 - DNA, 33 bp, Homo sapien
caagtcagacacctcactcttggcaaagcgaga

SEQ ID NO: 365890 - DNA, 33 bp, Homo sapien
caagtcagacacctcattcttggcaaagcgaga

SEQ ID NO: 365891 - DNA, 33 bp, Homo sapien
ttatttgaaaacatgacgagtagaacaatattt

SEQ ID NO: 365892 - DNA, 33 bp, Homo sapien
ttatttgaaaacatgatgagtagaacaatattt

SEQ ID NO: 365893 - DNA, 33 bp, Homo sapien
agaacgcccactccaacgcctgtgcttcacgca

SEQ ID NO: 365894 - DNA, 33 bp, Homo sapien
agaacgcccactccaatgcctgtgcttcacgca

SEQ ID NO: 365895 - DNA, 33 bp, Homo sapien
aggagagaagcttggacatgtgtgcagggtgat

SEQ ID NO: 365896 - DNA, 33 bp, Homo sapien
aggagagaagcttggatatgtgtgcagggtgat

SEQ ID NO: 365897 - DNA, 33 bp, Homo sapien
acaaaggatgtaaggacctgttaagaactcgta

SEQ ID NO: 365898 - DNA, 33 bp, Homo sapien
acaaaggatgtaaggatctgttaagaactcgta

SEQ ID NO: 365899 - DNA, 33 bp, Homo sapien
tttgcctaaaaacaaacatctgtgagtgagcat

SEQ ID NO: 365900 - DNA, 33 bp, Homo sapien
tttgcctaaaaacaaatatctgtgagtgagcat

SEQ ID NO: 365901 - DNA, 33 bp, Homo sapien
agagtaatgtggtcaagatgtgagtggtgacaa

SEQ ID NO: 365902 - DNA, 33 bp, Homo sapien
agagtaatgtggtcaatatgtgagtggtgacaa

SEQ ID NO: 365903 - DNA, 33 bp, Homo sapien
ggccatactgagcacaccaaacgagagttcaaa

SEQ ID NO: 365904 - DNA, 33 bp, Homo sapien
ggccatactgagcacatcaaacgagagttcaaa

SEQ ID NO: 365905 - DNA, 33 bp, Homo sapien
tgggtaattatcccacaagcattcagaagaaaa

SEQ ID NO: 365906 - DNA, 33 bp, Homo sapien
tgggtaattatcccacgagcattcagaagaaaa

SEQ ID NO: 365907 - DNA, 33 bp, Homo sapien
attactcacaaagagaagcacaaatgctaattt

SEQ ID NO: 365908 - DNA, 33 bp, Homo sapien
attactcacaaagagacgcacaaatgctaattt

SEQ ID NO: 365909 - DNA, 33 bp, Homo sapien
caaaatcacaaaataaaaaaagctctgggagtt

SEQ ID NO: 365910 - DNA, 33 bp, Homo sapien
caaaatcacaaaataagaaaagctctgggagtt

SEQ ID NO: 365911 - DNA, 33 bp, Homo sapien
gtctcttgggaataaaatgtgtgttcttattca

SEQ ID NO: 365912 - DNA, 33 bp, Homo sapien
gtctcttgggaataaagtgtgtgttcttattca

SEQ ID NO: 365913 - DNA, 33 bp, Homo sapien
aatctgactctaaaatcaataaaggacttgaaa

SEQ ID NO: 365914 - DNA, 33 bp, Homo sapien
aatctgactctaaaatgaataaaggacttgaaa

SEQ ID NO: 365915 - DNA, 33 bp, Homo sapien
gttaaggtttgcgattaaagtggggccttatca

SEQ ID NO: 365916 - DNA, 33 bp, Homo sapien
gttaaggtttgcgatttaagtggggccttatca

SEQ ID NO: 365917 - DNA, 33 bp, Homo sapien
ttcatattccctttacaaaattcaaaagatgtc

SEQ ID NO: 365918 - DNA, 33 bp, Homo sapien
ttcatattccctttacgaaattcaaaagatgtc

SEQ ID NO: 365919 - DNA, 33 bp, Homo sapien
tgtagtttcttcactggatatgcacacactcac

SEQ ID NO: 365920 - DNA, 33 bp, Homo sapien
tgtagtttcttcactgtatatgcacacactcac

SEQ ID NO: 365921 - DNA, 33 bp, Homo sapien
ccttggttcaaacttaccctacgacaatagctt

SEQ ID NO: 365922 - DNA, 33 bp, Homo sapien
ccttggttcaaacttatcctacgacaatagctt

SEQ ID NO: 365923 - DNA, 33 bp, Homo sapien
agattggccacaccaactcagatgtgttaattt

SEQ ID NO: 365924 - DNA, 33 bp, Homo sapien
agattggccacaccaagtcagatgtgttaattt

SEQ ID NO: 365925 - DNA, 33 bp, Homo sapien
tccccatgtcttaaaaacttccgaaaaggtggc

SEQ ID NO: 365926 - DNA, 33 bp, Homo sapien
tccccatgtcttaaaagcttccgaaaaggtggc

SEQ ID NO: 365927 - DNA, 33 bp, Homo sapien
ttaaaaaggcaaagtacaatgccctctcagcct

SEQ ID NO: 365928 - DNA, 33 bp, Homo sapien
ttaaaaaggcaaagtagaatgccctctcagcct

SEQ ID NO: 365929 - DNA, 33 bp, Homo sapien
cacgaaacaacgtgtacaagacaagcaatctgg

SEQ ID NO: 365930 - DNA, 33 bp, Homo sapien
cacgaaacaacgtgtataagacaagcaatctgg

SEQ ID NO: 365931 - DNA, 33 bp, Homo sapien
tgtaaatgtggagaaaccttcattgggttggtg

SEQ ID NO: 365932 - DNA, 33 bp, Homo sapien
tgtaaatgtggagaaatcttcattgggttggtg

SEQ ID NO: 365933 - DNA, 33 bp, Homo sapien
gtcaggaatagcaggaaagaattctctctcctc

SEQ ID NO: 365934 - DNA, 33 bp, Homo sapien
gtcaggaatagcaggacagaattctctctcctc

SEQ ID NO: 365935 - DNA, 33 bp, Homo sapien
gtggaaaaattaactacgctcaaacataacctg

SEQ ID NO: 365936 - DNA, 33 bp, Homo sapien
gtggaaaaattaactatgctcaaacataacctg

SEQ ID NO: 365937 - DNA, 33 bp, Homo sapien
gttttggcttaggacaagttactggacatgtcg

SEQ ID NO: 365938 - DNA, 33 bp, Homo sapien
gttttggcttaggacaggttactggacatgtcg

SEQ ID NO: 365939 - DNA, 33 bp, Homo sapien
taatatgtaaaaaaaccagccatacggaaagag

SEQ ID NO: 365940 - DNA, 33 bp, Homo sapien
taatatgtaaaaaaacgagccatacggaaagag

SEQ ID NO: 365941 - DNA, 33 bp, Homo sapien
aggggcatgctaagaaatgaatttgggccaggc

SEQ ID NO: 365942 - DNA, 33 bp, Homo sapien
aggggcatgctaagaactgaatttgggccaggc

SEQ ID NO: 365943 - DNA, 33 bp, Homo sapien
tcatggacatagataacgccgttgatcacctta

SEQ ID NO: 365944 - DNA, 33 bp, Homo sapien
tcatggacatagataatgccgttgatcacctta

SEQ ID NO: 365945 - DNA, 33 bp, Homo sapien
tgaagttttcttatagccagcaatcaagttgga

SEQ ID NO: 365946 - DNA, 33 bp, Homo sapien
tgaagttttcttatagtcagcaatcaagttgga

SEQ ID NO: 365947 - DNA, 33 bp, Homo sapien
cacaggtgtgaacaaaataagtgtagcaaccac

SEQ ID NO: 365948 - DNA, 33 bp, Homo sapien
cacaggtgtgaacaaagtaagtgtagcaaccac

SEQ ID NO: 365949 - DNA, 33 bp, Homo sapien
ccttctctttcatgtacggcctcttctagcctg

SEQ ID NO: 365950 - DNA, 33 bp, Homo sapien
ccttctctttcatgtatggcctcttctagcctg

SEQ ID NO: 365951 - DNA, 33 bp, Homo sapien
ggggaataatcatcaaggtttatagcaataaaa

SEQ ID NO: 365952 - DNA, 33 bp, Homo sapien
ggggaataatcatcaatgtttatagcaataaaa

SEQ ID NO: 365953 - DNA, 33 bp, Homo sapien
gtgggcgcactgggctcagatgaaccattccat

SEQ ID NO: 365954 - DNA, 33 bp, Homo sapien
gtgggcgcactgggctgagatgaaccattccat

SEQ ID NO: 365955 - DNA, 33 bp, Homo sapien
ggattacttacagtaaatgaaaaccaagacttg

SEQ ID NO: 365956 - DNA, 33 bp, Homo sapien
ggattacttacagtaagtgaaaaccaagacttg

SEQ ID NO: 365957 - DNA, 33 bp, Homo sapien
agccaggactgagaaccagtgattttatgcaga

SEQ ID NO: 365958 - DNA, 33 bp, Homo sapien
agccaggactgagaactagtgattttatgcaga

SEQ ID NO: 365959 - DNA, 33 bp, Homo sapien
cacgataggaccatatcaggagttagtagttat

SEQ ID NO: 365960 - DNA, 33 bp, Homo sapien
cacgataggaccatattaggagttagtagttat

SEQ ID NO: 365961 - DNA, 33 bp, Homo sapien
agcttacctttctccaactgcacaatgatcatg

SEQ ID NO: 365962 - DNA, 33 bp, Homo sapien
agcttacctttctccagctgcacaatgatcatg

SEQ ID NO: 365963 - DNA, 33 bp, Homo sapien
tctgctttctccatcaagatgagtaaaatgcag

SEQ ID NO: 365964 - DNA, 33 bp, Homo sapien
tctgctttctccatcaggatgagtaaaatgcag

SEQ ID NO: 365965 - DNA, 33 bp, Homo sapien
tctcctccttgccatacgtaattgatattcaca

SEQ ID NO: 365966 - DNA, 33 bp, Homo sapien
tctcctccttgccatatgtaattgatattcaca

SEQ ID NO: 365967 - DNA, 33 bp, Homo sapien
acaatggtagtttccacctcttggacactctct

SEQ ID NO: 365968 - DNA, 33 bp, Homo sapien
acaatggtagtttccatctcttggacactctct

SEQ ID NO: 365969 - DNA, 33 bp, Homo sapien
tgatagccgtgttaatcagccctccaaagggca

SEQ ID NO: 365970 - DNA, 33 bp, Homo sapien
tgatagccgtgttaattagccctccaaagggca

SEQ ID NO: 365971 - DNA, 33 bp, Homo sapien
ttcacacagtggacaacttactcctcatccatc

SEQ ID NO: 365972 - DNA, 33 bp, Homo sapien
ttcacacagtggacaatttactcctcatccatc

SEQ ID NO: 365973 - DNA, 33 bp, Homo sapien
ttatgcatagggctgacataaacgttcagtttt

SEQ ID NO: 365974 - DNA, 33 bp, Homo sapien
ttatgcatagggctgatataaacgttcagtttt

SEQ ID NO: 365975 - DNA, 33 bp, Homo sapien
ccggcggtggtttccaatatgtatctaatccca

SEQ ID NO: 365976 - DNA, 33 bp, Homo sapien
ccggcggtggtttccactatgtatctaatccca

SEQ ID NO: 365977 - DNA, 33 bp, Homo sapien
tttgttcttctgatcgaacttgtttctttctaa

SEQ ID NO: 365978 - DNA, 33 bp, Homo sapien
tttgttcttctgatcgtacttgtttctttctaa

SEQ ID NO: 365979 - DNA, 33 bp, Homo sapien
tttagactgttttttccaactgacaaatattta

SEQ ID NO: 365980 - DNA, 33 bp, Homo sapien
tttagactgttttttctaactgacaaatattta

SEQ ID NO: 365981 - DNA, 33 bp, Homo sapien
taaatcacaggtggaacagattcaatatgagaa

SEQ ID NO: 365982 - DNA, 33 bp, Homo sapien
taaatcacaggtggaagagattcaatatgagaa

SEQ ID NO: 365983 - DNA, 33 bp, Homo sapien
tgggagttttaagcaaagatacagttgaaggga

SEQ ID NO: 365984 - DNA, 33 bp, Homo sapien
tgggagttttaagcaatgatacagttgaaggga

SEQ ID NO: 365985 - DNA, 33 bp, Homo sapien
ctaataatctcctcaaacaatttctggcctaat

SEQ ID NO: 365986 - DNA, 33 bp, Homo sapien
ctaataatctcctcaagcaatttctggcctaat

SEQ ID NO: 365987 - DNA, 33 bp, Homo sapien
tctaatcttaatacacagaaaatgccaacttca

SEQ ID NO: 365988 - DNA, 33 bp, Homo sapien
tctaatcttaatacacggaaaatgccaacttca

SEQ ID NO: 365989 - DNA, 33 bp, Homo sapien
tcagtaatttgaagtacataccactccccaccc

SEQ ID NO: 365990 - DNA, 33 bp, Homo sapien
tcagtaatttgaagtagataccactccccaccc

SEQ ID NO: 365991 - DNA, 33 bp, Homo sapien
gttgcgactgggtgacaaattcattaggtgcat

SEQ ID NO: 365992 - DNA, 33 bp, Homo sapien
gttgcgactgggtgacgaattcattaggtgcat

SEQ ID NO: 365993 - DNA, 33 bp, Homo sapien
aactatctgggtcaaaaaaattcatctataaaa

SEQ ID NO: 365994 - DNA, 33 bp, Homo sapien
aactatctgggtcaaagaaattcatctataaaa

SEQ ID NO: 365995 - DNA, 33 bp, Homo sapien
ccctgcttgagggttaagtactagtgaagtgag

SEQ ID NO: 365996 - DNA, 33 bp, Homo sapien
ccctgcttgagggttacgtactagtgaagtgag

SEQ ID NO: 365997 - DNA, 33 bp, Homo sapien
acagatcatagtccagcatgtctgagaaacact

SEQ ID NO: 365998 - DNA, 33 bp, Homo sapien
acagatcatagtccagtatgtctgagaaacact

SEQ ID NO: 365999 - DNA, 33 bp, Homo sapien
tgaatgagttcataaaaggtggcttgaagtttt

SEQ ID NO: 366000 - DNA, 33 bp, Homo sapien
tgaatgagttcataaacggtggcttgaagtttt

SEQ ID NO: 366001 - DNA, 33 bp, Homo sapien
atacggtatactccccagacaggtattttgtaa

SEQ ID NO: 366002 - DNA, 33 bp, Homo sapien
atacggtatactccccggacaggtattttgtaa

SEQ ID NO: 366003 - DNA, 33 bp, Homo sapien
atcagaacctgcccgacggggttggcaaaggca

SEQ ID NO: 366004 - DNA, 33 bp, Homo sapien
atcagaacctgcccgatggggttggcaaaggca

SEQ ID NO: 366005 - DNA, 33 bp, Homo sapien
gtcaaacagctttcaccggcatctttgggtcac

SEQ ID NO: 366006 - DNA, 33 bp, Homo sapien
gtcaaacagctttcacgggcatctttgggtcac

SEQ ID NO: 366007 - DNA, 33 bp, Homo sapien
aagacagccctgtccacagatgtgcttggtggg

SEQ ID NO: 366008 - DNA, 33 bp, Homo sapien
aagacagccctgtccatagatgtgcttggtggg

SEQ ID NO: 366009 - DNA, 33 bp, Homo sapien
accctcttcacacctaagtgctatttctttgca

SEQ ID NO: 366010 - DNA, 33 bp, Homo sapien
accctcttcacacctacgtgctatttctttgca

SEQ ID NO: 366011 - DNA, 33 bp, Homo sapien
gagattcaaatttttaaaagttgccaggcgtgg

SEQ ID NO: 366012 - DNA, 33 bp, Homo sapien
gagattcaaatttttagaagttgccaggcgtgg

SEQ ID NO: 366013 - DNA, 33 bp, Homo sapien
tataaacaggatgatcccaatttggccagagaa

SEQ ID NO: 366014 - DNA, 33 bp, Homo sapien
tataaacaggatgatctcaatttggccagagaa

SEQ ID NO: 366015 - DNA, 33 bp, Homo sapien
aatttgttaattaagaatagatggtgagctgtc

SEQ ID NO: 366016 - DNA, 33 bp, Homo sapien
aatttgttaattaagagtagatggtgagctgtc

SEQ ID NO: 366017 - DNA, 33 bp, Homo sapien
cagaagcctctctgccaggacttagacacaatc

SEQ ID NO: 366018 - DNA, 33 bp, Homo sapien
cagaagcctctctgccgggacttagacacaatc

SEQ ID NO: 366019 - DNA, 33 bp, Homo sapien
tctggaggagacaatacctgagccgacacctga

SEQ ID NO: 366020 - DNA, 33 bp, Homo sapien
tctggaggagacaatatctgagccgacacctga

SEQ ID NO: 366021 - DNA, 33 bp, Homo sapien
tataagtgacagcgtgcagtatttgattttctg

SEQ ID NO: 366022 - DNA, 33 bp, Homo sapien
tataagtgacagcgtgtagtatttgattttctg

SEQ ID NO: 366023 - DNA, 33 bp, Homo sapien
atgggcaaaggccagaagcaggaaccaaaggag

SEQ ID NO: 366024 - DNA, 33 bp, Homo sapien
atgggcaaaggccagaggcaggaaccaaaggag

SEQ ID NO: 366025 - DNA, 33 bp, Homo sapien
agatcaccttcacttgaagaaatgttacttcac

SEQ ID NO: 366026 - DNA, 33 bp, Homo sapien
agatcaccttcacttggagaaatgttacttcac

SEQ ID NO: 366027 - DNA, 33 bp, Homo sapien
gccaacatgcacagcaccttgaagatggatttg

SEQ ID NO: 366028 - DNA, 33 bp, Homo sapien
gccaacatgcacagcagcttgaagatggatttg

SEQ ID NO: 366029 - DNA, 33 bp, Homo sapien
gaggtggctcctgtcaagaaagggcagttccct

SEQ ID NO: 366030 - DNA, 33 bp, Homo sapien
gaggtggctcctgtcaggaaagggcagttccct

SEQ ID NO: 366031 - DNA, 33 bp, Homo sapien
tcagctaaaaagacagacgcattacaaccagca

SEQ ID NO: 366032 - DNA, 33 bp, Homo sapien
tcagctaaaaagacagtcgcattacaaccagca

SEQ ID NO: 366033 - DNA, 33 bp, Homo sapien
ctcagggaatatcaaacgctatggcaaagcccc

SEQ ID NO: 366034 - DNA, 33 bp, Homo sapien
ctcagggaatatcaaaggctatggcaaagcccc

SEQ ID NO: 366035 - DNA, 33 bp, Homo sapien
agaggagccaatgccacaaagaagcaacatcca

SEQ ID NO: 366036 - DNA, 33 bp, Homo sapien
agaggagccaatgccagaaagaagcaacatcca

SEQ ID NO: 366037 - DNA, 33 bp, Homo sapien
tcttcttacatgccagaaacagctaactgctcc

SEQ ID NO: 366038 - DNA, 33 bp, Homo sapien
tcttcttacatgccagcaacagctaactgctcc

SEQ ID NO: 366039 - DNA, 33 bp, Homo sapien
ctgtggaaacaggaagactgagacctagagaag

SEQ ID NO: 366040 - DNA, 33 bp, Homo sapien
ctgtggaaacaggaagtctgagacctagagaag

SEQ ID NO: 366041 - DNA, 33 bp, Homo sapien
ttgttattgttgttgaagttttgtagggaaggg

SEQ ID NO: 366042 - DNA, 33 bp, Homo sapien
ttgttattgttgttgatgttttgtagggaaggg

SEQ ID NO: 366043 - DNA, 33 bp, Homo sapien
agaaaatgtcttttcaagtcaggtgtggtgtct

SEQ ID NO: 366044 - DNA, 33 bp, Homo sapien
agaaaatgtcttttcaggtcaggtgtggtgtct

SEQ ID NO: 366045 - DNA, 33 bp, Homo sapien
gctattgtacagatgacaaaaccagtgttcaga

SEQ ID NO: 366046 - DNA, 33 bp, Homo sapien
gctattgtacagatgagaaaaccagtgttcaga

SEQ ID NO: 366047 - DNA, 33 bp, Homo sapien
cctactgagtcaactcaagcttgtcctttcaat

SEQ ID NO: 366048 - DNA, 33 bp, Homo sapien
cctactgagtcaactccagcttgtcctttcaat

SEQ ID NO: 366049 - DNA, 33 bp, Homo sapien
gagcattgtgcagagaaaacatgaatggaaaac

SEQ ID NO: 366050 - DNA, 33 bp, Homo sapien
gagcattgtgcagagacaacatgaatggaaaac

SEQ ID NO: 366051 - DNA, 33 bp, Homo sapien
aagaaggtccatccacactccttcattcttttt

SEQ ID NO: 366052 - DNA, 33 bp, Homo sapien
aagaaggtccatccacgctccttcattcttttt

SEQ ID NO: 366053 - DNA, 33 bp, Homo sapien
gagtctataggatagaaaagccagacaggctcc

SEQ ID NO: 366054 - DNA, 33 bp, Homo sapien
gagtctataggatagagaagccagacaggctcc

SEQ ID NO: 366055 - DNA, 33 bp, Homo sapien
tttacttttgtttagacgggtgcttcaccttgg

SEQ ID NO: 366056 - DNA, 33 bp, Homo sapien
tttacttttgtttagatgggtgcttcaccttgg

SEQ ID NO: 366057 - DNA, 33 bp, Homo sapien
gtccctcgctgatgccaaatgaaagcttcagag

SEQ ID NO: 366058 - DNA, 33 bp, Homo sapien
gtccctcgctgatgccgaatgaaagcttcagag

SEQ ID NO: 366059 - DNA, 33 bp, Homo sapien
ggaggtgcgctgctgacggagtgaactgggtaa

SEQ ID NO: 366060 - DNA, 33 bp, Homo sapien
ggaggtgcgctgctgatggagtgaactgggtaa

SEQ ID NO: 366061 - DNA, 33 bp, Homo sapien
taggttaatgggaggacgttggttctatttata

SEQ ID NO: 366062 - DNA, 33 bp, Homo sapien
taggttaatgggaggatgttggttctatttata

SEQ ID NO: 366063 - DNA, 33 bp, Homo sapien
agtcaagtcgttgctacagagtctaaaaaaggt

SEQ ID NO: 366064 - DNA, 33 bp, Homo sapien
agtcaagtcgttgctatagagtctaaaaaaggt

SEQ ID NO: 366065 - DNA, 33 bp, Homo sapien
aatggaaagaaaatgaaggtttaggattcagac

SEQ ID NO: 366066 - DNA, 33 bp, Homo sapien
aatggaaagaaaatgagggtttaggattcagac

SEQ ID NO: 366067 - DNA, 33 bp, Homo sapien
tttctattgtggcttacctggatttcaatggaa

SEQ ID NO: 366068 - DNA, 33 bp, Homo sapien
tttctattgtggcttatctggatttcaatggaa

SEQ ID NO: 366069 - DNA, 33 bp, Homo sapien
taatggtgttattatacaaaggattaacctgca

SEQ ID NO: 366070 - DNA, 33 bp, Homo sapien
taatggtgttattatagaaaggattaacctgca

SEQ ID NO: 366071 - DNA, 33 bp, Homo sapien
gctttttggcagcatccaacccatagcaaagcc

SEQ ID NO: 366072 - DNA, 33 bp, Homo sapien
gctttttggcagcatcgaacccatagcaaagcc

SEQ ID NO: 366073 - DNA, 33 bp, Homo sapien
tatgctcttcatcaaaatgcaggcgtcatttct

SEQ ID NO: 366074 - DNA, 33 bp, Homo sapien
tatgctcttcatcaaagtgcaggcgtcatttct

SEQ ID NO: 366075 - DNA, 33 bp, Homo sapien
tagtttctgtgtctccccccttcaacaattttc

SEQ ID NO: 366076 - DNA, 33 bp, Homo sapien
tagtttctgtgtctccgcccttcaacaattttc

SEQ ID NO: 366077 - DNA, 33 bp, Homo sapien
attctcttgtctaaaaacctgattgcttccaat

SEQ ID NO: 366078 - DNA, 33 bp, Homo sapien
attctcttgtctaaaaccctgattgcttccaat

SEQ ID NO: 366079 - DNA, 33 bp, Homo sapien
atctctaaattcatcaagttgcatacattaaat

SEQ ID NO: 366080 - DNA, 33 bp, Homo sapien
atctctaaattcatcaggttgcatacattaaat

SEQ ID NO: 366081 - DNA, 33 bp, Homo sapien
ttaaggaagacccccccaaattgtataagcctc

SEQ ID NO: 366082 - DNA, 33 bp, Homo sapien
ttaaggaagacccccctaaattgtataagcctc

SEQ ID NO: 366083 - DNA, 33 bp, Homo sapien
tcacgtggggcagaaccaggcttcaggcgaggg

SEQ ID NO: 366084 - DNA, 33 bp, Homo sapien
tcacgtggggcagaacgaggcttcaggcgaggg

SEQ ID NO: 366085 - DNA, 33 bp, Homo sapien
ctcttgccagaactaactgagatgcaacccaac

SEQ ID NO: 366086 - DNA, 33 bp, Homo sapien
ctcttgccagaactaattgagatgcaacccaac

SEQ ID NO: 366087 - DNA, 33 bp, Homo sapien
cagcagtccccaaataccacttgttcatacccc

SEQ ID NO: 366088 - DNA, 33 bp, Homo sapien
cagcagtccccaaatatcacttgttcatacccc

SEQ ID NO: 366089 - DNA, 33 bp, Homo sapien
catgtccaggagagaacctagaaggtggaagtt

SEQ ID NO: 366090 - DNA, 33 bp, Homo sapien
catgtccaggagagaagctagaaggtggaagtt

SEQ ID NO: 366091 - DNA, 33 bp, Homo sapien
gagcacctgagttcaacctactgttctgcattt

SEQ ID NO: 366092 - DNA, 33 bp, Homo sapien
gagcacctgagttcaatctactgttctgcattt

SEQ ID NO: 366093 - DNA, 33 bp, Homo sapien
tcagggttgtgaaggacgatgtggaatcaggag

SEQ ID NO: 366094 - DNA, 33 bp, Homo sapien
tcagggttgtgaaggaggatgtggaatcaggag

SEQ ID NO: 366095 - DNA, 33 bp, Homo sapien
atagctgggattctacagaaagcagcattttct

SEQ ID NO: 366096 - DNA, 33 bp, Homo sapien
atagctgggattctacggaaagcagcattttct

SEQ ID NO: 366097 - DNA, 33 bp, Homo sapien
aaaacattaaattaagaaattcatcaccacatt

SEQ ID NO: 366098 - DNA, 33 bp, Homo sapien
aaaacattaaattaaggaattcatcaccacatt

SEQ ID NO: 366099 - DNA, 33 bp, Homo sapien
agcttgccagctccccagaaacgtctagagcca

SEQ ID NO: 366100 - DNA, 33 bp, Homo sapien
agcttgccagctccccggaaacgtctagagcca

SEQ ID NO: 366101 - DNA, 33 bp, Homo sapien
tatcagtgaagaaacactgagatattaaacagt

SEQ ID NO: 366102 - DNA, 33 bp, Homo sapien
tatcagtgaagaaacagtgagatattaaacagt

SEQ ID NO: 366103 - DNA, 33 bp, Homo sapien
tcctttcttacctgatgaacagctttgtgggct

SEQ ID NO: 366104 - DNA, 33 bp, Homo sapien
tcctttcttacctgattaacagctttgtgggct

SEQ ID NO: 366105 - DNA, 33 bp, Homo sapien
gaaggtcattatagtccattggaataaatgaat

SEQ ID NO: 366106 - DNA, 33 bp, Homo sapien
gaaggtcattatagtctattggaataaatgaat

SEQ ID NO: 366107 - DNA, 33 bp, Homo sapien
gaaatatgctgacacgaaatgggtgcactcaac

SEQ ID NO: 366108 - DNA, 33 bp, Homo sapien
gaaatatgctgacacgtaatgggtgcactcaac

SEQ ID NO: 366109 - DNA, 33 bp, Homo sapien
tgaaaatgaacattcaaaatttggtgtttcaag

SEQ ID NO: 366110 - DNA, 33 bp, Homo sapien
tgaaaatgaacattcagaatttggtgtttcaag

SEQ ID NO: 366111 - DNA, 33 bp, Homo sapien
tttacccatacaaatccctgcttgatgggaatt

SEQ ID NO: 366112 - DNA, 33 bp, Homo sapien
tttacccatacaaatctctgcttgatgggaatt

SEQ ID NO: 366113 - DNA, 33 bp, Homo sapien
cccagttgtaatctctcaaaacatggggcaaaa

SEQ ID NO: 366114 - DNA, 33 bp, Homo sapien
cccagttgtaatctctgaaaacatggggcaaaa

SEQ ID NO: 366115 - DNA, 33 bp, Homo sapien
tttttaagatgattgacagactgagtaaaagtt

SEQ ID NO: 366116 - DNA, 33 bp, Homo sapien
tttttaagatgattgagagactgagtaaaagtt

SEQ ID NO: 366117 - DNA, 33 bp, Homo sapien
gttggatgcttcatccccgatgctacagtgttg

SEQ ID NO: 366118 - DNA, 33 bp, Homo sapien
gttggatgcttcatcctcgatgctacagtgttg

SEQ ID NO: 366119 - DNA, 33 bp, Homo sapien
ctgaaggaaatggaccaccctggatgcctacac

SEQ ID NO: 366120 - DNA, 33 bp, Homo sapien
ctgaaggaaatggaccgccctggatgcctacac

SEQ ID NO: 366121 - DNA, 33 bp, Homo sapien
atgtaagatagtcatgcaggaaggtaatattta

SEQ ID NO: 366122 - DNA, 33 bp, Homo sapien
atgtaagatagtcatgtaggaaggtaatattta

SEQ ID NO: 366123 - DNA, 33 bp, Homo sapien
atgtagcaaacctgtccaagtctgcgtgtccga

SEQ ID NO: 366124 - DNA, 33 bp, Homo sapien
atgtagcaaacctgtctaagtctgcgtgtccga

SEQ ID NO: 366125 - DNA, 33 bp, Homo sapien
gcttgagtggctccaagttgaatattaaacaga

SEQ ID NO: 366126 - DNA, 33 bp, Homo sapien
gcttgagtggctccaatttgaatattaaacaga

SEQ ID NO: 366127 - DNA, 33 bp, Homo sapien
actgccaggagcgatgcaatggaggattcgaaa

SEQ ID NO: 366128 - DNA, 33 bp, Homo sapien
actgccaggagcgatggaatggaggattcgaaa

SEQ ID NO: 366129 - DNA, 33 bp, Homo sapien
ctcacttctgggcctcgattgattcagtgggtc

SEQ ID NO: 366130 - DNA, 33 bp, Homo sapien
ctcacttctgggcctctattgattcagtgggtc

SEQ ID NO: 366131 - DNA, 33 bp, Homo sapien
atttaccaaatgaacaaacaggctcagagaagt

SEQ ID NO: 366132 - DNA, 33 bp, Homo sapien
atttaccaaatgaacagacaggctcagagaagt

SEQ ID NO: 366133 - DNA, 33 bp, Homo sapien
gagcataaacaatttcacactctgaggtagacc

SEQ ID NO: 366134 - DNA, 33 bp, Homo sapien
gagcataaacaatttcgcactctgaggtagacc

SEQ ID NO: 366135 - DNA, 33 bp, Homo sapien
gatcactttgtaaccacgtttgtgcacaagcca

SEQ ID NO: 366136 - DNA, 33 bp, Homo sapien
gatcactttgtaaccatgtttgtgcacaagcca

SEQ ID NO: 366137 - DNA, 33 bp, Homo sapien
acctgccattgagcaacttaggattatggactc

SEQ ID NO: 366138 - DNA, 33 bp, Homo sapien
acctgccattgagcaagttaggattatggactc

SEQ ID NO: 366139 - DNA, 33 bp, Homo sapien
ccttttccagcagtgcgaagaggatatggtcag

SEQ ID NO: 366140 - DNA, 33 bp, Homo sapien
ccttttccagcagtgctaagaggatatggtcag

SEQ ID NO: 366141 - DNA, 33 bp, Homo sapien
cctcaaccaccaagcgcagtcatctagaagaga

SEQ ID NO: 366142 - DNA, 33 bp, Homo sapien
cctcaaccaccaagcgtagtcatctagaagaga

SEQ ID NO: 366143 - DNA, 33 bp, Homo sapien
aacaattttgattgtcacagctaggatgggagt

SEQ ID NO: 366144 - DNA, 33 bp, Homo sapien
aacaattttgattgtcgcagctaggatgggagt

SEQ ID NO: 366145 - DNA, 33 bp, Homo sapien
accaggagtgccttcaaaacagacatgaacgtt

SEQ ID NO: 366146 - DNA, 33 bp, Homo sapien
accaggagtgccttcagaacagacatgaacgtt

SEQ ID NO: 366147 - DNA, 33 bp, Homo sapien
gtgaaatagtacttgccacataataggtgccca

SEQ ID NO: 366148 - DNA, 33 bp, Homo sapien
gtgaaatagtacttgctacataataggtgccca

SEQ ID NO: 366149 - DNA, 33 bp, Homo sapien
gaatgtgatatagatacgtagtagccacatttt

SEQ ID NO: 366150 - DNA, 33 bp, Homo sapien
gaatgtgatatagatatgtagtagccacatttt

SEQ ID NO: 366151 - DNA, 33 bp, Homo sapien
caagttcctgcctacaccttccaaataaaaaga

SEQ ID NO: 366152 - DNA, 33 bp, Homo sapien
caagttcctgcctacatcttccaaataaaaaga

SEQ ID NO: 366153 - DNA, 33 bp, Homo sapien
gggttgagaggttaagcaagatgaaaagtgtag

SEQ ID NO: 366154 - DNA, 33 bp, Homo sapien
gggttgagaggttaagtaagatgaaaagtgtag

SEQ ID NO: 366155 - DNA, 33 bp, Homo sapien
tatttattgtttgccacgcaataggctaagcat

SEQ ID NO: 366156 - DNA, 33 bp, Homo sapien
tatttattgtttgccatgcaataggctaagcat

SEQ ID NO: 366157 - DNA, 33 bp, Homo sapien
gatggaggaaactgaacagtcacctttcagtcc

SEQ ID NO: 366158 - DNA, 33 bp, Homo sapien
gatggaggaaactgaagagtcacctttcagtcc

SEQ ID NO: 366159 - DNA, 33 bp, Homo sapien
aaaaatattcgcttgacgcacagtgggattata

SEQ ID NO: 366160 - DNA, 33 bp, Homo sapien
aaaaatattcgcttgatgcacagtgggattata

SEQ ID NO: 366161 - DNA, 33 bp, Homo sapien
atgcctgggaggtctacagtctactcaacactt

SEQ ID NO: 366162 - DNA, 33 bp, Homo sapien
atgcctgggaggtctatagtctactcaacactt

SEQ ID NO: 366163 - DNA, 33 bp, Homo sapien
cctgggttctggccccggatccactactgaata

SEQ ID NO: 366164 - DNA, 33 bp, Homo sapien
cctgggttctggcccctgatccactactgaata

SEQ ID NO: 366165 - DNA, 33 bp, Homo sapien
tcaaacgtgctacagaaacctcaactgtcaatc

SEQ ID NO: 366166 - DNA, 33 bp, Homo sapien
tcaaacgtgctacagagacctcaactgtcaatc

SEQ ID NO: 366167 - DNA, 33 bp, Homo sapien
caccaccatccaccacagcttttcaaatcacaa

SEQ ID NO: 366168 - DNA, 33 bp, Homo sapien
caccaccatccaccacggcttttcaaatcacaa

SEQ ID NO: 366169 - DNA, 33 bp, Homo sapien
agtgtggggtacctaccgagataaaatcccaag

SEQ ID NO: 366170 - DNA, 33 bp, Homo sapien
agtgtggggtacctactgagataaaatcccaag

SEQ ID NO: 366171 - DNA, 33 bp, Homo sapien
tccagcactttagctgaaagaaaggatacaaaa

SEQ ID NO: 366172 - DNA, 33 bp, Homo sapien
tccagcactttagctgcaagaaaggatacaaaa

SEQ ID NO: 366173 - DNA, 33 bp, Homo sapien
ttgagcaatggccctcgttaattttatcagata

SEQ ID NO: 366174 - DNA, 33 bp, Homo sapien
ttgagcaatggccctctttaattttatcagata

SEQ ID NO: 366175 - DNA, 33 bp, Homo sapien
aaagtttaacacatgaaacctatcccccaaaaa

SEQ ID NO: 366176 - DNA, 33 bp, Homo sapien
aaagtttaacacatgagacctatcccccaaaaa

SEQ ID NO: 366177 - DNA, 33 bp, Homo sapien
tcctcgctgacaggcaatgaacagctgtcaagc

SEQ ID NO: 366178 - DNA, 33 bp, Homo sapien
tcctcgctgacaggcagtgaacagctgtcaagc

SEQ ID NO: 366179 - DNA, 33 bp, Homo sapien
gtatgttattttacacacaaaagacagagtgtt

SEQ ID NO: 366180 - DNA, 33 bp, Homo sapien
gtatgttattttacacgcaaaagacagagtgtt

SEQ ID NO: 366181 - DNA, 33 bp, Homo sapien
ctgttgggtggcaatcacaaatgtctggggcat

SEQ ID NO: 366182 - DNA, 33 bp, Homo sapien
ctgttgggtggcaatcccaaatgtctggggcat

SEQ ID NO: 366183 - DNA, 33 bp, Homo sapien
cattgcaggatgttcaccagcttctgtagaacc

SEQ ID NO: 366184 - DNA, 33 bp, Homo sapien
cattgcaggatgttcagcagcttctgtagaacc

SEQ ID NO: 366185 - DNA, 33 bp, Homo sapien
atagtgtcaatagccaccctgtttgtggtccat

SEQ ID NO: 366186 - DNA, 33 bp, Homo sapien
atagtgtcaatagccagcctgtttgtggtccat

SEQ ID NO: 366187 - DNA, 33 bp, Homo sapien
ggacaattaagaaataaccaatggcaataccat

SEQ ID NO: 366188 - DNA, 33 bp, Homo sapien
ggacaattaagaaatacccaatggcaataccat

SEQ ID NO: 366189 - DNA, 33 bp, Homo sapien
taaacgagatcatatacgcaaaagctcctagct

SEQ ID NO: 366190 - DNA, 33 bp, Homo sapien
taaacgagatcatataggcaaaagctcctagct

SEQ ID NO: 366191 - DNA, 33 bp, Homo sapien
cttccactgttaccaccagggtccaagccatta

SEQ ID NO: 366192 - DNA, 33 bp, Homo sapien
cttccactgttaccacgagggtccaagccatta

SEQ ID NO: 366193 - DNA, 33 bp, Homo sapien
cacaatagtttgtggacgacatcttccttttcc

SEQ ID NO: 366194 - DNA, 33 bp, Homo sapien
cacaatagtttgtggatgacatcttccttttcc

SEQ ID NO: 366195 - DNA, 33 bp, Homo sapien
agactgttagaccttacaaggaccctcaggatt

SEQ ID NO: 366196 - DNA, 33 bp, Homo sapien
agactgttagaccttagaaggaccctcaggatt

SEQ ID NO: 366197 - DNA, 33 bp, Homo sapien
tgaaggttcagagggaataagtcctaaaatgcc

SEQ ID NO: 366198 - DNA, 33 bp, Homo sapien
tgaaggttcagagggagtaagtcctaaaatgcc

SEQ ID NO: 366199 - DNA, 33 bp, Homo sapien
cataggatctagtctacagaagagttgccttag

SEQ ID NO: 366200 - DNA, 33 bp, Homo sapien
cataggatctagtctagagaagagttgccttag

SEQ ID NO: 366201 - DNA, 33 bp, Homo sapien
cactgggttctgatgacgatatgtgattgtaga

SEQ ID NO: 366202 - DNA, 33 bp, Homo sapien
cactgggttctgatgatgatatgtgattgtaga

SEQ ID NO: 366203 - DNA, 33 bp, Homo sapien
ctttaatgcaaacatcaatgcgagaattcttgt

SEQ ID NO: 366204 - DNA, 33 bp, Homo sapien
ctttaatgcaaacatccatgcgagaattcttgt

SEQ ID NO: 366205 - DNA, 33 bp, Homo sapien
tatacagctcgactcaatcatttccattttttt

SEQ ID NO: 366206 - DNA, 33 bp, Homo sapien
tatacagctcgactcagtcatttccattttttt

SEQ ID NO: 366207 - DNA, 33 bp, Homo sapien
taaatgtattgaaaaaccactctgtatcccata

SEQ ID NO: 366208 - DNA, 33 bp, Homo sapien
taaatgtattgaaaaatcactctgtatcccata

SEQ ID NO: 366209 - DNA, 33 bp, Homo sapien
tgggctcgggaagtgaagagtgctgattggtca

SEQ ID NO: 366210 - DNA, 33 bp, Homo sapien
tgggctcgggaagtgaggagtgctgattggtca

SEQ ID NO: 366211 - DNA, 33 bp, Homo sapien
gattaggcaaagcttagacccctgtcaaaatct

SEQ ID NO: 366212 - DNA, 33 bp, Homo sapien
gattaggcaaagcttatacccctgtcaaaatct

SEQ ID NO: 366213 - DNA, 33 bp, Homo sapien
agacatagaagcaaaggaatagcacagggagtc

SEQ ID NO: 366214 - DNA, 33 bp, Homo sapien
agacatagaagcaaagtaatagcacagggagtc

SEQ ID NO: 366215 - DNA, 33 bp, Homo sapien
gtagctctactcttaaatggcacaaaaatagca

SEQ ID NO: 366216 - DNA, 33 bp, Homo sapien
gtagctctactcttaactggcacaaaaatagca

SEQ ID NO: 366217 - DNA, 33 bp, Homo sapien
catagtatccagaaaccagtaattgttgagtgc

SEQ ID NO: 366218 - DNA, 33 bp, Homo sapien
catagtatccagaaactagtaattgttgagtgc

SEQ ID NO: 366219 - DNA, 33 bp, Homo sapien
aagtgctctttcccgacaacttgaacacttaaa

SEQ ID NO: 366220 - DNA, 33 bp, Homo sapien
aagtgctctttcccgataacttgaacacttaaa

SEQ ID NO: 366221 - DNA, 33 bp, Homo sapien
ttaaaagatgaaggaaagtctagggaaacacga

SEQ ID NO: 366222 - DNA, 33 bp, Homo sapien
ttaaaagatgaaggaatgtctagggaaacacga

SEQ ID NO: 366223 - DNA, 33 bp, Homo sapien
agcccacctctgtcaactcaaagggagtcagag

SEQ ID NO: 366224 - DNA, 33 bp, Homo sapien
agcccacctctgtcaagtcaaagggagtcagag

SEQ ID NO: 366225 - DNA, 33 bp, Homo sapien
taccctataaagttgacattcatcatgcatgct

SEQ ID NO: 366226 - DNA, 33 bp, Homo sapien
taccctataaagttgatattcatcatgcatgct

SEQ ID NO: 366227 - DNA, 33 bp, Homo sapien
agagcaggtgtgatgcaaggttccataagagaa

SEQ ID NO: 366228 - DNA, 33 bp, Homo sapien
agagcaggtgtgatgcgaggttccataagagaa

SEQ ID NO: 366229 - DNA, 33 bp, Homo sapien
cctggctactgccttacgaaatgcaatggtcat

SEQ ID NO: 366230 - DNA, 33 bp, Homo sapien
cctggctactgccttatgaaatgcaatggtcat

SEQ ID NO: 366231 - DNA, 33 bp, Homo sapien
gttgcccttcaactataagaacatgatttaagc

SEQ ID NO: 366232 - DNA, 33 bp, Homo sapien
gttgcccttcaactatgagaacatgatttaagc

SEQ ID NO: 366233 - DNA, 33 bp, Homo sapien
cctcaccctctgaaatgagcactatcatttcct

SEQ ID NO: 366234 - DNA, 33 bp, Homo sapien
cctcaccctctgaaattagcactatcatttcct

SEQ ID NO: 366235 - DNA, 33 bp, Homo sapien
actagcatgtattaaacaccgactttttattca

SEQ ID NO: 366236 - DNA, 33 bp, Homo sapien
actagcatgtattaaagaccgactttttattca

SEQ ID NO: 366237 - DNA, 33 bp, Homo sapien
tgaagggttgagttcacggctttgtgtgctttc

SEQ ID NO: 366238 - DNA, 33 bp, Homo sapien
tgaagggttgagttcatggctttgtgtgctttc

SEQ ID NO: 366239 - DNA, 33 bp, Homo sapien
taaatatgctaaccaaagacctggtatgaagaa

SEQ ID NO: 366240 - DNA, 33 bp, Homo sapien
taaatatgctaaccaaggacctggtatgaagaa

SEQ ID NO: 366241 - DNA, 33 bp, Homo sapien
gctgcccaggaatggaggcactgagtggtgcaa

SEQ ID NO: 366242 - DNA, 33 bp, Homo sapien
gctgcccaggaatggatgcactgagtggtgcaa

SEQ ID NO: 366243 - DNA, 33 bp, Homo sapien
tgactttataacaacaatggtgatgatttactt

SEQ ID NO: 366244 - DNA, 33 bp, Homo sapien
tgactttataacaacagtggtgatgatttactt

SEQ ID NO: 366245 - DNA, 33 bp, Homo sapien
gccaggagttgaataccaagcctgggcaacata

SEQ ID NO: 366246 - DNA, 33 bp, Homo sapien
gccaggagttgaatacgaagcctgggcaacata

SEQ ID NO: 366247 - DNA, 33 bp, Homo sapien
aacgtgctagaggaatcagagataaaacagaaa

SEQ ID NO: 366248 - DNA, 33 bp, Homo sapien
aacgtgctagaggaatgagagataaaacagaaa

SEQ ID NO: 366249 - DNA, 33 bp, Homo sapien
tttaccatctcctaaaattcctacatgatctga

SEQ ID NO: 366250 - DNA, 33 bp, Homo sapien
tttaccatctcctaaatttcctacatgatctga

SEQ ID NO: 366251 - DNA, 33 bp, Homo sapien
ctaaaatgacttcccaaaagaagattcccctga

SEQ ID NO: 366252 - DNA, 33 bp, Homo sapien
ctaaaatgacttcccagaagaagattcccctga

SEQ ID NO: 366253 - DNA, 33 bp, Homo sapien
aataagataaatgataaaggtgctggcccacag

SEQ ID NO: 366254 - DNA, 33 bp, Homo sapien
aataagataaatgatagaggtgctggcccacag

SEQ ID NO: 366255 - DNA, 33 bp, Homo sapien
tgctttggaaagtagaaaagtttagtgttggca

SEQ ID NO: 366256 - DNA, 33 bp, Homo sapien
tgctttggaaagtagacaagtttagtgttggca

SEQ ID NO: 366257 - DNA, 33 bp, Homo sapien
ggaatcagataaaaccaggttcaaagctcagag

SEQ ID NO: 366258 - DNA, 33 bp, Homo sapien
ggaatcagataaaaccgggttcaaagctcagag

SEQ ID NO: 366259 - DNA, 33 bp, Homo sapien
cagattgcttggtatacatcgtactgagtggga

SEQ ID NO: 366260 - DNA, 33 bp, Homo sapien
cagattgcttggtatatatcgtactgagtggga

SEQ ID NO: 366261 - DNA, 33 bp, Homo sapien
gtattggttgaacactaactacattccagccat

SEQ ID NO: 366262 - DNA, 33 bp, Homo sapien
gtattggttgaacacttactacattccagccat

SEQ ID NO: 366263 - DNA, 33 bp, Homo sapien
atatcaattgtaataacagtattggttgaacac

SEQ ID NO: 366264 - DNA, 33 bp, Homo sapien
atatcaattgtaataatagtattggttgaacac

SEQ ID NO: 366265 - DNA, 33 bp, Homo sapien
cctgcttgggttttgactgggattatgactata

SEQ ID NO: 366266 - DNA, 33 bp, Homo sapien
cctgcttgggttttgattgggattatgactata

SEQ ID NO: 366267 - DNA, 33 bp, Homo sapien
ggttttggctattctacatcttttgtactctac

SEQ ID NO: 366268 - DNA, 33 bp, Homo sapien
ggttttggctattctagatcttttgtactctac

SEQ ID NO: 366269 - DNA, 33 bp, Homo sapien
cagacttgtacctgaacgttcactgcagcttta

SEQ ID NO: 366270 - DNA, 33 bp, Homo sapien
cagacttgtacctgaatgttcactgcagcttta

SEQ ID NO: 366271 - DNA, 33 bp, Homo sapien
aagatgaaatgcccagaagaaagtggggaaagt

SEQ ID NO: 366272 - DNA, 33 bp, Homo sapien
aagatgaaatgcccagcagaaagtggggaaagt

SEQ ID NO: 366273 - DNA, 33 bp, Homo sapien
attctgaggtttcccaaagaagtgcattttaat

SEQ ID NO: 366274 - DNA, 33 bp, Homo sapien
attctgaggtttcccacagaagtgcattttaat

SEQ ID NO: 366275 - DNA, 33 bp, Homo sapien
gcctggtttgactaaacctctgtggtggtggaa

SEQ ID NO: 366276 - DNA, 33 bp, Homo sapien
gcctggtttgactaaatctctgtggtggtggaa

SEQ ID NO: 366277 - DNA, 33 bp, Homo sapien
gattcaggtagaaaaacggaatgactgtaaaag

SEQ ID NO: 366278 - DNA, 33 bp, Homo sapien
gattcaggtagaaaaatggaatgactgtaaaag

SEQ ID NO: 366279 - DNA, 33 bp, Homo sapien
aattcaaggcaatgtcagaaaagtgggcaggag

SEQ ID NO: 366280 - DNA, 33 bp, Homo sapien
aattcaaggcaatgtcggaaaagtgggcaggag

SEQ ID NO: 366281 - DNA, 33 bp, Homo sapien
tatgtcataggaaaaaataggaacgtagcaacg

SEQ ID NO: 366282 - DNA, 33 bp, Homo sapien
tatgtcataggaaaaagtaggaacgtagcaacg

SEQ ID NO: 366283 - DNA, 33 bp, Homo sapien
tttaagttgagatccaatgatgagaaggaaaca

SEQ ID NO: 366284 - DNA, 33 bp, Homo sapien
tttaagttgagatccagtgatgagaaggaaaca

SEQ ID NO: 366285 - DNA, 33 bp, Homo sapien
gaggtgagcattcatactagtggctgaggttgg

SEQ ID NO: 366286 - DNA, 33 bp, Homo sapien
gaggtgagcattcatattagtggctgaggttgg

SEQ ID NO: 366287 - DNA, 33 bp, Homo sapien
tctagggaacttgcaaaatcacggagcaaggaa

SEQ ID NO: 366288 - DNA, 33 bp, Homo sapien
tctagggaacttgcaatatcacggagcaaggaa

SEQ ID NO: 366289 - DNA, 33 bp, Homo sapien
agggattcatttgaagacacagaggtctggaga

SEQ ID NO: 366290 - DNA, 33 bp, Homo sapien
agggattcatttgaagtcacagaggtctggaga

SEQ ID NO: 366291 - DNA, 33 bp, Homo sapien
tttgtacaatgccacaaatctttgtttctcaat

SEQ ID NO: 366292 - DNA, 33 bp, Homo sapien
tttgtacaatgccacagatctttgtttctcaat

SEQ ID NO: 366293 - DNA, 33 bp, Homo sapien
cagtttccagtgcatcagagtggcttccagtcc

SEQ ID NO: 366294 - DNA, 33 bp, Homo sapien
cagtttccagtgcatccgagtggcttccagtcc

SEQ ID NO: 366295 - DNA, 33 bp, Homo sapien
gctattatgaaaagaaggaagttggtttcattc

SEQ ID NO: 366296 - DNA, 33 bp, Homo sapien
gctattatgaaaagaatgaagttggtttcattc

SEQ ID NO: 366297 - DNA, 33 bp, Homo sapien
tggctagcacacaaggaaaaatttacaacatct

SEQ ID NO: 366298 - DNA, 33 bp, Homo sapien
tggctagcacacaagggaaaatttacaacatct

SEQ ID NO: 366299 - DNA, 33 bp, Homo sapien
gcagatttgcaccaaaactacagtgagcagcca

SEQ ID NO: 366300 - DNA, 33 bp, Homo sapien
gcagatttgcaccaaacctacagtgagcagcca

SEQ ID NO: 366301 - DNA, 33 bp, Homo sapien
gtggggtgcaggctcagtagctcttctgggctc

SEQ ID NO: 366302 - DNA, 33 bp, Homo sapien
gtggggtgcaggctcattagctcttctgggctc

SEQ ID NO: 366303 - DNA, 33 bp, Homo sapien
tgtgtgcaaattgaaactggtgtccccttttga

SEQ ID NO: 366304 - DNA, 33 bp, Homo sapien
tgtgtgcaaattgaaagtggtgtccccttttga

SEQ ID NO: 366305 - DNA, 33 bp, Homo sapien
gttctggctcctcaaccgtagagaaaaataatg

SEQ ID NO: 366306 - DNA, 33 bp, Homo sapien
gttctggctcctcaactgtagagaaaaataatg

SEQ ID NO: 366307 - DNA, 33 bp, Homo sapien
aagcactttaggacaacgtctggcacatagtag

SEQ ID NO: 366308 - DNA, 33 bp, Homo sapien
aagcactttaggacaatgtctggcacatagtag

SEQ ID NO: 366309 - DNA, 33 bp, Homo sapien
cttccttacaaacactcaggcttagcttgttgc

SEQ ID NO: 366310 - DNA, 33 bp, Homo sapien
cttccttacaaacactgaggcttagcttgttgc

SEQ ID NO: 366311 - DNA, 33 bp, Homo sapien
gaaccagaaacgtagacggttttgcaaatgaac

SEQ ID NO: 366312 - DNA, 33 bp, Homo sapien
gaaccagaaacgtagatggttttgcaaatgaac

SEQ ID NO: 366313 - DNA, 33 bp, Homo sapien
aataaagccaagcagaggagtattataattccc

SEQ ID NO: 366314 - DNA, 33 bp, Homo sapien
aataaagccaagcagatgagtattataattccc

SEQ ID NO: 366315 - DNA, 33 bp, Homo sapien
tgtttagttttattggccacctgctattgggga

SEQ ID NO: 366316 - DNA, 33 bp, Homo sapien
tgtttagttttattggtcacctgctattgggga

SEQ ID NO: 366317 - DNA, 33 bp, Homo sapien
ctcgcggcattgatgcacagcttgaaaaggctt

SEQ ID NO: 366318 - DNA, 33 bp, Homo sapien
ctcgcggcattgatgcgcagcttgaaaaggctt

SEQ ID NO: 366319 - DNA, 33 bp, Homo sapien
ttatgcattccctgaaatgatcttcgtggaact

SEQ ID NO: 366320 - DNA, 33 bp, Homo sapien
ttatgcattccctgaagtgatcttcgtggaact

SEQ ID NO: 366321 - DNA, 33 bp, Homo sapien
gatacgaccctgaaatcacagtgaaaggtgggt

SEQ ID NO: 366322 - DNA, 33 bp, Homo sapien
gatacgaccctgaaatgacagtgaaaggtgggt

SEQ ID NO: 366323 - DNA, 33 bp, Homo sapien
tcctgagtattctccaatattaggacgcgaata

SEQ ID NO: 366324 - DNA, 33 bp, Homo sapien
tcctgagtattctccagtattaggacgcgaata

SEQ ID NO: 366325 - DNA, 33 bp, Homo sapien
tcattaaagggagaaacagtttcagctcattca

SEQ ID NO: 366326 - DNA, 33 bp, Homo sapien
tcattaaagggagaaagagtttcagctcattca

SEQ ID NO: 366327 - DNA, 33 bp, Homo sapien
ctggggtagctttgaacgcagatgaatcacctg

SEQ ID NO: 366328 - DNA, 33 bp, Homo sapien
ctggggtagctttgaaggcagatgaatcacctg

SEQ ID NO: 366329 - DNA, 33 bp, Homo sapien
cagcataggagaaataagtcctctatcacagtg

SEQ ID NO: 366330 - DNA, 33 bp, Homo sapien
cagcataggagaaatacgtcctctatcacagtg

SEQ ID NO: 366331 - DNA, 33 bp, Homo sapien
tgctccacgaagggaccgaatgccttgaccaag

SEQ ID NO: 366332 - DNA, 33 bp, Homo sapien
tgctccacgaagggactgaatgccttgaccaag

SEQ ID NO: 366333 - DNA, 33 bp, Homo sapien
ataaagtctaattccacctctcatttatgcctc

SEQ ID NO: 366334 - DNA, 33 bp, Homo sapien
ataaagtctaattccatctctcatttatgcctc

SEQ ID NO: 366335 - DNA, 33 bp, Homo sapien
ttctctcagaagtggacgccaagaaggaatttg

SEQ ID NO: 366336 - DNA, 33 bp, Homo sapien
ttctctcagaagtggatgccaagaaggaatttg

SEQ ID NO: 366337 - DNA, 33 bp, Homo sapien
ccagaagaagaattgaaaatagagacatacaaa

SEQ ID NO: 366338 - DNA, 33 bp, Homo sapien
ccagaagaagaattgagaatagagacatacaaa

SEQ ID NO: 366339 - DNA, 33 bp, Homo sapien
ttttcaattgagaaagcaatcttcagtgcaaag

SEQ ID NO: 366340 - DNA, 33 bp, Homo sapien
ttttcaattgagaaagtaatcttcagtgcaaag

SEQ ID NO: 366341 - DNA, 33 bp, Homo sapien
atcttgtcttctcttacgcactaattgtgtctt

SEQ ID NO: 366342 - DNA, 33 bp, Homo sapien
atcttgtcttctcttatgcactaattgtgtctt

SEQ ID NO: 366343 - DNA, 33 bp, Homo sapien
tccccagagcccaatagagtgaatgcatgcagt

SEQ ID NO: 366344 - DNA, 33 bp, Homo sapien
tccccagagcccaatatagtgaatgcatgcagt

SEQ ID NO: 366345 - DNA, 33 bp, Homo sapien
aagaggaagttgacacaaaattaacacgcacca

SEQ ID NO: 366346 - DNA, 33 bp, Homo sapien
aagaggaagttgacacgaaattaacacgcacca

SEQ ID NO: 366347 - DNA, 33 bp, Homo sapien
acaaacctaaaattaaaaaagagcgtgaactca

SEQ ID NO: 366348 - DNA, 33 bp, Homo sapien
acaaacctaaaattaacaaagagcgtgaactca

SEQ ID NO: 366349 - DNA, 33 bp, Homo sapien
catatctaataggccacgtaacttcacccaaat

SEQ ID NO: 366350 - DNA, 33 bp, Homo sapien
catatctaataggccatgtaacttcacccaaat

SEQ ID NO: 366351 - DNA, 33 bp, Homo sapien
atctaatggctcagaactccaagaggtgaaatt

SEQ ID NO: 366352 - DNA, 33 bp, Homo sapien
atctaatggctcagaattccaagaggtgaaatt

SEQ ID NO: 366353 - DNA, 33 bp, Homo sapien
gaatagaaaagtagtacgaaggctgaatattct

SEQ ID NO: 366354 - DNA, 33 bp, Homo sapien
gaatagaaaagtagtatgaaggctgaatattct

SEQ ID NO: 366355 - DNA, 33 bp, Homo sapien
aggtgtcctgagatacacctgacacgtagtggg

SEQ ID NO: 366356 - DNA, 33 bp, Homo sapien
aggtgtcctgagatacgcctgacacgtagtggg

SEQ ID NO: 366357 - DNA, 33 bp, Homo sapien
taaatatactatctcactgaatcctccgactat

SEQ ID NO: 366358 - DNA, 33 bp, Homo sapien
taaatatactatctcattgaatcctccgactat

SEQ ID NO: 366359 - DNA, 33 bp, Homo sapien
gtgggtagtgctgcaactagggacctctcaccc

SEQ ID NO: 366360 - DNA, 33 bp, Homo sapien
gtgggtagtgctgcaattagggacctctcaccc

SEQ ID NO: 366361 - DNA, 33 bp, Homo sapien
cccaagttctcacatcactcaaacaatggaggt

SEQ ID NO: 366362 - DNA, 33 bp, Homo sapien
cccaagttctcacatcgctcaaacaatggaggt

SEQ ID NO: 366363 - DNA, 33 bp, Homo sapien
aaggcacattttcgccactccatctctatcctt

SEQ ID NO: 366364 - DNA, 33 bp, Homo sapien
aaggcacattttcgcctctccatctctatcctt

SEQ ID NO: 366365 - DNA, 33 bp, Homo sapien
atgattttcccagagtcacagctggttactggt

SEQ ID NO: 366366 - DNA, 33 bp, Homo sapien
atgattttcccagagtgacagctggttactggt

SEQ ID NO: 366367 - DNA, 33 bp, Homo sapien
gccaagtaaacctccaaagttcttcccattgaa

SEQ ID NO: 366368 - DNA, 33 bp, Homo sapien
gccaagtaaacctccagagttcttcccattgaa

SEQ ID NO: 366369 - DNA, 33 bp, Homo sapien
agcagcaggagcttcaatagagcactttaaaag

SEQ ID NO: 366370 - DNA, 33 bp, Homo sapien
agcagcaggagcttcagtagagcactttaaaag

SEQ ID NO: 366371 - DNA, 33 bp, Homo sapien
agtgaacgctagcatacagacagcggtgcactg

SEQ ID NO: 366372 - DNA, 33 bp, Homo sapien
agtgaacgctagcatagagacagcggtgcactg

SEQ ID NO: 366373 - DNA, 33 bp, Homo sapien
cccctgggctaggaacaacagagttaacataac

SEQ ID NO: 366374 - DNA, 33 bp, Homo sapien
cccctgggctaggaaccacagagttaacataac

SEQ ID NO: 366375 - DNA, 33 bp, Homo sapien
gcatatggaaatagaaaataagccacgggattg

SEQ ID NO: 366376 - DNA, 33 bp, Homo sapien
gcatatggaaatagaagataagccacgggattg

SEQ ID NO: 366377 - DNA, 33 bp, Homo sapien
agtggaatgaatcgacaattctgaaactatttt

SEQ ID NO: 366378 - DNA, 33 bp, Homo sapien
agtggaatgaatcgaccattctgaaactatttt

SEQ ID NO: 366379 - DNA, 33 bp, Homo sapien
gtcctgggctttagcaaaagtgtaaatattttg

SEQ ID NO: 366380 - DNA, 33 bp, Homo sapien
gtcctgggctttagcagaagtgtaaatattttg

SEQ ID NO: 366381 - DNA, 33 bp, Homo sapien
tcagacttttatgcccaaacctcaaacaaatac

SEQ ID NO: 366382 - DNA, 33 bp, Homo sapien
tcagacttttatgcccgaacctcaaacaaatac

SEQ ID NO: 366383 - DNA, 33 bp, Homo sapien
gacagtaagagaatgaaatggtgagataggaag

SEQ ID NO: 366384 - DNA, 33 bp, Homo sapien
gacagtaagagaatgacatggtgagataggaag

SEQ ID NO: 366385 - DNA, 33 bp, Homo sapien
cacggcctctgactaaaaagaattgatcctcca

SEQ ID NO: 366386 - DNA, 33 bp, Homo sapien
cacggcctctgactaagaagaattgatcctcca

SEQ ID NO: 366387 - DNA, 33 bp, Homo sapien
aaggtgggtattatcaaaatgtcatcctcgtac

SEQ ID NO: 366388 - DNA, 33 bp, Homo sapien
aaggtgggtattatcacaatgtcatcctcgtac

SEQ ID NO: 366389 - DNA, 33 bp, Homo sapien
ctgtgcccttaactaccaggagaattcaccact

SEQ ID NO: 366390 - DNA, 33 bp, Homo sapien
ctgtgcccttaactacgaggagaattcaccact

SEQ ID NO: 366391 - DNA, 33 bp, Homo sapien
cagatatttagcatccactaatttatctaatta

SEQ ID NO: 366392 - DNA, 33 bp, Homo sapien
cagatatttagcatcccctaatttatctaatta

SEQ ID NO: 366393 - DNA, 33 bp, Homo sapien
agagcaggttacaagcactttagaagcatctgt

SEQ ID NO: 366394 - DNA, 33 bp, Homo sapien
agagcaggttacaagccctttagaagcatctgt

SEQ ID NO: 366395 - DNA, 33 bp, Homo sapien
tattacaatcaaagtcaaagcagtatgacatag

SEQ ID NO: 366396 - DNA, 33 bp, Homo sapien
tattacaatcaaagtctaagcagtatgacatag

SEQ ID NO: 366397 - DNA, 33 bp, Homo sapien
tgcagctggacataaactgggtctaacaggact

SEQ ID NO: 366398 - DNA, 33 bp, Homo sapien
tgcagctggacataaattgggtctaacaggact

SEQ ID NO: 366399 - DNA, 33 bp, Homo sapien
agggtggaccctaaaccagtataactgaagcag

SEQ ID NO: 366400 - DNA, 33 bp, Homo sapien
agggtggaccctaaacgagtataactgaagcag

SEQ ID NO: 366401 - DNA, 33 bp, Homo sapien
gctttggcttgtagataaccatctttttccttc

SEQ ID NO: 366402 - DNA, 33 bp, Homo sapien
gctttggcttgtagatgaccatctttttccttc

SEQ ID NO: 366403 - DNA, 33 bp, Homo sapien
aatatatctggaaaacaagggttgacatgagag

SEQ ID NO: 366404 - DNA, 33 bp, Homo sapien
aatatatctggaaaacgagggttgacatgagag

SEQ ID NO: 366405 - DNA, 33 bp, Homo sapien
taaatgagataatccaggccaaaatgccttcac

SEQ ID NO: 366406 - DNA, 33 bp, Homo sapien
taaatgagataatccatgccaaaatgccttcac

SEQ ID NO: 366407 - DNA, 33 bp, Homo sapien
tggatggttttcctgcaacaaatcccacagaag

SEQ ID NO: 366408 - DNA, 33 bp, Homo sapien
tggatggttttcctgccacaaatcccacagaag

SEQ ID NO: 366409 - DNA, 33 bp, Homo sapien
atcttttaacaggtgcacattacacacaatata

SEQ ID NO: 366410 - DNA, 33 bp, Homo sapien
atcttttaacaggtgcgcattacacacaatata

SEQ ID NO: 366411 - DNA, 33 bp, Homo sapien
gaaagcagctttattcaaacactagcacttggg

SEQ ID NO: 366412 - DNA, 33 bp, Homo sapien
gaaagcagctttattcgaacactagcacttggg

SEQ ID NO: 366413 - DNA, 33 bp, Homo sapien
cgttaaccttttagaaagatcaaagtaagttct

SEQ ID NO: 366414 - DNA, 33 bp, Homo sapien
cgttaaccttttagaaggatcaaagtaagttct

SEQ ID NO: 366415 - DNA, 33 bp, Homo sapien
aagtgaatacgggctaaaatggcttttgtgaat

SEQ ID NO: 366416 - DNA, 33 bp, Homo sapien
aagtgaatacgggctagaatggcttttgtgaat

SEQ ID NO: 366417 - DNA, 33 bp, Homo sapien
ctcccctgcaagctgaaaagtactgctctgaag

SEQ ID NO: 366418 - DNA, 33 bp, Homo sapien
ctcccctgcaagctgagaagtactgctctgaag

SEQ ID NO: 366419 - DNA, 33 bp, Homo sapien
aactcgagaggaaccaaggctttaggagagggc

SEQ ID NO: 366420 - DNA, 33 bp, Homo sapien
aactcgagaggaaccagggctttaggagagggc

SEQ ID NO: 366421 - DNA, 33 bp, Homo sapien
agttgttcatccttacaaaagttatatttgttt

SEQ ID NO: 366422 - DNA, 33 bp, Homo sapien
agttgttcatccttacgaaagttatatttgttt

SEQ ID NO: 366423 - DNA, 33 bp, Homo sapien
tctagtgaacacattgcacatactgctgactta

SEQ ID NO: 366424 - DNA, 33 bp, Homo sapien
tctagtgaacacattggacatactgctgactta

SEQ ID NO: 366425 - DNA, 33 bp, Homo sapien
agtctcaccaactccaaagttttgagttttgtg

SEQ ID NO: 366426 - DNA, 33 bp, Homo sapien
agtctcaccaactccatagttttgagttttgtg

SEQ ID NO: 366427 - DNA, 33 bp, Homo sapien
aaagatgttatgattgccaaatggttgagttat

SEQ ID NO: 366428 - DNA, 33 bp, Homo sapien
aaagatgttatgattggcaaatggttgagttat

SEQ ID NO: 366429 - DNA, 33 bp, Homo sapien
aagaattagagtggcccggaatgacaagacact

SEQ ID NO: 366430 - DNA, 33 bp, Homo sapien
aagaattagagtggcctggaatgacaagacact

SEQ ID NO: 366431 - DNA, 33 bp, Homo sapien
ctgggcctgttccagcaaccaaagcacgccaag

SEQ ID NO: 366432 - DNA, 33 bp, Homo sapien
ctgggcctgttccagcgaccaaagcacgccaag

SEQ ID NO: 366433 - DNA, 33 bp, Homo sapien
tccagtttcctctcaacccaagccctgtcatca

SEQ ID NO: 366434 - DNA, 33 bp, Homo sapien
tccagtttcctctcaagccaagccctgtcatca

SEQ ID NO: 366435 - DNA, 33 bp, Homo sapien
aactggataataataaggctaccattttcaaag

SEQ ID NO: 366436 - DNA, 33 bp, Homo sapien
aactggataataataatgctaccattttcaaag

SEQ ID NO: 366437 - DNA, 33 bp, Homo sapien
ggagatgatgccaagggatatactgagaatgac

SEQ ID NO: 366438 - DNA, 33 bp, Homo sapien
ggagatgatgccaaggtatatactgagaatgac

SEQ ID NO: 366439 - DNA, 33 bp, Homo sapien
atctctcaaggctggaatagactgccaggctcc

SEQ ID NO: 366440 - DNA, 33 bp, Homo sapien
atctctcaaggctggattagactgccaggctcc

SEQ ID NO: 366441 - DNA, 33 bp, Homo sapien
tcaagtgttcatacaaatatttattgggcatgg

SEQ ID NO: 366442 - DNA, 33 bp, Homo sapien
tcaagtgttcatacaagtatttattgggcatgg

SEQ ID NO: 366443 - DNA, 33 bp, Homo sapien
gtatgaacacttgagaccacgtataagaaatgt

SEQ ID NO: 366444 - DNA, 33 bp, Homo sapien
gtatgaacacttgagatcacgtataagaaatgt

SEQ ID NO: 366445 - DNA, 33 bp, Homo sapien
tggggcttctttctaacagagttgttctgatac

SEQ ID NO: 366446 - DNA, 33 bp, Homo sapien
tggggcttctttctaatagagttgttctgatac

SEQ ID NO: 366447 - DNA, 33 bp, Homo sapien
ttatgaggtccatgaacatctacattttgcatt

SEQ ID NO: 366448 - DNA, 33 bp, Homo sapien
ttatgaggtccatgaagatctacattttgcatt

SEQ ID NO: 366449 - DNA, 33 bp, Homo sapien
ttgtttattgaagaaccattgtccaacagctca

SEQ ID NO: 366450 - DNA, 33 bp, Homo sapien
ttgtttattgaagaactattgtccaacagctca

SEQ ID NO: 366451 - DNA, 33 bp, Homo sapien
attaatgactgagtaacgcaaaaagtcatacac

SEQ ID NO: 366452 - DNA, 33 bp, Homo sapien
attaatgactgagtaatgcaaaaagtcatacac

SEQ ID NO: 366453 - DNA, 33 bp, Homo sapien
atggaatatttgcagggagagcattctgggtag

SEQ ID NO: 366454 - DNA, 33 bp, Homo sapien
atggaatatttgcaggtagagcattctgggtag

SEQ ID NO: 366455 - DNA, 33 bp, Homo sapien
caggaatgaatgaatacggtggtttgctttact

SEQ ID NO: 366456 - DNA, 33 bp, Homo sapien
caggaatgaatgaatatggtggtttgctttact

SEQ ID NO: 366457 - DNA, 33 bp, Homo sapien
agtggttctcaaccaactaggtcagttaacaat

SEQ ID NO: 366458 - DNA, 33 bp, Homo sapien
agtggttctcaaccaagtaggtcagttaacaat

SEQ ID NO: 366459 - DNA, 33 bp, Homo sapien
atatatacgattgctacgttacttgtatttctg

SEQ ID NO: 366460 - DNA, 33 bp, Homo sapien
atatatacgattgctatgttacttgtatttctg

SEQ ID NO: 366461 - DNA, 33 bp, Homo sapien
atcgtatatatggcaaataataacatgacaaat

SEQ ID NO: 366462 - DNA, 33 bp, Homo sapien
atcgtatatatggcaagtaataacatgacaaat

SEQ ID NO: 366463 - DNA, 33 bp, Homo sapien
catggatagaaagttgcagaagaagtgatatat

SEQ ID NO: 366464 - DNA, 33 bp, Homo sapien
catggatagaaagttgtagaagaagtgatatat

SEQ ID NO: 366465 - DNA, 33 bp, Homo sapien
gtttttcttccagttagaaaagggacaccgaca

SEQ ID NO: 366466 - DNA, 33 bp, Homo sapien
gtttttcttccagttataaaagggacaccgaca

SEQ ID NO: 366467 - DNA, 33 bp, Homo sapien
caatcctggcagcccaatagaattacaaattga

SEQ ID NO: 366468 - DNA, 33 bp, Homo sapien
caatcctggcagcccagtagaattacaaattga

SEQ ID NO: 366469 - DNA, 33 bp, Homo sapien
gtcccttccccaaagcaaacttcctagactact

SEQ ID NO: 366470 - DNA, 33 bp, Homo sapien
gtcccttccccaaagcgaacttcctagactact

SEQ ID NO: 366471 - DNA, 33 bp, Homo sapien
cagttttcagatgtgaagcccaaaataaaatgt

SEQ ID NO: 366472 - DNA, 33 bp, Homo sapien
cagttttcagatgtgaggcccaaaataaaatgt

SEQ ID NO: 366473 - DNA, 33 bp, Homo sapien
gaaaggagtgttatgaagatttaaaaagctaaa

SEQ ID NO: 366474 - DNA, 33 bp, Homo sapien
gaaaggagtgttatgaggatttaaaaagctaaa

SEQ ID NO: 366475 - DNA, 33 bp, Homo sapien
aacactgagtcctagacaggttcagacatttcc

SEQ ID NO: 366476 - DNA, 33 bp, Homo sapien
aacactgagtcctagagaggttcagacatttcc

SEQ ID NO: 366477 - DNA, 33 bp, Homo sapien
gagctggggtttgtcaaaaggtcaaggtagaaa

SEQ ID NO: 366478 - DNA, 33 bp, Homo sapien
gagctggggtttgtcagaaggtcaaggtagaaa

SEQ ID NO: 366479 - DNA, 33 bp, Homo sapien
gctttgaaatatatgaactgtttaccaaagaga

SEQ ID NO: 366480 - DNA, 33 bp, Homo sapien
gctttgaaatatatgacctgtttaccaaagaga

SEQ ID NO: 366481 - DNA, 33 bp, Homo sapien
ctgcattctgaccaaggcatatactgttttgtc

SEQ ID NO: 366482 - DNA, 33 bp, Homo sapien
ctgcattctgaccaagtcatatactgttttgtc

SEQ ID NO: 366483 - DNA, 33 bp, Homo sapien
gcaagcgaaaaacacagcagggttacaggtttt

SEQ ID NO: 366484 - DNA, 33 bp, Homo sapien
gcaagcgaaaaacacatcagggttacaggtttt

SEQ ID NO: 366485 - DNA, 33 bp, Homo sapien
cataaatcagcccaagcacactaatgatgggtt

SEQ ID NO: 366486 - DNA, 33 bp, Homo sapien
cataaatcagcccaaggacactaatgatgggtt

SEQ ID NO: 366487 - DNA, 33 bp, Homo sapien
ctattaaggcattttacatcacaaactgttgtc

SEQ ID NO: 366488 - DNA, 33 bp, Homo sapien
ctattaaggcattttagatcacaaactgttgtc

SEQ ID NO: 366489 - DNA, 33 bp, Homo sapien
gtttaactgggttaaggataaattcctgcaatt

SEQ ID NO: 366490 - DNA, 33 bp, Homo sapien
gtttaactgggttaagtataaattcctgcaatt

SEQ ID NO: 366491 - DNA, 33 bp, Homo sapien
atgcagataagacacaatgcatttccagctgac

SEQ ID NO: 366492 - DNA, 33 bp, Homo sapien
atgcagataagacacattgcatttccagctgac

SEQ ID NO: 366493 - DNA, 33 bp, Homo sapien
agaccaggcactttgaaaatatgtctaacgtta

SEQ ID NO: 366494 - DNA, 33 bp, Homo sapien
agaccaggcactttgagaatatgtctaacgtta

SEQ ID NO: 366495 - DNA, 33 bp, Homo sapien
gagatggcaaaaggaaaagaggtgtatttcagg

SEQ ID NO: 366496 - DNA, 33 bp, Homo sapien
gagatggcaaaaggaatagaggtgtatttcagg

SEQ ID NO: 366497 - DNA, 33 bp, Homo sapien
ctacatttttgcacagaaaggcttttgtctggt

SEQ ID NO: 366498 - DNA, 33 bp, Homo sapien
ctacatttttgcacaggaaggcttttgtctggt

SEQ ID NO: 366499 - DNA, 33 bp, Homo sapien
tcaaataatggacttaagagacccaggagctgc

SEQ ID NO: 366500 - DNA, 33 bp, Homo sapien
tcaaataatggacttaggagacccaggagctgc

SEQ ID NO: 366501 - DNA, 33 bp, Homo sapien
atccacagctgtcatacagtcacacattgttta

SEQ ID NO: 366502 - DNA, 33 bp, Homo sapien
atccacagctgtcatatagtcacacattgttta

SEQ ID NO: 366503 - DNA, 33 bp, Homo sapien
ctctacatcttttcctcagaaattgaccatctg

SEQ ID NO: 366504 - DNA, 33 bp, Homo sapien
ctctacatcttttccttagaaattgaccatctg

SEQ ID NO: 366505 - DNA, 33 bp, Homo sapien
acctgataatattgacgctacattcccataaga

SEQ ID NO: 366506 - DNA, 33 bp, Homo sapien
acctgataatattgactctacattcccataaga

SEQ ID NO: 366507 - DNA, 33 bp, Homo sapien
tttgtgcattcataagacaggtgttgcaaactt

SEQ ID NO: 366508 - DNA, 33 bp, Homo sapien
tttgtgcattcataagccaggtgttgcaaactt

SEQ ID NO: 366509 - DNA, 33 bp, Homo sapien
ctttacctacacaaccaattgatcagcacccat

SEQ ID NO: 366510 - DNA, 33 bp, Homo sapien
ctttacctacacaaccgattgatcagcacccat

SEQ ID NO: 366511 - DNA, 33 bp, Homo sapien
caatgccatccctttgaaaatacaatgtgctgt

SEQ ID NO: 366512 - DNA, 33 bp, Homo sapien
caatgccatccctttggaaatacaatgtgctgt

SEQ ID NO: 366513 - DNA, 33 bp, Homo sapien
tcattcttgctgggaacacacaagctaaatgct

SEQ ID NO: 366514 - DNA, 33 bp, Homo sapien
tcattcttgctgggaagacacaagctaaatgct

SEQ ID NO: 366515 - DNA, 33 bp, Homo sapien
tctccttgtacccccaatctgtggcacaggtct

SEQ ID NO: 366516 - DNA, 33 bp, Homo sapien
tctccttgtacccccagtctgtggcacaggtct

SEQ ID NO: 366517 - DNA, 33 bp, Homo sapien
ttgttgacaacacttcaataaaaaagaaactga

SEQ ID NO: 366518 - DNA, 33 bp, Homo sapien
ttgttgacaacacttcgataaaaaagaaactga

SEQ ID NO: 366519 - DNA, 33 bp, Homo sapien
tgtaaaatccagaagcaaaatggatcacttcca

SEQ ID NO: 366520 - DNA, 33 bp, Homo sapien
tgtaaaatccagaagcgaaatggatcacttcca

SEQ ID NO: 366521 - DNA, 33 bp, Homo sapien
ttagtatacacaaggaacttaatgggcatcgga

SEQ ID NO: 366522 - DNA, 33 bp, Homo sapien
ttagtatacacaaggagcttaatgggcatcgga

SEQ ID NO: 366523 - DNA, 33 bp, Homo sapien
agaacactggttcaaagtatctactaaagttga

SEQ ID NO: 366524 - DNA, 33 bp, Homo sapien
agaacactggttcaaattatctactaaagttga

SEQ ID NO: 366525 - DNA, 33 bp, Homo sapien
tcctgtgattggcagacgttgagtacacatatc

SEQ ID NO: 366526 - DNA, 33 bp, Homo sapien
tcctgtgattggcagatgttgagtacacatatc

SEQ ID NO: 366527 - DNA, 33 bp, Homo sapien
ttcagctccatccataaggtttaagaatcactc

SEQ ID NO: 366528 - DNA, 33 bp, Homo sapien
ttcagctccatccatacggtttaagaatcactc

SEQ ID NO: 366529 - DNA, 33 bp, Homo sapien
tttgccaaactggatcaagctcctactgtgttc

SEQ ID NO: 366530 - DNA, 33 bp, Homo sapien
tttgccaaactggatcgagctcctactgtgttc

SEQ ID NO: 366531 - DNA, 33 bp, Homo sapien
ccagggttcacagaagactcagccatttattca

SEQ ID NO: 366532 - DNA, 33 bp, Homo sapien
ccagggttcacagaagcctcagccatttattca

SEQ ID NO: 366533 - DNA, 33 bp, Homo sapien
ggccagtgatctgaggaaggtacaaatgcccta

SEQ ID NO: 366534 - DNA, 33 bp, Homo sapien
ggccagtgatctgagggaggtacaaatgcccta

SEQ ID NO: 366535 - DNA, 33 bp, Homo sapien
tcacactaaccctatgaactagctaacctctgc

SEQ ID NO: 366536 - DNA, 33 bp, Homo sapien
tcacactaaccctatgcactagctaacctctgc

SEQ ID NO: 366537 - DNA, 33 bp, Homo sapien
tcatgccaatgtgtaactgctttggtcagagtc

SEQ ID NO: 366538 - DNA, 33 bp, Homo sapien
tcatgccaatgtgtaattgctttggtcagagtc

SEQ ID NO: 366539 - DNA, 33 bp, Homo sapien
atgcccttaaccattacgctatattgcttctca

SEQ ID NO: 366540 - DNA, 33 bp, Homo sapien
atgcccttaaccattatgctatattgcttctca

SEQ ID NO: 366541 - DNA, 33 bp, Homo sapien
ggaagtgcctttggaacaccatcatcatatgtc

SEQ ID NO: 366542 - DNA, 33 bp, Homo sapien
ggaagtgcctttggaataccatcatcatatgtc

SEQ ID NO: 366543 - DNA, 33 bp, Homo sapien
ttagttgactattgagaaatggagttctgtagt

SEQ ID NO: 366544 - DNA, 33 bp, Homo sapien
ttagttgactattgaggaatggagttctgtagt

SEQ ID NO: 366545 - DNA, 33 bp, Homo sapien
cttttgatgcacatttaaaaaaaaatttaggga

SEQ ID NO: 366546 - DNA, 33 bp, Homo sapien
cttttgatgcacattttaaaaaaaatttaggga

SEQ ID NO: 366547 - DNA, 33 bp, Homo sapien
aaagccagctaggcatcaaccactgtctccaac

SEQ ID NO: 366548 - DNA, 33 bp, Homo sapien
aaagccagctaggcattaaccactgtctccaac

SEQ ID NO: 366549 - DNA, 33 bp, Homo sapien
tccatcaagattaggacagagacatccatgtgt

SEQ ID NO: 366550 - DNA, 33 bp, Homo sapien
tccatcaagattaggagagagacatccatgtgt

SEQ ID NO: 366551 - DNA, 33 bp, Homo sapien
attcagaagttaagtccatgatttctgaaaaac

SEQ ID NO: 366552 - DNA, 33 bp, Homo sapien
attcagaagttaagtctatgatttctgaaaaac

SEQ ID NO: 366553 - DNA, 33 bp, Homo sapien
ggttatttattaagccacaaggagaatgcacct

SEQ ID NO: 366554 - DNA, 33 bp, Homo sapien
ggttatttattaagccgcaaggagaatgcacct

SEQ ID NO: 366555 - DNA, 33 bp, Homo sapien
ggacacactgtgagtacatgacagcaaaagcag

SEQ ID NO: 366556 - DNA, 33 bp, Homo sapien
ggacacactgtgagtagatgacagcaaaagcag

SEQ ID NO: 366557 - DNA, 33 bp, Homo sapien
tccatcatggaacttacgtggttagaaaacaat

SEQ ID NO: 366558 - DNA, 33 bp, Homo sapien
tccatcatggaacttatgtggttagaaaacaat

SEQ ID NO: 366559 - DNA, 33 bp, Homo sapien
atttcctgactgtacaagagtgctcaaaagtta

SEQ ID NO: 366560 - DNA, 33 bp, Homo sapien
atttcctgactgtacaggagtgctcaaaagtta

SEQ ID NO: 366561 - DNA, 33 bp, Homo sapien
ataccagggttgcaccacatttcctccagcagt

SEQ ID NO: 366562 - DNA, 33 bp, Homo sapien
ataccagggttgcaccgcatttcctccagcagt

SEQ ID NO: 366563 - DNA, 33 bp, Homo sapien
aaatgaaggcatgaacaaatagactaattgaga

SEQ ID NO: 366564 - DNA, 33 bp, Homo sapien
aaatgaaggcatgaacgaatagactaattgaga

SEQ ID NO: 366565 - DNA, 33 bp, Homo sapien
gggggttaaatatgaaagctcagtgaaaactgt

SEQ ID NO: 366566 - DNA, 33 bp, Homo sapien
gggggttaaatatgaatgctcagtgaaaactgt

SEQ ID NO: 366567 - DNA, 33 bp, Homo sapien
attccaaataaacacaagatgaagtctaaactc

SEQ ID NO: 366568 - DNA, 33 bp, Homo sapien
attccaaataaacacaggatgaagtctaaactc

SEQ ID NO: 366569 - DNA, 33 bp, Homo sapien
ctgcaatggaatttcaatacaaaaactaccgac

SEQ ID NO: 366570 - DNA, 33 bp, Homo sapien
ctgcaatggaatttcagtacaaaaactaccgac

SEQ ID NO: 366571 - DNA, 33 bp, Homo sapien
agcaagtgtctttatcaaaaccaaaacatttgt

SEQ ID NO: 366572 - DNA, 33 bp, Homo sapien
agcaagtgtctttatcgaaaccaaaacatttgt

SEQ ID NO: 366573 - DNA, 33 bp, Homo sapien
ttgtgtgaacagccaaacataatgggctgcata

SEQ ID NO: 366574 - DNA, 33 bp, Homo sapien
ttgtgtgaacagccaaccataatgggctgcata

SEQ ID NO: 366575 - DNA, 33 bp, Homo sapien
aggtgatccttagtcacgagaggttaatggtga

SEQ ID NO: 366576 - DNA, 33 bp, Homo sapien
aggtgatccttagtcatgagaggttaatggtga

SEQ ID NO: 366577 - DNA, 33 bp, Homo sapien
actcaatctcattcaaacacatttcttctctgg

SEQ ID NO: 366578 - DNA, 33 bp, Homo sapien
actcaatctcattcaatcacatttcttctctgg

SEQ ID NO: 366579 - DNA, 33 bp, Homo sapien
cagagttaatcctaccagcagttttatttaatc

SEQ ID NO: 366580 - DNA, 33 bp, Homo sapien
cagagttaatcctaccggcagttttatttaatc

SEQ ID NO: 366581 - DNA, 33 bp, Homo sapien
atgactttgttctcaaccagtcaaatctggatc

SEQ ID NO: 366582 - DNA, 33 bp, Homo sapien
atgactttgttctcaatcagtcaaatctggatc

SEQ ID NO: 366583 - DNA, 33 bp, Homo sapien
ctccacctctccaccaataccaatcttcccaag

SEQ ID NO: 366584 - DNA, 33 bp, Homo sapien
ctccacctctccaccagtaccaatcttcccaag

SEQ ID NO: 366585 - DNA, 33 bp, Homo sapien
gggctgtcctaaatcacctgcaacgagaatcaa

SEQ ID NO: 366586 - DNA, 33 bp, Homo sapien
gggctgtcctaaatcagctgcaacgagaatcaa

SEQ ID NO: 366587 - DNA, 33 bp, Homo sapien
gcaaatagtctgcaaactggtactaggacagac

SEQ ID NO: 366588 - DNA, 33 bp, Homo sapien
gcaaatagtctgcaaattggtactaggacagac

SEQ ID NO: 366589 - DNA, 33 bp, Homo sapien
agcagattctcaataaatatacagaggctgaag

SEQ ID NO: 366590 - DNA, 33 bp, Homo sapien
agcagattctcaataagtatacagaggctgaag

SEQ ID NO: 366591 - DNA, 33 bp, Homo sapien
ctcacttattgtcttacacttctgtggttctga

SEQ ID NO: 366592 - DNA, 33 bp, Homo sapien
ctcacttattgtcttatacttctgtggttctga

SEQ ID NO: 366593 - DNA, 33 bp, Homo sapien
aatccaggatcatccgaatctcaaggtactaaa

SEQ ID NO: 366594 - DNA, 33 bp, Homo sapien
aatccaggatcatccgcatctcaaggtactaaa

SEQ ID NO: 366595 - DNA, 33 bp, Homo sapien
attttgataagctaccagaaagtattgtaaagc

SEQ ID NO: 366596 - DNA, 33 bp, Homo sapien
attttgataagctaccggaaagtattgtaaagc

SEQ ID NO: 366597 - DNA, 33 bp, Homo sapien
ctattagttactttccagactctcttcctcctc

SEQ ID NO: 366598 - DNA, 33 bp, Homo sapien
ctattagttactttcccgactctcttcctcctc

SEQ ID NO: 366599 - DNA, 33 bp, Homo sapien
ctgtacattaataccccaagaggcaatgtaagg

SEQ ID NO: 366600 - DNA, 33 bp, Homo sapien
ctgtacattaataccctaagaggcaatgtaagg

SEQ ID NO: 366601 - DNA, 33 bp, Homo sapien
aatgcatataacactaaagcatacaggatggtg

SEQ ID NO: 366602 - DNA, 33 bp, Homo sapien
aatgcatataacactatagcatacaggatggtg

SEQ ID NO: 366603 - DNA, 33 bp, Homo sapien
aaacaagttgctgccacatcccggtgttctgat

SEQ ID NO: 366604 - DNA, 33 bp, Homo sapien
aaacaagttgctgccagatcccggtgttctgat

SEQ ID NO: 366605 - DNA, 33 bp, Homo sapien
aatagaaaaatgaaagccggcactctaattcca

SEQ ID NO: 366606 - DNA, 33 bp, Homo sapien
aatagaaaaatgaaagtcggcactctaattcca

SEQ ID NO: 366607 - DNA, 33 bp, Homo sapien
cagcctttgcctggtaagacttggttctcagat

SEQ ID NO: 366608 - DNA, 33 bp, Homo sapien
cagcctttgcctggtacgacttggttctcagat

SEQ ID NO: 366609 - DNA, 33 bp, Homo sapien
aaaatttagtggcaaaactgcctgaacgtgtgc

SEQ ID NO: 366610 - DNA, 33 bp, Homo sapien
aaaatttagtggcaaagctgcctgaacgtgtgc

SEQ ID NO: 366611 - DNA, 33 bp, Homo sapien
cctgcagcttaacaacaaagatgaagaaaaaga

SEQ ID NO: 366612 - DNA, 33 bp, Homo sapien
cctgcagcttaacaacgaagatgaagaaaaaga

SEQ ID NO: 366613 - DNA, 33 bp, Homo sapien
tgacaagacactctagaaaggtttatcttgttc

SEQ ID NO: 366614 - DNA, 33 bp, Homo sapien
tgacaagacactctaggaaggtttatcttgttc

SEQ ID NO: 366615 - DNA, 33 bp, Homo sapien
tttacaaatatttttacgattggcttgtatata

SEQ ID NO: 366616 - DNA, 33 bp, Homo sapien
tttacaaatatttttatgattggcttgtatata

SEQ ID NO: 366617 - DNA, 33 bp, Homo sapien
caccaaagtcttatcacgtcacgtatcaagatt

SEQ ID NO: 366618 - DNA, 33 bp, Homo sapien
caccaaagtcttatcaggtcacgtatcaagatt

SEQ ID NO: 366619 - DNA, 33 bp, Homo sapien
ctccataccagtatgaagctctactttattcta

SEQ ID NO: 366620 - DNA, 33 bp, Homo sapien
ctccataccagtatgaggctctactttattcta

SEQ ID NO: 366621 - DNA, 33 bp, Homo sapien
agcattagggcatggacacatttggtgagtcct

SEQ ID NO: 366622 - DNA, 33 bp, Homo sapien
agcattagggcatggatacatttggtgagtcct

SEQ ID NO: 366623 - DNA, 33 bp, Homo sapien
aaaacaaagattcttccctatccatcatgcttc

SEQ ID NO: 366624 - DNA, 33 bp, Homo sapien
aaaacaaagattcttctctatccatcatgcttc

SEQ ID NO: 366625 - DNA, 33 bp, Homo sapien
tctgtcacttgcaaccaggtgaatcctacctga

SEQ ID NO: 366626 - DNA, 33 bp, Homo sapien
tctgtcacttgcaaccgggtgaatcctacctga

SEQ ID NO: 366627 - DNA, 33 bp, Homo sapien
atcacactagagcttgaaaatggcataaaataa

SEQ ID NO: 366628 - DNA, 33 bp, Homo sapien
atcacactagagcttgcaaatggcataaaataa

SEQ ID NO: 366629 - DNA, 33 bp, Homo sapien
atgaaaatacgttatacgtcaagtgctgataaa

SEQ ID NO: 366630 - DNA, 33 bp, Homo sapien
atgaaaatacgttatatgtcaagtgctgataaa

SEQ ID NO: 366631 - DNA, 33 bp, Homo sapien
tcaaagtggtcacttaccagcaaattgacatga

SEQ ID NO: 366632 - DNA, 33 bp, Homo sapien
tcaaagtggtcacttatcagcaaattgacatga

SEQ ID NO: 366633 - DNA, 33 bp, Homo sapien
atagaacagaagagtcaaggcagctaagtcaca

SEQ ID NO: 366634 - DNA, 33 bp, Homo sapien
atagaacagaagagtccaggcagctaagtcaca

SEQ ID NO: 366635 - DNA, 33 bp, Homo sapien
cctaaagatgctggcacagcgttgcacagtcac

SEQ ID NO: 366636 - DNA, 33 bp, Homo sapien
cctaaagatgctggcatagcgttgcacagtcac

SEQ ID NO: 366637 - DNA, 33 bp, Homo sapien
ttaactcactgcataactctctttgttcatggc

SEQ ID NO: 366638 - DNA, 33 bp, Homo sapien
ttaactcactgcataagtctctttgttcatggc

SEQ ID NO: 366639 - DNA, 33 bp, Homo sapien
atagaaaagcaggaggacattagaaggttgtta

SEQ ID NO: 366640 - DNA, 33 bp, Homo sapien
atagaaaagcaggagggcattagaaggttgtta

SEQ ID NO: 366641 - DNA, 33 bp, Homo sapien
tcttctctgcgcctctcacattaccctgggttt

SEQ ID NO: 366642 - DNA, 33 bp, Homo sapien
tcttctctgcgcctcttacattaccctgggttt

SEQ ID NO: 366643 - DNA, 33 bp, Homo sapien
gccaggacaaggaagaagagattaagaatccct

SEQ ID NO: 366644 - DNA, 33 bp, Homo sapien
gccaggacaaggaagaggagattaagaatccct

SEQ ID NO: 366645 - DNA, 33 bp, Homo sapien
aaatgtcttctgatcacgtctccttttaataac

SEQ ID NO: 366646 - DNA, 33 bp, Homo sapien
aaatgtcttctgatcatgtctccttttaataac

SEQ ID NO: 366647 - DNA, 33 bp, Homo sapien
acatcaactgcagtgggattgctgcctccagtt

SEQ ID NO: 366648 - DNA, 33 bp, Homo sapien
acatcaactgcagtggtattgctgcctccagtt

SEQ ID NO: 366649 - DNA, 33 bp, Homo sapien
agaagcccctggagaacagttcaccaaaacgtg

SEQ ID NO: 366650 - DNA, 33 bp, Homo sapien
agaagcccctggagaagagttcaccaaaacgtg

SEQ ID NO: 366651 - DNA, 33 bp, Homo sapien
tagcctgaccttcttacagatggctgagagaac

SEQ ID NO: 366652 - DNA, 33 bp, Homo sapien
tagcctgaccttcttatagatggctgagagaac

SEQ ID NO: 366653 - DNA, 33 bp, Homo sapien
ggaaagcatctatcacagtctggcatacagcag

SEQ ID NO: 366654 - DNA, 33 bp, Homo sapien
ggaaagcatctatcaccgtctggcatacagcag

SEQ ID NO: 366655 - DNA, 33 bp, Homo sapien
tttatagcgacacgcactgaaaacttttttctc

SEQ ID NO: 366656 - DNA, 33 bp, Homo sapien
tttatagcgacacgcagtgaaaacttttttctc

SEQ ID NO: 366657 - DNA, 33 bp, Homo sapien
gcgtgtcgctataaataagcatgattggcttgc

SEQ ID NO: 366658 - DNA, 33 bp, Homo sapien
gcgtgtcgctataaatgagcatgattggcttgc

SEQ ID NO: 366659 - DNA, 33 bp, Homo sapien
ctgaatcataaaactaccatgcttataggaaac

SEQ ID NO: 366660 - DNA, 33 bp, Homo sapien
ctgaatcataaaactatcatgcttataggaaac

SEQ ID NO: 366661 - DNA, 33 bp, Homo sapien
aagaacatggatctgcaccattcactgcacagt

SEQ ID NO: 366662 - DNA, 33 bp, Homo sapien
aagaacatggatctgctccattcactgcacagt

SEQ ID NO: 366663 - DNA, 33 bp, Homo sapien
agtggaccctcccgtgaagatggctctatttca

SEQ ID NO: 366664 - DNA, 33 bp, Homo sapien
agtggaccctcccgtggagatggctctatttca

SEQ ID NO: 366665 - DNA, 33 bp, Homo sapien
taatccactttttgcccagtgcttattatcagc

SEQ ID NO: 366666 - DNA, 33 bp, Homo sapien
taatccactttttgcctagtgcttattatcagc

SEQ ID NO: 366667 - DNA, 33 bp, Homo sapien
atctcagctatcaagaaaacccaagtattaacg

SEQ ID NO: 366668 - DNA, 33 bp, Homo sapien
atctcagctatcaagacaacccaagtattaacg

SEQ ID NO: 366669 - DNA, 33 bp, Homo sapien
ctcgtccaaggcattccgaaaagcacccttgtc

SEQ ID NO: 366670 - DNA, 33 bp, Homo sapien
ctcgtccaaggcattctgaaaagcacccttgtc

SEQ ID NO: 366671 - DNA, 33 bp, Homo sapien
tctttctgctcttataacaaagatgcaacaccc

SEQ ID NO: 366672 - DNA, 33 bp, Homo sapien
tctttctgctcttatagcaaagatgcaacaccc

SEQ ID NO: 366673 - DNA, 33 bp, Homo sapien
gcctgactcccagctgcaactcctaacataagt

SEQ ID NO: 366674 - DNA, 33 bp, Homo sapien
gcctgactcccagctggaactcctaacataagt

SEQ ID NO: 366675 - DNA, 33 bp, Homo sapien
cttatcattgtccttaaccaatggagagtttct

SEQ ID NO: 366676 - DNA, 33 bp, Homo sapien
cttatcattgtccttacccaatggagagtttct

SEQ ID NO: 366677 - DNA, 33 bp, Homo sapien
ccaatctcagttctcacggccgcctggcatcag

SEQ ID NO: 366678 - DNA, 33 bp, Homo sapien
ccaatctcagttctcatggccgcctggcatcag

SEQ ID NO: 366679 - DNA, 33 bp, Homo sapien
aggggaatctgaatcaatcatcgtttttacctg

SEQ ID NO: 366680 - DNA, 33 bp, Homo sapien
aggggaatctgaatcattcatcgtttttacctg

SEQ ID NO: 366681 - DNA, 33 bp, Homo sapien
tgaccagaaactctgaagtagatcaaagttggg

SEQ ID NO: 366682 - DNA, 33 bp, Homo sapien
tgaccagaaactctgacgtagatcaaagttggg

SEQ ID NO: 366683 - DNA, 33 bp, Homo sapien
tttatacatcgtataagctactttgagtcaagg

SEQ ID NO: 366684 - DNA, 33 bp, Homo sapien
tttatacatcgtataatctactttgagtcaagg

SEQ ID NO: 366685 - DNA, 33 bp, Homo sapien
acccagcaaagaaacacgatctggtcagtagtg

SEQ ID NO: 366686 - DNA, 33 bp, Homo sapien
acccagcaaagaaacatgatctggtcagtagtg

SEQ ID NO: 366687 - DNA, 33 bp, Homo sapien
gatcccagctgccatgaagaatagcattaggaa

SEQ ID NO: 366688 - DNA, 33 bp, Homo sapien
gatcccagctgccatgtagaatagcattaggaa

SEQ ID NO: 366689 - DNA, 33 bp, Homo sapien
actgccctttccatcaaactctgagacccatgc

SEQ ID NO: 366690 - DNA, 33 bp, Homo sapien
actgccctttccatcagactctgagacccatgc

SEQ ID NO: 366691 - DNA, 33 bp, Homo sapien
gcattgccttttcacaagagtatccccagagcc

SEQ ID NO: 366692 - DNA, 33 bp, Homo sapien
gcattgccttttcacaggagtatccccagagcc

SEQ ID NO: 366693 - DNA, 33 bp, Homo sapien
tgctactactgttgtcaccattgtacacttagc

SEQ ID NO: 366694 - DNA, 33 bp, Homo sapien
tgctactactgttgtcgccattgtacacttagc

SEQ ID NO: 366695 - DNA, 33 bp, Homo sapien
gccttgctctcctcacacttatcatcatcccca

SEQ ID NO: 366696 - DNA, 33 bp, Homo sapien
gccttgctctcctcacgcttatcatcatcccca

SEQ ID NO: 366697 - DNA, 33 bp, Homo sapien
tagaatcatagcaaataactgtgcatgagcccc

SEQ ID NO: 366698 - DNA, 33 bp, Homo sapien
tagaatcatagcaaatcactgtgcatgagcccc

SEQ ID NO: 366699 - DNA, 33 bp, Homo sapien
aatgaaggctactgtacgtctagaagtttccaa

SEQ ID NO: 366700 - DNA, 33 bp, Homo sapien
aatgaaggctactgtatgtctagaagtttccaa

SEQ ID NO: 366701 - DNA, 33 bp, Homo sapien
caaaatgggcgaacgaagtgaggtgcctgggac

SEQ ID NO: 366702 - DNA, 33 bp, Homo sapien
caaaatgggcgaacgaggtgaggtgcctgggac

SEQ ID NO: 366703 - DNA, 33 bp, Homo sapien
tctcaagcttttatgacccaggtctccttgata

SEQ ID NO: 366704 - DNA, 33 bp, Homo sapien
tctcaagcttttatgatccaggtctccttgata

SEQ ID NO: 366705 - DNA, 33 bp, Homo sapien
tattaatttctcttgcaatttcaaatagcatta

SEQ ID NO: 366706 - DNA, 33 bp, Homo sapien
tattaatttctcttgccatttcaaatagcatta

SEQ ID NO: 366707 - DNA, 33 bp, Homo sapien
gctcacgatattttaagtggatgaataaatgaa

SEQ ID NO: 366708 - DNA, 33 bp, Homo sapien
gctcacgatattttaattggatgaataaatgaa

SEQ ID NO: 366709 - DNA, 33 bp, Homo sapien
ctatgctttaaaagacacttgcatctggggctt

SEQ ID NO: 366710 - DNA, 33 bp, Homo sapien
ctatgctttaaaagacgcttgcatctggggctt

SEQ ID NO: 366711 - DNA, 33 bp, Homo sapien
taaaccagtatgtttacggggagataacttgtc

SEQ ID NO: 366712 - DNA, 33 bp, Homo sapien
taaaccagtatgtttatggggagataacttgtc

SEQ ID NO: 366713 - DNA, 33 bp, Homo sapien
tgctgcagtagaaggaaccagatccctttccac

SEQ ID NO: 366714 - DNA, 33 bp, Homo sapien
tgctgcagtagaaggacccagatccctttccac

SEQ ID NO: 366715 - DNA, 33 bp, Homo sapien
attgcactcaccatccacctaactgcctaagcc

SEQ ID NO: 366716 - DNA, 33 bp, Homo sapien
attgcactcaccatccgcctaactgcctaagcc

SEQ ID NO: 366717 - DNA, 33 bp, Homo sapien
atcatcagattttccacatgataagtttttagc

SEQ ID NO: 366718 - DNA, 33 bp, Homo sapien
atcatcagattttccagatgataagtttttagc

SEQ ID NO: 366719 - DNA, 33 bp, Homo sapien
ctttttcaggttttgcaaactggctatgaattg

SEQ ID NO: 366720 - DNA, 33 bp, Homo sapien
ctttttcaggttttgcgaactggctatgaattg

SEQ ID NO: 366721 - DNA, 33 bp, Homo sapien
aaagagggtacttggaacatgtcttctctataa

SEQ ID NO: 366722 - DNA, 33 bp, Homo sapien
aaagagggtacttggatcatgtcttctctataa

SEQ ID NO: 366723 - DNA, 33 bp, Homo sapien
gagcagtcagattaacacaacaactcttggagt

SEQ ID NO: 366724 - DNA, 33 bp, Homo sapien
gagcagtcagattaacccaacaactcttggagt

SEQ ID NO: 366725 - DNA, 33 bp, Homo sapien
tcttctagaaccaataagcttcctacattgcat

SEQ ID NO: 366726 - DNA, 33 bp, Homo sapien
tcttctagaaccaatacgcttcctacattgcat

SEQ ID NO: 366727 - DNA, 33 bp, Homo sapien
caaattcttaacaagactcatggctcgtcccgt

SEQ ID NO: 366728 - DNA, 33 bp, Homo sapien
caaattcttaacaagattcatggctcgtcccgt

SEQ ID NO: 366729 - DNA, 33 bp, Homo sapien
taggtagctgcagatggaatgttcacagtgctc

SEQ ID NO: 366730 - DNA, 33 bp, Homo sapien
taggtagctgcagatgtaatgttcacagtgctc

SEQ ID NO: 366731 - DNA, 33 bp, Homo sapien
gccagactcaaacatcaaagtctctccttgcat

SEQ ID NO: 366732 - DNA, 33 bp, Homo sapien
gccagactcaaacatccaagtctctccttgcat

SEQ ID NO: 366733 - DNA, 33 bp, Homo sapien
gagaggggcatatggacaataacaaccaaaaaa

SEQ ID NO: 366734 - DNA, 33 bp, Homo sapien
gagaggggcatatggataataacaaccaaaaaa

SEQ ID NO: 366735 - DNA, 33 bp, Homo sapien
agagaagactcacttacatgcaagactgacatg

SEQ ID NO: 366736 - DNA, 33 bp, Homo sapien
agagaagactcacttatatgcaagactgacatg

SEQ ID NO: 366737 - DNA, 33 bp, Homo sapien
caatctatacccaccccagactgcggcatctct

SEQ ID NO: 366738 - DNA, 33 bp, Homo sapien
caatctatacccaccctagactgcggcatctct

SEQ ID NO: 366739 - DNA, 33 bp, Homo sapien
aaatctgtaatggagtgaatcaacaagacactt

SEQ ID NO: 366740 - DNA, 33 bp, Homo sapien
aaatctgtaatggagttaatcaacaagacactt

SEQ ID NO: 366741 - DNA, 33 bp, Homo sapien
tccctatctcttaataacagcttcttcatctat

SEQ ID NO: 366742 - DNA, 33 bp, Homo sapien
tccctatctcttaatatcagcttcttcatctat

SEQ ID NO: 366743 - DNA, 33 bp, Homo sapien
tcgagaaagattgctccctgcttttggccagaa

SEQ ID NO: 366744 - DNA, 33 bp, Homo sapien
tcgagaaagattgctctctgcttttggccagaa

SEQ ID NO: 366745 - DNA, 33 bp, Homo sapien
aactggcaacatcaccacctaaatgaccccagg

SEQ ID NO: 366746 - DNA, 33 bp, Homo sapien
aactggcaacatcaccgcctaaatgaccccagg

SEQ ID NO: 366747 - DNA, 33 bp, Homo sapien
aagggactgtgaaaacaagagtaggcagaggca

SEQ ID NO: 366748 - DNA, 33 bp, Homo sapien
aagggactgtgaaaacgagagtaggcagaggca

SEQ ID NO: 366749 - DNA, 33 bp, Homo sapien
agaggattctggccagcagagaaaagagaaaag

SEQ ID NO: 366750 - DNA, 33 bp, Homo sapien
agaggattctggccaggagagaaaagagaaaag

SEQ ID NO: 366751 - DNA, 33 bp, Homo sapien
agtggatggatatgaacactatgtagaaggtgt

SEQ ID NO: 366752 - DNA, 33 bp, Homo sapien
agtggatggatatgaatactatgtagaaggtgt

SEQ ID NO: 366753 - DNA, 33 bp, Homo sapien
ttccttcccataaccacgtaaaattgtgctcgt

SEQ ID NO: 366754 - DNA, 33 bp, Homo sapien
ttccttcccataaccaggtaaaattgtgctcgt

SEQ ID NO: 366755 - DNA, 33 bp, Homo sapien
ttgcggcagcatggcgaaccatctgatcagtgg

SEQ ID NO: 366756 - DNA, 33 bp, Homo sapien
ttgcggcagcatggcggaccatctgatcagtgg

SEQ ID NO: 366757 - DNA, 33 bp, Homo sapien
atccacaccagtgtcaatcaggttcttagcctg

SEQ ID NO: 366758 - DNA, 33 bp, Homo sapien
atccacaccagtgtcagtcaggttcttagcctg

SEQ ID NO: 366759 - DNA, 33 bp, Homo sapien
tccatgatgtactcagaagagctcaaatttgag

SEQ ID NO: 366760 - DNA, 33 bp, Homo sapien
tccatgatgtactcaggagagctcaaatttgag

SEQ ID NO: 366761 - DNA, 33 bp, Homo sapien; identical to SEQ ID NO: 366759

SEQ ID NO: 366762 - DNA, 33 bp, Homo sapien; identical to SEQ ID NO: 366760

SEQ ID NO: 366763 - DNA, 33 bp, Homo sapien
cttcttcaaaaggttacgaacccactgatttct

SEQ ID NO: 366764 - DNA, 33 bp, Homo sapien
cttcttcaaaaggttatgaacccactgatttct

SEQ ID NO: 366765 - DNA, 33 bp, Homo sapien
ttacttttactttatacacaattgcaacagagc

SEQ ID NO: 366766 - DNA, 33 bp, Homo sapien
ttacttttactttatatacaattgcaacagagc

SEQ ID NO: 366767 - DNA, 33 bp, Homo sapien
aaacacgcccctttctcaagagtcctggcctga

SEQ ID NO: 366768 - DNA, 33 bp, Homo sapien
aaacacgcccctttcttaagagtcctggcctga

SEQ ID NO: 366769 - DNA, 33 bp, Homo sapien
tagtgccaaggttaaagcttgatattataacct

SEQ ID NO: 366770 - DNA, 33 bp, Homo sapien
tagtgccaaggttaaatcttgatattataacct

SEQ ID NO: 366771 - DNA, 33 bp, Homo sapien
aggttaaataggagaacggagaaagttataaaa

SEQ ID NO: 366772 - DNA, 33 bp, Homo sapien
aggttaaataggagaatggagaaagttataaaa

SEQ ID NO: 366773 - DNA, 33 bp, Homo sapien
ttccgcatggtcaaggaaagagacccactccag

SEQ ID NO: 366774 - DNA, 33 bp, Homo sapien
ttccgcatggtcaaggcaagagacccactccag

SEQ ID NO: 366775 - DNA, 33 bp, Homo sapien
cctgtagctcaatgtaactgtctgtggttgatg

SEQ ID NO: 366776 - DNA, 33 bp, Homo sapien
cctgtagctcaatgtagctgtctgtggttgatg

SEQ ID NO: 366777 - DNA, 33 bp, Homo sapien
tttcagaataacatccaaagattaccccacaga

SEQ ID NO: 366778 - DNA, 33 bp, Homo sapien
tttcagaataacatccgaagattaccccacaga

SEQ ID NO: 366779 - DNA, 33 bp, Homo sapien
gaaactttctgggagacatctgacagccgcatg

SEQ ID NO: 366780 - DNA, 33 bp, Homo sapien
gaaactttctgggagagatctgacagccgcatg

SEQ ID NO: 366781 - DNA, 33 bp, Homo sapien
tgagtggttgcatagacgatgattgatattgtg

SEQ ID NO: 366782 - DNA, 33 bp, Homo sapien
tgagtggttgcatagatgatgattgatattgtg

SEQ ID NO: 366783 - DNA, 33 bp, Homo sapien
atatagtgcactgcaagacctcgcttttttaac

SEQ ID NO: 366784 - DNA, 33 bp, Homo sapien
atatagtgcactgcaatacctcgcttttttaac

SEQ ID NO: 366785 - DNA, 33 bp, Homo sapien
accatttcacagaagaaacagaaacatgtaaat

SEQ ID NO: 366786 - DNA, 33 bp, Homo sapien
accatttcacagaagagacagaaacatgtaaat

SEQ ID NO: 366787 - DNA, 33 bp, Homo sapien
gttagcaggactgtcacgaagccctctcaaagg

SEQ ID NO: 366788 - DNA, 33 bp, Homo sapien
gttagcaggactgtcaggaagccctctcaaagg

SEQ ID NO: 366789 - DNA, 33 bp, Homo sapien
gccttcagacttgctggaggagaatctctgctg

SEQ ID NO: 366790 - DNA, 33 bp, Homo sapien
gccttcagacttgctgtaggagaatctctgctg

SEQ ID NO: 366791 - DNA, 33 bp, Homo sapien
atttttggcagaatcaaatggttgctttgtggt

SEQ ID NO: 366792 - DNA, 33 bp, Homo sapien
atttttggcagaatcagatggttgctttgtggt

SEQ ID NO: 366793 - DNA, 33 bp, Homo sapien
gaagtcctgacctcaccataaacaaagagcctt

SEQ ID NO: 366794 - DNA, 33 bp, Homo sapien
gaagtcctgacctcactataaacaaagagcctt

SEQ ID NO: 366795 - DNA, 33 bp, Homo sapien
gaatttctctcatgaaacccattttcttgattt

SEQ ID NO: 366796 - DNA, 33 bp, Homo sapien
gaatttctctcatgaaccccattttcttgattt

SEQ ID NO: 366797 - DNA, 33 bp, Homo sapien
accttctcagcaacaacggatgaaaataagcat

SEQ ID NO: 366798 - DNA, 33 bp, Homo sapien
accttctcagcaacaatggatgaaaataagcat

SEQ ID NO: 366799 - DNA, 33 bp, Homo sapien
agcagcctagcttggcgcatggtgctttataga

SEQ ID NO: 366800 - DNA, 33 bp, Homo sapien
agcagcctagcttggctcatggtgctttataga

SEQ ID NO: 366801 - DNA, 33 bp, Homo sapien
tttacctagaattaaaatcaattgcttgctgtg

SEQ ID NO: 366802 - DNA, 33 bp, Homo sapien
tttacctagaattaaagtcaattgcttgctgtg

SEQ ID NO: 366803 - DNA, 33 bp, Homo sapien
gccaccatcttgctcccaaagattcactccatc

SEQ ID NO: 366804 - DNA, 33 bp, Homo sapien
gccaccatcttgctccgaaagattcactccatc

SEQ ID NO: 366805 - DNA, 33 bp, Homo sapien
ttgctcacttaacttacatgtgcttatctggac

SEQ ID NO: 366806 - DNA, 33 bp, Homo sapien
ttgctcacttaacttatatgtgcttatctggac

SEQ ID NO: 366807 - DNA, 33 bp, Homo sapien
gattgaaaggataagcacatctgcttttagact

SEQ ID NO: 366808 - DNA, 33 bp, Homo sapien
gattgaaaggataagcgcatctgcttttagact

SEQ ID NO: 366809 - DNA, 33 bp, Homo sapien
tctgttgaagaggtggcatgatattgcgtgtgt

SEQ ID NO: 366810 - DNA, 33 bp, Homo sapien
tctgttgaagaggtgggatgatattgcgtgtgt

SEQ ID NO: 366811 - DNA, 33 bp, Homo sapien
gctcaaatagcaacaaaaacttcaaggaggaga

SEQ ID NO: 366812 - DNA, 33 bp, Homo sapien
gctcaaatagcaacaagaacttcaaggaggaga

SEQ ID NO: 366813 - DNA, 33 bp, Homo sapien
gacctggtttcattagaacctagttgcaaatga

SEQ ID NO: 366814 - DNA, 33 bp, Homo sapien
gacctggtttcattagcacctagttgcaaatga

SEQ ID NO: 366815 - DNA, 33 bp, Homo sapien
gaaactatagtgtctcacacagaataggtgcac

SEQ ID NO: 366816 - DNA, 33 bp, Homo sapien
gaaactatagtgtctcgcacagaataggtgcac

SEQ ID NO: 366817 - DNA, 33 bp, Homo sapien
tatttagatgtcaatgcagctgtttttaaaaaa

SEQ ID NO: 366818 - DNA, 33 bp, Homo sapien
tatttagatgtcaatggagctgtttttaaaaaa

SEQ ID NO: 366819 - DNA, 33 bp, Homo sapien
acaggaaagactgaaagaagaacagcattcagt

SEQ ID NO: 366820 - DNA, 33 bp, Homo sapien
acaggaaagactgaaataagaacagcattcagt

SEQ ID NO: 366821 - DNA, 33 bp, Homo sapien
tgagttggtgaatagaagtgttcctttacaaag

SEQ ID NO: 366822 - DNA, 33 bp, Homo sapien
tgagttggtgaatagatgtgttcctttacaaag

SEQ ID NO: 366823 - DNA, 33 bp, Homo sapien
attgtctggcccataacgtcacgttcaaagact

SEQ ID NO: 366824 - DNA, 33 bp, Homo sapien
attgtctggcccataatgtcacgttcaaagact

SEQ ID NO: 366825 - DNA, 33 bp, Homo sapien
attagcatcaaagttaagaagagtcagggttaa

SEQ ID NO: 366826 - DNA, 33 bp, Homo sapien
attagcatcaaagttaggaagagtcagggttaa

SEQ ID NO: 366827 - DNA, 33 bp, Homo sapien
aagagtgggtttatcaataaaggcaatggtgaa

SEQ ID NO: 366828 - DNA, 33 bp, Homo sapien
aagagtgggtttatcattaaaggcaatggtgaa

SEQ ID NO: 366829 - DNA, 33 bp, Homo sapien
tcgcctcacttgtgggaccagatggagcatggc

SEQ ID NO: 366830 - DNA, 33 bp, Homo sapien
tcgcctcacttgtgggcccagatggagcatggc

SEQ ID NO: 366831 - DNA, 33 bp, Homo sapien
agtcctgcgctacagaaacggtttaaacttatt

SEQ ID NO: 366832 - DNA, 33 bp, Homo sapien
agtcctgcgctacagacacggtttaaacttatt

SEQ ID NO: 366833 - DNA, 33 bp, Homo sapien
gaaagtctagagcaaactgcaaaatgaggagag

SEQ ID NO: 366834 - DNA, 33 bp, Homo sapien
gaaagtctagagcaaattgcaaaatgaggagag

SEQ ID NO: 366835 - DNA, 33 bp, Homo sapien
attaggatcgaatgaaataaggtgtatgaaaac

SEQ ID NO: 366836 - DNA, 33 bp, Homo sapien
attaggatcgaatgaagtaaggtgtatgaaaac

SEQ ID NO: 366837 - DNA, 33 bp, Homo sapien
atcaccttccacctgaactttgattccagtctt

SEQ ID NO: 366838 - DNA, 33 bp, Homo sapien
atcaccttccacctgagctttgattccagtctt

SEQ ID NO: 366839 - DNA, 33 bp, Homo sapien
aaaccagtttcacttacgataagcagaagataa

SEQ ID NO: 366840 - DNA, 33 bp, Homo sapien
aaaccagtttcacttatgataagcagaagataa

SEQ ID NO: 366841 - DNA, 33 bp, Homo sapien
cccatcccatctagaacgagtaaatccacagat

SEQ ID NO: 366842 - DNA, 33 bp, Homo sapien
cccatcccatctagaatgagtaaatccacagat

SEQ ID NO: 366843 - DNA, 33 bp, Homo sapien
ttgtgagagagaatatcaaagctcaaattccat

SEQ ID NO: 366844 - DNA, 33 bp, Homo sapien
ttgtgagagagaatatgaaagctcaaattccat

SEQ ID NO: 366845 - DNA, 33 bp, Homo sapien
gaatgcagaggagggacagcttcatccacaggt

SEQ ID NO: 366846 - DNA, 33 bp, Homo sapien
gaatgcagaggagggatagcttcatccacaggt

SEQ ID NO: 366847 - DNA, 33 bp, Homo sapien
caatggaaacaattaacctttttcaagtcaggg

SEQ ID NO: 366848 - DNA, 33 bp, Homo sapien
caatggaaacaattaagctttttcaagtcaggg

SEQ ID NO: 366849 - DNA, 33 bp, Homo sapien
actaaaaaatgcagacacaataacaatagcatt

SEQ ID NO: 366850 - DNA, 33 bp, Homo sapien
actaaaaaatgcagacgcaataacaatagcatt

SEQ ID NO: 366851 - DNA, 33 bp, Homo sapien
tgtcctgcatcccccacccttgatctttcaact

SEQ ID NO: 366852 - DNA, 33 bp, Homo sapien
tgtcctgcatcccccatccttgatctttcaact

SEQ ID NO: 366853 - DNA, 33 bp, Homo sapien
gtccttcatttgtagaatcagttagttggatgt

SEQ ID NO: 366854 - DNA, 33 bp, Homo sapien
gtccttcatttgtagagtcagttagttggatgt

SEQ ID NO: 366855 - DNA, 33 bp, Homo sapien
gagggagttacatgcaaaaagtgagaagagttt

SEQ ID NO: 366856 - DNA, 33 bp, Homo sapien
gagggagttacatgcacaaagtgagaagagttt

SEQ ID NO: 366857 - DNA, 33 bp, Homo sapien
tttctttaattctggaaaaaatctcagccgcta

SEQ ID NO: 366858 - DNA, 33 bp, Homo sapien
tttctttaattctggagaaaatctcagccgcta

SEQ ID NO: 366859 - DNA, 33 bp, Homo sapien
ttgttattttcttcaacggtcaagtagacagac

SEQ ID NO: 366860 - DNA, 33 bp, Homo sapien
ttgttattttcttcaatggtcaagtagacagac

SEQ ID NO: 366861 - DNA, 33 bp, Homo sapien
tttacttctacattggcaacatgatagtgcccc

SEQ ID NO: 366862 - DNA, 33 bp, Homo sapien
tttacttctacattgggaacatgatagtgcccc

SEQ ID NO: 366863 - DNA, 33 bp, Homo sapien
catctcttttataagaccacaaatcccatttta

SEQ ID NO: 366864 - DNA, 33 bp, Homo sapien
catctcttttataagagcacaaatcccatttta

SEQ ID NO: 366865 - DNA, 33 bp, Homo sapien
ctggatcaaactaaaacatcacttttggacatt

SEQ ID NO: 366866 - DNA, 33 bp, Homo sapien
ctggatcaaactaaaatatcacttttggacatt

SEQ ID NO: 366867 - DNA, 33 bp, Homo sapien
aggggaacttcttccaagaatgtggatgtggct

SEQ ID NO: 366868 - DNA, 33 bp, Homo sapien
aggggaacttcttccaggaatgtggatgtggct

SEQ ID NO: 366869 - DNA, 33 bp, Homo sapien
agtttgttacttttgaaattgtgtgtatccaca

SEQ ID NO: 366870 - DNA, 33 bp, Homo sapien
agtttgttacttttgagattgtgtgtatccaca

SEQ ID NO: 366871 - DNA, 33 bp, Homo sapien
acttatatgaagttcaaaaaagggcaaaactaa

SEQ ID NO: 366872 - DNA, 33 bp, Homo sapien
acttatatgaagttcagaaaagggcaaaactaa

SEQ ID NO: 366873 - DNA, 33 bp, Homo sapien
gtgtggggccaagcacagacagttattttagat

SEQ ID NO: 366874 - DNA, 33 bp, Homo sapien
gtgtggggccaagcacggacagttattttagat

SEQ ID NO: 366875 - DNA, 33 bp, Homo sapien
ataaatcaaactgatacggcctcttttgaatag

SEQ ID NO: 366876 - DNA, 33 bp, Homo sapien
ataaatcaaactgatatggcctcttttgaatag

SEQ ID NO: 366877 - DNA, 33 bp, Homo sapien
gctggctccaacttaagctctgtcactcagctg

SEQ ID NO: 366878 - DNA, 33 bp, Homo sapien
gctggctccaacttaatctctgtcactcagctg

SEQ ID NO: 366879 - DNA, 33 bp, Homo sapien
gggcacccaaggacaaccacctcttgaagaata

SEQ ID NO: 366880 - DNA, 33 bp, Homo sapien
gggcacccaaggacaatcacctcttgaagaata

SEQ ID NO: 366881 - DNA, 33 bp, Homo sapien
gctgactctgcccaacaactagtaattagcaga

SEQ ID NO: 366882 - DNA, 33 bp, Homo sapien
gctgactctgcccaacgactagtaattagcaga

SEQ ID NO: 366883 - DNA, 33 bp, Homo sapien
aagagtgaagaaaaacaagcccgaaagatgtta

SEQ ID NO: 366884 - DNA, 33 bp, Homo sapien
aagagtgaagaaaaacgagcccgaaagatgtta

SEQ ID NO: 366885 - DNA, 33 bp, Homo sapien
cagagcccctttcataagcgaactcccctacat

SEQ ID NO: 366886 - DNA, 33 bp, Homo sapien
cagagcccctttcataggcgaactcccctacat

SEQ ID NO: 366887 - DNA, 33 bp, Homo sapien
actccaatctcttacccaccttttcacccgaga

SEQ ID NO: 366888 - DNA, 33 bp, Homo sapien
actccaatctcttaccgaccttttcacccgaga

SEQ ID NO: 366889 - DNA, 33 bp, Homo sapien
tacctagtatcaagcagccagtaagtttcagag

SEQ ID NO: 366890 - DNA, 33 bp, Homo sapien
tacctagtatcaagcatccagtaagtttcagag

SEQ ID NO: 366891 - DNA, 33 bp, Homo sapien
gagtccttgcctgtctcaaccctttttctgaaa

SEQ ID NO: 366892 - DNA, 33 bp, Homo sapien
gagtccttgcctgtcttaaccctttttctgaaa

SEQ ID NO: 366893 - DNA, 33 bp, Homo sapien
tcacagagcaggttagcattgaaataggtattt

SEQ ID NO: 366894 - DNA, 33 bp, Homo sapien
tcacagagcaggttaggattgaaataggtattt

SEQ ID NO: 366895 - DNA, 33 bp, Homo sapien
accacaacaagtcccacgaatacctcactcaac

SEQ ID NO: 366896 - DNA, 33 bp, Homo sapien
accacaacaagtcccatgaatacctcactcaac

SEQ ID NO: 366897 - DNA, 33 bp, Homo sapien
attacacaattccttcacccttttgcaaagaat

SEQ ID NO: 366898 - DNA, 33 bp, Homo sapien
attacacaattccttcgcccttttgcaaagaat

SEQ ID NO: 366899 - DNA, 33 bp, Homo sapien
tccagagatattctacacatagataagcatata

SEQ ID NO: 366900 - DNA, 33 bp, Homo sapien
tccagagatattctacgcatagataagcatata

SEQ ID NO: 366901 - DNA, 33 bp, Homo sapien
agagacaggtaaaagacggtggattccttctca

SEQ ID NO: 366902 - DNA, 33 bp, Homo sapien
agagacaggtaaaagagggtggattccttctca

SEQ ID NO: 366903 - DNA, 33 bp, Homo sapien
ccacctgccaaaaaccaatgtgaccatcttgca

SEQ ID NO: 366904 - DNA, 33 bp, Homo sapien
ccacctgccaaaaaccgatgtgaccatcttgca

SEQ ID NO: 366905 - DNA, 33 bp, Homo sapien
atataatttctgttgaccactaaattttgagat

SEQ ID NO: 366906 - DNA, 33 bp, Homo sapien
atataatttctgttgatcactaaattttgagat

SEQ ID NO: 366907 - DNA, 33 bp, Homo sapien
gatagaaccacctggcaaggcttgttaaaaatg

SEQ ID NO: 366908 - DNA, 33 bp, Homo sapien
gatagaaccacctggcgaggcttgttaaaaatg

SEQ ID NO: 366909 - DNA, 33 bp, Homo sapien
taagtaatgttcattccacacccacaaagatct

SEQ ID NO: 366910 - DNA, 33 bp, Homo sapien
taagtaatgttcattcgacacccacaaagatct

SEQ ID NO: 366911 - DNA, 33 bp, Homo sapien
gataattgtaactacaacttccacaagccaggt

SEQ ID NO: 366912 - DNA, 33 bp, Homo sapien
gataattgtaactacaccttccacaagccaggt

SEQ ID NO: 366913 - DNA, 33 bp, Homo sapien
tgttttcatattatacaagcaatgcaaccacaa

SEQ ID NO: 366914 - DNA, 33 bp, Homo sapien
tgttttcatattatacgagcaatgcaaccacaa

SEQ ID NO: 366915 - DNA, 33 bp, Homo sapien
ttatctcctcaaaggaatattctgcagccatta

SEQ ID NO: 366916 - DNA, 33 bp, Homo sapien
ttatctcctcaaaggagtattctgcagccatta

SEQ ID NO: 366917 - DNA, 33 bp, Homo sapien
gtcataagttcctctaccacagaattgcaatta

SEQ ID NO: 366918 - DNA, 33 bp, Homo sapien
gtcataagttcctctatcacagaattgcaatta

SEQ ID NO: 366919 - DNA, 33 bp, Homo sapien
tgaagaggatgatagccaatattcactgagcac

SEQ ID NO: 366920 - DNA, 33 bp, Homo sapien
tgaagaggatgatagctaatattcactgagcac

SEQ ID NO: 366921 - DNA, 33 bp, Homo sapien
tttgtacattcttcagcactactgatcacttag

SEQ ID NO: 366922 - DNA, 33 bp, Homo sapien
tttgtacattcttcaggactactgatcacttag

SEQ ID NO: 366923 - DNA, 33 bp, Homo sapien
ccactaggaaaaagagaatgattgatgagaatt

SEQ ID NO: 366924 - DNA, 33 bp, Homo sapien
ccactaggaaaaagagtatgattgatgagaatt

SEQ ID NO: 366925 - DNA, 33 bp, Homo sapien
tctgagaatcagtttagacccactaggaaaaag

SEQ ID NO: 366926 - DNA, 33 bp, Homo sapien
tctgagaatcagtttatacccactaggaaaaag

SEQ ID NO: 366927 - DNA, 33 bp, Homo sapien
aatgcttataatgcaaagttgaggtaaagagta

SEQ ID NO: 366928 - DNA, 33 bp, Homo sapien
aatgcttataatgcaatgttgaggtaaagagta

SEQ ID NO: 366929 - DNA, 33 bp, Homo sapien
ggcagtggagcctcagcctgaagatgaattgcc

SEQ ID NO: 366930 - DNA, 33 bp, Homo sapien
ggcagtggagcctcaggctgaagatgaattgcc

SEQ ID NO: 366931 - DNA, 33 bp, Homo sapien
cccaagctcccttaacacacagaggaccaagcg

SEQ ID NO: 366932 - DNA, 33 bp, Homo sapien
cccaagctcccttaacgcacagaggaccaagcg

SEQ ID NO: 366933 - DNA, 33 bp, Homo sapien
atccaagaagacctgaaggcagaaagcagaaag

SEQ ID NO: 366934 - DNA, 33 bp, Homo sapien
atccaagaagacctgagggcagaaagcagaaag

SEQ ID NO: 366935 - DNA, 33 bp, Homo sapien
ttctgagctgcaatgcactgtgtctattgggtg

SEQ ID NO: 366936 - DNA, 33 bp, Homo sapien
ttctgagctgcaatgcgctgtgtctattgggtg

SEQ ID NO: 366937 - DNA, 33 bp, Homo sapien
tctttaaatgagtatcccggtcatatgtactga

SEQ ID NO: 366938 - DNA, 33 bp, Homo sapien
tctttaaatgagtatctcggtcatatgtactga

SEQ ID NO: 366939 - DNA, 33 bp, Homo sapien
tgagatcagaaatctgcaaacaacactggaaaa

SEQ ID NO: 366940 - DNA, 33 bp, Homo sapien
tgagatcagaaatctggaaacaacactggaaaa

SEQ ID NO: 366941 - DNA, 33 bp, Homo sapien
gtatgtagccttggacactaaattcaccgattc

SEQ ID NO: 366942 - DNA, 33 bp, Homo sapien
gtatgtagccttggacgctaaattcaccgattc

SEQ ID NO: 366943 - DNA, 33 bp, Homo sapien
ataaccactttctcaccagggggacctcacacg

SEQ ID NO: 366944 - DNA, 33 bp, Homo sapien
ataaccactttctcactagggggacctcacacg

SEQ ID NO: 366945 - DNA, 33 bp, Homo sapien
aagctgctaagaatcacgttcctggagaaattt

SEQ ID NO: 366946 - DNA, 33 bp, Homo sapien
aagctgctaagaatcatgttcctggagaaattt

SEQ ID NO: 366947 - DNA, 33 bp, Homo sapien
aatacaaaccattacacaccgcagtttcaattc

SEQ ID NO: 366948 - DNA, 33 bp, Homo sapien
aatacaaaccattacataccgcagtttcaattc

SEQ ID NO: 366949 - DNA, 33 bp, Homo sapien
aaccaggtcctgccaaagcaatccatcctggat

SEQ ID NO: 366950 - DNA, 33 bp, Homo sapien
aaccaggtcctgccaacgcaatccatcctggat

SEQ ID NO: 366951 - DNA, 33 bp, Homo sapien
cagcctactgggtagcagaactactggtgtata

SEQ ID NO: 366952 - DNA, 33 bp, Homo sapien
cagcctactgggtagcggaactactggtgtata

SEQ ID NO: 366953 - DNA, 33 bp, Homo sapien
gaaggtgccaagagaacgcaatgccaaagtgga

SEQ ID NO: 366954 - DNA, 33 bp, Homo sapien
gaaggtgccaagagaatgcaatgccaaagtgga

SEQ ID NO: 366955 - DNA, 33 bp, Homo sapien
gacacacagtgggctacaagtgctgggtcttat

SEQ ID NO: 366956 - DNA, 33 bp, Homo sapien
gacacacagtgggctataagtgctgggtcttat

SEQ ID NO: 366957 - DNA, 33 bp, Homo sapien
ctccaatccctgtcatcagtgtgcccattcaga

SEQ ID NO: 366958 - DNA, 33 bp, Homo sapien
ctccaatccctgtcatgagtgtgcccattcaga

SEQ ID NO: 366959 - DNA, 33 bp, Homo sapien
aacagtcacatcaaaacttgaacagtggccact

SEQ ID NO: 366960 - DNA, 33 bp, Homo sapien
aacagtcacatcaaaatttgaacagtggccact

SEQ ID NO: 366961 - DNA, 33 bp, Homo sapien
gattagggatgcaactgacgccactatgacctc

SEQ ID NO: 366962 - DNA, 33 bp, Homo sapien
gattagggatgcaacttacgccactatgacctc

SEQ ID NO: 366963 - DNA, 33 bp, Homo sapien
cctccaagctcatcacaccttgttaccatagcc

SEQ ID NO: 366964 - DNA, 33 bp, Homo sapien
cctccaagctcatcacgccttgttaccatagcc

SEQ ID NO: 366965 - DNA, 33 bp, Homo sapien
gatggcattggagttacctgtgtttctgtctat

SEQ ID NO: 366966 - DNA, 33 bp, Homo sapien
gatggcattggagttatctgtgtttctgtctat

SEQ ID NO: 366967 - DNA, 33 bp, Homo sapien
tgaggagtgaagtctaactcactacagtatccc

SEQ ID NO: 366968 - DNA, 33 bp, Homo sapien
tgaggagtgaagtctacctcactacagtatccc

SEQ ID NO: 366969 - DNA, 33 bp, Homo sapien
taacaaaggaataaccagcggggatagggtcag

SEQ ID NO: 366970 - DNA, 33 bp, Homo sapien
taacaaaggaataaccggcggggatagggtcag

SEQ ID NO: 366971 - DNA, 33 bp, Homo sapien
ataactcactcggttacgacattaagactatga

SEQ ID NO: 366972 - DNA, 33 bp, Homo sapien
ataactcactcggttatgacattaagactatga

SEQ ID NO: 366973 - DNA, 33 bp, Homo sapien
tctctcagctaagtgacagtcaatcaggctaaa

SEQ ID NO: 366974 - DNA, 33 bp, Homo sapien
tctctcagctaagtgagagtcaatcaggctaaa

SEQ ID NO: 366975 - DNA, 33 bp, Homo sapien
tatatttggaataatacggaattgcaaaatggt

SEQ ID NO: 366976 - DNA, 33 bp, Homo sapien
tatatttggaataatatggaattgcaaaatggt

SEQ ID NO: 366977 - DNA, 33 bp, Homo sapien
cagttctcaactagcaccactcaagtttaataa

SEQ ID NO: 366978 - DNA, 33 bp, Homo sapien
cagttctcaactagcagcactcaagtttaataa

SEQ ID NO: 366979 - DNA, 33 bp, Homo sapien
gttctgaactgcatccagcctgttgatgagatt

SEQ ID NO: 366980 - DNA, 33 bp, Homo sapien
gttctgaactgcatccggcctgttgatgagatt

SEQ ID NO: 366981 - DNA, 33 bp, Homo sapien
attgtgttaatagcaacgtttctgggatccctg

SEQ ID NO: 366982 - DNA, 33 bp, Homo sapien
attgtgttaatagcaatgtttctgggatccctg

SEQ ID NO: 366983 - DNA, 33 bp, Homo sapien
aatgtgcctgtatccaaaagaaatgaaacctgc

SEQ ID NO: 366984 - DNA, 33 bp, Homo sapien
aatgtgcctgtatccacaagaaatgaaacctgc

SEQ ID NO: 366985 - DNA, 33 bp, Homo sapien
tagggagtgtcacaaagtttcagccagaacaaa

SEQ ID NO: 366986 - DNA, 33 bp, Homo sapien
tagggagtgtcacaaattttcagccagaacaaa

SEQ ID NO: 366987 - DNA, 33 bp, Homo sapien
tggaagaaaagcttcacctagggagtgtcacaa

SEQ ID NO: 366988 - DNA, 33 bp, Homo sapien
tggaagaaaagcttcatctagggagtgtcacaa

SEQ ID NO: 366989 - DNA, 33 bp, Homo sapien
gcatctcccagttttaccaaattttctgtcatg

SEQ ID NO: 366990 - DNA, 33 bp, Homo sapien
gcatctcccagttttagcaaattttctgtcatg

SEQ ID NO: 366991 - DNA, 33 bp, Homo sapien
gggagtgggttccggcactagctggtgtccccc

SEQ ID NO: 366992 - DNA, 33 bp, Homo sapien
gggagtgggttccggcgctagctggtgtccccc

SEQ ID NO: 366993 - DNA, 33 bp, Homo sapien
tgtctccaggtttggaaattcttttgtctcaat

SEQ ID NO: 366994 - DNA, 33 bp, Homo sapien
tgtctccaggtttggacattcttttgtctcaat

SEQ ID NO: 366995 - DNA, 33 bp, Homo sapien
ccacaaacgagccacacgataagaactgtggct

SEQ ID NO: 366996 - DNA, 33 bp, Homo sapien
ccacaaacgagccacaggataagaactgtggct

SEQ ID NO: 366997 - DNA, 33 bp, Homo sapien
catacagcgaaaaagcaaggattcaggtccggg

SEQ ID NO: 366998 - DNA, 33 bp, Homo sapien
catacagcgaaaaagcgaggattcaggtccggg

SEQ ID NO: 366999 - DNA, 33 bp, Homo sapien
catattttgggttggcacgttcttcactccttc

SEQ ID NO: 367000 - DNA, 33 bp, Homo sapien
catattttgggttggcccgttcttcactccttc

SEQ ID NO: 367001 - DNA, 33 bp, Homo sapien
ttttctttcagcacttcaaatttgtcatcccac

SEQ ID NO: 367002 - DNA, 33 bp, Homo sapien
ttttctttcagcactttaaatttgtcatcccac

SEQ ID NO: 367003 - DNA, 33 bp, Homo sapien
gtatatgatggaataccattttgcctgtcattt

SEQ ID NO: 367004 - DNA, 33 bp, Homo sapien
gtatatgatggaatactattttgcctgtcattt

SEQ ID NO: 367005 - DNA, 33 bp, Homo sapien
tatattatttttgtctcactaggttaatttaaa

SEQ ID NO: 367006 - DNA, 33 bp, Homo sapien
tatattatttttgtctgactaggttaatttaaa

SEQ ID NO: 367007 - DNA, 33 bp, Homo sapien
catttatgaagcttaacctagttggatataaaa

SEQ ID NO: 367008 - DNA, 33 bp, Homo sapien
catttatgaagcttaatctagttggatataaaa

SEQ ID NO: 367009 - DNA, 33 bp, Homo sapien
aagtagaccctccctacaataaatcctcagatc

SEQ ID NO: 367010 - DNA, 33 bp, Homo sapien
aagtagaccctccctataataaatcctcagatc

SEQ ID NO: 367011 - DNA, 33 bp, Homo sapien
tgcattgttttgtaagccccccaccattttgca

SEQ ID NO: 367012 - DNA, 33 bp, Homo sapien
tgcattgttttgtaagtcccccaccattttgca

SEQ ID NO: 367013 - DNA, 33 bp, Homo sapien
attttgcaatgtccaacgacaagtttgtagagt

SEQ ID NO: 367014 - DNA, 33 bp, Homo sapien
attttgcaatgtccaatgacaagtttgtagagt

SEQ ID NO: 367015 - DNA, 33 bp, Homo sapien
agcaggaaataaccagcaatttttacagacaag

SEQ ID NO: 367016 - DNA, 33 bp, Homo sapien
agcaggaaataaccaggaatttttacagacaag

SEQ ID NO: 367017 - DNA, 33 bp, Homo sapien
atgccttcatctaccaaggttgtagctgaccca

SEQ ID NO: 367018 - DNA, 33 bp, Homo sapien
atgccttcatctaccatggttgtagctgaccca

SEQ ID NO: 367019 - DNA, 33 bp, Homo sapien
taacgaaagaaagaggaagcaaattagacaggt

SEQ ID NO: 367020 - DNA, 33 bp, Homo sapien
taacgaaagaaagagggagcaaattagacaggt

SEQ ID NO: 367021 - DNA, 33 bp, Homo sapien
acaaaaattatctacaaaatccctaagacaaat

SEQ ID NO: 367022 - DNA, 33 bp, Homo sapien
acaaaaattatctacagaatccctaagacaaat

SEQ ID NO: 367023 - DNA, 33 bp, Homo sapien
aaactgataatttttacggaagcctgagtgtga

SEQ ID NO: 367024 - DNA, 33 bp, Homo sapien
aaactgataatttttatggaagcctgagtgtga

SEQ ID NO: 367025 - DNA, 33 bp, Homo sapien
ctgatgaattttcacaaagtgacagatgaccca

SEQ ID NO: 367026 - DNA, 33 bp, Homo sapien
ctgatgaattttcacagagtgacagatgaccca

SEQ ID NO: 367027 - DNA, 33 bp, Homo sapien
aaatctgcatggaaaactgttgagcataaactg

SEQ ID NO: 367028 - DNA, 33 bp, Homo sapien
aaatctgcatggaaaagtgttgagcataaactg

SEQ ID NO: 367029 - DNA, 33 bp, Homo sapien
cctctggtatttctaaacttcagtgagaggtat

SEQ ID NO: 367030 - DNA, 33 bp, Homo sapien
cctctggtatttctaatcttcagtgagaggtat

SEQ ID NO: 367031 - DNA, 33 bp, Homo sapien
tagcaaaggtaaaccgaacattgagcttgatcg

SEQ ID NO: 367032 - DNA, 33 bp, Homo sapien
tagcaaaggtaaaccgtacattgagcttgatcg

SEQ ID NO: 367033 - DNA, 33 bp, Homo sapien
ttgtattcaaaatggaaccatacaaacgcaaat

SEQ ID NO: 367034 - DNA, 33 bp, Homo sapien
ttgtattcaaaatggagccatacaaacgcaaat

SEQ ID NO: 367035 - DNA, 33 bp, Homo sapien
ccctaatcatcaatccacagcttgaaatcattt

SEQ ID NO: 367036 - DNA, 33 bp, Homo sapien
ccctaatcatcaatccgcagcttgaaatcattt

SEQ ID NO: 367037 - DNA, 33 bp, Homo sapien
tccttgtgaactgtatcacactgctctctggaa

SEQ ID NO: 367038 - DNA, 33 bp, Homo sapien
tccttgtgaactgtatgacactgctctctggaa

SEQ ID NO: 367039 - DNA, 33 bp, Homo sapien
gatggatgaatgaacgaatacatacattttagg

SEQ ID NO: 367040 - DNA, 33 bp, Homo sapien
gatggatgaatgaacggatacatacattttagg

SEQ ID NO: 367041 - DNA, 33 bp, Homo sapien
ctggaaatcattcacccagaccctctgaatcag

SEQ ID NO: 367042 - DNA, 33 bp, Homo sapien
ctggaaatcattcacctagaccctctgaatcag

SEQ ID NO: 367043 - DNA, 33 bp, Homo sapien
cacgcaggttaaggatcaccattcctaaggcaa

SEQ ID NO: 367044 - DNA, 33 bp, Homo sapien
cacgcaggttaaggatgaccattcctaaggcaa

SEQ ID NO: 367045 - DNA, 33 bp, Homo sapien
aacaaaaagaacattcaacaagagaccatatgg

SEQ ID NO: 367046 - DNA, 33 bp, Homo sapien
aacaaaaagaacattcgacaagagaccatatgg

SEQ ID NO: 367047 - DNA, 33 bp, Homo sapien
ctttcaaggtaagtgtcaatgaaggaagctgac

SEQ ID NO: 367048 - DNA, 33 bp, Homo sapien
ctttcaaggtaagtgtgaatgaaggaagctgac

SEQ ID NO: 367049 - DNA, 33 bp, Homo sapien
ccattcgggcacttggaagagtttacagtgcag

SEQ ID NO: 367050 - DNA, 33 bp, Homo sapien
ccattcgggcacttggcagagtttacagtgcag

SEQ ID NO: 367051 - DNA, 33 bp, Homo sapien
aatcctactgagttcaccaaggaaaagacccag

SEQ ID NO: 367052 - DNA, 33 bp, Homo sapien
aatcctactgagttcatcaaggaaaagacccag

SEQ ID NO: 367053 - DNA, 33 bp, Homo sapien
atacagggcatttttacacgactctctttcctc

SEQ ID NO: 367054 - DNA, 33 bp, Homo sapien
atacagggcatttttatacgactctctttcctc

SEQ ID NO: 367055 - DNA, 33 bp, Homo sapien
tccagttctgatgcccagaggtttcttgttgct

SEQ ID NO: 367056 - DNA, 33 bp, Homo sapien
tccagttctgatgcccggaggtttcttgttgct

SEQ ID NO: 367057 - DNA, 33 bp, Homo sapien
tggcttctgggtcccaccatgtgctcttggttg

SEQ ID NO: 367058 - DNA, 33 bp, Homo sapien
tggcttctgggtcccatcatgtgctcttggttg

SEQ ID NO: 367059 - DNA, 33 bp, Homo sapien
gtgaggcaggtgtcaaatgcagggtgttcccca

SEQ ID NO: 367060 - DNA, 33 bp, Homo sapien
gtgaggcaggtgtcaactgcagggtgttcccca

SEQ ID NO: 367061 - DNA, 33 bp, Homo sapien
cagtctttaactcgccagcaaagatccatctat

SEQ ID NO: 367062 - DNA, 33 bp, Homo sapien
cagtctttaactcgccggcaaagatccatctat

SEQ ID NO: 367063 - DNA, 33 bp, Homo sapien
actggactgtagactaacaaccactcagtgtcc

SEQ ID NO: 367064 - DNA, 33 bp, Homo sapien
actggactgtagactagcaaccactcagtgtcc

SEQ ID NO: 367065 - DNA, 33 bp, Homo sapien
ctcttgctgctcaaaagctccaagtccaagact

SEQ ID NO: 367066 - DNA, 33 bp, Homo sapien
ctcttgctgctcaaaatctccaagtccaagact

SEQ ID NO: 367067 - DNA, 33 bp, Homo sapien
acatcgcgatggttaccggggtgccctggtgaa

SEQ ID NO: 367068 - DNA, 33 bp, Homo sapien
acatcgcgatggttactggggtgccctggtgaa

SEQ ID NO: 367069 - DNA, 33 bp, Homo sapien
aggtgcattctgaagacagtaggcagatgccag

SEQ ID NO: 367070 - DNA, 33 bp, Homo sapien
aggtgcattctgaagatagtaggcagatgccag

SEQ ID NO: 367071 - DNA, 33 bp, Homo sapien
agactccccaatttccagcaacaggtaattaac

SEQ ID NO: 367072 - DNA, 33 bp, Homo sapien
agactccccaatttcccgcaacaggtaattaac

SEQ ID NO: 367073 - DNA, 33 bp, Homo sapien
gttttagctcctactacgaagatattatgtgag

SEQ ID NO: 367074 - DNA, 33 bp, Homo sapien
gttttagctcctactatgaagatattatgtgag

SEQ ID NO: 367075 - DNA, 33 bp, Homo sapien
atacaagcaggtatgacgcaggtttctgtctcc

SEQ ID NO: 367076 - DNA, 33 bp, Homo sapien
atacaagcaggtatgaggcaggtttctgtctcc

SEQ ID NO: 367077 - DNA, 33 bp, Homo sapien
aggactgggaccagaactccatcaaacacactc

SEQ ID NO: 367078 - DNA, 33 bp, Homo sapien
aggactgggaccagaattccatcaaacacactc

SEQ ID NO: 367079 - DNA, 33 bp, Homo sapien
tgcctcttctgagccaatgatttagaaaatagt

SEQ ID NO: 367080 - DNA, 33 bp, Homo sapien
tgcctcttctgagccagtgatttagaaaatagt

SEQ ID NO: 367081 - DNA, 33 bp, Homo sapien
attccagcagtttacacacttaggctggttatt

SEQ ID NO: 367082 - DNA, 33 bp, Homo sapien
attccagcagtttacatacttaggctggttatt

SEQ ID NO: 367083 - DNA, 33 bp, Homo sapien
tggactctttccactccatattctgttctgtca

SEQ ID NO: 367084 - DNA, 33 bp, Homo sapien
tggactctttccactctatattctgttctgtca

SEQ ID NO: 367085 - DNA, 33 bp, Homo sapien
gtttaaagtcctgtccaagagcgagctcctctc

SEQ ID NO: 367086 - DNA, 33 bp, Homo sapien
gtttaaagtcctgtcccagagcgagctcctctc

SEQ ID NO: 367087 - DNA, 33 bp, Homo sapien
cctgtatgattgtaccagattgatgatcaaacg

SEQ ID NO: 367088 - DNA, 33 bp, Homo sapien
cctgtatgattgtacccgattgatgatcaaacg

SEQ ID NO: 367089 - DNA, 33 bp, Homo sapien
ttgcacatttgctaaaacatcccccgtagagtg

SEQ ID NO: 367090 - DNA, 33 bp, Homo sapien
ttgcacatttgctaaagcatcccccgtagagtg

SEQ ID NO: 367091 - DNA, 33 bp, Homo sapien
cctcaccctgaatgcaaagagctgcctactctt

SEQ ID NO: 367092 - DNA, 33 bp, Homo sapien
cctcaccctgaatgcagagagctgcctactctt

SEQ ID NO: 367093 - DNA, 33 bp, Homo sapien
ctgaggaacaccacccaatccgctccatgtgga

SEQ ID NO: 367094 - DNA, 33 bp, Homo sapien
ctgaggaacaccacccgatccgctccatgtgga

SEQ ID NO: 367095 - DNA, 33 bp, Homo sapien
gcggaggcaggagagacggattgtaaagcggta

SEQ ID NO: 367096 - DNA, 33 bp, Homo sapien
gcggaggcaggagagatggattgtaaagcggta

SEQ ID NO: 367097 - DNA, 33 bp, Homo sapien
tggtgggaatgaaaacaagaaacctgggggaaa

SEQ ID NO: 367098 - DNA, 33 bp, Homo sapien
tggtgggaatgaaaactagaaacctgggggaaa

SEQ ID NO: 367099 - DNA, 33 bp, Homo sapien
tgtttggagttgggcagtaatatcacatagagg

SEQ ID NO: 367100 - DNA, 33 bp, Homo sapien
tgtttggagttgggcattaatatcacatagagg

SEQ ID NO: 367101 - DNA, 33 bp, Homo sapien
ccttgaacatctcaacaggaattaggcaaagcc

SEQ ID NO: 367102 - DNA, 33 bp, Homo sapien
ccttgaacatctcaactggaattaggcaaagcc

SEQ ID NO: 367103 - DNA, 33 bp, Homo sapien
caagagaggtgttgccacattgagtgtttatat

SEQ ID NO: 367104 - DNA, 33 bp, Homo sapien
caagagaggtgttgccgcattgagtgtttatat

SEQ ID NO: 367105 - DNA, 33 bp, Homo sapien
cccctggtttttagataagagaaatgagacagt

SEQ ID NO: 367106 - DNA, 33 bp, Homo sapien
cccctggtttttagatgagagaaatgagacagt

SEQ ID NO: 367107 - DNA, 33 bp, Homo sapien
gtctcttcaataaatgcaaaaccatcagcactt

SEQ ID NO: 367108 - DNA, 33 bp, Homo sapien
gtctcttcaataaatggaaaaccatcagcactt

SEQ ID NO: 367109 - DNA, 33 bp, Homo sapien
acacccggctgtgtacccttgtctttaacgcac

SEQ ID NO: 367110 - DNA, 33 bp, Homo sapien
acacccggctgtgtactcttgtctttaacgcac

SEQ ID NO: 367111 - DNA, 33 bp, Homo sapien
taattgtatatgttaacttaaagggacagccag

SEQ ID NO: 367112 - DNA, 33 bp, Homo sapien
taattgtatatgttaatttaaagggacagccag

SEQ ID NO: 367113 - DNA, 33 bp, Homo sapien
agagatcagtataacccaaatgtttgtgtcttt

SEQ ID NO: 367114 - DNA, 33 bp, Homo sapien
agagatcagtataacctaaatgtttgtgtcttt

SEQ ID NO: 367115 - DNA, 33 bp, Homo sapien
tagaagctttcttgcccgagagaccaatatgct

SEQ ID NO: 367116 - DNA, 33 bp, Homo sapien
tagaagctttcttgcctgagagaccaatatgct

SEQ ID NO: 367117 - DNA, 33 bp, Homo sapien
cgattccttccagcaccggagcctgcagccaag

SEQ ID NO: 367118 - DNA, 33 bp, Homo sapien
cgattccttccagcactggagcctgcagccaag

SEQ ID NO: 367119 - DNA, 33 bp, Homo sapien
tagcgtggccacattcccatcgcagagttaggg

SEQ ID NO: 367120 - DNA, 33 bp, Homo sapien
tagcgtggccacattctcatcgcagagttaggg

SEQ ID NO: 367121 - DNA, 33 bp, Homo sapien
ctgtgtgttttaccaaaggtgccttcctgcctc

SEQ ID NO: 367122 - DNA, 33 bp, Homo sapien
ctgtgtgttttaccaatggtgccttcctgcctc

SEQ ID NO: 367123 - DNA, 33 bp, Homo sapien
acgtttggtgactgtccgaattgcagtatctct

SEQ ID NO: 367124 - DNA, 33 bp, Homo sapien
acgtttggtgactgtctgaattgcagtatctct

SEQ ID NO: 367125 - DNA, 33 bp, Homo sapien
gatcttacaaatgtcaaagtgctgaggtgaccc

SEQ ID NO: 367126 - DNA, 33 bp, Homo sapien
gatcttacaaatgtcacagtgctgaggtgaccc

SEQ ID NO: 367127 - DNA, 33 bp, Homo sapien
ccctctttctcatcccaagcatctctcagacct

SEQ ID NO: 367128 - DNA, 33 bp, Homo sapien
ccctctttctcatcccgagcatctctcagacct

SEQ ID NO: 367129 - DNA, 33 bp, Homo sapien
atcatctggggttgcaaaagcggcctcctgatc

SEQ ID NO: 367130 - DNA, 33 bp, Homo sapien
atcatctggggttgcacaagcggcctcctgatc

SEQ ID NO: 367131 - DNA, 33 bp, Homo sapien
agaattgatatccagacgcggtaagggcttttt

SEQ ID NO: 367132 - DNA, 33 bp, Homo sapien
agaattgatatccagatgcggtaagggcttttt

SEQ ID NO: 367133 - DNA, 33 bp, Homo sapien
catgcaggaacttgcaatataaaatgcaaaacc

SEQ ID NO: 367134 - DNA, 33 bp, Homo sapien
catgcaggaacttgcagtataaaatgcaaaacc

SEQ ID NO: 367135 - DNA, 33 bp, Homo sapien
ttccccgtaatacttaccatttaacatgctcta

SEQ ID NO: 367136 - DNA, 33 bp, Homo sapien
ttccccgtaatacttatcatttaacatgctcta

SEQ ID NO: 367137 - DNA, 33 bp, Homo sapien
tattacctttaatatcacagatggtgtacacca

SEQ ID NO: 367138 - DNA, 33 bp, Homo sapien
tattacctttaatatctcagatggtgtacacca

SEQ ID NO: 367139 - DNA, 33 bp, Homo sapien
catagtgaacacccacggtgatattaagagtaa

SEQ ID NO: 367140 - DNA, 33 bp, Homo sapien
catagtgaacacccactgtgatattaagagtaa

SEQ ID NO: 367141 - DNA, 33 bp, Homo sapien
tcccagggtgcagacacatggtgtacactcttt

SEQ ID NO: 367142 - DNA, 33 bp, Homo sapien
tcccagggtgcagacatatggtgtacactcttt

SEQ ID NO: 367143 - DNA, 33 bp, Homo sapien
ggttttaaagagaaagcctgtgattactgttcc

SEQ ID NO: 367144 - DNA, 33 bp, Homo sapien
ggttttaaagagaaaggctgtgattactgttcc

SEQ ID NO: 367145 - DNA, 33 bp, Homo sapien; identical to SEQ ID NO: 367143

SEQ ID NO: 367146 - DNA, 33 bp, Homo sapien; identical to SEQ ID NO: 367144

SEQ ID NO: 367147 - DNA, 33 bp, Homo sapien
aacccatctgcctgccaaaggaacgcattgggg

SEQ ID NO: 367148 - DNA, 33 bp, Homo sapien
aacccatctgcctgccgaaggaacgcattgggg

SEQ ID NO: 367149 - DNA, 33 bp, Homo sapien
gttttcagccaaatgacagcagattggactctt

SEQ ID NO: 367150 - DNA, 33 bp, Homo sapien
gttttcagccaaatgatagcagattggactctt

SEQ ID NO: 367151 - DNA, 33 bp, Homo sapien; identical to SEQ ID NO: 367149

SEQ ID NO: 367152 - DNA, 33 bp, Homo sapien; identical to SEQ ID NO: 367150

SEQ ID NO: 367153 - DNA, 33 bp, Homo sapien
cttacatatacacttgaacacacgtactcttac

SEQ ID NO: 367154 - DNA, 33 bp, Homo sapien
cttacatatacacttgcacacacgtactcttac

SEQ ID NO: 367155 - DNA, 33 bp, Homo sapien
aaactataatgtctgacacgcaaaatattgatc

SEQ ID NO: 367156 - DNA, 33 bp, Homo sapien
aaactataatgtctgagacgcaaaatattgatc

SEQ ID NO: 367157 - DNA, 33 bp, Homo sapien
ctctcaacaaaaaatacgtaatgtcaagtgagc

SEQ ID NO: 367158 - DNA, 33 bp, Homo sapien
ctctcaacaaaaaatatgtaatgtcaagtgagc

SEQ ID NO: 367159 - DNA, 33 bp, Homo sapien
aatcccatagaacgtacgacaccaagagtgagg

SEQ ID NO: 367160 - DNA, 33 bp, Homo sapien
aatcccatagaacgtatgacaccaagagtgagg

SEQ ID NO: 367161 - DNA, 33 bp, Homo sapien
tttagtcattattcaccatcttcagtcagagga

SEQ ID NO: 367162 - DNA, 33 bp, Homo sapien
tttagtcattattcactatcttcagtcagagga

SEQ ID NO: 367163 - DNA, 33 bp, Homo sapien
ctctcagacaatggtacaaataagtgctaggaa

SEQ ID NO: 367164 - DNA, 33 bp, Homo sapien
ctctcagacaatggtagaaataagtgctaggaa

SEQ ID NO: 367165 - DNA, 33 bp, Homo sapien
taaaccaccactgcataaaaaaatacagctgat

SEQ ID NO: 367166 - DNA, 33 bp, Homo sapien
taaaccaccactgcattaaaaaatacagctgat

SEQ ID NO: 367167 - DNA, 33 bp, Homo sapien
gctgaagtttttaacaagaggtttctgcagacc

SEQ ID NO: 367168 - DNA, 33 bp, Homo sapien
gctgaagtttttaacacgaggtttctgcagacc

SEQ ID NO: 367169 - DNA, 33 bp, Homo sapien
aattagctcttgtgaaccacctggaactttgtt

SEQ ID NO: 367170 - DNA, 33 bp, Homo sapien
aattagctcttgtgaagcacctggaactttgtt

SEQ ID NO: 367171 - DNA, 33 bp, Homo sapien
agcaaggtttttatatcacagatgatgccctcc

SEQ ID NO: 367172 - DNA, 33 bp, Homo sapien
agcaaggtttttatattacagatgatgccctcc

SEQ ID NO: 367173 - DNA, 33 bp, Homo sapien
cacagagagctagtaacacaggcgacccgaggc

SEQ ID NO: 367174 - DNA, 33 bp, Homo sapien
cacagagagctagtaagacaggcgacccgaggc

SEQ ID NO: 367175 - DNA, 33 bp, Homo sapien
acaatttgagtaacaacaagagtatgtctgcat

SEQ ID NO: 367176 - DNA, 33 bp, Homo sapien
acaatttgagtaacaataagagtatgtctgcat

SEQ ID NO: 367177 - DNA, 33 bp, Homo sapien
atttttcattgtcacagctgaggggttggaagc

SEQ ID NO: 367178 - DNA, 33 bp, Homo sapien
atttttcattgtcacatctgaggggttggaagc

SEQ ID NO: 367179 - DNA, 33 bp, Homo sapien
tcctggacatgagccccgcttgaaattgttggc

SEQ ID NO: 367180 - DNA, 33 bp, Homo sapien
tcctggacatgagccctgcttgaaattgttggc

SEQ ID NO: 367181 - DNA, 33 bp, Homo sapien
atcactttatctgccactggatacaaaagcagt

SEQ ID NO: 367182 - DNA, 33 bp, Homo sapien
atcactttatctgccattggatacaaaagcagt

SEQ ID NO: 367183 - DNA, 33 bp, Homo sapien
cttcttttctccgtccaccaattcaaatgctaa

SEQ ID NO: 367184 - DNA, 33 bp, Homo sapien
cttcttttctccgtccgccaattcaaatgctaa

SEQ ID NO: 367185 - DNA, 33 bp, Homo sapien
gattatctgggtggaccctaaatgccaacacaa

SEQ ID NO: 367186 - DNA, 33 bp, Homo sapien
gattatctgggtggacgctaaatgccaacacaa

SEQ ID NO: 367187 - DNA, 33 bp, Homo sapien
gtcagattcctttctcagaataggggctcagga

SEQ ID NO: 367188 - DNA, 33 bp, Homo sapien
gtcagattcctttctctgaataggggctcagga

SEQ ID NO: 367189 - DNA, 33 bp, Homo sapien
aagccaataacaaggacgagatgcagtgaaagg

SEQ ID NO: 367190 - DNA, 33 bp, Homo sapien
aagccaataacaaggatgagatgcagtgaaagg

SEQ ID NO: 367191 - DNA, 33 bp, Homo sapien
ttgagactagagaatgacaacaacttttaccaa

SEQ ID NO: 367192 - DNA, 33 bp, Homo sapien
ttgagactagagaatggcaacaacttttaccaa

SEQ ID NO: 367193 - DNA, 33 bp, Homo sapien
ccagctctcttggaaactaatagaacaagaact

SEQ ID NO: 367194 - DNA, 33 bp, Homo sapien
ccagctctcttggaaagtaatagaacaagaact

SEQ ID NO: 367195 - DNA, 33 bp, Homo sapien
tttatgcatgattgtcagaacttggaagcaacc

SEQ ID NO: 367196 - DNA, 33 bp, Homo sapien
tttatgcatgattgtcggaacttggaagcaacc

SEQ ID NO: 367197 - DNA, 33 bp, Homo sapien
ccacatcgccacatcacagttaattcgctttat

SEQ ID NO: 367198 - DNA, 33 bp, Homo sapien
ccacatcgccacatcatagttaattcgctttat

SEQ ID NO: 367199 - DNA, 33 bp, Homo sapien
ttaggatgtgagaaaccagagctgtgacacacc

SEQ ID NO: 367200 - DNA, 33 bp, Homo sapien
ttaggatgtgagaaactagagctgtgacacacc

SEQ ID NO: 367201 - DNA, 33 bp, Homo sapien
taagccccctttacaacaatccatcagcaggtc

SEQ ID NO: 367202 - DNA, 33 bp, Homo sapien
taagccccctttacaataatccatcagcaggtc

SEQ ID NO: 367203 - DNA, 33 bp, Homo sapien
agtattatttagcatcactttggcgggtcaccc

SEQ ID NO: 367204 - DNA, 33 bp, Homo sapien
agtattatttagcatcgctttggcgggtcaccc

SEQ ID NO: 367205 - DNA, 33 bp, Homo sapien
catgcctactcccacaccaaattgccctgaatt

SEQ ID NO: 367206 - DNA, 33 bp, Homo sapien
catgcctactcccacagcaaattgccctgaatt

SEQ ID NO: 367207 - DNA, 33 bp, Homo sapien
ttgcaaaccaagtgtaaatatcccaggagaacg

SEQ ID NO: 367208 - DNA, 33 bp, Homo sapien
ttgcaaaccaagtgtagatatcccaggagaacg

SEQ ID NO: 367209 - DNA, 33 bp, Homo sapien
aaatcaggtgtcgccacaatgttctaactcaga

SEQ ID NO: 367210 - DNA, 33 bp, Homo sapien
aaatcaggtgtcgccagaatgttctaactcaga

SEQ ID NO: 367211 - DNA, 33 bp, Homo sapien
tgtggggtagtacctaacatctactgaatgctt

SEQ ID NO: 367212 - DNA, 33 bp, Homo sapien
tgtggggtagtacctatcatctactgaatgctt

SEQ ID NO: 367213 - DNA, 33 bp, Homo sapien
agtctgggagaaggagaacagatagctttctgg

SEQ ID NO: 367214 - DNA, 33 bp, Homo sapien
agtctgggagaaggaggacagatagctttctgg

SEQ ID NO: 367215 - DNA, 33 bp, Homo sapien
aggcaccatgacatgaagtccgagaaaaaaggt

SEQ ID NO: 367216 - DNA, 33 bp, Homo sapien
aggcaccatgacatgaggtccgagaaaaaaggt

SEQ ID NO: 367217 - DNA, 33 bp, Homo sapien
cacagtggttaaataactagcccaagattgcac

SEQ ID NO: 367218 - DNA, 33 bp, Homo sapien
cacagtggttaaataagtagcccaagattgcac

SEQ ID NO: 367219 - DNA, 33 bp, Homo sapien
atgcagtagcacctcaatagatatctgttgaat

SEQ ID NO: 367220 - DNA, 33 bp, Homo sapien
atgcagtagcacctcagtagatatctgttgaat

SEQ ID NO: 367221 - DNA, 33 bp, Homo sapien
cctaatttccctaagagcagtagctgtttctgt

SEQ ID NO: 367222 - DNA, 33 bp, Homo sapien
cctaatttccctaagatcagtagctgtttctgt

SEQ ID NO: 367223 - DNA, 33 bp, Homo sapien
acttaaacaagagagacgatgagtgaaggaatg

SEQ ID NO: 367224 - DNA, 33 bp, Homo sapien
acttaaacaagagagaggatgagtgaaggaatg

SEQ ID NO: 367225 - DNA, 33 bp, Homo sapien
ttccagctcctcgaagccgtctaggatgagcag

SEQ ID NO: 367226 - DNA, 33 bp, Homo sapien
ttccagctcctcgaaggcgtctaggatgagcag

SEQ ID NO: 367227 - DNA, 33 bp, Homo sapien
ggaatgaccatgttaaccagcaaacgggtccat

SEQ ID NO: 367228 - DNA, 33 bp, Homo sapien
ggaatgaccatgttaagcagcaaacgggtccat

SEQ ID NO: 367229 - DNA, 33 bp, Homo sapien
tcactcattcaacagacgtattgagcacttgaa

SEQ ID NO: 367230 - DNA, 33 bp, Homo sapien
tcactcattcaacagaggtattgagcacttgaa

SEQ ID NO: 367231 - DNA, 33 bp, Homo sapien
ttttctgatccctggccaaattacaattcctgg

SEQ ID NO: 367232 - DNA, 33 bp, Homo sapien
ttttctgatccctggcgaaattacaattcctgg

SEQ ID NO: 367233 - DNA, 33 bp, Homo sapien
acaaccaaggtcttagaatggccaaataattta

SEQ ID NO: 367234 - DNA, 33 bp, Homo sapien
acaaccaaggtcttaggatggccaaataattta

SEQ ID NO: 367235 - DNA, 33 bp, Homo sapien
ggccaaataatttaccagaatttacttagcaat

SEQ ID NO: 367236 - DNA, 33 bp, Homo sapien
ggccaaataatttaccggaatttacttagcaat

SEQ ID NO: 367237 - DNA, 33 bp, Homo sapien
ggctaggaatgaataactgacttgctcagagtt

SEQ ID NO: 367238 - DNA, 33 bp, Homo sapien
ggctaggaatgaataagtgacttgctcagagtt

SEQ ID NO: 367239 - DNA, 33 bp, Homo sapien
ttattcattcctagcccctgttttcttacctgg

SEQ ID NO: 367240 - DNA, 33 bp, Homo sapien
ttattcattcctagccgctgttttcttacctgg

SEQ ID NO: 367241 - DNA, 33 bp, Homo sapien
tggaaggctaaccacgcacgtcagcttttgccg

SEQ ID NO: 367242 - DNA, 33 bp, Homo sapien
tggaaggctaaccacgtacgtcagcttttgccg

SEQ ID NO: 367243 - DNA, 33 bp, Homo sapien
tccctgggggaaggaaccaatatttattgcaca

SEQ ID NO: 367244 - DNA, 33 bp, Homo sapien
tccctgggggaaggaatcaatatttattgcaca

SEQ ID NO: 367245 - DNA, 33 bp, Homo sapien
tctcggctcccacgtcacagatgcagttattgt

SEQ ID NO: 367246 - DNA, 33 bp, Homo sapien
tctcggctcccacgtcgcagatgcagttattgt

SEQ ID NO: 367247 - DNA, 33 bp, Homo sapien
tttccgggcaaggtggaaggtgttgccaagccc

SEQ ID NO: 367248 - DNA, 33 bp, Homo sapien
tttccgggcaaggtgggaggtgttgccaagccc

SEQ ID NO: 367249 - DNA, 33 bp, Homo sapien
aacctacaggaaggcaatagccacagccaagtt

SEQ ID NO: 367250 - DNA, 33 bp, Homo sapien
aacctacaggaaggcactagccacagccaagtt

SEQ ID NO: 367251 - DNA, 33 bp, Homo sapien
ctatcctttccgcaaacttcactgaacatctcg

SEQ ID NO: 367252 - DNA, 33 bp, Homo sapien
ctatcctttccgcaaatttcactgaacatctcg

SEQ ID NO: 367253 - DNA, 33 bp, Homo sapien
aaagaataatcgcagacagtggagaagcactca

SEQ ID NO: 367254 - DNA, 33 bp, Homo sapien
aaagaataatcgcagagagtggagaagcactca

SEQ ID NO: 367255 - DNA, 33 bp, Homo sapien
aatttacatgaggttaagaatgcctaacacaca

SEQ ID NO: 367256 - DNA, 33 bp, Homo sapien
aatttacatgaggttatgaatgcctaacacaca

SEQ ID NO: 367257 - DNA, 33 bp, Homo sapien
caatcttggacttcaacgctccagaacagtgag

SEQ ID NO: 367258 - DNA, 33 bp, Homo sapien
caatcttggacttcaatgctccagaacagtgag

SEQ ID NO: 367259 - DNA, 33 bp, Homo sapien
tgctcttgggtgaagaagaaataaaccattaag

SEQ ID NO: 367260 - DNA, 33 bp, Homo sapien
tgctcttgggtgaagaggaaataaaccattaag

SEQ ID NO: 367261 - DNA, 33 bp, Homo sapien
attccaaaggacaggcaatgggacagcagtgcc

SEQ ID NO: 367262 - DNA, 33 bp, Homo sapien
attccaaaggacaggcgatgggacagcagtgcc

SEQ ID NO: 367263 - DNA, 33 bp, Homo sapien
ttacctgattcaagtacattaacgtggtcatct

SEQ ID NO: 367264 - DNA, 33 bp, Homo sapien
ttacctgattcaagtatattaacgtggtcatct

SEQ ID NO: 367265 - DNA, 33 bp, Homo sapien
catttctatccgtctaactgtatatacttgaaa

SEQ ID NO: 367266 - DNA, 33 bp, Homo sapien
catttctatccgtctacctgtatatacttgaaa

SEQ ID NO: 367267 - DNA, 33 bp, Homo sapien
actaggagaggtaaaaatgtagaaaaaacagac

SEQ ID NO: 367268 - DNA, 33 bp, Homo sapien
actaggagaggtaaaagtgtagaaaaaacagac

SEQ ID NO: 367269 - DNA, 33 bp, Homo sapien
ttagggttataagtcccaaaatgttaatagtgg

SEQ ID NO: 367270 - DNA, 33 bp, Homo sapien
ttagggttataagtcctaaaatgttaatagtgg

SEQ ID NO: 367271 - DNA, 33 bp, Homo sapien
aatgagaaaagattaccgacatcaggaggaaac

SEQ ID NO: 367272 - DNA, 33 bp, Homo sapien
aatgagaaaagattactgacatcaggaggaaac

SEQ ID NO: 367273 - DNA, 33 bp, Homo sapien
cagcgtgctttgaaagaagtctccctccggctc

SEQ ID NO: 367274 - DNA, 33 bp, Homo sapien
cagcgtgctttgaaaggagtctccctccggctc

SEQ ID NO: 367275 - DNA, 33 bp, Homo sapien
gacactggctgtagctcaaccatttagtcaggg

SEQ ID NO: 367276 - DNA, 33 bp, Homo sapien
gacactggctgtagctgaaccatttagtcaggg

SEQ ID NO: 367277 - DNA, 33 bp, Homo sapien
gcagaaggccagcgagcagtaagttgctgggag

SEQ ID NO: 367278 - DNA, 33 bp, Homo sapien
gcagaaggccagcgagtagtaagttgctgggag

SEQ ID NO: 367279 - DNA, 33 bp, Homo sapien
tactgaggttggaggaactttcactttctgctc

SEQ ID NO: 367280 - DNA, 33 bp, Homo sapien
tactgaggttggaggacctttcactttctgctc

SEQ ID NO: 367281 - DNA, 33 bp, Homo sapien
agcttttcaaaggctacacgtgatggtgtaaat

SEQ ID NO: 367282 - DNA, 33 bp, Homo sapien
agcttttcaaaggctatacgtgatggtgtaaat

SEQ ID NO: 367283 - DNA, 33 bp, Homo sapien
gatgaaaatgcaggaacggagtaggcagtaggg

SEQ ID NO: 367284 - DNA, 33 bp, Homo sapien
gatgaaaatgcaggaagggagtaggcagtaggg

SEQ ID NO: 367285 - DNA, 33 bp, Homo sapien
cacattgcacatattcactcatttaattcttgt

SEQ ID NO: 367286 - DNA, 33 bp, Homo sapien
cacattgcacatattcgctcatttaattcttgt

SEQ ID NO: 367287 - DNA, 33 bp, Homo sapien
cacaactgaagtttccagcctctaggagctgag

SEQ ID NO: 367288 - DNA, 33 bp, Homo sapien
cacaactgaagtttcccgcctctaggagctgag

SEQ ID NO: 367289 - DNA, 33 bp, Homo sapien
aattcataaagtagacaataatacaaatgcatg

SEQ ID NO: 367290 - DNA, 33 bp, Homo sapien
aattcataaagtagacgataatacaaatgcatg

SEQ ID NO: 367291 - DNA, 33 bp, Homo sapien
gacagaaaagtcctacaaggaggctgtcagcac

SEQ ID NO: 367292 - DNA, 33 bp, Homo sapien
gacagaaaagtcctacgaggaggctgtcagcac

SEQ ID NO: 367293 - DNA, 33 bp, Homo sapien
ttgctcaagccaaatcacaggagtcatctgact

SEQ ID NO: 367294 - DNA, 33 bp, Homo sapien
ttgctcaagccaaatcgcaggagtcatctgact

SEQ ID NO: 367295 - DNA, 33 bp, Homo sapien
ctggtactcaagggaccgtattttaagagttcc

SEQ ID NO: 367296 - DNA, 33 bp, Homo sapien
ctggtactcaagggactgtattttaagagttcc

SEQ ID NO: 367297 - DNA, 33 bp, Homo sapien
ttgaaagacccacagaagagtttgcataagagc

SEQ ID NO: 367298 - DNA, 33 bp, Homo sapien
ttgaaagacccacagaggagtttgcataagagc

SEQ ID NO: 367299 - DNA, 33 bp, Homo sapien
gaaaccaaactgtaggaaatgacattgcagggg

SEQ ID NO: 367300 - DNA, 33 bp, Homo sapien
gaaaccaaactgtagggaatgacattgcagggg

SEQ ID NO: 367301 - DNA, 33 bp, Homo sapien
gttcaaaccatagcaccaggtatctgggccact

SEQ ID NO: 367302 - DNA, 33 bp, Homo sapien
gttcaaaccatagcacgaggtatctgggccact

SEQ ID NO: 367303 - DNA, 33 bp, Homo sapien
atcagggtttttcttaccacttctatgaacaca

SEQ ID NO: 367304 - DNA, 33 bp, Homo sapien
atcagggtttttcttagcacttctatgaacaca

SEQ ID NO: 367305 - DNA, 33 bp, Homo sapien
aaacagtgccatcatccgagcaatgacctgaat

SEQ ID NO: 367306 - DNA, 33 bp, Homo sapien
aaacagtgccatcatctgagcaatgacctgaat

SEQ ID NO: 367307 - DNA, 33 bp, Homo sapien
ctaaacaaaactagggaacagatttgccaaata

SEQ ID NO: 367308 - DNA, 33 bp, Homo sapien
ctaaacaaaactagggtacagatttgccaaata

SEQ ID NO: 367309 - DNA, 33 bp, Homo sapien
tgaagcggctattactcaggattctccctactg

SEQ ID NO: 367310 - DNA, 33 bp, Homo sapien
tgaagcggctattacttaggattctccctactg

SEQ ID NO: 367311 - DNA, 33 bp, Homo sapien
ctcttcatatctataccgcctggcactgaggag

SEQ ID NO: 367312 - DNA, 33 bp, Homo sapien
ctcttcatatctatactgcctggcactgaggag

SEQ ID NO: 367313 - DNA, 33 bp, Homo sapien
ctgccccatccctgaacgcaccgtggcttgggt

SEQ ID NO: 367314 - DNA, 33 bp, Homo sapien
ctgccccatccctgaatgcaccgtggcttgggt

SEQ ID NO: 367315 - DNA, 33 bp, Homo sapien
ttatttactattggacagcctgactagctcttt

SEQ ID NO: 367316 - DNA, 33 bp, Homo sapien
ttatttactattggacggcctgactagctcttt

SEQ ID NO: 367317 - DNA, 33 bp, Homo sapien
ggccttatttaaactacgtttcagccatggtaa

SEQ ID NO: 367318 - DNA, 33 bp, Homo sapien
ggccttatttaaactatgtttcagccatggtaa

SEQ ID NO: 367319 - DNA, 33 bp, Homo sapien
attacaacagatttgacacaaggtgactggtca

SEQ ID NO: 367320 - DNA, 33 bp, Homo sapien
attacaacagatttgatacaaggtgactggtca

SEQ ID NO: 367321 - DNA, 33 bp, Homo sapien
tcttgaactctctggaaggcgaattcattccat

SEQ ID NO: 367322 - DNA, 33 bp, Homo sapien
tcttgaactctctggagggcgaattcattccat

SEQ ID NO: 367323 - DNA, 33 bp, Homo sapien
cacacgcgtgggctaaaagactgtgaagagtca

SEQ ID NO: 367324 - DNA, 33 bp, Homo sapien
cacacgcgtgggctaagagactgtgaagagtca

SEQ ID NO: 367325 - DNA, 33 bp, Homo sapien
ctctgcatcctcattacacctgatgttatcaga

SEQ ID NO: 367326 - DNA, 33 bp, Homo sapien
ctctgcatcctcattatacctgatgttatcaga

SEQ ID NO: 367327 - DNA, 33 bp, Homo sapien
acgtgaaggatttgcacaggccattcacagatg

SEQ ID NO: 367328 - DNA, 33 bp, Homo sapien
acgtgaaggatttgcataggccattcacagatg

SEQ ID NO: 367329 - DNA, 33 bp, Homo sapien
ctggaaatagccgacacggcatgggttaagtat

SEQ ID NO: 367330 - DNA, 33 bp, Homo sapien
ctggaaatagccgacatggcatgggttaagtat

SEQ ID NO: 367331 - DNA, 33 bp, Homo sapien
ctggaggaattgttcaatcttgttttcccaaca

SEQ ID NO: 367332 - DNA, 33 bp, Homo sapien
ctggaggaattgttcagtcttgttttcccaaca

SEQ ID NO: 367333 - DNA, 33 bp, Homo sapien
ccactttctgacctgccgaaagggaaaatggta

SEQ ID NO: 367334 - DNA, 33 bp, Homo sapien
ccactttctgacctgctgaaagggaaaatggta

SEQ ID NO: 367335 - DNA, 33 bp, Homo sapien
gctttgaagaggccatcagcagcatgaaggaaa

SEQ ID NO: 367336 - DNA, 33 bp, Homo sapien
gctttgaagaggccattagcagcatgaaggaaa

SEQ ID NO: 367337 - DNA, 33 bp, Homo sapien
acctctgctgaggttacagctttctacacttct

SEQ ID NO: 367338 - DNA, 33 bp, Homo sapien
acctctgctgaggttatagctttctacacttct

SEQ ID NO: 367339 - DNA, 33 bp, Homo sapien
acatgtgagtgcttcacgttatcgtagtgtcat

SEQ ID NO: 367340 - DNA, 33 bp, Homo sapien
acatgtgagtgcttcatgttatcgtagtgtcat

SEQ ID NO: 367341 - DNA, 33 bp, Homo sapien
accggacggctggacacgagccttctgctatct

SEQ ID NO: 367342 - DNA, 33 bp, Homo sapien
accggacggctggacatgagccttctgctatct

SEQ ID NO: 367343 - DNA, 33 bp, Homo sapien
gccatctatcttgtgaaccgtttgtatgcaacc

SEQ ID NO: 367344 - DNA, 33 bp, Homo sapien
gccatctatcttgtgagccgtttgtatgcaacc

SEQ ID NO: 367345 - DNA, 33 bp, Homo sapien
gctttgcacttggtaactactctgaggatactg

SEQ ID NO: 367346 - DNA, 33 bp, Homo sapien
gctttgcacttggtaattactctgaggatactg

SEQ ID NO: 367347 - DNA, 33 bp, Homo sapien
ctacttcgcagcccaagtgtgtttgattcatac

SEQ ID NO: 367348 - DNA, 33 bp, Homo sapien
ctacttcgcagcccaattgtgtttgattcatac

SEQ ID NO: 367349 - DNA, 33 bp, Homo sapien
tctctgatgtgttgccactttgatttggggaaa

SEQ ID NO: 367350 - DNA, 33 bp, Homo sapien
tctctgatgtgttgccgctttgatttggggaaa

SEQ ID NO: 367351 - DNA, 33 bp, Homo sapien
ttgccacattgtatcccgaatgctgtgcacagt

SEQ ID NO: 367352 - DNA, 33 bp, Homo sapien
ttgccacattgtatcctgaatgctgtgcacagt

SEQ ID NO: 367353 - DNA, 33 bp, Homo sapien
ctaagttttgctggataaatgttcaagtcctgg

SEQ ID NO: 367354 - DNA, 33 bp, Homo sapien
ctaagttttgctggatcaatgttcaagtcctgg

SEQ ID NO: 367355 - DNA, 33 bp, Homo sapien
acctcctggtttaaaacggtagctcctttcttc

SEQ ID NO: 367356 - DNA, 33 bp, Homo sapien
acctcctggtttaaaatggtagctcctttcttc

SEQ ID NO: 367357 - DNA, 33 bp, Homo sapien
caccaatcttgtggcacgtcaaggagaaaaggg

SEQ ID NO: 367358 - DNA, 33 bp, Homo sapien
caccaatcttgtggcatgtcaaggagaaaaggg

SEQ ID NO: 367359 - DNA, 33 bp, Homo sapien
agggtgactgaccccaaaaaccatgaacaaagg

SEQ ID NO: 367360 - DNA, 33 bp, Homo sapien
agggtgactgaccccacaaaccatgaacaaagg

SEQ ID NO: 367361 - DNA, 33 bp, Homo sapien
agaggagctgaagcctcaaacacagaaggcaca

SEQ ID NO: 367362 - DNA, 33 bp, Homo sapien
agaggagctgaagcctgaaacacagaaggcaca

SEQ ID NO: 367363 - DNA, 33 bp, Homo sapien
cggagattgtggtgaaccaagattggtgacaaa

SEQ ID NO: 367364 - DNA, 33 bp, Homo sapien
cggagattgtggtgaagcaagattggtgacaaa

SEQ ID NO: 367365 - DNA, 33 bp, Homo sapien
gtctgctgaaaccataagaaattgctgattgcc

SEQ ID NO: 367366 - DNA, 33 bp, Homo sapien
gtctgctgaaaccataggaaattgctgattgcc

SEQ ID NO: 367367 - DNA, 33 bp, Homo sapien
cagactgtaaaatcaacacctggcccaaatagc

SEQ ID NO: 367368 - DNA, 33 bp, Homo sapien
cagactgtaaaatcaatacctggcccaaatagc

SEQ ID NO: 367369 - DNA, 33 bp, Homo sapien
agactagggatccagaagactaaggaaggcaaa

SEQ ID NO: 367370 - DNA, 33 bp, Homo sapien
agactagggatccagaggactaaggaaggcaaa

SEQ ID NO: 367371 - DNA, 33 bp, Homo sapien
tcttggacagggctaaacttccaccacattgtc

SEQ ID NO: 367372 - DNA, 33 bp, Homo sapien
tcttggacagggctaaccttccaccacattgtc

SEQ ID NO: 367373 - DNA, 33 bp, Homo sapien
ctccctgtcgtgtcccagaagcctgaccttgac

SEQ ID NO: 367374 - DNA, 33 bp, Homo sapien
ctccctgtcgtgtcccggaagcctgaccttgac

SEQ ID NO: 367375 - DNA, 33 bp, Homo sapien
tgggggaggtgctatacgctggtaaatgaccag

SEQ ID NO: 367376 - DNA, 33 bp, Homo sapien
tgggggaggtgctatatgctggtaaatgaccag

SEQ ID NO: 367377 - DNA, 33 bp, Homo sapien
ggtatttctccctctcactgcttcaagtggcat

SEQ ID NO: 367378 - DNA, 33 bp, Homo sapien
ggtatttctccctctctctgcttcaagtggcat

SEQ ID NO: 367379 - DNA, 33 bp, Homo sapien
ctgtgagtttcattcaaatcgtgtacggcagga

SEQ ID NO: 367380 - DNA, 33 bp, Homo sapien
ctgtgagtttcattcacatcgtgtacggcagga

SEQ ID NO: 367381 - DNA, 33 bp, Homo sapien
taaccaaagcggtgcacggcaatgtgatagggg

SEQ ID NO: 367382 - DNA, 33 bp, Homo sapien
taaccaaagcggtgcatggcaatgtgatagggg

SEQ ID NO: 367383 - DNA, 33 bp, Homo sapien
accggagacagacatcaacagccactaggagat

SEQ ID NO: 367384 - DNA, 33 bp, Homo sapien
accggagacagacatcgacagccactaggagat

SEQ ID NO: 367385 - DNA, 33 bp, Homo sapien
tgtactccctgcacgaaaagatattattttgga

SEQ ID NO: 367386 - DNA, 33 bp, Homo sapien
tgtactccctgcacgacaagatattattttgga

SEQ ID NO: 367387 - DNA, 33 bp, Homo sapien; identical to SEQ ID NO: 367385

SEQ ID NO: 367388 - DNA, 33 bp, Homo sapien; identical to SEQ ID NO: 367386

SEQ ID NO: 367389 - DNA, 33 bp, Homo sapien
tgctttcaggagctgcccaactcaatgagattg

SEQ ID NO: 367390 - DNA, 33 bp, Homo sapien
tgctttcaggagctgctcaactcaatgagattg

SEQ ID NO: 367391 - DNA, 33 bp, Homo sapien
gcattgttacacagcacactaatgtaggggtgt

SEQ ID NO: 367392 - DNA, 33 bp, Homo sapien
gcattgttacacagcagactaatgtaggggtgt

SEQ ID NO: 367393 - DNA, 33 bp, Homo sapien
catgcctggtacaaagaaagttctctaggaaaa

SEQ ID NO: 367394 - DNA, 33 bp, Homo sapien
catgcctggtacaaaggaagttctctaggaaaa

SEQ ID NO: 367395 - DNA, 33 bp, Homo sapien
cttcacagtcctggcaaatagtgacagtgataa

SEQ ID NO: 367396 - DNA, 33 bp, Homo sapien
cttcacagtcctggcagatagtgacagtgataa

SEQ ID NO: 367397 - DNA, 33 bp, Homo sapien
tgtttagagtgggatgcatttggtccaagtcct

SEQ ID NO: 367398 - DNA, 33 bp, Homo sapien
tgtttagagtgggatggatttggtccaagtcct

SEQ ID NO: 367399 - DNA, 33 bp, Homo sapien
ggctcagacaagtgcaaccacctactcaaggtc

SEQ ID NO: 367400 - DNA, 33 bp, Homo sapien
ggctcagacaagtgcagccacctactcaaggtc

SEQ ID NO: 367401 - DNA, 33 bp, Homo sapien
gctccgtgtatttttgaatgaaggcatgtgagg

SEQ ID NO: 367402 - DNA, 33 bp, Homo sapien
gctccgtgtatttttggatgaaggcatgtgagg

SEQ ID NO: 367403 - DNA, 33 bp, Homo sapien
attccggggcagaggccagtttcacgattacac

SEQ ID NO: 367404 - DNA, 33 bp, Homo sapien
attccggggcagaggctagtttcacgattacac

SEQ ID NO: 367405 - DNA, 33 bp, Homo sapien
actactgactacttcaagtaacagctgacttca

SEQ ID NO: 367406 - DNA, 33 bp, Homo sapien
actactgactacttcaggtaacagctgacttca

SEQ ID NO: 367407 - DNA, 33 bp, Homo sapien
ggcgtgattcaaacggaatggcgaggcttcgtt

SEQ ID NO: 367408 - DNA, 33 bp, Homo sapien
ggcgtgattcaaacggtatggcgaggcttcgtt

SEQ ID NO: 367409 - DNA, 33 bp, Homo sapien
ctaagggattctcggcaattagagggacagctg

SEQ ID NO: 367410 - DNA, 33 bp, Homo sapien
ctaagggattctcggcgattagagggacagctg

SEQ ID NO: 367411 - DNA, 33 bp, Homo sapien
agctaatagctactcacgggtcagatgatcaga

SEQ ID NO: 367412 - DNA, 33 bp, Homo sapien
agctaatagctactcatgggtcagatgatcaga

SEQ ID NO: 367413 - DNA, 33 bp, Homo sapien
gaaaatggttagaacaaatcgagtcctaattaa

SEQ ID NO: 367414 - DNA, 33 bp, Homo sapien
gaaaatggttagaacagatcgagtcctaattaa

SEQ ID NO: 367415 - DNA, 33 bp, Homo sapien
caagatctgagtgaaacgagcaaaagtcacctg

SEQ ID NO: 367416 - DNA, 33 bp, Homo sapien
caagatctgagtgaaatgagcaaaagtcacctg

SEQ ID NO: 367417 - DNA, 33 bp, Homo sapien
cagagtgaaagggaacaactaagtaaatggatg

SEQ ID NO: 367418 - DNA, 33 bp, Homo sapien
cagagtgaaagggaacgactaagtaaatggatg

SEQ ID NO: 367419 - DNA, 33 bp, Homo sapien
actttgggctcaagcacctcaaaggatagcatt

SEQ ID NO: 367420 - DNA, 33 bp, Homo sapien
actttgggctcaagcatctcaaaggatagcatt

SEQ ID NO: 367421 - DNA, 33 bp, Homo sapien
caccaactctaatgtacggagaaggcttgggag

SEQ ID NO: 367422 - DNA, 33 bp, Homo sapien
caccaactctaatgtatggagaaggcttgggag

SEQ ID NO: 367423 - DNA, 33 bp, Homo sapien
tctcagtagaggtgtccagtaagtaggcagctg

SEQ ID NO: 367424 - DNA, 33 bp, Homo sapien
tctcagtagaggtgtctagtaagtaggcagctg

SEQ ID NO: 367425 - DNA, 33 bp, Homo sapien
ttgctgctgctgtaacaaagtaccataaacttt

SEQ ID NO: 367426 - DNA, 33 bp, Homo sapien
ttgctgctgctgtaacgaagtaccataaacttt

SEQ ID NO: 367427 - DNA, 33 bp, Homo sapien
cattatggtttttcgcccccaactctgtcaccc

SEQ ID NO: 367428 - DNA, 33 bp, Homo sapien
cattatggtttttcgctcccaactctgtcaccc

SEQ ID NO: 367429 - DNA, 33 bp, Homo sapien
cacactctatgtctcacataataacttgctttg

SEQ ID NO: 367430 - DNA, 33 bp, Homo sapien
cacactctatgtctcatataataacttgctttg

SEQ ID NO: 367431 - DNA, 33 bp, Homo sapien
catcagagcaaacctacaaaacacatctatggg

SEQ ID NO: 367432 - DNA, 33 bp, Homo sapien
catcagagcaaacctagaaaacacatctatggg

SEQ ID NO: 367433 - DNA, 33 bp, Homo sapien
tacagtttaagaacagccaaatctcactgctat

SEQ ID NO: 367434 - DNA, 33 bp, Homo sapien
tacagtttaagaacaggcaaatctcactgctat

SEQ ID NO: 367435 - DNA, 33 bp, Homo sapien
gtttctaatccttacacagaatctacaaggctg

SEQ ID NO: 367436 - DNA, 33 bp, Homo sapien
gtttctaatccttacatagaatctacaaggctg

SEQ ID NO: 367437 - DNA, 33 bp, Homo sapien
aaacatttccgtgggcacctgaagtgtcatagc

SEQ ID NO: 367438 - DNA, 33 bp, Homo sapien
aaacatttccgtgggcgcctgaagtgtcatagc

SEQ ID NO: 367439 - DNA, 33 bp, Homo sapien
gaatttgttaccacaacgttgggaaatgaatat

SEQ ID NO: 367440 - DNA, 33 bp, Homo sapien
gaatttgttaccacaatgttgggaaatgaatat

SEQ ID NO: 367441 - DNA, 33 bp, Homo sapien
attttctctgagattgaaaactttatagatata

SEQ ID NO: 367442 - DNA, 33 bp, Homo sapien
attttctctgagattggaaactttatagatata

SEQ ID NO: 367443 - DNA, 33 bp, Homo sapien
attcacacattgaacactattattattattatt

SEQ ID NO: 367444 - DNA, 33 bp, Homo sapien
attcacacattgaacattattattattattatt

SEQ ID NO: 367445 - DNA, 33 bp, Homo sapien
ctgaacatgatgtccaggtgcttcaccttgttg

SEQ ID NO: 367446 - DNA, 33 bp, Homo sapien
ctgaacatgatgtccatgtgcttcaccttgttg

SEQ ID NO: 367447 - DNA, 33 bp, Homo sapien
ctcttgtccagtaaagcctcctatggaacgtat

SEQ ID NO: 367448 - DNA, 33 bp, Homo sapien
ctcttgtccagtaaaggctcctatggaacgtat

SEQ ID NO: 367449 - DNA, 33 bp, Homo sapien
gactgtttcaagcatactacaaacatgagtccc

SEQ ID NO: 367450 - DNA, 33 bp, Homo sapien
gactgtttcaagcatagtacaaacatgagtccc

SEQ ID NO: 367451 - DNA, 33 bp, Homo sapien
cacaagggattgatcaaagaggttgcctcaggc

SEQ ID NO: 367452 - DNA, 33 bp, Homo sapien
cacaagggattgatcagagaggttgcctcaggc

SEQ ID NO: 367453 - DNA, 33 bp, Homo sapien
acaggaagtagccatgcaactgtgaggtggcag

SEQ ID NO: 367454 - DNA, 33 bp, Homo sapien
acaggaagtagccatgtaactgtgaggtggcag

SEQ ID NO: 367455 - DNA, 33 bp, Homo sapien
aagtttgcttgtcactcagtaggggagggctgg

SEQ ID NO: 367456 - DNA, 33 bp, Homo sapien
aagtttgcttgtcactgagtaggggagggctgg

SEQ ID NO: 367457 - DNA, 33 bp, Homo sapien
gacctcttctcttcacagagcctttgttgagcc

SEQ ID NO: 367458 - DNA, 33 bp, Homo sapien
gacctcttctcttcacggagcctttgttgagcc

SEQ ID NO: 367459 - DNA, 33 bp, Homo sapien
gttttattggaatacactggtaatttacagaat

SEQ ID NO: 367460 - DNA, 33 bp, Homo sapien
gttttattggaatacattggtaatttacagaat

SEQ ID NO: 367461 - DNA, 33 bp, Homo sapien
actttccaatctgcccagctttaaaaagaaaat

SEQ ID NO: 367462 - DNA, 33 bp, Homo sapien
actttccaatctgcccggctttaaaaagaaaat

SEQ ID NO: 367463 - DNA, 33 bp, Homo sapien
cggaagtcgatggtccccactttctcttcctca

SEQ ID NO: 367464 - DNA, 33 bp, Homo sapien
cggaagtcgatggtccgcactttctcttcctca

SEQ ID NO: 367465 - DNA, 33 bp, Homo sapien
acgtttctcgataacacatgcagcatggccttc

SEQ ID NO: 367466 - DNA, 33 bp, Homo sapien
acgtttctcgataacatatgcagcatggccttc

SEQ ID NO: 367467 - DNA, 33 bp, Homo sapien
aacgtacacaaaagcaaatgagatcctaagtgt

SEQ ID NO: 367468 - DNA, 33 bp, Homo sapien
aacgtacacaaaagcagatgagatcctaagtgt

SEQ ID NO: 367469 - DNA, 33 bp, Homo sapien
aattacagagatgaatcaaaattacaatacagg

SEQ ID NO: 367470 - DNA, 33 bp, Homo sapien
aattacagagatgaatgaaaattacaatacagg

SEQ ID NO: 367471 - DNA, 33 bp, Homo sapien
aggtcctaaaagctaacgaagagggtggaaaga

SEQ ID NO: 367472 - DNA, 33 bp, Homo sapien
aggtcctaaaagctaaggaagagggtggaaaga

SEQ ID NO: 367473 - DNA, 33 bp, Homo sapien
tgggcaccaatgacaacgaagcaggcaatgagc

SEQ ID NO: 367474 - DNA, 33 bp, Homo sapien
tgggcaccaatgacaatgaagcaggcaatgagc

SEQ ID NO: 367475 - DNA, 33 bp, Homo sapien
caggacctgtgtgtgacatgagcctgaagcaca

SEQ ID NO: 367476 - DNA, 33 bp, Homo sapien
caggacctgtgtgtgagatgagcctgaagcaca

SEQ ID NO: 367477 - DNA, 33 bp, Homo sapien
ctgccacgacaaggaacgacgtctccaggattg

SEQ ID NO: 367478 - DNA, 33 bp, Homo sapien
ctgccacgacaaggaaggacgtctccaggattg

SEQ ID NO: 367479 - DNA, 33 bp, Homo sapien
ccagggtactctcccaatcccagcgctttcaca

SEQ ID NO: 367480 - DNA, 33 bp, Homo sapien
ccagggtactctcccagtcccagcgctttcaca

SEQ ID NO: 367481 - DNA, 33 bp, Homo sapien
gcccggagtattttcaaaagtgctttctgtaat

SEQ ID NO: 367482 - DNA, 33 bp, Homo sapien
gcccggagtattttcataagtgctttctgtaat

SEQ ID NO: 367483 - DNA, 33 bp, Homo sapien
gatctctgaggagatccaagttggtaatagggc

SEQ ID NO: 367484 - DNA, 33 bp, Homo sapien
gatctctgaggagatctaagttggtaatagggc

SEQ ID NO: 367485 - DNA, 33 bp, Homo sapien
ctcttgccgagcatccaccatgggttcactccc

SEQ ID NO: 367486 - DNA, 33 bp, Homo sapien
ctcttgccgagcatccgccatgggttcactccc

SEQ ID NO: 367487 - DNA, 33 bp, Homo sapien
cattctgcaagggagacggtatttgttcccatt

SEQ ID NO: 367488 - DNA, 33 bp, Homo sapien
cattctgcaagggagatggtatttgttcccatt

SEQ ID NO: 367489 - DNA, 33 bp, Homo sapien
gtgtctttcacatccactccctgcacctagaac

SEQ ID NO: 367490 - DNA, 33 bp, Homo sapien
gtgtctttcacatccagtccctgcacctagaac

SEQ ID NO: 367491 - DNA, 33 bp, Homo sapien
gacacctattttattacgggttgctgcgaaaat

SEQ ID NO: 367492 - DNA, 33 bp, Homo sapien
gacacctattttattatgggttgctgcgaaaat

SEQ ID NO: 367493 - DNA, 33 bp, Homo sapien
ttgtcaaaaatgttcaacctgaatcttatcttc

SEQ ID NO: 367494 - DNA, 33 bp, Homo sapien
ttgtcaaaaatgttcagcctgaatcttatcttc

SEQ ID NO: 367495 - DNA, 33 bp, Homo sapien
aaggagacgctggaccaccctgtgcagagagag

SEQ ID NO: 367496 - DNA, 33 bp, Homo sapien
aaggagacgctggaccgccctgtgcagagagag

SEQ ID NO: 367497 - DNA, 33 bp, Homo sapien
cacccagctgttaggacggtgccgaggggacat

SEQ ID NO: 367498 - DNA, 33 bp, Homo sapien
cacccagctgttaggatggtgccgaggggacat

SEQ ID NO: 367499 - DNA, 33 bp, Homo sapien
ttgaagcctgtcaatacggtaacaactggtgcc

SEQ ID NO: 367500 - DNA, 33 bp, Homo sapien
ttgaagcctgtcaatatggtaacaactggtgcc

SEQ ID NO: 367501 - DNA, 33 bp, Homo sapien
tgtgttcagcccagaacctctctgtgaacccca

SEQ ID NO: 367502 - DNA, 33 bp, Homo sapien
tgtgttcagcccagaagctctctgtgaacccca

SEQ ID NO: 367503 - DNA, 33 bp, Homo sapien
cagacatgagaccagacggagacgcacattcct

SEQ ID NO: 367504 - DNA, 33 bp, Homo sapien
cagacatgagaccagatggagacgcacattcct

SEQ ID NO: 367505 - DNA, 33 bp, Homo sapien
actttggaaggttgaagcagaaagacagcttgg

SEQ ID NO: 367506 - DNA, 33 bp, Homo sapien
actttggaaggttgaatcagaaagacagcttgg

SEQ ID NO: 367507 - DNA, 33 bp, Homo sapien
catggatgtcatcgtgcaatgagtgttcttctg

SEQ ID NO: 367508 - DNA, 33 bp, Homo sapien
catggatgtcatcgtggaatgagtgttcttctg

SEQ ID NO: 367509 - DNA, 33 bp, Homo sapien
agactggaagatgccacgctgttggctttgaag

SEQ ID NO: 367510 - DNA, 33 bp, Homo sapien
agactggaagatgccatgctgttggctttgaag

SEQ ID NO: 367511 - DNA, 33 bp, Homo sapien
ccataacgaatctctgaaatcttagtggtttaa

SEQ ID NO: 367512 - DNA, 33 bp, Homo sapien
ccataacgaatctctgcaatcttagtggtttaa

SEQ ID NO: 367513 - DNA, 33 bp, Homo sapien
actgagtaaatggcaggcgtttagtttcatata

SEQ ID NO: 367514 - DNA, 33 bp, Homo sapien
actgagtaaatggcagtcgtttagtttcatata

SEQ ID NO: 367515 - DNA, 33 bp, Homo sapien
tgcaggagaccttcacagctgataggcgacacc

SEQ ID NO: 367516 - DNA, 33 bp, Homo sapien
tgcaggagaccttcacggctgataggcgacacc

SEQ ID NO: 367517 - DNA, 33 bp, Homo sapien
caaacaaacaaacaaaagtcagtgatgcatggt

SEQ ID NO: 367518 - DNA, 33 bp, Homo sapien
caaacaaacaaacaaacgtcagtgatgcatggt

SEQ ID NO: 367519 - DNA, 33 bp, Homo sapien
cgagtcagcctggaacacagcagtgcagggcga

SEQ ID NO: 367520 - DNA, 33 bp, Homo sapien
cgagtcagcctggaacgcagcagtgcagggcga

SEQ ID NO: 367521 - DNA, 33 bp, Homo sapien
gacccagtacaatggaagaacatagatccatac

SEQ ID NO: 367522 - DNA, 33 bp, Homo sapien
gacccagtacaatggaggaacatagatccatac

SEQ ID NO: 367523 - DNA, 33 bp, Homo sapien
atacgagaataggacaggcccttaacccaatag

SEQ ID NO: 367524 - DNA, 33 bp, Homo sapien
atacgagaataggacatgcccttaacccaatag

SEQ ID NO: 367525 - DNA, 33 bp, Homo sapien
tcttacagtacaacccaaagtccttgtgaaggc

SEQ ID NO: 367526 - DNA, 33 bp, Homo sapien
tcttacagtacaacccgaagtccttgtgaaggc

SEQ ID NO: 367527 - DNA, 33 bp, Homo sapien
ctgccttaacaaagtacgctaactgtgtgtctt

SEQ ID NO: 367528 - DNA, 33 bp, Homo sapien
ctgccttaacaaagtatgctaactgtgtgtctt

SEQ ID NO: 367529 - DNA, 33 bp, Homo sapien
agcctaagatgtagcaactgtaaaatggggctg

SEQ ID NO: 367530 - DNA, 33 bp, Homo sapien
agcctaagatgtagcacctgtaaaatggggctg

SEQ ID NO: 367531 - DNA, 33 bp, Homo sapien
gtgctgctgcgtggaacatgactgagcatgaga

SEQ ID NO: 367532 - DNA, 33 bp, Homo sapien
gtgctgctgcgtggaagatgactgagcatgaga

SEQ ID NO: 367533 - DNA, 33 bp, Homo sapien
tgcaggaaattagaaaaaaaatcagaaagctca

SEQ ID NO: 367534 - DNA, 33 bp, Homo sapien
tgcaggaaattagaaagaaaatcagaaagctca

SEQ ID NO: 367535 - DNA, 33 bp, Homo sapien
ataaacttgaaactataacatacaatacagaaa

SEQ ID NO: 367536 - DNA, 33 bp, Homo sapien
ataaacttgaaactatcacatacaatacagaaa

SEQ ID NO: 367537 - DNA, 33 bp, Homo sapien
ttggcattattattaacgaagtttctcattaaa

SEQ ID NO: 367538 - DNA, 33 bp, Homo sapien
ttggcattattattaaggaagtttctcattaaa

SEQ ID NO: 367539 - DNA, 33 bp, Homo sapien
ccttctcttgttcctaagcaggtagctacagat

SEQ ID NO: 367540 - DNA, 33 bp, Homo sapien
ccttctcttgttcctacgcaggtagctacagat

SEQ ID NO: 367541 - DNA, 33 bp, Homo sapien
ttcagaatcatctctgaaaaaaggcatagacca

SEQ ID NO: 367542 - DNA, 33 bp, Homo sapien
ttcagaatcatctctggaaaaaggcatagacca

SEQ ID NO: 367543 - DNA, 33 bp, Homo sapien
tctgatgtcaccttccaatcaggtatggccatc

SEQ ID NO: 367544 - DNA, 33 bp, Homo sapien
tctgatgtcaccttccgatcaggtatggccatc

SEQ ID NO: 367545 - DNA, 33 bp, Homo sapien
gactgggaattaggcaaggtcagtgaacccctg

SEQ ID NO: 367546 - DNA, 33 bp, Homo sapien
gactgggaattaggcacggtcagtgaacccctg

SEQ ID NO: 367547 - DNA, 33 bp, Homo sapien
cctagagcctcatcaactccccaacaaatgggc

SEQ ID NO: 367548 - DNA, 33 bp, Homo sapien
cctagagcctcatcaattccccaacaaatgggc

SEQ ID NO: 367549 - DNA, 33 bp, Homo sapien
tcagcacgtgtgggtcaccttgatgatctcagg

SEQ ID NO: 367550 - DNA, 33 bp, Homo sapien
tcagcacgtgtgggtcgccttgatgatctcagg

SEQ ID NO: 367551 - DNA, 33 bp, Homo sapien
caaggggacgggatgacgcatcagcatccatcc

SEQ ID NO: 367552 - DNA, 33 bp, Homo sapien
caaggggacgggatgaggcatcagcatccatcc

SEQ ID NO: 367553 - DNA, 33 bp, Homo sapien
agctcctgaacccacactcttaacaagcatcct

SEQ ID NO: 367554 - DNA, 33 bp, Homo sapien
agctcctgaacccacattcttaacaagcatcct

SEQ ID NO: 367555 - DNA, 33 bp, Homo sapien
accagcctgtgggacacccggaagtctactcac

SEQ ID NO: 367556 - DNA, 33 bp, Homo sapien
accagcctgtgggacatccggaagtctactcac

SEQ ID NO: 367557 - DNA, 33 bp, Homo sapien
gagagagatggtttagcatggcacagtccctgg

SEQ ID NO: 367558 - DNA, 33 bp, Homo sapien
gagagagatggtttagtatggcacagtccctgg

SEQ ID NO: 367559 - DNA, 33 bp, Homo sapien
acatcaccttgtcaaaacaataaatcttaatct

SEQ ID NO: 367560 - DNA, 33 bp, Homo sapien
acatcaccttgtcaaagcaataaatcttaatct

SEQ ID NO: 367561 - DNA, 33 bp, Homo sapien
gcctctgagtacctggcattataggtgtgcacc

SEQ ID NO: 367562 - DNA, 33 bp, Homo sapien
gcctctgagtacctgggattataggtgtgcacc

SEQ ID NO: 367563 - DNA, 33 bp, Homo sapien
gctttgcccatgatgaagacttggatatcccac

SEQ ID NO: 367564 - DNA, 33 bp, Homo sapien
gctttgcccatgatgaggacttggatatcccac

SEQ ID NO: 367565 - DNA, 33 bp, Homo sapien
gagataaatggctacacagaaagtggtctatcc

SEQ ID NO: 367566 - DNA, 33 bp, Homo sapien
gagataaatggctacatagaaagtggtctatcc

SEQ ID NO: 367567 - DNA, 33 bp, Homo sapien
ccaggaagataatgacaaatgactgtagatcac

SEQ ID NO: 367568 - DNA, 33 bp, Homo sapien
ccaggaagataatgaccaatgactgtagatcac

SEQ ID NO: 367569 - DNA, 33 bp, Homo sapien
cagatgtgggggaaccaggcaaaaggctcctga

SEQ ID NO: 367570 - DNA, 33 bp, Homo sapien
cagatgtgggggaaccgggcaaaaggctcctga

SEQ ID NO: 367571 - DNA, 33 bp, Homo sapien
ccctgaagaagatccccgcccaaggcctcagat

SEQ ID NO: 367572 - DNA, 33 bp, Homo sapien
ccctgaagaagatccctgcccaaggcctcagat

SEQ ID NO: 367573 - DNA, 33 bp, Homo sapien
tagggaagaaagtaaaatgaaagcatttgattc

SEQ ID NO: 367574 - DNA, 33 bp, Homo sapien
tagggaagaaagtaaagtgaaagcatttgattc

SEQ ID NO: 367575 - DNA, 33 bp, Homo sapien
tccacactgcataacaatggaaggaacaatcat

SEQ ID NO: 367576 - DNA, 33 bp, Homo sapien
tccacactgcataacactggaaggaacaatcat

SEQ ID NO: 367577 - DNA, 33 bp, Homo sapien
gaacataaaatgaggacgccattaagttagaca

SEQ ID NO: 367578 - DNA, 33 bp, Homo sapien
gaacataaaatgaggaggccattaagttagaca

SEQ ID NO: 367579 - DNA, 33 bp, Homo sapien
tggtctatccacacaacggagtatgattcaccc

SEQ ID NO: 367580 - DNA, 33 bp, Homo sapien
tggtctatccacacaatggagtatgattcaccc

SEQ ID NO: 367581 - DNA, 33 bp, Homo sapien
atgctcagcaaaagacaccagatgcaaagatca

SEQ ID NO: 367582 - DNA, 33 bp, Homo sapien
atgctcagcaaaagacgccagatgcaaagatca

SEQ ID NO: 367583 - DNA, 33 bp, Homo sapien
aaaagaaattctgttcaaaagtatttcagacca

SEQ ID NO: 367584 - DNA, 33 bp, Homo sapien
aaaagaaattctgttcgaaagtatttcagacca

SEQ ID NO: 367585 - DNA, 33 bp, Homo sapien
gacgctggtttacataaagcagaatttggaaat

SEQ ID NO: 367586 - DNA, 33 bp, Homo sapien
gacgctggtttacatatagcagaatttggaaat

SEQ ID NO: 367587 - DNA, 33 bp, Homo sapien
aaattttttatctttgaaatcagggaaagatgg

SEQ ID NO: 367588 - DNA, 33 bp, Homo sapien
aaattttttatctttggaatcagggaaagatgg

SEQ ID NO: 367589 - DNA, 33 bp, Homo sapien
ggacaatgtggaggaacgtgccggttgcatgag

SEQ ID NO: 367590 - DNA, 33 bp, Homo sapien
ggacaatgtggaggaatgtgccggttgcatgag

SEQ ID NO: 367591 - DNA, 33 bp, Homo sapien
caaaccctttgataaactctgacagccaatgat

SEQ ID NO: 367592 - DNA, 33 bp, Homo sapien
caaaccctttgataaattctgacagccaatgat

SEQ ID NO: 367593 - DNA, 33 bp, Homo sapien
accagacaatgacctacgtaccttccatatctg

SEQ ID NO: 367594 - DNA, 33 bp, Homo sapien
accagacaatgacctatgtaccttccatatctg

SEQ ID NO: 367595 - DNA, 33 bp, Homo sapien
ggaggaaccgaagaaacggtattcacctcaaag

SEQ ID NO: 367596 - DNA, 33 bp, Homo sapien
ggaggaaccgaagaaagggtattcacctcaaag

SEQ ID NO: 367597 - DNA, 33 bp, Homo sapien
tgttagagctattggaataagcccttcctgctg

SEQ ID NO: 367598 - DNA, 33 bp, Homo sapien
tgttagagctattggagtaagcccttcctgctg

SEQ ID NO: 367599 - DNA, 33 bp, Homo sapien
ggagcctcagtttatccatacccaggctagctc

SEQ ID NO: 367600 - DNA, 33 bp, Homo sapien
ggagcctcagtttatcgatacccaggctagctc

SEQ ID NO: 367601 - DNA, 33 bp, Homo sapien
ccagcaactcttcctccagaaatgtgtgctggc

SEQ ID NO: 367602 - DNA, 33 bp, Homo sapien
ccagcaactcttcctctagaaatgtgtgctggc

SEQ ID NO: 367603 - DNA, 33 bp, Homo sapien
agattagtttttttcaataagcaacttgcattt

SEQ ID NO: 367604 - DNA, 33 bp, Homo sapien
agattagtttttttcagtaagcaacttgcattt

SEQ ID NO: 367605 - DNA, 33 bp, Homo sapien
gggactgtgacaaatcaaagaggaagccttcta

SEQ ID NO: 367606 - DNA, 33 bp, Homo sapien
gggactgtgacaaatcgaagaggaagccttcta

SEQ ID NO: 367607 - DNA, 33 bp, Homo sapien
aggtctacctccatcactagcttcccttctcct

SEQ ID NO: 367608 - DNA, 33 bp, Homo sapien
aggtctacctccatcattagcttcccttctcct

SEQ ID NO: 367609 - DNA, 33 bp, Homo sapien
agaaaaacgatggaataataaagccaacatggg

SEQ ID NO: 367610 - DNA, 33 bp, Homo sapien
agaaaaacgatggaatgataaagccaacatggg

SEQ ID NO: 367611 - DNA, 33 bp, Homo sapien
gagattactaagaaaactgcccaggatcatgaa

SEQ ID NO: 367612 - DNA, 33 bp, Homo sapien
gagattactaagaaaattgcccaggatcatgaa

SEQ ID NO: 367613 - DNA, 33 bp, Homo sapien
actccgtctcaagaaaaattctagcccccgtag

SEQ ID NO: 367614 - DNA, 33 bp, Homo sapien
actccgtctcaagaaagattctagcccccgtag

SEQ ID NO: 367615 - DNA, 33 bp, Homo sapien
ccttgggtcccagttacggatctctgtgggcct

SEQ ID NO: 367616 - DNA, 33 bp, Homo sapien
ccttgggtcccagttatggatctctgtgggcct

SEQ ID NO: 367617 - DNA, 33 bp, Homo sapien
tccaaatagggtcgaaactgctgcgtccttgag

SEQ ID NO: 367618 - DNA, 33 bp, Homo sapien
tccaaatagggtcgaacctgctgcgtccttgag

SEQ ID NO: 367619 - DNA, 33 bp, Homo sapien
atgcgatgacgaagcccgcagaggccatgccag

SEQ ID NO: 367620 - DNA, 33 bp, Homo sapien
atgcgatgacgaagccggcagaggccatgccag

SEQ ID NO: 367621 - DNA, 33 bp, Homo sapien
atggcttcaacctgacaattaaattcagccaag

SEQ ID NO: 367622 - DNA, 33 bp, Homo sapien
atggcttcaacctgaccattaaattcagccaag

SEQ ID NO: 367623 - DNA, 33 bp, Homo sapien
tcctggtactgttttacattcaaagacgcagta

SEQ ID NO: 367624 - DNA, 33 bp, Homo sapien
tcctggtactgttttagattcaaagacgcagta

SEQ ID NO: 367625 - DNA, 33 bp, Homo sapien
tgctaaaaatgaaggacgtaggaaaatgacaga

SEQ ID NO: 367626 - DNA, 33 bp, Homo sapien
tgctaaaaatgaaggatgtaggaaaatgacaga

SEQ ID NO: 367627 - DNA, 33 bp, Homo sapien
ttaaagtctgtaccaaaatctaagaatacaaat

SEQ ID NO: 367628 - DNA, 33 bp, Homo sapien
ttaaagtctgtaccaagatctaagaatacaaat

SEQ ID NO: 367629 - DNA, 33 bp, Homo sapien
tggatctgtgtttcgtgaaaaaaaatatgcatg

SEQ ID NO: 367630 - DNA, 33 bp, Homo sapien
tggatctgtgtttcgttaaaaaaaatatgcatg

SEQ ID NO: 367631 - DNA, 33 bp, Homo sapien
tcttagggacataataaagtcacaaacttacag

SEQ ID NO: 367632 - DNA, 33 bp, Homo sapien
tcttagggacataatagagtcacaaacttacag

SEQ ID NO: 367633 - DNA, 33 bp, Homo sapien
ctacatttgttttttgaagctagctggtcatca

SEQ ID NO: 367634 - DNA, 33 bp, Homo sapien
ctacatttgttttttgcagctagctggtcatca

SEQ ID NO: 367635 - DNA, 33 bp, Homo sapien
ctgaagagcacttcacaatgcatagtttatgca

SEQ ID NO: 367636 - DNA, 33 bp, Homo sapien
ctgaagagcacttcaccatgcatagtttatgca

SEQ ID NO: 367637 - DNA, 33 bp, Homo sapien
tggtttcacaagtgtcacgatgggcttgactag

SEQ ID NO: 367638 - DNA, 33 bp, Homo sapien
tggtttcacaagtgtcgcgatgggcttgactag

SEQ ID NO: 367639 - DNA, 33 bp, Homo sapien
ctaaaaagaaacaggcagacaaaggatcactga

SEQ ID NO: 367640 - DNA, 33 bp, Homo sapien
ctaaaaagaaacaggcggacaaaggatcactga

SEQ ID NO: 367641 - DNA, 33 bp, Homo sapien
gtgatgtgacattaaaatcagaagagttccatg

SEQ ID NO: 367642 - DNA, 33 bp, Homo sapien
gtgatgtgacattaaagtcagaagagttccatg

SEQ ID NO: 367643 - DNA, 33 bp, Homo sapien
tctaaaaatctgactcaaagagttttggagata

SEQ ID NO: 367644 - DNA, 33 bp, Homo sapien
tctaaaaatctgactcgaagagttttggagata

SEQ ID NO: 367645 - DNA, 33 bp, Homo sapien
ggtttgtgtgagtgtacgctatggatgttcaca

SEQ ID NO: 367646 - DNA, 33 bp, Homo sapien
ggtttgtgtgagtgtatgctatggatgttcaca

SEQ ID NO: 367647 - DNA, 33 bp, Homo sapien
tctctctggctgcaagcaagggttaatattgag

SEQ ID NO: 367648 - DNA, 33 bp, Homo sapien
tctctctggctgcaaggaagggttaatattgag

SEQ ID NO: 367649 - DNA, 33 bp, Homo sapien
gtatgtaggtttctacaatttttccatgtcaga

SEQ ID NO: 367650 - DNA, 33 bp, Homo sapien
gtatgtaggtttctaccatttttccatgtcaga

SEQ ID NO: 367651 - DNA, 33 bp, Homo sapien
gccatctcttctggccacttctagtcactttac

SEQ ID NO: 367652 - DNA, 33 bp, Homo sapien
gccatctcttctggcctcttctagtcactttac

SEQ ID NO: 367653 - DNA, 33 bp, Homo sapien
tcagctctttgccacacgccttttgtgtataag

SEQ ID NO: 367654 - DNA, 33 bp, Homo sapien
tcagctctttgccacatgccttttgtgtataag

SEQ ID NO: 367655 - DNA, 33 bp, Homo sapien
aaaacacacagcgttccatgatatggttgtacc

SEQ ID NO: 367656 - DNA, 33 bp, Homo sapien
aaaacacacagcgttctatgatatggttgtacc

SEQ ID NO: 367657 - DNA, 33 bp, Homo sapien
ggaagtagcagagctcaatttcaaaggcagaca

SEQ ID NO: 367658 - DNA, 33 bp, Homo sapien
ggaagtagcagagctcgatttcaaaggcagaca

SEQ ID NO: 367659 - DNA, 33 bp, Homo sapien
tgttgaactgaattgcacaatgggtcttgtcct

SEQ ID NO: 367660 - DNA, 33 bp, Homo sapien
tgttgaactgaattgcgcaatgggtcttgtcct

SEQ ID NO: 367661 - DNA, 33 bp, Homo sapien
tgcaaagtgaacatacacatttaagagagaagt

SEQ ID NO: 367662 - DNA, 33 bp, Homo sapien
tgcaaagtgaacatactcatttaagagagaagt

SEQ ID NO: 367663 - DNA, 33 bp, Homo sapien
acacttgaaggatgaacgatgttaggaagcaga

SEQ ID NO: 367664 - DNA, 33 bp, Homo sapien
acacttgaaggatgaatgatgttaggaagcaga

SEQ ID NO: 367665 - DNA, 33 bp, Homo sapien
ttcatcatattgaccacgttgggtcttgacctc

SEQ ID NO: 367666 - DNA, 33 bp, Homo sapien
ttcatcatattgaccaggttgggtcttgacctc

SEQ ID NO: 367667 - DNA, 33 bp, Homo sapien
tctctactatggtataagatgttctcgtgggcc

SEQ ID NO: 367668 - DNA, 33 bp, Homo sapien
tctctactatggtatatgatgttctcgtgggcc

SEQ ID NO: 367669 - DNA, 33 bp, Homo sapien
gtgtatgcaacacttccgaagccttggaaacat

SEQ ID NO: 367670 - DNA, 33 bp, Homo sapien
gtgtatgcaacacttctgaagccttggaaacat

SEQ ID NO: 367671 - DNA, 33 bp, Homo sapien
agaacaggaaagtaaacacctgtgtcatgttca

SEQ ID NO: 367672 - DNA, 33 bp, Homo sapien
agaacaggaaagtaaatacctgtgtcatgttca

SEQ ID NO: 367673 - DNA, 33 bp, Homo sapien
ctgtttttttggtagcaagagtagcgggcagtg

SEQ ID NO: 367674 - DNA, 33 bp, Homo sapien
ctgtttttttggtagcgagagtagcgggcagtg

SEQ ID NO: 367675 - DNA, 33 bp, Homo sapien
aaccagtgaaaggccaagtacctaaaaaggtgt

SEQ ID NO: 367676 - DNA, 33 bp, Homo sapien
aaccagtgaaaggccacgtacctaaaaaggtgt

SEQ ID NO: 367677 - DNA, 33 bp, Homo sapien
tagcttaatcaggacaagcctggttcagaattt

SEQ ID NO: 367678 - DNA, 33 bp, Homo sapien
tagcttaatcaggacaggcctggttcagaattt

SEQ ID NO: 367679 - DNA, 33 bp, Homo sapien
ttggatggatctaataagctctgtcacataagg

SEQ ID NO: 367680 - DNA, 33 bp, Homo sapien
ttggatggatctaataggctctgtcacataagg

SEQ ID NO: 367681 - DNA, 33 bp, Homo sapien
gagatctctcacgaaacaaacaagatcaaggat

SEQ ID NO: 367682 - DNA, 33 bp, Homo sapien
gagatctctcacgaaagaaacaagatcaaggat

SEQ ID NO: 367683 - DNA, 33 bp, Homo sapien
acagtttgataaggtaagccaacaatgaatata

SEQ ID NO: 367684 - DNA, 33 bp, Homo sapien
acagtttgataaggtaggccaacaatgaatata

SEQ ID NO: 367685 - DNA, 33 bp, Homo sapien
tttatcttctaaaagcccaaattcaggttgcag

SEQ ID NO: 367686 - DNA, 33 bp, Homo sapien
tttatcttctaaaagctcaaattcaggttgcag

SEQ ID NO: 367687 - DNA, 33 bp, Homo sapien
atccatatacatttaaagagctgatgaatgagg

SEQ ID NO: 367688 - DNA, 33 bp, Homo sapien
atccatatacatttaaggagctgatgaatgagg

SEQ ID NO: 367689 - DNA, 33 bp, Homo sapien
gggttacctagagagaatcacgggaagtagatg

SEQ ID NO: 367690 - DNA, 33 bp, Homo sapien
gggttacctagagagagtcacgggaagtagatg

SEQ ID NO: 367691 - DNA, 33 bp, Homo sapien
gtaaaatcattgcccgaaaaggatcaatacctg

SEQ ID NO: 367692 - DNA, 33 bp, Homo sapien
gtaaaatcattgcccggaaaggatcaatacctg

SEQ ID NO: 367693 - DNA, 33 bp, Homo sapien
gtactgttttgttttgaaaagctgttacagtta

SEQ ID NO: 367694 - DNA, 33 bp, Homo sapien
gtactgttttgttttggaaagctgttacagtta

SEQ ID NO: 367695 - DNA, 33 bp, Homo sapien
attattttttagagaccggatcttactttgtca

SEQ ID NO: 367696 - DNA, 33 bp, Homo sapien
attattttttagagacgggatcttactttgtca

SEQ ID NO: 367697 - DNA, 33 bp, Homo sapien
gactggccactagatacagacccctccccctgc

SEQ ID NO: 367698 - DNA, 33 bp, Homo sapien
gactggccactagatagagacccctccccctgc

SEQ ID NO: 367699 - DNA, 33 bp, Homo sapien
aacagggaccagaagcaaccatgagaacatgag

SEQ ID NO: 367700 - DNA, 33 bp, Homo sapien
aacagggaccagaagcgaccatgagaacatgag

SEQ ID NO: 367701 - DNA, 33 bp, Homo sapien
agtgctgcattgaaaaacctaattcattctgta

SEQ ID NO: 367702 - DNA, 33 bp, Homo sapien
agtgctgcattgaaaaccctaattcattctgta

SEQ ID NO: 367703 - DNA, 33 bp, Homo sapien
cagatcttcacctccccagatcctgcaataatt

SEQ ID NO: 367704 - DNA, 33 bp, Homo sapien
cagatcttcacctcccgagatcctgcaataatt

SEQ ID NO: 367705 - DNA, 33 bp, Homo sapien
atgaatagatgtgatgccacagtaaactacatt

SEQ ID NO: 367706 - DNA, 33 bp, Homo sapien
atgaatagatgtgatgtcacagtaaactacatt

SEQ ID NO: 367707 - DNA, 33 bp, Homo sapien
tatagagacgtccagaggtttgtcaaaaatgca

SEQ ID NO: 367708 - DNA, 33 bp, Homo sapien
tatagagacgtccagatgtttgtcaaaaatgca

SEQ ID NO: 367709 - DNA, 33 bp, Homo sapien
cacatatctttggggcactataaaatccagcag

SEQ ID NO: 367710 - DNA, 33 bp, Homo sapien
cacatatctttggggcgctataaaatccagcag

SEQ ID NO: 367711 - DNA, 33 bp, Homo sapien
tgttagtaatacctcaataaagatgttatgagc

SEQ ID NO: 367712 - DNA, 33 bp, Homo sapien
tgttagtaatacctcagtaaagatgttatgagc

SEQ ID NO: 367713 - DNA, 33 bp, Homo sapien
ttcccccaggagctgaagtaggttggtgtaagt

SEQ ID NO: 367714 - DNA, 33 bp, Homo sapien
ttcccccaggagctgaggtaggttggtgtaagt

SEQ ID NO: 367715 - DNA, 33 bp, Homo sapien
tacaaagaccggcagacgggtcccactatgttg

SEQ ID NO: 367716 - DNA, 33 bp, Homo sapien
tacaaagaccggcagatgggtcccactatgttg

SEQ ID NO: 367717 - DNA, 33 bp, Homo sapien
aagaaaagattgagacggatataggctgcagta

SEQ ID NO: 367718 - DNA, 33 bp, Homo sapien
aagaaaagattgagactgatataggctgcagta

SEQ ID NO: 367719 - DNA, 33 bp, Homo sapien
tatgcattttgcataactgcattgtatctccgt

SEQ ID NO: 367720 - DNA, 33 bp, Homo sapien
tatgcattttgcataattgcattgtatctccgt

SEQ ID NO: 367721 - DNA, 33 bp, Homo sapien
cgccctgactttggggaagaacgattgtccatt

SEQ ID NO: 367722 - DNA, 33 bp, Homo sapien
cgccctgactttgggggagaacgattgtccatt

SEQ ID NO: 367723 - DNA, 33 bp, Homo sapien
tagacagaagcctcacaaactctctcccatcac

SEQ ID NO: 367724 - DNA, 33 bp, Homo sapien
tagacagaagcctcacgaactctctcccatcac

SEQ ID NO: 367725 - DNA, 33 bp, Homo sapien
ctttggaatattttgccctctagaaataatggc

SEQ ID NO: 367726 - DNA, 33 bp, Homo sapien
ctttggaatattttgctctctagaaataatggc

SEQ ID NO: 367727 - DNA, 33 bp, Homo sapien
cacattgaaacaaaccgctttgctgggcagata

SEQ ID NO: 367728 - DNA, 33 bp, Homo sapien
cacattgaaacaaacctctttgctgggcagata

SEQ ID NO: 367729 - DNA, 33 bp, Homo sapien
ccccatatcatcacgaaaaacatcctttattct

SEQ ID NO: 367730 - DNA, 33 bp, Homo sapien
ccccatatcatcacgacaaacatcctttattct

SEQ ID NO: 367731 - DNA, 33 bp, Homo sapien
aaggtctccgcaaatacgatgggcaaaatatgg

SEQ ID NO: 367732 - DNA, 33 bp, Homo sapien
aaggtctccgcaaatatgatgggcaaaatatgg

SEQ ID NO: 367733 - DNA, 33 bp, Homo sapien
tgatctgtcttgcaaaattctgctaggattatt

SEQ ID NO: 367734 - DNA, 33 bp, Homo sapien
tgatctgtcttgcaaacttctgctaggattatt

SEQ ID NO: 367735 - DNA, 33 bp, Homo sapien
cagttggttgaaaccacagatgcggaactcacg

SEQ ID NO: 367736 - DNA, 33 bp, Homo sapien
cagttggttgaaaccatagatgcggaactcacg

SEQ ID NO: 367737 - DNA, 33 bp, Homo sapien
caggccatctgctccacgttccgaaatgacagc

SEQ ID NO: 367738 - DNA, 33 bp, Homo sapien
caggccatctgctccatgttccgaaatgacagc

SEQ ID NO: 367739 - DNA, 33 bp, Homo sapien
aattgattcatgagacagagcctgtgaacacac

SEQ ID NO: 367740 - DNA, 33 bp, Homo sapien
aattgattcatgagacggagcctgtgaacacac

SEQ ID NO: 367741 - DNA, 33 bp, Homo sapien
ggatataatctcctcacgcgctgtttcctaagc

SEQ ID NO: 367742 - DNA, 33 bp, Homo sapien
ggatataatctcctcatgcgctgtttcctaagc

SEQ ID NO: 367743 - DNA, 33 bp, Homo sapien
tgcttggtggcagaaccgaaatggacaccaaag

SEQ ID NO: 367744 - DNA, 33 bp, Homo sapien
tgcttggtggcagaactgaaatggacaccaaag

SEQ ID NO: 367745 - DNA, 33 bp, Homo sapien
agacagaagaagaaaacggtaatagcagcaagg

SEQ ID NO: 367746 - DNA, 33 bp, Homo sapien
agacagaagaagaaaatggtaatagcagcaagg

SEQ ID NO: 367747 - DNA, 33 bp, Homo sapien
acatctccttaaccaccggaacttcaagaagag

SEQ ID NO: 367748 - DNA, 33 bp, Homo sapien
acatctccttaaccactggaacttcaagaagag

SEQ ID NO: 367749 - DNA, 33 bp, Homo sapien
tcctaaccacagaccacgtttctaccaagtatc

SEQ ID NO: 367750 - DNA, 33 bp, Homo sapien
tcctaaccacagaccatgtttctaccaagtatc

SEQ ID NO: 367751 - DNA, 33 bp, Homo sapien
cccaagcaaataccccagacacccagacagacc

SEQ ID NO: 367752 - DNA, 33 bp, Homo sapien
cccaagcaaataccccggacacccagacagacc

SEQ ID NO: 367753 - DNA, 33 bp, Homo sapien
ggctggtgacaatgaaacgtgtctccttaggta

SEQ ID NO: 367754 - DNA, 33 bp, Homo sapien
ggctggtgacaatgaatcgtgtctccttaggta

SEQ ID NO: 367755 - DNA, 33 bp, Homo sapien
taccacctgagctatcaaagggtgttatatgct

SEQ ID NO: 367756 - DNA, 33 bp, Homo sapien
taccacctgagctatcgaagggtgttatatgct

SEQ ID NO: 367757 - DNA, 33 bp, Homo sapien
cagggatccacactccacgaatcaaaagggcac

SEQ ID NO: 367758 - DNA, 33 bp, Homo sapien
cagggatccacactccccgaatcaaaagggcac

SEQ ID NO: 367759 - DNA, 33 bp, Homo sapien
gtacattaggacacccagatgaagaagaaaata

SEQ ID NO: 367760 - DNA, 33 bp, Homo sapien
gtacattaggacacccggatgaagaagaaaata

SEQ ID NO: 367761 - DNA, 33 bp, Homo sapien
agatctaaaaccataaaaattctggaagaaaac

SEQ ID NO: 367762 - DNA, 33 bp, Homo sapien
agatctaaaaccataacaattctggaagaaaac

SEQ ID NO: 367763 - DNA, 33 bp, Homo sapien
tatttatgagtatttcacatgcaattaatcttc

SEQ ID NO: 367764 - DNA, 33 bp, Homo sapien
tatttatgagtatttcgcatgcaattaatcttc

SEQ ID NO: 367765 - DNA, 33 bp, Homo sapien
ggatggattcatccacaaatgcagctgagcaag

SEQ ID NO: 367766 - DNA, 33 bp, Homo sapien
ggatggattcatccacgaatgcagctgagcaag

SEQ ID NO: 367767 - DNA, 33 bp, Homo sapien
tgtcaatttcaaccaacggaaactgatctaaga

SEQ ID NO: 367768 - DNA, 33 bp, Homo sapien
tgtcaatttcaaccaatggaaactgatctaaga

SEQ ID NO: 367769 - DNA, 33 bp, Homo sapien
ggagatagcaatgaaaaggcccacacccttgat

SEQ ID NO: 367770 - DNA, 33 bp, Homo sapien
ggagatagcaatgaaacggcccacacccttgat

SEQ ID NO: 367771 - DNA, 33 bp, Homo sapien
tttatagcgaatataaactacttatacaagtaa

SEQ ID NO: 367772 - DNA, 33 bp, Homo sapien
tttatagcgaatataacctacttatacaagtaa

SEQ ID NO: 367773 - DNA, 33 bp, Homo sapien
tttctagcacagttgcaccagaccaatatgtac

SEQ ID NO: 367774 - DNA, 33 bp, Homo sapien
tttctagcacagttgcgccagaccaatatgtac

SEQ ID NO: 367775 - DNA, 33 bp, Homo sapien
taggaagctagttacagctgagcaacagcaggc

SEQ ID NO: 367776 - DNA, 33 bp, Homo sapien
taggaagctagttacatctgagcaacagcaggc

SEQ ID NO: 367777 - DNA, 33 bp, Homo sapien
agctgcaatgcaaatcaaggtggaaaccaccaa

SEQ ID NO: 367778 - DNA, 33 bp, Homo sapien
agctgcaatgcaaatcgaggtggaaaccaccaa

SEQ ID NO: 367779 - DNA, 33 bp, Homo sapien
atgtcactgaacatgaagcctgggtcttaaata

SEQ ID NO: 367780 - DNA, 33 bp, Homo sapien
atgtcactgaacatgaggcctgggtcttaaata

SEQ ID NO: 367781 - DNA, 33 bp, Homo sapien
gagcaaaccagagttccctgaattcgtactggt

SEQ ID NO: 367782 - DNA, 33 bp, Homo sapien
gagcaaaccagagttcgctgaattcgtactggt

SEQ ID NO: 367783 - DNA, 33 bp, Homo sapien
ctctggctctggagaaagtcctgagggcagcac

SEQ ID NO: 367784 - DNA, 33 bp, Homo sapien
ctctggctctggagaaggtcctgagggcagcac

SEQ ID NO: 367785 - DNA, 33 bp, Homo sapien
ccggttttaattgtcacagatgtgggcacccag

SEQ ID NO: 367786 - DNA, 33 bp, Homo sapien
ccggttttaattgtcatagatgtgggcacccag

SEQ ID NO: 367787 - DNA, 33 bp, Homo sapien
cagtagtcctgcttgaacattctcacatatttt

SEQ ID NO: 367788 - DNA, 33 bp, Homo sapien
cagtagtcctgcttgagcattctcacatatttt

SEQ ID NO: 367789 - DNA, 33 bp, Homo sapien
ggctgtgggccaaaaggacagcgtggcatgatg

SEQ ID NO: 367790 - DNA, 33 bp, Homo sapien
ggctgtgggccaaaagtacagcgtggcatgatg

SEQ ID NO: 367791 - DNA, 33 bp, Homo sapien
tcgtccatcctagtaccatgcgtcattttcttt

SEQ ID NO: 367792 - DNA, 33 bp, Homo sapien
tcgtccatcctagtactatgcgtcattttcttt

SEQ ID NO: 367793 - DNA, 33 bp, Homo sapien
gttcagccagcaaagccaagacttcatcatagc

SEQ ID NO: 367794 - DNA, 33 bp, Homo sapien
gttcagccagcaaagctaagacttcatcatagc

SEQ ID NO: 367795 - DNA, 33 bp, Homo sapien
caaaggagctaatgccactgcagagttggccaa

SEQ ID NO: 367796 - DNA, 33 bp, Homo sapien
caaaggagctaatgccgctgcagagttggccaa

SEQ ID NO: 367797 - DNA, 33 bp, Homo sapien
cagaggaggtaagtcacgttcctggcaagtgac

SEQ ID NO: 367798 - DNA, 33 bp, Homo sapien
cagaggaggtaagtcatgttcctggcaagtgac

SEQ ID NO: 367799 - DNA, 33 bp, Homo sapien
tcacacaaaaattaaaacattgtgaagggtgta

SEQ ID NO: 367800 - DNA, 33 bp, Homo sapien
tcacacaaaaattaaagcattgtgaagggtgta

SEQ ID NO: 367801 - DNA, 33 bp, Homo sapien
gtacactgggtgacaacagaacatgaggacaaa

SEQ ID NO: 367802 - DNA, 33 bp, Homo sapien
gtacactgggtgacaatagaacatgaggacaaa

SEQ ID NO: 367803 - DNA, 33 bp, Homo sapien
gaagactgcctcaaacaagacatctttgcctct

SEQ ID NO: 367804 - DNA, 33 bp, Homo sapien
gaagactgcctcaaacgagacatctttgcctct

SEQ ID NO: 367805 - DNA, 33 bp, Homo sapien
taaacagcagagtgacaggatttatgaggttcc

SEQ ID NO: 367806 - DNA, 33 bp, Homo sapien
taaacagcagagtgacgggatttatgaggttcc

SEQ ID NO: 367807 - DNA, 33 bp, Homo sapien
aaattctgaggctaaaactggattcaagaagaa

SEQ ID NO: 367808 - DNA, 33 bp, Homo sapien
aaattctgaggctaaatctggattcaagaagaa

SEQ ID NO: 367809 - DNA, 33 bp, Homo sapien
cctgtggtgcttgctacgagcagtaagcagagt

SEQ ID NO: 367810 - DNA, 33 bp, Homo sapien
cctgtggtgcttgctatgagcagtaagcagagt

SEQ ID NO: 367811 - DNA, 33 bp, Homo sapien
cacagaataacccataatagcaaaaagcaaatg

SEQ ID NO: 367812 - DNA, 33 bp, Homo sapien
cacagaataacccatagtagcaaaaagcaaatg

SEQ ID NO: 367813 - DNA, 33 bp, Homo sapien
tgaactatgatcgtccagctgcgctccagcctg

SEQ ID NO: 367814 - DNA, 33 bp, Homo sapien
tgaactatgatcgtccggctgcgctccagcctg

SEQ ID NO: 367815 - DNA, 33 bp, Homo sapien
ccttaaaatatcgatcaatctcaatctgtctac

SEQ ID NO: 367816 - DNA, 33 bp, Homo sapien
ccttaaaatatcgatcgatctcaatctgtctac

SEQ ID NO: 367817 - DNA, 33 bp, Homo sapien
gtacccagatatttcacccaacaccagtctaaa

SEQ ID NO: 367818 - DNA, 33 bp, Homo sapien
gtacccagatatttcatccaacaccagtctaaa

SEQ ID NO: 367819 - DNA, 33 bp, Homo sapien
gacacactaccacctggaggtttcaaagtattg

SEQ ID NO: 367820 - DNA, 33 bp, Homo sapien
gacacactaccacctgtaggtttcaaagtattg

SEQ ID NO: 367821 - DNA, 33 bp, Homo sapien
ccccaggatataaggacacagcttactacaatc

SEQ ID NO: 367822 - DNA, 33 bp, Homo sapien
ccccaggatataaggagacagcttactacaatc

SEQ ID NO: 367823 - DNA, 33 bp, Homo sapien
gtgtatgcggctaagccaagaaaaagagtggtt

SEQ ID NO: 367824 - DNA, 33 bp, Homo sapien
gtgtatgcggctaagcgaagaaaaagagtggtt

SEQ ID NO: 367825 - DNA, 33 bp, Homo sapien
ttcatctccctgatgtcaaatggccagttggac

SEQ ID NO: 367826 - DNA, 33 bp, Homo sapien
ttcatctccctgatgtgaaatggccagttggac

SEQ ID NO: 367827 - DNA, 33 bp, Homo sapien
cacatagggagtcttcaatcagtggtagcctgt

SEQ ID NO: 367828 - DNA, 33 bp, Homo sapien
cacatagggagtcttctatcagtggtagcctgt

SEQ ID NO: 367829 - DNA, 33 bp, Homo sapien
agaggaatggcagggcagcagaacaaaagtggc

SEQ ID NO: 367830 - DNA, 33 bp, Homo sapien
agaggaatggcagggcggcagaacaaaagtggc

SEQ ID NO: 367831 - DNA, 33 bp, Homo sapien
attccgctgtaagaacaaccaatttcagagcat

SEQ ID NO: 367832 - DNA, 33 bp, Homo sapien
attccgctgtaagaacgaccaatttcagagcat

SEQ ID NO: 367833 - DNA, 33 bp, Homo sapien
taagagggaacatcctaaaagacaagcccacgt

SEQ ID NO: 367834 - DNA, 33 bp, Homo sapien
taagagggaacatcctgaaagacaagcccacgt

SEQ ID NO: 367835 - DNA, 33 bp, Homo sapien
actgccctggtctcctcaccactgtcacaggtt

SEQ ID NO: 367836 - DNA, 33 bp, Homo sapien
actgccctggtctccttaccactgtcacaggtt

SEQ ID NO: 367837 - DNA, 33 bp, Homo sapien
tcatgggttctgagaaactagatggagtctttg

SEQ ID NO: 367838 - DNA, 33 bp, Homo sapien
tcatgggttctgagaagctagatggagtctttg

SEQ ID NO: 367839 - DNA, 33 bp, Homo sapien
aatcacacctttctcgcaggttaacatcagagg

SEQ ID NO: 367840 - DNA, 33 bp, Homo sapien
aatcacacctttctcgtaggttaacatcagagg

SEQ ID NO: 367841 - DNA, 33 bp, Homo sapien
gggaaattactgtgcaacctgcccttaagaaga

SEQ ID NO: 367842 - DNA, 33 bp, Homo sapien
gggaaattactgtgcagcctgcccttaagaaga

SEQ ID NO: 367843 - DNA, 33 bp, Homo sapien
cttgcaactgaaatccacaataggggcagtcct

SEQ ID NO: 367844 - DNA, 33 bp, Homo sapien
cttgcaactgaaatccgcaataggggcagtcct

SEQ ID NO: 367845 - DNA, 33 bp, Homo sapien
atatcccactcagacaacgtggttcttggtctt

SEQ ID NO: 367846 - DNA, 33 bp, Homo sapien
atatcccactcagacagcgtggttcttggtctt

SEQ ID NO: 367847 - DNA, 33 bp, Homo sapien
ttcagagctgagaaaacggagggctggatttta

SEQ ID NO: 367848 - DNA, 33 bp, Homo sapien
ttcagagctgagaaaatggagggctggatttta

SEQ ID NO: 367849 - DNA, 33 bp, Homo sapien
ctaccaacagtgaggacgccccatgtggctaaa

SEQ ID NO: 367850 - DNA, 33 bp, Homo sapien
ctaccaacagtgaggaggccccatgtggctaaa

SEQ ID NO: 367851 - DNA, 33 bp, Homo sapien
acccttcctcttccacaatgagaaataagtaat

SEQ ID NO: 367852 - DNA, 33 bp, Homo sapien
acccttcctcttccacgatgagaaataagtaat

SEQ ID NO: 367853 - DNA, 33 bp, Homo sapien
aaccaaaatgatgatacgactgtgccagaggat

SEQ ID NO: 367854 - DNA, 33 bp, Homo sapien
aaccaaaatgatgatatgactgtgccagaggat

SEQ ID NO: 367855 - DNA, 33 bp, Homo sapien
ggtagatgactgataaataacttgacagacctg

SEQ ID NO: 367856 - DNA, 33 bp, Homo sapien
ggtagatgactgataagtaacttgacagacctg

SEQ ID NO: 367857 - DNA, 33 bp, Homo sapien
aactcgcaagctcctacgaaagaaagctcatcg

SEQ ID NO: 367858 - DNA, 33 bp, Homo sapien
aactcgcaagctcctatgaaagaaagctcatcg

SEQ ID NO: 367859 - DNA, 33 bp, Homo sapien
ctttgcccttctgacacggaaagaaactatatc

SEQ ID NO: 367860 - DNA, 33 bp, Homo sapien
ctttgcccttctgacatggaaagaaactatatc

SEQ ID NO: 367861 - DNA, 33 bp, Homo sapien
tttgttttgggaatgacacataagaacccagct

SEQ ID NO: 367862 - DNA, 33 bp, Homo sapien
tttgttttgggaatgagacataagaacccagct

SEQ ID NO: 367863 - DNA, 33 bp, Homo sapien
cttgatggacgcgagtaaaagagatgtagtcct

SEQ ID NO: 367864 - DNA, 33 bp, Homo sapien
cttgatggacgcgagtgaaagagatgtagtcct

SEQ ID NO: 367865 - DNA, 33 bp, Homo sapien
gacacattcacgacaccgtactaggaggattag

SEQ ID NO: 367866 - DNA, 33 bp, Homo sapien
gacacattcacgacactgtactaggaggattag

SEQ ID NO: 367867 - DNA, 33 bp, Homo sapien
ctaataacagctaccaaaaatgatgtcaaccca

SEQ ID NO: 367868 - DNA, 33 bp, Homo sapien
ctaataacagctaccagaaatgatgtcaaccca

SEQ ID NO: 367869 - DNA, 33 bp, Homo sapien
gtcaagtgtgcccagaaaagtgaagggacctgc

SEQ ID NO: 367870 - DNA, 33 bp, Homo sapien
gtcaagtgtgcccagagaagtgaagggacctgc

SEQ ID NO: 367871 - DNA, 33 bp, Homo sapien
cttgtccactctttgacggcagagactgacttg

SEQ ID NO: 367872 - DNA, 33 bp, Homo sapien
cttgtccactctttgagggcagagactgacttg

SEQ ID NO: 367873 - DNA, 33 bp, Homo sapien
ctgcatagttgacatacggtgtttaccgctgca

SEQ ID NO: 367874 - DNA, 33 bp, Homo sapien
ctgcatagttgacatatggtgtttaccgctgca

SEQ ID NO: 367875 - DNA, 33 bp, Homo sapien
cctgtgaccattctaaaacaaccagttctacct

SEQ ID NO: 367876 - DNA, 33 bp, Homo sapien
cctgtgaccattctaagacaaccagttctacct

SEQ ID NO: 367877 - DNA, 33 bp, Homo sapien
gttattggattcaaaactgatcatacagtggtg

SEQ ID NO: 367878 - DNA, 33 bp, Homo sapien
gttattggattcaaaattgatcatacagtggtg

SEQ ID NO: 367879 - DNA, 33 bp, Homo sapien
gcatttaattaacaccggacatcagcttcacag

SEQ ID NO: 367880 - DNA, 33 bp, Homo sapien
gcatttaattaacacctgacatcagcttcacag

SEQ ID NO: 367881 - DNA, 33 bp, Homo sapien
atcacgtgaaccacgacaggtgctttgatgttt

SEQ ID NO: 367882 - DNA, 33 bp, Homo sapien
atcacgtgaaccacgataggtgctttgatgttt

SEQ ID NO: 367883 - DNA, 33 bp, Homo sapien
gggttcttgagcgtcaaaagcacctgcccatgg

SEQ ID NO: 367884 - DNA, 33 bp, Homo sapien
gggttcttgagcgtcagaagcacctgcccatgg

SEQ ID NO: 367885 - DNA, 33 bp, Homo sapien
ctctgttggctgagtacagtagctcatgcttgt

SEQ ID NO: 367886 - DNA, 33 bp, Homo sapien
ctctgttggctgagtatagtagctcatgcttgt

SEQ ID NO: 367887 - DNA, 33 bp, Homo sapien
tgcccagtttctgcttcaacacctccactcaca

SEQ ID NO: 367888 - DNA, 33 bp, Homo sapien
tgcccagtttctgcttgaacacctccactcaca

SEQ ID NO: 367889 - DNA, 33 bp, Homo sapien
actctccactggaggacctcagaccttcaagaa

SEQ ID NO: 367890 - DNA, 33 bp, Homo sapien
actctccactggaggatctcagaccttcaagaa

SEQ ID NO: 367891 - DNA, 33 bp, Homo sapien
ggctttcacagacaaactcattagaaagtactg

SEQ ID NO: 367892 - DNA, 33 bp, Homo sapien
ggctttcacagacaaattcattagaaagtactg

SEQ ID NO: 367893 - DNA, 33 bp, Homo sapien
atgacctggcagctacagagtcactagcccaca

SEQ ID NO: 367894 - DNA, 33 bp, Homo sapien
atgacctggcagctacggagtcactagcccaca

SEQ ID NO: 367895 - DNA, 33 bp, Homo sapien
tctggttccaatcccacggcctttagtgttagc

SEQ ID NO: 367896 - DNA, 33 bp, Homo sapien
tctggttccaatcccatggcctttagtgttagc

SEQ ID NO: 367897 - DNA, 33 bp, Homo sapien
tagtgttagctttgcccaggactaaacctccgt

SEQ ID NO: 367898 - DNA, 33 bp, Homo sapien
tagtgttagctttgcctaggactaaacctccgt

SEQ ID NO: 367899 - DNA, 33 bp, Homo sapien
ctgagcatgtattggacgccagacccaacccta

SEQ ID NO: 367900 - DNA, 33 bp, Homo sapien
ctgagcatgtattggatgccagacccaacccta

SEQ ID NO: 367901 - DNA, 33 bp, Homo sapien
acacccattgtgtggcgccaagtaaaccacctc

SEQ ID NO: 367902 - DNA, 33 bp, Homo sapien
acacccattgtgtggctccaagtaaaccacctc

SEQ ID NO: 367903 - DNA, 33 bp, Homo sapien
aaagagaaggaaaaaactctgtacacgttcagt

SEQ ID NO: 367904 - DNA, 33 bp, Homo sapien
aaagagaaggaaaaaagtctgtacacgttcagt

SEQ ID NO: 367905 - DNA, 33 bp, Homo sapien
attacctgccaaatcacaaaaggattacaaatt

SEQ ID NO: 367906 - DNA, 33 bp, Homo sapien
attacctgccaaatcagaaaaggattacaaatt

SEQ ID NO: 367907 - DNA, 33 bp, Homo sapien
agccatttggagttaaacttgtattttgagctc

SEQ ID NO: 367908 - DNA, 33 bp, Homo sapien
agccatttggagttaagcttgtattttgagctc

SEQ ID NO: 367909 - DNA, 33 bp, Homo sapien
aaacatgatctgataccatcctatttggaccat

SEQ ID NO: 367910 - DNA, 33 bp, Homo sapien
aaacatgatctgatactatcctatttggaccat

SEQ ID NO: 367911 - DNA, 33 bp, Homo sapien
agacacattgagcttacgggtggattgcatggt

SEQ ID NO: 367912 - DNA, 33 bp, Homo sapien
agacacattgagcttatgggtggattgcatggt

SEQ ID NO: 367913 - DNA, 33 bp, Homo sapien
ttcctgacacctgtcaccaaaacatctgtaggc

SEQ ID NO: 367914 - DNA, 33 bp, Homo sapien
ttcctgacacctgtcagcaaaacatctgtaggc

SEQ ID NO: 367915 - DNA, 33 bp, Homo sapien
ctacaatcagacaataggggtcaatttctttat

SEQ ID NO: 367916 - DNA, 33 bp, Homo sapien
ctacaatcagacaatatgggtcaatttctttat

SEQ ID NO: 367917 - DNA, 33 bp, Homo sapien
ataccctttttatccaatcacgttgttaatctt

SEQ ID NO: 367918 - DNA, 33 bp, Homo sapien
ataccctttttatccagtcacgttgttaatctt

SEQ ID NO: 367919 - DNA, 33 bp, Homo sapien
cttctgactcactagcaataaaatgcggatctc

SEQ ID NO: 367920 - DNA, 33 bp, Homo sapien
cttctgactcactagcgataaaatgcggatctc

SEQ ID NO: 367921 - DNA, 33 bp, Homo sapien
ggaaaggatctgatgacgagagctgcctctgtg

SEQ ID NO: 367922 - DNA, 33 bp, Homo sapien
ggaaaggatctgatgatgagagctgcctctgtg

SEQ ID NO: 367923 - DNA, 33 bp, Homo sapien
gggaggaagcctaatccagtgtggtcagggatc

SEQ ID NO: 367924 - DNA, 33 bp, Homo sapien
gggaggaagcctaatcgagtgtggtcagggatc

SEQ ID NO: 367925 - DNA, 33 bp, Homo sapien
gaatttcatctgaaccaggtgcacagatatgga

SEQ ID NO: 367926 - DNA, 33 bp, Homo sapien
gaatttcatctgaaccgggtgcacagatatgga

SEQ ID NO: 367927 - DNA, 33 bp, Homo sapien
ctcccactttcaagaacttcattatctcatgga

SEQ ID NO: 367928 - DNA, 33 bp, Homo sapien
ctcccactttcaagaatttcattatctcatgga

SEQ ID NO: 367929 - DNA, 33 bp, Homo sapien
gcaggagaatctcttcaatgggacctgggcacc

SEQ ID NO: 367930 - DNA, 33 bp, Homo sapien
gcaggagaatctcttcgatgggacctgggcacc

SEQ ID NO: 367931 - DNA, 33 bp, Homo sapien
acacttaggatttaatcacatttggctttcatc

SEQ ID NO: 367932 - DNA, 33 bp, Homo sapien
acacttaggatttaatgacatttggctttcatc

SEQ ID NO: 367933 - DNA, 33 bp, Homo sapien
gacatttggcagtgacagcatttaccatctcac

SEQ ID NO: 367934 - DNA, 33 bp, Homo sapien
gacatttggcagtgacggcatttaccatctcac

SEQ ID NO: 367935 - DNA, 33 bp, Homo sapien
tctgttcaggacattacgggattcttactgcag

SEQ ID NO: 367936 - DNA, 33 bp, Homo sapien
tctgttcaggacattatgggattcttactgcag

SEQ ID NO: 367937 - DNA, 33 bp, Homo sapien
ggtttatggccgtgtcacaccaatctctgcctt

SEQ ID NO: 367938 - DNA, 33 bp, Homo sapien
ggtttatggccgtgtcgcaccaatctctgcctt

SEQ ID NO: 367939 - DNA, 33 bp, Homo sapien
acacctgggttgatccgctagtgacaccagcct

SEQ ID NO: 367940 - DNA, 33 bp, Homo sapien
acacctgggttgatcctctagtgacaccagcct

SEQ ID NO: 367941 - DNA, 33 bp, Homo sapien
tttcccccgtcggagcacagaccaaagccgtgc

SEQ ID NO: 367942 - DNA, 33 bp, Homo sapien
tttcccccgtcggagcgcagaccaaagccgtgc

SEQ ID NO: 367943 - DNA, 33 bp, Homo sapien
cacagccttaactgtccaatgaattgtgctgac

SEQ ID NO: 367944 - DNA, 33 bp, Homo sapien
cacagccttaactgtctaatgaattgtgctgac

SEQ ID NO: 367945 - DNA, 33 bp, Homo sapien
tgtacagagagtagaaagataattcagtcgttc

SEQ ID NO: 367946 - DNA, 33 bp, Homo sapien
tgtacagagagtagaaggataattcagtcgttc

SEQ ID NO: 367947 - DNA, 33 bp, Homo sapien
agcgtcagaggagagacgatgatctattcctat

SEQ ID NO: 367948 - DNA, 33 bp, Homo sapien
agcgtcagaggagagaggatgatctattcctat

SEQ ID NO: 367949 - DNA, 33 bp, Homo sapien
agaaaccaaggtttacagaagccaagtgacttc

SEQ ID NO: 367950 - DNA, 33 bp, Homo sapien
agaaaccaaggtttacggaagccaagtgacttc

SEQ ID NO: 367951 - DNA, 33 bp, Homo sapien
caatagctccagagtacacatatacagatgcac

SEQ ID NO: 367952 - DNA, 33 bp, Homo sapien
caatagctccagagtagacatatacagatgcac

SEQ ID NO: 367953 - DNA, 33 bp, Homo sapien
catgtaattttggagcgataaaggcctaattag

SEQ ID NO: 367954 - DNA, 33 bp, Homo sapien
catgtaattttggagctataaaggcctaattag

SEQ ID NO: 367955 - DNA, 33 bp, Homo sapien
atgtgatagcttccaaattctaaatgtcagcca

SEQ ID NO: 367956 - DNA, 33 bp, Homo sapien
atgtgatagcttccaacttctaaatgtcagcca

SEQ ID NO: 367957 - DNA, 33 bp, Homo sapien
atttttgattgggttcaattctatttggcacct

SEQ ID NO: 367958 - DNA, 33 bp, Homo sapien
atttttgattgggttcgattctatttggcacct

SEQ ID NO: 367959 - DNA, 33 bp, Homo sapien
agggattccgctttcaagttcagtgtcctttct

SEQ ID NO: 367960 - DNA, 33 bp, Homo sapien
agggattccgctttcaggttcagtgtcctttct

SEQ ID NO: 367961 - DNA, 33 bp, Homo sapien
tcctgaaagctatgaaatgagacggaccttagc

SEQ ID NO: 367962 - DNA, 33 bp, Homo sapien
tcctgaaagctatgaattgagacggaccttagc

SEQ ID NO: 367963 - DNA, 33 bp, Homo sapien
tcaagggaaatcttaacaaaaccagacagtggc

SEQ ID NO: 367964 - DNA, 33 bp, Homo sapien
tcaagggaaatcttaagaaaaccagacagtggc

SEQ ID NO: 367965 - DNA, 33 bp, Homo sapien
ccagatctgtgctgtccagaacaggagccatca

SEQ ID NO: 367966 - DNA, 33 bp, Homo sapien
ccagatctgtgctgtcgagaacaggagccatca

SEQ ID NO: 367967 - DNA, 33 bp, Homo sapien
gtgtaatagctcattcaatccttgtagccatcc

SEQ ID NO: 367968 - DNA, 33 bp, Homo sapien
gtgtaatagctcattcgatccttgtagccatcc

SEQ ID NO: 367969 - DNA, 33 bp, Homo sapien
agatttttccacaatacaagtagtgggggctct

SEQ ID NO: 367970 - DNA, 33 bp, Homo sapien
agatttttccacaatagaagtagtgggggctct

SEQ ID NO: 367971 - DNA, 33 bp, Homo sapien
ctatcttaagagaggaagaaaaggaagagctga

SEQ ID NO: 367972 - DNA, 33 bp, Homo sapien
ctatcttaagagaggatgaaaaggaagagctga

SEQ ID NO: 367973 - DNA, 33 bp, Homo sapien
caagtcaagtggttatcagatcacaaaggtaac

SEQ ID NO: 367974 - DNA, 33 bp, Homo sapien
caagtcaagtggttatgagatcacaaaggtaac

SEQ ID NO: 367975 - DNA, 33 bp, Homo sapien
aacagtgcctaccccacaggttgctgtaagaat

SEQ ID NO: 367976 - DNA, 33 bp, Homo sapien
aacagtgcctaccccataggttgctgtaagaat

SEQ ID NO: 367977 - DNA, 33 bp, Homo sapien
cactgggtagctctccagatgggttacttctgg

SEQ ID NO: 367978 - DNA, 33 bp, Homo sapien
cactgggtagctctccggatgggttacttctgg

SEQ ID NO: 367979 - DNA, 33 bp, Homo sapien
accgaccacagattacaaatactcaaaaaagtg

SEQ ID NO: 367980 - DNA, 33 bp, Homo sapien
accgaccacagattaccaatactcaaaaaagtg

SEQ ID NO: 367981 - DNA, 33 bp, Homo sapien
ccagggccgtactgtcagacacatgcatctgcc

SEQ ID NO: 367982 - DNA, 33 bp, Homo sapien
ccagggccgtactgtcggacacatgcatctgcc

SEQ ID NO: 367983 - DNA, 33 bp, Homo sapien
gccacacaaaacaaacgaactcaggggcatgat

SEQ ID NO: 367984 - DNA, 33 bp, Homo sapien
gccacacaaaacaaactaactcaggggcatgat

SEQ ID NO: 367985 - DNA, 33 bp, Homo sapien
caccagccctcacatgaactaacagaacaagaa

SEQ ID NO: 367986 - DNA, 33 bp, Homo sapien
caccagccctcacatggactaacagaacaagaa

SEQ ID NO: 367987 - DNA, 33 bp, Homo sapien
ggtcctccgcatttacacattcgccaattaccg

SEQ ID NO: 367988 - DNA, 33 bp, Homo sapien
ggtcctccgcatttacgcattcgccaattaccg

SEQ ID NO: 367989 - DNA, 33 bp, Homo sapien
gccctgactccacaccagaaaatcaggacccac

SEQ ID NO: 367990 - DNA, 33 bp, Homo sapien
gccctgactccacaccggaaaatcaggacccac

SEQ ID NO: 367991 - DNA, 33 bp, Homo sapien
agagccaggaaaatacaacttggcatctgggga

SEQ ID NO: 367992 - DNA, 33 bp, Homo sapien
agagccaggaaaataccacttggcatctgggga

SEQ ID NO: 367993 - DNA, 33 bp, Homo sapien
acttttaaagccagtccaaactctgccggatgg

SEQ ID NO: 367994 - DNA, 33 bp, Homo sapien
acttttaaagccagtcgaaactctgccggatgg

SEQ ID NO: 367995 - DNA, 33 bp, Homo sapien
agtatagcccctagcacgtggtaagcactcaat

SEQ ID NO: 367996 - DNA, 33 bp, Homo sapien
agtatagcccctagcatgtggtaagcactcaat

SEQ ID NO: 367997 - DNA, 33 bp, Homo sapien; identical to SEQ ID NO: 367995

SEQ ID NO: 367998 - DNA, 33 bp, Homo sapien; identical to SEQ ID NO: 367996

SEQ ID NO: 367999 - DNA, 33 bp, Homo sapien
tattaaccaattcaagcctcgggacaacgctag

SEQ ID NO: 368000 - DNA, 33 bp, Homo sapien
tattaaccaattcaaggctcgggacaacgctag

SEQ ID NO: 368001 - DNA, 33 bp, Homo sapien
agtctttctccaagacaacaagctgtcctgatc

SEQ ID NO: 368002 - DNA, 33 bp, Homo sapien
agtctttctccaagactacaagctgtcctgatc

SEQ ID NO: 368003 - DNA, 33 bp, Homo sapien
agagctggatgcaaggaagtttgatgcacctga

SEQ ID NO: 368004 - DNA, 33 bp, Homo sapien
agagctggatgcaaggcagtttgatgcacctga

SEQ ID NO: 368005 - DNA, 33 bp, Homo sapien
tgtgtgctggacagagactatgattcgggcctc

SEQ ID NO: 368006 - DNA, 33 bp, Homo sapien
tgtgtgctggacagagcctatgattcgggcctc

SEQ ID NO: 368007 - DNA, 33 bp, Homo sapien
gcaaggcatgtaccacacagatgaggtataagc

SEQ ID NO: 368008 - DNA, 33 bp, Homo sapien
gcaaggcatgtaccacgcagatgaggtataagc

SEQ ID NO: 368009 - DNA, 33 bp, Homo sapien
tacattcagggcaggtcaagtcacattgtgtgt

SEQ ID NO: 368010 - DNA, 33 bp, Homo sapien
tacattcagggcaggtgaagtcacattgtgtgt

SEQ ID NO: 368011 - DNA, 33 bp, Homo sapien
cggctgcctttgtgtacatgaacttccctatta

SEQ ID NO: 368012 - DNA, 33 bp, Homo sapien
cggctgcctttgtgtatatgaacttccctatta

SEQ ID NO: 368013 - DNA, 33 bp, Homo sapien
ccctatgtagctgtgcaccttcacactgccgtt

SEQ ID NO: 368014 - DNA, 33 bp, Homo sapien
ccctatgtagctgtgcgccttcacactgccgtt

SEQ ID NO: 368015 - DNA, 33 bp, Homo sapien
gaggctaagtctttggaagaggaggagaattaa

SEQ ID NO: 368016 - DNA, 33 bp, Homo sapien
gaggctaagtctttgggagaggaggagaattaa

SEQ ID NO: 368017 - DNA, 33 bp, Homo sapien
agaatgcctaaccgtccgaaaatgcagcccagt

SEQ ID NO: 368018 - DNA, 33 bp, Homo sapien
agaatgcctaaccgtctgaaaatgcagcccagt

SEQ ID NO: 368019 - DNA, 33 bp, Homo sapien
gagatccacagcccaactaatagcagagatgca

SEQ ID NO: 368020 - DNA, 33 bp, Homo sapien
gagatccacagcccaattaatagcagagatgca

SEQ ID NO: 368021 - DNA, 33 bp, Homo sapien
aacgaaagaattgccactgagacctgccagagg

SEQ ID NO: 368022 - DNA, 33 bp, Homo sapien
aacgaaagaattgccattgagacctgccagagg

SEQ ID NO: 368023 - DNA, 33 bp, Homo sapien
gtggtgatgataagtacgataaacccatgcctg

SEQ ID NO: 368024 - DNA, 33 bp, Homo sapien
gtggtgatgataagtatgataaacccatgcctg

SEQ ID NO: 368025 - DNA, 33 bp, Homo sapien
ccctcagtggagggcaactgttgctcacttgtc

SEQ ID NO: 368026 - DNA, 33 bp, Homo sapien
ccctcagtggagggcacctgttgctcacttgtc

SEQ ID NO: 368027 - DNA, 33 bp, Homo sapien
caaaaatgttgctagtaacggctcctcctgctg

SEQ ID NO: 368028 - DNA, 33 bp, Homo sapien
caaaaatgttgctagtgacggctcctcctgctg

SEQ ID NO: 368029 - DNA, 33 bp, Homo sapien
cccaggctggttactgccactcgcgttaattgt

SEQ ID NO: 368030 - DNA, 33 bp, Homo sapien
cccaggctggttactggcactcgcgttaattgt

SEQ ID NO: 368031 - DNA, 33 bp, Homo sapien
cttgggatctccaggcactgtgataggctccgg

SEQ ID NO: 368032 - DNA, 33 bp, Homo sapien
cttgggatctccaggcgctgtgataggctccgg

SEQ ID NO: 368033 - DNA, 33 bp, Homo sapien
cgctcctgtgccaatacctccgagagacctctc

SEQ ID NO: 368034 - DNA, 33 bp, Homo sapien
cgctcctgtgccaatagctccgagagacctctc

SEQ ID NO: 368035 - DNA, 33 bp, Homo sapien
catcccagatgaagacaggagacatcaggagac

SEQ ID NO: 368036 - DNA, 33 bp, Homo sapien
catcccagatgaagacgggagacatcaggagac

SEQ ID NO: 368037 - DNA, 33 bp, Homo sapien
tcaaacactgctgagaaccactccaatgtcacc

SEQ ID NO: 368038 - DNA, 33 bp, Homo sapien
tcaaacactgctgagagccactccaatgtcacc

SEQ ID NO: 368039 - DNA, 33 bp, Homo sapien
ctccaaagtcacaacaaagtcttcttctccaaa

SEQ ID NO: 368040 - DNA, 33 bp, Homo sapien
ctccaaagtcacaacacagtcttcttctccaaa

SEQ ID NO: 368041 - DNA, 33 bp, Homo sapien
tattctcattcgctcaatctgccagccctggct

SEQ ID NO: 368042 - DNA, 33 bp, Homo sapien
tattctcattcgctcagtctgccagccctggct

SEQ ID NO: 368043 - DNA, 33 bp, Homo sapien
agattcatgtcacaccgacaggctcgcattaac

SEQ ID NO: 368044 - DNA, 33 bp, Homo sapien
agattcatgtcacacctacaggctcgcattaac

SEQ ID NO: 368045 - DNA, 33 bp, Homo sapien
gtccataaatcgaaccctgtgttctgttctgcg

SEQ ID NO: 368046 - DNA, 33 bp, Homo sapien
gtccataaatcgaaccttgtgttctgttctgcg

SEQ ID NO: 368047 - DNA, 33 bp, Homo sapien
ttggctctccagaagacgagatgagatgggtgc

SEQ ID NO: 368048 - DNA, 33 bp, Homo sapien
ttggctctccagaagatgagatgagatgggtgc

SEQ ID NO: 368049 - DNA, 33 bp, Homo sapien
tcgctgtggattcctccaaactgtgattgctac

SEQ ID NO: 368050 - DNA, 33 bp, Homo sapien
tcgctgtggattcctcgaaactgtgattgctac

SEQ ID NO: 368051 - DNA, 33 bp, Homo sapien
gaaagggtccattggaataatcgtcgggctaga

SEQ ID NO: 368052 - DNA, 33 bp, Homo sapien
gaaagggtccattggagtaatcgtcgggctaga

SEQ ID NO: 368053 - DNA, 33 bp, Homo sapien
tgtgtcagttcagggaaattggtcacaggttat

SEQ ID NO: 368054 - DNA, 33 bp, Homo sapien
tgtgtcagttcagggacattggtcacaggttat

SEQ ID NO: 368055 - DNA, 33 bp, Homo sapien
tgaatttaacaggtgacaataccagacttcttt

SEQ ID NO: 368056 - DNA, 33 bp, Homo sapien
tgaatttaacaggtgagaataccagacttcttt

SEQ ID NO: 368057 - DNA, 33 bp, Homo sapien
gagaaattactaatgcagcaggaaacaagccgt

SEQ ID NO: 368058 - DNA, 33 bp, Homo sapien
gagaaattactaatgccgcaggaaacaagccgt

SEQ ID NO: 368059 - DNA, 33 bp, Homo sapien
accatccatgaatccacaatggggcccagaaag

SEQ ID NO: 368060 - DNA, 33 bp, Homo sapien
accatccatgaatccagaatggggcccagaaag

SEQ ID NO: 368061 - DNA, 33 bp, Homo sapien
acttggccctatcccagaatacacagtgatgtc

SEQ ID NO: 368062 - DNA, 33 bp, Homo sapien
acttggccctatcccataatacacagtgatgtc

SEQ ID NO: 368063 - DNA, 33 bp, Homo sapien
cactagctctattcaaaattgccaacaactgga

SEQ ID NO: 368064 - DNA, 33 bp, Homo sapien
cactagctctattcaagattgccaacaactgga

SEQ ID NO: 368065 - DNA, 33 bp, Homo sapien
tgtagttgttcatcagcctcccttttcaagctg

SEQ ID NO: 368066 - DNA, 33 bp, Homo sapien
tgtagttgttcatcaggctcccttttcaagctg

SEQ ID NO: 368067 - DNA, 33 bp, Homo sapien
ttaggagctggctgaacgaagatgcgatggacc

SEQ ID NO: 368068 - DNA, 33 bp, Homo sapien
ttaggagctggctgaaggaagatgcgatggacc

SEQ ID NO: 368069 - DNA, 33 bp, Homo sapien
acgcaggtcagtatcaagcactggctggcacag

SEQ ID NO: 368070 - DNA, 33 bp, Homo sapien
acgcaggtcagtatcaggcactggctggcacag

SEQ ID NO: 368071 - DNA, 33 bp, Homo sapien
ctggatctaaaccatccataagatacgcagctg

SEQ ID NO: 368072 - DNA, 33 bp, Homo sapien
ctggatctaaaccatctataagatacgcagctg

SEQ ID NO: 368073 - DNA, 33 bp, Homo sapien
aactcaggactttacactctcagtacggcatcc

SEQ ID NO: 368074 - DNA, 33 bp, Homo sapien
aactcaggactttacagtctcagtacggcatcc

SEQ ID NO: 368075 - DNA, 33 bp, Homo sapien
agccgaccccaatcataaaatcggcctcttcag

SEQ ID NO: 368076 - DNA, 33 bp, Homo sapien
agccgaccccaatcatgaaatcggcctcttcag

SEQ ID NO: 368077 - DNA, 33 bp, Homo sapien
attatcaatagatcaagctggcatttatgttcc

SEQ ID NO: 368078 - DNA, 33 bp, Homo sapien
attatcaatagatcaatctggcatttatgttcc

SEQ ID NO: 368079 - DNA, 33 bp, Homo sapien
attaccaagaagagtgaataaatcttccttttt

SEQ ID NO: 368080 - DNA, 33 bp, Homo sapien
attaccaagaagagtggataaatcttccttttt

SEQ ID NO: 368081 - DNA, 33 bp, Homo sapien
gtctaattttctcctaccttcttagttttctag

SEQ ID NO: 368082 - DNA, 33 bp, Homo sapien
gtctaattttctcctatcttcttagttttctag

SEQ ID NO: 368083 - DNA, 33 bp, Homo sapien
ttctcccaggggccaactcttcaaggctgcagg

SEQ ID NO: 368084 - DNA, 33 bp, Homo sapien
ttctcccaggggccaagtcttcaaggctgcagg

SEQ ID NO: 368085 - DNA, 33 bp, Homo sapien
cctggctaccgaacagaatgggctcaagaatgc

SEQ ID NO: 368086 - DNA, 33 bp, Homo sapien
cctggctaccgaacaggatgggctcaagaatgc

SEQ ID NO: 368087 - DNA, 33 bp, Homo sapien
gtccgttgtaacagcacaaaaagcttgtggagt

SEQ ID NO: 368088 - DNA, 33 bp, Homo sapien
gtccgttgtaacagcataaaaagcttgtggagt

SEQ ID NO: 368089 - DNA, 33 bp, Homo sapien
cactgtaacagggagccgaacactatgatgcct

SEQ ID NO: 368090 - DNA, 33 bp, Homo sapien
cactgtaacagggagctgaacactatgatgcct

SEQ ID NO: 368091 - DNA, 33 bp, Homo sapien
ctatgtccccaagaaacgacactgtaacaggga

SEQ ID NO: 368092 - DNA, 33 bp, Homo sapien
ctatgtccccaagaaatgacactgtaacaggga

SEQ ID NO: 368093 - DNA, 33 bp, Homo sapien
tgcttgctgtcttacacgtgtattggcttatta

SEQ ID NO: 368094 - DNA, 33 bp, Homo sapien
tgcttgctgtcttacaggtgtattggcttatta

SEQ ID NO: 368095 - DNA, 33 bp, Homo sapien
ccctgggaaacgccctaacaaggcaggcagaga

SEQ ID NO: 368096 - DNA, 33 bp, Homo sapien
ccctgggaaacgccctgacaaggcaggcagaga

SEQ ID NO: 368097 - DNA, 33 bp, Homo sapien
gcttaaaccatttgaacgatgagcatatataga

SEQ ID NO: 368098 - DNA, 33 bp, Homo sapien
gcttaaaccatttgaatgatgagcatatataga

SEQ ID NO: 368099 - DNA, 33 bp, Homo sapien
acacgctgacattacacaagacgatgcacaccc

SEQ ID NO: 368100 - DNA, 33 bp, Homo sapien
acacgctgacattacagaagacgatgcacaccc

SEQ ID NO: 368101 - DNA, 33 bp, Homo sapien
aattgtaggcactggcaatatagtacagaagat

SEQ ID NO: 368102 - DNA, 33 bp, Homo sapien
aattgtaggcactggcgatatagtacagaagat

SEQ ID NO: 368103 - DNA, 33 bp, Homo sapien
gcctggaagatagtaaagacgaaggtgctgtgt

SEQ ID NO: 368104 - DNA, 33 bp, Homo sapien
gcctggaagatagtaaggacgaaggtgctgtgt

SEQ ID NO: 368105 - DNA, 33 bp, Homo sapien
ttttgcaagcaacttcacttacattttggaaga

SEQ ID NO: 368106 - DNA, 33 bp, Homo sapien
ttttgcaagcaacttcgcttacattttggaaga

SEQ ID NO: 368107 - DNA, 33 bp, Homo sapien
ttgtgtatttgtcatactaagtcttccaaaatg

SEQ ID NO: 368108 - DNA, 33 bp, Homo sapien
ttgtgtatttgtcatattaagtcttccaaaatg

SEQ ID NO: 368109 - DNA, 33 bp, Homo sapien
agaatagcttgtcaacccatcctttgtggataa

SEQ ID NO: 368110 - DNA, 33 bp, Homo sapien
agaatagcttgtcaactcatcctttgtggataa

SEQ ID NO: 368111 - DNA, 33 bp, Homo sapien
gaatcacactgagcaacgtttcaaccagaaata

SEQ ID NO: 368112 - DNA, 33 bp, Homo sapien
gaatcacactgagcaaggtttcaaccagaaata

SEQ ID NO: 368113 - DNA, 33 bp, Homo sapien
ttttaaaaggattaaaaaagccactgcttgtca

SEQ ID NO: 368114 - DNA, 33 bp, Homo sapien
ttttaaaaggattaaagaagccactgcttgtca

SEQ ID NO: 368115 - DNA, 33 bp, Homo sapien
tcacatcctggaggcacaactgggttttcaaag

SEQ ID NO: 368116 - DNA, 33 bp, Homo sapien
tcacatcctggaggcagaactgggttttcaaag

SEQ ID NO: 368117 - DNA, 33 bp, Homo sapien
accagcatgcggctgaaattaatcggacagcct

SEQ ID NO: 368118 - DNA, 33 bp, Homo sapien
accagcatgcggctgacattaatcggacagcct

SEQ ID NO: 368119 - DNA, 33 bp, Homo sapien
gcagtgtaccccaagaagcttattaaaaagaac

SEQ ID NO: 368120 - DNA, 33 bp, Homo sapien
gcagtgtaccccaagaggcttattaaaaagaac

SEQ ID NO: 368121 - DNA, 33 bp, Homo sapien
gcagggaggatggagacggagtttctgaaatga

SEQ ID NO: 368122 - DNA, 33 bp, Homo sapien
gcagggaggatggagatggagtttctgaaatga

SEQ ID NO: 368123 - DNA, 33 bp, Homo sapien
cagatgattccatccccaaatccatgaggggcc

SEQ ID NO: 368124 - DNA, 33 bp, Homo sapien
cagatgattccatccctaaatccatgaggggcc

SEQ ID NO: 368125 - DNA, 33 bp, Homo sapien
atttctaaggccgttcactctcctgtgtgaccc

SEQ ID NO: 368126 - DNA, 33 bp, Homo sapien
atttctaaggccgttccctctcctgtgtgaccc

SEQ ID NO: 368127 - DNA, 33 bp, Homo sapien
acctgctggtgaatgacacagccaggagtcatc

SEQ ID NO: 368128 - DNA, 33 bp, Homo sapien
acctgctggtgaatgatacagccaggagtcatc

SEQ ID NO: 368129 - DNA, 33 bp, Homo sapien
tgcaatcataaagccaatcaccaagaagcagac

SEQ ID NO: 368130 - DNA, 33 bp, Homo sapien
tgcaatcataaagccagtcaccaagaagcagac

SEQ ID NO: 368131 - DNA, 33 bp, Homo sapien
ctttggacacgctggaggacgccgggttactag

SEQ ID NO: 368132 - DNA, 33 bp, Homo sapien
ctttggacacgctggatgacgccgggttactag

SEQ ID NO: 368133 - DNA, 33 bp, Homo sapien
aaaccaggctccatgactatgaagttggaccca

SEQ ID NO: 368134 - DNA, 33 bp, Homo sapien
aaaccaggctccatgattatgaagttggaccca

SEQ ID NO: 368135 - DNA, 33 bp, Homo sapien
agttctgttatcaaggacaatgtcgggggcaga

SEQ ID NO: 368136 - DNA, 33 bp, Homo sapien
agttctgttatcaaggtcaatgtcgggggcaga

SEQ ID NO: 368137 - DNA, 33 bp, Homo sapien
cagcagaacctgaggacaaaagcaggtggaagg

SEQ ID NO: 368138 - DNA, 33 bp, Homo sapien
cagcagaacctgaggagaaaagcaggtggaagg

SEQ ID NO: 368139 - DNA, 33 bp, Homo sapien
aggtgcggaccctgcaatcagtttgcgagtgtg

SEQ ID NO: 368140 - DNA, 33 bp, Homo sapien
aggtgcggaccctgcagtcagtttgcgagtgtg

SEQ ID NO: 368141 - DNA, 33 bp, Homo sapien
catacttgtttctcacaggttagtatctctcag

SEQ ID NO: 368142 - DNA, 33 bp, Homo sapien
catacttgtttctcacgggttagtatctctcag

SEQ ID NO: 368143 - DNA, 33 bp, Homo sapien
cagtggagttgtaaacaagggaaccatcttgca

SEQ ID NO: 368144 - DNA, 33 bp, Homo sapien
cagtggagttgtaaacgagggaaccatcttgca

SEQ ID NO: 368145 - DNA, 33 bp, Homo sapien
ctttattttggaaacaagatcaagattgtgtat

SEQ ID NO: 368146 - DNA, 33 bp, Homo sapien
ctttattttggaaacatgatcaagattgtgtat

SEQ ID NO: 368147 - DNA, 33 bp, Homo sapien
gggtcctcttggctaaagtggcttttttttttg

SEQ ID NO: 368148 - DNA, 33 bp, Homo sapien
gggtcctcttggctaaggtggcttttttttttg

SEQ ID NO: 368149 - DNA, 33 bp, Homo sapien
acattggtttggatcactcactcgaccacaatc

SEQ ID NO: 368150 - DNA, 33 bp, Homo sapien
acattggtttggatcagtcactcgaccacaatc

SEQ ID NO: 368151 - DNA, 33 bp, Homo sapien
cagggcaggagtcctacggaggattgtggtcga

SEQ ID NO: 368152 - DNA, 33 bp, Homo sapien
cagggcaggagtcctatggaggattgtggtcga

SEQ ID NO: 368153 - DNA, 33 bp, Homo sapien
aatcatacagaatcgcccattctttgtgactgg

SEQ ID NO: 368154 - DNA, 33 bp, Homo sapien
aatcatacagaatcgctcattctttgtgactgg

SEQ ID NO: 368155 - DNA, 33 bp, Homo sapien
aaactgtctcatgttaactatctggtgagggtg

SEQ ID NO: 368156 - DNA, 33 bp, Homo sapien
aaactgtctcatgttacctatctggtgagggtg

SEQ ID NO: 368157 - DNA, 33 bp, Homo sapien
gtcaactttttgatcacacagaatagatgggag

SEQ ID NO: 368158 - DNA, 33 bp, Homo sapien
gtcaactttttgatcagacagaatagatgggag

SEQ ID NO: 368159 - DNA, 33 bp, Homo sapien
ttcacagatgtgagaagacccttcagaaacgct

SEQ ID NO: 368160 - DNA, 33 bp, Homo sapien
ttcacagatgtgagaatacccttcagaaacgct

SEQ ID NO: 368161 - DNA, 33 bp, Homo sapien
agatgagcagctcaacaaagacatgccttttct

SEQ ID NO: 368162 - DNA, 33 bp, Homo sapien
agatgagcagctcaacgaagacatgccttttct

SEQ ID NO: 368163 - DNA, 33 bp, Homo sapien
tctcctaaaaggagcagtattactccgtgttct

SEQ ID NO: 368164 - DNA, 33 bp, Homo sapien
tctcctaaaaggagcattattactccgtgttct

SEQ ID NO: 368165 - DNA, 33 bp, Homo sapien
tggtgactgggttttaccatactcagtgcctct

SEQ ID NO: 368166 - DNA, 33 bp, Homo sapien
tggtgactgggttttagcatactcagtgcctct

SEQ ID NO: 368167 - DNA, 33 bp, Homo sapien
gcctctgccatgtgtaaacaacccagctcaggt

SEQ ID NO: 368168 - DNA, 33 bp, Homo sapien
gcctctgccatgtgtagacaacccagctcaggt

SEQ ID NO: 368169 - DNA, 33 bp, Homo sapien
acaccacggcagtccaacttgtgtgacaaagca

SEQ ID NO: 368170 - DNA, 33 bp, Homo sapien
acaccacggcagtccagcttgtgtgacaaagca

SEQ ID NO: 368171 - DNA, 33 bp, Homo sapien
atcccaatccacccaaagctcaaaatgttctga

SEQ ID NO: 368172 - DNA, 33 bp, Homo sapien
atcccaatccacccaaggctcaaaatgttctga

SEQ ID NO: 368173 - DNA, 33 bp, Homo sapien
tttgaaggatcacaaacgctgctgtacttccgt

SEQ ID NO: 368174 - DNA, 33 bp, Homo sapien
tttgaaggatcacaaaggctgctgtacttccgt

SEQ ID NO: 368175 - DNA, 33 bp, Homo sapien
cacatgacaggtattgcatgtagagcagatggg

SEQ ID NO: 368176 - DNA, 33 bp, Homo sapien
cacatgacaggtattggatgtagagcagatggg

SEQ ID NO: 368177 - DNA, 33 bp, Homo sapien
tacaaagacctatttacctatttccaaataagg

SEQ ID NO: 368178 - DNA, 33 bp, Homo sapien
tacaaagacctatttatctatttccaaataagg

SEQ ID NO: 368179 - DNA, 33 bp, Homo sapien
gatatagttacattaaagtcaagtcatactaaa

SEQ ID NO: 368180 - DNA, 33 bp, Homo sapien
gatatagttacattaaggtcaagtcatactaaa

SEQ ID NO: 368181 - DNA, 33 bp, Homo sapien
gtctcagcagatgctcacggtgacctagaagag

SEQ ID NO: 368182 - DNA, 33 bp, Homo sapien
gtctcagcagatgctcccggtgacctagaagag

SEQ ID NO: 368183 - DNA, 33 bp, Homo sapien
atgtcatctgtacataaatatgcttgcgacttc

SEQ ID NO: 368184 - DNA, 33 bp, Homo sapien
atgtcatctgtacatacatatgcttgcgacttc

SEQ ID NO: 368185 - DNA, 33 bp, Homo sapien
agtttcatcatatccacaccaaaacttactatt

SEQ ID NO: 368186 - DNA, 33 bp, Homo sapien
agtttcatcatatccagaccaaaacttactatt

SEQ ID NO: 368187 - DNA, 33 bp, Homo sapien
cagccgtgattccaacacatgagttttagggaa

SEQ ID NO: 368188 - DNA, 33 bp, Homo sapien
cagccgtgattccaacgcatgagttttagggaa

SEQ ID NO: 368189 - DNA, 33 bp, Homo sapien
gacaaaggcatgtgacaacaattgaaagcactg

SEQ ID NO: 368190 - DNA, 33 bp, Homo sapien
gacaaaggcatgtgacgacaattgaaagcactg

SEQ ID NO: 368191 - DNA, 33 bp, Homo sapien
gtacgattcttctcaaccagctcccgaagtaca

SEQ ID NO: 368192 - DNA, 33 bp, Homo sapien
gtacgattcttctcaagcagctcccgaagtaca

SEQ ID NO: 368193 - DNA, 33 bp, Homo sapien
ctgacactgtttaccacgcacctccctctacgt

SEQ ID NO: 368194 - DNA, 33 bp, Homo sapien
ctgacactgtttaccatgcacctccctctacgt

SEQ ID NO: 368195 - DNA, 33 bp, Homo sapien
gaggaacatttgacgtaaaacacggtcgtcatt

SEQ ID NO: 368196 - DNA, 33 bp, Homo sapien
gaggaacatttgacgtgaaacacggtcgtcatt

SEQ ID NO: 368197 - DNA, 33 bp, Homo sapien
agggcctctctcagcacatggcaaatgacgacc

SEQ ID NO: 368198 - DNA, 33 bp, Homo sapien
agggcctctctcagcagatggcaaatgacgacc

SEQ ID NO: 368199 - DNA, 33 bp, Homo sapien
ggagggagttgaaggggaatggaagaaaatgac

SEQ ID NO: 368200 - DNA, 33 bp, Homo sapien
ggagggagttgaagggtaatggaagaaaatgac

SEQ ID NO: 368201 - DNA, 33 bp, Homo sapien
ccaatttagtctcaacggcagctgtctcaaggt

SEQ ID NO: 368202 - DNA, 33 bp, Homo sapien
ccaatttagtctcaactgcagctgtctcaaggt

SEQ ID NO: 368203 - DNA, 33 bp, Homo sapien
ttactggatatccttactaactttgtctcgatc

SEQ ID NO: 368204 - DNA, 33 bp, Homo sapien
ttactggatatccttattaactttgtctcgatc

SEQ ID NO: 368205 - DNA, 33 bp, Homo sapien
tttcacacaagcatgaaaattagagaagatgtc

SEQ ID NO: 368206 - DNA, 33 bp, Homo sapien
tttcacacaagcatgacaattagagaagatgtc

SEQ ID NO: 368207 - DNA, 33 bp, Homo sapien
atcagcaaacaggtcggcacaagatacagctat

SEQ ID NO: 368208 - DNA, 33 bp, Homo sapien
atcagcaaacaggtcgtcacaagatacagctat

SEQ ID NO: 368209 - DNA, 33 bp, Homo sapien
cttcgaagcgaaattacgaatccttctgttcaa

SEQ ID NO: 368210 - DNA, 33 bp, Homo sapien
cttcgaagcgaaattatgaatccttctgttcaa

SEQ ID NO: 368211 - DNA, 33 bp, Homo sapien
gatgtaatacctcttcaaagattttagcctgtc

SEQ ID NO: 368212 - DNA, 33 bp, Homo sapien
gatgtaatacctcttccaagattttagcctgtc

SEQ ID NO: 368213 - DNA, 33 bp, Homo sapien
taatcattaatccgacaaacatttcgatgcctc

SEQ ID NO: 368214 - DNA, 33 bp, Homo sapien
taatcattaatccgacgaacatttcgatgcctc

SEQ ID NO: 368215 - DNA, 33 bp, Homo sapien
tgaactcaagggctgaaggacagggaccaagac

SEQ ID NO: 368216 - DNA, 33 bp, Homo sapien
tgaactcaagggctgagggacagggaccaagac

SEQ ID NO: 368217 - DNA, 33 bp, Homo sapien
ggctgactgtgaaatgcaaggtatattcatgag

SEQ ID NO: 368218 - DNA, 33 bp, Homo sapien
ggctgactgtgaaatggaaggtatattcatgag

SEQ ID NO: 368219 - DNA, 33 bp, Homo sapien
aaaagaacttaaagtcagaagaatggaaccatt

SEQ ID NO: 368220 - DNA, 33 bp, Homo sapien
aaaagaacttaaagtccgaagaatggaaccatt

SEQ ID NO: 368221 - DNA, 33 bp, Homo sapien
attttccagtgataagaacttgttagaactatg

SEQ ID NO: 368222 - DNA, 33 bp, Homo sapien
attttccagtgataagtacttgttagaactatg

SEQ ID NO: 368223 - DNA, 33 bp, Homo sapien
cttgttacagaagattgaactacattgaacgag

SEQ ID NO: 368224 - DNA, 33 bp, Homo sapien
cttgttacagaagatttaactacattgaacgag

SEQ ID NO: 368225 - DNA, 33 bp, Homo sapien
gagctgtgtgtagtaaagaaaaacaacaggaaa

SEQ ID NO: 368226 - DNA, 33 bp, Homo sapien
gagctgtgtgtagtaaggaaaaacaacaggaaa

SEQ ID NO: 368227 - DNA, 33 bp, Homo sapien
tatttggaccataataaaccaagcagttagaaa

SEQ ID NO: 368228 - DNA, 33 bp, Homo sapien
tatttggaccataatacaccaagcagttagaaa

SEQ ID NO: 368229 - DNA, 33 bp, Homo sapien
gtgcacatgaaactgaacaagatctgccccagg

SEQ ID NO: 368230 - DNA, 33 bp, Homo sapien
gtgcacatgaaactgagcaagatctgccccagg

SEQ ID NO: 368231 - DNA, 33 bp, Homo sapien
tacatttgctgctattaaaagactttagtcaca

SEQ ID NO: 368232 - DNA, 33 bp, Homo sapien
tacatttgctgctattgaaagactttagtcaca

SEQ ID NO: 368233 - DNA, 33 bp, Homo sapien
ttaacttctttgtatcaaataacagaagccaaa

SEQ ID NO: 368234 - DNA, 33 bp, Homo sapien
ttaacttctttgtatcgaataacagaagccaaa

SEQ ID NO: 368235 - DNA, 33 bp, Homo sapien
gcctcatggcaaaagtaacagcaagaacagggc

SEQ ID NO: 368236 - DNA, 33 bp, Homo sapien
gcctcatggcaaaagtcacagcaagaacagggc

SEQ ID NO: 368237 - DNA, 33 bp, Homo sapien
caaggtgggggccgaacgatcccaacacagtgg

SEQ ID NO: 368238 - DNA, 33 bp, Homo sapien
caaggtgggggccgaatgatcccaacacagtgg

SEQ ID NO: 368239 - DNA, 33 bp, Homo sapien
acaaactgagctagtgcaatcagaaggtggcat

SEQ ID NO: 368240 - DNA, 33 bp, Homo sapien
acaaactgagctagtggaatcagaaggtggcat

SEQ ID NO: 368241 - DNA, 33 bp, Homo sapien
acaatgagatataaagaaagacgtagatacaaa

SEQ ID NO: 368242 - DNA, 33 bp, Homo sapien
acaatgagatataaaggaagacgtagatacaaa

SEQ ID NO: 368243 - DNA, 33 bp, Homo sapien
acttgtcaactaccaaaaaatgagtaccaactt

SEQ ID NO: 368244 - DNA, 33 bp, Homo sapien
acttgtcaactaccaagaaatgagtaccaactt

SEQ ID NO: 368245 - DNA, 33 bp, Homo sapien
tcacggtgggaggagacggtattcgatgctcgt

SEQ ID NO: 368246 - DNA, 33 bp, Homo sapien
tcacggtgggaggagatggtattcgatgctcgt

SEQ ID NO: 368247 - DNA, 33 bp, Homo sapien
ccttttaagtcaattacagctgaataggtgttt

SEQ ID NO: 368248 - DNA, 33 bp, Homo sapien
ccttttaagtcaattatagctgaataggtgttt

SEQ ID NO: 368249 - DNA, 33 bp, Homo sapien
agatgcttccataaagccttgaagcttccaact

SEQ ID NO: 368250 - DNA, 33 bp, Homo sapien
agatgcttccataaagtcttgaagcttccaact

SEQ ID NO: 368251 - DNA, 33 bp, Homo sapien
tcactacagaatcaccaagcccagtaaagcatt

SEQ ID NO: 368252 - DNA, 33 bp, Homo sapien
tcactacagaatcaccgagcccagtaaagcatt

SEQ ID NO: 368253 - DNA, 33 bp, Homo sapien
tcaaatttcctccattaaaaaaaattgcttaaa

SEQ ID NO: 368254 - DNA, 33 bp, Homo sapien
tcaaatttcctccatttaaaaaaattgcttaaa

SEQ ID NO: 368255 - DNA, 33 bp, Homo sapien
cagggcagaaaatgaccatccttgactcagaca

SEQ ID NO: 368256 - DNA, 33 bp, Homo sapien
cagggcagaaaatgacgatccttgactcagaca

SEQ ID NO: 368257 - DNA, 33 bp, Homo sapien
tctctccaagatagcccaagcctgttgacagcc

SEQ ID NO: 368258 - DNA, 33 bp, Homo sapien
tctctccaagatagccgaagcctgttgacagcc

SEQ ID NO: 368259 - DNA, 33 bp, Homo sapien
acataaatacagattgcatttttcctttaggct

SEQ ID NO: 368260 - DNA, 33 bp, Homo sapien
acataaatacagattggatttttcctttaggct

SEQ ID NO: 368261 - DNA, 33 bp, Homo sapien
tctcttaatactgaaaatcacaaaataggataa

SEQ ID NO: 368262 - DNA, 33 bp, Homo sapien
tctcttaatactgaaagtcacaaaataggataa

SEQ ID NO: 368263 - DNA, 33 bp, Homo sapien
gttagtaggagctgtcaccagtacaccactagg

SEQ ID NO: 368264 - DNA, 33 bp, Homo sapien
gttagtaggagctgtcgccagtacaccactagg

SEQ ID NO: 368265 - DNA, 33 bp, Homo sapien
ccttgccataaatagaaaactgaaaggctccaa

SEQ ID NO: 368266 - DNA, 33 bp, Homo sapien
ccttgccataaatagacaactgaaaggctccaa

SEQ ID NO: 368267 - DNA, 33 bp, Homo sapien
caaggcattaaagaaggccagtgtttagtatca

SEQ ID NO: 368268 - DNA, 33 bp, Homo sapien
caaggcattaaagaagtccagtgtttagtatca

SEQ ID NO: 368269 - DNA, 33 bp, Homo sapien
ctgcttggcttaggcactccgtaacctgagagt

SEQ ID NO: 368270 - DNA, 33 bp, Homo sapien
ctgcttggcttaggcagtccgtaacctgagagt

SEQ ID NO: 368271 - DNA, 33 bp, Homo sapien
acccatcacagtgaaacctttgagaggcttagc

SEQ ID NO: 368272 - DNA, 33 bp, Homo sapien
acccatcacagtgaaatctttgagaggcttagc

SEQ ID NO: 368273 - DNA, 33 bp, Homo sapien
gaatataatttttgtgaatcgttaatcaggtga

SEQ ID NO: 368274 - DNA, 33 bp, Homo sapien
gaatataatttttgtggatcgttaatcaggtga

SEQ ID NO: 368275 - DNA, 33 bp, Homo sapien
catgggggtctggagaaggagtgtttcagcctg

SEQ ID NO: 368276 - DNA, 33 bp, Homo sapien
catgggggtctggagacggagtgtttcagcctg

SEQ ID NO: 368277 - DNA, 33 bp, Homo sapien
gcagagccatctttctaaaatgcaaaacctggg

SEQ ID NO: 368278 - DNA, 33 bp, Homo sapien
gcagagccatctttctcaaatgcaaaacctggg

SEQ ID NO: 368279 - DNA, 33 bp, Homo sapien
tcaaattttacttgacaaagtggcccaagtggt

SEQ ID NO: 368280 - DNA, 33 bp, Homo sapien
tcaaattttacttgacgaagtggcccaagtggt

SEQ ID NO: 368281 - DNA, 33 bp, Homo sapien
atcctgatcaaacacaatgtctccatttgagcc

SEQ ID NO: 368282 - DNA, 33 bp, Homo sapien
atcctgatcaaacacagtgtctccatttgagcc

SEQ ID NO: 368283 - DNA, 33 bp, Homo sapien
gacatggccccttctacctggacaatgttactg

SEQ ID NO: 368284 - DNA, 33 bp, Homo sapien
gacatggccccttctatctggacaatgttactg

SEQ ID NO: 368285 - DNA, 33 bp, Homo sapien
taatcgtctatcttcccgcatatcccaggagcc

SEQ ID NO: 368286 - DNA, 33 bp, Homo sapien
taatcgtctatcttccggcatatcccaggagcc

SEQ ID NO: 368287 - DNA, 33 bp, Homo sapien
catggatgcgtacagcaaagagcgcccacctac

SEQ ID NO: 368288 - DNA, 33 bp, Homo sapien
catggatgcgtacagccaagagcgcccacctac

SEQ ID NO: 368289 - DNA, 33 bp, Homo sapien
acaggctacagagacacgaaggaggtagaatta

SEQ ID NO: 368290 - DNA, 33 bp, Homo sapien
acaggctacagagacatgaaggaggtagaatta

SEQ ID NO: 368291 - DNA, 33 bp, Homo sapien
ctgggagctgggataactggagacacagaccag

SEQ ID NO: 368292 - DNA, 33 bp, Homo sapien
ctgggagctgggataattggagacacagaccag

SEQ ID NO: 368293 - DNA, 33 bp, Homo sapien
ctggtgaaaggaagaacgaggacaaagagaaga

SEQ ID NO: 368294 - DNA, 33 bp, Homo sapien
ctggtgaaaggaagaatgaggacaaagagaaga

SEQ ID NO: 368295 - DNA, 33 bp, Homo sapien
tttcaaagtcattaagcatggcccctcacatgc

SEQ ID NO: 368296 - DNA, 33 bp, Homo sapien
tttcaaagtcattaagtatggcccctcacatgc

SEQ ID NO: 368297 - DNA, 33 bp, Homo sapien
cagcttgtaaggggcaagagaccaaccccaggg

SEQ ID NO: 368298 - DNA, 33 bp, Homo sapien
cagcttgtaaggggcacgagaccaaccccaggg

SEQ ID NO: 368299 - DNA, 33 bp, Homo sapien
aacttcttcgtccctgaatatcacattgtgcat

SEQ ID NO: 368300 - DNA, 33 bp, Homo sapien
aacttcttcgtccctggatatcacattgtgcat

SEQ ID NO: 368301 - DNA, 33 bp, Homo sapien
gtttgcatacatcacaagttatttggggaagta

SEQ ID NO: 368302 - DNA, 33 bp, Homo sapien
gtttgcatacatcacaggttatttggggaagta

SEQ ID NO: 368303 - DNA, 33 bp, Homo sapien
tatcgggtacaaattcccttttatggacctgaa

SEQ ID NO: 368304 - DNA, 33 bp, Homo sapien
tatcgggtacaaattctcttttatggacctgaa

SEQ ID NO: 368305 - DNA, 33 bp, Homo sapien
aagctctttgcagagacgaacttactgaatctt

SEQ ID NO: 368306 - DNA, 33 bp, Homo sapien
aagctctttgcagagatgaacttactgaatctt

SEQ ID NO: 368307 - DNA, 33 bp, Homo sapien
ccgtcactttagtccaatgcataaagggatcag

SEQ ID NO: 368308 - DNA, 33 bp, Homo sapien
ccgtcactttagtccagtgcataaagggatcag

SEQ ID NO: 368309 - DNA, 33 bp, Homo sapien
actggaggcgtgggacaaatacacagggaacca

SEQ ID NO: 368310 - DNA, 33 bp, Homo sapien
actggaggcgtgggacgaatacacagggaacca

SEQ ID NO: 368311 - DNA, 33 bp, Homo sapien
agaaacacgaagccacagtacttgagacatgga

SEQ ID NO: 368312 - DNA, 33 bp, Homo sapien
agaaacacgaagccacggtacttgagacatgga

SEQ ID NO: 368313 - DNA, 33 bp, Homo sapien
agaaatcctgcagtccaacgcctgtagggcctg

SEQ ID NO: 368314 - DNA, 33 bp, Homo sapien
agaaatcctgcagtccgacgcctgtagggcctg

SEQ ID NO: 368315 - DNA, 33 bp, Homo sapien
cagctcactgatactccgagagtgtttgttact

SEQ ID NO: 368316 - DNA, 33 bp, Homo sapien
cagctcactgatactctgagagtgtttgttact

SEQ ID NO: 368317 - DNA, 33 bp, Homo sapien
atctcttcaaatatgacgcgagttatgaattca

SEQ ID NO: 368318 - DNA, 33 bp, Homo sapien
atctcttcaaatatgatgcgagttatgaattca

SEQ ID NO: 368319 - DNA, 33 bp, Homo sapien
aactggctcctgaatcactgttaggggtttaat

SEQ ID NO: 368320 - DNA, 33 bp, Homo sapien
aactggctcctgaatcgctgttaggggtttaat

SEQ ID NO: 368321 - DNA, 33 bp, Homo sapien
tctaccacacgaaatagggaagctttgtttaat

SEQ ID NO: 368322 - DNA, 33 bp, Homo sapien
tctaccacacgaaatatggaagctttgtttaat

SEQ ID NO: 368323 - DNA, 33 bp, Homo sapien
ttatggctagagaggcagaaatagatatatgtc

SEQ ID NO: 368324 - DNA, 33 bp, Homo sapien
ttatggctagagaggcggaaatagatatatgtc

SEQ ID NO: 368325 - DNA, 33 bp, Homo sapien
ctgaataagagctggagagtcaaagaaagagaa

SEQ ID NO: 368326 - DNA, 33 bp, Homo sapien
ctgaataagagctggatagtcaaagaaagagaa

SEQ ID NO: 368327 - DNA, 33 bp, Homo sapien
aatcctccaagcaacccaggaatacagatatca

SEQ ID NO: 368328 - DNA, 33 bp, Homo sapien
aatcctccaagcaaccgaggaatacagatatca

SEQ ID NO: 368329 - DNA, 33 bp, Homo sapien
tagtacagcagtccccagattccagtagagatc

SEQ ID NO: 368330 - DNA, 33 bp, Homo sapien
tagtacagcagtccccggattccagtagagatc

SEQ ID NO: 368331 - DNA, 33 bp, Homo sapien
taagtgcttctgaacaagagacagttgtgtcat

SEQ ID NO: 368332 - DNA, 33 bp, Homo sapien
taagtgcttctgaacaggagacagttgtgtcat

SEQ ID NO: 368333 - DNA, 33 bp, Homo sapien
tacaaaatgatctgtcactatgtctccatcagg

SEQ ID NO: 368334 - DNA, 33 bp, Homo sapien
tacaaaatgatctgtcgctatgtctccatcagg

SEQ ID NO: 368335 - DNA, 33 bp, Homo sapien
tgcttagctgactggaatatttacatcttcttt

SEQ ID NO: 368336 - DNA, 33 bp, Homo sapien
tgcttagctgactggattatttacatcttcttt

SEQ ID NO: 368337 - DNA, 33 bp, Homo sapien
tgaattctatcaaccaaaaggactcttaagacc

SEQ ID NO: 368338 - DNA, 33 bp, Homo sapien
tgaattctatcaaccacaaggactcttaagacc

SEQ ID NO: 368339 - DNA, 33 bp, Homo sapien
ctggtttcctcccatccaagttcacaggatgaa

SEQ ID NO: 368340 - DNA, 33 bp, Homo sapien
ctggtttcctcccatcgaagttcacaggatgaa

SEQ ID NO: 368341 - DNA, 33 bp, Homo sapien
gcatctaacactgtaactggcacttagtttgca

SEQ ID NO: 368342 - DNA, 33 bp, Homo sapien
gcatctaacactgtaattggcacttagtttgca

SEQ ID NO: 368343 - DNA, 33 bp, Homo sapien
cccatcacactgagctcactatcaccttagaat

SEQ ID NO: 368344 - DNA, 33 bp, Homo sapien
cccatcacactgagcttactatcaccttagaat

SEQ ID NO: 368345 - DNA, 33 bp, Homo sapien
tagtcatcaccctttacattgccttgcaaaact

SEQ ID NO: 368346 - DNA, 33 bp, Homo sapien
tagtcatcaccctttatattgccttgcaaaact

SEQ ID NO: 368347 - DNA, 33 bp, Homo sapien
ttctagtacttaggtacgaaaaggcgggcttct

SEQ ID NO: 368348 - DNA, 33 bp, Homo sapien
ttctagtacttaggtaggaaaaggcgggcttct

SEQ ID NO: 368349 - DNA, 33 bp, Homo sapien
ctcatccacagacgtcaagtttgtaatctctgg

SEQ ID NO: 368350 - DNA, 33 bp, Homo sapien
ctcatccacagacgtcgagtttgtaatctctgg

SEQ ID NO: 368351 - DNA, 33 bp, Homo sapien
tgagtagctaggaacacagaaggtgctaccacg

SEQ ID NO: 368352 - DNA, 33 bp, Homo sapien
tgagtagctaggaacagagaaggtgctaccacg

SEQ ID NO: 368353 - DNA, 33 bp, Homo sapien
ttttctggaaatgttacagtgcaaactttttac

SEQ ID NO: 368354 - DNA, 33 bp, Homo sapien
ttttctggaaatgttatagtgcaaactttttac

SEQ ID NO: 368355 - DNA, 33 bp, Homo sapien
ctggagagagacttgacgataaatctataagat

SEQ ID NO: 368356 - DNA, 33 bp, Homo sapien
ctggagagagacttgatgataaatctataagat

SEQ ID NO: 368357 - DNA, 33 bp, Homo sapien
tgctgcaatcagaccactcttttcaaaataaaa

SEQ ID NO: 368358 - DNA, 33 bp, Homo sapien
tgctgcaatcagaccattcttttcaaaataaaa

SEQ ID NO: 368359 - DNA, 33 bp, Homo sapien
gggcatggcctctccaaagaagtgttatttaac

SEQ ID NO: 368360 - DNA, 33 bp, Homo sapien
gggcatggcctctccacagaagtgttatttaac

SEQ ID NO: 368361 - DNA, 33 bp, Homo sapien
ttgcacaggagacacaaaaagttttgagaatgt

SEQ ID NO: 368362 - DNA, 33 bp, Homo sapien
ttgcacaggagacacacaaagttttgagaatgt

SEQ ID NO: 368363 - DNA, 33 bp, Homo sapien
ttctctgctagtgatacgacaaggcatctgttg

SEQ ID NO: 368364 - DNA, 33 bp, Homo sapien
ttctctgctagtgatatgacaaggcatctgttg

SEQ ID NO: 368365 - DNA, 33 bp, Homo sapien
gccaatgaggacagaccggacataagagggttt

SEQ ID NO: 368366 - DNA, 33 bp, Homo sapien
gccaatgaggacagactggacataagagggttt

SEQ ID NO: 368367 - DNA, 33 bp, Homo sapien
tgtgatcctgaagccaaacatcagaaggtggct

SEQ ID NO: 368368 - DNA, 33 bp, Homo sapien
tgtgatcctgaagccagacatcagaaggtggct

SEQ ID NO: 368369 - DNA, 33 bp, Homo sapien
atatttggtgaccacaaagagagtggaagtgga

SEQ ID NO: 368370 - DNA, 33 bp, Homo sapien
atatttggtgaccacatagagagtggaagtgga

SEQ ID NO: 368371 - DNA, 33 bp, Homo sapien
cccacttaaaatcgtcaaatgatgctaaaaaga

SEQ ID NO: 368372 - DNA, 33 bp, Homo sapien
cccacttaaaatcgtcgaatgatgctaaaaaga

SEQ ID NO: 368373 - DNA, 33 bp, Homo sapien
ggttgccattatgacacaggttgggattgcagt

SEQ ID NO: 368374 - DNA, 33 bp, Homo sapien
ggttgccattatgacataggttgggattgcagt

SEQ ID NO: 368375 - DNA, 33 bp, Homo sapien
ctggacaaagccaaccaccgtatcatgaggaca

SEQ ID NO: 368376 - DNA, 33 bp, Homo sapien
ctggacaaagccaacctccgtatcatgaggaca

SEQ ID NO: 368377 - DNA, 33 bp, Homo sapien
agtctagtaacagcagactcaccagggaaccta

SEQ ID NO: 368378 - DNA, 33 bp, Homo sapien
agtctagtaacagcaggctcaccagggaaccta

SEQ ID NO: 368379 - DNA, 33 bp, Homo sapien
acagaatcatacactccaggagtgggcccaagt

SEQ ID NO: 368380 - DNA, 33 bp, Homo sapien
acagaatcatacactctaggagtgggcccaagt

SEQ ID NO: 368381 - DNA, 33 bp, Homo sapien
gagcgttacagttccacgagtcaaaagaggttg

SEQ ID NO: 368382 - DNA, 33 bp, Homo sapien
gagcgttacagttccatgagtcaaaagaggttg

SEQ ID NO: 368383 - DNA, 33 bp, Homo sapien
tgtgcctctgctctagacctgataaatgcattg

SEQ ID NO: 368384 - DNA, 33 bp, Homo sapien
tgtgcctctgctctagtcctgataaatgcattg

SEQ ID NO: 368385 - DNA, 33 bp, Homo sapien
gcttctcagggatggcagcatttgagaagtcat

SEQ ID NO: 368386 - DNA, 33 bp, Homo sapien
gcttctcagggatggcggcatttgagaagtcat

SEQ ID NO: 368387 - DNA, 33 bp, Homo sapien
acgggctcccaggctacgtgtctcaagtccgcc

SEQ ID NO: 368388 - DNA, 33 bp, Homo sapien
acgggctcccaggctatgtgtctcaagtccgcc

SEQ ID NO: 368389 - DNA, 33 bp, Homo sapien
gtgtgcttcagtcccaaacatcgtatacaaatg

SEQ ID NO: 368390 - DNA, 33 bp, Homo sapien
gtgtgcttcagtcccagacatcgtatacaaatg

SEQ ID NO: 368391 - DNA, 33 bp, Homo sapien
tcgcaccaatagtcacacattctacaaacaata

SEQ ID NO: 368392 - DNA, 33 bp, Homo sapien
tcgcaccaatagtcactcattctacaaacaata

SEQ ID NO: 368393 - DNA, 33 bp, Homo sapien
ttctgttccttccataccagggaaagcttatcc

SEQ ID NO: 368394 - DNA, 33 bp, Homo sapien
ttctgttccttccatagcagggaaagcttatcc

SEQ ID NO: 368395 - DNA, 33 bp, Homo sapien
tggagcttatgttacaatgggagaaatggaaaa

SEQ ID NO: 368396 - DNA, 33 bp, Homo sapien
tggagcttatgttacagtgggagaaatggaaaa

SEQ ID NO: 368397 - DNA, 33 bp, Homo sapien
ttttgctctgaaagaaaaatacttcccatcaac

SEQ ID NO: 368398 - DNA, 33 bp, Homo sapien
ttttgctctgaaagaagaatacttcccatcaac

SEQ ID NO: 368399 - DNA, 33 bp, Homo sapien
tttaagatctagataacccaggcaggcacagtg

SEQ ID NO: 368400 - DNA, 33 bp, Homo sapien
tttaagatctagataatccaggcaggcacagtg

SEQ ID NO: 368401 - DNA, 33 bp, Homo sapien
aaaaacaaaaaactccacaggatgtgcaaaggc

SEQ ID NO: 368402 - DNA, 33 bp, Homo sapien
aaaaacaaaaaactccgcaggatgtgcaaaggc

SEQ ID NO: 368403 - DNA, 33 bp, Homo sapien
tagtacattcagatgaagttttgggggaaaaac

SEQ ID NO: 368404 - DNA, 33 bp, Homo sapien
tagtacattcagatgatgttttgggggaaaaac

SEQ ID NO: 368405 - DNA, 33 bp, Homo sapien
ttcattgtactttgaaaggaatcctgcagttga

SEQ ID NO: 368406 - DNA, 33 bp, Homo sapien
ttcattgtactttgaatggaatcctgcagttga

SEQ ID NO: 368407 - DNA, 33 bp, Homo sapien
aactaagccaagagagacacacaaaatctagag

SEQ ID NO: 368408 - DNA, 33 bp, Homo sapien
aactaagccaagagaggcacacaaaatctagag

SEQ ID NO: 368409 - DNA, 33 bp, Homo sapien
tgtgggcaaataacaacttatgaaacagcaaat

SEQ ID NO: 368410 - DNA, 33 bp, Homo sapien
tgtgggcaaataacaatttatgaaacagcaaat

SEQ ID NO: 368411 - DNA, 33 bp, Homo sapien
tagtatttggaactacacatttcctttgaagaa

SEQ ID NO: 368412 - DNA, 33 bp, Homo sapien
tagtatttggaactacgcatttcctttgaagaa

SEQ ID NO: 368413 - DNA, 33 bp, Homo sapien
cttgtttgcagtctaactggagataattccttt

SEQ ID NO: 368414 - DNA, 33 bp, Homo sapien
cttgtttgcagtctaagtggagataattccttt

SEQ ID NO: 368415 - DNA, 33 bp, Homo sapien
gtgtagctcctaaagaaattgttgatcctgggc

SEQ ID NO: 368416 - DNA, 33 bp, Homo sapien
gtgtagctcctaaagatattgttgatcctgggc

SEQ ID NO: 368417 - DNA, 33 bp, Homo sapien
gggccctctggactgaactgattcttcagggaa

SEQ ID NO: 368418 - DNA, 33 bp, Homo sapien
gggccctctggactgagctgattcttcagggaa

SEQ ID NO: 368419 - DNA, 33 bp, Homo sapien
atgatagggggaagaactggtgatggggagagc

SEQ ID NO: 368420 - DNA, 33 bp, Homo sapien
atgatagggggaagaagtggtgatggggagagc

SEQ ID NO: 368421 - DNA, 33 bp, Homo sapien
tgaagtgggtgaataaagatgggggagaggtag

SEQ ID NO: 368422 - DNA, 33 bp, Homo sapien
tgaagtgggtgaataaggatgggggagaggtag

SEQ ID NO: 368423 - DNA, 33 bp, Homo sapien
cttcaaataatattcaaacatcagttacaatca

SEQ ID NO: 368424 - DNA, 33 bp, Homo sapien
cttcaaataatattcagacatcagttacaatca

SEQ ID NO: 368425 - DNA, 33 bp, Homo sapien
tcatatttgaatgacaacttaattggatataat

SEQ ID NO: 368426 - DNA, 33 bp, Homo sapien
tcatatttgaatgacagcttaattggatataat

SEQ ID NO: 368427 - DNA, 33 bp, Homo sapien
aagataaaggaagcttaaagaggtggggatgag

SEQ ID NO: 368428 - DNA, 33 bp, Homo sapien
aagataaaggaagctttaagaggtggggatgag

SEQ ID NO: 368429 - DNA, 33 bp, Homo sapien
ttcttagagctgaacacgcctagtttctggact

SEQ ID NO: 368430 - DNA, 33 bp, Homo sapien
ttcttagagctgaacatgcctagtttctggact

SEQ ID NO: 368431 - DNA, 33 bp, Homo sapien
gaaaagctgtttaccaaccaagaacacctgcct

SEQ ID NO: 368432 - DNA, 33 bp, Homo sapien
gaaaagctgtttaccagccaagaacacctgcct

SEQ ID NO: 368433 - DNA, 33 bp, Homo sapien
gagttgttacagacataaatactcattaagttc

SEQ ID NO: 368434 - DNA, 33 bp, Homo sapien
gagttgttacagacatgaatactcattaagttc

SEQ ID NO: 368435 - DNA, 33 bp, Homo sapien
gaattcatctgggtgacacataatgatgattga

SEQ ID NO: 368436 - DNA, 33 bp, Homo sapien
gaattcatctgggtgagacataatgatgattga

SEQ ID NO: 368437 - DNA, 33 bp, Homo sapien
taatctctcttcagaactccatactcatatatc

SEQ ID NO: 368438 - DNA, 33 bp, Homo sapien
taatctctcttcagaagtccatactcatatatc

SEQ ID NO: 368439 - DNA, 33 bp, Homo sapien
tcgtcccccactcacaatccatgtagttttgaa

SEQ ID NO: 368440 - DNA, 33 bp, Homo sapien
tcgtcccccactcacactccatgtagttttgaa

SEQ ID NO: 368441 - DNA, 33 bp, Homo sapien
atttatgacaacataaagtagtagaaagacaaa

SEQ ID NO: 368442 - DNA, 33 bp, Homo sapien
atttatgacaacataatgtagtagaaagacaaa

SEQ ID NO: 368443 - DNA, 33 bp, Homo sapien
cacagcagcatcatgaagtaggtcctataatta

SEQ ID NO: 368444 - DNA, 33 bp, Homo sapien
cacagcagcatcatgaggtaggtcctataatta

SEQ ID NO: 368445 - DNA, 33 bp, Homo sapien
aataatatctatatcacgaggttaaggctaggc

SEQ ID NO: 368446 - DNA, 33 bp, Homo sapien
aataatatctatatcatgaggttaaggctaggc

SEQ ID NO: 368447 - DNA, 33 bp, Homo sapien
gcagaaaactgcactcaaataaactgagccaca

SEQ ID NO: 368448 - DNA, 33 bp, Homo sapien
gcagaaaactgcactcgaataaactgagccaca

SEQ ID NO: 368449 - DNA, 33 bp, Homo sapien
gccaactcacaccttacgaaagtcaggtcattg

SEQ ID NO: 368450 - DNA, 33 bp, Homo sapien
gccaactcacaccttatgaaagtcaggtcattg

SEQ ID NO: 368451 - DNA, 33 bp, Homo sapien
agatcagggagaattgaaacatagatatttggc

SEQ ID NO: 368452 - DNA, 33 bp, Homo sapien
agatcagggagaattggaacatagatatttggc

SEQ ID NO: 368453 - DNA, 33 bp, Homo sapien
attctgagcctatagccgaagaacgcttgtgtg

SEQ ID NO: 368454 - DNA, 33 bp, Homo sapien
attctgagcctatagctgaagaacgcttgtgtg

SEQ ID NO: 368455 - DNA, 33 bp, Homo sapien
tttgaaatctagaaatcacaaatgaaatctagt

SEQ ID NO: 368456 - DNA, 33 bp, Homo sapien
tttgaaatctagaaatgacaaatgaaatctagt

SEQ ID NO: 368457 - DNA, 33 bp, Homo sapien
actaaatgaggtaaagcagttagcacaaatctg

SEQ ID NO: 368458 - DNA, 33 bp, Homo sapien
actaaatgaggtaaagtagttagcacaaatctg

SEQ ID NO: 368459 - DNA, 33 bp, Homo sapien
attacattaccctctgaaagatgaattggagct

SEQ ID NO: 368460 - DNA, 33 bp, Homo sapien
attacattaccctctggaagatgaattggagct

SEQ ID NO: 368461 - DNA, 33 bp, Homo sapien
tggagcctgcctcctcaattccactgtgagaga

SEQ ID NO: 368462 - DNA, 33 bp, Homo sapien
tggagcctgcctcctcgattccactgtgagaga

SEQ ID NO: 368463 - DNA, 33 bp, Homo sapien
ccctgcctgctttgcacagaatattgattctct

SEQ ID NO: 368464 - DNA, 33 bp, Homo sapien
ccctgcctgctttgcatagaatattgattctct

SEQ ID NO: 368465 - DNA, 33 bp, Homo sapien
ggttcactacccagaaactttcactatgggtgt

SEQ ID NO: 368466 - DNA, 33 bp, Homo sapien
ggttcactacccagaagctttcactatgggtgt

SEQ ID NO: 368467 - DNA, 33 bp, Homo sapien
ttggcacagctattacaaacaaagaaatccttt

SEQ ID NO: 368468 - DNA, 33 bp, Homo sapien
ttggcacagctattaccaacaaagaaatccttt

SEQ ID NO: 368469 - DNA, 33 bp, Homo sapien
ctcatgcatagtaaacaccacctaagtatttgg

SEQ ID NO: 368470 - DNA, 33 bp, Homo sapien
ctcatgcatagtaaactccacctaagtatttgg

SEQ ID NO: 368471 - DNA, 33 bp, Homo sapien
caataagcaagccaaactgttattcactcaatc

SEQ ID NO: 368472 - DNA, 33 bp, Homo sapien
caataagcaagccaaattgttattcactcaatc

SEQ ID NO: 368473 - DNA, 33 bp, Homo sapien
tttaatgaaagcacaaccttaaagttggtcggg

SEQ ID NO: 368474 - DNA, 33 bp, Homo sapien
tttaatgaaagcacaatcttaaagttggtcggg

SEQ ID NO: 368475 - DNA, 33 bp, Homo sapien
gcaagagacaggaagacgggaagacgcagcagg

SEQ ID NO: 368476 - DNA, 33 bp, Homo sapien
gcaagagacaggaagatgggaagacgcagcagg

SEQ ID NO: 368477 - DNA, 33 bp, Homo sapien
tgagtgtcatttccacaaattaaaataacatga

SEQ ID NO: 368478 - DNA, 33 bp, Homo sapien
tgagtgtcatttccacgaattaaaataacatga

SEQ ID NO: 368479 - DNA, 33 bp, Homo sapien
tcaagtgttggagaaaaatcaggagttggcatg

SEQ ID NO: 368480 - DNA, 33 bp, Homo sapien
tcaagtgttggagaaacatcaggagttggcatg

SEQ ID NO: 368481 - DNA, 33 bp, Homo sapien
gagttaaacaacaaatcagatatagcttcagaa

SEQ ID NO: 368482 - DNA, 33 bp, Homo sapien
gagttaaacaacaaattagatatagcttcagaa

SEQ ID NO: 368483 - DNA, 33 bp, Homo sapien
ctattgagctctgctaacttccaaattttggtg

SEQ ID NO: 368484 - DNA, 33 bp, Homo sapien
ctattgagctctgctaccttccaaattttggtg

SEQ ID NO: 368485 - DNA, 33 bp, Homo sapien
cagaatcccaaaatgcgctggagtctagagaga

SEQ ID NO: 368486 - DNA, 33 bp, Homo sapien
cagaatcccaaaatgctctggagtctagagaga

SEQ ID NO: 368487 - DNA, 33 bp, Homo sapien
cagcttttatgaacaactgagtgatgtgtgtat

SEQ ID NO: 368488 - DNA, 33 bp, Homo sapien
cagcttttatgaacaagtgagtgatgtgtgtat

SEQ ID NO: 368489 - DNA, 33 bp, Homo sapien
tgggtccctgcagcaactgaatattaagcacat

SEQ ID NO: 368490 - DNA, 33 bp, Homo sapien
tgggtccctgcagcaagtgaatattaagcacat

SEQ ID NO: 368491 - DNA, 33 bp, Homo sapien
catccttttaggccaaattcaaataccatttcc

SEQ ID NO: 368492 - DNA, 33 bp, Homo sapien
catccttttaggccaagttcaaataccatttcc

SEQ ID NO: 368493 - DNA, 33 bp, Homo sapien
actgacactcagtctacattagcaattggaacc

SEQ ID NO: 368494 - DNA, 33 bp, Homo sapien
actgacactcagtctagattagcaattggaacc

SEQ ID NO: 368495 - DNA, 33 bp, Homo sapien
taatgcatttatcacacggtcactaataatgct

SEQ ID NO: 368496 - DNA, 33 bp, Homo sapien
taatgcatttatcacatggtcactaataatgct

SEQ ID NO: 368497 - DNA, 33 bp, Homo sapien
ggcctgccccagactcacttactcaaaatctgt

SEQ ID NO: 368498 - DNA, 33 bp, Homo sapien
ggcctgccccagactcgcttactcaaaatctgt

SEQ ID NO: 368499 - DNA, 33 bp, Homo sapien
caatctgactgtcatacaggcatttaaaaggca

SEQ ID NO: 368500 - DNA, 33 bp, Homo sapien
caatctgactgtcatataggcatttaaaaggca

SEQ ID NO: 368501 - DNA, 33 bp, Homo sapien
taatctctatttcatacccttaacaggcaccat

SEQ ID NO: 368502 - DNA, 33 bp, Homo sapien
taatctctatttcatatccttaacaggcaccat

SEQ ID NO: 368503 - DNA, 33 bp, Homo sapien
tgatgaaatgagataaaattattaaagtgcttt

SEQ ID NO: 368504 - DNA, 33 bp, Homo sapien
tgatgaaatgagataacattattaaagtgcttt

SEQ ID NO: 368505 - DNA, 33 bp, Homo sapien
ctgtgaggaaagtcctaaccggaagacacttag

SEQ ID NO: 368506 - DNA, 33 bp, Homo sapien
ctgtgaggaaagtcctgaccggaagacacttag

SEQ ID NO: 368507 - DNA, 33 bp, Homo sapien
attggagctttctgaaactgagaggaaagaaag

SEQ ID NO: 368508 - DNA, 33 bp, Homo sapien
attggagctttctgaagctgagaggaaagaaag

SEQ ID NO: 368509 - DNA, 33 bp, Homo sapien
attttcttgaaaaaagcaatagtttggtaagta

SEQ ID NO: 368510 - DNA, 33 bp, Homo sapien
attttcttgaaaaaagtaatagtttggtaagta

SEQ ID NO: 368511 - DNA, 33 bp, Homo sapien
cccaggccatttgaaaatgagagttctgggcca

SEQ ID NO: 368512 - DNA, 33 bp, Homo sapien
cccaggccatttgaaactgagagttctgggcca

SEQ ID NO: 368513 - DNA, 33 bp, Homo sapien
aattatctgtgtgaaccatcattcatgtaacat

SEQ ID NO: 368514 - DNA, 33 bp, Homo sapien
aattatctgtgtgaactatcattcatgtaacat

SEQ ID NO: 368515 - DNA, 33 bp, Homo sapien
tcttttacttttctcactgaaggtatggatgat

SEQ ID NO: 368516 - DNA, 33 bp, Homo sapien
tcttttacttttctcattgaaggtatggatgat

SEQ ID NO: 368517 - DNA, 33 bp, Homo sapien
cgtaatatgcacatggccaacagtgaggtgatc

SEQ ID NO: 368518 - DNA, 33 bp, Homo sapien
cgtaatatgcacatggtcaacagtgaggtgatc

SEQ ID NO: 368519 - DNA, 33 bp, Homo sapien
gtgtgcatgccgtgaacagtgacaccaggaaag

SEQ ID NO: 368520 - DNA, 33 bp, Homo sapien
gtgtgcatgccgtgaatagtgacaccaggaaag

SEQ ID NO: 368521 - DNA, 33 bp, Homo sapien
acatgtgggaaatgcacgtaggaaatgtgatgt

SEQ ID NO: 368522 - DNA, 33 bp, Homo sapien
acatgtgggaaatgcatgtaggaaatgtgatgt

SEQ ID NO: 368523 - DNA, 33 bp, Homo sapien
ctgtgattaaccactacgctatactacccccaa

SEQ ID NO: 368524 - DNA, 33 bp, Homo sapien
ctgtgattaaccactatgctatactacccccaa

SEQ ID NO: 368525 - DNA, 33 bp, Homo sapien
tacagtagattgttgaggtatctcatgcccatt

SEQ ID NO: 368526 - DNA, 33 bp, Homo sapien
tacagtagattgttgatgtatctcatgcccatt

SEQ ID NO: 368527 - DNA, 33 bp, Homo sapien
ccaccaaagccttctacaagttccataggttcc

SEQ ID NO: 368528 - DNA, 33 bp, Homo sapien
ccaccaaagccttctataagttccataggttcc

SEQ ID NO: 368529 - DNA, 33 bp, Homo sapien
ggccacacagttggcaaatggtgcaagtggaac

SEQ ID NO: 368530 - DNA, 33 bp, Homo sapien
ggccacacagttggcagatggtgcaagtggaac

SEQ ID NO: 368531 - DNA, 33 bp, Homo sapien
aatgccgtctttgtagcatagtctttagccttc

SEQ ID NO: 368532 - DNA, 33 bp, Homo sapien
aatgccgtctttgtagtatagtctttagccttc

SEQ ID NO: 368533 - DNA, 33 bp, Homo sapien
gagtgcctgagatacaatggtgaatggagtaga

SEQ ID NO: 368534 - DNA, 33 bp, Homo sapien
gagtgcctgagatacagtggtgaatggagtaga

SEQ ID NO: 368535 - DNA, 33 bp, Homo sapien
gacgaggacccagtcaaaaatttctctcatatc

SEQ ID NO: 368536 - DNA, 33 bp, Homo sapien
gacgaggacccagtcataaatttctctcatatc

SEQ ID NO: 368537 - DNA, 33 bp, Homo sapien
acaggacacaaaaagacgcttgcatttagcatg

SEQ ID NO: 368538 - DNA, 33 bp, Homo sapien
acaggacacaaaaagaggcttgcatttagcatg

SEQ ID NO: 368539 - DNA, 33 bp, Homo sapien
caaaagagccattctaagattttgagcttccaa

SEQ ID NO: 368540 - DNA, 33 bp, Homo sapien
caaaagagccattctaggattttgagcttccaa

SEQ ID NO: 368541 - DNA, 33 bp, Homo sapien
tgttgagtaaatcaaaccctttctaattagaga

SEQ ID NO: 368542 - DNA, 33 bp, Homo sapien
tgttgagtaaatcaaatcctttctaattagaga

SEQ ID NO: 368543 - DNA, 33 bp, Homo sapien
gtccttgattaaaacaacctagccattttattt

SEQ ID NO: 368544 - DNA, 33 bp, Homo sapien
gtccttgattaaaacatcctagccattttattt

SEQ ID NO: 368545 - DNA, 33 bp, Homo sapien
catggagttcaaggtagggtaaaatgagatatg

SEQ ID NO: 368546 - DNA, 33 bp, Homo sapien
catggagttcaaggtatggtaaaatgagatatg

SEQ ID NO: 368547 - DNA, 33 bp, Homo sapien
tgaactccatggtagcaaattggctgggacaga

SEQ ID NO: 368548 - DNA, 33 bp, Homo sapien
tgaactccatggtagcgaattggctgggacaga

SEQ ID NO: 368549 - DNA, 33 bp, Homo sapien
atgtactaaactctacggaaatgtacacttaaa

SEQ ID NO: 368550 - DNA, 33 bp, Homo sapien
atgtactaaactctactgaaatgtacacttaaa

SEQ ID NO: 368551 - DNA, 33 bp, Homo sapien
aaagagtaagactgataatagtgacctttgctg

SEQ ID NO: 368552 - DNA, 33 bp, Homo sapien
aaagagtaagactgatgatagtgacctttgctg

SEQ ID NO: 368553 - DNA, 33 bp, Homo sapien
tgggacagcaaatgacaacacaaaaggaaagca

SEQ ID NO: 368554 - DNA, 33 bp, Homo sapien
tgggacagcaaatgaccacacaaaaggaaagca

SEQ ID NO: 368555 - DNA, 33 bp, Homo sapien
ggggctattgagtgaaagggcaaacatctcctg

SEQ ID NO: 368556 - DNA, 33 bp, Homo sapien
ggggctattgagtgaaggggcaaacatctcctg

SEQ ID NO: 368557 - DNA, 33 bp, Homo sapien
gcgataaaggataaagaaacataccaaaggact

SEQ ID NO: 368558 - DNA, 33 bp, Homo sapien
gcgataaaggataaaggaacataccaaaggact

SEQ ID NO: 368559 - DNA, 33 bp, Homo sapien
taaatgcagatgacaaggcctacacagcctgat

SEQ ID NO: 368560 - DNA, 33 bp, Homo sapien
taaatgcagatgacaatgcctacacagcctgat

SEQ ID NO: 368561 - DNA, 33 bp, Homo sapien
aattaggagacattgcaaggatatcagcaagaa

SEQ ID NO: 368562 - DNA, 33 bp, Homo sapien
aattaggagacattgccaggatatcagcaagaa

SEQ ID NO: 368563 - DNA, 33 bp, Homo sapien
tgcagatcagaaaatacgggatcagagaggttg

SEQ ID NO: 368564 - DNA, 33 bp, Homo sapien
tgcagatcagaaaataggggatcagagaggttg

SEQ ID NO: 368565 - DNA, 33 bp, Homo sapien
gacatttaatgagggcaagtgagatttttcagt

SEQ ID NO: 368566 - DNA, 33 bp, Homo sapien
gacatttaatgagggcgagtgagatttttcagt

SEQ ID NO: 368567 - DNA, 33 bp, Homo sapien
gcaatggttgacttcacgctcctcttctcttgc

SEQ ID NO: 368568 - DNA, 33 bp, Homo sapien
gcaatggttgacttcatgctcctcttctcttgc

SEQ ID NO: 368569 - DNA, 33 bp, Homo sapien
gcaaatacttctggtcccctgagagatgaaagt

SEQ ID NO: 368570 - DNA, 33 bp, Homo sapien
gcaaatacttctggtctcctgagagatgaaagt

SEQ ID NO: 368571 - DNA, 33 bp, Homo sapien
atttgagaaatacataagtttggtccagaaaaa

SEQ ID NO: 368572 - DNA, 33 bp, Homo sapien
atttgagaaatacataggtttggtccagaaaaa

SEQ ID NO: 368573 - DNA, 33 bp, Homo sapien
ttttcattagagaaaacagtgaacatgttaagt

SEQ ID NO: 368574 - DNA, 33 bp, Homo sapien
ttttcattagagaaaagagtgaacatgttaagt

SEQ ID NO: 368575 - DNA, 33 bp, Homo sapien
tgtaccaagacaaggacgctatagctagggtag

SEQ ID NO: 368576 - DNA, 33 bp, Homo sapien
tgtaccaagacaaggatgctatagctagggtag

SEQ ID NO: 368577 - DNA, 33 bp, Homo sapien
aagtctcctggagtcactcttctcttcattata

SEQ ID NO: 368578 - DNA, 33 bp, Homo sapien
aagtctcctggagtcagtcttctcttcattata

SEQ ID NO: 368579 - DNA, 33 bp, Homo sapien
tccaatgccaatttgccacgtgccttgaaacta

SEQ ID NO: 368580 - DNA, 33 bp, Homo sapien
tccaatgccaatttgctacgtgccttgaaacta

SEQ ID NO: 368581 - DNA, 33 bp, Homo sapien
cattcttatgtgcctacgagtcgagtcattcac

SEQ ID NO: 368582 - DNA, 33 bp, Homo sapien
cattcttatgtgcctatgagtcgagtcattcac

SEQ ID NO: 368583 - DNA, 33 bp, Homo sapien
ataggaataataatgcactttctgtagatttgt

SEQ ID NO: 368584 - DNA, 33 bp, Homo sapien
ataggaataataatgcgctttctgtagatttgt

SEQ ID NO: 368585 - DNA, 33 bp, Homo sapien
cattagggtttgcctcaccatctgcagcagctg

SEQ ID NO: 368586 - DNA, 33 bp, Homo sapien
cattagggtttgcctcgccatctgcagcagctg

SEQ ID NO: 368587 - DNA, 33 bp, Homo sapien
actaggaccctctgagaagctggaagaaatcac

SEQ ID NO: 368588 - DNA, 33 bp, Homo sapien
actaggaccctctgaggagctggaagaaatcac

SEQ ID NO: 368589 - DNA, 33 bp, Homo sapien
gtccttaaaacaagcccaaaagaccttccatga

SEQ ID NO: 368590 - DNA, 33 bp, Homo sapien
gtccttaaaacaagccgaaaagaccttccatga

SEQ ID NO: 368591 - DNA, 33 bp, Homo sapien
atgaagaccctgaaaagttaagttaaaggacac

SEQ ID NO: 368592 - DNA, 33 bp, Homo sapien
atgaagaccctgaaaatttaagttaaaggacac

SEQ ID NO: 368593 - DNA, 33 bp, Homo sapien
atgccatatccttcacaaacttatttctagtct

SEQ ID NO: 368594 - DNA, 33 bp, Homo sapien
atgccatatccttcaccaacttatttctagtct

SEQ ID NO: 368595 - DNA, 33 bp, Homo sapien
aaatgaattaatgactaagtagaagagaagaga

SEQ ID NO: 368596 - DNA, 33 bp, Homo sapien
aaatgaattaatgactgagtagaagagaagaga

SEQ ID NO: 368597 - DNA, 33 bp, Homo sapien
gatccagcattgcaaccgaagtcttcttgtctc

SEQ ID NO: 368598 - DNA, 33 bp, Homo sapien
gatccagcattgcaactgaagtcttcttgtctc

SEQ ID NO: 368599 - DNA, 33 bp, Homo sapien
cagcgtgtacggtggtaaaggagttgacaaaac

SEQ ID NO: 368600 - DNA, 33 bp, Homo sapien
cagcgtgtacggtggtgaaggagttgacaaaac

SEQ ID NO: 368601 - DNA, 33 bp, Homo sapien
attttcagttcctaccaactctctgatggccct

SEQ ID NO: 368602 - DNA, 33 bp, Homo sapien
attttcagttcctaccgactctctgatggccct

SEQ ID NO: 368603 - DNA, 33 bp, Homo sapien
acaacacacagcaagacaaaacccaatgcccct

SEQ ID NO: 368604 - DNA, 33 bp, Homo sapien
acaacacacagcaagataaaacccaatgcccct

SEQ ID NO: 368605 - DNA, 33 bp, Homo sapien
tgcatttcagggtttcaccagatgaagtacggc

SEQ ID NO: 368606 - DNA, 33 bp, Homo sapien
tgcatttcagggtttcgccagatgaagtacggc

SEQ ID NO: 368607 - DNA, 33 bp, Homo sapien
gaacgtctgatggaaaaattttaaaaactcctc

SEQ ID NO: 368608 - DNA, 33 bp, Homo sapien
gaacgtctgatggaaacattttaaaaactcctc

SEQ ID NO: 368609 - DNA, 33 bp, Homo sapien
gtgttgaggctgagcacattgtacagataggaa

SEQ ID NO: 368610 - DNA, 33 bp, Homo sapien
gtgttgaggctgagcagattgtacagataggaa

SEQ ID NO: 368611 - DNA, 33 bp, Homo sapien
gtaaagcaaaagtcaccataatggaagaacaaa

SEQ ID NO: 368612 - DNA, 33 bp, Homo sapien
gtaaagcaaaagtcacgataatggaagaacaaa

SEQ ID NO: 368613 - DNA, 33 bp, Homo sapien
atggagaaacaaatacaggttagcaaaggcact

SEQ ID NO: 368614 - DNA, 33 bp, Homo sapien
atggagaaacaaatacgggttagcaaaggcact

SEQ ID NO: 368615 - DNA, 33 bp, Homo sapien
tgagatctttgagagcagaaaagcaatttcaat

SEQ ID NO: 368616 - DNA, 33 bp, Homo sapien
tgagatctttgagagcggaaaagcaatttcaat

SEQ ID NO: 368617 - DNA, 33 bp, Homo sapien
ctatagtgtaatgaccaagaacataggatttgg

SEQ ID NO: 368618 - DNA, 33 bp, Homo sapien
ctatagtgtaatgaccgagaacataggatttgg

SEQ ID NO: 368619 - DNA, 33 bp, Homo sapien
ttattcaaaaattatgaaattactctgggttgg

SEQ ID NO: 368620 - DNA, 33 bp, Homo sapien
ttattcaaaaattatggaattactctgggttgg

SEQ ID NO: 368621 - DNA, 33 bp, Homo sapien
agacttggtcgtctctcaatcaagtgcatcagt

SEQ ID NO: 368622 - DNA, 33 bp, Homo sapien
agacttggtcgtctctgaatcaagtgcatcagt

SEQ ID NO: 368623 - DNA, 33 bp, Homo sapien
tggtgttagcaaccaagccttgtgttattcaaa

SEQ ID NO: 368624 - DNA, 33 bp, Homo sapien
tggtgttagcaaccaatccttgtgttattcaaa

SEQ ID NO: 368625 - DNA, 33 bp, Homo sapien
agttgtgtaagtttagaattctatccaatatgg

SEQ ID NO: 368626 - DNA, 33 bp, Homo sapien
agttgtgtaagtttaggattctatccaatatgg

SEQ ID NO: 368627 - DNA, 33 bp, Homo sapien
tagggaagaagtagtcaaagagtagtccaaaga

SEQ ID NO: 368628 - DNA, 33 bp, Homo sapien
tagggaagaagtagtcgaagagtagtccaaaga

SEQ ID NO: 368629 - DNA, 33 bp, Homo sapien
gggtggtttccctggacgataatcacttcttga

SEQ ID NO: 368630 - DNA, 33 bp, Homo sapien
gggtggtttccctggatgataatcacttcttga

SEQ ID NO: 368631 - DNA, 33 bp, Homo sapien
agaagatgaacaattaaggatgaggaaaaacaa

SEQ ID NO: 368632 - DNA, 33 bp, Homo sapien
agaagatgaacaattagggatgaggaaaaacaa

SEQ ID NO: 368633 - DNA, 33 bp, Homo sapien
taagcttcctctaaaaaacctcacagattggca

SEQ ID NO: 368634 - DNA, 33 bp, Homo sapien
taagcttcctctaaaatacctcacagattggca

SEQ ID NO: 368635 - DNA, 33 bp, Homo sapien
atttaatttccttctgcattttgaagtcgaagt

SEQ ID NO: 368636 - DNA, 33 bp, Homo sapien
atttaatttccttctgtattttgaagtcgaagt

SEQ ID NO: 368637 - DNA, 33 bp, Homo sapien
ctctccgtctttgtgccaactgcatcataatga

SEQ ID NO: 368638 - DNA, 33 bp, Homo sapien
ctctccgtctttgtgctaactgcatcataatga

SEQ ID NO: 368639 - DNA, 33 bp, Homo sapien
tcagtgggaaatgggacgtagagtcaatggccc

SEQ ID NO: 368640 - DNA, 33 bp, Homo sapien
tcagtgggaaatgggatgtagagtcaatggccc

SEQ ID NO: 368641 - DNA, 33 bp, Homo sapien
ggaaacaaaggtcctgaaacaagaaatgccttg

SEQ ID NO: 368642 - DNA, 33 bp, Homo sapien
ggaaacaaaggtcctggaacaagaaatgccttg

SEQ ID NO: 368643 - DNA, 33 bp, Homo sapien
tgaagggtcataaaaacgtcttgttcagttagt

SEQ ID NO: 368644 - DNA, 33 bp, Homo sapien
tgaagggtcataaaaatgtcttgttcagttagt

SEQ ID NO: 368645 - DNA, 33 bp, Homo sapien
gtaacttatccaaaacgacaaagctactatgta

SEQ ID NO: 368646 - DNA, 33 bp, Homo sapien
gtaacttatccaaaactacaaagctactatgta

SEQ ID NO: 368647 - DNA, 33 bp, Homo sapien
tcccttttgctttaggacaagttgcaattagac

SEQ ID NO: 368648 - DNA, 33 bp, Homo sapien
tcccttttgctttagggcaagttgcaattagac

SEQ ID NO: 368649 - DNA, 33 bp, Homo sapien
aaacaggctctggttacctattcatttcagttc

SEQ ID NO: 368650 - DNA, 33 bp, Homo sapien
aaacaggctctggttagctattcatttcagttc

SEQ ID NO: 368651 - DNA, 33 bp, Homo sapien
tatcgagaatttagtacgtgccagacacacttc

SEQ ID NO: 368652 - DNA, 33 bp, Homo sapien
tatcgagaatttagtatgtgccagacacacttc

SEQ ID NO: 368653 - DNA, 33 bp, Homo sapien
tccctctgtgtttctacactttgtctctctgct

SEQ ID NO: 368654 - DNA, 33 bp, Homo sapien
tccctctgtgtttctatactttgtctctctgct

SEQ ID NO: 368655 - DNA, 33 bp, Homo sapien
gttgataagagtgacaataagaggaagagaagg

SEQ ID NO: 368656 - DNA, 33 bp, Homo sapien
gttgataagagtgacagtaagaggaagagaagg

SEQ ID NO: 368657 - DNA, 33 bp, Homo sapien
attcactgaaaccataaagcagtgtgtcctgct

SEQ ID NO: 368658 - DNA, 33 bp, Homo sapien
attcactgaaaccatagagcagtgtgtcctgct

SEQ ID NO: 368659 - DNA, 33 bp, Homo sapien
atggaaacaacagctcaaatgaacttcaggaac

SEQ ID NO: 368660 - DNA, 33 bp, Homo sapien
atggaaacaacagctcgaatgaacttcaggaac

SEQ ID NO: 368661 - DNA, 33 bp, Homo sapien
tgccatgagcccttaagattgatttctggttga

SEQ ID NO: 368662 - DNA, 33 bp, Homo sapien
tgccatgagcccttaatattgatttctggttga

SEQ ID NO: 368663 - DNA, 33 bp, Homo sapien
ctggtttctctcagacagactagacccaaatcc

SEQ ID NO: 368664 - DNA, 33 bp, Homo sapien
ctggtttctctcagacggactagacccaaatcc

SEQ ID NO: 368665 - DNA, 33 bp, Homo sapien
tcttcatgttgaggaggataagcaggaggagga

SEQ ID NO: 368666 - DNA, 33 bp, Homo sapien
tcttcatgttgaggagtataagcaggaggagga

SEQ ID NO: 368667 - DNA, 33 bp, Homo sapien
acctgatttaaccacaaatggagccaaattaac

SEQ ID NO: 368668 - DNA, 33 bp, Homo sapien
acctgatttaaccacatatggagccaaattaac

SEQ ID NO: 368669 - DNA, 33 bp, Homo sapien
agaataaagtaaattaacagggtgctatcaaga

SEQ ID NO: 368670 - DNA, 33 bp, Homo sapien
agaataaagtaaattagcagggtgctatcaaga

SEQ ID NO: 368671 - DNA, 33 bp, Homo sapien
aaaaacagtgattttacggtaagacgatttggc

SEQ ID NO: 368672 - DNA, 33 bp, Homo sapien
aaaaacagtgattttatggtaagacgatttggc

SEQ ID NO: 368673 - DNA, 33 bp, Homo sapien
aggatttaaactgccaatctgactccagagcca

SEQ ID NO: 368674 - DNA, 33 bp, Homo sapien
aggatttaaactgccagtctgactccagagcca

SEQ ID NO: 368675 - DNA, 33 bp, Homo sapien
cccactatgatagaaccgaggctgagcaaggcc

SEQ ID NO: 368676 - DNA, 33 bp, Homo sapien
cccactatgatagaactgaggctgagcaaggcc

SEQ ID NO: 368677 - DNA, 33 bp, Homo sapien
ttcactctcttctggcacagaaatgtccttctt

SEQ ID NO: 368678 - DNA, 33 bp, Homo sapien
ttcactctcttctggcgcagaaatgtccttctt

SEQ ID NO: 368679 - DNA, 33 bp, Homo sapien
taagcatagtaaccaagagttagtttttcagcc

SEQ ID NO: 368680 - DNA, 33 bp, Homo sapien
taagcatagtaaccaatagttagtttttcagcc

SEQ ID NO: 368681 - DNA, 33 bp, Homo sapien
aaggcctattctcgaacgtaagtacagaaaggg

SEQ ID NO: 368682 - DNA, 33 bp, Homo sapien
aaggcctattctcgaatgtaagtacagaaaggg

SEQ ID NO: 368683 - DNA, 33 bp, Homo sapien
acccacgtttaacttagaagtctcattacttct

SEQ ID NO: 368684 - DNA, 33 bp, Homo sapien
acccacgtttaacttataagtctcattacttct

SEQ ID NO: 368685 - DNA, 33 bp, Homo sapien
gctgaaaccgcatatgcaagagaactacttcac

SEQ ID NO: 368686 - DNA, 33 bp, Homo sapien
gctgaaaccgcatatggaagagaactacttcac

SEQ ID NO: 368687 - DNA, 33 bp, Homo sapien
ctgggagcagctgtaacaccatcatctcttgag

SEQ ID NO: 368688 - DNA, 33 bp, Homo sapien
ctgggagcagctgtaataccatcatctcttgag

SEQ ID NO: 368689 - DNA, 33 bp, Homo sapien
ggttcagtgaggctccaaggatgtaacaggctt

SEQ ID NO: 368690 - DNA, 33 bp, Homo sapien
ggttcagtgaggctccgaggatgtaacaggctt

SEQ ID NO: 368691 - DNA, 33 bp, Homo sapien
cttatttacttcgaaccatcaatagaagtactt

SEQ ID NO: 368692 - DNA, 33 bp, Homo sapien
cttatttacttcgaacgatcaatagaagtactt

SEQ ID NO: 368693 - DNA, 33 bp, Homo sapien
attttaaacaaaaattaaagctcaaaagaactg

SEQ ID NO: 368694 - DNA, 33 bp, Homo sapien
attttaaacaaaaattgaagctcaaaagaactg

SEQ ID NO: 368695 - DNA, 33 bp, Homo sapien
gaaggacattccaggaaaaagtagagggaagtg

SEQ ID NO: 368696 - DNA, 33 bp, Homo sapien
gaaggacattccaggagaaagtagagggaagtg

SEQ ID NO: 368697 - DNA, 33 bp, Homo sapien
atactggcaaacatccaagccaataagaagatg

SEQ ID NO: 368698 - DNA, 33 bp, Homo sapien
atactggcaaacatccgagccaataagaagatg

SEQ ID NO: 368699 - DNA, 33 bp, Homo sapien
aaggcacctaagcagtaaaggttttgtgtgtgg

SEQ ID NO: 368700 - DNA, 33 bp, Homo sapien
aaggcacctaagcagtgaaggttttgtgtgtgg

SEQ ID NO: 368701 - DNA, 33 bp, Homo sapien
ttctaaaacagaaactaagttgttcacctttgt

SEQ ID NO: 368702 - DNA, 33 bp, Homo sapien
ttctaaaacagaaactcagttgttcacctttgt

SEQ ID NO: 368703 - DNA, 33 bp, Homo sapien
ttcacctttgtagccacggaccccatcatcatg

SEQ ID NO: 368704 - DNA, 33 bp, Homo sapien
ttcacctttgtagccatggaccccatcatcatg

SEQ ID NO: 368705 - DNA, 33 bp, Homo sapien
aaataactgatggccaaaagcaatttctattga

SEQ ID NO: 368706 - DNA, 33 bp, Homo sapien
aaataactgatggccagaagcaatttctattga

SEQ ID NO: 368707 - DNA, 33 bp, Homo sapien
cacataaagtacttagaaaaatgtagttagtgc

SEQ ID NO: 368708 - DNA, 33 bp, Homo sapien
cacataaagtacttagtaaaatgtagttagtgc

SEQ ID NO: 368709 - DNA, 33 bp, Homo sapien
ctaagtgctcctgacacatagttatctcagtta

SEQ ID NO: 368710 - DNA, 33 bp, Homo sapien
ctaagtgctcctgacatatagttatctcagtta

SEQ ID NO: 368711 - DNA, 33 bp, Homo sapien
actgccctttataaaccgacatctctcatgaga

SEQ ID NO: 368712 - DNA, 33 bp, Homo sapien
actgccctttataaactgacatctctcatgaga

SEQ ID NO: 368713 - DNA, 33 bp, Homo sapien
gtgttacctcccaagccataaacaactcggtta

SEQ ID NO: 368714 - DNA, 33 bp, Homo sapien
gtgttacctcccaagcgataaacaactcggtta

SEQ ID NO: 368715 - DNA, 33 bp, Homo sapien
gtgggggagttcacagcagagggaattgcaagc

SEQ ID NO: 368716 - DNA, 33 bp, Homo sapien
gtgggggagttcacaggagagggaattgcaagc

SEQ ID NO: 368717 - DNA, 33 bp, Homo sapien
tgcatttgcaaatacacagtagaggtaactgca

SEQ ID NO: 368718 - DNA, 33 bp, Homo sapien
tgcatttgcaaatacagagtagaggtaactgca

SEQ ID NO: 368719 - DNA, 33 bp, Homo sapien
ttacatattcttcaaacgcttgaaacccattgc

SEQ ID NO: 368720 - DNA, 33 bp, Homo sapien
ttacatattcttcaaatgcttgaaacccattgc

SEQ ID NO: 368721 - DNA, 33 bp, Homo sapien
tcaagaaattttcaagcctaatagggcagatcg

SEQ ID NO: 368722 - DNA, 33 bp, Homo sapien
tcaagaaattttcaagtctaatagggcagatcg

SEQ ID NO: 368723 - DNA, 33 bp, Homo sapien
cacggagaactgtgacagatgctatcagtgtcc

SEQ ID NO: 368724 - DNA, 33 bp, Homo sapien
cacggagaactgtgaccgatgctatcagtgtcc

SEQ ID NO: 368725 - DNA, 33 bp, Homo sapien
atgataacagagtaaccgaggaatgtagagaca

SEQ ID NO: 368726 - DNA, 33 bp, Homo sapien
atgataacagagtaactgaggaatgtagagaca

SEQ ID NO: 368727 - DNA, 33 bp, Homo sapien
gaccctttgtttcatcaagttagttttcccttt

SEQ ID NO: 368728 - DNA, 33 bp, Homo sapien
gaccctttgtttcatccagttagttttcccttt

SEQ ID NO: 368729 - DNA, 33 bp, Homo sapien
agtccttacatctaaaatgattttgtttagtgt

SEQ ID NO: 368730 - DNA, 33 bp, Homo sapien
agtccttacatctaaagtgattttgtttagtgt

SEQ ID NO: 368731 - DNA, 33 bp, Homo sapien
cttcgtcactatgtccgggacacatgacgggac

SEQ ID NO: 368732 - DNA, 33 bp, Homo sapien
cttcgtcactatgtcctggacacatgacgggac

SEQ ID NO: 368733 - DNA, 33 bp, Homo sapien
gacacctgagtcagctaaataatcatgtttttt

SEQ ID NO: 368734 - DNA, 33 bp, Homo sapien
gacacctgagtcagcttaataatcatgtttttt

SEQ ID NO: 368735 - DNA, 33 bp, Homo sapien
gaggctttaggccatacgttatcagttctacct

SEQ ID NO: 368736 - DNA, 33 bp, Homo sapien
gaggctttaggccatatgttatcagttctacct

SEQ ID NO: 368737 - DNA, 33 bp, Homo sapien
accaaaacaaaattgacatgaaattccaagaaa

SEQ ID NO: 368738 - DNA, 33 bp, Homo sapien
accaaaacaaaattgagatgaaattccaagaaa

SEQ ID NO: 368739 - DNA, 33 bp, Homo sapien
aggcaatttcagcttgaaccaaaacaaaattga

SEQ ID NO: 368740 - DNA, 33 bp, Homo sapien
aggcaatttcagcttggaccaaaacaaaattga

SEQ ID NO: 368741 - DNA, 33 bp, Homo sapien
cagagtggatccgaacactttacagaaattgga

SEQ ID NO: 368742 - DNA, 33 bp, Homo sapien
cagagtggatccgaacgctttacagaaattgga

SEQ ID NO: 368743 - DNA, 33 bp, Homo sapien
agatgctccagtaaatcagttagattcaaggag

SEQ ID NO: 368744 - DNA, 33 bp, Homo sapien
agatgctccagtaaattagttagattcaaggag

SEQ ID NO: 368745 - DNA, 33 bp, Homo sapien
atagctgatcctataactaccctcttacatata

SEQ ID NO: 368746 - DNA, 33 bp, Homo sapien
atagctgatcctataagtaccctcttacatata

SEQ ID NO: 368747 - DNA, 33 bp, Homo sapien
acatagttacatgaaagtattgggtgtattata

SEQ ID NO: 368748 - DNA, 33 bp, Homo sapien
acatagttacatgaaattattgggtgtattata

SEQ ID NO: 368749 - DNA, 33 bp, Homo sapien
gaagttgtttctcagactccaggttgttggttt

SEQ ID NO: 368750 - DNA, 33 bp, Homo sapien
gaagttgtttctcagattccaggttgttggttt

SEQ ID NO: 368751 - DNA, 33 bp, Homo sapien
gcatgaatgtccaggacgttgcgccttgcaaaa

SEQ ID NO: 368752 - DNA, 33 bp, Homo sapien
gcatgaatgtccaggaggttgcgccttgcaaaa

SEQ ID NO: 368753 - DNA, 33 bp, Homo sapien
gaccctaaatgacaaactgataccaaaaaaatc

SEQ ID NO: 368754 - DNA, 33 bp, Homo sapien
gaccctaaatgacaaattgataccaaaaaaatc

SEQ ID NO: 368755 - DNA, 33 bp, Homo sapien
ccatcttactacattgaacatctttgaaaacaa

SEQ ID NO: 368756 - DNA, 33 bp, Homo sapien
ccatcttactacattggacatctttgaaaacaa

SEQ ID NO: 368757 - DNA, 33 bp, Homo sapien
gtgtgaaaacagaaacaacaaaagtcatttagg

SEQ ID NO: 368758 - DNA, 33 bp, Homo sapien
gtgtgaaaacagaaactacaaaagtcatttagg

SEQ ID NO: 368759 - DNA, 33 bp, Homo sapien
gggaatctgacagctacgtaggcaatctttaca

SEQ ID NO: 368760 - DNA, 33 bp, Homo sapien
gggaatctgacagctatgtaggcaatctttaca

SEQ ID NO: 368761 - DNA, 33 bp, Homo sapien
attatattacatccacaccttaaaatcttcaat

SEQ ID NO: 368762 - DNA, 33 bp, Homo sapien
attatattacatccacgccttaaaatcttcaat

SEQ ID NO: 368763 - DNA, 33 bp, Homo sapien
cagtagaaattgaagaaaagcaggggaggagag

SEQ ID NO: 368764 - DNA, 33 bp, Homo sapien
cagtagaaattgaagagaagcaggggaggagag

SEQ ID NO: 368765 - DNA, 33 bp, Homo sapien
gtgtgatgaggaggacagggttgaaatttcaaa

SEQ ID NO: 368766 - DNA, 33 bp, Homo sapien
gtgtgatgaggaggacggggttgaaatttcaaa

SEQ ID NO: 368767 - DNA, 33 bp, Homo sapien
tattagcaacctgccaatgagaaattatgtctt

SEQ ID NO: 368768 - DNA, 33 bp, Homo sapien
tattagcaacctgccagtgagaaattatgtctt

SEQ ID NO: 368769 - DNA, 33 bp, Homo sapien
tcaggaatgtggaaggaaagttgactacattaa

SEQ ID NO: 368770 - DNA, 33 bp, Homo sapien
tcaggaatgtggaaggcaagttgactacattaa

SEQ ID NO: 368771 - DNA, 33 bp, Homo sapien
aagagaaagtacaccacagattagatacacaac

SEQ ID NO: 368772 - DNA, 33 bp, Homo sapien
aagagaaagtacaccatagattagatacacaac

SEQ ID NO: 368773 - DNA, 33 bp, Homo sapien
atacagtacacattacaatttgcgtctaatgcc

SEQ ID NO: 368774 - DNA, 33 bp, Homo sapien
atacagtacacattaccatttgcgtctaatgcc

SEQ ID NO: 368775 - DNA, 33 bp, Homo sapien
tgttaaatttttcaggaacaagtgatattttgg

SEQ ID NO: 368776 - DNA, 33 bp, Homo sapien
tgttaaatttttcagggacaagtgatattttgg

SEQ ID NO: 368777 - DNA, 33 bp, Homo sapien
catctgagcatcacaacggaaaatcttctccaa

SEQ ID NO: 368778 - DNA, 33 bp, Homo sapien
catctgagcatcacaatggaaaatcttctccaa

SEQ ID NO: 368779 - DNA, 33 bp, Homo sapien
aagggctaattatggtcaagcaacatggagtat

SEQ ID NO: 368780 - DNA, 33 bp, Homo sapien
aagggctaattatggttaagcaacatggagtat

SEQ ID NO: 368781 - DNA, 33 bp, Homo sapien
ttctagggaaaacagcagaacttttcagcagga

SEQ ID NO: 368782 - DNA, 33 bp, Homo sapien
ttctagggaaaacagcggaacttttcagcagga

SEQ ID NO: 368783 - DNA, 33 bp, Homo sapien
acaatgccccacattcaagagtattctatctcc

SEQ ID NO: 368784 - DNA, 33 bp, Homo sapien
acaatgccccacattctagagtattctatctcc

SEQ ID NO: 368785 - DNA, 33 bp, Homo sapien
aatggggaatgagacaataaagaggaggtagaa

SEQ ID NO: 368786 - DNA, 33 bp, Homo sapien
aatggggaatgagacagtaaagaggaggtagaa

SEQ ID NO: 368787 - DNA, 33 bp, Homo sapien
caaaactactgcacacaactccttgcctcccaa

SEQ ID NO: 368788 - DNA, 33 bp, Homo sapien
caaaactactgcacacgactccttgcctcccaa

SEQ ID NO: 368789 - DNA, 33 bp, Homo sapien
ggtagtaagtacttagcagatactcaaagaggt

SEQ ID NO: 368790 - DNA, 33 bp, Homo sapien
ggtagtaagtacttaggagatactcaaagaggt

SEQ ID NO: 368791 - DNA, 33 bp, Homo sapien
cctttaaacaagatcaaaaaaagcagacggaaa

SEQ ID NO: 368792 - DNA, 33 bp, Homo sapien
cctttaaacaagatcagaaaaagcagacggaaa

SEQ ID NO: 368793 - DNA, 33 bp, Homo sapien
acaccggtcccgatccacttctactatcacacg

SEQ ID NO: 368794 - DNA, 33 bp, Homo sapien
acaccggtcccgatccgcttctactatcacacg

SEQ ID NO: 368795 - DNA, 33 bp, Homo sapien
agagaacactaggctcactaattcagccctctt

SEQ ID NO: 368796 - DNA, 33 bp, Homo sapien
agagaacactaggctctctaattcagccctctt

SEQ ID NO: 368797 - DNA, 33 bp, Homo sapien
gatttcctttcttatacgacaaagacatctcca

SEQ ID NO: 368798 - DNA, 33 bp, Homo sapien
gatttcctttcttataggacaaagacatctcca

SEQ ID NO: 368799 - DNA, 33 bp, Homo sapien
ctggtttggattctgacgtttctgggcctcccc

SEQ ID NO: 368800 - DNA, 33 bp, Homo sapien
ctggtttggattctgatgtttctgggcctcccc

SEQ ID NO: 368801 - DNA, 33 bp, Homo sapien
agcacagttatagctcactacacccttcaatta

SEQ ID NO: 368802 - DNA, 33 bp, Homo sapien
agcacagttatagctccctacacccttcaatta

SEQ ID NO: 368803 - DNA, 33 bp, Homo sapien
tgcaatgagagtcctacgacagagaaacacgat

SEQ ID NO: 368804 - DNA, 33 bp, Homo sapien
tgcaatgagagtcctatgacagagaaacacgat

SEQ ID NO: 368805 - DNA, 33 bp, Homo sapien
acggaacatcgtatacagaagactgaagatttc

SEQ ID NO: 368806 - DNA, 33 bp, Homo sapien
acggaacatcgtataccgaagactgaagatttc

SEQ ID NO: 368807 - DNA, 33 bp, Homo sapien
aactttacaaaaatgcagattcctggctagcac

SEQ ID NO: 368808 - DNA, 33 bp, Homo sapien
aactttacaaaaatgctgattcctggctagcac

SEQ ID NO: 368809 - DNA, 33 bp, Homo sapien
ccccagcctgctaaaacctcgtctgtgcattaa

SEQ ID NO: 368810 - DNA, 33 bp, Homo sapien
ccccagcctgctaaaatctcgtctgtgcattaa

SEQ ID NO: 368811 - DNA, 33 bp, Homo sapien
acatttcaccaccgataagctagcttcaagagg

SEQ ID NO: 368812 - DNA, 33 bp, Homo sapien
acatttcaccaccgatcagctagcttcaagagg

SEQ ID NO: 368813 - DNA, 33 bp, Homo sapien
tgttgcactatccttcacatctacaacagtgtc

SEQ ID NO: 368814 - DNA, 33 bp, Homo sapien
tgttgcactatccttcgcatctacaacagtgtc

SEQ ID NO: 368815 - DNA, 33 bp, Homo sapien
attctacatttaaaaaaaatcatggtccaaata

SEQ ID NO: 368816 - DNA, 33 bp, Homo sapien
attctacatttaaaaacaatcatggtccaaata

SEQ ID NO: 368817 - DNA, 33 bp, Homo sapien
tgtttaatattgttacagctactcagggttttt

SEQ ID NO: 368818 - DNA, 33 bp, Homo sapien
tgtttaatattgttacggctactcagggttttt

SEQ ID NO: 368819 - DNA, 33 bp, Homo sapien
atgaataaaaagctgacaaaacataaaggagaa

SEQ ID NO: 368820 - DNA, 33 bp, Homo sapien
atgaataaaaagctgagaaaacataaaggagaa

SEQ ID NO: 368821 - DNA, 33 bp, Homo sapien
atctatctagtttttacggccaggtacagtgta

SEQ ID NO: 368822 - DNA, 33 bp, Homo sapien
atctatctagtttttatggccaggtacagtgta

SEQ ID NO: 368823 - DNA, 33 bp, Homo sapien
tatgaagtagaaaagacggctctacaggtacac

SEQ ID NO: 368824 - DNA, 33 bp, Homo sapien
tatgaagtagaaaagatggctctacaggtacac

SEQ ID NO: 368825 - DNA, 33 bp, Homo sapien
tatatgcaatgggtaacgaaattggacaaaatc

SEQ ID NO: 368826 - DNA, 33 bp, Homo sapien
tatatgcaatgggtaatgaaattggacaaaatc

SEQ ID NO: 368827 - DNA, 33 bp, Homo sapien
atgttcaattctaaacagtacagaaagcattgc

SEQ ID NO: 368828 - DNA, 33 bp, Homo sapien
atgttcaattctaaaccgtacagaaagcattgc

SEQ ID NO: 368829 - DNA, 33 bp, Homo sapien
gaggaattatgggaaacaggcgagtttacaaaa

SEQ ID NO: 368830 - DNA, 33 bp, Homo sapien
gaggaattatgggaaagaggcgagtttacaaaa

SEQ ID NO: 368831 - DNA, 33 bp, Homo sapien
ccagccctgtcatttacgtactatgtgatcatg

SEQ ID NO: 368832 - DNA, 33 bp, Homo sapien
ccagccctgtcatttatgtactatgtgatcatg

SEQ ID NO: 368833 - DNA, 33 bp, Homo sapien
atcataaatgatgccaagaaaacaccagaagga

SEQ ID NO: 368834 - DNA, 33 bp, Homo sapien
atcataaatgatgccaggaaaacaccagaagga

SEQ ID NO: 368835 - DNA, 33 bp, Homo sapien
aactggcaacactttagcaccagttcaaaggag

SEQ ID NO: 368836 - DNA, 33 bp, Homo sapien
aactggcaacactttatcaccagttcaaaggag

SEQ ID NO: 368837 - DNA, 33 bp, Homo sapien
gaagcttaattggaaactattgtaattgtctag

SEQ ID NO: 368838 - DNA, 33 bp, Homo sapien
gaagcttaattggaaagtattgtaattgtctag

SEQ ID NO: 368839 - DNA, 33 bp, Homo sapien
aaaccaaagtcctgagaaccgctattatgtaaa

SEQ ID NO: 368840 - DNA, 33 bp, Homo sapien
aaaccaaagtcctgaggaccgctattatgtaaa

SEQ ID NO: 368841 - DNA, 33 bp, Homo sapien
tatttttatgccatcaaaagagagtagttcaaa

SEQ ID NO: 368842 - DNA, 33 bp, Homo sapien
tatttttatgccatcagaagagagtagttcaaa

SEQ ID NO: 368843 - DNA, 33 bp, Homo sapien
tcattttgcttggatgcaagtgaaatatgcatt

SEQ ID NO: 368844 - DNA, 33 bp, Homo sapien
tcattttgcttggatgtaagtgaaatatgcatt

SEQ ID NO: 368845 - DNA, 33 bp, Homo sapien
accttcatttgcccaacattaagaactctgctt

SEQ ID NO: 368846 - DNA, 33 bp, Homo sapien
accttcatttgcccaagattaagaactctgctt

SEQ ID NO: 368847 - DNA, 33 bp, Homo sapien
ggacaattcaacagaaagaaaaggaactgtagg

SEQ ID NO: 368848 - DNA, 33 bp, Homo sapien
ggacaattcaacagaacgaaaaggaactgtagg

SEQ ID NO: 368849 - DNA, 33 bp, Homo sapien
tgtgttatttctaagaatatctggctcctctgt

SEQ ID NO: 368850 - DNA, 33 bp, Homo sapien
tgtgttatttctaagattatctggctcctctgt

SEQ ID NO: 368851 - DNA, 33 bp, Homo sapien
tgtagatgcctttggaagaggttattagcccct

SEQ ID NO: 368852 - DNA, 33 bp, Homo sapien
tgtagatgcctttggaggaggttattagcccct

SEQ ID NO: 368853 - DNA, 33 bp, Homo sapien
cctgaggtgggaagccagagatatacccgaggg

SEQ ID NO: 368854 - DNA, 33 bp, Homo sapien
cctgaggtgggaagccggagatatacccgaggg

SEQ ID NO: 368855 - DNA, 33 bp, Homo sapien
tattactgtggggttaaacaagaaaatgatgct

SEQ ID NO: 368856 - DNA, 33 bp, Homo sapien
tattactgtggggttagacaagaaaatgatgct

SEQ ID NO: 368857 - DNA, 33 bp, Homo sapien
aacatttgagcaaaaacgtcatcctgatagaaa

SEQ ID NO: 368858 - DNA, 33 bp, Homo sapien
aacatttgagcaaaaatgtcatcctgatagaaa

SEQ ID NO: 368859 - DNA, 33 bp, Homo sapien
cattactgagatgacacatttggagttgcttga

SEQ ID NO: 368860 - DNA, 33 bp, Homo sapien
cattactgagatgacatatttggagttgcttga

SEQ ID NO: 368861 - DNA, 33 bp, Homo sapien
tgccagaagagtcacagagaaaagtggtcctga

SEQ ID NO: 368862 - DNA, 33 bp, Homo sapien
tgccagaagagtcacatagaaaagtggtcctga

SEQ ID NO: 368863 - DNA, 33 bp, Homo sapien
ggacacacagctaatacgtgttgcagctgggct

SEQ ID NO: 368864 - DNA, 33 bp, Homo sapien
ggacacacagctaatatgtgttgcagctgggct

SEQ ID NO: 368865 - DNA, 33 bp, Homo sapien
agcttgaagctgctgaatatttgcgaccagaag

SEQ ID NO: 368866 - DNA, 33 bp, Homo sapien
agcttgaagctgctgagtatttgcgaccagaag

SEQ ID NO: 368867 - DNA, 33 bp, Homo sapien
ggaggaaggagtagagaccaggctttggtaatt

SEQ ID NO: 368868 - DNA, 33 bp, Homo sapien
ggaggaaggagtagagcccaggctttggtaatt

SEQ ID NO: 368869 - DNA, 33 bp, Homo sapien
cttcttttcaagattaagatgactccatttctc

SEQ ID NO: 368870 - DNA, 33 bp, Homo sapien
cttcttttcaagattaggatgactccatttctc

SEQ ID NO: 368871 - DNA, 33 bp, Homo sapien
attaaaaatagcattacattgagaataaaccac

SEQ ID NO: 368872 - DNA, 33 bp, Homo sapien
attaaaaatagcattagattgagaataaaccac

SEQ ID NO: 368873 - DNA, 33 bp, Homo sapien
gggaaaccatgacaataaaggaagaacttgcac

SEQ ID NO: 368874 - DNA, 33 bp, Homo sapien
gggaaaccatgacaatgaaggaagaacttgcac

SEQ ID NO: 368875 - DNA, 33 bp, Homo sapien
ggataaatgtcacatacccatttttttggtcta

SEQ ID NO: 368876 - DNA, 33 bp, Homo sapien
ggataaatgtcacatatccatttttttggtcta

SEQ ID NO: 368877 - DNA, 33 bp, Homo sapien
gactctgggtttttcagagcacttattacaaat

SEQ ID NO: 368878 - DNA, 33 bp, Homo sapien
gactctgggtttttcatagcacttattacaaat

SEQ ID NO: 368879 - DNA, 33 bp, Homo sapien
tttccccaaaaacactgaacatttgctagaaga

SEQ ID NO: 368880 - DNA, 33 bp, Homo sapien
tttccccaaaaacacttaacatttgctagaaga

SEQ ID NO: 368881 - DNA, 33 bp, Homo sapien
atgaagccattttgtacgtgtaattaaggtccc

SEQ ID NO: 368882 - DNA, 33 bp, Homo sapien
atgaagccattttgtatgtgtaattaaggtccc

SEQ ID NO: 368883 - DNA, 33 bp, Homo sapien
ctaacttcttcaagacactggacaaacatttgt

SEQ ID NO: 368884 - DNA, 33 bp, Homo sapien
ctaacttcttcaagacgctggacaaacatttgt

SEQ ID NO: 368885 - DNA, 33 bp, Homo sapien
ctagatttcagcctgaggagacactaagcagag

SEQ ID NO: 368886 - DNA, 33 bp, Homo sapien
ctagatttcagcctgatgagacactaagcagag

SEQ ID NO: 368887 - DNA, 33 bp, Homo sapien
agctattgttctaccaacaaggcactgggattc

SEQ ID NO: 368888 - DNA, 33 bp, Homo sapien
agctattgttctaccagcaaggcactgggattc

SEQ ID NO: 368889 - DNA, 33 bp, Homo sapien
atttgttttatttgccactgtactcctcctgtc

SEQ ID NO: 368890 - DNA, 33 bp, Homo sapien
atttgttttatttgccgctgtactcctcctgtc

SEQ ID NO: 368891 - DNA, 33 bp, Homo sapien
tcttttcatcatactacgttgttgagatatttc

SEQ ID NO: 368892 - DNA, 33 bp, Homo sapien
tcttttcatcatactatgttgttgagatatttc

SEQ ID NO: 368893 - DNA, 33 bp, Homo sapien
ggaaaaatcaactctccctcataattgtttgcc

SEQ ID NO: 368894 - DNA, 33 bp, Homo sapien
ggaaaaatcaactctctctcataattgtttgcc

SEQ ID NO: 368895 - DNA, 33 bp, Homo sapien
tacagagtggtttgataaacattgcggagaatc

SEQ ID NO: 368896 - DNA, 33 bp, Homo sapien
tacagagtggtttgatgaacattgcggagaatc

SEQ ID NO: 368897 - DNA, 33 bp, Homo sapien
tacaaaagcttgttataaggcaataataataat

SEQ ID NO: 368898 - DNA, 33 bp, Homo sapien
tacaaaagcttgttatgaggcaataataataat

SEQ ID NO: 368899 - DNA, 33 bp, Homo sapien
tatacacaatagaggactactcaacagacattt

SEQ ID NO: 368900 - DNA, 33 bp, Homo sapien
tatacacaatagaggagtactcaacagacattt

SEQ ID NO: 368901 - DNA, 33 bp, Homo sapien
tagaaactctggatgaaatctttctctaggaag

SEQ ID NO: 368902 - DNA, 33 bp, Homo sapien
tagaaactctggatgatatctttctctaggaag

SEQ ID NO: 368903 - DNA, 33 bp, Homo sapien
cttaaaggcattctacaggaaataaaggttaag

SEQ ID NO: 368904 - DNA, 33 bp, Homo sapien
cttaaaggcattctacgggaaataaaggttaag

SEQ ID NO: 368905 - DNA, 33 bp, Homo sapien
gtcagatcagctgagtcaaacctggcagttcca

SEQ ID NO: 368906 - DNA, 33 bp, Homo sapien
gtcagatcagctgagtgaaacctggcagttcca

SEQ ID NO: 368907 - DNA, 33 bp, Homo sapien
accaatcttaaaggacccatctctgttgagact

SEQ ID NO: 368908 - DNA, 33 bp, Homo sapien
accaatcttaaaggactcatctctgttgagact

SEQ ID NO: 368909 - DNA, 33 bp, Homo sapien
tcaataagctgagaagaaaagaggaaccacttc

SEQ ID NO: 368910 - DNA, 33 bp, Homo sapien
tcaataagctgagaaggaaagaggaaccacttc

SEQ ID NO: 368911 - DNA, 33 bp, Homo sapien
tgggttttattttccacctactcctggcaggaa

SEQ ID NO: 368912 - DNA, 33 bp, Homo sapien
tgggttttattttccagctactcctggcaggaa

SEQ ID NO: 368913 - DNA, 33 bp, Homo sapien
tactcctggcaggaaactgactactctaatgtg

SEQ ID NO: 368914 - DNA, 33 bp, Homo sapien
tactcctggcaggaaattgactactctaatgtg

SEQ ID NO: 368915 - DNA, 33 bp, Homo sapien
tgggtgattccggacacaggacagagaaggtga

SEQ ID NO: 368916 - DNA, 33 bp, Homo sapien
tgggtgattccggacagaggacagagaaggtga

SEQ ID NO: 368917 - DNA, 33 bp, Homo sapien
cgagattctgaactctcaaataaggcagcacca

SEQ ID NO: 368918 - DNA, 33 bp, Homo sapien
cgagattctgaactcttaaataaggcagcacca

SEQ ID NO: 368919 - DNA, 33 bp, Homo sapien
ctggatggatttctagccagaagtgaaagaagg

SEQ ID NO: 368920 - DNA, 33 bp, Homo sapien
ctggatggatttctagtcagaagtgaaagaagg

SEQ ID NO: 368921 - DNA, 33 bp, Homo sapien
gaaattgcagagaggaaacagcaaaaaaatagt

SEQ ID NO: 368922 - DNA, 33 bp, Homo sapien
gaaattgcagagaggagacagcaaaaaaatagt

SEQ ID NO: 368923 - DNA, 33 bp, Homo sapien
tctcaaatggattatgccacctgaagtttcaag

SEQ ID NO: 368924 - DNA, 33 bp, Homo sapien
tctcaaatggattatggcacctgaagtttcaag

SEQ ID NO: 368925 - DNA, 33 bp, Homo sapien
tatgtcatgagggataatagagcagggatgaca

SEQ ID NO: 368926 - DNA, 33 bp, Homo sapien
tatgtcatgagggatattagagcagggatgaca

SEQ ID NO: 368927 - DNA, 33 bp, Homo sapien
ccataggatcacaggtcaaatcatggtcacagt

SEQ ID NO: 368928 - DNA, 33 bp, Homo sapien
ccataggatcacaggttaaatcatggtcacagt

SEQ ID NO: 368929 - DNA, 33 bp, Homo sapien
ttaggcagtaccaagaaagaacttctgagctcc

SEQ ID NO: 368930 - DNA, 33 bp, Homo sapien
ttaggcagtaccaagagagaacttctgagctcc

SEQ ID NO: 368931 - DNA, 33 bp, Homo sapien
caaagacaacttccaactcagtaccacattaag

SEQ ID NO: 368932 - DNA, 33 bp, Homo sapien
caaagacaacttccaattcagtaccacattaag

SEQ ID NO: 368933 - DNA, 33 bp, Homo sapien
ggtactaaagggtgagcaatcaataataaatat

SEQ ID NO: 368934 - DNA, 33 bp, Homo sapien
ggtactaaagggtgaggaatcaataataaatat

SEQ ID NO: 368935 - DNA, 33 bp, Homo sapien
aaagaaggctgataaaaactggtttgctcttga

SEQ ID NO: 368936 - DNA, 33 bp, Homo sapien
aaagaaggctgataaacactggtttgctcttga

SEQ ID NO: 368937 - DNA, 33 bp, Homo sapien
ggcacaagaactgtgaccaatgcaggtgcaaag

SEQ ID NO: 368938 - DNA, 33 bp, Homo sapien
ggcacaagaactgtgatcaatgcaggtgcaaag

SEQ ID NO: 368939 - DNA, 33 bp, Homo sapien
ttgaatgtgatgccccaaagaggtaagtcaact

SEQ ID NO: 368940 - DNA, 33 bp, Homo sapien
ttgaatgtgatgcccccaagaggtaagtcaact

SEQ ID NO: 368941 - DNA, 33 bp, Homo sapien
agagacaaaggtagcactataaacatgaatcaa

SEQ ID NO: 368942 - DNA, 33 bp, Homo sapien
agagacaaaggtagcattataaacatgaatcaa

SEQ ID NO: 368943 - DNA, 33 bp, Homo sapien
actcattgagacataaataataaaaatggaagg

SEQ ID NO: 368944 - DNA, 33 bp, Homo sapien
actcattgagacataattaataaaaatggaagg

SEQ ID NO: 368945 - DNA, 33 bp, Homo sapien
caatgcagctatcctggagttcagtcagaagga

SEQ ID NO: 368946 - DNA, 33 bp, Homo sapien
caatgcagctatcctgtagttcagtcagaagga

SEQ ID NO: 368947 - DNA, 33 bp, Homo sapien
cacagatgtaaaatctcaaggtcatttgtcaga

SEQ ID NO: 368948 - DNA, 33 bp, Homo sapien
cacagatgtaaaatcttaaggtcatttgtcaga

SEQ ID NO: 368949 - DNA, 33 bp, Homo sapien
gctttttagtttgctgcagtccctgtcttctat

SEQ ID NO: 368950 - DNA, 33 bp, Homo sapien
gctttttagtttgctgtagtccctgtcttctat

SEQ ID NO: 368951 - DNA, 33 bp, Homo sapien
aacaatcactggataacaaacagggagacttac

SEQ ID NO: 368952 - DNA, 33 bp, Homo sapien
aacaatcactggataagaaacagggagacttac

SEQ ID NO: 368953 - DNA, 33 bp, Homo sapien
ccataaggctgcacaacaggtcagtgtgttagg

SEQ ID NO: 368954 - DNA, 33 bp, Homo sapien
ccataaggctgcacaataggtcagtgtgttagg

SEQ ID NO: 368955 - DNA, 33 bp, Homo sapien
gcttccaagcccgatactatattgctggtccca

SEQ ID NO: 368956 - DNA, 33 bp, Homo sapien
gcttccaagcccgatattatattgctggtccca

SEQ ID NO: 368957 - DNA, 33 bp, Homo sapien
tctgcctaccttgagaatcacctttgcctgcat

SEQ ID NO: 368958 - DNA, 33 bp, Homo sapien
tctgcctaccttgagagtcacctttgcctgcat

SEQ ID NO: 368959 - DNA, 33 bp, Homo sapien
ggaattaaaagcatctaacagctaaggattcct

SEQ ID NO: 368960 - DNA, 33 bp, Homo sapien
ggaattaaaagcatctgacagctaaggattcct

SEQ ID NO: 368961 - DNA, 33 bp, Homo sapien
cacatgatgggaacgaacatgccctcaggagcc

SEQ ID NO: 368962 - DNA, 33 bp, Homo sapien
cacatgatgggaacgagcatgccctcaggagcc

SEQ ID NO: 368963 - DNA, 33 bp, Homo sapien
aaagagtaactgctacaaactattgatgaatga

SEQ ID NO: 368964 - DNA, 33 bp, Homo sapien
aaagagtaactgctactaactattgatgaatga

SEQ ID NO: 368965 - DNA, 33 bp, Homo sapien
aagccttgtttccacaatacaggcaggaataaa

SEQ ID NO: 368966 - DNA, 33 bp, Homo sapien
aagccttgtttccacattacaggcaggaataaa

SEQ ID NO: 368967 - DNA, 33 bp, Homo sapien
aaaacactcctttggaaatatgaggacagggga

SEQ ID NO: 368968 - DNA, 33 bp, Homo sapien
aaaacactcctttggacatatgaggacagggga

SEQ ID NO: 368969 - DNA, 33 bp, Homo sapien
agaaagcaggacaccaaaatgggatctatgcag

SEQ ID NO: 368970 - DNA, 33 bp, Homo sapien
agaaagcaggacaccagaatgggatctatgcag

SEQ ID NO: 368971 - DNA, 33 bp, Homo sapien
cactcaaaaggtttccgccttatcaaaagtgac

SEQ ID NO: 368972 - DNA, 33 bp, Homo sapien
cactcaaaaggtttcctccttatcaaaagtgac

SEQ ID NO: 368973 - DNA, 33 bp, Homo sapien
ctctgtggtattaagccctgcagttttattatt

SEQ ID NO: 368974 - DNA, 33 bp, Homo sapien
ctctgtggtattaagctctgcagttttattatt

SEQ ID NO: 368975 - DNA, 33 bp, Homo sapien
tcactcacaattcacccaatttcagttaatacg

SEQ ID NO: 368976 - DNA, 33 bp, Homo sapien
tcactcacaattcacctaatttcagttaatacg

SEQ ID NO: 368977 - DNA, 33 bp, Homo sapien
gcacttatgatgccagactcatgaattcccact

SEQ ID NO: 368978 - DNA, 33 bp, Homo sapien
gcacttatgatgccaggctcatgaattcccact

SEQ ID NO: 368979 - DNA, 33 bp, Homo sapien
tcagtcctgttgttaacgtggtaccttgtctcc

SEQ ID NO: 368980 - DNA, 33 bp, Homo sapien
tcagtcctgttgttaatgtggtaccttgtctcc

SEQ ID NO: 368981 - DNA, 33 bp, Homo sapien
tttaccttccatttggcaatcactcatgagctt

SEQ ID NO: 368982 - DNA, 33 bp, Homo sapien
tttaccttccatttgggaatcactcatgagctt

SEQ ID NO: 368983 - DNA, 33 bp, Homo sapien
tctcttcatgtcacccagagtaaaagccaaagt

SEQ ID NO: 368984 - DNA, 33 bp, Homo sapien
tctcttcatgtcacccggagtaaaagccaaagt

SEQ ID NO: 368985 - DNA, 33 bp, Homo sapien
attcaaccatctgtgcaaaggataatagtgtct

SEQ ID NO: 368986 - DNA, 33 bp, Homo sapien
attcaaccatctgtgccaaggataatagtgtct

SEQ ID NO: 368987 - DNA, 33 bp, Homo sapien
gcatgacatgtatgtaccccacgtgcacaccct

SEQ ID NO: 368988 - DNA, 33 bp, Homo sapien
gcatgacatgtatgtatcccacgtgcacaccct

SEQ ID NO: 368989 - DNA, 33 bp, Homo sapien
atattaaatgaaaaacacattacagaacgtgta

SEQ ID NO: 368990 - DNA, 33 bp, Homo sapien
atattaaatgaaaaacgcattacagaacgtgta

SEQ ID NO: 368991 - DNA, 33 bp, Homo sapien
tgctagagcacttacaaatgtcacctcactgaa

SEQ ID NO: 368992 - DNA, 33 bp, Homo sapien
tgctagagcacttacagatgtcacctcactgaa

SEQ ID NO: 368993 - DNA, 33 bp, Homo sapien
gagttgtaattattcaacttgatgcttgactgg

SEQ ID NO: 368994 - DNA, 33 bp, Homo sapien
gagttgtaattattcagcttgatgcttgactgg

SEQ ID NO: 368995 - DNA, 33 bp, Homo sapien
attgggttctcaaggacattcttctggcctggg

SEQ ID NO: 368996 - DNA, 33 bp, Homo sapien
attgggttctcaaggatattcttctggcctggg

SEQ ID NO: 368997 - DNA, 33 bp, Homo sapien
atggttaaaggaacaccaatccatcactttctc

SEQ ID NO: 368998 - DNA, 33 bp, Homo sapien
atggttaaaggaacactaatccatcactttctc

SEQ ID NO: 368999 - DNA, 33 bp, Homo sapien
acattctgcatggactaaatgccagtaccctgt

SEQ ID NO: 369000 - DNA, 33 bp, Homo sapien
acattctgcatggactgaatgccagtaccctgt

SEQ ID NO: 369001 - DNA, 33 bp, Homo sapien
aaatacatcagagcacaggtggacagcactagg

SEQ ID NO: 369002 - DNA, 33 bp, Homo sapien
aaatacatcagagcaccggtggacagcactagg

SEQ ID NO: 369003 - DNA, 33 bp, Homo sapien
agaactcataggtctacagaatttaatgtactt

SEQ ID NO: 369004 - DNA, 33 bp, Homo sapien
agaactcataggtctagagaatttaatgtactt

SEQ ID NO: 369005 - DNA, 33 bp, Homo sapien
tattggaagtaatgaaaactaattctagcaagc

SEQ ID NO: 369006 - DNA, 33 bp, Homo sapien
tattggaagtaatgaacactaattctagcaagc

SEQ ID NO: 369007 - DNA, 33 bp, Homo sapien
agtcttccataggagacagaacctcacaaagca

SEQ ID NO: 369008 - DNA, 33 bp, Homo sapien
agtcttccataggagagagaacctcacaaagca

SEQ ID NO: 369009 - DNA, 33 bp, Homo sapien
tttctcttttctttcacgacctagtgatgggga

SEQ ID NO: 369010 - DNA, 33 bp, Homo sapien
tttctcttttctttcatgacctagtgatgggga

SEQ ID NO: 369011 - DNA, 33 bp, Homo sapien
gagtcaacattccttccccaccgctgttatgac

SEQ ID NO: 369012 - DNA, 33 bp, Homo sapien
gagtcaacattccttctccaccgctgttatgac

SEQ ID NO: 369013 - DNA, 33 bp, Homo sapien
tattatattgcattacaagtaacgtgtgacaat

SEQ ID NO: 369014 - DNA, 33 bp, Homo sapien
tattatattgcattaccagtaacgtgtgacaat

SEQ ID NO: 369015 - DNA, 33 bp, Homo sapien
taatgcaaacaataaactccttagacctcctac

SEQ ID NO: 369016 - DNA, 33 bp, Homo sapien
taatgcaaacaataaattccttagacctcctac

SEQ ID NO: 369017 - DNA, 33 bp, Homo sapien
tcctaatctaaacagaagtaacacaagctggaa

SEQ ID NO: 369018 - DNA, 33 bp, Homo sapien
tcctaatctaaacagaggtaacacaagctggaa

SEQ ID NO: 369019 - DNA, 33 bp, Homo sapien
gagggatctgtagacacacaggcattggcattg

SEQ ID NO: 369020 - DNA, 33 bp, Homo sapien
gagggatctgtagacagacaggcattggcattg

SEQ ID NO: 369021 - DNA, 33 bp, Homo sapien
cctgagaatgtttagaaccatagactccagagt

SEQ ID NO: 369022 - DNA, 33 bp, Homo sapien
cctgagaatgtttagagccatagactccagagt

SEQ ID NO: 369023 - DNA, 33 bp, Homo sapien
gacttgaagttgatgaccttgcgttggttagct

SEQ ID NO: 369024 - DNA, 33 bp, Homo sapien
gacttgaagttgatgatcttgcgttggttagct

SEQ ID NO: 369025 - DNA, 33 bp, Homo sapien
ggcagtggaactgattcaaaccccagtggcctg

SEQ ID NO: 369026 - DNA, 33 bp, Homo sapien
ggcagtggaactgattgaaaccccagtggcctg

SEQ ID NO: 369027 - DNA, 33 bp, Homo sapien
atatatgccctctcagaacctcaaaatgtgact

SEQ ID NO: 369028 - DNA, 33 bp, Homo sapien
atatatgccctctcaggacctcaaaatgtgact

SEQ ID NO: 369029 - DNA, 33 bp, Homo sapien
aattttctttcattaccagcatctaagcgtcct

SEQ ID NO: 369030 - DNA, 33 bp, Homo sapien
aattttctttcattacgagcatctaagcgtcct

SEQ ID NO: 369031 - DNA, 33 bp, Homo sapien
cttactataaatcagaccgcaagtttgggatat

SEQ ID NO: 369032 - DNA, 33 bp, Homo sapien
cttactataaatcagatcgcaagtttgggatat

SEQ ID NO: 369033 - DNA, 33 bp, Homo sapien
aaagcgatgggatgtacgtgacctcatgtgcat

SEQ ID NO: 369034 - DNA, 33 bp, Homo sapien
aaagcgatgggatgtatgtgacctcatgtgcat

SEQ ID NO: 369035 - DNA, 33 bp, Homo sapien
ccagtgcttgcttcaagaatgggcatttgatac

SEQ ID NO: 369036 - DNA, 33 bp, Homo sapien
ccagtgcttgcttcaataatgggcatttgatac

SEQ ID NO: 369037 - DNA, 33 bp, Homo sapien
acctggtgcctctgggacagcccttgagaagag

SEQ ID NO: 369038 - DNA, 33 bp, Homo sapien
acctggtgcctctgggtcagcccttgagaagag

SEQ ID NO: 369039 - DNA, 33 bp, Homo sapien
actgaagtatccatcactcacacctggaccact

SEQ ID NO: 369040 - DNA, 33 bp, Homo sapien
actgaagtatccatcattcacacctggaccact

SEQ ID NO: 369041 - DNA, 33 bp, Homo sapien
gattatgctttgactgcaactcaacctactttt

SEQ ID NO: 369042 - DNA, 33 bp, Homo sapien
gattatgctttgactgtaactcaacctactttt

SEQ ID NO: 369043 - DNA, 33 bp, Homo sapien
tgccaagctttgaagacggttgcttgtaaatag

SEQ ID NO: 369044 - DNA, 33 bp, Homo sapien
tgccaagctttgaagatggttgcttgtaaatag

SEQ ID NO: 369045 - DNA, 33 bp, Homo sapien
agcaatctcaaaaacactgagtgagaaaaacaa

SEQ ID NO: 369046 - DNA, 33 bp, Homo sapien
agcaatctcaaaaacattgagtgagaaaaacaa

SEQ ID NO: 369047 - DNA, 33 bp, Homo sapien
atcctcgctaacactaccttctctttgttgttg

SEQ ID NO: 369048 - DNA, 33 bp, Homo sapien
atcctcgctaacactatcttctctttgttgttg

SEQ ID NO: 369049 - DNA, 33 bp, Homo sapien
taataagatcaaatcaacaaataaaccaccacc

SEQ ID NO: 369050 - DNA, 33 bp, Homo sapien
taataagatcaaatcaccaaataaaccaccacc

SEQ ID NO: 369051 - DNA, 33 bp, Homo sapien
agatataaggtgttaccagctatgaaaccccag

SEQ ID NO: 369052 - DNA, 33 bp, Homo sapien
agatataaggtgttactagctatgaaaccccag

SEQ ID NO: 369053 - DNA, 33 bp, Homo sapien
ggagcctcgcggagaccgtcagggcagccagct

SEQ ID NO: 369054 - DNA, 33 bp, Homo sapien
ggagcctcgcggagactgtcagggcagccagct

SEQ ID NO: 369055 - DNA, 33 bp, Homo sapien
atccttcatcacagcaatcttggtcttatctct

SEQ ID NO: 369056 - DNA, 33 bp, Homo sapien
atccttcatcacagcagtcttggtcttatctct

SEQ ID NO: 369057 - DNA, 33 bp, Homo sapien
aaatcaaatatcctcacgcgaaggtatcaataa

SEQ ID NO: 369058 - DNA, 33 bp, Homo sapien
aaatcaaatatcctcatgcgaaggtatcaataa

SEQ ID NO: 369059 - DNA, 33 bp, Homo sapien
actttcaaatacaggcaaagagagaattaatga

SEQ ID NO: 369060 - DNA, 33 bp, Homo sapien
actttcaaatacaggcgaagagagaattaatga

SEQ ID NO: 369061 - DNA, 33 bp, Homo sapien
tttacttaaaatgcataaacagaacaagttact

SEQ ID NO: 369062 - DNA, 33 bp, Homo sapien
tttacttaaaatgcatgaacagaacaagttact

SEQ ID NO: 369063 - DNA, 33 bp, Homo sapien
gctagcaaaagcattacggagatagaagatgaa

SEQ ID NO: 369064 - DNA, 33 bp, Homo sapien
gctagcaaaagcattatggagatagaagatgaa

SEQ ID NO: 369065 - DNA, 33 bp, Homo sapien
actcaatcatctaggacgagctggcctaacaga

SEQ ID NO: 369066 - DNA, 33 bp, Homo sapien
actcaatcatctaggaggagctggcctaacaga

SEQ ID NO: 369067 - DNA, 33 bp, Homo sapien
ttcttatgctactgaactaatgagcatgcacct

SEQ ID NO: 369068 - DNA, 33 bp, Homo sapien
ttcttatgctactgaattaatgagcatgcacct

SEQ ID NO: 369069 - DNA, 33 bp, Homo sapien
tgtagggttgtagctacgttcccataaaacttc

SEQ ID NO: 369070 - DNA, 33 bp, Homo sapien
tgtagggttgtagctatgttcccataaaacttc

SEQ ID NO: 369071 - DNA, 33 bp, Homo sapien
accacattttgagaaccattgtattaagccaag

SEQ ID NO: 369072 - DNA, 33 bp, Homo sapien
accacattttgagaacgattgtattaagccaag

SEQ ID NO: 369073 - DNA, 33 bp, Homo sapien
ttctgggcacactgccgacaggatagccctgct

SEQ ID NO: 369074 - DNA, 33 bp, Homo sapien
ttctgggcacactgcctacaggatagccctgct

SEQ ID NO: 369075 - DNA, 33 bp, Homo sapien
agggttgtggcctaaaacaatgatgggagatgg

SEQ ID NO: 369076 - DNA, 33 bp, Homo sapien
agggttgtggcctaaagcaatgatgggagatgg

SEQ ID NO: 369077 - DNA, 33 bp, Homo sapien
gaacccaattgtcttaagtcatattccccagaa

SEQ ID NO: 369078 - DNA, 33 bp, Homo sapien
gaacccaattgtcttaggtcatattccccagaa

SEQ ID NO: 369079 - DNA, 33 bp, Homo sapien
gccaggggatgtggaaactcaaaagagacgtga

SEQ ID NO: 369080 - DNA, 33 bp, Homo sapien
gccaggggatgtggaacctcaaaagagacgtga

SEQ ID NO: 369081 - DNA, 33 bp, Homo sapien
tattttttaagattccaaaatgctgtctaaaac

SEQ ID NO: 369082 - DNA, 33 bp, Homo sapien
tattttttaagattccgaaatgctgtctaaaac

SEQ ID NO: 369083 - DNA, 33 bp, Homo sapien
agaataaaggagagaacgcacagcagcacgtaa

SEQ ID NO: 369084 - DNA, 33 bp, Homo sapien
agaataaaggagagaatgcacagcagcacgtaa

SEQ ID NO: 369085 - DNA, 33 bp, Homo sapien
actctgcatgtttccaagaaaggcttctctcct

SEQ ID NO: 369086 - DNA, 33 bp, Homo sapien
actctgcatgtttccaggaaaggcttctctcct

SEQ ID NO: 369087 - DNA, 33 bp, Homo sapien
attttcagggtaatcacaaataggggtggttaa

SEQ ID NO: 369088 - DNA, 33 bp, Homo sapien
attttcagggtaatcataaataggggtggttaa

SEQ ID NO: 369089 - DNA, 33 bp, Homo sapien
gacatttcatgaagaacgacagaatgtaaggca

SEQ ID NO: 369090 - DNA, 33 bp, Homo sapien
gacatttcatgaagaaggacagaatgtaaggca

SEQ ID NO: 369091 - DNA, 33 bp, Homo sapien
tagacatattgtctaccgagcttcaggctgaat

SEQ ID NO: 369092 - DNA, 33 bp, Homo sapien
tagacatattgtctactgagcttcaggctgaat

SEQ ID NO: 369093 - DNA, 33 bp, Homo sapien
taatcagtgaccaagaagcatatggccctagaa

SEQ ID NO: 369094 - DNA, 33 bp, Homo sapien
taatcagtgaccaagaggcatatggccctagaa

SEQ ID NO: 369095 - DNA, 33 bp, Homo sapien
attaacctggcttgcccaaagactttgttcttt

SEQ ID NO: 369096 - DNA, 33 bp, Homo sapien
attaacctggcttgccgaaagactttgttcttt

SEQ ID NO: 369097 - DNA, 33 bp, Homo sapien
gggcagggaagtgcccaaagtgccatccaagag

SEQ ID NO: 369098 - DNA, 33 bp, Homo sapien
gggcagggaagtgcccgaagtgccatccaagag

SEQ ID NO: 369099 - DNA, 33 bp, Homo sapien
ggttcaggcctgtttaggtggaaattatggggt

SEQ ID NO: 369100 - DNA, 33 bp, Homo sapien
ggttcaggcctgtttatgtggaaattatggggt

SEQ ID NO: 369101 - DNA, 33 bp, Homo sapien
aggatttactctgtaacaggttttccccaagcc

SEQ ID NO: 369102 - DNA, 33 bp, Homo sapien
aggatttactctgtaataggttttccccaagcc

SEQ ID NO: 369103 - DNA, 33 bp, Homo sapien
ttgaaaatattaatcgcccttgtcagtattgag

SEQ ID NO: 369104 - DNA, 33 bp, Homo sapien
ttgaaaatattaatcgtccttgtcagtattgag

SEQ ID NO: 369105 - DNA, 33 bp, Homo sapien
tgtaatggtgaggaacacaggctccagaatata

SEQ ID NO: 369106 - DNA, 33 bp, Homo sapien
tgtaatggtgaggaacgcaggctccagaatata

SEQ ID NO: 369107 - DNA, 33 bp, Homo sapien
ccacgggtgaagctagaatgatgtatcgctttt

SEQ ID NO: 369108 - DNA, 33 bp, Homo sapien
ccacgggtgaagctagcatgatgtatcgctttt

SEQ ID NO: 369109 - DNA, 33 bp, Homo sapien
caagtgcagccaacacagtcagggtacacagta

SEQ ID NO: 369110 - DNA, 33 bp, Homo sapien
caagtgcagccaacacggtcagggtacacagta

SEQ ID NO: 369111 - DNA, 33 bp, Homo sapien
attaaaattaaaaacacgcatttctcatgactc

SEQ ID NO: 369112 - DNA, 33 bp, Homo sapien
attaaaattaaaaacaggcatttctcatgactc

SEQ ID NO: 369113 - DNA, 33 bp, Homo sapien
aaggcaggaggatcagccagggcaacataacaa

SEQ ID NO: 369114 - DNA, 33 bp, Homo sapien
aaggcaggaggatcaggcagggcaacataacaa

SEQ ID NO: 369115 - DNA, 33 bp, Homo sapien
cctcagaaagcgttcactccaaagcctttattt

SEQ ID NO: 369116 - DNA, 33 bp, Homo sapien
cctcagaaagcgttcagtccaaagcctttattt

SEQ ID NO: 369117 - DNA, 33 bp, Homo sapien
gacaaacagaaaggaaagacaatgtaaagacac

SEQ ID NO: 369118 - DNA, 33 bp, Homo sapien
gacaaacagaaaggaaggacaatgtaaagacac

SEQ ID NO: 369119 - DNA, 33 bp, Homo sapien
ctggcttcctccagaacgggcattggagaaagc

SEQ ID NO: 369120 - DNA, 33 bp, Homo sapien
ctggcttcctccagaatgggcattggagaaagc

SEQ ID NO: 369121 - DNA, 33 bp, Homo sapien
gcaccaacctaatatacgccatttgtatttatc

SEQ ID NO: 369122 - DNA, 33 bp, Homo sapien
gcaccaacctaatatatgccatttgtatttatc

SEQ ID NO: 369123 - DNA, 33 bp, Homo sapien
gacctctgtgacaatacggtcccttgccccaac

SEQ ID NO: 369124 - DNA, 33 bp, Homo sapien
gacctctgtgacaatatggtcccttgccccaac

SEQ ID NO: 369125 - DNA, 33 bp, Homo sapien
ctctctgagtcacctccctcttcacttttaagg

SEQ ID NO: 369126 - DNA, 33 bp, Homo sapien
ctctctgagtcacctctctcttcacttttaagg

SEQ ID NO: 369127 - DNA, 33 bp, Homo sapien
caccagttgcaatgcacggttctgttcttcttc

SEQ ID NO: 369128 - DNA, 33 bp, Homo sapien
caccagttgcaatgcatggttctgttcttcttc

SEQ ID NO: 369129 - DNA, 33 bp, Homo sapien
ctttatctttctctccagagcagaaaatgagag

SEQ ID NO: 369130 - DNA, 33 bp, Homo sapien
ctttatctttctctccggagcagaaaatgagag

SEQ ID NO: 369131 - DNA, 33 bp, Homo sapien
atgagatggttaaaagacaagaggtaaggtgcc

SEQ ID NO: 369132 - DNA, 33 bp, Homo sapien
atgagatggttaaaaggcaagaggtaaggtgcc

SEQ ID NO: 369133 - DNA, 33 bp, Homo sapien
tatttaaaagtttttacaagaaattgcagggaa

SEQ ID NO: 369134 - DNA, 33 bp, Homo sapien
tatttaaaagtttttataagaaattgcagggaa

SEQ ID NO: 369135 - DNA, 33 bp, Homo sapien
accattcattccttcaaacacaatgtgggtgtt

SEQ ID NO: 369136 - DNA, 33 bp, Homo sapien
accattcattccttcagacacaatgtgggtgtt

SEQ ID NO: 369137 - DNA, 33 bp, Homo sapien
cccaccataaaattccgcactgctctcaactct

SEQ ID NO: 369138 - DNA, 33 bp, Homo sapien
cccaccataaaattcctcactgctctcaactct

SEQ ID NO: 369139 - DNA, 33 bp, Homo sapien
ggagtcctctaccacacgtgaatcttgaatatt

SEQ ID NO: 369140 - DNA, 33 bp, Homo sapien
ggagtcctctaccacatgtgaatcttgaatatt

SEQ ID NO: 369141 - DNA, 33 bp, Homo sapien
gaacgctagaagttcagcttattcaaatattca

SEQ ID NO: 369142 - DNA, 33 bp, Homo sapien
gaacgctagaagttcatcttattcaaatattca

SEQ ID NO: 369143 - DNA, 33 bp, Homo sapien
ggtaaagattaaagaggtgaggatggctgaggt

SEQ ID NO: 369144 - DNA, 33 bp, Homo sapien
ggtaaagattaaagagttgaggatggctgaggt

SEQ ID NO: 369145 - DNA, 33 bp, Homo sapien
aaaggcctaagaagaacggtatatgtatggttt

SEQ ID NO: 369146 - DNA, 33 bp, Homo sapien
aaaggcctaagaagaatggtatatgtatggttt

SEQ ID NO: 369147 - DNA, 33 bp, Homo sapien
ctccactatcatcagtaacatgaatatgaatgt

SEQ ID NO: 369148 - DNA, 33 bp, Homo sapien
ctccactatcatcagtgacatgaatatgaatgt

SEQ ID NO: 369149 - DNA, 33 bp, Homo sapien
gagaggattatacaagaccataaatactaggag

SEQ ID NO: 369150 - DNA, 33 bp, Homo sapien
gagaggattatacaaggccataaatactaggag

SEQ ID NO: 369151 - DNA, 33 bp, Homo sapien
ggtcatttcttgcccaaacttgtgagattttac

SEQ ID NO: 369152 - DNA, 33 bp, Homo sapien
ggtcatttcttgcccagacttgtgagattttac

SEQ ID NO: 369153 - DNA, 33 bp, Homo sapien
ttctccctcctcttacccacagtctagaaattg

SEQ ID NO: 369154 - DNA, 33 bp, Homo sapien
ttctccctcctcttactcacagtctagaaattg

SEQ ID NO: 369155 - DNA, 33 bp, Homo sapien
tgagatgagcccataactgccctaactttctgc

SEQ ID NO: 369156 - DNA, 33 bp, Homo sapien
tgagatgagcccataattgccctaactttctgc

SEQ ID NO: 369157 - DNA, 33 bp, Homo sapien
cacacattggcaaacacgtaatgcagggctgtg

SEQ ID NO: 369158 - DNA, 33 bp, Homo sapien
cacacattggcaaacaggtaatgcagggctgtg

SEQ ID NO: 369159 - DNA, 33 bp, Homo sapien
tattccagtgtttcagcaatttttacatggtca

SEQ ID NO: 369160 - DNA, 33 bp, Homo sapien
tattccagtgtttcagtaatttttacatggtca

SEQ ID NO: 369161 - DNA, 33 bp, Homo sapien
acacaatgccttttggaatgaattagggagaga

SEQ ID NO: 369162 - DNA, 33 bp, Homo sapien
acacaatgccttttgggatgaattagggagaga

SEQ ID NO: 369163 - DNA, 33 bp, Homo sapien
agaggtttggactgccaaggatggacttaaatt

SEQ ID NO: 369164 - DNA, 33 bp, Homo sapien
agaggtttggactgccgaggatggacttaaatt

SEQ ID NO: 369165 - DNA, 33 bp, Homo sapien
ctttcatgctaacatgcaaagaaaggtacctgc

SEQ ID NO: 369166 - DNA, 33 bp, Homo sapien
ctttcatgctaacatggaaagaaaggtacctgc

SEQ ID NO: 369167 - DNA, 33 bp, Homo sapien
agatttccagccactacgtcttcatcacaagta

SEQ ID NO: 369168 - DNA, 33 bp, Homo sapien
agatttccagccactatgtcttcatcacaagta

SEQ ID NO: 369169 - DNA, 33 bp, Homo sapien
ggttttatcaattctcactagcaatctacttta

SEQ ID NO: 369170 - DNA, 33 bp, Homo sapien
ggttttatcaattctcgctagcaatctacttta

SEQ ID NO: 369171 - DNA, 33 bp, Homo sapien
tggctgatccaaacacaaccttcaggcttccct

SEQ ID NO: 369172 - DNA, 33 bp, Homo sapien
tggctgatccaaacacgaccttcaggcttccct

SEQ ID NO: 369173 - DNA, 33 bp, Homo sapien
aatgccatttatacaccgatgacccacatttct

SEQ ID NO: 369174 - DNA, 33 bp, Homo sapien
aatgccatttatacactgatgacccacatttct

SEQ ID NO: 369175 - DNA, 33 bp, Homo sapien
atacataggttatgtacgcacaaaagggaattt

SEQ ID NO: 369176 - DNA, 33 bp, Homo sapien
atacataggttatgtatgcacaaaagggaattt

SEQ ID NO: 369177 - DNA, 33 bp, Homo sapien
atctgcacagaaatctaaactttaatgattcta

SEQ ID NO: 369178 - DNA, 33 bp, Homo sapien
atctgcacagaaatctgaactttaatgattcta

SEQ ID NO: 369179 - DNA, 33 bp, Homo sapien
ttaaatacatttactcagacttgcaattccacg

SEQ ID NO: 369180 - DNA, 33 bp, Homo sapien
ttaaatacatttactcggacttgcaattccacg

SEQ ID NO: 369181 - DNA, 33 bp, Homo sapien
tggtacttcctagagacggccggagccaggccc

SEQ ID NO: 369182 - DNA, 33 bp, Homo sapien
tggtacttcctagagatggccggagccaggccc

SEQ ID NO: 369183 - DNA, 33 bp, Homo sapien
ttactacgtgtaacaaaagtctgcttttccagc

SEQ ID NO: 369184 - DNA, 33 bp, Homo sapien
ttactacgtgtaacaacagtctgcttttccagc

SEQ ID NO: 369185 - DNA, 33 bp, Homo sapien
cgccctagaggccacaaaattagcccaaaatta

SEQ ID NO: 369186 - DNA, 33 bp, Homo sapien
cgccctagaggccacagaattagcccaaaatta

SEQ ID NO: 369187 - DNA, 33 bp, Homo sapien
aattatcaaagaacataaactggaaggtcaggt

SEQ ID NO: 369188 - DNA, 33 bp, Homo sapien
aattatcaaagaacattaactggaaggtcaggt

SEQ ID NO: 369189 - DNA, 33 bp, Homo sapien
ctggagagcatcctaactgcatttcaactcatc

SEQ ID NO: 369190 - DNA, 33 bp, Homo sapien
ctggagagcatcctaagtgcatttcaactcatc

SEQ ID NO: 369191 - DNA, 33 bp, Homo sapien
attgattaccaaaacacagcaaaatgttcatta

SEQ ID NO: 369192 - DNA, 33 bp, Homo sapien
attgattaccaaaacagagcaaaatgttcatta

SEQ ID NO: 369193 - DNA, 33 bp, Homo sapien
gaattgtatgtaaatgcaatcaaacagtacgtg

SEQ ID NO: 369194 - DNA, 33 bp, Homo sapien
gaattgtatgtaaatggaatcaaacagtacgtg

SEQ ID NO: 369195 - DNA, 33 bp, Homo sapien
taccttgtatttgagaaaggatgaggtctggct

SEQ ID NO: 369196 - DNA, 33 bp, Homo sapien
taccttgtatttgagataggatgaggtctggct

SEQ ID NO: 369197 - DNA, 33 bp, Homo sapien
gacaatacttgttgagcacatacctcgtgcaga

SEQ ID NO: 369198 - DNA, 33 bp, Homo sapien
gacaatacttgttgaggacatacctcgtgcaga

SEQ ID NO: 369199 - DNA, 33 bp, Homo sapien
cagacgccggggccagaacagacacatccaccc

SEQ ID NO: 369200 - DNA, 33 bp, Homo sapien
cagacgccggggccaggacagacacatccaccc

SEQ ID NO: 369201 - DNA, 33 bp, Homo sapien
tgagtccaaaactaacgggcaggtggaatggaa

SEQ ID NO: 369202 - DNA, 33 bp, Homo sapien
tgagtccaaaactaactggcaggtggaatggaa

SEQ ID NO: 369203 - DNA, 33 bp, Homo sapien
ttctgtccgtgttgtgaaaaccaggtattttca

SEQ ID NO: 369204 - DNA, 33 bp, Homo sapien
ttctgtccgtgttgtggaaaccaggtattttca

SEQ ID NO: 369205 - DNA, 33 bp, Homo sapien
aggaggagaaatgaaacatgaggtgagggggtt

SEQ ID NO: 369206 - DNA, 33 bp, Homo sapien
aggaggagaaatgaaagatgaggtgagggggtt

SEQ ID NO: 369207 - DNA, 33 bp, Homo sapien
tctttgcctaactctgcagaacctgttttcttg

SEQ ID NO: 369208 - DNA, 33 bp, Homo sapien
tctttgcctaactctgtagaacctgttttcttg

SEQ ID NO: 369209 - DNA, 33 bp, Homo sapien
aaaaactcccatgtaacaagcatctggatcaag

SEQ ID NO: 369210 - DNA, 33 bp, Homo sapien
aaaaactcccatgtaataagcatctggatcaag

SEQ ID NO: 369211 - DNA, 33 bp, Homo sapien
catctggatcaagaaacggaacatatgaaagtg

SEQ ID NO: 369212 - DNA, 33 bp, Homo sapien
catctggatcaagaaatggaacatatgaaagtg

SEQ ID NO: 369213 - DNA, 33 bp, Homo sapien
gcatgggtggatagacaaatggatagatggatg

SEQ ID NO: 369214 - DNA, 33 bp, Homo sapien
gcatgggtggatagacgaatggatagatggatg

SEQ ID NO: 369215 - DNA, 33 bp, Homo sapien
cagggaacttcctggacgcacaggaaccccaga

SEQ ID NO: 369216 - DNA, 33 bp, Homo sapien
cagggaacttcctggaggcacaggaaccccaga

SEQ ID NO: 369217 - DNA, 33 bp, Homo sapien
ttcataacagctccaaattggaaacagcgcaga

SEQ ID NO: 369218 - DNA, 33 bp, Homo sapien
ttcataacagctccaagttggaaacagcgcaga

SEQ ID NO: 369219 - DNA, 33 bp, Homo sapien
attggtattaatagaaagcgcgtgtatagtttt

SEQ ID NO: 369220 - DNA, 33 bp, Homo sapien
attggtattaatagaatgcgcgtgtatagtttt

SEQ ID NO: 369221 - DNA, 33 bp, Homo sapien
gatgctcccaaaatgcaagtgaatgaagaatga

SEQ ID NO: 369222 - DNA, 33 bp, Homo sapien
gatgctcccaaaatgctagtgaatgaagaatga

SEQ ID NO: 369223 - DNA, 33 bp, Homo sapien
cttgggacatggaggacaatctacaagcaggtc

SEQ ID NO: 369224 - DNA, 33 bp, Homo sapien
cttgggacatggaggagaatctacaagcaggtc

SEQ ID NO: 369225 - DNA, 33 bp, Homo sapien; identical to SEQ ID NO: 369223

SEQ ID NO: 369226 - DNA, 33 bp, Homo sapien; identical to SEQ ID NO: 369224

SEQ ID NO: 369227 - DNA, 33 bp, Homo sapien
ctgctctgtcgcaccacgatactggctaatttt

SEQ ID NO: 369228 - DNA, 33 bp, Homo sapien
ctgctctgtcgcaccatgatactggctaatttt

SEQ ID NO: 369229 - DNA, 33 bp, Homo sapien
attgtggactgggaaactgttggtttgggaaac

SEQ ID NO: 369230 - DNA, 33 bp, Homo sapien
attgtggactgggaaattgttggtttgggaaac

SEQ ID NO: 369231 - DNA, 33 bp, Homo sapien
acgatgtgagacaaagaagaatgattataattg

SEQ ID NO: 369232 - DNA, 33 bp, Homo sapien
acgatgtgagacaaaggagaatgattataattg

SEQ ID NO: 369233 - DNA, 33 bp, Homo sapien
ccagggttgccaaaaaattctatggcctgcagg

SEQ ID NO: 369234 - DNA, 33 bp, Homo sapien
ccagggttgccaaaaagttctatggcctgcagg

SEQ ID NO: 369235 - DNA, 33 bp, Homo sapien
tcttgataaatcgaacactcttaatgctgcagt

SEQ ID NO: 369236 - DNA, 33 bp, Homo sapien
tcttgataaatcgaaccctcttaatgctgcagt

SEQ ID NO: 369237 - DNA, 33 bp, Homo sapien
gtacgtacaatgatcacgtgtcaactaaaatta

SEQ ID NO: 369238 - DNA, 33 bp, Homo sapien
gtacgtacaatgatcatgtgtcaactaaaatta

SEQ ID NO: 369239 - DNA, 33 bp, Homo sapien
atttaaccgactcagacggaaaatatttggggg

SEQ ID NO: 369240 - DNA, 33 bp, Homo sapien
atttaaccgactcagatggaaaatatttggggg

SEQ ID NO: 369241 - DNA, 33 bp, Homo sapien
tgcttagagctgcacaaataagttctaggtttg

SEQ ID NO: 369242 - DNA, 33 bp, Homo sapien
tgcttagagctgcacagataagttctaggtttg

SEQ ID NO: 369243 - DNA, 33 bp, Homo sapien
aagagtaagaactaaccatatgattcaaagggg

SEQ ID NO: 369244 - DNA, 33 bp, Homo sapien
aagagtaagaactaactatatgattcaaagggg

SEQ ID NO: 369245 - DNA, 33 bp, Homo sapien
tgggtaggtactagcaaaagtagacacttcaca

SEQ ID NO: 369246 - DNA, 33 bp, Homo sapien
tgggtaggtactagcagaagtagacacttcaca

SEQ ID NO: 369247 - DNA, 33 bp, Homo sapien
gttgaaaaatactgcacaacaatgaatttaaca

SEQ ID NO: 369248 - DNA, 33 bp, Homo sapien
gttgaaaaatactgcagaacaatgaatttaaca

SEQ ID NO: 369249 - DNA, 33 bp, Homo sapien
tcctttaatactgcaacgtctaacttcatgtat

SEQ ID NO: 369250 - DNA, 33 bp, Homo sapien
tcctttaatactgcaatgtctaacttcatgtat

SEQ ID NO: 369251 - DNA, 33 bp, Homo sapien
gaacttttctcaaaaaaaagtacatggacttca

SEQ ID NO: 369252 - DNA, 33 bp, Homo sapien
gaacttttctcaaaaacaagtacatggacttca

SEQ ID NO: 369253 - DNA, 33 bp, Homo sapien
ctaatcctgatctgtaaccaactaggataataa

SEQ ID NO: 369254 - DNA, 33 bp, Homo sapien
ctaatcctgatctgtagccaactaggataataa

SEQ ID NO: 369255 - DNA, 33 bp, Homo sapien
taaagaagacagtctacagtgtgaggccctaca

SEQ ID NO: 369256 - DNA, 33 bp, Homo sapien
taaagaagacagtctatagtgtgaggccctaca

SEQ ID NO: 369257 - DNA, 33 bp, Homo sapien
agccttcgtttgcaagaagagttccagttgacg

SEQ ID NO: 369258 - DNA, 33 bp, Homo sapien
agccttcgtttgcaaggagagttccagttgacg

SEQ ID NO: 369259 - DNA, 33 bp, Homo sapien; identical to SEQ ID NO: 369257

SEQ ID NO: 369260 - DNA, 33 bp, Homo sapien; identical to SEQ ID NO: 369258

SEQ ID NO: 369261 - DNA, 33 bp, Homo sapien
cttacaacaaatagacccattttaattatatag

SEQ ID NO: 369262 - DNA, 33 bp, Homo sapien
cttacaacaaatagacgcattttaattatatag

SEQ ID NO: 369263 - DNA, 33 bp, Homo sapien
catgctcactgtcacaaaactgagacttttttc

SEQ ID NO: 369264 - DNA, 33 bp, Homo sapien
catgctcactgtcacagaactgagacttttttc

SEQ ID NO: 369265 - DNA, 33 bp, Homo sapien
aaaaaaggccctcaacacagatatggaagaatt

SEQ ID NO: 369266 - DNA, 33 bp, Homo sapien
aaaaaaggccctcaacccagatatggaagaatt

SEQ ID NO: 369267 - DNA, 33 bp, Homo sapien
aaactcaaagacaagcagataacatgctcatag

SEQ ID NO: 369268 - DNA, 33 bp, Homo sapien
aaactcaaagacaagcggataacatgctcatag

SEQ ID NO: 369269 - DNA, 33 bp, Homo sapien
ccagctcagtcagtcacattgaagacttagaaa

SEQ ID NO: 369270 - DNA, 33 bp, Homo sapien
ccagctcagtcagtcatattgaagacttagaaa

SEQ ID NO: 369271 - DNA, 33 bp, Homo sapien
gctccggcccactggacaggcgctccacctttt

SEQ ID NO: 369272 - DNA, 33 bp, Homo sapien
gctccggcccactggataggcgctccacctttt

SEQ ID NO: 369273 - DNA, 33 bp, Homo sapien
atcaatcaagtatcacagctacagcagaagccc

SEQ ID NO: 369274 - DNA, 33 bp, Homo sapien
atcaatcaagtatcaccgctacagcagaagccc

SEQ ID NO: 369275 - DNA, 33 bp, Homo sapien
agtaaaatgagagcaacacctgccaggtctcca

SEQ ID NO: 369276 - DNA, 33 bp, Homo sapien
agtaaaatgagagcaatacctgccaggtctcca

SEQ ID NO: 369277 - DNA, 33 bp, Homo sapien
ctagctagctgtttgaagttgagcaagttacct

SEQ ID NO: 369278 - DNA, 33 bp, Homo sapien
ctagctagctgtttgacgttgagcaagttacct

SEQ ID NO: 369279 - DNA, 33 bp, Homo sapien
tcgcggatacttcatacagtgcacacggaaacc

SEQ ID NO: 369280 - DNA, 33 bp, Homo sapien
tcgcggatacttcatatagtgcacacggaaacc

SEQ ID NO: 369281 - DNA, 33 bp, Homo sapien
atacttggcacagcgaaaaaatggatttaaaag

SEQ ID NO: 369282 - DNA, 33 bp, Homo sapien
atacttggcacagcgagaaaatggatttaaaag

SEQ ID NO: 369283 - DNA, 33 bp, Homo sapien
ggaatatagaagtgaacgcgccacaggctctgc

SEQ ID NO: 369284 - DNA, 33 bp, Homo sapien
ggaatatagaagtgaatgcgccacaggctctgc

SEQ ID NO: 369285 - DNA, 33 bp, Homo sapien
agaagctatagcttcacgactataacctatgca

SEQ ID NO: 369286 - DNA, 33 bp, Homo sapien
agaagctatagcttcatgactataacctatgca

SEQ ID NO: 369287 - DNA, 33 bp, Homo sapien
atcattgcgatttctagagccttgaaggggatg

SEQ ID NO: 369288 - DNA, 33 bp, Homo sapien
atcattgcgatttctatagccttgaaggggatg

SEQ ID NO: 369289 - DNA, 33 bp, Homo sapien
catctctgccctagagcatgtttgattgcattc

SEQ ID NO: 369290 - DNA, 33 bp, Homo sapien
catctctgccctagagtatgtttgattgcattc

SEQ ID NO: 369291 - DNA, 33 bp, Homo sapien
tgtgagcgctaaaaataattaaaccctgccatg

SEQ ID NO: 369292 - DNA, 33 bp, Homo sapien
tgtgagcgctaaaaatgattaaaccctgccatg

SEQ ID NO: 369293 - DNA, 33 bp, Homo sapien
gaacaaaatatactaccacatgatactacattc

SEQ ID NO: 369294 - DNA, 33 bp, Homo sapien
gaacaaaatatactactacatgatactacattc

SEQ ID NO: 369295 - DNA, 33 bp, Homo sapien; identical to SEQ ID NO: 369293

SEQ ID NO: 369296 - DNA, 33 bp, Homo sapien; identical to SEQ ID NO: 369294

SEQ ID NO: 369297 - DNA, 33 bp, Homo sapien
tctagtagacttttcactctggtgttaaaaata

SEQ ID NO: 369298 - DNA, 33 bp, Homo sapien
tctagtagacttttcattctggtgttaaaaata

SEQ ID NO: 369299 - DNA, 33 bp, Homo sapien; identical to SEQ ID NO: 369297

SEQ ID NO: 369300 - DNA, 33 bp, Homo sapien; identical to SEQ ID NO: 369298

SEQ ID NO: 369301 - DNA, 33 bp, Homo sapien
aagggaatctcctagcccctataacagaaaagc

SEQ ID NO: 369302 - DNA, 33 bp, Homo sapien
aagggaatctcctagctcctataacagaaaagc

SEQ ID NO: 369303 - DNA, 33 bp, Homo sapien
ttgctactctgatataacacattacatatcttt

SEQ ID NO: 369304 - DNA, 33 bp, Homo sapien
ttgctactctgatatagcacattacatatcttt

SEQ ID NO: 369305 - DNA, 33 bp, Homo sapien
tgtatctgttctcaataataaccatgaggaatt

SEQ ID NO: 369306 - DNA, 33 bp, Homo sapien
tgtatctgttctcaatgataaccatgaggaatt

SEQ ID NO: 369307 - DNA, 33 bp, Homo sapien
tcttatttccgtgcaacctttcgtttgtttgtt

SEQ ID NO: 369308 - DNA, 33 bp, Homo sapien
tcttatttccgtgcaatctttcgtttgtttgtt

SEQ ID NO: 369309 - DNA, 33 bp, Homo sapien
actgtgttctttgaaaagtccgtcgttaatgtt

SEQ ID NO: 369310 - DNA, 33 bp, Homo sapien
actgtgttctttgaaaggtccgtcgttaatgtt

SEQ ID NO: 369311 - DNA, 33 bp, Homo sapien
gggccaatttctgttcacattcaggctgttccc

SEQ ID NO: 369312 - DNA, 33 bp, Homo sapien
gggccaatttctgttcgcattcaggctgttccc

SEQ ID NO: 369313 - DNA, 33 bp, Homo sapien
tgcatagtcataaacaatctgtgatatcctgtt

SEQ ID NO: 369314 - DNA, 33 bp, Homo sapien
tgcatagtcataaacagtctgtgatatcctgtt

SEQ ID NO: 369315 - DNA, 33 bp, Homo sapien
tctacgtagacacttaagtcatctgcaaatagg

SEQ ID NO: 369316 - DNA, 33 bp, Homo sapien
tctacgtagacacttatgtcatctgcaaatagg

SEQ ID NO: 369317 - DNA, 33 bp, Homo sapien
cacaggggggctttagaccacatcagaaagtca

SEQ ID NO: 369318 - DNA, 33 bp, Homo sapien
cacaggggggctttaggccacatcagaaagtca

SEQ ID NO: 369319 - DNA, 33 bp, Homo sapien
ttcagactggaaagaaactgactgtgtgtgata

SEQ ID NO: 369320 - DNA, 33 bp, Homo sapien
ttcagactggaaagaagctgactgtgtgtgata

SEQ ID NO: 369321 - DNA, 33 bp, Homo sapien
ggacctgaataaatgaatatcacacacagtcag

SEQ ID NO: 369322 - DNA, 33 bp, Homo sapien
ggacctgaataaatgagtatcacacacagtcag

SEQ ID NO: 369323 - DNA, 33 bp, Homo sapien
tctgtgtgcaggatctaaagcccctggagagag

SEQ ID NO: 369324 - DNA, 33 bp, Homo sapien
tctgtgtgcaggatctcaagcccctggagagag

SEQ ID NO: 369325 - DNA, 33 bp, Homo sapien
actgccagcatctctaaccatctgattaggttt

SEQ ID NO: 369326 - DNA, 33 bp, Homo sapien
actgccagcatctctagccatctgattaggttt

SEQ ID NO: 369327 - DNA, 33 bp, Homo sapien
atcagcagagcattacaccctgagcatcacccg

SEQ ID NO: 369328 - DNA, 33 bp, Homo sapien
atcagcagagcattacgccctgagcatcacccg

SEQ ID NO: 369329 - DNA, 33 bp, Homo sapien
ccttttctaagtatcaaggtcttctctttgcat

SEQ ID NO: 369330 - DNA, 33 bp, Homo sapien
ccttttctaagtatcagggtcttctctttgcat

SEQ ID NO: 369331 - DNA, 33 bp, Homo sapien
tggtcactgctaagcaagctttttgaataagcc

SEQ ID NO: 369332 - DNA, 33 bp, Homo sapien
tggtcactgctaagcatgctttttgaataagcc

SEQ ID NO: 369333 - DNA, 33 bp, Homo sapien
aaaggtttacagaaagaatcaaggagaaatgct

SEQ ID NO: 369334 - DNA, 33 bp, Homo sapien
aaaggtttacagaaaggatcaaggagaaatgct

SEQ ID NO: 369335 - DNA, 33 bp, Homo sapien
ttctataagaatctgaaaggtaaggttggagaa

SEQ ID NO: 369336 - DNA, 33 bp, Homo sapien
ttctataagaatctgagaggtaaggttggagaa

SEQ ID NO: 369337 - DNA, 33 bp, Homo sapien
cttgggagcccgtaatcacacagtgtcctctcc

SEQ ID NO: 369338 - DNA, 33 bp, Homo sapien
cttgggagcccgtaattacacagtgtcctctcc

SEQ ID NO: 369339 - DNA, 33 bp, Homo sapien
attacttctaaaggaaaacgaacggcacacctg

SEQ ID NO: 369340 - DNA, 33 bp, Homo sapien
attacttctaaaggaagacgaacggcacacctg

SEQ ID NO: 369341 - DNA, 33 bp, Homo sapien
cagaggaagggaagaaaaaggaacttggccatt

SEQ ID NO: 369342 - DNA, 33 bp, Homo sapien
cagaggaagggaagaacaaggaacttggccatt

SEQ ID NO: 369343 - DNA, 33 bp, Homo sapien
tctccagaattccatcgctttcctctttttcac

SEQ ID NO: 369344 - DNA, 33 bp, Homo sapien
tctccagaattccatctctttcctctttttcac

SEQ ID NO: 369345 - DNA, 33 bp, Homo sapien
agggaaaaaagggaaacattccagtgtcacaag

SEQ ID NO: 369346 - DNA, 33 bp, Homo sapien
agggaaaaaagggaaagattccagtgtcacaag

SEQ ID NO: 369347 - DNA, 33 bp, Homo sapien
aaagatcacgtctgccccacaggcccttccaga

SEQ ID NO: 369348 - DNA, 33 bp, Homo sapien
aaagatcacgtctgccgcacaggcccttccaga

SEQ ID NO: 369349 - DNA, 33 bp, Homo sapien
tcagtgtacacaaccaagaaagtccacgggaac

SEQ ID NO: 369350 - DNA, 33 bp, Homo sapien
tcagtgtacacaaccatgaaagtccacgggaac

SEQ ID NO: 369351 - DNA, 33 bp, Homo sapien
ttgggggaaactcaacaatgtgtgttctaaaca

SEQ ID NO: 369352 - DNA, 33 bp, Homo sapien
ttgggggaaactcaacgatgtgtgttctaaaca

SEQ ID NO: 369353 - DNA, 33 bp, Homo sapien
tcctcatccttccaacactgtaaatcatctgtt

SEQ ID NO: 369354 - DNA, 33 bp, Homo sapien
tcctcatccttccaacgctgtaaatcatctgtt

SEQ ID NO: 369355 - DNA, 33 bp, Homo sapien
ttagtgttaaaaatcgaatgaggtagaagccca

SEQ ID NO: 369356 - DNA, 33 bp, Homo sapien
ttagtgttaaaaatcggatgaggtagaagccca

SEQ ID NO: 369357 - DNA, 33 bp, Homo sapien
tgagtactaagatgccaaaaagttttacaaaaa

SEQ ID NO: 369358 - DNA, 33 bp, Homo sapien
tgagtactaagatgccgaaaagttttacaaaaa

SEQ ID NO: 369359 - DNA, 33 bp, Homo sapien
taaatatgatctcttccacctgcttaagtgcat

SEQ ID NO: 369360 - DNA, 33 bp, Homo sapien
taaatatgatctcttctacctgcttaagtgcat

SEQ ID NO: 369361 - DNA, 33 bp, Homo sapien
gcatgggctctttacccgcagaatgggactcat

SEQ ID NO: 369362 - DNA, 33 bp, Homo sapien
gcatgggctctttacctgcagaatgggactcat

SEQ ID NO: 369363 - DNA, 33 bp, Homo sapien
cagagaattacgctgcaatggtgggtttcttac

SEQ ID NO: 369364 - DNA, 33 bp, Homo sapien
cagagaattacgctgcgatggtgggtttcttac

SEQ ID NO: 369365 - DNA, 33 bp, Homo sapien
taagagtggcttttggcatgaaaggaagaaaaa

SEQ ID NO: 369366 - DNA, 33 bp, Homo sapien
taagagtggcttttggtatgaaaggaagaaaaa

SEQ ID NO: 369367 - DNA, 33 bp, Homo sapien
tcaagtccaagttcaaatccaccatcgcggcgc

SEQ ID NO: 369368 - DNA, 33 bp, Homo sapien
tcaagtccaagttcaagtccaccatcgcggcgc

SEQ ID NO: 369369 - DNA, 33 bp, Homo sapien
gtctccaaaaaaaagaagtgcttccacaagtgt

SEQ ID NO: 369370 - DNA, 33 bp, Homo sapien
gtctccaaaaaaaagaggtgcttccacaagtgt

SEQ ID NO: 369371 - DNA, 33 bp, Homo sapien
tgcaccagtcaacacacgcgtggcggcttcctg

SEQ ID NO: 369372 - DNA, 33 bp, Homo sapien
tgcaccagtcaacacatgcgtggcggcttcctg

SEQ ID NO: 369373 - DNA, 33 bp, Homo sapien
tttccagtttatcataagcggccgccttctcct

SEQ ID NO: 369374 - DNA, 33 bp, Homo sapien
tttccagtttatcatacgcggccgccttctcct

SEQ ID NO: 369375 - DNA, 33 bp, Homo sapien
gcctcaaagggacttacgcagagacactaggga

SEQ ID NO: 369376 - DNA, 33 bp, Homo sapien
gcctcaaagggacttatgcagagacactaggga

SEQ ID NO: 369377 - DNA, 33 bp, Homo sapien
agacagttatgttgcacagacatcaaacacctt

SEQ ID NO: 369378 - DNA, 33 bp, Homo sapien
agacagttatgttgcagagacatcaaacacctt

SEQ ID NO: 369379 - DNA, 33 bp, Homo sapien
aatactgcagcagccactatgaatgattattta

SEQ ID NO: 369380 - DNA, 33 bp, Homo sapien
aatactgcagcagccagtatgaatgattattta

SEQ ID NO: 369381 - DNA, 33 bp, Homo sapien
atggatgctggaggtacccggggtgacttctgc

SEQ ID NO: 369382 - DNA, 33 bp, Homo sapien
atggatgctggaggtatccggggtgacttctgc

SEQ ID NO: 369383 - DNA, 33 bp, Homo sapien
gaggttatgggagacacggggagaggtaaacat

SEQ ID NO: 369384 - DNA, 33 bp, Homo sapien
gaggttatgggagacatggggagaggtaaacat

SEQ ID NO: 369385 - DNA, 33 bp, Homo sapien
agaaattaagcatggcagccaagcgtggtggtt

SEQ ID NO: 369386 - DNA, 33 bp, Homo sapien
agaaattaagcatggcggccaagcgtggtggtt

SEQ ID NO: 369387 - DNA, 33 bp, Homo sapien
gatggaggaatggatacagcattgatggatgga

SEQ ID NO: 369388 - DNA, 33 bp, Homo sapien
gatggaggaatggatagagcattgatggatgga

SEQ ID NO: 369389 - DNA, 33 bp, Homo sapien
tctacttgttccttgcaataccagcattcttct

SEQ ID NO: 369390 - DNA, 33 bp, Homo sapien
tctacttgttccttgcgataccagcattcttct

SEQ ID NO: 369391 - DNA, 33 bp, Homo sapien
acccttcaaagcatccactcctggtacccttga

SEQ ID NO: 369392 - DNA, 33 bp, Homo sapien
acccttcaaagcatccgctcctggtacccttga

SEQ ID NO: 369393 - DNA, 33 bp, Homo sapien
aagttctccaaagccacgaccagcgcccatcct

SEQ ID NO: 369394 - DNA, 33 bp, Homo sapien
aagttctccaaagccatgaccagcgcccatcct

SEQ ID NO: 369395 - DNA, 33 bp, Homo sapien
ggagtgcttctcaatcaagggcaactgtcccac

SEQ ID NO: 369396 - DNA, 33 bp, Homo sapien
ggagtgcttctcaatcgagggcaactgtcccac

SEQ ID NO: 369397 - DNA, 33 bp, Homo sapien
ggttcctgccttggacagtatgatgctgaaata

SEQ ID NO: 369398 - DNA, 33 bp, Homo sapien
ggttcctgccttggacggtatgatgctgaaata

SEQ ID NO: 369399 - DNA, 33 bp, Homo sapien
gagtagagtggggagacgaaggctggagaaaga

SEQ ID NO: 369400 - DNA, 33 bp, Homo sapien
gagtagagtggggagatgaaggctggagaaaga

SEQ ID NO: 369401 - DNA, 33 bp, Homo sapien
cagaattggtggttaaatacatggaaaacaaga

SEQ ID NO: 369402 - DNA, 33 bp, Homo sapien
cagaattggtggttaagtacatggaaaacaaga

SEQ ID NO: 369403 - DNA, 33 bp, Homo sapien
catgcctcatatcagaatcccagtataatttta

SEQ ID NO: 369404 - DNA, 33 bp, Homo sapien
catgcctcatatcagagtcccagtataatttta

SEQ ID NO: 369405 - DNA, 33 bp, Homo sapien
aaagtattcatgcagacggcttagagtcaagta

SEQ ID NO: 369406 - DNA, 33 bp, Homo sapien
aaagtattcatgcagatggcttagagtcaagta

SEQ ID NO: 369407 - DNA, 33 bp, Homo sapien
caggacttcaagaatgcagtgtgctatgatcgt

SEQ ID NO: 369408 - DNA, 33 bp, Homo sapien
caggacttcaagaatgtagtgtgctatgatcgt

SEQ ID NO: 369409 - DNA, 33 bp, Homo sapien
tattgatacccaataactggcaaggtgaagcca

SEQ ID NO: 369410 - DNA, 33 bp, Homo sapien
tattgatacccaataattggcaaggtgaagcca

SEQ ID NO: 369411 - DNA, 33 bp, Homo sapien
tgcccttgtacatgtcaacgatcttctccgagt

SEQ ID NO: 369412 - DNA, 33 bp, Homo sapien
tgcccttgtacatgtcgacgatcttctccgagt

SEQ ID NO: 369413 - DNA, 33 bp, Homo sapien
ttgagtgcttctgtgcaatctgtctaccctgga

SEQ ID NO: 369414 - DNA, 33 bp, Homo sapien
ttgagtgcttctgtgcgatctgtctaccctgga

SEQ ID NO: 369415 - DNA, 33 bp, Homo sapien
gtcccgccatgctgtacgtggtaaggcactatt

SEQ ID NO: 369416 - DNA, 33 bp, Homo sapien
gtcccgccatgctgtatgtggtaaggcactatt

SEQ ID NO: 369417 - DNA, 33 bp, Homo sapien
agatgtgtcaaacatcactaatgccatctctga

SEQ ID NO: 369418 - DNA, 33 bp, Homo sapien
agatgtgtcaaacatcgctaatgccatctctga

SEQ ID NO: 369419 - DNA, 33 bp, Homo sapien
ccttcaaacaaaattccctatcttatttcacac

SEQ ID NO: 369420 - DNA, 33 bp, Homo sapien
ccttcaaacaaaattctctatcttatttcacac

SEQ ID NO: 369421 - DNA, 33 bp, Homo sapien
gtttctttgatttactcaacgatactattttag

SEQ ID NO: 369422 - DNA, 33 bp, Homo sapien
gtttctttgatttacttaacgatactattttag

SEQ ID NO: 369423 - DNA, 33 bp, Homo sapien
cccaaacagcatttctcaagattgccagtgaga

SEQ ID NO: 369424 - DNA, 33 bp, Homo sapien
cccaaacagcatttcttaagattgccagtgaga

SEQ ID NO: 369425 - DNA, 33 bp, Homo sapien
gattcgtggaaactcccattaaacagccggtca

SEQ ID NO: 369426 - DNA, 33 bp, Homo sapien
gattcgtggaaactcctattaaacagccggtca

SEQ ID NO: 369427 - DNA, 33 bp, Homo sapien
aaatatcaaaccctgaaactaaattggctttta

SEQ ID NO: 369428 - DNA, 33 bp, Homo sapien
aaatatcaaaccctgagactaaattggctttta

SEQ ID NO: 369429 - DNA, 33 bp, Homo sapien
tgtcaagatcatcaaccgcaatttataaaggag

SEQ ID NO: 369430 - DNA, 33 bp, Homo sapien
tgtcaagatcatcaactgcaatttataaaggag

SEQ ID NO: 369431 - DNA, 33 bp, Homo sapien
aagtgtcttccaggcacaatcagaaatcaggtg

SEQ ID NO: 369432 - DNA, 33 bp, Homo sapien
aagtgtcttccaggcataatcagaaatcaggtg

SEQ ID NO: 369433 - DNA, 33 bp, Homo sapien
gttgccttctctaaaacaatgagctctacctct

SEQ ID NO: 369434 - DNA, 33 bp, Homo sapien
gttgccttctctaaaataatgagctctacctct

SEQ ID NO: 369435 - DNA, 33 bp, Homo sapien
aagaagttttgatggcccagtgttctaagcata

SEQ ID NO: 369436 - DNA, 33 bp, Homo sapien
aagaagttttgatggcgcagtgttctaagcata

SEQ ID NO: 369437 - DNA, 33 bp, Homo sapien
atttgcctctctctccaagttcctcatcaacat

SEQ ID NO: 369438 - DNA, 33 bp, Homo sapien
atttgcctctctctccgagttcctcatcaacat

SEQ ID NO: 369439 - DNA, 33 bp, Homo sapien
tttcctaacctctgtaccaatgaggacttcctt

SEQ ID NO: 369440 - DNA, 33 bp, Homo sapien
tttcctaacctctgtatcaatgaggacttcctt

SEQ ID NO: 369441 - DNA, 33 bp, Homo sapien
ttttgttacattgatcaaaagtcagaaaggaaa

SEQ ID NO: 369442 - DNA, 33 bp, Homo sapien
ttttgttacattgatcgaaagtcagaaaggaaa

SEQ ID NO: 369443 - DNA, 33 bp, Homo sapien
agaccacccttcacaacaggagtgtcaaagtca

SEQ ID NO: 369444 - DNA, 33 bp, Homo sapien
agaccacccttcacaataggagtgtcaaagtca

SEQ ID NO: 369445 - DNA, 33 bp, Homo sapien
ggctggggccaacaaacggcaagcagaagtcaa

SEQ ID NO: 369446 - DNA, 33 bp, Homo sapien
ggctggggccaacaaagggcaagcagaagtcaa

SEQ ID NO: 369447 - DNA, 33 bp, Homo sapien
ccagtagttataattaagttggcttatctgcga

SEQ ID NO: 369448 - DNA, 33 bp, Homo sapien
ccagtagttataattaggttggcttatctgcga

SEQ ID NO: 369449 - DNA, 33 bp, Homo sapien
ggagtgagccgtttgacgcttggtacttgggac

SEQ ID NO: 369450 - DNA, 33 bp, Homo sapien
ggagtgagccgtttgatgcttggtacttgggac

SEQ ID NO: 369451 - DNA, 33 bp, Homo sapien
tctgaatgtactaaacggagttgcacactttat

SEQ ID NO: 369452 - DNA, 33 bp, Homo sapien
tctgaatgtactaaactgagttgcacactttat

SEQ ID NO: 369453 - DNA, 33 bp, Homo sapien
ttgaattgtctctcaccgggttcctcccacaac

SEQ ID NO: 369454 - DNA, 33 bp, Homo sapien
ttgaattgtctctcactgggttcctcccacaac

SEQ ID NO: 369455 - DNA, 33 bp, Homo sapien
atttgcataagtaaaacggaaccaaatgttaat

SEQ ID NO: 369456 - DNA, 33 bp, Homo sapien
atttgcataagtaaaatggaaccaaatgttaat

SEQ ID NO: 369457 - DNA, 33 bp, Homo sapien
ggcaagggtattgagacgtgaacaagcattact

SEQ ID NO: 369458 - DNA, 33 bp, Homo sapien
ggcaagggtattgagatgtgaacaagcattact

SEQ ID NO: 369459 - DNA, 33 bp, Homo sapien
catgtgtgatgaaaagcactcagagaagagggc

SEQ ID NO: 369460 - DNA, 33 bp, Homo sapien
catgtgtgatgaaaaggactcagagaagagggc

SEQ ID NO: 369461 - DNA, 33 bp, Homo sapien
ggttcaaggccactgcagagtcggcgtgtatgt

SEQ ID NO: 369462 - DNA, 33 bp, Homo sapien
ggttcaaggccactgcggagtcggcgtgtatgt

SEQ ID NO: 369463 - DNA, 33 bp, Homo sapien
gaggttacaagtgcaaactactgtgcctagcca

SEQ ID NO: 369464 - DNA, 33 bp, Homo sapien
gaggttacaagtgcaagctactgtgcctagcca

SEQ ID NO: 369465 - DNA, 33 bp, Homo sapien
aacgtatgcttccttccatttgataacagaaga

SEQ ID NO: 369466 - DNA, 33 bp, Homo sapien
aacgtatgcttccttcgatttgataacagaaga

SEQ ID NO: 369467 - DNA, 33 bp, Homo sapien
tacaaagagatttagccaggaaacatcaagaca

SEQ ID NO: 369468 - DNA, 33 bp, Homo sapien
tacaaagagatttagctaggaaacatcaagaca

SEQ ID NO: 369469 - DNA, 33 bp, Homo sapien
ctctacgggtgggatacgtttcaaggtgcatcc

SEQ ID NO: 369470 - DNA, 33 bp, Homo sapien
ctctacgggtgggatatgtttcaaggtgcatcc

SEQ ID NO: 369471 - DNA, 33 bp, Homo sapien
gtagctgggagtgtagacatgcaccaacatgcc

SEQ ID NO: 369472 - DNA, 33 bp, Homo sapien
gtagctgggagtgtaggcatgcaccaacatgcc

SEQ ID NO: 369473 - DNA, 33 bp, Homo sapien
tagaccaaggatctcaaactcaaatccctcagg

SEQ ID NO: 369474 - DNA, 33 bp, Homo sapien
tagaccaaggatctcacactcaaatccctcagg

SEQ ID NO: 369475 - DNA, 33 bp, Homo sapien
tacacctgctccccaacttggcttacttttaat

SEQ ID NO: 369476 - DNA, 33 bp, Homo sapien
tacacctgctccccaagttggcttacttttaat

SEQ ID NO: 369477 - DNA, 33 bp, Homo sapien
taggctagaggcttcacgtggcagtatccacct

SEQ ID NO: 369478 - DNA, 33 bp, Homo sapien
taggctagaggcttcatgtggcagtatccacct

SEQ ID NO: 369479 - DNA, 33 bp, Homo sapien
aggtcattgtttgaacacagaaaaagcggaaag

SEQ ID NO: 369480 - DNA, 33 bp, Homo sapien
aggtcattgtttgaacgcagaaaaagcggaaag

SEQ ID NO: 369481 - DNA, 33 bp, Homo sapien
atgacatcctggctgcagaagagagagtgcctg

SEQ ID NO: 369482 - DNA, 33 bp, Homo sapien
atgacatcctggctgcggaagagagagtgcctg

SEQ ID NO: 369483 - DNA, 33 bp, Homo sapien
cttttgtgcttagcgacgtttagtccctgaggg

SEQ ID NO: 369484 - DNA, 33 bp, Homo sapien
cttttgtgcttagcgatgtttagtccctgaggg

SEQ ID NO: 369485 - DNA, 33 bp, Homo sapien
gccatgccaccaaggagaacatcaacctgacaa

SEQ ID NO: 369486 - DNA, 33 bp, Homo sapien
gccatgccaccaaggataacatcaacctgacaa

SEQ ID NO: 369487 - DNA, 33 bp, Homo sapien
ttgcctgccagttggactcacttggggagcctt

SEQ ID NO: 369488 - DNA, 33 bp, Homo sapien
ttgcctgccagttggagtcacttggggagcctt

SEQ ID NO: 369489 - DNA, 33 bp, Homo sapien
ataataaagtttatgaaaaaaatagctggtgat

SEQ ID NO: 369490 - DNA, 33 bp, Homo sapien
ataataaagtttatgagaaaaatagctggtgat

SEQ ID NO: 369491 - DNA, 33 bp, Homo sapien
ggcgaccctgggatcaacccatcactcaacatc

SEQ ID NO: 369492 - DNA, 33 bp, Homo sapien
ggcgaccctgggatcagcccatcactcaacatc

SEQ ID NO: 369493 - DNA, 33 bp, Homo sapien
aaaaatattcaggtacacagagaaaataaaaca

SEQ ID NO: 369494 - DNA, 33 bp, Homo sapien
aaaaatattcaggtacgcagagaaaataaaaca

SEQ ID NO: 369495 - DNA, 33 bp, Homo sapien
tgccttttctgagaaacgtggaaaaccaatgaa

SEQ ID NO: 369496 - DNA, 33 bp, Homo sapien
tgccttttctgagaaatgtggaaaaccaatgaa

SEQ ID NO: 369497 - DNA, 33 bp, Homo sapien
acgccaaatgaggtacagggaagggactttaca

SEQ ID NO: 369498 - DNA, 33 bp, Homo sapien
acgccaaatgaggtacggggaagggactttaca

SEQ ID NO: 369499 - DNA, 33 bp, Homo sapien
gctgggccttgggatccgagtcagcactttgac

SEQ ID NO: 369500 - DNA, 33 bp, Homo sapien
gctgggccttgggatctgagtcagcactttgac

SEQ ID NO: 369501 - DNA, 33 bp, Homo sapien
ttttagagattctacagggtctacattgtttct

SEQ ID NO: 369502 - DNA, 33 bp, Homo sapien
ttttagagattctacatggtctacattgtttct

SEQ ID NO: 369503 - DNA, 33 bp, Homo sapien
tacaggcaccaaccaacacatctggctaatttt

SEQ ID NO: 369504 - DNA, 33 bp, Homo sapien
tacaggcaccaaccaatacatctggctaatttt

SEQ ID NO: 369505 - DNA, 33 bp, Homo sapien
ccctcagctcttctacaagtggacgtggaatga

SEQ ID NO: 369506 - DNA, 33 bp, Homo sapien
ccctcagctcttctacgagtggacgtggaatga

SEQ ID NO: 369507 - DNA, 33 bp, Homo sapien
ctccttcatcataaaacacagcagtgatttggc

SEQ ID NO: 369508 - DNA, 33 bp, Homo sapien
ctccttcatcataaaatacagcagtgatttggc

SEQ ID NO: 369509 - DNA, 33 bp, Homo sapien
ttccacagtaataaagcatttcaacatttgaac

SEQ ID NO: 369510 - DNA, 33 bp, Homo sapien
ttccacagtaataaagtatttcaacatttgaac

SEQ ID NO: 369511 - DNA, 33 bp, Homo sapien
gctaggatggttaatacactgcatacgctataa

SEQ ID NO: 369512 - DNA, 33 bp, Homo sapien
gctaggatggttaatatactgcatacgctataa

SEQ ID NO: 369513 - DNA, 33 bp, Homo sapien
ggatgtggggaacttacgtatctagctcagggg

SEQ ID NO: 369514 - DNA, 33 bp, Homo sapien
ggatgtggggaacttatgtatctagctcagggg

SEQ ID NO: 369515 - DNA, 33 bp, Homo sapien
cctctgccccttgttacggtcctgactctgatg

SEQ ID NO: 369516 - DNA, 33 bp, Homo sapien
cctctgccccttgttatggtcctgactctgatg

SEQ ID NO: 369517 - DNA, 33 bp, Homo sapien
ctgaattttgggtcataaaaatcatctggactg

SEQ ID NO: 369518 - DNA, 33 bp, Homo sapien
ctgaattttgggtcatgaaaatcatctggactg

SEQ ID NO: 369519 - DNA, 33 bp, Homo sapien
tggctttgtctaattacagaaatggatccttag

SEQ ID NO: 369520 - DNA, 33 bp, Homo sapien
tggctttgtctaattatagaaatggatccttag

SEQ ID NO: 369521 - DNA, 33 bp, Homo sapien
tcatctcaattgctaaagtgttaaagacctgct

SEQ ID NO: 369522 - DNA, 33 bp, Homo sapien
tcatctcaattgctaaggtgttaaagacctgct

SEQ ID NO: 369523 - DNA, 33 bp, Homo sapien
caaagactggaggcacaggtcctagtcccagct

SEQ ID NO: 369524 - DNA, 33 bp, Homo sapien
caaagactggaggcacgggtcctagtcccagct

SEQ ID NO: 369525 - DNA, 33 bp, Homo sapien
cctggaagaaatttgaataagttgcaaatactg

SEQ ID NO: 369526 - DNA, 33 bp, Homo sapien
cctggaagaaatttgagtaagttgcaaatactg

SEQ ID NO: 369527 - DNA, 33 bp, Homo sapien
ttacaaccatgagtacccagagtttagctccct

SEQ ID NO: 369528 - DNA, 33 bp, Homo sapien
ttacaaccatgagtacgcagagtttagctccct

SEQ ID NO: 369529 - DNA, 33 bp, Homo sapien
atgacgggagaatccacgggactttactgttag

SEQ ID NO: 369530 - DNA, 33 bp, Homo sapien
atgacgggagaatccatgggactttactgttag

SEQ ID NO: 369531 - DNA, 33 bp, Homo sapien
atcttcggaaatgatcacaaggctttatttctt

SEQ ID NO: 369532 - DNA, 33 bp, Homo sapien
atcttcggaaatgatcgcaaggctttatttctt

SEQ ID NO: 369533 - DNA, 33 bp, Homo sapien
ctaatagtcacaacgtcaccagtttttcactgg

SEQ ID NO: 369534 - DNA, 33 bp, Homo sapien
ctaatagtcacaacgttaccagtttttcactgg

SEQ ID NO: 369535 - DNA, 33 bp, Homo sapien
taatggatccgtcctcactgaatcgtgacgaca

SEQ ID NO: 369536 - DNA, 33 bp, Homo sapien
taatggatccgtcctcgctgaatcgtgacgaca

SEQ ID NO: 369537 - DNA, 33 bp, Homo sapien
ctctctgggtgacctcgctaccatacaatatga

SEQ ID NO: 369538 - DNA, 33 bp, Homo sapien
ctctctgggtgacctctctaccatacaatatga

SEQ ID NO: 369539 - DNA, 33 bp, Homo sapien
gtctttccatttttgacgaggagaagaaggagt

SEQ ID NO: 369540 - DNA, 33 bp, Homo sapien
gtctttccatttttgaggaggagaagaaggagt

SEQ ID NO: 369541 - DNA, 33 bp, Homo sapien
gcctcatcttaaggacacagatctttgcctgga

SEQ ID NO: 369542 - DNA, 33 bp, Homo sapien
gcctcatcttaaggacgcagatctttgcctgga

SEQ ID NO: 369543 - DNA, 33 bp, Homo sapien
accacgcagacctcaccggttctcccgctgtgc

SEQ ID NO: 369544 - DNA, 33 bp, Homo sapien
accacgcagacctcactggttctcccgctgtgc

SEQ ID NO: 369545 - DNA, 33 bp, Homo sapien
gcacagctgcagccagacgggactgttgaaaac

SEQ ID NO: 369546 - DNA, 33 bp, Homo sapien
gcacagctgcagccaggcgggactgttgaaaac

SEQ ID NO: 369547 - DNA, 33 bp, Homo sapien
ctcattcatttcttcaatcagtgataactgagc

SEQ ID NO: 369548 - DNA, 33 bp, Homo sapien
ctcattcatttcttcagtcagtgataactgagc

SEQ ID NO: 369549 - DNA, 33 bp, Homo sapien
agagttagccagaaaaaagcattccagacacaa

SEQ ID NO: 369550 - DNA, 33 bp, Homo sapien
agagttagccagaaaagagcattccagacacaa

SEQ ID NO: 369551 - DNA, 33 bp, Homo sapien
ggtttctaataatccaaaaaaacagtgtgctgg

SEQ ID NO: 369552 - DNA, 33 bp, Homo sapien
ggtttctaataatccagaaaaacagtgtgctgg

SEQ ID NO: 369553 - DNA, 33 bp, Homo sapien
ggagacagcccaagaaagactttgatgcctagc

SEQ ID NO: 369554 - DNA, 33 bp, Homo sapien
ggagacagcccaagaaggactttgatgcctagc

SEQ ID NO: 369555 - DNA, 33 bp, Homo sapien
ggttgtttgttacataacattgtcacagcaaaa

SEQ ID NO: 369556 - DNA, 33 bp, Homo sapien
ggttgtttgttacatagcattgtcacagcaaaa

SEQ ID NO: 369557 - DNA, 33 bp, Homo sapien
aaggatggttgtgttcccaatacaaaagataaa

SEQ ID NO: 369558 - DNA, 33 bp, Homo sapien
aaggatggttgtgttcgcaatacaaaagataaa

SEQ ID NO: 369559 - DNA, 33 bp, Homo sapien
atggctcaggtatgccaccgtttcttgttttca

SEQ ID NO: 369560 - DNA, 33 bp, Homo sapien
atggctcaggtatgccgccgtttcttgttttca

SEQ ID NO: 369561 - DNA, 33 bp, Homo sapien
ggctgaggcattaaacaagcccatatgtagaaa

SEQ ID NO: 369562 - DNA, 33 bp, Homo sapien
ggctgaggcattaaacgagcccatatgtagaaa

SEQ ID NO: 369563 - DNA, 33 bp, Homo sapien
tccttctgaccacttaccagttgtgaatctgtg

SEQ ID NO: 369564 - DNA, 33 bp, Homo sapien
tccttctgaccacttatcagttgtgaatctgtg

SEQ ID NO: 369565 - DNA, 33 bp, Homo sapien
tgtgctaaaaaggcaaatgtactacatcggcca

SEQ ID NO: 369566 - DNA, 33 bp, Homo sapien
tgtgctaaaaaggcaagtgtactacatcggcca

SEQ ID NO: 369567 - DNA, 33 bp, Homo sapien; identical to SEQ ID NO: 369565

SEQ ID NO: 369568 - DNA, 33 bp, Homo sapien; identical to SEQ ID NO: 369566

SEQ ID NO: 369569 - DNA, 33 bp, Homo sapien
tggtgagacctccaaaagtgaatgtgtctaggg

SEQ ID NO: 369570 - DNA, 33 bp, Homo sapien
tggtgagacctccaaacgtgaatgtgtctaggg

SEQ ID NO: 369571 - DNA, 33 bp, Homo sapien
cactgaaccagtgtccgacctgctgggactccc

SEQ ID NO: 369572 - DNA, 33 bp, Homo sapien
cactgaaccagtgtcctacctgctgggactccc

SEQ ID NO: 369573 - DNA, 33 bp, Homo sapien
caggttacaaacattacgtataatcttcacaac

SEQ ID NO: 369574 - DNA, 33 bp, Homo sapien
caggttacaaacattatgtataatcttcacaac

SEQ ID NO: 369575 - DNA, 33 bp, Homo sapien
gtagtaagaggtgtgacgaggttattagattct

SEQ ID NO: 369576 - DNA, 33 bp, Homo sapien
gtagtaagaggtgtgatgaggttattagattct

SEQ ID NO: 369577 - DNA, 33 bp, Homo sapien
gcccacagtgcagaaaatattcaggactgggct

SEQ ID NO: 369578 - DNA, 33 bp, Homo sapien
gcccacagtgcagaaactattcaggactgggct

SEQ ID NO: 369579 - DNA, 33 bp, Homo sapien
catgtgagacactggcacgtctaagaacaggtg

SEQ ID NO: 369580 - DNA, 33 bp, Homo sapien
catgtgagacactggcgcgtctaagaacaggtg

SEQ ID NO: 369581 - DNA, 33 bp, Homo sapien
ttaagtaaatctttacaaaactagctagcttta

SEQ ID NO: 369582 - DNA, 33 bp, Homo sapien
ttaagtaaatctttacgaaactagctagcttta

SEQ ID NO: 369583 - DNA, 33 bp, Homo sapien
ttggaactgaggccacaagccagaactctgaac

SEQ ID NO: 369584 - DNA, 33 bp, Homo sapien
ttggaactgaggccacgagccagaactctgaac

SEQ ID NO: 369585 - DNA, 33 bp, Homo sapien
gatatagtttagaggaaagttgcttgtatatat

SEQ ID NO: 369586 - DNA, 33 bp, Homo sapien
gatatagtttagaggacagttgcttgtatatat

SEQ ID NO: 369587 - DNA, 33 bp, Homo sapien
actcagggtcataccacaaaccttatcagtcat

SEQ ID NO: 369588 - DNA, 33 bp, Homo sapien
actcagggtcataccataaaccttatcagtcat

SEQ ID NO: 369589 - DNA, 33 bp, Homo sapien
tcaggactctctgcaaatgttgctttatctggg

SEQ ID NO: 369590 - DNA, 33 bp, Homo sapien
tcaggactctctgcaattgttgctttatctggg

SEQ ID NO: 369591 - DNA, 33 bp, Homo sapien
cagtaggaatgggcacacctaatgctcagatct

SEQ ID NO: 369592 - DNA, 33 bp, Homo sapien
cagtaggaatgggcacgcctaatgctcagatct

SEQ ID NO: 369593 - DNA, 33 bp, Homo sapien
atgtgctgatttggaacaatctccaggatatat

SEQ ID NO: 369594 - DNA, 33 bp, Homo sapien
atgtgctgatttggaataatctccaggatatat

SEQ ID NO: 369595 - DNA, 33 bp, Homo sapien
tatgtaggtttagatgcagaaggtaaaacaagc

SEQ ID NO: 369596 - DNA, 33 bp, Homo sapien
tatgtaggtttagatgtagaaggtaaaacaagc

SEQ ID NO: 369597 - DNA, 33 bp, Homo sapien
ccttctccatagtctaactcctcctatgaatcc

SEQ ID NO: 369598 - DNA, 33 bp, Homo sapien
ccttctccatagtctatctcctcctatgaatcc

SEQ ID NO: 369599 - DNA, 33 bp, Homo sapien
cctcctatgaatccaactacacttaaatcacct

SEQ ID NO: 369600 - DNA, 33 bp, Homo sapien
cctcctatgaatccaattacacttaaatcacct

SEQ ID NO: 369601 - DNA, 33 bp, Homo sapien
acagctgttcagtttgcacgctgcacgaaggct

SEQ ID NO: 369602 - DNA, 33 bp, Homo sapien
acagctgttcagtttgtacgctgcacgaaggct

SEQ ID NO: 369603 - DNA, 33 bp, Homo sapien
gtcacttacttggactcaataacactcacacat

SEQ ID NO: 369604 - DNA, 33 bp, Homo sapien
gtcacttacttggactgaataacactcacacat

SEQ ID NO: 369605 - DNA, 33 bp, Homo sapien
tccatttttcaagaacactcatgtctgaatagt

SEQ ID NO: 369606 - DNA, 33 bp, Homo sapien
tccatttttcaagaacgctcatgtctgaatagt

SEQ ID NO: 369607 - DNA, 33 bp, Homo sapien
gttatggaaaacacaacataatatgacacaaat

SEQ ID NO: 369608 - DNA, 33 bp, Homo sapien
gttatggaaaacacaagataatatgacacaaat

SEQ ID NO: 369609 - DNA, 33 bp, Homo sapien
ttccataacacgtaagacattccatgtgcaaga

SEQ ID NO: 369610 - DNA, 33 bp, Homo sapien
ttccataacacgtaaggcattccatgtgcaaga

SEQ ID NO: 369611 - DNA, 33 bp, Homo sapien
acctatattagaatgccgaaaaataacaaaaac

SEQ ID NO: 369612 - DNA, 33 bp, Homo sapien
acctatattagaatgctgaaaaataacaaaaac

SEQ ID NO: 369613 - DNA, 33 bp, Homo sapien
taaacattccacacaaagggcccagcacaatgg

SEQ ID NO: 369614 - DNA, 33 bp, Homo sapien
taaacattccacacaatgggcccagcacaatgg

SEQ ID NO: 369615 - DNA, 33 bp, Homo sapien
ttattccatcattgggaaagttgaactaaatga

SEQ ID NO: 369616 - DNA, 33 bp, Homo sapien
ttattccatcattggggaagttgaactaaatga

SEQ ID NO: 369617 - DNA, 33 bp, Homo sapien
gttctgtgctcttcagcctctgtcatctatcat

SEQ ID NO: 369618 - DNA, 33 bp, Homo sapien
gttctgtgctcttcagtctctgtcatctatcat

SEQ ID NO: 369619 - DNA, 33 bp, Homo sapien
gaaagagtttggttgactattggatgtaacaag

SEQ ID NO: 369620 - DNA, 33 bp, Homo sapien
gaaagagtttggttgattattggatgtaacaag

SEQ ID NO: 369621 - DNA, 33 bp, Homo sapien
tcagagtccctagcaacggctaattaaaccatt

SEQ ID NO: 369622 - DNA, 33 bp, Homo sapien
tcagagtccctagcaatggctaattaaaccatt

SEQ ID NO: 369623 - DNA, 33 bp, Homo sapien
agaatggaaaaagcagaagatgggacatgcaag

SEQ ID NO: 369624 - DNA, 33 bp, Homo sapien
agaatggaaaaagcaggagatgggacatgcaag

SEQ ID NO: 369625 - DNA, 33 bp, Homo sapien
aacccacagatacagaaagtcaactgcatatgc

SEQ ID NO: 369626 - DNA, 33 bp, Homo sapien
aacccacagatacagagagtcaactgcatatgc

SEQ ID NO: 369627 - DNA, 33 bp, Homo sapien
tggttgagttctggacaaagagatttaggtaga

SEQ ID NO: 369628 - DNA, 33 bp, Homo sapien
tggttgagttctggacgaagagatttaggtaga

SEQ ID NO: 369629 - DNA, 33 bp, Homo sapien
ttaaacctggctcttgaaaagactgtcaacttg

SEQ ID NO: 369630 - DNA, 33 bp, Homo sapien
ttaaacctggctcttggaaagactgtcaacttg

SEQ ID NO: 369631 - DNA, 33 bp, Homo sapien
agtgatagataaggctcaatgtatgacctcatt

SEQ ID NO: 369632 - DNA, 33 bp, Homo sapien
agtgatagataaggcttaatgtatgacctcatt

SEQ ID NO: 369633 - DNA, 33 bp, Homo sapien
gccttctgtacctacacgactccctctttccag

SEQ ID NO: 369634 - DNA, 33 bp, Homo sapien
gccttctgtacctacatgactccctctttccag

SEQ ID NO: 369635 - DNA, 33 bp, Homo sapien
ccatagtttcctgggaaataacagattcgtact

SEQ ID NO: 369636 - DNA, 33 bp, Homo sapien
ccatagtttcctgggagataacagattcgtact

SEQ ID NO: 369637 - DNA, 33 bp, Homo sapien
ttgtctctgattgatccatggaaacattccttg

SEQ ID NO: 369638 - DNA, 33 bp, Homo sapien
ttgtctctgattgatcgatggaaacattccttg

SEQ ID NO: 369639 - DNA, 33 bp, Homo sapien
attctctttccttcaaataagatgccccatgca

SEQ ID NO: 369640 - DNA, 33 bp, Homo sapien
attctctttccttcaagtaagatgccccatgca

SEQ ID NO: 369641 - DNA, 33 bp, Homo sapien
gtggttctatctaaagcctcaaaactgagtctc

SEQ ID NO: 369642 - DNA, 33 bp, Homo sapien
gtggttctatctaaagtctcaaaactgagtctc

SEQ ID NO: 369643 - DNA, 33 bp, Homo sapien
gatctcgtgagacttaagagaacaacacaggaa

SEQ ID NO: 369644 - DNA, 33 bp, Homo sapien
gatctcgtgagacttacgagaacaacacaggaa

SEQ ID NO: 369645 - DNA, 33 bp, Homo sapien
attgtgtgacttaaagcctacttggaacttctc

SEQ ID NO: 369646 - DNA, 33 bp, Homo sapien
attgtgtgacttaaaggctacttggaacttctc

SEQ ID NO: 369647 - DNA, 33 bp, Homo sapien
gactgcacctaatagtaaccactgtttgaactc

SEQ ID NO: 369648 - DNA, 33 bp, Homo sapien
gactgcacctaatagtgaccactgtttgaactc

SEQ ID NO: 369649 - DNA, 33 bp, Homo sapien
gacagaaggaagtggacggccaggaaatttagg

SEQ ID NO: 369650 - DNA, 33 bp, Homo sapien
gacagaaggaagtggatggccaggaaatttagg

SEQ ID NO: 369651 - DNA, 33 bp, Homo sapien
ctgctccagactatgacgcctggcttataattt

SEQ ID NO: 369652 - DNA, 33 bp, Homo sapien
ctgctccagactatgatgcctggcttataattt

SEQ ID NO: 369653 - DNA, 33 bp, Homo sapien
ttagtttcttcattgacgtattggttatttagg

SEQ ID NO: 369654 - DNA, 33 bp, Homo sapien
ttagtttcttcattgatgtattggttatttagg

SEQ ID NO: 369655 - DNA, 33 bp, Homo sapien
tttacctctttaaagaactcatctcaaatacag

SEQ ID NO: 369656 - DNA, 33 bp, Homo sapien
tttacctctttaaagacctcatctcaaatacag

SEQ ID NO: 369657 - DNA, 33 bp, Homo sapien
gttagagaagatgcaacctggggccttagggaa

SEQ ID NO: 369658 - DNA, 33 bp, Homo sapien
gttagagaagatgcaatctggggccttagggaa

SEQ ID NO: 369659 - DNA, 33 bp, Homo sapien
gcacagtagattaggaaagggattgaattacag

SEQ ID NO: 369660 - DNA, 33 bp, Homo sapien
gcacagtagattaggagagggattgaattacag

SEQ ID NO: 369661 - DNA, 33 bp, Homo sapien
tctagctgaaatggacactcctttgtgtgagca

SEQ ID NO: 369662 - DNA, 33 bp, Homo sapien
tctagctgaaatggacgctcctttgtgtgagca

SEQ ID NO: 369663 - DNA, 33 bp, Homo sapien
agacaggtgcatgtaaccaaataacatttttta

SEQ ID NO: 369664 - DNA, 33 bp, Homo sapien
agacaggtgcatgtaatcaaataacatttttta

SEQ ID NO: 369665 - DNA, 33 bp, Homo sapien
agttgtgcagtaaaggaaaaaaatatcacagaa

SEQ ID NO: 369666 - DNA, 33 bp, Homo sapien
agttgtgcagtaaagggaaaaaatatcacagaa

SEQ ID NO: 369667 - DNA, 33 bp, Homo sapien
gtgcagagatttcaaaaatgagctttggcacaa

SEQ ID NO: 369668 - DNA, 33 bp, Homo sapien
gtgcagagatttcaaacatgagctttggcacaa

SEQ ID NO: 369669 - DNA, 33 bp, Homo sapien
gatatatcccaatccaagtgcttctcttatatt

SEQ ID NO: 369670 - DNA, 33 bp, Homo sapien
gatatatcccaatccatgtgcttctcttatatt

SEQ ID NO: 369671 - DNA, 33 bp, Homo sapien
agacccacaaggctaaagttctcattgtgtttg

SEQ ID NO: 369672 - DNA, 33 bp, Homo sapien
agacccacaaggctaaggttctcattgtgtttg

SEQ ID NO: 369673 - DNA, 33 bp, Homo sapien
aaactgagatctgcaaagtggggtgtgtgaaga

SEQ ID NO: 369674 - DNA, 33 bp, Homo sapien
aaactgagatctgcaaggtggggtgtgtgaaga

SEQ ID NO: 369675 - DNA, 33 bp, Homo sapien
ccatgcaccactcaaaaagctgagcaaaagcat

SEQ ID NO: 369676 - DNA, 33 bp, Homo sapien
ccatgcaccactcaaacagctgagcaaaagcat

SEQ ID NO: 369677 - DNA, 33 bp, Homo sapien
aacaatggaaaattccacgctcttatgcataaa

SEQ ID NO: 369678 - DNA, 33 bp, Homo sapien
aacaatggaaaattccgcgctcttatgcataaa

SEQ ID NO: 369679 - DNA, 33 bp, Homo sapien
aaactcatgaaacaagcaatcttgcaatgtact

SEQ ID NO: 369680 - DNA, 33 bp, Homo sapien
aaactcatgaaacaaggaatcttgcaatgtact

SEQ ID NO: 369681 - DNA, 33 bp, Homo sapien
ttaaaaatcaagggaaagtaactaggcatggtg

SEQ ID NO: 369682 - DNA, 33 bp, Homo sapien
ttaaaaatcaagggaacgtaactaggcatggtg

SEQ ID NO: 369683 - DNA, 33 bp, Homo sapien
aagggccttatcgttaactcatgcgtttcttaa

SEQ ID NO: 369684 - DNA, 33 bp, Homo sapien
aagggccttatcgttacctcatgcgtttcttaa

SEQ ID NO: 369685 - DNA, 33 bp, Homo sapien
ggaaacgtggcaggaactacagcaatacaagta

SEQ ID NO: 369686 - DNA, 33 bp, Homo sapien
ggaaacgtggcaggaagtacagcaatacaagta

SEQ ID NO: 369687 - DNA, 33 bp, Homo sapien
gattttggagtcgagcagacctgagatatctaa

SEQ ID NO: 369688 - DNA, 33 bp, Homo sapien
gattttggagtcgagcggacctgagatatctaa

SEQ ID NO: 369689 - DNA, 33 bp, Homo sapien
aatattcaaccaagagcatctcccttctgtgag

SEQ ID NO: 369690 - DNA, 33 bp, Homo sapien
aatattcaaccaagagtatctcccttctgtgag

SEQ ID NO: 369691 - DNA, 33 bp, Homo sapien
atgcaatatagctcagaaagccttattcctatt

SEQ ID NO: 369692 - DNA, 33 bp, Homo sapien
atgcaatatagctcagtaagccttattcctatt

SEQ ID NO: 369693 - DNA, 33 bp, Homo sapien
atctttccaacgcaataaataccaccaccacct

SEQ ID NO: 369694 - DNA, 33 bp, Homo sapien
atctttccaacgcaatgaataccaccaccacct

SEQ ID NO: 369695 - DNA, 33 bp, Homo sapien
gtttttcactcctggcacttaaaaagtcgcctc

SEQ ID NO: 369696 - DNA, 33 bp, Homo sapien
gtttttcactcctggctcttaaaaagtcgcctc

SEQ ID NO: 369697 - DNA, 33 bp, Homo sapien
aggtgttttggtcataagggtccctcatgaatg

SEQ ID NO: 369698 - DNA, 33 bp, Homo sapien
aggtgttttggtcataggggtccctcatgaatg

SEQ ID NO: 369699 - DNA, 33 bp, Homo sapien
ccagaaaatccttatccccaagaagcaagcctt

SEQ ID NO: 369700 - DNA, 33 bp, Homo sapien
ccagaaaatccttatctccaagaagcaagcctt

SEQ ID NO: 369701 - DNA, 33 bp, Homo sapien
tgaaagtacactgacaccaggagataccctgga

SEQ ID NO: 369702 - DNA, 33 bp, Homo sapien
tgaaagtacactgacatcaggagataccctgga

SEQ ID NO: 369703 - DNA, 33 bp, Homo sapien; identical to SEQ ID NO: 369701

SEQ ID NO: 369704 - DNA, 33 bp, Homo sapien; identical to SEQ ID NO: 369702

SEQ ID NO: 369705 - DNA, 33 bp, Homo sapien
tatagcattattctgaaggattttcaaagtctc

SEQ ID NO: 369706 - DNA, 33 bp, Homo sapien
tatagcattattctgacggattttcaaagtctc

SEQ ID NO: 369707 - DNA, 33 bp, Homo sapien; identical to SEQ ID NO: 369705

SEQ ID NO: 369708 - DNA, 33 bp, Homo sapien; identical to SEQ ID NO: 369706

SEQ ID NO: 369709 - DNA, 33 bp, Homo sapien
caggctgtctgaccaacggcctccaacaaataa

SEQ ID NO: 369710 - DNA, 33 bp, Homo sapien
caggctgtctgaccaatggcctccaacaaataa

SEQ ID NO: 369711 - DNA, 33 bp, Homo sapien
ttctcaacagcgattccagggatctcagggtac

SEQ ID NO: 369712 - DNA, 33 bp, Homo sapien
ttctcaacagcgattctagggatctcagggtac

SEQ ID NO: 369713 - DNA, 33 bp, Homo sapien
gacactctgcataaggaaaaaaacaaggctcca

SEQ ID NO: 369714 - DNA, 33 bp, Homo sapien
gacactctgcataagggaaaaaacaaggctcca

SEQ ID NO: 369715 - DNA, 33 bp, Homo sapien
tctttgcgtggtgttcaatgcccctgctttact

SEQ ID NO: 369716 - DNA, 33 bp, Homo sapien
tctttgcgtggtgttcgatgcccctgctttact

SEQ ID NO: 369717 - DNA, 33 bp, Homo sapien
tcccattttcaaggatcaaagaaggtcatggtc

SEQ ID NO: 369718 - DNA, 33 bp, Homo sapien
tcccattttcaaggattaaagaaggtcatggtc

SEQ ID NO: 369719 - DNA, 33 bp, Homo sapien
aagacttttccttgcactattatcagtaacatc

SEQ ID NO: 369720 - DNA, 33 bp, Homo sapien
aagacttttccttgcagtattatcagtaacatc

SEQ ID NO: 369721 - DNA, 33 bp, Homo sapien
ttatgtttatgctttaaaagtatggaaaaactt

SEQ ID NO: 369722 - DNA, 33 bp, Homo sapien
ttatgtttatgctttacaagtatggaaaaactt

SEQ ID NO: 369723 - DNA, 33 bp, Homo sapien
cttacaagctgtgcaaacttgagcaggtgactt

SEQ ID NO: 369724 - DNA, 33 bp, Homo sapien
cttacaagctgtgcaaccttgagcaggtgactt

SEQ ID NO: 369725 - DNA, 33 bp, Homo sapien
taacagaggtagttaccgctctgatgttcctgt

SEQ ID NO: 369726 - DNA, 33 bp, Homo sapien
taacagaggtagttactgctctgatgttcctgt

SEQ ID NO: 369727 - DNA, 33 bp, Homo sapien
tcccagcacctcatccggaagggctctgtgttt

SEQ ID NO: 369728 - DNA, 33 bp, Homo sapien
tcccagcacctcatcctgaagggctctgtgttt

SEQ ID NO: 369729 - DNA, 33 bp, Homo sapien
tgatcaaatgcttagagatgtacctcagtggtg

SEQ ID NO: 369730 - DNA, 33 bp, Homo sapien
tgatcaaatgcttagatatgtacctcagtggtg

SEQ ID NO: 369731 - DNA, 33 bp, Homo sapien
aaacagttaccagccacgcatcgtgtatccagt

SEQ ID NO: 369732 - DNA, 33 bp, Homo sapien
aaacagttaccagccatgcatcgtgtatccagt

SEQ ID NO: 369733 - DNA, 33 bp, Homo sapien
aaaaagatataggatacgaatggaaaaatctcc

SEQ ID NO: 369734 - DNA, 33 bp, Homo sapien
aaaaagatataggatatgaatggaaaaatctcc

SEQ ID NO: 369735 - DNA, 33 bp, Homo sapien
taggaaggcttttctaaggagatcactgcaaag

SEQ ID NO: 369736 - DNA, 33 bp, Homo sapien
taggaaggcttttctacggagatcactgcaaag

SEQ ID NO: 369737 - DNA, 33 bp, Homo sapien
attgtgacaaatcacgaccttagcacttaggga

SEQ ID NO: 369738 - DNA, 33 bp, Homo sapien
attgtgacaaatcacgtccttagcacttaggga

SEQ ID NO: 369739 - DNA, 33 bp, Homo sapien
tcccatacataatgtcaattcacagatattgag

SEQ ID NO: 369740 - DNA, 33 bp, Homo sapien
tcccatacataatgtccattcacagatattgag

SEQ ID NO: 369741 - DNA, 33 bp, Homo sapien
aaacttctgcaatgcacatgtgttagtttataa

SEQ ID NO: 369742 - DNA, 33 bp, Homo sapien
aaacttctgcaatgcatatgtgttagtttataa

SEQ ID NO: 369743 - DNA, 33 bp, Homo sapien
aaatacccagataaaacgagactgttaaagttt

SEQ ID NO: 369744 - DNA, 33 bp, Homo sapien
aaatacccagataaaatgagactgttaaagttt

SEQ ID NO: 369745 - DNA, 33 bp, Homo sapien
tcctggctcgaggcaacgtgacggctcacttca

SEQ ID NO: 369746 - DNA, 33 bp, Homo sapien
tcctggctcgaggcaatgtgacggctcacttca

SEQ ID NO: 369747 - DNA, 33 bp, Homo sapien
ccttgagccaagataccgcacatactgaaggtg

SEQ ID NO: 369748 - DNA, 33 bp, Homo sapien
ccttgagccaagatactgcacatactgaaggtg

SEQ ID NO: 369749 - DNA, 33 bp, Homo sapien
ctagaagtggggagggaatccagttctgaagga

SEQ ID NO: 369750 - DNA, 33 bp, Homo sapien
ctagaagtggggaggggatccagttctgaagga

SEQ ID NO: 369751 - DNA, 33 bp, Homo sapien
catggttaagtgcatcaactggacatttttgta

SEQ ID NO: 369752 - DNA, 33 bp, Homo sapien
catggttaagtgcatcgactggacatttttgta

SEQ ID NO: 369753 - DNA, 33 bp, Homo sapien
gtctggtaaccatgtaagtttgaatacaaatta

SEQ ID NO: 369754 - DNA, 33 bp, Homo sapien
gtctggtaaccatgtacgtttgaatacaaatta

SEQ ID NO: 369755 - DNA, 33 bp, Homo sapien
tcaaatacaatatttacgcagtcatctccaaaa

SEQ ID NO: 369756 - DNA, 33 bp, Homo sapien
tcaaatacaatatttatgcagtcatctccaaaa

SEQ ID NO: 369757 - DNA, 33 bp, Homo sapien
ggttgctgtatttatcacattcaaaaactgata

SEQ ID NO: 369758 - DNA, 33 bp, Homo sapien
ggttgctgtatttatcgcattcaaaaactgata

SEQ ID NO: 369759 - DNA, 33 bp, Homo sapien
agtcagctttctccacacagggcagcaataata

SEQ ID NO: 369760 - DNA, 33 bp, Homo sapien
agtcagctttctccacccagggcagcaataata

SEQ ID NO: 369761 - DNA, 33 bp, Homo sapien
aggagggcagaaaaagaagctcaagtagaaatg

SEQ ID NO: 369762 - DNA, 33 bp, Homo sapien
aggagggcagaaaaaggagctcaagtagaaatg

SEQ ID NO: 369763 - DNA, 33 bp, Homo sapien
agctgtagggccttgactaaggtaaagcgactc

SEQ ID NO: 369764 - DNA, 33 bp, Homo sapien
agctgtagggccttgagtaaggtaaagcgactc

SEQ ID NO: 369765 - DNA, 33 bp, Homo sapien
caaataatgatcatgggattggggagatggagc

SEQ ID NO: 369766 - DNA, 33 bp, Homo sapien
caaataatgatcatggtattggggagatggagc

SEQ ID NO: 369767 - DNA, 33 bp, Homo sapien
cttcatattttttaaacctctctcaatcagtag

SEQ ID NO: 369768 - DNA, 33 bp, Homo sapien
cttcatattttttaaagctctctcaatcagtag

SEQ ID NO: 369769 - DNA, 33 bp, Homo sapien
atgactcatgttgaccaactcataattccagcg

SEQ ID NO: 369770 - DNA, 33 bp, Homo sapien
atgactcatgttgacctactcataattccagcg

SEQ ID NO: 369771 - DNA, 33 bp, Homo sapien
gcatctcccgcgtggtgaaaccccatcgtgcat

SEQ ID NO: 369772 - DNA, 33 bp, Homo sapien
gcatctcccgcgtggttaaaccccatcgtgcat

SEQ ID NO: 369773 - DNA, 33 bp, Homo sapien
ccttctgtcaagcaaccgggtcagggcagaacc

SEQ ID NO: 369774 - DNA, 33 bp, Homo sapien
ccttctgtcaagcaacggggtcagggcagaacc

SEQ ID NO: 369775 - DNA, 33 bp, Homo sapien
cttccttatccagttcaccattaacgggcacct

SEQ ID NO: 369776 - DNA, 33 bp, Homo sapien
cttccttatccagttcgccattaacgggcacct

SEQ ID NO: 369777 - DNA, 33 bp, Homo sapien
aagaaagtggcaaggagcagagagaaactactg

SEQ ID NO: 369778 - DNA, 33 bp, Homo sapien
aagaaagtggcaaggatcagagagaaactactg

SEQ ID NO: 369779 - DNA, 33 bp, Homo sapien
agctagtattttttgcgagtagatatgtacatt

SEQ ID NO: 369780 - DNA, 33 bp, Homo sapien
agctagtattttttgctagtagatatgtacatt

SEQ ID NO: 369781 - DNA, 33 bp, Homo sapien
tcgctgcctttgaggaatatacagattaagcca

SEQ ID NO: 369782 - DNA, 33 bp, Homo sapien
tcgctgcctttgaggagtatacagattaagcca

SEQ ID NO: 369783 - DNA, 33 bp, Homo sapien
tttgattcagattgagaaaggtggtgcagggtg

SEQ ID NO: 369784 - DNA, 33 bp, Homo sapien
tttgattcagattgaggaaggtggtgcagggtg

SEQ ID NO: 369785 - DNA, 33 bp, Homo sapien
gttcgaaaccatccaacaaaacctccacccaga

SEQ ID NO: 369786 - DNA, 33 bp, Homo sapien
gttcgaaaccatccaataaaacctccacccaga

SEQ ID NO: 369787 - DNA, 33 bp, Homo sapien
tcctggctctgcctcccaggtagctgtaattac

SEQ ID NO: 369788 - DNA, 33 bp, Homo sapien
tcctggctctgcctccgaggtagctgtaattac

SEQ ID NO: 369789 - DNA, 33 bp, Homo sapien
ctaccgtgctacattcgaagtagtgcattttgt

SEQ ID NO: 369790 - DNA, 33 bp, Homo sapien
ctaccgtgctacattctaagtagtgcattttgt

SEQ ID NO: 369791 - DNA, 33 bp, Homo sapien
gtgcggccgactaccccatcaggtaaggcagcc

SEQ ID NO: 369792 - DNA, 33 bp, Homo sapien
gtgcggccgactacccgatcaggtaaggcagcc

SEQ ID NO: 369793 - DNA, 33 bp, Homo sapien
gtaatgctattatccccgctttccaaatgagga

SEQ ID NO: 369794 - DNA, 33 bp, Homo sapien
gtaatgctattatccctgctttccaaatgagga

SEQ ID NO: 369795 - DNA, 33 bp, Homo sapien
gatgaaaatgtcaagcgacaggaaggctcgtag

SEQ ID NO: 369796 - DNA, 33 bp, Homo sapien
gatgaaaatgtcaagctacaggaaggctcgtag

SEQ ID NO: 369797 - DNA, 33 bp, Homo sapien
atggtaaaagacaagacgtagcgttcattcatt

SEQ ID NO: 369798 - DNA, 33 bp, Homo sapien
atggtaaaagacaagatgtagcgttcattcatt

SEQ ID NO: 369799 - DNA, 33 bp, Homo sapien
gggggagacggcttacactgagaactattatcc

SEQ ID NO: 369800 - DNA, 33 bp, Homo sapien
gggggagacggcttactctgagaactattatcc

SEQ ID NO: 369801 - DNA, 33 bp, Homo sapien
catccctccaaaatcacgtccactcagaatctc

SEQ ID NO: 369802 - DNA, 33 bp, Homo sapien
catccctccaaaatcatgtccactcagaatctc

SEQ ID NO: 369803 - DNA, 33 bp, Homo sapien
atacctaaatcaagcccctcttcagaatttcag

SEQ ID NO: 369804 - DNA, 33 bp, Homo sapien
atacctaaatcaagcctctcttcagaatttcag

SEQ ID NO: 369805 - DNA, 33 bp, Homo sapien
caaacaagactcacctcaacattgttctttacg

SEQ ID NO: 369806 - DNA, 33 bp, Homo sapien
caaacaagactcacctgaacattgttctttacg

SEQ ID NO: 369807 - DNA, 33 bp, Homo sapien
aatttgctacctacaacggatgccccaggacat

SEQ ID NO: 369808 - DNA, 33 bp, Homo sapien
aatttgctacctacaatggatgccccaggacat

SEQ ID NO: 369809 - DNA, 33 bp, Homo sapien
aaaggagaaaagtcccaagagcaaggaatgtct

SEQ ID NO: 369810 - DNA, 33 bp, Homo sapien
aaaggagaaaagtcccgagagcaaggaatgtct

SEQ ID NO: 369811 - DNA, 33 bp, Homo sapien
ttttgatgaaggaaaacggaaagttacagagcc

SEQ ID NO: 369812 - DNA, 33 bp, Homo sapien
ttttgatgaaggaaaatggaaagttacagagcc

SEQ ID NO: 369813 - DNA, 33 bp, Homo sapien
tgacttttctggaagccatctagtatctgtgag

SEQ ID NO: 369814 - DNA, 33 bp, Homo sapien
tgacttttctggaagcgatctagtatctgtgag

SEQ ID NO: 369815 - DNA, 33 bp, Homo sapien
aagtcagagagaggcgcagtcagcgagaattgg

SEQ ID NO: 369816 - DNA, 33 bp, Homo sapien
aagtcagagagaggcgtagtcagcgagaattgg

SEQ ID NO: 369817 - DNA, 33 bp, Homo sapien
ctctaattaattgcagcattccattgcgttatt

SEQ ID NO: 369818 - DNA, 33 bp, Homo sapien
ctctaattaattgcagtattccattgcgttatt

SEQ ID NO: 369819 - DNA, 33 bp, Homo sapien
ctgtctccaaaataaacgaatgactgactgact

SEQ ID NO: 369820 - DNA, 33 bp, Homo sapien
ctgtctccaaaataaatgaatgactgactgact

SEQ ID NO: 369821 - DNA, 33 bp, Homo sapien
gacacgtgaagtatcccaagacagaagacaggg

SEQ ID NO: 369822 - DNA, 33 bp, Homo sapien
gacacgtgaagtatcctaagacagaagacaggg

SEQ ID NO: 369823 - DNA, 33 bp, Homo sapien
gttttccagcaagcaacggaagacggggacttg

SEQ ID NO: 369824 - DNA, 33 bp, Homo sapien
gttttccagcaagcaatggaagacggggacttg

SEQ ID NO: 369825 - DNA, 33 bp, Homo sapien
tgtaaggacacaatcaacgatggctatactttg

SEQ ID NO: 369826 - DNA, 33 bp, Homo sapien
tgtaaggacacaatcagcgatggctatactttg

SEQ ID NO: 369827 - DNA, 33 bp, Homo sapien
agaaacactgcagccacctaaaaataggcagaa

SEQ ID NO: 369828 - DNA, 33 bp, Homo sapien
agaaacactgcagccagctaaaaataggcagaa

SEQ ID NO: 369829 - DNA, 33 bp, Homo sapien
gttctaccctgagacaagtgacaagtacctctc

SEQ ID NO: 369830 - DNA, 33 bp, Homo sapien
gttctaccctgagacatgtgacaagtacctctc

SEQ ID NO: 369831 - DNA, 33 bp, Homo sapien
gtacacatgagaagttaaaagtgctctgtgttg

SEQ ID NO: 369832 - DNA, 33 bp, Homo sapien
gtacacatgagaagttcaaagtgctctgtgttg

SEQ ID NO: 369833 - DNA, 33 bp, Homo sapien
aggttttttggtcctgaaactggacacactata

SEQ ID NO: 369834 - DNA, 33 bp, Homo sapien
aggttttttggtcctgcaactggacacactata

SEQ ID NO: 369835 - DNA, 33 bp, Homo sapien
atgttttcttggccctaaacctgctgtaagcct

SEQ ID NO: 369836 - DNA, 33 bp, Homo sapien
atgttttcttggccctcaacctgctgtaagcct

SEQ ID NO: 369837 - DNA, 33 bp, Homo sapien
cccatacatggtaagcactacaggaatgccagc

SEQ ID NO: 369838 - DNA, 33 bp, Homo sapien
cccatacatggtaagcgctacaggaatgccagc

SEQ ID NO: 369839 - DNA, 33 bp, Homo sapien
taactagtgcaaactcactcatggatcagagat

SEQ ID NO: 369840 - DNA, 33 bp, Homo sapien
taactagtgcaaactcgctcatggatcagagat

SEQ ID NO: 369841 - DNA, 33 bp, Homo sapien
actctgcgaataacccaccacgtggctcctcat

SEQ ID NO: 369842 - DNA, 33 bp, Homo sapien
actctgcgaataacccgccacgtggctcctcat

SEQ ID NO: 369843 - DNA, 33 bp, Homo sapien
gcctatgatgtcctacaggatctagctactgcc

SEQ ID NO: 369844 - DNA, 33 bp, Homo sapien
gcctatgatgtcctacgggatctagctactgcc

SEQ ID NO: 369845 - DNA, 33 bp, Homo sapien
tatgtttcagccaccacggcgagctcattcctg

SEQ ID NO: 369846 - DNA, 33 bp, Homo sapien
tatgtttcagccaccagggcgagctcattcctg

SEQ ID NO: 369847 - DNA, 33 bp, Homo sapien
gcctgaggaatcactccagagcttactgccact

SEQ ID NO: 369848 - DNA, 33 bp, Homo sapien
gcctgaggaatcactctagagcttactgccact

SEQ ID NO: 369849 - DNA, 33 bp, Homo sapien
accatgttagccaggacaatagtagatcttttt

SEQ ID NO: 369850 - DNA, 33 bp, Homo sapien
accatgttagccaggataatagtagatcttttt

SEQ ID NO: 369851 - DNA, 33 bp, Homo sapien
caaaaagcagcaggcaagcaaaggccagtgaga

SEQ ID NO: 369852 - DNA, 33 bp, Homo sapien
caaaaagcagcaggcaggcaaaggccagtgaga

SEQ ID NO: 369853 - DNA, 33 bp, Homo sapien
gatgaaaacaattaaacgattcaaaagcacatc

SEQ ID NO: 369854 - DNA, 33 bp, Homo sapien
gatgaaaacaattaaatgattcaaaagcacatc

SEQ ID NO: 369855 - DNA, 33 bp, Homo sapien
gagtggtggagctctgcagaaagaggaaggaac

SEQ ID NO: 369856 - DNA, 33 bp, Homo sapien
gagtggtggagctctgtagaaagaggaaggaac

SEQ ID NO: 369857 - DNA, 33 bp, Homo sapien
aggttagagagaaggacgggatatgaaccatag

SEQ ID NO: 369858 - DNA, 33 bp, Homo sapien
aggttagagagaaggatgggatatgaaccatag

SEQ ID NO: 369859 - DNA, 33 bp, Homo sapien
tctgcttcctcatctcagacattagccaatcag

SEQ ID NO: 369860 - DNA, 33 bp, Homo sapien
tctgcttcctcatctctgacattagccaatcag

SEQ ID NO: 369861 - DNA, 33 bp, Homo sapien
ttgaccagccttatcaaatctgactgtatttcc

SEQ ID NO: 369862 - DNA, 33 bp, Homo sapien
ttgaccagccttatcacatctgactgtatttcc

SEQ ID NO: 369863 - DNA, 33 bp, Homo sapien
ggctggctgtcccgccaaacaaagagcctggat

SEQ ID NO: 369864 - DNA, 33 bp, Homo sapien
ggctggctgtcccgccgaacaaagagcctggat

SEQ ID NO: 369865 - DNA, 33 bp, Homo sapien
attacagcctctggcaaatgttccagggaggcc

SEQ ID NO: 369866 - DNA, 33 bp, Homo sapien
attacagcctctggcagatgttccagggaggcc

SEQ ID NO: 369867 - DNA, 33 bp, Homo sapien
cgtggatacaggcataccttcttggatgcaatt

SEQ ID NO: 369868 - DNA, 33 bp, Homo sapien
cgtggatacaggcatatcttcttggatgcaatt

SEQ ID NO: 369869 - DNA, 33 bp, Homo sapien
atgcctgtatccacgaaccagtttagagcagta

SEQ ID NO: 369870 - DNA, 33 bp, Homo sapien
atgcctgtatccacgagccagtttagagcagta

SEQ ID NO: 369871 - DNA, 33 bp, Homo sapien
tgttgaatactgtacacggacattttgcagaca

SEQ ID NO: 369872 - DNA, 33 bp, Homo sapien
tgttgaatactgtacatggacattttgcagaca

SEQ ID NO: 369873 - DNA, 33 bp, Homo sapien
acctcaaatatgaagacgatacacagagacaaa

SEQ ID NO: 369874 - DNA, 33 bp, Homo sapien
acctcaaatatgaagatgatacacagagacaaa

SEQ ID NO: 369875 - DNA, 33 bp, Homo sapien
tgacaaaaaataagaaagtgtagttgaactaat

SEQ ID NO: 369876 - DNA, 33 bp, Homo sapien
tgacaaaaaataagaacgtgtagttgaactaat

SEQ ID NO: 369877 - DNA, 33 bp, Homo sapien
tgtgaagggtccaaaacggatctaaaccattgc

SEQ ID NO: 369878 - DNA, 33 bp, Homo sapien
tgtgaagggtccaaaatggatctaaaccattgc

SEQ ID NO: 369879 - DNA, 33 bp, Homo sapien
tacaaagacaaaagagcaagccattagatgata

SEQ ID NO: 369880 - DNA, 33 bp, Homo sapien
tacaaagacaaaagagtaagccattagatgata

SEQ ID NO: 369881 - DNA, 33 bp, Homo sapien
tgtcaaaagaggaaaaaaaaacacgcaagggcc

SEQ ID NO: 369882 - DNA, 33 bp, Homo sapien
tgtcaaaagaggaaaagaaaacacgcaagggcc

SEQ ID NO: 369883 - DNA, 33 bp, Homo sapien
gaagtccaaaagggaaactacttcaaatgacca

SEQ ID NO: 369884 - DNA, 33 bp, Homo sapien
gaagtccaaaagggaatctacttcaaatgacca

SEQ ID NO: 369885 - DNA, 33 bp, Homo sapien
gttatgtaattctccactgcatctcatttaatc

SEQ ID NO: 369886 - DNA, 33 bp, Homo sapien
gttatgtaattctccagtgcatctcatttaatc

SEQ ID NO: 369887 - DNA, 33 bp, Homo sapien
cctgaatcagactaccagcgttcacatctgtat

SEQ ID NO: 369888 - DNA, 33 bp, Homo sapien
cctgaatcagactaccggcgttcacatctgtat

SEQ ID NO: 369889 - DNA, 33 bp, Homo sapien
tctgcattcatgttgacggccagatctttggtc

SEQ ID NO: 369890 - DNA, 33 bp, Homo sapien
tctgcattcatgttgatggccagatctttggtc

SEQ ID NO: 369891 - DNA, 33 bp, Homo sapien
atagctctcacttttaagacatctcatctgatc

SEQ ID NO: 369892 - DNA, 33 bp, Homo sapien
atagctctcacttttaggacatctcatctgatc

SEQ ID NO: 369893 - DNA, 33 bp, Homo sapien
ggcagggggagaatgaagggctagagtcaacgg

SEQ ID NO: 369894 - DNA, 33 bp, Homo sapien
ggcagggggagaatgaggggctagagtcaacgg

SEQ ID NO: 369895 - DNA, 33 bp, Homo sapien
gggaagaacgctttaactgagcatgcgtacaac

SEQ ID NO: 369896 - DNA, 33 bp, Homo sapien
gggaagaacgctttaattgagcatgcgtacaac

SEQ ID NO: 369897 - DNA, 33 bp, Homo sapien
atggtggtatatatgccatgctggccggatatt

SEQ ID NO: 369898 - DNA, 33 bp, Homo sapien
atggtggtatatatgctatgctggccggatatt

SEQ ID NO: 369899 - DNA, 33 bp, Homo sapien
gctggccttgtagagacaggagcagacgtgcac

SEQ ID NO: 369900 - DNA, 33 bp, Homo sapien
gctggccttgtagagagaggagcagacgtgcac

SEQ ID NO: 369901 - DNA, 33 bp, Homo sapien
cttcctggcccctgtacgtttgaagatggtttt

SEQ ID NO: 369902 - DNA, 33 bp, Homo sapien
cttcctggcccctgtaggtttgaagatggtttt

SEQ ID NO: 369903 - DNA, 33 bp, Homo sapien
ccagatattttaaaaccacccagcttgtgtctc

SEQ ID NO: 369904 - DNA, 33 bp, Homo sapien
ccagatattttaaaactacccagcttgtgtctc

SEQ ID NO: 369905 - DNA, 33 bp, Homo sapien
aaatggttaggagagacgtttggagaaggtgac

SEQ ID NO: 369906 - DNA, 33 bp, Homo sapien
aaatggttaggagagatgtttggagaaggtgac

SEQ ID NO: 369907 - DNA, 33 bp, Homo sapien
gccggtcgtggatcttgaactctcaaaagcaat

SEQ ID NO: 369908 - DNA, 33 bp, Homo sapien
gccggtcgtggatctttaactctcaaaagcaat

SEQ ID NO: 369909 - DNA, 33 bp, Homo sapien
aggtgacaaaattcaactgatcctcctagacat

SEQ ID NO: 369910 - DNA, 33 bp, Homo sapien
aggtgacaaaattcaattgatcctcctagacat

SEQ ID NO: 369911 - DNA, 33 bp, Homo sapien
cctccctcaggtctcacgttaatttcacctcca

SEQ ID NO: 369912 - DNA, 33 bp, Homo sapien
cctccctcaggtctcatgttaatttcacctcca

SEQ ID NO: 369913 - DNA, 33 bp, Homo sapien
gcataaagtcaacatgcagcaacagtgagctgt

SEQ ID NO: 369914 - DNA, 33 bp, Homo sapien
gcataaagtcaacatggagcaacagtgagctgt

SEQ ID NO: 369915 - DNA, 33 bp, Homo sapien
caacacaccatcctgacaaatctaaagcccaga

SEQ ID NO: 369916 - DNA, 33 bp, Homo sapien
caacacaccatcctgagaaatctaaagcccaga

SEQ ID NO: 369917 - DNA, 33 bp, Homo sapien
attttgcattgctaacaggtccccaggagatgc

SEQ ID NO: 369918 - DNA, 33 bp, Homo sapien
attttgcattgctaacgggtccccaggagatgc

SEQ ID NO: 369919 - DNA, 33 bp, Homo sapien
atgtcagcctgaaatccagtggtgaattatgcc

SEQ ID NO: 369920 - DNA, 33 bp, Homo sapien
atgtcagcctgaaatcgagtggtgaattatgcc

SEQ ID NO: 369921 - DNA, 33 bp, Homo sapien
ggtaaaggctgcttgcgaaagggctgttgcttt

SEQ ID NO: 369922 - DNA, 33 bp, Homo sapien
ggtaaaggctgcttgctaaagggctgttgcttt

SEQ ID NO: 369923 - DNA, 33 bp, Homo sapien
tatataactaaacgagaatagcagtctgcagtt

SEQ ID NO: 369924 - DNA, 33 bp, Homo sapien
tatataactaaacgaggatagcagtctgcagtt

SEQ ID NO: 369925 - DNA, 33 bp, Homo sapien
acaaagcatgacactgaagagtttcacgtggga

SEQ ID NO: 369926 - DNA, 33 bp, Homo sapien
acaaagcatgacactgcagagtttcacgtggga

SEQ ID NO: 369927 - DNA, 33 bp, Homo sapien
gaaataattgcacctgaaaatatgttccccaca

SEQ ID NO: 369928 - DNA, 33 bp, Homo sapien
gaaataattgcacctggaaatatgttccccaca

SEQ ID NO: 369929 - DNA, 33 bp, Homo sapien
aaaattacataatcacaacttttctataaatgg

SEQ ID NO: 369930 - DNA, 33 bp, Homo sapien
aaaattacataatcacgacttttctataaatgg

SEQ ID NO: 369931 - DNA, 33 bp, Homo sapien
tcattttctctgaccacgagtgtaatatttttc

SEQ ID NO: 369932 - DNA, 33 bp, Homo sapien
tcattttctctgaccatgagtgtaatatttttc

SEQ ID NO: 369933 - DNA, 33 bp, Homo sapien
actttgtcacagggaggatgtcccagcgttccc

SEQ ID NO: 369934 - DNA, 33 bp, Homo sapien
actttgtcacagggagtatgtcccagcgttccc

SEQ ID NO: 369935 - DNA, 33 bp, Homo sapien
agtgcagcgaagggacaatttacaaaggtgtgg

SEQ ID NO: 369936 - DNA, 33 bp, Homo sapien
agtgcagcgaagggacgatttacaaaggtgtgg

SEQ ID NO: 369937 - DNA, 33 bp, Homo sapien
tggaattaacaatacagtattttttctgaatct

SEQ ID NO: 369938 - DNA, 33 bp, Homo sapien
tggaattaacaatacattattttttctgaatct

SEQ ID NO: 369939 - DNA, 33 bp, Homo sapien
cacacaaagtttacgccgagttttatgttggca

SEQ ID NO: 369940 - DNA, 33 bp, Homo sapien
cacacaaagtttacgctgagttttatgttggca

SEQ ID NO: 369941 - DNA, 33 bp, Homo sapien
acagaagcatcctgggcccaacggaaaaactac

SEQ ID NO: 369942 - DNA, 33 bp, Homo sapien
acagaagcatcctgggtccaacggaaaaactac

SEQ ID NO: 369943 - DNA, 33 bp, Homo sapien
ctgtagacacatatgaatcaaacacctgtaaac

SEQ ID NO: 369944 - DNA, 33 bp, Homo sapien
ctgtagacacatatgagtcaaacacctgtaaac

SEQ ID NO: 369945 - DNA, 33 bp, Homo sapien
catgtgaaatagactacatccgattttacaaaa

SEQ ID NO: 369946 - DNA, 33 bp, Homo sapien
catgtgaaatagactatatccgattttacaaaa

SEQ ID NO: 369947 - DNA, 33 bp, Homo sapien
gcgccagtatccaaacaggtatcaaacatatca

SEQ ID NO: 369948 - DNA, 33 bp, Homo sapien
gcgccagtatccaaaccggtatcaaacatatca

SEQ ID NO: 369949 - DNA, 33 bp, Homo sapien
tctgagaaggtatccacgagctccatctgactg

SEQ ID NO: 369950 - DNA, 33 bp, Homo sapien
tctgagaaggtatccatgagctccatctgactg

SEQ ID NO: 369951 - DNA, 33 bp, Homo sapien
ccccacttaatgaatacagtacaaaacaaaatt

SEQ ID NO: 369952 - DNA, 33 bp, Homo sapien
ccccacttaatgaatagagtacaaaacaaaatt

SEQ ID NO: 369953 - DNA, 33 bp, Homo sapien
gtttttgaattactgacggcagtgataggtttc

SEQ ID NO: 369954 - DNA, 33 bp, Homo sapien
gtttttgaattactgatggcagtgataggtttc

SEQ ID NO: 369955 - DNA, 33 bp, Homo sapien
gttgaatggaagaatacggtcacaaaagaagac

SEQ ID NO: 369956 - DNA, 33 bp, Homo sapien
gttgaatggaagaatatggtcacaaaagaagac

SEQ ID NO: 369957 - DNA, 33 bp, Homo sapien
atgcaaacatgtaacaaggagctctgaactagc

SEQ ID NO: 369958 - DNA, 33 bp, Homo sapien
atgcaaacatgtaacagggagctctgaactagc

SEQ ID NO: 369959 - DNA, 33 bp, Homo sapien
cttatattagttcccaagtaaagcagaagacgc

SEQ ID NO: 369960 - DNA, 33 bp, Homo sapien
cttatattagttcccacgtaaagcagaagacgc

SEQ ID NO: 369961 - DNA, 33 bp, Homo sapien
aagctccctccaactcaagtggtctttcaacta

SEQ ID NO: 369962 - DNA, 33 bp, Homo sapien
aagctccctccaactcgagtggtctttcaacta

SEQ ID NO: 369963 - DNA, 33 bp, Homo sapien
aattagcttgcagagcaaacaaccgaaggagag

SEQ ID NO: 369964 - DNA, 33 bp, Homo sapien
aattagcttgcagagctaacaaccgaaggagag

SEQ ID NO: 369965 - DNA, 33 bp, Homo sapien
atttattggatctcagaagcataagttgagcta

SEQ ID NO: 369966 - DNA, 33 bp, Homo sapien
atttattggatctcaggagcataagttgagcta

SEQ ID NO: 369967 - DNA, 33 bp, Homo sapien
gttccatccagttgtcaaaatctcttttgagtt

SEQ ID NO: 369968 - DNA, 33 bp, Homo sapien
gttccatccagttgtcgaaatctcttttgagtt

SEQ ID NO: 369969 - DNA, 33 bp, Homo sapien
ggatcagtactcagggccatttcttgattttta

SEQ ID NO: 369970 - DNA, 33 bp, Homo sapien
ggatcagtactcagggtcatttcttgattttta

SEQ ID NO: 369971 - DNA, 33 bp, Homo sapien
taaggaaatcgagagaaagagaggtaaaatcac

SEQ ID NO: 369972 - DNA, 33 bp, Homo sapien
taaggaaatcgagagagagagaggtaaaatcac

SEQ ID NO: 369973 - DNA, 33 bp, Homo sapien
tccaagatgtacaaaaactgatagactttgtca

SEQ ID NO: 369974 - DNA, 33 bp, Homo sapien
tccaagatgtacaaaagctgatagactttgtca

SEQ ID NO: 369975 - DNA, 33 bp, Homo sapien
aaaccatatcatacagacccaaaagaaaaacag

SEQ ID NO: 369976 - DNA, 33 bp, Homo sapien
aaaccatatcatacaggcccaaaagaaaaacag

SEQ ID NO: 369977 - DNA, 33 bp, Homo sapien
tgttgatcttcacaaaaagttccattcttcaac

SEQ ID NO: 369978 - DNA, 33 bp, Homo sapien
tgttgatcttcacaaatagttccattcttcaac

SEQ ID NO: 369979 - DNA, 33 bp, Homo sapien
atgaaccattctggcaaggaaggttttccattc

SEQ ID NO: 369980 - DNA, 33 bp, Homo sapien
atgaaccattctggcagggaaggttttccattc

SEQ ID NO: 369981 - DNA, 33 bp, Homo sapien
attactctctccaaacaccaggctaagtactcc

SEQ ID NO: 369982 - DNA, 33 bp, Homo sapien
attactctctccaaacgccaggctaagtactcc

SEQ ID NO: 369983 - DNA, 33 bp, Homo sapien
ggagatggttccaacaccgttgctggtttcaag

SEQ ID NO: 369984 - DNA, 33 bp, Homo sapien
ggagatggttccaacatcgttgctggtttcaag

SEQ ID NO: 369985 - DNA, 33 bp, Homo sapien
gggaacaagtcatagtaaagtaaattgccaatg

SEQ ID NO: 369986 - DNA, 33 bp, Homo sapien
gggaacaagtcatagtgaagtaaattgccaatg

SEQ ID NO: 369987 - DNA, 33 bp, Homo sapien
ctcagagggtttgatgcaacgatgacatattaa

SEQ ID NO: 369988 - DNA, 33 bp, Homo sapien
ctcagagggtttgatgtaacgatgacatattaa

SEQ ID NO: 369989 - DNA, 33 bp, Homo sapien
aatagtggtctttgtaacatgcaaactctttgt

SEQ ID NO: 369990 - DNA, 33 bp, Homo sapien
aatagtggtctttgtagcatgcaaactctttgt

SEQ ID NO: 369991 - DNA, 33 bp, Homo sapien
acaaccaagcttgagaacagctgatgtgggggg

SEQ ID NO: 369992 - DNA, 33 bp, Homo sapien
acaaccaagcttgagagcagctgatgtgggggg

SEQ ID NO: 369993 - DNA, 33 bp, Homo sapien
tattattgttactacccccattctacagatgag

SEQ ID NO: 369994 - DNA, 33 bp, Homo sapien
tattattgttactacctccattctacagatgag

SEQ ID NO: 369995 - DNA, 33 bp, Homo sapien
gaacccgcaatgcagacggtctatggcttccga

SEQ ID NO: 369996 - DNA, 33 bp, Homo sapien
gaacccgcaatgcagatggtctatggcttccga

SEQ ID NO: 369997 - DNA, 33 bp, Homo sapien
gagattctggttagaacacactgataccatcat

SEQ ID NO: 369998 - DNA, 33 bp, Homo sapien
gagattctggttagaatacactgataccatcat

SEQ ID NO: 369999 - DNA, 33 bp, Homo sapien
agcaagataacacataactctctgtgcctcagt

SEQ ID NO: 370000 - DNA, 33 bp, Homo sapien
agcaagataacacatacctctctgtgcctcagt

SEQ ID NO: 370001 - DNA, 33 bp, Homo sapien
agttgaaacgtaatccccaatgtgatcatgttg

SEQ ID NO: 370002 - DNA, 33 bp, Homo sapien
agttgaaacgtaatcctcaatgtgatcatgttg

SEQ ID NO: 370003 - DNA, 33 bp, Homo sapien
ggtgttgtaaattcgacagtacaaaacaaatat

SEQ ID NO: 370004 - DNA, 33 bp, Homo sapien
ggtgttgtaaattcgatagtacaaaacaaatat

SEQ ID NO: 370005 - DNA, 33 bp, Homo sapien
ggcacacatgattataaaggttgagaagttcca

SEQ ID NO: 370006 - DNA, 33 bp, Homo sapien
ggcacacatgattatagaggttgagaagttcca

SEQ ID NO: 370007 - DNA, 33 bp, Homo sapien
agtaatcagagaggcactcaacggacacagcta

SEQ ID NO: 370008 - DNA, 33 bp, Homo sapien
agtaatcagagaggcattcaacggacacagcta

SEQ ID NO: 370009 - DNA, 33 bp, Homo sapien
tattatcaagaagtcaagagtttacaatactgc

SEQ ID NO: 370010 - DNA, 33 bp, Homo sapien
tattatcaagaagtcacgagtttacaatactgc

SEQ ID NO: 370011 - DNA, 33 bp, Homo sapien
tcacaggctaacatcacgcataagtaaggcagg

SEQ ID NO: 370012 - DNA, 33 bp, Homo sapien
tcacaggctaacatcatgcataagtaaggcagg

SEQ ID NO: 370013 - DNA, 33 bp, Homo sapien
aagaatgtatttccagaaagaatttcattcatc

SEQ ID NO: 370014 - DNA, 33 bp, Homo sapien
aagaatgtatttccaggaagaatttcattcatc

SEQ ID NO: 370015 - DNA, 33 bp, Homo sapien
catcaatatttacttcaaagagtgattttccaa

SEQ ID NO: 370016 - DNA, 33 bp, Homo sapien
catcaatatttacttcgaagagtgattttccaa

SEQ ID NO: 370017 - DNA, 33 bp, Homo sapien
aactgttttttgaagcaaagaatgcagaactag

SEQ ID NO: 370018 - DNA, 33 bp, Homo sapien
aactgttttttgaagcgaagaatgcagaactag

SEQ ID NO: 370019 - DNA, 33 bp, Homo sapien
aggggcccagctataacctaataccagcagtga

SEQ ID NO: 370020 - DNA, 33 bp, Homo sapien
aggggcccagctataatctaataccagcagtga

SEQ ID NO: 370021 - DNA, 33 bp, Homo sapien
ttcctgttaccaccacactgttcacctgtgtta

SEQ ID NO: 370022 - DNA, 33 bp, Homo sapien
ttcctgttaccaccacgctgttcacctgtgtta

SEQ ID NO: 370023 - DNA, 33 bp, Homo sapien
tctcataaaatgaaacccacaactatcctatga

SEQ ID NO: 370024 - DNA, 33 bp, Homo sapien
tctcataaaatgaaacgcacaactatcctatga

SEQ ID NO: 370025 - DNA, 33 bp, Homo sapien
cagttccaatcttaggcacttatccaagagaaa

SEQ ID NO: 370026 - DNA, 33 bp, Homo sapien
cagttccaatcttaggtacttatccaagagaaa

SEQ ID NO: 370027 - DNA, 33 bp, Homo sapien
ccagttgagaatcatcactccagaattgggccc

SEQ ID NO: 370028 - DNA, 33 bp, Homo sapien
ccagttgagaatcatccctccagaattgggccc

SEQ ID NO: 370029 - DNA, 33 bp, Homo sapien
actttgcttctcgaacacagacaggagagtagg

SEQ ID NO: 370030 - DNA, 33 bp, Homo sapien
actttgcttctcgaacgcagacaggagagtagg

SEQ ID NO: 370031 - DNA, 33 bp, Homo sapien
ttgaggtccaggtgaaatatgagagagcctgac

SEQ ID NO: 370032 - DNA, 33 bp, Homo sapien
ttgaggtccaggtgaattatgagagagcctgac

SEQ ID NO: 370033 - DNA, 33 bp, Homo sapien
tcatggttttgtccaaagtttccccagagcagc

SEQ ID NO: 370034 - DNA, 33 bp, Homo sapien
tcatggttttgtccaacgtttccccagagcagc

SEQ ID NO: 370035 - DNA, 33 bp, Homo sapien
atgagtgcttcactgcccttttacttgcatctt

SEQ ID NO: 370036 - DNA, 33 bp, Homo sapien
atgagtgcttcactgctcttttacttgcatctt

SEQ ID NO: 370037 - DNA, 33 bp, Homo sapien
tcctcatttcctggaccacccaacttccaacat

SEQ ID NO: 370038 - DNA, 33 bp, Homo sapien
tcctcatttcctggacgacccaacttccaacat

SEQ ID NO: 370039 - DNA, 33 bp, Homo sapien
ttctttgattgaagaccatcattttctcatttc

SEQ ID NO: 370040 - DNA, 33 bp, Homo sapien
ttctttgattgaagacgatcattttctcatttc

SEQ ID NO: 370041 - DNA, 33 bp, Homo sapien
gttaattgattcacggaccatgaaggactagtt

SEQ ID NO: 370042 - DNA, 33 bp, Homo sapien
gttaattgattcacgggccatgaaggactagtt

SEQ ID NO: 370043 - DNA, 33 bp, Homo sapien
ttgctttaataatcaccatctccagcagaacaa

SEQ ID NO: 370044 - DNA, 33 bp, Homo sapien
ttgctttaataatcactatctccagcagaacaa

SEQ ID NO: 370045 - DNA, 33 bp, Homo sapien
ccaccccatttgttaactggttctcatctgtta

SEQ ID NO: 370046 - DNA, 33 bp, Homo sapien
ccaccccatttgttaagtggttctcatctgtta

SEQ ID NO: 370047 - DNA, 33 bp, Homo sapien
actgcaaggatgacaacgggttgtgtaaggtgg

SEQ ID NO: 370048 - DNA, 33 bp, Homo sapien
actgcaaggatgacaatgggttgtgtaaggtgg

SEQ ID NO: 370049 - DNA, 33 bp, Homo sapien
tggcacttggagaattaaacttttcatgccatt

SEQ ID NO: 370050 - DNA, 33 bp, Homo sapien
tggcacttggagaattcaacttttcatgccatt

SEQ ID NO: 370051 - DNA, 33 bp, Homo sapien
tccaataatctttgtaccaaacaatggcatgaa

SEQ ID NO: 370052 - DNA, 33 bp, Homo sapien
tccaataatctttgtagcaaacaatggcatgaa

SEQ ID NO: 370053 - DNA, 33 bp, Homo sapien
attcaatgacaattcacggaaggcttttagact

SEQ ID NO: 370054 - DNA, 33 bp, Homo sapien
attcaatgacaattcatggaaggcttttagact

SEQ ID NO: 370055 - DNA, 33 bp, Homo sapien
aagggacattttctggaaaaagagaagaatgag

SEQ ID NO: 370056 - DNA, 33 bp, Homo sapien
aagggacattttctgggaaaagagaagaatgag

SEQ ID NO: 370057 - DNA, 33 bp, Homo sapien
acacttaaataaccagcaacactgcctttccta

SEQ ID NO: 370058 - DNA, 33 bp, Homo sapien
acacttaaataaccaggaacactgcctttccta

SEQ ID NO: 370059 - DNA, 33 bp, Homo sapien
caagagaaggaagcaacagtgcgttggctggca

SEQ ID NO: 370060 - DNA, 33 bp, Homo sapien
caagagaaggaagcaatagtgcgttggctggca

SEQ ID NO: 370061 - DNA, 33 bp, Homo sapien
cagattttgagttgaaacgtcaatgggcattgc

SEQ ID NO: 370062 - DNA, 33 bp, Homo sapien
cagattttgagttgaagcgtcaatgggcattgc

SEQ ID NO: 370063 - DNA, 33 bp, Homo sapien
attatactaatatcaaacaaagtagactttact

SEQ ID NO: 370064 - DNA, 33 bp, Homo sapien
attatactaatatcaagcaaagtagactttact

SEQ ID NO: 370065 - DNA, 33 bp, Homo sapien
caaaagaagacaaaaacgaaagggtgcatgaaa

SEQ ID NO: 370066 - DNA, 33 bp, Homo sapien
caaaagaagacaaaaatgaaagggtgcatgaaa

SEQ ID NO: 370067 - DNA, 33 bp, Homo sapien
ttaatcccatttgctacaccaaactactgaaag

SEQ ID NO: 370068 - DNA, 33 bp, Homo sapien
ttaatcccatttgctataccaaactactgaaag

SEQ ID NO: 370069 - DNA, 33 bp, Homo sapien
gattttgggagtgggcgcctaacaaaagggtaa

SEQ ID NO: 370070 - DNA, 33 bp, Homo sapien
gattttgggagtgggctcctaacaaaagggtaa

SEQ ID NO: 370071 - DNA, 33 bp, Homo sapien
ttatgtgctaatttagaaacaatgaatatctca

SEQ ID NO: 370072 - DNA, 33 bp, Homo sapien
ttatgtgctaatttaggaacaatgaatatctca

SEQ ID NO: 370073 - DNA, 33 bp, Homo sapien
gaggtttggtggacaactggggcagctgtcacc

SEQ ID NO: 370074 - DNA, 33 bp, Homo sapien
gaggtttggtggacaattggggcagctgtcacc

SEQ ID NO: 370075 - DNA, 33 bp, Homo sapien
tttagatcctggctacactatccaatatccacg

SEQ ID NO: 370076 - DNA, 33 bp, Homo sapien
tttagatcctggctacgctatccaatatccacg

SEQ ID NO: 370077 - DNA, 33 bp, Homo sapien
gaaggaaacacaaaaccatgggaaggaaagaaa

SEQ ID NO: 370078 - DNA, 33 bp, Homo sapien
gaaggaaacacaaaactatgggaaggaaagaaa

SEQ ID NO: 370079 - DNA, 33 bp, Homo sapien
tttctaccatattaaaagatcagtgatgctggc

SEQ ID NO: 370080 - DNA, 33 bp, Homo sapien
tttctaccatattaaatgatcagtgatgctggc

SEQ ID NO: 370081 - DNA, 33 bp, Homo sapien
atcatgttattctatacccagacttccatttca

SEQ ID NO: 370082 - DNA, 33 bp, Homo sapien
atcatgttattctatatccagacttccatttca

SEQ ID NO: 370083 - DNA, 33 bp, Homo sapien
atcctgagtaacacaaagcttggcacatagtag

SEQ ID NO: 370084 - DNA, 33 bp, Homo sapien
atcctgagtaacacaaggcttggcacatagtag

SEQ ID NO: 370085 - DNA, 33 bp, Homo sapien
cagcaataaaaagcaacgaactattgatacatg

SEQ ID NO: 370086 - DNA, 33 bp, Homo sapien
cagcaataaaaagcaatgaactattgatacatg

SEQ ID NO: 370087 - DNA, 33 bp, Homo sapien
agacctactcattatcacattatcatgagaaca

SEQ ID NO: 370088 - DNA, 33 bp, Homo sapien
agacctactcattatcgcattatcatgagaaca

SEQ ID NO: 370089 - DNA, 33 bp, Homo sapien
catgagatgcccattacagaaacttacccattc

SEQ ID NO: 370090 - DNA, 33 bp, Homo sapien
catgagatgcccattatagaaacttacccattc

SEQ ID NO: 370091 - DNA, 33 bp, Homo sapien
gtttttgtttggctcaccagtgttgctttaaag

SEQ ID NO: 370092 - DNA, 33 bp, Homo sapien
gtttttgtttggctcatcagtgttgctttaaag

SEQ ID NO: 370093 - DNA, 33 bp, Homo sapien
accagtcccaaaaccactcatctattttctgtc

SEQ ID NO: 370094 - DNA, 33 bp, Homo sapien
accagtcccaaaaccagtcatctattttctgtc

SEQ ID NO: 370095 - DNA, 33 bp, Homo sapien
tgtactgttgaaaaaaacagagaagtcccaaga

SEQ ID NO: 370096 - DNA, 33 bp, Homo sapien
tgtactgttgaaaaaaccagagaagtcccaaga

SEQ ID NO: 370097 - DNA, 33 bp, Homo sapien
tgatctgtactttatgcatgagaaaagctgagg

SEQ ID NO: 370098 - DNA, 33 bp, Homo sapien
tgatctgtactttatggatgagaaaagctgagg

SEQ ID NO: 370099 - DNA, 33 bp, Homo sapien
aggagaagactgagaactgaccacgtctttggt

SEQ ID NO: 370100 - DNA, 33 bp, Homo sapien
aggagaagactgagaattgaccacgtctttggt

SEQ ID NO: 370101 - DNA, 33 bp, Homo sapien
ctcggggaaaagcatacggctgaacttgaggga

SEQ ID NO: 370102 - DNA, 33 bp, Homo sapien
ctcggggaaaagcatatggctgaacttgaggga

SEQ ID NO: 370103 - DNA, 33 bp, Homo sapien
cttgcttttgtctccacatctgtgcaggagagt

SEQ ID NO: 370104 - DNA, 33 bp, Homo sapien
cttgcttttgtctccatatctgtgcaggagagt

SEQ ID NO: 370105 - DNA, 33 bp, Homo sapien
tcagcatttttggcaacgaatcttgtgattgcc

SEQ ID NO: 370106 - DNA, 33 bp, Homo sapien
tcagcatttttggcaatgaatcttgtgattgcc

SEQ ID NO: 370107 - DNA, 33 bp, Homo sapien
tagaagtcaagtcaaaagcagagaatatggaga

SEQ ID NO: 370108 - DNA, 33 bp, Homo sapien
tagaagtcaagtcaaaggcagagaatatggaga

SEQ ID NO: 370109 - DNA, 33 bp, Homo sapien
gatttccacgaagacactgatttgtggctatgt

SEQ ID NO: 370110 - DNA, 33 bp, Homo sapien
gatttccacgaagacattgatttgtggctatgt

SEQ ID NO: 370111 - DNA, 33 bp, Homo sapien
cttctcaggcccctccccaagtggttctgattc

SEQ ID NO: 370112 - DNA, 33 bp, Homo sapien
cttctcaggcccctcctcaagtggttctgattc

SEQ ID NO: 370113 - DNA, 33 bp, Homo sapien
aatgataagaccatgaggagcaatgagcaatca

SEQ ID NO: 370114 - DNA, 33 bp, Homo sapien
aatgataagaccatgatgagcaatgagcaatca

SEQ ID NO: 370115 - DNA, 33 bp, Homo sapien
tatgtgcatagtgaaccgtatacaattttatca

SEQ ID NO: 370116 - DNA, 33 bp, Homo sapien
tatgtgcatagtgaactgtatacaattttatca

SEQ ID NO: 370117 - DNA, 33 bp, Homo sapien
acctaaggatgtactaagaaggcttttctgatt

SEQ ID NO: 370118 - DNA, 33 bp, Homo sapien
acctaaggatgtactatgaaggcttttctgatt

SEQ ID NO: 370119 - DNA, 33 bp, Homo sapien
tttaagatcagcaggaaaaaagtaaaatcagtg

SEQ ID NO: 370120 - DNA, 33 bp, Homo sapien
tttaagatcagcaggagaaaagtaaaatcagtg

SEQ ID NO: 370121 - DNA, 33 bp, Homo sapien
ggaagatggcaatggaagtgaacttggtataag

SEQ ID NO: 370122 - DNA, 33 bp, Homo sapien
ggaagatggcaatggaggtgaacttggtataag

SEQ ID NO: 370123 - DNA, 33 bp, Homo sapien
tacacatgaatgtagacagtgaaataataaaca

SEQ ID NO: 370124 - DNA, 33 bp, Homo sapien
tacacatgaatgtagagagtgaaataataaaca

SEQ ID NO: 370125 - DNA, 33 bp, Homo sapien
tggatttatcaaggtccaggatcttacaggtca

SEQ ID NO: 370126 - DNA, 33 bp, Homo sapien
tggatttatcaaggtctaggatcttacaggtca

SEQ ID NO: 370127 - DNA, 33 bp, Homo sapien
attgatctcgcactaccattgtgtattggattt

SEQ ID NO: 370128 - DNA, 33 bp, Homo sapien
attgatctcgcactactattgtgtattggattt

SEQ ID NO: 370129 - DNA, 33 bp, Homo sapien
ggccaagtttgagtgccaatcacatccaggtca

SEQ ID NO: 370130 - DNA, 33 bp, Homo sapien
ggccaagtttgagtgctaatcacatccaggtca

SEQ ID NO: 370131 - DNA, 33 bp, Homo sapien
catttgactcacaaagactaaaacatttactta

SEQ ID NO: 370132 - DNA, 33 bp, Homo sapien
catttgactcacaaagcctaaaacatttactta

SEQ ID NO: 370133 - DNA, 33 bp, Homo sapien
gaggtaaggaaacagccagtcatctatcgcctg

SEQ ID NO: 370134 - DNA, 33 bp, Homo sapien
gaggtaaggaaacagcgagtcatctatcgcctg

SEQ ID NO: 370135 - DNA, 33 bp, Homo sapien
ggaaaagacaagagtaaatcgttcaaggcaggg

SEQ ID NO: 370136 - DNA, 33 bp, Homo sapien
ggaaaagacaagagtagatcgttcaaggcaggg

SEQ ID NO: 370137 - DNA, 33 bp, Homo sapien
agagcagtgatgcacccatatgacagaaaattg

SEQ ID NO: 370138 - DNA, 33 bp, Homo sapien
agagcagtgatgcacctatatgacagaaaattg

SEQ ID NO: 370139 - DNA, 33 bp, Homo sapien
acaaataaccaccttgaagttttccataaggtt

SEQ ID NO: 370140 - DNA, 33 bp, Homo sapien
acaaataaccaccttgcagttttccataaggtt

SEQ ID NO: 370141 - DNA, 33 bp, Homo sapien
tcttgtggaataaacaaagtttagataggtgga

SEQ ID NO: 370142 - DNA, 33 bp, Homo sapien
tcttgtggaataaacagagtttagataggtgga

SEQ ID NO: 370143 - DNA, 33 bp, Homo sapien
tcctgggcacttaacacgaagaggaggaaagga

SEQ ID NO: 370144 - DNA, 33 bp, Homo sapien
tcctgggcacttaacatgaagaggaggaaagga

SEQ ID NO: 370145 - DNA, 33 bp, Homo sapien
ccgtccatctcttacccattttctgaacgcctc

SEQ ID NO: 370146 - DNA, 33 bp, Homo sapien
ccgtccatctcttacctattttctgaacgcctc

SEQ ID NO: 370147 - DNA, 33 bp, Homo sapien
cacttctttgttcctgacaattatcccatttga

SEQ ID NO: 370148 - DNA, 33 bp, Homo sapien
cacttctttgttcctggcaattatcccatttga

SEQ ID NO: 370149 - DNA, 33 bp, Homo sapien
agcccaattttccttccatgtaccaaggctccc

SEQ ID NO: 370150 - DNA, 33 bp, Homo sapien
agcccaattttccttctatgtaccaaggctccc

SEQ ID NO: 370151 - DNA, 33 bp, Homo sapien
caagattgagaactaacgctcacaagcctatgt

SEQ ID NO: 370152 - DNA, 33 bp, Homo sapien
caagattgagaactaatgctcacaagcctatgt

SEQ ID NO: 370153 - DNA, 33 bp, Homo sapien
cagtttcttcttctgaaccttcttgttgagttg

SEQ ID NO: 370154 - DNA, 33 bp, Homo sapien
cagtttcttcttctgagccttcttgttgagttg

SEQ ID NO: 370155 - DNA, 33 bp, Homo sapien
actggggttatgtttcaaatggtcaagatttaa

SEQ ID NO: 370156 - DNA, 33 bp, Homo sapien
actggggttatgtttccaatggtcaagatttaa

SEQ ID NO: 370157 - DNA, 33 bp, Homo sapien
ctgcaagggcaaagcgcatagtggtcagggaat

SEQ ID NO: 370158 - DNA, 33 bp, Homo sapien
ctgcaagggcaaagcgtatagtggtcagggaat

SEQ ID NO: 370159 - DNA, 33 bp, Homo sapien
ttggagttgtaaagaacttagatacgtggaaat

SEQ ID NO: 370160 - DNA, 33 bp, Homo sapien
ttggagttgtaaagaatttagatacgtggaaat

SEQ ID NO: 370161 - DNA, 33 bp, Homo sapien
ttgaccaatggcatgaacatttcagatgagtct

SEQ ID NO: 370162 - DNA, 33 bp, Homo sapien
ttgaccaatggcatgagcatttcagatgagtct

SEQ ID NO: 370163 - DNA, 33 bp, Homo sapien
attattggctgagaaaatagctggtgaacgaga

SEQ ID NO: 370164 - DNA, 33 bp, Homo sapien
attattggctgagaaagtagctggtgaacgaga

SEQ ID NO: 370165 - DNA, 33 bp, Homo sapien
cactttgctttaagacagaagagagagctgggc

SEQ ID NO: 370166 - DNA, 33 bp, Homo sapien
cactttgctttaagaccgaagagagagctgggc

SEQ ID NO: 370167 - DNA, 33 bp, Homo sapien
caggaatgactggacacagaaattctccactta

SEQ ID NO: 370168 - DNA, 33 bp, Homo sapien
caggaatgactggacatagaaattctccactta

SEQ ID NO: 370169 - DNA, 33 bp, Homo sapien
tggaatccagggtgaccaaggcatgacaagggt

SEQ ID NO: 370170 - DNA, 33 bp, Homo sapien
tggaatccagggtgacgaaggcatgacaagggt

SEQ ID NO: 370171 - DNA, 33 bp, Homo sapien
ccccatcccagtttggacaaaatactgctgtca

SEQ ID NO: 370172 - DNA, 33 bp, Homo sapien
ccccatcccagtttgggcaaaatactgctgtca

SEQ ID NO: 370173 - DNA, 33 bp, Homo sapien
aagagtaaattcatacacacaagttgttccaaa

SEQ ID NO: 370174 - DNA, 33 bp, Homo sapien
aagagtaaattcatacgcacaagttgttccaaa

SEQ ID NO: 370175 - DNA, 33 bp, Homo sapien
tcatgtattctataaacaagaccaatctgacat

SEQ ID NO: 370176 - DNA, 33 bp, Homo sapien
tcatgtattctataaataagaccaatctgacat

SEQ ID NO: 370177 - DNA, 33 bp, Homo sapien
tggtagaactcaatcacaattaagctatctatt

SEQ ID NO: 370178 - DNA, 33 bp, Homo sapien
tggtagaactcaatcataattaagctatctatt

SEQ ID NO: 370179 - DNA, 33 bp, Homo sapien
catgtaaaaaggtgtaaggaaatatggaaggga

SEQ ID NO: 370180 - DNA, 33 bp, Homo sapien
catgtaaaaaggtgtagggaaatatggaaggga

SEQ ID NO: 370181 - DNA, 33 bp, Homo sapien; identical to SEQ ID NO: 370179

SEQ ID NO: 370182 - DNA, 33 bp, Homo sapien; identical to SEQ ID NO: 370180

SEQ ID NO: 370183 - DNA, 33 bp, Homo sapien
tggtgacctttccagaaagaatcattacattca

SEQ ID NO: 370184 - DNA, 33 bp, Homo sapien
tggtgacctttccagagagaatcattacattca

SEQ ID NO: 370185 - DNA, 33 bp, Homo sapien
tcatcaccacaggcgacataactgaagctcaaa

SEQ ID NO: 370186 - DNA, 33 bp, Homo sapien
tcatcaccacaggcgagataactgaagctcaaa

SEQ ID NO: 370187 - DNA, 33 bp, Homo sapien
aaacaacaaaagagaacgcatcaagcagtggtt

SEQ ID NO: 370188 - DNA, 33 bp, Homo sapien
aaacaacaaaagagaatgcatcaagcagtggtt

SEQ ID NO: 370189 - DNA, 33 bp, Homo sapien
tgccagacactgtgccaagttcaggactccacc

SEQ ID NO: 370190 - DNA, 33 bp, Homo sapien
tgccagacactgtgccgagttcaggactccacc

SEQ ID NO: 370191 - DNA, 33 bp, Homo sapien
tttgtatcattcccatcacagatacggatgctg

SEQ ID NO: 370192 - DNA, 33 bp, Homo sapien
tttgtatcattcccattacagatacggatgctg

SEQ ID NO: 370193 - DNA, 33 bp, Homo sapien
ctaagacagttataaacatatgaaaagcacaca

SEQ ID NO: 370194 - DNA, 33 bp, Homo sapien
ctaagacagttataaagatatgaaaagcacaca

SEQ ID NO: 370195 - DNA, 33 bp, Homo sapien
tgtttttgttgcttcacagcggtgcaagagaga

SEQ ID NO: 370196 - DNA, 33 bp, Homo sapien
tgtttttgttgcttcatagcggtgcaagagaga

SEQ ID NO: 370197 - DNA, 33 bp, Homo sapien
ggctgtttttaggctacatttttaggaagacaa

SEQ ID NO: 370198 - DNA, 33 bp, Homo sapien
ggctgtttttaggctatatttttaggaagacaa

SEQ ID NO: 370199 - DNA, 33 bp, Homo sapien
ttgaaacttctattgcaacagttcaggtgtgtt

SEQ ID NO: 370200 - DNA, 33 bp, Homo sapien
ttgaaacttctattgcgacagttcaggtgtgtt

SEQ ID NO: 370201 - DNA, 33 bp, Homo sapien
acatttctttttctctcaacagtggcaacatga

SEQ ID NO: 370202 - DNA, 33 bp, Homo sapien
acatttctttttctctgaacagtggcaacatga

SEQ ID NO: 370203 - DNA, 33 bp, Homo sapien
cacatccaggtgaaagacttcttgaggtagaac

SEQ ID NO: 370204 - DNA, 33 bp, Homo sapien
cacatccaggtgaaagtcttcttgaggtagaac

SEQ ID NO: 370205 - DNA, 33 bp, Homo sapien
agcttaaggaagttaagtacaagtttatatacc

SEQ ID NO: 370206 - DNA, 33 bp, Homo sapien
agcttaaggaagttaattacaagtttatatacc

SEQ ID NO: 370207 - DNA, 33 bp, Homo sapien
gagatgaaaaatacaacatccaattagctaaaa

SEQ ID NO: 370208 - DNA, 33 bp, Homo sapien
gagatgaaaaatacaatatccaattagctaaaa

SEQ ID NO: 370209 - DNA, 33 bp, Homo sapien
aaaatcagcataccgactaccctacaaatttcc

SEQ ID NO: 370210 - DNA, 33 bp, Homo sapien
aaaatcagcataccgattaccctacaaatttcc

SEQ ID NO: 370211 - DNA, 33 bp, Homo sapien
atgcaaaaatggtccaataagtctacaagtatt

SEQ ID NO: 370212 - DNA, 33 bp, Homo sapien
atgcaaaaatggtccagtaagtctacaagtatt

SEQ ID NO: 370213 - DNA, 33 bp, Homo sapien
aaatgtagaaataagaacagcagatagttgtgt

SEQ ID NO: 370214 - DNA, 33 bp, Homo sapien
aaatgtagaaataagaccagcagatagttgtgt

SEQ ID NO: 370215 - DNA, 33 bp, Homo sapien
gcaataacatattcacaaagtaaattactaaca

SEQ ID NO: 370216 - DNA, 33 bp, Homo sapien
gcaataacatattcaccaagtaaattactaaca

SEQ ID NO: 370217 - DNA, 33 bp, Homo sapien
ctcatccagcgctccacctcttcctactctctc

SEQ ID NO: 370218 - DNA, 33 bp, Homo sapien
ctcatccagcgctccatctcttcctactctctc

SEQ ID NO: 370219 - DNA, 33 bp, Homo sapien
tctctgttaccagagaatcagaaaaacaaaagc

SEQ ID NO: 370220 - DNA, 33 bp, Homo sapien
tctctgttaccagagagtcagaaaaacaaaagc

SEQ ID NO: 370221 - DNA, 33 bp, Homo sapien
cctgcataataaacaactgaagtgggggctgcc

SEQ ID NO: 370222 - DNA, 33 bp, Homo sapien
cctgcataataaacaattgaagtgggggctgcc

SEQ ID NO: 370223 - DNA, 33 bp, Homo sapien
agatgactaagtaacaagagagttgtatttggt

SEQ ID NO: 370224 - DNA, 33 bp, Homo sapien
agatgactaagtaacaggagagttgtatttggt

SEQ ID NO: 370225 - DNA, 33 bp, Homo sapien
acagggtttaatacaagcattcttcgtttatga

SEQ ID NO: 370226 - DNA, 33 bp, Homo sapien
acagggtttaatacaatcattcttcgtttatga

SEQ ID NO: 370227 - DNA, 33 bp, Homo sapien
ccaacattgtctgctacggctcttccttcaaca

SEQ ID NO: 370228 - DNA, 33 bp, Homo sapien
ccaacattgtctgctatggctcttccttcaaca

SEQ ID NO: 370229 - DNA, 33 bp, Homo sapien
cgcggaggtgctgcggaatgcctagagagggca

SEQ ID NO: 370230 - DNA, 33 bp, Homo sapien
cgcggaggtgctgcgggatgcctagagagggca

SEQ ID NO: 370231 - DNA, 33 bp, Homo sapien
ggctggaggaccgcacaaactcacaagtttgag

SEQ ID NO: 370232 - DNA, 33 bp, Homo sapien
ggctggaggaccgcacgaactcacaagtttgag

SEQ ID NO: 370233 - DNA, 33 bp, Homo sapien
catttccctgcttttacgaaacttacattctat

SEQ ID NO: 370234 - DNA, 33 bp, Homo sapien
catttccctgcttttatgaaacttacattctat

SEQ ID NO: 370235 - DNA, 33 bp, Homo sapien
caggttggcgtgagaaatgaggtgacgtcatgc

SEQ ID NO: 370236 - DNA, 33 bp, Homo sapien
caggttggcgtgagaagtgaggtgacgtcatgc

SEQ ID NO: 370237 - DNA, 33 bp, Homo sapien
tctacaggtgaaaagtgaaaacactagaagatc

SEQ ID NO: 370238 - DNA, 33 bp, Homo sapien
tctacaggtgaaaagttaaaacactagaagatc

SEQ ID NO: 370239 - DNA, 33 bp, Homo sapien
taaggacatatttatcagactgtatcctcctcg

SEQ ID NO: 370240 - DNA, 33 bp, Homo sapien
taaggacatatttatccgactgtatcctcctcg

SEQ ID NO: 370241 - DNA, 33 bp, Homo sapien
agggccagatcaatccacagcaccctggtctct

SEQ ID NO: 370242 - DNA, 33 bp, Homo sapien
agggccagatcaatccgcagcaccctggtctct

SEQ ID NO: 370243 - DNA, 33 bp, Homo sapien
tgaaaaaggtaaattaacttgtactctggctgg

SEQ ID NO: 370244 - DNA, 33 bp, Homo sapien
tgaaaaaggtaaattagcttgtactctggctgg

SEQ ID NO: 370245 - DNA, 33 bp, Homo sapien
ttgatttgttcaaagccgaatccaaacaaggcc

SEQ ID NO: 370246 - DNA, 33 bp, Homo sapien
ttgatttgttcaaagctgaatccaaacaaggcc

SEQ ID NO: 370247 - DNA, 33 bp, Homo sapien
aagtcaaggattgtatcaatttcagtgctgaac

SEQ ID NO: 370248 - DNA, 33 bp, Homo sapien
aagtcaaggattgtatgaatttcagtgctgaac

SEQ ID NO: 370249 - DNA, 33 bp, Homo sapien
ttcacttgaaaacacaagttggccgaaatcatc

SEQ ID NO: 370250 - DNA, 33 bp, Homo sapien
ttcacttgaaaacacaggttggccgaaatcatc

SEQ ID NO: 370251 - DNA, 33 bp, Homo sapien
cacactgcgaagccacaggctaatcagtatttc

SEQ ID NO: 370252 - DNA, 33 bp, Homo sapien
cacactgcgaagccacgggctaatcagtatttc

SEQ ID NO: 370253 - DNA, 33 bp, Homo sapien
gagctgcactttaaaaattatacagacatcacc

SEQ ID NO: 370254 - DNA, 33 bp, Homo sapien
gagctgcactttaaaagttatacagacatcacc

SEQ ID NO: 370255 - DNA, 33 bp, Homo sapien
aggctcagcatttccaaatcttcatacacttaa

SEQ ID NO: 370256 - DNA, 33 bp, Homo sapien
aggctcagcatttccagatcttcatacacttaa

SEQ ID NO: 370257 - DNA, 33 bp, Homo sapien
tgtttattcttcgttacgatcaggtaaaatcca

SEQ ID NO: 370258 - DNA, 33 bp, Homo sapien
tgtttattcttcgttatgatcaggtaaaatcca

SEQ ID NO: 370259 - DNA, 33 bp, Homo sapien
aatgagttgatggttacgttcagggtccggcca

SEQ ID NO: 370260 - DNA, 33 bp, Homo sapien
aatgagttgatggttatgttcagggtccggcca

SEQ ID NO: 370261 - DNA, 33 bp, Homo sapien
tgtacaaaagtacaaccataactgtacacctgt

SEQ ID NO: 370262 - DNA, 33 bp, Homo sapien
tgtacaaaagtacaacgataactgtacacctgt

SEQ ID NO: 370263 - DNA, 33 bp, Homo sapien
catgtccatcaactgacgaacaaaatggcaata

SEQ ID NO: 370264 - DNA, 33 bp, Homo sapien
catgtccatcaactgatgaacaaaatggcaata

SEQ ID NO: 370265 - DNA, 33 bp, Homo sapien
ccacactttgaataatcagagaatcaaagactt

SEQ ID NO: 370266 - DNA, 33 bp, Homo sapien
ccacactttgaataatgagagaatcaaagactt

SEQ ID NO: 370267 - DNA, 33 bp, Homo sapien
aaaaaccagcttcaggcatcagacaacatccaa

SEQ ID NO: 370268 - DNA, 33 bp, Homo sapien
aaaaaccagcttcaggtatcagacaacatccaa

SEQ ID NO: 370269 - DNA, 33 bp, Homo sapien
tcatttgtaaaatagacccaaagacagtgccac

SEQ ID NO: 370270 - DNA, 33 bp, Homo sapien
tcatttgtaaaatagatccaaagacagtgccac

SEQ ID NO: 370271 - DNA, 33 bp, Homo sapien
caccacacccagccgcaaacgctttgaatagtg

SEQ ID NO: 370272 - DNA, 33 bp, Homo sapien
caccacacccagccgcgaacgctttgaatagtg

SEQ ID NO: 370273 - DNA, 33 bp, Homo sapien
tcgctagaatccaatacgtgtttatgatttttt

SEQ ID NO: 370274 - DNA, 33 bp, Homo sapien
tcgctagaatccaatatgtgtttatgatttttt

SEQ ID NO: 370275 - DNA, 33 bp, Homo sapien
attatcctagattctacgtgtcttgctaaacat

SEQ ID NO: 370276 - DNA, 33 bp, Homo sapien
attatcctagattctatgtgtcttgctaaacat

SEQ ID NO: 370277 - DNA, 33 bp, Homo sapien
gaatggctagtaagtgcaaccacggtgtccatt

SEQ ID NO: 370278 - DNA, 33 bp, Homo sapien
gaatggctagtaagtggaaccacggtgtccatt

SEQ ID NO: 370279 - DNA, 33 bp, Homo sapien
atcagtcctattgttacggaagtgtagaatttt

SEQ ID NO: 370280 - DNA, 33 bp, Homo sapien
atcagtcctattgttatggaagtgtagaatttt

SEQ ID NO: 370281 - DNA, 33 bp, Homo sapien
attcattttggtatcccgagtagcctacgccat

SEQ ID NO: 370282 - DNA, 33 bp, Homo sapien
attcattttggtatcctgagtagcctacgccat

SEQ ID NO: 370283 - DNA, 33 bp, Homo sapien
cttatatgaaaaaggaagggaagatttggatac

SEQ ID NO: 370284 - DNA, 33 bp, Homo sapien
cttatatgaaaaaggaggggaagatttggatac

SEQ ID NO: 370285 - DNA, 33 bp, Homo sapien
ctataaaatggagtgcgaccaacagagtggttt

SEQ ID NO: 370286 - DNA, 33 bp, Homo sapien
ctataaaatggagtgctaccaacagagtggttt

SEQ ID NO: 370287 - DNA, 33 bp, Homo sapien
ggttggaccaaagaaaaaccatctgcaagcctg

SEQ ID NO: 370288 - DNA, 33 bp, Homo sapien
ggttggaccaaagaaagaccatctgcaagcctg

SEQ ID NO: 370289 - DNA, 33 bp, Homo sapien
tcccagctgcaaaatacacccaacctggtgata

SEQ ID NO: 370290 - DNA, 33 bp, Homo sapien
tcccagctgcaaaatatacccaacctggtgata

SEQ ID NO: 370291 - DNA, 33 bp, Homo sapien
acaaataatactgtccaacggcattgaggacac

SEQ ID NO: 370292 - DNA, 33 bp, Homo sapien
acaaataatactgtccgacggcattgaggacac

SEQ ID NO: 370293 - DNA, 33 bp, Homo sapien
cactcctgattgctaaatggggaagctttggcc

SEQ ID NO: 370294 - DNA, 33 bp, Homo sapien
cactcctgattgctaagtggggaagctttggcc

SEQ ID NO: 370295 - DNA, 33 bp, Homo sapien
atcacctttcaagagcaccttgtatcctcacat

SEQ ID NO: 370296 - DNA, 33 bp, Homo sapien
atcacctttcaagagcgccttgtatcctcacat

SEQ ID NO: 370297 - DNA, 33 bp, Homo sapien
ttaggtcatgggggaaaagttctcatgaaggga

SEQ ID NO: 370298 - DNA, 33 bp, Homo sapien
ttaggtcatgggggaagagttctcatgaaggga

SEQ ID NO: 370299 - DNA, 33 bp, Homo sapien
aatcactgccaagcgcaccagccctcatgaata

SEQ ID NO: 370300 - DNA, 33 bp, Homo sapien
aatcactgccaagcgcgccagccctcatgaata

SEQ ID NO: 370301 - DNA, 33 bp, Homo sapien
ggggggttctggaataaaggtaacattctggtt

SEQ ID NO: 370302 - DNA, 33 bp, Homo sapien
ggggggttctggaatagaggtaacattctggtt

SEQ ID NO: 370303 - DNA, 33 bp, Homo sapien
gacagcaacactcccactggccgaaacaggatc

SEQ ID NO: 370304 - DNA, 33 bp, Homo sapien
gacagcaacactcccattggccgaaacaggatc

SEQ ID NO: 370305 - DNA, 33 bp, Homo sapien
ggcagattggactcaaatggacccagttggtag

SEQ ID NO: 370306 - DNA, 33 bp, Homo sapien
ggcagattggactcaattggacccagttggtag

SEQ ID NO: 370307 - DNA, 33 bp, Homo sapien
caactattaataaaaaggtgttttgattccaat

SEQ ID NO: 370308 - DNA, 33 bp, Homo sapien
caactattaataaaaatgtgttttgattccaat

SEQ ID NO: 370309 - DNA, 33 bp, Homo sapien
ggcagtgccctggttacagcaagacctctggtt

SEQ ID NO: 370310 - DNA, 33 bp, Homo sapien
ggcagtgccctggttatagcaagacctctggtt

SEQ ID NO: 370311 - DNA, 33 bp, Homo sapien
atgagctgtagaaacagtaagtcatactatgtc

SEQ ID NO: 370312 - DNA, 33 bp, Homo sapien
atgagctgtagaaacattaagtcatactatgtc

SEQ ID NO: 370313 - DNA, 33 bp, Homo sapien
atttgcaccactgttaaaaggcagaaccccagc

SEQ ID NO: 370314 - DNA, 33 bp, Homo sapien
atttgcaccactgttagaaggcagaaccccagc

SEQ ID NO: 370315 - DNA, 33 bp, Homo sapien
agtagtataaattgaaacacaaatcagattcta

SEQ ID NO: 370316 - DNA, 33 bp, Homo sapien
agtagtataaattgaagcacaaatcagattcta

SEQ ID NO: 370317 - DNA, 33 bp, Homo sapien
gttaaaaattgtttcccgctcaggttctgatga

SEQ ID NO: 370318 - DNA, 33 bp, Homo sapien
gttaaaaattgtttcctgctcaggttctgatga

SEQ ID NO: 370319 - DNA, 33 bp, Homo sapien
tgctgtactgtaccaaaactcactgtactaact

SEQ ID NO: 370320 - DNA, 33 bp, Homo sapien
tgctgtactgtaccaacactcactgtactaact

SEQ ID NO: 370321 - DNA, 33 bp, Homo sapien
taattcccacaacaaccatatgattggtgtctt

SEQ ID NO: 370322 - DNA, 33 bp, Homo sapien
taattcccacaacaactatatgattggtgtctt

SEQ ID NO: 370323 - DNA, 33 bp, Homo sapien
acctcgacctctgtaagtgttcaggggttttgg

SEQ ID NO: 370324 - DNA, 33 bp, Homo sapien
acctcgacctctgtaattgttcaggggttttgg

SEQ ID NO: 370325 - DNA, 33 bp, Homo sapien
aggtctttgccagcaacggggacgaggatccaa

SEQ ID NO: 370326 - DNA, 33 bp, Homo sapien
aggtctttgccagcaatggggacgaggatccaa

SEQ ID NO: 370327 - DNA, 33 bp, Homo sapien
taaataagaaataaacagggaagtgaggtaatg

SEQ ID NO: 370328 - DNA, 33 bp, Homo sapien
taaataagaaataaacggggaagtgaggtaatg

SEQ ID NO: 370329 - DNA, 33 bp, Homo sapien
agtgatcaatttgtaaaactgttgtctggagtc

SEQ ID NO: 370330 - DNA, 33 bp, Homo sapien
agtgatcaatttgtaacactgttgtctggagtc

SEQ ID NO: 370331 - DNA, 33 bp, Homo sapien
tcactgccatgtactacgctaagcgctttacat

SEQ ID NO: 370332 - DNA, 33 bp, Homo sapien
tcactgccatgtactatgctaagcgctttacat

SEQ ID NO: 370333 - DNA, 33 bp, Homo sapien
gagacctcagaacttacagctggtatctgaagt

SEQ ID NO: 370334 - DNA, 33 bp, Homo sapien
gagacctcagaacttatagctggtatctgaagt

SEQ ID NO: 370335 - DNA, 33 bp, Homo sapien
ccgtgcctgccattttaaaaaattttttgtaga

SEQ ID NO: 370336 - DNA, 33 bp, Homo sapien
ccgtgcctgccatttttaaaaattttttgtaga

SEQ ID NO: 370337 - DNA, 33 bp, Homo sapien
gaatagaaaaatgacaactacacacaatgacac

SEQ ID NO: 370338 - DNA, 33 bp, Homo sapien
gaatagaaaaatgacatctacacacaatgacac

SEQ ID NO: 370339 - DNA, 33 bp, Homo sapien
ttcgtttttacagcaaatatcaacaggtgaaag

SEQ ID NO: 370340 - DNA, 33 bp, Homo sapien
ttcgtttttacagcaactatcaacaggtgaaag

SEQ ID NO: 370341 - DNA, 33 bp, Homo sapien
ggcctaggaactttccagaagccccatccatag

SEQ ID NO: 370342 - DNA, 33 bp, Homo sapien
ggcctaggaactttccggaagccccatccatag

SEQ ID NO: 370343 - DNA, 33 bp, Homo sapien
agctatgcactagtgacgacacttgcacctctt

SEQ ID NO: 370344 - DNA, 33 bp, Homo sapien
agctatgcactagtgatgacacttgcacctctt

SEQ ID NO: 370345 - DNA, 33 bp, Homo sapien
ggtgatgaaaggtctgcagtagtgggatgaatg

SEQ ID NO: 370346 - DNA, 33 bp, Homo sapien
ggtgatgaaaggtctggagtagtgggatgaatg

SEQ ID NO: 370347 - DNA, 33 bp, Homo sapien
aaaccttttctctgaacctgcctttgatctcat

SEQ ID NO: 370348 - DNA, 33 bp, Homo sapien
aaaccttttctctgaatctgcctttgatctcat

SEQ ID NO: 370349 - DNA, 33 bp, Homo sapien
agctcagaggtagagactctagtaagtattaga

SEQ ID NO: 370350 - DNA, 33 bp, Homo sapien
agctcagaggtagagattctagtaagtattaga

SEQ ID NO: 370351 - DNA, 33 bp, Homo sapien
attaagcaaataagtccatgtttcctgggtgcc

SEQ ID NO: 370352 - DNA, 33 bp, Homo sapien
attaagcaaataagtcgatgtttcctgggtgcc

SEQ ID NO: 370353 - DNA, 33 bp, Homo sapien
aaggaattgggaatagaaggcctttcatcagcc

SEQ ID NO: 370354 - DNA, 33 bp, Homo sapien
aaggaattgggaatagtaggcctttcatcagcc

SEQ ID NO: 370355 - DNA, 33 bp, Homo sapien
atcagtaattctacaggctccatctttcagtct

SEQ ID NO: 370356 - DNA, 33 bp, Homo sapien
atcagtaattctacagtctccatctttcagtct

SEQ ID NO: 370357 - DNA, 33 bp, Homo sapien
ggaaaatggtgagaaggctgtgtgcataactca

SEQ ID NO: 370358 - DNA, 33 bp, Homo sapien
ggaaaatggtgagaagtctgtgtgcataactca

SEQ ID NO: 370359 - DNA, 33 bp, Homo sapien
gatgaaagcaactgtccctttctttccccagag

SEQ ID NO: 370360 - DNA, 33 bp, Homo sapien
gatgaaagcaactgtctctttctttccccagag

SEQ ID NO: 370361 - DNA, 33 bp, Homo sapien
gctataaagactgtgaactattcttagacccgc

SEQ ID NO: 370362 - DNA, 33 bp, Homo sapien
gctataaagactgtgagctattcttagacccgc

SEQ ID NO: 370363 - DNA, 33 bp, Homo sapien
tttctttttagaattaagaacaaatcctgaact

SEQ ID NO: 370364 - DNA, 33 bp, Homo sapien
tttctttttagaattaggaacaaatcctgaact

SEQ ID NO: 370365 - DNA, 33 bp, Homo sapien
tcttctcctcgcatcaagtgtaatatcaagacg

SEQ ID NO: 370366 - DNA, 33 bp, Homo sapien
tcttctcctcgcatcaggtgtaatatcaagacg

SEQ ID NO: 370367 - DNA, 33 bp, Homo sapien
ttgggaaagaagtgaacggagaagctagctcac

SEQ ID NO: 370368 - DNA, 33 bp, Homo sapien
ttgggaaagaagtgaatggagaagctagctcac

SEQ ID NO: 370369 - DNA, 33 bp, Homo sapien
tttattgttctgtagacgactgactagttttgt

SEQ ID NO: 370370 - DNA, 33 bp, Homo sapien
tttattgttctgtagatgactgactagttttgt

SEQ ID NO: 370371 - DNA, 33 bp, Homo sapien
aaatgttatagaatccaagccctaatcaataat

SEQ ID NO: 370372 - DNA, 33 bp, Homo sapien
aaatgttatagaatccgagccctaatcaataat

SEQ ID NO: 370373 - DNA, 33 bp, Homo sapien
aatcagataacccttaagcagacagttttctaa

SEQ ID NO: 370374 - DNA, 33 bp, Homo sapien
aatcagataacccttaggcagacagttttctaa

SEQ ID NO: 370375 - DNA, 33 bp, Homo sapien
aaacaggagggatcgcagaaagaaggtggcttg

SEQ ID NO: 370376 - DNA, 33 bp, Homo sapien
aaacaggagggatcgcggaaagaaggtggcttg

SEQ ID NO: 370377 - DNA, 33 bp, Homo sapien
cttgcctcaaatcacaataaactctggggtgca

SEQ ID NO: 370378 - DNA, 33 bp, Homo sapien
cttgcctcaaatcacagtaaactctggggtgca

SEQ ID NO: 370379 - DNA, 33 bp, Homo sapien
tctaccctcaacctgaagccatggtgagctcta

SEQ ID NO: 370380 - DNA, 33 bp, Homo sapien
tctaccctcaacctgatgccatggtgagctcta

SEQ ID NO: 370381 - DNA, 33 bp, Homo sapien
gtattgataagatataggaaagaagggaagcaa

SEQ ID NO: 370382 - DNA, 33 bp, Homo sapien
gtattgataagatatatgaaagaagggaagcaa

SEQ ID NO: 370383 - DNA, 33 bp, Homo sapien
gaagaggtacccaaagcaggcaaattcatagag

SEQ ID NO: 370384 - DNA, 33 bp, Homo sapien
gaagaggtacccaaagtaggcaaattcatagag

SEQ ID NO: 370385 - DNA, 33 bp, Homo sapien
aatccctacaatgttcccagccccataggaaac

SEQ ID NO: 370386 - DNA, 33 bp, Homo sapien
aatccctacaatgttcgcagccccataggaaac

SEQ ID NO: 370387 - DNA, 33 bp, Homo sapien
cacatagctagaaagcagcagaatggagtggtc

SEQ ID NO: 370388 - DNA, 33 bp, Homo sapien
cacatagctagaaagcggcagaatggagtggtc

SEQ ID NO: 370389 - DNA, 33 bp, Homo sapien
agcccacaactttggaaagcataggtctcaaag

SEQ ID NO: 370390 - DNA, 33 bp, Homo sapien
agcccacaactttggagagcataggtctcaaag

SEQ ID NO: 370391 - DNA, 33 bp, Homo sapien
aagaatcttccatataccctatccccctgcttg

SEQ ID NO: 370392 - DNA, 33 bp, Homo sapien
aagaatcttccatatagcctatccccctgcttg

SEQ ID NO: 370393 - DNA, 33 bp, Homo sapien
cccaccctggaaggtaagatggaaacttctagt

SEQ ID NO: 370394 - DNA, 33 bp, Homo sapien
cccaccctggaaggtacgatggaaacttctagt

SEQ ID NO: 370395 - DNA, 33 bp, Homo sapien
cttttagggagttttaacagagtctctacccaa

SEQ ID NO: 370396 - DNA, 33 bp, Homo sapien
cttttagggagttttagcagagtctctacccaa

SEQ ID NO: 370397 - DNA, 33 bp, Homo sapien
gcccagatgaaccaacggtacaaccacagatgg

SEQ ID NO: 370398 - DNA, 33 bp, Homo sapien
gcccagatgaaccaactgtacaaccacagatgg

SEQ ID NO: 370399 - DNA, 33 bp, Homo sapien
ataaataattatctgacccaaaataccagtagt

SEQ ID NO: 370400 - DNA, 33 bp, Homo sapien
ataaataattatctgatccaaaataccagtagt

SEQ ID NO: 370401 - DNA, 33 bp, Homo sapien
tgtgtccacattctagacatcaggattggggaa

SEQ ID NO: 370402 - DNA, 33 bp, Homo sapien
tgtgtccacattctaggcatcaggattggggaa

SEQ ID NO: 370403 - DNA, 33 bp, Homo sapien
tcaccttgaaccaagacgggatatatgtgtgtt

SEQ ID NO: 370404 - DNA, 33 bp, Homo sapien
tcaccttgaaccaagatgggatatatgtgtgtt

SEQ ID NO: 370405 - DNA, 33 bp, Homo sapien
ctaacaaagcaaatagcaatagagcggacatcg

SEQ ID NO: 370406 - DNA, 33 bp, Homo sapien
ctaacaaagcaaataggaatagagcggacatcg

SEQ ID NO: 370407 - DNA, 33 bp, Homo sapien
gctggctgccaagaataagagctccattaccga

SEQ ID NO: 370408 - DNA, 33 bp, Homo sapien
gctggctgccaagaatgagagctccattaccga

SEQ ID NO: 370409 - DNA, 33 bp, Homo sapien
gcattcttgcaaagaccgaatggccaagcctgg

SEQ ID NO: 370410 - DNA, 33 bp, Homo sapien
gcattcttgcaaagactgaatggccaagcctgg

SEQ ID NO: 370411 - DNA, 33 bp, Homo sapien
ccattgtttatgctggaaatcaagataagtacc

SEQ ID NO: 370412 - DNA, 33 bp, Homo sapien
ccattgtttatgctgggaatcaagataagtacc

SEQ ID NO: 370413 - DNA, 33 bp, Homo sapien
ataaatctctttaatgacacactgctactatta

SEQ ID NO: 370414 - DNA, 33 bp, Homo sapien
ataaatctctttaatgtcacactgctactatta

SEQ ID NO: 370415 - DNA, 33 bp, Homo sapien
gaaagtggagttctcacctggaatttctataat

SEQ ID NO: 370416 - DNA, 33 bp, Homo sapien
gaaagtggagttctcatctggaatttctataat

SEQ ID NO: 370417 - DNA, 33 bp, Homo sapien
tcatgatggtcctgaaaaatctgccttaccgta

SEQ ID NO: 370418 - DNA, 33 bp, Homo sapien
tcatgatggtcctgaataatctgccttaccgta

SEQ ID NO: 370419 - DNA, 33 bp, Homo sapien
agaaacaagcccagtgcattcatctgttctcac

SEQ ID NO: 370420 - DNA, 33 bp, Homo sapien
agaaacaagcccagtgtattcatctgttctcac

SEQ ID NO: 370421 - DNA, 33 bp, Homo sapien
gctcggcaaactgtaaaacaaggtacacccata

SEQ ID NO: 370422 - DNA, 33 bp, Homo sapien
gctcggcaaactgtaacacaaggtacacccata

SEQ ID NO: 370423 - DNA, 33 bp, Homo sapien
cttctctcttaagtgcagacttttgctttccaa

SEQ ID NO: 370424 - DNA, 33 bp, Homo sapien
cttctctcttaagtgcggacttttgctttccaa

SEQ ID NO: 370425 - DNA, 33 bp, Homo sapien
ttattgaacccatacaagttactgtaaaaaatg

SEQ ID NO: 370426 - DNA, 33 bp, Homo sapien
ttattgaacccatacaggttactgtaaaaaatg

SEQ ID NO: 370427 - DNA, 33 bp, Homo sapien
tttgactagcttgaccaaactggggagaaggga

SEQ ID NO: 370428 - DNA, 33 bp, Homo sapien
tttgactagcttgaccgaactggggagaaggga

SEQ ID NO: 370429 - DNA, 33 bp, Homo sapien
ataaagagctatgatcaacacgtctgcttctgt

SEQ ID NO: 370430 - DNA, 33 bp, Homo sapien
ataaagagctatgatcgacacgtctgcttctgt

SEQ ID NO: 370431 - DNA, 33 bp, Homo sapien
ttaaatgctggttataagccacagattgtaaca

SEQ ID NO: 370432 - DNA, 33 bp, Homo sapien
ttaaatgctggttatacgccacagattgtaaca

SEQ ID NO: 370433 - DNA, 33 bp, Homo sapien
cagcacagttattacacggaactaaatttcttt

SEQ ID NO: 370434 - DNA, 33 bp, Homo sapien
cagcacagttattacatggaactaaatttcttt

SEQ ID NO: 370435 - DNA, 33 bp, Homo sapien
gctgaactaaagaaaaatactgcaacaatagga

SEQ ID NO: 370436 - DNA, 33 bp, Homo sapien
gctgaactaaagaaaattactgcaacaatagga

SEQ ID NO: 370437 - DNA, 33 bp, Homo sapien
gttctatgtcattggacgggttatgaatttccc

SEQ ID NO: 370438 - DNA, 33 bp, Homo sapien
gttctatgtcattggatgggttatgaatttccc

SEQ ID NO: 370439 - DNA, 33 bp, Homo sapien
tatgaatagcacggtcacatctttttaaaagat

SEQ ID NO: 370440 - DNA, 33 bp, Homo sapien
tatgaatagcacggtcccatctttttaaaagat

SEQ ID NO: 370441 - DNA, 33 bp, Homo sapien
ctccatatctatctccagccacccagtttctca

SEQ ID NO: 370442 - DNA, 33 bp, Homo sapien
ctccatatctatctccggccacccagtttctca

SEQ ID NO: 370443 - DNA, 33 bp, Homo sapien
acacaaatagaaatcaatgataacaaaacaact

SEQ ID NO: 370444 - DNA, 33 bp, Homo sapien
acacaaatagaaatcagtgataacaaaacaact

SEQ ID NO: 370445 - DNA, 33 bp, Homo sapien
cattttaggatgtttaacagctacctactagat

SEQ ID NO: 370446 - DNA, 33 bp, Homo sapien
cattttaggatgtttagcagctacctactagat

SEQ ID NO: 370447 - DNA, 33 bp, Homo sapien
tatggacaagaaaaggaagatgacatagaaaaa

SEQ ID NO: 370448 - DNA, 33 bp, Homo sapien
tatggacaagaaaagggagatgacatagaaaaa

SEQ ID NO: 370449 - DNA, 33 bp, Homo sapien
gatccacagaccacagcatacttttgtcaaatt

SEQ ID NO: 370450 - DNA, 33 bp, Homo sapien
gatccacagaccacaggatacttttgtcaaatt

SEQ ID NO: 370451 - DNA, 33 bp, Homo sapien
ggagaaaggccacccaacttcacttatagaatg

SEQ ID NO: 370452 - DNA, 33 bp, Homo sapien
ggagaaaggccacccagcttcacttatagaatg

SEQ ID NO: 370453 - DNA, 33 bp, Homo sapien
cagttaatatttttcaagcacctactgtgggcc

SEQ ID NO: 370454 - DNA, 33 bp, Homo sapien
cagttaatatttttcaggcacctactgtgggcc

SEQ ID NO: 370455 - DNA, 33 bp, Homo sapien
gggaagaggaaggagacattgccgattagtctc

SEQ ID NO: 370456 - DNA, 33 bp, Homo sapien
gggaagaggaaggagatattgccgattagtctc

SEQ ID NO: 370457 - DNA, 33 bp, Homo sapien
taagcaggttctgcatcagtaaccacactggag

SEQ ID NO: 370458 - DNA, 33 bp, Homo sapien
taagcaggttctgcattagtaaccacactggag

SEQ ID NO: 370459 - DNA, 33 bp, Homo sapien
aaccttaggtatggaccaaaggcttttcttctt

SEQ ID NO: 370460 - DNA, 33 bp, Homo sapien
aaccttaggtatggactaaaggcttttcttctt

SEQ ID NO: 370461 - DNA, 33 bp, Homo sapien
tcagatttcatgcgaaactcaatcctctacttt

SEQ ID NO: 370462 - DNA, 33 bp, Homo sapien
tcagatttcatgcgaacctcaatcctctacttt

SEQ ID NO: 370463 - DNA, 33 bp, Homo sapien
tttaattgttactcaacgattgtccgtttttcc

SEQ ID NO: 370464 - DNA, 33 bp, Homo sapien
tttaattgttactcaatgattgtccgtttttcc

SEQ ID NO: 370465 - DNA, 33 bp, Homo sapien
gtctgtagttctctgacgcgctttttacatgga

SEQ ID NO: 370466 - DNA, 33 bp, Homo sapien
gtctgtagttctctgatgcgctttttacatgga

SEQ ID NO: 370467 - DNA, 33 bp, Homo sapien
cactctctgtcttaagaatttctgtggttttta

SEQ ID NO: 370468 - DNA, 33 bp, Homo sapien
cactctctgtcttaagtatttctgtggttttta

SEQ ID NO: 370469 - DNA, 33 bp, Homo sapien
cccacagacaagtctcccttagtccctgtgctt

SEQ ID NO: 370470 - DNA, 33 bp, Homo sapien
cccacagacaagtctctcttagtccctgtgctt

SEQ ID NO: 370471 - DNA, 33 bp, Homo sapien
tatgctaagatggtcaaggcctcaaaaggtgga

SEQ ID NO: 370472 - DNA, 33 bp, Homo sapien
tatgctaagatggtcagggcctcaaaaggtgga

SEQ ID NO: 370473 - DNA, 33 bp, Homo sapien
atgactagagtgaaagaaggaggaaaaagtgac

SEQ ID NO: 370474 - DNA, 33 bp, Homo sapien
atgactagagtgaaaggaggaggaaaaagtgac

SEQ ID NO: 370475 - DNA, 33 bp, Homo sapien
taaaaagcctggaaaaatgcaactctgccccct

SEQ ID NO: 370476 - DNA, 33 bp, Homo sapien
taaaaagcctggaaaagtgcaactctgccccct

SEQ ID NO: 370477 - DNA, 33 bp, Homo sapien
actgttccaaaacccaagatgccatgaacctcc

SEQ ID NO: 370478 - DNA, 33 bp, Homo sapien
actgttccaaaacccaggatgccatgaacctcc

SEQ ID NO: 370479 - DNA, 33 bp, Homo sapien
tgctgttattacatcccgatctgtttgtctcat

SEQ ID NO: 370480 - DNA, 33 bp, Homo sapien
tgctgttattacatcctgatctgtttgtctcat

SEQ ID NO: 370481 - DNA, 33 bp, Homo sapien
gattgtacctctttgccgacaacatgattttgt

SEQ ID NO: 370482 - DNA, 33 bp, Homo sapien
gattgtacctctttgctgacaacatgattttgt

SEQ ID NO: 370483 - DNA, 33 bp, Homo sapien
ggaaaactcaaagactgaattttcagattgtaa

SEQ ID NO: 370484 - DNA, 33 bp, Homo sapien
ggaaaactcaaagacttaattttcagattgtaa

SEQ ID NO: 370485 - DNA, 33 bp, Homo sapien
ggcatggaaggatctcaatgatctagtgtaaaa

SEQ ID NO: 370486 - DNA, 33 bp, Homo sapien
ggcatggaaggatctcgatgatctagtgtaaaa

SEQ ID NO: 370487 - DNA, 33 bp, Homo sapien
tatgaagcttctcaaacgtaacagtaaagtaca

SEQ ID NO: 370488 - DNA, 33 bp, Homo sapien
tatgaagcttctcaaaggtaacagtaaagtaca

SEQ ID NO: 370489 - DNA, 33 bp, Homo sapien
ataactcaggccatagaagtggaatagattgtc

SEQ ID NO: 370490 - DNA, 33 bp, Homo sapien
ataactcaggccatagtagtggaatagattgtc

SEQ ID NO: 370491 - DNA, 33 bp, Homo sapien
atacttttaatggatacgttagtgatgaaaaat

SEQ ID NO: 370492 - DNA, 33 bp, Homo sapien
atacttttaatggatatgttagtgatgaaaaat

SEQ ID NO: 370493 - DNA, 33 bp, Homo sapien
cgcggtagcggccagggattctacggtcaagac

SEQ ID NO: 370494 - DNA, 33 bp, Homo sapien
cgcggtagcggccaggtattctacggtcaagac

SEQ ID NO: 370495 - DNA, 33 bp, Homo sapien
gataacaagtcacatccaagctgggattcaaac

SEQ ID NO: 370496 - DNA, 33 bp, Homo sapien
gataacaagtcacatcgaagctgggattcaaac

SEQ ID NO: 370497 - DNA, 33 bp, Homo sapien
agtaaaccttgagacaaatctcttttattccac

SEQ ID NO: 370498 - DNA, 33 bp, Homo sapien
agtaaaccttgagacagatctcttttattccac

SEQ ID NO: 370499 - DNA, 33 bp, Homo sapien
ggaggagagcacaacactggaggagaaaggtgt

SEQ ID NO: 370500 - DNA, 33 bp, Homo sapien
ggaggagagcacaacattggaggagaaaggtgt

SEQ ID NO: 370501 - DNA, 33 bp, Homo sapien
agttggctttggcctcaagacacttacgaaatt

SEQ ID NO: 370502 - DNA, 33 bp, Homo sapien
agttggctttggcctcgagacacttacgaaatt

SEQ ID NO: 370503 - DNA, 33 bp, Homo sapien
gactccttgtatagtacgggtgatttctttggt

SEQ ID NO: 370504 - DNA, 33 bp, Homo sapien
gactccttgtatagtaggggtgatttctttggt

SEQ ID NO: 370505 - DNA, 33 bp, Homo sapien
agaaggcagtccttaacgtattgttgaatcgtt

SEQ ID NO: 370506 - DNA, 33 bp, Homo sapien
agaaggcagtccttaatgtattgttgaatcgtt

SEQ ID NO: 370507 - DNA, 33 bp, Homo sapien
gagtaacatgtattcactgaagcttatgttcct

SEQ ID NO: 370508 - DNA, 33 bp, Homo sapien
gagtaacatgtattcattgaagcttatgttcct

SEQ ID NO: 370509 - DNA, 33 bp, Homo sapien
cagccttttcatttcacagagccactagtactc

SEQ ID NO: 370510 - DNA, 33 bp, Homo sapien
cagccttttcatttcatagagccactagtactc

SEQ ID NO: 370511 - DNA, 33 bp, Homo sapien
cagaatggtgttcccacggtgctgttgtttaag

SEQ ID NO: 370512 - DNA, 33 bp, Homo sapien
cagaatggtgttcccagggtgctgttgtttaag

SEQ ID NO: 370513 - DNA, 33 bp, Homo sapien
gcatccagaccatttagaagaggacctctgagg

SEQ ID NO: 370514 - DNA, 33 bp, Homo sapien
gcatccagaccatttataagaggacctctgagg

SEQ ID NO: 370515 - DNA, 33 bp, Homo sapien
ctgaaatgtgagaaccactgatttaggcagaca

SEQ ID NO: 370516 - DNA, 33 bp, Homo sapien
ctgaaatgtgagaaccgctgatttaggcagaca

SEQ ID NO: 370517 - DNA, 33 bp, Homo sapien
aatgaatgtagataggaaggtatttaggtaggt

SEQ ID NO: 370518 - DNA, 33 bp, Homo sapien
aatgaatgtagataggtaggtatttaggtaggt

SEQ ID NO: 370519 - DNA, 33 bp, Homo sapien
gaatagctaatggagtaaactggcagtttcaca

SEQ ID NO: 370520 - DNA, 33 bp, Homo sapien
gaatagctaatggagtgaactggcagtttcaca

SEQ ID NO: 370521 - DNA, 33 bp, Homo sapien
gccagaggaaggtaaaacaaggcctctgaggtg

SEQ ID NO: 370522 - DNA, 33 bp, Homo sapien
gccagaggaaggtaaagcaaggcctctgaggtg

SEQ ID NO: 370523 - DNA, 33 bp, Homo sapien
tggcttaggtccatgccactcaatttatcacaa

SEQ ID NO: 370524 - DNA, 33 bp, Homo sapien
tggcttaggtccatgctactcaatttatcacaa

SEQ ID NO: 370525 - DNA, 33 bp, Homo sapien
gggagtgactgattcacggtgctccacagatag

SEQ ID NO: 370526 - DNA, 33 bp, Homo sapien
gggagtgactgattcatggtgctccacagatag

SEQ ID NO: 370527 - DNA, 33 bp, Homo sapien
aaaacagaaaacaaaacctctgagtgggtagag

SEQ ID NO: 370528 - DNA, 33 bp, Homo sapien
aaaacagaaaacaaaagctctgagtgggtagag

SEQ ID NO: 370529 - DNA, 33 bp, Homo sapien
gttgtacttattagaccaagcacaaagattacg

SEQ ID NO: 370530 - DNA, 33 bp, Homo sapien
gttgtacttattagacgaagcacaaagattacg

SEQ ID NO: 370531 - DNA, 33 bp, Homo sapien
ttcattttcacacacaccagaacttgaagattc

SEQ ID NO: 370532 - DNA, 33 bp, Homo sapien
ttcattttcacacacagcagaacttgaagattc

SEQ ID NO: 370533 - DNA, 33 bp, Homo sapien
ctgctcagtaggaagaactcttgagatatgcaa

SEQ ID NO: 370534 - DNA, 33 bp, Homo sapien
ctgctcagtaggaagacctcttgagatatgcaa

SEQ ID NO: 370535 - DNA, 33 bp, Homo sapien
tctcaccaatgaggagcaaaaggccatcatgtg

SEQ ID NO: 370536 - DNA, 33 bp, Homo sapien
tctcaccaatgaggaggaaaaggccatcatgtg

SEQ ID NO: 370537 - DNA, 33 bp, Homo sapien
aaggccacagctgacaaacaatatcccattatt

SEQ ID NO: 370538 - DNA, 33 bp, Homo sapien
aaggccacagctgacagacaatatcccattatt

SEQ ID NO: 370539 - DNA, 33 bp, Homo sapien
ttcataccatagagaacagtaacaaaataggac

SEQ ID NO: 370540 - DNA, 33 bp, Homo sapien
ttcataccatagagaagagtaacaaaataggac

SEQ ID NO: 370541 - DNA, 33 bp, Homo sapien
ttttcatcctgtgcatcactaggtttttggtgg

SEQ ID NO: 370542 - DNA, 33 bp, Homo sapien
ttttcatcctgtgcattactaggtttttggtgg

SEQ ID NO: 370543 - DNA, 33 bp, Homo sapien
catgggaatctcagacccttgttaaaatgcaga

SEQ ID NO: 370544 - DNA, 33 bp, Homo sapien
catgggaatctcagactcttgttaaaatgcaga

SEQ ID NO: 370545 - DNA, 33 bp, Homo sapien
tctgcagataaaccaaacgtctctgactttata

SEQ ID NO: 370546 - DNA, 33 bp, Homo sapien
tctgcagataaaccaagcgtctctgactttata

SEQ ID NO: 370547 - DNA, 33 bp, Homo sapien
cagggtgatactacgacgaagccccatttcgca

SEQ ID NO: 370548 - DNA, 33 bp, Homo sapien
cagggtgatactacgatgaagccccatttcgca

SEQ ID NO: 370549 - DNA, 33 bp, Homo sapien
ggtactgaagtggctacgaaaacaacaacagct

SEQ ID NO: 370550 - DNA, 33 bp, Homo sapien
ggtactgaagtggctatgaaaacaacaacagct

SEQ ID NO: 370551 - DNA, 33 bp, Homo sapien
agcctccctagaatgacgaagtgaacagggaaa

SEQ ID NO: 370552 - DNA, 33 bp, Homo sapien
agcctccctagaatgaggaagtgaacagggaaa

SEQ ID NO: 370553 - DNA, 33 bp, Homo sapien
acaaagaacaaaagcacagccttaaaagtctat

SEQ ID NO: 370554 - DNA, 33 bp, Homo sapien
acaaagaacaaaagcatagccttaaaagtctat

SEQ ID NO: 370555 - DNA, 33 bp, Homo sapien
tattccctctgaatagaaaccatacatacaaaa

SEQ ID NO: 370556 - DNA, 33 bp, Homo sapien
tattccctctgaataggaaccatacatacaaaa

SEQ ID NO: 370557 - DNA, 33 bp, Homo sapien
cacacacaaggacatacaaaatctaagcctctg

SEQ ID NO: 370558 - DNA, 33 bp, Homo sapien
cacacacaaggacatataaaatctaagcctctg

SEQ ID NO: 370559 - DNA, 33 bp, Homo sapien
ctcctctaaatgctcccgaattagcccaggggg

SEQ ID NO: 370560 - DNA, 33 bp, Homo sapien
ctcctctaaatgctcctgaattagcccaggggg

SEQ ID NO: 370561 - DNA, 33 bp, Homo sapien
ggtctgaattaactggaatcaatttttcagatg

SEQ ID NO: 370562 - DNA, 33 bp, Homo sapien
ggtctgaattaactgggatcaatttttcagatg

SEQ ID NO: 370563 - DNA, 33 bp, Homo sapien
aatacagtagctcgccacctaatcccaggtttc

SEQ ID NO: 370564 - DNA, 33 bp, Homo sapien
aatacagtagctcgccgcctaatcccaggtttc

SEQ ID NO: 370565 - DNA, 33 bp, Homo sapien
tctactaaaatacaaaaaatttgtctggcatgg

SEQ ID NO: 370566 - DNA, 33 bp, Homo sapien
tctactaaaatacaaacaatttgtctggcatgg

SEQ ID NO: 370567 - DNA, 33 bp, Homo sapien
cacttattcaatcaaacgctaatctaggtgtgg

SEQ ID NO: 370568 - DNA, 33 bp, Homo sapien
cacttattcaatcaaatgctaatctaggtgtgg

SEQ ID NO: 370569 - DNA, 33 bp, Homo sapien
cccatccagaaaacaaacccacaagtacagcag

SEQ ID NO: 370570 - DNA, 33 bp, Homo sapien
cccatccagaaaacaagcccacaagtacagcag

SEQ ID NO: 370571 - DNA, 33 bp, Homo sapien
tacctgtaccactgtaccactgagataaataag

SEQ ID NO: 370572 - DNA, 33 bp, Homo sapien
tacctgtaccactgtatcactgagataaataag

SEQ ID NO: 370573 - DNA, 33 bp, Homo sapien
ttccagagaggactaacgaagtattgcttgata

SEQ ID NO: 370574 - DNA, 33 bp, Homo sapien
ttccagagaggactaatgaagtattgcttgata

SEQ ID NO: 370575 - DNA, 33 bp, Homo sapien
tctcgctactcctgcccaaaacagaatttattc

SEQ ID NO: 370576 - DNA, 33 bp, Homo sapien
tctcgctactcctgcctaaaacagaatttattc

SEQ ID NO: 370577 - DNA, 33 bp, Homo sapien
agggtgaaaatgcttacgtttgtgagagcagag

SEQ ID NO: 370578 - DNA, 33 bp, Homo sapien
agggtgaaaatgcttatgtttgtgagagcagag

SEQ ID NO: 370579 - DNA, 33 bp, Homo sapien
aatctttaccactaaacgatgtgataaatgcca

SEQ ID NO: 370580 - DNA, 33 bp, Homo sapien
aatctttaccactaaatgatgtgataaatgcca

SEQ ID NO: 370581 - DNA, 33 bp, Homo sapien
taggcggtttgtgttaaccagctcaattcaccc

SEQ ID NO: 370582 - DNA, 33 bp, Homo sapien
taggcggtttgtgttagccagctcaattcaccc

SEQ ID NO: 370583 - DNA, 33 bp, Homo sapien
gggagggttggcgttacctgagactaacataag

SEQ ID NO: 370584 - DNA, 33 bp, Homo sapien
gggagggttggcgttatctgagactaacataag

SEQ ID NO: 370585 - DNA, 33 bp, Homo sapien
attttaagtttgtaagccaataatgtgatgcct

SEQ ID NO: 370586 - DNA, 33 bp, Homo sapien
attttaagtttgtaagtcaataatgtgatgcct

SEQ ID NO: 370587 - DNA, 33 bp, Homo sapien
gactggattctcatggacatataaccattttat

SEQ ID NO: 370588 - DNA, 33 bp, Homo sapien
gactggattctcatgggcatataaccattttat

SEQ ID NO: 370589 - DNA, 33 bp, Homo sapien
tcctagttctttcccaactgccccaaggtactc

SEQ ID NO: 370590 - DNA, 33 bp, Homo sapien
tcctagttctttcccagctgccccaaggtactc

SEQ ID NO: 370591 - DNA, 33 bp, Homo sapien
atcaagaacttgtatcaaaagaacacatggtca

SEQ ID NO: 370592 - DNA, 33 bp, Homo sapien
atcaagaacttgtatcgaaagaacacatggtca

SEQ ID NO: 370593 - DNA, 33 bp, Homo sapien
ataaggtatggtaagactagggaagttggtgag

SEQ ID NO: 370594 - DNA, 33 bp, Homo sapien
ataaggtatggtaagagtagggaagttggtgag

SEQ ID NO: 370595 - DNA, 33 bp, Homo sapien
gcgcgcctggctgatacgttttctttcttttct

SEQ ID NO: 370596 - DNA, 33 bp, Homo sapien
gcgcgcctggctgatatgttttctttcttttct

SEQ ID NO: 370597 - DNA, 33 bp, Homo sapien
acccagtgcaactaacaactaggctttcggatc

SEQ ID NO: 370598 - DNA, 33 bp, Homo sapien
acccagtgcaactaactactaggctttcggatc

SEQ ID NO: 370599 - DNA, 33 bp, Homo sapien
gaaattgtgtctcacacacaaaaagtcttccct

SEQ ID NO: 370600 - DNA, 33 bp, Homo sapien
gaaattgtgtctcacatacaaaaagtcttccct

SEQ ID NO: 370601 - DNA, 33 bp, Homo sapien
gtctgtgagtacgcaaaattgcttggagtagcc

SEQ ID NO: 370602 - DNA, 33 bp, Homo sapien
gtctgtgagtacgcaagattgcttggagtagcc

SEQ ID NO: 370603 - DNA, 33 bp, Homo sapien
acagtattattgattcactacacattgaccatg

SEQ ID NO: 370604 - DNA, 33 bp, Homo sapien
acagtattattgattcgctacacattgaccatg

SEQ ID NO: 370605 - DNA, 33 bp, Homo sapien
tgttagaatatgaacacgggtctgtttgatgcc

SEQ ID NO: 370606 - DNA, 33 bp, Homo sapien
tgttagaatatgaacatgggtctgtttgatgcc

SEQ ID NO: 370607 - DNA, 33 bp, Homo sapien
gcccctgagggttatcaatgtactcacagcact

SEQ ID NO: 370608 - DNA, 33 bp, Homo sapien
gcccctgagggttatcgatgtactcacagcact

SEQ ID NO: 370609 - DNA, 33 bp, Homo sapien
aataaaataatagtaccacctagagctgtctca

SEQ ID NO: 370610 - DNA, 33 bp, Homo sapien
aataaaataatagtactacctagagctgtctca

SEQ ID NO: 370611 - DNA, 33 bp, Homo sapien
cggcaggtttttcatgcaagatcaagcagatta

SEQ ID NO: 370612 - DNA, 33 bp, Homo sapien
cggcaggtttttcatgtaagatcaagcagatta

SEQ ID NO: 370613 - DNA, 33 bp, Homo sapien
gccacagagagcagtaagtggcctccatctggt

SEQ ID NO: 370614 - DNA, 33 bp, Homo sapien
gccacagagagcagtaggtggcctccatctggt

SEQ ID NO: 370615 - DNA, 33 bp, Homo sapien
ttactcaaaccaagggaaaatggtgtgagcaaa

SEQ ID NO: 370616 - DNA, 33 bp, Homo sapien
ttactcaaaccaagggcaaatggtgtgagcaaa

SEQ ID NO: 370617 - DNA, 33 bp, Homo sapien
cttgtaggggaaatgaaggaaaatagccatcac

SEQ ID NO: 370618 - DNA, 33 bp, Homo sapien
cttgtaggggaaatgagggaaaatagccatcac

SEQ ID NO: 370619 - DNA, 33 bp, Homo sapien
cacagtaatgagcaggaatgtataatcctctta

SEQ ID NO: 370620 - DNA, 33 bp, Homo sapien
cacagtaatgagcagggatgtataatcctctta

SEQ ID NO: 370621 - DNA, 33 bp, Homo sapien
ttagtacatttcgcaactacttttcattgcaaa

SEQ ID NO: 370622 - DNA, 33 bp, Homo sapien
ttagtacatttcgcaattacttttcattgcaaa

SEQ ID NO: 370623 - DNA, 33 bp, Homo sapien
gtgagccaaatttttaaatccatcatcatttta

SEQ ID NO: 370624 - DNA, 33 bp, Homo sapien
gtgagccaaatttttacatccatcatcatttta

SEQ ID NO: 370625 - DNA, 33 bp, Homo sapien
aagacctcatctcaaaagacaaaaaaagaagca

SEQ ID NO: 370626 - DNA, 33 bp, Homo sapien
aagacctcatctcaaaggacaaaaaaagaagca

SEQ ID NO: 370627 - DNA, 33 bp, Homo sapien
ccaagtgtttgcaaagaaggaaatacatttatg

SEQ ID NO: 370628 - DNA, 33 bp, Homo sapien
ccaagtgtttgcaaaggaggaaatacatttatg

SEQ ID NO: 370629 - DNA, 33 bp, Homo sapien
cagaccctctttcagaaaggaaatgcaattagg

SEQ ID NO: 370630 - DNA, 33 bp, Homo sapien
cagaccctctttcagagaggaaatgcaattagg

SEQ ID NO: 370631 - DNA, 33 bp, Homo sapien
cattaattcctattcccaccttcaatcccagat

SEQ ID NO: 370632 - DNA, 33 bp, Homo sapien
cattaattcctattcctaccttcaatcccagat

SEQ ID NO: 370633 - DNA, 33 bp, Homo sapien
cttttataactctagcagcatatgtgtaaacca

SEQ ID NO: 370634 - DNA, 33 bp, Homo sapien
cttttataactctagcggcatatgtgtaaacca

SEQ ID NO: 370635 - DNA, 33 bp, Homo sapien
attggtgcttgcagtacatttggaaagaggcac

SEQ ID NO: 370636 - DNA, 33 bp, Homo sapien
attggtgcttgcagtatatttggaaagaggcac

SEQ ID NO: 370637 - DNA, 33 bp, Homo sapien
tagttgggttatgaaacagaaccatacagtatt

SEQ ID NO: 370638 - DNA, 33 bp, Homo sapien
tagttgggttatgaaatagaaccatacagtatt

SEQ ID NO: 370639 - DNA, 33 bp, Homo sapien
tctcatttagggaccacattgtgtgattctaat

SEQ ID NO: 370640 - DNA, 33 bp, Homo sapien
tctcatttagggaccatattgtgtgattctaat

SEQ ID NO: 370641 - DNA, 33 bp, Homo sapien
tgtcggacatgatgtgcaccagccagcggttct

SEQ ID NO: 370642 - DNA, 33 bp, Homo sapien
tgtcggacatgatgtgtaccagccagcggttct

SEQ ID NO: 370643 - DNA, 33 bp, Homo sapien
agaatataaccaagaacctttgcagtcacaaaa

SEQ ID NO: 370644 - DNA, 33 bp, Homo sapien
agaatataaccaagaagctttgcagtcacaaaa

SEQ ID NO: 370645 - DNA, 33 bp, Homo sapien
aatcaaacccttaaaacccattattgcatgatg

SEQ ID NO: 370646 - DNA, 33 bp, Homo sapien
aatcaaacccttaaaagccattattgcatgatg

SEQ ID NO: 370647 - DNA, 33 bp, Homo sapien
tctggctttttgaccacggacagcttcattggg

SEQ ID NO: 370648 - DNA, 33 bp, Homo sapien
tctggctttttgaccatggacagcttcattggg

SEQ ID NO: 370649 - DNA, 33 bp, Homo sapien
cctggcttacacttaccacttggtcatgtagcc

SEQ ID NO: 370650 - DNA, 33 bp, Homo sapien
cctggcttacacttactacttggtcatgtagcc

SEQ ID NO: 370651 - DNA, 33 bp, Homo sapien
ataaatttagtgatgcccaaccatgtaccagag

SEQ ID NO: 370652 - DNA, 33 bp, Homo sapien
ataaatttagtgatgctcaaccatgtaccagag

SEQ ID NO: 370653 - DNA, 33 bp, Homo sapien
attttgcaaactcaaaagatgacagggcctggg

SEQ ID NO: 370654 - DNA, 33 bp, Homo sapien
attttgcaaactcaaatgatgacagggcctggg

SEQ ID NO: 370655 - DNA, 33 bp, Homo sapien
tgtgttgcacgttcagacaatggctcctaaaat

SEQ ID NO: 370656 - DNA, 33 bp, Homo sapien
tgtgttgcacgttcaggcaatggctcctaaaat

SEQ ID NO: 370657 - DNA, 33 bp, Homo sapien
gatccgttagagttgagcagacttggcttcaaa

SEQ ID NO: 370658 - DNA, 33 bp, Homo sapien
gatccgttagagttgatcagacttggcttcaaa

SEQ ID NO: 370659 - DNA, 33 bp, Homo sapien
taactgttttttctgaaaggaggttgaaattgt

SEQ ID NO: 370660 - DNA, 33 bp, Homo sapien
taactgttttttctgagaggaggttgaaattgt

SEQ ID NO: 370661 - DNA, 33 bp, Homo sapien
actcgactgaaattgaacccacttaaggctgag

SEQ ID NO: 370662 - DNA, 33 bp, Homo sapien
actcgactgaaattgagcccacttaaggctgag

SEQ ID NO: 370663 - DNA, 33 bp, Homo sapien
cagggggattgtttcagcacaatattcttttta

SEQ ID NO: 370664 - DNA, 33 bp, Homo sapien
cagggggattgtttcatcacaatattcttttta

SEQ ID NO: 370665 - DNA, 33 bp, Homo sapien
acacaaggtggaaccacggtctgtgagggtcag

SEQ ID NO: 370666 - DNA, 33 bp, Homo sapien
acacaaggtggaaccatggtctgtgagggtcag

SEQ ID NO: 370667 - DNA, 33 bp, Homo sapien
ggttattctattggacagcacgtgtatataacc

SEQ ID NO: 370668 - DNA, 33 bp, Homo sapien
ggttattctattggacggcacgtgtatataacc

SEQ ID NO: 370669 - DNA, 33 bp, Homo sapien
atagaaatacaatgaccatacaagagtcacatt

SEQ ID NO: 370670 - DNA, 33 bp, Homo sapien
atagaaatacaatgacgatacaagagtcacatt

SEQ ID NO: 370671 - DNA, 33 bp, Homo sapien
ctcgacctggtctgaaggttggttatcattgag

SEQ ID NO: 370672 - DNA, 33 bp, Homo sapien
ctcgacctggtctgaatgttggttatcattgag

SEQ ID NO: 370673 - DNA, 33 bp, Homo sapien
aattgtggattcatggaaaagacctatgcacag

SEQ ID NO: 370674 - DNA, 33 bp, Homo sapien
aattgtggattcatgggaaagacctatgcacag

SEQ ID NO: 370675 - DNA, 33 bp, Homo sapien
caaatgtgcctaaggacgagtcatgcagtatac

SEQ ID NO: 370676 - DNA, 33 bp, Homo sapien
caaatgtgcctaaggaggagtcatgcagtatac

SEQ ID NO: 370677 - DNA, 33 bp, Homo sapien
aaggtcaattaggcacaccattagagactattc

SEQ ID NO: 370678 - DNA, 33 bp, Homo sapien
aaggtcaattaggcacgccattagagactattc

SEQ ID NO: 370679 - DNA, 33 bp, Homo sapien
ctgagactcagaaaaacgaagcatcttatctac

SEQ ID NO: 370680 - DNA, 33 bp, Homo sapien
ctgagactcagaaaaatgaagcatcttatctac

SEQ ID NO: 370681 - DNA, 33 bp, Homo sapien
tgcttgtctccccttacggttttaagagaatga

SEQ ID NO: 370682 - DNA, 33 bp, Homo sapien
tgcttgtctccccttatggttttaagagaatga

SEQ ID NO: 370683 - DNA, 33 bp, Homo sapien
tcctgggaacttgggacctggatttctgagagc

SEQ ID NO: 370684 - DNA, 33 bp, Homo sapien
tcctgggaacttgggagctggatttctgagagc

SEQ ID NO: 370685 - DNA, 33 bp, Homo sapien
actttgaggtgggagaagaatagagatttcaat

SEQ ID NO: 370686 - DNA, 33 bp, Homo sapien
actttgaggtgggagaggaatagagatttcaat

SEQ ID NO: 370687 - DNA, 33 bp, Homo sapien
aaaactctaatgctaacataaaccgtggacttt

SEQ ID NO: 370688 - DNA, 33 bp, Homo sapien
aaaactctaatgctaatataaaccgtggacttt

SEQ ID NO: 370689 - DNA, 33 bp, Homo sapien
aaaaacattaagagaaagtctcaggggggtgct

SEQ ID NO: 370690 - DNA, 33 bp, Homo sapien
aaaaacattaagagaaggtctcaggggggtgct

SEQ ID NO: 370691 - DNA, 33 bp, Homo sapien
agtttactagccaggcaatccaagactcaaatc

SEQ ID NO: 370692 - DNA, 33 bp, Homo sapien
agtttactagccaggcgatccaagactcaaatc

SEQ ID NO: 370693 - DNA, 33 bp, Homo sapien
ggacttcttaatcccaatccaatgccaatggtg

SEQ ID NO: 370694 - DNA, 33 bp, Homo sapien
ggacttcttaatcccagtccaatgccaatggtg

SEQ ID NO: 370695 - DNA, 33 bp, Homo sapien
gacctcagaaccatcacacagccactaaacaca

SEQ ID NO: 370696 - DNA, 33 bp, Homo sapien
gacctcagaaccatcatacagccactaaacaca

SEQ ID NO: 370697 - DNA, 33 bp, Homo sapien
atgatgtggaggttaacaaatgtttcacgtcat

SEQ ID NO: 370698 - DNA, 33 bp, Homo sapien
atgatgtggaggttaagaaatgtttcacgtcat

SEQ ID NO: 370699 - DNA, 33 bp, Homo sapien
agtgcttactgttttacggcattaagcttggca

SEQ ID NO: 370700 - DNA, 33 bp, Homo sapien
agtgcttactgttttatggcattaagcttggca

SEQ ID NO: 370701 - DNA, 33 bp, Homo sapien
gtggccaggtcctgtcccaggcattttgtgctt

SEQ ID NO: 370702 - DNA, 33 bp, Homo sapien
gtggccaggtcctgtctcaggcattttgtgctt

SEQ ID NO: 370703 - DNA, 33 bp, Homo sapien
cgcatcctcttgcatccctcaaaggaccaagct

SEQ ID NO: 370704 - DNA, 33 bp, Homo sapien
cgcatcctcttgcatctctcaaaggaccaagct

SEQ ID NO: 370705 - DNA, 33 bp, Homo sapien
aggatgcgaggctggacccaactggacttaggg

SEQ ID NO: 370706 - DNA, 33 bp, Homo sapien
aggatgcgaggctggagccaactggacttaggg

SEQ ID NO: 370707 - DNA, 33 bp, Homo sapien
ttggccattgaccgagaagagtacctggaagga

SEQ ID NO: 370708 - DNA, 33 bp, Homo sapien
ttggccattgaccgagcagagtacctggaagga

SEQ ID NO: 370709 - DNA, 33 bp, Homo sapien
agagacttctaactgccgatagcttggtggatc

SEQ ID NO: 370710 - DNA, 33 bp, Homo sapien
agagacttctaactgctgatagcttggtggatc

SEQ ID NO: 370711 - DNA, 33 bp, Homo sapien
gaaaccatgaataaacagatgaagatggaatac

SEQ ID NO: 370712 - DNA, 33 bp, Homo sapien
gaaaccatgaataaacggatgaagatggaatac

SEQ ID NO: 370713 - DNA, 33 bp, Homo sapien
aacaagattaaagcagcacaacagaacgtaaaa

SEQ ID NO: 370714 - DNA, 33 bp, Homo sapien
aacaagattaaagcagtacaacagaacgtaaaa

SEQ ID NO: 370715 - DNA, 33 bp, Homo sapien
tctcacacactcctaaagtcagtgaatgctgtt

SEQ ID NO: 370716 - DNA, 33 bp, Homo sapien
tctcacacactcctaatgtcagtgaatgctgtt

SEQ ID NO: 370717 - DNA, 33 bp, Homo sapien
gtacgagcatcactgcacccacgtcttccatgt

SEQ ID NO: 370718 - DNA, 33 bp, Homo sapien
gtacgagcatcactgcgcccacgtcttccatgt

SEQ ID NO: 370719 - DNA, 33 bp, Homo sapien
acacttagttagaaaacgtgagctttctagttt

SEQ ID NO: 370720 - DNA, 33 bp, Homo sapien
acacttagttagaaaaggtgagctttctagttt

SEQ ID NO: 370721 - DNA, 33 bp, Homo sapien
aatactgaattgtttaagagaggaagaattttc

SEQ ID NO: 370722 - DNA, 33 bp, Homo sapien
aatactgaattgtttaggagaggaagaattttc

SEQ ID NO: 370723 - DNA, 33 bp, Homo sapien
ggcagtgtaagagagacggaagatagataaaag

SEQ ID NO: 370724 - DNA, 33 bp, Homo sapien
ggcagtgtaagagagatggaagatagataaaag

SEQ ID NO: 370725 - DNA, 33 bp, Homo sapien
ccatgggaaggccaaaataaacacttcaacaga

SEQ ID NO: 370726 - DNA, 33 bp, Homo sapien
ccatgggaaggccaaagtaaacacttcaacaga

SEQ ID NO: 370727 - DNA, 33 bp, Homo sapien
cccctctgatgttgcaatatgcctacagaggaa

SEQ ID NO: 370728 - DNA, 33 bp, Homo sapien
cccctctgatgttgcagtatgcctacagaggaa

SEQ ID NO: 370729 - DNA, 33 bp, Homo sapien
agagaggtagacagaacagatcacagaacaatc

SEQ ID NO: 370730 - DNA, 33 bp, Homo sapien
agagaggtagacagaagagatcacagaacaatc

SEQ ID NO: 370731 - DNA, 33 bp, Homo sapien
cttaattgtcagaggactcatttgcacttgttg

SEQ ID NO: 370732 - DNA, 33 bp, Homo sapien
cttaattgtcagaggattcatttgcacttgttg

SEQ ID NO: 370733 - DNA, 33 bp, Homo sapien
tccttcctaagatagaagataagtcactcagaa

SEQ ID NO: 370734 - DNA, 33 bp, Homo sapien
tccttcctaagatagaggataagtcactcagaa

SEQ ID NO: 370735 - DNA, 33 bp, Homo sapien
ctcaatttatcgctccacccgcatcacatgttt

SEQ ID NO: 370736 - DNA, 33 bp, Homo sapien
ctcaatttatcgctccgcccgcatcacatgttt

SEQ ID NO: 370737 - DNA, 33 bp, Homo sapien
cagttcctgaaactaacagatttctgtgctcac

SEQ ID NO: 370738 - DNA, 33 bp, Homo sapien
cagttcctgaaactaatagatttctgtgctcac

SEQ ID NO: 370739 - DNA, 33 bp, Homo sapien
tccaaggctggataaacaggatataggactttc

SEQ ID NO: 370740 - DNA, 33 bp, Homo sapien
tccaaggctggataaagaggatataggactttc

SEQ ID NO: 370741 - DNA, 33 bp, Homo sapien
aaacgttctaatgtagcagtgctgattagaaag

SEQ ID NO: 370742 - DNA, 33 bp, Homo sapien
aaacgttctaatgtaggagtgctgattagaaag

SEQ ID NO: 370743 - DNA, 33 bp, Homo sapien
agaccaacaagaggaaagtctgttggaaggtgt

SEQ ID NO: 370744 - DNA, 33 bp, Homo sapien
agaccaacaagaggaaggtctgttggaaggtgt

SEQ ID NO: 370745 - DNA, 33 bp, Homo sapien
atgtaactgctaagtaactgagcttggaatcag

SEQ ID NO: 370746 - DNA, 33 bp, Homo sapien
atgtaactgctaagtagctgagcttggaatcag

SEQ ID NO: 370747 - DNA, 33 bp, Homo sapien
gacattataaatgcagcctccttccattttcag

SEQ ID NO: 370748 - DNA, 33 bp, Homo sapien
gacattataaatgcaggctccttccattttcag

SEQ ID NO: 370749 - DNA, 33 bp, Homo sapien
ccttatctgaactacaaggtgttaactttctta

SEQ ID NO: 370750 - DNA, 33 bp, Homo sapien
ccttatctgaactacagggtgttaactttctta

SEQ ID NO: 370751 - DNA, 33 bp, Homo sapien
gctaagaagattgtggaaggtaaagattagtat

SEQ ID NO: 370752 - DNA, 33 bp, Homo sapien
gctaagaagattgtgggaggtaaagattagtat

SEQ ID NO: 370753 - DNA, 33 bp, Homo sapien
gaggtggatgaaaggaaatgaaaatgggtctag

SEQ ID NO: 370754 - DNA, 33 bp, Homo sapien
gaggtggatgaaaggagatgaaaatgggtctag

SEQ ID NO: 370755 - DNA, 33 bp, Homo sapien
cttgtgctctctacaactgtgtccatagaacca

SEQ ID NO: 370756 - DNA, 33 bp, Homo sapien
cttgtgctctctacaattgtgtccatagaacca

SEQ ID NO: 370757 - DNA, 33 bp, Homo sapien
agaagagaaactcactcaaggaagcttaaatta

SEQ ID NO: 370758 - DNA, 33 bp, Homo sapien
agaagagaaactcactgaaggaagcttaaatta

SEQ ID NO: 370759 - DNA, 33 bp, Homo sapien
gttttactgaagaagacgacggattgaattgac

SEQ ID NO: 370760 - DNA, 33 bp, Homo sapien
gttttactgaagaagatgacggattgaattgac

SEQ ID NO: 370761 - DNA, 33 bp, Homo sapien
agcagggggacctcaacgtatattagttaccat

SEQ ID NO: 370762 - DNA, 33 bp, Homo sapien
agcagggggacctcaatgtatattagttaccat

SEQ ID NO: 370763 - DNA, 33 bp, Homo sapien
ttgttgaaaattttccactaaatattacaaggc

SEQ ID NO: 370764 - DNA, 33 bp, Homo sapien
ttgttgaaaattttcctctaaatattacaaggc

SEQ ID NO: 370765 - DNA, 33 bp, Homo sapien
tattctcttggcctcactaactagcctactcct

SEQ ID NO: 370766 - DNA, 33 bp, Homo sapien
tattctcttggcctcagtaactagcctactcct

SEQ ID NO: 370767 - DNA, 33 bp, Homo sapien
ctcaagtaagcatctccaaaagacaaatgaggc

SEQ ID NO: 370768 - DNA, 33 bp, Homo sapien
ctcaagtaagcatctctaaaagacaaatgaggc

SEQ ID NO: 370769 - DNA, 33 bp, Homo sapien
accagcctgggtaatacgacaagatccgtctca

SEQ ID NO: 370770 - DNA, 33 bp, Homo sapien
accagcctgggtaatatgacaagatccgtctca

SEQ ID NO: 370771 - DNA, 33 bp, Homo sapien
tttccttaaaacttcaacagttctgaatattag

SEQ ID NO: 370772 - DNA, 33 bp, Homo sapien
tttccttaaaacttcaccagttctgaatattag

SEQ ID NO: 370773 - DNA, 33 bp, Homo sapien
gtataactcacatgacaacttttaagagctgca

SEQ ID NO: 370774 - DNA, 33 bp, Homo sapien
gtataactcacatgacgacttttaagagctgca

SEQ ID NO: 370775 - DNA, 33 bp, Homo sapien
aagaccccgaggcacaaggaatggaacatattt

SEQ ID NO: 370776 - DNA, 33 bp, Homo sapien
aagaccccgaggcacagggaatggaacatattt

SEQ ID NO: 370777 - DNA, 33 bp, Homo sapien
aacagagagcaagatgcagcttttagcaagttt

SEQ ID NO: 370778 - DNA, 33 bp, Homo sapien
aacagagagcaagatgtagcttttagcaagttt

SEQ ID NO: 370779 - DNA, 33 bp, Homo sapien
agagacatgaagccagacagttaagggaatctg

SEQ ID NO: 370780 - DNA, 33 bp, Homo sapien
agagacatgaagccaggcagttaagggaatctg

SEQ ID NO: 370781 - DNA, 33 bp, Homo sapien
ctagcaaacaaggcccacaataagaaaataaga

SEQ ID NO: 370782 - DNA, 33 bp, Homo sapien
ctagcaaacaaggcccgcaataagaaaataaga

SEQ ID NO: 370783 - DNA, 33 bp, Homo sapien
acatagaatcatggcaaaattcttcataatagc

SEQ ID NO: 370784 - DNA, 33 bp, Homo sapien
acatagaatcatggcacaattcttcataatagc

SEQ ID NO: 370785 - DNA, 33 bp, Homo sapien
atgacccaggggctaaacaaactgattataggt

SEQ ID NO: 370786 - DNA, 33 bp, Homo sapien
atgacccaggggctaagcaaactgattataggt

SEQ ID NO: 370787 - DNA, 33 bp, Homo sapien
gcctgtcctgacctcactctaggtgtagtctcc

SEQ ID NO: 370788 - DNA, 33 bp, Homo sapien
gcctgtcctgacctcagtctaggtgtagtctcc

SEQ ID NO: 370789 - DNA, 33 bp, Homo sapien
accacctgcatatacaatgataaaataaaagga

SEQ ID NO: 370790 - DNA, 33 bp, Homo sapien
accacctgcatatacactgataaaataaaagga

SEQ ID NO: 370791 - DNA, 33 bp, Homo sapien
gggtgcaatagtctcaaaagcacctcatgcatg

SEQ ID NO: 370792 - DNA, 33 bp, Homo sapien
gggtgcaatagtctcacaagcacctcatgcatg

SEQ ID NO: 370793 - DNA, 33 bp, Homo sapien
ctaattccattagtgaacataacagctatggat

SEQ ID NO: 370794 - DNA, 33 bp, Homo sapien
ctaattccattagtgaccataacagctatggat

SEQ ID NO: 370795 - DNA, 33 bp, Homo sapien
cattgggagagatagaacccaaaagtggaagac

SEQ ID NO: 370796 - DNA, 33 bp, Homo sapien
cattgggagagatagagcccaaaagtggaagac

SEQ ID NO: 370797 - DNA, 33 bp, Homo sapien
ctccagcctcattacacatcagcctccccctca

SEQ ID NO: 370798 - DNA, 33 bp, Homo sapien
ctccagcctcattacatatcagcctccccctca

SEQ ID NO: 370799 - DNA, 33 bp, Homo sapien
tctcttggctgttacaatctttccagctgatct

SEQ ID NO: 370800 - DNA, 33 bp, Homo sapien
tctcttggctgttacagtctttccagctgatct

SEQ ID NO: 370801 - DNA, 33 bp, Homo sapien
gacagctgctagttaacgcaggcaagggtaaat

SEQ ID NO: 370802 - DNA, 33 bp, Homo sapien
gacagctgctagttaatgcaggcaagggtaaat

SEQ ID NO: 370803 - DNA, 33 bp, Homo sapien
gaagcaaagtatatgacgtaaagagtttatttg

SEQ ID NO: 370804 - DNA, 33 bp, Homo sapien
gaagcaaagtatatgatgtaaagagtttatttg

SEQ ID NO: 370805 - DNA, 33 bp, Homo sapien
atgataattgagtagggaggtatgtagacgata

SEQ ID NO: 370806 - DNA, 33 bp, Homo sapien
atgataattgagtaggtaggtatgtagacgata

SEQ ID NO: 370807 - DNA, 33 bp, Homo sapien
acaaaagcgatgcaaaaatacacagtcataaaa

SEQ ID NO: 370808 - DNA, 33 bp, Homo sapien
acaaaagcgatgcaaagatacacagtcataaaa

SEQ ID NO: 370809 - DNA, 33 bp, Homo sapien
actttatccgttcctacgctttgggtcatgacc

SEQ ID NO: 370810 - DNA, 33 bp, Homo sapien
actttatccgttcctatgctttgggtcatgacc

SEQ ID NO: 370811 - DNA, 33 bp, Homo sapien
tgtgatagatggcgacaagttctgagggggatg

SEQ ID NO: 370812 - DNA, 33 bp, Homo sapien
tgtgatagatggcgactagttctgagggggatg

SEQ ID NO: 370813 - DNA, 33 bp, Homo sapien
gtagcacagctgtaggaatattgactcctcttc

SEQ ID NO: 370814 - DNA, 33 bp, Homo sapien
gtagcacagctgtagggatattgactcctcttc

SEQ ID NO: 370815 - DNA, 33 bp, Homo sapien
ttcagagtgattgtaaaaggcctgcatgatgca

SEQ ID NO: 370816 - DNA, 33 bp, Homo sapien
ttcagagtgattgtaagaggcctgcatgatgca

SEQ ID NO: 370817 - DNA, 33 bp, Homo sapien
gaggcctccaatgtgaagacatctattttctta

SEQ ID NO: 370818 - DNA, 33 bp, Homo sapien
gaggcctccaatgtgaggacatctattttctta

SEQ ID NO: 370819 - DNA, 33 bp, Homo sapien
ctaatgtaatctgttacaagttaaggtggcaat

SEQ ID NO: 370820 - DNA, 33 bp, Homo sapien
ctaatgtaatctgttagaagttaaggtggcaat

SEQ ID NO: 370821 - DNA, 33 bp, Homo sapien
ggctggaaacactgtaaagaaactcagtgttga

SEQ ID NO: 370822 - DNA, 33 bp, Homo sapien
ggctggaaacactgtacagaaactcagtgttga

SEQ ID NO: 370823 - DNA, 33 bp, Homo sapien
gccatcttcttggggacgtgtgagctccatttg

SEQ ID NO: 370824 - DNA, 33 bp, Homo sapien
gccatcttcttggggatgtgtgagctccatttg

SEQ ID NO: 370825 - DNA, 33 bp, Homo sapien
ttagtcatgttctttcgacccaatatgcagttt

SEQ ID NO: 370826 - DNA, 33 bp, Homo sapien
ttagtcatgttctttctacccaatatgcagttt

SEQ ID NO: 370827 - DNA, 33 bp, Homo sapien
tgagttcactgctttgaaatacctgctagtgga

SEQ ID NO: 370828 - DNA, 33 bp, Homo sapien
tgagttcactgctttggaatacctgctagtgga

SEQ ID NO: 370829 - DNA, 33 bp, Homo sapien
aagttcttattacgcaacagtcactgtgctaag

SEQ ID NO: 370830 - DNA, 33 bp, Homo sapien
aagttcttattacgcatcagtcactgtgctaag

SEQ ID NO: 370831 - DNA, 33 bp, Homo sapien
ttctttttgaggtgtcactagcaaaatcattaa

SEQ ID NO: 370832 - DNA, 33 bp, Homo sapien
ttctttttgaggtgtcgctagcaaaatcattaa

SEQ ID NO: 370833 - DNA, 33 bp, Homo sapien
gaaaggaggagtatgacagatgagactgtattg

SEQ ID NO: 370834 - DNA, 33 bp, Homo sapien
gaaaggaggagtatgatagatgagactgtattg

SEQ ID NO: 370835 - DNA, 33 bp, Homo sapien
ttttaacaaggagatgaagatttctaagaagac

SEQ ID NO: 370836 - DNA, 33 bp, Homo sapien
ttttaacaaggagatggagatttctaagaagac

SEQ ID NO: 370837 - DNA, 33 bp, Homo sapien
aacaaaggaccgatatcaagaatatattaagaa

SEQ ID NO: 370838 - DNA, 33 bp, Homo sapien
aacaaaggaccgatatgaagaatatattaagaa

SEQ ID NO: 370839 - DNA, 33 bp, Homo sapien
cctttgtttgttttaacagttgctaacatcttc

SEQ ID NO: 370840 - DNA, 33 bp, Homo sapien
cctttgtttgttttaagagttgctaacatcttc

SEQ ID NO: 370841 - DNA, 33 bp, Homo sapien
cattattctgtgataaataataatgaccttcct

SEQ ID NO: 370842 - DNA, 33 bp, Homo sapien
cattattctgtgataagtaataatgaccttcct

SEQ ID NO: 370843 - DNA, 33 bp, Homo sapien
aaactgcctttggaaaaattatgacactgaggg

SEQ ID NO: 370844 - DNA, 33 bp, Homo sapien
aaactgcctttggaaatattatgacactgaggg

SEQ ID NO: 370845 - DNA, 33 bp, Homo sapien
ccatccaaacagaggaggatcatgtcactcagt

SEQ ID NO: 370846 - DNA, 33 bp, Homo sapien
ccatccaaacagaggatgatcatgtcactcagt

SEQ ID NO: 370847 - DNA, 33 bp, Homo sapien
atcaacacatggaaagacctctgcccttgatca

SEQ ID NO: 370848 - DNA, 33 bp, Homo sapien
atcaacacatggaaagtcctctgcccttgatca

SEQ ID NO: 370849 - DNA, 33 bp, Homo sapien
aactaacccactaacaggataacccattaatcc

SEQ ID NO: 370850 - DNA, 33 bp, Homo sapien
aactaacccactaacatgataacccattaatcc

SEQ ID NO: 370851 - DNA, 33 bp, Homo sapien
ctcacttcagtctaagcagctttgtacagtgct

SEQ ID NO: 370852 - DNA, 33 bp, Homo sapien
ctcacttcagtctaagtagctttgtacagtgct

SEQ ID NO: 370853 - DNA, 33 bp, Homo sapien
ctttcaaactatatggaatcaccaatatgcaat

SEQ ID NO: 370854 - DNA, 33 bp, Homo sapien
ctttcaaactatatgggatcaccaatatgcaat

SEQ ID NO: 370855 - DNA, 33 bp, Homo sapien
tccaagaatttaaaataaggcagattgctcatt

SEQ ID NO: 370856 - DNA, 33 bp, Homo sapien
tccaagaatttaaaatgaggcagattgctcatt

SEQ ID NO: 370857 - DNA, 33 bp, Homo sapien
taatatgtcttttatacgcctcttctttttttg

SEQ ID NO: 370858 - DNA, 33 bp, Homo sapien
taatatgtcttttatatgcctcttctttttttg

SEQ ID NO: 370859 - DNA, 33 bp, Homo sapien
tctgcagctgagagggacagaaaccaagttgca

SEQ ID NO: 370860 - DNA, 33 bp, Homo sapien
tctgcagctgagaggggcagaaaccaagttgca

SEQ ID NO: 370861 - DNA, 33 bp, Homo sapien; identical to SEQ ID NO: 370859

SEQ ID NO: 370862 - DNA, 33 bp, Homo sapien; identical to SEQ ID NO: 370860

SEQ ID NO: 370863 - DNA, 33 bp, Homo sapien
acttcaatatactacaatatgctgcaaaactat

SEQ ID NO: 370864 - DNA, 33 bp, Homo sapien
acttcaatatactacattatgctgcaaaactat

SEQ ID NO: 370865 - DNA, 33 bp, Homo sapien
aatattctgtccctcaaaaagaaaaaaatagca

SEQ ID NO: 370866 - DNA, 33 bp, Homo sapien
aatattctgtccctcagaaagaaaaaaatagca

SEQ ID NO: 370867 - DNA, 33 bp, Homo sapien
taggacaggctgtgataagtagcttggagaaaa

SEQ ID NO: 370868 - DNA, 33 bp, Homo sapien
taggacaggctgtgatgagtagcttggagaaaa

SEQ ID NO: 370869 - DNA, 33 bp, Homo sapien
tatgttagagcatagacggagaattaaagatgg

SEQ ID NO: 370870 - DNA, 33 bp, Homo sapien
tatgttagagcatagatggagaattaaagatgg

SEQ ID NO: 370871 - DNA, 33 bp, Homo sapien
ttgaggatttgcaagaataaggcctgcatctgt

SEQ ID NO: 370872 - DNA, 33 bp, Homo sapien
ttgaggatttgcaagactaaggcctgcatctgt

SEQ ID NO: 370873 - DNA, 33 bp, Homo sapien
gaaaaagagctatgaaagaggcattcctgtgca

SEQ ID NO: 370874 - DNA, 33 bp, Homo sapien
gaaaaagagctatgaaggaggcattcctgtgca

SEQ ID NO: 370875 - DNA, 33 bp, Homo sapien
aatatcaacaaaattgcaagttgaaccattgta

SEQ ID NO: 370876 - DNA, 33 bp, Homo sapien
aatatcaacaaaattgtaagttgaaccattgta

SEQ ID NO: 370877 - DNA, 33 bp, Homo sapien
ctcttgcagtttttaacatttccctgacttact

SEQ ID NO: 370878 - DNA, 33 bp, Homo sapien
ctcttgcagtttttaatatttccctgacttact

SEQ ID NO: 370879 - DNA, 33 bp, Homo sapien
accaaaggagattatgcaggctaagttattggt

SEQ ID NO: 370880 - DNA, 33 bp, Homo sapien
accaaaggagattatgtaggctaagttattggt

SEQ ID NO: 370881 - DNA, 33 bp, Homo sapien
gagacaggcacatatacagataaaaggagtatg

SEQ ID NO: 370882 - DNA, 33 bp, Homo sapien
gagacaggcacatatatagataaaaggagtatg

SEQ ID NO: 370883 - DNA, 33 bp, Homo sapien
gggtacaaagcggtatcataatttttgaagaca

SEQ ID NO: 370884 - DNA, 33 bp, Homo sapien
gggtacaaagcggtattataatttttgaagaca

SEQ ID NO: 370885 - DNA, 33 bp, Homo sapien
cgcttgccagcctgaggaaagagaaaccctgtt

SEQ ID NO: 370886 - DNA, 33 bp, Homo sapien
cgcttgccagcctgagtaaagagaaaccctgtt

SEQ ID NO: 370887 - DNA, 33 bp, Homo sapien
atgccatgaagaaaagaatacatttaagacata

SEQ ID NO: 370888 - DNA, 33 bp, Homo sapien
atgccatgaagaaaaggatacatttaagacata

SEQ ID NO: 370889 - DNA, 33 bp, Homo sapien
gacccagaggcactaacgcgggaactccaggag

SEQ ID NO: 370890 - DNA, 33 bp, Homo sapien
gacccagaggcactaatgcgggaactccaggag

SEQ ID NO: 370891 - DNA, 33 bp, Homo sapien
gaatttatgacaatgccctctttcctctctttg

SEQ ID NO: 370892 - DNA, 33 bp, Homo sapien
gaatttatgacaatgctctctttcctctctttg

SEQ ID NO: 370893 - DNA, 33 bp, Homo sapien
ccgaatggctgggtgaaagtctgacctagaaga

SEQ ID NO: 370894 - DNA, 33 bp, Homo sapien
ccgaatggctgggtgagagtctgacctagaaga

SEQ ID NO: 370895 - DNA, 33 bp, Homo sapien
aaaacaaaatactccaatggaagtttcccatgt

SEQ ID NO: 370896 - DNA, 33 bp, Homo sapien
aaaacaaaatactccagtggaagtttcccatgt

SEQ ID NO: 370897 - DNA, 33 bp, Homo sapien
acaagtacccaaggaaagtgagtgagggcagat

SEQ ID NO: 370898 - DNA, 33 bp, Homo sapien
acaagtacccaaggaaggtgagtgagggcagat

SEQ ID NO: 370899 - DNA, 33 bp, Homo sapien
tgatggctgtacaacactgttactttatttgat

SEQ ID NO: 370900 - DNA, 33 bp, Homo sapien
tgatggctgtacaacattgttactttatttgat

SEQ ID NO: 370901 - DNA, 33 bp, Homo sapien
acatcttctgcacatcaaataaatggtaggttt

SEQ ID NO: 370902 - DNA, 33 bp, Homo sapien
acatcttctgcacatcgaataaatggtaggttt

SEQ ID NO: 370903 - DNA, 33 bp, Homo sapien
catcccaaaagttccaggtgggttcagacagga

SEQ ID NO: 370904 - DNA, 33 bp, Homo sapien
catcccaaaagttccatgtgggttcagacagga

SEQ ID NO: 370905 - DNA, 33 bp, Homo sapien
agcacagacctgggtccaagtctcagctctgcc

SEQ ID NO: 370906 - DNA, 33 bp, Homo sapien
agcacagacctgggtctaagtctcagctctgcc

SEQ ID NO: 370907 - DNA, 33 bp, Homo sapien
ttatccctctagcacaaaaaggatgactgctat

SEQ ID NO: 370908 - DNA, 33 bp, Homo sapien
ttatccctctagcacataaaggatgactgctat

SEQ ID NO: 370909 - DNA, 33 bp, Homo sapien
tgtaaaatgaccaaaaagtaaataagaaagtga

SEQ ID NO: 370910 - DNA, 33 bp, Homo sapien
tgtaaaatgaccaaaaggtaaataagaaagtga

SEQ ID NO: 370911 - DNA, 33 bp, Homo sapien
tagcatttataaggagcatgttctgctacttta

SEQ ID NO: 370912 - DNA, 33 bp, Homo sapien
tagcatttataaggagtatgttctgctacttta

SEQ ID NO: 370913 - DNA, 33 bp, Homo sapien
tatatacagactctaactatgcttacctagtcc

SEQ ID NO: 370914 - DNA, 33 bp, Homo sapien
tatatacagactctaagtatgcttacctagtcc

SEQ ID NO: 370915 - DNA, 33 bp, Homo sapien
gataaaacagtctgaacgcttgtgaatgaacta

SEQ ID NO: 370916 - DNA, 33 bp, Homo sapien
gataaaacagtctgaatgcttgtgaatgaacta

SEQ ID NO: 370917 - DNA, 33 bp, Homo sapien
aattctcaaacataggaagatgcaaaaataaag

SEQ ID NO: 370918 - DNA, 33 bp, Homo sapien
aattctcaaacatagggagatgcaaaaataaag

SEQ ID NO: 370919 - DNA, 33 bp, Homo sapien
atacaacacaataccacactatcttccaaacca

SEQ ID NO: 370920 - DNA, 33 bp, Homo sapien
atacaacacaataccatactatcttccaaacca

SEQ ID NO: 370921 - DNA, 33 bp, Homo sapien
tgtgttcgaattttaaacaggtaatgctacatt

SEQ ID NO: 370922 - DNA, 33 bp, Homo sapien
tgtgttcgaattttaagcaggtaatgctacatt

SEQ ID NO: 370923 - DNA, 33 bp, Homo sapien
ctctggaatgtgcacacacttgttggctactct

SEQ ID NO: 370924 - DNA, 33 bp, Homo sapien
ctctggaatgtgcacagacttgttggctactct

SEQ ID NO: 370925 - DNA, 33 bp, Homo sapien
tttgaacctgctacacactgggtcaacccatct

SEQ ID NO: 370926 - DNA, 33 bp, Homo sapien
tttgaacctgctacaccctgggtcaacccatct

SEQ ID NO: 370927 - DNA, 33 bp, Homo sapien
acactgaatatgtttacggactgagggtgtaaa

SEQ ID NO: 370928 - DNA, 33 bp, Homo sapien
acactgaatatgtttatggactgagggtgtaaa

SEQ ID NO: 370929 - DNA, 33 bp, Homo sapien
tccctttcacttatggacatacaagaagataag

SEQ ID NO: 370930 - DNA, 33 bp, Homo sapien
tccctttcacttatgggcatacaagaagataag

SEQ ID NO: 370931 - DNA, 33 bp, Homo sapien
taaagcagtgtccacccattttttggctagatc

SEQ ID NO: 370932 - DNA, 33 bp, Homo sapien
taaagcagtgtccacctattttttggctagatc

SEQ ID NO: 370933 - DNA, 33 bp, Homo sapien
ttaacctagtctcccaatctgatgatgccaaaa

SEQ ID NO: 370934 - DNA, 33 bp, Homo sapien
ttaacctagtctcccagtctgatgatgccaaaa

SEQ ID NO: 370935 - DNA, 33 bp, Homo sapien
attactgagtgagaagcatgataaagtgtgagg

SEQ ID NO: 370936 - DNA, 33 bp, Homo sapien
attactgagtgagaagtatgataaagtgtgagg

SEQ ID NO: 370937 - DNA, 33 bp, Homo sapien
actcctgcctaaatccccaggttctcacaaagg

SEQ ID NO: 370938 - DNA, 33 bp, Homo sapien
actcctgcctaaatcctcaggttctcacaaagg

SEQ ID NO: 370939 - DNA, 33 bp, Homo sapien
ggtccacaatggagtccacagttggtgagccta

SEQ ID NO: 370940 - DNA, 33 bp, Homo sapien
ggtccacaatggagtctacagttggtgagccta

SEQ ID NO: 370941 - DNA, 33 bp, Homo sapien; identical to SEQ ID NO: 370939

SEQ ID NO: 370942 - DNA, 33 bp, Homo sapien; identical to SEQ ID NO: 370940

SEQ ID NO: 370943 - DNA, 33 bp, Homo sapien
gttttcttgcatctcactgaccttctttaagat

SEQ ID NO: 370944 - DNA, 33 bp, Homo sapien
gttttcttgcatctcattgaccttctttaagat

SEQ ID NO: 370945 - DNA, 33 bp, Homo sapien
aagacacagagagatcaaggtcacaaagctagt

SEQ ID NO: 370946 - DNA, 33 bp, Homo sapien
aagacacagagagatcgaggtcacaaagctagt

SEQ ID NO: 370947 - DNA, 33 bp, Homo sapien
tctatgtgttaggaaccgaggataggaagatca

SEQ ID NO: 370948 - DNA, 33 bp, Homo sapien
tctatgtgttaggaactgaggataggaagatca

SEQ ID NO: 370949 - DNA, 33 bp, Homo sapien
aatatttctttgttctaaaaagagtcatgagga

SEQ ID NO: 370950 - DNA, 33 bp, Homo sapien
aatatttctttgttctgaaaagagtcatgagga

SEQ ID NO: 370951 - DNA, 33 bp, Homo sapien; identical to SEQ ID NO: 370949

SEQ ID NO: 370952 - DNA, 33 bp, Homo sapien; identical to SEQ ID NO: 370950

SEQ ID NO: 370953 - DNA, 33 bp, Homo sapien
atggcacagtttgacactgacaccttcctagat

SEQ ID NO: 370954 - DNA, 33 bp, Homo sapien
atggcacagtttgacattgacaccttcctagat

SEQ ID NO: 370955 - DNA, 33 bp, Homo sapien
tacagtttcagtgacaatagcaaatcctgaact

SEQ ID NO: 370956 - DNA, 33 bp, Homo sapien
tacagtttcagtgacactagcaaatcctgaact

SEQ ID NO: 370957 - DNA, 33 bp, Homo sapien
aggctaacataagaacggagatctccacatcag

SEQ ID NO: 370958 - DNA, 33 bp, Homo sapien
aggctaacataagaactgagatctccacatcag

SEQ ID NO: 370959 - DNA, 33 bp, Homo sapien; identical to SEQ ID NO: 370957

SEQ ID NO: 370960 - DNA, 33 bp, Homo sapien; identical to SEQ ID NO: 370958

SEQ ID NO: 370961 - DNA, 33 bp, Homo sapien
ccatattattttcttcacactaaataggacaac

SEQ ID NO: 370962 - DNA, 33 bp, Homo sapien
ccatattattttcttcgcactaaataggacaac

SEQ ID NO: 370963 - DNA, 33 bp, Homo sapien
tatgatttgtattctaaccacatcctctggttc

SEQ ID NO: 370964 - DNA, 33 bp, Homo sapien
tatgatttgtattctacccacatcctctggttc

SEQ ID NO: 370965 - DNA, 33 bp, Homo sapien
ccatttctgttctgaccaaactaatccccaaat

SEQ ID NO: 370966 - DNA, 33 bp, Homo sapien
ccatttctgttctgactaaactaatccccaaat

SEQ ID NO: 370967 - DNA, 33 bp, Homo sapien
cagtaggagagctccccccctgtcaatccttgc

SEQ ID NO: 370968 - DNA, 33 bp, Homo sapien
cagtaggagagctccctccctgtcaatccttgc

SEQ ID NO: 370969 - DNA, 33 bp, Homo sapien
accagcaggtaccagagaatactgaggagctgg

SEQ ID NO: 370970 - DNA, 33 bp, Homo sapien
accagcaggtaccagataatactgaggagctgg

SEQ ID NO: 370971 - DNA, 33 bp, Homo sapien
caggtatttggtctaaactcaccaaaaggacag

SEQ ID NO: 370972 - DNA, 33 bp, Homo sapien
caggtatttggtctaatctcaccaaaaggacag

SEQ ID NO: 370973 - DNA, 33 bp, Homo sapien
agaggttctttcagtacaaataaggcctaaata

SEQ ID NO: 370974 - DNA, 33 bp, Homo sapien
agaggttctttcagtataaataaggcctaaata

SEQ ID NO: 370975 - DNA, 33 bp, Homo sapien
ctgttgctaactggaacgtttggtagagataat

SEQ ID NO: 370976 - DNA, 33 bp, Homo sapien
ctgttgctaactggaaggtttggtagagataat

SEQ ID NO: 370977 - DNA, 33 bp, Homo sapien
ggaattaatgaaatcaactataacctaatagta

SEQ ID NO: 370978 - DNA, 33 bp, Homo sapien
ggaattaatgaaatcagctataacctaatagta

SEQ ID NO: 370979 - DNA, 33 bp, Homo sapien
ttttatgatagtttcacaggtccctgaggctct

SEQ ID NO: 370980 - DNA, 33 bp, Homo sapien
ttttatgatagtttcataggtccctgaggctct

SEQ ID NO: 370981 - DNA, 33 bp, Homo sapien
attcttgcatcctttacattttccccaaagatt

SEQ ID NO: 370982 - DNA, 33 bp, Homo sapien
attcttgcatcctttatattttccccaaagatt

SEQ ID NO: 370983 - DNA, 33 bp, Homo sapien
tcattaaagactcttaggaacaactatatgcca

SEQ ID NO: 370984 - DNA, 33 bp, Homo sapien
tcattaaagactcttatgaacaactatatgcca

SEQ ID NO: 370985 - DNA, 33 bp, Homo sapien
tcttgcctactgtgtcacctgggaagagtaaaa

SEQ ID NO: 370986 - DNA, 33 bp, Homo sapien
tcttgcctactgtgtcgcctgggaagagtaaaa

SEQ ID NO: 370987 - DNA, 33 bp, Homo sapien
cacttccttttggaaagaaatcataaagcaatc

SEQ ID NO: 370988 - DNA, 33 bp, Homo sapien
cacttccttttggaaataaatcataaagcaatc

SEQ ID NO: 370989 - DNA, 33 bp, Homo sapien
aagtgaatttcactgacgttgaagcctagcatg

SEQ ID NO: 370990 - DNA, 33 bp, Homo sapien
aagtgaatttcactgatgttgaagcctagcatg

SEQ ID NO: 370991 - DNA, 33 bp, Homo sapien
aaagcaaccacaggtaatacctcaatgaatggg

SEQ ID NO: 370992 - DNA, 33 bp, Homo sapien
aaagcaaccacaggtactacctcaatgaatggg

SEQ ID NO: 370993 - DNA, 33 bp, Homo sapien
cacaacactggtcctcgcaggcaagggaggtca

SEQ ID NO: 370994 - DNA, 33 bp, Homo sapien
cacaacactggtcctctcaggcaagggaggtca

SEQ ID NO: 370995 - DNA, 33 bp, Homo sapien
tcgggcctagttgacccgctcagaaggtcttga

SEQ ID NO: 370996 - DNA, 33 bp, Homo sapien
tcgggcctagttgacctgctcagaaggtcttga

SEQ ID NO: 370997 - DNA, 33 bp, Homo sapien
gaaattgaagaaatacccaaattcttgctgaag

SEQ ID NO: 370998 - DNA, 33 bp, Homo sapien
gaaattgaagaaatactcaaattcttgctgaag

SEQ ID NO: 370999 - DNA, 33 bp, Homo sapien
atccaatctcaggggacgaaataggtcctgaag

SEQ ID NO: 371000 - DNA, 33 bp, Homo sapien
atccaatctcaggggatgaaataggtcctgaag

SEQ ID NO: 371001 - DNA, 33 bp, Homo sapien
ggtctttttctacccaccctcaagatattttat

SEQ ID NO: 371002 - DNA, 33 bp, Homo sapien
ggtctttttctacccatcctcaagatattttat

SEQ ID NO: 371003 - DNA, 33 bp, Homo sapien
aaactcttacattagcaaaacacagttctgatc

SEQ ID NO: 371004 - DNA, 33 bp, Homo sapien
aaactcttacattagcgaaacacagttctgatc

SEQ ID NO: 371005 - DNA, 33 bp, Homo sapien
gatatagaaagcaaaaagaccttagaggcctca

SEQ ID NO: 371006 - DNA, 33 bp, Homo sapien
gatatagaaagcaaaaggaccttagaggcctca

SEQ ID NO: 371007 - DNA, 33 bp, Homo sapien
aatagatggtatcacacggcaaaaaggttgaga

SEQ ID NO: 371008 - DNA, 33 bp, Homo sapien
aatagatggtatcacatggcaaaaaggttgaga

SEQ ID NO: 371009 - DNA, 33 bp, Homo sapien
accaagtttccataaaactgtctgctggttggg

SEQ ID NO: 371010 - DNA, 33 bp, Homo sapien
accaagtttccataaagctgtctgctggttggg

SEQ ID NO: 371011 - DNA, 33 bp, Homo sapien
taaaaaaaatcgagtccacaacagaaaagcatt

SEQ ID NO: 371012 - DNA, 33 bp, Homo sapien
taaaaaaaatcgagtctacaacagaaaagcatt

SEQ ID NO: 371013 - DNA, 33 bp, Homo sapien
ttcagttctggttccacatagggccagatctta

SEQ ID NO: 371014 - DNA, 33 bp, Homo sapien
ttcagttctggttccatatagggccagatctta

SEQ ID NO: 371015 - DNA, 33 bp, Homo sapien
aggactcttattcctaccttcaactggtttgtt

SEQ ID NO: 371016 - DNA, 33 bp, Homo sapien
aggactcttattcctatcttcaactggtttgtt

SEQ ID NO: 371017 - DNA, 33 bp, Homo sapien
attcaggtctgctcacaataagtgaccattctc

SEQ ID NO: 371018 - DNA, 33 bp, Homo sapien
attcaggtctgctcacgataagtgaccattctc

SEQ ID NO: 371019 - DNA, 33 bp, Homo sapien
aacaacctcaagaaaagagttgttgcagctttc

SEQ ID NO: 371020 - DNA, 33 bp, Homo sapien
aacaacctcaagaaaatagttgttgcagctttc

SEQ ID NO: 371021 - DNA, 33 bp, Homo sapien
gagggtcagtaacaggcccagacatggaaaaca

SEQ ID NO: 371022 - DNA, 33 bp, Homo sapien
gagggtcagtaacaggtccagacatggaaaaca

SEQ ID NO: 371023 - DNA, 33 bp, Homo sapien
aatgctgtctattaaaaccctgccctagcagct

SEQ ID NO: 371024 - DNA, 33 bp, Homo sapien
aatgctgtctattaaacccctgccctagcagct

SEQ ID NO: 371025 - DNA, 33 bp, Homo sapien
tggtaaagatgggatacgaatggctgaagtttg

SEQ ID NO: 371026 - DNA, 33 bp, Homo sapien
tggtaaagatgggatatgaatggctgaagtttg

SEQ ID NO: 371027 - DNA, 33 bp, Homo sapien
aaatcttcaactggcacgataatgaagttccgt

SEQ ID NO: 371028 - DNA, 33 bp, Homo sapien
aaatcttcaactggcatgataatgaagttccgt

SEQ ID NO: 371029 - DNA, 33 bp, Homo sapien
ctaatgcaagaaaccaacttactttataataca

SEQ ID NO: 371030 - DNA, 33 bp, Homo sapien
ctaatgcaagaaaccagcttactttataataca

SEQ ID NO: 371031 - DNA, 33 bp, Homo sapien
tagctcttgtggcaaaataagtcacctgtgccc

SEQ ID NO: 371032 - DNA, 33 bp, Homo sapien
tagctcttgtggcaaagtaagtcacctgtgccc

SEQ ID NO: 371033 - DNA, 33 bp, Homo sapien
tacctgggggagacagacatataaacagacaat

SEQ ID NO: 371034 - DNA, 33 bp, Homo sapien
tacctgggggagacagccatataaacagacaat

SEQ ID NO: 371035 - DNA, 33 bp, Homo sapien
cttcatatcaaatcgaaaagtctgagaacacaa

SEQ ID NO: 371036 - DNA, 33 bp, Homo sapien
cttcatatcaaatcgagaagtctgagaacacaa

SEQ ID NO: 371037 - DNA, 33 bp, Homo sapien
atagaatacccctgcaagaacacacaagaaact

SEQ ID NO: 371038 - DNA, 33 bp, Homo sapien
atagaatacccctgcaggaacacacaagaaact

SEQ ID NO: 371039 - DNA, 33 bp, Homo sapien
tttgcaaaaagattgaaatggatgaattttgct

SEQ ID NO: 371040 - DNA, 33 bp, Homo sapien
tttgcaaaaagattgagatggatgaattttgct

SEQ ID NO: 371041 - DNA, 33 bp, Homo sapien
ccattatgtaaatggaatataggtgataggtgg

SEQ ID NO: 371042 - DNA, 33 bp, Homo sapien
ccattatgtaaatggagtataggtgataggtgg

SEQ ID NO: 371043 - DNA, 33 bp, Homo sapien
gactgatgacaaagaccggcgtctcctgctgtc

SEQ ID NO: 371044 - DNA, 33 bp, Homo sapien
gactgatgacaaagactggcgtctcctgctgtc

SEQ ID NO: 371045 - DNA, 33 bp, Homo sapien
gataccatgtcatacccgatttactcactattt

SEQ ID NO: 371046 - DNA, 33 bp, Homo sapien
gataccatgtcatacctgatttactcactattt

SEQ ID NO: 371047 - DNA, 33 bp, Homo sapien
attttgctagggacacaatgcagttcgtaacag

SEQ ID NO: 371048 - DNA, 33 bp, Homo sapien
attttgctagggacacgatgcagttcgtaacag

SEQ ID NO: 371049 - DNA, 33 bp, Homo sapien
gataagtctagggaaacctctatatggcaatgg

SEQ ID NO: 371050 - DNA, 33 bp, Homo sapien
gataagtctagggaaatctctatatggcaatgg

SEQ ID NO: 371051 - DNA, 33 bp, Homo sapien
tggattctaacgtgtcacagtcagtgtatgtgc

SEQ ID NO: 371052 - DNA, 33 bp, Homo sapien
tggattctaacgtgtcgcagtcagtgtatgtgc

SEQ ID NO: 371053 - DNA, 33 bp, Homo sapien
gaccctaggatgcacaagaggtggctttgcctt

SEQ ID NO: 371054 - DNA, 33 bp, Homo sapien
gaccctaggatgcacacgaggtggctttgcctt

SEQ ID NO: 371055 - DNA, 33 bp, Homo sapien
ttaagaatcttcataccgagtgggtgcagtggc

SEQ ID NO: 371056 - DNA, 33 bp, Homo sapien
ttaagaatcttcatactgagtgggtgcagtggc

SEQ ID NO: 371057 - DNA, 33 bp, Homo sapien
gttactggtttgacaaaaaagacacaaccaggc

SEQ ID NO: 371058 - DNA, 33 bp, Homo sapien
gttactggtttgacaagaaagacacaaccaggc

SEQ ID NO: 371059 - DNA, 33 bp, Homo sapien
atttctgtcaagcaaaatagattgtctactatg

SEQ ID NO: 371060 - DNA, 33 bp, Homo sapien
atttctgtcaagcaaactagattgtctactatg

SEQ ID NO: 371061 - DNA, 33 bp, Homo sapien
tattttcttaagctcacgtgaaacattcaccaa

SEQ ID NO: 371062 - DNA, 33 bp, Homo sapien
tattttcttaagctcatgtgaaacattcaccaa

SEQ ID NO: 371063 - DNA, 33 bp, Homo sapien
acccatgttcatagcacctttattcgcaatagc

SEQ ID NO: 371064 - DNA, 33 bp, Homo sapien
acccatgttcatagcagctttattcgcaatagc

SEQ ID NO: 371065 - DNA, 33 bp, Homo sapien
ttattatcaaacatacagaaacatggaagacat

SEQ ID NO: 371066 - DNA, 33 bp, Homo sapien
ttattatcaaacatacggaaacatggaagacat

SEQ ID NO: 371067 - DNA, 33 bp, Homo sapien
cagagaggcttggaaacactctgggtcagctac

SEQ ID NO: 371068 - DNA, 33 bp, Homo sapien
cagagaggcttggaaatactctgggtcagctac

SEQ ID NO: 371069 - DNA, 33 bp, Homo sapien
atggaatccttcaaagcagggaaaagttgaagt

SEQ ID NO: 371070 - DNA, 33 bp, Homo sapien
atggaatccttcaaagtagggaaaagttgaagt

SEQ ID NO: 371071 - DNA, 33 bp, Homo sapien
aggcggtaggtcgcaacgatcttctgggcgaga

SEQ ID NO: 371072 - DNA, 33 bp, Homo sapien
aggcggtaggtcgcaatgatcttctgggcgaga

SEQ ID NO: 371073 - DNA, 33 bp, Homo sapien
gcaaaacaagaactcaaatcaagatctgtctgg

SEQ ID NO: 371074 - DNA, 33 bp, Homo sapien
gcaaaacaagaactcacatcaagatctgtctgg

SEQ ID NO: 371075 - DNA, 33 bp, Homo sapien
aactctacattccaaaaatcaccagtgctaatg

SEQ ID NO: 371076 - DNA, 33 bp, Homo sapien
aactctacattccaaagatcaccagtgctaatg

SEQ ID NO: 371077 - DNA, 33 bp, Homo sapien
ctctccacctgagttaccaaaaacgtaatgaat

SEQ ID NO: 371078 - DNA, 33 bp, Homo sapien
ctctccacctgagttatcaaaaacgtaatgaat

SEQ ID NO: 371079 - DNA, 33 bp, Homo sapien
tgtactgagacaatgacggccaaagtcatttct

SEQ ID NO: 371080 - DNA, 33 bp, Homo sapien
tgtactgagacaatgatggccaaagtcatttct

SEQ ID NO: 371081 - DNA, 33 bp, Homo sapien
acatattcccagccaaatgatgccaatgcttga

SEQ ID NO: 371082 - DNA, 33 bp, Homo sapien
acatattcccagccaattgatgccaatgcttga

SEQ ID NO: 371083 - DNA, 33 bp, Homo sapien
caccaccgcggctgatgaattttgtatttttag

SEQ ID NO: 371084 - DNA, 33 bp, Homo sapien
caccaccgcggctgattaattttgtatttttag

SEQ ID NO: 371085 - DNA, 33 bp, Homo sapien
aggccttccttgacaccctgagacaactaaatc

SEQ ID NO: 371086 - DNA, 33 bp, Homo sapien
aggccttccttgacacgctgagacaactaaatc

SEQ ID NO: 371087 - DNA, 33 bp, Homo sapien
ctaaatcactcttctgcattctaataactattt

SEQ ID NO: 371088 - DNA, 33 bp, Homo sapien
ctaaatcactcttctggattctaataactattt

SEQ ID NO: 371089 - DNA, 33 bp, Homo sapien
cttctagaggctaaataagggttctccgctcta

SEQ ID NO: 371090 - DNA, 33 bp, Homo sapien
cttctagaggctaaatgagggttctccgctcta

SEQ ID NO: 371091 - DNA, 33 bp, Homo sapien
agagttaggattaggaaaaaaggcatgtcacct

SEQ ID NO: 371092 - DNA, 33 bp, Homo sapien
agagttaggattaggagaaaaggcatgtcacct

SEQ ID NO: 371093 - DNA, 33 bp, Homo sapien
tctgggtgccacactcacctaacagggtctcca

SEQ ID NO: 371094 - DNA, 33 bp, Homo sapien
tctgggtgccacactcgcctaacagggtctcca

SEQ ID NO: 371095 - DNA, 33 bp, Homo sapien
ttctattctagcccagcacctacaatatttcct

SEQ ID NO: 371096 - DNA, 33 bp, Homo sapien
ttctattctagcccaggacctacaatatttcct

SEQ ID NO: 371097 - DNA, 33 bp, Homo sapien
aacaaaatttgtgagggacaactataaaggata

SEQ ID NO: 371098 - DNA, 33 bp, Homo sapien
aacaaaatttgtgaggtacaactataaaggata

SEQ ID NO: 371099 - DNA, 33 bp, Homo sapien
ttttggggttccatgccgattattctccatttg

SEQ ID NO: 371100 - DNA, 33 bp, Homo sapien
ttttggggttccatgctgattattctccatttg

SEQ ID NO: 371101 - DNA, 33 bp, Homo sapien
aataatgaatgaataactgattacagccacatt

SEQ ID NO: 371102 - DNA, 33 bp, Homo sapien
aataatgaatgaataagtgattacagccacatt

SEQ ID NO: 371103 - DNA, 33 bp, Homo sapien
gtgctcaacaaatgtcactgtcactcatccatg

SEQ ID NO: 371104 - DNA, 33 bp, Homo sapien
gtgctcaacaaatgtcgctgtcactcatccatg

SEQ ID NO: 371105 - DNA, 33 bp, Homo sapien
ggggacttttggccacacctgaagacattcttg

SEQ ID NO: 371106 - DNA, 33 bp, Homo sapien
ggggacttttggccacgcctgaagacattcttg

SEQ ID NO: 371107 - DNA, 33 bp, Homo sapien
gttgccccagacctcacagaaactgcaggataa

SEQ ID NO: 371108 - DNA, 33 bp, Homo sapien
gttgccccagacctcatagaaactgcaggataa

SEQ ID NO: 371109 - DNA, 33 bp, Homo sapien
ttcagaaggtgagcctcaaacagggaaaccaac

SEQ ID NO: 371110 - DNA, 33 bp, Homo sapien
ttcagaaggtgagcctgaaacagggaaaccaac

SEQ ID NO: 371111 - DNA, 33 bp, Homo sapien
attgcaaagagaagaacgcttgggcctccttgc

SEQ ID NO: 371112 - DNA, 33 bp, Homo sapien
attgcaaagagaagaatgcttgggcctccttgc

SEQ ID NO: 371113 - DNA, 33 bp, Homo sapien
tcacactcatggcaagaagatcactggcaaatt

SEQ ID NO: 371114 - DNA, 33 bp, Homo sapien
tcacactcatggcaaggagatcactggcaaatt

SEQ ID NO: 371115 - DNA, 33 bp, Homo sapien
aaccctctcaataaacacaacaatcaaggtaca

SEQ ID NO: 371116 - DNA, 33 bp, Homo sapien
aaccctctcaataaactcaacaatcaaggtaca

SEQ ID NO: 371117 - DNA, 33 bp, Homo sapien
acaatgaaacctgggaagcaatagcactagttc

SEQ ID NO: 371118 - DNA, 33 bp, Homo sapien
acaatgaaacctgggaggcaatagcactagttc

SEQ ID NO: 371119 - DNA, 33 bp, Homo sapien
gatgaccatgaaattaccaattagagcagcaaa

SEQ ID NO: 371120 - DNA, 33 bp, Homo sapien
gatgaccatgaaattagcaattagagcagcaaa

SEQ ID NO: 371121 - DNA, 33 bp, Homo sapien
gtatcatgatcttgaacatttgggcattaatta

SEQ ID NO: 371122 - DNA, 33 bp, Homo sapien
gtatcatgatcttgaatatttgggcattaatta

SEQ ID NO: 371123 - DNA, 33 bp, Homo sapien
gtggagggtcacttggaatctgagagtgattgt

SEQ ID NO: 371124 - DNA, 33 bp, Homo sapien
gtggagggtcacttgggatctgagagtgattgt

SEQ ID NO: 371125 - DNA, 33 bp, Homo sapien
tctagtgttggaacaaattgcagtttctccatc

SEQ ID NO: 371126 - DNA, 33 bp, Homo sapien
tctagtgttggaacaagttgcagtttctccatc

SEQ ID NO: 371127 - DNA, 33 bp, Homo sapien
catggttaaaaacttccagccagggtgatactt

SEQ ID NO: 371128 - DNA, 33 bp, Homo sapien
catggttaaaaacttctagccagggtgatactt

SEQ ID NO: 371129 - DNA, 33 bp, Homo sapien
ctcttcgagtagacccactgtgctatccaatac

SEQ ID NO: 371130 - DNA, 33 bp, Homo sapien
ctcttcgagtagacccgctgtgctatccaatac

SEQ ID NO: 371131 - DNA, 33 bp, Homo sapien
gaaaccgaaagattgacaagttaaattgcctaa

SEQ ID NO: 371132 - DNA, 33 bp, Homo sapien
gaaaccgaaagattgagaagttaaattgcctaa

SEQ ID NO: 371133 - DNA, 33 bp, Homo sapien
aacatctatggagttcactgaagtcacaagggc

SEQ ID NO: 371134 - DNA, 33 bp, Homo sapien
aacatctatggagttccctgaagtcacaagggc

SEQ ID NO: 371135 - DNA, 33 bp, Homo sapien
ccttgttgacccccaactgtaaaagcttaagct

SEQ ID NO: 371136 - DNA, 33 bp, Homo sapien
ccttgttgacccccaagtgtaaaagcttaagct

SEQ ID NO: 371137 - DNA, 33 bp, Homo sapien
ctgcaaatgattctataagttcgttcagatctg

SEQ ID NO: 371138 - DNA, 33 bp, Homo sapien
ctgcaaatgattctatgagttcgttcagatctg

SEQ ID NO: 371139 - DNA, 33 bp, Homo sapien
gtagcttgcatataaaagggcagtgatatagca

SEQ ID NO: 371140 - DNA, 33 bp, Homo sapien
gtagcttgcatataaaggggcagtgatatagca

SEQ ID NO: 371141 - DNA, 33 bp, Homo sapien
gacacaggtgtctacaagataagctgccacctt

SEQ ID NO: 371142 - DNA, 33 bp, Homo sapien
gacacaggtgtctacaggataagctgccacctt

SEQ ID NO: 371143 - DNA, 33 bp, Homo sapien
tataatggacatgaatcatcttaagagacaggt

SEQ ID NO: 371144 - DNA, 33 bp, Homo sapien
tataatggacatgaattatcttaagagacaggt

SEQ ID NO: 371145 - DNA, 33 bp, Homo sapien
ccttccccgccactcaaaggcaggtgtccttag

SEQ ID NO: 371146 - DNA, 33 bp, Homo sapien
ccttccccgccactcagaggcaggtgtccttag

SEQ ID NO: 371147 - DNA, 33 bp, Homo sapien
ccaaagacttgaacaccgtggtcttctcacagt

SEQ ID NO: 371148 - DNA, 33 bp, Homo sapien
ccaaagacttgaacacggtggtcttctcacagt

SEQ ID NO: 371149 - DNA, 33 bp, Homo sapien
tccccaactcgtagggccaatgtctagactaaa

SEQ ID NO: 371150 - DNA, 33 bp, Homo sapien
tccccaactcgtagggtcaatgtctagactaaa

SEQ ID NO: 371151 - DNA, 33 bp, Homo sapien
atgtttccagatatgccagtgcatttaatcctc

SEQ ID NO: 371152 - DNA, 33 bp, Homo sapien
atgtttccagatatgcgagtgcatttaatcctc

SEQ ID NO: 371153 - DNA, 33 bp, Homo sapien
cctctgcactcctctccctgttattcatctcag

SEQ ID NO: 371154 - DNA, 33 bp, Homo sapien
cctctgcactcctctctctgttattcatctcag

SEQ ID NO: 371155 - DNA, 33 bp, Homo sapien
tgaggaagtgaatcaccaagtcactgagcagat

SEQ ID NO: 371156 - DNA, 33 bp, Homo sapien
tgaggaagtgaatcacgaagtcactgagcagat

SEQ ID NO: 371157 - DNA, 33 bp, Homo sapien
cacctgccaaaggaaactaaccacaaagcagag

SEQ ID NO: 371158 - DNA, 33 bp, Homo sapien
cacctgccaaaggaaagtaaccacaaagcagag

SEQ ID NO: 371159 - DNA, 33 bp, Homo sapien
atttggtagaattcaccggtaaagccctctggt

SEQ ID NO: 371160 - DNA, 33 bp, Homo sapien
atttggtagaattcactggtaaagccctctggt

SEQ ID NO: 371161 - DNA, 33 bp, Homo sapien
gggaggagagcacggacggaaaaactacctacc

SEQ ID NO: 371162 - DNA, 33 bp, Homo sapien
gggaggagagcacggatggaaaaactacctacc

SEQ ID NO: 371163 - DNA, 33 bp, Homo sapien
agggatggcggactacgctgggtttatccatca

SEQ ID NO: 371164 - DNA, 33 bp, Homo sapien
agggatggcggactactctgggtttatccatca

SEQ ID NO: 371165 - DNA, 33 bp, Homo sapien
tgacttcgattccatcaatcaagaggagtttgc

SEQ ID NO: 371166 - DNA, 33 bp, Homo sapien
tgacttcgattccatcgatcaagaggagtttgc

SEQ ID NO: 371167 - DNA, 33 bp, Homo sapien
tccattatctgagcaccgatggcccagctacct

SEQ ID NO: 371168 - DNA, 33 bp, Homo sapien
tccattatctgagcacggatggcccagctacct

SEQ ID NO: 371169 - DNA, 33 bp, Homo sapien
atccagttttcccgtcaccatttattgaagaga

SEQ ID NO: 371170 - DNA, 33 bp, Homo sapien
atccagttttcccgtcgccatttattgaagaga

SEQ ID NO: 371171 - DNA, 33 bp, Homo sapien
tgtgtgcaattgaccacatccagctaattcttt

SEQ ID NO: 371172 - DNA, 33 bp, Homo sapien
tgtgtgcaattgaccatatccagctaattcttt

SEQ ID NO: 371173 - DNA, 33 bp, Homo sapien
gctcctgctccaggtacgtgttgttttataagc

SEQ ID NO: 371174 - DNA, 33 bp, Homo sapien
gctcctgctccaggtatgtgttgttttataagc

SEQ ID NO: 371175 - DNA, 33 bp, Homo sapien
aggataaccacagagaccgctgccatggggttt

SEQ ID NO: 371176 - DNA, 33 bp, Homo sapien
aggataaccacagagatcgctgccatggggttt

SEQ ID NO: 371177 - DNA, 33 bp, Homo sapien
attacagagttcagaacgtgcaccaggaggtca

SEQ ID NO: 371178 - DNA, 33 bp, Homo sapien
attacagagttcagaatgtgcaccaggaggtca

SEQ ID NO: 371179 - DNA, 33 bp, Homo sapien
ttatagtcatcagtgtgaatcttggttttaagg

SEQ ID NO: 371180 - DNA, 33 bp, Homo sapien
ttatagtcatcagtgttaatcttggttttaagg

SEQ ID NO: 371181 - DNA, 33 bp, Homo sapien
aatctccatgttttgcaaatgctcaaaccagtc

SEQ ID NO: 371182 - DNA, 33 bp, Homo sapien
aatctccatgttttgccaatgctcaaaccagtc

SEQ ID NO: 371183 - DNA, 33 bp, Homo sapien
gatggatacaccgtccagcatttcttggactag

SEQ ID NO: 371184 - DNA, 33 bp, Homo sapien
gatggatacaccgtccggcatttcttggactag

SEQ ID NO: 371185 - DNA, 33 bp, Homo sapien
ttaatgagtgtcagtacggaaatgtaagcccag

SEQ ID NO: 371186 - DNA, 33 bp, Homo sapien
ttaatgagtgtcagtatggaaatgtaagcccag

SEQ ID NO: 371187 - DNA, 33 bp, Homo sapien
tgatgatttggaggtcaatagctttctctatgg

SEQ ID NO: 371188 - DNA, 33 bp, Homo sapien
tgatgatttggaggtcgatagctttctctatgg

SEQ ID NO: 371189 - DNA, 33 bp, Homo sapien
actttcttgaacttccagagtgtatttataata

SEQ ID NO: 371190 - DNA, 33 bp, Homo sapien
actttcttgaacttccggagtgtatttataata

SEQ ID NO: 371191 - DNA, 33 bp, Homo sapien
cccatatatgagaaccacttgttatcagactct

SEQ ID NO: 371192 - DNA, 33 bp, Homo sapien
cccatatatgagaaccgcttgttatcagactct

SEQ ID NO: 371193 - DNA, 33 bp, Homo sapien
agtcttctttactcgaagttaagcagatctctt

SEQ ID NO: 371194 - DNA, 33 bp, Homo sapien
agtcttctttactcgaggttaagcagatctctt

SEQ ID NO: 371195 - DNA, 33 bp, Homo sapien
gtagtcttcattctaactctaagagcattcatt

SEQ ID NO: 371196 - DNA, 33 bp, Homo sapien
gtagtcttcattctaagtctaagagcattcatt

SEQ ID NO: 371197 - DNA, 33 bp, Homo sapien
cactctgtacctcacaagaatgaactggaaaat

SEQ ID NO: 371198 - DNA, 33 bp, Homo sapien
cactctgtacctcacatgaatgaactggaaaat

SEQ ID NO: 371199 - DNA, 33 bp, Homo sapien
aggctggatgatgtcccgctgatctattgctgt

SEQ ID NO: 371200 - DNA, 33 bp, Homo sapien
aggctggatgatgtcctgctgatctattgctgt

SEQ ID NO: 371201 - DNA, 33 bp, Homo sapien
aggaaaaagtagatgaaaaaagagacaacgagg

SEQ ID NO: 371202 - DNA, 33 bp, Homo sapien
aggaaaaagtagatgagaaaagagacaacgagg

SEQ ID NO: 371203 - DNA, 33 bp, Homo sapien
atgccaagctgtgtaaaaaacaactctttgaga

SEQ ID NO: 371204 - DNA, 33 bp, Homo sapien
atgccaagctgtgtaagaaacaactctttgaga

SEQ ID NO: 371205 - DNA, 33 bp, Homo sapien
ggggtcatttgaatcaaagcacatggtgtccac

SEQ ID NO: 371206 - DNA, 33 bp, Homo sapien
ggggtcatttgaatcatagcacatggtgtccac

SEQ ID NO: 371207 - DNA, 33 bp, Homo sapien
ccacccagatgctctcccttttgattaactcaa

SEQ ID NO: 371208 - DNA, 33 bp, Homo sapien
ccacccagatgctctctcttttgattaactcaa

SEQ ID NO: 371209 - DNA, 33 bp, Homo sapien
ttgttttggagcaaagacattctgtgatattta

SEQ ID NO: 371210 - DNA, 33 bp, Homo sapien
ttgttttggagcaaaggcattctgtgatattta

SEQ ID NO: 371211 - DNA, 33 bp, Homo sapien
actgaaaaagacatgacggcagatatactagaa

SEQ ID NO: 371212 - DNA, 33 bp, Homo sapien
actgaaaaagacatgatggcagatatactagaa

SEQ ID NO: 371213 - DNA, 33 bp, Homo sapien
catgcagcagcttaccagaatgccttggctaat

SEQ ID NO: 371214 - DNA, 33 bp, Homo sapien
catgcagcagcttaccggaatgccttggctaat

SEQ ID NO: 371215 - DNA, 33 bp, Homo sapien; identical to SEQ ID NO: 371213

SEQ ID NO: 371216 - DNA, 33 bp, Homo sapien; identical to SEQ ID NO: 371214

SEQ ID NO: 371217 - DNA, 33 bp, Homo sapien
gtaacttatgtataacacggcagggaaagaaga

SEQ ID NO: 371218 - DNA, 33 bp, Homo sapien
gtaacttatgtataacgcggcagggaaagaaga

SEQ ID NO: 371219 - DNA, 33 bp, Homo sapien
ggcaaggcgttctttccagccagtagtagtagt

SEQ ID NO: 371220 - DNA, 33 bp, Homo sapien
ggcaaggcgttctttctagccagtagtagtagt

SEQ ID NO: 371221 - DNA, 33 bp, Homo sapien
cattatatgtttaaagaagcaatagaacatcta

SEQ ID NO: 371222 - DNA, 33 bp, Homo sapien
cattatatgtttaaagtagcaatagaacatcta

SEQ ID NO: 371223 - DNA, 33 bp, Homo sapien
ctggatttacagatgacgagcgtcgaagcttct

SEQ ID NO: 371224 - DNA, 33 bp, Homo sapien
ctggatttacagatgatgagcgtcgaagcttct

SEQ ID NO: 371225 - DNA, 33 bp, Homo sapien
ccatgtaatgaggagaacagctaccattgtttg

SEQ ID NO: 371226 - DNA, 33 bp, Homo sapien
ccatgtaatgaggagagcagctaccattgtttg

SEQ ID NO: 371227 - DNA, 33 bp, Homo sapien
gcctgcaccagaggaaaaagagatgagggcagg

SEQ ID NO: 371228 - DNA, 33 bp, Homo sapien
gcctgcaccagaggaagaagagatgagggcagg

SEQ ID NO: 371229 - DNA, 33 bp, Homo sapien
tagcctcaacctggccacattctacccatgtga

SEQ ID NO: 371230 - DNA, 33 bp, Homo sapien
tagcctcaacctggccgcattctacccatgtga

SEQ ID NO: 371231 - DNA, 33 bp, Homo sapien
atactgtcacaactcaagagattgtcagtatca

SEQ ID NO: 371232 - DNA, 33 bp, Homo sapien
atactgtcacaactcaggagattgtcagtatca

SEQ ID NO: 371233 - DNA, 33 bp, Homo sapien
actagtctgtccaagcccaaagcaagattggaa

SEQ ID NO: 371234 - DNA, 33 bp, Homo sapien
actagtctgtccaagctcaaagcaagattggaa

SEQ ID NO: 371235 - DNA, 33 bp, Homo sapien
taaaatagcccttgcacgatgacagttttatat

SEQ ID NO: 371236 - DNA, 33 bp, Homo sapien
taaaatagcccttgcatgatgacagttttatat

SEQ ID NO: 371237 - DNA, 33 bp, Homo sapien
gcaattggaaactaacaaagtcctgaagagcag

SEQ ID NO: 371238 - DNA, 33 bp, Homo sapien
gcaattggaaactaacgaagtcctgaagagcag

SEQ ID NO: 371239 - DNA, 33 bp, Homo sapien
acgttggttttcaaacggtgagtatagaaatca

SEQ ID NO: 371240 - DNA, 33 bp, Homo sapien
acgttggttttcaaactgtgagtatagaaatca

SEQ ID NO: 371241 - DNA, 33 bp, Homo sapien
atcataggatacccaactcaaaactcctctaat

SEQ ID NO: 371242 - DNA, 33 bp, Homo sapien
atcataggatacccaattcaaaactcctctaat

SEQ ID NO: 371243 - DNA, 33 bp, Homo sapien
ggggagggacagtgcaactcagaggacgttttc

SEQ ID NO: 371244 - DNA, 33 bp, Homo sapien
ggggagggacagtgcatctcagaggacgttttc

SEQ ID NO: 371245 - DNA, 33 bp, Homo sapien
ccacgtagttggaggcgcccttccactgctggg

SEQ ID NO: 371246 - DNA, 33 bp, Homo sapien
ccacgtagttggaggctcccttccactgctggg

SEQ ID NO: 371247 - DNA, 33 bp, Homo sapien
ttggagaaaaggctctcacattccaagccgctg

SEQ ID NO: 371248 - DNA, 33 bp, Homo sapien
ttggagaaaaggctctgacattccaagccgctg

SEQ ID NO: 371249 - DNA, 33 bp, Homo sapien
atctgtctagcatcaaaattttttttacatcaa

SEQ ID NO: 371250 - DNA, 33 bp, Homo sapien
atctgtctagcatcaagattttttttacatcaa

SEQ ID NO: 371251 - DNA, 33 bp, Homo sapien
cagctgactgctacataaagtatcctttgcctc

SEQ ID NO: 371252 - DNA, 33 bp, Homo sapien
cagctgactgctacatgaagtatcctttgcctc

SEQ ID NO: 371253 - DNA, 33 bp, Homo sapien
ttgcatgtctgaaggaactgtatgacctccgcc

SEQ ID NO: 371254 - DNA, 33 bp, Homo sapien
ttgcatgtctgaaggagctgtatgacctccgcc

SEQ ID NO: 371255 - DNA, 33 bp, Homo sapien
taaacctcatttttcaactctctctattcttag

SEQ ID NO: 371256 - DNA, 33 bp, Homo sapien
taaacctcatttttcagctctctctattcttag

SEQ ID NO: 371257 - DNA, 33 bp, Homo sapien
tcaccaaatttagcacagaaaactgacaccagt

SEQ ID NO: 371258 - DNA, 33 bp, Homo sapien
tcaccaaatttagcacggaaaactgacaccagt

SEQ ID NO: 371259 - DNA, 33 bp, Homo sapien
tcatattgtcaccaaacacagatagtttgactt

SEQ ID NO: 371260 - DNA, 33 bp, Homo sapien
tcatattgtcaccaaagacagatagtttgactt

SEQ ID NO: 371261 - DNA, 33 bp, Homo sapien; identical to SEQ ID NO: 371259

SEQ ID NO: 371262 - DNA, 33 bp, Homo sapien; identical to SEQ ID NO: 371260

SEQ ID NO: 371263 - DNA, 33 bp, Homo sapien
tgcacattccactctaccacatatttcttacat

SEQ ID NO: 371264 - DNA, 33 bp, Homo sapien
tgcacattccactctatcacatatttcttacat

SEQ ID NO: 371265 - DNA, 33 bp, Homo sapien
caaaagcaggatctgaaaaaggactattatcca

SEQ ID NO: 371266 - DNA, 33 bp, Homo sapien
caaaagcaggatctgataaaggactattatcca

SEQ ID NO: 371267 - DNA, 33 bp, Homo sapien
tacatttgggcatgacacttttctaggagtaag

SEQ ID NO: 371268 - DNA, 33 bp, Homo sapien
tacatttgggcatgacgcttttctaggagtaag

SEQ ID NO: 371269 - DNA, 33 bp, Homo sapien
gactgatgactaaaaacgtgccatgtttcagtt

SEQ ID NO: 371270 - DNA, 33 bp, Homo sapien
gactgatgactaaaaatgtgccatgtttcagtt

SEQ ID NO: 371271 - DNA, 33 bp, Homo sapien
taaatctacgactgcaaggtatttacaagttgc

SEQ ID NO: 371272 - DNA, 33 bp, Homo sapien
taaatctacgactgcagggtatttacaagttgc

SEQ ID NO: 371273 - DNA, 33 bp, Homo sapien
tgcacctggctgataccgtaatcttaatgtcac

SEQ ID NO: 371274 - DNA, 33 bp, Homo sapien
tgcacctggctgatactgtaatcttaatgtcac

SEQ ID NO: 371275 - DNA, 33 bp, Homo sapien
tatttgatttttttaacagccatgtggcctatt

SEQ ID NO: 371276 - DNA, 33 bp, Homo sapien
tatttgatttttttaatagccatgtggcctatt

SEQ ID NO: 371277 - DNA, 33 bp, Homo sapien
ttactttctacactggcatggggactcggccaa

SEQ ID NO: 371278 - DNA, 33 bp, Homo sapien
ttactttctacactggtatggggactcggccaa

SEQ ID NO: 371279 - DNA, 33 bp, Homo sapien
tgagagcctgcttgccaatagtcaactccaggt

SEQ ID NO: 371280 - DNA, 33 bp, Homo sapien
tgagagcctgcttgccgatagtcaactccaggt

SEQ ID NO: 371281 - DNA, 33 bp, Homo sapien
tctcatcacaggaacacgagcagaagtgatgtg

SEQ ID NO: 371282 - DNA, 33 bp, Homo sapien
tctcatcacaggaacaggagcagaagtgatgtg

SEQ ID NO: 371283 - DNA, 33 bp, Homo sapien
ctgtcagcaagaggcacatatgcaatttcacaa

SEQ ID NO: 371284 - DNA, 33 bp, Homo sapien
ctgtcagcaagaggcagatatgcaatttcacaa

SEQ ID NO: 371285 - DNA, 33 bp, Homo sapien
actggatcatctctgaagttttccccacagtga

SEQ ID NO: 371286 - DNA, 33 bp, Homo sapien
actggatcatctctgaggttttccccacagtga

SEQ ID NO: 371287 - DNA, 33 bp, Homo sapien
tcttgaccactggatacgttagataaatgtctt

SEQ ID NO: 371288 - DNA, 33 bp, Homo sapien
tcttgaccactggataggttagataaatgtctt

SEQ ID NO: 371289 - DNA, 33 bp, Homo sapien
agtgcactctagagccaaactgcctgggttcat

SEQ ID NO: 371290 - DNA, 33 bp, Homo sapien
agtgcactctagagccgaactgcctgggttcat

SEQ ID NO: 371291 - DNA, 33 bp, Homo sapien
ttcctagatgttaggaataagacttggtccctg

SEQ ID NO: 371292 - DNA, 33 bp, Homo sapien
ttcctagatgttaggagtaagacttggtccctg

SEQ ID NO: 371293 - DNA, 33 bp, Homo sapien
ccacagcacataactacaagcagggcatttcgg

SEQ ID NO: 371294 - DNA, 33 bp, Homo sapien
ccacagcacataactataagcagggcatttcgg

SEQ ID NO: 371295 - DNA, 33 bp, Homo sapien
tctatgagttgcttcaaatgccctggttggttt

SEQ ID NO: 371296 - DNA, 33 bp, Homo sapien
tctatgagttgcttcacatgccctggttggttt

SEQ ID NO: 371297 - DNA, 33 bp, Homo sapien
gaaaatgttaaccacaagcaggacaaaatgtgg

SEQ ID NO: 371298 - DNA, 33 bp, Homo sapien
gaaaatgttaaccacaggcaggacaaaatgtgg

SEQ ID NO: 371299 - DNA, 33 bp, Homo sapien
ccctcacagcatcccaatgacataggaattatc

SEQ ID NO: 371300 - DNA, 33 bp, Homo sapien
ccctcacagcatcccagtgacataggaattatc

SEQ ID NO: 371301 - DNA, 33 bp, Homo sapien
aggaatagattaagaaacacctaccagcacatg

SEQ ID NO: 371302 - DNA, 33 bp, Homo sapien
aggaatagattaagaagcacctaccagcacatg

SEQ ID NO: 371303 - DNA, 33 bp, Homo sapien
acctgttcttcttcaggactaattggttggcca

SEQ ID NO: 371304 - DNA, 33 bp, Homo sapien
acctgttcttcttcagtactaattggttggcca

SEQ ID NO: 371305 - DNA, 33 bp, Homo sapien
gcgttgcttttataacagcctaaaatgtaaaac

SEQ ID NO: 371306 - DNA, 33 bp, Homo sapien
gcgttgcttttataaccgcctaaaatgtaaaac

SEQ ID NO: 371307 - DNA, 33 bp, Homo sapien
tgatgtttccactgagacgcactaattgtgagc

SEQ ID NO: 371308 - DNA, 33 bp, Homo sapien
tgatgtttccactgaggcgcactaattgtgagc

SEQ ID NO: 371309 - DNA, 33 bp, Homo sapien
ttctccagagaaacaacggaaccaataggatat

SEQ ID NO: 371310 - DNA, 33 bp, Homo sapien
ttctccagagaaacaatggaaccaataggatat

SEQ ID NO: 371311 - DNA, 33 bp, Homo sapien
ttggacactattaccaagttgcaccttaaattt

SEQ ID NO: 371312 - DNA, 33 bp, Homo sapien
ttggacactattaccaggttgcaccttaaattt

SEQ ID NO: 371313 - DNA, 33 bp, Homo sapien
acctctttcctggtcacaggccctgatgtgggg

SEQ ID NO: 371314 - DNA, 33 bp, Homo sapien
acctctttcctggtcataggccctgatgtgggg

SEQ ID NO: 371315 - DNA, 33 bp, Homo sapien
acgagaagtcatttaacacacgtaagatggcaa

SEQ ID NO: 371316 - DNA, 33 bp, Homo sapien
acgagaagtcatttaagacacgtaagatggcaa

SEQ ID NO: 371317 - DNA, 33 bp, Homo sapien
ttttgtgagcttaggaacaactataggctggac

SEQ ID NO: 371318 - DNA, 33 bp, Homo sapien
ttttgtgagcttaggagcaactataggctggac

SEQ ID NO: 371319 - DNA, 33 bp, Homo sapien
agatcctcctcttcaccggctcccatcaaagtc

SEQ ID NO: 371320 - DNA, 33 bp, Homo sapien
agatcctcctcttcactggctcccatcaaagtc

SEQ ID NO: 371321 - DNA, 33 bp, Homo sapien
gagatggaaggaaaaaaccatgtgcctgaagag

SEQ ID NO: 371322 - DNA, 33 bp, Homo sapien
gagatggaaggaaaaagccatgtgcctgaagag

SEQ ID NO: 371323 - DNA, 33 bp, Homo sapien
tggacttgagccaggaaatgagggactcatgca

SEQ ID NO: 371324 - DNA, 33 bp, Homo sapien
tggacttgagccaggacatgagggactcatgca

SEQ ID NO: 371325 - DNA, 33 bp, Homo sapien
catcctacaggtgatcagaaacataatgggatc

SEQ ID NO: 371326 - DNA, 33 bp, Homo sapien
catcctacaggtgatcggaaacataatgggatc

SEQ ID NO: 371327 - DNA, 33 bp, Homo sapien
ctattgatacgtgtcacaatttcgatggatctc

SEQ ID NO: 371328 - DNA, 33 bp, Homo sapien
ctattgatacgtgtcagaatttcgatggatctc

SEQ ID NO: 371329 - DNA, 33 bp, Homo sapien
gcttgaatacaagtacacctggttccaggaact

SEQ ID NO: 371330 - DNA, 33 bp, Homo sapien
gcttgaatacaagtacgcctggttccaggaact

SEQ ID NO: 371331 - DNA, 33 bp, Homo sapien
ctcttatcatcttcccacaaaactgaaaaatct

SEQ ID NO: 371332 - DNA, 33 bp, Homo sapien
ctcttatcatcttcccgcaaaactgaaaaatct

SEQ ID NO: 371333 - DNA, 33 bp, Homo sapien
agtatccccagcagaacctggcttacctcaccc

SEQ ID NO: 371334 - DNA, 33 bp, Homo sapien
agtatccccagcagaatctggcttacctcaccc

SEQ ID NO: 371335 - DNA, 33 bp, Homo sapien
tcctccacctcaataacacgtttgcagtttaca

SEQ ID NO: 371336 - DNA, 33 bp, Homo sapien
tcctccacctcaataagacgtttgcagtttaca

SEQ ID NO: 371337 - DNA, 33 bp, Homo sapien
tgtcttaggctaataccacactgtttaattatc

SEQ ID NO: 371338 - DNA, 33 bp, Homo sapien
tgtcttaggctaatactacactgtttaattatc

SEQ ID NO: 371339 - DNA, 33 bp, Homo sapien
tagatgagaaaggataataacttggaccaggct

SEQ ID NO: 371340 - DNA, 33 bp, Homo sapien
tagatgagaaaggatagtaacttggaccaggct

SEQ ID NO: 371341 - DNA, 33 bp, Homo sapien
tgactgacttggatagaattttttaggaagtga

SEQ ID NO: 371342 - DNA, 33 bp, Homo sapien
tgactgacttggatagcattttttaggaagtga

SEQ ID NO: 371343 - DNA, 33 bp, Homo sapien
aaatagtactgatcacagcagatgactccacat

SEQ ID NO: 371344 - DNA, 33 bp, Homo sapien
aaatagtactgatcactgcagatgactccacat

SEQ ID NO: 371345 - DNA, 33 bp, Homo sapien
gattgagactccctaacgcatctttcttactgg

SEQ ID NO: 371346 - DNA, 33 bp, Homo sapien
gattgagactccctaaggcatctttcttactgg

SEQ ID NO: 371347 - DNA, 33 bp, Homo sapien
aagatgtgattataaactgagagttcactttct

SEQ ID NO: 371348 - DNA, 33 bp, Homo sapien
aagatgtgattataaattgagagttcactttct

SEQ ID NO: 371349 - DNA, 33 bp, Homo sapien
gaagcaggattagaagccactagtacctatttc

SEQ ID NO: 371350 - DNA, 33 bp, Homo sapien
gaagcaggattagaaggcactagtacctatttc

SEQ ID NO: 371351 - DNA, 33 bp, Homo sapien
tctgtaggatagaagcgctctgcaacttggtca

SEQ ID NO: 371352 - DNA, 33 bp, Homo sapien
tctgtaggatagaagctctctgcaacttggtca

SEQ ID NO: 371353 - DNA, 33 bp, Homo sapien
acctgaattgggtagaagtgctcacaggttctt

SEQ ID NO: 371354 - DNA, 33 bp, Homo sapien
acctgaattgggtagaggtgctcacaggttctt

SEQ ID NO: 371355 - DNA, 33 bp, Homo sapien
catgcacaaattggaagggtacagcttgataaa

SEQ ID NO: 371356 - DNA, 33 bp, Homo sapien
catgcacaaattggaatggtacagcttgataaa

SEQ ID NO: 371357 - DNA, 33 bp, Homo sapien
tccgtggcaccttcagacccatctcatcttgaa

SEQ ID NO: 371358 - DNA, 33 bp, Homo sapien
tccgtggcaccttcaggcccatctcatcttgaa

SEQ ID NO: 371359 - DNA, 33 bp, Homo sapien
aatttctttttcagtgcagactccatgacacaa

SEQ ID NO: 371360 - DNA, 33 bp, Homo sapien
aatttctttttcagtgtagactccatgacacaa

SEQ ID NO: 371361 - DNA, 33 bp, Homo sapien
tcctctccagcaagtaaaggttctgtctatgcc

SEQ ID NO: 371362 - DNA, 33 bp, Homo sapien
tcctctccagcaagtacaggttctgtctatgcc

SEQ ID NO: 371363 - DNA, 33 bp, Homo sapien
atcttgccctttgggacagcacatcagtagaca

SEQ ID NO: 371364 - DNA, 33 bp, Homo sapien
atcttgccctttgggatagcacatcagtagaca

SEQ ID NO: 371365 - DNA, 33 bp, Homo sapien
gtttggaaggttctccactctatctgaaagccc

SEQ ID NO: 371366 - DNA, 33 bp, Homo sapien
gtttggaaggttctccgctctatctgaaagccc

SEQ ID NO: 371367 - DNA, 33 bp, Homo sapien
ataattattggtttgaacacatggaagacatta

SEQ ID NO: 371368 - DNA, 33 bp, Homo sapien
ataattattggtttgagcacatggaagacatta

SEQ ID NO: 371369 - DNA, 33 bp, Homo sapien
acagaatcctaacttcccagcaaggtgagggca

SEQ ID NO: 371370 - DNA, 33 bp, Homo sapien
acagaatcctaacttctcagcaaggtgagggca

SEQ ID NO: 371371 - DNA, 33 bp, Homo sapien
agatcagtgagggagtaaacttagctgcattaa

SEQ ID NO: 371372 - DNA, 33 bp, Homo sapien
agatcagtgagggagtgaacttagctgcattaa

SEQ ID NO: 371373 - DNA, 33 bp, Homo sapien
cagatgtcaaaattcacatttacaagtgaattc

SEQ ID NO: 371374 - DNA, 33 bp, Homo sapien
cagatgtcaaaattcatatttacaagtgaattc

SEQ ID NO: 371375 - DNA, 33 bp, Homo sapien
tcacggaaaatagacaacgtgtaagcccagcta

SEQ ID NO: 371376 - DNA, 33 bp, Homo sapien
tcacggaaaatagacagcgtgtaagcccagcta

SEQ ID NO: 371377 - DNA, 33 bp, Homo sapien
ggttccactccagatacctgattgccaacacaa

SEQ ID NO: 371378 - DNA, 33 bp, Homo sapien
ggttccactccagatatctgattgccaacacaa

SEQ ID NO: 371379 - DNA, 33 bp, Homo sapien
tatagtaggtgcccagcaaacacttgcctcggg

SEQ ID NO: 371380 - DNA, 33 bp, Homo sapien
tatagtaggtgcccagtaaacacttgcctcggg

SEQ ID NO: 371381 - DNA, 33 bp, Homo sapien
gcagccttgtcagtgaaggaataatcaaacaac

SEQ ID NO: 371382 - DNA, 33 bp, Homo sapien
gcagccttgtcagtgagggaataatcaaacaac

SEQ ID NO: 371383 - DNA, 33 bp, Homo sapien
tatcaaaaatgggttacgtctatagtgggtacc

SEQ ID NO: 371384 - DNA, 33 bp, Homo sapien
tatcaaaaatgggttatgtctatagtgggtacc

SEQ ID NO: 371385 - DNA, 33 bp, Homo sapien
tagatattataagcgacgatggttctgttgcta

SEQ ID NO: 371386 - DNA, 33 bp, Homo sapien
tagatattataagcgatgatggttctgttgcta

SEQ ID NO: 371387 - DNA, 33 bp, Homo sapien
aacctcttcagcaacccgcttgggaagccagac

SEQ ID NO: 371388 - DNA, 33 bp, Homo sapien
aacctcttcagcaacctgcttgggaagccagac

SEQ ID NO: 371389 - DNA, 33 bp, Homo sapien
atgttacaacctcaaaaggaaaaggcatgttct

SEQ ID NO: 371390 - DNA, 33 bp, Homo sapien
atgttacaacctcaaatggaaaaggcatgttct

SEQ ID NO: 371391 - DNA, 33 bp, Homo sapien
aattgaagcaatgcaacaatttaaggtcatata

SEQ ID NO: 371392 - DNA, 33 bp, Homo sapien
aattgaagcaatgcaagaatttaaggtcatata

SEQ ID NO: 371393 - DNA, 33 bp, Homo sapien
gttcagcttgttacccacacaatggatgagttt

SEQ ID NO: 371394 - DNA, 33 bp, Homo sapien
gttcagcttgttacccgcacaatggatgagttt

SEQ ID NO: 371395 - DNA, 33 bp, Homo sapien
gccccagctcaaggggccactgctttggaaact

SEQ ID NO: 371396 - DNA, 33 bp, Homo sapien
gccccagctcaagggggcactgctttggaaact

SEQ ID NO: 371397 - DNA, 33 bp, Homo sapien
gatccaatcagattgcacctcattaccctatgc

SEQ ID NO: 371398 - DNA, 33 bp, Homo sapien
gatccaatcagattgctcctcattaccctatgc

SEQ ID NO: 371399 - DNA, 33 bp, Homo sapien
ctgcgacgcagcaaaacgcccagcgtggaaggg

SEQ ID NO: 371400 - DNA, 33 bp, Homo sapien
ctgcgacgcagcaaaatgcccagcgtggaaggg

SEQ ID NO: 371401 - DNA, 33 bp, Homo sapien
atatcaccttgatcccacatagaatcaccctaa

SEQ ID NO: 371402 - DNA, 33 bp, Homo sapien
atatcaccttgatcccccatagaatcaccctaa

SEQ ID NO: 371403 - DNA, 33 bp, Homo sapien
ctccattaatctctgcacttggcttcgaacacc

SEQ ID NO: 371404 - DNA, 33 bp, Homo sapien
ctccattaatctctgcgcttggcttcgaacacc

SEQ ID NO: 371405 - DNA, 33 bp, Homo sapien
gactacatggaaaacacggagtcgattaagaag

SEQ ID NO: 371406 - DNA, 33 bp, Homo sapien
gactacatggaaaacatggagtcgattaagaag

SEQ ID NO: 371407 - DNA, 33 bp, Homo sapien
agtggtgtcaaacataagaactgctgacctcct

SEQ ID NO: 371408 - DNA, 33 bp, Homo sapien
agtggtgtcaaacataggaactgctgacctcct

SEQ ID NO: 371409 - DNA, 33 bp, Homo sapien
tggatacagtgtacacagctcagatgaagagtg

SEQ ID NO: 371410 - DNA, 33 bp, Homo sapien
tggatacagtgtacacggctcagatgaagagtg

SEQ ID NO: 371411 - DNA, 33 bp, Homo sapien
gatcagcctacgtaaaatacagcccctcatcct

SEQ ID NO: 371412 - DNA, 33 bp, Homo sapien
gatcagcctacgtaaagtacagcccctcatcct

SEQ ID NO: 371413 - DNA, 33 bp, Homo sapien
atgtatgtttacacgccctggttgcctgctcat

SEQ ID NO: 371414 - DNA, 33 bp, Homo sapien
atgtatgtttacacgctctggttgcctgctcat

SEQ ID NO: 371415 - DNA, 33 bp, Homo sapien
tgctgtcataataacacgagagctgccagcatc

SEQ ID NO: 371416 - DNA, 33 bp, Homo sapien
tgctgtcataataacatgagagctgccagcatc

SEQ ID NO: 371417 - DNA, 33 bp, Homo sapien
aaaaagaagcttcagagtcatgccttttttatt

SEQ ID NO: 371418 - DNA, 33 bp, Homo sapien
aaaaagaagcttcagattcatgccttttttatt

SEQ ID NO: 371419 - DNA, 33 bp, Homo sapien
tgtaacacaggtatgacaattttggacacagct

SEQ ID NO: 371420 - DNA, 33 bp, Homo sapien
tgtaacacaggtatgataattttggacacagct

SEQ ID NO: 371421 - DNA, 33 bp, Homo sapien
gaattcaaggaagttccaagtatttctcttccc

SEQ ID NO: 371422 - DNA, 33 bp, Homo sapien
gaattcaaggaagttcgaagtatttctcttccc

SEQ ID NO: 371423 - DNA, 33 bp, Homo sapien
cactggtgggaagcatcagaagatgtgaagagc

SEQ ID NO: 371424 - DNA, 33 bp, Homo sapien
cactggtgggaagcatgagaagatgtgaagagc

SEQ ID NO: 371425 - DNA, 33 bp, Homo sapien
acctgtgaaataatgacaaaaatggattatgta

SEQ ID NO: 371426 - DNA, 33 bp, Homo sapien
acctgtgaaataatgataaaaatggattatgta

SEQ ID NO: 371427 - DNA, 33 bp, Homo sapien
aactgataaaaccgcaatgcacccttgtttagg

SEQ ID NO: 371428 - DNA, 33 bp, Homo sapien
aactgataaaaccgcagtgcacccttgtttagg

SEQ ID NO: 371429 - DNA, 33 bp, Homo sapien
ctctgggctccgctgaaaaccaaaattgggtta

SEQ ID NO: 371430 - DNA, 33 bp, Homo sapien
ctctgggctccgctgagaaccaaaattgggtta

SEQ ID NO: 371431 - DNA, 33 bp, Homo sapien
tcttgtccttcagaccacttatctcagtctgta

SEQ ID NO: 371432 - DNA, 33 bp, Homo sapien
tcttgtccttcagaccgcttatctcagtctgta

SEQ ID NO: 371433 - DNA, 33 bp, Homo sapien
gcctgcaagaaatatcagaggatttcagacctt

SEQ ID NO: 371434 - DNA, 33 bp, Homo sapien
gcctgcaagaaatatcggaggatttcagacctt

SEQ ID NO: 371435 - DNA, 33 bp, Homo sapien
tgcttttctgtgtttaacccaggagtccaaagg

SEQ ID NO: 371436 - DNA, 33 bp, Homo sapien
tgcttttctgtgtttagcccaggagtccaaagg

SEQ ID NO: 371437 - DNA, 33 bp, Homo sapien
ttccaagtacaatggaaagacatggggggattt

SEQ ID NO: 371438 - DNA, 33 bp, Homo sapien
ttccaagtacaatggacagacatggggggattt

SEQ ID NO: 371439 - DNA, 33 bp, Homo sapien
catctccaacttaatacgcccaacacagactca

SEQ ID NO: 371440 - DNA, 33 bp, Homo sapien
catctccaacttaatatgcccaacacagactca

SEQ ID NO: 371441 - DNA, 33 bp, Homo sapien
gaagtttgagacctgcccggacaacatagcaaa

SEQ ID NO: 371442 - DNA, 33 bp, Homo sapien
gaagtttgagacctgcgcggacaacatagcaaa

SEQ ID NO: 371443 - DNA, 33 bp, Homo sapien
gacaaaagagaagcaacgggatccgaggagaga

SEQ ID NO: 371444 - DNA, 33 bp, Homo sapien
gacaaaagagaagcaatgggatccgaggagaga

SEQ ID NO: 371445 - DNA, 33 bp, Homo sapien
gctgcattctgggcaaatcccacctgtgtgggc

SEQ ID NO: 371446 - DNA, 33 bp, Homo sapien
gctgcattctgggcaagtcccacctgtgtgggc

SEQ ID NO: 371447 - DNA, 33 bp, Homo sapien
gaatgcagcaccttgagaattatgccagcccca

SEQ ID NO: 371448 - DNA, 33 bp, Homo sapien
gaatgcagcaccttgataattatgccagcccca

SEQ ID NO: 371449 - DNA, 33 bp, Homo sapien
ttgttgtctcagtggaagaataccgtgaattcc

SEQ ID NO: 371450 - DNA, 33 bp, Homo sapien
ttgttgtctcagtggaggaataccgtgaattcc

SEQ ID NO: 371451 - DNA, 33 bp, Homo sapien
caactcacaagcagtacaataattcccagctat

SEQ ID NO: 371452 - DNA, 33 bp, Homo sapien
caactcacaagcagtataataattcccagctat

SEQ ID NO: 371453 - DNA, 33 bp, Homo sapien
aattcccagctatcacaggtaagaaaacaatgg

SEQ ID NO: 371454 - DNA, 33 bp, Homo sapien
aattcccagctatcacgggtaagaaaacaatgg

SEQ ID NO: 371455 - DNA, 33 bp, Homo sapien
tggaacagtaacaatcaatcattatgagctatc

SEQ ID NO: 371456 - DNA, 33 bp, Homo sapien
tggaacagtaacaatcgatcattatgagctatc

SEQ ID NO: 371457 - DNA, 33 bp, Homo sapien
actaactgtgatgcaacggagtgagagcaaaga

SEQ ID NO: 371458 - DNA, 33 bp, Homo sapien
actaactgtgatgcaatggagtgagagcaaaga

SEQ ID NO: 371459 - DNA, 33 bp, Homo sapien
agaaaagaaagaaagacagtgttcataattctt

SEQ ID NO: 371460 - DNA, 33 bp, Homo sapien
agaaaagaaagaaagatagtgttcataattctt

SEQ ID NO: 371461 - DNA, 33 bp, Homo sapien
ggaattccattggtgacggaggaaataattggg

SEQ ID NO: 371462 - DNA, 33 bp, Homo sapien
ggaattccattggtgatggaggaaataattggg

SEQ ID NO: 371463 - DNA, 33 bp, Homo sapien
cagccagcaaggtaaccgggacctcagccctac

SEQ ID NO: 371464 - DNA, 33 bp, Homo sapien
cagccagcaaggtaactgggacctcagccctac

SEQ ID NO: 371465 - DNA, 33 bp, Homo sapien
tacagtcacaagttaccgagttctgccagtaat

SEQ ID NO: 371466 - DNA, 33 bp, Homo sapien
tacagtcacaagttactgagttctgccagtaat

SEQ ID NO: 371467 - DNA, 33 bp, Homo sapien
tttgggatgatcaagaagtgaaaagctgcccac

SEQ ID NO: 371468 - DNA, 33 bp, Homo sapien
tttgggatgatcaagaggtgaaaagctgcccac

SEQ ID NO: 371469 - DNA, 33 bp, Homo sapien
cccaaaggtgactgagaattcctttataagccc

SEQ ID NO: 371470 - DNA, 33 bp, Homo sapien
cccaaaggtgactgagtattcctttataagccc

SEQ ID NO: 371471 - DNA, 33 bp, Homo sapien
acagaatctccagaagacagacacgttaattaa

SEQ ID NO: 371472 - DNA, 33 bp, Homo sapien
acagaatctccagaaggcagacacgttaattaa

SEQ ID NO: 371473 - DNA, 33 bp, Homo sapien
ctgcttggctctcaataaatgatagctgctatt

SEQ ID NO: 371474 - DNA, 33 bp, Homo sapien
ctgcttggctctcaatgaatgatagctgctatt

SEQ ID NO: 371475 - DNA, 33 bp, Homo sapien
actcaggtagggaaacagctcagagaggttaat

SEQ ID NO: 371476 - DNA, 33 bp, Homo sapien
actcaggtagggaaacggctcagagaggttaat

SEQ ID NO: 371477 - DNA, 33 bp, Homo sapien
tccaagtgccattttccccaccacgtagaagta

SEQ ID NO: 371478 - DNA, 33 bp, Homo sapien
tccaagtgccattttctccaccacgtagaagta

SEQ ID NO: 371479 - DNA, 33 bp, Homo sapien
ttctatccatttatcaagtgagaaaacattctc

SEQ ID NO: 371480 - DNA, 33 bp, Homo sapien
ttctatccatttatcaggtgagaaaacattctc

SEQ ID NO: 371481 - DNA, 33 bp, Homo sapien
acaatctgcacacaatcaggatccatctcatga

SEQ ID NO: 371482 - DNA, 33 bp, Homo sapien
acaatctgcacacaattaggatccatctcatga

SEQ ID NO: 371483 - DNA, 33 bp, Homo sapien
ttctctgaggtggactcacatgaaactgaggct

SEQ ID NO: 371484 - DNA, 33 bp, Homo sapien
ttctctgaggtggactgacatgaaactgaggct

SEQ ID NO: 371485 - DNA, 33 bp, Homo sapien
tttacaatgagaaatacaattgcttactcaatc

SEQ ID NO: 371486 - DNA, 33 bp, Homo sapien
tttacaatgagaaatataattgcttactcaatc

SEQ ID NO: 371487 - DNA, 33 bp, Homo sapien
tcatactgtttttctaccaaaaggcatttgtcc

SEQ ID NO: 371488 - DNA, 33 bp, Homo sapien
tcatactgtttttctatcaaaaggcatttgtcc

SEQ ID NO: 371489 - DNA, 33 bp, Homo sapien
taaaagaggtttaatgcaatcacagttccacgt

SEQ ID NO: 371490 - DNA, 33 bp, Homo sapien
taaaagaggtttaatggaatcacagttccacgt

SEQ ID NO: 371491 - DNA, 33 bp, Homo sapien
gctgaacagggtatgaagtgggatccttcttca

SEQ ID NO: 371492 - DNA, 33 bp, Homo sapien
gctgaacagggtatgaggtgggatccttcttca

SEQ ID NO: 371493 - DNA, 33 bp, Homo sapien
cacctgtcaaaatatccaacgtgcatgccttga

SEQ ID NO: 371494 - DNA, 33 bp, Homo sapien
cacctgtcaaaatatctaacgtgcatgccttga

SEQ ID NO: 371495 - DNA, 33 bp, Homo sapien
aaccactcaccaaaaacgttgtgccaaggtatg

SEQ ID NO: 371496 - DNA, 33 bp, Homo sapien
aaccactcaccaaaaatgttgtgccaaggtatg

SEQ ID NO: 371497 - DNA, 33 bp, Homo sapien
gaactttgaagtgatgaataaaatagacaaatc

SEQ ID NO: 371498 - DNA, 33 bp, Homo sapien
gaactttgaagtgatgtataaaatagacaaatc

SEQ ID NO: 371499 - DNA, 33 bp, Homo sapien
tccatgctcttaagtgcaggcatttgaattttt

SEQ ID NO: 371500 - DNA, 33 bp, Homo sapien
tccatgctcttaagtgtaggcatttgaattttt

SEQ ID NO: 371501 - DNA, 33 bp, Homo sapien
cagatggttgttatcacgttttttgcaataaag

SEQ ID NO: 371502 - DNA, 33 bp, Homo sapien
cagatggttgttatcatgttttttgcaataaag

SEQ ID NO: 371503 - DNA, 33 bp, Homo sapien
taggtgtactgtctatgagcaagaatattttga

SEQ ID NO: 371504 - DNA, 33 bp, Homo sapien
taggtgtactgtctattagcaagaatattttga

SEQ ID NO: 371505 - DNA, 33 bp, Homo sapien
actgaatattttgagccgactattgagacttat

SEQ ID NO: 371506 - DNA, 33 bp, Homo sapien
actgaatattttgagctgactattgagacttat

SEQ ID NO: 371507 - DNA, 33 bp, Homo sapien
ctcatccacctgtaccccaggtaattctacaca

SEQ ID NO: 371508 - DNA, 33 bp, Homo sapien
ctcatccacctgtacctcaggtaattctacaca

SEQ ID NO: 371509 - DNA, 33 bp, Homo sapien
gcactacaacaccttccaagtaatctgatggtt

SEQ ID NO: 371510 - DNA, 33 bp, Homo sapien
gcactacaacaccttcgaagtaatctgatggtt

SEQ ID NO: 371511 - DNA, 33 bp, Homo sapien
cccagctgattctagtcaatgtgggtcttcact

SEQ ID NO: 371512 - DNA, 33 bp, Homo sapien
cccagctgattctagttaatgtgggtcttcact

SEQ ID NO: 371513 - DNA, 33 bp, Homo sapien
gtcttaaggaatgatacggcctcagtgcaatgg

SEQ ID NO: 371514 - DNA, 33 bp, Homo sapien
gtcttaaggaatgatatggcctcagtgcaatgg

SEQ ID NO: 371515 - DNA, 33 bp, Homo sapien
agcgacagtcatagtcgccgtgagcacaaggct

SEQ ID NO: 371516 - DNA, 33 bp, Homo sapien
agcgacagtcatagtctccgtgagcacaaggct

SEQ ID NO: 371517 - DNA, 33 bp, Homo sapien
gggacacacaggagtcaatgaagaggcatggcc

SEQ ID NO: 371518 - DNA, 33 bp, Homo sapien
gggacacacaggagtcgatgaagaggcatggcc

SEQ ID NO: 371519 - DNA, 33 bp, Homo sapien
gctcaggaaagagatccgagctggaaatttgaa

SEQ ID NO: 371520 - DNA, 33 bp, Homo sapien
gctcaggaaagagatctgagctggaaatttgaa

SEQ ID NO: 371521 - DNA, 33 bp, Homo sapien
acagaagaactcaggaagacaatagtatttaca

SEQ ID NO: 371522 - DNA, 33 bp, Homo sapien
acagaagaactcaggaggacaatagtatttaca

SEQ ID NO: 371523 - DNA, 33 bp, Homo sapien
accttgcattgactcactattctgctattgcat

SEQ ID NO: 371524 - DNA, 33 bp, Homo sapien
accttgcattgactcattattctgctattgcat

SEQ ID NO: 371525 - DNA, 33 bp, Homo sapien
gggtttggaacctcaaacaacatggcttcttca

SEQ ID NO: 371526 - DNA, 33 bp, Homo sapien
gggtttggaacctcaatcaacatggcttcttca

SEQ ID NO: 371527 - DNA, 33 bp, Homo sapien
aggtgtcatatatggaatacgcataccctttga

SEQ ID NO: 371528 - DNA, 33 bp, Homo sapien
aggtgtcatatatggactacgcataccctttga

SEQ ID NO: 371529 - DNA, 33 bp, Homo sapien
tatcttgattgcagtacggttacatgaatctat

SEQ ID NO: 371530 - DNA, 33 bp, Homo sapien
tatcttgattgcagtatggttacatgaatctat

SEQ ID NO: 371531 - DNA, 33 bp, Homo sapien
cagcttctgttgaacactcacagaggagggctg

SEQ ID NO: 371532 - DNA, 33 bp, Homo sapien
cagcttctgttgaacattcacagaggagggctg

SEQ ID NO: 371533 - DNA, 33 bp, Homo sapien
tccaagcttatgatgcgagtgggtttaaggcct

SEQ ID NO: 371534 - DNA, 33 bp, Homo sapien
tccaagcttatgatgctagtgggtttaaggcct

SEQ ID NO: 371535 - DNA, 33 bp, Homo sapien
ctgctcttgccccctgaagtctatgcggacaca

SEQ ID NO: 371536 - DNA, 33 bp, Homo sapien
ctgctcttgccccctgcagtctatgcggacaca

SEQ ID NO: 371537 - DNA, 33 bp, Homo sapien
gacaaagttatatctaagctggggtgtggcttg

SEQ ID NO: 371538 - DNA, 33 bp, Homo sapien
gacaaagttatatctaggctggggtgtggcttg

SEQ ID NO: 371539 - DNA, 33 bp, Homo sapien
gtacattgagttccacagaaacctcggtgtatc

SEQ ID NO: 371540 - DNA, 33 bp, Homo sapien
gtacattgagttccacggaaacctcggtgtatc

SEQ ID NO: 371541 - DNA, 33 bp, Homo sapien
ctctatgaatgttggaagcaagattggccagat

SEQ ID NO: 371542 - DNA, 33 bp, Homo sapien
ctctatgaatgttggacgcaagattggccagat

SEQ ID NO: 371543 - DNA, 33 bp, Homo sapien
acgtgctaatagttcaagtcccgggatttatct

SEQ ID NO: 371544 - DNA, 33 bp, Homo sapien
acgtgctaatagttcaggtcccgggatttatct

SEQ ID NO: 371545 - DNA, 33 bp, Homo sapien
tgggcacctgaaaaacaaccaaactggacatct

SEQ ID NO: 371546 - DNA, 33 bp, Homo sapien
tgggcacctgaaaaacgaccaaactggacatct

SEQ ID NO: 371547 - DNA, 33 bp, Homo sapien
ctgctagaattcaggcaagtgaagtcagagttt

SEQ ID NO: 371548 - DNA, 33 bp, Homo sapien
ctgctagaattcaggccagtgaagtcagagttt

SEQ ID NO: 371549 - DNA, 33 bp, Homo sapien
aactgaccactgtctcaccacttcttactgggg

SEQ ID NO: 371550 - DNA, 33 bp, Homo sapien
aactgaccactgtctcgccacttcttactgggg

SEQ ID NO: 371551 - DNA, 33 bp, Homo sapien
ggctgggaagaagtgacgaaacattttataccc

SEQ ID NO: 371552 - DNA, 33 bp, Homo sapien
ggctgggaagaagtgatgaaacattttataccc

SEQ ID NO: 371553 - DNA, 33 bp, Homo sapien
tgtctggcaatcatcaagcctagagaaacaggg

SEQ ID NO: 371554 - DNA, 33 bp, Homo sapien
tgtctggcaatcatcaggcctagagaaacaggg

SEQ ID NO: 371555 - DNA, 33 bp, Homo sapien
gacaccatgaaacttaacaatggttacagtata

SEQ ID NO: 371556 - DNA, 33 bp, Homo sapien
gacaccatgaaacttatcaatggttacagtata

SEQ ID NO: 371557 - DNA, 33 bp, Homo sapien
gaacccagggagtgaacgacctaagccagtggg

SEQ ID NO: 371558 - DNA, 33 bp, Homo sapien
gaacccagggagtgaatgacctaagccagtggg

SEQ ID NO: 371559 - DNA, 33 bp, Homo sapien
gacatgtttgccgaaccgccctcaaagttaggc

SEQ ID NO: 371560 - DNA, 33 bp, Homo sapien
gacatgtttgccgaactgccctcaaagttaggc

SEQ ID NO: 371561 - DNA, 33 bp, Homo sapien
atctgccatttcacccacaggaattgacccagt

SEQ ID NO: 371562 - DNA, 33 bp, Homo sapien
atctgccatttcacccgcaggaattgacccagt

SEQ ID NO: 371563 - DNA, 33 bp, Homo sapien
agattgtcatccactcagacatttgccctctct

SEQ ID NO: 371564 - DNA, 33 bp, Homo sapien
agattgtcatccactcggacatttgccctctct

SEQ ID NO: 371565 - DNA, 33 bp, Homo sapien
agttgatttggcaaacaatagcatgtgttgaaa

SEQ ID NO: 371566 - DNA, 33 bp, Homo sapien
agttgatttggcaaacgatagcatgtgttgaaa

SEQ ID NO: 371567 - DNA, 33 bp, Homo sapien
gagagtggtggtggccagatctagatgagtgag

SEQ ID NO: 371568 - DNA, 33 bp, Homo sapien
gagagtggtggtggccggatctagatgagtgag

SEQ ID NO: 371569 - DNA, 33 bp, Homo sapien
actagggcagtccagacgggtgtgcctcagggt

SEQ ID NO: 371570 - DNA, 33 bp, Homo sapien
actagggcagtccagatgggtgtgcctcagggt

SEQ ID NO: 371571 - DNA, 33 bp, Homo sapien
cacagccttgggcaaaagaggttcataggtgca

SEQ ID NO: 371572 - DNA, 33 bp, Homo sapien
cacagccttgggcaaaggaggttcataggtgca

SEQ ID NO: 371573 - DNA, 33 bp, Homo sapien
agcaaaaattgcaaaaatggtatacaaatgatc

SEQ ID NO: 371574 - DNA, 33 bp, Homo sapien
agcaaaaattgcaaaagtggtatacaaatgatc

SEQ ID NO: 371575 - DNA, 33 bp, Homo sapien
agaagttggccagatagggtgaagagagtgccc

SEQ ID NO: 371576 - DNA, 33 bp, Homo sapien
agaagttggccagatatggtgaagagagtgccc

SEQ ID NO: 371577 - DNA, 33 bp, Homo sapien
acttaatatcttgggcaacttaacctccctgag

SEQ ID NO: 371578 - DNA, 33 bp, Homo sapien
acttaatatcttgggcgacttaacctccctgag

SEQ ID NO: 371579 - DNA, 33 bp, Homo sapien
ggggaaggaatgcatagctgtaaagcagagcaa

SEQ ID NO: 371580 - DNA, 33 bp, Homo sapien
ggggaaggaatgcatatctgtaaagcagagcaa

SEQ ID NO: 371581 - DNA, 33 bp, Homo sapien
catgtgagccaatgaagcgcctgttttgcttaa

SEQ ID NO: 371582 - DNA, 33 bp, Homo sapien
catgtgagccaatgaatcgcctgttttgcttaa

SEQ ID NO: 371583 - DNA, 33 bp, Homo sapien
taaaccaaaactcaccaaattcagttccagggt

SEQ ID NO: 371584 - DNA, 33 bp, Homo sapien
taaaccaaaactcaccgaattcagttccagggt

SEQ ID NO: 371585 - DNA, 33 bp, Homo sapien
gacagacaataaaagaacaatcacacaaatgag

SEQ ID NO: 371586 - DNA, 33 bp, Homo sapien
gacagacaataaaagagcaatcacacaaatgag

SEQ ID NO: 371587 - DNA, 33 bp, Homo sapien
tgggtggctaccacaccggaagaaacgagagat

SEQ ID NO: 371588 - DNA, 33 bp, Homo sapien
tgggtggctaccacactggaagaaacgagagat

SEQ ID NO: 371589 - DNA, 33 bp, Homo sapien
ggactccttgcacatgacaatgcaggtctctct

SEQ ID NO: 371590 - DNA, 33 bp, Homo sapien
ggactccttgcacatgccaatgcaggtctctct

SEQ ID NO: 371591 - DNA, 33 bp, Homo sapien
gctgtcacgcgggctaaataataatgccccata

SEQ ID NO: 371592 - DNA, 33 bp, Homo sapien
gctgtcacgcgggctagataataatgccccata

SEQ ID NO: 371593 - DNA, 33 bp, Homo sapien
tcttgatgccattccaataccttgtctgctctt

SEQ ID NO: 371594 - DNA, 33 bp, Homo sapien
tcttgatgccattccattaccttgtctgctctt

SEQ ID NO: 371595 - DNA, 33 bp, Homo sapien
agatgtctgagcttcaacccggtcttgctaagt

SEQ ID NO: 371596 - DNA, 33 bp, Homo sapien
agatgtctgagcttcagcccggtcttgctaagt

SEQ ID NO: 371597 - DNA, 33 bp, Homo sapien
ccttagagctggaatacggctggcatcggagaa

SEQ ID NO: 371598 - DNA, 33 bp, Homo sapien
ccttagagctggaatatggctggcatcggagaa

SEQ ID NO: 371599 - DNA, 33 bp, Homo sapien
taactcctaaggaataaaggcatcagccatacc

SEQ ID NO: 371600 - DNA, 33 bp, Homo sapien
taactcctaaggaatagaggcatcagccatacc

SEQ ID NO: 371601 - DNA, 33 bp, Homo sapien
caaggagaacagggtacgcaggaaaggcaggtg

SEQ ID NO: 371602 - DNA, 33 bp, Homo sapien
caaggagaacagggtatgcaggaaaggcaggtg

SEQ ID NO: 371603 - DNA, 33 bp, Homo sapien
aagatttttaagcagcagagtaacatggttcag

SEQ ID NO: 371604 - DNA, 33 bp, Homo sapien
aagatttttaagcagcggagtaacatggttcag

SEQ ID NO: 371605 - DNA, 33 bp, Homo sapien
cgaaaaactgcaacatcagctgggcgtggcagc

SEQ ID NO: 371606 - DNA, 33 bp, Homo sapien
cgaaaaactgcaacattagctgggcgtggcagc

SEQ ID NO: 371607 - DNA, 33 bp, Homo sapien
agtggatgaatggaacaaacgatacatgaaaaa

SEQ ID NO: 371608 - DNA, 33 bp, Homo sapien
agtggatgaatggaacgaacgatacatgaaaaa

SEQ ID NO: 371609 - DNA, 33 bp, Homo sapien
aagcaaccttttcagaagggaaattggtaatgc

SEQ ID NO: 371610 - DNA, 33 bp, Homo sapien
aagcaaccttttcagacgggaaattggtaatgc

SEQ ID NO: 371611 - DNA, 33 bp, Homo sapien
caaataagcaacttacggaaggtcatgtgactc

SEQ ID NO: 371612 - DNA, 33 bp, Homo sapien
caaataagcaacttactgaaggtcatgtgactc

SEQ ID NO: 371613 - DNA, 33 bp, Homo sapien
ggttcttaggcagacactgcatcctgggtcttg

SEQ ID NO: 371614 - DNA, 33 bp, Homo sapien
ggttcttaggcagacattgcatcctgggtcttg

SEQ ID NO: 371615 - DNA, 33 bp, Homo sapien
gtgtgcaaattcacaacatttttgttgtttttg

SEQ ID NO: 371616 - DNA, 33 bp, Homo sapien
gtgtgcaaattcacaatatttttgttgtttttg

SEQ ID NO: 371617 - DNA, 33 bp, Homo sapien
acataaagcacagatacgcaaatagatctctgg

SEQ ID NO: 371618 - DNA, 33 bp, Homo sapien
acataaagcacagatatgcaaatagatctctgg

SEQ ID NO: 371619 - DNA, 33 bp, Homo sapien
tccaattagtaggacaaagagcgatgctaccat

SEQ ID NO: 371620 - DNA, 33 bp, Homo sapien
tccaattagtaggacacagagcgatgctaccat

SEQ ID NO: 371621 - DNA, 33 bp, Homo sapien
gtcttgttttctttgaccgcttactttggggga

SEQ ID NO: 371622 - DNA, 33 bp, Homo sapien
gtcttgttttctttgatcgcttactttggggga

SEQ ID NO: 371623 - DNA, 33 bp, Homo sapien
aggtacagtgaatacaatatagaattaaacaca

SEQ ID NO: 371624 - DNA, 33 bp, Homo sapien
aggtacagtgaatacagtatagaattaaacaca

SEQ ID NO: 371625 - DNA, 33 bp, Homo sapien
gtagagagtcttgccccctagttacctgataca

SEQ ID NO: 371626 - DNA, 33 bp, Homo sapien
gtagagagtcttgccctctagttacctgataca

SEQ ID NO: 371627 - DNA, 33 bp, Homo sapien
tgatcaggcataggccgaaagcgctatatccct

SEQ ID NO: 371628 - DNA, 33 bp, Homo sapien
tgatcaggcataggcctaaagcgctatatccct

SEQ ID NO: 371629 - DNA, 33 bp, Homo sapien
tagctgtcctcaggataaaacttcccacaagat

SEQ ID NO: 371630 - DNA, 33 bp, Homo sapien
tagctgtcctcaggattaaacttcccacaagat

SEQ ID NO: 371631 - DNA, 33 bp, Homo sapien
tgtgaaatgaagaaaacagcaagttatcataaa

SEQ ID NO: 371632 - DNA, 33 bp, Homo sapien
tgtgaaatgaagaaaatagcaagttatcataaa

SEQ ID NO: 371633 - DNA, 33 bp, Homo sapien
tttttaaagtcaatacaatggaaatcaataaat

SEQ ID NO: 371634 - DNA, 33 bp, Homo sapien
tttttaaagtcaatacgatggaaatcaataaat

SEQ ID NO: 371635 - DNA, 33 bp, Homo sapien
ggataaattgctttcacgattagctcaccttct

SEQ ID NO: 371636 - DNA, 33 bp, Homo sapien
ggataaattgctttcatgattagctcaccttct

SEQ ID NO: 371637 - DNA, 33 bp, Homo sapien
gtaagcagtctcttcacacatttcttacagtct

SEQ ID NO: 371638 - DNA, 33 bp, Homo sapien
gtaagcagtctcttcatacatttcttacagtct

SEQ ID NO: 371639 - DNA, 33 bp, Homo sapien
tgcctcacatcaggagcagcataggaggttgac

SEQ ID NO: 371640 - DNA, 33 bp, Homo sapien
tgcctcacatcaggagtagcataggaggttgac

SEQ ID NO: 371641 - DNA, 33 bp, Homo sapien
tgtcctcagcagctccagcaagtacctacaagg

SEQ ID NO: 371642 - DNA, 33 bp, Homo sapien
tgtcctcagcagctccggcaagtacctacaagg

SEQ ID NO: 371643 - DNA, 33 bp, Homo sapien
atgtgattaaattaaacgagtctctgactggag

SEQ ID NO: 371644 - DNA, 33 bp, Homo sapien
atgtgattaaattaaatgagtctctgactggag

SEQ ID NO: 371645 - DNA, 33 bp, Homo sapien
cagaatctgtattccaacctaagtgatctgtat

SEQ ID NO: 371646 - DNA, 33 bp, Homo sapien
cagaatctgtattccagcctaagtgatctgtat

SEQ ID NO: 371647 - DNA, 33 bp, Homo sapien
aaagttttgattccacaattcttccacaagtat

SEQ ID NO: 371648 - DNA, 33 bp, Homo sapien
aaagttttgattccacgattcttccacaagtat

SEQ ID NO: 371649 - DNA, 33 bp, Homo sapien
ctgtgtgtcccttaaacgttagaaatacctctg

SEQ ID NO: 371650 - DNA, 33 bp, Homo sapien
ctgtgtgtcccttaaatgttagaaatacctctg

SEQ ID NO: 371651 - DNA, 33 bp, Homo sapien
gtttaggctgacaaacagacttatgtggatgtt

SEQ ID NO: 371652 - DNA, 33 bp, Homo sapien
gtttaggctgacaaacggacttatgtggatgtt

SEQ ID NO: 371653 - DNA, 33 bp, Homo sapien
aaacgacagggttatacgactaggctactgggg

SEQ ID NO: 371654 - DNA, 33 bp, Homo sapien
aaacgacagggttatatgactaggctactgggg

SEQ ID NO: 371655 - DNA, 33 bp, Homo sapien
agttgtattttccatcacaaaagtaatgcttac

SEQ ID NO: 371656 - DNA, 33 bp, Homo sapien
agttgtattttccatcgcaaaagtaatgcttac

SEQ ID NO: 371657 - DNA, 33 bp, Homo sapien
ctttcccgaggctccaataagcacgaatcacag

SEQ ID NO: 371658 - DNA, 33 bp, Homo sapien
ctttcccgaggctccagtaagcacgaatcacag

SEQ ID NO: 371659 - DNA, 33 bp, Homo sapien
aggcaaaagtgcttaagctttagaaatggttta

SEQ ID NO: 371660 - DNA, 33 bp, Homo sapien
aggcaaaagtgcttaatctttagaaatggttta

SEQ ID NO: 371661 - DNA, 33 bp, Homo sapien
tctccataacacttctcacccaacatagtccaa

SEQ ID NO: 371662 - DNA, 33 bp, Homo sapien
tctccataacacttctgacccaacatagtccaa

SEQ ID NO: 371663 - DNA, 33 bp, Homo sapien
gaaaccagggggcaagaacccattggtctcctt

SEQ ID NO: 371664 - DNA, 33 bp, Homo sapien
gaaaccagggggcaagcacccattggtctcctt

SEQ ID NO: 371665 - DNA, 33 bp, Homo sapien
cctctctgaacaaaaccggagacatctaccagg

SEQ ID NO: 371666 - DNA, 33 bp, Homo sapien
cctctctgaacaaaactggagacatctaccagg

SEQ ID NO: 371667 - DNA, 33 bp, Homo sapien
gcagaaatacttgcaccataactgattccaaaa

SEQ ID NO: 371668 - DNA, 33 bp, Homo sapien
gcagaaatacttgcactataactgattccaaaa

SEQ ID NO: 371669 - DNA, 33 bp, Homo sapien
tactcaatgtctctaaacctggcacaaaacaaa

SEQ ID NO: 371670 - DNA, 33 bp, Homo sapien
tactcaatgtctctaaccctggcacaaaacaaa

SEQ ID NO: 371671 - DNA, 33 bp, Homo sapien
tgtcagtgaagagagaagagaagtcctaggatt

SEQ ID NO: 371672 - DNA, 33 bp, Homo sapien
tgtcagtgaagagagacgagaagtcctaggatt

SEQ ID NO: 371673 - DNA, 33 bp, Homo sapien
caaggaatgtgtgaaccgatgcacgtaaagtgc

SEQ ID NO: 371674 - DNA, 33 bp, Homo sapien
caaggaatgtgtgaacggatgcacgtaaagtgc

SEQ ID NO: 371675 - DNA, 33 bp, Homo sapien
agacagacttgggaaacgttcaacggaggaggg

SEQ ID NO: 371676 - DNA, 33 bp, Homo sapien
agacagacttgggaaatgttcaacggaggaggg

SEQ ID NO: 371677 - DNA, 33 bp, Homo sapien
taaacctgcctcaaacagagatttctctttggt

SEQ ID NO: 371678 - DNA, 33 bp, Homo sapien
taaacctgcctcaaacggagatttctctttggt

SEQ ID NO: 371679 - DNA, 33 bp, Homo sapien
attggtgttgcttaggcagggctgaggacaagg

SEQ ID NO: 371680 - DNA, 33 bp, Homo sapien
attggtgttgcttaggtagggctgaggacaagg

SEQ ID NO: 371681 - DNA, 33 bp, Homo sapien
ctttctcatatcagacacagggcccagtcaacc

SEQ ID NO: 371682 - DNA, 33 bp, Homo sapien
ctttctcatatcagacgcagggcccagtcaacc

SEQ ID NO: 371683 - DNA, 33 bp, Homo sapien
tgtcattggcttcccaacttattgcttcagtgt

SEQ ID NO: 371684 - DNA, 33 bp, Homo sapien
tgtcattggcttcccatcttattgcttcagtgt

SEQ ID NO: 371685 - DNA, 33 bp, Homo sapien
gtgaggatcaaatgaccccctacctttctgtgc

SEQ ID NO: 371686 - DNA, 33 bp, Homo sapien
gtgaggatcaaatgactccctacctttctgtgc

SEQ ID NO: 371687 - DNA, 33 bp, Homo sapien
ctgggggaagaatagaaacatgcaatagggtct

SEQ ID NO: 371688 - DNA, 33 bp, Homo sapien
ctgggggaagaatagatacatgcaatagggtct

SEQ ID NO: 371689 - DNA, 33 bp, Homo sapien
ctaggctgtaatgagacgtctagaagtggtgtc

SEQ ID NO: 371690 - DNA, 33 bp, Homo sapien
ctaggctgtaatgagatgtctagaagtggtgtc

SEQ ID NO: 371691 - DNA, 33 bp, Homo sapien
aaataaacataatcaacaaaggaagcggctttg

SEQ ID NO: 371692 - DNA, 33 bp, Homo sapien
aaataaacataatcaataaaggaagcggctttg

SEQ ID NO: 371693 - DNA, 33 bp, Homo sapien
taagtcataaaggatggatagcacacaaaagac

SEQ ID NO: 371694 - DNA, 33 bp, Homo sapien
taagtcataaaggatgtatagcacacaaaagac

SEQ ID NO: 371695 - DNA, 33 bp, Homo sapien
ttttcccataggattaaccagggtctgtttctg

SEQ ID NO: 371696 - DNA, 33 bp, Homo sapien
ttttcccataggattagccagggtctgtttctg

SEQ ID NO: 371697 - DNA, 33 bp, Homo sapien
gaaccttccatgttccagcatcaactattaacc

SEQ ID NO: 371698 - DNA, 33 bp, Homo sapien
gaaccttccatgttccggcatcaactattaacc

SEQ ID NO: 371699 - DNA, 33 bp, Homo sapien
gaaaaagattctacagccgagcacagtggctca

SEQ ID NO: 371700 - DNA, 33 bp, Homo sapien
gaaaaagattctacaggcgagcacagtggctca

SEQ ID NO: 371701 - DNA, 33 bp, Homo sapien
tttccagaggtttggacgattatgcggggagca

SEQ ID NO: 371702 - DNA, 33 bp, Homo sapien
tttccagaggtttggatgattatgcggggagca

SEQ ID NO: 371703 - DNA, 33 bp, Homo sapien
cagcaatatgaatgtacataacaccactgaact

SEQ ID NO: 371704 - DNA, 33 bp, Homo sapien
cagcaatatgaatgtatataacaccactgaact

SEQ ID NO: 371705 - DNA, 33 bp, Homo sapien
tatataaatacacatacgctatgctaatctaca

SEQ ID NO: 371706 - DNA, 33 bp, Homo sapien
tatataaatacacatatgctatgctaatctaca

SEQ ID NO: 371707 - DNA, 33 bp, Homo sapien
acactcatttcacaacaacttcagctggggaag

SEQ ID NO: 371708 - DNA, 33 bp, Homo sapien
acactcatttcacaaccacttcagctggggaag

SEQ ID NO: 371709 - DNA, 33 bp, Homo sapien
caggcaaagaggcaacaaacggaagggggtcct

SEQ ID NO: 371710 - DNA, 33 bp, Homo sapien
caggcaaagaggcaaccaacggaagggggtcct

SEQ ID NO: 371711 - DNA, 33 bp, Homo sapien
atttgctttgaccaggaaatatggcagaagtga

SEQ ID NO: 371712 - DNA, 33 bp, Homo sapien
atttgctttgaccagggaatatggcagaagtga

SEQ ID NO: 371713 - DNA, 33 bp, Homo sapien
cccaaatgagtgctcaacatttacacctgataa

SEQ ID NO: 371714 - DNA, 33 bp, Homo sapien
cccaaatgagtgctcagcatttacacctgataa

SEQ ID NO: 371715 - DNA, 33 bp, Homo sapien
acttagtgcacacgcaacactgaatactaccac

SEQ ID NO: 371716 - DNA, 33 bp, Homo sapien
acttagtgcacacgcatcactgaatactaccac

SEQ ID NO: 371717 - DNA, 33 bp, Homo sapien
gaaactgaagattaaaaagaaagatgcctaaga

SEQ ID NO: 371718 - DNA, 33 bp, Homo sapien
gaaactgaagattaaagagaaagatgcctaaga

SEQ ID NO: 371719 - DNA, 33 bp, Homo sapien
tctgcaactctggctaacatcattgataaattg

SEQ ID NO: 371720 - DNA, 33 bp, Homo sapien
tctgcaactctggctagcatcattgataaattg

SEQ ID NO: 371721 - DNA, 33 bp, Homo sapien
caccacagttcaactacctcttccctgcttccc

SEQ ID NO: 371722 - DNA, 33 bp, Homo sapien
caccacagttcaactagctcttccctgcttccc

SEQ ID NO: 371723 - DNA, 33 bp, Homo sapien
tgaattcttctatgtacgttttttaaactgtgg

SEQ ID NO: 371724 - DNA, 33 bp, Homo sapien
tgaattcttctatgtatgttttttaaactgtgg

SEQ ID NO: 371725 - DNA, 33 bp, Homo sapien
tataataggtcaagaacaccatgaagaaagcag

SEQ ID NO: 371726 - DNA, 33 bp, Homo sapien
tataataggtcaagaataccatgaagaaagcag

SEQ ID NO: 371727 - DNA, 33 bp, Homo sapien
tctttaccttccactaagatttgctgctattct

SEQ ID NO: 371728 - DNA, 33 bp, Homo sapien
tctttaccttccactaggatttgctgctattct

SEQ ID NO: 371729 - DNA, 33 bp, Homo sapien
ttagtctttgtgtttccactctccatcctcctc

SEQ ID NO: 371730 - DNA, 33 bp, Homo sapien
ttagtctttgtgtttctactctccatcctcctc

SEQ ID NO: 371731 - DNA, 33 bp, Homo sapien
tgtgaaaagacaggaagtacttgaagggtgggg

SEQ ID NO: 371732 - DNA, 33 bp, Homo sapien
tgtgaaaagacaggaattacttgaagggtgggg

SEQ ID NO: 371733 - DNA, 33 bp, Homo sapien
ttgtaaattgccttcactagaaaatgttaatta

SEQ ID NO: 371734 - DNA, 33 bp, Homo sapien
ttgtaaattgccttcattagaaaatgttaatta

SEQ ID NO: 371735 - DNA, 33 bp, Homo sapien
aaattctagtgacttacaatattcgaagtttag

SEQ ID NO: 371736 - DNA, 33 bp, Homo sapien
aaattctagtgacttagaatattcgaagtttag

SEQ ID NO: 371737 - DNA, 33 bp, Homo sapien
tacagccacaaagcaaactgtttctgactgtgt

SEQ ID NO: 371738 - DNA, 33 bp, Homo sapien
tacagccacaaagcaagctgtttctgactgtgt

SEQ ID NO: 371739 - DNA, 33 bp, Homo sapien
ggctctagggaggaataaagagtggtcaagtgc

SEQ ID NO: 371740 - DNA, 33 bp, Homo sapien
ggctctagggaggaatgaagagtggtcaagtgc

SEQ ID NO: 371741 - DNA, 33 bp, Homo sapien
gactgaaatgaaatcaatgagaacatggggact

SEQ ID NO: 371742 - DNA, 33 bp, Homo sapien
gactgaaatgaaatcagtgagaacatggggact

SEQ ID NO: 371743 - DNA, 33 bp, Homo sapien
cagagacagagagacaagggtagatagcaaggt

SEQ ID NO: 371744 - DNA, 33 bp, Homo sapien
cagagacagagagacatgggtagatagcaaggt

SEQ ID NO: 371745 - DNA, 33 bp, Homo sapien
aaggagaagccgagagaacacaaggggagaccc

SEQ ID NO: 371746 - DNA, 33 bp, Homo sapien
aaggagaagccgagaggacacaaggggagaccc

SEQ ID NO: 371747 - DNA, 33 bp, Homo sapien
attcattaaaactgcactagtctaaggagtccc

SEQ ID NO: 371748 - DNA, 33 bp, Homo sapien
attcattaaaactgcattagtctaaggagtccc

SEQ ID NO: 371749 - DNA, 33 bp, Homo sapien
aattctggcatttaaaccgattttgtggttttt

SEQ ID NO: 371750 - DNA, 33 bp, Homo sapien
aattctggcatttaaagcgattttgtggttttt

SEQ ID NO: 371751 - DNA, 33 bp, Homo sapien
gggctgtttccacagacgtttattttttatttt

SEQ ID NO: 371752 - DNA, 33 bp, Homo sapien
gggctgtttccacagatgtttattttttatttt

SEQ ID NO: 371753 - DNA, 33 bp, Homo sapien
tcagtcagtgttgctacaaatctaggcacctgt

SEQ ID NO: 371754 - DNA, 33 bp, Homo sapien
tcagtcagtgttgctataaatctaggcacctgt

SEQ ID NO: 371755 - DNA, 33 bp, Homo sapien
tgatatttattgatgaaccccttttggttaagt

SEQ ID NO: 371756 - DNA, 33 bp, Homo sapien
tgatatttattgatgagccccttttggttaagt

SEQ ID NO: 371757 - DNA, 33 bp, Homo sapien
caaacctggctgagcaaagagccacccggatga

SEQ ID NO: 371758 - DNA, 33 bp, Homo sapien
caaacctggctgagcacagagccacccggatga

SEQ ID NO: 371759 - DNA, 33 bp, Homo sapien
tcccagtcttcatttacatgctaggattttgca

SEQ ID NO: 371760 - DNA, 33 bp, Homo sapien
tcccagtcttcatttatatgctaggattttgca

SEQ ID NO: 371761 - DNA, 33 bp, Homo sapien
ctgttggtccttaccactgcaatacggcaaaaa

SEQ ID NO: 371762 - DNA, 33 bp, Homo sapien
ctgttggtccttaccattgcaatacggcaaaaa

SEQ ID NO: 371763 - DNA, 33 bp, Homo sapien
caatgcttagtttccaaaaaggagtttaaggct

SEQ ID NO: 371764 - DNA, 33 bp, Homo sapien
caatgcttagtttccagaaaggagtttaaggct

SEQ ID NO: 371765 - DNA, 33 bp, Homo sapien
tgttctccactataaaaggagaaaaatgatcat

SEQ ID NO: 371766 - DNA, 33 bp, Homo sapien
tgttctccactataaagggagaaaaatgatcat

SEQ ID NO: 371767 - DNA, 33 bp, Homo sapien
atctcagtggtggaaagtcctactgatttgagg

SEQ ID NO: 371768 - DNA, 33 bp, Homo sapien
atctcagtggtggaaattcctactgatttgagg

SEQ ID NO: 371769 - DNA, 33 bp, Homo sapien
taactcttgtcctgaccatatgcatctatgtat

SEQ ID NO: 371770 - DNA, 33 bp, Homo sapien
taactcttgtcctgactatatgcatctatgtat

SEQ ID NO: 371771 - DNA, 33 bp, Homo sapien
agaagccaagcctccaagaacaaaacagaagtg

SEQ ID NO: 371772 - DNA, 33 bp, Homo sapien
agaagccaagcctccaggaacaaaacagaagtg

SEQ ID NO: 371773 - DNA, 33 bp, Homo sapien
atctgaaatgtgtgaaaaaatagtaaatattta

SEQ ID NO: 371774 - DNA, 33 bp, Homo sapien
atctgaaatgtgtgaacaaatagtaaatattta

SEQ ID NO: 371775 - DNA, 33 bp, Homo sapien
ctacacccagcttgacgcatttactcttcacaa

SEQ ID NO: 371776 - DNA, 33 bp, Homo sapien
ctacacccagcttgactcatttactcttcacaa

SEQ ID NO: 371777 - DNA, 33 bp, Homo sapien
ccagggctactgcgggaattaaatgaggtatga

SEQ ID NO: 371778 - DNA, 33 bp, Homo sapien
ccagggctactgcggggattaaatgaggtatga

SEQ ID NO: 371779 - DNA, 33 bp, Homo sapien
tgatgaacaagactcacgagaccaggcatggta

SEQ ID NO: 371780 - DNA, 33 bp, Homo sapien
tgatgaacaagactcatgagaccaggcatggta

SEQ ID NO: 371781 - DNA, 33 bp, Homo sapien
attattgatttatatgcaattgattcctaactc

SEQ ID NO: 371782 - DNA, 33 bp, Homo sapien
attattgatttatatgtaattgattcctaactc

SEQ ID NO: 371783 - DNA, 33 bp, Homo sapien
tggagctccaagtctacactttcacagcgatgt

SEQ ID NO: 371784 - DNA, 33 bp, Homo sapien
tggagctccaagtctatactttcacagcgatgt

SEQ ID NO: 371785 - DNA, 33 bp, Homo sapien
aggcactagctcatcagaaatattagctattac

SEQ ID NO: 371786 - DNA, 33 bp, Homo sapien
aggcactagctcatcataaatattagctattac

SEQ ID NO: 371787 - DNA, 33 bp, Homo sapien
ccagctaccagagaaaagggagtggacgctggg

SEQ ID NO: 371788 - DNA, 33 bp, Homo sapien
ccagctaccagagaaacgggagtggacgctggg

SEQ ID NO: 371789 - DNA, 33 bp, Homo sapien
ggtttaggaaaagaggaatttattggcttgtac

SEQ ID NO: 371790 - DNA, 33 bp, Homo sapien
ggtttaggaaaagaggcatttattggcttgtac

SEQ ID NO: 371791 - DNA, 33 bp, Homo sapien
aggagggttacaagatgaaaatgtgctgagtct

SEQ ID NO: 371792 - DNA, 33 bp, Homo sapien
aggagggttacaagattaaaatgtgctgagtct

SEQ ID NO: 371793 - DNA, 33 bp, Homo sapien
gccagcataacacactcaaatgaggaatgtgtt

SEQ ID NO: 371794 - DNA, 33 bp, Homo sapien
gccagcataacacacttaaatgaggaatgtgtt

SEQ ID NO: 371795 - DNA, 33 bp, Homo sapien
tggattatggcaggaccatattccaaaatctta

SEQ ID NO: 371796 - DNA, 33 bp, Homo sapien
tggattatggcaggactatattccaaaatctta

SEQ ID NO: 371797 - DNA, 33 bp, Homo sapien
ctcatcaaaagaatgcacctaatttattccctg

SEQ ID NO: 371798 - DNA, 33 bp, Homo sapien
ctcatcaaaagaatgcgcctaatttattccctg

SEQ ID NO: 371799 - DNA, 33 bp, Homo sapien
tggaggaaaaatgaaacgcccagatcgacagcc

SEQ ID NO: 371800 - DNA, 33 bp, Homo sapien
tggaggaaaaatgaaatgcccagatcgacagcc

SEQ ID NO: 371801 - DNA, 33 bp, Homo sapien
gttccatctacagcagaagcaaatgaggcaaga

SEQ ID NO: 371802 - DNA, 33 bp, Homo sapien
gttccatctacagcaggagcaaatgaggcaaga

SEQ ID NO: 371803 - DNA, 33 bp, Homo sapien
gtttggaagcaattcactctgacctttacaagc

SEQ ID NO: 371804 - DNA, 33 bp, Homo sapien
gtttggaagcaattcattctgacctttacaagc

SEQ ID NO: 371805 - DNA, 33 bp, Homo sapien
gactcaagagacctcaagtttcctagtcttctt

SEQ ID NO: 371806 - DNA, 33 bp, Homo sapien
gactcaagagacctcacgtttcctagtcttctt

SEQ ID NO: 371807 - DNA, 33 bp, Homo sapien
ctcacctgcagatctcactggacacgaagaggg

SEQ ID NO: 371808 - DNA, 33 bp, Homo sapien
ctcacctgcagatctcgctggacacgaagaggg

SEQ ID NO: 371809 - DNA, 33 bp, Homo sapien
ttgtggtacgctgacacaacagaacaaaccaat

SEQ ID NO: 371810 - DNA, 33 bp, Homo sapien
ttgtggtacgctgacataacagaacaaaccaat

SEQ ID NO: 371811 - DNA, 33 bp, Homo sapien
cattcagttaaaaagccctgcagaagattctac

SEQ ID NO: 371812 - DNA, 33 bp, Homo sapien
cattcagttaaaaagctctgcagaagattctac

SEQ ID NO: 371813 - DNA, 33 bp, Homo sapien
gctcatcattatactcccagggcataaactgta

SEQ ID NO: 371814 - DNA, 33 bp, Homo sapien
gctcatcattatactctcagggcataaactgta

SEQ ID NO: 371815 - DNA, 33 bp, Homo sapien
gtagcgtcctgggagaagtgaaggatgtaaggg

SEQ ID NO: 371816 - DNA, 33 bp, Homo sapien
gtagcgtcctgggagaggtgaaggatgtaaggg

SEQ ID NO: 371817 - DNA, 33 bp, Homo sapien
ggcagcaggcctattacaaaaactagaaatgag

SEQ ID NO: 371818 - DNA, 33 bp, Homo sapien
ggcagcaggcctattagaaaaactagaaatgag

SEQ ID NO: 371819 - DNA, 33 bp, Homo sapien
tgctgggaaggaccccacacaacctttagtgct

SEQ ID NO: 371820 - DNA, 33 bp, Homo sapien
tgctgggaaggaccccgcacaacctttagtgct

SEQ ID NO: 371821 - DNA, 33 bp, Homo sapien
caggagtatctgaaggacatcatgcaaggtcag

SEQ ID NO: 371822 - DNA, 33 bp, Homo sapien
caggagtatctgaaggtcatcatgcaaggtcag

SEQ ID NO: 371823 - DNA, 33 bp, Homo sapien
tggacttagttctggacggggcagagatctaac

SEQ ID NO: 371824 - DNA, 33 bp, Homo sapien
tggacttagttctggatggggcagagatctaac

SEQ ID NO: 371825 - DNA, 33 bp, Homo sapien
taaccacatgagagaaccatgaatgttaccatg

SEQ ID NO: 371826 - DNA, 33 bp, Homo sapien
taaccacatgagagaagcatgaatgttaccatg

SEQ ID NO: 371827 - DNA, 33 bp, Homo sapien
aagatgattacctttcccttctggtaagcttct

SEQ ID NO: 371828 - DNA, 33 bp, Homo sapien
aagatgattacctttctcttctggtaagcttct

SEQ ID NO: 371829 - DNA, 33 bp, Homo sapien
gggcccagtgatgccgacgacccctccagaatg

SEQ ID NO: 371830 - DNA, 33 bp, Homo sapien
gggcccagtgatgccggcgacccctccagaatg

SEQ ID NO: 371831 - DNA, 33 bp, Homo sapien
gcaactaagaaataccaccagatgtcctctgcc

SEQ ID NO: 371832 - DNA, 33 bp, Homo sapien
gcaactaagaaataccgccagatgtcctctgcc

SEQ ID NO: 371833 - DNA, 33 bp, Homo sapien
aatctgatggataaaccgcttgctaaatatttt

SEQ ID NO: 371834 - DNA, 33 bp, Homo sapien
aatctgatggataaactgcttgctaaatatttt

SEQ ID NO: 371835 - DNA, 33 bp, Homo sapien
accccaaacagaggaactgaatcagcaagagaa

SEQ ID NO: 371836 - DNA, 33 bp, Homo sapien
accccaaacagaggaattgaatcagcaagagaa

SEQ ID NO: 371837 - DNA, 33 bp, Homo sapien
ctctgcaatgattagaatcccaagaaaaggtca

SEQ ID NO: 371838 - DNA, 33 bp, Homo sapien
ctctgcaatgattagattcccaagaaaaggtca

SEQ ID NO: 371839 - DNA, 33 bp, Homo sapien
caagatgcacctattacccatgtatcacccata

SEQ ID NO: 371840 - DNA, 33 bp, Homo sapien
caagatgcacctattatccatgtatcacccata

SEQ ID NO: 371841 - DNA, 33 bp, Homo sapien
aaagaagaaaaccataagatcattgtagttatc

SEQ ID NO: 371842 - DNA, 33 bp, Homo sapien
aaagaagaaaaccatacgatcattgtagttatc

SEQ ID NO: 371843 - DNA, 33 bp, Homo sapien
gcagatagttagagtcaatttggattgaatgta

SEQ ID NO: 371844 - DNA, 33 bp, Homo sapien
gcagatagttagagtcgatttggattgaatgta

SEQ ID NO: 371845 - DNA, 33 bp, Homo sapien
tagaaaatgagaattgcacagctcttaaggata

SEQ ID NO: 371846 - DNA, 33 bp, Homo sapien
tagaaaatgagaattgtacagctcttaaggata

SEQ ID NO: 371847 - DNA, 33 bp, Homo sapien
taattttattaacatccatagctgaagcagtgc

SEQ ID NO: 371848 - DNA, 33 bp, Homo sapien
taattttattaacatctatagctgaagcagtgc

SEQ ID NO: 371849 - DNA, 33 bp, Homo sapien
aagaaacttaataaacactacacatttagctca

SEQ ID NO: 371850 - DNA, 33 bp, Homo sapien
aagaaacttaataaaccctacacatttagctca

SEQ ID NO: 371851 - DNA, 33 bp, Homo sapien
gtagaaattctaacccaggaagtctgattccaa

SEQ ID NO: 371852 - DNA, 33 bp, Homo sapien
gtagaaattctaacccgggaagtctgattccaa

SEQ ID NO: 371853 - DNA, 33 bp, Homo sapien
tatgcagcgattataagtcaggcataaacaagc

SEQ ID NO: 371854 - DNA, 33 bp, Homo sapien
tatgcagcgattataattcaggcataaacaagc

SEQ ID NO: 371855 - DNA, 33 bp, Homo sapien
tgtgattgcttgagagccagactgcctagattt

SEQ ID NO: 371856 - DNA, 33 bp, Homo sapien
tgtgattgcttgagagtcagactgcctagattt

SEQ ID NO: 371857 - DNA, 33 bp, Homo sapien
aaaggaccttaagaaactcaggctgactatgag

SEQ ID NO: 371858 - DNA, 33 bp, Homo sapien
aaaggaccttaagaaattcaggctgactatgag

SEQ ID NO: 371859 - DNA, 33 bp, Homo sapien
ccttcctacaagatcgccctcaaaccctgagca

SEQ ID NO: 371860 - DNA, 33 bp, Homo sapien
ccttcctacaagatcgtcctcaaaccctgagca

SEQ ID NO: 371861 - DNA, 33 bp, Homo sapien
tatatcatattaattcacaccataatcctgcaa

SEQ ID NO: 371862 - DNA, 33 bp, Homo sapien
tatatcatattaattctcaccataatcctgcaa

SEQ ID NO: 371863 - DNA, 33 bp, Homo sapien
ccttgttgatgcttctcaagtctccatgtctaa

SEQ ID NO: 371864 - DNA, 33 bp, Homo sapien
ccttgttgatgcttctgaagtctccatgtctaa

SEQ ID NO: 371865 - DNA, 33 bp, Homo sapien
tagagaaaacacagggcccagcgacgtgactca

SEQ ID NO: 371866 - DNA, 33 bp, Homo sapien
tagagaaaacacagggtccagcgacgtgactca

SEQ ID NO: 371867 - DNA, 33 bp, Homo sapien
ttacagtcctggtaaaatgaatccctggttact

SEQ ID NO: 371868 - DNA, 33 bp, Homo sapien
ttacagtcctggtaaagtgaatccctggttact

SEQ ID NO: 371869 - DNA, 33 bp, Homo sapien
tccaaaatatttatcacgggtgttggatgatta

SEQ ID NO: 371870 - DNA, 33 bp, Homo sapien
tccaaaatatttatcatgggtgttggatgatta

SEQ ID NO: 371871 - DNA, 33 bp, Homo sapien
ggttggatatcagggtaaaatatagacaagagt

SEQ ID NO: 371872 - DNA, 33 bp, Homo sapien
ggttggatatcagggtgaaatatagacaagagt

SEQ ID NO: 371873 - DNA, 33 bp, Homo sapien
aaagccaaatccagtcaccctcagttcctctct

SEQ ID NO: 371874 - DNA, 33 bp, Homo sapien
aaagccaaatccagtcgccctcagttcctctct

SEQ ID NO: 371875 - DNA, 33 bp, Homo sapien
aaaagatgatgttgacaatcaccactgtaatgg

SEQ ID NO: 371876 - DNA, 33 bp, Homo sapien
aaaagatgatgttgacgatcaccactgtaatgg

SEQ ID NO: 371877 - DNA, 33 bp, Homo sapien
agaactctgaaataataaattccttttgtgtga

SEQ ID NO: 371878 - DNA, 33 bp, Homo sapien
agaactctgaaataattaattccttttgtgtga

SEQ ID NO: 371879 - DNA, 33 bp, Homo sapien
tgtcctgcttattgggcacatcaccagtgccta

SEQ ID NO: 371880 - DNA, 33 bp, Homo sapien
tgtcctgcttattgggtacatcaccagtgccta

SEQ ID NO: 371881 - DNA, 33 bp, Homo sapien
ctctcatcacagccacagtgacaaaggccaggc

SEQ ID NO: 371882 - DNA, 33 bp, Homo sapien
ctctcatcacagccaccgtgacaaaggccaggc

SEQ ID NO: 371883 - DNA, 33 bp, Homo sapien
accattacatttttgaacacttttctactgacc

SEQ ID NO: 371884 - DNA, 33 bp, Homo sapien
accattacatttttgagcacttttctactgacc

SEQ ID NO: 371885 - DNA, 33 bp, Homo sapien
ttgtgattatgccagacagaacaatgaccagca

SEQ ID NO: 371886 - DNA, 33 bp, Homo sapien
ttgtgattatgccagagagaacaatgaccagca

SEQ ID NO: 371887 - DNA, 33 bp, Homo sapien
gtggtatgtttctaccactaaccatatgcaggg

SEQ ID NO: 371888 - DNA, 33 bp, Homo sapien
gtggtatgtttctaccgctaaccatatgcaggg

SEQ ID NO: 371889 - DNA, 33 bp, Homo sapien
gattatacttgtcacactgagttttgtagaggg

SEQ ID NO: 371890 - DNA, 33 bp, Homo sapien
gattatacttgtcacattgagttttgtagaggg

SEQ ID NO: 371891 - DNA, 33 bp, Homo sapien
gaggggctataaaaccaggagaagaggtggtgg

SEQ ID NO: 371892 - DNA, 33 bp, Homo sapien
gaggggctataaaaccgggagaagaggtggtgg

SEQ ID NO: 371893 - DNA, 33 bp, Homo sapien
tgacgctattgtgttaactgccaggttcctctt

SEQ ID NO: 371894 - DNA, 33 bp, Homo sapien
tgacgctattgtgttatctgccaggttcctctt

SEQ ID NO: 371895 - DNA, 33 bp, Homo sapien
gacaacgaattataaaagctgtgaagatgctac

SEQ ID NO: 371896 - DNA, 33 bp, Homo sapien
gacaacgaattataaatgctgtgaagatgctac

SEQ ID NO: 371897 - DNA, 33 bp, Homo sapien
tcactgaggtcttgctcaaaggccatttcctcc

SEQ ID NO: 371898 - DNA, 33 bp, Homo sapien
tcactgaggtcttgcttaaaggccatttcctcc

SEQ ID NO: 371899 - DNA, 33 bp, Homo sapien
atttgggttctgaaacactgtcactctagtctc

SEQ ID NO: 371900 - DNA, 33 bp, Homo sapien
atttgggttctgaaactctgtcactctagtctc

SEQ ID NO: 371901 - DNA, 33 bp, Homo sapien
tctaaaagcacttcaaagggtcaaagggcaacc

SEQ ID NO: 371902 - DNA, 33 bp, Homo sapien
tctaaaagcacttcaaggggtcaaagggcaacc

SEQ ID NO: 371903 - DNA, 33 bp, Homo sapien
aggagggaactccatacagacattttacctatc

SEQ ID NO: 371904 - DNA, 33 bp, Homo sapien
aggagggaactccatagagacattttacctatc

SEQ ID NO: 371905 - DNA, 33 bp, Homo sapien
aaaatgtctttggagaaaacttctgcctgataa

SEQ ID NO: 371906 - DNA, 33 bp, Homo sapien
aaaatgtctttggagagaacttctgcctgataa

SEQ ID NO: 371907 - DNA, 33 bp, Homo sapien
tgtgtctttcttcttacgctgtgttaatgtgtt

SEQ ID NO: 371908 - DNA, 33 bp, Homo sapien
tgtgtctttcttcttatgctgtgttaatgtgtt

SEQ ID NO: 371909 - DNA, 33 bp, Homo sapien
tgtagggtttctggggaagtaattgaggttata

SEQ ID NO: 371910 - DNA, 33 bp, Homo sapien
tgtagggtttctggggtagtaattgaggttata

SEQ ID NO: 371911 - DNA, 33 bp, Homo sapien
tgtttcaggcgagaccacaactgtgagccatga

SEQ ID NO: 371912 - DNA, 33 bp, Homo sapien
tgtttcaggcgagaccgcaactgtgagccatga

SEQ ID NO: 371913 - DNA, 33 bp, Homo sapien
atgatactttttaaaaattaaccagataatgtc

SEQ ID NO: 371914 - DNA, 33 bp, Homo sapien
atgatactttttaaaagttaaccagataatgtc

SEQ ID NO: 371915 - DNA, 33 bp, Homo sapien
ggtaataacaatcaagacaggatatttttatta

SEQ ID NO: 371916 - DNA, 33 bp, Homo sapien
ggtaataacaatcaaggcaggatatttttatta

SEQ ID NO: 371917 - DNA, 33 bp, Homo sapien
ggaaaataacattcacaattcacataactgttg

SEQ ID NO: 371918 - DNA, 33 bp, Homo sapien
ggaaaataacattcaccattcacataactgttg

SEQ ID NO: 371919 - DNA, 33 bp, Homo sapien
agtagcttgtttggaaaggtgaagttctgtgtg

SEQ ID NO: 371920 - DNA, 33 bp, Homo sapien
agtagcttgtttggaatggtgaagttctgtgtg

SEQ ID NO: 371921 - DNA, 33 bp, Homo sapien
ccatacagtaccctgcaaacatttattacacac

SEQ ID NO: 371922 - DNA, 33 bp, Homo sapien
ccatacagtaccctgcgaacatttattacacac

SEQ ID NO: 371923 - DNA, 33 bp, Homo sapien
ccaatgtgattaactaacttgccattttggttc

SEQ ID NO: 371924 - DNA, 33 bp, Homo sapien
ccaatgtgattaactagcttgccattttggttc

SEQ ID NO: 371925 - DNA, 33 bp, Homo sapien
ttactgcacctagtgaaactattcaaaaataga

SEQ ID NO: 371926 - DNA, 33 bp, Homo sapien
ttactgcacctagtgagactattcaaaaataga

SEQ ID NO: 371927 - DNA, 33 bp, Homo sapien
gatgttcaataaacagaaagctattatcatcat

SEQ ID NO: 371928 - DNA, 33 bp, Homo sapien
gatgttcaataaacagtaagctattatcatcat

SEQ ID NO: 371929 - DNA, 33 bp, Homo sapien
agttcataaggttgaccgtaaactgagcttcct

SEQ ID NO: 371930 - DNA, 33 bp, Homo sapien
agttcataaggttgactgtaaactgagcttcct

SEQ ID NO: 371931 - DNA, 33 bp, Homo sapien
tgtcacaagactcttacggcaggcaagattcca

SEQ ID NO: 371932 - DNA, 33 bp, Homo sapien
tgtcacaagactcttatggcaggcaagattcca

SEQ ID NO: 371933 - DNA, 33 bp, Homo sapien
aatctaaagatctgtacgtcttattttggtgtg

SEQ ID NO: 371934 - DNA, 33 bp, Homo sapien
aatctaaagatctgtatgtcttattttggtgtg

SEQ ID NO: 371935 - DNA, 33 bp, Homo sapien
actgtgaagggatttcaaactttccttgttttt

SEQ ID NO: 371936 - DNA, 33 bp, Homo sapien
actgtgaagggatttcgaactttccttgttttt

SEQ ID NO: 371937 - DNA, 33 bp, Homo sapien
tgctactcaaagagtcacccttggaccaggagt

SEQ ID NO: 371938 - DNA, 33 bp, Homo sapien
tgctactcaaagagtcgcccttggaccaggagt

SEQ ID NO: 371939 - DNA, 33 bp, Homo sapien
agtgcctgcagcaatccgaggtgtggagggcac

SEQ ID NO: 371940 - DNA, 33 bp, Homo sapien
agtgcctgcagcaatctgaggtgtggagggcac

SEQ ID NO: 371941 - DNA, 33 bp, Homo sapien
accacataagcttctacctcaggttgtgacctc

SEQ ID NO: 371942 - DNA, 33 bp, Homo sapien
accacataagcttctagctcaggttgtgacctc

SEQ ID NO: 371943 - DNA, 33 bp, Homo sapien
gtcgttgcactgtttccaccaaatcccaccagg

SEQ ID NO: 371944 - DNA, 33 bp, Homo sapien
gtcgttgcactgtttctaccaaatcccaccagg

SEQ ID NO: 371945 - DNA, 33 bp, Homo sapien
gcaacgacatgctgtgaaagtgatgatttctcc

SEQ ID NO: 371946 - DNA, 33 bp, Homo sapien
gcaacgacatgctgtgtaagtgatgatttctcc

SEQ ID NO: 371947 - DNA, 33 bp, Homo sapien
aattccagccagataccatgaattgaaaaggaa

SEQ ID NO: 371948 - DNA, 33 bp, Homo sapien
aattccagccagatacgatgaattgaaaaggaa

SEQ ID NO: 371949 - DNA, 33 bp, Homo sapien
ccaactgtaaatggaaagtgagtatctctggct

SEQ ID NO: 371950 - DNA, 33 bp, Homo sapien
ccaactgtaaatggaatgtgagtatctctggct

SEQ ID NO: 371951 - DNA, 33 bp, Homo sapien
ggctcaggtgagaggaccattcaaggccaggag

SEQ ID NO: 371952 - DNA, 33 bp, Homo sapien
ggctcaggtgagaggatcattcaaggccaggag

SEQ ID NO: 371953 - DNA, 33 bp, Homo sapien
cagcgaaggttgaaataagcagtccagggtagc

SEQ ID NO: 371954 - DNA, 33 bp, Homo sapien
cagcgaaggttgaaatgagcagtccagggtagc

SEQ ID NO: 371955 - DNA, 33 bp, Homo sapien
agtgtctggtaatgagacataagttaaatgcca

SEQ ID NO: 371956 - DNA, 33 bp, Homo sapien
agtgtctggtaatgaggcataagttaaatgcca

SEQ ID NO: 371957 - DNA, 33 bp, Homo sapien
taaccagaatcaaaacactcaataaccaaataa

SEQ ID NO: 371958 - DNA, 33 bp, Homo sapien
taaccagaatcaaaaccctcaataaccaaataa

SEQ ID NO: 371959 - DNA, 33 bp, Homo sapien
gacaggtagcaaggacagtcattcctcattaaa

SEQ ID NO: 371960 - DNA, 33 bp, Homo sapien
gacaggtagcaaggactgtcattcctcattaaa

SEQ ID NO: 371961 - DNA, 33 bp, Homo sapien
tattatctgagaataaagatgccttacaacagt

SEQ ID NO: 371962 - DNA, 33 bp, Homo sapien
tattatctgagaataaggatgccttacaacagt

SEQ ID NO: 371963 - DNA, 33 bp, Homo sapien
gtggctgtgaatccacaaatctaacagagagac

SEQ ID NO: 371964 - DNA, 33 bp, Homo sapien
gtggctgtgaatccacgaatctaacagagagac

SEQ ID NO: 371965 - DNA, 33 bp, Homo sapien
ctctagaggtcagataagcacctgctgaagaag

SEQ ID NO: 371966 - DNA, 33 bp, Homo sapien
ctctagaggtcagataggcacctgctgaagaag

SEQ ID NO: 371967 - DNA, 33 bp, Homo sapien
ggagagaagattgtaccaatagttcgtctctgg

SEQ ID NO: 371968 - DNA, 33 bp, Homo sapien
ggagagaagattgtactaatagttcgtctctgg

SEQ ID NO: 371969 - DNA, 33 bp, Homo sapien
cttctttgcacttatccatttctagggacagat

SEQ ID NO: 371970 - DNA, 33 bp, Homo sapien
cttctttgcacttatctatttctagggacagat

SEQ ID NO: 371971 - DNA, 33 bp, Homo sapien
attgcacttggcctcactattttgagtgaatcc

SEQ ID NO: 371972 - DNA, 33 bp, Homo sapien
attgcacttggcctcattattttgagtgaatcc

SEQ ID NO: 371973 - DNA, 33 bp, Homo sapien
gacaggcaggaccagcggcataatttacagggc

SEQ ID NO: 371974 - DNA, 33 bp, Homo sapien
gacaggcaggaccagctgcataatttacagggc

SEQ ID NO: 371975 - DNA, 33 bp, Homo sapien
tagatcgagagcgatcacagaaaaaattaaaag

SEQ ID NO: 371976 - DNA, 33 bp, Homo sapien
tagatcgagagcgatcgcagaaaaaattaaaag

SEQ ID NO: 371977 - DNA, 33 bp, Homo sapien
gatgcattgatttggacatttgtgggaatgcct

SEQ ID NO: 371978 - DNA, 33 bp, Homo sapien
gatgcattgatttggatatttgtgggaatgcct

SEQ ID NO: 371979 - DNA, 33 bp, Homo sapien
atactggggaagccacacaacgtaggaagcaga

SEQ ID NO: 371980 - DNA, 33 bp, Homo sapien
atactggggaagccacgcaacgtaggaagcaga

SEQ ID NO: 371981 - DNA, 33 bp, Homo sapien
gggcaaccctcgaccacgaaagcaaggaaataa

SEQ ID NO: 371982 - DNA, 33 bp, Homo sapien
gggcaaccctcgaccatgaaagcaaggaaataa

SEQ ID NO: 371983 - DNA, 33 bp, Homo sapien
tgagttatgagtccaccaccacctccaaaactt

SEQ ID NO: 371984 - DNA, 33 bp, Homo sapien
tgagttatgagtccactaccacctccaaaactt

SEQ ID NO: 371985 - DNA, 33 bp, Homo sapien
gtgaacatctctctaacgcaattctcttgacat

SEQ ID NO: 371986 - DNA, 33 bp, Homo sapien
gtgaacatctctctaatgcaattctcttgacat

SEQ ID NO: 371987 - DNA, 33 bp, Homo sapien
tgactaaagccacaggcaggattttctttcctg

SEQ ID NO: 371988 - DNA, 33 bp, Homo sapien
tgactaaagccacaggtaggattttctttcctg

SEQ ID NO: 371989 - DNA, 33 bp, Homo sapien
gggcaattctcccttaccagtctagcactccca

SEQ ID NO: 371990 - DNA, 33 bp, Homo sapien
gggcaattctcccttagcagtctagcactccca

SEQ ID NO: 371991 - DNA, 33 bp, Homo sapien
taagtagctgaaaacagtcaagaaaataaggta

SEQ ID NO: 371992 - DNA, 33 bp, Homo sapien
taagtagctgaaaacattcaagaaaataaggta

SEQ ID NO: 371993 - DNA, 33 bp, Homo sapien
ggaaactgacaaatacggatgtctacgctgcag

SEQ ID NO: 371994 - DNA, 33 bp, Homo sapien
ggaaactgacaaatactgatgtctacgctgcag

SEQ ID NO: 371995 - DNA, 33 bp, Homo sapien
cttcttccacttgaaagcaaaagactcttgaca

SEQ ID NO: 371996 - DNA, 33 bp, Homo sapien
cttcttccacttgaaatcaaaagactcttgaca

SEQ ID NO: 371997 - DNA, 33 bp, Homo sapien
gagtagatcctgggaaacttagagctggttggt

SEQ ID NO: 371998 - DNA, 33 bp, Homo sapien
gagtagatcctgggaaccttagagctggttggt

SEQ ID NO: 371999 - DNA, 33 bp, Homo sapien
tctggaatcttagctcacagaaggaatgtacct

SEQ ID NO: 372000 - DNA, 33 bp, Homo sapien
tctggaatcttagctcgcagaaggaatgtacct

SEQ ID NO: 372001 - DNA, 33 bp, Homo sapien
agttgttgcattataactcaaataacacatggt

SEQ ID NO: 372002 - DNA, 33 bp, Homo sapien
agttgttgcattataattcaaataacacatggt

SEQ ID NO: 372003 - DNA, 33 bp, Homo sapien
caaataacacatggtgaagtctctaaaatataa

SEQ ID NO: 372004 - DNA, 33 bp, Homo sapien
caaataacacatggtggagtctctaaaatataa

SEQ ID NO: 372005 - DNA, 33 bp, Homo sapien
atatgtgttaaacccaaattgcaaattgacctt

SEQ ID NO: 372006 - DNA, 33 bp, Homo sapien
atatgtgttaaacccagattgcaaattgacctt

SEQ ID NO: 372007 - DNA, 33 bp, Homo sapien
tatgtgtgacaaacaagagaggagatgtgtgtg

SEQ ID NO: 372008 - DNA, 33 bp, Homo sapien
tatgtgtgacaaacaatagaggagatgtgtgtg

SEQ ID NO: 372009 - DNA, 33 bp, Homo sapien
tgcaaggctggaggaaaaaggaacttgctcttt

SEQ ID NO: 372010 - DNA, 33 bp, Homo sapien
tgcaaggctggaggaagaaggaacttgctcttt

SEQ ID NO: 372011 - DNA, 33 bp, Homo sapien
tactttgtaatggaaacagcacttggaagagtt

SEQ ID NO: 372012 - DNA, 33 bp, Homo sapien
tactttgtaatggaaagagcacttggaagagtt

SEQ ID NO: 372013 - DNA, 33 bp, Homo sapien
cacaatccctttgagcagacacatattactcgt

SEQ ID NO: 372014 - DNA, 33 bp, Homo sapien
cacaatccctttgagcggacacatattactcgt

SEQ ID NO: 372015 - DNA, 33 bp, Homo sapien
aactagtaggtgttaacgctggcttctgggtcc

SEQ ID NO: 372016 - DNA, 33 bp, Homo sapien
aactagtaggtgttaatgctggcttctgggtcc

SEQ ID NO: 372017 - DNA, 33 bp, Homo sapien
cctatagtaagccctacggaaatgtttgttaca

SEQ ID NO: 372018 - DNA, 33 bp, Homo sapien
cctatagtaagccctatggaaatgtttgttaca

SEQ ID NO: 372019 - DNA, 33 bp, Homo sapien
ctccttcagagactccaattatacatatattag

SEQ ID NO: 372020 - DNA, 33 bp, Homo sapien
ctccttcagagactccgattatacatatattag

SEQ ID NO: 372021 - DNA, 33 bp, Homo sapien
gaggctctgcatccaggaatccaggcttctagt

SEQ ID NO: 372022 - DNA, 33 bp, Homo sapien
gaggctctgcatccagtaatccaggcttctagt

SEQ ID NO: 372023 - DNA, 33 bp, Homo sapien
cttttgcagcaacctaataaatctgaagtctaa

SEQ ID NO: 372024 - DNA, 33 bp, Homo sapien
cttttgcagcaacctattaaatctgaagtctaa

SEQ ID NO: 372025 - DNA, 33 bp, Homo sapien
acccaagcatgtaattaaacatcttacaacgca

SEQ ID NO: 372026 - DNA, 33 bp, Homo sapien
acccaagcatgtaattgaacatcttacaacgca

SEQ ID NO: 372027 - DNA, 33 bp, Homo sapien
aatgaatttcaaagacacataaaactgagcaat

SEQ ID NO: 372028 - DNA, 33 bp, Homo sapien
aatgaatttcaaagacgcataaaactgagcaat

SEQ ID NO: 372029 - DNA, 33 bp, Homo sapien
cttcattccgaataacagctttttcaccattca

SEQ ID NO: 372030 - DNA, 33 bp, Homo sapien
cttcattccgaataacggctttttcaccattca

SEQ ID NO: 372031 - DNA, 33 bp, Homo sapien
aaatagtggagaaagcaaaagagagcctggaca

SEQ ID NO: 372032 - DNA, 33 bp, Homo sapien
aaatagtggagaaagcgaaagagagcctggaca

SEQ ID NO: 372033 - DNA, 33 bp, Homo sapien
atgccaacaaaacaaaattctggtgccttcagg

SEQ ID NO: 372034 - DNA, 33 bp, Homo sapien
atgccaacaaaacaaagttctggtgccttcagg

SEQ ID NO: 372035 - DNA, 33 bp, Homo sapien
gatgctgtgtgaattacgaagctttgcattcta

SEQ ID NO: 372036 - DNA, 33 bp, Homo sapien
gatgctgtgtgaattatgaagctttgcattcta

SEQ ID NO: 372037 - DNA, 33 bp, Homo sapien
tgaggctggtgttccccctgagatgaggagaca

SEQ ID NO: 372038 - DNA, 33 bp, Homo sapien
tgaggctggtgttccctctgagatgaggagaca

SEQ ID NO: 372039 - DNA, 33 bp, Homo sapien
caggaaacagttctgacggccccaagcaatgta

SEQ ID NO: 372040 - DNA, 33 bp, Homo sapien
caggaaacagttctgatggccccaagcaatgta

SEQ ID NO: 372041 - DNA, 33 bp, Homo sapien
actgaacttgaaagctaacccggattgtgaagc

SEQ ID NO: 372042 - DNA, 33 bp, Homo sapien
actgaacttgaaagctgacccggattgtgaagc

SEQ ID NO: 372043 - DNA, 33 bp, Homo sapien
attaagcaggcttttaagtgatgttaaatattt

SEQ ID NO: 372044 - DNA, 33 bp, Homo sapien
attaagcaggcttttacgtgatgttaaatattt

SEQ ID NO: 372045 - DNA, 33 bp, Homo sapien
actattctcagtctgaacgaacaaaatacaaaa

SEQ ID NO: 372046 - DNA, 33 bp, Homo sapien
actattctcagtctgaccgaacaaaatacaaaa

SEQ ID NO: 372047 - DNA, 33 bp, Homo sapien
atgtctgcttttattaggtttgattctgtctac

SEQ ID NO: 372048 - DNA, 33 bp, Homo sapien
atgtctgcttttattatgtttgattctgtctac

SEQ ID NO: 372049 - DNA, 33 bp, Homo sapien
atagtggtgacaaagacgtttgattcacaaaga

SEQ ID NO: 372050 - DNA, 33 bp, Homo sapien
atagtggtgacaaagatgtttgattcacaaaga

SEQ ID NO: 372051 - DNA, 33 bp, Homo sapien
atgtcttgagtccagaagttcaacattagcctg

SEQ ID NO: 372052 - DNA, 33 bp, Homo sapien
atgtcttgagtccagaggttcaacattagcctg

SEQ ID NO: 372053 - DNA, 33 bp, Homo sapien
actattgtaactgatacaaacgtgggaatctga

SEQ ID NO: 372054 - DNA, 33 bp, Homo sapien
actattgtaactgatataaacgtgggaatctga

SEQ ID NO: 372055 - DNA, 33 bp, Homo sapien
gaaataaaatgagtcaatatctcactacatcat

SEQ ID NO: 372056 - DNA, 33 bp, Homo sapien
gaaataaaatgagtcagtatctcactacatcat

SEQ ID NO: 372057 - DNA, 33 bp, Homo sapien
tatggcacctctaccacgaagatccataggtca

SEQ ID NO: 372058 - DNA, 33 bp, Homo sapien
tatggcacctctaccatgaagatccataggtca

SEQ ID NO: 372059 - DNA, 33 bp, Homo sapien
ttcagtccacacaaccccaattctttcaatgtt

SEQ ID NO: 372060 - DNA, 33 bp, Homo sapien
ttcagtccacacaacctcaattctttcaatgtt

SEQ ID NO: 372061 - DNA, 33 bp, Homo sapien
aagccaggaggttagaaaagttagtaagtggct

SEQ ID NO: 372062 - DNA, 33 bp, Homo sapien
aagccaggaggttagacaagttagtaagtggct

SEQ ID NO: 372063 - DNA, 33 bp, Homo sapien
ttgatggtgcagagaacgtttttcttattggcc

SEQ ID NO: 372064 - DNA, 33 bp, Homo sapien
ttgatggtgcagagaatgtttttcttattggcc

SEQ ID NO: 372065 - DNA, 33 bp, Homo sapien
catattttttaacataaattgtgacatgattct

SEQ ID NO: 372066 - DNA, 33 bp, Homo sapien
catattttttaacatacattgtgacatgattct

SEQ ID NO: 372067 - DNA, 33 bp, Homo sapien
ttttaaaaagcttagcacaagtggagtcattct

SEQ ID NO: 372068 - DNA, 33 bp, Homo sapien
ttttaaaaagcttagcgcaagtggagtcattct

SEQ ID NO: 372069 - DNA, 33 bp, Homo sapien
gagtttgttaggtagacataataggagaggact

SEQ ID NO: 372070 - DNA, 33 bp, Homo sapien
gagtttgttaggtagatataataggagaggact

SEQ ID NO: 372071 - DNA, 33 bp, Homo sapien
gaaaatgctcaaaaaacggttactcaatgaata

SEQ ID NO: 372072 - DNA, 33 bp, Homo sapien
gaaaatgctcaaaaaatggttactcaatgaata

SEQ ID NO: 372073 - DNA, 33 bp, Homo sapien
ggacaactaatagttacctggaagtggaaaggg

SEQ ID NO: 372074 - DNA, 33 bp, Homo sapien
ggacaactaatagttatctggaagtggaaaggg

SEQ ID NO: 372075 - DNA, 33 bp, Homo sapien
gaagcttttgaaaaaccgatccaaatctccaac

SEQ ID NO: 372076 - DNA, 33 bp, Homo sapien
gaagcttttgaaaaactgatccaaatctccaac

SEQ ID NO: 372077 - DNA, 33 bp, Homo sapien
tgtggctgtcaagtaccagaaatgggactgtga

SEQ ID NO: 372078 - DNA, 33 bp, Homo sapien
tgtggctgtcaagtactagaaatgggactgtga

SEQ ID NO: 372079 - DNA, 33 bp, Homo sapien
ttcaagaacgtcattacgttgcccattacactt

SEQ ID NO: 372080 - DNA, 33 bp, Homo sapien
ttcaagaacgtcattatgttgcccattacactt

SEQ ID NO: 372081 - DNA, 33 bp, Homo sapien
ttacgagtatgtccttcaaacagcaggagagtg

SEQ ID NO: 372082 - DNA, 33 bp, Homo sapien
ttacgagtatgtccttgaaacagcaggagagtg

SEQ ID NO: 372083 - DNA, 33 bp, Homo sapien
ataactgccagagtgacgggagagaaacttcat

SEQ ID NO: 372084 - DNA, 33 bp, Homo sapien
ataactgccagagtgatgggagagaaacttcat

SEQ ID NO: 372085 - DNA, 33 bp, Homo sapien
gtggggcgatcccaaacctgctctgaggtgggg

SEQ ID NO: 372086 - DNA, 33 bp, Homo sapien
gtggggcgatcccaaatctgctctgaggtgggg

SEQ ID NO: 372087 - DNA, 33 bp, Homo sapien
gcatttgtccggtacaatggcaacgcaactctg

SEQ ID NO: 372088 - DNA, 33 bp, Homo sapien
gcatttgtccggtacagtggcaacgcaactctg

SEQ ID NO: 372089 - DNA, 33 bp, Homo sapien
attcctatagcttacactatcatccacatctaa

SEQ ID NO: 372090 - DNA, 33 bp, Homo sapien
attcctatagcttacattatcatccacatctaa

SEQ ID NO: 372091 - DNA, 33 bp, Homo sapien
caggtaaacaggagaacgtaaggaaagcttatt

SEQ ID NO: 372092 - DNA, 33 bp, Homo sapien
caggtaaacaggagaatgtaaggaaagcttatt

SEQ ID NO: 372093 - DNA, 33 bp, Homo sapien
caatgaatagtccacaaatttaactgctctatt

SEQ ID NO: 372094 - DNA, 33 bp, Homo sapien
caatgaatagtccacatatttaactgctctatt

SEQ ID NO: 372095 - DNA, 33 bp, Homo sapien
ggaaagatagcgaaaaagttgttactatcacac

SEQ ID NO: 372096 - DNA, 33 bp, Homo sapien
ggaaagatagcgaaaaggttgttactatcacac

SEQ ID NO: 372097 - DNA, 33 bp, Homo sapien
ttctgctgagacgaaactgaattcaaaaatgga

SEQ ID NO: 372098 - DNA, 33 bp, Homo sapien
ttctgctgagacgaaagtgaattcaaaaatgga

SEQ ID NO: 372099 - DNA, 33 bp, Homo sapien
ttttcttgaggagagacaccttccctgaatgtg

SEQ ID NO: 372100 - DNA, 33 bp, Homo sapien
ttttcttgaggagagagaccttccctgaatgtg

SEQ ID NO: 372101 - DNA, 33 bp, Homo sapien
acagacagctctgcccactatgggaacactaag

SEQ ID NO: 372102 - DNA, 33 bp, Homo sapien
acagacagctctgcccgctatgggaacactaag

SEQ ID NO: 372103 - DNA, 33 bp, Homo sapien
acgccatgagaatttacgcttggcttagtgttc

SEQ ID NO: 372104 - DNA, 33 bp, Homo sapien
acgccatgagaatttatgcttggcttagtgttc

SEQ ID NO: 372105 - DNA, 33 bp, Homo sapien
gccaaggcagagacaactggcgagctcgctcag

SEQ ID NO: 372106 - DNA, 33 bp, Homo sapien
gccaaggcagagacaattggcgagctcgctcag

SEQ ID NO: 372107 - DNA, 33 bp, Homo sapien
aagagtctaggggaagaagtgtgagagcacagc

SEQ ID NO: 372108 - DNA, 33 bp, Homo sapien
aagagtctaggggaaggagtgtgagagcacagc

SEQ ID NO: 372109 - DNA, 33 bp, Homo sapien
tgacgacaaggtcaaagtggggcccttgaccca

SEQ ID NO: 372110 - DNA, 33 bp, Homo sapien
tgacgacaaggtcaaattggggcccttgaccca

SEQ ID NO: 372111 - DNA, 33 bp, Homo sapien
atcttcgctatgccccactgatgtcctgggccc

SEQ ID NO: 372112 - DNA, 33 bp, Homo sapien
atcttcgctatgccccgctgatgtcctgggccc

SEQ ID NO: 372113 - DNA, 33 bp, Homo sapien
tgttacccagagataacgaaggtaaatgtatcc

SEQ ID NO: 372114 - DNA, 33 bp, Homo sapien
tgttacccagagataatgaaggtaaatgtatcc

SEQ ID NO: 372115 - DNA, 33 bp, Homo sapien
gcagccctacaagaggaaaagagtcagtcctgg

SEQ ID NO: 372116 - DNA, 33 bp, Homo sapien
gcagccctacaagagggaaagagtcagtcctgg

SEQ ID NO: 372117 - DNA, 33 bp, Homo sapien
gtttctcaacaagtcacgtgtacctgggcctcc

SEQ ID NO: 372118 - DNA, 33 bp, Homo sapien
gtttctcaacaagtcatgtgtacctgggcctcc

SEQ ID NO: 372119 - DNA, 33 bp, Homo sapien
gattaacaagggatgacgtatgactcttctgtg

SEQ ID NO: 372120 - DNA, 33 bp, Homo sapien
gattaacaagggatgatgtatgactcttctgtg

SEQ ID NO: 372121 - DNA, 33 bp, Homo sapien
ggaatgagttatatcaagccaagaggaggcgga

SEQ ID NO: 372122 - DNA, 33 bp, Homo sapien
ggaatgagttatatcatgccaagaggaggcgga

SEQ ID NO: 372123 - DNA, 33 bp, Homo sapien
tatgtaaaatgtaaaagttggtgtttgacataa

SEQ ID NO: 372124 - DNA, 33 bp, Homo sapien
tatgtaaaatgtaaaatttggtgtttgacataa

SEQ ID NO: 372125 - DNA, 33 bp, Homo sapien
tcactagatgcctagacagagatgcctcagtct

SEQ ID NO: 372126 - DNA, 33 bp, Homo sapien
tcactagatgcctagatagagatgcctcagtct

SEQ ID NO: 372127 - DNA, 33 bp, Homo sapien
tcttaatgtggtaaggaaataggtttataccat

SEQ ID NO: 372128 - DNA, 33 bp, Homo sapien
tcttaatgtggtaagggaataggtttataccat

SEQ ID NO: 372129 - DNA, 33 bp, Homo sapien
ctcctaaatcttcaacagagtccacagctgcct

SEQ ID NO: 372130 - DNA, 33 bp, Homo sapien
ctcctaaatcttcaacggagtccacagctgcct

SEQ ID NO: 372131 - DNA, 33 bp, Homo sapien
tgaacttgctttgcagaacacttgctgaaatgg

SEQ ID NO: 372132 - DNA, 33 bp, Homo sapien
tgaacttgctttgcaggacacttgctgaaatgg

SEQ ID NO: 372133 - DNA, 33 bp, Homo sapien
gcatatcacctgtaaactattctgactggtcac

SEQ ID NO: 372134 - DNA, 33 bp, Homo sapien
gcatatcacctgtaaagtattctgactggtcac

SEQ ID NO: 372135 - DNA, 33 bp, Homo sapien
tattttgatgattaaaagagagagtagcttata

SEQ ID NO: 372136 - DNA, 33 bp, Homo sapien
tattttgatgattaaaggagagagtagcttata

SEQ ID NO: 372137 - DNA, 33 bp, Homo sapien
ctgtcaggaggaatgacgagggctgagcacgca

SEQ ID NO: 372138 - DNA, 33 bp, Homo sapien
ctgtcaggaggaatgatgagggctgagcacgca

SEQ ID NO: 372139 - DNA, 33 bp, Homo sapien
caaatctcatgtggaagtatgatctccagtgtt

SEQ ID NO: 372140 - DNA, 33 bp, Homo sapien
caaatctcatgtggaattatgatctccagtgtt

SEQ ID NO: 372141 - DNA, 33 bp, Homo sapien
agctttccttttccaacgtcaaacgaaagtgcc

SEQ ID NO: 372142 - DNA, 33 bp, Homo sapien
agctttccttttccaatgtcaaacgaaagtgcc

SEQ ID NO: 372143 - DNA, 33 bp, Homo sapien
gagaggaaatttgaagaaggaactaattgttat

SEQ ID NO: 372144 - DNA, 33 bp, Homo sapien
gagaggaaatttgaaggaggaactaattgttat

SEQ ID NO: 372145 - DNA, 33 bp, Homo sapien
gaggtttgacggtcttcaactgtcttcagtcca

SEQ ID NO: 372146 - DNA, 33 bp, Homo sapien
gaggtttgacggtcttgaactgtcttcagtcca

SEQ ID NO: 372147 - DNA, 33 bp, Homo sapien
agtggttgtttaggaacaccatctcatgtactt

SEQ ID NO: 372148 - DNA, 33 bp, Homo sapien
agtggttgtttaggaataccatctcatgtactt

SEQ ID NO: 372149 - DNA, 33 bp, Homo sapien
gaatgacctttccaaacttatcaagctgttcta

SEQ ID NO: 372150 - DNA, 33 bp, Homo sapien
gaatgacctttccaaatttatcaagctgttcta

SEQ ID NO: 372151 - DNA, 33 bp, Homo sapien
cagatagaagagtgatgaactgtgtggccagga

SEQ ID NO: 372152 - DNA, 33 bp, Homo sapien
cagatagaagagtgattaactgtgtggccagga

SEQ ID NO: 372153 - DNA, 33 bp, Homo sapien
tttctgaaggttcaaacactggttcacattgtg

SEQ ID NO: 372154 - DNA, 33 bp, Homo sapien
tttctgaaggttcaaagactggttcacattgtg

SEQ ID NO: 372155 - DNA, 33 bp, Homo sapien
tctagtctcttaaaaggcctgtgagaatgttga

SEQ ID NO: 372156 - DNA, 33 bp, Homo sapien
tctagtctcttaaaagtcctgtgagaatgttga

SEQ ID NO: 372157 - DNA, 33 bp, Homo sapien
gcactagatgcctgttaaaaccgtgcaacattt

SEQ ID NO: 372158 - DNA, 33 bp, Homo sapien
gcactagatgcctgtttaaaccgtgcaacattt

SEQ ID NO: 372159 - DNA, 33 bp, Homo sapien
aggtgctttgcaagaactgaactctacgggata

SEQ ID NO: 372160 - DNA, 33 bp, Homo sapien
aggtgctttgcaagaattgaactctacgggata

SEQ ID NO: 372161 - DNA, 33 bp, Homo sapien
atcatcaataatttcaggaacctaccagtggag

SEQ ID NO: 372162 - DNA, 33 bp, Homo sapien
atcatcaataatttcatgaacctaccagtggag

SEQ ID NO: 372163 - DNA, 33 bp, Homo sapien
cctatacgtgagaaacagctcctgataccacca

SEQ ID NO: 372164 - DNA, 33 bp, Homo sapien
cctatacgtgagaaacggctcctgataccacca

SEQ ID NO: 372165 - DNA, 33 bp, Homo sapien
ccagctcaaccactccaatgattctgctttcac

SEQ ID NO: 372166 - DNA, 33 bp, Homo sapien
ccagctcaaccactcccatgattctgctttcac

SEQ ID NO: 372167 - DNA, 33 bp, Homo sapien
ggggctcttgtgaagcaatcaggccacgagggc

SEQ ID NO: 372168 - DNA, 33 bp, Homo sapien
ggggctcttgtgaagcgatcaggccacgagggc

SEQ ID NO: 372169 - DNA, 33 bp, Homo sapien
gtctgctcctaacagacgctgaagtgatgctgt

SEQ ID NO: 372170 - DNA, 33 bp, Homo sapien
gtctgctcctaacagaggctgaagtgatgctgt

SEQ ID NO: 372171 - DNA, 33 bp, Homo sapien
ctgggtgcattttgaacgtagagctgatagaat

SEQ ID NO: 372172 - DNA, 33 bp, Homo sapien
ctgggtgcattttgaaggtagagctgatagaat

SEQ ID NO: 372173 - DNA, 33 bp, Homo sapien
acagctaagaagatgcaatctgggtgccggaaa

SEQ ID NO: 372174 - DNA, 33 bp, Homo sapien
acagctaagaagatgcgatctgggtgccggaaa

SEQ ID NO: 372175 - DNA, 33 bp, Homo sapien
ttcatatttaaagcccagattcaaagaaccaaa

SEQ ID NO: 372176 - DNA, 33 bp, Homo sapien
ttcatatttaaagcccggattcaaagaaccaaa

SEQ ID NO: 372177 - DNA, 33 bp, Homo sapien
tgcagtatgactgtgcaagtttaagcttcgggc

SEQ ID NO: 372178 - DNA, 33 bp, Homo sapien
tgcagtatgactgtgccagtttaagcttcgggc

SEQ ID NO: 372179 - DNA, 33 bp, Homo sapien
cctgtggactgctctagctctgaacgtatattt

SEQ ID NO: 372180 - DNA, 33 bp, Homo sapien
cctgtggactgctctatctctgaacgtatattt

SEQ ID NO: 372181 - DNA, 33 bp, Homo sapien
ttctggtctacagtacaaggagttaaggctttg

SEQ ID NO: 372182 - DNA, 33 bp, Homo sapien
ttctggtctacagtacgaggagttaaggctttg

SEQ ID NO: 372183 - DNA, 33 bp, Homo sapien
atttagtggaattaacggactagctctggccat

SEQ ID NO: 372184 - DNA, 33 bp, Homo sapien
atttagtggaattaactgactagctctggccat

SEQ ID NO: 372185 - DNA, 33 bp, Homo sapien
gaacccaccaatttcgaacacaacttcactcct

SEQ ID NO: 372186 - DNA, 33 bp, Homo sapien
gaacccaccaatttcggacacaacttcactcct

SEQ ID NO: 372187 - DNA, 33 bp, Homo sapien
cccttgtaatatccagcctccgggtttccaact

SEQ ID NO: 372188 - DNA, 33 bp, Homo sapien
cccttgtaatatccagtctccgggtttccaact

SEQ ID NO: 372189 - DNA, 33 bp, Homo sapien
ctaatgattttatataagaactagcttctcttt

SEQ ID NO: 372190 - DNA, 33 bp, Homo sapien
ctaatgattttatatatgaactagcttctcttt

SEQ ID NO: 372191 - DNA, 33 bp, Homo sapien
aaagaataaagaggcaaaaggaattggaacctg

SEQ ID NO: 372192 - DNA, 33 bp, Homo sapien
aaagaataaagaggcacaaggaattggaacctg

SEQ ID NO: 372193 - DNA, 33 bp, Homo sapien
caaactccttgaataccggactcggaatggccc

SEQ ID NO: 372194 - DNA, 33 bp, Homo sapien
caaactccttgaatactggactcggaatggccc

SEQ ID NO: 372195 - DNA, 33 bp, Homo sapien
taacgcctttaatcctaaaacttcgggaggctg

SEQ ID NO: 372196 - DNA, 33 bp, Homo sapien
taacgcctttaatcctgaaacttcgggaggctg

SEQ ID NO: 372197 - DNA, 33 bp, Homo sapien
catttcacagtggaggaaacgttgcttagtaaa

SEQ ID NO: 372198 - DNA, 33 bp, Homo sapien
catttcacagtggaggtaacgttgcttagtaaa

SEQ ID NO: 372199 - DNA, 33 bp, Homo sapien
ctaaatgtcaagaaacaggaaggaataaaaagg

SEQ ID NO: 372200 - DNA, 33 bp, Homo sapien
ctaaatgtcaagaaacgggaaggaataaaaagg

SEQ ID NO: 372201 - DNA, 33 bp, Homo sapien
taaaataaagtgactaccaagttgtctaggttt

SEQ ID NO: 372202 - DNA, 33 bp, Homo sapien
taaaataaagtgactagcaagttgtctaggttt

SEQ ID NO: 372203 - DNA, 33 bp, Homo sapien
ggatagtaagtgttaacagcaagtactatacgg

SEQ ID NO: 372204 - DNA, 33 bp, Homo sapien
ggatagtaagtgttaatagcaagtactatacgg

SEQ ID NO: 372205 - DNA, 33 bp, Homo sapien
caacccttctcccacacagctgctaggaatttt

SEQ ID NO: 372206 - DNA, 33 bp, Homo sapien
caacccttctcccacatagctgctaggaatttt

SEQ ID NO: 372207 - DNA, 33 bp, Homo sapien
aagaaagcaatttaacaggaagtcaagcatgaa

SEQ ID NO: 372208 - DNA, 33 bp, Homo sapien
aagaaagcaatttaacgggaagtcaagcatgaa

SEQ ID NO: 372209 - DNA, 33 bp, Homo sapien
ccaactgatgtcctataaatcctaaaacttgct

SEQ ID NO: 372210 - DNA, 33 bp, Homo sapien
ccaactgatgtcctatgaatcctaaaacttgct

SEQ ID NO: 372211 - DNA, 33 bp, Homo sapien
catgttccttggctacactagtcgtattgaaca

SEQ ID NO: 372212 - DNA, 33 bp, Homo sapien
catgttccttggctactctagtcgtattgaaca

SEQ ID NO: 372213 - DNA, 33 bp, Homo sapien
tgcagggaatcttggccctcaagttggatcctg

SEQ ID NO: 372214 - DNA, 33 bp, Homo sapien
tgcagggaatcttggctctcaagttggatcctg

SEQ ID NO: 372215 - DNA, 33 bp, Homo sapien
tagtgcaagtaacagaaaggtgaaattggctga

SEQ ID NO: 372216 - DNA, 33 bp, Homo sapien
tagtgcaagtaacagagaggtgaaattggctga

SEQ ID NO: 372217 - DNA, 33 bp, Homo sapien
gagaagaaatgtcaacaatcttttgaacctcta

SEQ ID NO: 372218 - DNA, 33 bp, Homo sapien
gagaagaaatgtcaactatcttttgaacctcta

SEQ ID NO: 372219 - DNA, 33 bp, Homo sapien
atagtgttaaaactagaagatccacttctgccc

SEQ ID NO: 372220 - DNA, 33 bp, Homo sapien
atagtgttaaaactaggagatccacttctgccc

SEQ ID NO: 372221 - DNA, 33 bp, Homo sapien
tctgcaaaaaggggataacagcagcacttaatt

SEQ ID NO: 372222 - DNA, 33 bp, Homo sapien
tctgcaaaaaggggatgacagcagcacttaatt

SEQ ID NO: 372223 - DNA, 33 bp, Homo sapien
gagaaagatcataaagacggctgagaattttgg

SEQ ID NO: 372224 - DNA, 33 bp, Homo sapien
gagaaagatcataaagccggctgagaattttgg

SEQ ID NO: 372225 - DNA, 33 bp, Homo sapien
gttgattctgatgaccactgaagcctgagaatc

SEQ ID NO: 372226 - DNA, 33 bp, Homo sapien
gttgattctgatgaccgctgaagcctgagaatc

SEQ ID NO: 372227 - DNA, 33 bp, Homo sapien
tgctctctaaatgttacgccaatttgtgttatg

SEQ ID NO: 372228 - DNA, 33 bp, Homo sapien
tgctctctaaatgttatgccaatttgtgttatg

SEQ ID NO: 372229 - DNA, 33 bp, Homo sapien
agaaaggagacacatacaacatagcagtcaaaa

SEQ ID NO: 372230 - DNA, 33 bp, Homo sapien
agaaaggagacacatataacatagcagtcaaaa

SEQ ID NO: 372231 - DNA, 33 bp, Homo sapien
atttgtggtctacttccagcatctgtgcgagac

SEQ ID NO: 372232 - DNA, 33 bp, Homo sapien
atttgtggtctacttctagcatctgtgcgagac

SEQ ID NO: 372233 - DNA, 33 bp, Homo sapien
ccctctccctctctgacgctatgtctctggcta

SEQ ID NO: 372234 - DNA, 33 bp, Homo sapien
ccctctccctctctgatgctatgtctctggcta

SEQ ID NO: 372235 - DNA, 33 bp, Homo sapien
agaaacagttattacacggatgttcatagcagc

SEQ ID NO: 372236 - DNA, 33 bp, Homo sapien
agaaacagttattacatggatgttcatagcagc

SEQ ID NO: 372237 - DNA, 33 bp, Homo sapien
cattgctaagcccccacaggaccgtggaagggg

SEQ ID NO: 372238 - DNA, 33 bp, Homo sapien
cattgctaagcccccataggaccgtggaagggg

SEQ ID NO: 372239 - DNA, 33 bp, Homo sapien
gaccaggctgccggcccagctgtcctgtgcctg

SEQ ID NO: 372240 - DNA, 33 bp, Homo sapien
gaccaggctgccggcctagctgtcctgtgcctg

SEQ ID NO: 372241 - DNA, 33 bp, Homo sapien
tggggtagttggttgaagtgggctgtaagtttt

SEQ ID NO: 372242 - DNA, 33 bp, Homo sapien
tggggtagttggttgaggtgggctgtaagtttt

SEQ ID NO: 372243 - DNA, 33 bp, Homo sapien
agctctgatcctaagcacagtatgtgtacacac

SEQ ID NO: 372244 - DNA, 33 bp, Homo sapien
agctctgatcctaagcgcagtatgtgtacacac

SEQ ID NO: 372245 - DNA, 33 bp, Homo sapien
acactaccaacatggaactgtacttagcattag

SEQ ID NO: 372246 - DNA, 33 bp, Homo sapien
acactaccaacatggagctgtacttagcattag

SEQ ID NO: 372247 - DNA, 33 bp, Homo sapien
gcaggtgactcaggtaaacattgataaatgttt

SEQ ID NO: 372248 - DNA, 33 bp, Homo sapien
gcaggtgactcaggtagacattgataaatgttt

SEQ ID NO: 372249 - DNA, 33 bp, Homo sapien
aagcctgtcatcggaaaagcaaattgtatgggg

SEQ ID NO: 372250 - DNA, 33 bp, Homo sapien
aagcctgtcatcggaagagcaaattgtatgggg

SEQ ID NO: 372251 - DNA, 33 bp, Homo sapien
ctgtcttgtttcagaacctcagtggtaagaatt

SEQ ID NO: 372252 - DNA, 33 bp, Homo sapien
ctgtcttgtttcagaatctcagtggtaagaatt

SEQ ID NO: 372253 - DNA, 33 bp, Homo sapien
aatattcattcatcagcaggtacttgggttgtt

SEQ ID NO: 372254 - DNA, 33 bp, Homo sapien
aatattcattcatcaggaggtacttgggttgtt

SEQ ID NO: 372255 - DNA, 33 bp, Homo sapien
gacagttgacaatcaccgtgatgacccgaagag

SEQ ID NO: 372256 - DNA, 33 bp, Homo sapien
gacagttgacaatcacggtgatgacccgaagag

SEQ ID NO: 372257 - DNA, 33 bp, Homo sapien
tgcttatttttagaaaacaggttgtctgtggtc

SEQ ID NO: 372258 - DNA, 33 bp, Homo sapien
tgcttatttttagaaagcaggttgtctgtggtc

SEQ ID NO: 372259 - DNA, 33 bp, Homo sapien
cctggcttttgttacccaatgcaatgcctccat

SEQ ID NO: 372260 - DNA, 33 bp, Homo sapien
cctggcttttgttacctaatgcaatgcctccat

SEQ ID NO: 372261 - DNA, 33 bp, Homo sapien
tattccatgttatagacctgccacatttttttt

SEQ ID NO: 372262 - DNA, 33 bp, Homo sapien
tattccatgttatagatctgccacatttttttt

SEQ ID NO: 372263 - DNA, 33 bp, Homo sapien
aagtggcttaagcaaaacaaaggaatatattgg

SEQ ID NO: 372264 - DNA, 33 bp, Homo sapien
aagtggcttaagcaaagcaaaggaatatattgg

SEQ ID NO: 372265 - DNA, 33 bp, Homo sapien
taccttcctgctgctcacttccagaatttagtc

SEQ ID NO: 372266 - DNA, 33 bp, Homo sapien
taccttcctgctgctcgcttccagaatttagtc

SEQ ID NO: 372267 - DNA, 33 bp, Homo sapien
gaaaaataagtggattcaatatgtatgggtcta

SEQ ID NO: 372268 - DNA, 33 bp, Homo sapien
gaaaaataagtggattgaatatgtatgggtcta

SEQ ID NO: 372269 - DNA, 33 bp, Homo sapien
ttcaccaacttgttcacgtgatgctctgcaaat

SEQ ID NO: 372270 - DNA, 33 bp, Homo sapien
ttcaccaacttgttcatgtgatgctctgcaaat

SEQ ID NO: 372271 - DNA, 33 bp, Homo sapien
gacacacagttctggacacccgtagactgttct

SEQ ID NO: 372272 - DNA, 33 bp, Homo sapien
gacacacagttctggagacccgtagactgttct

SEQ ID NO: 372273 - DNA, 33 bp, Homo sapien
cacttgtaagtgagaacatgtagtctttggtct

SEQ ID NO: 372274 - DNA, 33 bp, Homo sapien
cacttgtaagtgagaatatgtagtctttggtct

SEQ ID NO: 372275 - DNA, 33 bp, Homo sapien
ataacaatgttgactacgaacagttgtacttta

SEQ ID NO: 372276 - DNA, 33 bp, Homo sapien
ataacaatgttgactatgaacagttgtacttta

SEQ ID NO: 372277 - DNA, 33 bp, Homo sapien
ggcgcaacgtcacttccattcctttctattaat

SEQ ID NO: 372278 - DNA, 33 bp, Homo sapien
ggcgcaacgtcacttcgattcctttctattaat

SEQ ID NO: 372279 - DNA, 33 bp, Homo sapien
tatagttccatcaagacacggtggaagacagag

SEQ ID NO: 372280 - DNA, 33 bp, Homo sapien
tatagttccatcaagatacggtggaagacagag

SEQ ID NO: 372281 - DNA, 33 bp, Homo sapien
tctgctaagccatgaaaggataaaaagatgaat

SEQ ID NO: 372282 - DNA, 33 bp, Homo sapien
tctgctaagccatgaagggataaaaagatgaat

SEQ ID NO: 372283 - DNA, 33 bp, Homo sapien
ggatctgtctaagtaccccttaaaccaagactc

SEQ ID NO: 372284 - DNA, 33 bp, Homo sapien
ggatctgtctaagtacgccttaaaccaagactc

SEQ ID NO: 372285 - DNA, 33 bp, Homo sapien
cctaatcttggatcaaccttcccggtgttaatt

SEQ ID NO: 372286 - DNA, 33 bp, Homo sapien
cctaatcttggatcaatcttcccggtgttaatt

SEQ ID NO: 372287 - DNA, 33 bp, Homo sapien
aatacagatttgttgaaggaattaattaatcat

SEQ ID NO: 372288 - DNA, 33 bp, Homo sapien
aatacagatttgttgagggaattaattaatcat

SEQ ID NO: 372289 - DNA, 33 bp, Homo sapien
gcacagcccaaatggcaacatcttcatcctcgg

SEQ ID NO: 372290 - DNA, 33 bp, Homo sapien
gcacagcccaaatggcgacatcttcatcctcgg

SEQ ID NO: 372291 - DNA, 33 bp, Homo sapien
ccattctagaagccaacgcggcctacttcccta

SEQ ID NO: 372292 - DNA, 33 bp, Homo sapien
ccattctagaagccaatgcggcctacttcccta

SEQ ID NO: 372293 - DNA, 33 bp, Homo sapien
gtctgaggcacttggaacaatagcaaggcaggg

SEQ ID NO: 372294 - DNA, 33 bp, Homo sapien
gtctgaggcacttggagcaatagcaaggcaggg

SEQ ID NO: 372295 - DNA, 33 bp, Homo sapien
cactgtgcccagcatacaaagtgctacgtaaat

SEQ ID NO: 372296 - DNA, 33 bp, Homo sapien
cactgtgcccagcatataaagtgctacgtaaat

SEQ ID NO: 372297 - DNA, 33 bp, Homo sapien
tattggaataaatcacagtatatgtgccaccag

SEQ ID NO: 372298 - DNA, 33 bp, Homo sapien
tattggaataaatcacggtatatgtgccaccag

SEQ ID NO: 372299 - DNA, 33 bp, Homo sapien
ggagtgtggcaaaaaaggagttgggtgacaaat

SEQ ID NO: 372300 - DNA, 33 bp, Homo sapien
ggagtgtggcaaaaaatgagttgggtgacaaat

SEQ ID NO: 372301 - DNA, 33 bp, Homo sapien
gattaggccagatatcaaagatacttgccaatc

SEQ ID NO: 372302 - DNA, 33 bp, Homo sapien
gattaggccagatatcgaagatacttgccaatc

SEQ ID NO: 372303 - DNA, 33 bp, Homo sapien
tagccctgcaaaaaaacggctttagtacctgct

SEQ ID NO: 372304 - DNA, 33 bp, Homo sapien
tagccctgcaaaaaaatggctttagtacctgct

SEQ ID NO: 372305 - DNA, 33 bp, Homo sapien
ccaatgtgctacacaaattgtatcatttttcat

SEQ ID NO: 372306 - DNA, 33 bp, Homo sapien
ccaatgtgctacacaagttgtatcatttttcat

SEQ ID NO: 372307 - DNA, 33 bp, Homo sapien
agagacctcaggattacgctgattctggggtga

SEQ ID NO: 372308 - DNA, 33 bp, Homo sapien
agagacctcaggattatgctgattctggggtga

SEQ ID NO: 372309 - DNA, 33 bp, Homo sapien
cagaaatccatctctaactagattatatagcaa

SEQ ID NO: 372310 - DNA, 33 bp, Homo sapien
cagaaatccatctctagctagattatatagcaa

SEQ ID NO: 372311 - DNA, 33 bp, Homo sapien
aatccctgaaaatgaaacatatgtaaaagaaag

SEQ ID NO: 372312 - DNA, 33 bp, Homo sapien
aatccctgaaaatgaaccatatgtaaaagaaag

SEQ ID NO: 372313 - DNA, 33 bp, Homo sapien
ttccttctggtaggaaatcagagacagggtcaa

SEQ ID NO: 372314 - DNA, 33 bp, Homo sapien
ttccttctggtaggaagtcagagacagggtcaa

SEQ ID NO: 372315 - DNA, 33 bp, Homo sapien
atattctgagatccacaaaagagtgggaaaacg

SEQ ID NO: 372316 - DNA, 33 bp, Homo sapien
atattctgagatccacgaaagagtgggaaaacg

SEQ ID NO: 372317 - DNA, 33 bp, Homo sapien
cttacagctctcataacaaaggatactctcatt

SEQ ID NO: 372318 - DNA, 33 bp, Homo sapien
cttacagctctcataataaaggatactctcatt

SEQ ID NO: 372319 - DNA, 33 bp, Homo sapien
tacccctggataagaaagctaaaaatattataa

SEQ ID NO: 372320 - DNA, 33 bp, Homo sapien
tacccctggataagaaggctaaaaatattataa

SEQ ID NO: 372321 - DNA, 33 bp, Homo sapien
ttaagtggtgagtgggaatatgatttattttta

SEQ ID NO: 372322 - DNA, 33 bp, Homo sapien
ttaagtggtgagtggggatatgatttattttta

SEQ ID NO: 372323 - DNA, 33 bp, Homo sapien
caaactgtctcaaagtaaccccagaagttcatg

SEQ ID NO: 372324 - DNA, 33 bp, Homo sapien
caaactgtctcaaagtgaccccagaagttcatg

SEQ ID NO: 372325 - DNA, 33 bp, Homo sapien
aatatgataatcaaccggcacatttacttcaga

SEQ ID NO: 372326 - DNA, 33 bp, Homo sapien
aatatgataatcaacctgcacatttacttcaga

SEQ ID NO: 372327 - DNA, 33 bp, Homo sapien
tcatttaacacatttaggaagtacctgcaatgt

SEQ ID NO: 372328 - DNA, 33 bp, Homo sapien
tcatttaacacatttatgaagtacctgcaatgt

SEQ ID NO: 372329 - DNA, 33 bp, Homo sapien
cctgcaatgtatcaggaatgaagttacatatct

SEQ ID NO: 372330 - DNA, 33 bp, Homo sapien
cctgcaatgtatcaggcatgaagttacatatct

SEQ ID NO: 372331 - DNA, 33 bp, Homo sapien
ggattagagttagaagaattagcagctgaaaaa

SEQ ID NO: 372332 - DNA, 33 bp, Homo sapien
ggattagagttagaagcattagcagctgaaaaa

SEQ ID NO: 372333 - DNA, 33 bp, Homo sapien
gagacagctgtgaatcactgttttgaaatggaa

SEQ ID NO: 372334 - DNA, 33 bp, Homo sapien
gagacagctgtgaatcgctgttttgaaatggaa

SEQ ID NO: 372335 - DNA, 33 bp, Homo sapien
cattttgataaaagcccgagatcctggcaacta

SEQ ID NO: 372336 - DNA, 33 bp, Homo sapien
cattttgataaaagcctgagatcctggcaacta

SEQ ID NO: 372337 - DNA, 33 bp, Homo sapien
catctgagctctcgtacgtttgttttcaccaaa

SEQ ID NO: 372338 - DNA, 33 bp, Homo sapien
catctgagctctcgtatgtttgttttcaccaaa

SEQ ID NO: 372339 - DNA, 33 bp, Homo sapien
gagcaggtacgctgcacagagtagactcgtaga

SEQ ID NO: 372340 - DNA, 33 bp, Homo sapien
gagcaggtacgctgcagagagtagactcgtaga

SEQ ID NO: 372341 - DNA, 33 bp, Homo sapien
agatagtacagatcaagtgtgattctattcgtc

SEQ ID NO: 372342 - DNA, 33 bp, Homo sapien
agatagtacagatcaattgtgattctattcgtc

SEQ ID NO: 372343 - DNA, 33 bp, Homo sapien
tccataaagccttccacgatttcaccttctgca

SEQ ID NO: 372344 - DNA, 33 bp, Homo sapien
tccataaagccttccatgatttcaccttctgca

SEQ ID NO: 372345 - DNA, 33 bp, Homo sapien
ttgtatcatttttcccagaaatgctacatgaac

SEQ ID NO: 372346 - DNA, 33 bp, Homo sapien
ttgtatcatttttccctgaaatgctacatgaac

SEQ ID NO: 372347 - DNA, 33 bp, Homo sapien
atggcctatagtttaccctactcctcactcagc

SEQ ID NO: 372348 - DNA, 33 bp, Homo sapien
atggcctatagtttactctactcctcactcagc

SEQ ID NO: 372349 - DNA, 33 bp, Homo sapien
gattcttgattttttcacaggtggcaggtaaga

SEQ ID NO: 372350 - DNA, 33 bp, Homo sapien
gattcttgattttttcgcaggtggcaggtaaga

SEQ ID NO: 372351 - DNA, 33 bp, Homo sapien
agaatgtgagttgatgaagagataaggtcattg

SEQ ID NO: 372352 - DNA, 33 bp, Homo sapien
agaatgtgagttgatgcagagataaggtcattg

SEQ ID NO: 372353 - DNA, 33 bp, Homo sapien
cttgtgcagatctagccacataacaatcagaaa

SEQ ID NO: 372354 - DNA, 33 bp, Homo sapien
cttgtgcagatctagctacataacaatcagaaa

SEQ ID NO: 372355 - DNA, 33 bp, Homo sapien
agtagatcaagtgctacaattaggaagcatagc

SEQ ID NO: 372356 - DNA, 33 bp, Homo sapien
agtagatcaagtgctataattaggaagcatagc

SEQ ID NO: 372357 - DNA, 33 bp, Homo sapien
caacaatagataaataatatgccaagtaatggt

SEQ ID NO: 372358 - DNA, 33 bp, Homo sapien
caacaatagataaatagtatgccaagtaatggt

SEQ ID NO: 372359 - DNA, 33 bp, Homo sapien
cacctattcctttcggccagtgttattgccagg

SEQ ID NO: 372360 - DNA, 33 bp, Homo sapien
cacctattcctttcggtcagtgttattgccagg

SEQ ID NO: 372361 - DNA, 33 bp, Homo sapien
ccatgcaggtgtttgaacataactgtcattgtc

SEQ ID NO: 372362 - DNA, 33 bp, Homo sapien
ccatgcaggtgtttgaccataactgtcattgtc

SEQ ID NO: 372363 - DNA, 33 bp, Homo sapien
ctctgccccactgacactgaatgtttccagatg

SEQ ID NO: 372364 - DNA, 33 bp, Homo sapien
ctctgccccactgacattgaatgtttccagatg

SEQ ID NO: 372365 - DNA, 33 bp, Homo sapien
ctttcagcccagacacaaggaagacaaaggagt

SEQ ID NO: 372366 - DNA, 33 bp, Homo sapien
ctttcagcccagacacgaggaagacaaaggagt

SEQ ID NO: 372367 - DNA, 33 bp, Homo sapien
taatcaatcaaaactcaattagtccacattttg

SEQ ID NO: 372368 - DNA, 33 bp, Homo sapien
taatcaatcaaaactccattagtccacattttg

SEQ ID NO: 372369 - DNA, 33 bp, Homo sapien
gtgaattttgagtatacgaggaatgcataaaaa

SEQ ID NO: 372370 - DNA, 33 bp, Homo sapien
gtgaattttgagtataggaggaatgcataaaaa

SEQ ID NO: 372371 - DNA, 33 bp, Homo sapien
atggagctggaagaaaataccaattcaagactt

SEQ ID NO: 372372 - DNA, 33 bp, Homo sapien
atggagctggaagaaagtaccaattcaagactt

SEQ ID NO: 372373 - DNA, 33 bp, Homo sapien
atgtgacttattgaggcacccagttgacaccca

SEQ ID NO: 372374 - DNA, 33 bp, Homo sapien
atgtgacttattgaggtacccagttgacaccca

SEQ ID NO: 372375 - DNA, 33 bp, Homo sapien
gctattaaaatgttaaacttttctctgcaactt

SEQ ID NO: 372376 - DNA, 33 bp, Homo sapien
gctattaaaatgttaaccttttctctgcaactt

SEQ ID NO: 372377 - DNA, 33 bp, Homo sapien
acaaacttccatcttaacatctgcatcccgagg

SEQ ID NO: 372378 - DNA, 33 bp, Homo sapien
acaaacttccatcttagcatctgcatcccgagg

SEQ ID NO: 372379 - DNA, 33 bp, Homo sapien
aattgaagcatcgtaaatgaacaaaaccctttt

SEQ ID NO: 372380 - DNA, 33 bp, Homo sapien
aattgaagcatcgtaagtgaacaaaaccctttt

SEQ ID NO: 372381 - DNA, 33 bp, Homo sapien
tctgttcaaggaactaaggatcaacctgagaga

SEQ ID NO: 372382 - DNA, 33 bp, Homo sapien
tctgttcaaggaactacggatcaacctgagaga

SEQ ID NO: 372383 - DNA, 33 bp, Homo sapien
ggaaatggtcaagaagcctcgattatgaagcag

SEQ ID NO: 372384 - DNA, 33 bp, Homo sapien
ggaaatggtcaagaaggctcgattatgaagcag

SEQ ID NO: 372385 - DNA, 33 bp, Homo sapien
gttgattatgaagcaacgcagctttcctaagtg

SEQ ID NO: 372386 - DNA, 33 bp, Homo sapien
gttgattatgaagcaatgcagctttcctaagtg

SEQ ID NO: 372387 - DNA, 33 bp, Homo sapien
cccagcaaattccaggaaactgtcaagaggaag

SEQ ID NO: 372388 - DNA, 33 bp, Homo sapien
cccagcaaattccaggcaactgtcaagaggaag

SEQ ID NO: 372389 - DNA, 33 bp, Homo sapien
acaaacatgaatggcacagaaccttggtggtag

SEQ ID NO: 372390 - DNA, 33 bp, Homo sapien
acaaacatgaatggcagagaaccttggtggtag

SEQ ID NO: 372391 - DNA, 33 bp, Homo sapien
ttgatagtcatgatgaaaacagctaatattggt

SEQ ID NO: 372392 - DNA, 33 bp, Homo sapien
ttgatagtcatgatgataacagctaatattggt

SEQ ID NO: 372393 - DNA, 33 bp, Homo sapien
tgtatgggaacttggacggtgagaaccaagtgt

SEQ ID NO: 372394 - DNA, 33 bp, Homo sapien
tgtatgggaacttggatggtgagaaccaagtgt

SEQ ID NO: 372395 - DNA, 33 bp, Homo sapien
aaagaagacgggaccacattcacatgtatgacc

SEQ ID NO: 372396 - DNA, 33 bp, Homo sapien
aaagaagacgggaccatattcacatgtatgacc

SEQ ID NO: 372397 - DNA, 33 bp, Homo sapien
cttgggaaaccccggaaagtgagtggtgatccg

SEQ ID NO: 372398 - DNA, 33 bp, Homo sapien
cttgggaaaccccggagagtgagtggtgatccg

SEQ ID NO: 372399 - DNA, 33 bp, Homo sapien
cctccatggtcaaagacggtgacaaccaatggg

SEQ ID NO: 372400 - DNA, 33 bp, Homo sapien
cctccatggtcaaagatggtgacaaccaatggg

SEQ ID NO: 372401 - DNA, 33 bp, Homo sapien
taactaggggaacgatgaacatctcccacatat

SEQ ID NO: 372402 - DNA, 33 bp, Homo sapien
taactaggggaacgattaacatctcccacatat

SEQ ID NO: 372403 - DNA, 33 bp, Homo sapien
tgaaataactgatgccagatcatgtcatgtaat

SEQ ID NO: 372404 - DNA, 33 bp, Homo sapien
tgaaataactgatgccggatcatgtcatgtaat

SEQ ID NO: 372405 - DNA, 33 bp, Homo sapien
agggtcacacagacaactgagcaatattgagat

SEQ ID NO: 372406 - DNA, 33 bp, Homo sapien
agggtcacacagacaattgagcaatattgagat

SEQ ID NO: 372407 - DNA, 33 bp, Homo sapien
cctgatgtctttgaaaagtgttctgggcaagct

SEQ ID NO: 372408 - DNA, 33 bp, Homo sapien
cctgatgtctttgaaaggtgttctgggcaagct

SEQ ID NO: 372409 - DNA, 33 bp, Homo sapien
cccctcagaagagttaaggctccagaaagttag

SEQ ID NO: 372410 - DNA, 33 bp, Homo sapien
cccctcagaagagttagggctccagaaagttag

SEQ ID NO: 372411 - DNA, 33 bp, Homo sapien
catctgtgtcccccacaaaatggtgtagcccat

SEQ ID NO: 372412 - DNA, 33 bp, Homo sapien
catctgtgtcccccacgaaatggtgtagcccat

SEQ ID NO: 372413 - DNA, 33 bp, Homo sapien
cataacagaactttaagagtgaaccaatgaaga

SEQ ID NO: 372414 - DNA, 33 bp, Homo sapien
cataacagaactttaatagtgaaccaatgaaga

SEQ ID NO: 372415 - DNA, 33 bp, Homo sapien
atgaaatccttctttacctataaacacaagcaa

SEQ ID NO: 372416 - DNA, 33 bp, Homo sapien
atgaaatccttctttatctataaacacaagcaa

SEQ ID NO: 372417 - DNA, 33 bp, Homo sapien
ctgttcttttgtgggcgatacactatgttctcc

SEQ ID NO: 372418 - DNA, 33 bp, Homo sapien
ctgttcttttgtgggctatacactatgttctcc

SEQ ID NO: 372419 - DNA, 33 bp, Homo sapien
tgcttctttgtctgtaggatttgaataaagaga

SEQ ID NO: 372420 - DNA, 33 bp, Homo sapien
tgcttctttgtctgtatgatttgaataaagaga

SEQ ID NO: 372421 - DNA, 33 bp, Homo sapien
gactgggtcacttgcccatttcagaacaaatca

SEQ ID NO: 372422 - DNA, 33 bp, Homo sapien
gactgggtcacttgcctatttcagaacaaatca

SEQ ID NO: 372423 - DNA, 33 bp, Homo sapien
cagaaacagatcaaagaaaagcatatagaagtt

SEQ ID NO: 372424 - DNA, 33 bp, Homo sapien
cagaaacagatcaaaggaaagcatatagaagtt

SEQ ID NO: 372425 - DNA, 33 bp, Homo sapien
cctacatgttcaataaacttacatcttcagtct

SEQ ID NO: 372426 - DNA, 33 bp, Homo sapien
cctacatgttcaataagcttacatcttcagtct

SEQ ID NO: 372427 - DNA, 33 bp, Homo sapien
tggtgttgctgtctttaaaacaagagaaaagag

SEQ ID NO: 372428 - DNA, 33 bp, Homo sapien
tggtgttgctgtctttcaaacaagagaaaagag

SEQ ID NO: 372429 - DNA, 33 bp, Homo sapien
tggccaatgtggcaaacgaaacctcatctctac

SEQ ID NO: 372430 - DNA, 33 bp, Homo sapien
tggccaatgtggcaaatgaaacctcatctctac

SEQ ID NO: 372431 - DNA, 33 bp, Homo sapien
ttcatttctgggcatccagtcccaatagtgggc

SEQ ID NO: 372432 - DNA, 33 bp, Homo sapien
ttcatttctgggcatcgagtcccaatagtgggc

SEQ ID NO: 372433 - DNA, 33 bp, Homo sapien
acctggtcacccaagaagttcgatggagatgtt

SEQ ID NO: 372434 - DNA, 33 bp, Homo sapien
acctggtcacccaagaggttcgatggagatgtt

SEQ ID NO: 372435 - DNA, 33 bp, Homo sapien
acccctgccactattagcaacaaatttacataa

SEQ ID NO: 372436 - DNA, 33 bp, Homo sapien
acccctgccactattatcaacaaatttacataa

SEQ ID NO: 372437 - DNA, 33 bp, Homo sapien
ttgcaccatactgtagcatattaagtgagcaat

SEQ ID NO: 372438 - DNA, 33 bp, Homo sapien
ttgcaccatactgtaggatattaagtgagcaat

SEQ ID NO: 372439 - DNA, 33 bp, Homo sapien
gcaataaagtgagtcccgcagattttttgtttt

SEQ ID NO: 372440 - DNA, 33 bp, Homo sapien
gcaataaagtgagtcctgcagattttttgtttt

SEQ ID NO: 372441 - DNA, 33 bp, Homo sapien
gcattcccaatggatccgaagactcgatggaag

SEQ ID NO: 372442 - DNA, 33 bp, Homo sapien
gcattcccaatggatctgaagactcgatggaag

SEQ ID NO: 372443 - DNA, 33 bp, Homo sapien
aaggtcagagcaaaatcaatagggaacagttac

SEQ ID NO: 372444 - DNA, 33 bp, Homo sapien
aaggtcagagcaaaatgaatagggaacagttac

SEQ ID NO: 372445 - DNA, 33 bp, Homo sapien
acctgtggatctctaaccagtcaaatagatccc

SEQ ID NO: 372446 - DNA, 33 bp, Homo sapien
acctgtggatctctaatcagtcaaatagatccc

SEQ ID NO: 372447 - DNA, 33 bp, Homo sapien
aacaggtatgtacttacatttagagcagctatt

SEQ ID NO: 372448 - DNA, 33 bp, Homo sapien
aacaggtatgtacttagatttagagcagctatt

SEQ ID NO: 372449 - DNA, 33 bp, Homo sapien
ttaaattcaagtgataacttttctggacctcca

SEQ ID NO: 372450 - DNA, 33 bp, Homo sapien
ttaaattcaagtgatagcttttctggacctcca

SEQ ID NO: 372451 - DNA, 33 bp, Homo sapien
aggtcagattgaaatggcatggcccagggccct

SEQ ID NO: 372452 - DNA, 33 bp, Homo sapien
aggtcagattgaaatgtcatggcccagggccct

SEQ ID NO: 372453 - DNA, 33 bp, Homo sapien
gaacatgagagtttaaacccagtacaggttgca

SEQ ID NO: 372454 - DNA, 33 bp, Homo sapien
gaacatgagagtttaatcccagtacaggttgca

SEQ ID NO: 372455 - DNA, 33 bp, Homo sapien
gtatgatggagctcagaaagatgtaattcctcc

SEQ ID NO: 372456 - DNA, 33 bp, Homo sapien
gtatgatggagctcaggaagatgtaattcctcc

SEQ ID NO: 372457 - DNA, 33 bp, Homo sapien
cagaagagagggcatgacactttcaaaaggctg

SEQ ID NO: 372458 - DNA, 33 bp, Homo sapien
cagaagagagggcatggcactttcaaaaggctg

SEQ ID NO: 372459 - DNA, 33 bp, Homo sapien
tcacaaaaccagaatcccattgaacttccgcaa

SEQ ID NO: 372460 - DNA, 33 bp, Homo sapien
tcacaaaaccagaatctcattgaacttccgcaa

SEQ ID NO: 372461 - DNA, 33 bp, Homo sapien
agaaattagatggtcacggtgaagcacgcctgt

SEQ ID NO: 372462 - DNA, 33 bp, Homo sapien
agaaattagatggtcatggtgaagcacgcctgt

SEQ ID NO: 372463 - DNA, 33 bp, Homo sapien
gtttcaatatttgccaaacgtaacatctgacaa

SEQ ID NO: 372464 - DNA, 33 bp, Homo sapien
gtttcaatatttgccagacgtaacatctgacaa

SEQ ID NO: 372465 - DNA, 33 bp, Homo sapien
gagatgagtggaagaaccagaactcaagcctgg

SEQ ID NO: 372466 - DNA, 33 bp, Homo sapien
gagatgagtggaagaatcagaactcaagcctgg

SEQ ID NO: 372467 - DNA, 33 bp, Homo sapien
gcttgttttctagcgagcactagcagacactta

SEQ ID NO: 372468 - DNA, 33 bp, Homo sapien
gcttgttttctagcgatcactagcagacactta

SEQ ID NO: 372469 - DNA, 33 bp, Homo sapien
agctgtctatgtttccagacccattttacatgt

SEQ ID NO: 372470 - DNA, 33 bp, Homo sapien
agctgtctatgtttccggacccattttacatgt

SEQ ID NO: 372471 - DNA, 33 bp, Homo sapien
ggccatatgtagaaacgccaatcaaccatccca

SEQ ID NO: 372472 - DNA, 33 bp, Homo sapien
ggccatatgtagaaactccaatcaaccatccca

SEQ ID NO: 372473 - DNA, 33 bp, Homo sapien
tcagccattgcaaaccaggccatggtcagaacc

SEQ ID NO: 372474 - DNA, 33 bp, Homo sapien
tcagccattgcaaaccgggccatggtcagaacc

SEQ ID NO: 372475 - DNA, 33 bp, Homo sapien
ttctccaatccttgcactaatggtcacagactc

SEQ ID NO: 372476 - DNA, 33 bp, Homo sapien
ttctccaatccttgcagtaatggtcacagactc

SEQ ID NO: 372477 - DNA, 33 bp, Homo sapien
aggaggaatctttctacgacagactgataatgc

SEQ ID NO: 372478 - DNA, 33 bp, Homo sapien
aggaggaatctttctatgacagactgataatgc

SEQ ID NO: 372479 - DNA, 33 bp, Homo sapien
ggcagctgtgtaatgacgcatggtgatggactt

SEQ ID NO: 372480 - DNA, 33 bp, Homo sapien
ggcagctgtgtaatgatgcatggtgatggactt

SEQ ID NO: 372481 - DNA, 33 bp, Homo sapien
tagacgttttcctgccacgtctaggcaaaccct

SEQ ID NO: 372482 - DNA, 33 bp, Homo sapien
tagacgttttcctgccgcgtctaggcaaaccct

SEQ ID NO: 372483 - DNA, 33 bp, Homo sapien
gcttctgtctccctaactcagtgcaggccacaa

SEQ ID NO: 372484 - DNA, 33 bp, Homo sapien
gcttctgtctccctaattcagtgcaggccacaa

SEQ ID NO: 372485 - DNA, 33 bp, Homo sapien
ttagcattcacagtacaataccattttacagat

SEQ ID NO: 372486 - DNA, 33 bp, Homo sapien
ttagcattcacagtactataccattttacagat

SEQ ID NO: 372487 - DNA, 33 bp, Homo sapien
gttcagctctgctaggcaggtacctttgaaact

SEQ ID NO: 372488 - DNA, 33 bp, Homo sapien
gttcagctctgctaggtaggtacctttgaaact

SEQ ID NO: 372489 - DNA, 33 bp, Homo sapien
agctccagcacctccagatttttactgctgaac

SEQ ID NO: 372490 - DNA, 33 bp, Homo sapien
agctccagcacctccatatttttactgctgaac

SEQ ID NO: 372491 - DNA, 33 bp, Homo sapien
ttcagtttgtctacttcaaagtgtctccaaatt

SEQ ID NO: 372492 - DNA, 33 bp, Homo sapien
ttcagtttgtctacttgaaagtgtctccaaatt

SEQ ID NO: 372493 - DNA, 33 bp, Homo sapien
acagagtagtataatcaacacgggagactcaga

SEQ ID NO: 372494 - DNA, 33 bp, Homo sapien
acagagtagtataatcgacacgggagactcaga

SEQ ID NO: 372495 - DNA, 33 bp, Homo sapien
aagcatgaagtggacaagtagtaaatgttagtt

SEQ ID NO: 372496 - DNA, 33 bp, Homo sapien
aagcatgaagtggacaggtagtaaatgttagtt

SEQ ID NO: 372497 - DNA, 33 bp, Homo sapien
tggacttttgggttaccggaagctgtaaggtcc

SEQ ID NO: 372498 - DNA, 33 bp, Homo sapien
tggacttttgggttactggaagctgtaaggtcc

SEQ ID NO: 372499 - DNA, 33 bp, Homo sapien
gagcaaccgagtatggcattgcaaaaaaaaatt

SEQ ID NO: 372500 - DNA, 33 bp, Homo sapien
gagcaaccgagtatggtattgcaaaaaaaaatt

SEQ ID NO: 372501 - DNA, 33 bp, Homo sapien
aagttttgtaggataagtacagctgacccaaca

SEQ ID NO: 372502 - DNA, 33 bp, Homo sapien
aagttttgtaggataattacagctgacccaaca

SEQ ID NO: 372503 - DNA, 33 bp, Homo sapien
ctaagtctacgggacaaggaatacatactccat

SEQ ID NO: 372504 - DNA, 33 bp, Homo sapien
ctaagtctacgggacagggaatacatactccat

SEQ ID NO: 372505 - DNA, 33 bp, Homo sapien
tggccctcatctcatcacttccgaaagcttcca

SEQ ID NO: 372506 - DNA, 33 bp, Homo sapien
tggccctcatctcatcgcttccgaaagcttcca

SEQ ID NO: 372507 - DNA, 33 bp, Homo sapien
atttacatacgtgccagtccatgcaaccacttt

SEQ ID NO: 372508 - DNA, 33 bp, Homo sapien
atttacatacgtgccattccatgcaaccacttt

SEQ ID NO: 372509 - DNA, 33 bp, Homo sapien
aggttaagagcttttacagtgttacatggtaac

SEQ ID NO: 372510 - DNA, 33 bp, Homo sapien
aggttaagagcttttatagtgttacatggtaac

SEQ ID NO: 372511 - DNA, 33 bp, Homo sapien
gagaccctgttgcaaaaatacataaaaataaaa

SEQ ID NO: 372512 - DNA, 33 bp, Homo sapien
gagaccctgttgcaaacatacataaaaataaaa

SEQ ID NO: 372513 - DNA, 33 bp, Homo sapien
aggatcagtaagaagacgttgagtgaaaaagag

SEQ ID NO: 372514 - DNA, 33 bp, Homo sapien
aggatcagtaagaagatgttgagtgaaaaagag

SEQ ID NO: 372515 - DNA, 33 bp, Homo sapien
tgtccatgttttcccaatgaataaccactttaa

SEQ ID NO: 372516 - DNA, 33 bp, Homo sapien
tgtccatgttttcccagtgaataaccactttaa

SEQ ID NO: 372517 - DNA, 33 bp, Homo sapien
gtgggtttatttctcacgctctgtctttagaac

SEQ ID NO: 372518 - DNA, 33 bp, Homo sapien
gtgggtttatttctcatgctctgtctttagaac

SEQ ID NO: 372519 - DNA, 33 bp, Homo sapien
gaagaaagtataggccaagaagaaaccatatgt

SEQ ID NO: 372520 - DNA, 33 bp, Homo sapien
gaagaaagtataggccgagaagaaaccatatgt

SEQ ID NO: 372521 - DNA, 33 bp, Homo sapien
tgagaactacccaactaagccaaagtaacccac

SEQ ID NO: 372522 - DNA, 33 bp, Homo sapien
tgagaactacccaactgagccaaagtaacccac

SEQ ID NO: 372523 - DNA, 33 bp, Homo sapien
tcaccttgcatcaagcaatcccagctcttcaaa

SEQ ID NO: 372524 - DNA, 33 bp, Homo sapien
tcaccttgcatcaagcgatcccagctcttcaaa

SEQ ID NO: 372525 - DNA, 33 bp, Homo sapien
actgcagacaaaaatcaatagttctcctaagca

SEQ ID NO: 372526 - DNA, 33 bp, Homo sapien
actgcagacaaaaatcgatagttctcctaagca

SEQ ID NO: 372527 - DNA, 33 bp, Homo sapien
ttccaggaagtagccacgcttgttggtaagtgc

SEQ ID NO: 372528 - DNA, 33 bp, Homo sapien
ttccaggaagtagccaggcttgttggtaagtgc

SEQ ID NO: 372529 - DNA, 33 bp, Homo sapien
ggaaagagccacaagaagtagtctctttctgag

SEQ ID NO: 372530 - DNA, 33 bp, Homo sapien
ggaaagagccacaagatgtagtctctttctgag

SEQ ID NO: 372531 - DNA, 33 bp, Homo sapien
tagtagagtttctggacgtaaagctgactaaat

SEQ ID NO: 372532 - DNA, 33 bp, Homo sapien
tagtagagtttctggaggtaaagctgactaaat

SEQ ID NO: 372533 - DNA, 33 bp, Homo sapien
aggcactgagaggtaaataattcacctaataag

SEQ ID NO: 372534 - DNA, 33 bp, Homo sapien
aggcactgagaggtaagtaattcacctaataag

SEQ ID NO: 372535 - DNA, 33 bp, Homo sapien
tacaggaaagcacatacgttgtagggcacatca

SEQ ID NO: 372536 - DNA, 33 bp, Homo sapien
tacaggaaagcacatatgttgtagggcacatca

SEQ ID NO: 372537 - DNA, 33 bp, Homo sapien
gagacagagattggcacgatgtacctgcaaacc

SEQ ID NO: 372538 - DNA, 33 bp, Homo sapien
gagacagagattggcatgatgtacctgcaaacc

SEQ ID NO: 372539 - DNA, 33 bp, Homo sapien
tcagtgtgctgggaggaaagtatttactcccat

SEQ ID NO: 372540 - DNA, 33 bp, Homo sapien
tcagtgtgctgggagggaagtatttactcccat

SEQ ID NO: 372541 - DNA, 33 bp, Homo sapien
atagttttgcttttggcagcttcaggtggcttt

SEQ ID NO: 372542 - DNA, 33 bp, Homo sapien
atagttttgcttttggtagcttcaggtggcttt

SEQ ID NO: 372543 - DNA, 33 bp, Homo sapien
agttgcaatcaaaagacatttgctggaaagaca

SEQ ID NO: 372544 - DNA, 33 bp, Homo sapien
agttgcaatcaaaagagatttgctggaaagaca

SEQ ID NO: 372545 - DNA, 33 bp, Homo sapien
ctaatgttgctatacacgaaaacagcgtgggtc

SEQ ID NO: 372546 - DNA, 33 bp, Homo sapien
ctaatgttgctatacatgaaaacagcgtgggtc

SEQ ID NO: 372547 - DNA, 33 bp, Homo sapien
tcaatgagacacagagaagattaaattgaaaaa

SEQ ID NO: 372548 - DNA, 33 bp, Homo sapien
tcaatgagacacagaggagattaaattgaaaaa

SEQ ID NO: 372549 - DNA, 33 bp, Homo sapien
tggggtcatatacctacgtttagagcctggaaa

SEQ ID NO: 372550 - DNA, 33 bp, Homo sapien
tggggtcatatacctatgtttagagcctggaaa

SEQ ID NO: 372551 - DNA, 33 bp, Homo sapien
aatgtaggtctggggacgacatatgaggacgat

SEQ ID NO: 372552 - DNA, 33 bp, Homo sapien
aatgtaggtctggggatgacatatgaggacgat

SEQ ID NO: 372553 - DNA, 33 bp, Homo sapien
aactgggtgacttgccaatgatcacgcagccag

SEQ ID NO: 372554 - DNA, 33 bp, Homo sapien
aactgggtgacttgcccatgatcacgcagccag

SEQ ID NO: 372555 - DNA, 33 bp, Homo sapien
agaatctttcttgctcaatgtcttctcactgtc

SEQ ID NO: 372556 - DNA, 33 bp, Homo sapien
agaatctttcttgctcgatgtcttctcactgtc

SEQ ID NO: 372557 - DNA, 33 bp, Homo sapien
cttgcaaactgaaaataactttagtagtgctaa

SEQ ID NO: 372558 - DNA, 33 bp, Homo sapien
cttgcaaactgaaaatgactttagtagtgctaa

SEQ ID NO: 372559 - DNA, 33 bp, Homo sapien
gtaacaaacataagaaagatgggtcaatataac

SEQ ID NO: 372560 - DNA, 33 bp, Homo sapien
gtaacaaacataagaaggatgggtcaatataac

SEQ ID NO: 372561 - DNA, 33 bp, Homo sapien
ttacacacctatcttaaaattacacaaaatcca

SEQ ID NO: 372562 - DNA, 33 bp, Homo sapien
ttacacacctatcttagaattacacaaaatcca

SEQ ID NO: 372563 - DNA, 33 bp, Homo sapien
agggatctcattaaataaagcaagacaatttgc

SEQ ID NO: 372564 - DNA, 33 bp, Homo sapien
agggatctcattaaatgaagcaagacaatttgc

SEQ ID NO: 372565 - DNA, 33 bp, Homo sapien
ttatttcttcatttaccgacttcctccccagaa

SEQ ID NO: 372566 - DNA, 33 bp, Homo sapien
ttatttcttcatttactgacttcctccccagaa

SEQ ID NO: 372567 - DNA, 33 bp, Homo sapien
aataaggaaaaatcatgaaaatctctgaatcac

SEQ ID NO: 372568 - DNA, 33 bp, Homo sapien
aataaggaaaaatcattaaaatctctgaatcac

SEQ ID NO: 372569 - DNA, 33 bp, Homo sapien
aaggcctcatgtcaacccaatttaaatctggtt

SEQ ID NO: 372570 - DNA, 33 bp, Homo sapien
aaggcctcatgtcaactcaatttaaatctggtt

SEQ ID NO: 372571 - DNA, 33 bp, Homo sapien
acagaaagccaaaagacacaaacagagaaggca

SEQ ID NO: 372572 - DNA, 33 bp, Homo sapien
acagaaagccaaaagatacaaacagagaaggca

SEQ ID NO: 372573 - DNA, 33 bp, Homo sapien
agaaaagaataaggcaatcttggctgagggcgt

SEQ ID NO: 372574 - DNA, 33 bp, Homo sapien
agaaaagaataaggcagtcttggctgagggcgt

SEQ ID NO: 372575 - DNA, 33 bp, Homo sapien
aaattttggcagaataagagtgaacaggtttct

SEQ ID NO: 372576 - DNA, 33 bp, Homo sapien
aaattttggcagaataggagtgaacaggtttct

SEQ ID NO: 372577 - DNA, 33 bp, Homo sapien
gactgaacaactaaacggccgtttacatcattt

SEQ ID NO: 372578 - DNA, 33 bp, Homo sapien
gactgaacaactaaactgccgtttacatcattt

SEQ ID NO: 372579 - DNA, 33 bp, Homo sapien
attaggagtaggtaaccaggctgagatgtaggg

SEQ ID NO: 372580 - DNA, 33 bp, Homo sapien
attaggagtaggtaactaggctgagatgtaggg

SEQ ID NO: 372581 - DNA, 33 bp, Homo sapien
tctagggtctagaaaaatgtctgggaaaactgg

SEQ ID NO: 372582 - DNA, 33 bp, Homo sapien
tctagggtctagaaaagtgtctgggaaaactgg

SEQ ID NO: 372583 - DNA, 33 bp, Homo sapien
acacattcatgcccaactgtttatgtagtgtct

SEQ ID NO: 372584 - DNA, 33 bp, Homo sapien
acacattcatgcccaattgtttatgtagtgtct

SEQ ID NO: 372585 - DNA, 33 bp, Homo sapien
acttgtaagggtctcactcacaggctgacaaac

SEQ ID NO: 372586 - DNA, 33 bp, Homo sapien
acttgtaagggtctcattcacaggctgacaaac

SEQ ID NO: 372587 - DNA, 33 bp, Homo sapien
agagtgatattttgtaagtttgccttgcttagc

SEQ ID NO: 372588 - DNA, 33 bp, Homo sapien
agagtgatattttgtatgtttgccttgcttagc

SEQ ID NO: 372589 - DNA, 33 bp, Homo sapien
aaggtgagaaggctcaatccccaaactcactgc

SEQ ID NO: 372590 - DNA, 33 bp, Homo sapien
aaggtgagaaggctcagtccccaaactcactgc

SEQ ID NO: 372591 - DNA, 33 bp, Homo sapien
ctacatttgctcaaaaatccaccattgctttct

SEQ ID NO: 372592 - DNA, 33 bp, Homo sapien
ctacatttgctcaaaagtccaccattgctttct

SEQ ID NO: 372593 - DNA, 33 bp, Homo sapien
tcacattgacatcatccccgtatcccaaattgt

SEQ ID NO: 372594 - DNA, 33 bp, Homo sapien
tcacattgacatcatctccgtatcccaaattgt

SEQ ID NO: 372595 - DNA, 33 bp, Homo sapien
agctggaattgagtaaaggtctacagcccagtt

SEQ ID NO: 372596 - DNA, 33 bp, Homo sapien
agctggaattgagtaagggtctacagcccagtt

SEQ ID NO: 372597 - DNA, 33 bp, Homo sapien
tggtggaactgtgaaccgggacaaactttgaag

SEQ ID NO: 372598 - DNA, 33 bp, Homo sapien
tggtggaactgtgaactgggacaaactttgaag

SEQ ID NO: 372599 - DNA, 33 bp, Homo sapien
tgttcataaagaagacagtaacttttatgctga

SEQ ID NO: 372600 - DNA, 33 bp, Homo sapien
tgttcataaagaagacggtaacttttatgctga

SEQ ID NO: 372601 - DNA, 33 bp, Homo sapien
atgaaaatggaatggaagtagcagagttgagag

SEQ ID NO: 372602 - DNA, 33 bp, Homo sapien
atgaaaatggaatggaggtagcagagttgagag

SEQ ID NO: 372603 - DNA, 33 bp, Homo sapien
tctaggatgattaggacagaggaatagtggctt

SEQ ID NO: 372604 - DNA, 33 bp, Homo sapien
tctaggatgattaggatagaggaatagtggctt

SEQ ID NO: 372605 - DNA, 33 bp, Homo sapien
cggcgagagagacgaactgctggttccatcttc

SEQ ID NO: 372606 - DNA, 33 bp, Homo sapien
cggcgagagagacgaattgctggttccatcttc

SEQ ID NO: 372607 - DNA, 33 bp, Homo sapien
accatgtttgttaaaacgccttgagtcagtgca

SEQ ID NO: 372608 - DNA, 33 bp, Homo sapien
accatgtttgttaaaatgccttgagtcagtgca

SEQ ID NO: 372609 - DNA, 33 bp, Homo sapien
tacatcatttcacataactacaaggaggaccct

SEQ ID NO: 372610 - DNA, 33 bp, Homo sapien
tacatcatttcacatagctacaaggaggaccct

SEQ ID NO: 372611 - DNA, 33 bp, Homo sapien
aaaagatacaaaattagagtgagataggaggaa

SEQ ID NO: 372612 - DNA, 33 bp, Homo sapien
aaaagatacaaaattatagtgagataggaggaa

SEQ ID NO: 372613 - DNA, 33 bp, Homo sapien
cagcacaaggtcagccacagacaagtgggcatt

SEQ ID NO: 372614 - DNA, 33 bp, Homo sapien
cagcacaaggtcagccgcagacaagtgggcatt

SEQ ID NO: 372615 - DNA, 33 bp, Homo sapien
cttcaaccacaccataccagtggagctttcatt

SEQ ID NO: 372616 - DNA, 33 bp, Homo sapien
cttcaaccacaccatagcagtggagctttcatt

SEQ ID NO: 372617 - DNA, 33 bp, Homo sapien
attcacttcataaatcactgtttgctcaaagaa

SEQ ID NO: 372618 - DNA, 33 bp, Homo sapien
attcacttcataaatcgctgtttgctcaaagaa

SEQ ID NO: 372619 - DNA, 33 bp, Homo sapien
agtgaatctattaatacgagtgatctggggaca

SEQ ID NO: 372620 - DNA, 33 bp, Homo sapien
agtgaatctattaatatgagtgatctggggaca

SEQ ID NO: 372621 - DNA, 33 bp, Homo sapien
ctaaaaagaaatgagcggagaagacatggagaa

SEQ ID NO: 372622 - DNA, 33 bp, Homo sapien
ctaaaaagaaatgagctgagaagacatggagaa

SEQ ID NO: 372623 - DNA, 33 bp, Homo sapien
tatagcagctaaagcactaattgccaaaatttg

SEQ ID NO: 372624 - DNA, 33 bp, Homo sapien
tatagcagctaaagcattaattgccaaaatttg

SEQ ID NO: 372625 - DNA, 33 bp, Homo sapien
gtctgcatttcagggaagttaggggattaaaag

SEQ ID NO: 372626 - DNA, 33 bp, Homo sapien
gtctgcatttcagggaggttaggggattaaaag

SEQ ID NO: 372627 - DNA, 33 bp, Homo sapien
agatcagtgcctgacacattgtggacattccat

SEQ ID NO: 372628 - DNA, 33 bp, Homo sapien
agatcagtgcctgacatattgtggacattccat

SEQ ID NO: 372629 - DNA, 33 bp, Homo sapien
atgctaatgatagagaagtattcaagctatatt

SEQ ID NO: 372630 - DNA, 33 bp, Homo sapien
atgctaatgatagagaggtattcaagctatatt

SEQ ID NO: 372631 - DNA, 33 bp, Homo sapien
gctcttatagaaaaagactgtgggcccttgatt

SEQ ID NO: 372632 - DNA, 33 bp, Homo sapien
gctcttatagaaaaagtctgtgggcccttgatt

SEQ ID NO: 372633 - DNA, 33 bp, Homo sapien
atgtagaagagatgaaattcaagcatgggtttc

SEQ ID NO: 372634 - DNA, 33 bp, Homo sapien
atgtagaagagatgaatttcaagcatgggtttc

SEQ ID NO: 372635 - DNA, 33 bp, Homo sapien
tccagttctttctcagcacctctttgttcagtt

SEQ ID NO: 372636 - DNA, 33 bp, Homo sapien
tccagttctttctcaggacctctttgttcagtt

SEQ ID NO: 372637 - DNA, 33 bp, Homo sapien
tgatatctctgttttgcagataagcagccgaga

SEQ ID NO: 372638 - DNA, 33 bp, Homo sapien
tgatatctctgttttgtagataagcagccgaga

SEQ ID NO: 372639 - DNA, 33 bp, Homo sapien
catttttattagtaaaagcactaaatgtaagca

SEQ ID NO: 372640 - DNA, 33 bp, Homo sapien
catttttattagtaaaggcactaaatgtaagca

SEQ ID NO: 372641 - DNA, 33 bp, Homo sapien
gtggccaggtaatacactgcattgtgtgtcgag

SEQ ID NO: 372642 - DNA, 33 bp, Homo sapien
gtggccaggtaatacattgcattgtgtgtcgag

SEQ ID NO: 372643 - DNA, 33 bp, Homo sapien
accaggagaaattatccaggtgaagaaataaga

SEQ ID NO: 372644 - DNA, 33 bp, Homo sapien
accaggagaaattatctaggtgaagaaataaga

SEQ ID NO: 372645 - DNA, 33 bp, Homo sapien
aatatccacttgattgcaatgcactgtgcctag

SEQ ID NO: 372646 - DNA, 33 bp, Homo sapien
aatatccacttgattgtaatgcactgtgcctag

SEQ ID NO: 372647 - DNA, 33 bp, Homo sapien
ggtctgcaaaatctaaaatatataccacctggc

SEQ ID NO: 372648 - DNA, 33 bp, Homo sapien
ggtctgcaaaatctaatatatataccacctggc

SEQ ID NO: 372649 - DNA, 33 bp, Homo sapien
gtagagtgtcaaatacaagggtcctgagacagg

SEQ ID NO: 372650 - DNA, 33 bp, Homo sapien
gtagagtgtcaaatactagggtcctgagacagg

SEQ ID NO: 372651 - DNA, 33 bp, Homo sapien
acttaacagtgaatagaatttcaatcatctgga

SEQ ID NO: 372652 - DNA, 33 bp, Homo sapien
acttaacagtgaataggatttcaatcatctgga

SEQ ID NO: 372653 - DNA, 33 bp, Homo sapien
gcctcaaccaactatacattaccacaacaaacc

SEQ ID NO: 372654 - DNA, 33 bp, Homo sapien
gcctcaaccaactatatattaccacaacaaacc

SEQ ID NO: 372655 - DNA, 33 bp, Homo sapien
ggaggacctcatgatcactaactggaggagatg

SEQ ID NO: 372656 - DNA, 33 bp, Homo sapien
ggaggacctcatgatcgctaactggaggagatg

SEQ ID NO: 372657 - DNA, 33 bp, Homo sapien
gtggcttggaggctccacaactctaaattaaaa

SEQ ID NO: 372658 - DNA, 33 bp, Homo sapien
gtggcttggaggctccgcaactctaaattaaaa

SEQ ID NO: 372659 - DNA, 33 bp, Homo sapien
ccagggtaatattgaccctatacaccaggttag

SEQ ID NO: 372660 - DNA, 33 bp, Homo sapien
ccagggtaatattgactctatacaccaggttag

SEQ ID NO: 372661 - DNA, 33 bp, Homo sapien
tcatgggaacttaacaaatgccaacttcttctc

SEQ ID NO: 372662 - DNA, 33 bp, Homo sapien
tcatgggaacttaacagatgccaacttcttctc

SEQ ID NO: 372663 - DNA, 33 bp, Homo sapien
aaggtctttgaagccacgaaactagctgatctt

SEQ ID NO: 372664 - DNA, 33 bp, Homo sapien
aaggtctttgaagccatgaaactagctgatctt

SEQ ID NO: 372665 - DNA, 33 bp, Homo sapien
caatcacccaggaaataagcatagtattcaatt

SEQ ID NO: 372666 - DNA, 33 bp, Homo sapien
caatcacccaggaaatgagcatagtattcaatt

SEQ ID NO: 372667 - DNA, 33 bp, Homo sapien
gaaatgtatagtagcaaagtctgatatttcagt

SEQ ID NO: 372668 - DNA, 33 bp, Homo sapien
gaaatgtatagtagcagagtctgatatttcagt

SEQ ID NO: 372669 - DNA, 33 bp, Homo sapien
ttggttgcttataaatcaaaaggcagaagtgaa

SEQ ID NO: 372670 - DNA, 33 bp, Homo sapien
ttggttgcttataaatgaaaaggcagaagtgaa

SEQ ID NO: 372671 - DNA, 33 bp, Homo sapien
ctgttatctgaaattaccttgttcatatgttca

SEQ ID NO: 372672 - DNA, 33 bp, Homo sapien
ctgttatctgaaattatcttgttcatatgttca

SEQ ID NO: 372673 - DNA, 33 bp, Homo sapien
cttgtgatccaagaaacctggtcagcaagacag

SEQ ID NO: 372674 - DNA, 33 bp, Homo sapien
cttgtgatccaagaaatctggtcagcaagacag

SEQ ID NO: 372675 - DNA, 33 bp, Homo sapien
cgacaataattaacacgcgtactgagcagttaa

SEQ ID NO: 372676 - DNA, 33 bp, Homo sapien
cgacaataattaacactcgtactgagcagttaa

SEQ ID NO: 372677 - DNA, 33 bp, Homo sapien
cactaccatattctcccgatggaatctccacta

SEQ ID NO: 372678 - DNA, 33 bp, Homo sapien
cactaccatattctcctgatggaatctccacta

SEQ ID NO: 372679 - DNA, 33 bp, Homo sapien
cacctgccctttaaaacgctgagaccaaggaaa

SEQ ID NO: 372680 - DNA, 33 bp, Homo sapien
cacctgccctttaaaatgctgagaccaaggaaa

SEQ ID NO: 372681 - DNA, 33 bp, Homo sapien
cagggatgggaggaaactcagaaacgctgaacc

SEQ ID NO: 372682 - DNA, 33 bp, Homo sapien
cagggatgggaggaaagtcagaaacgctgaacc

SEQ ID NO: 372683 - DNA, 33 bp, Homo sapien
gaaggaagaccagtaacgctggagggcagtgag

SEQ ID NO: 372684 - DNA, 33 bp, Homo sapien
gaaggaagaccagtaatgctggagggcagtgag

SEQ ID NO: 372685 - DNA, 33 bp, Homo sapien
gcagaccttttttgtcactcacatatacattaa

SEQ ID NO: 372686 - DNA, 33 bp, Homo sapien
gcagaccttttttgtcgctcacatatacattaa

SEQ ID NO: 372687 - DNA, 33 bp, Homo sapien
catacagagccaaatacattctcttgaaatgaa

SEQ ID NO: 372688 - DNA, 33 bp, Homo sapien
catacagagccaaatatattctcttgaaatgaa

SEQ ID NO: 372689 - DNA, 33 bp, Homo sapien
gtgtagcgatggtcgcaaaacagtaggcaagga

SEQ ID NO: 372690 - DNA, 33 bp, Homo sapien
gtgtagcgatggtcgcgaaacagtaggcaagga

SEQ ID NO: 372691 - DNA, 33 bp, Homo sapien
actgagtctctgactacgggttttcctgtgttt

SEQ ID NO: 372692 - DNA, 33 bp, Homo sapien
actgagtctctgactatgggttttcctgtgttt

SEQ ID NO: 372693 - DNA, 33 bp, Homo sapien
tatctctgggtaaagacggaaatattcatatca

SEQ ID NO: 372694 - DNA, 33 bp, Homo sapien
tatctctgggtaaagatggaaatattcatatca

SEQ ID NO: 372695 - DNA, 33 bp, Homo sapien
ctggcattcctttccagaaaaaagattcagagg

SEQ ID NO: 372696 - DNA, 33 bp, Homo sapien
ctggcattcctttccataaaaaagattcagagg

SEQ ID NO: 372697 - DNA, 33 bp, Homo sapien
ggtctttttaggcccaatgcggtaggtacaatg

SEQ ID NO: 372698 - DNA, 33 bp, Homo sapien
ggtctttttaggcccagtgcggtaggtacaatg

SEQ ID NO: 372699 - DNA, 33 bp, Homo sapien
aattcctttgccctacgattgccactctgataa

SEQ ID NO: 372700 - DNA, 33 bp, Homo sapien
aattcctttgccctactattgccactctgataa

SEQ ID NO: 372701 - DNA, 33 bp, Homo sapien
gctctgagctgagtggcagttctgttgagctgc

SEQ ID NO: 372702 - DNA, 33 bp, Homo sapien
gctctgagctgagtggtagttctgttgagctgc

SEQ ID NO: 372703 - DNA, 33 bp, Homo sapien
tttgcaaaatcaaggaaatgagtggcagaatga

SEQ ID NO: 372704 - DNA, 33 bp, Homo sapien
tttgcaaaatcaaggacatgagtggcagaatga

SEQ ID NO: 372705 - DNA, 33 bp, Homo sapien
gttccctttggctccacgtaagatctaccaggg

SEQ ID NO: 372706 - DNA, 33 bp, Homo sapien
gttccctttggctccaggtaagatctaccaggg

SEQ ID NO: 372707 - DNA, 33 bp, Homo sapien
agctaaaatttaaacccaggtctgattggctga

SEQ ID NO: 372708 - DNA, 33 bp, Homo sapien
agctaaaatttaaaccgaggtctgattggctga

SEQ ID NO: 372709 - DNA, 33 bp, Homo sapien
gtgtctttctttcttcactggtcagctggggat

SEQ ID NO: 372710 - DNA, 33 bp, Homo sapien
gtgtctttctttcttcgctggtcagctggggat

SEQ ID NO: 372711 - DNA, 33 bp, Homo sapien
ttcgcaaaggaaagacaaacgataatctagcaa

SEQ ID NO: 372712 - DNA, 33 bp, Homo sapien
ttcgcaaaggaaagacgaacgataatctagcaa

SEQ ID NO: 372713 - DNA, 33 bp, Homo sapien
ggactaaatgtagaaacggagtctcctgatttc

SEQ ID NO: 372714 - DNA, 33 bp, Homo sapien
ggactaaatgtagaaatggagtctcctgatttc

SEQ ID NO: 372715 - DNA, 33 bp, Homo sapien
tacatgaattgagaagaatcggacaaacaataa

SEQ ID NO: 372716 - DNA, 33 bp, Homo sapien
tacatgaattgagaaggatcggacaaacaataa

SEQ ID NO: 372717 - DNA, 33 bp, Homo sapien
gtttaaatttatgccaactgttgtaccatcttg

SEQ ID NO: 372718 - DNA, 33 bp, Homo sapien
gtttaaatttatgccagctgttgtaccatcttg

SEQ ID NO: 372719 - DNA, 33 bp, Homo sapien
aactgtgctaacaaaacggttgtaagttcttct

SEQ ID NO: 372720 - DNA, 33 bp, Homo sapien
aactgtgctaacaaaatggttgtaagttcttct

SEQ ID NO: 372721 - DNA, 33 bp, Homo sapien
aaaacatgtttatttccagcttgggaacctaca

SEQ ID NO: 372722 - DNA, 33 bp, Homo sapien
aaaacatgtttatttctagcttgggaacctaca

SEQ ID NO: 372723 - DNA, 33 bp, Homo sapien
gaggaggaggagaaaacgaattccaggctaaga

SEQ ID NO: 372724 - DNA, 33 bp, Homo sapien
gaggaggaggagaaaatgaattccaggctaaga

SEQ ID NO: 372725 - DNA, 33 bp, Homo sapien
taaaatccagtcacagaaagttacatattgcat

SEQ ID NO: 372726 - DNA, 33 bp, Homo sapien
taaaatccagtcacagtaagttacatattgcat

SEQ ID NO: 372727 - DNA, 33 bp, Homo sapien
tcactgggggaagctaaggtgtgatttccaact

SEQ ID NO: 372728 - DNA, 33 bp, Homo sapien
tcactgggggaagctacggtgtgatttccaact

SEQ ID NO: 372729 - DNA, 33 bp, Homo sapien
catcagtgacaacccaaagccatatggtaagtt

SEQ ID NO: 372730 - DNA, 33 bp, Homo sapien
catcagtgacaacccagagccatatggtaagtt

SEQ ID NO: 372731 - DNA, 33 bp, Homo sapien
cagattatgattcctgaaaagaagttgcactgg

SEQ ID NO: 372732 - DNA, 33 bp, Homo sapien
cagattatgattcctgcaaagaagttgcactgg

SEQ ID NO: 372733 - DNA, 33 bp, Homo sapien
taatcctgctagtcacaataataacaaaaacaa

SEQ ID NO: 372734 - DNA, 33 bp, Homo sapien
taatcctgctagtcacgataataacaaaaacaa

SEQ ID NO: 372735 - DNA, 33 bp, Homo sapien
gcttgtttttatatcacgggtattgcaagtaat

SEQ ID NO: 372736 - DNA, 33 bp, Homo sapien
gcttgtttttatatcatgggtattgcaagtaat

SEQ ID NO: 372737 - DNA, 33 bp, Homo sapien
tagtaaagtgttaaaggctctaatagaagatgt

SEQ ID NO: 372738 - DNA, 33 bp, Homo sapien
tagtaaagtgttaaagtctctaatagaagatgt

SEQ ID NO: 372739 - DNA, 33 bp, Homo sapien
ggactgaccatcaagaactcatcttttccttgg

SEQ ID NO: 372740 - DNA, 33 bp, Homo sapien
ggactgaccatcaagagctcatcttttccttgg

SEQ ID NO: 372741 - DNA, 33 bp, Homo sapien
aaagaatgttaagccacagagaagctagataaa

SEQ ID NO: 372742 - DNA, 33 bp, Homo sapien
aaagaatgttaagccatagagaagctagataaa

SEQ ID NO: 372743 - DNA, 33 bp, Homo sapien
aattgagcttgaaaagaatgtgagattttatat

SEQ ID NO: 372744 - DNA, 33 bp, Homo sapien
aattgagcttgaaaagcatgtgagattttatat

SEQ ID NO: 372745 - DNA, 33 bp, Homo sapien
ttcaggctctcagaaccgctcagactatcacat

SEQ ID NO: 372746 - DNA, 33 bp, Homo sapien
ttcaggctctcagaactgctcagactatcacat

SEQ ID NO: 372747 - DNA, 33 bp, Homo sapien
gtgacattatatcacacattccagaggttagct

SEQ ID NO: 372748 - DNA, 33 bp, Homo sapien
gtgacattatatcacatattccagaggttagct

SEQ ID NO: 372749 - DNA, 33 bp, Homo sapien
agcagtatcagaatcacctggagtttgttacag

SEQ ID NO: 372750 - DNA, 33 bp, Homo sapien
agcagtatcagaatcatctggagtttgttacag

SEQ ID NO: 372751 - DNA, 33 bp, Homo sapien
tgtttctttggaggaggacctaattctcttaac

SEQ ID NO: 372752 - DNA, 33 bp, Homo sapien
tgtttctttggaggagtacctaattctcttaac

SEQ ID NO: 372753 - DNA, 33 bp, Homo sapien
gctagtacaatgcaatcaatttgttttaagctc

SEQ ID NO: 372754 - DNA, 33 bp, Homo sapien
gctagtacaatgcaattaatttgttttaagctc

SEQ ID NO: 372755 - DNA, 33 bp, Homo sapien
acacagctctaaagaaagccctggactcaagtg

SEQ ID NO: 372756 - DNA, 33 bp, Homo sapien
acacagctctaaagaaggccctggactcaagtg

SEQ ID NO: 372757 - DNA, 33 bp, Homo sapien
acagaaagtggaaagagctccaagcaagaactt

SEQ ID NO: 372758 - DNA, 33 bp, Homo sapien
acagaaagtggaaagatctccaagcaagaactt

SEQ ID NO: 372759 - DNA, 33 bp, Homo sapien
tacccagaataaagaaagttgtactctactgta

SEQ ID NO: 372760 - DNA, 33 bp, Homo sapien
tacccagaataaagaaggttgtactctactgta

SEQ ID NO: 372761 - DNA, 33 bp, Homo sapien
tatttgtgtagtttccaaagttcctcttgtcat

SEQ ID NO: 372762 - DNA, 33 bp, Homo sapien
tatttgtgtagtttccgaagttcctcttgtcat

SEQ ID NO: 372763 - DNA, 33 bp, Homo sapien
ccagtcaatactttcaacattcttctggaaatc

SEQ ID NO: 372764 - DNA, 33 bp, Homo sapien
ccagtcaatactttcatcattcttctggaaatc

SEQ ID NO: 372765 - DNA, 33 bp, Homo sapien
catctccctcctatcacattgtattggtcataa

SEQ ID NO: 372766 - DNA, 33 bp, Homo sapien
catctccctcctatcatattgtattggtcataa

SEQ ID NO: 372767 - DNA, 33 bp, Homo sapien
agctctcatagtagtgaattttattgctttttg

SEQ ID NO: 372768 - DNA, 33 bp, Homo sapien
agctctcatagtagtgcattttattgctttttg

SEQ ID NO: 372769 - DNA, 33 bp, Homo sapien
agatgcccaaagagaaacagaaggaggtctcaa

SEQ ID NO: 372770 - DNA, 33 bp, Homo sapien
agatgcccaaagagaaccagaaggaggtctcaa

SEQ ID NO: 372771 - DNA, 33 bp, Homo sapien
ttgttcctttctttacaaggtggccagagaaat

SEQ ID NO: 372772 - DNA, 33 bp, Homo sapien
ttgttcctttctttactaggtggccagagaaat

SEQ ID NO: 372773 - DNA, 33 bp, Homo sapien
taaactggcaaccaaactcactgttgcataaag

SEQ ID NO: 372774 - DNA, 33 bp, Homo sapien
taaactggcaaccaaattcactgttgcataaag

SEQ ID NO: 372775 - DNA, 33 bp, Homo sapien
gttagattgtggaatacagtttgctctgatgcc

SEQ ID NO: 372776 - DNA, 33 bp, Homo sapien
gttagattgtggaatatagtttgctctgatgcc

SEQ ID NO: 372777 - DNA, 33 bp, Homo sapien
accaagatgtcagtgaaaaagaaggctcagaga

SEQ ID NO: 372778 - DNA, 33 bp, Homo sapien
accaagatgtcagtgagaaagaaggctcagaga

SEQ ID NO: 372779 - DNA, 33 bp, Homo sapien
cacagtgctgcaaaacaaaaattgaagttcagg

SEQ ID NO: 372780 - DNA, 33 bp, Homo sapien
cacagtgctgcaaaaccaaaattgaagttcagg

SEQ ID NO: 372781 - DNA, 33 bp, Homo sapien
catctttgcatttcagaataatttaacacagct

SEQ ID NO: 372782 - DNA, 33 bp, Homo sapien
catctttgcatttcaggataatttaacacagct

SEQ ID NO: 372783 - DNA, 33 bp, Homo sapien
gccccaaaatgctggacgttcttttccatgtgc

SEQ ID NO: 372784 - DNA, 33 bp, Homo sapien
gccccaaaatgctggatgttcttttccatgtgc

SEQ ID NO: 372785 - DNA, 33 bp, Homo sapien
gaaataagtcatgctcaaaaaactgagaccatg

SEQ ID NO: 372786 - DNA, 33 bp, Homo sapien
gaaataagtcatgctcgaaaaactgagaccatg

SEQ ID NO: 372787 - DNA, 33 bp, Homo sapien
cttcaggggtgggaccaatgcggacgatgatag

SEQ ID NO: 372788 - DNA, 33 bp, Homo sapien
cttcaggggtgggaccgatgcggacgatgatag

SEQ ID NO: 372789 - DNA, 33 bp, Homo sapien
cataacctttggtccaaatagctttctcacttc

SEQ ID NO: 372790 - DNA, 33 bp, Homo sapien
cataacctttggtccagatagctttctcacttc

SEQ ID NO: 372791 - DNA, 33 bp, Homo sapien
tcattgttcataaggacagagatgttgcctgat

SEQ ID NO: 372792 - DNA, 33 bp, Homo sapien
tcattgttcataaggatagagatgttgcctgat

SEQ ID NO: 372793 - DNA, 33 bp, Homo sapien
aggggtgagcaggcataaatacgttggaggagg

SEQ ID NO: 372794 - DNA, 33 bp, Homo sapien
aggggtgagcaggcatgaatacgttggaggagg

SEQ ID NO: 372795 - DNA, 33 bp, Homo sapien
gaattagctggaaatagaggagtcatcattgac

SEQ ID NO: 372796 - DNA, 33 bp, Homo sapien
gaattagctggaaatataggagtcatcattgac

SEQ ID NO: 372797 - DNA, 33 bp, Homo sapien
tgataaggttagaacactctaggagaagggaac

SEQ ID NO: 372798 - DNA, 33 bp, Homo sapien
tgataaggttagaacattctaggagaagggaac

SEQ ID NO: 372799 - DNA, 33 bp, Homo sapien
tctaattcagtgctgacgtgccaacaggcagcc

SEQ ID NO: 372800 - DNA, 33 bp, Homo sapien
tctaattcagtgctgatgtgccaacaggcagcc

SEQ ID NO: 372801 - DNA, 33 bp, Homo sapien
tatctaaaactataaacttcacgagattgggga

SEQ ID NO: 372802 - DNA, 33 bp, Homo sapien
tatctaaaactataaatttcacgagattgggga

SEQ ID NO: 372803 - DNA, 33 bp, Homo sapien
ccagattccttcatcaagactgacacactcatc

SEQ ID NO: 372804 - DNA, 33 bp, Homo sapien
ccagattccttcatcaggactgacacactcatc

SEQ ID NO: 372805 - DNA, 33 bp, Homo sapien
tgcaggagtcctccaacggggctctgaaagtta

SEQ ID NO: 372806 - DNA, 33 bp, Homo sapien
tgcaggagtcctccaatggggctctgaaagtta

SEQ ID NO: 372807 - DNA, 33 bp, Homo sapien
tcagccaaacctcacactggagaagagtggttg

SEQ ID NO: 372808 - DNA, 33 bp, Homo sapien
tcagccaaacctcacattggagaagagtggttg

SEQ ID NO: 372809 - DNA, 33 bp, Homo sapien
gattgagtacactggacgtaaagacgggaacaa

SEQ ID NO: 372810 - DNA, 33 bp, Homo sapien
gattgagtacactggatgtaaagacgggaacaa

SEQ ID NO: 372811 - DNA, 33 bp, Homo sapien
agcagctgttgacaccaagcagagacagaagct

SEQ ID NO: 372812 - DNA, 33 bp, Homo sapien
agcagctgttgacacccagcagagacagaagct

SEQ ID NO: 372813 - DNA, 33 bp, Homo sapien
ttgtgataaatcattcagaaacatacttcactt

SEQ ID NO: 372814 - DNA, 33 bp, Homo sapien
ttgtgataaatcattcggaaacatacttcactt

SEQ ID NO: 372815 - DNA, 33 bp, Homo sapien
cctaaacacaggacaaattgagctctttttttt

SEQ ID NO: 372816 - DNA, 33 bp, Homo sapien
cctaaacacaggacaagttgagctctttttttt

SEQ ID NO: 372817 - DNA, 33 bp, Homo sapien
ggctgagaatcatggcacagaaagataggagga

SEQ ID NO: 372818 - DNA, 33 bp, Homo sapien
ggctgagaatcatggcgcagaaagataggagga

SEQ ID NO: 372819 - DNA, 33 bp, Homo sapien
agacttactaccatgaaaaccatatgtggaaaa

SEQ ID NO: 372820 - DNA, 33 bp, Homo sapien
agacttactaccatgagaaccatatgtggaaaa

SEQ ID NO: 372821 - DNA, 33 bp, Homo sapien
tgtggaagacagggacaggtcagcttggccaag

SEQ ID NO: 372822 - DNA, 33 bp, Homo sapien
tgtggaagacagggacgggtcagcttggccaag

SEQ ID NO: 372823 - DNA, 33 bp, Homo sapien
gagccatcagataaaccaaatgtggcgtgtcac

SEQ ID NO: 372824 - DNA, 33 bp, Homo sapien
gagccatcagataaactaaatgtggcgtgtcac

SEQ ID NO: 372825 - DNA, 33 bp, Homo sapien
accaagccaaacaccaactcgtcattgctatag

SEQ ID NO: 372826 - DNA, 33 bp, Homo sapien
accaagccaaacaccatctcgtcattgctatag

SEQ ID NO: 372827 - DNA, 33 bp, Homo sapien
tcttcagattaaccctaaaccagcatagggatt

SEQ ID NO: 372828 - DNA, 33 bp, Homo sapien
tcttcagattaaccctgaaccagcatagggatt

SEQ ID NO: 372829 - DNA, 33 bp, Homo sapien
aagcaagaagcatctcaatctcatacctcaacc

SEQ ID NO: 372830 - DNA, 33 bp, Homo sapien
aagcaagaagcatctcgatctcatacctcaacc

SEQ ID NO: 372831 - DNA, 33 bp, Homo sapien
tgcagtgactgcacacaatagatactctgtaaa

SEQ ID NO: 372832 - DNA, 33 bp, Homo sapien
tgcagtgactgcacactatagatactctgtaaa

SEQ ID NO: 372833 - DNA, 33 bp, Homo sapien
cactatagcactttaaactcatcagagcacttg

SEQ ID NO: 372834 - DNA, 33 bp, Homo sapien
cactatagcactttaatctcatcagagcacttg

SEQ ID NO: 372835 - DNA, 33 bp, Homo sapien
gtgtgtctttctacgacgtcagaattttatcaa

SEQ ID NO: 372836 - DNA, 33 bp, Homo sapien
gtgtgtctttctacgatgtcagaattttatcaa

SEQ ID NO: 372837 - DNA, 33 bp, Homo sapien
tttcatatttcaattcaatttccctagcagaac

SEQ ID NO: 372838 - DNA, 33 bp, Homo sapien
tttcatatttcaattcgatttccctagcagaac

SEQ ID NO: 372839 - DNA, 33 bp, Homo sapien
taaatttagaaaattcagaacaggactgtgagc

SEQ ID NO: 372840 - DNA, 33 bp, Homo sapien
taaatttagaaaattcggaacaggactgtgagc

SEQ ID NO: 372841 - DNA, 33 bp, Homo sapien
gacttcacagattgagaagttctacacaagtct

SEQ ID NO: 372842 - DNA, 33 bp, Homo sapien
gacttcacagattgaggagttctacacaagtct

SEQ ID NO: 372843 - DNA, 33 bp, Homo sapien
acaacctggtccacaacaggtgtttctgatggc

SEQ ID NO: 372844 - DNA, 33 bp, Homo sapien
acaacctggtccacaataggtgtttctgatggc

SEQ ID NO: 372845 - DNA, 33 bp, Homo sapien
tcctgagttctttccacaggacgcgcatcccaa

SEQ ID NO: 372846 - DNA, 33 bp, Homo sapien
tcctgagttctttccagaggacgcgcatcccaa

SEQ ID NO: 372847 - DNA, 33 bp, Homo sapien
cagtgttgtttgttgaagggatgcatggtaaag

SEQ ID NO: 372848 - DNA, 33 bp, Homo sapien
cagtgttgtttgttgaggggatgcatggtaaag

SEQ ID NO: 372849 - DNA, 33 bp, Homo sapien
atggacttgaatttaacgattctaaatctcatg

SEQ ID NO: 372850 - DNA, 33 bp, Homo sapien
atggacttgaatttaatgattctaaatctcatg

SEQ ID NO: 372851 - DNA, 33 bp, Homo sapien
gctgttgcagcttccaaaactagttactgagga

SEQ ID NO: 372852 - DNA, 33 bp, Homo sapien
gctgttgcagcttccagaactagttactgagga

SEQ ID NO: 372853 - DNA, 33 bp, Homo sapien
tttaaatttaatattgaaacctaagcattttcc

SEQ ID NO: 372854 - DNA, 33 bp, Homo sapien
tttaaatttaatattggaacctaagcattttcc

SEQ ID NO: 372855 - DNA, 33 bp, Homo sapien
tattctaagagtgctaagggtaaaggaagcaga

SEQ ID NO: 372856 - DNA, 33 bp, Homo sapien
tattctaagagtgctaggggtaaaggaagcaga

SEQ ID NO: 372857 - DNA, 33 bp, Homo sapien
ggcaagggtacaaacacacaatattcctttttc

SEQ ID NO: 372858 - DNA, 33 bp, Homo sapien
ggcaagggtacaaacatacaatattcctttttc

SEQ ID NO: 372859 - DNA, 33 bp, Homo sapien
gtgctgctttgccagaccttttgaatgaatctg

SEQ ID NO: 372860 - DNA, 33 bp, Homo sapien
gtgctgctttgccagagcttttgaatgaatctg

SEQ ID NO: 372861 - DNA, 33 bp, Homo sapien
ccttgccagagatgctaaagggaggctatggga

SEQ ID NO: 372862 - DNA, 33 bp, Homo sapien
ccttgccagagatgcttaagggaggctatggga

SEQ ID NO: 372863 - DNA, 33 bp, Homo sapien
acgacagcacttgcagaagctcagacagtggga

SEQ ID NO: 372864 - DNA, 33 bp, Homo sapien
acgacagcacttgcaggagctcagacagtggga

SEQ ID NO: 372865 - DNA, 33 bp, Homo sapien
cagcctcatgtgagcccatctgctggttattct

SEQ ID NO: 372866 - DNA, 33 bp, Homo sapien
cagcctcatgtgagcctatctgctggttattct

SEQ ID NO: 372867 - DNA, 33 bp, Homo sapien
cctcttcatggtgaaaatagagggagtattgtg

SEQ ID NO: 372868 - DNA, 33 bp, Homo sapien
cctcttcatggtgaaattagagggagtattgtg

SEQ ID NO: 372869 - DNA, 33 bp, Homo sapien
attgcacacctactaactggaaaagccaatctc

SEQ ID NO: 372870 - DNA, 33 bp, Homo sapien
attgcacacctactaagtggaaaagccaatctc

SEQ ID NO: 372871 - DNA, 33 bp, Homo sapien
ctctcactctccccaaagattggccacaggctt

SEQ ID NO: 372872 - DNA, 33 bp, Homo sapien
ctctcactctccccaacgattggccacaggctt

SEQ ID NO: 372873 - DNA, 33 bp, Homo sapien
gatgaaatcctaactccgaaatctcatctctct

SEQ ID NO: 372874 - DNA, 33 bp, Homo sapien
gatgaaatcctaactctgaaatctcatctctct

SEQ ID NO: 372875 - DNA, 33 bp, Homo sapien
ccctgatgtctgcctacactttacctaatgaca

SEQ ID NO: 372876 - DNA, 33 bp, Homo sapien
ccctgatgtctgcctatactttacctaatgaca

SEQ ID NO: 372877 - DNA, 33 bp, Homo sapien
gaatttcagtaatgaccaggtgaaatggcaagt

SEQ ID NO: 372878 - DNA, 33 bp, Homo sapien
gaatttcagtaatgactaggtgaaatggcaagt

SEQ ID NO: 372879 - DNA, 33 bp, Homo sapien
tgcactccaattaccccaggagaagctgtccca

SEQ ID NO: 372880 - DNA, 33 bp, Homo sapien
tgcactccaattacccgaggagaagctgtccca

SEQ ID NO: 372881 - DNA, 33 bp, Homo sapien
caagatccaaccacttcaagggtgcactcccaa

SEQ ID NO: 372882 - DNA, 33 bp, Homo sapien
caagatccaaccactttaagggtgcactcccaa

SEQ ID NO: 372883 - DNA, 33 bp, Homo sapien
aaagtaggcaagtaaagccctaaaataaataat

SEQ ID NO: 372884 - DNA, 33 bp, Homo sapien
aaagtaggcaagtaaatccctaaaataaataat

SEQ ID NO: 372885 - DNA, 33 bp, Homo sapien
gtcacagttctcatcactgatagcctcaggctt

SEQ ID NO: 372886 - DNA, 33 bp, Homo sapien
gtcacagttctcatcattgatagcctcaggctt

SEQ ID NO: 372887 - DNA, 33 bp, Homo sapien
agcggagtgagaattcaagaccagacaaccagg

SEQ ID NO: 372888 - DNA, 33 bp, Homo sapien
agcggagtgagaattccagaccagacaaccagg

SEQ ID NO: 372889 - DNA, 33 bp, Homo sapien
gaggttagcatgattccactcaaagcttaagaa

SEQ ID NO: 372890 - DNA, 33 bp, Homo sapien
gaggttagcatgattctactcaaagcttaagaa

SEQ ID NO: 372891 - DNA, 33 bp, Homo sapien
gagactgattaaattacgtcgtgcctatgcaat

SEQ ID NO: 372892 - DNA, 33 bp, Homo sapien
gagactgattaaattatgtcgtgcctatgcaat

SEQ ID NO: 372893 - DNA, 33 bp, Homo sapien
actaaacttcacccaaagaagtccccataactt

SEQ ID NO: 372894 - DNA, 33 bp, Homo sapien
actaaacttcacccaaggaagtccccataactt

SEQ ID NO: 372895 - DNA, 33 bp, Homo sapien
acgcccatagacgtacacatattcccaagcaca

SEQ ID NO: 372896 - DNA, 33 bp, Homo sapien
acgcccatagacgtacgcatattcccaagcaca

SEQ ID NO: 372897 - DNA, 33 bp, Homo sapien
atcttcttggttttgccgactttctgaataaac

SEQ ID NO: 372898 - DNA, 33 bp, Homo sapien
atcttcttggttttgctgactttctgaataaac

SEQ ID NO: 372899 - DNA, 33 bp, Homo sapien
ttaggataattttaaaacactgagacaatatgc

SEQ ID NO: 372900 - DNA, 33 bp, Homo sapien
ttaggataattttaaagcactgagacaatatgc

SEQ ID NO: 372901 - DNA, 33 bp, Homo sapien
tcacatgacaaatgaaatggctgggacccggtg

SEQ ID NO: 372902 - DNA, 33 bp, Homo sapien
tcacatgacaaatgaattggctgggacccggtg

SEQ ID NO: 372903 - DNA, 33 bp, Homo sapien
gaagagcacagtgttaaaattgcaggtagggtc

SEQ ID NO: 372904 - DNA, 33 bp, Homo sapien
gaagagcacagtgttacaattgcaggtagggtc

SEQ ID NO: 372905 - DNA, 33 bp, Homo sapien
aaaacagagcccagaaatggagatacagaaaga

SEQ ID NO: 372906 - DNA, 33 bp, Homo sapien
aaaacagagcccagaattggagatacagaaaga

SEQ ID NO: 372907 - DNA, 33 bp, Homo sapien
agaaagaccaagtctacattgcatggaaacttg

SEQ ID NO: 372908 - DNA, 33 bp, Homo sapien
agaaagaccaagtctagattgcatggaaacttg

SEQ ID NO: 372909 - DNA, 33 bp, Homo sapien
cacaattttcagagcccagaatattagagagac

SEQ ID NO: 372910 - DNA, 33 bp, Homo sapien
cacaattttcagagccgagaatattagagagac

SEQ ID NO: 372911 - DNA, 33 bp, Homo sapien
cgttcacactttagacaactctaaccatccacc

SEQ ID NO: 372912 - DNA, 33 bp, Homo sapien
cgttcacactttagacgactctaaccatccacc

SEQ ID NO: 372913 - DNA, 33 bp, Homo sapien
ctctacttttgatcaacgaatggctaaagtcta

SEQ ID NO: 372914 - DNA, 33 bp, Homo sapien
ctctacttttgatcaatgaatggctaaagtcta

SEQ ID NO: 372915 - DNA, 33 bp, Homo sapien
tctgggtatcagacaaatcatacatatctagca

SEQ ID NO: 372916 - DNA, 33 bp, Homo sapien
tctgggtatcagacaagtcatacatatctagca

SEQ ID NO: 372917 - DNA, 33 bp, Homo sapien
gccaaaagtttgcttacgtatgaaataaaaaaa

SEQ ID NO: 372918 - DNA, 33 bp, Homo sapien
gccaaaagtttgcttatgtatgaaataaaaaaa

SEQ ID NO: 372919 - DNA, 33 bp, Homo sapien
tagggtccacagccacagatcaaaaatatctgg

SEQ ID NO: 372920 - DNA, 33 bp, Homo sapien
tagggtccacagccacggatcaaaaatatctgg

SEQ ID NO: 372921 - DNA, 33 bp, Homo sapien
gggcagaccagtgtcaggtatctactcctggaa

SEQ ID NO: 372922 - DNA, 33 bp, Homo sapien
gggcagaccagtgtcatgtatctactcctggaa

SEQ ID NO: 372923 - DNA, 33 bp, Homo sapien
ctaaactacatgctccagctagtttactcacat

SEQ ID NO: 372924 - DNA, 33 bp, Homo sapien
ctaaactacatgctccggctagtttactcacat

SEQ ID NO: 372925 - DNA, 33 bp, Homo sapien
atagcattaagataaaaatcattaagatagcat

SEQ ID NO: 372926 - DNA, 33 bp, Homo sapien
atagcattaagataaagatcattaagatagcat

SEQ ID NO: 372927 - DNA, 33 bp, Homo sapien
aggctgggaaatcccactatctgcagcctgcaa

SEQ ID NO: 372928 - DNA, 33 bp, Homo sapien
aggctgggaaatcccattatctgcagcctgcaa

SEQ ID NO: 372929 - DNA, 33 bp, Homo sapien
tgcatgtgatcactgcaattttcatgtgccaca

SEQ ID NO: 372930 - DNA, 33 bp, Homo sapien
tgcatgtgatcactgcgattttcatgtgccaca

SEQ ID NO: 372931 - DNA, 33 bp, Homo sapien
agcctgtgagcaacggcaagatgaaagtctcca

SEQ ID NO: 372932 - DNA, 33 bp, Homo sapien
agcctgtgagcaacgggaagatgaaagtctcca

SEQ ID NO: 372933 - DNA, 33 bp, Homo sapien
ataaaggaggtacttcaactatatttcctgtaa

SEQ ID NO: 372934 - DNA, 33 bp, Homo sapien
ataaaggaggtacttcgactatatttcctgtaa

SEQ ID NO: 372935 - DNA, 33 bp, Homo sapien
gcccactatggtttcaactttttctgaggcaaa

SEQ ID NO: 372936 - DNA, 33 bp, Homo sapien
gcccactatggtttcagctttttctgaggcaaa

SEQ ID NO: 372937 - DNA, 33 bp, Homo sapien
gcatactaggcactataataggcgttgactcta

SEQ ID NO: 372938 - DNA, 33 bp, Homo sapien
gcatactaggcactattataggcgttgactcta

SEQ ID NO: 372939 - DNA, 33 bp, Homo sapien
agtctgtctctctgaacgataaggactctttta

SEQ ID NO: 372940 - DNA, 33 bp, Homo sapien
agtctgtctctctgaatgataaggactctttta

SEQ ID NO: 372941 - DNA, 33 bp, Homo sapien
tcaggggccaggatagcagctgaacccatgcaa

SEQ ID NO: 372942 - DNA, 33 bp, Homo sapien
tcaggggccaggatagtagctgaacccatgcaa

SEQ ID NO: 372943 - DNA, 33 bp, Homo sapien
ctgattaagcaccctaagcaaagatcccttctc

SEQ ID NO: 372944 - DNA, 33 bp, Homo sapien
ctgattaagcaccctaggcaaagatcccttctc

SEQ ID NO: 372945 - DNA, 33 bp, Homo sapien
gagttggcaatgtggcaagagatttggttgtca

SEQ ID NO: 372946 - DNA, 33 bp, Homo sapien
gagttggcaatgtggcgagagatttggttgtca

SEQ ID NO: 372947 - DNA, 33 bp, Homo sapien
tggttatagccaagaaaagcttacctgtggggt

SEQ ID NO: 372948 - DNA, 33 bp, Homo sapien
tggttatagccaagaagagcttacctgtggggt

SEQ ID NO: 372949 - DNA, 33 bp, Homo sapien
tcagttttaccttgggaactagctcctttacag

SEQ ID NO: 372950 - DNA, 33 bp, Homo sapien
tcagttttaccttgggcactagctcctttacag

SEQ ID NO: 372951 - DNA, 33 bp, Homo sapien
agtgctcacgaaaagacgaacacacataagcac

SEQ ID NO: 372952 - DNA, 33 bp, Homo sapien
agtgctcacgaaaagatgaacacacataagcac

SEQ ID NO: 372953 - DNA, 33 bp, Homo sapien
atagccagactcctaccggaattaggtagccca

SEQ ID NO: 372954 - DNA, 33 bp, Homo sapien
atagccagactcctactggaattaggtagccca

SEQ ID NO: 372955 - DNA, 33 bp, Homo sapien
ggaaaggtttaaccagaacttcagatgggctac

SEQ ID NO: 372956 - DNA, 33 bp, Homo sapien
ggaaaggtttaaccaggacttcagatgggctac

SEQ ID NO: 372957 - DNA, 33 bp, Homo sapien
gggaaattgagagaatcagaaatgtttggcaga

SEQ ID NO: 372958 - DNA, 33 bp, Homo sapien
gggaaattgagagaatgagaaatgtttggcaga

SEQ ID NO: 372959 - DNA, 33 bp, Homo sapien
gaggagcctaaatttaacattcattcaaagttt

SEQ ID NO: 372960 - DNA, 33 bp, Homo sapien
gaggagcctaaatttatcattcattcaaagttt

SEQ ID NO: 372961 - DNA, 33 bp, Homo sapien
gattgatgaagacttgaagtatcactttatgaa

SEQ ID NO: 372962 - DNA, 33 bp, Homo sapien
gattgatgaagacttggagtatcactttatgaa

SEQ ID NO: 372963 - DNA, 33 bp, Homo sapien
tagctgtattattttgaatgatggtaaaatgga

SEQ ID NO: 372964 - DNA, 33 bp, Homo sapien
tagctgtattattttggatgatggtaaaatgga

SEQ ID NO: 372965 - DNA, 33 bp, Homo sapien
ggctttctgctcattacgttgcaccttgaagtc

SEQ ID NO: 372966 - DNA, 33 bp, Homo sapien
ggctttctgctcattatgttgcaccttgaagtc

SEQ ID NO: 372967 - DNA, 33 bp, Homo sapien
aaatcacaaaaagctaaaagagtaacatgagca

SEQ ID NO: 372968 - DNA, 33 bp, Homo sapien
aaatcacaaaaagctacaagagtaacatgagca

SEQ ID NO: 372969 - DNA, 33 bp, Homo sapien
catacaaatggtcacaaaacttaccctacactg

SEQ ID NO: 372970 - DNA, 33 bp, Homo sapien
catacaaatggtcacagaacttaccctacactg

SEQ ID NO: 372971 - DNA, 33 bp, Homo sapien
tgatctcatgttgagaaccttagcttaattaca

SEQ ID NO: 372972 - DNA, 33 bp, Homo sapien
tgatctcatgttgagatccttagcttaattaca

SEQ ID NO: 372973 - DNA, 33 bp, Homo sapien
acaggaagttgcaaaaatcatataggaagtccc

SEQ ID NO: 372974 - DNA, 33 bp, Homo sapien
acaggaagttgcaaaagtcatataggaagtccc

SEQ ID NO: 372975 - DNA, 33 bp, Homo sapien
atagttaatacaaaggaatgaactactggtaga

SEQ ID NO: 372976 - DNA, 33 bp, Homo sapien
atagttaatacaaaggcatgaactactggtaga

SEQ ID NO: 372977 - DNA, 33 bp, Homo sapien
agttaaagttagcccacgacttccgggttggag

SEQ ID NO: 372978 - DNA, 33 bp, Homo sapien
agttaaagttagcccaggacttccgggttggag

SEQ ID NO: 372979 - DNA, 33 bp, Homo sapien
tgaggctcagagatgaaagaaaggctgtcagac

SEQ ID NO: 372980 - DNA, 33 bp, Homo sapien
tgaggctcagagatgagagaaaggctgtcagac

SEQ ID NO: 372981 - DNA, 33 bp, Homo sapien
aggcgtagaatggaacaagaaagctgtgaaatt

SEQ ID NO: 372982 - DNA, 33 bp, Homo sapien
aggcgtagaatggaacgagaaagctgtgaaatt

SEQ ID NO: 372983 - DNA, 33 bp, Homo sapien
ttttcttgactggttcacatggaggtataaaga

SEQ ID NO: 372984 - DNA, 33 bp, Homo sapien
ttttcttgactggttctcatggaggtataaaga

SEQ ID NO: 372985 - DNA, 33 bp, Homo sapien
ttccaaagcacattgaaaagaacaatatttgta

SEQ ID NO: 372986 - DNA, 33 bp, Homo sapien
ttccaaagcacattgataagaacaatatttgta

SEQ ID NO: 372987 - DNA, 33 bp, Homo sapien
gggtaattgtttttacactcaatgcaaaacaaa

SEQ ID NO: 372988 - DNA, 33 bp, Homo sapien
gggtaattgtttttacgctcaatgcaaaacaaa

SEQ ID NO: 372989 - DNA, 33 bp, Homo sapien
ccagattgtagctgcaagagagattgggaacgt

SEQ ID NO: 372990 - DNA, 33 bp, Homo sapien
ccagattgtagctgcaggagagattgggaacgt

SEQ ID NO: 372991 - DNA, 33 bp, Homo sapien
ctgactctctgacaagaaggagcccaacccctc

SEQ ID NO: 372992 - DNA, 33 bp, Homo sapien
ctgactctctgacaaggaggagcccaacccctc

SEQ ID NO: 372993 - DNA, 33 bp, Homo sapien
gcacagaagcagaagacggtatcacaattacga

SEQ ID NO: 372994 - DNA, 33 bp, Homo sapien
gcacagaagcagaagatggtatcacaattacga

SEQ ID NO: 372995 - DNA, 33 bp, Homo sapien
tgcagcaacagcatgaaattcccggctgacctg

SEQ ID NO: 372996 - DNA, 33 bp, Homo sapien
tgcagcaacagcatgagattcccggctgacctg

SEQ ID NO: 372997 - DNA, 33 bp, Homo sapien
tatgccatcattcaagaagtcccactgtgtgct

SEQ ID NO: 372998 - DNA, 33 bp, Homo sapien
tatgccatcattcaaggagtcccactgtgtgct

SEQ ID NO: 372999 - DNA, 33 bp, Homo sapien
ttgcagataacctgtgaacatcatcctgtatac

SEQ ID NO: 373000 - DNA, 33 bp, Homo sapien
ttgcagataacctgtgcacatcatcctgtatac

SEQ ID NO: 373001 - DNA, 33 bp, Homo sapien
tgggtgactgagtaaacgaataagtggataaat

SEQ ID NO: 373002 - DNA, 33 bp, Homo sapien
tgggtgactgagtaaatgaataagtggataaat

SEQ ID NO: 373003 - DNA, 33 bp, Homo sapien
aaaataccaatgcccaagcttaccaggaactaa

SEQ ID NO: 373004 - DNA, 33 bp, Homo sapien
aaaataccaatgcccaggcttaccaggaactaa

SEQ ID NO: 373005 - DNA, 33 bp, Homo sapien
tgactctgcattttacaaggttaagtatttgga

SEQ ID NO: 373006 - DNA, 33 bp, Homo sapien
tgactctgcattttaccaggttaagtatttgga

SEQ ID NO: 373007 - DNA, 33 bp, Homo sapien
ttaagtatttggaatccacttatggattgatgg

SEQ ID NO: 373008 - DNA, 33 bp, Homo sapien
ttaagtatttggaatctacttatggattgatgg

SEQ ID NO: 373009 - DNA, 33 bp, Homo sapien
cactgtgccccaaaaaattatgtagctgattct

SEQ ID NO: 373010 - DNA, 33 bp, Homo sapien
cactgtgccccaaaaatttatgtagctgattct

SEQ ID NO: 373011 - DNA, 33 bp, Homo sapien
gatggtaaagactggcacataatttttgcttca

SEQ ID NO: 373012 - DNA, 33 bp, Homo sapien
gatggtaaagactggcgcataatttttgcttca

SEQ ID NO: 373013 - DNA, 33 bp, Homo sapien
catggtccaaccattcaagtccagcgactactc

SEQ ID NO: 373014 - DNA, 33 bp, Homo sapien
catggtccaaccattcgagtccagcgactactc

SEQ ID NO: 373015 - DNA, 33 bp, Homo sapien
tgaagcacctcttaaaactgtgtcatcccacat

SEQ ID NO: 373016 - DNA, 33 bp, Homo sapien
tgaagcacctcttaaacctgtgtcatcccacat

SEQ ID NO: 373017 - DNA, 33 bp, Homo sapien
atttggcatttagttacccatactagcaatttg

SEQ ID NO: 373018 - DNA, 33 bp, Homo sapien
atttggcatttagttatccatactagcaatttg

SEQ ID NO: 373019 - DNA, 33 bp, Homo sapien
acactttcctgaaacacctgcttggcttgttcc

SEQ ID NO: 373020 - DNA, 33 bp, Homo sapien
acactttcctgaaacatctgcttggcttgttcc

SEQ ID NO: 373021 - DNA, 33 bp, Homo sapien
tgagcttggagttaaaattaagccaggtctcaa

SEQ ID NO: 373022 - DNA, 33 bp, Homo sapien
tgagcttggagttaaatttaagccaggtctcaa

SEQ ID NO: 373023 - DNA, 33 bp, Homo sapien
tctggcagacggtacccagagtgggacaacatc

SEQ ID NO: 373024 - DNA, 33 bp, Homo sapien
tctggcagacggtacctagagtgggacaacatc

SEQ ID NO: 373025 - DNA, 33 bp, Homo sapien
gtagaagcatgtgacacagaaaattggctttcc

SEQ ID NO: 373026 - DNA, 33 bp, Homo sapien
gtagaagcatgtgacagagaaaattggctttcc

SEQ ID NO: 373027 - DNA, 33 bp, Homo sapien
ttggtttctcatcatgcaatgtgctaggaaagg

SEQ ID NO: 373028 - DNA, 33 bp, Homo sapien
ttggtttctcatcatgtaatgtgctaggaaagg

SEQ ID NO: 373029 - DNA, 33 bp, Homo sapien
aaggttgggtcctcacacttgaaaaactattgc

SEQ ID NO: 373030 - DNA, 33 bp, Homo sapien
aaggttgggtcctcacgcttgaaaaactattgc

SEQ ID NO: 373031 - DNA, 33 bp, Homo sapien
tgggtagacagtagaactgagtgccaggatctg

SEQ ID NO: 373032 - DNA, 33 bp, Homo sapien
tgggtagacagtagaagtgagtgccaggatctg

SEQ ID NO: 373033 - DNA, 33 bp, Homo sapien
ggaaggaattctcgagacaaagcccaggaaatg

SEQ ID NO: 373034 - DNA, 33 bp, Homo sapien
ggaaggaattctcgaggcaaagcccaggaaatg

SEQ ID NO: 373035 - DNA, 33 bp, Homo sapien
ttctctgggacgtagcccttcgaattatcctat

SEQ ID NO: 373036 - DNA, 33 bp, Homo sapien
ttctctgggacgtagctcttcgaattatcctat

SEQ ID NO: 373037 - DNA, 33 bp, Homo sapien
ggaggtcctccagtagaaatgtaagcaattcct

SEQ ID NO: 373038 - DNA, 33 bp, Homo sapien
ggaggtcctccagtagtaatgtaagcaattcct

SEQ ID NO: 373039 - DNA, 33 bp, Homo sapien
ttgagtcaagggattacagcatcctagaggaat

SEQ ID NO: 373040 - DNA, 33 bp, Homo sapien
ttgagtcaagggattatagcatcctagaggaat

SEQ ID NO: 373041 - DNA, 33 bp, Homo sapien
tcaagatacatggttaagggaaaacactaatgg

SEQ ID NO: 373042 - DNA, 33 bp, Homo sapien
tcaagatacatggttacgggaaaacactaatgg

SEQ ID NO: 373043 - DNA, 33 bp, Homo sapien
cagaaatttgtaaggacacgtggggattacaat

SEQ ID NO: 373044 - DNA, 33 bp, Homo sapien
cagaaatttgtaaggatacgtggggattacaat

SEQ ID NO: 373045 - DNA, 33 bp, Homo sapien
gtggagaaagacagtcaattggataatgggagc

SEQ ID NO: 373046 - DNA, 33 bp, Homo sapien
gtggagaaagacagtcgattggataatgggagc

SEQ ID NO: 373047 - DNA, 33 bp, Homo sapien
catctaagttgcccaaagtattagcaaaaagct

SEQ ID NO: 373048 - DNA, 33 bp, Homo sapien
catctaagttgcccaatgtattagcaaaaagct

SEQ ID NO: 373049 - DNA, 33 bp, Homo sapien
caagaatgaaaggcacagagatatataatcact

SEQ ID NO: 373050 - DNA, 33 bp, Homo sapien
caagaatgaaaggcacggagatatataatcact

SEQ ID NO: 373051 - DNA, 33 bp, Homo sapien
atgaatgaacgtgaagacatagcagtagaaact

SEQ ID NO: 373052 - DNA, 33 bp, Homo sapien
atgaatgaacgtgaagtcatagcagtagaaact

SEQ ID NO: 373053 - DNA, 33 bp, Homo sapien
gttctgcttccctctacgttgactttagtatca

SEQ ID NO: 373054 - DNA, 33 bp, Homo sapien
gttctgcttccctctatgttgactttagtatca

SEQ ID NO: 373055 - DNA, 33 bp, Homo sapien
tgtggcaaactggagaacacctggtcagtgtaa

SEQ ID NO: 373056 - DNA, 33 bp, Homo sapien
tgtggcaaactggagagcacctggtcagtgtaa

SEQ ID NO: 373057 - DNA, 33 bp, Homo sapien
attcactgattaccatgaggacacaccaagcca

SEQ ID NO: 373058 - DNA, 33 bp, Homo sapien
attcactgattaccattaggacacaccaagcca

SEQ ID NO: 373059 - DNA, 33 bp, Homo sapien
taaaggaccatgagaaacaagatataatctcac

SEQ ID NO: 373060 - DNA, 33 bp, Homo sapien
taaaggaccatgagaagcaagatataatctcac

SEQ ID NO: 373061 - DNA, 33 bp, Homo sapien
cctccaggaaactgttcaaactgtgggaggaga

SEQ ID NO: 373062 - DNA, 33 bp, Homo sapien
cctccaggaaactgttgaaactgtgggaggaga

SEQ ID NO: 373063 - DNA, 33 bp, Homo sapien
aaggaaacagatgcagcccctacttaactagag

SEQ ID NO: 373064 - DNA, 33 bp, Homo sapien
aaggaaacagatgcagtccctacttaactagag

SEQ ID NO: 373065 - DNA, 33 bp, Homo sapien
tgttctttttggaacaacctctagtcctaagca

SEQ ID NO: 373066 - DNA, 33 bp, Homo sapien
tgttctttttggaacagcctctagtcctaagca

SEQ ID NO: 373067 - DNA, 33 bp, Homo sapien
gtgcatttactccaaccggctaagagagcttgg

SEQ ID NO: 373068 - DNA, 33 bp, Homo sapien
gtgcatttactccaactggctaagagagcttgg

SEQ ID NO: 373069 - DNA, 33 bp, Homo sapien
tctccctgacaatggccaaatccaataggtgct

SEQ ID NO: 373070 - DNA, 33 bp, Homo sapien
tctccctgacaatggctaaatccaataggtgct

SEQ ID NO: 373071 - DNA, 33 bp, Homo sapien
ctatcctgggatatcaaatggtcatggttgctc

SEQ ID NO: 373072 - DNA, 33 bp, Homo sapien
ctatcctgggatatcagatggtcatggttgctc

SEQ ID NO: 373073 - DNA, 33 bp, Homo sapien
tggaaaaatcctccaaatattgccggccactct

SEQ ID NO: 373074 - DNA, 33 bp, Homo sapien
tggaaaaatcctccaattattgccggccactct

SEQ ID NO: 373075 - DNA, 33 bp, Homo sapien
cacatgaacgccattacacggtggtcttaaaag

SEQ ID NO: 373076 - DNA, 33 bp, Homo sapien
cacatgaacgccattatacggtggtcttaaaag

SEQ ID NO: 373077 - DNA, 33 bp, Homo sapien
gttaataagttctgacagtattctaaataaagt

SEQ ID NO: 373078 - DNA, 33 bp, Homo sapien
gttaataagttctgacggtattctaaataaagt

SEQ ID NO: 373079 - DNA, 33 bp, Homo sapien
gggcgtgaattacaacaaagttacagttcataa

SEQ ID NO: 373080 - DNA, 33 bp, Homo sapien
gggcgtgaattacaacgaagttacagttcataa

SEQ ID NO: 373081 - DNA, 33 bp, Homo sapien
aaagccccttggttagaatgtgaactgcctttt

SEQ ID NO: 373082 - DNA, 33 bp, Homo sapien
aaagccccttggttaggatgtgaactgcctttt

SEQ ID NO: 373083 - DNA, 33 bp, Homo sapien
taatagcaatgttttgcatacctgaaaattgcc

SEQ ID NO: 373084 - DNA, 33 bp, Homo sapien
taatagcaatgttttgtatacctgaaaattgcc

SEQ ID NO: 373085 - DNA, 33 bp, Homo sapien
acttctatttatccttcaacactttgctttcca

SEQ ID NO: 373086 - DNA, 33 bp, Homo sapien
acttctatttatcctttaacactttgctttcca

SEQ ID NO: 373087 - DNA, 33 bp, Homo sapien
tctctttgtctttgtccacatagttccttctgc

SEQ ID NO: 373088 - DNA, 33 bp, Homo sapien
tctctttgtctttgtctacatagttccttctgc

SEQ ID NO: 373089 - DNA, 33 bp, Homo sapien
tagtcactcgaggttacgtctgcaggtcaggga

SEQ ID NO: 373090 - DNA, 33 bp, Homo sapien
tagtcactcgaggttatgtctgcaggtcaggga

SEQ ID NO: 373091 - DNA, 33 bp, Homo sapien
cctggtctctccacacggcaattggctcctacc

SEQ ID NO: 373092 - DNA, 33 bp, Homo sapien
cctggtctctccacactgcaattggctcctacc

SEQ ID NO: 373093 - DNA, 33 bp, Homo sapien
ccctggatctggaaagcagacagcccaggtgct

SEQ ID NO: 373094 - DNA, 33 bp, Homo sapien
ccctggatctggaaagtagacagcccaggtgct

SEQ ID NO: 373095 - DNA, 33 bp, Homo sapien
aactatctcccaagaaagtttaatgaccttaac

SEQ ID NO: 373096 - DNA, 33 bp, Homo sapien
aactatctcccaagaaggtttaatgaccttaac

SEQ ID NO: 373097 - DNA, 33 bp, Homo sapien
ttgtacagccgtaactcactgcagactccaact

SEQ ID NO: 373098 - DNA, 33 bp, Homo sapien
ttgtacagccgtaacttactgcagactccaact

SEQ ID NO: 373099 - DNA, 33 bp, Homo sapien
ctgaacattctggaggcatttggtcattggaga

SEQ ID NO: 373100 - DNA, 33 bp, Homo sapien
ctgaacattctggagggatttggtcattggaga

SEQ ID NO: 373101 - DNA, 33 bp, Homo sapien
ctatctttttctgcaaatcatatgtgttcaggt

SEQ ID NO: 373102 - DNA, 33 bp, Homo sapien
ctatctttttctgcaagtcatatgtgttcaggt

SEQ ID NO: 373103 - DNA, 33 bp, Homo sapien
taacttacccattgtccctcagcccctaaaaca

SEQ ID NO: 373104 - DNA, 33 bp, Homo sapien
taacttacccattgtctctcagcccctaaaaca

SEQ ID NO: 373105 - DNA, 33 bp, Homo sapien
tggacactgaaatatgaatgttgtagaattttt

SEQ ID NO: 373106 - DNA, 33 bp, Homo sapien
tggacactgaaatatgtatgttgtagaattttt

SEQ ID NO: 373107 - DNA, 33 bp, Homo sapien
ttgaaattgttttggaaattctgagcccttcca

SEQ ID NO: 373108 - DNA, 33 bp, Homo sapien
ttgaaattgttttggatattctgagcccttcca

SEQ ID NO: 373109 - DNA, 33 bp, Homo sapien
tcactctgagagtatacgcaagttattgctccc

SEQ ID NO: 373110 - DNA, 33 bp, Homo sapien
tcactctgagagtatatgcaagttattgctccc

SEQ ID NO: 373111 - DNA, 33 bp, Homo sapien
ccagcgttgacagagcagaggccagtatcctgg

SEQ ID NO: 373112 - DNA, 33 bp, Homo sapien
ccagcgttgacagagcggaggccagtatcctgg

SEQ ID NO: 373113 - DNA, 33 bp, Homo sapien
aatattcttctcctccaagctcattgtctagtg

SEQ ID NO: 373114 - DNA, 33 bp, Homo sapien
aatattcttctcctccgagctcattgtctagtg

SEQ ID NO: 373115 - DNA, 33 bp, Homo sapien
aatttctcctggctgaccttgacgtttgacttc

SEQ ID NO: 373116 - DNA, 33 bp, Homo sapien
aatttctcctggctgatcttgacgtttgacttc

SEQ ID NO: 373117 - DNA, 33 bp, Homo sapien
agtttgagtttgctaaatcaataagaagagagg

SEQ ID NO: 373118 - DNA, 33 bp, Homo sapien
agtttgagtttgctaagtcaataagaagagagg

SEQ ID NO: 373119 - DNA, 33 bp, Homo sapien
agcacaggaatggaaaaatagagcaatgtttca

SEQ ID NO: 373120 - DNA, 33 bp, Homo sapien
agcacaggaatggaaagatagagcaatgtttca

SEQ ID NO: 373121 - DNA, 33 bp, Homo sapien
ctttacaattgtaccaagtttgtatcgctaaac

SEQ ID NO: 373122 - DNA, 33 bp, Homo sapien
ctttacaattgtaccacgtttgtatcgctaaac

SEQ ID NO: 373123 - DNA, 33 bp, Homo sapien
acaaaagaattggaaaattgtgaccagaatgcc

SEQ ID NO: 373124 - DNA, 33 bp, Homo sapien
acaaaagaattggaaagttgtgaccagaatgcc

SEQ ID NO: 373125 - DNA, 33 bp, Homo sapien
tgcctactgtgcaccacgactcctccaggcact

SEQ ID NO: 373126 - DNA, 33 bp, Homo sapien
tgcctactgtgcaccatgactcctccaggcact

SEQ ID NO: 373127 - DNA, 33 bp, Homo sapien
cttggatctcaatttcaccatctcaagtcatct

SEQ ID NO: 373128 - DNA, 33 bp, Homo sapien
cttggatctcaatttcgccatctcaagtcatct

SEQ ID NO: 373129 - DNA, 33 bp, Homo sapien
tctgcaactaatttaaatgtgatttgaggtaag

SEQ ID NO: 373130 - DNA, 33 bp, Homo sapien
tctgcaactaatttaagtgtgatttgaggtaag

SEQ ID NO: 373131 - DNA, 33 bp, Homo sapien
cttcctcacttacaagcagacatggtaaaaggt

SEQ ID NO: 373132 - DNA, 33 bp, Homo sapien
cttcctcacttacaaggagacatggtaaaaggt

SEQ ID NO: 373133 - DNA, 33 bp, Homo sapien
gataatcaaagcagagaaatcaatggaccctgg

SEQ ID NO: 373134 - DNA, 33 bp, Homo sapien
gataatcaaagcagagtaatcaatggaccctgg

SEQ ID NO: 373135 - DNA, 33 bp, Homo sapien
ttatatgagaatagggaagaaagggtaaaataa

SEQ ID NO: 373136 - DNA, 33 bp, Homo sapien
ttatatgagaatagggtagaaagggtaaaataa

SEQ ID NO: 373137 - DNA, 33 bp, Homo sapien
gcctgcatggttccaagccctagttagtttgtt

SEQ ID NO: 373138 - DNA, 33 bp, Homo sapien
gcctgcatggttccaatccctagttagtttgtt

SEQ ID NO: 373139 - DNA, 33 bp, Homo sapien
ctcacatttcactacacgaaggaaatcacctgg

SEQ ID NO: 373140 - DNA, 33 bp, Homo sapien
ctcacatttcactacatgaaggaaatcacctgg

SEQ ID NO: 373141 - DNA, 33 bp, Homo sapien
acctgtgactcccagacagaagaagcctttaag

SEQ ID NO: 373142 - DNA, 33 bp, Homo sapien
acctgtgactcccagatagaagaagcctttaag

SEQ ID NO: 373143 - DNA, 33 bp, Homo sapien
acatttgatctgagtacgtagaatttaagtaaa

SEQ ID NO: 373144 - DNA, 33 bp, Homo sapien
acatttgatctgagtaggtagaatttaagtaaa

SEQ ID NO: 373145 - DNA, 33 bp, Homo sapien
gttgtaaattccacaaagaaagcatagctcatg

SEQ ID NO: 373146 - DNA, 33 bp, Homo sapien
gttgtaaattccacaaggaaagcatagctcatg

SEQ ID NO: 373147 - DNA, 33 bp, Homo sapien
cagtggcagattgcccaggaagaattggaggca

SEQ ID NO: 373148 - DNA, 33 bp, Homo sapien
cagtggcagattgcccgggaagaattggaggca

SEQ ID NO: 373149 - DNA, 33 bp, Homo sapien
gagataaaggcatagacgaaatgtgaagtctga

SEQ ID NO: 373150 - DNA, 33 bp, Homo sapien
gagataaaggcatagatgaaatgtgaagtctga

SEQ ID NO: 373151 - DNA, 33 bp, Homo sapien
ctggcactgtgtttgaaaggccaaagaagaaac

SEQ ID NO: 373152 - DNA, 33 bp, Homo sapien
ctggcactgtgtttgagaggccaaagaagaaac

SEQ ID NO: 373153 - DNA, 33 bp, Homo sapien
aataatggtacctaccccatggacctgccatac

SEQ ID NO: 373154 - DNA, 33 bp, Homo sapien
aataatggtacctacctcatggacctgccatac

SEQ ID NO: 373155 - DNA, 33 bp, Homo sapien
gacaaacagaaaaaaaagtctgttctcatttag

SEQ ID NO: 373156 - DNA, 33 bp, Homo sapien
gacaaacagaaaaaaaggtctgttctcatttag

SEQ ID NO: 373157 - DNA, 33 bp, Homo sapien
tgatatttaccttgaagctacataagtcaaagg

SEQ ID NO: 373158 - DNA, 33 bp, Homo sapien
tgatatttaccttgaatctacataagtcaaagg

SEQ ID NO: 373159 - DNA, 33 bp, Homo sapien
ttgctcaatcatttggaattactgccttagttt

SEQ ID NO: 373160 - DNA, 33 bp, Homo sapien
ttgctcaatcatttgggattactgccttagttt

SEQ ID NO: 373161 - DNA, 33 bp, Homo sapien
agacctagtttggagaagaaaataaagagttca

SEQ ID NO: 373162 - DNA, 33 bp, Homo sapien
agacctagtttggagacgaaaataaagagttca

SEQ ID NO: 373163 - DNA, 33 bp, Homo sapien
tatgagaaggagaaaggcttggcatttcatggc

SEQ ID NO: 373164 - DNA, 33 bp, Homo sapien
tatgagaaggagaaagtcttggcatttcatggc

SEQ ID NO: 373165 - DNA, 33 bp, Homo sapien
gcctacaggtagttaagagctcaccatcgttgc

SEQ ID NO: 373166 - DNA, 33 bp, Homo sapien
gcctacaggtagttaatagctcaccatcgttgc

SEQ ID NO: 373167 - DNA, 33 bp, Homo sapien
catgctatgggtgataaagagggcatctgcctt

SEQ ID NO: 373168 - DNA, 33 bp, Homo sapien
catgctatgggtgatagagagggcatctgcctt

SEQ ID NO: 373169 - DNA, 33 bp, Homo sapien
tctcagccggttcttaaagaagatctggatctg

SEQ ID NO: 373170 - DNA, 33 bp, Homo sapien
tctcagccggttcttacagaagatctggatctg

SEQ ID NO: 373171 - DNA, 33 bp, Homo sapien
atttgtggcgaatgaacgaataaagaaaggtct

SEQ ID NO: 373172 - DNA, 33 bp, Homo sapien
atttgtggcgaatgaatgaataaagaaaggtct

SEQ ID NO: 373173 - DNA, 33 bp, Homo sapien
tgctggacaggtagaaaaaaagcttggagatgc

SEQ ID NO: 373174 - DNA, 33 bp, Homo sapien
tgctggacaggtagaataaaagcttggagatgc

SEQ ID NO: 373175 - DNA, 33 bp, Homo sapien
gagcctaggttactgacatctggaatgcagtgt

SEQ ID NO: 373176 - DNA, 33 bp, Homo sapien
gagcctaggttactgatatctggaatgcagtgt

SEQ ID NO: 373177 - DNA, 33 bp, Homo sapien
cagactcctccacatcacataggacatgcagaa

SEQ ID NO: 373178 - DNA, 33 bp, Homo sapien
cagactcctccacatcgcataggacatgcagaa

SEQ ID NO: 373179 - DNA, 33 bp, Homo sapien
tgaatttgttgccgaacgccagatgttctggct

SEQ ID NO: 373180 - DNA, 33 bp, Homo sapien
tgaatttgttgccgaatgccagatgttctggct

SEQ ID NO: 373181 - DNA, 33 bp, Homo sapien
taataaaatggtgatactacagcagagatagcc

SEQ ID NO: 373182 - DNA, 33 bp, Homo sapien
taataaaatggtgatattacagcagagatagcc

SEQ ID NO: 373183 - DNA, 33 bp, Homo sapien
agaagacttcatttgacgttagtgagtgtccag

SEQ ID NO: 373184 - DNA, 33 bp, Homo sapien
agaagacttcatttgatgttagtgagtgtccag

SEQ ID NO: 373185 - DNA, 33 bp, Homo sapien
ctggtcacactttagacggtcacctagaaaaag

SEQ ID NO: 373186 - DNA, 33 bp, Homo sapien
ctggtcacactttagatggtcacctagaaaaag

SEQ ID NO: 373187 - DNA, 33 bp, Homo sapien
tttacaatgatggaaaactggaagcaatctagc

SEQ ID NO: 373188 - DNA, 33 bp, Homo sapien
tttacaatgatggaaagctggaagcaatctagc

SEQ ID NO: 373189 - DNA, 33 bp, Homo sapien
ccatagtattatgcacacattaaaaaaacataa

SEQ ID NO: 373190 - DNA, 33 bp, Homo sapien
ccatagtattatgcacccattaaaaaaacataa

SEQ ID NO: 373191 - DNA, 33 bp, Homo sapien
tacatgctttttaaaccaagagccttgtttcaa

SEQ ID NO: 373192 - DNA, 33 bp, Homo sapien
tacatgctttttaaacgaagagccttgtttcaa

SEQ ID NO: 373193 - DNA, 33 bp, Homo sapien
ggtaatatatgcaaagaccttggtatagttctt

SEQ ID NO: 373194 - DNA, 33 bp, Homo sapien
ggtaatatatgcaaagtccttggtatagttctt

SEQ ID NO: 373195 - DNA, 33 bp, Homo sapien
ataggccttatcatcacgtggcttctgcatcac

SEQ ID NO: 373196 - DNA, 33 bp, Homo sapien
ataggccttatcatcatgtggcttctgcatcac

SEQ ID NO: 373197 - DNA, 33 bp, Homo sapien
taatatttataacaacgctgctacaactcattt

SEQ ID NO: 373198 - DNA, 33 bp, Homo sapien
taatatttataacaactctgctacaactcattt

SEQ ID NO: 373199 - DNA, 33 bp, Homo sapien
aggatcttactcggccaggaaaagcaaatgctc

SEQ ID NO: 373200 - DNA, 33 bp, Homo sapien
aggatcttactcggcctggaaaagcaaatgctc

SEQ ID NO: 373201 - DNA, 33 bp, Homo sapien
caccctaaacagtaagcactaagcagtcagaat

SEQ ID NO: 373202 - DNA, 33 bp, Homo sapien
caccctaaacagtaaggactaagcagtcagaat

SEQ ID NO: 373203 - DNA, 33 bp, Homo sapien
ctggatatttctgatccacacttcattggatcc

SEQ ID NO: 373204 - DNA, 33 bp, Homo sapien
ctggatatttctgatcgacacttcattggatcc

SEQ ID NO: 373205 - DNA, 33 bp, Homo sapien
cttgtgtggggatcagaccacctctgtaaaaca

SEQ ID NO: 373206 - DNA, 33 bp, Homo sapien
cttgtgtggggatcagtccacctctgtaaaaca

SEQ ID NO: 373207 - DNA, 33 bp, Homo sapien
cagagcttatcttgcactaaattccttggtggg

SEQ ID NO: 373208 - DNA, 33 bp, Homo sapien
cagagcttatcttgcagtaaattccttggtggg

SEQ ID NO: 373209 - DNA, 33 bp, Homo sapien
aaaaatcctagtctcccattaactcatcattta

SEQ ID NO: 373210 - DNA, 33 bp, Homo sapien
aaaaatcctagtctcctattaactcatcattta

SEQ ID NO: 373211 - DNA, 33 bp, Homo sapien
ttctccagaggctaccagaatggtcagttcctg

SEQ ID NO: 373212 - DNA, 33 bp, Homo sapien
ttctccagaggctaccggaatggtcagttcctg

SEQ ID NO: 373213 - DNA, 33 bp, Homo sapien
aactactgctgtgaaaccaaagaccatagcacc

SEQ ID NO: 373214 - DNA, 33 bp, Homo sapien
aactactgctgtgaaatcaaagaccatagcacc

SEQ ID NO: 373215 - DNA, 33 bp, Homo sapien
gaggagacgatgggtaagagttgaggaaggaag

SEQ ID NO: 373216 - DNA, 33 bp, Homo sapien
gaggagacgatgggtaggagttgaggaaggaag

SEQ ID NO: 373217 - DNA, 33 bp, Homo sapien
agcctcagcctgtgtcaagttttctttagtccc

SEQ ID NO: 373218 - DNA, 33 bp, Homo sapien
agcctcagcctgtgtcgagttttctttagtccc

SEQ ID NO: 373219 - DNA, 33 bp, Homo sapien
caggcagatgtggagaggaggaacagatgagat

SEQ ID NO: 373220 - DNA, 33 bp, Homo sapien
caggcagatgtggagatgaggaacagatgagat

SEQ ID NO: 373221 - DNA, 33 bp, Homo sapien
acagaaggaagtaggacgtgttgtgtgataatc

SEQ ID NO: 373222 - DNA, 33 bp, Homo sapien
acagaaggaagtaggatgtgttgtgtgataatc

SEQ ID NO: 373223 - DNA, 33 bp, Homo sapien
gagttcccttcccatccagtgcattgaacacca

SEQ ID NO: 373224 - DNA, 33 bp, Homo sapien
gagttcccttcccatcgagtgcattgaacacca

SEQ ID NO: 373225 - DNA, 33 bp, Homo sapien
gttgctcagagagagcactgctaagtcccttga

SEQ ID NO: 373226 - DNA, 33 bp, Homo sapien
gttgctcagagagagcgctgctaagtcccttga

SEQ ID NO: 373227 - DNA, 33 bp, Homo sapien
actcctgcctcagtgcaagacgggtggtcccgg

SEQ ID NO: 373228 - DNA, 33 bp, Homo sapien
actcctgcctcagtgcgagacgggtggtcccgg

SEQ ID NO: 373229 - DNA, 33 bp, Homo sapien
gatgttcaaccctgacaaagaagttaactacag

SEQ ID NO: 373230 - DNA, 33 bp, Homo sapien
gatgttcaaccctgacgaagaagttaactacag

SEQ ID NO: 373231 - DNA, 33 bp, Homo sapien
taactaatggatactacacttaatgcctgggtt

SEQ ID NO: 373232 - DNA, 33 bp, Homo sapien
taactaatggatactatacttaatgcctgggtt

SEQ ID NO: 373233 - DNA, 33 bp, Homo sapien
agggtagagacgataacggctaagatcatggac

SEQ ID NO: 373234 - DNA, 33 bp, Homo sapien
agggtagagacgataatggctaagatcatggac

SEQ ID NO: 373235 - DNA, 33 bp, Homo sapien
atgagtgaaggatcaacagctgcatcagaggaa

SEQ ID NO: 373236 - DNA, 33 bp, Homo sapien
atgagtgaaggatcaatagctgcatcagaggaa

SEQ ID NO: 373237 - DNA, 33 bp, Homo sapien
cagtatctctgccctcaagttgcttaaagcctg

SEQ ID NO: 373238 - DNA, 33 bp, Homo sapien
cagtatctctgccctcgagttgcttaaagcctg

SEQ ID NO: 373239 - DNA, 33 bp, Homo sapien
cttgcctcactacagcacagcagccagactgat

SEQ ID NO: 373240 - DNA, 33 bp, Homo sapien
cttgcctcactacagcgcagcagccagactgat

SEQ ID NO: 373241 - DNA, 33 bp, Homo sapien
cgcaggaactgggatcagagactattattctaa

SEQ ID NO: 373242 - DNA, 33 bp, Homo sapien
cgcaggaactgggatcggagactattattctaa

SEQ ID NO: 373243 - DNA, 33 bp, Homo sapien
tttcagaaaataaagcccaaccctttcggtggt

SEQ ID NO: 373244 - DNA, 33 bp, Homo sapien
tttcagaaaataaagctcaaccctttcggtggt

SEQ ID NO: 373245 - DNA, 33 bp, Homo sapien
aggcctatcaactggacgaacagagcaagattg

SEQ ID NO: 373246 - DNA, 33 bp, Homo sapien
aggcctatcaactggatgaacagagcaagattg

SEQ ID NO: 373247 - DNA, 33 bp, Homo sapien
taccaccaagttttcactctcaggtgtgtttca

SEQ ID NO: 373248 - DNA, 33 bp, Homo sapien
taccaccaagttttcattctcaggtgtgtttca

SEQ ID NO: 373249 - DNA, 33 bp, Homo sapien
gtgtgggaacgtgcacacccatgaacaatgatc

SEQ ID NO: 373250 - DNA, 33 bp, Homo sapien
gtgtgggaacgtgcacgcccatgaacaatgatc

SEQ ID NO: 373251 - DNA, 33 bp, Homo sapien
tttcccttctatcttaccttcgtgcctaagtga

SEQ ID NO: 373252 - DNA, 33 bp, Homo sapien
tttcccttctatcttatcttcgtgcctaagtga

SEQ ID NO: 373253 - DNA, 33 bp, Homo sapien
agaggcggtacctttccctgaatcactgtacag

SEQ ID NO: 373254 - DNA, 33 bp, Homo sapien
agaggcggtacctttcgctgaatcactgtacag

SEQ ID NO: 373255 - DNA, 33 bp, Homo sapien
gtttagagatgttgaacaggtcaaatcaacaga

SEQ ID NO: 373256 - DNA, 33 bp, Homo sapien
gtttagagatgttgaagaggtcaaatcaacaga

SEQ ID NO: 373257 - DNA, 33 bp, Homo sapien
taagagtaaactgaaacaataggcaagtattca

SEQ ID NO: 373258 - DNA, 33 bp, Homo sapien
taagagtaaactgaaataataggcaagtattca

SEQ ID NO: 373259 - DNA, 33 bp, Homo sapien
tggttccacgtgttcaactaaacctgggcctct

SEQ ID NO: 373260 - DNA, 33 bp, Homo sapien
tggttccacgtgttcagctaaacctgggcctct

SEQ ID NO: 373261 - DNA, 33 bp, Homo sapien
ctgctctggggaaccacgcttgtgcagccttgg

SEQ ID NO: 373262 - DNA, 33 bp, Homo sapien
ctgctctggggaaccatgcttgtgcagccttgg

SEQ ID NO: 373263 - DNA, 33 bp, Homo sapien
ttccaaagcttaacaacggctccatatactggc

SEQ ID NO: 373264 - DNA, 33 bp, Homo sapien
ttccaaagcttaacaatggctccatatactggc

SEQ ID NO: 373265 - DNA, 33 bp, Homo sapien
ctctccagctgacatcacctgtaatatgtaata

SEQ ID NO: 373266 - DNA, 33 bp, Homo sapien
ctctccagctgacatcgcctgtaatatgtaata

SEQ ID NO: 373267 - DNA, 33 bp, Homo sapien
aagcagggaaatccaaatcactactgagaacaa

SEQ ID NO: 373268 - DNA, 33 bp, Homo sapien
aagcagggaaatccaagtcactactgagaacaa

SEQ ID NO: 373269 - DNA, 33 bp, Homo sapien
ggcatagtaacttgtaaccttgggagctctgaa

SEQ ID NO: 373270 - DNA, 33 bp, Homo sapien
ggcatagtaacttgtagccttgggagctctgaa

SEQ ID NO: 373271 - DNA, 33 bp, Homo sapien
tgtttccttggctttcaaagacaggcagctgct

SEQ ID NO: 373272 - DNA, 33 bp, Homo sapien
tgtttccttggctttctaagacaggcagctgct

SEQ ID NO: 373273 - DNA, 33 bp, Homo sapien
gcggggcctctggaaacccgttgtcttttgggt

SEQ ID NO: 373274 - DNA, 33 bp, Homo sapien
gcggggcctctggaaagccgttgtcttttgggt

SEQ ID NO: 373275 - DNA, 33 bp, Homo sapien
ttatgatcatatgttaagcgggttttgtgagcc

SEQ ID NO: 373276 - DNA, 33 bp, Homo sapien
ttatgatcatatgttaggcgggttttgtgagcc

SEQ ID NO: 373277 - DNA, 33 bp, Homo sapien
acatgctgatgaaaggaactgtgatttgtgttt

SEQ ID NO: 373278 - DNA, 33 bp, Homo sapien
acatgctgatgaaagggactgtgatttgtgttt

SEQ ID NO: 373279 - DNA, 33 bp, Homo sapien
ggacagtttctgatcaagggagacagactagaa

SEQ ID NO: 373280 - DNA, 33 bp, Homo sapien
ggacagtttctgatcacgggagacagactagaa

SEQ ID NO: 373281 - DNA, 33 bp, Homo sapien
atggaaagcctgttacacttcaagtaccccaca

SEQ ID NO: 373282 - DNA, 33 bp, Homo sapien
atggaaagcctgttacgcttcaagtaccccaca

SEQ ID NO: 373283 - DNA, 33 bp, Homo sapien
tcaatcttggcctatcacaaataagccatgaga

SEQ ID NO: 373284 - DNA, 33 bp, Homo sapien
tcaatcttggcctatcgcaaataagccatgaga

SEQ ID NO: 373285 - DNA, 33 bp, Homo sapien
gatggagggcagtggaatagcggagagtagtgg

SEQ ID NO: 373286 - DNA, 33 bp, Homo sapien
gatggagggcagtggagtagcggagagtagtgg

SEQ ID NO: 373287 - DNA, 33 bp, Homo sapien
ccatcccatctaccaaacccctcaagtcccagg

SEQ ID NO: 373288 - DNA, 33 bp, Homo sapien
ccatcccatctaccaagcccctcaagtcccagg

SEQ ID NO: 373289 - DNA, 33 bp, Homo sapien
acaggttgaagaggcaaaggaaggctgaacaag

SEQ ID NO: 373290 - DNA, 33 bp, Homo sapien
acaggttgaagaggcagaggaaggctgaacaag

SEQ ID NO: 373291 - DNA, 33 bp, Homo sapien
tcctttcttctgagccaaccttattcccaggta

SEQ ID NO: 373292 - DNA, 33 bp, Homo sapien
tcctttcttctgagccgaccttattcccaggta

SEQ ID NO: 373293 - DNA, 33 bp, Homo sapien
tttcttccatgccaaggaggcgttgatggattg

SEQ ID NO: 373294 - DNA, 33 bp, Homo sapien
tttcttccatgccaagtaggcgttgatggattg

SEQ ID NO: 373295 - DNA, 33 bp, Homo sapien
ccagaactactgaatcaaaatatccagaagcag

SEQ ID NO: 373296 - DNA, 33 bp, Homo sapien
ccagaactactgaatcgaaatatccagaagcag

SEQ ID NO: 373297 - DNA, 33 bp, Homo sapien
aatgtgcacgtgcaaaggattcagtgggcacct

SEQ ID NO: 373298 - DNA, 33 bp, Homo sapien
aatgtgcacgtgcaaatgattcagtgggcacct

SEQ ID NO: 373299 - DNA, 33 bp, Homo sapien
gtttcttctcaggtcacgattaagaggagctgc

SEQ ID NO: 373300 - DNA, 33 bp, Homo sapien
gtttcttctcaggtcatgattaagaggagctgc

SEQ ID NO: 373301 - DNA, 33 bp, Homo sapien
aactgcaaatggacaactaggtgttcacatttg

SEQ ID NO: 373302 - DNA, 33 bp, Homo sapien
aactgcaaatggacaattaggtgttcacatttg

SEQ ID NO: 373303 - DNA, 33 bp, Homo sapien
aggaatggctgaatcacaggaaattgccacact

SEQ ID NO: 373304 - DNA, 33 bp, Homo sapien
aggaatggctgaatcataggaaattgccacact

SEQ ID NO: 373305 - DNA, 33 bp, Homo sapien
cctactgataacctaccctgggaatccctagac

SEQ ID NO: 373306 - DNA, 33 bp, Homo sapien
cctactgataacctactctgggaatccctagac

SEQ ID NO: 373307 - DNA, 33 bp, Homo sapien
gtgaagcgcttgcagacgcactgctacaaggtc

SEQ ID NO: 373308 - DNA, 33 bp, Homo sapien
gtgaagcgcttgcagaggcactgctacaaggtc

SEQ ID NO: 373309 - DNA, 33 bp, Homo sapien
ttatttctaggtagtgcaatctaccacatgtgg

SEQ ID NO: 373310 - DNA, 33 bp, Homo sapien
ttatttctaggtagtggaatctaccacatgtgg

SEQ ID NO: 373311 - DNA, 33 bp, Homo sapien
ccatggtcacaccaacaaggcttcatgtttcag

SEQ ID NO: 373312 - DNA, 33 bp, Homo sapien
ccatggtcacaccaacgaggcttcatgtttcag

SEQ ID NO: 373313 - DNA, 33 bp, Homo sapien
ggaagaagaagtgcgacgataactggccagtga

SEQ ID NO: 373314 - DNA, 33 bp, Homo sapien
ggaagaagaagtgcgatgataactggccagtga

SEQ ID NO: 373315 - DNA, 33 bp, Homo sapien
tttctccttgacagcaagaaaatgttctaaaac

SEQ ID NO: 373316 - DNA, 33 bp, Homo sapien
tttctccttgacagcatgaaaatgttctaaaac

SEQ ID NO: 373317 - DNA, 33 bp, Homo sapien
gggaaatttgggaacacaggttttctagaggaa

SEQ ID NO: 373318 - DNA, 33 bp, Homo sapien
gggaaatttgggaacagaggttttctagaggaa

SEQ ID NO: 373319 - DNA, 33 bp, Homo sapien
tggttcaccatccgaacggctgccagagggatt

SEQ ID NO: 373320 - DNA, 33 bp, Homo sapien
tggttcaccatccgaatggctgccagagggatt

SEQ ID NO: 373321 - DNA, 33 bp, Homo sapien
catgcaatgcaattcagggtcatattacaaaag

SEQ ID NO: 373322 - DNA, 33 bp, Homo sapien
catgcaatgcaattcatggtcatattacaaaag

SEQ ID NO: 373323 - DNA, 33 bp, Homo sapien
caaaatgttacagctaccttcgaagacactggc

SEQ ID NO: 373324 - DNA, 33 bp, Homo sapien
caaaatgttacagctagcttcgaagacactggc

SEQ ID NO: 373325 - DNA, 33 bp, Homo sapien
ctcaaaggaggcaacaataaagatttattcatt

SEQ ID NO: 373326 - DNA, 33 bp, Homo sapien
ctcaaaggaggcaacagtaaagatttattcatt

SEQ ID NO: 373327 - DNA, 33 bp, Homo sapien
ctcactgatttccaaccaagaaatgtaatcctt

SEQ ID NO: 373328 - DNA, 33 bp, Homo sapien
ctcactgatttccaacgaagaaatgtaatcctt

SEQ ID NO: 373329 - DNA, 33 bp, Homo sapien
ttgtcctttgcacccccggcacttcgtgaggag

SEQ ID NO: 373330 - DNA, 33 bp, Homo sapien
ttgtcctttgcacccctggcacttcgtgaggag

SEQ ID NO: 373331 - DNA, 33 bp, Homo sapien
atccaccatcacagagaactccactctcaacac

SEQ ID NO: 373332 - DNA, 33 bp, Homo sapien
atccaccatcacagaggactccactctcaacac

SEQ ID NO: 373333 - DNA, 33 bp, Homo sapien
aaccgaactgggaacagtccttccattctgtgt

SEQ ID NO: 373334 - DNA, 33 bp, Homo sapien
aaccgaactgggaacattccttccattctgtgt

SEQ ID NO: 373335 - DNA, 33 bp, Homo sapien
ggaaactatcaggtcaataatggcaggggccgt

SEQ ID NO: 373336 - DNA, 33 bp, Homo sapien
ggaaactatcaggtcagtaatggcaggggccgt

SEQ ID NO: 373337 - DNA, 33 bp, Homo sapien
tcatctgtatcacacaacttgtactgtcatagc

SEQ ID NO: 373338 - DNA, 33 bp, Homo sapien
tcatctgtatcacacaccttgtactgtcatagc

SEQ ID NO: 373339 - DNA, 33 bp, Homo sapien
agagcctgcctaaaaacgaagccagtacagaat

SEQ ID NO: 373340 - DNA, 33 bp, Homo sapien
agagcctgcctaaaaatgaagccagtacagaat

SEQ ID NO: 373341 - DNA, 33 bp, Homo sapien
atatatttcttgctcacgtaacaagctaacgtg

SEQ ID NO: 373342 - DNA, 33 bp, Homo sapien
atatatttcttgctcatgtaacaagctaacgtg

SEQ ID NO: 373343 - DNA, 33 bp, Homo sapien
attcccaggaatctgaagctcagaaagcgtaag

SEQ ID NO: 373344 - DNA, 33 bp, Homo sapien
attcccaggaatctgaggctcagaaagcgtaag

SEQ ID NO: 373345 - DNA, 33 bp, Homo sapien
actgaaccctgaccaaactttgcttttgcagac

SEQ ID NO: 373346 - DNA, 33 bp, Homo sapien
actgaaccctgaccaacctttgcttttgcagac

SEQ ID NO: 373347 - DNA, 33 bp, Homo sapien
gcatttcccaggcatgaataagccctagtcctc

SEQ ID NO: 373348 - DNA, 33 bp, Homo sapien
gcatttcccaggcatggataagccctagtcctc

SEQ ID NO: 373349 - DNA, 33 bp, Homo sapien
gtccctgctttagtcacagcaatttttcatgtc

SEQ ID NO: 373350 - DNA, 33 bp, Homo sapien
gtccctgctttagtcatagcaatttttcatgtc

SEQ ID NO: 373351 - DNA, 33 bp, Homo sapien
aaaagcaccatccaaaacagaaaggaaggtggc

SEQ ID NO: 373352 - DNA, 33 bp, Homo sapien
aaaagcaccatccaaagcagaaaggaaggtggc

SEQ ID NO: 373353 - DNA, 33 bp, Homo sapien
agggtggatgccgatacggaatgggcaggaatt

SEQ ID NO: 373354 - DNA, 33 bp, Homo sapien
agggtggatgccgatatggaatgggcaggaatt

SEQ ID NO: 373355 - DNA, 33 bp, Homo sapien
actggagtcgcatggagcaggaactgtgtggtc

SEQ ID NO: 373356 - DNA, 33 bp, Homo sapien
actggagtcgcatggatcaggaactgtgtggtc

SEQ ID NO: 373357 - DNA, 33 bp, Homo sapien
ttgatgcatattccgacctgttctttcattcac

SEQ ID NO: 373358 - DNA, 33 bp, Homo sapien
ttgatgcatattccgatctgttctttcattcac

SEQ ID NO: 373359 - DNA, 33 bp, Homo sapien
gacacatacaacccaaccacaaagacatagatt

SEQ ID NO: 373360 - DNA, 33 bp, Homo sapien
gacacatacaacccaatcacaaagacatagatt

SEQ ID NO: 373361 - DNA, 33 bp, Homo sapien
ctcaagctctgcagccaaactgtccaggtttga

SEQ ID NO: 373362 - DNA, 33 bp, Homo sapien
ctcaagctctgcagccgaactgtccaggtttga

SEQ ID NO: 373363 - DNA, 33 bp, Homo sapien
atgtgggttccaagaaaataaccaagtcatggt

SEQ ID NO: 373364 - DNA, 33 bp, Homo sapien
atgtgggttccaagaagataaccaagtcatggt

SEQ ID NO: 373365 - DNA, 33 bp, Homo sapien
ggctctttcagttttacgggcatttgtgaaaga

SEQ ID NO: 373366 - DNA, 33 bp, Homo sapien
ggctctttcagttttatgggcatttgtgaaaga

SEQ ID NO: 373367 - DNA, 33 bp, Homo sapien
ggctctctgtcctcaccaggtgtcacttcatga

SEQ ID NO: 373368 - DNA, 33 bp, Homo sapien
ggctctctgtcctcactaggtgtcacttcatga

SEQ ID NO: 373369 - DNA, 33 bp, Homo sapien
ggtttctccaccttgacagtgttgacatttggg

SEQ ID NO: 373370 - DNA, 33 bp, Homo sapien
ggtttctccaccttgatagtgttgacatttggg

SEQ ID NO: 373371 - DNA, 33 bp, Homo sapien
tatctcagaaacagccaggatacagtgaccagg

SEQ ID NO: 373372 - DNA, 33 bp, Homo sapien
tatctcagaaacagccgggatacagtgaccagg

SEQ ID NO: 373373 - DNA, 33 bp, Homo sapien
tagtaaacagcaacaactataagtacctttatt

SEQ ID NO: 373374 - DNA, 33 bp, Homo sapien
tagtaaacagcaacaattataagtacctttatt

SEQ ID NO: 373375 - DNA, 33 bp, Homo sapien
caggtccagaccagcacagtcagagttgatgaa

SEQ ID NO: 373376 - DNA, 33 bp, Homo sapien
caggtccagaccagcatagtcagagttgatgaa

SEQ ID NO: 373377 - DNA, 33 bp, Homo sapien
tttctgaggtccaacactgtggggttcctgtaa

SEQ ID NO: 373378 - DNA, 33 bp, Homo sapien
tttctgaggtccaacattgtggggttcctgtaa

SEQ ID NO: 373379 - DNA, 33 bp, Homo sapien
tctaccttcctcacccaaaaccgtgaggtccca

SEQ ID NO: 373380 - DNA, 33 bp, Homo sapien
tctaccttcctcacccgaaaccgtgaggtccca

SEQ ID NO: 373381 - DNA, 33 bp, Homo sapien
accaggctgtgaaaacagggccataccaggatg

SEQ ID NO: 373382 - DNA, 33 bp, Homo sapien
accaggctgtgaaaacggggccataccaggatg

SEQ ID NO: 373383 - DNA, 33 bp, Homo sapien
ctctctgctgagtgaccgtaagctcggcgtctg

SEQ ID NO: 373384 - DNA, 33 bp, Homo sapien
ctctctgctgagtgactgtaagctcggcgtctg

SEQ ID NO: 373385 - DNA, 33 bp, Homo sapien
gttcagtgttgataaaatttacaggagtgtaca

SEQ ID NO: 373386 - DNA, 33 bp, Homo sapien
gttcagtgttgataaagtttacaggagtgtaca

SEQ ID NO: 373387 - DNA, 33 bp, Homo sapien
atagctgggtactcaccagggcccatctttttt

SEQ ID NO: 373388 - DNA, 33 bp, Homo sapien
atagctgggtactcactagggcccatctttttt

SEQ ID NO: 373389 - DNA, 33 bp, Homo sapien
cacaagagagtgccaacttatatagtacttaag

SEQ ID NO: 373390 - DNA, 33 bp, Homo sapien
cacaagagagtgccaagttatatagtacttaag

SEQ ID NO: 373391 - DNA, 33 bp, Homo sapien
atgattcatgtttacaatgagtgacagtattgc

SEQ ID NO: 373392 - DNA, 33 bp, Homo sapien
atgattcatgtttacactgagtgacagtattgc

SEQ ID NO: 373393 - DNA, 33 bp, Homo sapien
tccccatgtgtaagccggagacactgcttgccc

SEQ ID NO: 373394 - DNA, 33 bp, Homo sapien
tccccatgtgtaagcctgagacactgcttgccc

SEQ ID NO: 373395 - DNA, 33 bp, Homo sapien
ccaagtgctggaactagctccttttcactccac

SEQ ID NO: 373396 - DNA, 33 bp, Homo sapien
ccaagtgctggaactatctccttttcactccac

SEQ ID NO: 373397 - DNA, 33 bp, Homo sapien
gtctccctgaggaaagccccctcctagagcaag

SEQ ID NO: 373398 - DNA, 33 bp, Homo sapien
gtctccctgaggaaagtcccctcctagagcaag

SEQ ID NO: 373399 - DNA, 33 bp, Homo sapien
attgtttcaaacatgaaggtgttgagtgatgtc

SEQ ID NO: 373400 - DNA, 33 bp, Homo sapien
attgtttcaaacatgacggtgttgagtgatgtc

SEQ ID NO: 373401 - DNA, 33 bp, Homo sapien
gaattccaagagttgacatactgacattcccaa

SEQ ID NO: 373402 - DNA, 33 bp, Homo sapien
gaattccaagagttgatatactgacattcccaa

SEQ ID NO: 373403 - DNA, 33 bp, Homo sapien
ctattccctctccaacccagattaaggacacct

SEQ ID NO: 373404 - DNA, 33 bp, Homo sapien
ctattccctctccaactcagattaaggacacct

SEQ ID NO: 373405 - DNA, 33 bp, Homo sapien
ttggaggcttggcaaacgttagtgtgttttgcc

SEQ ID NO: 373406 - DNA, 33 bp, Homo sapien
ttggaggcttggcaaatgttagtgtgttttgcc

SEQ ID NO: 373407 - DNA, 33 bp, Homo sapien
caagtttaagggccaccgcctcagccagcatca

SEQ ID NO: 373408 - DNA, 33 bp, Homo sapien
caagtttaagggccactgcctcagccagcatca

SEQ ID NO: 373409 - DNA, 33 bp, Homo sapien
ttccaagagacgaaacagactgattttaagcct

SEQ ID NO: 373410 - DNA, 33 bp, Homo sapien
ttccaagagacgaaacggactgattttaagcct

SEQ ID NO: 373411 - DNA, 33 bp, Homo sapien
gcggggggaccaaaagaagctcaggaatggggc

SEQ ID NO: 373412 - DNA, 33 bp, Homo sapien
gcggggggaccaaaaggagctcaggaatggggc

SEQ ID NO: 373413 - DNA, 33 bp, Homo sapien
gcagagttccaggcacactttcctcgaaacaga

SEQ ID NO: 373414 - DNA, 33 bp, Homo sapien
gcagagttccaggcacgctttcctcgaaacaga

SEQ ID NO: 373415 - DNA, 33 bp, Homo sapien
gttagccggatatcaccgaagcggaaattgcag

SEQ ID NO: 373416 - DNA, 33 bp, Homo sapien
gttagccggatatcactgaagcggaaattgcag

SEQ ID NO: 373417 - DNA, 33 bp, Homo sapien
aagcacgaaggtgaacaaaagactttctgcccc

SEQ ID NO: 373418 - DNA, 33 bp, Homo sapien
aagcacgaaggtgaacgaaagactttctgcccc

SEQ ID NO: 373419 - DNA, 33 bp, Homo sapien
agttgtggcatccaataaatagaaaaggcctga

SEQ ID NO: 373420 - DNA, 33 bp, Homo sapien
agttgtggcatccaatgaatagaaaaggcctga

SEQ ID NO: 373421 - DNA, 33 bp, Homo sapien
gtggtcatgtgatctaaccgatgccttccacac

SEQ ID NO: 373422 - DNA, 33 bp, Homo sapien
gtggtcatgtgatctatccgatgccttccacac

SEQ ID NO: 373423 - DNA, 33 bp, Homo sapien
agagttagtgacatgcacatagaaaaccaagca

SEQ ID NO: 373424 - DNA, 33 bp, Homo sapien
agagttagtgacatgctcatagaaaaccaagca

SEQ ID NO: 373425 - DNA, 33 bp, Homo sapien
gaagcacaaatgaaaaatgtctccatggtgttg

SEQ ID NO: 373426 - DNA, 33 bp, Homo sapien
gaagcacaaatgaaaagtgtctccatggtgttg

SEQ ID NO: 373427 - DNA, 33 bp, Homo sapien
gctggctaagatcagccctaagagagagtgtag

SEQ ID NO: 373428 - DNA, 33 bp, Homo sapien
gctggctaagatcagcgctaagagagagtgtag

SEQ ID NO: 373429 - DNA, 33 bp, Homo sapien
tgtacttgcagtcttacgacgttattgtagcct

SEQ ID NO: 373430 - DNA, 33 bp, Homo sapien
tgtacttgcagtcttaggacgttattgtagcct

SEQ ID NO: 373431 - DNA, 33 bp, Homo sapien
gatgaattggaagatgaataaatatttcttcct

SEQ ID NO: 373432 - DNA, 33 bp, Homo sapien
gatgaattggaagatggataaatatttcttcct

SEQ ID NO: 373433 - DNA, 33 bp, Homo sapien
gagagggctgtcgagagaacctcgtccctggag

SEQ ID NO: 373434 - DNA, 33 bp, Homo sapien
gagagggctgtcgagataacctcgtccctggag

SEQ ID NO: 373435 - DNA, 33 bp, Homo sapien
ctctttgcttttcggcactggagtcttggccct

SEQ ID NO: 373436 - DNA, 33 bp, Homo sapien
ctctttgcttttcggcgctggagtcttggccct

SEQ ID NO: 373437 - DNA, 33 bp, Homo sapien
catcttaggatttttcaactttattgtggtatg

SEQ ID NO: 373438 - DNA, 33 bp, Homo sapien
catcttaggatttttcgactttattgtggtatg

SEQ ID NO: 373439 - DNA, 33 bp, Homo sapien
gacacaaacatagagacagcagaatggaagaca

SEQ ID NO: 373440 - DNA, 33 bp, Homo sapien
gacacaaacatagagatagcagaatggaagaca

SEQ ID NO: 373441 - DNA, 33 bp, Homo sapien
gcattctacccctgccacatactataatagcta

SEQ ID NO: 373442 - DNA, 33 bp, Homo sapien
gcattctacccctgccgcatactataatagcta

SEQ ID NO: 373443 - DNA, 33 bp, Homo sapien
tcccagtccaaaggccactatagcccaggctgg

SEQ ID NO: 373444 - DNA, 33 bp, Homo sapien
tcccagtccaaaggcctctatagcccaggctgg

SEQ ID NO: 373445 - DNA, 33 bp, Homo sapien
gggaatattgcactcacctggttttgctcagaa

SEQ ID NO: 373446 - DNA, 33 bp, Homo sapien
gggaatattgcactcatctggttttgctcagaa

SEQ ID NO: 373447 - DNA, 33 bp, Homo sapien
gcaatctggataggctaaaaatcatccaaattg

SEQ ID NO: 373448 - DNA, 33 bp, Homo sapien
gcaatctggataggctgaaaatcatccaaattg

SEQ ID NO: 373449 - DNA, 33 bp, Homo sapien
ctgtattcccagaccaagagaggatgtgctcca

SEQ ID NO: 373450 - DNA, 33 bp, Homo sapien
ctgtattcccagaccaggagaggatgtgctcca

SEQ ID NO: 373451 - DNA, 33 bp, Homo sapien
gtggtggaatcagaaaatcactctcatggttac

SEQ ID NO: 373452 - DNA, 33 bp, Homo sapien
gtggtggaatcagaaagtcactctcatggttac

SEQ ID NO: 373453 - DNA, 33 bp, Homo sapien
cagtggcttttgtctacctggcactatgatctt

SEQ ID NO: 373454 - DNA, 33 bp, Homo sapien
cagtggcttttgtctatctggcactatgatctt

SEQ ID NO: 373455 - DNA, 33 bp, Homo sapien
tcacagacctagaggacggtggatctattcaca

SEQ ID NO: 373456 - DNA, 33 bp, Homo sapien
tcacagacctagaggatggtggatctattcaca

SEQ ID NO: 373457 - DNA, 33 bp, Homo sapien
tttttagcgtcgatgacaaatgaaaaagaaggg

SEQ ID NO: 373458 - DNA, 33 bp, Homo sapien
tttttagcgtcgatgataaatgaaaaagaaggg

SEQ ID NO: 373459 - DNA, 33 bp, Homo sapien
aatgctgttactggaactcttcatagagtctgc

SEQ ID NO: 373460 - DNA, 33 bp, Homo sapien
aatgctgttactggaattcttcatagagtctgc

SEQ ID NO: 373461 - DNA, 33 bp, Homo sapien
ccttaacacagatttaccaagggcagagaaaat

SEQ ID NO: 373462 - DNA, 33 bp, Homo sapien
ccttaacacagatttatcaagggcagagaaaat

SEQ ID NO: 373463 - DNA, 33 bp, Homo sapien
acagtgatgactcagacatctttaaccagcccc

SEQ ID NO: 373464 - DNA, 33 bp, Homo sapien
acagtgatgactcagatatctttaaccagcccc

SEQ ID NO: 373465 - DNA, 33 bp, Homo sapien
ctcaggcaagtgtcaactgctatgcatcatcac

SEQ ID NO: 373466 - DNA, 33 bp, Homo sapien
ctcaggcaagtgtcaattgctatgcatcatcac

SEQ ID NO: 373467 - DNA, 33 bp, Homo sapien
caacttgcccaaattcaagagattttgtttcac

SEQ ID NO: 373468 - DNA, 33 bp, Homo sapien
caacttgcccaaattcgagagattttgtttcac

SEQ ID NO: 373469 - DNA, 33 bp, Homo sapien
atcaccctttggccataactgattggacaagga

SEQ ID NO: 373470 - DNA, 33 bp, Homo sapien
atcaccctttggccatcactgattggacaagga

SEQ ID NO: 373471 - DNA, 33 bp, Homo sapien
gtttttgcaaaaacacaaagcattttttcatag

SEQ ID NO: 373472 - DNA, 33 bp, Homo sapien
gtttttgcaaaaacacgaagcattttttcatag

SEQ ID NO: 373473 - DNA, 33 bp, Homo sapien
ggtcaaacatctcatcagaatagaatatggcct

SEQ ID NO: 373474 - DNA, 33 bp, Homo sapien
ggtcaaacatctcatcggaatagaatatggcct

SEQ ID NO: 373475 - DNA, 33 bp, Homo sapien
aaaatccaggcttctcaatatgatctagcccct

SEQ ID NO: 373476 - DNA, 33 bp, Homo sapien
aaaatccaggcttctcgatatgatctagcccct

SEQ ID NO: 373477 - DNA, 33 bp, Homo sapien
ggtgctgcttccctgacgctggactgagcacgg

SEQ ID NO: 373478 - DNA, 33 bp, Homo sapien
ggtgctgcttccctgatgctggactgagcacgg

SEQ ID NO: 373479 - DNA, 33 bp, Homo sapien
tgacctgggtcaacaacgctctgcttccgtttc

SEQ ID NO: 373480 - DNA, 33 bp, Homo sapien
tgacctgggtcaacaatgctctgcttccgtttc

SEQ ID NO: 373481 - DNA, 33 bp, Homo sapien
aaaattgccaaaaacacgaaggagtgagagtgg

SEQ ID NO: 373482 - DNA, 33 bp, Homo sapien
aaaattgccaaaaacaggaaggagtgagagtgg

SEQ ID NO: 373483 - DNA, 33 bp, Homo sapien
ttaaggtgtgtgtataaagaggagaacactcca

SEQ ID NO: 373484 - DNA, 33 bp, Homo sapien
ttaaggtgtgtgtatacagaggagaacactcca

SEQ ID NO: 373485 - DNA, 33 bp, Homo sapien
tccctgtgcccttcagcagcctgcataactctc

SEQ ID NO: 373486 - DNA, 33 bp, Homo sapien
tccctgtgcccttcagtagcctgcataactctc

SEQ ID NO: 373487 - DNA, 33 bp, Homo sapien
gcataactctctccccaaactcatcactttgtg

SEQ ID NO: 373488 - DNA, 33 bp, Homo sapien
gcataactctctccccgaactcatcactttgtg

SEQ ID NO: 373489 - DNA, 33 bp, Homo sapien
acgctgtgcctgggaccatgctgatgcagggat

SEQ ID NO: 373490 - DNA, 33 bp, Homo sapien
acgctgtgcctgggactatgctgatgcagggat

SEQ ID NO: 373491 - DNA, 33 bp, Homo sapien
cctagatctaatcacaatatctcacctttgtgc

SEQ ID NO: 373492 - DNA, 33 bp, Homo sapien
cctagatctaatcacagtatctcacctttgtgc

SEQ ID NO: 373493 - DNA, 33 bp, Homo sapien
tggccacacagtgcacaaatggcttgggtctgt

SEQ ID NO: 373494 - DNA, 33 bp, Homo sapien
tggccacacagtgcacgaatggcttgggtctgt

SEQ ID NO: 373495 - DNA, 33 bp, Homo sapien
tcccacgtcaaacagcgaataaggaagagaccc

SEQ ID NO: 373496 - DNA, 33 bp, Homo sapien
tcccacgtcaaacagctaataaggaagagaccc

SEQ ID NO: 373497 - DNA, 33 bp, Homo sapien
gaattatacattgaaaggcacagaaattatttt

SEQ ID NO: 373498 - DNA, 33 bp, Homo sapien
gaattatacattgaaatgcacagaaattatttt

SEQ ID NO: 373499 - DNA, 33 bp, Homo sapien
caaaaaatctccaacaccttagagacagcaaaa

SEQ ID NO: 373500 - DNA, 33 bp, Homo sapien
caaaaaatctccaacatcttagagacagcaaaa

SEQ ID NO: 373501 - DNA, 33 bp, Homo sapien
cttagcacatgaagccactgttatttgtgtatg

SEQ ID NO: 373502 - DNA, 33 bp, Homo sapien
cttagcacatgaagcccctgttatttgtgtatg

SEQ ID NO: 373503 - DNA, 33 bp, Homo sapien
agcagcgctcttcacagtaggaaagacataaaa

SEQ ID NO: 373504 - DNA, 33 bp, Homo sapien
agcagcgctcttcacattaggaaagacataaaa

SEQ ID NO: 373505 - DNA, 33 bp, Homo sapien
atggtgacaacagtaacaataatatggtgataa

SEQ ID NO: 373506 - DNA, 33 bp, Homo sapien
atggtgacaacagtaataataatatggtgataa

SEQ ID NO: 373507 - DNA, 33 bp, Homo sapien
atctgtcttcgcttcaactttcccatctgcgaa

SEQ ID NO: 373508 - DNA, 33 bp, Homo sapien
atctgtcttcgcttcacctttcccatctgcgaa

SEQ ID NO: 373509 - DNA, 33 bp, Homo sapien
ggggaggtgaaaacacaagatggtccttgaagt

SEQ ID NO: 373510 - DNA, 33 bp, Homo sapien
ggggaggtgaaaacacgagatggtccttgaagt

SEQ ID NO: 373511 - DNA, 33 bp, Homo sapien
tagtaaattaagattcaataacatcacgtaaaa

SEQ ID NO: 373512 - DNA, 33 bp, Homo sapien
tagtaaattaagattccataacatcacgtaaaa

SEQ ID NO: 373513 - DNA, 33 bp, Homo sapien
tgcatttatcttctaaaagagaggagatggagt

SEQ ID NO: 373514 - DNA, 33 bp, Homo sapien
tgcatttatcttctaagagagaggagatggagt

SEQ ID NO: 373515 - DNA, 33 bp, Homo sapien
ccgcctcacttgggaacgtggcactgtgtgggg

SEQ ID NO: 373516 - DNA, 33 bp, Homo sapien
ccgcctcacttgggaatgtggcactgtgtgggg

SEQ ID NO: 373517 - DNA, 33 bp, Homo sapien
agctgtgccaaacaaacgacccgcctcacttgg

SEQ ID NO: 373518 - DNA, 33 bp, Homo sapien
agctgtgccaaacaaatgacccgcctcacttgg

SEQ ID NO: 373519 - DNA, 33 bp, Homo sapien
acacacacacataatacgcctttcttcgacagc

SEQ ID NO: 373520 - DNA, 33 bp, Homo sapien
acacacacacataatatgcctttcttcgacagc

SEQ ID NO: 373521 - DNA, 33 bp, Homo sapien
ggagatgggcattaacacctttcagtggcagga

SEQ ID NO: 373522 - DNA, 33 bp, Homo sapien
ggagatgggcattaacgcctttcagtggcagga

SEQ ID NO: 373523 - DNA, 33 bp, Homo sapien
ctatttcccttaacacaaaacccattgatagag

SEQ ID NO: 373524 - DNA, 33 bp, Homo sapien
ctatttcccttaacaccaaacccattgatagag

SEQ ID NO: 373525 - DNA, 33 bp, Homo sapien
aaaaagcctgggtaaagcttggaaagcagcgag

SEQ ID NO: 373526 - DNA, 33 bp, Homo sapien
aaaaagcctgggtaaatcttggaaagcagcgag

SEQ ID NO: 373527 - DNA, 33 bp, Homo sapien
agtggggaggttgtaacggatcactaaggaagg

SEQ ID NO: 373528 - DNA, 33 bp, Homo sapien
agtggggaggttgtaatggatcactaaggaagg

SEQ ID NO: 373529 - DNA, 33 bp, Homo sapien
aacaggttgaaagccaaacaattagccttggat

SEQ ID NO: 373530 - DNA, 33 bp, Homo sapien
aacaggttgaaagccacacaattagccttggat

SEQ ID NO: 373531 - DNA, 33 bp, Homo sapien
gacctgcaagatggatcagccccgtttttcatc

SEQ ID NO: 373532 - DNA, 33 bp, Homo sapien
gacctgcaagatggatgagccccgtttttcatc

SEQ ID NO: 373533 - DNA, 33 bp, Homo sapien
ggacacgtttgttccacagtcactgaggtcata

SEQ ID NO: 373534 - DNA, 33 bp, Homo sapien
ggacacgtttgttccagagtcactgaggtcata

SEQ ID NO: 373535 - DNA, 33 bp, Homo sapien
tttcatatgcaaaccccgctttgaggtgctgac

SEQ ID NO: 373536 - DNA, 33 bp, Homo sapien
tttcatatgcaaaccctgctttgaggtgctgac

SEQ ID NO: 373537 - DNA, 33 bp, Homo sapien
caaccttccatagcacacctcttaggcaggggt

SEQ ID NO: 373538 - DNA, 33 bp, Homo sapien
caaccttccatagcacgcctcttaggcaggggt

SEQ ID NO: 373539 - DNA, 33 bp, Homo sapien
agcaacaccagcctaaacaaaaacagcttaccc

SEQ ID NO: 373540 - DNA, 33 bp, Homo sapien
agcaacaccagcctaaccaaaaacagcttaccc

SEQ ID NO: 373541 - DNA, 33 bp, Homo sapien
agcacggatctcacacaacaagcaacactgccc

SEQ ID NO: 373542 - DNA, 33 bp, Homo sapien
agcacggatctcacacgacaagcaacactgccc

SEQ ID NO: 373543 - DNA, 33 bp, Homo sapien
ggacacacaggaatgccaacccgagatgccacg

SEQ ID NO: 373544 - DNA, 33 bp, Homo sapien
ggacacacaggaatgctaacccgagatgccacg

SEQ ID NO: 373545 - DNA, 33 bp, Homo sapien
tggagacatgaatacaatgactattcctgcttg

SEQ ID NO: 373546 - DNA, 33 bp, Homo sapien
tggagacatgaatacagtgactattcctgcttg

SEQ ID NO: 373547 - DNA, 33 bp, Homo sapien
tgtattataaagaatacagatcaagaccagaca

SEQ ID NO: 373548 - DNA, 33 bp, Homo sapien
tgtattataaagaatatagatcaagaccagaca

SEQ ID NO: 373549 - DNA, 33 bp, Homo sapien
tgagcttcctggcagccgatggaaaaaggcaaa

SEQ ID NO: 373550 - DNA, 33 bp, Homo sapien
tgagcttcctggcagctgatggaaaaaggcaaa

SEQ ID NO: 373551 - DNA, 33 bp, Homo sapien
gtataggcaatggagtaaagttggtatgctttg

SEQ ID NO: 373552 - DNA, 33 bp, Homo sapien
gtataggcaatggagtgaagttggtatgctttg

SEQ ID NO: 373553 - DNA, 33 bp, Homo sapien
ggccggctcagggaccaaagcttaagtcagcat

SEQ ID NO: 373554 - DNA, 33 bp, Homo sapien
ggccggctcagggaccgaagcttaagtcagcat

SEQ ID NO: 373555 - DNA, 33 bp, Homo sapien
tggaaacccagcgataagagcatcagcatctcc

SEQ ID NO: 373556 - DNA, 33 bp, Homo sapien
tggaaacccagcgataggagcatcagcatctcc

SEQ ID NO: 373557 - DNA, 33 bp, Homo sapien
taatctgatcttagacacaaaaatttatgtgga

SEQ ID NO: 373558 - DNA, 33 bp, Homo sapien
taatctgatcttagacgcaaaaatttatgtgga

SEQ ID NO: 373559 - DNA, 33 bp, Homo sapien
cttgactagggaatcccacgccccacagccaga

SEQ ID NO: 373560 - DNA, 33 bp, Homo sapien
cttgactagggaatcctacgccccacagccaga

SEQ ID NO: 373561 - DNA, 33 bp, Homo sapien
atggacaggatggaaacagttcttggaggcttc

SEQ ID NO: 373562 - DNA, 33 bp, Homo sapien
atggacaggatggaaagagttcttggaggcttc

SEQ ID NO: 373563 - DNA, 33 bp, Homo sapien
aaaaaaaagttacacaatatggctagaaactat

SEQ ID NO: 373564 - DNA, 33 bp, Homo sapien
aaaaaaaagttacacagtatggctagaaactat

SEQ ID NO: 373565 - DNA, 33 bp, Homo sapien
gatgtgattccattccaatgccaatcggcatgc

SEQ ID NO: 373566 - DNA, 33 bp, Homo sapien
gatgtgattccattccgatgccaatcggcatgc

SEQ ID NO: 373567 - DNA, 33 bp, Homo sapien
ctaggtcctctgtaaacggcagcctatgaagct

SEQ ID NO: 373568 - DNA, 33 bp, Homo sapien
ctaggtcctctgtaaatggcagcctatgaagct

SEQ ID NO: 373569 - DNA, 33 bp, Homo sapien
tagcagagattcttcactctgccttagccaaga

SEQ ID NO: 373570 - DNA, 33 bp, Homo sapien
tagcagagattcttcattctgccttagccaaga

SEQ ID NO: 373571 - DNA, 33 bp, Homo sapien
atcatgtcaggtagcgacagccacagcagagag

SEQ ID NO: 373572 - DNA, 33 bp, Homo sapien
atcatgtcaggtagcggcagccacagcagagag

SEQ ID NO: 373573 - DNA, 33 bp, Homo sapien
gaggtgtctcccatagaatttcatggtacttta

SEQ ID NO: 373574 - DNA, 33 bp, Homo sapien
gaggtgtctcccatagcatttcatggtacttta

SEQ ID NO: 373575 - DNA, 33 bp, Homo sapien
gaaagaacaggtgaaacacttggagaaggtgct

SEQ ID NO: 373576 - DNA, 33 bp, Homo sapien
gaaagaacaggtgaaatacttggagaaggtgct

SEQ ID NO: 373577 - DNA, 33 bp, Homo sapien
tgcagttcctctgttacggctttattcgcaggc

SEQ ID NO: 373578 - DNA, 33 bp, Homo sapien
tgcagttcctctgttatggctttattcgcaggc

SEQ ID NO: 373579 - DNA, 33 bp, Homo sapien
taggcactctgtaaaactattgtggtttctcaa

SEQ ID NO: 373580 - DNA, 33 bp, Homo sapien
taggcactctgtaaaattattgtggtttctcaa

SEQ ID NO: 373581 - DNA, 33 bp, Homo sapien
gggaaatcagcaattcacatggtggcagcagga

SEQ ID NO: 373582 - DNA, 33 bp, Homo sapien
gggaaatcagcaattcgcatggtggcagcagga

SEQ ID NO: 373583 - DNA, 33 bp, Homo sapien
accatatcacccatccgactaactttgggcctg

SEQ ID NO: 373584 - DNA, 33 bp, Homo sapien
accatatcacccatcctactaactttgggcctg

SEQ ID NO: 373585 - DNA, 33 bp, Homo sapien
ctggctctgtcatttcacggttgtgcgagggtg

SEQ ID NO: 373586 - DNA, 33 bp, Homo sapien
ctggctctgtcatttcgcggttgtgcgagggtg

SEQ ID NO: 373587 - DNA, 33 bp, Homo sapien
ctgtctaaaataaacaccttctcaagtcacctt

SEQ ID NO: 373588 - DNA, 33 bp, Homo sapien
ctgtctaaaataaacagcttctcaagtcacctt

SEQ ID NO: 373589 - DNA, 33 bp, Homo sapien
tcaatcacagtcgcacaaggaaagaacaaggaa

SEQ ID NO: 373590 - DNA, 33 bp, Homo sapien
tcaatcacagtcgcacgaggaaagaacaaggaa

SEQ ID NO: 373591 - DNA, 33 bp, Homo sapien
gcattgatctattcataaggagtcctcccccat

SEQ ID NO: 373592 - DNA, 33 bp, Homo sapien
gcattgatctattcatgaggagtcctcccccat

SEQ ID NO: 373593 - DNA, 33 bp, Homo sapien
ggggtcttcccttgacgcctctacacatccgtt

SEQ ID NO: 373594 - DNA, 33 bp, Homo sapien
ggggtcttcccttgactcctctacacatccgtt

SEQ ID NO: 373595 - DNA, 33 bp, Homo sapien
tgaccatggagccaaccacattgttacacatcc

SEQ ID NO: 373596 - DNA, 33 bp, Homo sapien
tgaccatggagccaactacattgttacacatcc

SEQ ID NO: 373597 - DNA, 33 bp, Homo sapien
gcctatctcctaaataccttttgcattggtgcg

SEQ ID NO: 373598 - DNA, 33 bp, Homo sapien
gcctatctcctaaatatcttttgcattggtgcg

SEQ ID NO: 373599 - DNA, 33 bp, Homo sapien
aacagcaatgcctccaggttatgaactttttta

SEQ ID NO: 373600 - DNA, 33 bp, Homo sapien
aacagcaatgcctccatgttatgaactttttta

SEQ ID NO: 373601 - DNA, 33 bp, Homo sapien
ttcatctgtaatttacacacttggggctatcaa

SEQ ID NO: 373602 - DNA, 33 bp, Homo sapien
ttcatctgtaatttacgcacttggggctatcaa

SEQ ID NO: 373603 - DNA, 33 bp, Homo sapien
actcacctttctccgacgccggggccaggtcaa

SEQ ID NO: 373604 - DNA, 33 bp, Homo sapien
actcacctttctccgatgccggggccaggtcaa

SEQ ID NO: 373605 - DNA, 33 bp, Homo sapien
ataagcatcttgacaacgggttatctatgctat

SEQ ID NO: 373606 - DNA, 33 bp, Homo sapien
ataagcatcttgacaaggggttatctatgctat

SEQ ID NO: 373607 - DNA, 33 bp, Homo sapien
atctataccataccaaacgtcttctctccagac

SEQ ID NO: 373608 - DNA, 33 bp, Homo sapien
atctataccataccaagcgtcttctctccagac

SEQ ID NO: 373609 - DNA, 33 bp, Homo sapien
tggcccagcctcgaaaaaagcccctgtgccatg

SEQ ID NO: 373610 - DNA, 33 bp, Homo sapien
tggcccagcctcgaaagaagcccctgtgccatg

SEQ ID NO: 373611 - DNA, 33 bp, Homo sapien
cctctctcacttacaccactggaaagtttaatg

SEQ ID NO: 373612 - DNA, 33 bp, Homo sapien
cctctctcacttacactactggaaagtttaatg

SEQ ID NO: 373613 - DNA, 33 bp, Homo sapien
tacgagggaagagagagaatcttctggctggct

SEQ ID NO: 373614 - DNA, 33 bp, Homo sapien
tacgagggaagagagataatcttctggctggct

SEQ ID NO: 373615 - DNA, 33 bp, Homo sapien
atcttgtttaaagaccacagggacacacttcta

SEQ ID NO: 373616 - DNA, 33 bp, Homo sapien
atcttgtttaaagaccgcagggacacacttcta

SEQ ID NO: 373617 - DNA, 33 bp, Homo sapien
aaagcctctaggatccaaatacaagcagctgca

SEQ ID NO: 373618 - DNA, 33 bp, Homo sapien
aaagcctctaggatccgaatacaagcagctgca

SEQ ID NO: 373619 - DNA, 33 bp, Homo sapien
accaacagctggaggacgaactttctaaactat

SEQ ID NO: 373620 - DNA, 33 bp, Homo sapien
accaacagctggaggatgaactttctaaactat

SEQ ID NO: 373621 - DNA, 33 bp, Homo sapien
aactaactaccaaggaacacaatttttggatag

SEQ ID NO: 373622 - DNA, 33 bp, Homo sapien
aactaactaccaaggagcacaatttttggatag

SEQ ID NO: 373623 - DNA, 33 bp, Homo sapien
cagacggatgaagaagaccagaccctccctcat

SEQ ID NO: 373624 - DNA, 33 bp, Homo sapien
cagacggatgaagaaggccagaccctccctcat

SEQ ID NO: 373625 - DNA, 33 bp, Homo sapien
tctggtttacactcaacactcaaatgtttactg

SEQ ID NO: 373626 - DNA, 33 bp, Homo sapien
tctggtttacactcaagactcaaatgtttactg

SEQ ID NO: 373627 - DNA, 33 bp, Homo sapien
aaaatttaccagaaaaactgttgctattaataa

SEQ ID NO: 373628 - DNA, 33 bp, Homo sapien
aaaatttaccagaaaacctgttgctattaataa

SEQ ID NO: 373629 - DNA, 33 bp, Homo sapien
cccttcttcaccagcacggccgccgattctgat

SEQ ID NO: 373630 - DNA, 33 bp, Homo sapien
cccttcttcaccagcatggccgccgattctgat

SEQ ID NO: 373631 - DNA, 33 bp, Homo sapien
agaggctatgtgccaacgcggccggccggctgt

SEQ ID NO: 373632 - DNA, 33 bp, Homo sapien
agaggctatgtgccaatgcggccggccggctgt

SEQ ID NO: 373633 - DNA, 33 bp, Homo sapien
tgagccaccatgcaggccaagtcattcttaaac

SEQ ID NO: 373634 - DNA, 33 bp, Homo sapien
tgagccaccatgcaggtcaagtcattcttaaac

SEQ ID NO: 373635 - DNA, 33 bp, Homo sapien
ttaaataaaaaggaggccataaaacagcaggat

SEQ ID NO: 373636 - DNA, 33 bp, Homo sapien
ttaaataaaaaggaggtcataaaacagcaggat

SEQ ID NO: 373637 - DNA, 33 bp, Homo sapien
attcttagaggtgtgcaagctggtctttgacct

SEQ ID NO: 373638 - DNA, 33 bp, Homo sapien
attcttagaggtgtgcgagctggtctttgacct

SEQ ID NO: 373639 - DNA, 33 bp, Homo sapien
aagggatgtcttttaaatcagtggctcccaaat

SEQ ID NO: 373640 - DNA, 33 bp, Homo sapien
aagggatgtcttttaagtcagtggctcccaaat

SEQ ID NO: 373641 - DNA, 33 bp, Homo sapien
tggcggttcacaccgcaagttcttcaggagaga

SEQ ID NO: 373642 - DNA, 33 bp, Homo sapien
tggcggttcacaccgcgagttcttcaggagaga

SEQ ID NO: 373643 - DNA, 33 bp, Homo sapien
gttcatccacttggtagcttttttctagtgtaa

SEQ ID NO: 373644 - DNA, 33 bp, Homo sapien
gttcatccacttggtatcttttttctagtgtaa

SEQ ID NO: 373645 - DNA, 33 bp, Homo sapien
gaagatctgacaggtcaaatagaacaggaaatc

SEQ ID NO: 373646 - DNA, 33 bp, Homo sapien
gaagatctgacaggtcgaatagaacaggaaatc

SEQ ID NO: 373647 - DNA, 33 bp, Homo sapien
aggtataaaatttgccacaggagactgatctta

SEQ ID NO: 373648 - DNA, 33 bp, Homo sapien
aggtataaaatttgccgcaggagactgatctta

SEQ ID NO: 373649 - DNA, 33 bp, Homo sapien
ccctgggcttcatcaaactactcctgaaatctg

SEQ ID NO: 373650 - DNA, 33 bp, Homo sapien
ccctgggcttcatcaacctactcctgaaatctg

SEQ ID NO: 373651 - DNA, 33 bp, Homo sapien
tgccttatcaagctacagggctaataggccaaa

SEQ ID NO: 373652 - DNA, 33 bp, Homo sapien
tgccttatcaagctacggggctaataggccaaa

SEQ ID NO: 373653 - DNA, 33 bp, Homo sapien
gggcaggaccctcatcaatctgggagagccgac

SEQ ID NO: 373654 - DNA, 33 bp, Homo sapien
gggcaggaccctcatccatctgggagagccgac

SEQ ID NO: 373655 - DNA, 33 bp, Homo sapien
ttttcaagaagaaagaagcaatgcagcaaagtg

SEQ ID NO: 373656 - DNA, 33 bp, Homo sapien
ttttcaagaagaaagaggcaatgcagcaaagtg

SEQ ID NO: 373657 - DNA, 33 bp, Homo sapien
ttcaagtatcagattacagaggaaacgagaggt

SEQ ID NO: 373658 - DNA, 33 bp, Homo sapien
ttcaagtatcagattagagaggaaacgagaggt

SEQ ID NO: 373659 - DNA, 33 bp, Homo sapien
gaaactatggaaactaatatctttgaacatctc

SEQ ID NO: 373660 - DNA, 33 bp, Homo sapien
gaaactatggaaactagtatctttgaacatctc

SEQ ID NO: 373661 - DNA, 33 bp, Homo sapien
gcccaactgtgcttaccgcgcgaaggaaaatgt

SEQ ID NO: 373662 - DNA, 33 bp, Homo sapien
gcccaactgtgcttactgcgcgaaggaaaatgt

SEQ ID NO: 373663 - DNA, 33 bp, Homo sapien
tttctgctgttatacacctgttttatttcatgt

SEQ ID NO: 373664 - DNA, 33 bp, Homo sapien
tttctgctgttatacatctgttttatttcatgt

SEQ ID NO: 373665 - DNA, 33 bp, Homo sapien; identical to SEQ ID NO: 373663

SEQ ID NO: 373666 - DNA, 33 bp, Homo sapien; identical to SEQ ID NO: 373664

SEQ ID NO: 373667 - DNA, 33 bp, Homo sapien
tttgggcatttattaaagactcctgcctaaatc

SEQ ID NO: 373668 - DNA, 33 bp, Homo sapien
tttgggcatttattaacgactcctgcctaaatc

SEQ ID NO: 373669 - DNA, 33 bp, Homo sapien
ctcatgattagttagaacttggatccaagaaaa

SEQ ID NO: 373670 - DNA, 33 bp, Homo sapien
ctcatgattagttagaccttggatccaagaaaa

SEQ ID NO: 373671 - DNA, 33 bp, Homo sapien
ttgcctcggttcacacagtctttgagagggaga

SEQ ID NO: 373672 - DNA, 33 bp, Homo sapien
ttgcctcggttcacaccgtctttgagagggaga

SEQ ID NO: 373673 - DNA, 33 bp, Homo sapien
acttcttcaaactgaacaaggaggatgctaaga

SEQ ID NO: 373674 - DNA, 33 bp, Homo sapien
acttcttcaaactgaataaggaggatgctaaga

SEQ ID NO: 373675 - DNA, 33 bp, Homo sapien
tgggcctgtactatgccatacccagtgtcaggg

SEQ ID NO: 373676 - DNA, 33 bp, Homo sapien
tgggcctgtactatgctatacccagtgtcaggg

SEQ ID NO: 373677 - DNA, 33 bp, Homo sapien
cttgtcttgctgggccacgttggttgctctgtg

SEQ ID NO: 373678 - DNA, 33 bp, Homo sapien
cttgtcttgctgggccgcgttggttgctctgtg

SEQ ID NO: 373679 - DNA, 33 bp, Homo sapien
gcagggcctgtaaacaacagccaaaagcctttt

SEQ ID NO: 373680 - DNA, 33 bp, Homo sapien
gcagggcctgtaaacagcagccaaaagcctttt

SEQ ID NO: 373681 - DNA, 33 bp, Homo sapien
ttccacattcccagaactagtatcgtgcaccct

SEQ ID NO: 373682 - DNA, 33 bp, Homo sapien
ttccacattcccagaattagtatcgtgcaccct

SEQ ID NO: 373683 - DNA, 33 bp, Homo sapien
tgaattttcccacagacgttgcagattttatta

SEQ ID NO: 373684 - DNA, 33 bp, Homo sapien
tgaattttcccacagatgttgcagattttatta

SEQ ID NO: 373685 - DNA, 33 bp, Homo sapien
tggtatggaaaccttaccaccatatagattaga

SEQ ID NO: 373686 - DNA, 33 bp, Homo sapien
tggtatggaaaccttatcaccatatagattaga

SEQ ID NO: 373687 - DNA, 33 bp, Homo sapien
cctaaccatcctgcaacagaagtgttaagtacg

SEQ ID NO: 373688 - DNA, 33 bp, Homo sapien
cctaaccatcctgcaagagaagtgttaagtacg

SEQ ID NO: 373689 - DNA, 33 bp, Homo sapien
tcactgaaaaggtccaaatgcatggctgtccct

SEQ ID NO: 373690 - DNA, 33 bp, Homo sapien
tcactgaaaaggtccagatgcatggctgtccct

SEQ ID NO: 373691 - DNA, 33 bp, Homo sapien
aatcagcaggggagtgaacttgcaaacaatgac

SEQ ID NO: 373692 - DNA, 33 bp, Homo sapien
aatcagcaggggagtggacttgcaaacaatgac

SEQ ID NO: 373693 - DNA, 33 bp, Homo sapien
agaaaaagcaaattaaaaggagtctgaaaaaat

SEQ ID NO: 373694 - DNA, 33 bp, Homo sapien
agaaaaagcaaattaagaggagtctgaaaaaat

SEQ ID NO: 373695 - DNA, 33 bp, Homo sapien
ctactagacaaagtaacaaaggctgtgttagga

SEQ ID NO: 373696 - DNA, 33 bp, Homo sapien
ctactagacaaagtaagaaaggctgtgttagga

SEQ ID NO: 373697 - DNA, 33 bp, Homo sapien
tgagactgcgtcgttgcatttagcttaagttgt

SEQ ID NO: 373698 - DNA, 33 bp, Homo sapien
tgagactgcgtcgttggatttagcttaagttgt

SEQ ID NO: 373699 - DNA, 33 bp, Homo sapien
cagcacttctcagtaccaattacagaggctgaa

SEQ ID NO: 373700 - DNA, 33 bp, Homo sapien
cagcacttctcagtacgaattacagaggctgaa

SEQ ID NO: 373701 - DNA, 33 bp, Homo sapien
ctttaagcctcgagtcacttttccagtggggcc

SEQ ID NO: 373702 - DNA, 33 bp, Homo sapien
ctttaagcctcgagtcgcttttccagtggggcc

SEQ ID NO: 373703 - DNA, 33 bp, Homo sapien
ctacgcacccaacaaacgtttatttccttcact

SEQ ID NO: 373704 - DNA, 33 bp, Homo sapien
ctacgcacccaacaaatgtttatttccttcact

SEQ ID NO: 373705 - DNA, 33 bp, Homo sapien
cttgcagacagttacaaaggtcacatatatagc

SEQ ID NO: 373706 - DNA, 33 bp, Homo sapien
cttgcagacagttacagaggtcacatatatagc

SEQ ID NO: 373707 - DNA, 33 bp, Homo sapien
ttacttagtattgagcgagctgttgcttaatat

SEQ ID NO: 373708 - DNA, 33 bp, Homo sapien
ttacttagtattgagctagctgttgcttaatat

SEQ ID NO: 373709 - DNA, 33 bp, Homo sapien
aagcagaaccaacgaacagagagaaactgaatt

SEQ ID NO: 373710 - DNA, 33 bp, Homo sapien
aagcagaaccaacgaagagagagaaactgaatt

SEQ ID NO: 373711 - DNA, 33 bp, Homo sapien
cctggttttgattatacgccctgccccttggct

SEQ ID NO: 373712 - DNA, 33 bp, Homo sapien
cctggttttgattatatgccctgccccttggct

SEQ ID NO: 373713 - DNA, 33 bp, Homo sapien
gttgaagaacagcccaagtttgccaagatttaa

SEQ ID NO: 373714 - DNA, 33 bp, Homo sapien
gttgaagaacagcccaggtttgccaagatttaa

SEQ ID NO: 373715 - DNA, 33 bp, Homo sapien
tccacatttgccagcacagtgcatttggcagtg

SEQ ID NO: 373716 - DNA, 33 bp, Homo sapien
tccacatttgccagcatagtgcatttggcagtg

SEQ ID NO: 373717 - DNA, 33 bp, Homo sapien
ctgattgaccagagtccgaatccaaagtctccc

SEQ ID NO: 373718 - DNA, 33 bp, Homo sapien
ctgattgaccagagtctgaatccaaagtctccc

SEQ ID NO: 373719 - DNA, 33 bp, Homo sapien
ttccagccagctaaaacgtcatgacccaagcca

SEQ ID NO: 373720 - DNA, 33 bp, Homo sapien
ttccagccagctaaaatgtcatgacccaagcca

SEQ ID NO: 373721 - DNA, 33 bp, Homo sapien
gaactctgaaccacacagatgcaagaccatttc

SEQ ID NO: 373722 - DNA, 33 bp, Homo sapien
gaactctgaaccacacggatgcaagaccatttc

SEQ ID NO: 373723 - DNA, 33 bp, Homo sapien
ttattaaattaacacaaatgcttttctctttat

SEQ ID NO: 373724 - DNA, 33 bp, Homo sapien
ttattaaattaacacacatgcttttctctttat

SEQ ID NO: 373725 - DNA, 33 bp, Homo sapien
acaacacagagtctcacgctccactttctcatc

SEQ ID NO: 373726 - DNA, 33 bp, Homo sapien
acaacacagagtctcatgctccactttctcatc

SEQ ID NO: 373727 - DNA, 33 bp, Homo sapien
tttaaagtatactgcacagattattttcaaata

SEQ ID NO: 373728 - DNA, 33 bp, Homo sapien
tttaaagtatactgcatagattattttcaaata

SEQ ID NO: 373729 - DNA, 33 bp, Homo sapien
ggaagtgatgaaataaactatggtaaatccaca

SEQ ID NO: 373730 - DNA, 33 bp, Homo sapien
ggaagtgatgaaataagctatggtaaatccaca

SEQ ID NO: 373731 - DNA, 33 bp, Homo sapien
gcaaatgattttaaaactgcgtaatgcaaagga

SEQ ID NO: 373732 - DNA, 33 bp, Homo sapien
gcaaatgattttaaaagtgcgtaatgcaaagga

SEQ ID NO: 373733 - DNA, 33 bp, Homo sapien
aagatccgtttcagaacttctctgcagacatct

SEQ ID NO: 373734 - DNA, 33 bp, Homo sapien
aagatccgtttcagaatttctctgcagacatct

SEQ ID NO: 373735 - DNA, 33 bp, Homo sapien
tgctgaaaaaaagtaaatcgtgtgcatgaattc

SEQ ID NO: 373736 - DNA, 33 bp, Homo sapien
tgctgaaaaaaagtaactcgtgtgcatgaattc

SEQ ID NO: 373737 - DNA, 33 bp, Homo sapien
aaagctgaaatgaaaacattaagcaatgattaa

SEQ ID NO: 373738 - DNA, 33 bp, Homo sapien
aaagctgaaatgaaaatattaagcaatgattaa

SEQ ID NO: 373739 - DNA, 33 bp, Homo sapien
cacattttggtcctcaagaaggaagaaagatgg

SEQ ID NO: 373740 - DNA, 33 bp, Homo sapien
cacattttggtcctcaggaaggaagaaagatgg

SEQ ID NO: 373741 - DNA, 33 bp, Homo sapien
aacagcattatgaaaaccacggtgtatcttaaa

SEQ ID NO: 373742 - DNA, 33 bp, Homo sapien
aacagcattatgaaaatcacggtgtatcttaaa

SEQ ID NO: 373743 - DNA, 33 bp, Homo sapien
aatgctggtttgcttacgttgttcacctggagg

SEQ ID NO: 373744 - DNA, 33 bp, Homo sapien
aatgctggtttgcttatgttgttcacctggagg

SEQ ID NO: 373745 - DNA, 33 bp, Homo sapien
catcagtaggcataaaaattcaataaagcaaga

SEQ ID NO: 373746 - DNA, 33 bp, Homo sapien
catcagtaggcataaagattcaataaagcaaga

SEQ ID NO: 373747 - DNA, 33 bp, Homo sapien
cctactgcttttcagcaccatagaaagacagct

SEQ ID NO: 373748 - DNA, 33 bp, Homo sapien
cctactgcttttcagcgccatagaaagacagct

SEQ ID NO: 373749 - DNA, 33 bp, Homo sapien
catggtcaagttagaacgtgcacagaatagtgt

SEQ ID NO: 373750 - DNA, 33 bp, Homo sapien
catggtcaagttagaatgtgcacagaatagtgt

SEQ ID NO: 373751 - DNA, 33 bp, Homo sapien
gcttctctccacctagacggctcaggaagtttg

SEQ ID NO: 373752 - DNA, 33 bp, Homo sapien
gcttctctccacctaggcggctcaggaagtttg

SEQ ID NO: 373753 - DNA, 33 bp, Homo sapien
gtgcaaaagtcatgaacgtaggcagatttcctg

SEQ ID NO: 373754 - DNA, 33 bp, Homo sapien
gtgcaaaagtcatgaatgtaggcagatttcctg

SEQ ID NO: 373755 - DNA, 33 bp, Homo sapien
gacctcaccattgcaccgcagcctgggaaacaa

SEQ ID NO: 373756 - DNA, 33 bp, Homo sapien
gacctcaccattgcactgcagcctgggaaacaa

SEQ ID NO: 373757 - DNA, 33 bp, Homo sapien
aagtctatgctatgtacgttaaccaaaccctct

SEQ ID NO: 373758 - DNA, 33 bp, Homo sapien
aagtctatgctatgtatgttaaccaaaccctct

SEQ ID NO: 373759 - DNA, 33 bp, Homo sapien
aaactagagagtgaaaagatgagcggtagccag

SEQ ID NO: 373760 - DNA, 33 bp, Homo sapien
aaactagagagtgaaaggatgagcggtagccag

SEQ ID NO: 373761 - DNA, 33 bp, Homo sapien
gtgggcaaaatgtggcagagcatgcccgatagc

SEQ ID NO: 373762 - DNA, 33 bp, Homo sapien
gtgggcaaaatgtggcggagcatgcccgatagc

SEQ ID NO: 373763 - DNA, 33 bp, Homo sapien
aatgtcatatgttcgacgaagtcaaggagtcaa

SEQ ID NO: 373764 - DNA, 33 bp, Homo sapien
aatgtcatatgttcgatgaagtcaaggagtcaa

SEQ ID NO: 373765 - DNA, 33 bp, Homo sapien
ctgccaaaaataaaaacgacagagagagacaat

SEQ ID NO: 373766 - DNA, 33 bp, Homo sapien
ctgccaaaaataaaaatgacagagagagacaat

SEQ ID NO: 373767 - DNA, 33 bp, Homo sapien
catgcaggctgttgctaaagtcttgggaactga

SEQ ID NO: 373768 - DNA, 33 bp, Homo sapien
catgcaggctgttgctgaagtcttgggaactga

SEQ ID NO: 373769 - DNA, 33 bp, Homo sapien
aaaaagtctgcctaaaactctgaactagacaaa

SEQ ID NO: 373770 - DNA, 33 bp, Homo sapien
aaaaagtctgcctaaacctctgaactagacaaa

SEQ ID NO: 373771 - DNA, 33 bp, Homo sapien
gtgcaattcagtgttacgttagtcacaaggttg

SEQ ID NO: 373772 - DNA, 33 bp, Homo sapien
gtgcaattcagtgttatgttagtcacaaggttg

SEQ ID NO: 373773 - DNA, 33 bp, Homo sapien
atgagtggattaaaaacgacatctatccataga

SEQ ID NO: 373774 - DNA, 33 bp, Homo sapien
atgagtggattaaaaatgacatctatccataga

SEQ ID NO: 373775 - DNA, 33 bp, Homo sapien
ggaagctccaaactggaatacaaaccagatata

SEQ ID NO: 373776 - DNA, 33 bp, Homo sapien
ggaagctccaaactgggatacaaaccagatata

SEQ ID NO: 373777 - DNA, 33 bp, Homo sapien
gtagagagagtttcataatcacagggcactgtg

SEQ ID NO: 373778 - DNA, 33 bp, Homo sapien
gtagagagagtttcatgatcacagggcactgtg

SEQ ID NO: 373779 - DNA, 33 bp, Homo sapien
tcatcatgcctatgcccacttcacctctgactc

SEQ ID NO: 373780 - DNA, 33 bp, Homo sapien
tcatcatgcctatgcctacttcacctctgactc

SEQ ID NO: 373781 - DNA, 33 bp, Homo sapien
gaatgaatccatgacccggaaggacatttaagg

SEQ ID NO: 373782 - DNA, 33 bp, Homo sapien
gaatgaatccatgaccgggaaggacatttaagg

SEQ ID NO: 373783 - DNA, 33 bp, Homo sapien
aattcatcgcattatacattagacatcaagaca

SEQ ID NO: 373784 - DNA, 33 bp, Homo sapien
aattcatcgcattatatattagacatcaagaca

SEQ ID NO: 373785 - DNA, 33 bp, Homo sapien
aacaaagtttaagaagcccagagtacgtgtgcc

SEQ ID NO: 373786 - DNA, 33 bp, Homo sapien
aacaaagtttaagaagtccagagtacgtgtgcc

SEQ ID NO: 373787 - DNA, 33 bp, Homo sapien
gtccgtagccacagaacgttaaactagggcaga

SEQ ID NO: 373788 - DNA, 33 bp, Homo sapien
gtccgtagccacagaatgttaaactagggcaga

SEQ ID NO: 373789 - DNA, 33 bp, Homo sapien
gtctcttagttatcaacgccttctagagaccat

SEQ ID NO: 373790 - DNA, 33 bp, Homo sapien
gtctcttagttatcaatgccttctagagaccat

SEQ ID NO: 373791 - DNA, 33 bp, Homo sapien
cccgggtgccactgacagggccggtgaaggaaa

SEQ ID NO: 373792 - DNA, 33 bp, Homo sapien
cccgggtgccactgacggggccggtgaaggaaa

SEQ ID NO: 373793 - DNA, 33 bp, Homo sapien
ccacaaggggacagtagcgaccgaattactggc

SEQ ID NO: 373794 - DNA, 33 bp, Homo sapien
ccacaaggggacagtatcgaccgaattactggc

SEQ ID NO: 373795 - DNA, 33 bp, Homo sapien
caaatttctttattaccaactttctaatcatgc

SEQ ID NO: 373796 - DNA, 33 bp, Homo sapien
caaatttctttattacgaactttctaatcatgc

SEQ ID NO: 373797 - DNA, 33 bp, Homo sapien
cttggtgacactatgaataagttataaacgtac

SEQ ID NO: 373798 - DNA, 33 bp, Homo sapien
cttggtgacactatgagtaagttataaacgtac

SEQ ID NO: 373799 - DNA, 33 bp, Homo sapien
aaatcactctaaatacgaaagccatttccttta

SEQ ID NO: 373800 - DNA, 33 bp, Homo sapien
aaatcactctaaatactaaagccatttccttta

SEQ ID NO: 373801 - DNA, 33 bp, Homo sapien
ctgagaatgtcaatgacccacaactgaaaaaac

SEQ ID NO: 373802 - DNA, 33 bp, Homo sapien
ctgagaatgtcaatgatccacaactgaaaaaac

SEQ ID NO: 373803 - DNA, 33 bp, Homo sapien
taagccactgtaccacactaaagattaaaaagt

SEQ ID NO: 373804 - DNA, 33 bp, Homo sapien
taagccactgtaccacgctaaagattaaaaagt

SEQ ID NO: 373805 - DNA, 33 bp, Homo sapien
gtggcaatttggagaaaagcgtgttccctgagg

SEQ ID NO: 373806 - DNA, 33 bp, Homo sapien
gtggcaatttggagaagagcgtgttccctgagg

SEQ ID NO: 373807 - DNA, 33 bp, Homo sapien
ctcgtgctaaactccagcaaaaagcagacgcag

SEQ ID NO: 373808 - DNA, 33 bp, Homo sapien
ctcgtgctaaactccatcaaaaagcagacgcag

SEQ ID NO: 373809 - DNA, 33 bp, Homo sapien
agaggtgacttgttacacaaaagcagagaacaa

SEQ ID NO: 373810 - DNA, 33 bp, Homo sapien
agaggtgacttgttacgcaaaagcagagaacaa

SEQ ID NO: 373811 - DNA, 33 bp, Homo sapien
agctgcttccaactctaaagtgttaatgatttc

SEQ ID NO: 373812 - DNA, 33 bp, Homo sapien
agctgcttccaactctgaagtgttaatgatttc

SEQ ID NO: 373813 - DNA, 33 bp, Homo sapien
cagagagtcagcccaaatggtagatgttgctcc

SEQ ID NO: 373814 - DNA, 33 bp, Homo sapien
cagagagtcagcccaagtggtagatgttgctcc

SEQ ID NO: 373815 - DNA, 33 bp, Homo sapien
tgtactttgcacataccggttttttttgctaca

SEQ ID NO: 373816 - DNA, 33 bp, Homo sapien
tgtactttgcacatactggttttttttgctaca

SEQ ID NO: 373817 - DNA, 33 bp, Homo sapien
tgtgcatttgtgggggacattccttacacctct

SEQ ID NO: 373818 - DNA, 33 bp, Homo sapien
tgtgcatttgtggggggcattccttacacctct

SEQ ID NO: 373819 - DNA, 33 bp, Homo sapien
aatgcatctcgaaaccccagccaggtgccactg

SEQ ID NO: 373820 - DNA, 33 bp, Homo sapien
aatgcatctcgaaaccgcagccaggtgccactg

SEQ ID NO: 373821 - DNA, 33 bp, Homo sapien
cctcccagatctgaccagaccccgcagaaccta

SEQ ID NO: 373822 - DNA, 33 bp, Homo sapien
cctcccagatctgaccggaccccgcagaaccta

SEQ ID NO: 373823 - DNA, 33 bp, Homo sapien
gagatgcacagttacacgggtgctcggtccggg

SEQ ID NO: 373824 - DNA, 33 bp, Homo sapien
gagatgcacagttacatgggtgctcggtccggg

SEQ ID NO: 373825 - DNA, 33 bp, Homo sapien
tgacattctttggtgaacatcccatctcctttt

SEQ ID NO: 373826 - DNA, 33 bp, Homo sapien
tgacattctttggtgagcatcccatctcctttt

SEQ ID NO: 373827 - DNA, 33 bp, Homo sapien
agctatggttcttgaaacaaggttatttgaaag

SEQ ID NO: 373828 - DNA, 33 bp, Homo sapien
agctatggttcttgaatcaaggttatttgaaag

SEQ ID NO: 373829 - DNA, 33 bp, Homo sapien; identical to SEQ ID NO: 373827

SEQ ID NO: 373830 - DNA, 33 bp, Homo sapien; identical to SEQ ID NO: 373828

SEQ ID NO: 373831 - DNA, 33 bp, Homo sapien
agcaaagactggctgggaccgtgtgaaagcagc

SEQ ID NO: 373832 - DNA, 33 bp, Homo sapien
agcaaagactggctggtaccgtgtgaaagcagc

SEQ ID NO: 373833 - DNA, 33 bp, Homo sapien
tccagccgttcaaggacgaggcttccgaaagac

SEQ ID NO: 373834 - DNA, 33 bp, Homo sapien
tccagccgttcaaggatgaggcttccgaaagac

SEQ ID NO: 373835 - DNA, 33 bp, Homo sapien
ggcatgtctctggttacggaggggtttatctta

SEQ ID NO: 373836 - DNA, 33 bp, Homo sapien
ggcatgtctctggttatggaggggtttatctta

SEQ ID NO: 373837 - DNA, 33 bp, Homo sapien; identical to SEQ ID NO: 373835

SEQ ID NO: 373838 - DNA, 33 bp, Homo sapien; identical to SEQ ID NO: 373836

SEQ ID NO: 373839 - DNA, 33 bp, Homo sapien
gggcccagagctcatcaaaacctgctcagtcca

SEQ ID NO: 373840 - DNA, 33 bp, Homo sapien
gggcccagagctcatcgaaacctgctcagtcca

SEQ ID NO: 373841 - DNA, 33 bp, Homo sapien
tgctggaaataaaacaccctgaaataacagaag

SEQ ID NO: 373842 - DNA, 33 bp, Homo sapien
tgctggaaataaaacatcctgaaataacagaag

SEQ ID NO: 373843 - DNA, 33 bp, Homo sapien
ccacagggaaagaatccatgtggtgacgggtgg

SEQ ID NO: 373844 - DNA, 33 bp, Homo sapien
ccacagggaaagaatcgatgtggtgacgggtgg

SEQ ID NO: 373845 - DNA, 33 bp, Homo sapien
atggaaaatggggacaatcagaagctcaggaca

SEQ ID NO: 373846 - DNA, 33 bp, Homo sapien
atggaaaatggggacagtcagaagctcaggaca

SEQ ID NO: 373847 - DNA, 33 bp, Homo sapien
tgaaaaacaactctgaactcttatccagtgttt

SEQ ID NO: 373848 - DNA, 33 bp, Homo sapien
tgaaaaacaactctgatctcttatccagtgttt

SEQ ID NO: 373849 - DNA, 33 bp, Homo sapien
gttctcgtcgcccagccaggtgccattggggta

SEQ ID NO: 373850 - DNA, 33 bp, Homo sapien
gttctcgtcgcccagctaggtgccattggggta

SEQ ID NO: 373851 - DNA, 33 bp, Homo sapien
tggcatgtggctttatcagtcacaaaggaatga

SEQ ID NO: 373852 - DNA, 33 bp, Homo sapien
tggcatgtggctttattagtcacaaaggaatga

SEQ ID NO: 373853 - DNA, 33 bp, Homo sapien
atcggctctgtggaggaaacaggtgtgaacggg

SEQ ID NO: 373854 - DNA, 33 bp, Homo sapien
atcggctctgtggaggcaacaggtgtgaacggg

SEQ ID NO: 373855 - DNA, 33 bp, Homo sapien
ggtgccactaaaaacacaggctaggtctagtgg

SEQ ID NO: 373856 - DNA, 33 bp, Homo sapien
ggtgccactaaaaacataggctaggtctagtgg

SEQ ID NO: 373857 - DNA, 33 bp, Homo sapien
cagagactgcaggcccactatgtgcaccctgga

SEQ ID NO: 373858 - DNA, 33 bp, Homo sapien
cagagactgcaggcccgctatgtgcaccctgga

SEQ ID NO: 373859 - DNA, 33 bp, Homo sapien
tacccacaactgtaaaatgagagagaccgactt

SEQ ID NO: 373860 - DNA, 33 bp, Homo sapien
tacccacaactgtaaagtgagagagaccgactt

SEQ ID NO: 373861 - DNA, 33 bp, Homo sapien
cagattgcacaggttcaagagtgctcagattag

SEQ ID NO: 373862 - DNA, 33 bp, Homo sapien
cagattgcacaggttcgagagtgctcagattag

SEQ ID NO: 373863 - DNA, 33 bp, Homo sapien
cctcaaggggcactcaatgaaagaacctggaag

SEQ ID NO: 373864 - DNA, 33 bp, Homo sapien
cctcaaggggcactcagtgaaagaacctggaag

SEQ ID NO: 373865 - DNA, 33 bp, Homo sapien
aggtgggacacatccaactgaacggaaacagaa

SEQ ID NO: 373866 - DNA, 33 bp, Homo sapien
aggtgggacacatccagctgaacggaaacagaa

SEQ ID NO: 373867 - DNA, 33 bp, Homo sapien
agctgcttttctgtgcacttaacattatctcat

SEQ ID NO: 373868 - DNA, 33 bp, Homo sapien
agctgcttttctgtgcgcttaacattatctcat

SEQ ID NO: 373869 - DNA, 33 bp, Homo sapien
ctcctgggtgagagccacaggaattaattgctc

SEQ ID NO: 373870 - DNA, 33 bp, Homo sapien
ctcctgggtgagagccgcaggaattaattgctc

SEQ ID NO: 373871 - DNA, 33 bp, Homo sapien
atatccaagtgcttcgcatactgaaccatataa

SEQ ID NO: 373872 - DNA, 33 bp, Homo sapien
atatccaagtgcttcgtatactgaaccatataa

SEQ ID NO: 373873 - DNA, 33 bp, Homo sapien
accaataaaagcagcaaatttatatggttcagt

SEQ ID NO: 373874 - DNA, 33 bp, Homo sapien
accaataaaagcagcacatttatatggttcagt

SEQ ID NO: 373875 - DNA, 33 bp, Homo sapien
cccacaagactgcccccgacttccgatgccaat

SEQ ID NO: 373876 - DNA, 33 bp, Homo sapien
cccacaagactgcccctgacttccgatgccaat

SEQ ID NO: 373877 - DNA, 33 bp, Homo sapien
ttggagctggacatgactcacccctgtaatccc

SEQ ID NO: 373878 - DNA, 33 bp, Homo sapien
ttggagctggacatgattcacccctgtaatccc

SEQ ID NO: 373879 - DNA, 33 bp, Homo sapien
ggttattccattcacaatatcacccaaaaggct

SEQ ID NO: 373880 - DNA, 33 bp, Homo sapien
ggttattccattcacactatcacccaaaaggct

SEQ ID NO: 373881 - DNA, 33 bp, Homo sapien
caccactatgcatctagaagcgctgcataaaac

SEQ ID NO: 373882 - DNA, 33 bp, Homo sapien
caccactatgcatctataagcgctgcataaaac

SEQ ID NO: 373883 - DNA, 33 bp, Homo sapien
tccattatcgagtatccagggacagaatgcact

SEQ ID NO: 373884 - DNA, 33 bp, Homo sapien
tccattatcgagtatctagggacagaatgcact

SEQ ID NO: 373885 - DNA, 33 bp, Homo sapien; identical to SEQ ID NO: 373883

SEQ ID NO: 373886 - DNA, 33 bp, Homo sapien; identical to SEQ ID NO: 373884

SEQ ID NO: 373887 - DNA, 33 bp, Homo sapien
gccatatccgcctcaccgagatagtagagatag

SEQ ID NO: 373888 - DNA, 33 bp, Homo sapien
gccatatccgcctcactgagatagtagagatag

SEQ ID NO: 373889 - DNA, 33 bp, Homo sapien; identical to SEQ ID NO: 373887

SEQ ID NO: 373890 - DNA, 33 bp, Homo sapien; identical to SEQ ID NO: 373888

SEQ ID NO: 373891 - DNA, 33 bp, Homo sapien
agagaaacagaagatacaggcaggtgttcagag

SEQ ID NO: 373892 - DNA, 33 bp, Homo sapien
agagaaacagaagatagaggcaggtgttcagag

SEQ ID NO: 373893 - DNA, 33 bp, Homo sapien
cagccaggaaacactcacttctccctgcacagt

SEQ ID NO: 373894 - DNA, 33 bp, Homo sapien
cagccaggaaacactcgcttctccctgcacagt

SEQ ID NO: 373895 - DNA, 33 bp, Homo sapien
atttgcatgtgattgaaagtggatataaataca

SEQ ID NO: 373896 - DNA, 33 bp, Homo sapien
atttgcatgtgattgagagtggatataaataca

SEQ ID NO: 373897 - DNA, 33 bp, Homo sapien
acacacacgtacacgaaaaaaggaatcagcagc

SEQ ID NO: 373898 - DNA, 33 bp, Homo sapien
acacacacgtacacgataaaaggaatcagcagc

SEQ ID NO: 373899 - DNA, 33 bp, Homo sapien
ggctggaactgttagccgcgttaggaccccctg

SEQ ID NO: 373900 - DNA, 33 bp, Homo sapien
ggctggaactgttagctgcgttaggaccccctg

SEQ ID NO: 373901 - DNA, 33 bp, Homo sapien
tcttgctgtcagcacgaaataaagtcagagctg

SEQ ID NO: 373902 - DNA, 33 bp, Homo sapien
tcttgctgtcagcacggaataaagtcagagctg

SEQ ID NO: 373903 - DNA, 33 bp, Homo sapien
gttcagtttctctgcaccacccctgttcctccg

SEQ ID NO: 373904 - DNA, 33 bp, Homo sapien
gttcagtttctctgcatcacccctgttcctccg

SEQ ID NO: 373905 - DNA, 33 bp, Homo sapien
ggtgtaagattctttgcaggggtcatctgtctg

SEQ ID NO: 373906 - DNA, 33 bp, Homo sapien
ggtgtaagattctttgtaggggtcatctgtctg

SEQ ID NO: 373907 - DNA, 33 bp, Homo sapien
tgggaacatcagtatacgataccaggtggagaa

SEQ ID NO: 373908 - DNA, 33 bp, Homo sapien
tgggaacatcagtatatgataccaggtggagaa

SEQ ID NO: 373909 - DNA, 33 bp, Homo sapien
cgtttactctgcaaaactgacagcacttagacg

SEQ ID NO: 373910 - DNA, 33 bp, Homo sapien
cgtttactctgcaaaattgacagcacttagacg

SEQ ID NO: 373911 - DNA, 33 bp, Homo sapien
actgcccagatggtgccaatggcagttcaaagg

SEQ ID NO: 373912 - DNA, 33 bp, Homo sapien
actgcccagatggtgctaatggcagttcaaagg

SEQ ID NO: 373913 - DNA, 33 bp, Homo sapien
ttggggagattatccactgatgaaccaaatgga

SEQ ID NO: 373914 - DNA, 33 bp, Homo sapien
ttggggagattatccattgatgaaccaaatgga

SEQ ID NO: 373915 - DNA, 33 bp, Homo sapien
ggatcaacaaagaagacgttcaaatacaattga

SEQ ID NO: 373916 - DNA, 33 bp, Homo sapien
ggatcaacaaagaagatgttcaaatacaattga

SEQ ID NO: 373917 - DNA, 33 bp, Homo sapien
tgcttagttcttacacacctgagacactggccc

SEQ ID NO: 373918 - DNA, 33 bp, Homo sapien
tgcttagttcttacacgcctgagacactggccc

SEQ ID NO: 373919 - DNA, 33 bp, Homo sapien
aggccatccctctagacgagaacgagggcatct

SEQ ID NO: 373920 - DNA, 33 bp, Homo sapien
aggccatccctctagatgagaacgagggcatct

SEQ ID NO: 373921 - DNA, 33 bp, Homo sapien
caataaacagaaaatcaccacttgtaattgggc

SEQ ID NO: 373922 - DNA, 33 bp, Homo sapien
caataaacagaaaatcgccacttgtaattgggc

SEQ ID NO: 373923 - DNA, 33 bp, Homo sapien
gcagcttcatgacagactctgggccagggccac

SEQ ID NO: 373924 - DNA, 33 bp, Homo sapien
gcagcttcatgacagattctgggccagggccac

SEQ ID NO: 373925 - DNA, 33 bp, Homo sapien
tattcatgttctttaccagattttctgcttttt

SEQ ID NO: 373926 - DNA, 33 bp, Homo sapien
tattcatgttctttactagattttctgcttttt

SEQ ID NO: 373927 - DNA, 33 bp, Homo sapien
gtgaggtgtaataaaacaaggagtgcctgtgta

SEQ ID NO: 373928 - DNA, 33 bp, Homo sapien
gtgaggtgtaataaaataaggagtgcctgtgta

SEQ ID NO: 373929 - DNA, 33 bp, Homo sapien
ggctagctgcagaccacgggcaagtttgctaac

SEQ ID NO: 373930 - DNA, 33 bp, Homo sapien
ggctagctgcagaccatgggcaagtttgctaac

SEQ ID NO: 373931 - DNA, 33 bp, Homo sapien
tggatgagattattgacaccatcacagcaagag

SEQ ID NO: 373932 - DNA, 33 bp, Homo sapien
tggatgagattattgataccatcacagcaagag

SEQ ID NO: 373933 - DNA, 33 bp, Homo sapien
gcacgtaaggtactcaataaatgttatttgtac

SEQ ID NO: 373934 - DNA, 33 bp, Homo sapien
gcacgtaaggtactcagtaaatgttatttgtac

SEQ ID NO: 373935 - DNA, 33 bp, Homo sapien
tctgcctcgagcgccaagtcccggtctgtgtgg

SEQ ID NO: 373936 - DNA, 33 bp, Homo sapien
tctgcctcgagcgccaggtcccggtctgtgtgg

SEQ ID NO: 373937 - DNA, 33 bp, Homo sapien
aaaaatgagaaattgccaggttttctttgcaga

SEQ ID NO: 373938 - DNA, 33 bp, Homo sapien
aaaaatgagaaattgctaggttttctttgcaga

SEQ ID NO: 373939 - DNA, 33 bp, Homo sapien
gaccctctcttttcagaatataaaacacaccca

SEQ ID NO: 373940 - DNA, 33 bp, Homo sapien
gaccctctcttttcaggatataaaacacaccca

SEQ ID NO: 373941 - DNA, 33 bp, Homo sapien
gcaatttcccaggccaaatgataggtttctagg

SEQ ID NO: 373942 - DNA, 33 bp, Homo sapien
gcaatttcccaggccagatgataggtttctagg

SEQ ID NO: 373943 - DNA, 33 bp, Homo sapien
gattataggtgtgccacgaagccaggctaattt

SEQ ID NO: 373944 - DNA, 33 bp, Homo sapien
gattataggtgtgccatgaagccaggctaattt

SEQ ID NO: 373945 - DNA, 33 bp, Homo sapien
ctttttgttggactggaaaccagctactttctt

SEQ ID NO: 373946 - DNA, 33 bp, Homo sapien
ctttttgttggactgggaaccagctactttctt

SEQ ID NO: 373947 - DNA, 33 bp, Homo sapien
aggtctttggacaccaatgcccgagagattttc

SEQ ID NO: 373948 - DNA, 33 bp, Homo sapien
aggtctttggacaccactgcccgagagattttc

SEQ ID NO: 373949 - DNA, 33 bp, Homo sapien
caacgggattgcagaacgtcacgtgctttcctt

SEQ ID NO: 373950 - DNA, 33 bp, Homo sapien
caacgggattgcagaatgtcacgtgctttcctt

SEQ ID NO: 373951 - DNA, 33 bp, Homo sapien
cacacactgttttgtaacttgatttttttctgc

SEQ ID NO: 373952 - DNA, 33 bp, Homo sapien
cacacactgttttgtatcttgatttttttctgc

SEQ ID NO: 373953 - DNA, 33 bp, Homo sapien
agttcaagaccagcccaaccgacattatgaaac

SEQ ID NO: 373954 - DNA, 33 bp, Homo sapien
agttcaagaccagcccgaccgacattatgaaac

SEQ ID NO: 373955 - DNA, 33 bp, Homo sapien
gactttgaagaaattgcaatctggcaggaaagg

SEQ ID NO: 373956 - DNA, 33 bp, Homo sapien
gactttgaagaaattgtaatctggcaggaaagg

SEQ ID NO: 373957 - DNA, 33 bp, Homo sapien
agggagtggagagtgaagagctgaaatccccca

SEQ ID NO: 373958 - DNA, 33 bp, Homo sapien
agggagtggagagtgaggagctgaaatccccca

SEQ ID NO: 373959 - DNA, 33 bp, Homo sapien
tcaagcaccagcccagactcttactgtcctctt

SEQ ID NO: 373960 - DNA, 33 bp, Homo sapien
tcaagcaccagcccagcctcttactgtcctctt

SEQ ID NO: 373961 - DNA, 33 bp, Homo sapien
gactaaggctgccaggaattgagttaaactcag

SEQ ID NO: 373962 - DNA, 33 bp, Homo sapien
gactaaggctgccagggattgagttaaactcag

SEQ ID NO: 373963 - DNA, 33 bp, Homo sapien
tgaggacaaaacgagacagtgatgggctgaagt

SEQ ID NO: 373964 - DNA, 33 bp, Homo sapien
tgaggacaaaacgagatagtgatgggctgaagt

SEQ ID NO: 373965 - DNA, 33 bp, Homo sapien
cccggccttactgaacgcaggcattagttttcg

SEQ ID NO: 373966 - DNA, 33 bp, Homo sapien
cccggccttactgaactcaggcattagttttcg

SEQ ID NO: 373967 - DNA, 33 bp, Homo sapien
aggtcttcaagaccaaagaacacctacactcca

SEQ ID NO: 373968 - DNA, 33 bp, Homo sapien
aggtcttcaagaccaaggaacacctacactcca

SEQ ID NO: 373969 - DNA, 33 bp, Homo sapien
atataaaacaaacgtgaagctctagttaatgat

SEQ ID NO: 373970 - DNA, 33 bp, Homo sapien
atataaaacaaacgtggagctctagttaatgat

SEQ ID NO: 373971 - DNA, 33 bp, Homo sapien
tttggtaataattccacgaaggagatgctgtca

SEQ ID NO: 373972 - DNA, 33 bp, Homo sapien
tttggtaataattccatgaaggagatgctgtca

SEQ ID NO: 373973 - DNA, 33 bp, Homo sapien
ggattcaagcaacccagtaagacactgagcaaa

SEQ ID NO: 373974 - DNA, 33 bp, Homo sapien
ggattcaagcaacccattaagacactgagcaaa

SEQ ID NO: 373975 - DNA, 33 bp, Homo sapien
gatttttggatttttcaagagaagctgaaaaca

SEQ ID NO: 373976 - DNA, 33 bp, Homo sapien
gatttttggatttttccagagaagctgaaaaca

SEQ ID NO: 373977 - DNA, 33 bp, Homo sapien
gattgaagccctcctaccacttttttactgtgt

SEQ ID NO: 373978 - DNA, 33 bp, Homo sapien
gattgaagccctcctatcacttttttactgtgt

SEQ ID NO: 373979 - DNA, 33 bp, Homo sapien
ttcctacgtaacactcaactccaggactatagc

SEQ ID NO: 373980 - DNA, 33 bp, Homo sapien
ttcctacgtaacactcgactccaggactatagc

SEQ ID NO: 373981 - DNA, 33 bp, Homo sapien
gttttccaagttatcaatgagaactattctttc

SEQ ID NO: 373982 - DNA, 33 bp, Homo sapien
gttttccaagttatcagtgagaactattctttc

SEQ ID NO: 373983 - DNA, 33 bp, Homo sapien
gttacctatcatgacaaggctgtgacagctagt

SEQ ID NO: 373984 - DNA, 33 bp, Homo sapien
gttacctatcatgacagggctgtgacagctagt

SEQ ID NO: 373985 - DNA, 33 bp, Homo sapien
ggaagttttgagaagacagcggtctacatcagg

SEQ ID NO: 373986 - DNA, 33 bp, Homo sapien
ggaagttttgagaagagagcggtctacatcagg

SEQ ID NO: 373987 - DNA, 33 bp, Homo sapien
cctgcctcattgtggccagagctatacaacctg

SEQ ID NO: 373988 - DNA, 33 bp, Homo sapien
cctgcctcattgtggctagagctatacaacctg

SEQ ID NO: 373989 - DNA, 33 bp, Homo sapien
tgctgttgtcctttctaaagtaaatctgctcat

SEQ ID NO: 373990 - DNA, 33 bp, Homo sapien
tgctgttgtcctttctgaagtaaatctgctcat

SEQ ID NO: 373991 - DNA, 33 bp, Homo sapien
tgcctccttgacatcccctctctgggtctcatt

SEQ ID NO: 373992 - DNA, 33 bp, Homo sapien
tgcctccttgacatcctctctctgggtctcatt

SEQ ID NO: 373993 - DNA, 33 bp, Homo sapien
gtcccaggagacaccccagtcttgagcaaactg

SEQ ID NO: 373994 - DNA, 33 bp, Homo sapien
gtcccaggagacaccctagtcttgagcaaactg

SEQ ID NO: 373995 - DNA, 33 bp, Homo sapien
aaggtggctgagatgcagagtagccttcccccc

SEQ ID NO: 373996 - DNA, 33 bp, Homo sapien
aaggtggctgagatgcggagtagccttcccccc

SEQ ID NO: 373997 - DNA, 33 bp, Homo sapien
tgtggctgtgtaaagcccttctctctcggtgtg

SEQ ID NO: 373998 - DNA, 33 bp, Homo sapien
tgtggctgtgtaaagcgcttctctctcggtgtg

SEQ ID NO: 373999 - DNA, 33 bp, Homo sapien
ccaaaaagccaagctccccaagctgcagtggat

SEQ ID NO: 374000 - DNA, 33 bp, Homo sapien
ccaaaaagccaagctctccaagctgcagtggat

SEQ ID NO: 374001 - DNA, 33 bp, Homo sapien
atctccattcgactgaagtactacaaacacgat

SEQ ID NO: 374002 - DNA, 33 bp, Homo sapien
atctccattcgactgaggtactacaaacacgat

SEQ ID NO: 374003 - DNA, 33 bp, Homo sapien
gtctgttttatcttcacgtccctagcacgggac

SEQ ID NO: 374004 - DNA, 33 bp, Homo sapien
gtctgttttatcttcatgtccctagcacgggac

SEQ ID NO: 374005 - DNA, 33 bp, Homo sapien
attgaatggagtcgagaacatcagcttccaggc

SEQ ID NO: 374006 - DNA, 33 bp, Homo sapien
attgaatggagtcgaggacatcagcttccaggc

SEQ ID NO: 374007 - DNA, 33 bp, Homo sapien
gccttcaatcataaacaaggcttctgaggctca

SEQ ID NO: 374008 - DNA, 33 bp, Homo sapien
gccttcaatcataaacgaggcttctgaggctca

SEQ ID NO: 374009 - DNA, 33 bp, Homo sapien
tattctcattgccactgaatgtagaccttggta

SEQ ID NO: 374010 - DNA, 33 bp, Homo sapien
tattctcattgccacttaatgtagaccttggta

SEQ ID NO: 374011 - DNA, 33 bp, Homo sapien
tcatactctgtacaaaagtttccttccctgggc

SEQ ID NO: 374012 - DNA, 33 bp, Homo sapien
tcatactctgtacaaaggtttccttccctgggc

SEQ ID NO: 374013 - DNA, 33 bp, Homo sapien
attctgagactgctcacgtacgggaaggactcg

SEQ ID NO: 374014 - DNA, 33 bp, Homo sapien
attctgagactgctcatgtacgggaaggactcg

SEQ ID NO: 374015 - DNA, 33 bp, Homo sapien
tttctgatctcaccgaagtagattttgccacaa

SEQ ID NO: 374016 - DNA, 33 bp, Homo sapien
tttctgatctcaccgaggtagattttgccacaa

SEQ ID NO: 374017 - DNA, 33 bp, Homo sapien
tttggagaaagatatacgataggaaatgaggga

SEQ ID NO: 374018 - DNA, 33 bp, Homo sapien
tttggagaaagatatatgataggaaatgaggga

SEQ ID NO: 374019 - DNA, 33 bp, Homo sapien
tagtcaagatgattcaaaggaaagaggttaaga

SEQ ID NO: 374020 - DNA, 33 bp, Homo sapien
tagtcaagatgattcagaggaaagaggttaaga

SEQ ID NO: 374021 - DNA, 33 bp, Homo sapien
gcactttaggaagccaaagtggaggagcatctg

SEQ ID NO: 374022 - DNA, 33 bp, Homo sapien
gcactttaggaagccatagtggaggagcatctg

SEQ ID NO: 374023 - DNA, 33 bp, Homo sapien
aatttcaatatatgaacggacagggaacacaaa

SEQ ID NO: 374024 - DNA, 33 bp, Homo sapien
aatttcaatatatgaatggacagggaacacaaa

SEQ ID NO: 374025 - DNA, 33 bp, Homo sapien
ggccatacccttatgacgtcattcagccttaat

SEQ ID NO: 374026 - DNA, 33 bp, Homo sapien
ggccatacccttatgatgtcattcagccttaat

SEQ ID NO: 374027 - DNA, 33 bp, Homo sapien
ctacagccctggccacagtactttggtgacact

SEQ ID NO: 374028 - DNA, 33 bp, Homo sapien
ctacagccctggccacggtactttggtgacact

SEQ ID NO: 374029 - DNA, 33 bp, Homo sapien
gcgtctttgcacgctaagctagccacacttccg

SEQ ID NO: 374030 - DNA, 33 bp, Homo sapien
gcgtctttgcacgctatgctagccacacttccg

SEQ ID NO: 374031 - DNA, 33 bp, Homo sapien
aacaggatccaggccaagtagacagaaccagcg

SEQ ID NO: 374032 - DNA, 33 bp, Homo sapien
aacaggatccaggccaggtagacagaaccagcg

SEQ ID NO: 374033 - DNA, 33 bp, Homo sapien
gagtgaaccgttataccagccttgccattttaa

SEQ ID NO: 374034 - DNA, 33 bp, Homo sapien
gagtgaaccgttatactagccttgccattttaa

SEQ ID NO: 374035 - DNA, 33 bp, Homo sapien
ttgagcctacctgatacctttgcccaaatcctt

SEQ ID NO: 374036 - DNA, 33 bp, Homo sapien
ttgagcctacctgatatctttgcccaaatcctt

SEQ ID NO: 374037 - DNA, 33 bp, Homo sapien
ataatgtcaatgacctcaagccctctgagtaca

SEQ ID NO: 374038 - DNA, 33 bp, Homo sapien
ataatgtcaatgacctgaagccctctgagtaca

SEQ ID NO: 374039 - DNA, 33 bp, Homo sapien
atgtctacactctggccatgctgaactgaactg

SEQ ID NO: 374040 - DNA, 33 bp, Homo sapien
atgtctacactctggctatgctgaactgaactg

SEQ ID NO: 374041 - DNA, 33 bp, Homo sapien
tgtgcaggaaaagggaagatgaagacctgatac

SEQ ID NO: 374042 - DNA, 33 bp, Homo sapien
tgtgcaggaaaagggacgatgaagacctgatac

SEQ ID NO: 374043 - DNA, 33 bp, Homo sapien
atatgaacaagctgaacagacttagcctgcctc

SEQ ID NO: 374044 - DNA, 33 bp, Homo sapien
atatgaacaagctgaatagacttagcctgcctc

SEQ ID NO: 374045 - DNA, 33 bp, Homo sapien
gacatttcctttctgacgttaatagcatctctg

SEQ ID NO: 374046 - DNA, 33 bp, Homo sapien
gacatttcctttctgatgttaatagcatctctg

SEQ ID NO: 374047 - DNA, 33 bp, Homo sapien
cccttcctgtttgagaaagtagagtgtacatgt

SEQ ID NO: 374048 - DNA, 33 bp, Homo sapien
cccttcctgtttgagagagtagagtgtacatgt

SEQ ID NO: 374049 - DNA, 33 bp, Homo sapien
tcggcctttaccacaagtgggagaacagaatct

SEQ ID NO: 374050 - DNA, 33 bp, Homo sapien
tcggcctttaccacaattgggagaacagaatct

SEQ ID NO: 374051 - DNA, 33 bp, Homo sapien
gcagcgtcaggaaccactgcaacacgtggtaac

SEQ ID NO: 374052 - DNA, 33 bp, Homo sapien
gcagcgtcaggaaccagtgcaacacgtggtaac

SEQ ID NO: 374053 - DNA, 33 bp, Homo sapien
tcggcaggatgtgcggacagcagcgtcaggaac

SEQ ID NO: 374054 - DNA, 33 bp, Homo sapien
tcggcaggatgtgcgggcagcagcgtcaggaac

SEQ ID NO: 374055 - DNA, 33 bp, Homo sapien
ggttaaggtcacaggaaaggtccggcagcgtgc

SEQ ID NO: 374056 - DNA, 33 bp, Homo sapien
ggttaaggtcacaggagaggtccggcagcgtgc

SEQ ID NO: 374057 - DNA, 33 bp, Homo sapien
agccccatcaacaaaaaagtgaaggtcagactg

SEQ ID NO: 374058 - DNA, 33 bp, Homo sapien
agccccatcaacaaaagagtgaaggtcagactg

SEQ ID NO: 374059 - DNA, 33 bp, Homo sapien
actctatagttctgaaaaatgaggacctcttat

SEQ ID NO: 374060 - DNA, 33 bp, Homo sapien
actctatagttctgaacaatgaggacctcttat

SEQ ID NO: 374061 - DNA, 33 bp, Homo sapien
tccacaggcacccagaagttgatgctgacaggc

SEQ ID NO: 374062 - DNA, 33 bp, Homo sapien
tccacaggcacccagaggttgatgctgacaggc

SEQ ID NO: 374063 - DNA, 33 bp, Homo sapien
ggatggtggcataataacaagaatgaccttatt

SEQ ID NO: 374064 - DNA, 33 bp, Homo sapien
ggatggtggcataatagcaagaatgaccttatt

SEQ ID NO: 374065 - DNA, 33 bp, Homo sapien
atgggctaactacttacggtgcactcaggctaa

SEQ ID NO: 374066 - DNA, 33 bp, Homo sapien
atgggctaactacttatggtgcactcaggctaa

SEQ ID NO: 374067 - DNA, 33 bp, Homo sapien
cccaggctccttgctacaaaaattgccaggtca

SEQ ID NO: 374068 - DNA, 33 bp, Homo sapien
cccaggctccttgctagaaaaattgccaggtca

SEQ ID NO: 374069 - DNA, 33 bp, Homo sapien
aagcttctgagacctacaactggcatggtgtca

SEQ ID NO: 374070 - DNA, 33 bp, Homo sapien
aagcttctgagacctataactggcatggtgtca

SEQ ID NO: 374071 - DNA, 33 bp, Homo sapien
ctgctggaaaaccatcaccaaggcccttacggt

SEQ ID NO: 374072 - DNA, 33 bp, Homo sapien
ctgctggaaaaccatcgccaaggcccttacggt

SEQ ID NO: 374073 - DNA, 33 bp, Homo sapien
atgaaggggagtgacacgatacaatctgacatc

SEQ ID NO: 374074 - DNA, 33 bp, Homo sapien
atgaaggggagtgacatgatacaatctgacatc

SEQ ID NO: 374075 - DNA, 33 bp, Homo sapien
ctcactatcccaatgaacacataggtagcaaca

SEQ ID NO: 374076 - DNA, 33 bp, Homo sapien
ctcactatcccaatgagcacataggtagcaaca

SEQ ID NO: 374077 - DNA, 33 bp, Homo sapien
ccggccaagacatgacccttaattctcgttcca

SEQ ID NO: 374078 - DNA, 33 bp, Homo sapien
ccggccaagacatgactcttaattctcgttcca

SEQ ID NO: 374079 - DNA, 33 bp, Homo sapien
actctgccttgaaaaacgtcctaaagccattct

SEQ ID NO: 374080 - DNA, 33 bp, Homo sapien
actctgccttgaaaaatgtcctaaagccattct

SEQ ID NO: 374081 - DNA, 33 bp, Homo sapien
cacatttaaacaaaccacacatcgctcttttga

SEQ ID NO: 374082 - DNA, 33 bp, Homo sapien
cacatttaaacaaaccgcacatcgctcttttga

SEQ ID NO: 374083 - DNA, 33 bp, Homo sapien
gttaaaggaaagaatccctagctgacattactt

SEQ ID NO: 374084 - DNA, 33 bp, Homo sapien
gttaaaggaaagaatctctagctgacattactt

SEQ ID NO: 374085 - DNA, 33 bp, Homo sapien
gatgtagtgaagaattaaagtctcctccctcaa

SEQ ID NO: 374086 - DNA, 33 bp, Homo sapien
gatgtagtgaagaattgaagtctcctccctcaa

SEQ ID NO: 374087 - DNA, 33 bp, Homo sapien
tatactttgtgttgccaccactctagaaatatt

SEQ ID NO: 374088 - DNA, 33 bp, Homo sapien
tatactttgtgttgcccccactctagaaatatt

SEQ ID NO: 374089 - DNA, 33 bp, Homo sapien
ttctctgcatgggaacagacaggcagcccagaa

SEQ ID NO: 374090 - DNA, 33 bp, Homo sapien
ttctctgcatgggaacggacaggcagcccagaa

SEQ ID NO: 374091 - DNA, 33 bp, Homo sapien
ccatttctgacgttgaaccatttgacagtgcca

SEQ ID NO: 374092 - DNA, 33 bp, Homo sapien
ccatttctgacgttgacccatttgacagtgcca

SEQ ID NO: 374093 - DNA, 33 bp, Homo sapien
tatcacatgtagctaacgtataaacacagagat

SEQ ID NO: 374094 - DNA, 33 bp, Homo sapien
tatcacatgtagctaatgtataaacacagagat

SEQ ID NO: 374095 - DNA, 33 bp, Homo sapien
aacattaatccaatttaaaaatgtgccaaagac

SEQ ID NO: 374096 - DNA, 33 bp, Homo sapien
aacattaatccaattttaaaatgtgccaaagac

SEQ ID NO: 374097 - DNA, 33 bp, Homo sapien
acgtgtgggtcatacggccatagcagggttaaa

SEQ ID NO: 374098 - DNA, 33 bp, Homo sapien
acgtgtgggtcatacgtccatagcagggttaaa

SEQ ID NO: 374099 - DNA, 33 bp, Homo sapien
tgtcatggttgactccactttacttcctgcctt

SEQ ID NO: 374100 - DNA, 33 bp, Homo sapien
tgtcatggttgactccgctttacttcctgcctt

SEQ ID NO: 374101 - DNA, 33 bp, Homo sapien
cactaagagtgtgcaacagttctcccttctcca

SEQ ID NO: 374102 - DNA, 33 bp, Homo sapien
cactaagagtgtgcaagagttctcccttctcca

SEQ ID NO: 374103 - DNA, 33 bp, Homo sapien
attccaagcatccacaccttcaaaccaaactct

SEQ ID NO: 374104 - DNA, 33 bp, Homo sapien
attccaagcatccacatcttcaaaccaaactct

SEQ ID NO: 374105 - DNA, 33 bp, Homo sapien
aatgcgaatgccctttaaaactactcacagcgt

SEQ ID NO: 374106 - DNA, 33 bp, Homo sapien
aatgcgaatgccctttgaaactactcacagcgt

SEQ ID NO: 374107 - DNA, 33 bp, Homo sapien
aacccacccagcttagaaaatagttggcaagga

SEQ ID NO: 374108 - DNA, 33 bp, Homo sapien
aacccacccagcttagtaaatagttggcaagga

SEQ ID NO: 374109 - DNA, 33 bp, Homo sapien
gctgggaactgaggaccgtacatgccattcaca

SEQ ID NO: 374110 - DNA, 33 bp, Homo sapien
gctgggaactgaggactgtacatgccattcaca

SEQ ID NO: 374111 - DNA, 33 bp, Homo sapien
cactcagaactgcctcagagcaatgcacaggct

SEQ ID NO: 374112 - DNA, 33 bp, Homo sapien
cactcagaactgcctcggagcaatgcacaggct

SEQ ID NO: 374113 - DNA, 33 bp, Homo sapien
cagtgagaaatccttaagaactaaacttcaccc

SEQ ID NO: 374114 - DNA, 33 bp, Homo sapien
cagtgagaaatccttatgaactaaacttcaccc

SEQ ID NO: 374115 - DNA, 33 bp, Homo sapien
caaagagaaaaataaccagtgaaggaatctggc

SEQ ID NO: 374116 - DNA, 33 bp, Homo sapien
caaagagaaaaataactagtgaaggaatctggc

SEQ ID NO: 374117 - DNA, 33 bp, Homo sapien
cctgtcttcaaatggaaaagaaaatgatggatc

SEQ ID NO: 374118 - DNA, 33 bp, Homo sapien
cctgtcttcaaatggagaagaaaatgatggatc

SEQ ID NO: 374119 - DNA, 33 bp, Homo sapien
tctcttttattcacacagtagagatgagtatta

SEQ ID NO: 374120 - DNA, 33 bp, Homo sapien
tctcttttattcacaccgtagagatgagtatta

SEQ ID NO: 374121 - DNA, 33 bp, Homo sapien
ttctcaccttggaagaatcacatcttacataat

SEQ ID NO: 374122 - DNA, 33 bp, Homo sapien
ttctcaccttggaagagtcacatcttacataat

SEQ ID NO: 374123 - DNA, 33 bp, Homo sapien
atcttgttgtttcttacggctgcgtcgcattcc

SEQ ID NO: 374124 - DNA, 33 bp, Homo sapien
atcttgttgtttcttatggctgcgtcgcattcc

SEQ ID NO: 374125 - DNA, 33 bp, Homo sapien; identical to SEQ ID NO: 374123

SEQ ID NO: 374126 - DNA, 33 bp, Homo sapien; identical to SEQ ID NO: 374124

SEQ ID NO: 374127 - DNA, 33 bp, Homo sapien
gtatctcttggaggaacatctgactgaatatag

SEQ ID NO: 374128 - DNA, 33 bp, Homo sapien
gtatctcttggaggaatatctgactgaatatag

SEQ ID NO: 374129 - DNA, 33 bp, Homo sapien
catcaagggatgataacaagacaatatgtaatg

SEQ ID NO: 374130 - DNA, 33 bp, Homo sapien
catcaagggatgataataagacaatatgtaatg

SEQ ID NO: 374131 - DNA, 33 bp, Homo sapien
gctgttagcatggaaacgagttccttatgtgag

SEQ ID NO: 374132 - DNA, 33 bp, Homo sapien
gctgttagcatggaaatgagttccttatgtgag

SEQ ID NO: 374133 - DNA, 33 bp, Homo sapien
gctcatgcacaaggtcacccagtctacatggta

SEQ ID NO: 374134 - DNA, 33 bp, Homo sapien
gctcatgcacaaggtcgcccagtctacatggta

SEQ ID NO: 374135 - DNA, 33 bp, Homo sapien
ggtgtgctttaaccaaggaatgctttaccaccc

SEQ ID NO: 374136 - DNA, 33 bp, Homo sapien
ggtgtgctttaaccaatgaatgctttaccaccc

SEQ ID NO: 374137 - DNA, 33 bp, Homo sapien
ttcagtctaaagcagacggataatggttgaatt

SEQ ID NO: 374138 - DNA, 33 bp, Homo sapien
ttcagtctaaagcagatggataatggttgaatt

SEQ ID NO: 374139 - DNA, 33 bp, Homo sapien
tttagagtttattatacactggacaatgttcta

SEQ ID NO: 374140 - DNA, 33 bp, Homo sapien
tttagagtttattatatactggacaatgttcta

SEQ ID NO: 374141 - DNA, 33 bp, Homo sapien
ggtcctggctacagaaaaaaacttgccacatcc

SEQ ID NO: 374142 - DNA, 33 bp, Homo sapien
ggtcctggctacagaacaaaacttgccacatcc

SEQ ID NO: 374143 - DNA, 33 bp, Homo sapien
atacatcaaacatgaacggaaagagatcttctg

SEQ ID NO: 374144 - DNA, 33 bp, Homo sapien
atacatcaaacatgaatggaaagagatcttctg

SEQ ID NO: 374145 - DNA, 33 bp, Homo sapien
tatgttcaagatgacagaggatataaggaatac

SEQ ID NO: 374146 - DNA, 33 bp, Homo sapien
tatgttcaagatgacataggatataaggaatac

SEQ ID NO: 374147 - DNA, 33 bp, Homo sapien
aaggtcctattatgcacggttggtttccagtaa

SEQ ID NO: 374148 - DNA, 33 bp, Homo sapien
aaggtcctattatgcagggttggtttccagtaa

SEQ ID NO: 374149 - DNA, 33 bp, Homo sapien
gaaagctggaatagcacgtagcttggttgaaat

SEQ ID NO: 374150 - DNA, 33 bp, Homo sapien
gaaagctggaatagcatgtagcttggttgaaat

SEQ ID NO: 374151 - DNA, 33 bp, Homo sapien
gaagccgcacttttgaataacggtagctgacat

SEQ ID NO: 374152 - DNA, 33 bp, Homo sapien
gaagccgcacttttgagtaacggtagctgacat

SEQ ID NO: 374153 - DNA, 33 bp, Homo sapien
atccttttttgctcacaattgttttattcattt

SEQ ID NO: 374154 - DNA, 33 bp, Homo sapien
atccttttttgctcacgattgttttattcattt

SEQ ID NO: 374155 - DNA, 33 bp, Homo sapien
gaatgtatatctaaacaccaaaatagcacacct

SEQ ID NO: 374156 - DNA, 33 bp, Homo sapien
gaatgtatatctaaacgccaaaatagcacacct

SEQ ID NO: 374157 - DNA, 33 bp, Homo sapien
acagtatattgtgacaccatcatcagtatgtgt

SEQ ID NO: 374158 - DNA, 33 bp, Homo sapien
acagtatattgtgacatcatcatcagtatgtgt

SEQ ID NO: 374159 - DNA, 33 bp, Homo sapien
tgttggccactgtaaaggcatcaaatgtgactg

SEQ ID NO: 374160 - DNA, 33 bp, Homo sapien
tgttggccactgtaaatgcatcaaatgtgactg

SEQ ID NO: 374161 - DNA, 33 bp, Homo sapien
gctcattgaggcaaaacgtgaaaaagtgaatat

SEQ ID NO: 374162 - DNA, 33 bp, Homo sapien
gctcattgaggcaaaatgtgaaaaagtgaatat

SEQ ID NO: 374163 - DNA, 33 bp, Homo sapien
gagggatgtgcattagccaccttgtggccctca

SEQ ID NO: 374164 - DNA, 33 bp, Homo sapien
gagggatgtgcattagtcaccttgtggccctca

SEQ ID NO: 374165 - DNA, 33 bp, Homo sapien
ttgcaacatacttgtgacaatatcaaattaata

SEQ ID NO: 374166 - DNA, 33 bp, Homo sapien
ttgcaacatacttgtggcaatatcaaattaata

SEQ ID NO: 374167 - DNA, 33 bp, Homo sapien
ctctccacacttctcaacctactctcttgctgg

SEQ ID NO: 374168 - DNA, 33 bp, Homo sapien
ctctccacacttctcatcctactctcttgctgg

SEQ ID NO: 374169 - DNA, 33 bp, Homo sapien
catttccccacaatgacgcttttgttatcatgt

SEQ ID NO: 374170 - DNA, 33 bp, Homo sapien
catttccccacaatgatgcttttgttatcatgt

SEQ ID NO: 374171 - DNA, 33 bp, Homo sapien
gcccctccactgagcaccaatgatatatagcca

SEQ ID NO: 374172 - DNA, 33 bp, Homo sapien
gcccctccactgagcatcaatgatatatagcca

SEQ ID NO: 374173 - DNA, 33 bp, Homo sapien
ctaccaatctcccccaagacacttcatctgcac

SEQ ID NO: 374174 - DNA, 33 bp, Homo sapien
ctaccaatctcccccaggacacttcatctgcac

SEQ ID NO: 374175 - DNA, 33 bp, Homo sapien
ggattccgaggctttccattcggtgatcagcac

SEQ ID NO: 374176 - DNA, 33 bp, Homo sapien
ggattccgaggctttctattcggtgatcagcac

SEQ ID NO: 374177 - DNA, 33 bp, Homo sapien
atatatattacctcaaatcgtcaaatccttatc

SEQ ID NO: 374178 - DNA, 33 bp, Homo sapien
atatatattacctcaattcgtcaaatccttatc

SEQ ID NO: 374179 - DNA, 33 bp, Homo sapien
gagaaataatagagatgacacatggagaatgca

SEQ ID NO: 374180 - DNA, 33 bp, Homo sapien
gagaaataatagagattacacatggagaatgca

SEQ ID NO: 374181 - DNA, 33 bp, Homo sapien
tattcccagcatccagaaggtagaagccagcga

SEQ ID NO: 374182 - DNA, 33 bp, Homo sapien
tattcccagcatccagcaggtagaagccagcga

SEQ ID NO: 374183 - DNA, 33 bp, Homo sapien
ttggatacaacctacacgaatcaccccacagac

SEQ ID NO: 374184 - DNA, 33 bp, Homo sapien
ttggatacaacctacatgaatcaccccacagac

SEQ ID NO: 374185 - DNA, 33 bp, Homo sapien
agagtaaatggaacaacaaatgttaggcaacaa

SEQ ID NO: 374186 - DNA, 33 bp, Homo sapien
agagtaaatggaacaataaatgttaggcaacaa

SEQ ID NO: 374187 - DNA, 33 bp, Homo sapien
gtccatctgaggcaaaaataagtctctattttt

SEQ ID NO: 374188 - DNA, 33 bp, Homo sapien
gtccatctgaggcaaacataagtctctattttt

SEQ ID NO: 374189 - DNA, 33 bp, Homo sapien
ttgcaaatgcacaaagccggcagggaccactat

SEQ ID NO: 374190 - DNA, 33 bp, Homo sapien
ttgcaaatgcacaaagtcggcagggaccactat

SEQ ID NO: 374191 - DNA, 33 bp, Homo sapien
gctgtcaggatccagacgagacatttatcctcc

SEQ ID NO: 374192 - DNA, 33 bp, Homo sapien
gctgtcaggatccagatgagacatttatcctcc

SEQ ID NO: 374193 - DNA, 33 bp, Homo sapien
ggcactgattaattcgaaacaaatttctaaatt

SEQ ID NO: 374194 - DNA, 33 bp, Homo sapien
ggcactgattaattcggaacaaatttctaaatt

SEQ ID NO: 374195 - DNA, 33 bp, Homo sapien
gtatgtgaatgaattgcacctttatacacaaag

SEQ ID NO: 374196 - DNA, 33 bp, Homo sapien
gtatgtgaatgaattgtacctttatacacaaag

SEQ ID NO: 374197 - DNA, 33 bp, Homo sapien
gtaacatattagtagacgaccgatcagtcattg

SEQ ID NO: 374198 - DNA, 33 bp, Homo sapien
gtaacatattagtagatgaccgatcagtcattg

SEQ ID NO: 374199 - DNA, 33 bp, Homo sapien
aaaagagaaacagaaaattcatatttaggtccc

SEQ ID NO: 374200 - DNA, 33 bp, Homo sapien
aaaagagaaacagaaagttcatatttaggtccc

SEQ ID NO: 374201 - DNA, 33 bp, Homo sapien
tctttaccaacaaccccgatgcccaaatcatac

SEQ ID NO: 374202 - DNA, 33 bp, Homo sapien
tctttaccaacaaccctgatgcccaaatcatac

SEQ ID NO: 374203 - DNA, 33 bp, Homo sapien
gattaccaagaagcaaatagggtgatataggtg

SEQ ID NO: 374204 - DNA, 33 bp, Homo sapien
gattaccaagaagcaactagggtgatataggtg

SEQ ID NO: 374205 - DNA, 33 bp, Homo sapien
atgtgtttggaaattaacctgatgagttagaag

SEQ ID NO: 374206 - DNA, 33 bp, Homo sapien
atgtgtttggaaattagcctgatgagttagaag

SEQ ID NO: 374207 - DNA, 33 bp, Homo sapien
tcatcttctcccaggccgataatggtcactcca

SEQ ID NO: 374208 - DNA, 33 bp, Homo sapien
tcatcttctcccaggctgataatggtcactcca

SEQ ID NO: 374209 - DNA, 33 bp, Homo sapien
aaatgtaaaatactgaaaaaagtggaagtagta

SEQ ID NO: 374210 - DNA, 33 bp, Homo sapien
aaatgtaaaatactgacaaaagtggaagtagta

SEQ ID NO: 374211 - DNA, 33 bp, Homo sapien
cttttttcctgcctacgctgtatctgcttactt

SEQ ID NO: 374212 - DNA, 33 bp, Homo sapien
cttttttcctgcctactctgtatctgcttactt

SEQ ID NO: 374213 - DNA, 33 bp, Homo sapien
gacttctatgttatcaccaaagagctactatga

SEQ ID NO: 374214 - DNA, 33 bp, Homo sapien
gacttctatgttatcatcaaagagctactatga

SEQ ID NO: 374215 - DNA, 33 bp, Homo sapien
caacaaatccaaagaaacaatgacagtctgcat

SEQ ID NO: 374216 - DNA, 33 bp, Homo sapien
caacaaatccaaagaagcaatgacagtctgcat

SEQ ID NO: 374217 - DNA, 33 bp, Homo sapien
taatgccaagtcaaaaccactgtttaggagtgc

SEQ ID NO: 374218 - DNA, 33 bp, Homo sapien
taatgccaagtcaaaagcactgtttaggagtgc

SEQ ID NO: 374219 - DNA, 33 bp, Homo sapien
acctgccactttactacgctcccagattaaatt

SEQ ID NO: 374220 - DNA, 33 bp, Homo sapien
acctgccactttactatgctcccagattaaatt

SEQ ID NO: 374221 - DNA, 33 bp, Homo sapien
tttcagagcatggaaaattattttggaagtttg

SEQ ID NO: 374222 - DNA, 33 bp, Homo sapien
tttcagagcatggaaacttattttggaagtttg

SEQ ID NO: 374223 - DNA, 33 bp, Homo sapien; identical to SEQ ID NO: 374221

SEQ ID NO: 374224 - DNA, 33 bp, Homo sapien; identical to SEQ ID NO: 374222

SEQ ID NO: 374225 - DNA, 33 bp, Homo sapien
atgaaaattattggccaaaatggagatgagctc

SEQ ID NO: 374226 - DNA, 33 bp, Homo sapien
atgaaaattattggcctaaatggagatgagctc

SEQ ID NO: 374227 - DNA, 33 bp, Homo sapien
gtccgtgagggagaaacttcgtggagatccgtt

SEQ ID NO: 374228 - DNA, 33 bp, Homo sapien
gtccgtgagggagaaatttcgtggagatccgtt

SEQ ID NO: 374229 - DNA, 33 bp, Homo sapien
gaggctgggttagacaaggtcctgtagttcctc

SEQ ID NO: 374230 - DNA, 33 bp, Homo sapien
gaggctgggttagacagggtcctgtagttcctc

SEQ ID NO: 374231 - DNA, 33 bp, Homo sapien
gtagtccctgaaggaacagtctctctgggtgtt

SEQ ID NO: 374232 - DNA, 33 bp, Homo sapien
gtagtccctgaaggaatagtctctctgggtgtt

SEQ ID NO: 374233 - DNA, 33 bp, Homo sapien
attttctctgctatccgctatcctgtaagccca

SEQ ID NO: 374234 - DNA, 33 bp, Homo sapien
attttctctgctatcctctatcctgtaagccca

SEQ ID NO: 374235 - DNA, 33 bp, Homo sapien
ttaagaactgtttgaacaattacgtgataaaac

SEQ ID NO: 374236 - DNA, 33 bp, Homo sapien
ttaagaactgtttgaataattacgtgataaaac

SEQ ID NO: 374237 - DNA, 33 bp, Homo sapien
taatctcagaagaacactgggcagcagccaaaa

SEQ ID NO: 374238 - DNA, 33 bp, Homo sapien
taatctcagaagaacagtgggcagcagccaaaa

SEQ ID NO: 374239 - DNA, 33 bp, Homo sapien
tgttgactgtgacatggaggagcaggctggtcc

SEQ ID NO: 374240 - DNA, 33 bp, Homo sapien
tgttgactgtgacatgtaggagcaggctggtcc

SEQ ID NO: 374241 - DNA, 33 bp, Homo sapien
cagaaatggttcccagaaaaagaagatcacaag

SEQ ID NO: 374242 - DNA, 33 bp, Homo sapien
cagaaatggttcccaggaaaagaagatcacaag

SEQ ID NO: 374243 - DNA, 33 bp, Homo sapien
ttgttcacatctgtaaacttagctttttgggag

SEQ ID NO: 374244 - DNA, 33 bp, Homo sapien
ttgttcacatctgtaaccttagctttttgggag

SEQ ID NO: 374245 - DNA, 33 bp, Homo sapien
ctctgctaactggagacgtttttagagagtcca

SEQ ID NO: 374246 - DNA, 33 bp, Homo sapien
ctctgctaactggagatgtttttagagagtcca

SEQ ID NO: 374247 - DNA, 33 bp, Homo sapien
gaaccggttggcactacatgggattggagggga

SEQ ID NO: 374248 - DNA, 33 bp, Homo sapien
gaaccggttggcactagatgggattggagggga

SEQ ID NO: 374249 - DNA, 33 bp, Homo sapien
aagactccatcttgcgaccagcttcagaaagcc

SEQ ID NO: 374250 - DNA, 33 bp, Homo sapien
aagactccatcttgcggccagcttcagaaagcc

SEQ ID NO: 374251 - DNA, 33 bp, Homo sapien
gatcccctcgaaaagccccctcgcgagtatctg

SEQ ID NO: 374252 - DNA, 33 bp, Homo sapien
gatcccctcgaaaagctccctcgcgagtatctg

SEQ ID NO: 374253 - DNA, 33 bp, Homo sapien
taaaaatatgatattaggacatcacaatattat

SEQ ID NO: 374254 - DNA, 33 bp, Homo sapien
taaaaatatgatattatgacatcacaatattat

SEQ ID NO: 374255 - DNA, 33 bp, Homo sapien
gccaacactctccctaaacaggaggaaaaactg

SEQ ID NO: 374256 - DNA, 33 bp, Homo sapien
gccaacactctccctatacaggaggaaaaactg

SEQ ID NO: 374257 - DNA, 33 bp, Homo sapien
ttcatcaagctactcaaaattggtgaacaattt

SEQ ID NO: 374258 - DNA, 33 bp, Homo sapien
ttcatcaagctactcagaattggtgaacaattt

SEQ ID NO: 374259 - DNA, 33 bp, Homo sapien
cttctatttgttgaacaagcaaaaagaagcagc

SEQ ID NO: 374260 - DNA, 33 bp, Homo sapien
cttctatttgttgaacgagcaaaaagaagcagc

SEQ ID NO: 374261 - DNA, 33 bp, Homo sapien
agaaaatttacaatgaagcaaatgtgagttggg

SEQ ID NO: 374262 - DNA, 33 bp, Homo sapien
agaaaatttacaatgaggcaaatgtgagttggg

SEQ ID NO: 374263 - DNA, 33 bp, Homo sapien
taattatagtgatgtcacaacacatacgaatta

SEQ ID NO: 374264 - DNA, 33 bp, Homo sapien
taattatagtgatgtcgcaacacatacgaatta

SEQ ID NO: 374265 - DNA, 33 bp, Homo sapien
cccttaccaggacacaacttgcagaagggattg

SEQ ID NO: 374266 - DNA, 33 bp, Homo sapien
cccttaccaggacacagcttgcagaagggattg

SEQ ID NO: 374267 - DNA, 33 bp, Homo sapien
ttgactgttctacttggagtgggtaaatatgtg

SEQ ID NO: 374268 - DNA, 33 bp, Homo sapien
ttgactgttctacttgtagtgggtaaatatgtg

SEQ ID NO: 374269 - DNA, 33 bp, Homo sapien
tcagatactgagcaaaagtgtatgtcacagtca

SEQ ID NO: 374270 - DNA, 33 bp, Homo sapien
tcagatactgagcaaaggtgtatgtcacagtca

SEQ ID NO: 374271 - DNA, 33 bp, Homo sapien
ggagcgccccacgttacggccttgttgtgggct

SEQ ID NO: 374272 - DNA, 33 bp, Homo sapien
ggagcgccccacgttatggccttgttgtgggct

SEQ ID NO: 374273 - DNA, 33 bp, Homo sapien
tgttttagtcaaagaacagtgatttatcattcc

SEQ ID NO: 374274 - DNA, 33 bp, Homo sapien
tgttttagtcaaagaatagtgatttatcattcc

SEQ ID NO: 374275 - DNA, 33 bp, Homo sapien
gtaatgatccaaagagacatcaacctaagaggt

SEQ ID NO: 374276 - DNA, 33 bp, Homo sapien
gtaatgatccaaagaggcatcaacctaagaggt

SEQ ID NO: 374277 - DNA, 33 bp, Homo sapien; identical to SEQ ID NO: 374275

SEQ ID NO: 374278 - DNA, 33 bp, Homo sapien; identical to SEQ ID NO: 374276

SEQ ID NO: 374279 - DNA, 33 bp, Homo sapien
agaccaggcaaccatacaggtgcaaaaatctta

SEQ ID NO: 374280 - DNA, 33 bp, Homo sapien
agaccaggcaaccatagaggtgcaaaaatctta

SEQ ID NO: 374281 - DNA, 33 bp, Homo sapien
ggggtatattcaacacacatgggttttataatc

SEQ ID NO: 374282 - DNA, 33 bp, Homo sapien
ggggtatattcaacacgcatgggttttataatc

SEQ ID NO: 374283 - DNA, 33 bp, Homo sapien
gatctgtatggccacacaaccaaaagtagaaat

SEQ ID NO: 374284 - DNA, 33 bp, Homo sapien
gatctgtatggccacagaaccaaaagtagaaat

SEQ ID NO: 374285 - DNA, 33 bp, Homo sapien
gacctccaaatccaaacatttctccactccagg

SEQ ID NO: 374286 - DNA, 33 bp, Homo sapien
gacctccaaatccaaatatttctccactccagg

SEQ ID NO: 374287 - DNA, 33 bp, Homo sapien
agcatcataaaagggcccaaaataccggtgaga

SEQ ID NO: 374288 - DNA, 33 bp, Homo sapien
agcatcataaaagggctcaaaataccggtgaga

SEQ ID NO: 374289 - DNA, 33 bp, Homo sapien
cctaagagtcgcaacactctctgaaacctgcat

SEQ ID NO: 374290 - DNA, 33 bp, Homo sapien
cctaagagtcgcaacagtctctgaaacctgcat

SEQ ID NO: 374291 - DNA, 33 bp, Homo sapien
tggagaaatgtacggaagagtgaagactctctg

SEQ ID NO: 374292 - DNA, 33 bp, Homo sapien
tggagaaatgtacggaggagtgaagactctctg

SEQ ID NO: 374293 - DNA, 33 bp, Homo sapien
agtgaaggtaataaaacgtcctccaactcacac

SEQ ID NO: 374294 - DNA, 33 bp, Homo sapien
agtgaaggtaataaaatgtcctccaactcacac

SEQ ID NO: 374295 - DNA, 33 bp, Homo sapien; identical to SEQ ID NO: 374293

SEQ ID NO: 374296 - DNA, 33 bp, Homo sapien; identical to SEQ ID NO: 374294

SEQ ID NO: 374297 - DNA, 33 bp, Homo sapien
tctgctgaggaagggcactgaatctcacactca

SEQ ID NO: 374298 - DNA, 33 bp, Homo sapien
tctgctgaggaagggcgctgaatctcacactca

SEQ ID NO: 374299 - DNA, 33 bp, Homo sapien
tttccacttttacagacgtctcagagaattaca

SEQ ID NO: 374300 - DNA, 33 bp, Homo sapien
tttccacttttacagatgtctcagagaattaca

SEQ ID NO: 374301 - DNA, 33 bp, Homo sapien
ggctccagttgctctacagtcttttcaacacct

SEQ ID NO: 374302 - DNA, 33 bp, Homo sapien
ggctccagttgctctatagtcttttcaacacct

SEQ ID NO: 374303 - DNA, 33 bp, Homo sapien
gagccctagttcataaatgtcagttatgatcat

SEQ ID NO: 374304 - DNA, 33 bp, Homo sapien
gagccctagttcataagtgtcagttatgatcat

SEQ ID NO: 374305 - DNA, 33 bp, Homo sapien
ttatacactgaaagtcacctggttcagagccac

SEQ ID NO: 374306 - DNA, 33 bp, Homo sapien
ttatacactgaaagtcgcctggttcagagccac

SEQ ID NO: 374307 - DNA, 33 bp, Homo sapien
ttggctgtctaccttccaggaaaatataatcaa

SEQ ID NO: 374308 - DNA, 33 bp, Homo sapien
ttggctgtctaccttctaggaaaatataatcaa

SEQ ID NO: 374309 - DNA, 33 bp, Homo sapien
ggtctctcaagagtgactagaacattgtacttc

SEQ ID NO: 374310 - DNA, 33 bp, Homo sapien
ggtctctcaagagtgattagaacattgtacttc

SEQ ID NO: 374311 - DNA, 33 bp, Homo sapien
tggacgcttcaggaccccagatctgtacatttc

SEQ ID NO: 374312 - DNA, 33 bp, Homo sapien
tggacgcttcaggacctcagatctgtacatttc

SEQ ID NO: 374313 - DNA, 33 bp, Homo sapien
atggttgagttaccataaaaaaattatgtacct

SEQ ID NO: 374314 - DNA, 33 bp, Homo sapien
atggttgagttaccattaaaaaattatgtacct

SEQ ID NO: 374315 - DNA, 33 bp, Homo sapien
caagatcctctgttcaaggctcctggaaaagcc

SEQ ID NO: 374316 - DNA, 33 bp, Homo sapien
caagatcctctgttcagggctcctggaaaagcc

SEQ ID NO: 374317 - DNA, 33 bp, Homo sapien
gtcaggaaccatacagaaaagtcatgtcacctt

SEQ ID NO: 374318 - DNA, 33 bp, Homo sapien
gtcaggaaccatacaggaaagtcatgtcacctt

SEQ ID NO: 374319 - DNA, 33 bp, Homo sapien; identical to SEQ ID NO: 374317

SEQ ID NO: 374320 - DNA, 33 bp, Homo sapien; identical to SEQ ID NO: 374318

SEQ ID NO: 374321 - DNA, 33 bp, Homo sapien
ccaatgcaggtagaacacagtcaaaagagtcat

SEQ ID NO: 374322 - DNA, 33 bp, Homo sapien
ccaatgcaggtagaacgcagtcaaaagagtcat

SEQ ID NO: 374323 - DNA, 33 bp, Homo sapien
tctaattctaaccgtgcactgtttggatatgtg

SEQ ID NO: 374324 - DNA, 33 bp, Homo sapien
tctaattctaaccgtggactgtttggatatgtg

SEQ ID NO: 374325 - DNA, 33 bp, Homo sapien
tgtgtaggtatgagaggcatcatttttcctgtg

SEQ ID NO: 374326 - DNA, 33 bp, Homo sapien
tgtgtaggtatgagagtcatcatttttcctgtg

SEQ ID NO: 374327 - DNA, 33 bp, Homo sapien
tcccaggggaaagtccacgctaggagccctgtg

SEQ ID NO: 374328 - DNA, 33 bp, Homo sapien
tcccaggggaaagtccgcgctaggagccctgtg

SEQ ID NO: 374329 - DNA, 33 bp, Homo sapien
ctcatgataaggctcagacctgctttcctgctt

SEQ ID NO: 374330 - DNA, 33 bp, Homo sapien
ctcatgataaggctcatacctgctttcctgctt

SEQ ID NO: 374331 - DNA, 33 bp, Homo sapien
attagtcatatgggaaaacttccaggaggtgcc

SEQ ID NO: 374332 - DNA, 33 bp, Homo sapien
attagtcatatgggaacacttccaggaggtgcc

SEQ ID NO: 374333 - DNA, 33 bp, Homo sapien
ccgccacaatgaaaaaaaccccagatcatcatc

SEQ ID NO: 374334 - DNA, 33 bp, Homo sapien
ccgccacaatgaaaaagaccccagatcatcatc

SEQ ID NO: 374335 - DNA, 33 bp, Homo sapien
tatttagatctgcaaagaaaacatttccttctg

SEQ ID NO: 374336 - DNA, 33 bp, Homo sapien
tatttagatctgcaaataaaacatttccttctg

SEQ ID NO: 374337 - DNA, 33 bp, Homo sapien
atctgtgaggatctggacaaaggggtagtgata

SEQ ID NO: 374338 - DNA, 33 bp, Homo sapien
atctgtgaggatctgggcaaaggggtagtgata

SEQ ID NO: 374339 - DNA, 33 bp, Homo sapien
ggtatctctatcattaaaattcttgaggtagcc

SEQ ID NO: 374340 - DNA, 33 bp, Homo sapien
ggtatctctatcattagaattcttgaggtagcc

SEQ ID NO: 374341 - DNA, 33 bp, Homo sapien
agactgctttgggtagacagagagtatctccca

SEQ ID NO: 374342 - DNA, 33 bp, Homo sapien
agactgctttgggtaggcagagagtatctccca

SEQ ID NO: 374343 - DNA, 33 bp, Homo sapien
actttcagacaacacaagcattctcatgataga

SEQ ID NO: 374344 - DNA, 33 bp, Homo sapien
actttcagacaacacaggcattctcatgataga

SEQ ID NO: 374345 - DNA, 33 bp, Homo sapien
agatatctaggcaaccacaggcattttaatggg

SEQ ID NO: 374346 - DNA, 33 bp, Homo sapien
agatatctaggcaaccgcaggcattttaatggg

SEQ ID NO: 374347 - DNA, 33 bp, Homo sapien
taattcctggggtcaccaagctatctatattat

SEQ ID NO: 374348 - DNA, 33 bp, Homo sapien
taattcctggggtcacgaagctatctatattat

SEQ ID NO: 374349 - DNA, 33 bp, Homo sapien
tcataggcattttaatcagagagatacctgggt

SEQ ID NO: 374350 - DNA, 33 bp, Homo sapien
tcataggcattttaatgagagagatacctgggt

SEQ ID NO: 374351 - DNA, 33 bp, Homo sapien
atatcaggcattctaacgtgggagactccaggc

SEQ ID NO: 374352 - DNA, 33 bp, Homo sapien
atatcaggcattctaatgtgggagactccaggc

SEQ ID NO: 374353 - DNA, 33 bp, Homo sapien
tacagggaaatttgagacctcctcttctatagg

SEQ ID NO: 374354 - DNA, 33 bp, Homo sapien
tacagggaaatttgaggcctcctcttctatagg

SEQ ID NO: 374355 - DNA, 33 bp, Homo sapien
aaaatgaaggtgaagacactttgcattcagtaa

SEQ ID NO: 374356 - DNA, 33 bp, Homo sapien
aaaatgaaggtgaagagactttgcattcagtaa

SEQ ID NO: 374357 - DNA, 33 bp, Homo sapien
tatgtcaccagggagactcagatttctggattg

SEQ ID NO: 374358 - DNA, 33 bp, Homo sapien
tatgtcaccagggagattcagatttctggattg

SEQ ID NO: 374359 - DNA, 33 bp, Homo sapien
taaggcaagagaaagaagtgctcatggcaatga

SEQ ID NO: 374360 - DNA, 33 bp, Homo sapien
taaggcaagagaaagaggtgctcatggcaatga

SEQ ID NO: 374361 - DNA, 33 bp, Homo sapien
tccatctctgaggagggatatttggctagagta

SEQ ID NO: 374362 - DNA, 33 bp, Homo sapien
tccatctctgaggaggtatatttggctagagta

SEQ ID NO: 374363 - DNA, 33 bp, Homo sapien
aggaagtaagctacaaaaggatgtatgagtgtg

SEQ ID NO: 374364 - DNA, 33 bp, Homo sapien
aggaagtaagctacaagaggatgtatgagtgtg

SEQ ID NO: 374365 - DNA, 33 bp, Homo sapien
ctggctctagaaacccaccaatcatggacagga

SEQ ID NO: 374366 - DNA, 33 bp, Homo sapien
ctggctctagaaacccgccaatcatggacagga

SEQ ID NO: 374367 - DNA, 33 bp, Homo sapien
aaatatcacatgataaacactagaaagaagcta

SEQ ID NO: 374368 - DNA, 33 bp, Homo sapien
aaatatcacatgataatcactagaaagaagcta

SEQ ID NO: 374369 - DNA, 33 bp, Homo sapien
cccaaaagattatacaccatgctgctataaaga

SEQ ID NO: 374370 - DNA, 33 bp, Homo sapien
cccaaaagattatacatcatgctgctataaaga

SEQ ID NO: 374371 - DNA, 33 bp, Homo sapien
cttaagcagacttaaccggatacatcagagtgt

SEQ ID NO: 374372 - DNA, 33 bp, Homo sapien
cttaagcagacttaactggatacatcagagtgt

SEQ ID NO: 374373 - DNA, 33 bp, Homo sapien
ctaacactacttcacaatgcctatatcattcac

SEQ ID NO: 374374 - DNA, 33 bp, Homo sapien
ctaacactacttcacattgcctatatcattcac

SEQ ID NO: 374375 - DNA, 33 bp, Homo sapien
ataactgtccacattaagaaggtgttacgggct

SEQ ID NO: 374376 - DNA, 33 bp, Homo sapien
ataactgtccacattaggaaggtgttacgggct

SEQ ID NO: 374377 - DNA, 33 bp, Homo sapien
tacactaaaaagttaccaccaggcttaatatga

SEQ ID NO: 374378 - DNA, 33 bp, Homo sapien
tacactaaaaagttactaccaggcttaatatga

SEQ ID NO: 374379 - DNA, 33 bp, Homo sapien
atccaaaaaaggtctccatgttgtgtgactcat

SEQ ID NO: 374380 - DNA, 33 bp, Homo sapien
atccaaaaaaggtctctatgttgtgtgactcat

SEQ ID NO: 374381 - DNA, 33 bp, Homo sapien
ccagggagtgtgaatacaagttgttgctgcagc

SEQ ID NO: 374382 - DNA, 33 bp, Homo sapien
ccagggagtgtgaatataagttgttgctgcagc

SEQ ID NO: 374383 - DNA, 33 bp, Homo sapien
ttcgaaaaaaacgaaccagcaatgcctggaaat

SEQ ID NO: 374384 - DNA, 33 bp, Homo sapien
ttcgaaaaaaacgaacgagcaatgcctggaaat

SEQ ID NO: 374385 - DNA, 33 bp, Homo sapien
taactgtggtgttggacaatgaacctacacagg

SEQ ID NO: 374386 - DNA, 33 bp, Homo sapien
taactgtggtgttggataatgaacctacacagg

SEQ ID NO: 374387 - DNA, 33 bp, Homo sapien
aagaggtggagcttaactctccttacccttgaa

SEQ ID NO: 374388 - DNA, 33 bp, Homo sapien
aagaggtggagcttaattctccttacccttgaa

SEQ ID NO: 374389 - DNA, 33 bp, Homo sapien
cttactgtgttgtcacccactgtgccaaggtct

SEQ ID NO: 374390 - DNA, 33 bp, Homo sapien
cttactgtgttgtcacgcactgtgccaaggtct

SEQ ID NO: 374391 - DNA, 33 bp, Homo sapien
tatcggtcactgatacacctactcaggcaacat

SEQ ID NO: 374392 - DNA, 33 bp, Homo sapien
tatcggtcactgatacgcctactcaggcaacat

SEQ ID NO: 374393 - DNA, 33 bp, Homo sapien
aggaaaacaaaccacactgatacaaagaccaag

SEQ ID NO: 374394 - DNA, 33 bp, Homo sapien
aggaaaacaaaccacattgatacaaagaccaag

SEQ ID NO: 374395 - DNA, 33 bp, Homo sapien
gccggcactaaagcgaacaattcccgtgaacgc

SEQ ID NO: 374396 - DNA, 33 bp, Homo sapien
gccggcactaaagcgagcaattcccgtgaacgc

SEQ ID NO: 374397 - DNA, 33 bp, Homo sapien
gtgtgtacttagctcaaatacttgattgcaact

SEQ ID NO: 374398 - DNA, 33 bp, Homo sapien
gtgtgtacttagctcagatacttgattgcaact

SEQ ID NO: 374399 - DNA, 33 bp, Homo sapien
gtgtttctcagaaagcggaacctcattacattc

SEQ ID NO: 374400 - DNA, 33 bp, Homo sapien
gtgtttctcagaaagctgaacctcattacattc

SEQ ID NO: 374401 - DNA, 33 bp, Homo sapien
aaagacactgtgcccaagaagcaggccagtttg

SEQ ID NO: 374402 - DNA, 33 bp, Homo sapien
aaagacactgtgcccaggaagcaggccagtttg

SEQ ID NO: 374403 - DNA, 33 bp, Homo sapien
tgaggtggactgaaaacgtcaaaaacaacctcc

SEQ ID NO: 374404 - DNA, 33 bp, Homo sapien
tgaggtggactgaaaaggtcaaaaacaacctcc

SEQ ID NO: 374405 - DNA, 33 bp, Homo sapien
ggtctcctggaaaacaaccccaggcatatgtgt

SEQ ID NO: 374406 - DNA, 33 bp, Homo sapien
ggtctcctggaaaacagccccaggcatatgtgt

SEQ ID NO: 374407 - DNA, 33 bp, Homo sapien
aagtacattttgatccaagatttgattgaatct

SEQ ID NO: 374408 - DNA, 33 bp, Homo sapien
aagtacattttgatccgagatttgattgaatct

SEQ ID NO: 374409 - DNA, 33 bp, Homo sapien
agcaattatgataaaaactgacctggacatttg

SEQ ID NO: 374410 - DNA, 33 bp, Homo sapien
agcaattatgataaaatctgacctggacatttg

SEQ ID NO: 374411 - DNA, 33 bp, Homo sapien
gtcctcctgaggtgcacggtgaatccccagagg

SEQ ID NO: 374412 - DNA, 33 bp, Homo sapien
gtcctcctgaggtgcatggtgaatccccagagg

SEQ ID NO: 374413 - DNA, 33 bp, Homo sapien
tcctgggttctcttgcaccaagaaagtcagcag

SEQ ID NO: 374414 - DNA, 33 bp, Homo sapien
tcctgggttctcttgcgccaagaaagtcagcag

SEQ ID NO: 374415 - DNA, 33 bp, Homo sapien
ttaaactggagccaacaagaacgctcagagggc

SEQ ID NO: 374416 - DNA, 33 bp, Homo sapien
ttaaactggagccaacgagaacgctcagagggc

SEQ ID NO: 374417 - DNA, 33 bp, Homo sapien
attgtggtaaatgtgacagactgttttcctctt

SEQ ID NO: 374418 - DNA, 33 bp, Homo sapien
attgtggtaaatgtgatagactgttttcctctt

SEQ ID NO: 374419 - DNA, 33 bp, Homo sapien
agaattcatctatgcaaaagctgcctcagagta

SEQ ID NO: 374420 - DNA, 33 bp, Homo sapien
agaattcatctatgcagaagctgcctcagagta

SEQ ID NO: 374421 - DNA, 33 bp, Homo sapien
gcatagtacactgacaagtgggtggacagcaag

SEQ ID NO: 374422 - DNA, 33 bp, Homo sapien
gcatagtacactgacacgtgggtggacagcaag

SEQ ID NO: 374423 - DNA, 33 bp, Homo sapien
actgttgccttacaaccagaagcaaagccattc

SEQ ID NO: 374424 - DNA, 33 bp, Homo sapien
actgttgccttacaactagaagcaaagccattc

SEQ ID NO: 374425 - DNA, 33 bp, Homo sapien
accaaacgggtataaacgctgctctggcaggga

SEQ ID NO: 374426 - DNA, 33 bp, Homo sapien
accaaacgggtataaatgctgctctggcaggga

SEQ ID NO: 374427 - DNA, 33 bp, Homo sapien
ggcctcactccatgtaagtatgagatgtgtcca

SEQ ID NO: 374428 - DNA, 33 bp, Homo sapien
ggcctcactccatgtacgtatgagatgtgtcca

SEQ ID NO: 374429 - DNA, 33 bp, Homo sapien
actgctaagaatggcccgcaatgatcctaaata

SEQ ID NO: 374430 - DNA, 33 bp, Homo sapien
actgctaagaatggcctgcaatgatcctaaata

SEQ ID NO: 374431 - DNA, 33 bp, Homo sapien
tgttcaatatatgttccaattgaaggaaaaaat

SEQ ID NO: 374432 - DNA, 33 bp, Homo sapien
tgttcaatatatgttcgaattgaaggaaaaaat

SEQ ID NO: 374433 - DNA, 33 bp, Homo sapien
tggccagtaggttcaacttaagaacacgatttt

SEQ ID NO: 374434 - DNA, 33 bp, Homo sapien
tggccagtaggttcaatttaagaacacgatttt

SEQ ID NO: 374435 - DNA, 33 bp, Homo sapien
cgggccagcatcatgaaatacattgggtgtcaa

SEQ ID NO: 374436 - DNA, 33 bp, Homo sapien
cgggccagcatcatgatatacattgggtgtcaa

SEQ ID NO: 374437 - DNA, 33 bp, Homo sapien
ggaatttcagaaaggtcacatggccaggaagtg

SEQ ID NO: 374438 - DNA, 33 bp, Homo sapien
ggaatttcagaaaggtgacatggccaggaagtg

SEQ ID NO: 374439 - DNA, 33 bp, Homo sapien
tgaaggaacaaggaaggagctaaaatgttaaca

SEQ ID NO: 374440 - DNA, 33 bp, Homo sapien
tgaaggaacaaggaagtagctaaaatgttaaca

SEQ ID NO: 374441 - DNA, 33 bp, Homo sapien
taagctatgacacacaaaaattgtgcttttacc

SEQ ID NO: 374442 - DNA, 33 bp, Homo sapien
taagctatgacacacagaaattgtgcttttacc

SEQ ID NO: 374443 - DNA, 33 bp, Homo sapien
gagtatacaagatgcaacaagcgttttggtcta

SEQ ID NO: 374444 - DNA, 33 bp, Homo sapien
gagtatacaagatgcagcaagcgttttggtcta

SEQ ID NO: 374445 - DNA, 33 bp, Homo sapien
attctttttttcatggaccaataaatgatttta

SEQ ID NO: 374446 - DNA, 33 bp, Homo sapien
attctttttttcatgggccaataaatgatttta

SEQ ID NO: 374447 - DNA, 33 bp, Homo sapien
tgtcatggaattcaggccctccacaactaggtc

SEQ ID NO: 374448 - DNA, 33 bp, Homo sapien
tgtcatggaattcaggtcctccacaactaggtc

SEQ ID NO: 374449 - DNA, 33 bp, Homo sapien
tttcaaaatactttaaaagtggaggtgcatatg

SEQ ID NO: 374450 - DNA, 33 bp, Homo sapien
tttcaaaatactttaatagtggaggtgcatatg

SEQ ID NO: 374451 - DNA, 33 bp, Homo sapien
ggcacatctgcttttcactccaggaggaaacat

SEQ ID NO: 374452 - DNA, 33 bp, Homo sapien
ggcacatctgcttttcgctccaggaggaaacat

SEQ ID NO: 374453 - DNA, 33 bp, Homo sapien
tggtgttgctttcagacgggcttgaatgtgtta

SEQ ID NO: 374454 - DNA, 33 bp, Homo sapien
tggtgttgctttcagatgggcttgaatgtgtta

SEQ ID NO: 374455 - DNA, 33 bp, Homo sapien
aacaattatgtttccacaactcccacataaaaa

SEQ ID NO: 374456 - DNA, 33 bp, Homo sapien
aacaattatgtttccagaactcccacataaaaa

SEQ ID NO: 374457 - DNA, 33 bp, Homo sapien
acactcattacagcaaaagagaatcattcttct

SEQ ID NO: 374458 - DNA, 33 bp, Homo sapien
acactcattacagcaagagagaatcattcttct

SEQ ID NO: 374459 - DNA, 33 bp, Homo sapien
ctctaacctactataccgctgtagccttccact

SEQ ID NO: 374460 - DNA, 33 bp, Homo sapien
ctctaacctactatactgctgtagccttccact

SEQ ID NO: 374461 - DNA, 33 bp, Homo sapien
gaaaaggccacctctcactgttgctttcagtaa

SEQ ID NO: 374462 - DNA, 33 bp, Homo sapien
gaaaaggccacctctcgctgttgctttcagtaa

SEQ ID NO: 374463 - DNA, 33 bp, Homo sapien
aagctttgaaaagacacggaaagcatttgaaag

SEQ ID NO: 374464 - DNA, 33 bp, Homo sapien
aagctttgaaaagacagggaaagcatttgaaag

SEQ ID NO: 374465 - DNA, 33 bp, Homo sapien
tgtctacatgacatcaaactaggcttctgtttt

SEQ ID NO: 374466 - DNA, 33 bp, Homo sapien
tgtctacatgacatcagactaggcttctgtttt

SEQ ID NO: 374467 - DNA, 33 bp, Homo sapien
gcttagaatagtttagcatggttcatcatattg

SEQ ID NO: 374468 - DNA, 33 bp, Homo sapien
gcttagaatagtttagtatggttcatcatattg

SEQ ID NO: 374469 - DNA, 33 bp, Homo sapien
tgagttttatagtctacatcaggatttctcaag

SEQ ID NO: 374470 - DNA, 33 bp, Homo sapien
tgagttttatagtctatatcaggatttctcaag

SEQ ID NO: 374471 - DNA, 33 bp, Homo sapien
aaaaaagtctctaaagaaaacagaggtattcca

SEQ ID NO: 374472 - DNA, 33 bp, Homo sapien
aaaaaagtctctaaaggaaacagaggtattcca

SEQ ID NO: 374473 - DNA, 33 bp, Homo sapien
actagagcaagcaaagcagagaatctcactgct

SEQ ID NO: 374474 - DNA, 33 bp, Homo sapien
actagagcaagcaaaggagagaatctcactgct

SEQ ID NO: 374475 - DNA, 33 bp, Homo sapien
tcaacctagcgggataacatcctacggcctgcc

SEQ ID NO: 374476 - DNA, 33 bp, Homo sapien
tcaacctagcgggataccatcctacggcctgcc

SEQ ID NO: 374477 - DNA, 33 bp, Homo sapien
gggttaaggttaagcacagaaaagctgtgtaca

SEQ ID NO: 374478 - DNA, 33 bp, Homo sapien
gggttaaggttaagcagagaaaagctgtgtaca

SEQ ID NO: 374479 - DNA, 33 bp, Homo sapien
gagaatttattgtagccgataacagatgggaaa

SEQ ID NO: 374480 - DNA, 33 bp, Homo sapien
gagaatttattgtagctgataacagatgggaaa

SEQ ID NO: 374481 - DNA, 33 bp, Homo sapien
caccatatgtctgtaacgtctaagtatttaaag

SEQ ID NO: 374482 - DNA, 33 bp, Homo sapien
caccatatgtctgtaatgtctaagtatttaaag

SEQ ID NO: 374483 - DNA, 33 bp, Homo sapien
tcttaaggcaaacatcaaatgagcattatttta

SEQ ID NO: 374484 - DNA, 33 bp, Homo sapien
tcttaaggcaaacatcgaatgagcattatttta

SEQ ID NO: 374485 - DNA, 33 bp, Homo sapien
acatactggtgaaggacaatgtattcactgaca

SEQ ID NO: 374486 - DNA, 33 bp, Homo sapien
acatactggtgaaggataatgtattcactgaca

SEQ ID NO: 374487 - DNA, 33 bp, Homo sapien
cctcagttttgttcctaagaagtctgcggccct

SEQ ID NO: 374488 - DNA, 33 bp, Homo sapien
cctcagttttgttccttagaagtctgcggccct

SEQ ID NO: 374489 - DNA, 33 bp, Homo sapien
aaggctgcctctattaagacatcgagatctgtg

SEQ ID NO: 374490 - DNA, 33 bp, Homo sapien
aaggctgcctctattaggacatcgagatctgtg

SEQ ID NO: 374491 - DNA, 33 bp, Homo sapien
tgcattaatgtctgcaaaaatcctcattgcctg

SEQ ID NO: 374492 - DNA, 33 bp, Homo sapien
tgcattaatgtctgcacaaatcctcattgcctg

SEQ ID NO: 374493 - DNA, 33 bp, Homo sapien
taaaacatactgaaaacaccacagatgacattt

SEQ ID NO: 374494 - DNA, 33 bp, Homo sapien
taaaacatactgaaaataccacagatgacattt

SEQ ID NO: 374495 - DNA, 33 bp, Homo sapien
attccatcagtagaccagaaactttcagaaact

SEQ ID NO: 374496 - DNA, 33 bp, Homo sapien
attccatcagtagaccggaaactttcagaaact

SEQ ID NO: 374497 - DNA, 33 bp, Homo sapien
aagacttacacgttagacctaaagccataaaaa

SEQ ID NO: 374498 - DNA, 33 bp, Homo sapien
aagacttacacgttagccctaaagccataaaaa

SEQ ID NO: 374499 - DNA, 33 bp, Homo sapien
atttacttatttttggaaagaacctgaggattt

SEQ ID NO: 374500 - DNA, 33 bp, Homo sapien
atttacttatttttgggaagaacctgaggattt

SEQ ID NO: 374501 - DNA, 33 bp, Homo sapien
atccctatattctggacatttagatcagacaag

SEQ ID NO: 374502 - DNA, 33 bp, Homo sapien
atccctatattctggatatttagatcagacaag

SEQ ID NO: 374503 - DNA, 33 bp, Homo sapien
tcattcttcagttaacaccttcatattggttct

SEQ ID NO: 374504 - DNA, 33 bp, Homo sapien
tcattcttcagttaacgccttcatattggttct

SEQ ID NO: 374505 - DNA, 33 bp, Homo sapien
tatggtatatccacagaatatcatgtccttcag

SEQ ID NO: 374506 - DNA, 33 bp, Homo sapien
tatggtatatccacagtatatcatgtccttcag

SEQ ID NO: 374507 - DNA, 33 bp, Homo sapien
ccagtggaatgatcccaaagcatctcatatgga

SEQ ID NO: 374508 - DNA, 33 bp, Homo sapien
ccagtggaatgatcccgaagcatctcatatgga

SEQ ID NO: 374509 - DNA, 33 bp, Homo sapien
cttacctgtggtccaaatgagttagtgccctct

SEQ ID NO: 374510 - DNA, 33 bp, Homo sapien
cttacctgtggtccaagtgagttagtgccctct

SEQ ID NO: 374511 - DNA, 33 bp, Homo sapien
atggacttcatgcttacgtttttttcaggcatt

SEQ ID NO: 374512 - DNA, 33 bp, Homo sapien
atggacttcatgcttatgtttttttcaggcatt

SEQ ID NO: 374513 - DNA, 33 bp, Homo sapien
acccaaataaatataacagtttacgctttccgt

SEQ ID NO: 374514 - DNA, 33 bp, Homo sapien
acccaaataaatataatagtttacgctttccgt

SEQ ID NO: 374515 - DNA, 33 bp, Homo sapien
ccatcttgtggaaagcactaagagctactaaat

SEQ ID NO: 374516 - DNA, 33 bp, Homo sapien
ccatcttgtggaaagcgctaagagctactaaat

SEQ ID NO: 374517 - DNA, 33 bp, Homo sapien
ccaccagtaagtactacgacctctgcccatcca

SEQ ID NO: 374518 - DNA, 33 bp, Homo sapien
ccaccagtaagtactatgacctctgcccatcca

SEQ ID NO: 374519 - DNA, 33 bp, Homo sapien
tattctaaacactatagaacctgtcttttataa

SEQ ID NO: 374520 - DNA, 33 bp, Homo sapien
tattctaaacactatataacctgtcttttataa

SEQ ID NO: 374521 - DNA, 33 bp, Homo sapien
aagctagatcaaagtggatgtccatagtggggg

SEQ ID NO: 374522 - DNA, 33 bp, Homo sapien
aagctagatcaaagtgtatgtccatagtggggg

SEQ ID NO: 374523 - DNA, 33 bp, Homo sapien
cattctgtaagaaggcaattttaaacaacctat

SEQ ID NO: 374524 - DNA, 33 bp, Homo sapien
cattctgtaagaaggcgattttaaacaacctat

SEQ ID NO: 374525 - DNA, 33 bp, Homo sapien
ccattattcaggatgaacttaatgcagtcccca

SEQ ID NO: 374526 - DNA, 33 bp, Homo sapien
ccattattcaggatgagcttaatgcagtcccca

SEQ ID NO: 374527 - DNA, 33 bp, Homo sapien
aaaactacctatcgggcattatgctgagtatcg

SEQ ID NO: 374528 - DNA, 33 bp, Homo sapien
aaaactacctatcgggtattatgctgagtatcg

SEQ ID NO: 374529 - DNA, 33 bp, Homo sapien
cacacatcagatcaaacgaacaggctttagctt

SEQ ID NO: 374530 - DNA, 33 bp, Homo sapien
cacacatcagatcaaatgaacaggctttagctt

SEQ ID NO: 374531 - DNA, 33 bp, Homo sapien
ggtgaatcttaccaagaagaaacctaaggcagt

SEQ ID NO: 374532 - DNA, 33 bp, Homo sapien
ggtgaatcttaccaaggagaaacctaaggcagt

SEQ ID NO: 374533 - DNA, 33 bp, Homo sapien
gatgataatctctgccacataaacctaataggt

SEQ ID NO: 374534 - DNA, 33 bp, Homo sapien
gatgataatctctgccccataaacctaataggt

SEQ ID NO: 374535 - DNA, 33 bp, Homo sapien
tatacagaatagtctcacttctctatactttgg

SEQ ID NO: 374536 - DNA, 33 bp, Homo sapien
tatacagaatagtctcgcttctctatactttgg

SEQ ID NO: 374537 - DNA, 33 bp, Homo sapien
acaggtgagagcaagaagacagaagggacgtgt

SEQ ID NO: 374538 - DNA, 33 bp, Homo sapien
acaggtgagagcaagaggacagaagggacgtgt

SEQ ID NO: 374539 - DNA, 33 bp, Homo sapien
aatatgtctatcaggacctatttattctcatga

SEQ ID NO: 374540 - DNA, 33 bp, Homo sapien
aatatgtctatcaggatctatttattctcatga

SEQ ID NO: 374541 - DNA, 33 bp, Homo sapien
atctgccttggaaatcaagagatccatgtgaaa

SEQ ID NO: 374542 - DNA, 33 bp, Homo sapien
atctgccttggaaatccagagatccatgtgaaa

SEQ ID NO: 374543 - DNA, 33 bp, Homo sapien
tgagcaaaataaggggaaaatgagacagggcac

SEQ ID NO: 374544 - DNA, 33 bp, Homo sapien
tgagcaaaataagggggaaatgagacagggcac

SEQ ID NO: 374545 - DNA, 33 bp, Homo sapien
gaacatcatcagttcaacagtgtgtgcttgagt

SEQ ID NO: 374546 - DNA, 33 bp, Homo sapien
gaacatcatcagttcagcagtgtgtgcttgagt

SEQ ID NO: 374547 - DNA, 33 bp, Homo sapien
gtattatgtattacagcaaatgcctctgggtta

SEQ ID NO: 374548 - DNA, 33 bp, Homo sapien
gtattatgtattacagtaaatgcctctgggtta

SEQ ID NO: 374549 - DNA, 33 bp, Homo sapien
agagcctactcatgaacatgctgtgttggcttc

SEQ ID NO: 374550 - DNA, 33 bp, Homo sapien
agagcctactcatgaatatgctgtgttggcttc

SEQ ID NO: 374551 - DNA, 33 bp, Homo sapien
aaatccctgtactctccatatttgccatgtcaa

SEQ ID NO: 374552 - DNA, 33 bp, Homo sapien
aaatccctgtactctctatatttgccatgtcaa

SEQ ID NO: 374553 - DNA, 33 bp, Homo sapien
ttaatgtgagcaaaagacttgtgattattggaa

SEQ ID NO: 374554 - DNA, 33 bp, Homo sapien
ttaatgtgagcaaaaggcttgtgattattggaa

SEQ ID NO: 374555 - DNA, 33 bp, Homo sapien
tccagaggcatctccgaaagagttctttcctgc

SEQ ID NO: 374556 - DNA, 33 bp, Homo sapien
tccagaggcatctccgcaagagttctttcctgc

SEQ ID NO: 374557 - DNA, 33 bp, Homo sapien
aacagcagaaataccacgtagcccttctctccc

SEQ ID NO: 374558 - DNA, 33 bp, Homo sapien
aacagcagaaataccatgtagcccttctctccc

SEQ ID NO: 374559 - DNA, 33 bp, Homo sapien
tactaaagagcttctaacaacctgcccttttat

SEQ ID NO: 374560 - DNA, 33 bp, Homo sapien
tactaaagagcttctagcaacctgcccttttat

SEQ ID NO: 374561 - DNA, 33 bp, Homo sapien
tagcctctcagccttaagtttcccagttatgaa

SEQ ID NO: 374562 - DNA, 33 bp, Homo sapien
tagcctctcagccttaggtttcccagttatgaa

SEQ ID NO: 374563 - DNA, 33 bp, Homo sapien
taaatatccatcagcaaagaaatgaataaagaa

SEQ ID NO: 374564 - DNA, 33 bp, Homo sapien
taaatatccatcagcagagaaatgaataaagaa

SEQ ID NO: 374565 - DNA, 33 bp, Homo sapien
cagatgagtttgggtaaacaaaatagggtgaaa

SEQ ID NO: 374566 - DNA, 33 bp, Homo sapien
cagatgagtttgggtatacaaaatagggtgaaa

SEQ ID NO: 374567 - DNA, 33 bp, Homo sapien
agattaacacaatataaacaaacttgtgagtaa

SEQ ID NO: 374568 - DNA, 33 bp, Homo sapien
agattaacacaatatagacaaacttgtgagtaa

SEQ ID NO: 374569 - DNA, 33 bp, Homo sapien
gcctatgcttccttccgccaccggcagggagcc

SEQ ID NO: 374570 - DNA, 33 bp, Homo sapien
gcctatgcttccttcctccaccggcagggagcc

SEQ ID NO: 374571 - DNA, 33 bp, Homo sapien
attgggacagattcccaccgcaggctcagccca

SEQ ID NO: 374572 - DNA, 33 bp, Homo sapien
attgggacagattcccgccgcaggctcagccca

SEQ ID NO: 374573 - DNA, 33 bp, Homo sapien
gcaatggcgatccttcaaagactctacataccc

SEQ ID NO: 374574 - DNA, 33 bp, Homo sapien
gcaatggcgatccttcgaagactctacataccc

SEQ ID NO: 374575 - DNA, 33 bp, Homo sapien
gctctctccaagctcaacttctctcagaccagc

SEQ ID NO: 374576 - DNA, 33 bp, Homo sapien
gctctctccaagctcatcttctctcagaccagc

SEQ ID NO: 374577 - DNA, 33 bp, Homo sapien
gcagcatagtaaacaaatggaggactgtggcac

SEQ ID NO: 374578 - DNA, 33 bp, Homo sapien
gcagcatagtaaacaagtggaggactgtggcac

SEQ ID NO: 374579 - DNA, 33 bp, Homo sapien
atctccacattgcctaaaatttcctattaaagt

SEQ ID NO: 374580 - DNA, 33 bp, Homo sapien
atctccacattgcctataatttcctattaaagt

SEQ ID NO: 374581 - DNA, 33 bp, Homo sapien
tgcttacgcaattttcccttttccctcaatttt

SEQ ID NO: 374582 - DNA, 33 bp, Homo sapien
tgcttacgcaattttctcttttccctcaatttt

SEQ ID NO: 374583 - DNA, 33 bp, Homo sapien
taaacactacctataggccatgatgaggaattt

SEQ ID NO: 374584 - DNA, 33 bp, Homo sapien
taaacactacctatagtccatgatgaggaattt

SEQ ID NO: 374585 - DNA, 33 bp, Homo sapien
ttctcattctaaatacccagccctgtttagact

SEQ ID NO: 374586 - DNA, 33 bp, Homo sapien
ttctcattctaaatactcagccctgtttagact

SEQ ID NO: 374587 - DNA, 33 bp, Homo sapien
tggagcccaggccttaaatgccatcaaactcct

SEQ ID NO: 374588 - DNA, 33 bp, Homo sapien
tggagcccaggccttacatgccatcaaactcct

SEQ ID NO: 374589 - DNA, 33 bp, Homo sapien
gtgttatttgcatgcacgtggatgagattcaga

SEQ ID NO: 374590 - DNA, 33 bp, Homo sapien
gtgttatttgcatgcatgtggatgagattcaga

SEQ ID NO: 374591 - DNA, 33 bp, Homo sapien
tcacccagtacacataaaacaactccaccacta

SEQ ID NO: 374592 - DNA, 33 bp, Homo sapien
tcacccagtacacatagaacaactccaccacta

SEQ ID NO: 374593 - DNA, 33 bp, Homo sapien
atgttttaggaaatgaactcaaaaggaagagat

SEQ ID NO: 374594 - DNA, 33 bp, Homo sapien
atgttttaggaaatgacctcaaaaggaagagat

SEQ ID NO: 374595 - DNA, 33 bp, Homo sapien
gctgtgcagctacagaagagcagatcctgaatt

SEQ ID NO: 374596 - DNA, 33 bp, Homo sapien
gctgtgcagctacagatgagcagatcctgaatt

SEQ ID NO: 374597 - DNA, 33 bp, Homo sapien
ccttctagaggcaagaaaaagtctcctggtcca

SEQ ID NO: 374598 - DNA, 33 bp, Homo sapien
ccttctagaggcaagataaagtctcctggtcca

SEQ ID NO: 374599 - DNA, 33 bp, Homo sapien
ttgagagtcacaccgacgagatgctctggcagg

SEQ ID NO: 374600 - DNA, 33 bp, Homo sapien
ttgagagtcacaccgatgagatgctctggcagg

SEQ ID NO: 374601 - DNA, 33 bp, Homo sapien
tggatagctgtatacacggggtaactatttatt

SEQ ID NO: 374602 - DNA, 33 bp, Homo sapien
tggatagctgtatacatggggtaactatttatt

SEQ ID NO: 374603 - DNA, 33 bp, Homo sapien
taagtgctgccctcaaatgttctacagggcatc

SEQ ID NO: 374604 - DNA, 33 bp, Homo sapien
taagtgctgccctcaagtgttctacagggcatc

SEQ ID NO: 374605 - DNA, 33 bp, Homo sapien
aaaaagatttatgaaacctagtcagttcaagcc

SEQ ID NO: 374606 - DNA, 33 bp, Homo sapien
aaaaagatttatgaaagctagtcagttcaagcc

SEQ ID NO: 374607 - DNA, 33 bp, Homo sapien
tcaggttgtgaaagagcctcgatctggagccag

SEQ ID NO: 374608 - DNA, 33 bp, Homo sapien
tcaggttgtgaaagaggctcgatctggagccag

SEQ ID NO: 374609 - DNA, 33 bp, Homo sapien
aatatgatgagttttacgggttctggtacgact

SEQ ID NO: 374610 - DNA, 33 bp, Homo sapien
aatatgatgagttttatgggttctggtacgact

SEQ ID NO: 374611 - DNA, 33 bp, Homo sapien
gagacttaatccaatcactttgatggtcagtgg

SEQ ID NO: 374612 - DNA, 33 bp, Homo sapien
gagacttaatccaatcgctttgatggtcagtgg

SEQ ID NO: 374613 - DNA, 33 bp, Homo sapien
gggctatgcacagtccaatgccaacccagactt

SEQ ID NO: 374614 - DNA, 33 bp, Homo sapien
gggctatgcacagtccgatgccaacccagactt

SEQ ID NO: 374615 - DNA, 33 bp, Homo sapien
gcaacaaagaggccaaaagaaaaatctcagtgc

SEQ ID NO: 374616 - DNA, 33 bp, Homo sapien
gcaacaaagaggccaagagaaaaatctcagtgc

SEQ ID NO: 374617 - DNA, 33 bp, Homo sapien
ctcctcatctgtgccccgaagaaatctcagcta

SEQ ID NO: 374618 - DNA, 33 bp, Homo sapien
ctcctcatctgtgccctgaagaaatctcagcta

SEQ ID NO: 374619 - DNA, 33 bp, Homo sapien
ttttccatgttaggataaagacatcaacttcat

SEQ ID NO: 374620 - DNA, 33 bp, Homo sapien
ttttccatgttaggatgaagacatcaacttcat

SEQ ID NO: 374621 - DNA, 33 bp, Homo sapien
gtggtccatgatcaacaacctacgacctcccag

SEQ ID NO: 374622 - DNA, 33 bp, Homo sapien
gtggtccatgatcaaccacctacgacctcccag

SEQ ID NO: 374623 - DNA, 33 bp, Homo sapien
ttaccagtttctcttacgatattgtccagggct

SEQ ID NO: 374624 - DNA, 33 bp, Homo sapien
ttaccagtttctcttatgatattgtccagggct

SEQ ID NO: 374625 - DNA, 33 bp, Homo sapien
cctcgcctacgtaggagaaggtttgccccaggc

SEQ ID NO: 374626 - DNA, 33 bp, Homo sapien
cctcgcctacgtaggataaggtttgccccaggc

SEQ ID NO: 374627 - DNA, 33 bp, Homo sapien
cagggattttcaccaaagtcacgaggaaggcat

SEQ ID NO: 374628 - DNA, 33 bp, Homo sapien
cagggattttcaccaaggtcacgaggaaggcat

SEQ ID NO: 374629 - DNA, 33 bp, Homo sapien
aaaatacttcagtgtacatccttctacgtgtac

SEQ ID NO: 374630 - DNA, 33 bp, Homo sapien
aaaatacttcagtgtatatccttctacgtgtac

SEQ ID NO: 374631 - DNA, 33 bp, Homo sapien
aggatggctgacaacaagctgctcttaccactc

SEQ ID NO: 374632 - DNA, 33 bp, Homo sapien
aggatggctgacaacaggctgctcttaccactc

SEQ ID NO: 374633 - DNA, 33 bp, Homo sapien
ttattctgtgaactcaccttatctggttctttc

SEQ ID NO: 374634 - DNA, 33 bp, Homo sapien
ttattctgtgaactcagcttatctggttctttc

SEQ ID NO: 374635 - DNA, 33 bp, Homo sapien
aaaaccaagaggaggacgctatgtaaaacatag

SEQ ID NO: 374636 - DNA, 33 bp, Homo sapien
aaaaccaagaggaggatgctatgtaaaacatag

SEQ ID NO: 374637 - DNA, 33 bp, Homo sapien
aggttggcttaggggacgcactttccaacatgc

SEQ ID NO: 374638 - DNA, 33 bp, Homo sapien
aggttggcttaggggatgcactttccaacatgc

SEQ ID NO: 374639 - DNA, 33 bp, Homo sapien
tagggaagcatggcccagaataggcagtcccag

SEQ ID NO: 374640 - DNA, 33 bp, Homo sapien
tagggaagcatggcccggaataggcagtcccag

SEQ ID NO: 374641 - DNA, 33 bp, Homo sapien
gcttaccattttaagaccttgtttgagccaata

SEQ ID NO: 374642 - DNA, 33 bp, Homo sapien
gcttaccattttaagatcttgtttgagccaata

SEQ ID NO: 374643 - DNA, 33 bp, Homo sapien
aagccacacagtcacgaaagacttcacatttaa

SEQ ID NO: 374644 - DNA, 33 bp, Homo sapien
aagccacacagtcacggaagacttcacatttaa

SEQ ID NO: 374645 - DNA, 33 bp, Homo sapien
tatgtggagaatggaacgtaaggatttaagatc

SEQ ID NO: 374646 - DNA, 33 bp, Homo sapien
tatgtggagaatggaatgtaaggatttaagatc

SEQ ID NO: 374647 - DNA, 33 bp, Homo sapien
tgcaagtgatagcaccagagaggcggaaccgag

SEQ ID NO: 374648 - DNA, 33 bp, Homo sapien
tgcaagtgatagcaccggagaggcggaaccgag

SEQ ID NO: 374649 - DNA, 33 bp, Homo sapien
cggcactatgaggaaacgaagccatgtaccctg

SEQ ID NO: 374650 - DNA, 33 bp, Homo sapien
cggcactatgaggaaatgaagccatgtaccctg

SEQ ID NO: 374651 - DNA, 33 bp, Homo sapien
ttaattatttgggctacgtcattgctaaaaggt

SEQ ID NO: 374652 - DNA, 33 bp, Homo sapien
ttaattatttgggctatgtcattgctaaaaggt

SEQ ID NO: 374653 - DNA, 33 bp, Homo sapien
cataatatatctggtaaactatgctaaaaaaat

SEQ ID NO: 374654 - DNA, 33 bp, Homo sapien
cataatatatctggtacactatgctaaaaaaat

SEQ ID NO: 374655 - DNA, 33 bp, Homo sapien
cagtttagagaagagtaaaatcataactgactg

SEQ ID NO: 374656 - DNA, 33 bp, Homo sapien
cagtttagagaagagtgaaatcataactgactg

SEQ ID NO: 374657 - DNA, 33 bp, Homo sapien
gcctgcagaactctgacccaaacaaatctcttt

SEQ ID NO: 374658 - DNA, 33 bp, Homo sapien
gcctgcagaactctgatccaaacaaatctcttt

SEQ ID NO: 374659 - DNA, 33 bp, Homo sapien
cccaaactgaaattgacgagtcctgacaaagcc

SEQ ID NO: 374660 - DNA, 33 bp, Homo sapien
cccaaactgaaattgatgagtcctgacaaagcc

SEQ ID NO: 374661 - DNA, 33 bp, Homo sapien
acaacctcaatttaaaatgcatcaaaagccagg

SEQ ID NO: 374662 - DNA, 33 bp, Homo sapien
acaacctcaatttaaagtgcatcaaaagccagg

SEQ ID NO: 374663 - DNA, 33 bp, Homo sapien
atgagacacagaacctaagctgtcaaattgctg

SEQ ID NO: 374664 - DNA, 33 bp, Homo sapien
atgagacacagaacctgagctgtcaaattgctg

SEQ ID NO: 374665 - DNA, 33 bp, Homo sapien
ggggacataagcatgaatacctcctggcactga

SEQ ID NO: 374666 - DNA, 33 bp, Homo sapien
ggggacataagcatgactacctcctggcactga

SEQ ID NO: 374667 - DNA, 33 bp, Homo sapien
gagggaaaatgttttaaatctagtcttgtatac

SEQ ID NO: 374668 - DNA, 33 bp, Homo sapien
gagggaaaatgttttacatctagtcttgtatac

SEQ ID NO: 374669 - DNA, 33 bp, Homo sapien
tcacacttgattgatactaaggccatgtataca

SEQ ID NO: 374670 - DNA, 33 bp, Homo sapien
tcacacttgattgatattaaggccatgtataca

SEQ ID NO: 374671 - DNA, 33 bp, Homo sapien
caaatgctgttttagcccatattcagtgtaaat

SEQ ID NO: 374672 - DNA, 33 bp, Homo sapien
caaatgctgttttagctcatattcagtgtaaat

SEQ ID NO: 374673 - DNA, 33 bp, Homo sapien
cctctgttatttctaaatatgccactgagaact

SEQ ID NO: 374674 - DNA, 33 bp, Homo sapien
cctctgttatttctaagtatgccactgagaact

SEQ ID NO: 374675 - DNA, 33 bp, Homo sapien
ccttgaactccgaaagaacagggctacactcac

SEQ ID NO: 374676 - DNA, 33 bp, Homo sapien
ccttgaactccgaaaggacagggctacactcac

SEQ ID NO: 374677 - DNA, 33 bp, Homo sapien
agagagtaaaaaggaaagctattggaatgggaa

SEQ ID NO: 374678 - DNA, 33 bp, Homo sapien
agagagtaaaaaggaaggctattggaatgggaa

SEQ ID NO: 374679 - DNA, 33 bp, Homo sapien
gactcaggtaattcacacaacttggcctcccaa

SEQ ID NO: 374680 - DNA, 33 bp, Homo sapien
gactcaggtaattcacgcaacttggcctcccaa

SEQ ID NO: 374681 - DNA, 33 bp, Homo sapien
aatgggcaatgtttgacgagcctactgccaagt

SEQ ID NO: 374682 - DNA, 33 bp, Homo sapien
aatgggcaatgtttgatgagcctactgccaagt

SEQ ID NO: 374683 - DNA, 33 bp, Homo sapien
aacattgcccatttcccattctttttctctcct

SEQ ID NO: 374684 - DNA, 33 bp, Homo sapien
aacattgcccatttcctattctttttctctcct

SEQ ID NO: 374685 - DNA, 33 bp, Homo sapien
tttctgttccaatgtaaaatccagggtatcaca

SEQ ID NO: 374686 - DNA, 33 bp, Homo sapien
tttctgttccaatgtagaatccagggtatcaca

SEQ ID NO: 374687 - DNA, 33 bp, Homo sapien
gagaaacaggtttggcaaagaagatcaagagtc

SEQ ID NO: 374688 - DNA, 33 bp, Homo sapien
gagaaacaggtttggcgaagaagatcaagagtc

SEQ ID NO: 374689 - DNA, 33 bp, Homo sapien
gatgcaccagtaataactgtaatacttcattgt

SEQ ID NO: 374690 - DNA, 33 bp, Homo sapien
gatgcaccagtaataattgtaatacttcattgt

SEQ ID NO: 374691 - DNA, 33 bp, Homo sapien
tttggtcatatgctaacagttttacttctaatt

SEQ ID NO: 374692 - DNA, 33 bp, Homo sapien
tttggtcatatgctaagagttttacttctaatt

SEQ ID NO: 374693 - DNA, 33 bp, Homo sapien
tttgagttcattgtccgcaggaaaggcttccac

SEQ ID NO: 374694 - DNA, 33 bp, Homo sapien
tttgagttcattgtcctcaggaaaggcttccac

SEQ ID NO: 374695 - DNA, 33 bp, Homo sapien
ctggccacagctgccagacagtttctagcatct

SEQ ID NO: 374696 - DNA, 33 bp, Homo sapien
ctggccacagctgccatacagtttctagcatct

SEQ ID NO: 374697 - DNA, 33 bp, Homo sapien
gagacacggggatttcacaaaggtcaaacagca

SEQ ID NO: 374698 - DNA, 33 bp, Homo sapien
gagacacggggatttcgcaaaggtcaaacagca

SEQ ID NO: 374699 - DNA, 33 bp, Homo sapien
tcctcagcaacatctgaatccaatttagctgtg

SEQ ID NO: 374700 - DNA, 33 bp, Homo sapien
tcctcagcaacatctggatccaatttagctgtg

SEQ ID NO: 374701 - DNA, 33 bp, Homo sapien
ccctctacatttggagaccaagactcctctctc

SEQ ID NO: 374702 - DNA, 33 bp, Homo sapien
ccctctacatttggagcccaagactcctctctc

SEQ ID NO: 374703 - DNA, 33 bp, Homo sapien
gagaggctttggcttaagaggtggggagaggat

SEQ ID NO: 374704 - DNA, 33 bp, Homo sapien
gagaggctttggcttatgaggtggggagaggat

SEQ ID NO: 374705 - DNA, 33 bp, Homo sapien
catgtcaacctcaacaaccctgtggcagcccta

SEQ ID NO: 374706 - DNA, 33 bp, Homo sapien
catgtcaacctcaacacccctgtggcagcccta

SEQ ID NO: 374707 - DNA, 33 bp, Homo sapien
gtctcctctgctgcccaacaaggggttgatcct

SEQ ID NO: 374708 - DNA, 33 bp, Homo sapien
gtctcctctgctgcccgacaaggggttgatcct

SEQ ID NO: 374709 - DNA, 33 bp, Homo sapien
ggacttaattcccaaacgccatgcttttctacc

SEQ ID NO: 374710 - DNA, 33 bp, Homo sapien
ggacttaattcccaaatgccatgcttttctacc

SEQ ID NO: 374711 - DNA, 33 bp, Homo sapien
cctgtgtctagaaataacttcatagaagaagac

SEQ ID NO: 374712 - DNA, 33 bp, Homo sapien
cctgtgtctagaaatagcttcatagaagaagac

SEQ ID NO: 374713 - DNA, 33 bp, Homo sapien
gttctcctcaaaaggacgctaaatagagatata

SEQ ID NO: 374714 - DNA, 33 bp, Homo sapien
gttctcctcaaaaggatgctaaatagagatata

SEQ ID NO: 374715 - DNA, 33 bp, Homo sapien
atgcccgaagggactcgcatctgcttgagctac

SEQ ID NO: 374716 - DNA, 33 bp, Homo sapien
atgcccgaagggactctcatctgcttgagctac

SEQ ID NO: 374717 - DNA, 33 bp, Homo sapien
atgcttatactgacaactgagcaacatccaact

SEQ ID NO: 374718 - DNA, 33 bp, Homo sapien
atgcttatactgacaattgagcaacatccaact

SEQ ID NO: 374719 - DNA, 33 bp, Homo sapien
caatttacaaagcctacgtgagaaataattatt

SEQ ID NO: 374720 - DNA, 33 bp, Homo sapien
caatttacaaagcctatgtgagaaataattatt

SEQ ID NO: 374721 - DNA, 33 bp, Homo sapien
tctcataacaacctcaagagcccataaaatggt

SEQ ID NO: 374722 - DNA, 33 bp, Homo sapien
tctcataacaacctcatgagcccataaaatggt

SEQ ID NO: 374723 - DNA, 33 bp, Homo sapien
gcgtacttccctttaaaaatctggactggtctt

SEQ ID NO: 374724 - DNA, 33 bp, Homo sapien
gcgtacttccctttaagaatctggactggtctt

SEQ ID NO: 374725 - DNA, 33 bp, Homo sapien
ctcattatggatgcaacgagaccacagaggaca

SEQ ID NO: 374726 - DNA, 33 bp, Homo sapien
ctcattatggatgcaaggagaccacagaggaca

SEQ ID NO: 374727 - DNA, 33 bp, Homo sapien
agactccatctcaacaagtgcttctgtgaccca

SEQ ID NO: 374728 - DNA, 33 bp, Homo sapien
agactccatctcaacacgtgcttctgtgaccca

SEQ ID NO: 374729 - DNA, 33 bp, Homo sapien
agtaagatgttctgcaagcctgaggaatgttgt

SEQ ID NO: 374730 - DNA, 33 bp, Homo sapien
agtaagatgttctgcaggcctgaggaatgttgt

SEQ ID NO: 374731 - DNA, 33 bp, Homo sapien
tggggcagaaacacagcagtctatgtggtcttg

SEQ ID NO: 374732 - DNA, 33 bp, Homo sapien
tggggcagaaacacaggagtctatgtggtcttg

SEQ ID NO: 374733 - DNA, 33 bp, Homo sapien
caaatgcggaattcataaatatagagagggcct

SEQ ID NO: 374734 - DNA, 33 bp, Homo sapien
caaatgcggaattcatgaatatagagagggcct

SEQ ID NO: 374735 - DNA, 33 bp, Homo sapien
atagattgaattgcacagtccttcacattacag

SEQ ID NO: 374736 - DNA, 33 bp, Homo sapien
atagattgaattgcaccgtccttcacattacag

SEQ ID NO: 374737 - DNA, 33 bp, Homo sapien
tctataataataaaggcatcaattcagctagag

SEQ ID NO: 374738 - DNA, 33 bp, Homo sapien
tctataataataaagggatcaattcagctagag

SEQ ID NO: 374739 - DNA, 33 bp, Homo sapien
ttatagagaaatttcacgtaagagtggaattgc

SEQ ID NO: 374740 - DNA, 33 bp, Homo sapien
ttatagagaaatttcatgtaagagtggaattgc

SEQ ID NO: 374741 - DNA, 33 bp, Homo sapien
tgcccacgaaaagtgaactaaagcagggcaagg

SEQ ID NO: 374742 - DNA, 33 bp, Homo sapien
tgcccacgaaaagtgagctaaagcagggcaagg

SEQ ID NO: 374743 - DNA, 33 bp, Homo sapien
gggctaaggatcctgacgaaactggtcctagtg

SEQ ID NO: 374744 - DNA, 33 bp, Homo sapien
gggctaaggatcctgatgaaactggtcctagtg

SEQ ID NO: 374745 - DNA, 33 bp, Homo sapien
tggcctttctcagactcaaataaagggcaaagg

SEQ ID NO: 374746 - DNA, 33 bp, Homo sapien
tggcctttctcagactgaaataaagggcaaagg

SEQ ID NO: 374747 - DNA, 33 bp, Homo sapien
tgcaggtctttcccaactccagatttctaaagc

SEQ ID NO: 374748 - DNA, 33 bp, Homo sapien
tgcaggtctttcccaattccagatttctaaagc

SEQ ID NO: 374749 - DNA, 33 bp, Homo sapien
ctttccctgtcatcctcaactctcatcctaaac

SEQ ID NO: 374750 - DNA, 33 bp, Homo sapien
ctttccctgtcatcctgaactctcatcctaaac

SEQ ID NO: 374751 - DNA, 33 bp, Homo sapien
tggttttatttagagcgactgcaagcctcaggt

SEQ ID NO: 374752 - DNA, 33 bp, Homo sapien
tggttttatttagagctactgcaagcctcaggt

SEQ ID NO: 374753 - DNA, 33 bp, Homo sapien
aataaacaaaggtctcgcccaagcttctccttt

SEQ ID NO: 374754 - DNA, 33 bp, Homo sapien
aataaacaaaggtctctcccaagcttctccttt

SEQ ID NO: 374755 - DNA, 33 bp, Homo sapien
gtgtgtagggccctgaacctgccttaggaacca

SEQ ID NO: 374756 - DNA, 33 bp, Homo sapien
gtgtgtagggccctgagcctgccttaggaacca

SEQ ID NO: 374757 - DNA, 33 bp, Homo sapien
gaatgaatatgctgaaacttctctgttgctgaa

SEQ ID NO: 374758 - DNA, 33 bp, Homo sapien
gaatgaatatgctgaaccttctctgttgctgaa

SEQ ID NO: 374759 - DNA, 33 bp, Homo sapien
tccctcatgtggagtacactcaggtagacttcc

SEQ ID NO: 374760 - DNA, 33 bp, Homo sapien
tccctcatgtggagtagactcaggtagacttcc

SEQ ID NO: 374761 - DNA, 33 bp, Homo sapien
atataattatgctaccaggattttttttccagc

SEQ ID NO: 374762 - DNA, 33 bp, Homo sapien
atataattatgctaccgggattttttttccagc

SEQ ID NO: 374763 - DNA, 33 bp, Homo sapien
actcattccccaggataaactaagaggtgacag

SEQ ID NO: 374764 - DNA, 33 bp, Homo sapien
actcattccccaggatcaactaagaggtgacag

SEQ ID NO: 374765 - DNA, 33 bp, Homo sapien
tgccagccagagactaaagagtgggagctcagg

SEQ ID NO: 374766 - DNA, 33 bp, Homo sapien
tgccagccagagactatagagtgggagctcagg

SEQ ID NO: 374767 - DNA, 33 bp, Homo sapien
ttctggggagaggggacgctgacagcctattgc

SEQ ID NO: 374768 - DNA, 33 bp, Homo sapien
ttctggggagaggggatgctgacagcctattgc

SEQ ID NO: 374769 - DNA, 33 bp, Homo sapien
tgtagcctttcacagaagaattacacaagaact

SEQ ID NO: 374770 - DNA, 33 bp, Homo sapien
tgtagcctttcacagaggaattacacaagaact

SEQ ID NO: 374771 - DNA, 33 bp, Homo sapien
gccagccagagttttaagaaatagtaattatta

SEQ ID NO: 374772 - DNA, 33 bp, Homo sapien
gccagccagagttttatgaaatagtaattatta

SEQ ID NO: 374773 - DNA, 33 bp, Homo sapien
tgtcccctgaaaacagaccttgattaaaacaag

SEQ ID NO: 374774 - DNA, 33 bp, Homo sapien
tgtcccctgaaaacaggccttgattaaaacaag

SEQ ID NO: 374775 - DNA, 33 bp, Homo sapien
ctattttctgggttgaacagttgcttattattg

SEQ ID NO: 374776 - DNA, 33 bp, Homo sapien
ctattttctgggttgagcagttgcttattattg

SEQ ID NO: 374777 - DNA, 33 bp, Homo sapien
tggcaatgacaagagaaattagttcacagcctt

SEQ ID NO: 374778 - DNA, 33 bp, Homo sapien
tggcaatgacaagagatattagttcacagcctt

SEQ ID NO: 374779 - DNA, 33 bp, Homo sapien
cttatgtggggttccaatgctaattttttcatg

SEQ ID NO: 374780 - DNA, 33 bp, Homo sapien
cttatgtggggttccagtgctaattttttcatg

SEQ ID NO: 374781 - DNA, 33 bp, Homo sapien
accaatattgaggacaaggagagcaacgtaatg

SEQ ID NO: 374782 - DNA, 33 bp, Homo sapien
accaatattgaggacatggagagcaacgtaatg

SEQ ID NO: 374783 - DNA, 33 bp, Homo sapien
aaaatcagttgagttaataaatggagggaaaac

SEQ ID NO: 374784 - DNA, 33 bp, Homo sapien
aaaatcagttgagttagtaaatggagggaaaac

SEQ ID NO: 374785 - DNA, 33 bp, Homo sapien
aaatccacagatgatacagagctgtaaggcaga

SEQ ID NO: 374786 - DNA, 33 bp, Homo sapien
aaatccacagatgatagagagctgtaaggcaga

SEQ ID NO: 374787 - DNA, 33 bp, Homo sapien
ccttccaaatgcaggacgtttttccagagcatt

SEQ ID NO: 374788 - DNA, 33 bp, Homo sapien
ccttccaaatgcaggatgtttttccagagcatt

SEQ ID NO: 374789 - DNA, 33 bp, Homo sapien
aggcagccagcgccaaaacctcctaacaatctc

SEQ ID NO: 374790 - DNA, 33 bp, Homo sapien
aggcagccagcgccaacacctcctaacaatctc

SEQ ID NO: 374791 - DNA, 33 bp, Homo sapien
ggtttctcttacaaaaacagaagatctaaccat

SEQ ID NO: 374792 - DNA, 33 bp, Homo sapien
ggtttctcttacaaaaccagaagatctaaccat

SEQ ID NO: 374793 - DNA, 33 bp, Homo sapien
tgccagactaagtcaaacaatgaagacctgtgg

SEQ ID NO: 374794 - DNA, 33 bp, Homo sapien
tgccagactaagtcaagcaatgaagacctgtgg

SEQ ID NO: 374795 - DNA, 33 bp, Homo sapien
ccacaatgcaatcaaccaacagaagggcgttgc

SEQ ID NO: 374796 - DNA, 33 bp, Homo sapien
ccacaatgcaatcaacgaacagaagggcgttgc

SEQ ID NO: 374797 - DNA, 33 bp, Homo sapien
gtatattgtccagggccatatagccagtcagta

SEQ ID NO: 374798 - DNA, 33 bp, Homo sapien
gtatattgtccagggcgatatagccagtcagta

SEQ ID NO: 374799 - DNA, 33 bp, Homo sapien
ctttgtaggctgtggcaaaggttgaatatttag

SEQ ID NO: 374800 - DNA, 33 bp, Homo sapien
ctttgtaggctgtggcgaaggttgaatatttag

SEQ ID NO: 374801 - DNA, 33 bp, Homo sapien
ctagaaaagaaggagaaatccataggccaagat

SEQ ID NO: 374802 - DNA, 33 bp, Homo sapien
ctagaaaagaaggagacatccataggccaagat

SEQ ID NO: 374803 - DNA, 33 bp, Homo sapien
gagcttttggaaggtggaattttctgttccagg

SEQ ID NO: 374804 - DNA, 33 bp, Homo sapien
gagcttttggaaggtgtaattttctgttccagg

SEQ ID NO: 374805 - DNA, 33 bp, Homo sapien
ggcatggaacatttgacaaaaatacagtgagag

SEQ ID NO: 374806 - DNA, 33 bp, Homo sapien
ggcatggaacatttgataaaaatacagtgagag

SEQ ID NO: 374807 - DNA, 33 bp, Homo sapien
gcttaaaataaatggacgagaatggtaagttgc

SEQ ID NO: 374808 - DNA, 33 bp, Homo sapien
gcttaaaataaatggatgagaatggtaagttgc

SEQ ID NO: 374809 - DNA, 33 bp, Homo sapien
atgtcagcatgaaaacccaagaagatagattta

SEQ ID NO: 374810 - DNA, 33 bp, Homo sapien
atgtcagcatgaaaactcaagaagatagattta

SEQ ID NO: 374811 - DNA, 33 bp, Homo sapien
aaccaatgcacagaaggagggtgtggagaaagc

SEQ ID NO: 374812 - DNA, 33 bp, Homo sapien
aaccaatgcacagaagtagggtgtggagaaagc

SEQ ID NO: 374813 - DNA, 33 bp, Homo sapien
gtgtcattccccaaagccactcgaacctgaagg

SEQ ID NO: 374814 - DNA, 33 bp, Homo sapien
gtgtcattccccaaaggcactcgaacctgaagg

SEQ ID NO: 374815 - DNA, 33 bp, Homo sapien
ggataagtaggaccagccatataaaaagctgga

SEQ ID NO: 374816 - DNA, 33 bp, Homo sapien
ggataagtaggaccagtcatataaaaagctgga

SEQ ID NO: 374817 - DNA, 33 bp, Homo sapien
caaacaactcagacaacgcaagagattggggga

SEQ ID NO: 374818 - DNA, 33 bp, Homo sapien
caaacaactcagacaatgcaagagattggggga

SEQ ID NO: 374819 - DNA, 33 bp, Homo sapien
tctgacaggatgtggagctcaggcagtaatcgg

SEQ ID NO: 374820 - DNA, 33 bp, Homo sapien
tctgacaggatgtggatctcaggcagtaatcgg

SEQ ID NO: 374821 - DNA, 33 bp, Homo sapien
gtctcttaagaaattaagtataaacaccaggca

SEQ ID NO: 374822 - DNA, 33 bp, Homo sapien
gtctcttaagaaattaggtataaacaccaggca

SEQ ID NO: 374823 - DNA, 33 bp, Homo sapien
actagctgtgtaactcacctcacttgtaaaatg

SEQ ID NO: 374824 - DNA, 33 bp, Homo sapien
actagctgtgtaactcgcctcacttgtaaaatg

SEQ ID NO: 374825 - DNA, 33 bp, Homo sapien
gactatggtcagccacagtatcctctccctatc

SEQ ID NO: 374826 - DNA, 33 bp, Homo sapien
gactatggtcagccactgtatcctctccctatc

SEQ ID NO: 374827 - DNA, 33 bp, Homo sapien
ttctagatgtggaatccgagacctaagcttgga

SEQ ID NO: 374828 - DNA, 33 bp, Homo sapien
ttctagatgtggaatctgagacctaagcttgga

SEQ ID NO: 374829 - DNA, 33 bp, Homo sapien
agggggaagcgttggactatcctttctaaagtt

SEQ ID NO: 374830 - DNA, 33 bp, Homo sapien
agggggaagcgttggagtatcctttctaaagtt

SEQ ID NO: 374831 - DNA, 33 bp, Homo sapien
ccttattctctagtacagcctgggtagggggta

SEQ ID NO: 374832 - DNA, 33 bp, Homo sapien
ccttattctctagtacggcctgggtagggggta

SEQ ID NO: 374833 - DNA, 33 bp, Homo sapien
gaggggagcattgctgaagagttgtccttgaag

SEQ ID NO: 374834 - DNA, 33 bp, Homo sapien
gaggggagcattgctggagagttgtccttgaag

SEQ ID NO: 374835 - DNA, 33 bp, Homo sapien
ggttactgctagcaaaccatagcctactctttc

SEQ ID NO: 374836 - DNA, 33 bp, Homo sapien
ggttactgctagcaaatcatagcctactctttc

SEQ ID NO: 374837 - DNA, 33 bp, Homo sapien
cctctgaccaataaaacgcattcaataaataat

SEQ ID NO: 374838 - DNA, 33 bp, Homo sapien
cctctgaccaataaaaggcattcaataaataat

SEQ ID NO: 374839 - DNA, 33 bp, Homo sapien
gactgtactgtgccaaaagctcccacgacaaaa

SEQ ID NO: 374840 - DNA, 33 bp, Homo sapien
gactgtactgtgccaacagctcccacgacaaaa

SEQ ID NO: 374841 - DNA, 33 bp, Homo sapien
ccacgccatgaaatacagtagccactaaccaca

SEQ ID NO: 374842 - DNA, 33 bp, Homo sapien
ccacgccatgaaatacggtagccactaaccaca

SEQ ID NO: 374843 - DNA, 33 bp, Homo sapien
agaacaggtggagaagccatactgagaggagag

SEQ ID NO: 374844 - DNA, 33 bp, Homo sapien
agaacaggtggagaaggcatactgagaggagag

SEQ ID NO: 374845 - DNA, 33 bp, Homo sapien
tatcataggtatatgccgatgattttctcgaag

SEQ ID NO: 374846 - DNA, 33 bp, Homo sapien
tatcataggtatatgctgatgattttctcgaag

SEQ ID NO: 374847 - DNA, 33 bp, Homo sapien
tagctgtgtgcaagccacttgatttctaaacct

SEQ ID NO: 374848 - DNA, 33 bp, Homo sapien
tagctgtgtgcaagccgcttgatttctaaacct

SEQ ID NO: 374849 - DNA, 33 bp, Homo sapien
tgcaaaagaagattcaacaaacaaaagtttggc

SEQ ID NO: 374850 - DNA, 33 bp, Homo sapien
tgcaaaagaagattcatcaaacaaaagtttggc

SEQ ID NO: 374851 - DNA, 33 bp, Homo sapien
tcctgttcaccagggacgggcaggaaataccac

SEQ ID NO: 374852 - DNA, 33 bp, Homo sapien
tcctgttcaccagggatgggcaggaaataccac

SEQ ID NO: 374853 - DNA, 33 bp, Homo sapien
gaagagctgctagcgacgctatcccttgtaggc

SEQ ID NO: 374854 - DNA, 33 bp, Homo sapien
gaagagctgctagcgatgctatcccttgtaggc

SEQ ID NO: 374855 - DNA, 33 bp, Homo sapien
aggtcacactctgagacactatttgctaggact

SEQ ID NO: 374856 - DNA, 33 bp, Homo sapien
aggtcacactctgagatactatttgctaggact

SEQ ID NO: 374857 - DNA, 33 bp, Homo sapien
aattaatccagacagaaaggaggctgagtattt

SEQ ID NO: 374858 - DNA, 33 bp, Homo sapien
aattaatccagacagacaggaggctgagtattt

SEQ ID NO: 374859 - DNA, 33 bp, Homo sapien
tacttggtgacgttaaatgtaaggaaaagattc

SEQ ID NO: 374860 - DNA, 33 bp, Homo sapien
tacttggtgacgttaattgtaaggaaaagattc

SEQ ID NO: 374861 - DNA, 33 bp, Homo sapien
cttcctctggtggctacggaatgaggctcagct

SEQ ID NO: 374862 - DNA, 33 bp, Homo sapien
cttcctctggtggctatggaatgaggctcagct

SEQ ID NO: 374863 - DNA, 33 bp, Homo sapien
tcatcaatcaaagtgcactgggctcacctacca

SEQ ID NO: 374864 - DNA, 33 bp, Homo sapien
tcatcaatcaaagtgccctgggctcacctacca

SEQ ID NO: 374865 - DNA, 33 bp, Homo sapien
tcccttattcaagaaacctctccacagtatccc

SEQ ID NO: 374866 - DNA, 33 bp, Homo sapien
tcccttattcaagaaatctctccacagtatccc

SEQ ID NO: 374867 - DNA, 33 bp, Homo sapien
ttcaaatgcccacaggaaccaaacagataatat

SEQ ID NO: 374868 - DNA, 33 bp, Homo sapien
ttcaaatgcccacagggaccaaacagataatat

SEQ ID NO: 374869 - DNA, 33 bp, Homo sapien
tggcaaggaaatgcttaaaaatactagctattg

SEQ ID NO: 374870 - DNA, 33 bp, Homo sapien
tggcaaggaaatgctttaaaatactagctattg

SEQ ID NO: 374871 - DNA, 33 bp, Homo sapien
acattagctttatgagacagaaacaattatcat

SEQ ID NO: 374872 - DNA, 33 bp, Homo sapien
acattagctttatgaggcagaaacaattatcat

SEQ ID NO: 374873 - DNA, 33 bp, Homo sapien
ccagcatccaagactgcatctctgttttttatg

SEQ ID NO: 374874 - DNA, 33 bp, Homo sapien
ccagcatccaagactgtatctctgttttttatg

SEQ ID NO: 374875 - DNA, 33 bp, Homo sapien
aaagaccttaatgcccactgagctagtttgaac

SEQ ID NO: 374876 - DNA, 33 bp, Homo sapien
aaagaccttaatgcccgctgagctagtttgaac

SEQ ID NO: 374877 - DNA, 33 bp, Homo sapien
agggagagggagtgacacatctgtttggtgctt

SEQ ID NO: 374878 - DNA, 33 bp, Homo sapien
agggagagggagtgactcatctgtttggtgctt

SEQ ID NO: 374879 - DNA, 33 bp, Homo sapien
acctgtgcacacttacaaagataggagttttgt

SEQ ID NO: 374880 - DNA, 33 bp, Homo sapien
acctgtgcacacttacgaagataggagttttgt

SEQ ID NO: 374881 - DNA, 33 bp, Homo sapien
tcctcatatgcctgcaactaaactcacagttct

SEQ ID NO: 374882 - DNA, 33 bp, Homo sapien
tcctcatatgcctgcagctaaactcacagttct

SEQ ID NO: 374883 - DNA, 33 bp, Homo sapien
accttcacctctataaacctagcgcggcgaccc

SEQ ID NO: 374884 - DNA, 33 bp, Homo sapien
accttcacctctataaccctagcgcggcgaccc

SEQ ID NO: 374885 - DNA, 33 bp, Homo sapien
ttcaaaatatgtaacaacctatatggcaaaagg

SEQ ID NO: 374886 - DNA, 33 bp, Homo sapien
ttcaaaatatgtaacatcctatatggcaaaagg

SEQ ID NO: 374887 - DNA, 33 bp, Homo sapien
attctcgtttgctctacgtttccagagtggaag

SEQ ID NO: 374888 - DNA, 33 bp, Homo sapien
attctcgtttgctctatgtttccagagtggaag

SEQ ID NO: 374889 - DNA, 33 bp, Homo sapien
aactattccatggctacggtggagagacgttaa

SEQ ID NO: 374890 - DNA, 33 bp, Homo sapien
aactattccatggctatggtggagagacgttaa

SEQ ID NO: 374891 - DNA, 33 bp, Homo sapien
tgtgtgccatcacacaacccatattctagtcat

SEQ ID NO: 374892 - DNA, 33 bp, Homo sapien
tgtgtgccatcacacagcccatattctagtcat

SEQ ID NO: 374893 - DNA, 33 bp, Homo sapien
agaagagaagacaggaaacaaacagcgtgcata

SEQ ID NO: 374894 - DNA, 33 bp, Homo sapien
agaagagaagacaggagacaaacagcgtgcata

SEQ ID NO: 374895 - DNA, 33 bp, Homo sapien
atttctgttgtccaaaagagaaaagaagctgga

SEQ ID NO: 374896 - DNA, 33 bp, Homo sapien
atttctgttgtccaaaggagaaaagaagctgga

SEQ ID NO: 374897 - DNA, 33 bp, Homo sapien
atgggtcatggtttgcagatccttgttcaagag

SEQ ID NO: 374898 - DNA, 33 bp, Homo sapien
atgggtcatggtttgcggatccttgttcaagag

SEQ ID NO: 374899 - DNA, 33 bp, Homo sapien
agagaccatatgggccacaaacctcaaatattt

SEQ ID NO: 374900 - DNA, 33 bp, Homo sapien
agagaccatatgggccgcaaacctcaaatattt

SEQ ID NO: 374901 - DNA, 33 bp, Homo sapien
cgctttagagtcaccaagctggttgtgtgtcta

SEQ ID NO: 374902 - DNA, 33 bp, Homo sapien
cgctttagagtcaccacgctggttgtgtgtcta

SEQ ID NO: 374903 - DNA, 33 bp, Homo sapien
agcagaaaacagcccacgtgtcattaatagtag

SEQ ID NO: 374904 - DNA, 33 bp, Homo sapien
agcagaaaacagcccaggtgtcattaatagtag

SEQ ID NO: 374905 - DNA, 33 bp, Homo sapien
aagattcttgttttagcacgtatcactcaaggg

SEQ ID NO: 374906 - DNA, 33 bp, Homo sapien
aagattcttgttttagtacgtatcactcaaggg

SEQ ID NO: 374907 - DNA, 33 bp, Homo sapien
cagatgccagagtcaagctcccagctccccaca

SEQ ID NO: 374908 - DNA, 33 bp, Homo sapien
cagatgccagagtcaatctcccagctccccaca

SEQ ID NO: 374909 - DNA, 33 bp, Homo sapien
caggtcttactgtgcccatgaatcaggcagaga

SEQ ID NO: 374910 - DNA, 33 bp, Homo sapien
caggtcttactgtgcctatgaatcaggcagaga

SEQ ID NO: 374911 - DNA, 33 bp, Homo sapien
atccaacaaagagaaagtccatctagcaggata

SEQ ID NO: 374912 - DNA, 33 bp, Homo sapien
atccaacaaagagaaattccatctagcaggata

SEQ ID NO: 374913 - DNA, 33 bp, Homo sapien
tatgttttctcattgaacctcctaacaattcca

SEQ ID NO: 374914 - DNA, 33 bp, Homo sapien
tatgttttctcattgaccctcctaacaattcca

SEQ ID NO: 374915 - DNA, 33 bp, Homo sapien
tctcaagaacagtcaacggcttctgaaactcct

SEQ ID NO: 374916 - DNA, 33 bp, Homo sapien
tctcaagaacagtcaatggcttctgaaactcct

SEQ ID NO: 374917 - DNA, 33 bp, Homo sapien
tcgctactttgacttacggaagtggtagctcat

SEQ ID NO: 374918 - DNA, 33 bp, Homo sapien
tcgctactttgacttatggaagtggtagctcat

SEQ ID NO: 374919 - DNA, 33 bp, Homo sapien
tggataacttctattcactctctggatctcagc

SEQ ID NO: 374920 - DNA, 33 bp, Homo sapien
tggataacttctattcgctctctggatctcagc

SEQ ID NO: 374921 - DNA, 33 bp, Homo sapien
tctgtaatgtacctcaaaacaagtaaatgacaa

SEQ ID NO: 374922 - DNA, 33 bp, Homo sapien
tctgtaatgtacctcacaacaagtaaatgacaa

SEQ ID NO: 374923 - DNA, 33 bp, Homo sapien
ctcttaagcaaataccaatcgctgcacaatgtg

SEQ ID NO: 374924 - DNA, 33 bp, Homo sapien
ctcttaagcaaataccgatcgctgcacaatgtg

SEQ ID NO: 374925 - DNA, 33 bp, Homo sapien
tgtgccctttactatgaaaacctatcattgtct

SEQ ID NO: 374926 - DNA, 33 bp, Homo sapien
tgtgccctttactatgcaaacctatcattgtct

SEQ ID NO: 374927 - DNA, 33 bp, Homo sapien
cagttctcaagtctcccctggtaatgtgactcc

SEQ ID NO: 374928 - DNA, 33 bp, Homo sapien
cagttctcaagtctcctctggtaatgtgactcc

SEQ ID NO: 374929 - DNA, 33 bp, Homo sapien
tattcatgggctgtcaatcaccaaggctgatct

SEQ ID NO: 374930 - DNA, 33 bp, Homo sapien
tattcatgggctgtcactcaccaaggctgatct

SEQ ID NO: 374931 - DNA, 33 bp, Homo sapien
cttgggagcattttgagaggattaagtgagagt

SEQ ID NO: 374932 - DNA, 33 bp, Homo sapien
cttgggagcattttgataggattaagtgagagt

SEQ ID NO: 374933 - DNA, 33 bp, Homo sapien
cctggacctgttttaaatctcagaatctcagct

SEQ ID NO: 374934 - DNA, 33 bp, Homo sapien
cctggacctgttttaagtctcagaatctcagct

SEQ ID NO: 374935 - DNA, 33 bp, Homo sapien
attcagatggcatccacatcttcagctcacatt

SEQ ID NO: 374936 - DNA, 33 bp, Homo sapien
attcagatggcatccatatcttcagctcacatt

SEQ ID NO: 374937 - DNA, 33 bp, Homo sapien
gaagaaagaaggcaggacatctccctccatggc

SEQ ID NO: 374938 - DNA, 33 bp, Homo sapien
gaagaaagaaggcagggcatctccctccatggc

SEQ ID NO: 374939 - DNA, 33 bp, Homo sapien
ttggtctcttccaggacgtcatgttttcctgcc

SEQ ID NO: 374940 - DNA, 33 bp, Homo sapien
ttggtctcttccaggatgtcatgttttcctgcc

SEQ ID NO: 374941 - DNA, 33 bp, Homo sapien
tttatagcttgggagcaatagactataacacat

SEQ ID NO: 374942 - DNA, 33 bp, Homo sapien
tttatagcttgggagcgatagactataacacat

SEQ ID NO: 374943 - DNA, 33 bp, Homo sapien
aaatgcttctgaagggaacaaaataccaccttt

SEQ ID NO: 374944 - DNA, 33 bp, Homo sapien
aaatgcttctgaaggggacaaaataccaccttt

SEQ ID NO: 374945 - DNA, 33 bp, Homo sapien
ttgaggaactgtcacacgttgttggagaataag

SEQ ID NO: 374946 - DNA, 33 bp, Homo sapien
ttgaggaactgtcacaggttgttggagaataag

SEQ ID NO: 374947 - DNA, 33 bp, Homo sapien
tcactccctttgaaagcctatgagatcttggtg

SEQ ID NO: 374948 - DNA, 33 bp, Homo sapien
tcactccctttgaaaggctatgagatcttggtg

SEQ ID NO: 374949 - DNA, 33 bp, Homo sapien
ttggacgttggtgttaccagtaaatagagacac

SEQ ID NO: 374950 - DNA, 33 bp, Homo sapien
ttggacgttggtgttatcagtaaatagagacac

SEQ ID NO: 374951 - DNA, 33 bp, Homo sapien
cagagcccgggactctaaattcacacacagccg

SEQ ID NO: 374952 - DNA, 33 bp, Homo sapien
cagagcccgggactctgaattcacacacagccg

SEQ ID NO: 374953 - DNA, 33 bp, Homo sapien
acgaattctcggctcccagtgccctaatggaaa

SEQ ID NO: 374954 - DNA, 33 bp, Homo sapien
acgaattctcggctcctagtgccctaatggaaa

SEQ ID NO: 374955 - DNA, 33 bp, Homo sapien
ccctcagcataggggacagcacattggatggag

SEQ ID NO: 374956 - DNA, 33 bp, Homo sapien
ccctcagcataggggagagcacattggatggag

SEQ ID NO: 374957 - DNA, 33 bp, Homo sapien
cattaaaatgtagagcccttggaaatgatttca

SEQ ID NO: 374958 - DNA, 33 bp, Homo sapien
cattaaaatgtagagctcttggaaatgatttca

SEQ ID NO: 374959 - DNA, 33 bp, Homo sapien
gcccaactactcaaccaaccacctagcacaacc

SEQ ID NO: 374960 - DNA, 33 bp, Homo sapien
gcccaactactcaacccaccacctagcacaacc

SEQ ID NO: 374961 - DNA, 33 bp, Homo sapien
acctaattcatcagccaatttgggattcccttc

SEQ ID NO: 374962 - DNA, 33 bp, Homo sapien
acctaattcatcagcctatttgggattcccttc

SEQ ID NO: 374963 - DNA, 33 bp, Homo sapien
ctgcagactggtaacgcacacttggcagggtgc

SEQ ID NO: 374964 - DNA, 33 bp, Homo sapien
ctgcagactggtaacgtacacttggcagggtgc

SEQ ID NO: 374965 - DNA, 33 bp, Homo sapien
atgtgtttagtcaaagaaatcagctttctcttc

SEQ ID NO: 374966 - DNA, 33 bp, Homo sapien
atgtgtttagtcaaagtaatcagctttctcttc

SEQ ID NO: 374967 - DNA, 33 bp, Homo sapien
ttaacctgcatatataactatcactgtaatact

SEQ ID NO: 374968 - DNA, 33 bp, Homo sapien
ttaacctgcatatatacctatcactgtaatact

SEQ ID NO: 374969 - DNA, 33 bp, Homo sapien
ctgttgccatcttttcccactccctgttcattg

SEQ ID NO: 374970 - DNA, 33 bp, Homo sapien
ctgttgccatcttttctcactccctgttcattg

SEQ ID NO: 374971 - DNA, 33 bp, Homo sapien
gagccagagtttattgcagctgtctcttgtctc

SEQ ID NO: 374972 - DNA, 33 bp, Homo sapien
gagccagagtttattgtagctgtctcttgtctc

SEQ ID NO: 374973 - DNA, 33 bp, Homo sapien
gttggtgactccattaaatcagattgtttaaat

SEQ ID NO: 374974 - DNA, 33 bp, Homo sapien
gttggtgactccattagatcagattgtttaaat

SEQ ID NO: 374975 - DNA, 33 bp, Homo sapien
gtggtatcaggcatcacacagtgagatagagct

SEQ ID NO: 374976 - DNA, 33 bp, Homo sapien
gtggtatcaggcatcatacagtgagatagagct

SEQ ID NO: 374977 - DNA, 33 bp, Homo sapien
acccagggctaaattacaccagcctccctttac

SEQ ID NO: 374978 - DNA, 33 bp, Homo sapien
acccagggctaaattataccagcctccctttac

SEQ ID NO: 374979 - DNA, 33 bp, Homo sapien
gttatgtacactttacaagactttgactctttg

SEQ ID NO: 374980 - DNA, 33 bp, Homo sapien
gttatgtacactttacgagactttgactctttg

SEQ ID NO: 374981 - DNA, 33 bp, Homo sapien
tttcatccataagcaacagtcattcaacccaaa

SEQ ID NO: 374982 - DNA, 33 bp, Homo sapien
tttcatccataagcaatagtcattcaacccaaa

SEQ ID NO: 374983 - DNA, 33 bp, Homo sapien
gcagagatggacaaaaaagccaagtccctccca

SEQ ID NO: 374984 - DNA, 33 bp, Homo sapien
gcagagatggacaaaagagccaagtccctccca

SEQ ID NO: 374985 - DNA, 33 bp, Homo sapien
gccaaggatgtaagcacatttttgatcttgcca

SEQ ID NO: 374986 - DNA, 33 bp, Homo sapien
gccaaggatgtaagcatatttttgatcttgcca

SEQ ID NO: 374987 - DNA, 33 bp, Homo sapien
cttgcctcttaagaaccatatatctccaaaagc

SEQ ID NO: 374988 - DNA, 33 bp, Homo sapien
cttgcctcttaagaactatatatctccaaaagc

SEQ ID NO: 374989 - DNA, 33 bp, Homo sapien
agatgctcttaggtaaagagatggccaaagact

SEQ ID NO: 374990 - DNA, 33 bp, Homo sapien
agatgctcttaggtaaggagatggccaaagact

SEQ ID NO: 374991 - DNA, 33 bp, Homo sapien
gaagaacttggtgttccatattcgagggcagga

SEQ ID NO: 374992 - DNA, 33 bp, Homo sapien
gaagaacttggtgttctatattcgagggcagga

SEQ ID NO: 374993 - DNA, 33 bp, Homo sapien
tgattagatggtgccaaattgagagtgagtctg

SEQ ID NO: 374994 - DNA, 33 bp, Homo sapien
tgattagatggtgccagattgagagtgagtctg

SEQ ID NO: 374995 - DNA, 33 bp, Homo sapien
aatggagctgaaaagacaaaagcagagctgaga

SEQ ID NO: 374996 - DNA, 33 bp, Homo sapien
aatggagctgaaaagataaaagcagagctgaga

SEQ ID NO: 374997 - DNA, 33 bp, Homo sapien
tgggggaaaggagaaaacacttttgtattcatg

SEQ ID NO: 374998 - DNA, 33 bp, Homo sapien
tgggggaaaggagaaagcacttttgtattcatg

SEQ ID NO: 374999 - DNA, 33 bp, Homo sapien
ttggattctacagcaaacctgtgaacagtgagg

SEQ ID NO: 375000 - DNA, 33 bp, Homo sapien
ttggattctacagcaaccctgtgaacagtgagg

SEQ ID NO: 375001 - DNA, 33 bp, Homo sapien
caggagggccaacaaaaaatgtgtcaagagagt

SEQ ID NO: 375002 - DNA, 33 bp, Homo sapien
caggagggccaacaaagaatgtgtcaagagagt

SEQ ID NO: 375003 - DNA, 33 bp, Homo sapien
ctgatctggttttcaaccttgacaccacttcat

SEQ ID NO: 375004 - DNA, 33 bp, Homo sapien
ctgatctggttttcaatcttgacaccacttcat

SEQ ID NO: 375005 - DNA, 33 bp, Homo sapien
tttgacataatgagaaaggcgagattgcaacaa

SEQ ID NO: 375006 - DNA, 33 bp, Homo sapien
tttgacataatgagaagggcgagattgcaacaa

SEQ ID NO: 375007 - DNA, 33 bp, Homo sapien
ataattacccaatataatactgttgctgttccc

SEQ ID NO: 375008 - DNA, 33 bp, Homo sapien
ataattacccaatatactactgttgctgttccc

SEQ ID NO: 375009 - DNA, 33 bp, Homo sapien
aaggtagtgagtgtggaaaacagagaaggagga

SEQ ID NO: 375010 - DNA, 33 bp, Homo sapien
aaggtagtgagtgtgggaaacagagaaggagga

SEQ ID NO: 375011 - DNA, 33 bp, Homo sapien
aaggaatcatgacaccagcatcaaccataatat

SEQ ID NO: 375012 - DNA, 33 bp, Homo sapien
aaggaatcatgacaccggcatcaaccataatat

SEQ ID NO: 375013 - DNA, 33 bp, Homo sapien
gcttcaatgcccagcaggatctaacccctgcct

SEQ ID NO: 375014 - DNA, 33 bp, Homo sapien
gcttcaatgcccagcatgatctaacccctgcct

SEQ ID NO: 375015 - DNA, 33 bp, Homo sapien
ttgctcgatatggaaacagcttgggaagcagag

SEQ ID NO: 375016 - DNA, 33 bp, Homo sapien
ttgctcgatatggaaatagcttgggaagcagag

SEQ ID NO: 375017 - DNA, 33 bp, Homo sapien
ttcttctggaaattggaactaataatccaccag

SEQ ID NO: 375018 - DNA, 33 bp, Homo sapien
ttcttctggaaattgggactaataatccaccag

SEQ ID NO: 375019 - DNA, 33 bp, Homo sapien
tacaaccgcagaactgaataaatctcttttctt

SEQ ID NO: 375020 - DNA, 33 bp, Homo sapien
tacaaccgcagaactgcataaatctcttttctt

SEQ ID NO: 375021 - DNA, 33 bp, Homo sapien
gcggggccagcaacacaggtcatcttctccacc

SEQ ID NO: 375022 - DNA, 33 bp, Homo sapien
gcggggccagcaacactggtcatcttctccacc

SEQ ID NO: 375023 - DNA, 33 bp, Homo sapien
ggccgcttgagaggcacaaacatagcttaatag

SEQ ID NO: 375024 - DNA, 33 bp, Homo sapien
ggccgcttgagaggcagaaacatagcttaatag

SEQ ID NO: 375025 - DNA, 33 bp, Homo sapien
atgaaatcagaagggaagagcttgatgacaatc

SEQ ID NO: 375026 - DNA, 33 bp, Homo sapien
atgaaatcagaagggaggagcttgatgacaatc

SEQ ID NO: 375027 - DNA, 33 bp, Homo sapien
tccctggaagaattacaagcccagcttccctga

SEQ ID NO: 375028 - DNA, 33 bp, Homo sapien
tccctggaagaattacgagcccagcttccctga

SEQ ID NO: 375029 - DNA, 33 bp, Homo sapien
attttaccgaatggtggaatataattttgagca

SEQ ID NO: 375030 - DNA, 33 bp, Homo sapien
attttaccgaatggtgtaatataattttgagca

SEQ ID NO: 375031 - DNA, 33 bp, Homo sapien
aaattgagttggatcaagaggcacttacaatgg

SEQ ID NO: 375032 - DNA, 33 bp, Homo sapien
aaattgagttggatcatgaggcacttacaatgg

SEQ ID NO: 375033 - DNA, 33 bp, Homo sapien
gagtggcttaatgcaactgaaatagacagccaa

SEQ ID NO: 375034 - DNA, 33 bp, Homo sapien
gagtggcttaatgcaagtgaaatagacagccaa

SEQ ID NO: 375035 - DNA, 33 bp, Homo sapien
ccagcacaagagagtgcagtacagagaaggata

SEQ ID NO: 375036 - DNA, 33 bp, Homo sapien
ccagcacaagagagtgtagtacagagaaggata

SEQ ID NO: 375037 - DNA, 33 bp, Homo sapien
ctacgtggtttttctcccaagatcttaagagca

SEQ ID NO: 375038 - DNA, 33 bp, Homo sapien
ctacgtggtttttctctcaagatcttaagagca

SEQ ID NO: 375039 - DNA, 33 bp, Homo sapien
tgcttatgttgtaccaagttatatgatgttgcc

SEQ ID NO: 375040 - DNA, 33 bp, Homo sapien
tgcttatgttgtaccaggttatatgatgttgcc

SEQ ID NO: 375041 - DNA, 33 bp, Homo sapien
taaatcattcagaaataaactcattaggtcatc

SEQ ID NO: 375042 - DNA, 33 bp, Homo sapien
taaatcattcagaaatcaactcattaggtcatc

SEQ ID NO: 375043 - DNA, 33 bp, Homo sapien
gttttctggaaacccaataaaggaacagatctt

SEQ ID NO: 375044 - DNA, 33 bp, Homo sapien
gttttctggaaacccagtaaaggaacagatctt

SEQ ID NO: 375045 - DNA, 33 bp, Homo sapien
tttgacagctgacaacagcaagccatggcttcc

SEQ ID NO: 375046 - DNA, 33 bp, Homo sapien
tttgacagctgacaacggcaagccatggcttcc

SEQ ID NO: 375047 - DNA, 33 bp, Homo sapien
aggccataaccacaaccaagtccatgagattga

SEQ ID NO: 375048 - DNA, 33 bp, Homo sapien
aggccataaccacaacgaagtccatgagattga

SEQ ID NO: 375049 - DNA, 33 bp, Homo sapien
gcttccatttttctccggcttcagtccatcttc

SEQ ID NO: 375050 - DNA, 33 bp, Homo sapien
gcttccatttttctcctgcttcagtccatcttc

SEQ ID NO: 375051 - DNA, 33 bp, Homo sapien
gatggcagcaggaatacagaggtaggcaaggta

SEQ ID NO: 375052 - DNA, 33 bp, Homo sapien
gatggcagcaggaatagagaggtaggcaaggta

SEQ ID NO: 375053 - DNA, 33 bp, Homo sapien
cccagccgatctggcaaacttctcatccttcaa

SEQ ID NO: 375054 - DNA, 33 bp, Homo sapien
cccagccgatctggcagacttctcatccttcaa

SEQ ID NO: 375055 - DNA, 33 bp, Homo sapien
gaattatttggctttaaaagatgaattccagta

SEQ ID NO: 375056 - DNA, 33 bp, Homo sapien
gaattatttggctttagaagatgaattccagta

SEQ ID NO: 375057 - DNA, 33 bp, Homo sapien
agcagggccactgagaaggtctgagtaaacggg

SEQ ID NO: 375058 - DNA, 33 bp, Homo sapien
agcagggccactgagagggtctgagtaaacggg

SEQ ID NO: 375059 - DNA, 33 bp, Homo sapien
aacttcagcactatggacaattttggctgaaaa

SEQ ID NO: 375060 - DNA, 33 bp, Homo sapien
aacttcagcactatgggcaattttggctgaaaa

SEQ ID NO: 375061 - DNA, 33 bp, Homo sapien
agcaggacaaaccctccgagagcctatgcccag

SEQ ID NO: 375062 - DNA, 33 bp, Homo sapien
agcaggacaaaccctctgagagcctatgcccag

SEQ ID NO: 375063 - DNA, 33 bp, Homo sapien
gttgtgtgaagctgctcaaatttctgatgaaat

SEQ ID NO: 375064 - DNA, 33 bp, Homo sapien
gttgtgtgaagctgctgaaatttctgatgaaat

SEQ ID NO: 375065 - DNA, 33 bp, Homo sapien
acagctttatcaggtaaaatatccttggttggc

SEQ ID NO: 375066 - DNA, 33 bp, Homo sapien
acagctttatcaggtataatatccttggttggc

SEQ ID NO: 375067 - DNA, 33 bp, Homo sapien
atagtaacccgatacacagccttccaacccaca

SEQ ID NO: 375068 - DNA, 33 bp, Homo sapien
atagtaacccgatacatagccttccaacccaca

SEQ ID NO: 375069 - DNA, 33 bp, Homo sapien
ggactagagcttggacaccttaatatttttttc

SEQ ID NO: 375070 - DNA, 33 bp, Homo sapien
ggactagagcttggactccttaatatttttttc

SEQ ID NO: 375071 - DNA, 33 bp, Homo sapien
ttttctaactgatcaacgattcgcccttttaaa

SEQ ID NO: 375072 - DNA, 33 bp, Homo sapien
ttttctaactgatcaatgattcgcccttttaaa

SEQ ID NO: 375073 - DNA, 33 bp, Homo sapien
tatctcagaacaggtacggtttgaagtccatgc

SEQ ID NO: 375074 - DNA, 33 bp, Homo sapien
tatctcagaacaggtatggtttgaagtccatgc

SEQ ID NO: 375075 - DNA, 33 bp, Homo sapien
ccaaacccattccgtcaacaaagcattgtctta

SEQ ID NO: 375076 - DNA, 33 bp, Homo sapien
ccaaacccattccgtcgacaaagcattgtctta

SEQ ID NO: 375077 - DNA, 33 bp, Homo sapien
ggacattagaaagcacaaagtgtaaaggggctg

SEQ ID NO: 375078 - DNA, 33 bp, Homo sapien
ggacattagaaagcacgaagtgtaaaggggctg

SEQ ID NO: 375079 - DNA, 33 bp, Homo sapien
gactccagctcttcagaaaatgatccaggggtc

SEQ ID NO: 375080 - DNA, 33 bp, Homo sapien
gactccagctcttcaggaaatgatccaggggtc

SEQ ID NO: 375081 - DNA, 33 bp, Homo sapien
gggcccacattgtccccgacttttcacaggttt

SEQ ID NO: 375082 - DNA, 33 bp, Homo sapien
gggcccacattgtccctgacttttcacaggttt

SEQ ID NO: 375083 - DNA, 33 bp, Homo sapien
aaagtgtgacattagacatcttctcctttgaga

SEQ ID NO: 375084 - DNA, 33 bp, Homo sapien
aaagtgtgacattagatatcttctcctttgaga

SEQ ID NO: 375085 - DNA, 33 bp, Homo sapien
aaagagagaaaggcacaagtcaggatttgggtt

SEQ ID NO: 375086 - DNA, 33 bp, Homo sapien
aaagagagaaaggcacgagtcaggatttgggtt

SEQ ID NO: 375087 - DNA, 33 bp, Homo sapien
ggccacacacagtggaagaagggtagtttctga

SEQ ID NO: 375088 - DNA, 33 bp, Homo sapien
ggccacacacagtggacgaagggtagtttctga

SEQ ID NO: 375089 - DNA, 33 bp, Homo sapien
tctctggaggagtcacaggggtacttgcagagg

SEQ ID NO: 375090 - DNA, 33 bp, Homo sapien
tctctggaggagtcacgggggtacttgcagagg

SEQ ID NO: 375091 - DNA, 33 bp, Homo sapien
gtgaaaacattttgtaactcagaggcaaacgct

SEQ ID NO: 375092 - DNA, 33 bp, Homo sapien
gtgaaaacattttgtagctcagaggcaaacgct

SEQ ID NO: 375093 - DNA, 33 bp, Homo sapien
agagaaagcacgaggcaaggaaccgctccctgg

SEQ ID NO: 375094 - DNA, 33 bp, Homo sapien
agagaaagcacgaggcgaggaaccgctccctgg

SEQ ID NO: 375095 - DNA, 33 bp, Homo sapien
gatcagtgaagcctcaactaccccacgggttct

SEQ ID NO: 375096 - DNA, 33 bp, Homo sapien
gatcagtgaagcctcagctaccccacgggttct

SEQ ID NO: 375097 - DNA, 33 bp, Homo sapien
gagacaggcaagtctcccagagcaaccagaaga

SEQ ID NO: 375098 - DNA, 33 bp, Homo sapien
gagacaggcaagtctctcagagcaaccagaaga

SEQ ID NO: 375099 - DNA, 33 bp, Homo sapien
gcatctaagaattagaatagggagatgatcttg

SEQ ID NO: 375100 - DNA, 33 bp, Homo sapien
gcatctaagaattagagtagggagatgatcttg

SEQ ID NO: 375101 - DNA, 33 bp, Homo sapien
cctgtctcatatgtccacactccactttcaatg

SEQ ID NO: 375102 - DNA, 33 bp, Homo sapien
cctgtctcatatgtccgcactccactttcaatg

SEQ ID NO: 375103 - DNA, 33 bp, Homo sapien
gacgagagagggacatcaaacagtgaagtacat

SEQ ID NO: 375104 - DNA, 33 bp, Homo sapien
gacgagagagggacattaaacagtgaagtacat

SEQ ID NO: 375105 - DNA, 33 bp, Homo sapien
ttctttatcaagctcaagcttttccttccactc

SEQ ID NO: 375106 - DNA, 33 bp, Homo sapien
ttctttatcaagctcaggcttttccttccactc

SEQ ID NO: 375107 - DNA, 33 bp, Homo sapien
aaggcctcattgataccggcaattggtattatg

SEQ ID NO: 375108 - DNA, 33 bp, Homo sapien
aaggcctcattgatactggcaattggtattatg

SEQ ID NO: 375109 - DNA, 33 bp, Homo sapien
aagagaggtgttgtacagacttgcagattttct

SEQ ID NO: 375110 - DNA, 33 bp, Homo sapien
aagagaggtgttgtacggacttgcagattttct

SEQ ID NO: 375111 - DNA, 33 bp, Homo sapien
catcctataaggcctgaattatcctgtcttcaa

SEQ ID NO: 375112 - DNA, 33 bp, Homo sapien
catcctataaggcctgcattatcctgtcttcaa

SEQ ID NO: 375113 - DNA, 33 bp, Homo sapien
actctaggaaggaagaagagccatttttcccca

SEQ ID NO: 375114 - DNA, 33 bp, Homo sapien
actctaggaaggaagaggagccatttttcccca

SEQ ID NO: 375115 - DNA, 33 bp, Homo sapien
ttatatgccaagtagtcaagaatgctcagtgat

SEQ ID NO: 375116 - DNA, 33 bp, Homo sapien
ttatatgccaagtagttaagaatgctcagtgat

SEQ ID NO: 375117 - DNA, 33 bp, Homo sapien
gcccggccagtgctgaaccacatccggggaggc

SEQ ID NO: 375118 - DNA, 33 bp, Homo sapien
gcccggccagtgctgagccacatccggggaggc

SEQ ID NO: 375119 - DNA, 33 bp, Homo sapien
aatgtaattattggcaagttgggacttaagttt

SEQ ID NO: 375120 - DNA, 33 bp, Homo sapien
aatgtaattattggcatgttgggacttaagttt

SEQ ID NO: 375121 - DNA, 33 bp, Homo sapien
caggatctaatagacacctatagaacatgccac

SEQ ID NO: 375122 - DNA, 33 bp, Homo sapien
caggatctaatagacatctatagaacatgccac

SEQ ID NO: 375123 - DNA, 33 bp, Homo sapien
ttacaaatacattgaaatgactgaaaatgacaa

SEQ ID NO: 375124 - DNA, 33 bp, Homo sapien
ttacaaatacattgaactgactgaaaatgacaa

SEQ ID NO: 375125 - DNA, 33 bp, Homo sapien
taacacatcaaggtcactcagaagttaggatca

SEQ ID NO: 375126 - DNA, 33 bp, Homo sapien
taacacatcaaggtcattcagaagttaggatca

SEQ ID NO: 375127 - DNA, 33 bp, Homo sapien
agtactcttgatgtcacagaacaggagaaaact

SEQ ID NO: 375128 - DNA, 33 bp, Homo sapien
agtactcttgatgtcagagaacaggagaaaact

SEQ ID NO: 375129 - DNA, 33 bp, Homo sapien
cattccagccatcagaaagataggaggaatgaa

SEQ ID NO: 375130 - DNA, 33 bp, Homo sapien
cattccagccatcagacagataggaggaatgaa

SEQ ID NO: 375131 - DNA, 33 bp, Homo sapien
ctatggcgaccaatagcaataggaccacaccta

SEQ ID NO: 375132 - DNA, 33 bp, Homo sapien
ctatggcgaccaatagtaataggaccacaccta

SEQ ID NO: 375133 - DNA, 33 bp, Homo sapien
ccaaatccaaatgagacgctgattccatcgcgc

SEQ ID NO: 375134 - DNA, 33 bp, Homo sapien
ccaaatccaaatgagaggctgattccatcgcgc

SEQ ID NO: 375135 - DNA, 33 bp, Homo sapien
tgctcctgttaacgcaacctaagaaaacattac

SEQ ID NO: 375136 - DNA, 33 bp, Homo sapien
tgctcctgttaacgcatcctaagaaaacattac

SEQ ID NO: 375137 - DNA, 33 bp, Homo sapien
tagccctgcatgtgacagcgtgggacagtccag

SEQ ID NO: 375138 - DNA, 33 bp, Homo sapien
tagccctgcatgtgacggcgtgggacagtccag

SEQ ID NO: 375139 - DNA, 33 bp, Homo sapien
ctcagaggccgggccacgatcccaaaaggcaag

SEQ ID NO: 375140 - DNA, 33 bp, Homo sapien
ctcagaggccgggccatgatcccaaaaggcaag

SEQ ID NO: 375141 - DNA, 33 bp, Homo sapien
atatcagaaaagccaaatgaaaataattcaggg

SEQ ID NO: 375142 - DNA, 33 bp, Homo sapien
atatcagaaaagccaactgaaaataattcaggg

SEQ ID NO: 375143 - DNA, 33 bp, Homo sapien
aaatacaaaaacagataaagatcgcccttaatt

SEQ ID NO: 375144 - DNA, 33 bp, Homo sapien
aaatacaaaaacagatgaagatcgcccttaatt

SEQ ID NO: 375145 - DNA, 33 bp, Homo sapien
tttcccattttgtagacgaaagggttaacacac

SEQ ID NO: 375146 - DNA, 33 bp, Homo sapien
tttcccattttgtagatgaaagggttaacacac

SEQ ID NO: 375147 - DNA, 33 bp, Homo sapien
ttcagtactttgcacagagaggaactcaataaa

SEQ ID NO: 375148 - DNA, 33 bp, Homo sapien
ttcagtactttgcacatagaggaactcaataaa

SEQ ID NO: 375149 - DNA, 33 bp, Homo sapien
ggggaaaccttcatcacgctgcgagagggaagg

SEQ ID NO: 375150 - DNA, 33 bp, Homo sapien
ggggaaaccttcatcatgctgcgagagggaagg

SEQ ID NO: 375151 - DNA, 33 bp, Homo sapien
ccttagccagcatgccaaaagagagatctggaa

SEQ ID NO: 375152 - DNA, 33 bp, Homo sapien
ccttagccagcatgccgaaagagagatctggaa

SEQ ID NO: 375153 - DNA, 33 bp, Homo sapien
ggtggacccagctctaagtactcattccactca

SEQ ID NO: 375154 - DNA, 33 bp, Homo sapien
ggtggacccagctctacgtactcattccactca

SEQ ID NO: 375155 - DNA, 33 bp, Homo sapien
taaggacaatgggagcaactgaaggctccagac

SEQ ID NO: 375156 - DNA, 33 bp, Homo sapien
taaggacaatgggagcgactgaaggctccagac

SEQ ID NO: 375157 - DNA, 33 bp, Homo sapien
tgaaatggcagggagacggggagccagagttaa

SEQ ID NO: 375158 - DNA, 33 bp, Homo sapien
tgaaatggcagggagatggggagccagagttaa

SEQ ID NO: 375159 - DNA, 33 bp, Homo sapien
agggggctgggaaatagagaaacaaactctgtt

SEQ ID NO: 375160 - DNA, 33 bp, Homo sapien
agggggctgggaaatatagaaacaaactctgtt

SEQ ID NO: 375161 - DNA, 33 bp, Homo sapien
cactcacagcttatagccctgcaataatttcct

SEQ ID NO: 375162 - DNA, 33 bp, Homo sapien
cactcacagcttatagtcctgcaataatttcct

SEQ ID NO: 375163 - DNA, 33 bp, Homo sapien
gaagaatatttgtttccacgggtcttgagtgtt

SEQ ID NO: 375164 - DNA, 33 bp, Homo sapien
gaagaatatttgtttctacgggtcttgagtgtt

SEQ ID NO: 375165 - DNA, 33 bp, Homo sapien
ctttcctccaagggacagagatttcagtattct

SEQ ID NO: 375166 - DNA, 33 bp, Homo sapien
ctttcctccaagggacggagatttcagtattct

SEQ ID NO: 375167 - DNA, 33 bp, Homo sapien
aatatcattccatcaaactaaatttttaactac

SEQ ID NO: 375168 - DNA, 33 bp, Homo sapien
aatatcattccatcaagctaaatttttaactac

SEQ ID NO: 375169 - DNA, 33 bp, Homo sapien
ggagactctctggggcactttcagggagttaga

SEQ ID NO: 375170 - DNA, 33 bp, Homo sapien
ggagactctctggggcgctttcagggagttaga

SEQ ID NO: 375171 - DNA, 33 bp, Homo sapien
tagaaagaagtccacaatgcaaacctaaaagcg

SEQ ID NO: 375172 - DNA, 33 bp, Homo sapien
tagaaagaagtccacagtgcaaacctaaaagcg

SEQ ID NO: 375173 - DNA, 33 bp, Homo sapien
agttgtgatgtcagcaagatattcacatatgga

SEQ ID NO: 375174 - DNA, 33 bp, Homo sapien
agttgtgatgtcagcaggatattcacatatgga

SEQ ID NO: 375175 - DNA, 33 bp, Homo sapien
tgggaaagcaggccaccgtgacgtctgaaatat

SEQ ID NO: 375176 - DNA, 33 bp, Homo sapien
tgggaaagcaggccactgtgacgtctgaaatat

SEQ ID NO: 375177 - DNA, 33 bp, Homo sapien
cgcctctttctttccaactccgaaccagggaga

SEQ ID NO: 375178 - DNA, 33 bp, Homo sapien
cgcctctttctttccagctccgaaccagggaga

SEQ ID NO: 375179 - DNA, 33 bp, Homo sapien
caaaatgattccacaacggtttacacaagcaca

SEQ ID NO: 375180 - DNA, 33 bp, Homo sapien
caaaatgattccacaatggtttacacaagcaca

SEQ ID NO: 375181 - DNA, 33 bp, Homo sapien
gcacaaactcgctgtcacaaagagagggaaaga

SEQ ID NO: 375182 - DNA, 33 bp, Homo sapien
gcacaaactcgctgtcgcaaagagagggaaaga

SEQ ID NO: 375183 - DNA, 33 bp, Homo sapien
ggctttgtgcgagatgaagaagaacattttttt

SEQ ID NO: 375184 - DNA, 33 bp, Homo sapien
ggctttgtgcgagatggagaagaacattttttt

SEQ ID NO: 375185 - DNA, 33 bp, Homo sapien
tgtcttggctccctgcgagggtttctctgatgc

SEQ ID NO: 375186 - DNA, 33 bp, Homo sapien
tgtcttggctccctgctagggtttctctgatgc

SEQ ID NO: 375187 - DNA, 33 bp, Homo sapien
cattgtcaaaacagaacgcttacaaagttattt

SEQ ID NO: 375188 - DNA, 33 bp, Homo sapien
cattgtcaaaacagaatgcttacaaagttattt

SEQ ID NO: 375189 - DNA, 33 bp, Homo sapien
gtggaaggccctttgacgtggtttcaattgctg

SEQ ID NO: 375190 - DNA, 33 bp, Homo sapien
gtggaaggccctttgatgtggtttcaattgctg

SEQ ID NO: 375191 - DNA, 33 bp, Homo sapien
tggaggtgtcttccccaaagcggcagcggctct

SEQ ID NO: 375192 - DNA, 33 bp, Homo sapien
tggaggtgtcttccccgaagcggcagcggctct

SEQ ID NO: 375193 - DNA, 33 bp, Homo sapien
gatccttctgacatgagggaaatggtctaaaac

SEQ ID NO: 375194 - DNA, 33 bp, Homo sapien
gatccttctgacatgatggaaatggtctaaaac

SEQ ID NO: 375195 - DNA, 33 bp, Homo sapien
gctcccagaataatacactttgctttagtttca

SEQ ID NO: 375196 - DNA, 33 bp, Homo sapien
gctcccagaataatacgctttgctttagtttca

SEQ ID NO: 375197 - DNA, 33 bp, Homo sapien
cctgtagatacatcccaagctttggccctagct

SEQ ID NO: 375198 - DNA, 33 bp, Homo sapien
cctgtagatacatcccgagctttggccctagct

SEQ ID NO: 375199 - DNA, 33 bp, Homo sapien
aaggagaccagttcccaacaggacaaagctttg

SEQ ID NO: 375200 - DNA, 33 bp, Homo sapien
aaggagaccagttcccgacaggacaaagctttg

SEQ ID NO: 375201 - DNA, 33 bp, Homo sapien
tttctcccaaaccgaaagaatgatccctacttt

SEQ ID NO: 375202 - DNA, 33 bp, Homo sapien
tttctcccaaaccgaaggaatgatccctacttt

SEQ ID NO: 375203 - DNA, 33 bp, Homo sapien
tacatactgctaaacactggatgaacattggct

SEQ ID NO: 375204 - DNA, 33 bp, Homo sapien
tacatactgctaaacattggatgaacattggct

SEQ ID NO: 375205 - DNA, 33 bp, Homo sapien
tggctactggctcccaaatcaccataaggtggt

SEQ ID NO: 375206 - DNA, 33 bp, Homo sapien
tggctactggctcccagatcaccataaggtggt

SEQ ID NO: 375207 - DNA, 33 bp, Homo sapien
cccaacgctctcattacacaaacagagaatcta

SEQ ID NO: 375208 - DNA, 33 bp, Homo sapien
cccaacgctctcattatacaaacagagaatcta

SEQ ID NO: 375209 - DNA, 33 bp, Homo sapien
agagaatctaaggtaccgggagccatccatggc

SEQ ID NO: 375210 - DNA, 33 bp, Homo sapien
agagaatctaaggtactgggagccatccatggc

SEQ ID NO: 375211 - DNA, 33 bp, Homo sapien
ggcattgtcatagtgaaccactttttgaacttc

SEQ ID NO: 375212 - DNA, 33 bp, Homo sapien
ggcattgtcatagtgagccactttttgaacttc

SEQ ID NO: 375213 - DNA, 33 bp, Homo sapien
aatactaggtgaatcacagcatcagtgatactc

SEQ ID NO: 375214 - DNA, 33 bp, Homo sapien
aatactaggtgaatcatagcatcagtgatactc

SEQ ID NO: 375215 - DNA, 33 bp, Homo sapien
cactcaagtcactgtgaacagcagaagtatcaa

SEQ ID NO: 375216 - DNA, 33 bp, Homo sapien
cactcaagtcactgtggacagcagaagtatcaa

SEQ ID NO: 375217 - DNA, 33 bp, Homo sapien
ggttaggaagtaaggaagtttctggtgagtttt

SEQ ID NO: 375218 - DNA, 33 bp, Homo sapien
ggttaggaagtaaggaggtttctggtgagtttt

SEQ ID NO: 375219 - DNA, 33 bp, Homo sapien
ctcctcgggttgtgcacaggatgagatcagata

SEQ ID NO: 375220 - DNA, 33 bp, Homo sapien
ctcctcgggttgtgcagaggatgagatcagata

SEQ ID NO: 375221 - DNA, 33 bp, Homo sapien
aatctgcggtgatgcaaaattgtacttgtgggc

SEQ ID NO: 375222 - DNA, 33 bp, Homo sapien
aatctgcggtgatgcataattgtacttgtgggc

SEQ ID NO: 375223 - DNA, 33 bp, Homo sapien
ttctgtgttgggtcccacacgcacctttcacgg

SEQ ID NO: 375224 - DNA, 33 bp, Homo sapien
ttctgtgttgggtcccgcacgcacctttcacgg

SEQ ID NO: 375225 - DNA, 33 bp, Homo sapien
gtaggaacctgataaacgtgtcttccatgaaaa

SEQ ID NO: 375226 - DNA, 33 bp, Homo sapien
gtaggaacctgataaatgtgtcttccatgaaaa

SEQ ID NO: 375227 - DNA, 33 bp, Homo sapien
aatttaactctggcaccggtctaaaataaagcg

SEQ ID NO: 375228 - DNA, 33 bp, Homo sapien
aatttaactctggcactggtctaaaataaagcg

SEQ ID NO: 375229 - DNA, 33 bp, Homo sapien
cccagtcagcgggagacaaatttggttggtttc

SEQ ID NO: 375230 - DNA, 33 bp, Homo sapien
cccagtcagcgggagataaatttggttggtttc

SEQ ID NO: 375231 - DNA, 33 bp, Homo sapien
tgtgataacagcattcactctatgtaatcaagt

SEQ ID NO: 375232 - DNA, 33 bp, Homo sapien
tgtgataacagcattcgctctatgtaatcaagt

SEQ ID NO: 375233 - DNA, 33 bp, Homo sapien
acacttattgtatgaacgaaccatctcttccat

SEQ ID NO: 375234 - DNA, 33 bp, Homo sapien
acacttattgtatgaatgaaccatctcttccat

SEQ ID NO: 375235 - DNA, 33 bp, Homo sapien
tggttagatgttttgaatatctcccatgtgcaa

SEQ ID NO: 375236 - DNA, 33 bp, Homo sapien
tggttagatgttttgagtatctcccatgtgcaa

SEQ ID NO: 375237 - DNA, 33 bp, Homo sapien
aggaagaatcctcctcccagtggcaaacccttc

SEQ ID NO: 375238 - DNA, 33 bp, Homo sapien
aggaagaatcctcctctcagtggcaaacccttc

SEQ ID NO: 375239 - DNA, 33 bp, Homo sapien
tcttttattatcagaacgcgccaactcctggca

SEQ ID NO: 375240 - DNA, 33 bp, Homo sapien
tcttttattatcagaatgcgccaactcctggca

SEQ ID NO: 375241 - DNA, 33 bp, Homo sapien
cggcccctggccagcacacgaatcagaaggaaa

SEQ ID NO: 375242 - DNA, 33 bp, Homo sapien
cggcccctggccagcagacgaatcagaaggaaa

SEQ ID NO: 375243 - DNA, 33 bp, Homo sapien
gttctagacttgctgacaactgaagatacgttc

SEQ ID NO: 375244 - DNA, 33 bp, Homo sapien
gttctagacttgctgataactgaagatacgttc

SEQ ID NO: 375245 - DNA, 33 bp, Homo sapien
gtggaattacacaaaaaaggactttacacttgg

SEQ ID NO: 375246 - DNA, 33 bp, Homo sapien
gtggaattacacaaaagaggactttacacttgg

SEQ ID NO: 375247 - DNA, 33 bp, Homo sapien
cagcataagaaggcccaagacttactttacaag

SEQ ID NO: 375248 - DNA, 33 bp, Homo sapien
cagcataagaaggcccgagacttactttacaag

SEQ ID NO: 375249 - DNA, 33 bp, Homo sapien
atggtcaaagtgcgcccgcaaggactcagtgag

SEQ ID NO: 375250 - DNA, 33 bp, Homo sapien
atggtcaaagtgcgcctgcaaggactcagtgag

SEQ ID NO: 375251 - DNA, 33 bp, Homo sapien
tggattggactcagataagatgagtaaatgcaa

SEQ ID NO: 375252 - DNA, 33 bp, Homo sapien
tggattggactcagatgagatgagtaaatgcaa

SEQ ID NO: 375253 - DNA, 33 bp, Homo sapien
agtcaagcccattctcacagtgaatacacttaa

SEQ ID NO: 375254 - DNA, 33 bp, Homo sapien
agtcaagcccattctcgcagtgaatacacttaa

SEQ ID NO: 375255 - DNA, 33 bp, Homo sapien
actggctgcccaactacggaattacagaactac

SEQ ID NO: 375256 - DNA, 33 bp, Homo sapien
actggctgcccaactatggaattacagaactac

SEQ ID NO: 375257 - DNA, 33 bp, Homo sapien
gtcagtatttcagaaacgcggttaggcatcagg

SEQ ID NO: 375258 - DNA, 33 bp, Homo sapien
gtcagtatttcagaaatgcggttaggcatcagg

SEQ ID NO: 375259 - DNA, 33 bp, Homo sapien
tttgttagacaccttcaacaaggtctccatggg

SEQ ID NO: 375260 - DNA, 33 bp, Homo sapien
tttgttagacaccttccacaaggtctccatggg

SEQ ID NO: 375261 - DNA, 33 bp, Homo sapien
ttgacaaattgcttaaccttagttttctcatct

SEQ ID NO: 375262 - DNA, 33 bp, Homo sapien
ttgacaaattgcttaatcttagttttctcatct

SEQ ID NO: 375263 - DNA, 33 bp, Homo sapien
aaccacctataatgcccctctcggaaatgccat

SEQ ID NO: 375264 - DNA, 33 bp, Homo sapien
aaccacctataatgcctctctcggaaatgccat

SEQ ID NO: 375265 - DNA, 33 bp, Homo sapien
tattgcaggctagtaaccatgtgcaatctcctg

SEQ ID NO: 375266 - DNA, 33 bp, Homo sapien
tattgcaggctagtaagcatgtgcaatctcctg

SEQ ID NO: 375267 - DNA, 33 bp, Homo sapien
tagaggaggaaaagtcagaagcaacaaagaaag

SEQ ID NO: 375268 - DNA, 33 bp, Homo sapien
tagaggaggaaaagtcggaagcaacaaagaaag

SEQ ID NO: 375269 - DNA, 33 bp, Homo sapien
cacaaccacaactttacacatggccagctgaat

SEQ ID NO: 375270 - DNA, 33 bp, Homo sapien
cacaaccacaactttatacatggccagctgaat

SEQ ID NO: 375271 - DNA, 33 bp, Homo sapien
aagaaacactcaaacaagaacacaaaggttata

SEQ ID NO: 375272 - DNA, 33 bp, Homo sapien
aagaaacactcaaacaggaacacaaaggttata

SEQ ID NO: 375273 - DNA, 33 bp, Homo sapien
aggggggttcatctcaaaatgattcagtggcag

SEQ ID NO: 375274 - DNA, 33 bp, Homo sapien
aggggggttcatctcagaatgattcagtggcag

SEQ ID NO: 375275 - DNA, 33 bp, Homo sapien
tctggggcaggcaataccagtcaatcacaggtg

SEQ ID NO: 375276 - DNA, 33 bp, Homo sapien
tctggggcaggcaatagcagtcaatcacaggtg

SEQ ID NO: 375277 - DNA, 33 bp, Homo sapien
tggttcatcctattaacgggagcagtacaaaac

SEQ ID NO: 375278 - DNA, 33 bp, Homo sapien
tggttcatcctattaatgggagcagtacaaaac

SEQ ID NO: 375279 - DNA, 33 bp, Homo sapien
aaagagccagggaccaagaaagggttaagcagc

SEQ ID NO: 375280 - DNA, 33 bp, Homo sapien
aaagagccagggaccaggaaagggttaagcagc

SEQ ID NO: 375281 - DNA, 33 bp, Homo sapien
tcatggcccagttagaagcagagagaaggcaca

SEQ ID NO: 375282 - DNA, 33 bp, Homo sapien
tcatggcccagttagaggcagagagaaggcaca

SEQ ID NO: 375283 - DNA, 33 bp, Homo sapien
gttgttctgccgagaggaggcttttccctgttt

SEQ ID NO: 375284 - DNA, 33 bp, Homo sapien
gttgttctgccgagagtaggcttttccctgttt

SEQ ID NO: 375285 - DNA, 33 bp, Homo sapien
gaccattttgccactgcaggggagtcggagata

SEQ ID NO: 375286 - DNA, 33 bp, Homo sapien
gaccattttgccactgtaggggagtcggagata

SEQ ID NO: 375287 - DNA, 33 bp, Homo sapien
agatgaatagacaaaaggtagaatatacctatg

SEQ ID NO: 375288 - DNA, 33 bp, Homo sapien
agatgaatagacaaaatgtagaatatacctatg

SEQ ID NO: 375289 - DNA, 33 bp, Homo sapien
gaaatgagtatccggacgccacccatgttagag

SEQ ID NO: 375290 - DNA, 33 bp, Homo sapien
gaaatgagtatccggatgccacccatgttagag

SEQ ID NO: 375291 - DNA, 33 bp, Homo sapien
aaaagcaggaccatgaagatctgggggagaaac

SEQ ID NO: 375292 - DNA, 33 bp, Homo sapien
aaaagcaggaccatgatgatctgggggagaaac

SEQ ID NO: 375293 - DNA, 33 bp, Homo sapien
tcgttatgtttcagagaatgtgactggacctcc

SEQ ID NO: 375294 - DNA, 33 bp, Homo sapien
tcgttatgtttcagaggatgtgactggacctcc

SEQ ID NO: 375295 - DNA, 33 bp, Homo sapien
tcctcactggctattacgcagagtaaatgagaa

SEQ ID NO: 375296 - DNA, 33 bp, Homo sapien
tcctcactggctattatgcagagtaaatgagaa

SEQ ID NO: 375297 - DNA, 33 bp, Homo sapien
ggaagcctggacaccacgtgaacgcagcagctg

SEQ ID NO: 375298 - DNA, 33 bp, Homo sapien
ggaagcctggacaccatgtgaacgcagcagctg

SEQ ID NO: 375299 - DNA, 33 bp, Homo sapien
ccccaaattagaagacagatgaatctatttgct

SEQ ID NO: 375300 - DNA, 33 bp, Homo sapien
ccccaaattagaagacggatgaatctatttgct

SEQ ID NO: 375301 - DNA, 33 bp, Homo sapien
gagatcatactacttcactccagcctggtcaac

SEQ ID NO: 375302 - DNA, 33 bp, Homo sapien
gagatcatactacttcgctccagcctggtcaac

SEQ ID NO: 375303 - DNA, 33 bp, Homo sapien
agagtaactaagcaaaagatgttgtggggaaga

SEQ ID NO: 375304 - DNA, 33 bp, Homo sapien
agagtaactaagcaaaggatgttgtggggaaga

SEQ ID NO: 375305 - DNA, 33 bp, Homo sapien
ggtgttgtcactcttccactgtggtgtctttgc

SEQ ID NO: 375306 - DNA, 33 bp, Homo sapien
ggtgttgtcactcttctactgtggtgtctttgc

SEQ ID NO: 375307 - DNA, 33 bp, Homo sapien
cactattgaagctaagaatctaaggatctggca

SEQ ID NO: 375308 - DNA, 33 bp, Homo sapien
cactattgaagctaaggatctaaggatctggca

SEQ ID NO: 375309 - DNA, 33 bp, Homo sapien
ctgactcatggtcttaacacttacttggttaat

SEQ ID NO: 375310 - DNA, 33 bp, Homo sapien
ctgactcatggtcttagcacttacttggttaat

SEQ ID NO: 375311 - DNA, 33 bp, Homo sapien
gtgcaaggaataagaacgcttctctatagtcaa

SEQ ID NO: 375312 - DNA, 33 bp, Homo sapien
gtgcaaggaataagaatgcttctctatagtcaa

SEQ ID NO: 375313 - DNA, 33 bp, Homo sapien
cttttatttttccttacgcactcgtgttgttgg

SEQ ID NO: 375314 - DNA, 33 bp, Homo sapien
cttttatttttccttatgcactcgtgttgttgg

SEQ ID NO: 375315 - DNA, 33 bp, Homo sapien
cagcaggaaatggaggacagtaggccaggcccc

SEQ ID NO: 375316 - DNA, 33 bp, Homo sapien
cagcaggaaatggagggcagtaggccaggcccc

SEQ ID NO: 375317 - DNA, 33 bp, Homo sapien
gcttccataactcacaatggcgttaatcatcgc

SEQ ID NO: 375318 - DNA, 33 bp, Homo sapien
gcttccataactcacactggcgttaatcatcgc

SEQ ID NO: 375319 - DNA, 33 bp, Homo sapien
tttttccaaacgtctacaatgtataacacctag

SEQ ID NO: 375320 - DNA, 33 bp, Homo sapien
tttttccaaacgtctagaatgtataacacctag

SEQ ID NO: 375321 - DNA, 33 bp, Homo sapien
atggctctaaggcctacgctgagaacagtgccg

SEQ ID NO: 375322 - DNA, 33 bp, Homo sapien
atggctctaaggcctatgctgagaacagtgccg

SEQ ID NO: 375323 - DNA, 33 bp, Homo sapien
atcaatttacgcttcccgagacatcacgaacac

SEQ ID NO: 375324 - DNA, 33 bp, Homo sapien
atcaatttacgcttcctgagacatcacgaacac

SEQ ID NO: 375325 - DNA, 33 bp, Homo sapien
cgtggagcatgggaaaagcttaagcaaggtatt

SEQ ID NO: 375326 - DNA, 33 bp, Homo sapien
cgtggagcatgggaaaggcttaagcaaggtatt

SEQ ID NO: 375327 - DNA, 33 bp, Homo sapien
acaaacagtctatgaaaccaaaacccatgcacc

SEQ ID NO: 375328 - DNA, 33 bp, Homo sapien
acaaacagtctatgaagccaaaacccatgcacc

SEQ ID NO: 375329 - DNA, 33 bp, Homo sapien
tgtccaatatagtgtccaaaaccttctggattt

SEQ ID NO: 375330 - DNA, 33 bp, Homo sapien
tgtccaatatagtgtctaaaaccttctggattt

SEQ ID NO: 375331 - DNA, 33 bp, Homo sapien
ctgccttccaagactcactgacaagaatgagaa

SEQ ID NO: 375332 - DNA, 33 bp, Homo sapien
ctgccttccaagactcgctgacaagaatgagaa

SEQ ID NO: 375333 - DNA, 33 bp, Homo sapien
gaggcactaaagcctacgtagaagcttgaggaa

SEQ ID NO: 375334 - DNA, 33 bp, Homo sapien
gaggcactaaagcctatgtagaagcttgaggaa

SEQ ID NO: 375335 - DNA, 33 bp, Homo sapien
agtgagctgagattgcaattctcccacctgcag

SEQ ID NO: 375336 - DNA, 33 bp, Homo sapien
agtgagctgagattgcgattctcccacctgcag

SEQ ID NO: 375337 - DNA, 33 bp, Homo sapien
cctcttccactggcaagggagatacatcagact

SEQ ID NO: 375338 - DNA, 33 bp, Homo sapien
cctcttccactggcaatggagatacatcagact

SEQ ID NO: 375339 - DNA, 33 bp, Homo sapien
tgttaactaatttttagcattttgccaatactt

SEQ ID NO: 375340 - DNA, 33 bp, Homo sapien
tgttaactaatttttatcattttgccaatactt

SEQ ID NO: 375341 - DNA, 33 bp, Homo sapien
ttattccagttgctccgctcattgtgaatatgg

SEQ ID NO: 375342 - DNA, 33 bp, Homo sapien
ttattccagttgctcctctcattgtgaatatgg

SEQ ID NO: 375343 - DNA, 33 bp, Homo sapien
aaagattattgggccacgaggactgaatgttca

SEQ ID NO: 375344 - DNA, 33 bp, Homo sapien
aaagattattgggccatgaggactgaatgttca

SEQ ID NO: 375345 - DNA, 33 bp, Homo sapien
gtgcctaccttctacaatactgataacaataca

SEQ ID NO: 375346 - DNA, 33 bp, Homo sapien
gtgcctaccttctacagtactgataacaataca

SEQ ID NO: 375347 - DNA, 33 bp, Homo sapien
aattcttagagagcaactattcaccctttggag

SEQ ID NO: 375348 - DNA, 33 bp, Homo sapien
aattcttagagagcaagtattcaccctttggag

SEQ ID NO: 375349 - DNA, 33 bp, Homo sapien
agttttgttgtataaacgctaaattctctgacc

SEQ ID NO: 375350 - DNA, 33 bp, Homo sapien
agttttgttgtataaatgctaaattctctgacc

SEQ ID NO: 375351 - DNA, 33 bp, Homo sapien
caaagaataagatgaactaatggatagagtgat

SEQ ID NO: 375352 - DNA, 33 bp, Homo sapien
caaagaataagatgaattaatggatagagtgat

SEQ ID NO: 375353 - DNA, 33 bp, Homo sapien
ttgtagccagactccaatatttgtttattgttt

SEQ ID NO: 375354 - DNA, 33 bp, Homo sapien
ttgtagccagactccagtatttgtttattgttt

SEQ ID NO: 375355 - DNA, 33 bp, Homo sapien
gcctggctctggatccggattttaaaaagctaa

SEQ ID NO: 375356 - DNA, 33 bp, Homo sapien
gcctggctctggatcctgattttaaaaagctaa

SEQ ID NO: 375357 - DNA, 33 bp, Homo sapien
tgggaagacagacaaccgggtgggaagcgaagg

SEQ ID NO: 375358 - DNA, 33 bp, Homo sapien
tgggaagacagacaactgggtgggaagcgaagg

SEQ ID NO: 375359 - DNA, 33 bp, Homo sapien
ctactcctggcaaagaggttctgcaataccacc

SEQ ID NO: 375360 - DNA, 33 bp, Homo sapien
ctactcctggcaaagatgttctgcaataccacc

SEQ ID NO: 375361 - DNA, 33 bp, Homo sapien
aatcagtagctataaactgtagagtggggtgca

SEQ ID NO: 375362 - DNA, 33 bp, Homo sapien
aatcagtagctataaattgtagagtggggtgca

SEQ ID NO: 375363 - DNA, 33 bp, Homo sapien
ctttttgtactgataacgaccatttctttactg

SEQ ID NO: 375364 - DNA, 33 bp, Homo sapien
ctttttgtactgataatgaccatttctttactg

SEQ ID NO: 375365 - DNA, 33 bp, Homo sapien
cgttgtgacggttaaagtatataatgtgggtgc

SEQ ID NO: 375366 - DNA, 33 bp, Homo sapien
cgttgtgacggttaaattatataatgtgggtgc

SEQ ID NO: 375367 - DNA, 33 bp, Homo sapien
tttctaaaacctttcaaaatagatggcgaggtg

SEQ ID NO: 375368 - DNA, 33 bp, Homo sapien
tttctaaaacctttcataatagatggcgaggtg

SEQ ID NO: 375369 - DNA, 33 bp, Homo sapien
gattggtatcaggaccccggatttggtatttac

SEQ ID NO: 375370 - DNA, 33 bp, Homo sapien
gattggtatcaggacctcggatttggtatttac

SEQ ID NO: 375371 - DNA, 33 bp, Homo sapien
gaaaacacatgaaggcaaatatcaaggaaaaga

SEQ ID NO: 375372 - DNA, 33 bp, Homo sapien
gaaaacacatgaaggcgaatatcaaggaaaaga

SEQ ID NO: 375373 - DNA, 33 bp, Homo sapien
tagatttgcaaaccagccaatgaagtagtaaag

SEQ ID NO: 375374 - DNA, 33 bp, Homo sapien
tagatttgcaaaccagtcaatgaagtagtaaag

SEQ ID NO: 375375 - DNA, 33 bp, Homo sapien
ttaataggtacgaaaaagttctggaaaatagtt

SEQ ID NO: 375376 - DNA, 33 bp, Homo sapien
ttaataggtacgaaaaggttctggaaaatagtt

SEQ ID NO: 375377 - DNA, 33 bp, Homo sapien
tgcccaaatgattagacggttgaagtcctctct

SEQ ID NO: 375378 - DNA, 33 bp, Homo sapien
tgcccaaatgattagatggttgaagtcctctct

SEQ ID NO: 375379 - DNA, 33 bp, Homo sapien
gccggcctgtaggtcaatatttatgcctctccc

SEQ ID NO: 375380 - DNA, 33 bp, Homo sapien
gccggcctgtaggtcactatttatgcctctccc

SEQ ID NO: 375381 - DNA, 33 bp, Homo sapien
agctggtggataaataacccatttctctgcgag

SEQ ID NO: 375382 - DNA, 33 bp, Homo sapien
agctggtggataaataccccatttctctgcgag

SEQ ID NO: 375383 - DNA, 33 bp, Homo sapien
tggcccacagagtcacaaggccgctgtattagt

SEQ ID NO: 375384 - DNA, 33 bp, Homo sapien
tggcccacagagtcacgaggccgctgtattagt

SEQ ID NO: 375385 - DNA, 33 bp, Homo sapien
ggcccccatgctctgacgctctatgccactgct

SEQ ID NO: 375386 - DNA, 33 bp, Homo sapien
ggcccccatgctctgatgctctatgccactgct

SEQ ID NO: 375387 - DNA, 33 bp, Homo sapien
ggtgttaaggagaacaaaactcgtaggggctgg

SEQ ID NO: 375388 - DNA, 33 bp, Homo sapien
ggtgttaaggagaacagaactcgtaggggctgg

SEQ ID NO: 375389 - DNA, 33 bp, Homo sapien
accaagacacagaggacagaagtaacttgttca

SEQ ID NO: 375390 - DNA, 33 bp, Homo sapien
accaagacacagaggatagaagtaacttgttca

SEQ ID NO: 375391 - DNA, 33 bp, Homo sapien
ttcaaggggacataacagtaggtggccgtgcca

SEQ ID NO: 375392 - DNA, 33 bp, Homo sapien
ttcaaggggacataaccgtaggtggccgtgcca

SEQ ID NO: 375393 - DNA, 33 bp, Homo sapien
tggagtaatggtcaaaatgtcaaataggtcata

SEQ ID NO: 375394 - DNA, 33 bp, Homo sapien
tggagtaatggtcaaagtgtcaaataggtcata

SEQ ID NO: 375395 - DNA, 33 bp, Homo sapien
ctgaaagaataaagatcatctaagtaaatggaa

SEQ ID NO: 375396 - DNA, 33 bp, Homo sapien
ctgaaagaataaagatgatctaagtaaatggaa

SEQ ID NO: 375397 - DNA, 33 bp, Homo sapien
tttcatgtcttcattgaaccatgtgttacatga

SEQ ID NO: 375398 - DNA, 33 bp, Homo sapien
tttcatgtcttcattggaccatgtgttacatga

SEQ ID NO: 375399 - DNA, 33 bp, Homo sapien
cctagaaagttctttaaggttcttcccagtgac

SEQ ID NO: 375400 - DNA, 33 bp, Homo sapien
cctagaaagttctttatggttcttcccagtgac

SEQ ID NO: 375401 - DNA, 33 bp, Homo sapien
tttctcgtggtggttggaccgaggccttgagct

SEQ ID NO: 375402 - DNA, 33 bp, Homo sapien
tttctcgtggtggttgtaccgaggccttgagct

SEQ ID NO: 375403 - DNA, 33 bp, Homo sapien
ttttgccctttcatcaggaggactcggcaagaa

SEQ ID NO: 375404 - DNA, 33 bp, Homo sapien
ttttgccctttcatcatgaggactcggcaagaa

SEQ ID NO: 375405 - DNA, 33 bp, Homo sapien
gccttcatggtgcttacggtccaatgagggtga

SEQ ID NO: 375406 - DNA, 33 bp, Homo sapien
gccttcatggtgcttatggtccaatgagggtga

SEQ ID NO: 375407 - DNA, 33 bp, Homo sapien
aaaaaacatgtcataccgcctctcaaagtggct

SEQ ID NO: 375408 - DNA, 33 bp, Homo sapien
aaaaaacatgtcatactgcctctcaaagtggct

SEQ ID NO: 375409 - DNA, 33 bp, Homo sapien
aatttctgtgccttccactcaaggtagctgtga

SEQ ID NO: 375410 - DNA, 33 bp, Homo sapien
aatttctgtgccttccgctcaaggtagctgtga

SEQ ID NO: 375411 - DNA, 33 bp, Homo sapien
tatagtgctagataacaggaatgggagatttta

SEQ ID NO: 375412 - DNA, 33 bp, Homo sapien
tatagtgctagataacgggaatgggagatttta

SEQ ID NO: 375413 - DNA, 33 bp, Homo sapien
ccatctagtttctccaactgaaaaatatgatct

SEQ ID NO: 375414 - DNA, 33 bp, Homo sapien
ccatctagtttctccagctgaaaaatatgatct

SEQ ID NO: 375415 - DNA, 33 bp, Homo sapien
gcaacctccgctttccacgttcaaactattctc

SEQ ID NO: 375416 - DNA, 33 bp, Homo sapien
gcaacctccgctttccgcgttcaaactattctc

SEQ ID NO: 375417 - DNA, 33 bp, Homo sapien
ttggttcttctgctgacggaaacagccctgagc

SEQ ID NO: 375418 - DNA, 33 bp, Homo sapien
ttggttcttctgctgatggaaacagccctgagc

SEQ ID NO: 375419 - DNA, 33 bp, Homo sapien
ttgaacagagaagtagaccttcaaatatgactc

SEQ ID NO: 375420 - DNA, 33 bp, Homo sapien
ttgaacagagaagtaggccttcaaatatgactc

SEQ ID NO: 375421 - DNA, 33 bp, Homo sapien
tggaaccacgttgtccaagaatttccatatggt

SEQ ID NO: 375422 - DNA, 33 bp, Homo sapien
tggaaccacgttgtcccagaatttccatatggt

SEQ ID NO: 375423 - DNA, 33 bp, Homo sapien
aagctattgaactagacccttggttttcaaagt

SEQ ID NO: 375424 - DNA, 33 bp, Homo sapien
aagctattgaactagatccttggttttcaaagt

SEQ ID NO: 375425 - DNA, 33 bp, Homo sapien
gtgtttccatcccaaacgcccatttccagagct

SEQ ID NO: 375426 - DNA, 33 bp, Homo sapien
gtgtttccatcccaaatgcccatttccagagct

SEQ ID NO: 375427 - DNA, 33 bp, Homo sapien
gtcacatacatgtttacccatgatacacaagct

SEQ ID NO: 375428 - DNA, 33 bp, Homo sapien
gtcacatacatgtttatccatgatacacaagct

SEQ ID NO: 375429 - DNA, 33 bp, Homo sapien
tcttaggtagacagaactggattaatcatgagc

SEQ ID NO: 375430 - DNA, 33 bp, Homo sapien
tcttaggtagacagaattggattaatcatgagc

SEQ ID NO: 375431 - DNA, 33 bp, Homo sapien
cacccatgaacccatcactcaactcaagaacta

SEQ ID NO: 375432 - DNA, 33 bp, Homo sapien
cacccatgaacccatcgctcaactcaagaacta

SEQ ID NO: 375433 - DNA, 33 bp, Homo sapien
ttcctttctgcaaagacgcttttactgggtttt

SEQ ID NO: 375434 - DNA, 33 bp, Homo sapien
ttcctttctgcaaagatgcttttactgggtttt

SEQ ID NO: 375435 - DNA, 33 bp, Homo sapien
aaggggcatttctgcactgagttaaccatttac

SEQ ID NO: 375436 - DNA, 33 bp, Homo sapien
aaggggcatttctgcattgagttaaccatttac

SEQ ID NO: 375437 - DNA, 33 bp, Homo sapien
ctgagcctgatgttgcagagcattgtaacgtca

SEQ ID NO: 375438 - DNA, 33 bp, Homo sapien
ctgagcctgatgttgcggagcattgtaacgtca

SEQ ID NO: 375439 - DNA, 33 bp, Homo sapien
tacatgcttgtcacctcaaataggttctaaact

SEQ ID NO: 375440 - DNA, 33 bp, Homo sapien
tacatgcttgtcaccttaaataggttctaaact

SEQ ID NO: 375441 - DNA, 33 bp, Homo sapien
cactcttggagcctaccgcatggagttcagtct

SEQ ID NO: 375442 - DNA, 33 bp, Homo sapien
cactcttggagcctactgcatggagttcagtct

SEQ ID NO: 375443 - DNA, 33 bp, Homo sapien
gagtctgctaccttccaaccctgagtctgtatg

SEQ ID NO: 375444 - DNA, 33 bp, Homo sapien
gagtctgctaccttcctaccctgagtctgtatg

SEQ ID NO: 375445 - DNA, 33 bp, Homo sapien
acagcaaagaggcccccggctctggagcagaga

SEQ ID NO: 375446 - DNA, 33 bp, Homo sapien
acagcaaagaggcccctggctctggagcagaga

SEQ ID NO: 375447 - DNA, 33 bp, Homo sapien
atatcagaagcctttcgagtcacagtaccagtc

SEQ ID NO: 375448 - DNA, 33 bp, Homo sapien
atatcagaagcctttctagtcacagtaccagtc

SEQ ID NO: 375449 - DNA, 33 bp, Homo sapien
tctccttcatatatccaagatcgtattattggc

SEQ ID NO: 375450 - DNA, 33 bp, Homo sapien
tctccttcatatatcccagatcgtattattggc

SEQ ID NO: 375451 - DNA, 33 bp, Homo sapien
tgatcagcacacgcggcaaagaacaccatgtta

SEQ ID NO: 375452 - DNA, 33 bp, Homo sapien
tgatcagcacacgcgggaaagaacaccatgtta

SEQ ID NO: 375453 - DNA, 33 bp, Homo sapien
aggtttgttctacaggaaaattgtgtgtcatgg

SEQ ID NO: 375454 - DNA, 33 bp, Homo sapien
aggtttgttctacaggtaaattgtgtgtcatgg

SEQ ID NO: 375455 - DNA, 33 bp, Homo sapien
tcttaagcaagtcacaaagtgatcaagtcacta

SEQ ID NO: 375456 - DNA, 33 bp, Homo sapien
tcttaagcaagtcacacagtgatcaagtcacta

SEQ ID NO: 375457 - DNA, 33 bp, Homo sapien
tggtgtgtgaatcagtaaaactgtgtggcctgg

SEQ ID NO: 375458 - DNA, 33 bp, Homo sapien
tggtgtgtgaatcagtgaaactgtgtggcctgg

SEQ ID NO: 375459 - DNA, 33 bp, Homo sapien
gtaacgttggcactaaaagattcaccagtgccc

SEQ ID NO: 375460 - DNA, 33 bp, Homo sapien
gtaacgttggcactaatagattcaccagtgccc

SEQ ID NO: 375461 - DNA, 33 bp, Homo sapien
ggattggcaggagaggacacctatagtatcaag

SEQ ID NO: 375462 - DNA, 33 bp, Homo sapien
ggattggcaggagaggtcacctatagtatcaag

SEQ ID NO: 375463 - DNA, 33 bp, Homo sapien
ggtaaagtgctctcagcagggtcaggctctcag

SEQ ID NO: 375464 - DNA, 33 bp, Homo sapien
ggtaaagtgctctcagtagggtcaggctctcag

SEQ ID NO: 375465 - DNA, 33 bp, Homo sapien
atatggaagaagctagaccataccttgtcaaac

SEQ ID NO: 375466 - DNA, 33 bp, Homo sapien
atatggaagaagctaggccataccttgtcaaac

SEQ ID NO: 375467 - DNA, 33 bp, Homo sapien
caacattcaggccaccacaggctatggctccac

SEQ ID NO: 375468 - DNA, 33 bp, Homo sapien
caacattcaggccaccgcaggctatggctccac

SEQ ID NO: 375469 - DNA, 33 bp, Homo sapien
agggtcctcatggcaccgcttttaacgtcccag

SEQ ID NO: 375470 - DNA, 33 bp, Homo sapien
agggtcctcatggcactgcttttaacgtcccag

SEQ ID NO: 375471 - DNA, 33 bp, Homo sapien
cgcccacgagctcctacaagaagacagagcaga

SEQ ID NO: 375472 - DNA, 33 bp, Homo sapien
cgcccacgagctcctagaagaagacagagcaga

SEQ ID NO: 375473 - DNA, 33 bp, Homo sapien
cttccctgtggctcaacttcctcactgggttcc

SEQ ID NO: 375474 - DNA, 33 bp, Homo sapien
cttccctgtggctcaatttcctcactgggttcc

SEQ ID NO: 375475 - DNA, 33 bp, Homo sapien
atcaaaatgaaacaacagtaagtagcagaacca

SEQ ID NO: 375476 - DNA, 33 bp, Homo sapien
atcaaaatgaaacaacggtaagtagcagaacca

SEQ ID NO: 375477 - DNA, 33 bp, Homo sapien
atagatattgggctgacggaagattctgatgat

SEQ ID NO: 375478 - DNA, 33 bp, Homo sapien
atagatattgggctgatggaagattctgatgat

SEQ ID NO: 375479 - DNA, 33 bp, Homo sapien
acctgttgaaacagcccgaaaaccacagcctga

SEQ ID NO: 375480 - DNA, 33 bp, Homo sapien
acctgttgaaacagcctgaaaaccacagcctga

SEQ ID NO: 375481 - DNA, 33 bp, Homo sapien
ccctggaggccagccccgagttgagactactgg

SEQ ID NO: 375482 - DNA, 33 bp, Homo sapien
ccctggaggccagcccggagttgagactactgg

SEQ ID NO: 375483 - DNA, 33 bp, Homo sapien
atgactggaaaaaggacctgcaagccggtctgc

SEQ ID NO: 375484 - DNA, 33 bp, Homo sapien
atgactggaaaaaggatctgcaagccggtctgc

SEQ ID NO: 375485 - DNA, 33 bp, Homo sapien
gatcatttactcataacagctcagtaaggtagt

SEQ ID NO: 375486 - DNA, 33 bp, Homo sapien
gatcatttactcataatagctcagtaaggtagt

SEQ ID NO: 375487 - DNA, 33 bp, Homo sapien
agataatctggtgaacaagtgctttggtggaaa

SEQ ID NO: 375488 - DNA, 33 bp, Homo sapien
agataatctggtgaacgagtgctttggtggaaa

SEQ ID NO: 375489 - DNA, 33 bp, Homo sapien
tgaatctgaaccagtaggtgttggggggatgat

SEQ ID NO: 375490 - DNA, 33 bp, Homo sapien
tgaatctgaaccagtatgtgttggggggatgat

SEQ ID NO: 375491 - DNA, 33 bp, Homo sapien
ggctgtttaggctgcaccaattggagacttgct

SEQ ID NO: 375492 - DNA, 33 bp, Homo sapien
ggctgtttaggctgcatcaattggagacttgct

SEQ ID NO: 375493 - DNA, 33 bp, Homo sapien
ctccttgaacctgacagtcccactatacaggtt

SEQ ID NO: 375494 - DNA, 33 bp, Homo sapien
ctccttgaacctgacattcccactatacaggtt

SEQ ID NO: 375495 - DNA, 33 bp, Homo sapien
acgttgtttttcactgcatgtatttttgtggtg

SEQ ID NO: 375496 - DNA, 33 bp, Homo sapien
acgttgtttttcactgtatgtatttttgtggtg

SEQ ID NO: 375497 - DNA, 33 bp, Homo sapien
ctactttccttgctgaactccacattaaaggat

SEQ ID NO: 375498 - DNA, 33 bp, Homo sapien
ctactttccttgctgagctccacattaaaggat

SEQ ID NO: 375499 - DNA, 33 bp, Homo sapien
acaggtttcattgggaatcacccatttaaagag

SEQ ID NO: 375500 - DNA, 33 bp, Homo sapien
acaggtttcattgggagtcacccatttaaagag

SEQ ID NO: 375501 - DNA, 33 bp, Homo sapien
atcctcgttcaaaaaacagtctactttataaat

SEQ ID NO: 375502 - DNA, 33 bp, Homo sapien
atcctcgttcaaaaaagagtctactttataaat

SEQ ID NO: 375503 - DNA, 33 bp, Homo sapien
gttgcagctgtacaccaaatagttagggaaggc

SEQ ID NO: 375504 - DNA, 33 bp, Homo sapien
gttgcagctgtacaccgaatagttagggaaggc

SEQ ID NO: 375505 - DNA, 33 bp, Homo sapien
gaaagaaagagttgtacgtttcctgccaagagt

SEQ ID NO: 375506 - DNA, 33 bp, Homo sapien
gaaagaaagagttgtatgtttcctgccaagagt

SEQ ID NO: 375507 - DNA, 33 bp, Homo sapien
aaggtcagtccaataacgaatatgtcttctgta

SEQ ID NO: 375508 - DNA, 33 bp, Homo sapien
aaggtcagtccaataatgaatatgtcttctgta

SEQ ID NO: 375509 - DNA, 33 bp, Homo sapien
aggcagcgggagttgaaaagaaacgatattagt

SEQ ID NO: 375510 - DNA, 33 bp, Homo sapien
aggcagcgggagttgagaagaaacgatattagt

SEQ ID NO: 375511 - DNA, 33 bp, Homo sapien
ggaatgatcagcatgacggacctccggaactga

SEQ ID NO: 375512 - DNA, 33 bp, Homo sapien
ggaatgatcagcatgagggacctccggaactga

SEQ ID NO: 375513 - DNA, 33 bp, Homo sapien
tgtacctgaggaagcgccatcatgagcccgggg

SEQ ID NO: 375514 - DNA, 33 bp, Homo sapien
tgtacctgaggaagcgtcatcatgagcccgggg

SEQ ID NO: 375515 - DNA, 33 bp, Homo sapien
gcacgacacctttggcacgcaccaggaagccaa

SEQ ID NO: 375516 - DNA, 33 bp, Homo sapien
gcacgacacctttggcccgcaccaggaagccaa

SEQ ID NO: 375517 - DNA, 33 bp, Homo sapien
caaagtggaagaataccgcttggccctaactcc

SEQ ID NO: 375518 - DNA, 33 bp, Homo sapien
caaagtggaagaatactgcttggccctaactcc

SEQ ID NO: 375519 - DNA, 33 bp, Homo sapien
tcgtggaactcagtaaacccagaaagctgtgac

SEQ ID NO: 375520 - DNA, 33 bp, Homo sapien
tcgtggaactcagtaaccccagaaagctgtgac

SEQ ID NO: 375521 - DNA, 33 bp, Homo sapien
ccagctagaggggcaacttaaaggcatcaggta

SEQ ID NO: 375522 - DNA, 33 bp, Homo sapien
ccagctagaggggcaatttaaaggcatcaggta

SEQ ID NO: 375523 - DNA, 33 bp, Homo sapien
tctctcctgcacataccggaggactactgtgtt

SEQ ID NO: 375524 - DNA, 33 bp, Homo sapien
tctctcctgcacatactggaggactactgtgtt

SEQ ID NO: 375525 - DNA, 33 bp, Homo sapien
acattttatcttaaggaccaattccaatccatt

SEQ ID NO: 375526 - DNA, 33 bp, Homo sapien
acattttatcttaagggccaattccaatccatt

SEQ ID NO: 375527 - DNA, 33 bp, Homo sapien
gaaggggcatttctgaataagatctgggccgct

SEQ ID NO: 375528 - DNA, 33 bp, Homo sapien
gaaggggcatttctgattaagatctgggccgct

SEQ ID NO: 375529 - DNA, 33 bp, Homo sapien
ttcatcagagcagtgggaaggggtcttttgtga

SEQ ID NO: 375530 - DNA, 33 bp, Homo sapien
ttcatcagagcagtggtaaggggtcttttgtga

SEQ ID NO: 375531 - DNA, 33 bp, Homo sapien
tcaataagaatttccaacaaatcattttctcct

SEQ ID NO: 375532 - DNA, 33 bp, Homo sapien
tcaataagaatttccagcaaatcattttctcct

SEQ ID NO: 375533 - DNA, 33 bp, Homo sapien
actaacattaagcagcaatgatttttatagtct

SEQ ID NO: 375534 - DNA, 33 bp, Homo sapien
actaacattaagcagctatgatttttatagtct

SEQ ID NO: 375535 - DNA, 33 bp, Homo sapien
agccaagacaggatacaggttaggcacctcctt

SEQ ID NO: 375536 - DNA, 33 bp, Homo sapien
agccaagacaggatacgggttaggcacctcctt

SEQ ID NO: 375537 - DNA, 33 bp, Homo sapien
ctcaggatagctgacaataaagcactcctttta

SEQ ID NO: 375538 - DNA, 33 bp, Homo sapien
ctcaggatagctgacagtaaagcactcctttta

SEQ ID NO: 375539 - DNA, 33 bp, Homo sapien
tataggattcaaatgagagctttatttcaattt

SEQ ID NO: 375540 - DNA, 33 bp, Homo sapien
tataggattcaaatgatagctttatttcaattt

SEQ ID NO: 375541 - DNA, 33 bp, Homo sapien
tattttttccactgaaatcttcagtccctcaaa

SEQ ID NO: 375542 - DNA, 33 bp, Homo sapien
tattttttccactgaactcttcagtccctcaaa

SEQ ID NO: 375543 - DNA, 33 bp, Homo sapien
ttgattggcagtctccaaattgtatgattcaat

SEQ ID NO: 375544 - DNA, 33 bp, Homo sapien
ttgattggcagtctccgaattgtatgattcaat

SEQ ID NO: 375545 - DNA, 33 bp, Homo sapien
aaatgttaggagaaaacgtcatagaaatccagg

SEQ ID NO: 375546 - DNA, 33 bp, Homo sapien
aaatgttaggagaaaatgtcatagaaatccagg

SEQ ID NO: 375547 - DNA, 33 bp, Homo sapien
taaaagatgccataacgataatttgcttttaaa

SEQ ID NO: 375548 - DNA, 33 bp, Homo sapien
taaaagatgccataactataatttgcttttaaa

SEQ ID NO: 375549 - DNA, 33 bp, Homo sapien
taccactaaggaaaaaaccccagtgcttggtag

SEQ ID NO: 375550 - DNA, 33 bp, Homo sapien
taccactaaggaaaaatccccagtgcttggtag

SEQ ID NO: 375551 - DNA, 33 bp, Homo sapien
acttccctgtatgatacgttaattggatcagat

SEQ ID NO: 375552 - DNA, 33 bp, Homo sapien
acttccctgtatgatatgttaattggatcagat

SEQ ID NO: 375553 - DNA, 33 bp, Homo sapien
ctatgatttctagccagctagggacttcagaat

SEQ ID NO: 375554 - DNA, 33 bp, Homo sapien
ctatgatttctagccatctagggacttcagaat

SEQ ID NO: 375555 - DNA, 33 bp, Homo sapien
tggcattccaagaatacaaaattgccacttacc

SEQ ID NO: 375556 - DNA, 33 bp, Homo sapien
tggcattccaagaatataaaattgccacttacc

SEQ ID NO: 375557 - DNA, 33 bp, Homo sapien
caaactctagcacaaccacgacccttgaatcaa

SEQ ID NO: 375558 - DNA, 33 bp, Homo sapien
caaactctagcacaacgacgacccttgaatcaa

SEQ ID NO: 375559 - DNA, 33 bp, Homo sapien
actaaatgtaaaagaacgcagaagagaggctga

SEQ ID NO: 375560 - DNA, 33 bp, Homo sapien
actaaatgtaaaagaatgcagaagagaggctga

SEQ ID NO: 375561 - DNA, 33 bp, Homo sapien
ttaatgtaaccaagaaattaaatcaatctatgc

SEQ ID NO: 375562 - DNA, 33 bp, Homo sapien
ttaatgtaaccaagaagttaaatcaatctatgc

SEQ ID NO: 375563 - DNA, 33 bp, Homo sapien
agaaaagggctgtggaatcatatagccctggct

SEQ ID NO: 375564 - DNA, 33 bp, Homo sapien
agaaaagggctgtggagtcatatagccctggct

SEQ ID NO: 375565 - DNA, 33 bp, Homo sapien
atttctgggaaaggagaagttggaaggccgcct

SEQ ID NO: 375566 - DNA, 33 bp, Homo sapien
atttctgggaaaggagtagttggaaggccgcct

SEQ ID NO: 375567 - DNA, 33 bp, Homo sapien
cttcttattctcttgacagttgtcttgaaattt

SEQ ID NO: 375568 - DNA, 33 bp, Homo sapien
cttcttattctcttgatagttgtcttgaaattt

SEQ ID NO: 375569 - DNA, 33 bp, Homo sapien
tagtaaccttgcatgccagactggctaataatt

SEQ ID NO: 375570 - DNA, 33 bp, Homo sapien
tagtaaccttgcatgctagactggctaataatt

SEQ ID NO: 375571 - DNA, 33 bp, Homo sapien
ctatacaggaccattcccgtgaaaagttgaaag

SEQ ID NO: 375572 - DNA, 33 bp, Homo sapien
ctatacaggaccattctcgtgaaaagttgaaag

SEQ ID NO: 375573 - DNA, 33 bp, Homo sapien
ccttccatagactccacctgacaagacccagtg

SEQ ID NO: 375574 - DNA, 33 bp, Homo sapien
ccttccatagactccatctgacaagacccagtg

SEQ ID NO: 375575 - DNA, 33 bp, Homo sapien
agaatcatggtctctacagaattggagcaggag

SEQ ID NO: 375576 - DNA, 33 bp, Homo sapien
agaatcatggtctctagagaattggagcaggag

SEQ ID NO: 375577 - DNA, 33 bp, Homo sapien
attgcttagagataaagatatggcctcatacca

SEQ ID NO: 375578 - DNA, 33 bp, Homo sapien
attgcttagagataaatatatggcctcatacca

SEQ ID NO: 375579 - DNA, 33 bp, Homo sapien
tccccagaggcctctacattaacttccagtctt

SEQ ID NO: 375580 - DNA, 33 bp, Homo sapien
tccccagaggcctctatattaacttccagtctt

SEQ ID NO: 375581 - DNA, 33 bp, Homo sapien
gcataaaattccaggacgggaaagagagccacg

SEQ ID NO: 375582 - DNA, 33 bp, Homo sapien
gcataaaattccaggatgggaaagagagccacg

SEQ ID NO: 375583 - DNA, 33 bp, Homo sapien
tgggtagggccaggtaaagccacagagacagca

SEQ ID NO: 375584 - DNA, 33 bp, Homo sapien
tgggtagggccaggtagagccacagagacagca

SEQ ID NO: 375585 - DNA, 33 bp, Homo sapien
gcaccctctgaaataactctgcaaaccactggg

SEQ ID NO: 375586 - DNA, 33 bp, Homo sapien
gcaccctctgaaataattctgcaaaccactggg

SEQ ID NO: 375587 - DNA, 33 bp, Homo sapien
aattagcatggatctaagcaaaacctagaagtc

SEQ ID NO: 375588 - DNA, 33 bp, Homo sapien
aattagcatggatctaggcaaaacctagaagtc

SEQ ID NO: 375589 - DNA, 33 bp, Homo sapien
atcttctgagacacaaagtcctgctcaataccc

SEQ ID NO: 375590 - DNA, 33 bp, Homo sapien
atcttctgagacacaacgtcctgctcaataccc

SEQ ID NO: 375591 - DNA, 33 bp, Homo sapien
tgcctctacttctccaactaccagctgggtgac

SEQ ID NO: 375592 - DNA, 33 bp, Homo sapien
tgcctctacttctccatctaccagctgggtgac

SEQ ID NO: 375593 - DNA, 33 bp, Homo sapien
atgctttcatggaacccgaggaaagaatgcact

SEQ ID NO: 375594 - DNA, 33 bp, Homo sapien
atgctttcatggaacctgaggaaagaatgcact

SEQ ID NO: 375595 - DNA, 33 bp, Homo sapien
tcttctcccagataaactcataggtcaggaggc

SEQ ID NO: 375596 - DNA, 33 bp, Homo sapien
tcttctcccagataaattcataggtcaggaggc

SEQ ID NO: 375597 - DNA, 33 bp, Homo sapien
tgtttgaataaatatacgaatggatggctgagc

SEQ ID NO: 375598 - DNA, 33 bp, Homo sapien
tgtttgaataaatatatgaatggatggctgagc

SEQ ID NO: 375599 - DNA, 33 bp, Homo sapien
gacaactatggagagacgttagtgctacccgtg

SEQ ID NO: 375600 - DNA, 33 bp, Homo sapien
gacaactatggagagatgttagtgctacccgtg

SEQ ID NO: 375601 - DNA, 33 bp, Homo sapien
acctgccgttagcccaatgataatttgatcaca

SEQ ID NO: 375602 - DNA, 33 bp, Homo sapien
acctgccgttagcccagtgataatttgatcaca

SEQ ID NO: 375603 - DNA, 33 bp, Homo sapien
tcaatgtaccaggggaactgacatgcctgggaa

SEQ ID NO: 375604 - DNA, 33 bp, Homo sapien
tcaatgtaccaggggagctgacatgcctgggaa

SEQ ID NO: 375605 - DNA, 33 bp, Homo sapien
aaaatacagttgatgcacatacacctaccctga

SEQ ID NO: 375606 - DNA, 33 bp, Homo sapien
aaaatacagttgatgctcatacacctaccctga

SEQ ID NO: 375607 - DNA, 33 bp, Homo sapien
atcccagcagagtccacagttgggaggatggaa

SEQ ID NO: 375608 - DNA, 33 bp, Homo sapien
atcccagcagagtccatagttgggaggatggaa

SEQ ID NO: 375609 - DNA, 33 bp, Homo sapien
tatcatcaggaagcgacagagctgctagtacac

SEQ ID NO: 375610 - DNA, 33 bp, Homo sapien
tatcatcaggaagcgatagagctgctagtacac

SEQ ID NO: 375611 - DNA, 33 bp, Homo sapien
gagctgctagtacacaatggggatgaagaggaa

SEQ ID NO: 375612 - DNA, 33 bp, Homo sapien
gagctgctagtacacagtggggatgaagaggaa

SEQ ID NO: 375613 - DNA, 33 bp, Homo sapien
ctcaaaaggtcaaccaatccaggaatgataagt

SEQ ID NO: 375614 - DNA, 33 bp, Homo sapien
ctcaaaaggtcaaccagtccaggaatgataagt

SEQ ID NO: 375615 - DNA, 33 bp, Homo sapien
tgaagctttaatgtgcagattctcaaaagcctt

SEQ ID NO: 375616 - DNA, 33 bp, Homo sapien
tgaagctttaatgtgcggattctcaaaagcctt

SEQ ID NO: 375617 - DNA, 33 bp, Homo sapien
gagctgatggctaccacgtgaaaatgccgaccc

SEQ ID NO: 375618 - DNA, 33 bp, Homo sapien
gagctgatggctaccaggtgaaaatgccgaccc

SEQ ID NO: 375619 - DNA, 33 bp, Homo sapien
cagaacctgggtgtgcactgattactgtctgcg

SEQ ID NO: 375620 - DNA, 33 bp, Homo sapien
cagaacctgggtgtgcgctgattactgtctgcg

SEQ ID NO: 375621 - DNA, 33 bp, Homo sapien
cacagcagagaaaaaaacaaatcaaattgaggg

SEQ ID NO: 375622 - DNA, 33 bp, Homo sapien
cacagcagagaaaaaagcaaatcaaattgaggg

SEQ ID NO: 375623 - DNA, 33 bp, Homo sapien
gccctatgcccctgaaacttgccaagctccttc

SEQ ID NO: 375624 - DNA, 33 bp, Homo sapien
gccctatgcccctgaatcttgccaagctccttc

SEQ ID NO: 375625 - DNA, 33 bp, Homo sapien
ttcaccgagagaccaacctatatttgcagctcc

SEQ ID NO: 375626 - DNA, 33 bp, Homo sapien
ttcaccgagagaccaatctatatttgcagctcc

SEQ ID NO: 375627 - DNA, 33 bp, Homo sapien
ctgacagcaagagagccgaaggtaaaaactgca

SEQ ID NO: 375628 - DNA, 33 bp, Homo sapien
ctgacagcaagagagctgaaggtaaaaactgca

SEQ ID NO: 375629 - DNA, 33 bp, Homo sapien
aggttttggtggaagcactatacttcacttctg

SEQ ID NO: 375630 - DNA, 33 bp, Homo sapien
aggttttggtggaagcgctatacttcacttctg

SEQ ID NO: 375631 - DNA, 33 bp, Homo sapien
gtcttcagacggagcacggccctgctgtcacct

SEQ ID NO: 375632 - DNA, 33 bp, Homo sapien
gtcttcagacggagcatggccctgctgtcacct

SEQ ID NO: 375633 - DNA, 33 bp, Homo sapien
gcctgtctagggaacaatagccagggctcaagt

SEQ ID NO: 375634 - DNA, 33 bp, Homo sapien
gcctgtctagggaacagtagccagggctcaagt

SEQ ID NO: 375635 - DNA, 33 bp, Homo sapien
ttgagcaatgagtgccacaagtttcccattttg

SEQ ID NO: 375636 - DNA, 33 bp, Homo sapien
ttgagcaatgagtgccgcaagtttcccattttg

SEQ ID NO: 375637 - DNA, 33 bp, Homo sapien
aaagatgactaagagcaagaggattagagaaga

SEQ ID NO: 375638 - DNA, 33 bp, Homo sapien
aaagatgactaagagcgagaggattagagaaga

SEQ ID NO: 375639 - DNA, 33 bp, Homo sapien
catgaggtaatcctgccgatgatgtatggcccg

SEQ ID NO: 375640 - DNA, 33 bp, Homo sapien
catgaggtaatcctgctgatgatgtatggcccg

SEQ ID NO: 375641 - DNA, 33 bp, Homo sapien
gggattgcagagagaaaggtgcccaggaaccta

SEQ ID NO: 375642 - DNA, 33 bp, Homo sapien
gggattgcagagagaatggtgcccaggaaccta

SEQ ID NO: 375643 - DNA, 33 bp, Homo sapien
taccttttagactttgcaggaaataacagtaca

SEQ ID NO: 375644 - DNA, 33 bp, Homo sapien
taccttttagactttgtaggaaataacagtaca

SEQ ID NO: 375645 - DNA, 33 bp, Homo sapien
gtcatggggcaataagaaggcagaaagagtaaa

SEQ ID NO: 375646 - DNA, 33 bp, Homo sapien
gtcatggggcaataaggaggcagaaagagtaaa

SEQ ID NO: 375647 - DNA, 33 bp, Homo sapien
aattcttaacaagactaacttcgcattggctag

SEQ ID NO: 375648 - DNA, 33 bp, Homo sapien
aattcttaacaagactcacttcgcattggctag

SEQ ID NO: 375649 - DNA, 33 bp, Homo sapien
agagaacaggtcaggacaattctgtcaccgtgt

SEQ ID NO: 375650 - DNA, 33 bp, Homo sapien
agagaacaggtcaggataattctgtcaccgtgt

SEQ ID NO: 375651 - DNA, 33 bp, Homo sapien
ttacatatggcatatcactgttttcatgctaca

SEQ ID NO: 375652 - DNA, 33 bp, Homo sapien
ttacatatggcatatcgctgttttcatgctaca

SEQ ID NO: 375653 - DNA, 33 bp, Homo sapien
tgcagagcttccaacaagaggttgcttgctctg

SEQ ID NO: 375654 - DNA, 33 bp, Homo sapien
tgcagagcttccaacaggaggttgcttgctctg

SEQ ID NO: 375655 - DNA, 33 bp, Homo sapien
cacatcagatttgcaacgttctgtagaaagcac

SEQ ID NO: 375656 - DNA, 33 bp, Homo sapien
cacatcagatttgcaatgttctgtagaaagcac

SEQ ID NO: 375657 - DNA, 33 bp, Homo sapien
tcttggtttctgctgacagccagcatttcctgg

SEQ ID NO: 375658 - DNA, 33 bp, Homo sapien
tcttggtttctgctgagagccagcatttcctgg

SEQ ID NO: 375659 - DNA, 33 bp, Homo sapien
aaagggcagaaacagccgaattaggtgttgtcc

SEQ ID NO: 375660 - DNA, 33 bp, Homo sapien
aaagggcagaaacagctgaattaggtgttgtcc

SEQ ID NO: 375661 - DNA, 33 bp, Homo sapien
tgcctgctttgcccaaccaaatcctactcatcc

SEQ ID NO: 375662 - DNA, 33 bp, Homo sapien
tgcctgctttgcccaatcaaatcctactcatcc

SEQ ID NO: 375663 - DNA, 33 bp, Homo sapien
agtgattatgcaatacacactcacgtaagtgca

SEQ ID NO: 375664 - DNA, 33 bp, Homo sapien
agtgattatgcaatacgcactcacgtaagtgca

SEQ ID NO: 375665 - DNA, 33 bp, Homo sapien
aacaagacaggctgcacgggtgttgagaggccc

SEQ ID NO: 375666 - DNA, 33 bp, Homo sapien
aacaagacaggctgcatgggtgttgagaggccc

SEQ ID NO: 375667 - DNA, 33 bp, Homo sapien
atttcaggacagaaatcagtaggatcttctgaa

SEQ ID NO: 375668 - DNA, 33 bp, Homo sapien
atttcaggacagaaatgagtaggatcttctgaa

SEQ ID NO: 375669 - DNA, 33 bp, Homo sapien
agttttccaatccttcactccggtctatgaccc

SEQ ID NO: 375670 - DNA, 33 bp, Homo sapien
agttttccaatccttcgctccggtctatgaccc

SEQ ID NO: 375671 - DNA, 33 bp, Homo sapien
accaggtaacatctagacatctgagtccgagac

SEQ ID NO: 375672 - DNA, 33 bp, Homo sapien
accaggtaacatctagtcatctgagtccgagac

SEQ ID NO: 375673 - DNA, 33 bp, Homo sapien
agtccacacgtgcagcaaaagaggagatgtgac

SEQ ID NO: 375674 - DNA, 33 bp, Homo sapien
agtccacacgtgcagcgaaagaggagatgtgac

SEQ ID NO: 375675 - DNA, 33 bp, Homo sapien
ttcttagttcctttgagattcacaggttttggt

SEQ ID NO: 375676 - DNA, 33 bp, Homo sapien
ttcttagttcctttgatattcacaggttttggt

SEQ ID NO: 375677 - DNA, 33 bp, Homo sapien
gcatcttcctcgcagaaaagtcactcccattat

SEQ ID NO: 375678 - DNA, 33 bp, Homo sapien
gcatcttcctcgcagacaagtcactcccattat

SEQ ID NO: 375679 - DNA, 33 bp, Homo sapien
gaattcattatttccacaatgggaaggagtggt

SEQ ID NO: 375680 - DNA, 33 bp, Homo sapien
gaattcattatttccagaatgggaaggagtggt

SEQ ID NO: 375681 - DNA, 33 bp, Homo sapien
tctttaaaggatttgacggagaaggaaagtggt

SEQ ID NO: 375682 - DNA, 33 bp, Homo sapien
tctttaaaggatttgatggagaaggaaagtggt

SEQ ID NO: 375683 - DNA, 33 bp, Homo sapien
agtgggacaattcctcaagtcctttaatctgcc

SEQ ID NO: 375684 - DNA, 33 bp, Homo sapien
agtgggacaattcctcgagtcctttaatctgcc

SEQ ID NO: 375685 - DNA, 33 bp, Homo sapien
atagtgtgggaaggaaaaaacaactattgctaa

SEQ ID NO: 375686 - DNA, 33 bp, Homo sapien
atagtgtgggaaggaagaaacaactattgctaa

SEQ ID NO: 375687 - DNA, 33 bp, Homo sapien
tttcatggcaacactcaacaacccagaagttac

SEQ ID NO: 375688 - DNA, 33 bp, Homo sapien
tttcatggcaacactcgacaacccagaagttac

SEQ ID NO: 375689 - DNA, 33 bp, Homo sapien
ctggcaatgttgttgacgctggacatacagaag

SEQ ID NO: 375690 - DNA, 33 bp, Homo sapien
ctggcaatgttgttgatgctggacatacagaag

SEQ ID NO: 375691 - DNA, 33 bp, Homo sapien
cgcagctcaaacttcaggtaagatgggcctggc

SEQ ID NO: 375692 - DNA, 33 bp, Homo sapien
cgcagctcaaacttcatgtaagatgggcctggc

SEQ ID NO: 375693 - DNA, 33 bp, Homo sapien
actgcctgtcaaaaatgaaatgaggggccccag

SEQ ID NO: 375694 - DNA, 33 bp, Homo sapien
actgcctgtcaaaaattaaatgaggggccccag

SEQ ID NO: 375695 - DNA, 33 bp, Homo sapien
taggtgagtaaatcgaagaacagggtagcaaag

SEQ ID NO: 375696 - DNA, 33 bp, Homo sapien
taggtgagtaaatcgaggaacagggtagcaaag

SEQ ID NO: 375697 - DNA, 33 bp, Homo sapien
ggaggagagacttgaacggtggtggcacaggct

SEQ ID NO: 375698 - DNA, 33 bp, Homo sapien
ggaggagagacttgaagggtggtggcacaggct

SEQ ID NO: 375699 - DNA, 33 bp, Homo sapien
gtattttggaaggggacatctaagttccaggca

SEQ ID NO: 375700 - DNA, 33 bp, Homo sapien
gtattttggaaggggatatctaagttccaggca

SEQ ID NO: 375701 - DNA, 33 bp, Homo sapien
tgatggatcaaggctacacttttacctcacccc

SEQ ID NO: 375702 - DNA, 33 bp, Homo sapien
tgatggatcaaggctatacttttacctcacccc

SEQ ID NO: 375703 - DNA, 33 bp, Homo sapien
taacagacatgagctaccctttcaaagaggagt

SEQ ID NO: 375704 - DNA, 33 bp, Homo sapien
taacagacatgagctatcctttcaaagaggagt

SEQ ID NO: 375705 - DNA, 33 bp, Homo sapien
ttttctacacatgaaaaattccaatgactaaat

SEQ ID NO: 375706 - DNA, 33 bp, Homo sapien
ttttctacacatgaaacattccaatgactaaat

SEQ ID NO: 375707 - DNA, 33 bp, Homo sapien
attactaacaccataacataaacattccttagt

SEQ ID NO: 375708 - DNA, 33 bp, Homo sapien
attactaacaccataagataaacattccttagt

SEQ ID NO: 375709 - DNA, 33 bp, Homo sapien
aagaaacgaatgcagacggtctgagggatgtgt

SEQ ID NO: 375710 - DNA, 33 bp, Homo sapien
aagaaacgaatgcagatggtctgagggatgtgt

SEQ ID NO: 375711 - DNA, 33 bp, Homo sapien
tctggtctgtgtctgacgggagggtttaggtaa

SEQ ID NO: 375712 - DNA, 33 bp, Homo sapien
tctggtctgtgtctgatgggagggtttaggtaa

SEQ ID NO: 375713 - DNA, 33 bp, Homo sapien
aaaatgttagtggaagaccttgagaaagagaag

SEQ ID NO: 375714 - DNA, 33 bp, Homo sapien
aaaatgttagtggaagtccttgagaaagagaag

SEQ ID NO: 375715 - DNA, 33 bp, Homo sapien
tgctaatgagtgaaaacgaactttaaaatccga

SEQ ID NO: 375716 - DNA, 33 bp, Homo sapien
tgctaatgagtgaaaatgaactttaaaatccga

SEQ ID NO: 375717 - DNA, 33 bp, Homo sapien
ctcaaacctgaatccaaatttttgatgccacaa

SEQ ID NO: 375718 - DNA, 33 bp, Homo sapien
ctcaaacctgaatccacatttttgatgccacaa

SEQ ID NO: 375719 - DNA, 33 bp, Homo sapien
tgtcaaaaattgatggccattgtattagtccat

SEQ ID NO: 375720 - DNA, 33 bp, Homo sapien
tgtcaaaaattgatgggcattgtattagtccat

SEQ ID NO: 375721 - DNA, 33 bp, Homo sapien
tcttacgctttagaacgattccaatctatgcat

SEQ ID NO: 375722 - DNA, 33 bp, Homo sapien
tcttacgctttagaactattccaatctatgcat

SEQ ID NO: 375723 - DNA, 33 bp, Homo sapien
tcccactggctgaaccaaactgggaatgaagtg

SEQ ID NO: 375724 - DNA, 33 bp, Homo sapien
tcccactggctgaacccaactgggaatgaagtg

SEQ ID NO: 375725 - DNA, 33 bp, Homo sapien
tcactcacaatcataagaatagcatgggggtaa

SEQ ID NO: 375726 - DNA, 33 bp, Homo sapien
tcactcacaatcataataatagcatgggggtaa

SEQ ID NO: 375727 - DNA, 33 bp, Homo sapien
tttactatgtttccaacgctggtactaagtcac

SEQ ID NO: 375728 - DNA, 33 bp, Homo sapien
tttactatgtttccaatgctggtactaagtcac

SEQ ID NO: 375729 - DNA, 33 bp, Homo sapien
gaaatatacacggtgcaataagtgttggcaatg

SEQ ID NO: 375730 - DNA, 33 bp, Homo sapien
gaaatatacacggtgcgataagtgttggcaatg

SEQ ID NO: 375731 - DNA, 33 bp, Homo sapien
aatttttgggagacacaaacattgagtccattg

SEQ ID NO: 375732 - DNA, 33 bp, Homo sapien
aatttttgggagacacgaacattgagtccattg

SEQ ID NO: 375733 - DNA, 33 bp, Homo sapien
taaacccagtcatccaatatcaagaagagccat

SEQ ID NO: 375734 - DNA, 33 bp, Homo sapien
taaacccagtcatccagtatcaagaagagccat

SEQ ID NO: 375735 - DNA, 33 bp, Homo sapien
ggcgcttcctgagaaacgcatcctggtcaaata

SEQ ID NO: 375736 - DNA, 33 bp, Homo sapien
ggcgcttcctgagaaatgcatcctggtcaaata

SEQ ID NO: 375737 - DNA, 33 bp, Homo sapien
aagcacagcccttggacatatgacattctaatt

SEQ ID NO: 375738 - DNA, 33 bp, Homo sapien
aagcacagcccttggatatatgacattctaatt

SEQ ID NO: 375739 - DNA, 33 bp, Homo sapien
catgttgtcccaacgcaattaattttttccttc

SEQ ID NO: 375740 - DNA, 33 bp, Homo sapien
catgttgtcccaacgcgattaattttttccttc

SEQ ID NO: 375741 - DNA, 33 bp, Homo sapien
ctggcaaagatgtgtcaccaacatgtctgttga

SEQ ID NO: 375742 - DNA, 33 bp, Homo sapien
ctggcaaagatgtgtcgccaacatgtctgttga

SEQ ID NO: 375743 - DNA, 33 bp, Homo sapien
tgtgacttcaactggggatgaaatgtggacaga

SEQ ID NO: 375744 - DNA, 33 bp, Homo sapien
tgtgacttcaactgggtatgaaatgtggacaga

SEQ ID NO: 375745 - DNA, 33 bp, Homo sapien
gaaacatctaataaacaaatttttcccttgttc

SEQ ID NO: 375746 - DNA, 33 bp, Homo sapien
gaaacatctaataaacgaatttttcccttgttc

SEQ ID NO: 375747 - DNA, 33 bp, Homo sapien
aagtagtttgcaggcacgggcagctggcatttt

SEQ ID NO: 375748 - DNA, 33 bp, Homo sapien
aagtagtttgcaggcatgggcagctggcatttt

SEQ ID NO: 375749 - DNA, 33 bp, Homo sapien
atatatataactgaaacaaaagcttcacaagac

SEQ ID NO: 375750 - DNA, 33 bp, Homo sapien
atatatataactgaaataaaagcttcacaagac

SEQ ID NO: 375751 - DNA, 33 bp, Homo sapien
gatttttataataaaaggttcaggacaatctgt

SEQ ID NO: 375752 - DNA, 33 bp, Homo sapien
gatttttataataaaatgttcaggacaatctgt

SEQ ID NO: 375753 - DNA, 33 bp, Homo sapien
tacaaaacacactataaaatgctctcttatctc

SEQ ID NO: 375754 - DNA, 33 bp, Homo sapien
tacaaaacacactatataatgctctcttatctc

SEQ ID NO: 375755 - DNA, 33 bp, Homo sapien
atcctaactactgaatcatactaaaagcaggat

SEQ ID NO: 375756 - DNA, 33 bp, Homo sapien
atcctaactactgaatgatactaaaagcaggat

SEQ ID NO: 375757 - DNA, 33 bp, Homo sapien
ttcatgtgtgtttagaggtaccccgaactctat

SEQ ID NO: 375758 - DNA, 33 bp, Homo sapien
ttcatgtgtgtttagatgtaccccgaactctat

SEQ ID NO: 375759 - DNA, 33 bp, Homo sapien
atttaaatttttcaacgctcctgttacaggaag

SEQ ID NO: 375760 - DNA, 33 bp, Homo sapien
atttaaatttttcaactctcctgttacaggaag

SEQ ID NO: 375761 - DNA, 33 bp, Homo sapien
tgcacatatctctctgcggctaaagtagaaaca

SEQ ID NO: 375762 - DNA, 33 bp, Homo sapien
tgcacatatctctctgtggctaaagtagaaaca

SEQ ID NO: 375763 - DNA, 33 bp, Homo sapien
ggaaaaaaacacagaggcaggtcccgtgtaagc

SEQ ID NO: 375764 - DNA, 33 bp, Homo sapien
ggaaaaaaacacagagtcaggtcccgtgtaagc

SEQ ID NO: 375765 - DNA, 33 bp, Homo sapien
agtcattggaggtgccacttagaggtccgagcc

SEQ ID NO: 375766 - DNA, 33 bp, Homo sapien
agtcattggaggtgccgcttagaggtccgagcc

SEQ ID NO: 375767 - DNA, 33 bp, Homo sapien
aaaaagtcaaatccaacgaggagacataacagc

SEQ ID NO: 375768 - DNA, 33 bp, Homo sapien
aaaaagtcaaatccaatgaggagacataacagc

SEQ ID NO: 375769 - DNA, 33 bp, Homo sapien
ccaaacacctttgtcaaatagttgtttgggcac

SEQ ID NO: 375770 - DNA, 33 bp, Homo sapien
ccaaacacctttgtcagatagttgtttgggcac

SEQ ID NO: 375771 - DNA, 33 bp, Homo sapien
ctggcaactttataaactgttatgcttctagtt

SEQ ID NO: 375772 - DNA, 33 bp, Homo sapien
ctggcaactttataaattgttatgcttctagtt

SEQ ID NO: 375773 - DNA, 33 bp, Homo sapien
ctccttctattcatcacgacgtccccgacgtgt

SEQ ID NO: 375774 - DNA, 33 bp, Homo sapien
ctccttctattcatcatgacgtccccgacgtgt

SEQ ID NO: 375775 - DNA, 33 bp, Homo sapien
gctggtatgctgcatgacagagagactgctctg

SEQ ID NO: 375776 - DNA, 33 bp, Homo sapien
gctggtatgctgcatggcagagagactgctctg

SEQ ID NO: 375777 - DNA, 33 bp, Homo sapien
aacaacaatagcctgaaaaaactctatttccca

SEQ ID NO: 375778 - DNA, 33 bp, Homo sapien
aacaacaatagcctgagaaaactctatttccca

SEQ ID NO: 375779 - DNA, 33 bp, Homo sapien
gaactgaaaacatttaactttgaatcataaaca

SEQ ID NO: 375780 - DNA, 33 bp, Homo sapien
gaactgaaaacatttacctttgaatcataaaca

SEQ ID NO: 375781 - DNA, 33 bp, Homo sapien
tgaacaactagaagaaacatacaagggcaagga

SEQ ID NO: 375782 - DNA, 33 bp, Homo sapien
tgaacaactagaagaatcatacaagggcaagga

SEQ ID NO: 375783 - DNA, 33 bp, Homo sapien
gcaagagcagtttgacccagattaaaagataca

SEQ ID NO: 375784 - DNA, 33 bp, Homo sapien
gcaagagcagtttgactcagattaaaagataca

SEQ ID NO: 375785 - DNA, 33 bp, Homo sapien
tcacccaaacccacgcagcatattgtatacgca

SEQ ID NO: 375786 - DNA, 33 bp, Homo sapien
tcacccaaacccacgcggcatattgtatacgca

SEQ ID NO: 375787 - DNA, 33 bp, Homo sapien
gctcttatgctcagaaaaagggcagtgccatgg

SEQ ID NO: 375788 - DNA, 33 bp, Homo sapien
gctcttatgctcagaagaagggcagtgccatgg

SEQ ID NO: 375789 - DNA, 33 bp, Homo sapien
ttatgcagagtacttaagaattaatggggaaat

SEQ ID NO: 375790 - DNA, 33 bp, Homo sapien
ttatgcagagtacttacgaattaatggggaaat

SEQ ID NO: 375791 - DNA, 33 bp, Homo sapien
ccgaaggaggagaaacacgttattttggcacac

SEQ ID NO: 375792 - DNA, 33 bp, Homo sapien
ccgaaggaggagaaacgcgttattttggcacac

SEQ ID NO: 375793 - DNA, 33 bp, Homo sapien
cactaaatgtcaataacaccacttgtattggtt

SEQ ID NO: 375794 - DNA, 33 bp, Homo sapien
cactaaatgtcaataataccacttgtattggtt

SEQ ID NO: 375795 - DNA, 33 bp, Homo sapien
gggagtaatttgaatacgaagtgggaaggagag

SEQ ID NO: 375796 - DNA, 33 bp, Homo sapien
gggagtaatttgaatatgaagtgggaaggagag

SEQ ID NO: 375797 - DNA, 33 bp, Homo sapien
tgccccacaaatcagcccccaatttatagaaga

SEQ ID NO: 375798 - DNA, 33 bp, Homo sapien
tgccccacaaatcagctcccaatttatagaaga

SEQ ID NO: 375799 - DNA, 33 bp, Homo sapien
atcttctttggaaagtaaaatgcctgatgtcac

SEQ ID NO: 375800 - DNA, 33 bp, Homo sapien
atcttctttggaaagttaaatgcctgatgtcac

SEQ ID NO: 375801 - DNA, 33 bp, Homo sapien
aaggaatctcttttcacaaatttgcttttcatt

SEQ ID NO: 375802 - DNA, 33 bp, Homo sapien
aaggaatctcttttcagaaatttgcttttcatt

SEQ ID NO: 375803 - DNA, 33 bp, Homo sapien
agcttagctaactcgcagaatccatgcagggtc

SEQ ID NO: 375804 - DNA, 33 bp, Homo sapien
agcttagctaactcgcggaatccatgcagggtc

SEQ ID NO: 375805 - DNA, 33 bp, Homo sapien
gagacaccaacttaaactgaaaagaaagtggtt

SEQ ID NO: 375806 - DNA, 33 bp, Homo sapien
gagacaccaacttaaattgaaaagaaagtggtt

SEQ ID NO: 375807 - DNA, 33 bp, Homo sapien
agataatcgaggcttgaaggttgactgaattat

SEQ ID NO: 375808 - DNA, 33 bp, Homo sapien
agataatcgaggcttgcaggttgactgaattat

SEQ ID NO: 375809 - DNA, 33 bp, Homo sapien
ttgctgttgtccccgaagtgtattgataagtta

SEQ ID NO: 375810 - DNA, 33 bp, Homo sapien
ttgctgttgtccccgaggtgtattgataagtta

SEQ ID NO: 375811 - DNA, 33 bp, Homo sapien
cctctcaggattcatacggtggtgaggttcttt

SEQ ID NO: 375812 - DNA, 33 bp, Homo sapien
cctctcaggattcatatggtggtgaggttcttt

SEQ ID NO: 375813 - DNA, 33 bp, Homo sapien
aagaaacatctccaaaagcatgcatatacccat

SEQ ID NO: 375814 - DNA, 33 bp, Homo sapien
aagaaacatctccaaaggcatgcatatacccat

SEQ ID NO: 375815 - DNA, 33 bp, Homo sapien
gagttggaggacaccacgatttgatggctttgg

SEQ ID NO: 375816 - DNA, 33 bp, Homo sapien
gagttggaggacaccatgatttgatggctttgg

SEQ ID NO: 375817 - DNA, 33 bp, Homo sapien
tagatgagcaaactaagtcatatttggactatg

SEQ ID NO: 375818 - DNA, 33 bp, Homo sapien
tagatgagcaaactaattcatatttggactatg

SEQ ID NO: 375819 - DNA, 33 bp, Homo sapien
cctgtaggcagaggacagccatcaggtgtgcag

SEQ ID NO: 375820 - DNA, 33 bp, Homo sapien
cctgtaggcagaggaccgccatcaggtgtgcag

SEQ ID NO: 375821 - DNA, 33 bp, Homo sapien
ccagcctctgtgtgcacgtctgaatttaggaag

SEQ ID NO: 375822 - DNA, 33 bp, Homo sapien
ccagcctctgtgtgcatgtctgaatttaggaag

SEQ ID NO: 375823 - DNA, 33 bp, Homo sapien
ctattcctccacaaccaacgaatgtctggagaa

SEQ ID NO: 375824 - DNA, 33 bp, Homo sapien
ctattcctccacaacctacgaatgtctggagaa

SEQ ID NO: 375825 - DNA, 33 bp, Homo sapien
ttggaacttgctacctaacctcacagtccctca

SEQ ID NO: 375826 - DNA, 33 bp, Homo sapien
ttggaacttgctaccttacctcacagtccctca

SEQ ID NO: 375827 - DNA, 33 bp, Homo sapien
tagagccactggcggtaaaactagattttcccc

SEQ ID NO: 375828 - DNA, 33 bp, Homo sapien
tagagccactggcggtgaaactagattttcccc

SEQ ID NO: 375829 - DNA, 33 bp, Homo sapien
gtgagttacaggtgaacatatgcctttagcccc

SEQ ID NO: 375830 - DNA, 33 bp, Homo sapien
gtgagttacaggtgaatatatgcctttagcccc

SEQ ID NO: 375831 - DNA, 33 bp, Homo sapien
catatcaaattaccccaaaatgtattggcttaa

SEQ ID NO: 375832 - DNA, 33 bp, Homo sapien
catatcaaattacccccaaatgtattggcttaa

SEQ ID NO: 375833 - DNA, 33 bp, Homo sapien
caggactttgtttggggagcgtgttaagttagc

SEQ ID NO: 375834 - DNA, 33 bp, Homo sapien
caggactttgtttgggtagcgtgttaagttagc

SEQ ID NO: 375835 - DNA, 33 bp, Homo sapien
atgatgataacatggaacacagttgaggctgac

SEQ ID NO: 375836 - DNA, 33 bp, Homo sapien
atgatgataacatggagcacagttgaggctgac

SEQ ID NO: 375837 - DNA, 33 bp, Homo sapien
ttaacttgatttcatccacaaagaccctacttt

SEQ ID NO: 375838 - DNA, 33 bp, Homo sapien
ttaacttgatttcatctacaaagaccctacttt

SEQ ID NO: 375839 - DNA, 33 bp, Homo sapien
gacattttggttattacagcaaatagacttcta

SEQ ID NO: 375840 - DNA, 33 bp, Homo sapien
gacattttggttattagagcaaatagacttcta

SEQ ID NO: 375841 - DNA, 33 bp, Homo sapien
ctcactcttagattacccttgctcttatacttt

SEQ ID NO: 375842 - DNA, 33 bp, Homo sapien
ctcactcttagattactcttgctcttatacttt

SEQ ID NO: 375843 - DNA, 33 bp, Homo sapien
tcacattacaaaatccagaaccatttaacctag

SEQ ID NO: 375844 - DNA, 33 bp, Homo sapien
tcacattacaaaatccggaaccatttaacctag

SEQ ID NO: 375845 - DNA, 33 bp, Homo sapien
taccatgattacctccaaacagctcttaggcat

SEQ ID NO: 375846 - DNA, 33 bp, Homo sapien
taccatgattacctccgaacagctcttaggcat

SEQ ID NO: 375847 - DNA, 33 bp, Homo sapien
ggaagtaatttagcagcattcttaccaaaactc

SEQ ID NO: 375848 - DNA, 33 bp, Homo sapien
ggaagtaatttagcaggattcttaccaaaactc

SEQ ID NO: 375849 - DNA, 33 bp, Homo sapien
tgagctggcaaatcaaatctcatatgcatgagt

SEQ ID NO: 375850 - DNA, 33 bp, Homo sapien
tgagctggcaaatcaagtctcatatgcatgagt

SEQ ID NO: 375851 - DNA, 33 bp, Homo sapien
agtaataattgccacactggattattgagagaa

SEQ ID NO: 375852 - DNA, 33 bp, Homo sapien
agtaataattgccacattggattattgagagaa

SEQ ID NO: 375853 - DNA, 33 bp, Homo sapien
tggctatcataacatacaagtcctagagctctg

SEQ ID NO: 375854 - DNA, 33 bp, Homo sapien
tggctatcataacatagaagtcctagagctctg

SEQ ID NO: 375855 - DNA, 33 bp, Homo sapien
tagttaaatgataaccagccattagtccctggt

SEQ ID NO: 375856 - DNA, 33 bp, Homo sapien
tagttaaatgataacctgccattagtccctggt

SEQ ID NO: 375857 - DNA, 33 bp, Homo sapien
aagaggaaaatgaaaacgaacactttgaaatgc

SEQ ID NO: 375858 - DNA, 33 bp, Homo sapien
aagaggaaaatgaaaatgaacactttgaaatgc

SEQ ID NO: 375859 - DNA, 33 bp, Homo sapien
agctaaaagaagaaagaagatcaaattctatct

SEQ ID NO: 375860 - DNA, 33 bp, Homo sapien
agctaaaagaagaaaggagatcaaattctatct

SEQ ID NO: 375861 - DNA, 33 bp, Homo sapien
ctggttctccaaaggccgaaggaacttaacagc

SEQ ID NO: 375862 - DNA, 33 bp, Homo sapien
ctggttctccaaaggctgaaggaacttaacagc

SEQ ID NO: 375863 - DNA, 33 bp, Homo sapien
tgtcttcttgactctgaagtaaataactcatta

SEQ ID NO: 375864 - DNA, 33 bp, Homo sapien
tgtcttcttgactctgcagtaaataactcatta

SEQ ID NO: 375865 - DNA, 33 bp, Homo sapien
aagtcttgaacaggaacgattggcaggaagaga

SEQ ID NO: 375866 - DNA, 33 bp, Homo sapien
aagtcttgaacaggaatgattggcaggaagaga

SEQ ID NO: 375867 - DNA, 33 bp, Homo sapien
gcagaactgcatcccactagcttcaacatttac

SEQ ID NO: 375868 - DNA, 33 bp, Homo sapien
gcagaactgcatcccattagcttcaacatttac

SEQ ID NO: 375869 - DNA, 33 bp, Homo sapien
ttggctgcatctgtaacccagaaaggcttaagt

SEQ ID NO: 375870 - DNA, 33 bp, Homo sapien
ttggctgcatctgtaatccagaaaggcttaagt

SEQ ID NO: 375871 - DNA, 33 bp, Homo sapien
atgttcaggtaacatcactttctgataactgta

SEQ ID NO: 375872 - DNA, 33 bp, Homo sapien
atgttcaggtaacatcgctttctgataactgta

SEQ ID NO: 375873 - DNA, 33 bp, Homo sapien
tcaaccaggagtaaagccttcttagcaactaag

SEQ ID NO: 375874 - DNA, 33 bp, Homo sapien
tcaaccaggagtaaagtcttcttagcaactaag

SEQ ID NO: 375875 - DNA, 33 bp, Homo sapien
gttacatgtaaaatacccaagtccattcttttt

SEQ ID NO: 375876 - DNA, 33 bp, Homo sapien
gttacatgtaaaatactcaagtccattcttttt

SEQ ID NO: 375877 - DNA, 33 bp, Homo sapien
gaccatgccataaaaagtgtctttgatgccaac

SEQ ID NO: 375878 - DNA, 33 bp, Homo sapien
gaccatgccataaaaattgtctttgatgccaac

SEQ ID NO: 375879 - DNA, 33 bp, Homo sapien
atattaagcttacatacagccactcatcaagga

SEQ ID NO: 375880 - DNA, 33 bp, Homo sapien
atattaagcttacatatagccactcatcaagga

SEQ ID NO: 375881 - DNA, 33 bp, Homo sapien
gctcaacagatgaaaactcttagctgaaactaa

SEQ ID NO: 375882 - DNA, 33 bp, Homo sapien
gctcaacagatgaaaagtcttagctgaaactaa

SEQ ID NO: 375883 - DNA, 33 bp, Homo sapien
tcagaaaagatgaataaagtcaggaaagcttca

SEQ ID NO: 375884 - DNA, 33 bp, Homo sapien
tcagaaaagatgaatacagtcaggaaagcttca

SEQ ID NO: 375885 - DNA, 33 bp, Homo sapien
agagttgtgctgtgaaatgactgctcaactgag

SEQ ID NO: 375886 - DNA, 33 bp, Homo sapien
agagttgtgctgtgaagtgactgctcaactgag

SEQ ID NO: 375887 - DNA, 33 bp, Homo sapien
ctcaagcctcctccctaagaagaatcaggaaga

SEQ ID NO: 375888 - DNA, 33 bp, Homo sapien
ctcaagcctcctccctcagaagaatcaggaaga

SEQ ID NO: 375889 - DNA, 33 bp, Homo sapien
gcctgcattatagtcacctttataccaatgcag

SEQ ID NO: 375890 - DNA, 33 bp, Homo sapien
gcctgcattatagtcagctttataccaatgcag

SEQ ID NO: 375891 - DNA, 33 bp, Homo sapien
caaagctcgttggtctaacttggaaaaggttat

SEQ ID NO: 375892 - DNA, 33 bp, Homo sapien
caaagctcgttggtctcacttggaaaaggttat

SEQ ID NO: 375893 - DNA, 33 bp, Homo sapien
atgcacatggggaaaaaggtaagtggtatttga

SEQ ID NO: 375894 - DNA, 33 bp, Homo sapien
atgcacatggggaaaagggtaagtggtatttga

SEQ ID NO: 375895 - DNA, 33 bp, Homo sapien
cggtggacaaccccaactcatggctcacttatt

SEQ ID NO: 375896 - DNA, 33 bp, Homo sapien
cggtggacaaccccaattcatggctcacttatt

SEQ ID NO: 375897 - DNA, 33 bp, Homo sapien
aactgatgaccaggccacaggataatgacagct

SEQ ID NO: 375898 - DNA, 33 bp, Homo sapien
aactgatgaccaggccgcaggataatgacagct

SEQ ID NO: 375899 - DNA, 33 bp, Homo sapien
gaggcagaaatcggctaaattataggattaaaa

SEQ ID NO: 375900 - DNA, 33 bp, Homo sapien
gaggcagaaatcggctgaattataggattaaaa

SEQ ID NO: 375901 - DNA, 33 bp, Homo sapien
gtattttctgttttcaacctgattcaaaagaca

SEQ ID NO: 375902 - DNA, 33 bp, Homo sapien
gtattttctgttttcatcctgattcaaaagaca

SEQ ID NO: 375903 - DNA, 33 bp, Homo sapien
atagacacgaggacaaaaatcatatctgagcaa

SEQ ID NO: 375904 - DNA, 33 bp, Homo sapien
atagacacgaggacaacaatcatatctgagcaa

SEQ ID NO: 375905 - DNA, 33 bp, Homo sapien
gctccacaataccatagggcaaaggttcttcaa

SEQ ID NO: 375906 - DNA, 33 bp, Homo sapien
gctccacaataccatatggcaaaggttcttcaa

SEQ ID NO: 375907 - DNA, 33 bp, Homo sapien
tgtgggatttgccctaacctttatttggaatga

SEQ ID NO: 375908 - DNA, 33 bp, Homo sapien
tgtgggatttgccctagcctttatttggaatga

SEQ ID NO: 375909 - DNA, 33 bp, Homo sapien
aagcatgggtaatagaagatgctgtgaggcata

SEQ ID NO: 375910 - DNA, 33 bp, Homo sapien
aagcatgggtaatagaggatgctgtgaggcata

SEQ ID NO: 375911 - DNA, 33 bp, Homo sapien
aagtcatgaaaacccaacctttagtgcctgctg

SEQ ID NO: 375912 - DNA, 33 bp, Homo sapien
aagtcatgaaaacccagcctttagtgcctgctg

SEQ ID NO: 375913 - DNA, 33 bp, Homo sapien
ggaatgtgacccaaaaccgtaagtgaaccagtg

SEQ ID NO: 375914 - DNA, 33 bp, Homo sapien
ggaatgtgacccaaaatcgtaagtgaaccagtg

SEQ ID NO: 375915 - DNA, 33 bp, Homo sapien
aaaacagaaagaagaaaagaatcccttgtatct

SEQ ID NO: 375916 - DNA, 33 bp, Homo sapien
aaaacagaaagaagaatagaatcccttgtatct

SEQ ID NO: 375917 - DNA, 33 bp, Homo sapien
ccaacaacaatcatcactaggtatttttaaaaa

SEQ ID NO: 375918 - DNA, 33 bp, Homo sapien
ccaacaacaatcatcagtaggtatttttaaaaa

SEQ ID NO: 375919 - DNA, 33 bp, Homo sapien
taaccttccaggaccacattttccagatcctga

SEQ ID NO: 375920 - DNA, 33 bp, Homo sapien
taaccttccaggaccatattttccagatcctga

SEQ ID NO: 375921 - DNA, 33 bp, Homo sapien
caggcactgttttgaacgctgtgcaagtatgag

SEQ ID NO: 375922 - DNA, 33 bp, Homo sapien
caggcactgttttgaatgctgtgcaagtatgag

SEQ ID NO: 375923 - DNA, 33 bp, Homo sapien
atcaatacctattggacaagtgaatgaatgaga

SEQ ID NO: 375924 - DNA, 33 bp, Homo sapien
atcaatacctattggagaagtgaatgaatgaga

SEQ ID NO: 375925 - DNA, 33 bp, Homo sapien
gttctctcctaaacaccgcctctttgccattat

SEQ ID NO: 375926 - DNA, 33 bp, Homo sapien
gttctctcctaaacactgcctctttgccattat

SEQ ID NO: 375927 - DNA, 33 bp, Homo sapien
gatctcagtgatttaacacaacaaaagtttatt

SEQ ID NO: 375928 - DNA, 33 bp, Homo sapien
gatctcagtgatttaagacaacaaaagtttatt

SEQ ID NO: 375929 - DNA, 33 bp, Homo sapien
gagagaaaactggagaaattagaataacgggtt

SEQ ID NO: 375930 - DNA, 33 bp, Homo sapien
gagagaaaactggagagattagaataacgggtt

SEQ ID NO: 375931 - DNA, 33 bp, Homo sapien
atatgtagctaaactccgaaagctgacaagctt

SEQ ID NO: 375932 - DNA, 33 bp, Homo sapien
atatgtagctaaactctgaaagctgacaagctt

SEQ ID NO: 375933 - DNA, 33 bp, Homo sapien
gaaatccacagggcagactagcaggttagaaac

SEQ ID NO: 375934 - DNA, 33 bp, Homo sapien
gaaatccacagggcaggctagcaggttagaaac

SEQ ID NO: 375935 - DNA, 33 bp, Homo sapien
ttggaaatgctggaaaccacaatggcagaacca

SEQ ID NO: 375936 - DNA, 33 bp, Homo sapien
ttggaaatgctggaaatcacaatggcagaacca

SEQ ID NO: 375937 - DNA, 33 bp, Homo sapien
ttcccagaggagaaaggacccacgaaaagcaca

SEQ ID NO: 375938 - DNA, 33 bp, Homo sapien
ttcccagaggagaaagtacccacgaaaagcaca

SEQ ID NO: 375939 - DNA, 33 bp, Homo sapien
ggggagatgggtttgaatacataggcaacagca

SEQ ID NO: 375940 - DNA, 33 bp, Homo sapien
ggggagatgggtttgagtacataggcaacagca

SEQ ID NO: 375941 - DNA, 33 bp, Homo sapien
atatgtatagtagcacgggacaaatagtaaata

SEQ ID NO: 375942 - DNA, 33 bp, Homo sapien
atatgtatagtagcactggacaaatagtaaata

SEQ ID NO: 375943 - DNA, 33 bp, Homo sapien
ttttctgtaatgaagacgtgtattttctgctgt

SEQ ID NO: 375944 - DNA, 33 bp, Homo sapien
ttttctgtaatgaagatgtgtattttctgctgt

SEQ ID NO: 375945 - DNA, 33 bp, Homo sapien
tgtcaaatatgagaaactaacatcagtacaata

SEQ ID NO: 375946 - DNA, 33 bp, Homo sapien
tgtcaaatatgagaaattaacatcagtacaata

SEQ ID NO: 375947 - DNA, 33 bp, Homo sapien
ccgtgctaaagtttgaacaatgccggcttgaac

SEQ ID NO: 375948 - DNA, 33 bp, Homo sapien
ccgtgctaaagtttgagcaatgccggcttgaac

SEQ ID NO: 375949 - DNA, 33 bp, Homo sapien
ggattacaggaaaatacaggacctatgccctgt

SEQ ID NO: 375950 - DNA, 33 bp, Homo sapien
ggattacaggaaaatataggacctatgccctgt

SEQ ID NO: 375951 - DNA, 33 bp, Homo sapien
agaatatcacacatcaaaaggttgtcagcctag

SEQ ID NO: 375952 - DNA, 33 bp, Homo sapien
agaatatcacacatcagaaggttgtcagcctag

SEQ ID NO: 375953 - DNA, 33 bp, Homo sapien
atgcgattatacacagaactcatttatacacaa

SEQ ID NO: 375954 - DNA, 33 bp, Homo sapien
atgcgattatacacagtactcatttatacacaa

SEQ ID NO: 375955 - DNA, 33 bp, Homo sapien
ttccagataaatgaaactccctgcagagagaga

SEQ ID NO: 375956 - DNA, 33 bp, Homo sapien
ttccagataaatgaaagtccctgcagagagaga

SEQ ID NO: 375957 - DNA, 33 bp, Homo sapien
ttttcccatgagagccaaacactgcatccaaaa

SEQ ID NO: 375958 - DNA, 33 bp, Homo sapien
ttttcccatgagagccgaacactgcatccaaaa

SEQ ID NO: 375959 - DNA, 33 bp, Homo sapien
gaaaagaggaaacttcgattgctaaacccagcc

SEQ ID NO: 375960 - DNA, 33 bp, Homo sapien
gaaaagaggaaacttctattgctaaacccagcc

SEQ ID NO: 375961 - DNA, 33 bp, Homo sapien
tcacttctgggctaaaagtttaatggtaggcat

SEQ ID NO: 375962 - DNA, 33 bp, Homo sapien
tcacttctgggctaaaggtttaatggtaggcat

SEQ ID NO: 375963 - DNA, 33 bp, Homo sapien
ccttgtctgcttaaagaactgaggactgagcag

SEQ ID NO: 375964 - DNA, 33 bp, Homo sapien
ccttgtctgcttaaaggactgaggactgagcag

SEQ ID NO: 375965 - DNA, 33 bp, Homo sapien
ctcctaaggaaaccaaactcacaatagtaatac

SEQ ID NO: 375966 - DNA, 33 bp, Homo sapien
ctcctaaggaaaccaagctcacaatagtaatac

SEQ ID NO: 375967 - DNA, 33 bp, Homo sapien
aaaaattacaaaaagcaaaaagatgtcaatgca

SEQ ID NO: 375968 - DNA, 33 bp, Homo sapien
aaaaattacaaaaagccaaaagatgtcaatgca

SEQ ID NO: 375969 - DNA, 33 bp, Homo sapien
ttaggcttcttcacaccgtggcctcattgctat

SEQ ID NO: 375970 - DNA, 33 bp, Homo sapien
ttaggcttcttcacactgtggcctcattgctat

SEQ ID NO: 375971 - DNA, 33 bp, Homo sapien
tggaaggtcatggaacaagagtcactggattcc

SEQ ID NO: 375972 - DNA, 33 bp, Homo sapien
tggaaggtcatggaacgagagtcactggattcc

SEQ ID NO: 375973 - DNA, 33 bp, Homo sapien
ggcctcagagagcttacactaatggcagaaggc

SEQ ID NO: 375974 - DNA, 33 bp, Homo sapien
ggcctcagagagcttatactaatggcagaaggc

SEQ ID NO: 375975 - DNA, 33 bp, Homo sapien
ctcttggtcaataggaactgcctcaccgaggga

SEQ ID NO: 375976 - DNA, 33 bp, Homo sapien
ctcttggtcaataggagctgcctcaccgaggga

SEQ ID NO: 375977 - DNA, 33 bp, Homo sapien
ttctggttgaatcttgcaagaaaaatggccatg

SEQ ID NO: 375978 - DNA, 33 bp, Homo sapien
ttctggttgaatcttgtaagaaaaatggccatg

SEQ ID NO: 375979 - DNA, 33 bp, Homo sapien
gtgaggctttatagaaaacacagccctctatgc

SEQ ID NO: 375980 - DNA, 33 bp, Homo sapien
gtgaggctttatagaatacacagccctctatgc

SEQ ID NO: 375981 - DNA, 33 bp, Homo sapien
aaaggcaaggaagaaggcctctggttctggaca

SEQ ID NO: 375982 - DNA, 33 bp, Homo sapien
aaaggcaaggaagaagtcctctggttctggaca

SEQ ID NO: 375983 - DNA, 33 bp, Homo sapien
tacactccctaagacactacaaacatacacaga

SEQ ID NO: 375984 - DNA, 33 bp, Homo sapien
tacactccctaagacattacaaacatacacaga

SEQ ID NO: 375985 - DNA, 33 bp, Homo sapien
tcccatgctaggctaaggtacagaaaatatgga

SEQ ID NO: 375986 - DNA, 33 bp, Homo sapien
tcccatgctaggctaatgtacagaaaatatgga

SEQ ID NO: 375987 - DNA, 33 bp, Homo sapien
acagttgtcatctaccaccactgtcagtgcaag

SEQ ID NO: 375988 - DNA, 33 bp, Homo sapien
acagttgtcatctacccccactgtcagtgcaag

SEQ ID NO: 375989 - DNA, 33 bp, Homo sapien
gttctagacacagggacatgagattcagctaaa

SEQ ID NO: 375990 - DNA, 33 bp, Homo sapien
gttctagacacagggagatgagattcagctaaa

SEQ ID NO: 375991 - DNA, 33 bp, Homo sapien
atttatcagactattacgaacaaagttgtagga

SEQ ID NO: 375992 - DNA, 33 bp, Homo sapien
atttatcagactattatgaacaaagttgtagga

SEQ ID NO: 375993 - DNA, 33 bp, Homo sapien
aaagactactcaaaatcaagcagctatttacta

SEQ ID NO: 375994 - DNA, 33 bp, Homo sapien
aaagactactcaaaattaagcagctatttacta

SEQ ID NO: 375995 - DNA, 33 bp, Homo sapien
gagggatctgtctaaacgaggaagatgtacagt

SEQ ID NO: 375996 - DNA, 33 bp, Homo sapien
gagggatctgtctaaatgaggaagatgtacagt

SEQ ID NO: 375997 - DNA, 33 bp, Homo sapien
ccttacaacaatagtaggccatttagagggatc

SEQ ID NO: 375998 - DNA, 33 bp, Homo sapien
ccttacaacaatagtatgccatttagagggatc

SEQ ID NO: 375999 - DNA, 33 bp, Homo sapien
ggtcatcctctttgaccaagcccacagcttctg

SEQ ID NO: 376000 - DNA, 33 bp, Homo sapien
ggtcatcctctttgactaagcccacagcttctg

SEQ ID NO: 376001 - DNA, 33 bp, Homo sapien
tggtatagatgctcgcagccagggtccctgtta

SEQ ID NO: 376002 - DNA, 33 bp, Homo sapien
tggtatagatgctcgcggccagggtccctgtta

SEQ ID NO: 376003 - DNA, 33 bp, Homo sapien
agcaggcttgaacaaacgctcaggagccctggt

SEQ ID NO: 376004 - DNA, 33 bp, Homo sapien
agcaggcttgaacaaatgctcaggagccctggt

SEQ ID NO: 376005 - DNA, 33 bp, Homo sapien
ggtaaaaattgaacccaaatgtcagagccaaga

SEQ ID NO: 376006 - DNA, 33 bp, Homo sapien
ggtaaaaattgaacccgaatgtcagagccaaga

SEQ ID NO: 376007 - DNA, 33 bp, Homo sapien
tagctacacaaaactgccaagtaataaagtggt

SEQ ID NO: 376008 - DNA, 33 bp, Homo sapien
tagctacacaaaactgtcaagtaataaagtggt

SEQ ID NO: 376009 - DNA, 33 bp, Homo sapien
ttagctaagtgttaaaactttttcattttagcc

SEQ ID NO: 376010 - DNA, 33 bp, Homo sapien
ttagctaagtgttaaagctttttcattttagcc

SEQ ID NO: 376011 - DNA, 33 bp, Homo sapien
actttaaaaacgagaactggaactgtctcccac

SEQ ID NO: 376012 - DNA, 33 bp, Homo sapien
actttaaaaacgagaattggaactgtctcccac

SEQ ID NO: 376013 - DNA, 33 bp, Homo sapien
agttcagactgtactcccccactatcaattcag

SEQ ID NO: 376014 - DNA, 33 bp, Homo sapien
agttcagactgtactctcccactatcaattcag

SEQ ID NO: 376015 - DNA, 33 bp, Homo sapien
cgcttttcttgctgcaaaagtcctagattattg

SEQ ID NO: 376016 - DNA, 33 bp, Homo sapien
cgcttttcttgctgcagaagtcctagattattg

SEQ ID NO: 376017 - DNA, 33 bp, Homo sapien
gagattttttcttaaccctggatccaaagcagt

SEQ ID NO: 376018 - DNA, 33 bp, Homo sapien
gagattttttcttaactctggatccaaagcagt

SEQ ID NO: 376019 - DNA, 33 bp, Homo sapien
ttagtcaacttgaggacgcagcaataggaagta

SEQ ID NO: 376020 - DNA, 33 bp, Homo sapien
ttagtcaacttgaggatgcagcaataggaagta

SEQ ID NO: 376021 - DNA, 33 bp, Homo sapien
ttctaaagctcttcccacgaataaaagctctga

SEQ ID NO: 376022 - DNA, 33 bp, Homo sapien
ttctaaagctcttcccgcgaataaaagctctga

SEQ ID NO: 376023 - DNA, 33 bp, Homo sapien
acagatggctaagcaacagctcagaggaatcca

SEQ ID NO: 376024 - DNA, 33 bp, Homo sapien
acagatggctaagcaatagctcagaggaatcca

SEQ ID NO: 376025 - DNA, 33 bp, Homo sapien
agtgcaagagcttgagaagattttgaagatctg

SEQ ID NO: 376026 - DNA, 33 bp, Homo sapien
agtgcaagagcttgaggagattttgaagatctg

SEQ ID NO: 376027 - DNA, 33 bp, Homo sapien
ccacaaatacactgcaagataaaaaaagagagg

SEQ ID NO: 376028 - DNA, 33 bp, Homo sapien
ccacaaatacactgcatgataaaaaaagagagg

SEQ ID NO: 376029 - DNA, 33 bp, Homo sapien
aagactccagattttacgaaacacaaggatcca

SEQ ID NO: 376030 - DNA, 33 bp, Homo sapien
aagactccagattttatgaaacacaaggatcca

SEQ ID NO: 376031 - DNA, 33 bp, Homo sapien
tgtgattcacatgacactatgatgtaagctttt

SEQ ID NO: 376032 - DNA, 33 bp, Homo sapien
tgtgattcacatgacagtatgatgtaagctttt

SEQ ID NO: 376033 - DNA, 33 bp, Homo sapien
taagatataagacacacgatttgcaaagtatat

SEQ ID NO: 376034 - DNA, 33 bp, Homo sapien
taagatataagacacatgatttgcaaagtatat

SEQ ID NO: 376035 - DNA, 33 bp, Homo sapien
cctattcatattgaacccaatcatttgcaagtg

SEQ ID NO: 376036 - DNA, 33 bp, Homo sapien
cctattcatattgaacgcaatcatttgcaagtg

SEQ ID NO: 376037 - DNA, 33 bp, Homo sapien
attctgatgtggactacggtgtgggaaacacag

SEQ ID NO: 376038 - DNA, 33 bp, Homo sapien
attctgatgtggactatggtgtgggaaacacag

SEQ ID NO: 376039 - DNA, 33 bp, Homo sapien
aaatgagaaatgattcaaaaatcgacatttgca

SEQ ID NO: 376040 - DNA, 33 bp, Homo sapien
aaatgagaaatgattcgaaaatcgacatttgca

SEQ ID NO: 376041 - DNA, 33 bp, Homo sapien
atttagcagcctctgtaaaaaacttgaattata

SEQ ID NO: 376042 - DNA, 33 bp, Homo sapien
atttagcagcctctgtcaaaaacttgaattata

SEQ ID NO: 376043 - DNA, 33 bp, Homo sapien
gttggaacttcaaaaacagatgaggttaacaga

SEQ ID NO: 376044 - DNA, 33 bp, Homo sapien
gttggaacttcaaaaatagatgaggttaacaga

SEQ ID NO: 376045 - DNA, 33 bp, Homo sapien
catggtctataatgtacaaaatgtcagtttggc

SEQ ID NO: 376046 - DNA, 33 bp, Homo sapien
catggtctataatgtagaaaatgtcagtttggc

SEQ ID NO: 376047 - DNA, 33 bp, Homo sapien
tggcggcctgctccagcaaaactctgcgtcatt

SEQ ID NO: 376048 - DNA, 33 bp, Homo sapien
tggcggcctgctccagtaaaactctgcgtcatt

SEQ ID NO: 376049 - DNA, 33 bp, Homo sapien
tttaggttgtaaatgaaaactttctgccttttc

SEQ ID NO: 376050 - DNA, 33 bp, Homo sapien
tttaggttgtaaatgagaactttctgccttttc

SEQ ID NO: 376051 - DNA, 33 bp, Homo sapien
aaacaggatggtaataaaattctgtacttcacg

SEQ ID NO: 376052 - DNA, 33 bp, Homo sapien
aaacaggatggtaatacaattctgtacttcacg

SEQ ID NO: 376053 - DNA, 33 bp, Homo sapien
ctttagactctagtccacatcaaacatactgtc

SEQ ID NO: 376054 - DNA, 33 bp, Homo sapien
ctttagactctagtccgcatcaaacatactgtc

SEQ ID NO: 376055 - DNA, 33 bp, Homo sapien
gtggaagtcaagaaaaaatttcagaccaggttg

SEQ ID NO: 376056 - DNA, 33 bp, Homo sapien
gtggaagtcaagaaaagatttcagaccaggttg

SEQ ID NO: 376057 - DNA, 33 bp, Homo sapien
tagtgtctgagaaaaaacaatgaagccaattaa

SEQ ID NO: 376058 - DNA, 33 bp, Homo sapien
tagtgtctgagaaaaagcaatgaagccaattaa

SEQ ID NO: 376059 - DNA, 33 bp, Homo sapien
agagtaattcatgcaccactaaaaaactgcaca

SEQ ID NO: 376060 - DNA, 33 bp, Homo sapien
agagtaattcatgcactactaaaaaactgcaca

SEQ ID NO: 376061 - DNA, 33 bp, Homo sapien
taatcttgccatgtaaccccctgtcacttagca

SEQ ID NO: 376062 - DNA, 33 bp, Homo sapien
taatcttgccatgtaagcccctgtcacttagca

SEQ ID NO: 376063 - DNA, 33 bp, Homo sapien
tgacgctctctctgtaccaaatggaagtcagtg

SEQ ID NO: 376064 - DNA, 33 bp, Homo sapien
tgacgctctctctgtagcaaatggaagtcagtg

SEQ ID NO: 376065 - DNA, 33 bp, Homo sapien
ggtaaatagacttgaacgctgatgggttgaagt

SEQ ID NO: 376066 - DNA, 33 bp, Homo sapien
ggtaaatagacttgaatgctgatgggttgaagt

SEQ ID NO: 376067 - DNA, 33 bp, Homo sapien
taaataagcaatcttacgtcattgtgcctcagt

SEQ ID NO: 376068 - DNA, 33 bp, Homo sapien
taaataagcaatcttatgtcattgtgcctcagt

SEQ ID NO: 376069 - DNA, 33 bp, Homo sapien
agtgatggccctctacaatgattcaaagattcc

SEQ ID NO: 376070 - DNA, 33 bp, Homo sapien
agtgatggccctctacgatgattcaaagattcc

SEQ ID NO: 376071 - DNA, 33 bp, Homo sapien
ctcaaggatgtagtaactgcatttgtactatgg

SEQ ID NO: 376072 - DNA, 33 bp, Homo sapien
ctcaaggatgtagtaattgcatttgtactatgg

SEQ ID NO: 376073 - DNA, 33 bp, Homo sapien
atattcactctgatggccaccacaaaacttcac

SEQ ID NO: 376074 - DNA, 33 bp, Homo sapien
atattcactctgatgggcaccacaaaacttcac

SEQ ID NO: 376075 - DNA, 33 bp, Homo sapien
aaagatcccgctcaatcaaagtccaaaaacagc

SEQ ID NO: 376076 - DNA, 33 bp, Homo sapien
aaagatcccgctcaatgaaagtccaaaaacagc

SEQ ID NO: 376077 - DNA, 33 bp, Homo sapien
caactcatccagtaacacagatttttatctgga

SEQ ID NO: 376078 - DNA, 33 bp, Homo sapien
caactcatccagtaacgcagatttttatctgga

SEQ ID NO: 376079 - DNA, 33 bp, Homo sapien
gatatttcaatcgcccaaaatggagagaggatt

SEQ ID NO: 376080 - DNA, 33 bp, Homo sapien
gatatttcaatcgcccgaaatggagagaggatt

SEQ ID NO: 376081 - DNA, 33 bp, Homo sapien
atggaaccatagttaaatatctgtgaaaaaagg

SEQ ID NO: 376082 - DNA, 33 bp, Homo sapien
atggaaccatagttaagtatctgtgaaaaaagg

SEQ ID NO: 376083 - DNA, 33 bp, Homo sapien
ttaatctgggcacaataaggaatatgttatcca

SEQ ID NO: 376084 - DNA, 33 bp, Homo sapien
ttaatctgggcacaatgaggaatatgttatcca

SEQ ID NO: 376085 - DNA, 33 bp, Homo sapien
ggatgcagccttctgcaattgttttccatctcc

SEQ ID NO: 376086 - DNA, 33 bp, Homo sapien
ggatgcagccttctgcgattgttttccatctcc

SEQ ID NO: 376087 - DNA, 33 bp, Homo sapien
agaggtaagctcccaaatgacttgaaataatct

SEQ ID NO: 376088 - DNA, 33 bp, Homo sapien
agaggtaagctcccaactgacttgaaataatct

SEQ ID NO: 376089 - DNA, 33 bp, Homo sapien
ccatgtcaataacaagaaggaagtgtgaggaag

SEQ ID NO: 376090 - DNA, 33 bp, Homo sapien
ccatgtcaataacaaggaggaagtgtgaggaag

SEQ ID NO: 376091 - DNA, 33 bp, Homo sapien
gtatttttaggtgttgaataaatgagtcaatcc

SEQ ID NO: 376092 - DNA, 33 bp, Homo sapien
gtatttttaggtgttggataaatgagtcaatcc

SEQ ID NO: 376093 - DNA, 33 bp, Homo sapien
cattaattatatgggccacaatgttccattact

SEQ ID NO: 376094 - DNA, 33 bp, Homo sapien
cattaattatatgggctacaatgttccattact

SEQ ID NO: 376095 - DNA, 33 bp, Homo sapien
gatttgtcatcccaggcatcttgctcagggaaa

SEQ ID NO: 376096 - DNA, 33 bp, Homo sapien
gatttgtcatcccaggtatcttgctcagggaaa

SEQ ID NO: 376097 - DNA, 33 bp, Homo sapien
cacatgccacactgtccaatgatgatactattt

SEQ ID NO: 376098 - DNA, 33 bp, Homo sapien
cacatgccacactgtctaatgatgatactattt

SEQ ID NO: 376099 - DNA, 33 bp, Homo sapien
actgaagtgaaggtacactgatgacattctgga

SEQ ID NO: 376100 - DNA, 33 bp, Homo sapien
actgaagtgaaggtactctgatgacattctgga

SEQ ID NO: 376101 - DNA, 33 bp, Homo sapien
aaggagcttttagtccaaaggataatttttcag

SEQ ID NO: 376102 - DNA, 33 bp, Homo sapien
aaggagcttttagtccgaaggataatttttcag

SEQ ID NO: 376103 - DNA, 33 bp, Homo sapien
ccaagtaactccttctaactaaggtgtccattc

SEQ ID NO: 376104 - DNA, 33 bp, Homo sapien
ccaagtaactccttctgactaaggtgtccattc

SEQ ID NO: 376105 - DNA, 33 bp, Homo sapien
taagaccaaaacatacagatgatggttttaacc

SEQ ID NO: 376106 - DNA, 33 bp, Homo sapien
taagaccaaaacatacggatgatggttttaacc

SEQ ID NO: 376107 - DNA, 33 bp, Homo sapien
tcacaactgcacattgcaactgctactaatatc

SEQ ID NO: 376108 - DNA, 33 bp, Homo sapien
tcacaactgcacattgtaactgctactaatatc

SEQ ID NO: 376109 - DNA, 33 bp, Homo sapien
tagagcccaaattgcaacagagagaaactttag

SEQ ID NO: 376110 - DNA, 33 bp, Homo sapien
tagagcccaaattgcagcagagagaaactttag

SEQ ID NO: 376111 - DNA, 33 bp, Homo sapien
atttaaaattgccagactaactccttattatct

SEQ ID NO: 376112 - DNA, 33 bp, Homo sapien
atttaaaattgccagagtaactccttattatct

SEQ ID NO: 376113 - DNA, 33 bp, Homo sapien
aggatttgctgaagtcaaaaagaaatgaggtgc

SEQ ID NO: 376114 - DNA, 33 bp, Homo sapien
aggatttgctgaagtccaaaagaaatgaggtgc

SEQ ID NO: 376115 - DNA, 33 bp, Homo sapien
cattttcaacaaaaacaatggaaaaacatcaaa

SEQ ID NO: 376116 - DNA, 33 bp, Homo sapien
cattttcaacaaaaacgatggaaaaacatcaaa

SEQ ID NO: 376117 - DNA, 33 bp, Homo sapien
agtctagaatgaagcacatgtaaaactgagtct

SEQ ID NO: 376118 - DNA, 33 bp, Homo sapien
agtctagaatgaagcatatgtaaaactgagtct

SEQ ID NO: 376119 - DNA, 33 bp, Homo sapien
ttttcttttgcccaaacacacccaaatatagtt

SEQ ID NO: 376120 - DNA, 33 bp, Homo sapien
ttttcttttgcccaaagacacccaaatatagtt

SEQ ID NO: 376121 - DNA, 33 bp, Homo sapien
tgttgtaggaaatgaaccaatgttacatgaggc

SEQ ID NO: 376122 - DNA, 33 bp, Homo sapien
tgttgtaggaaatgaatcaatgttacatgaggc

SEQ ID NO: 376123 - DNA, 33 bp, Homo sapien
gtgaacagtatccataagtcctggtgttgaaat

SEQ ID NO: 376124 - DNA, 33 bp, Homo sapien
gtgaacagtatccataggtcctggtgttgaaat

SEQ ID NO: 376125 - DNA, 33 bp, Homo sapien
catcttcagcaatataaacactagcaagatttt

SEQ ID NO: 376126 - DNA, 33 bp, Homo sapien
catcttcagcaatatatacactagcaagatttt

SEQ ID NO: 376127 - DNA, 33 bp, Homo sapien
agcatcattttgtataaaattcaagcagtctag

SEQ ID NO: 376128 - DNA, 33 bp, Homo sapien
agcatcattttgtatagaattcaagcagtctag

SEQ ID NO: 376129 - DNA, 33 bp, Homo sapien
ttttgtcagtgggacaataacaagtgccatgca

SEQ ID NO: 376130 - DNA, 33 bp, Homo sapien
ttttgtcagtgggacagtaacaagtgccatgca

SEQ ID NO: 376131 - DNA, 33 bp, Homo sapien
ctaatcctggcatcgccactgacttgcaatatg

SEQ ID NO: 376132 - DNA, 33 bp, Homo sapien
ctaatcctggcatcgctactgacttgcaatatg

SEQ ID NO: 376133 - DNA, 33 bp, Homo sapien
catttgttgaatccccaaacatacaaagatgca

SEQ ID NO: 376134 - DNA, 33 bp, Homo sapien
catttgttgaatccccgaacatacaaagatgca

SEQ ID NO: 376135 - DNA, 33 bp, Homo sapien
cagccggcggcctcatcacttttctactcctga

SEQ ID NO: 376136 - DNA, 33 bp, Homo sapien
cagccggcggcctcattacttttctactcctga

SEQ ID NO: 376137 - DNA, 33 bp, Homo sapien
gttgggttttaatcccccaacagtggcatggat

SEQ ID NO: 376138 - DNA, 33 bp, Homo sapien
gttgggttttaatccctcaacagtggcatggat

SEQ ID NO: 376139 - DNA, 33 bp, Homo sapien
gtttttcctcctgaaacgcaaagattgtcacac

SEQ ID NO: 376140 - DNA, 33 bp, Homo sapien
gtttttcctcctgaaatgcaaagattgtcacac

SEQ ID NO: 376141 - DNA, 33 bp, Homo sapien
ctggatttatccacaactgctctatcctgtatc

SEQ ID NO: 376142 - DNA, 33 bp, Homo sapien
ctggatttatccacaattgctctatcctgtatc

SEQ ID NO: 376143 - DNA, 33 bp, Homo sapien
aaacacagagcaatgacgatgtgaagacacagc

SEQ ID NO: 376144 - DNA, 33 bp, Homo sapien
aaacacagagcaatgatgatgtgaagacacagc

SEQ ID NO: 376145 - DNA, 33 bp, Homo sapien
aacaaaaagtattagacgaccattgctgctcct

SEQ ID NO: 376146 - DNA, 33 bp, Homo sapien
aacaaaaagtattagatgaccattgctgctcct

SEQ ID NO: 376147 - DNA, 33 bp, Homo sapien
gaatgagtcttcaaaaatgggagaagcgcacgg

SEQ ID NO: 376148 - DNA, 33 bp, Homo sapien
gaatgagtcttcaaaagtgggagaagcgcacgg

SEQ ID NO: 376149 - DNA, 33 bp, Homo sapien
tttgacattaattcaacttattgcatggatccg

SEQ ID NO: 376150 - DNA, 33 bp, Homo sapien
tttgacattaattcaagttattgcatggatccg

SEQ ID NO: 376151 - DNA, 33 bp, Homo sapien
atctctcaccaatataaccattctagcttgagt

SEQ ID NO: 376152 - DNA, 33 bp, Homo sapien
atctctcaccaatatagccattctagcttgagt

SEQ ID NO: 376153 - DNA, 33 bp, Homo sapien
attttgaagtctaggaactagagcctccgatac

SEQ ID NO: 376154 - DNA, 33 bp, Homo sapien
attttgaagtctaggacctagagcctccgatac

SEQ ID NO: 376155 - DNA, 33 bp, Homo sapien
taaaacagtttttaaagatctcgacatcaattg

SEQ ID NO: 376156 - DNA, 33 bp, Homo sapien
taaaacagtttttaaatatctcgacatcaattg

SEQ ID NO: 376157 - DNA, 33 bp, Homo sapien
ctccaacgcagagggcactcaattcattatcag

SEQ ID NO: 376158 - DNA, 33 bp, Homo sapien
ctccaacgcagagggcgctcaattcattatcag

SEQ ID NO: 376159 - DNA, 33 bp, Homo sapien
gacaagtggaagacaaaatgttatgcagtaaac

SEQ ID NO: 376160 - DNA, 33 bp, Homo sapien
gacaagtggaagacaagatgttatgcagtaaac

SEQ ID NO: 376161 - DNA, 33 bp, Homo sapien
ggtgaaagtctccatcactctaggcaccactgt

SEQ ID NO: 376162 - DNA, 33 bp, Homo sapien
ggtgaaagtctccatcgctctaggcaccactgt

SEQ ID NO: 376163 - DNA, 33 bp, Homo sapien
taacctttgcctaccaatgaggaaacaaatgta

SEQ ID NO: 376164 - DNA, 33 bp, Homo sapien
taacctttgcctaccagtgaggaaacaaatgta

SEQ ID NO: 376165 - DNA, 33 bp, Homo sapien
gatgcgtgagcaccaactgacaagtttttctgg

SEQ ID NO: 376166 - DNA, 33 bp, Homo sapien
gatgcgtgagcaccaagtgacaagtttttctgg

SEQ ID NO: 376167 - DNA, 33 bp, Homo sapien
gccttcttggtgattacgctgtgtctctccttt

SEQ ID NO: 376168 - DNA, 33 bp, Homo sapien
gccttcttggtgattatgctgtgtctctccttt

SEQ ID NO: 376169 - DNA, 33 bp, Homo sapien
cagaactttacagttgcagagcacttccacaga

SEQ ID NO: 376170 - DNA, 33 bp, Homo sapien
cagaactttacagttgtagagcacttccacaga

SEQ ID NO: 376171 - DNA, 33 bp, Homo sapien
agttatgttgcttgaaatcatccagcagtagga

SEQ ID NO: 376172 - DNA, 33 bp, Homo sapien
agttatgttgcttgaagtcatccagcagtagga

SEQ ID NO: 376173 - DNA, 33 bp, Homo sapien
tgttgtaacagggaaagacctgaactatgaatc

SEQ ID NO: 376174 - DNA, 33 bp, Homo sapien
tgttgtaacagggaaatacctgaactatgaatc

SEQ ID NO: 376175 - DNA, 33 bp, Homo sapien
gttccataaggttccacaattcagttcttattt

SEQ ID NO: 376176 - DNA, 33 bp, Homo sapien
gttccataaggttccataattcagttcttattt

SEQ ID NO: 376177 - DNA, 33 bp, Homo sapien
gcaagcaagagtctgaataaggcacctctaact

SEQ ID NO: 376178 - DNA, 33 bp, Homo sapien
gcaagcaagagtctgagtaaggcacctctaact

SEQ ID NO: 376179 - DNA, 33 bp, Homo sapien
ggccaaagcatcattaactaatctgcaggcatg

SEQ ID NO: 376180 - DNA, 33 bp, Homo sapien
ggccaaagcatcattagctaatctgcaggcatg

SEQ ID NO: 376181 - DNA, 33 bp, Homo sapien
gtccacttacctttaccagacactgtattgtaa

SEQ ID NO: 376182 - DNA, 33 bp, Homo sapien
gtccacttacctttactagacactgtattgtaa

SEQ ID NO: 376183 - DNA, 33 bp, Homo sapien
tgaaatgttccagactcaagaggattattaggg

SEQ ID NO: 376184 - DNA, 33 bp, Homo sapien
tgaaatgttccagactgaagaggattattaggg

SEQ ID NO: 376185 - DNA, 33 bp, Homo sapien
aatatgtttttagtacaagaatgttccgtgcat

SEQ ID NO: 376186 - DNA, 33 bp, Homo sapien
aatatgtttttagtactagaatgttccgtgcat

SEQ ID NO: 376187 - DNA, 33 bp, Homo sapien
caagaagatgagctcaatcaggcctaggttaga

SEQ ID NO: 376188 - DNA, 33 bp, Homo sapien
caagaagatgagctcagtcaggcctaggttaga

SEQ ID NO: 376189 - DNA, 33 bp, Homo sapien
atagcttactcttagagaattcaaactaaggtg

SEQ ID NO: 376190 - DNA, 33 bp, Homo sapien
atagcttactcttagataattcaaactaaggtg

SEQ ID NO: 376191 - DNA, 33 bp, Homo sapien
atgaaggccttgtgccaagaaacacgagttaga

SEQ ID NO: 376192 - DNA, 33 bp, Homo sapien
atgaaggccttgtgccgagaaacacgagttaga

SEQ ID NO: 376193 - DNA, 33 bp, Homo sapien
ctgtgatatggcaaaaataactgattatgtgca

SEQ ID NO: 376194 - DNA, 33 bp, Homo sapien
ctgtgatatggcaaaagtaactgattatgtgca

SEQ ID NO: 376195 - DNA, 33 bp, Homo sapien
ccaccaaacataacccaaaggaagtgaatagaa

SEQ ID NO: 376196 - DNA, 33 bp, Homo sapien
ccaccaaacataacccgaaggaagtgaatagaa

SEQ ID NO: 376197 - DNA, 33 bp, Homo sapien
gaacctgcctctcttcactattgctaacctctc

SEQ ID NO: 376198 - DNA, 33 bp, Homo sapien
gaacctgcctctcttccctattgctaacctctc

SEQ ID NO: 376199 - DNA, 33 bp, Homo sapien
agccaaagggaaaatcaagacctatgtggaaca

SEQ ID NO: 376200 - DNA, 33 bp, Homo sapien
agccaaagggaaaatcgagacctatgtggaaca

SEQ ID NO: 376201 - DNA, 33 bp, Homo sapien
gcatgatgtgaaaaaaaccaagctagtctccct

SEQ ID NO: 376202 - DNA, 33 bp, Homo sapien
gcatgatgtgaaaaaagccaagctagtctccct

SEQ ID NO: 376203 - DNA, 33 bp, Homo sapien
aaactattgctacttccatgtcatccctgccat

SEQ ID NO: 376204 - DNA, 33 bp, Homo sapien
aaactattgctacttctatgtcatccctgccat

SEQ ID NO: 376205 - DNA, 33 bp, Homo sapien
ttgcaagtatcagtagaaaaatatcccagaagt

SEQ ID NO: 376206 - DNA, 33 bp, Homo sapien
ttgcaagtatcagtaggaaaatatcccagaagt

SEQ ID NO: 376207 - DNA, 33 bp, Homo sapien
agatgctgtagaaaaaaaagacatacctaccaa

SEQ ID NO: 376208 - DNA, 33 bp, Homo sapien
agatgctgtagaaaaagaagacatacctaccaa

SEQ ID NO: 376209 - DNA, 33 bp, Homo sapien
gagctaaaggttctgaaatgcaatgcctatcat

SEQ ID NO: 376210 - DNA, 33 bp, Homo sapien
gagctaaaggttctgagatgcaatgcctatcat

SEQ ID NO: 376211 - DNA, 33 bp, Homo sapien
tagtcagaaaagtctacagggtaagagacactc

SEQ ID NO: 376212 - DNA, 33 bp, Homo sapien
tagtcagaaaagtctatagggtaagagacactc

SEQ ID NO: 376213 - DNA, 33 bp, Homo sapien
gacaaagaaagtaagacagaagtggataccaaa

SEQ ID NO: 376214 - DNA, 33 bp, Homo sapien
gacaaagaaagtaagatagaagtggataccaaa

SEQ ID NO: 376215 - DNA, 33 bp, Homo sapien
tattgagtaagcccaaactcttacttagtgtgc

SEQ ID NO: 376216 - DNA, 33 bp, Homo sapien
tattgagtaagcccaagctcttacttagtgtgc

SEQ ID NO: 376217 - DNA, 33 bp, Homo sapien
gctaggaactaggaggaagatatggactgagaa

SEQ ID NO: 376218 - DNA, 33 bp, Homo sapien
gctaggaactaggaggcagatatggactgagaa

SEQ ID NO: 376219 - DNA, 33 bp, Homo sapien
gacccagggacaatgcccagctctgaataggac

SEQ ID NO: 376220 - DNA, 33 bp, Homo sapien
gacccagggacaatgcgcagctctgaataggac

SEQ ID NO: 376221 - DNA, 33 bp, Homo sapien
tgaccagctcaaaatcaacacagctaggacctg

SEQ ID NO: 376222 - DNA, 33 bp, Homo sapien
tgaccagctcaaaatccacacagctaggacctg

SEQ ID NO: 376223 - DNA, 33 bp, Homo sapien
caggccaaacaaaatgaaatccaaacatgtggg

SEQ ID NO: 376224 - DNA, 33 bp, Homo sapien
caggccaaacaaaatggaatccaaacatgtggg

SEQ ID NO: 376225 - DNA, 33 bp, Homo sapien
acgtacgtgcgaaacaaactttactgaagaggt

SEQ ID NO: 376226 - DNA, 33 bp, Homo sapien
acgtacgtgcgaaacagactttactgaagaggt

SEQ ID NO: 376227 - DNA, 33 bp, Homo sapien
cctttgaacaatagaaagtcatggatctatccc

SEQ ID NO: 376228 - DNA, 33 bp, Homo sapien
cctttgaacaatagaaggtcatggatctatccc

SEQ ID NO: 376229 - DNA, 33 bp, Homo sapien
agtgggacaaatctaacgacagatttaaggcag

SEQ ID NO: 376230 - DNA, 33 bp, Homo sapien
agtgggacaaatctaaggacagatttaaggcag

SEQ ID NO: 376231 - DNA, 33 bp, Homo sapien
tacatataatgaaaacaaatggtataataactg

SEQ ID NO: 376232 - DNA, 33 bp, Homo sapien
tacatataatgaaaactaatggtataataactg

SEQ ID NO: 376233 - DNA, 33 bp, Homo sapien
agtgaataagcattaactaattatgtggtgctc

SEQ ID NO: 376234 - DNA, 33 bp, Homo sapien
agtgaataagcattaagtaattatgtggtgctc

SEQ ID NO: 376235 - DNA, 33 bp, Homo sapien
tccctatcaccaataaatgatcatggcaggccc

SEQ ID NO: 376236 - DNA, 33 bp, Homo sapien
tccctatcaccaataactgatcatggcaggccc

SEQ ID NO: 376237 - DNA, 33 bp, Homo sapien
ctgaagacaagaaacaaatttaagcgtcaaagt

SEQ ID NO: 376238 - DNA, 33 bp, Homo sapien
ctgaagacaagaaacatatttaagcgtcaaagt

SEQ ID NO: 376239 - DNA, 33 bp, Homo sapien
cataaatacaaattcaccgagtcctcttgtaaa

SEQ ID NO: 376240 - DNA, 33 bp, Homo sapien
cataaatacaaattcatcgagtcctcttgtaaa

SEQ ID NO: 376241 - DNA, 33 bp, Homo sapien
tgattgttcagccatacgattttgggcaatatt

SEQ ID NO: 376242 - DNA, 33 bp, Homo sapien
tgattgttcagccatatgattttgggcaatatt

SEQ ID NO: 376243 - DNA, 33 bp, Homo sapien
aaaaaatcactactgacgtatatgttctattca

SEQ ID NO: 376244 - DNA, 33 bp, Homo sapien
aaaaaatcactactgatgtatatgttctattca

SEQ ID NO: 376245 - DNA, 33 bp, Homo sapien
ttgctgggttaattaggcctgtcaataattcag

SEQ ID NO: 376246 - DNA, 33 bp, Homo sapien
ttgctgggttaattagtcctgtcaataattcag

SEQ ID NO: 376247 - DNA, 33 bp, Homo sapien
cagcatgactttgagaagagtggcagtatgcat

SEQ ID NO: 376248 - DNA, 33 bp, Homo sapien
cagcatgactttgagacgagtggcagtatgcat

SEQ ID NO: 376249 - DNA, 33 bp, Homo sapien
gaggaataaccgagacaaactgttaaaataata

SEQ ID NO: 376250 - DNA, 33 bp, Homo sapien
gaggaataaccgagacgaactgttaaaataata

SEQ ID NO: 376251 - DNA, 33 bp, Homo sapien
ttgattttttcagccaaaagtagatttctgaat

SEQ ID NO: 376252 - DNA, 33 bp, Homo sapien
ttgattttttcagccagaagtagatttctgaat

SEQ ID NO: 376253 - DNA, 33 bp, Homo sapien
aaattggccatgtactcacaaagaagtgacatc

SEQ ID NO: 376254 - DNA, 33 bp, Homo sapien
aaattggccatgtactgacaaagaagtgacatc

SEQ ID NO: 376255 - DNA, 33 bp, Homo sapien
accacctgttcatggacacttggaaattcctca

SEQ ID NO: 376256 - DNA, 33 bp, Homo sapien
accacctgttcatggatacttggaaattcctca

SEQ ID NO: 376257 - DNA, 33 bp, Homo sapien
ctctgcccttcggagaactacacttctgcttca

SEQ ID NO: 376258 - DNA, 33 bp, Homo sapien
ctctgcccttcggagatctacacttctgcttca

SEQ ID NO: 376259 - DNA, 33 bp, Homo sapien
gggctgacatttcagggaaccctctcagggaaa

SEQ ID NO: 376260 - DNA, 33 bp, Homo sapien
gggctgacatttcaggtaaccctctcagggaaa

SEQ ID NO: 376261 - DNA, 33 bp, Homo sapien
ttacgagctccttccactgcaagacaccaatta

SEQ ID NO: 376262 - DNA, 33 bp, Homo sapien
ttacgagctccttccattgcaagacaccaatta

SEQ ID NO: 376263 - DNA, 33 bp, Homo sapien
tcttaatattgaaagcaagtgaagagggaaagt

SEQ ID NO: 376264 - DNA, 33 bp, Homo sapien
tcttaatattgaaagcgagtgaagagggaaagt

SEQ ID NO: 376265 - DNA, 33 bp, Homo sapien
aagatggagcggaatagtacaaaatgcatttgc

SEQ ID NO: 376266 - DNA, 33 bp, Homo sapien
aagatggagcggaatattacaaaatgcatttgc

SEQ ID NO: 376267 - DNA, 33 bp, Homo sapien
tgtcaggtaataacagccgtgtgaagtgaaagg

SEQ ID NO: 376268 - DNA, 33 bp, Homo sapien
tgtcaggtaataacagtcgtgtgaagtgaaagg

SEQ ID NO: 376269 - DNA, 33 bp, Homo sapien
acctcctcacattcacaaaagcaacgctgtccc

SEQ ID NO: 376270 - DNA, 33 bp, Homo sapien
acctcctcacattcacgaaagcaacgctgtccc

SEQ ID NO: 376271 - DNA, 33 bp, Homo sapien
tccaaataccctgttaaaaaatccagttcaggg

SEQ ID NO: 376272 - DNA, 33 bp, Homo sapien
tccaaataccctgttagaaaatccagttcaggg

SEQ ID NO: 376273 - DNA, 33 bp, Homo sapien
aaagaaatcaaagtgacgccaaaaggaccgctg

SEQ ID NO: 376274 - DNA, 33 bp, Homo sapien
aaagaaatcaaagtgatgccaaaaggaccgctg

SEQ ID NO: 376275 - DNA, 33 bp, Homo sapien
ggaccttcaccttcacgctcctaataggcagca

SEQ ID NO: 376276 - DNA, 33 bp, Homo sapien
ggaccttcaccttcactctcctaataggcagca

SEQ ID NO: 376277 - DNA, 33 bp, Homo sapien
gtaactcacttttaacaaatacaatatgggaga

SEQ ID NO: 376278 - DNA, 33 bp, Homo sapien
gtaactcacttttaacgaatacaatatgggaga

SEQ ID NO: 376279 - DNA, 33 bp, Homo sapien
aatatgggagaagtaacaatgtttgacttttca

SEQ ID NO: 376280 - DNA, 33 bp, Homo sapien
aatatgggagaagtaataatgtttgacttttca

SEQ ID NO: 376281 - DNA, 33 bp, Homo sapien
aattacaaagtcagatcacacatgagaagcctt

SEQ ID NO: 376282 - DNA, 33 bp, Homo sapien
aattacaaagtcagattacacatgagaagcctt

SEQ ID NO: 376283 - DNA, 33 bp, Homo sapien
atgttgggttaagtatcacagatcaacatgagg

SEQ ID NO: 376284 - DNA, 33 bp, Homo sapien
atgttgggttaagtattacagatcaacatgagg

SEQ ID NO: 376285 - DNA, 33 bp, Homo sapien
gaaccaacataatcaacactacttaaacatact

SEQ ID NO: 376286 - DNA, 33 bp, Homo sapien
gaaccaacataatcaatactacttaaacatact

SEQ ID NO: 376287 - DNA, 33 bp, Homo sapien
aggaaataaaagcaaacgcagaaaattctgctg

SEQ ID NO: 376288 - DNA, 33 bp, Homo sapien
aggaaataaaagcaaatgcagaaaattctgctg

SEQ ID NO: 376289 - DNA, 33 bp, Homo sapien
aaaagggcctgtgttaaagcctagttggtctct

SEQ ID NO: 376290 - DNA, 33 bp, Homo sapien
aaaagggcctgtgttagagcctagttggtctct

SEQ ID NO: 376291 - DNA, 33 bp, Homo sapien
atagcatcatattggccattctggagtatgcaa

SEQ ID NO: 376292 - DNA, 33 bp, Homo sapien
atagcatcatattggctattctggagtatgcaa

SEQ ID NO: 376293 - DNA, 33 bp, Homo sapien
acacccaggaagcatcaagacactggcttgctc

SEQ ID NO: 376294 - DNA, 33 bp, Homo sapien
acacccaggaagcatcgagacactggcttgctc

SEQ ID NO: 376295 - DNA, 33 bp, Homo sapien
tgcagataggtgaataaatcacaactactttaa

SEQ ID NO: 376296 - DNA, 33 bp, Homo sapien
tgcagataggtgaatacatcacaactactttaa

SEQ ID NO: 376297 - DNA, 33 bp, Homo sapien
tgaggtgctatcaagaagatgaggtcagctaca

SEQ ID NO: 376298 - DNA, 33 bp, Homo sapien
tgaggtgctatcaagacgatgaggtcagctaca

SEQ ID NO: 376299 - DNA, 33 bp, Homo sapien
attcaaactcatcaaaagtccaagaaatgtttt

SEQ ID NO: 376300 - DNA, 33 bp, Homo sapien
attcaaactcatcaaaggtccaagaaatgtttt

SEQ ID NO: 376301 - DNA, 33 bp, Homo sapien
ttcaaagcacgtttcaaaaatgatcctcttgtg

SEQ ID NO: 376302 - DNA, 33 bp, Homo sapien
ttcaaagcacgtttcagaaatgatcctcttgtg

SEQ ID NO: 376303 - DNA, 33 bp, Homo sapien
gctttatccttctagaaattttgggcacataaa

SEQ ID NO: 376304 - DNA, 33 bp, Homo sapien
gctttatccttctagagattttgggcacataaa

SEQ ID NO: 376305 - DNA, 33 bp, Homo sapien
aaggaaccctttaacagtgtcttctttatgcaa

SEQ ID NO: 376306 - DNA, 33 bp, Homo sapien
aaggaaccctttaacattgtcttctttatgcaa

SEQ ID NO: 376307 - DNA, 33 bp, Homo sapien
tagagaattgtacatacgaggccaaaatagcat

SEQ ID NO: 376308 - DNA, 33 bp, Homo sapien
tagagaattgtacatatgaggccaaaatagcat

SEQ ID NO: 376309 - DNA, 33 bp, Homo sapien
tctccaacagttaaataaatctctgggggtgga

SEQ ID NO: 376310 - DNA, 33 bp, Homo sapien
tctccaacagttaaatcaatctctgggggtgga

SEQ ID NO: 376311 - DNA, 33 bp, Homo sapien
gcagatgtgctctacactggtaaggaagagaga

SEQ ID NO: 376312 - DNA, 33 bp, Homo sapien
gcagatgtgctctacattggtaaggaagagaga

SEQ ID NO: 376313 - DNA, 33 bp, Homo sapien
ctttcttgagcaatgcagagaaatactatttta

SEQ ID NO: 376314 - DNA, 33 bp, Homo sapien
ctttcttgagcaatgcggagaaatactatttta

SEQ ID NO: 376315 - DNA, 33 bp, Homo sapien
taattaatgccgactgcaaacacaaaaacagtt

SEQ ID NO: 376316 - DNA, 33 bp, Homo sapien
taattaatgccgactgtaaacacaaaaacagtt

SEQ ID NO: 376317 - DNA, 33 bp, Homo sapien
ggaccaaattaaaagggatctcttcagcgtttg

SEQ ID NO: 376318 - DNA, 33 bp, Homo sapien
ggaccaaattaaaaggtatctcttcagcgtttg

SEQ ID NO: 376319 - DNA, 33 bp, Homo sapien
cttcctgagttccagacgcctaaatgtgatctc

SEQ ID NO: 376320 - DNA, 33 bp, Homo sapien
cttcctgagttccagatgcctaaatgtgatctc

SEQ ID NO: 376321 - DNA, 33 bp, Homo sapien
tccattaactaaccacacagttacacgaggcca

SEQ ID NO: 376322 - DNA, 33 bp, Homo sapien
tccattaactaaccacgcagttacacgaggcca

SEQ ID NO: 376323 - DNA, 33 bp, Homo sapien
tttaatcccttgttcaagtgctacctacagaga

SEQ ID NO: 376324 - DNA, 33 bp, Homo sapien
tttaatcccttgttcatgtgctacctacagaga

SEQ ID NO: 376325 - DNA, 33 bp, Homo sapien
aaagaaaatgtgctacacaaaagtcagattaca

SEQ ID NO: 376326 - DNA, 33 bp, Homo sapien
aaagaaaatgtgctactcaaaagtcagattaca

SEQ ID NO: 376327 - DNA, 33 bp, Homo sapien
tttaaggtacaaggagccataataataagggat

SEQ ID NO: 376328 - DNA, 33 bp, Homo sapien
tttaaggtacaaggaggcataataataagggat

SEQ ID NO: 376329 - DNA, 33 bp, Homo sapien
tgatctcactccaccaaccaggctaaagtgtag

SEQ ID NO: 376330 - DNA, 33 bp, Homo sapien
tgatctcactccaccatccaggctaaagtgtag

SEQ ID NO: 376331 - DNA, 33 bp, Homo sapien
ttgataagcagaccaacgtggaaagcagtttgg

SEQ ID NO: 376332 - DNA, 33 bp, Homo sapien
ttgataagcagaccaatgtggaaagcagtttgg

SEQ ID NO: 376333 - DNA, 33 bp, Homo sapien
tataattatccccaaactggctatggtgtatac

SEQ ID NO: 376334 - DNA, 33 bp, Homo sapien
tataattatccccaaattggctatggtgtatac

SEQ ID NO: 376335 - DNA, 33 bp, Homo sapien
taaagagccaccaggacgatacactcaagagat

SEQ ID NO: 376336 - DNA, 33 bp, Homo sapien
taaagagccaccaggatgatacactcaagagat

SEQ ID NO: 376337 - DNA, 33 bp, Homo sapien
agacccagaaattggacggaactcgagttgagt

SEQ ID NO: 376338 - DNA, 33 bp, Homo sapien
agacccagaaattggatggaactcgagttgagt

SEQ ID NO: 376339 - DNA, 33 bp, Homo sapien
ataccaacctattaacagaggctacattaaaga

SEQ ID NO: 376340 - DNA, 33 bp, Homo sapien
ataccaacctattaacggaggctacattaaaga

SEQ ID NO: 376341 - DNA, 33 bp, Homo sapien
gttttagcatggatgacgagaaatttctaagag

SEQ ID NO: 376342 - DNA, 33 bp, Homo sapien
gttttagcatggatgatgagaaatttctaagag

SEQ ID NO: 376343 - DNA, 33 bp, Homo sapien
aactgattcacatcaactatataaacatcgttt

SEQ ID NO: 376344 - DNA, 33 bp, Homo sapien
aactgattcacatcaagtatataaacatcgttt

SEQ ID NO: 376345 - DNA, 33 bp, Homo sapien
aaggtgactggaacaaagtttaaatatttagcc

SEQ ID NO: 376346 - DNA, 33 bp, Homo sapien
aaggtgactggaacaacgtttaaatatttagcc

SEQ ID NO: 376347 - DNA, 33 bp, Homo sapien
agacataggtggaaaacgtgatttaagaacaga

SEQ ID NO: 376348 - DNA, 33 bp, Homo sapien
agacataggtggaaaatgtgatttaagaacaga

SEQ ID NO: 376349 - DNA, 33 bp, Homo sapien
ttccttcttttgggaaatgtcatcggtccccat

SEQ ID NO: 376350 - DNA, 33 bp, Homo sapien
ttccttcttttgggaactgtcatcggtccccat

SEQ ID NO: 376351 - DNA, 33 bp, Homo sapien
ctgtctttggccaccacggattgcctgagcaaa

SEQ ID NO: 376352 - DNA, 33 bp, Homo sapien
ctgtctttggccaccatggattgcctgagcaaa

SEQ ID NO: 376353 - DNA, 33 bp, Homo sapien
tctagctcaattatgacactgtgggcacaatat

SEQ ID NO: 376354 - DNA, 33 bp, Homo sapien
tctagctcaattatgagactgtgggcacaatat

SEQ ID NO: 376355 - DNA, 33 bp, Homo sapien
cgtaggactgagttcacggtaagtgcttaataa

SEQ ID NO: 376356 - DNA, 33 bp, Homo sapien
cgtaggactgagttcatggtaagtgcttaataa

SEQ ID NO: 376357 - DNA, 33 bp, Homo sapien
caactcctaccctccccgactggttgtggcaat

SEQ ID NO: 376358 - DNA, 33 bp, Homo sapien
caactcctaccctccctgactggttgtggcaat

SEQ ID NO: 376359 - DNA, 33 bp, Homo sapien
agcagaacaaaaaggcaaatgaagggataattt

SEQ ID NO: 376360 - DNA, 33 bp, Homo sapien
agcagaacaaaaaggcgaatgaagggataattt

SEQ ID NO: 376361 - DNA, 33 bp, Homo sapien
ctctacaaatgtcagcactagaaacatttgggt

SEQ ID NO: 376362 - DNA, 33 bp, Homo sapien
ctctacaaatgtcagcgctagaaacatttgggt

SEQ ID NO: 376363 - DNA, 33 bp, Homo sapien
ttaaaaatggatccaacttcatatatgagatga

SEQ ID NO: 376364 - DNA, 33 bp, Homo sapien
ttaaaaatggatccaagttcatatatgagatga

SEQ ID NO: 376365 - DNA, 33 bp, Homo sapien
ccagagggcatggtaccgaagatcaggaacaaa

SEQ ID NO: 376366 - DNA, 33 bp, Homo sapien
ccagagggcatggtactgaagatcaggaacaaa

SEQ ID NO: 376367 - DNA, 33 bp, Homo sapien
ccactcagccggtatcccacagtactgatccta

SEQ ID NO: 376368 - DNA, 33 bp, Homo sapien
ccactcagccggtatctcacagtactgatccta

SEQ ID NO: 376369 - DNA, 33 bp, Homo sapien
tctggtttagtgcagaaggtcttcacaaaagct

SEQ ID NO: 376370 - DNA, 33 bp, Homo sapien
tctggtttagtgcagatggtcttcacaaaagct

SEQ ID NO: 376371 - DNA, 33 bp, Homo sapien
gttgattgcaataacaccatcaaagccatgcac

SEQ ID NO: 376372 - DNA, 33 bp, Homo sapien
gttgattgcaataacagcatcaaagccatgcac

SEQ ID NO: 376373 - DNA, 33 bp, Homo sapien
gcttcaatggccactaaaagtcagacttgggga

SEQ ID NO: 376374 - DNA, 33 bp, Homo sapien
gcttcaatggccactagaagtcagacttgggga

SEQ ID NO: 376375 - DNA, 33 bp, Homo sapien
aaatgagatggtaacaatgtaactcctgccaga

SEQ ID NO: 376376 - DNA, 33 bp, Homo sapien
aaatgagatggtaacattgtaactcctgccaga

SEQ ID NO: 376377 - DNA, 33 bp, Homo sapien
gcaaccaggctccaaaaaaaccaatggaaaagc

SEQ ID NO: 376378 - DNA, 33 bp, Homo sapien
gcaaccaggctccaaagaaaccaatggaaaagc

SEQ ID NO: 376379 - DNA, 33 bp, Homo sapien
cttaaggaaggaaagaaactggcatgttataag

SEQ ID NO: 376380 - DNA, 33 bp, Homo sapien
cttaaggaaggaaagagactggcatgttataag

SEQ ID NO: 376381 - DNA, 33 bp, Homo sapien
gtcctttaatcttgacaacaaacttgagcttgt

SEQ ID NO: 376382 - DNA, 33 bp, Homo sapien
gtcctttaatcttgaccacaaacttgagcttgt

SEQ ID NO: 376383 - DNA, 33 bp, Homo sapien
acagtcataacagtcacaataagggaactctaa

SEQ ID NO: 376384 - DNA, 33 bp, Homo sapien
acagtcataacagtcataataagggaactctaa

SEQ ID NO: 376385 - DNA, 33 bp, Homo sapien
aggaatttgaggtaagacaatcaggtaaagttc

SEQ ID NO: 376386 - DNA, 33 bp, Homo sapien
aggaatttgaggtaagccaatcaggtaaagttc

SEQ ID NO: 376387 - DNA, 33 bp, Homo sapien
ttgcctgcattccttagcttcctgtttcaaggc

SEQ ID NO: 376388 - DNA, 33 bp, Homo sapien
ttgcctgcattccttatcttcctgtttcaaggc

SEQ ID NO: 376389 - DNA, 33 bp, Homo sapien
ctgagagctcaataaaactttcccagaaactgc

SEQ ID NO: 376390 - DNA, 33 bp, Homo sapien
ctgagagctcaataaagctttcccagaaactgc

SEQ ID NO: 376391 - DNA, 33 bp, Homo sapien
ttacgacaacagaagacgggcttgcgcgagtaa

SEQ ID NO: 376392 - DNA, 33 bp, Homo sapien
ttacgacaacagaagatgggcttgcgcgagtaa

SEQ ID NO: 376393 - DNA, 33 bp, Homo sapien
ctactgtgtcatcaaagcttagcaattagcctc

SEQ ID NO: 376394 - DNA, 33 bp, Homo sapien
ctactgtgtcatcaaatcttagcaattagcctc

SEQ ID NO: 376395 - DNA, 33 bp, Homo sapien
acaaaactatcacaaaatcatttattctgaagt

SEQ ID NO: 376396 - DNA, 33 bp, Homo sapien
acaaaactatcacaaagtcatttattctgaagt

SEQ ID NO: 376397 - DNA, 33 bp, Homo sapien
tatgactacttctcacactgagctcacatactc

SEQ ID NO: 376398 - DNA, 33 bp, Homo sapien
tatgactacttctcacgctgagctcacatactc

SEQ ID NO: 376399 - DNA, 33 bp, Homo sapien
gacaaataatagcatcggaggaaattacctaca

SEQ ID NO: 376400 - DNA, 33 bp, Homo sapien
gacaaataatagcatctgaggaaattacctaca

SEQ ID NO: 376401 - DNA, 33 bp, Homo sapien
accttgaaaatggtcacgtgctaaaactggtag

SEQ ID NO: 376402 - DNA, 33 bp, Homo sapien
accttgaaaatggtcatgtgctaaaactggtag

SEQ ID NO: 376403 - DNA, 33 bp, Homo sapien
tgaggaaaagcttaaccatccaggagacaacgg

SEQ ID NO: 376404 - DNA, 33 bp, Homo sapien
tgaggaaaagcttaacgatccaggagacaacgg

SEQ ID NO: 376405 - DNA, 33 bp, Homo sapien
gacgcatatggcagacagatttgcgtataccaa

SEQ ID NO: 376406 - DNA, 33 bp, Homo sapien
gacgcatatggcagacggatttgcgtataccaa

SEQ ID NO: 376407 - DNA, 33 bp, Homo sapien
tgcccaggtgttgaaacacagactttctttgtg

SEQ ID NO: 376408 - DNA, 33 bp, Homo sapien
tgcccaggtgttgaaatacagactttctttgtg

SEQ ID NO: 376409 - DNA, 33 bp, Homo sapien
tctaagcaatggaattaaaaaacccagacatat

SEQ ID NO: 376410 - DNA, 33 bp, Homo sapien
tctaagcaatggaatttaaaaacccagacatat

SEQ ID NO: 376411 - DNA, 33 bp, Homo sapien
tggctacatcataacactccacagaagcctcct

SEQ ID NO: 376412 - DNA, 33 bp, Homo sapien
tggctacatcataacattccacagaagcctcct

SEQ ID NO: 376413 - DNA, 33 bp, Homo sapien
gccaactcagtacccgcagagagatatagaaga

SEQ ID NO: 376414 - DNA, 33 bp, Homo sapien
gccaactcagtacccggagagagatatagaaga

SEQ ID NO: 376415 - DNA, 33 bp, Homo sapien
atttatctctctcttacgtggcacaaggtaact

SEQ ID NO: 376416 - DNA, 33 bp, Homo sapien
atttatctctctcttatgtggcacaaggtaact

SEQ ID NO: 376417 - DNA, 33 bp, Homo sapien
tatggaaaagatgacgaattttctacttggatg

SEQ ID NO: 376418 - DNA, 33 bp, Homo sapien
tatggaaaagatgacgcattttctacttggatg

SEQ ID NO: 376419 - DNA, 33 bp, Homo sapien
ctccagacccatccaccataatcatcagtattc

SEQ ID NO: 376420 - DNA, 33 bp, Homo sapien
ctccagacccatccacgataatcatcagtattc

SEQ ID NO: 376421 - DNA, 33 bp, Homo sapien
gcttctgtgttataataaagtcccattttgaac

SEQ ID NO: 376422 - DNA, 33 bp, Homo sapien
gcttctgtgttataatgaagtcccattttgaac

SEQ ID NO: 376423 - DNA, 33 bp, Homo sapien
aatgtagattgctttcacttcaagaactaacag

SEQ ID NO: 376424 - DNA, 33 bp, Homo sapien
aatgtagattgctttcccttcaagaactaacag

SEQ ID NO: 376425 - DNA, 33 bp, Homo sapien
tgagttgcaaatttctaactccttctgaatatt

SEQ ID NO: 376426 - DNA, 33 bp, Homo sapien
tgagttgcaaatttcttactccttctgaatatt

SEQ ID NO: 376427 - DNA, 33 bp, Homo sapien
gctgaactcgattaaaaattgcactctcacttt

SEQ ID NO: 376428 - DNA, 33 bp, Homo sapien
gctgaactcgattaaatattgcactctcacttt

SEQ ID NO: 376429 - DNA, 33 bp, Homo sapien
atgcacatgtggtgtacgcagaatttgaagcca

SEQ ID NO: 376430 - DNA, 33 bp, Homo sapien
atgcacatgtggtgtatgcagaatttgaagcca

SEQ ID NO: 376431 - DNA, 33 bp, Homo sapien
tttttaatgctttacaaaaaggaaaggcaatca

SEQ ID NO: 376432 - DNA, 33 bp, Homo sapien
tttttaatgctttacagaaaggaaaggcaatca

SEQ ID NO: 376433 - DNA, 33 bp, Homo sapien
cccctttctcttagaccaggcatgaataatctc

SEQ ID NO: 376434 - DNA, 33 bp, Homo sapien
cccctttctcttagactaggcatgaataatctc

SEQ ID NO: 376435 - DNA, 33 bp, Homo sapien
tccatcattcaatagccctctcactctctctct

SEQ ID NO: 376436 - DNA, 33 bp, Homo sapien
tccatcattcaatagctctctcactctctctct

SEQ ID NO: 376437 - DNA, 33 bp, Homo sapien
ctggagtgaagcttgaggattttgaagatttct

SEQ ID NO: 376438 - DNA, 33 bp, Homo sapien
ctggagtgaagcttgatgattttgaagatttct

SEQ ID NO: 376439 - DNA, 33 bp, Homo sapien
tgtgagaagctcatgcagaccttaaataaaagc

SEQ ID NO: 376440 - DNA, 33 bp, Homo sapien
tgtgagaagctcatgcggaccttaaataaaagc

SEQ ID NO: 376441 - DNA, 33 bp, Homo sapien
tgcctctatagctgtcccttagcgaagaataaa

SEQ ID NO: 376442 - DNA, 33 bp, Homo sapien
tgcctctatagctgtctcttagcgaagaataaa

SEQ ID NO: 376443 - DNA, 33 bp, Homo sapien
tgaggaacagtagagaaccttcttgaataaaca

SEQ ID NO: 376444 - DNA, 33 bp, Homo sapien
tgaggaacagtagagatccttcttgaataaaca

SEQ ID NO: 376445 - DNA, 33 bp, Homo sapien
ctctttccatggcaccaactacattattgcaaa

SEQ ID NO: 376446 - DNA, 33 bp, Homo sapien
ctctttccatggcaccgactacattattgcaaa

SEQ ID NO: 376447 - DNA, 33 bp, Homo sapien
gccacagcctattggaccaaggataaacacttg

SEQ ID NO: 376448 - DNA, 33 bp, Homo sapien
gccacagcctattggatcaaggataaacacttg

SEQ ID NO: 376449 - DNA, 33 bp, Homo sapien
ctcaagtccttgcagacatggtagctctctcac

SEQ ID NO: 376450 - DNA, 33 bp, Homo sapien
ctcaagtccttgcagatatggtagctctctcac

SEQ ID NO: 376451 - DNA, 33 bp, Homo sapien
gctaaagaccttgagaagaaagcagactgaatg

SEQ ID NO: 376452 - DNA, 33 bp, Homo sapien
gctaaagaccttgagaggaaagcagactgaatg

SEQ ID NO: 376453 - DNA, 33 bp, Homo sapien
accgtgtctaaagggggcagtccctactctttc

SEQ ID NO: 376454 - DNA, 33 bp, Homo sapien
accgtgtctaaaggggtcagtccctactctttc

SEQ ID NO: 376455 - DNA, 33 bp, Homo sapien
aatttgtagtgtttgccgattattgtgatgtaa

SEQ ID NO: 376456 - DNA, 33 bp, Homo sapien
aatttgtagtgtttgctgattattgtgatgtaa

SEQ ID NO: 376457 - DNA, 33 bp, Homo sapien
cataactggaatagcaactttctggaccatatg

SEQ ID NO: 376458 - DNA, 33 bp, Homo sapien
cataactggaatagcagctttctggaccatatg

SEQ ID NO: 376459 - DNA, 33 bp, Homo sapien
ccatatgcctggaacacagcaggtgctgaataa

SEQ ID NO: 376460 - DNA, 33 bp, Homo sapien
ccatatgcctggaacatagcaggtgctgaataa

SEQ ID NO: 376461 - DNA, 33 bp, Homo sapien
ggatttgccattgcataaaaaagggaaggtaag

SEQ ID NO: 376462 - DNA, 33 bp, Homo sapien
ggatttgccattgcatgaaaaagggaaggtaag

SEQ ID NO: 376463 - DNA, 33 bp, Homo sapien
taatattgcttattgacgattataaggtaaaga

SEQ ID NO: 376464 - DNA, 33 bp, Homo sapien
taatattgcttattgatgattataaggtaaaga

SEQ ID NO: 376465 - DNA, 33 bp, Homo sapien
cttagatcaatgtataccagcaaagtaattcta

SEQ ID NO: 376466 - DNA, 33 bp, Homo sapien
cttagatcaatgtatatcagcaaagtaattcta

SEQ ID NO: 376467 - DNA, 33 bp, Homo sapien
tcatcactgctcttcaactgagaataaggcttt

SEQ ID NO: 376468 - DNA, 33 bp, Homo sapien
tcatcactgctcttcagctgagaataaggcttt

SEQ ID NO: 376469 - DNA, 33 bp, Homo sapien
agtatctttcctactccaacatcctcaaattcc

SEQ ID NO: 376470 - DNA, 33 bp, Homo sapien
agtatctttcctactctaacatcctcaaattcc

SEQ ID NO: 376471 - DNA, 33 bp, Homo sapien
gccattgttggggttaaactgtcctgaacaaaa

SEQ ID NO: 376472 - DNA, 33 bp, Homo sapien
gccattgttggggttagactgtcctgaacaaaa

SEQ ID NO: 376473 - DNA, 33 bp, Homo sapien
catagtcacttgtgaaccactgaagcctctttc

SEQ ID NO: 376474 - DNA, 33 bp, Homo sapien
catagtcacttgtgaatcactgaagcctctttc

SEQ ID NO: 376475 - DNA, 33 bp, Homo sapien
atcaaagagtaccaaaaaccaatcttgctcact

SEQ ID NO: 376476 - DNA, 33 bp, Homo sapien
atcaaagagtaccaaacaccaatcttgctcact

SEQ ID NO: 376477 - DNA, 33 bp, Homo sapien
aatacaggctcaagaacaattgtaaacactgca

SEQ ID NO: 376478 - DNA, 33 bp, Homo sapien
aatacaggctcaagaataattgtaaacactgca

SEQ ID NO: 376479 - DNA, 33 bp, Homo sapien
cttggcaaagccaccacccttgtcaagcagcac

SEQ ID NO: 376480 - DNA, 33 bp, Homo sapien
cttggcaaagccaccatccttgtcaagcagcac

SEQ ID NO: 376481 - DNA, 33 bp, Homo sapien
tagagagtagctataaagagagtgctgcttgac

SEQ ID NO: 376482 - DNA, 33 bp, Homo sapien
tagagagtagctataaggagagtgctgcttgac

SEQ ID NO: 376483 - DNA, 33 bp, Homo sapien
aaagattatcataacaatagctaacagttgtgg

SEQ ID NO: 376484 - DNA, 33 bp, Homo sapien
aaagattatcataacactagctaacagttgtgg

SEQ ID NO: 376485 - DNA, 33 bp, Homo sapien
cttacaggttgaagtcaattgagtatcctttga

SEQ ID NO: 376486 - DNA, 33 bp, Homo sapien
cttacaggttgaagtcgattgagtatcctttga

SEQ ID NO: 376487 - DNA, 33 bp, Homo sapien
agaactgatacagaataagaactcaatggatac

SEQ ID NO: 376488 - DNA, 33 bp, Homo sapien
agaactgatacagaatgagaactcaatggatac

SEQ ID NO: 376489 - DNA, 33 bp, Homo sapien
aactggttgttatgaacactaaaatatataatg

SEQ ID NO: 376490 - DNA, 33 bp, Homo sapien
aactggttgttatgaagactaaaatatataatg

SEQ ID NO: 376491 - DNA, 33 bp, Homo sapien
tacctggtaaacaaaaatccagtctatcattgg

SEQ ID NO: 376492 - DNA, 33 bp, Homo sapien
tacctggtaaacaaaactccagtctatcattgg

SEQ ID NO: 376493 - DNA, 33 bp, Homo sapien
tcatgggacccgcatccgacaagagtgttctag

SEQ ID NO: 376494 - DNA, 33 bp, Homo sapien
tcatgggacccgcatctgacaagagtgttctag

SEQ ID NO: 376495 - DNA, 33 bp, Homo sapien
tccactgaatcccatacgtgtgagtgtgtgtat

SEQ ID NO: 376496 - DNA, 33 bp, Homo sapien
tccactgaatcccatatgtgtgagtgtgtgtat

SEQ ID NO: 376497 - DNA, 33 bp, Homo sapien
cctacaatgaccaatacgttcctgagcaacatc

SEQ ID NO: 376498 - DNA, 33 bp, Homo sapien
cctacaatgaccaatatgttcctgagcaacatc

SEQ ID NO: 376499 - DNA, 33 bp, Homo sapien
atagggagcgtcctcacaattcagaaagcagtt

SEQ ID NO: 376500 - DNA, 33 bp, Homo sapien
atagggagcgtcctcagaattcagaaagcagtt

SEQ ID NO: 376501 - DNA, 33 bp, Homo sapien
attaacctaaaaatcacaggcaagtgcggtgat

SEQ ID NO: 376502 - DNA, 33 bp, Homo sapien
attaacctaaaaatcataggcaagtgcggtgat

SEQ ID NO: 376503 - DNA, 33 bp, Homo sapien
gccccgtggaggtagacaccggaattaaattaa

SEQ ID NO: 376504 - DNA, 33 bp, Homo sapien
gccccgtggaggtagagaccggaattaaattaa

SEQ ID NO: 376505 - DNA, 33 bp, Homo sapien
gagggctgtgtgaagtcaatgccttggttcaac

SEQ ID NO: 376506 - DNA, 33 bp, Homo sapien
gagggctgtgtgaagttaatgccttggttcaac

SEQ ID NO: 376507 - DNA, 33 bp, Homo sapien
accttctggcaaccagcactttggcccatctac

SEQ ID NO: 376508 - DNA, 33 bp, Homo sapien
accttctggcaaccaggactttggcccatctac

SEQ ID NO: 376509 - DNA, 33 bp, Homo sapien
catttgaaggaaaatggagtgaattctatgaat

SEQ ID NO: 376510 - DNA, 33 bp, Homo sapien
catttgaaggaaaatgtagtgaattctatgaat

SEQ ID NO: 376511 - DNA, 33 bp, Homo sapien
ctccgcttaacctacacgagaagacatgctgta

SEQ ID NO: 376512 - DNA, 33 bp, Homo sapien
ctccgcttaacctacaggagaagacatgctgta

SEQ ID NO: 376513 - DNA, 33 bp, Homo sapien
ctgtaggatcacttgcacccagcagctcaagat

SEQ ID NO: 376514 - DNA, 33 bp, Homo sapien
ctgtaggatcacttgcgcccagcagctcaagat

SEQ ID NO: 376515 - DNA, 33 bp, Homo sapien
ttcttgaacaggaaagacagtgatggtgctgcc

SEQ ID NO: 376516 - DNA, 33 bp, Homo sapien
ttcttgaacaggaaagccagtgatggtgctgcc

SEQ ID NO: 376517 - DNA, 33 bp, Homo sapien
aggtagaataatgagaagatgtggaagagcagg

SEQ ID NO: 376518 - DNA, 33 bp, Homo sapien
aggtagaataatgagaggatgtggaagagcagg

SEQ ID NO: 376519 - DNA, 33 bp, Homo sapien
gtcagctttggctaggcaaggctacagtaacaa

SEQ ID NO: 376520 - DNA, 33 bp, Homo sapien
gtcagctttggctaggtaaggctacagtaacaa

SEQ ID NO: 376521 - DNA, 33 bp, Homo sapien
gtttctcagaaattcacgtagtaggtgcttaat

SEQ ID NO: 376522 - DNA, 33 bp, Homo sapien
gtttctcagaaattcatgtagtaggtgcttaat

SEQ ID NO: 376523 - DNA, 33 bp, Homo sapien
aggatattacaagtacacagcaatcttttccat

SEQ ID NO: 376524 - DNA, 33 bp, Homo sapien
aggatattacaagtacgcagcaatcttttccat

SEQ ID NO: 376525 - DNA, 33 bp, Homo sapien
ctctattttgtaccaacctcctatctcattctg

SEQ ID NO: 376526 - DNA, 33 bp, Homo sapien
ctctattttgtaccaatctcctatctcattctg

SEQ ID NO: 376527 - DNA, 33 bp, Homo sapien
gtagttgaagatgagaacatttgcattcttatt

SEQ ID NO: 376528 - DNA, 33 bp, Homo sapien
gtagttgaagatgagagcatttgcattcttatt

SEQ ID NO: 376529 - DNA, 33 bp, Homo sapien
ttaggcaaacataaacaggaatttaggagttag

SEQ ID NO: 376530 - DNA, 33 bp, Homo sapien
ttaggcaaacataaacgggaatttaggagttag

SEQ ID NO: 376531 - DNA, 33 bp, Homo sapien
tacctggaaaatattccctgagcctcaacctca

SEQ ID NO: 376532 - DNA, 33 bp, Homo sapien
tacctggaaaatattctctgagcctcaacctca

SEQ ID NO: 376533 - DNA, 33 bp, Homo sapien
ccatgtccagaacttcagaaatagctctgtggt

SEQ ID NO: 376534 - DNA, 33 bp, Homo sapien
ccatgtccagaacttcggaaatagctctgtggt

SEQ ID NO: 376535 - DNA, 33 bp, Homo sapien
ggatgagggcccttgcagatcttataattctcc

SEQ ID NO: 376536 - DNA, 33 bp, Homo sapien
ggatgagggcccttgcggatcttataattctcc

SEQ ID NO: 376537 - DNA, 33 bp, Homo sapien
aggactaaggttcctacgctcctgctagttgtt

SEQ ID NO: 376538 - DNA, 33 bp, Homo sapien
aggactaaggttcctatgctcctgctagttgtt

SEQ ID NO: 376539 - DNA, 33 bp, Homo sapien
aaagcttctgagactgaacaccttccttgatgc

SEQ ID NO: 376540 - DNA, 33 bp, Homo sapien
aaagcttctgagactggacaccttccttgatgc

SEQ ID NO: 376541 - DNA, 33 bp, Homo sapien
ttatatgttgttattacattttggcaaagtagg

SEQ ID NO: 376542 - DNA, 33 bp, Homo sapien
ttatatgttgttattatattttggcaaagtagg

SEQ ID NO: 376543 - DNA, 33 bp, Homo sapien
acctctggtggagatacaggggctgacttttct

SEQ ID NO: 376544 - DNA, 33 bp, Homo sapien
acctctggtggagatataggggctgacttttct

SEQ ID NO: 376545 - DNA, 33 bp, Homo sapien
gtcatgtgcagaagcaccgtggcatgacaaagc

SEQ ID NO: 376546 - DNA, 33 bp, Homo sapien
gtcatgtgcagaagcatcgtggcatgacaaagc

SEQ ID NO: 376547 - DNA, 33 bp, Homo sapien
acatttccatcttccaatgcttctattgatggc

SEQ ID NO: 376548 - DNA, 33 bp, Homo sapien
acatttccatcttccagtgcttctattgatggc

SEQ ID NO: 376549 - DNA, 33 bp, Homo sapien
cttcacaaattgcatacggttgtgacttcatca

SEQ ID NO: 376550 - DNA, 33 bp, Homo sapien
cttcacaaattgcatatggttgtgacttcatca

SEQ ID NO: 376551 - DNA, 33 bp, Homo sapien
tatccacagttctggaggccagcaatggaggag

SEQ ID NO: 376552 - DNA, 33 bp, Homo sapien
tatccacagttctggatgccagcaatggaggag

SEQ ID NO: 376553 - DNA, 33 bp, Homo sapien
aaatgagcatgcatacagcaactggctttcagc

SEQ ID NO: 376554 - DNA, 33 bp, Homo sapien
aaatgagcatgcatacggcaactggctttcagc

SEQ ID NO: 376555 - DNA, 33 bp, Homo sapien
cgattgttaaggcaaaaacacaggggacattcg

SEQ ID NO: 376556 - DNA, 33 bp, Homo sapien
cgattgttaaggcaaagacacaggggacattcg

SEQ ID NO: 376557 - DNA, 33 bp, Homo sapien
tgatgttcaatccagcgagtggggctcagctgt

SEQ ID NO: 376558 - DNA, 33 bp, Homo sapien
tgatgttcaatccagctagtggggctcagctgt

SEQ ID NO: 376559 - DNA, 33 bp, Homo sapien
tcacatgcttgttatactagttatttggatgat

SEQ ID NO: 376560 - DNA, 33 bp, Homo sapien
tcacatgcttgttatagtagttatttggatgat

SEQ ID NO: 376561 - DNA, 33 bp, Homo sapien
cttgtaagtcacatgggattagattgtgccaat

SEQ ID NO: 376562 - DNA, 33 bp, Homo sapien
cttgtaagtcacatggtattagattgtgccaat

SEQ ID NO: 376563 - DNA, 33 bp, Homo sapien
gaagttctaaatcagaagagcttccctgcacgg

SEQ ID NO: 376564 - DNA, 33 bp, Homo sapien
gaagttctaaatcagatgagcttccctgcacgg

SEQ ID NO: 376565 - DNA, 33 bp, Homo sapien
cttagactgctttcacaccatttctcaacaata

SEQ ID NO: 376566 - DNA, 33 bp, Homo sapien
cttagactgctttcacgccatttctcaacaata

SEQ ID NO: 376567 - DNA, 33 bp, Homo sapien
gaaagcagtctaagccaccctcctcattttcca

SEQ ID NO: 376568 - DNA, 33 bp, Homo sapien
gaaagcagtctaagccgccctcctcattttcca

SEQ ID NO: 376569 - DNA, 33 bp, Homo sapien
tcatgagggcagataactagtattataggtgaa

SEQ ID NO: 376570 - DNA, 33 bp, Homo sapien
tcatgagggcagataattagtattataggtgaa

SEQ ID NO: 376571 - DNA, 33 bp, Homo sapien
aagttttctccctgtaactagactgcaaattac

SEQ ID NO: 376572 - DNA, 33 bp, Homo sapien
aagttttctccctgtatctagactgcaaattac

SEQ ID NO: 376573 - DNA, 33 bp, Homo sapien
tgattccagttgtttcacaggcccaaacacaat

SEQ ID NO: 376574 - DNA, 33 bp, Homo sapien
tgattccagttgtttcgcaggcccaaacacaat

SEQ ID NO: 376575 - DNA, 33 bp, Homo sapien
tttgctaattttgtcccagaggctggcttggaa

SEQ ID NO: 376576 - DNA, 33 bp, Homo sapien
tttgctaattttgtcctagaggctggcttggaa

SEQ ID NO: 376577 - DNA, 33 bp, Homo sapien
ttactatattccatgaactgtgtcagatgcttt

SEQ ID NO: 376578 - DNA, 33 bp, Homo sapien
ttactatattccatgacctgtgtcagatgcttt

SEQ ID NO: 376579 - DNA, 33 bp, Homo sapien
agagattcggatgtaaagaattagagagcccct

SEQ ID NO: 376580 - DNA, 33 bp, Homo sapien
agagattcggatgtaaggaattagagagcccct

SEQ ID NO: 376581 - DNA, 33 bp, Homo sapien
atttttccaatatgaaaacttctacatttaaca

SEQ ID NO: 376582 - DNA, 33 bp, Homo sapien
atttttccaatatgaagacttctacatttaaca

SEQ ID NO: 376583 - DNA, 33 bp, Homo sapien
caaaaactcgtttcccacttttcagctaataat

SEQ ID NO: 376584 - DNA, 33 bp, Homo sapien
caaaaactcgtttcccgcttttcagctaataat

SEQ ID NO: 376585 - DNA, 33 bp, Homo sapien
tgaaagtggaaaaagcaacactgggtttggcag

SEQ ID NO: 376586 - DNA, 33 bp, Homo sapien
tgaaagtggaaaaagccacactgggtttggcag

SEQ ID NO: 376587 - DNA, 33 bp, Homo sapien
tagtggcagctctcaacgtttcctggagtcact

SEQ ID NO: 376588 - DNA, 33 bp, Homo sapien
tagtggcagctctcaatgtttcctggagtcact

SEQ ID NO: 376589 - DNA, 33 bp, Homo sapien
tcaatgccatggaataaaatgagttgttggaaa

SEQ ID NO: 376590 - DNA, 33 bp, Homo sapien
tcaatgccatggaatagaatgagttgttggaaa

SEQ ID NO: 376591 - DNA, 33 bp, Homo sapien
aaagtcatgggactcacatttcttgacaaagta

SEQ ID NO: 376592 - DNA, 33 bp, Homo sapien
aaagtcatgggactcatatttcttgacaaagta

SEQ ID NO: 376593 - DNA, 33 bp, Homo sapien
cagacaaataagaacacggataaaataagagac

SEQ ID NO: 376594 - DNA, 33 bp, Homo sapien
cagacaaataagaacatggataaaataagagac

SEQ ID NO: 376595 - DNA, 33 bp, Homo sapien
ataagagactcttaaaaactcattttgaaagcc

SEQ ID NO: 376596 - DNA, 33 bp, Homo sapien
ataagagactcttaaagactcattttgaaagcc

SEQ ID NO: 376597 - DNA, 33 bp, Homo sapien
agatacagtcaccataaaatgaactcattgccc

SEQ ID NO: 376598 - DNA, 33 bp, Homo sapien
agatacagtcaccatacaatgaactcattgccc

SEQ ID NO: 376599 - DNA, 33 bp, Homo sapien
acacacaaaaagacacaaactcaacaacaacaa

SEQ ID NO: 376600 - DNA, 33 bp, Homo sapien
acacacaaaaagacacgaactcaacaacaacaa

SEQ ID NO: 376601 - DNA, 33 bp, Homo sapien
tacagggaacttgccactgaaggactgaaatag

SEQ ID NO: 376602 - DNA, 33 bp, Homo sapien
tacagggaacttgccattgaaggactgaaatag

SEQ ID NO: 376603 - DNA, 33 bp, Homo sapien
gggacccagaggtcacagaataccaatatgaat

SEQ ID NO: 376604 - DNA, 33 bp, Homo sapien
gggacccagaggtcacggaataccaatatgaat

SEQ ID NO: 376605 - DNA, 33 bp, Homo sapien
tatggtgcaattccaaatagtactttcatgagg

SEQ ID NO: 376606 - DNA, 33 bp, Homo sapien
tatggtgcaattccaagtagtactttcatgagg

SEQ ID NO: 376607 - DNA, 33 bp, Homo sapien
tcactgactatatggacggggcattcgcatatt

SEQ ID NO: 376608 - DNA, 33 bp, Homo sapien
tcactgactatatggatggggcattcgcatatt

SEQ ID NO: 376609 - DNA, 33 bp, Homo sapien
ctgtgacagttttagcgatgtatttggcaaaga

SEQ ID NO: 376610 - DNA, 33 bp, Homo sapien
ctgtgacagttttagctatgtatttggcaaaga

SEQ ID NO: 376611 - DNA, 33 bp, Homo sapien
tgtgacttagctattgacaacttagaatctctt

SEQ ID NO: 376612 - DNA, 33 bp, Homo sapien
tgtgacttagctattggcaacttagaatctctt

SEQ ID NO: 376613 - DNA, 33 bp, Homo sapien
tagatgacctggcttaagctcaacaagactaaa

SEQ ID NO: 376614 - DNA, 33 bp, Homo sapien
tagatgacctggcttaggctcaacaagactaaa

SEQ ID NO: 376615 - DNA, 33 bp, Homo sapien
tcacatatttctgctaagactttccctgtgtat

SEQ ID NO: 376616 - DNA, 33 bp, Homo sapien
tcacatatttctgctaggactttccctgtgtat

SEQ ID NO: 376617 - DNA, 33 bp, Homo sapien
gatgtagaaacacatacatactctaaccaaaag

SEQ ID NO: 376618 - DNA, 33 bp, Homo sapien
gatgtagaaacacatatatactctaaccaaaag

SEQ ID NO: 376619 - DNA, 33 bp, Homo sapien
gtctttgcaggaatagaataagaaacaagaata

SEQ ID NO: 376620 - DNA, 33 bp, Homo sapien
gtctttgcaggaatagcataagaaacaagaata

SEQ ID NO: 376621 - DNA, 33 bp, Homo sapien
tttcagattagaagaacgtttcaaaccatttct

SEQ ID NO: 376622 - DNA, 33 bp, Homo sapien
tttcagattagaagaatgtttcaaaccatttct

SEQ ID NO: 376623 - DNA, 33 bp, Homo sapien
tgcgagtcggtgtagaacatgcacctcagggct

SEQ ID NO: 376624 - DNA, 33 bp, Homo sapien
tgcgagtcggtgtagatcatgcacctcagggct

SEQ ID NO: 376625 - DNA, 33 bp, Homo sapien
ctatacacctcggctacaaacctgtatagcatg

SEQ ID NO: 376626 - DNA, 33 bp, Homo sapien
ctatacacctcggctagaaacctgtatagcatg

SEQ ID NO: 376627 - DNA, 33 bp, Homo sapien
taagtgtgctgacagaaacaaaactatttactg

SEQ ID NO: 376628 - DNA, 33 bp, Homo sapien
taagtgtgctgacagagacaaaactatttactg

SEQ ID NO: 376629 - DNA, 33 bp, Homo sapien
ccccataaggtgattacagctgcacctccattg

SEQ ID NO: 376630 - DNA, 33 bp, Homo sapien
ccccataaggtgattatagctgcacctccattg

SEQ ID NO: 376631 - DNA, 33 bp, Homo sapien
ctctgtattttcatcaagttccctaggtggttg

SEQ ID NO: 376632 - DNA, 33 bp, Homo sapien
ctctgtattttcatcaggttccctaggtggttg

SEQ ID NO: 376633 - DNA, 33 bp, Homo sapien
ctggtggtacatacagaaactggttttggaagg

SEQ ID NO: 376634 - DNA, 33 bp, Homo sapien
ctggtggtacatacaggaactggttttggaagg

SEQ ID NO: 376635 - DNA, 33 bp, Homo sapien
atgattgtgtttgggacaagtgcacataccaaa

SEQ ID NO: 376636 - DNA, 33 bp, Homo sapien
atgattgtgtttgggagaagtgcacataccaaa

SEQ ID NO: 376637 - DNA, 33 bp, Homo sapien
cattatcctaagagaagtaatgcaggaacagaa

SEQ ID NO: 376638 - DNA, 33 bp, Homo sapien
cattatcctaagagaattaatgcaggaacagaa

SEQ ID NO: 376639 - DNA, 33 bp, Homo sapien
agattagatgatttaaacaaaggcaagaagatg

SEQ ID NO: 376640 - DNA, 33 bp, Homo sapien
agattagatgatttaagcaaaggcaagaagatg

SEQ ID NO: 376641 - DNA, 33 bp, Homo sapien
caaagctaattacagagtcgatgcctttccact

SEQ ID NO: 376642 - DNA, 33 bp, Homo sapien
caaagctaattacagattcgatgcctttccact

SEQ ID NO: 376643 - DNA, 33 bp, Homo sapien
aaaagacaatatgataaaaagtaagaaaattta

SEQ ID NO: 376644 - DNA, 33 bp, Homo sapien
aaaagacaatatgatagaaagtaagaaaattta

SEQ ID NO: 376645 - DNA, 33 bp, Homo sapien
ttccctgcatggtttccattttttaccagattg

SEQ ID NO: 376646 - DNA, 33 bp, Homo sapien
ttccctgcatggtttctattttttaccagattg

SEQ ID NO: 376647 - DNA, 33 bp, Homo sapien
ttgaagaatatggagaaaaaaagagactagaag

SEQ ID NO: 376648 - DNA, 33 bp, Homo sapien
ttgaagaatatggagataaaaagagactagaag

SEQ ID NO: 376649 - DNA, 33 bp, Homo sapien
tctaatttcttggatccctactgaggttacagc

SEQ ID NO: 376650 - DNA, 33 bp, Homo sapien
tctaatttcttggatctctactgaggttacagc

SEQ ID NO: 376651 - DNA, 33 bp, Homo sapien
gagatccttcccaaaacgatgcctggcgatttg

SEQ ID NO: 376652 - DNA, 33 bp, Homo sapien
gagatccttcccaaaatgatgcctggcgatttg

SEQ ID NO: 376653 - DNA, 33 bp, Homo sapien
gctgtctttccctgcactattaagctttaacat

SEQ ID NO: 376654 - DNA, 33 bp, Homo sapien
gctgtctttccctgcattattaagctttaacat

SEQ ID NO: 376655 - DNA, 33 bp, Homo sapien
atattggtgaatcacactgacacagtccctaac

SEQ ID NO: 376656 - DNA, 33 bp, Homo sapien
atattggtgaatcacattgacacagtccctaac

SEQ ID NO: 376657 - DNA, 33 bp, Homo sapien
aggccactgaagctaccggatttaggcttggga

SEQ ID NO: 376658 - DNA, 33 bp, Homo sapien
aggccactgaagctacgggatttaggcttggga

SEQ ID NO: 376659 - DNA, 33 bp, Homo sapien
agtgcttgttgctatgaaaagactgggaccatt

SEQ ID NO: 376660 - DNA, 33 bp, Homo sapien
agtgcttgttgctatgtaaagactgggaccatt

SEQ ID NO: 376661 - DNA, 33 bp, Homo sapien
acatttgtaatttgaaatcttggggaatagtga

SEQ ID NO: 376662 - DNA, 33 bp, Homo sapien
acatttgtaatttgaagtcttggggaatagtga

SEQ ID NO: 376663 - DNA, 33 bp, Homo sapien
tcttgataaatacaaaatcatttctgctgtcac

SEQ ID NO: 376664 - DNA, 33 bp, Homo sapien
tcttgataaatacaaagtcatttctgctgtcac

SEQ ID NO: 376665 - DNA, 33 bp, Homo sapien
tttcctggcttgaaaccataggagatggatgga

SEQ ID NO: 376666 - DNA, 33 bp, Homo sapien
tttcctggcttgaaacgataggagatggatgga

SEQ ID NO: 376667 - DNA, 33 bp, Homo sapien
tataacttactgagtgaaacaagtgcctctatc

SEQ ID NO: 376668 - DNA, 33 bp, Homo sapien
tataacttactgagtgcaacaagtgcctctatc

SEQ ID NO: 376669 - DNA, 33 bp, Homo sapien
aattctaactgcctccggaaggtctcactccaa

SEQ ID NO: 376670 - DNA, 33 bp, Homo sapien
aattctaactgcctcctgaaggtctcactccaa

SEQ ID NO: 376671 - DNA, 33 bp, Homo sapien
cagatgaggatagggaatatacactgttctgca

SEQ ID NO: 376672 - DNA, 33 bp, Homo sapien
cagatgaggatagggattatacactgttctgca

SEQ ID NO: 376673 - DNA, 33 bp, Homo sapien
aaaaactcatttgaagcccttagaataaacatt

SEQ ID NO: 376674 - DNA, 33 bp, Homo sapien
aaaaactcatttgaaggccttagaataaacatt

SEQ ID NO: 376675 - DNA, 33 bp, Homo sapien
gggatttgaaggtagaagaattaggtcacattt

SEQ ID NO: 376676 - DNA, 33 bp, Homo sapien
gggatttgaaggtagaggaattaggtcacattt

SEQ ID NO: 376677 - DNA, 33 bp, Homo sapien
ctctggggatgaaagaaaaggaggaatcaaaga

SEQ ID NO: 376678 - DNA, 33 bp, Homo sapien
ctctggggatgaaagagaaggaggaatcaaaga

SEQ ID NO: 376679 - DNA, 33 bp, Homo sapien
actgagaaatctcctcaaaggtatctcaaggaa

SEQ ID NO: 376680 - DNA, 33 bp, Homo sapien
actgagaaatctcctccaaggtatctcaaggaa

SEQ ID NO: 376681 - DNA, 33 bp, Homo sapien
tgttatgctcctaaaaatcccatttgtaaatca

SEQ ID NO: 376682 - DNA, 33 bp, Homo sapien
tgttatgctcctaaaattcccatttgtaaatca

SEQ ID NO: 376683 - DNA, 33 bp, Homo sapien
aatgcatgatgatgccaccactttaagagacag

SEQ ID NO: 376684 - DNA, 33 bp, Homo sapien
aatgcatgatgatgccgccactttaagagacag

SEQ ID NO: 376685 - DNA, 33 bp, Homo sapien
ccatcagcatattgagaactcacagtgtgccag

SEQ ID NO: 376686 - DNA, 33 bp, Homo sapien
ccatcagcatattgagcactcacagtgtgccag

SEQ ID NO: 376687 - DNA, 33 bp, Homo sapien
tgatcacaaaacagacacagaagagcacttaac

SEQ ID NO: 376688 - DNA, 33 bp, Homo sapien
tgatcacaaaacagacccagaagagcacttaac

SEQ ID NO: 376689 - DNA, 33 bp, Homo sapien
gatataacaaagataacgcagacaaaacgttta

SEQ ID NO: 376690 - DNA, 33 bp, Homo sapien
gatataacaaagataatgcagacaaaacgttta

SEQ ID NO: 376691 - DNA, 33 bp, Homo sapien
agtggcacaagcggaaaggaatcagaagaaagt

SEQ ID NO: 376692 - DNA, 33 bp, Homo sapien
agtggcacaagcggaagggaatcagaagaaagt

SEQ ID NO: 376693 - DNA, 33 bp, Homo sapien
tatcctgttgtcatggcagctaaagatcaagac

SEQ ID NO: 376694 - DNA, 33 bp, Homo sapien
tatcctgttgtcatggtagctaaagatcaagac

SEQ ID NO: 376695 - DNA, 33 bp, Homo sapien
tttattatttttctccacattcagaatcctccc

SEQ ID NO: 376696 - DNA, 33 bp, Homo sapien
tttattatttttctccgcattcagaatcctccc

SEQ ID NO: 376697 - DNA, 33 bp, Homo sapien
ctgtgaccatcctgaaatgaaatgaaagtcaat

SEQ ID NO: 376698 - DNA, 33 bp, Homo sapien
ctgtgaccatcctgaagtgaaatgaaagtcaat

SEQ ID NO: 376699 - DNA, 33 bp, Homo sapien
ccatgcatgttgctacaaaggacattttattgt

SEQ ID NO: 376700 - DNA, 33 bp, Homo sapien
ccatgcatgttgctactaaggacattttattgt

SEQ ID NO: 376701 - DNA, 33 bp, Homo sapien
ggtgcaatgtacacgcacattttcttttctttt

SEQ ID NO: 376702 - DNA, 33 bp, Homo sapien
ggtgcaatgtacacgcgcattttcttttctttt

SEQ ID NO: 376703 - DNA, 33 bp, Homo sapien
cagtacaggtctacagaataatgctattaagat

SEQ ID NO: 376704 - DNA, 33 bp, Homo sapien
cagtacaggtctacaggataatgctattaagat

SEQ ID NO: 376705 - DNA, 33 bp, Homo sapien
taatagctactttgtaagttctctctctatttt

SEQ ID NO: 376706 - DNA, 33 bp, Homo sapien
taatagctactttgtaggttctctctctatttt

SEQ ID NO: 376707 - DNA, 33 bp, Homo sapien
aatgtggtacagctataagtattcattggaata

SEQ ID NO: 376708 - DNA, 33 bp, Homo sapien
aatgtggtacagctatgagtattcattggaata

SEQ ID NO: 376709 - DNA, 33 bp, Homo sapien
tgctgcaaaagcattacgtcattcttttttatg

SEQ ID NO: 376710 - DNA, 33 bp, Homo sapien
tgctgcaaaagcattatgtcattcttttttatg

SEQ ID NO: 376711 - DNA, 33 bp, Homo sapien
tcaccatatcgcctgacggataatctttcaatg

SEQ ID NO: 376712 - DNA, 33 bp, Homo sapien
tcaccatatcgcctgatggataatctttcaatg

SEQ ID NO: 376713 - DNA, 33 bp, Homo sapien
taagtgatttcttcataagactactgaatttgc

SEQ ID NO: 376714 - DNA, 33 bp, Homo sapien
taagtgatttcttcatgagactactgaatttgc

SEQ ID NO: 376715 - DNA, 33 bp, Homo sapien
gctttcatgcatttcacggagcaaagggaatct

SEQ ID NO: 376716 - DNA, 33 bp, Homo sapien
gctttcatgcatttcatggagcaaagggaatct

SEQ ID NO: 376717 - DNA, 33 bp, Homo sapien
aggtctcctaacccaaagaactcccctaatctc

SEQ ID NO: 376718 - DNA, 33 bp, Homo sapien
aggtctcctaacccaatgaactcccctaatctc

SEQ ID NO: 376719 - DNA, 33 bp, Homo sapien
gtgatgaggacagcagaaaaatgagtgattatc

SEQ ID NO: 376720 - DNA, 33 bp, Homo sapien
gtgatgaggacagcagcaaaatgagtgattatc

SEQ ID NO: 376721 - DNA, 33 bp, Homo sapien
tttcacatatataagcaactgagactggatggt

SEQ ID NO: 376722 - DNA, 33 bp, Homo sapien
tttcacatatataagcgactgagactggatggt

SEQ ID NO: 376723 - DNA, 33 bp, Homo sapien
atcaatgcaaagcaacaagaaacacacaaaaaa

SEQ ID NO: 376724 - DNA, 33 bp, Homo sapien
atcaatgcaaagcaacgagaaacacacaaaaaa

SEQ ID NO: 376725 - DNA, 33 bp, Homo sapien
tgtaagcttgtaattaaactcttgagccatccc

SEQ ID NO: 376726 - DNA, 33 bp, Homo sapien
tgtaagcttgtaattagactcttgagccatccc

SEQ ID NO: 376727 - DNA, 33 bp, Homo sapien
tatatcctgcctgctacaatcagcagtgtggac

SEQ ID NO: 376728 - DNA, 33 bp, Homo sapien
tatatcctgcctgctataatcagcagtgtggac

SEQ ID NO: 376729 - DNA, 33 bp, Homo sapien
gcctgtcctagccagaaaaaaatccattgagta

SEQ ID NO: 376730 - DNA, 33 bp, Homo sapien
gcctgtcctagccagataaaaatccattgagta

SEQ ID NO: 376731 - DNA, 33 bp, Homo sapien
ggagactattcaatgcactgctgtggttaaaac

SEQ ID NO: 376732 - DNA, 33 bp, Homo sapien
ggagactattcaatgcgctgctgtggttaaaac

SEQ ID NO: 376733 - DNA, 33 bp, Homo sapien
ggctctcttccctcgcactcttcttcaagcttc

SEQ ID NO: 376734 - DNA, 33 bp, Homo sapien
ggctctcttccctcgcgctcttcttcaagcttc

SEQ ID NO: 376735 - DNA, 33 bp, Homo sapien
ggacctagaaggatgcgcagaatatcagctagt

SEQ ID NO: 376736 - DNA, 33 bp, Homo sapien
ggacctagaaggatgctcagaatatcagctagt

SEQ ID NO: 376737 - DNA, 33 bp, Homo sapien
gaatcggcagcatcacaattttaaactcttact

SEQ ID NO: 376738 - DNA, 33 bp, Homo sapien
gaatcggcagcatcacgattttaaactcttact

SEQ ID NO: 376739 - DNA, 33 bp, Homo sapien
ttatgaagctcaaagagattaaatatgtgaaac

SEQ ID NO: 376740 - DNA, 33 bp, Homo sapien
ttatgaagctcaaagatattaaatatgtgaaac

SEQ ID NO: 376741 - DNA, 33 bp, Homo sapien
tccaaacatttaggaaaggagttaaatgcagtc

SEQ ID NO: 376742 - DNA, 33 bp, Homo sapien
tccaaacatttaggaagggagttaaatgcagtc

SEQ ID NO: 376743 - DNA, 33 bp, Homo sapien
cttgcaggagggcagcggagcctttgttccatt

SEQ ID NO: 376744 - DNA, 33 bp, Homo sapien
cttgcaggagggcagctgagcctttgttccatt

SEQ ID NO: 376745 - DNA, 33 bp, Homo sapien
tagagtttgccataacaaaaacatatgaacaag

SEQ ID NO: 376746 - DNA, 33 bp, Homo sapien
tagagtttgccataacgaaaacatatgaacaag

SEQ ID NO: 376747 - DNA, 33 bp, Homo sapien
cttgataaaacaagaaagcttcaaaacatctca

SEQ ID NO: 376748 - DNA, 33 bp, Homo sapien
cttgataaaacaagaatgcttcaaaacatctca

SEQ ID NO: 376749 - DNA, 33 bp, Homo sapien
ggaagagcttacaaaactcatatattgctgtta

SEQ ID NO: 376750 - DNA, 33 bp, Homo sapien
ggaagagcttacaaaattcatatattgctgtta

SEQ ID NO: 376751 - DNA, 33 bp, Homo sapien
taagatcacagtgaagcaaggttaagagtgtgg

SEQ ID NO: 376752 - DNA, 33 bp, Homo sapien
taagatcacagtgaagtaaggttaagagtgtgg

SEQ ID NO: 376753 - DNA, 33 bp, Homo sapien
gttaacaattgacacacagtttagcgtacgctg

SEQ ID NO: 376754 - DNA, 33 bp, Homo sapien
gttaacaattgacacatagtttagcgtacgctg

SEQ ID NO: 376755 - DNA, 33 bp, Homo sapien
tagcttatttatcatcactaatttttggagcaa

SEQ ID NO: 376756 - DNA, 33 bp, Homo sapien
tagcttatttatcatctctaatttttggagcaa

SEQ ID NO: 376757 - DNA, 33 bp, Homo sapien
acaaatttctcaccaacagctgggttttccaca

SEQ ID NO: 376758 - DNA, 33 bp, Homo sapien
acaaatttctcaccaatagctgggttttccaca

SEQ ID NO: 376759 - DNA, 33 bp, Homo sapien
agttcatgcttttcaaagtatttttcccatttc

SEQ ID NO: 376760 - DNA, 33 bp, Homo sapien
agttcatgcttttcaaggtatttttcccatttc

SEQ ID NO: 376761 - DNA, 33 bp, Homo sapien
atacatagcctgagaaattcatgtgtattcatg

SEQ ID NO: 376762 - DNA, 33 bp, Homo sapien
atacatagcctgagaagttcatgtgtattcatg

SEQ ID NO: 376763 - DNA, 33 bp, Homo sapien
cttcaaactcctacttcaactctccttccctgt

SEQ ID NO: 376764 - DNA, 33 bp, Homo sapien
cttcaaactcctactttaactctccttccctgt

SEQ ID NO: 376765 - DNA, 33 bp, Homo sapien
cctagattggatctgaccattgtctttaaaact

SEQ ID NO: 376766 - DNA, 33 bp, Homo sapien
cctagattggatctgatcattgtctttaaaact

SEQ ID NO: 376767 - DNA, 33 bp, Homo sapien
ggttggagagtcgatacgcttgagaaaatataa

SEQ ID NO: 376768 - DNA, 33 bp, Homo sapien
ggttggagagtcgatatgcttgagaaaatataa

SEQ ID NO: 376769 - DNA, 33 bp, Homo sapien
attggtgatagtttcacactaccaagttataaa

SEQ ID NO: 376770 - DNA, 33 bp, Homo sapien
attggtgatagtttcatactaccaagttataaa

SEQ ID NO: 376771 - DNA, 33 bp, Homo sapien
tcatagacgagggaagcacatatggcattcagg

SEQ ID NO: 376772 - DNA, 33 bp, Homo sapien
tcatagacgagggaagtacatatggcattcagg

SEQ ID NO: 376773 - DNA, 33 bp, Homo sapien
caccatgaatcaactgcagtaataattgtagca

SEQ ID NO: 376774 - DNA, 33 bp, Homo sapien
caccatgaatcaactgtagtaataattgtagca

SEQ ID NO: 376775 - DNA, 33 bp, Homo sapien
acagcgctttccaaaagacttaatacaaagaaa

SEQ ID NO: 376776 - DNA, 33 bp, Homo sapien
acagcgctttccaaaatacttaatacaaagaaa

SEQ ID NO: 376777 - DNA, 33 bp, Homo sapien
attgaagccacaaagacgagaacacccaagaag

SEQ ID NO: 376778 - DNA, 33 bp, Homo sapien
attgaagccacaaagatgagaacacccaagaag

SEQ ID NO: 376779 - DNA, 33 bp, Homo sapien
tctgtagattcttgaacgaatttgtcagcactc

SEQ ID NO: 376780 - DNA, 33 bp, Homo sapien
tctgtagattcttgaatgaatttgtcagcactc

SEQ ID NO: 376781 - DNA, 33 bp, Homo sapien
tttacttcattttatgcagggcttcatcttcgg

SEQ ID NO: 376782 - DNA, 33 bp, Homo sapien
tttacttcattttatggagggcttcatcttcgg

SEQ ID NO: 376783 - DNA, 33 bp, Homo sapien
tacagccagtttcaacaggtagctttttagcaa

SEQ ID NO: 376784 - DNA, 33 bp, Homo sapien
tacagccagtttcaacgggtagctttttagcaa

SEQ ID NO: 376785 - DNA, 33 bp, Homo sapien
gcagtttctttagcacccttggtcagcagcttt

SEQ ID NO: 376786 - DNA, 33 bp, Homo sapien
gcagtttctttagcactcttggtcagcagcttt

SEQ ID NO: 376787 - DNA, 33 bp, Homo sapien
aaaacagacaaattcaacagatacaaccgactt

SEQ ID NO: 376788 - DNA, 33 bp, Homo sapien
aaaacagacaaattcagcagatacaaccgactt

SEQ ID NO: 376789 - DNA, 33 bp, Homo sapien
tttccacaaagcgtgacaattgtacccagacag

SEQ ID NO: 376790 - DNA, 33 bp, Homo sapien
tttccacaaagcgtgataattgtacccagacag

SEQ ID NO: 376791 - DNA, 33 bp, Homo sapien
acgtatggaaagcatacgttcctttattcagaa

SEQ ID NO: 376792 - DNA, 33 bp, Homo sapien
acgtatggaaagcatatgttcctttattcagaa

SEQ ID NO: 376793 - DNA, 33 bp, Homo sapien
gtgacatttcaaagaagatcgagggcctccatg

SEQ ID NO: 376794 - DNA, 33 bp, Homo sapien
gtgacatttcaaagaatatcgagggcctccatg

SEQ ID NO: 376795 - DNA, 33 bp, Homo sapien
gccatcctgcttccaactgatggatacaaaatg

SEQ ID NO: 376796 - DNA, 33 bp, Homo sapien
gccatcctgcttccaattgatggatacaaaatg

SEQ ID NO: 376797 - DNA, 33 bp, Homo sapien
cttagaatcttagcaccgtccaagagtgataaa

SEQ ID NO: 376798 - DNA, 33 bp, Homo sapien
cttagaatcttagcactgtccaagagtgataaa

SEQ ID NO: 376799 - DNA, 33 bp, Homo sapien
atgatagatctgacaactcataaaaataaaata

SEQ ID NO: 376800 - DNA, 33 bp, Homo sapien
atgatagatctgacaattcataaaaataaaata

SEQ ID NO: 376801 - DNA, 33 bp, Homo sapien
atgagaaaaataacgcaatgagaaatgtgatgt

SEQ ID NO: 376802 - DNA, 33 bp, Homo sapien
atgagaaaaataacgcgatgagaaatgtgatgt

SEQ ID NO: 376803 - DNA, 33 bp, Homo sapien
ccagaaggtgggaaaaacaaaatctctcaattc

SEQ ID NO: 376804 - DNA, 33 bp, Homo sapien
ccagaaggtgggaaaagcaaaatctctcaattc

SEQ ID NO: 376805 - DNA, 33 bp, Homo sapien
aacaacagaaacaacacatcaggtcttttggga

SEQ ID NO: 376806 - DNA, 33 bp, Homo sapien
aacaacagaaacaacatatcaggtcttttggga

SEQ ID NO: 376807 - DNA, 33 bp, Homo sapien
taataatttgagaggaagccatagctgaaattc

SEQ ID NO: 376808 - DNA, 33 bp, Homo sapien
taataatttgagaggaggccatagctgaaattc

SEQ ID NO: 376809 - DNA, 33 bp, Homo sapien
gggtccatcccacagcccttctttagtgtatct

SEQ ID NO: 376810 - DNA, 33 bp, Homo sapien
gggtccatcccacagcgcttctttagtgtatct

SEQ ID NO: 376811 - DNA, 33 bp, Homo sapien; identical to SEQ ID NO: 376809

SEQ ID NO: 376812 - DNA, 33 bp, Homo sapien; identical to SEQ ID NO: 376810

SEQ ID NO: 376813 - DNA, 33 bp, Homo sapien
tctccacagtcagatcagaaagaagggggcttt

SEQ ID NO: 376814 - DNA, 33 bp, Homo sapien
tctccacagtcagatcggaaagaagggggcttt

SEQ ID NO: 376815 - DNA, 33 bp, Homo sapien; identical to SEQ ID NO: 376813

SEQ ID NO: 376816 - DNA, 33 bp, Homo sapien; identical to SEQ ID NO: 376814

SEQ ID NO: 376817 - DNA, 33 bp, Homo sapien
cctggtgaagcactcaataacggttccaacagt

SEQ ID NO: 376818 - DNA, 33 bp, Homo sapien
cctggtgaagcactcagtaacggttccaacagt

SEQ ID NO: 376819 - DNA, 33 bp, Homo sapien
agcaccttgatgatgcactctgtccccggaggc

SEQ ID NO: 376820 - DNA, 33 bp, Homo sapien
agcaccttgatgatgcgctctgtccccggaggc

SEQ ID NO: 376821 - DNA, 33 bp, Homo sapien
gatgtgtaagttacaaaacaaaaatgcatcttt

SEQ ID NO: 376822 - DNA, 33 bp, Homo sapien
gatgtgtaagttacaagacaaaaatgcatcttt

SEQ ID NO: 376823 - DNA, 33 bp, Homo sapien
actgacctaccttaaaaggcattttgcacctat

SEQ ID NO: 376824 - DNA, 33 bp, Homo sapien
actgacctaccttaaagggcattttgcacctat

SEQ ID NO: 376825 - DNA, 33 bp, Homo sapien
ccaaggcaccagatcaacttagagcagccagcc

SEQ ID NO: 376826 - DNA, 33 bp, Homo sapien
ccaaggcaccagatcagcttagagcagccagcc

SEQ ID NO: 376827 - DNA, 33 bp, Homo sapien
caatgataccctagtaacaatgtgtacacctag

SEQ ID NO: 376828 - DNA, 33 bp, Homo sapien
caatgataccctagtagcaatgtgtacacctag

SEQ ID NO: 376829 - DNA, 33 bp, Homo sapien
agaaccagtgaacctgaaaagagaaactaccct

SEQ ID NO: 376830 - DNA, 33 bp, Homo sapien
agaaccagtgaacctggaaagagaaactaccct

SEQ ID NO: 376831 - DNA, 33 bp, Homo sapien
atcaaggacatatacaaataaaagctacagtta

SEQ ID NO: 376832 - DNA, 33 bp, Homo sapien
atcaaggacatatacagataaaagctacagtta

SEQ ID NO: 376833 - DNA, 33 bp, Homo sapien
cctgatgggtcacttaaacatttattaaggagt

SEQ ID NO: 376834 - DNA, 33 bp, Homo sapien
cctgatgggtcacttatacatttattaaggagt

SEQ ID NO: 376835 - DNA, 33 bp, Homo sapien
ttactaaaattcacaacgtcagctaaaacatga

SEQ ID NO: 376836 - DNA, 33 bp, Homo sapien
ttactaaaattcacaatgtcagctaaaacatga

SEQ ID NO: 376837 - DNA, 33 bp, Homo sapien
aatgagacatacttgcccaatacaatcatatga

SEQ ID NO: 376838 - DNA, 33 bp, Homo sapien
aatgagacatacttgctcaatacaatcatatga

SEQ ID NO: 376839 - DNA, 33 bp, Homo sapien
acaaaacagataaaaaccctagaaatgagacat

SEQ ID NO: 376840 - DNA, 33 bp, Homo sapien
acaaaacagataaaaatcctagaaatgagacat

SEQ ID NO: 376841 - DNA, 33 bp, Homo sapien
ctcatgtgtaaaaaaggaagtaagtagcaccta

SEQ ID NO: 376842 - DNA, 33 bp, Homo sapien
ctcatgtgtaaaaaagtaagtaagtagcaccta

SEQ ID NO: 376843 - DNA, 33 bp, Homo sapien
gtattgcttcaagagactcatgtggcttccttc

SEQ ID NO: 376844 - DNA, 33 bp, Homo sapien
gtattgcttcaagagattcatgtggcttccttc

SEQ ID NO: 376845 - DNA, 33 bp, Homo sapien
caatgtattgatcagcacaatgaaacataattt

SEQ ID NO: 376846 - DNA, 33 bp, Homo sapien
caatgtattgatcagcgcaatgaaacataattt

SEQ ID NO: 376847 - DNA, 33 bp, Homo sapien
atccactttctacctaacactcatgtaagatgt

SEQ ID NO: 376848 - DNA, 33 bp, Homo sapien
atccactttctacctaccactcatgtaagatgt

SEQ ID NO: 376849 - DNA, 33 bp, Homo sapien
ttatggtggtagttgccatgtctctcagagcac

SEQ ID NO: 376850 - DNA, 33 bp, Homo sapien
ttatggtggtagttgctatgtctctcagagcac

SEQ ID NO: 376851 - DNA, 33 bp, Homo sapien
tgtgacctggcaaacaataagagtgctctgaga

SEQ ID NO: 376852 - DNA, 33 bp, Homo sapien
tgtgacctggcaaacagtaagagtgctctgaga

SEQ ID NO: 376853 - DNA, 33 bp, Homo sapien
ctgtaggtttaaccaacagaatgtcacatggaa

SEQ ID NO: 376854 - DNA, 33 bp, Homo sapien
ctgtaggtttaaccaagagaatgtcacatggaa

SEQ ID NO: 376855 - DNA, 33 bp, Homo sapien
aactgccaaaccctcactgacattcagatgtgg

SEQ ID NO: 376856 - DNA, 33 bp, Homo sapien
aactgccaaaccctcattgacattcagatgtgg

SEQ ID NO: 376857 - DNA, 33 bp, Homo sapien
ataggctggtttccaacatgatgttttggaaga

SEQ ID NO: 376858 - DNA, 33 bp, Homo sapien
ataggctggtttccaagatgatgttttggaaga

SEQ ID NO: 376859 - DNA, 33 bp, Homo sapien
tgctaagaagctcaaaataatgtggatgactga

SEQ ID NO: 376860 - DNA, 33 bp, Homo sapien
tgctaagaagctcaaattaatgtggatgactga

SEQ ID NO: 376861 - DNA, 33 bp, Homo sapien
aacagctgtgggaaagcctagtctaatatcatt

SEQ ID NO: 376862 - DNA, 33 bp, Homo sapien
aacagctgtgggaaaggctagtctaatatcatt

SEQ ID NO: 376863 - DNA, 33 bp, Homo sapien
gtggttagtccgtccaatctcggcactccactt

SEQ ID NO: 376864 - DNA, 33 bp, Homo sapien
gtggttagtccgtccagtctcggcactccactt

SEQ ID NO: 376865 - DNA, 33 bp, Homo sapien
ctctcgggaactaatacaactcactcactactg

SEQ ID NO: 376866 - DNA, 33 bp, Homo sapien
ctctcgggaactaatagaactcactcactactg

SEQ ID NO: 376867 - DNA, 33 bp, Homo sapien
gttgtcctatagttaacaatgatcctcagacaa

SEQ ID NO: 376868 - DNA, 33 bp, Homo sapien
gttgtcctatagttaataatgatcctcagacaa

SEQ ID NO: 376869 - DNA, 33 bp, Homo sapien
aggctatggaaaggaaaaaagccacatcatccg

SEQ ID NO: 376870 - DNA, 33 bp, Homo sapien
aggctatggaaaggaagaaagccacatcatccg

SEQ ID NO: 376871 - DNA, 33 bp, Homo sapien
tgagtttaatccttccacatacgttaggactta

SEQ ID NO: 376872 - DNA, 33 bp, Homo sapien
tgagtttaatccttccgcatacgttaggactta

SEQ ID NO: 376873 - DNA, 33 bp, Homo sapien
gactggaattttgtgaataagttggaactattt

SEQ ID NO: 376874 - DNA, 33 bp, Homo sapien
gactggaattttgtgagtaagttggaactattt

SEQ ID NO: 376875 - DNA, 33 bp, Homo sapien
gggaaggcagaagggaaatctataccctagaac

SEQ ID NO: 376876 - DNA, 33 bp, Homo sapien
gggaaggcagaagggagatctataccctagaac

SEQ ID NO: 376877 - DNA, 33 bp, Homo sapien
caacggccctaatccaatgaccggtgggagttg

SEQ ID NO: 376878 - DNA, 33 bp, Homo sapien
caacggccctaatccagtgaccggtgggagttg

SEQ ID NO: 376879 - DNA, 33 bp, Homo sapien
aaaagcaaattccaaacctgagttccaagtacc

SEQ ID NO: 376880 - DNA, 33 bp, Homo sapien
aaaagcaaattccaaatctgagttccaagtacc

SEQ ID NO: 376881 - DNA, 33 bp, Homo sapien
ggaaaattatttcgaacgatctctcaggagttc

SEQ ID NO: 376882 - DNA, 33 bp, Homo sapien
ggaaaattatttcgaatgatctctcaggagttc

SEQ ID NO: 376883 - DNA, 33 bp, Homo sapien
cagtgagccatgattccacccactacattccag

SEQ ID NO: 376884 - DNA, 33 bp, Homo sapien
cagtgagccatgattctacccactacattccag

SEQ ID NO: 376885 - DNA, 33 bp, Homo sapien
ctctttttcctcctgacatggaatccagcaggc

SEQ ID NO: 376886 - DNA, 33 bp, Homo sapien
ctctttttcctcctgatatggaatccagcaggc

SEQ ID NO: 376887 - DNA, 33 bp, Homo sapien
tggttgattatatgtgacaattttactaggcca

SEQ ID NO: 376888 - DNA, 33 bp, Homo sapien
tggttgattatatgtgtcaattttactaggcca

SEQ ID NO: 376889 - DNA, 33 bp, Homo sapien
acaatgacaataacaaaactgacccaaagtggg

SEQ ID NO: 376890 - DNA, 33 bp, Homo sapien
acaatgacaataacaagactgacccaaagtggg

SEQ ID NO: 376891 - DNA, 33 bp, Homo sapien
actgtagacatgttgaacattagaatttgtagc

SEQ ID NO: 376892 - DNA, 33 bp, Homo sapien
actgtagacatgttgagcattagaatttgtagc

SEQ ID NO: 376893 - DNA, 33 bp, Homo sapien
tcttcttctgagagaccgcatatgacccactga

SEQ ID NO: 376894 - DNA, 33 bp, Homo sapien
tcttcttctgagagacggcatatgacccactga

SEQ ID NO: 376895 - DNA, 33 bp, Homo sapien
tcacgtcgaccttgccaacatgtttcaggaagg

SEQ ID NO: 376896 - DNA, 33 bp, Homo sapien
tcacgtcgaccttgccgacatgtttcaggaagg

SEQ ID NO: 376897 - DNA, 33 bp, Homo sapien
catgcactcctcgaacaaccatgggagtggatg

SEQ ID NO: 376898 - DNA, 33 bp, Homo sapien
catgcactcctcgaaccaccatgggagtggatg

SEQ ID NO: 376899 - DNA, 33 bp, Homo sapien
agcactgaaacactcacccatggttggaagccc

SEQ ID NO: 376900 - DNA, 33 bp, Homo sapien
agcactgaaacactcatccatggttggaagccc

SEQ ID NO: 376901 - DNA, 33 bp, Homo sapien
ataagccatcatttcagtattattttttgaagg

SEQ ID NO: 376902 - DNA, 33 bp, Homo sapien
ataagccatcatttcattattattttttgaagg

SEQ ID NO: 376903 - DNA, 33 bp, Homo sapien
tttgttaacacaagaccagaaggtaagagaatg

SEQ ID NO: 376904 - DNA, 33 bp, Homo sapien
tttgttaacacaagactagaaggtaagagaatg

SEQ ID NO: 376905 - DNA, 33 bp, Homo sapien
ttttaaaagcaatttccactaggagagtatgtc

SEQ ID NO: 376906 - DNA, 33 bp, Homo sapien
ttttaaaagcaatttctactaggagagtatgtc

SEQ ID NO: 376907 - DNA, 33 bp, Homo sapien
aggataaatgcaaaagaatccacatttagacac

SEQ ID NO: 376908 - DNA, 33 bp, Homo sapien
aggataaatgcaaaaggatccacatttagacac

SEQ ID NO: 376909 - DNA, 33 bp, Homo sapien
aaaaatgttaatctgacgttcttcaattctgtt

SEQ ID NO: 376910 - DNA, 33 bp, Homo sapien
aaaaatgttaatctgatgttcttcaattctgtt

SEQ ID NO: 376911 - DNA, 33 bp, Homo sapien
tacaggcatatttcacagaatacatagtagaaa

SEQ ID NO: 376912 - DNA, 33 bp, Homo sapien
tacaggcatatttcacggaatacatagtagaaa

SEQ ID NO: 376913 - DNA, 33 bp, Homo sapien
tgtttgccctgcacaccctcagtactcctctca

SEQ ID NO: 376914 - DNA, 33 bp, Homo sapien
tgtttgccctgcacactctcagtactcctctca

SEQ ID NO: 376915 - DNA, 33 bp, Homo sapien
tccataaagaaatccacagtggctgggtacagc

SEQ ID NO: 376916 - DNA, 33 bp, Homo sapien
tccataaagaaatccatagtggctgggtacagc

SEQ ID NO: 376917 - DNA, 33 bp, Homo sapien
ttcatgaagctccaaactgacagcatgccattc

SEQ ID NO: 376918 - DNA, 33 bp, Homo sapien
ttcatgaagctccaaattgacagcatgccattc

SEQ ID NO: 376919 - DNA, 33 bp, Homo sapien
caagaatagaagtaccacgaggcaaactggaag

SEQ ID NO: 376920 - DNA, 33 bp, Homo sapien
caagaatagaagtaccgcgaggcaaactggaag

SEQ ID NO: 376921 - DNA, 33 bp, Homo sapien
atatttttaaaggaaaacaaatattgccaaaca

SEQ ID NO: 376922 - DNA, 33 bp, Homo sapien
atatttttaaaggaaagcaaatattgccaaaca

SEQ ID NO: 376923 - DNA, 33 bp, Homo sapien
ctgtgcagtctctaccacaaggagacttccaag

SEQ ID NO: 376924 - DNA, 33 bp, Homo sapien
ctgtgcagtctctacctcaaggagacttccaag

SEQ ID NO: 376925 - DNA, 33 bp, Homo sapien
ctgacctattacagaacgccatgaagaccagtc

SEQ ID NO: 376926 - DNA, 33 bp, Homo sapien
ctgacctattacagaaggccatgaagaccagtc

SEQ ID NO: 376927 - DNA, 33 bp, Homo sapien
tgcaaactttatggccagaaaccaaagagtcag

SEQ ID NO: 376928 - DNA, 33 bp, Homo sapien
tgcaaactttatggccggaaaccaaagagtcag

SEQ ID NO: 376929 - DNA, 33 bp, Homo sapien
ttaatgattaacacaacaaattaacttccattc

SEQ ID NO: 376930 - DNA, 33 bp, Homo sapien
ttaatgattaacacaagaaattaacttccattc

SEQ ID NO: 376931 - DNA, 33 bp, Homo sapien
tccctctccacaacagcctctttgatggtccct

SEQ ID NO: 376932 - DNA, 33 bp, Homo sapien
tccctctccacaacagtctctttgatggtccct

SEQ ID NO: 376933 - DNA, 33 bp, Homo sapien
gatgcaacccagagaccggaaaaggtgaaggaa

SEQ ID NO: 376934 - DNA, 33 bp, Homo sapien
gatgcaacccagagactggaaaaggtgaaggaa

SEQ ID NO: 376935 - DNA, 33 bp, Homo sapien
gatgtttaaatagagacctaaaggaagcaagtg

SEQ ID NO: 376936 - DNA, 33 bp, Homo sapien
gatgtttaaatagagagctaaaggaagcaagtg

SEQ ID NO: 376937 - DNA, 33 bp, Homo sapien
cacagtgaagatgtgacgtgttggtaagtaccc

SEQ ID NO: 376938 - DNA, 33 bp, Homo sapien
cacagtgaagatgtgaggtgttggtaagtaccc

SEQ ID NO: 376939 - DNA, 33 bp, Homo sapien
acagaaaaataaatgaatagctgctggaataat

SEQ ID NO: 376940 - DNA, 33 bp, Homo sapien
acagaaaaataaatgagtagctgctggaataat

SEQ ID NO: 376941 - DNA, 33 bp, Homo sapien
ttatagcaacatcttacatttacctggagcttt

SEQ ID NO: 376942 - DNA, 33 bp, Homo sapien
ttatagcaacatcttatatttacctggagcttt

SEQ ID NO: 376943 - DNA, 33 bp, Homo sapien
tggatctgaaatctcacatagtaccaagacacg

SEQ ID NO: 376944 - DNA, 33 bp, Homo sapien
tggatctgaaatctcatatagtaccaagacacg

SEQ ID NO: 376945 - DNA, 33 bp, Homo sapien
aacaacatatttcaacaactaaacaaaaaagta

SEQ ID NO: 376946 - DNA, 33 bp, Homo sapien
aacaacatatttcaacgactaaacaaaaaagta

SEQ ID NO: 376947 - DNA, 33 bp, Homo sapien
atttgagtagctaaaaattccaagagtggaata

SEQ ID NO: 376948 - DNA, 33 bp, Homo sapien
atttgagtagctaaaagttccaagagtggaata

SEQ ID NO: 376949 - DNA, 33 bp, Homo sapien
tgcccactgtggcaataaatatctgagcctgtg

SEQ ID NO: 376950 - DNA, 33 bp, Homo sapien
tgcccactgtggcaatcaatatctgagcctgtg

SEQ ID NO: 376951 - DNA, 33 bp, Homo sapien
cagcagtcgcaaggaacctagaataataattca

SEQ ID NO: 376952 - DNA, 33 bp, Homo sapien
cagcagtcgcaaggaatctagaataataattca

SEQ ID NO: 376953 - DNA, 33 bp, Homo sapien
tatccaagtgcatcacaaaattcacagcagtcg

SEQ ID NO: 376954 - DNA, 33 bp, Homo sapien
tatccaagtgcatcactaaattcacagcagtcg

SEQ ID NO: 376955 - DNA, 33 bp, Homo sapien
ggacgtagcaagaaggccccaaagatgaaactc

SEQ ID NO: 376956 - DNA, 33 bp, Homo sapien
ggacgtagcaagaaggtcccaaagatgaaactc

SEQ ID NO: 376957 - DNA, 33 bp, Homo sapien
ttcttacaccgtggccaaaactgccatcatctc

SEQ ID NO: 376958 - DNA, 33 bp, Homo sapien
ttcttacaccgtggccgaaactgccatcatctc

SEQ ID NO: 376959 - DNA, 33 bp, Homo sapien
ggatggctgccaagtcacaagcattttacaaca

SEQ ID NO: 376960 - DNA, 33 bp, Homo sapien
ggatggctgccaagtcgcaagcattttacaaca

SEQ ID NO: 376961 - DNA, 33 bp, Homo sapien
gtttcctgattctgtaaaatgcaactgatttat

SEQ ID NO: 376962 - DNA, 33 bp, Homo sapien
gtttcctgattctgtataatgcaactgatttat

SEQ ID NO: 376963 - DNA, 33 bp, Homo sapien
ataacattaaacatcacagcgtttttatgaata

SEQ ID NO: 376964 - DNA, 33 bp, Homo sapien
ataacattaaacatcatagcgtttttatgaata

SEQ ID NO: 376965 - DNA, 33 bp, Homo sapien
gtgatttcaaaaatcactgacaaggcatagcat

SEQ ID NO: 376966 - DNA, 33 bp, Homo sapien
gtgatttcaaaaatcagtgacaaggcatagcat

SEQ ID NO: 376967 - DNA, 33 bp, Homo sapien
tgtccatgacattgatgaggcacttaaattcta

SEQ ID NO: 376968 - DNA, 33 bp, Homo sapien
tgtccatgacattgattaggcacttaaattcta

SEQ ID NO: 376969 - DNA, 33 bp, Homo sapien
taggaaagaatctagaacttacactgagactac

SEQ ID NO: 376970 - DNA, 33 bp, Homo sapien
taggaaagaatctagaccttacactgagactac

SEQ ID NO: 376971 - DNA, 33 bp, Homo sapien
caattcccagctgcaagagtgtcacatgaatgg

SEQ ID NO: 376972 - DNA, 33 bp, Homo sapien
caattcccagctgcaatagtgtcacatgaatgg

SEQ ID NO: 376973 - DNA, 33 bp, Homo sapien
atggtgaaaatgaacaaatcagaaagccaagtt

SEQ ID NO: 376974 - DNA, 33 bp, Homo sapien
atggtgaaaatgaacacatcagaaagccaagtt

SEQ ID NO: 376975 - DNA, 33 bp, Homo sapien
caaagctttcaaaatgcacaataaagcatgttt

SEQ ID NO: 376976 - DNA, 33 bp, Homo sapien
caaagctttcaaaatggacaataaagcatgttt

SEQ ID NO: 376977 - DNA, 33 bp, Homo sapien
tgttcttttagttcacaccattcacagtccttg

SEQ ID NO: 376978 - DNA, 33 bp, Homo sapien
tgttcttttagttcactccattcacagtccttg

SEQ ID NO: 376979 - DNA, 33 bp, Homo sapien
aattgaaattccatcacactttaaactgctgta

SEQ ID NO: 376980 - DNA, 33 bp, Homo sapien
aattgaaattccatcagactttaaactgctgta

SEQ ID NO: 376981 - DNA, 33 bp, Homo sapien
ttgtaccccagaaaaactagtcttgagtatcct

SEQ ID NO: 376982 - DNA, 33 bp, Homo sapien
ttgtaccccagaaaaattagtcttgagtatcct

SEQ ID NO: 376983 - DNA, 33 bp, Homo sapien
ccttccagaaaaatcaatcttgagtatccttcc

SEQ ID NO: 376984 - DNA, 33 bp, Homo sapien
ccttccagaaaaatcagtcttgagtatccttcc

SEQ ID NO: 376985 - DNA, 33 bp, Homo sapien
tatccttccagaaatactatatgtgcttgatat

SEQ ID NO: 376986 - DNA, 33 bp, Homo sapien
tatccttccagaaatattatatgtgcttgatat

SEQ ID NO: 376987 - DNA, 33 bp, Homo sapien
gcagtgcctgaggacacgcttaactaaggttgt

SEQ ID NO: 376988 - DNA, 33 bp, Homo sapien
gcagtgcctgaggacatgcttaactaaggttgt

SEQ ID NO: 376989 - DNA, 33 bp, Homo sapien
tgtggaacagattatacagttcaagggacatca

SEQ ID NO: 376990 - DNA, 33 bp, Homo sapien
tgtggaacagattatatagttcaagggacatca

SEQ ID NO: 376991 - DNA, 33 bp, Homo sapien
gggtgaggagaattaacatctggtccattggtt

SEQ ID NO: 376992 - DNA, 33 bp, Homo sapien
gggtgaggagaattaatatctggtccattggtt

SEQ ID NO: 376993 - DNA, 33 bp, Homo sapien
gttgtttattgcaaaacgagatagagtgatgga

SEQ ID NO: 376994 - DNA, 33 bp, Homo sapien
gttgtttattgcaaaatgagatagagtgatgga

SEQ ID NO: 376995 - DNA, 33 bp, Homo sapien
ctgctgggtatctacccgaaaaagaagtcatta

SEQ ID NO: 376996 - DNA, 33 bp, Homo sapien
ctgctgggtatctacctgaaaaagaagtcatta

SEQ ID NO: 376997 - DNA, 33 bp, Homo sapien
cttatcctagccagaacgaccattattaaaaag

SEQ ID NO: 376998 - DNA, 33 bp, Homo sapien
cttatcctagccagaatgaccattattaaaaag

SEQ ID NO: 376999 - DNA, 33 bp, Homo sapien
ggctgctgggatcataaaatactcctggctgtg

SEQ ID NO: 377000 - DNA, 33 bp, Homo sapien
ggctgctgggatcatagaatactcctggctgtg

SEQ ID NO: 377001 - DNA, 33 bp, Homo sapien
actgcgtgagtctatacggcagtgttgtgtctt

SEQ ID NO: 377002 - DNA, 33 bp, Homo sapien
actgcgtgagtctatatggcagtgttgtgtctt

SEQ ID NO: 377003 - DNA, 33 bp, Homo sapien
tctctgccacacagcaatatgatcgttccactg

SEQ ID NO: 377004 - DNA, 33 bp, Homo sapien
tctctgccacacagcagtatgatcgttccactg

SEQ ID NO: 377005 - DNA, 33 bp, Homo sapien
aaaactagtttaatgaagtatggttgcagaaaa

SEQ ID NO: 377006 - DNA, 33 bp, Homo sapien
aaaactagtttaatgacgtatggttgcagaaaa

SEQ ID NO: 377007 - DNA, 33 bp, Homo sapien
aatgcctaagtgcccaatgactgaagtccagat

SEQ ID NO: 377008 - DNA, 33 bp, Homo sapien
aatgcctaagtgcccagtgactgaagtccagat

SEQ ID NO: 377009 - DNA, 33 bp, Homo sapien
cgtctcagcctgccaaactattaggattatagg

SEQ ID NO: 377010 - DNA, 33 bp, Homo sapien
cgtctcagcctgccaatctattaggattatagg

SEQ ID NO: 377011 - DNA, 33 bp, Homo sapien
cggctgggatggtggtaaaatggcagatgtggt

SEQ ID NO: 377012 - DNA, 33 bp, Homo sapien
cggctgggatggtggtgaaatggcagatgtggt

SEQ ID NO: 377013 - DNA, 33 bp, Homo sapien
tttgtaaaagcagaagactaaagacagtagaag

SEQ ID NO: 377014 - DNA, 33 bp, Homo sapien
tttgtaaaagcagaaggctaaagacagtagaag

SEQ ID NO: 377015 - DNA, 33 bp, Homo sapien
atatgtgtccatataacgccagtttcccaacat

SEQ ID NO: 377016 - DNA, 33 bp, Homo sapien
atatgtgtccatataatgccagtttcccaacat

SEQ ID NO: 377017 - DNA, 33 bp, Homo sapien
tgttcctcatgggaaccgctatatgtattggga

SEQ ID NO: 377018 - DNA, 33 bp, Homo sapien
tgttcctcatgggaactgctatatgtattggga

SEQ ID NO: 377019 - DNA, 33 bp, Homo sapien
cctgacaacgaaaatccgacaagggatgtctta

SEQ ID NO: 377020 - DNA, 33 bp, Homo sapien
cctgacaacgaaaatctgacaagggatgtctta

SEQ ID NO: 377021 - DNA, 33 bp, Homo sapien
gggatgttgcctctggcagaacctcagttatgg

SEQ ID NO: 377022 - DNA, 33 bp, Homo sapien
gggatgttgcctctggtagaacctcagttatgg

SEQ ID NO: 377023 - DNA, 33 bp, Homo sapien
tagaactcacatgagaaacgatactcaacttta

SEQ ID NO: 377024 - DNA, 33 bp, Homo sapien
tagaactcacatgagagacgatactcaacttta

SEQ ID NO: 377025 - DNA, 33 bp, Homo sapien
gtccagatacctgggtaacactttagcctctgc

SEQ ID NO: 377026 - DNA, 33 bp, Homo sapien
gtccagatacctgggttacactttagcctctgc

SEQ ID NO: 377027 - DNA, 33 bp, Homo sapien
tgaagacacaatccaaaatctctacaaagacaa

SEQ ID NO: 377028 - DNA, 33 bp, Homo sapien
tgaagacacaatccaagatctctacaaagacaa

SEQ ID NO: 377029 - DNA, 33 bp, Homo sapien
taatttggtggaaggacgtagtttgtggaagac

SEQ ID NO: 377030 - DNA, 33 bp, Homo sapien
taatttggtggaaggatgtagtttgtggaagac

SEQ ID NO: 377031 - DNA, 33 bp, Homo sapien
gttgttggacagtaataaattgatggacatttg

SEQ ID NO: 377032 - DNA, 33 bp, Homo sapien
gttgttggacagtaatcaattgatggacatttg

SEQ ID NO: 377033 - DNA, 33 bp, Homo sapien
ggaatttaagccaagacggcccaggttggccaa

SEQ ID NO: 377034 - DNA, 33 bp, Homo sapien
ggaatttaagccaagatggcccaggttggccaa

SEQ ID NO: 377035 - DNA, 33 bp, Homo sapien
aaggaaccatttcattaaaataagccaacattt

SEQ ID NO: 377036 - DNA, 33 bp, Homo sapien
aaggaaccatttcattcaaataagccaacattt

SEQ ID NO: 377037 - DNA, 33 bp, Homo sapien
agtaagcttagtgacaatcatccatgttcagtc

SEQ ID NO: 377038 - DNA, 33 bp, Homo sapien
agtaagcttagtgacagtcatccatgttcagtc

SEQ ID NO: 377039 - DNA, 33 bp, Homo sapien
aatccaccggcctagaagtcaggctgagtattt

SEQ ID NO: 377040 - DNA, 33 bp, Homo sapien
aatccaccggcctagatgtcaggctgagtattt

SEQ ID NO: 377041 - DNA, 33 bp, Homo sapien
tcaggtaaagctgataaatgcctggccagatct

SEQ ID NO: 377042 - DNA, 33 bp, Homo sapien
tcaggtaaagctgatatatgcctggccagatct

SEQ ID NO: 377043 - DNA, 33 bp, Homo sapien
ctgttttctagagcaacgacatagggcagtgga

SEQ ID NO: 377044 - DNA, 33 bp, Homo sapien
ctgttttctagagcaatgacatagggcagtgga

SEQ ID NO: 377045 - DNA, 33 bp, Homo sapien
gatgggaggctgatacgaagactcagtagatta

SEQ ID NO: 377046 - DNA, 33 bp, Homo sapien
gatgggaggctgatactaagactcagtagatta

SEQ ID NO: 377047 - DNA, 33 bp, Homo sapien
gctttttttgtggcgactcacaaacagcgagtt

SEQ ID NO: 377048 - DNA, 33 bp, Homo sapien
gctttttttgtggcgattcacaaacagcgagtt

SEQ ID NO: 377049 - DNA, 33 bp, Homo sapien
cacagcacacttttagacagcagttcacagcca

SEQ ID NO: 377050 - DNA, 33 bp, Homo sapien
cacagcacacttttaggcagcagttcacagcca

SEQ ID NO: 377051 - DNA, 33 bp, Homo sapien
acatatttgcttataccgctttctccttttttt

SEQ ID NO: 377052 - DNA, 33 bp, Homo sapien
acatatttgcttatactgctttctccttttttt

SEQ ID NO: 377053 - DNA, 33 bp, Homo sapien
ttagatttactgataacaacaagcctaaatact

SEQ ID NO: 377054 - DNA, 33 bp, Homo sapien
ttagatttactgataagaacaagcctaaatact

SEQ ID NO: 377055 - DNA, 33 bp, Homo sapien
tggtcagccattttgacggaactggggcccagg

SEQ ID NO: 377056 - DNA, 33 bp, Homo sapien
tggtcagccattttgagggaactggggcccagg

SEQ ID NO: 377057 - DNA, 33 bp, Homo sapien
cataattttaactacaatgaatttcaggcgttt

SEQ ID NO: 377058 - DNA, 33 bp, Homo sapien
cataattttaactacagtgaatttcaggcgttt

SEQ ID NO: 377059 - DNA, 33 bp, Homo sapien
gtattccagcgactggcacgattttgtttctgc

SEQ ID NO: 377060 - DNA, 33 bp, Homo sapien
gtattccagcgactggtacgattttgtttctgc

SEQ ID NO: 377061 - DNA, 33 bp, Homo sapien
ggatgctaaaatttgaataggtagagtagcttt

SEQ ID NO: 377062 - DNA, 33 bp, Homo sapien
ggatgctaaaatttgagtaggtagagtagcttt

SEQ ID NO: 377063 - DNA, 33 bp, Homo sapien
tatcgtgtgggctgacgaatgacttttaaaatg

SEQ ID NO: 377064 - DNA, 33 bp, Homo sapien
tatcgtgtgggctgactaatgacttttaaaatg

SEQ ID NO: 377065 - DNA, 33 bp, Homo sapien
actctggattgacagacattctttgtgtaggtg

SEQ ID NO: 377066 - DNA, 33 bp, Homo sapien
actctggattgacagagattctttgtgtaggtg

SEQ ID NO: 377067 - DNA, 33 bp, Homo sapien
tgtttttctcaatgcaataacttgaaatgtcaa

SEQ ID NO: 377068 - DNA, 33 bp, Homo sapien
tgtttttctcaatgcagtaacttgaaatgtcaa

SEQ ID NO: 377069 - DNA, 33 bp, Homo sapien
ggtcttggaatagccaaactccgaagtgaaaag

SEQ ID NO: 377070 - DNA, 33 bp, Homo sapien
ggtcttggaatagccagactccgaagtgaaaag

SEQ ID NO: 377071 - DNA, 33 bp, Homo sapien
ttataaatgacagtcaagtgtgtattgtggcca

SEQ ID NO: 377072 - DNA, 33 bp, Homo sapien
ttataaatgacagtcacgtgtgtattgtggcca

SEQ ID NO: 377073 - DNA, 33 bp, Homo sapien
ttggcttattgtacgaagtaactccactttctg

SEQ ID NO: 377074 - DNA, 33 bp, Homo sapien
ttggcttattgtacgaggtaactccactttctg

SEQ ID NO: 377075 - DNA, 33 bp, Homo sapien
ttgtgtttcaacaaaaactctggaagaaagtca

SEQ ID NO: 377076 - DNA, 33 bp, Homo sapien
ttgtgtttcaacaaaacctctggaagaaagtca

SEQ ID NO: 377077 - DNA, 33 bp, Homo sapien
gttgcttttaaattcacgtatagttttacacat

SEQ ID NO: 377078 - DNA, 33 bp, Homo sapien
gttgcttttaaattcaggtatagttttacacat

SEQ ID NO: 377079 - DNA, 33 bp, Homo sapien
acaaatgagcatcgaaatcagcaggtttgggtt

SEQ ID NO: 377080 - DNA, 33 bp, Homo sapien
acaaatgagcatcgaattcagcaggtttgggtt

SEQ ID NO: 377081 - DNA, 33 bp, Homo sapien
gtcctattgacatcaacgtttttacctccagtt

SEQ ID NO: 377082 - DNA, 33 bp, Homo sapien
gtcctattgacatcaatgtttttacctccagtt

SEQ ID NO: 377083 - DNA, 33 bp, Homo sapien
cattgtcagctatttacgtattacaaaaacaat

SEQ ID NO: 377084 - DNA, 33 bp, Homo sapien
cattgtcagctatttatgtattacaaaaacaat

SEQ ID NO: 377085 - DNA, 33 bp, Homo sapien
atcacccttgtggtgacgtaatgttgatgttta

SEQ ID NO: 377086 - DNA, 33 bp, Homo sapien
atcacccttgtggtgatgtaatgttgatgttta

SEQ ID NO: 377087 - DNA, 33 bp, Homo sapien
ctcctaagtgtgcgtcacctacacaaacagagt

SEQ ID NO: 377088 - DNA, 33 bp, Homo sapien
ctcctaagtgtgcgtcgcctacacaaacagagt

SEQ ID NO: 377089 - DNA, 33 bp, Homo sapien
ataataaagtacccgcacttcacagaatgttgt

SEQ ID NO: 377090 - DNA, 33 bp, Homo sapien
ataataaagtacccgcgcttcacagaatgttgt

SEQ ID NO: 377091 - DNA, 33 bp, Homo sapien
caaacacaggaaacagaattcgaacccatgcag

SEQ ID NO: 377092 - DNA, 33 bp, Homo sapien
caaacacaggaaacaggattcgaacccatgcag

SEQ ID NO: 377093 - DNA, 33 bp, Homo sapien
aaatttctgaggcatacagtataatttctaggt

SEQ ID NO: 377094 - DNA, 33 bp, Homo sapien
aaatttctgaggcatatagtataatttctaggt

SEQ ID NO: 377095 - DNA, 33 bp, Homo sapien
aatttccagccattgaacataggaatgtgtggg

SEQ ID NO: 377096 - DNA, 33 bp, Homo sapien
aatttccagccattgaccataggaatgtgtggg

SEQ ID NO: 377097 - DNA, 33 bp, Homo sapien
ccccatgcttggaggaactcattgacattgtcg

SEQ ID NO: 377098 - DNA, 33 bp, Homo sapien
ccccatgcttggaggagctcattgacattgtcg

SEQ ID NO: 377099 - DNA, 33 bp, Homo sapien
gtccctgaggctggaacgggcttaatgtcgtgg

SEQ ID NO: 377100 - DNA, 33 bp, Homo sapien
gtccctgaggctggaatgggcttaatgtcgtgg

SEQ ID NO: 377101 - DNA, 33 bp, Homo sapien
tccaccaacgctgtgcaagccataaatgtggca

SEQ ID NO: 377102 - DNA, 33 bp, Homo sapien
tccaccaacgctgtgcgagccataaatgtggca

SEQ ID NO: 377103 - DNA, 33 bp, Homo sapien
gtcagcagtttatttccacaagtaccgtcactt

SEQ ID NO: 377104 - DNA, 33 bp, Homo sapien
gtcagcagtttatttctacaagtaccgtcactt

SEQ ID NO: 377105 - DNA, 33 bp, Homo sapien
cttgcctggtgccaccaacatcagcagttcagc

SEQ ID NO: 377106 - DNA, 33 bp, Homo sapien
cttgcctggtgccaccgacatcagcagttcagc

SEQ ID NO: 377107 - DNA, 33 bp, Homo sapien
ctcctgagtatattccagctttgtagtcaggac

SEQ ID NO: 377108 - DNA, 33 bp, Homo sapien
ctcctgagtatattccggctttgtagtcaggac

SEQ ID NO: 377109 - DNA, 33 bp, Homo sapien
tagcatttgtcaataaaaagtgtcaaatgatgt

SEQ ID NO: 377110 - DNA, 33 bp, Homo sapien
tagcatttgtcaataacaagtgtcaaatgatgt

SEQ ID NO: 377111 - DNA, 33 bp, Homo sapien
gaaagtgacagagcaacaacattaatgaaagcc

SEQ ID NO: 377112 - DNA, 33 bp, Homo sapien
gaaagtgacagagcaataacattaatgaaagcc

SEQ ID NO: 377113 - DNA, 33 bp, Homo sapien
ataaaatttatgtgaaaactcactgcaatagca

SEQ ID NO: 377114 - DNA, 33 bp, Homo sapien
ataaaatttatgtgaacactcactgcaatagca

SEQ ID NO: 377115 - DNA, 33 bp, Homo sapien
tcccttgtcaatcgcacggccacatggtatggg

SEQ ID NO: 377116 - DNA, 33 bp, Homo sapien
tcccttgtcaatcgcatggccacatggtatggg

SEQ ID NO: 377117 - DNA, 33 bp, Homo sapien
caatgttaactcacagaacagactataagacac

SEQ ID NO: 377118 - DNA, 33 bp, Homo sapien
caatgttaactcacaggacagactataagacac

SEQ ID NO: 377119 - DNA, 33 bp, Homo sapien
taaatagaatttcacaaaagccatgtcccttta

SEQ ID NO: 377120 - DNA, 33 bp, Homo sapien
taaatagaatttcacataagccatgtcccttta

SEQ ID NO: 377121 - DNA, 33 bp, Homo sapien
tctatggtacatagaaaccactgtaacataatc

SEQ ID NO: 377122 - DNA, 33 bp, Homo sapien
tctatggtacatagaagccactgtaacataatc

SEQ ID NO: 377123 - DNA, 33 bp, Homo sapien
tggatccaccgtagctcacatcagtcactgggc

SEQ ID NO: 377124 - DNA, 33 bp, Homo sapien
tggatccaccgtagcttacatcagtcactgggc

SEQ ID NO: 377125 - DNA, 33 bp, Homo sapien
aaagaaaatacactgtgtaagtccccatgtctg

SEQ ID NO: 377126 - DNA, 33 bp, Homo sapien
aaagaaaatacactgtttaagtccccatgtctg

SEQ ID NO: 377127 - DNA, 33 bp, Homo sapien
gagcaatctagatacacggagaagccatttgta

SEQ ID NO: 377128 - DNA, 33 bp, Homo sapien
gagcaatctagatacagggagaagccatttgta

SEQ ID NO: 377129 - DNA, 33 bp, Homo sapien
aaaacaagatgcaaagaaattgtttcacctagt

SEQ ID NO: 377130 - DNA, 33 bp, Homo sapien
aaaacaagatgcaaaggaattgtttcacctagt

SEQ ID NO: 377131 - DNA, 33 bp, Homo sapien
ttccctttttataagacgcagatatgagtgctc

SEQ ID NO: 377132 - DNA, 33 bp, Homo sapien
ttccctttttataagatgcagatatgagtgctc

SEQ ID NO: 377133 - DNA, 33 bp, Homo sapien
tttcttccattctatacgctatttttttcacct

SEQ ID NO: 377134 - DNA, 33 bp, Homo sapien
tttcttccattctatatgctatttttttcacct

SEQ ID NO: 377135 - DNA, 33 bp, Homo sapien
catggcggctcaagacacctaagaatacaaaag

SEQ ID NO: 377136 - DNA, 33 bp, Homo sapien
catggcggctcaagactcctaagaatacaaaag

SEQ ID NO: 377137 - DNA, 33 bp, Homo sapien
aagttagcaaccgtaactcccagacgcttacat

SEQ ID NO: 377138 - DNA, 33 bp, Homo sapien
aagttagcaaccgtaattcccagacgcttacat

SEQ ID NO: 377139 - DNA, 33 bp, Homo sapien
gaagtccttctgcccaaatcctggctttatcag

SEQ ID NO: 377140 - DNA, 33 bp, Homo sapien
gaagtccttctgcccatatcctggctttatcag

SEQ ID NO: 377141 - DNA, 33 bp, Homo sapien
ctctttctacagctaaaatttggaaactaacat

SEQ ID NO: 377142 - DNA, 33 bp, Homo sapien
ctctttctacagctaacatttggaaactaacat

SEQ ID NO: 377143 - DNA, 33 bp, Homo sapien
atttcagaggaaaccaaactcaggccgctgtag

SEQ ID NO: 377144 - DNA, 33 bp, Homo sapien
atttcagaggaaaccagactcaggccgctgtag

SEQ ID NO: 377145 - DNA, 33 bp, Homo sapien
tggtggatcccgcacactgtagcagtaaagggg

SEQ ID NO: 377146 - DNA, 33 bp, Homo sapien
tggtggatcccgcacattgtagcagtaaagggg

SEQ ID NO: 377147 - DNA, 33 bp, Homo sapien
ggtttggcttaacttccagttgtatatacatct

SEQ ID NO: 377148 - DNA, 33 bp, Homo sapien
ggtttggcttaacttctagttgtatatacatct

SEQ ID NO: 377149 - DNA, 33 bp, Homo sapien
agattttaaatgtagcacttaaggtaggcatca

SEQ ID NO: 377150 - DNA, 33 bp, Homo sapien
agattttaaatgtagcgcttaaggtaggcatca

SEQ ID NO: 377151 - DNA, 33 bp, Homo sapien
cagcacttcataaaataatcttggagcctccag

SEQ ID NO: 377152 - DNA, 33 bp, Homo sapien
cagcacttcataaaattatcttggagcctccag

SEQ ID NO: 377153 - DNA, 33 bp, Homo sapien
tctgggtaataagcacagagtatgaagccgctg

SEQ ID NO: 377154 - DNA, 33 bp, Homo sapien
tctgggtaataagcacggagtatgaagccgctg

SEQ ID NO: 377155 - DNA, 33 bp, Homo sapien
ggacacctggcccttcaagagagaaattttgct

SEQ ID NO: 377156 - DNA, 33 bp, Homo sapien
ggacacctggcccttcgagagagaaattttgct

SEQ ID NO: 377157 - DNA, 33 bp, Homo sapien
aatgtctgactcatcacggaggttttcgttaaa

SEQ ID NO: 377158 - DNA, 33 bp, Homo sapien
aatgtctgactcatcatggaggttttcgttaaa

SEQ ID NO: 377159 - DNA, 33 bp, Homo sapien
cagttgggctagactaagttatgctaggtaaca

SEQ ID NO: 377160 - DNA, 33 bp, Homo sapien
cagttgggctagactaggttatgctaggtaaca

SEQ ID NO: 377161 - DNA, 33 bp, Homo sapien
agttatctcctgtaacagtcaagcagagctact

SEQ ID NO: 377162 - DNA, 33 bp, Homo sapien
agttatctcctgtaacggtcaagcagagctact

SEQ ID NO: 377163 - DNA, 33 bp, Homo sapien
caaaaagaaaaccaaacgctaatactcagactc

SEQ ID NO: 377164 - DNA, 33 bp, Homo sapien
caaaaagaaaaccaaatgctaatactcagactc

SEQ ID NO: 377165 - DNA, 33 bp, Homo sapien
cttctgactccatccaacaatttcctctactgc

SEQ ID NO: 377166 - DNA, 33 bp, Homo sapien
cttctgactccatccagcaatttcctctactgc

SEQ ID NO: 377167 - DNA, 33 bp, Homo sapien
ctaatttacaattggacaagaactggcaaacta

SEQ ID NO: 377168 - DNA, 33 bp, Homo sapien
ctaatttacaattggataagaactggcaaacta

SEQ ID NO: 377169 - DNA, 33 bp, Homo sapien
aatctttggctatttccaggatgataaccagaa

SEQ ID NO: 377170 - DNA, 33 bp, Homo sapien
aatctttggctatttctaggatgataaccagaa

SEQ ID NO: 377171 - DNA, 33 bp, Homo sapien
cgtgtaccgcagacagaaatcattacattccgt

SEQ ID NO: 377172 - DNA, 33 bp, Homo sapien
cgtgtaccgcagacagcaatcattacattccgt

SEQ ID NO: 377173 - DNA, 33 bp, Homo sapien
ttagaatccagtcatcaatcggctcaatcgcca

SEQ ID NO: 377174 - DNA, 33 bp, Homo sapien
ttagaatccagtcatcgatcggctcaatcgcca

SEQ ID NO: 377175 - DNA, 33 bp, Homo sapien
ctgtggatggccgtcaaccactagatcagaggc

SEQ ID NO: 377176 - DNA, 33 bp, Homo sapien
ctgtggatggccgtcagccactagatcagaggc

SEQ ID NO: 377177 - DNA, 33 bp, Homo sapien
agcaatgcacaaaaggccaaatacaccatttaa

SEQ ID NO: 377178 - DNA, 33 bp, Homo sapien
agcaatgcacaaaaggtcaaatacaccatttaa

SEQ ID NO: 377179 - DNA, 33 bp, Homo sapien
tggagctagtccatacactctctgaggacactc

SEQ ID NO: 377180 - DNA, 33 bp, Homo sapien
tggagctagtccatacgctctctgaggacactc

SEQ ID NO: 377181 - DNA, 33 bp, Homo sapien
gtgcctgcggcatttacgcagtttgctgtgggt

SEQ ID NO: 377182 - DNA, 33 bp, Homo sapien
gtgcctgcggcatttatgcagtttgctgtgggt

SEQ ID NO: 377183 - DNA, 33 bp, Homo sapien
agtttaatgtccaccaataaaaactacttttta

SEQ ID NO: 377184 - DNA, 33 bp, Homo sapien
agtttaatgtccaccagtaaaaactacttttta

SEQ ID NO: 377185 - DNA, 33 bp, Homo sapien
attgtacactcagaaacgatgaaaatggtaaat

SEQ ID NO: 377186 - DNA, 33 bp, Homo sapien
attgtacactcagaaatgatgaaaatggtaaat

SEQ ID NO: 377187 - DNA, 33 bp, Homo sapien
ctaagaacttcttcaaaaagcatttatggatta

SEQ ID NO: 377188 - DNA, 33 bp, Homo sapien
ctaagaacttcttcaataagcatttatggatta

SEQ ID NO: 377189 - DNA, 33 bp, Homo sapien
taaagatccctgaaaacggaggtcagtccctac

SEQ ID NO: 377190 - DNA, 33 bp, Homo sapien
taaagatccctgaaaatggaggtcagtccctac

SEQ ID NO: 377191 - DNA, 33 bp, Homo sapien
tggatcacttgctctgaaggcagctggctgcca

SEQ ID NO: 377192 - DNA, 33 bp, Homo sapien
tggatcacttgctctggaggcagctggctgcca

SEQ ID NO: 377193 - DNA, 33 bp, Homo sapien
ccccacccattggccaagagagaaaggttcaaa

SEQ ID NO: 377194 - DNA, 33 bp, Homo sapien
ccccacccattggccaggagagaaaggttcaaa

SEQ ID NO: 377195 - DNA, 33 bp, Homo sapien
ttctcctattctttgaacctctctctcctggcc

SEQ ID NO: 377196 - DNA, 33 bp, Homo sapien
ttctcctattctttgagcctctctctcctggcc

SEQ ID NO: 377197 - DNA, 33 bp, Homo sapien
tgtaacaacaacaaaactcttggcccctataat

SEQ ID NO: 377198 - DNA, 33 bp, Homo sapien
tgtaacaacaacaaaattcttggcccctataat

SEQ ID NO: 377199 - DNA, 33 bp, Homo sapien
ttgatacagttgagacacagaacatttctatca

SEQ ID NO: 377200 - DNA, 33 bp, Homo sapien
ttgatacagttgagacccagaacatttctatca

SEQ ID NO: 377201 - DNA, 33 bp, Homo sapien
gaggcttcctttgctccaccttgtacttcaggg

SEQ ID NO: 377202 - DNA, 33 bp, Homo sapien
gaggcttcctttgctctaccttgtacttcaggg

SEQ ID NO: 377203 - DNA, 33 bp, Homo sapien
ccttatggcaccacatcaatgctctgtggaaaa

SEQ ID NO: 377204 - DNA, 33 bp, Homo sapien
ccttatggcaccacattaatgctctgtggaaaa

SEQ ID NO: 377205 - DNA, 33 bp, Homo sapien
ggtcaaataggtttagacaaggttaggataaac

SEQ ID NO: 377206 - DNA, 33 bp, Homo sapien
ggtcaaataggtttaggcaaggttaggataaac

SEQ ID NO: 377207 - DNA, 33 bp, Homo sapien
tattgtagcaataagaatagtaatcagaatcca

SEQ ID NO: 377208 - DNA, 33 bp, Homo sapien
tattgtagcaataagagtagtaatcagaatcca

SEQ ID NO: 377209 - DNA, 33 bp, Homo sapien
aaaaaacctctaggaactgtcccaagatcaaac

SEQ ID NO: 377210 - DNA, 33 bp, Homo sapien
aaaaaacctctaggaattgtcccaagatcaaac

SEQ ID NO: 377211 - DNA, 33 bp, Homo sapien
ccactggatctttgcagtctgacagcaggtggc

SEQ ID NO: 377212 - DNA, 33 bp, Homo sapien
ccactggatctttgcattctgacagcaggtggc

SEQ ID NO: 377213 - DNA, 33 bp, Homo sapien
tttccaggctttttagaatggtggcagtcaaga

SEQ ID NO: 377214 - DNA, 33 bp, Homo sapien
tttccaggctttttagcatggtggcagtcaaga

SEQ ID NO: 377215 - DNA, 33 bp, Homo sapien
cacgcttcttagggtcaatcctcctaaccgttt

SEQ ID NO: 377216 - DNA, 33 bp, Homo sapien
cacgcttcttagggtcgatcctcctaaccgttt

SEQ ID NO: 377217 - DNA, 33 bp, Homo sapien
attcagagataccccaaaacttgtcattaataa

SEQ ID NO: 377218 - DNA, 33 bp, Homo sapien
attcagagataccccagaacttgtcattaataa

SEQ ID NO: 377219 - DNA, 33 bp, Homo sapien
gcattcgtctttgctcaaacaatgccccatcaa

SEQ ID NO: 377220 - DNA, 33 bp, Homo sapien
gcattcgtctttgctcgaacaatgccccatcaa

SEQ ID NO: 377221 - DNA, 33 bp, Homo sapien
agtttgggatggggaacgatttatgcattcatg

SEQ ID NO: 377222 - DNA, 33 bp, Homo sapien
agtttgggatggggaaggatttatgcattcatg

SEQ ID NO: 377223 - DNA, 33 bp, Homo sapien
tacaaacaattaggcccaaagcaagtccccggc

SEQ ID NO: 377224 - DNA, 33 bp, Homo sapien
tacaaacaattaggcctaaagcaagtccccggc

SEQ ID NO: 377225 - DNA, 33 bp, Homo sapien
tgtttttaaatcagatcacaccctgaggttctg

SEQ ID NO: 377226 - DNA, 33 bp, Homo sapien
tgtttttaaatcagattacaccctgaggttctg

SEQ ID NO: 377227 - DNA, 33 bp, Homo sapien
ggactaactccagaagcctccttgtgtgctgat

SEQ ID NO: 377228 - DNA, 33 bp, Homo sapien
ggactaactccagaagtctccttgtgtgctgat

SEQ ID NO: 377229 - DNA, 33 bp, Homo sapien
ggcacacatccttccacaaaagcactctgctgg

SEQ ID NO: 377230 - DNA, 33 bp, Homo sapien
ggcacacatccttccataaaagcactctgctgg

SEQ ID NO: 377231 - DNA, 33 bp, Homo sapien
aaacagcaactgggtacgtgccctcagctcatg

SEQ ID NO: 377232 - DNA, 33 bp, Homo sapien
aaacagcaactgggtatgtgccctcagctcatg

SEQ ID NO: 377233 - DNA, 33 bp, Homo sapien
cctgggtctatgtgcacgccgctatgctcgggt

SEQ ID NO: 377234 - DNA, 33 bp, Homo sapien
cctgggtctatgtgcatgccgctatgctcgggt

SEQ ID NO: 377235 - DNA, 33 bp, Homo sapien
cttgtcctgcattctaccatgcctgtcccacac

SEQ ID NO: 377236 - DNA, 33 bp, Homo sapien
cttgtcctgcattctatcatgcctgtcccacac

SEQ ID NO: 377237 - DNA, 33 bp, Homo sapien
ttcctattttaaaaacaatctaccattgccttc

SEQ ID NO: 377238 - DNA, 33 bp, Homo sapien
ttcctattttaaaaactatctaccattgccttc

SEQ ID NO: 377239 - DNA, 33 bp, Homo sapien
gatccatgagtcctggaatgggcctattgtgtc

SEQ ID NO: 377240 - DNA, 33 bp, Homo sapien
gatccatgagtcctgggatgggcctattgtgtc

SEQ ID NO: 377241 - DNA, 33 bp, Homo sapien
aggtttctctcctagagctgaggtcttgcagca

SEQ ID NO: 377242 - DNA, 33 bp, Homo sapien
aggtttctctcctagatctgaggtcttgcagca

SEQ ID NO: 377243 - DNA, 33 bp, Homo sapien
acccaataaatcaccaaatcgaagcacacttgt

SEQ ID NO: 377244 - DNA, 33 bp, Homo sapien
acccaataaatcaccatatcgaagcacacttgt

SEQ ID NO: 377245 - DNA, 33 bp, Homo sapien
tattattatatgccacagaggttttcacgatcg

SEQ ID NO: 377246 - DNA, 33 bp, Homo sapien
tattattatatgccactgaggttttcacgatcg

SEQ ID NO: 377247 - DNA, 33 bp, Homo sapien
tagcccgtggctaaccaaagacaagtgagtgag

SEQ ID NO: 377248 - DNA, 33 bp, Homo sapien
tagcccgtggctaaccgaagacaagtgagtgag

SEQ ID NO: 377249 - DNA, 33 bp, Homo sapien
agagcaattaagcatcaagcccaaacattccaa

SEQ ID NO: 377250 - DNA, 33 bp, Homo sapien
agagcaattaagcatcgagcccaaacattccaa

SEQ ID NO: 377251 - DNA, 33 bp, Homo sapien
acactcatctacttagaaagtcagaaaacagag

SEQ ID NO: 377252 - DNA, 33 bp, Homo sapien
acactcatctacttagcaagtcagaaaacagag

SEQ ID NO: 377253 - DNA, 33 bp, Homo sapien
aaggctagtaaacataaaaaaggtgctcaatgt

SEQ ID NO: 377254 - DNA, 33 bp, Homo sapien
aaggctagtaaacatataaaaggtgctcaatgt

SEQ ID NO: 377255 - DNA, 33 bp, Homo sapien
gtataacaacatggaaaatctggaaacaatgta

SEQ ID NO: 377256 - DNA, 33 bp, Homo sapien
gtataacaacatggaacatctggaaacaatgta

SEQ ID NO: 377257 - DNA, 33 bp, Homo sapien
gtagaagagtacatacactacgatacttcagga

SEQ ID NO: 377258 - DNA, 33 bp, Homo sapien
gtagaagagtacatacgctacgatacttcagga

SEQ ID NO: 377259 - DNA, 33 bp, Homo sapien
aaaggatgcaccataaaagcaaagggcaccagc

SEQ ID NO: 377260 - DNA, 33 bp, Homo sapien
aaaggatgcaccataagagcaaagggcaccagc

SEQ ID NO: 377261 - DNA, 33 bp, Homo sapien
catattctgacacatcaagttattctagctgtg

SEQ ID NO: 377262 - DNA, 33 bp, Homo sapien
catattctgacacatccagttattctagctgtg

SEQ ID NO: 377263 - DNA, 33 bp, Homo sapien
ggctgtttgacaggaaagtagattcaacactgc

SEQ ID NO: 377264 - DNA, 33 bp, Homo sapien
ggctgtttgacaggaaggtagattcaacactgc

SEQ ID NO: 377265 - DNA, 33 bp, Homo sapien
cccttctgctgcaagaaccacttctactgagac

SEQ ID NO: 377266 - DNA, 33 bp, Homo sapien
cccttctgctgcaagagccacttctactgagac

SEQ ID NO: 377267 - DNA, 33 bp, Homo sapien
aactgcccaagaacccacgatgatttgtccttg

SEQ ID NO: 377268 - DNA, 33 bp, Homo sapien
aactgcccaagaacccgcgatgatttgtccttg

SEQ ID NO: 377269 - DNA, 33 bp, Homo sapien
atgatggtagcattaaaagtttcgttgtcttga

SEQ ID NO: 377270 - DNA, 33 bp, Homo sapien
atgatggtagcattaagagtttcgttgtcttga

SEQ ID NO: 377271 - DNA, 33 bp, Homo sapien
gaacagcatgtgtgaaagaaatctgggagacca

SEQ ID NO: 377272 - DNA, 33 bp, Homo sapien
gaacagcatgtgtgaaggaaatctgggagacca

SEQ ID NO: 377273 - DNA, 33 bp, Homo sapien
atagtttggctcgcacaccttgtaccagttcgt

SEQ ID NO: 377274 - DNA, 33 bp, Homo sapien
atagtttggctcgcacgccttgtaccagttcgt

SEQ ID NO: 377275 - DNA, 33 bp, Homo sapien
aagctaagcgtggcaaagggtaacttcagcttg

SEQ ID NO: 377276 - DNA, 33 bp, Homo sapien
aagctaagcgtggcaatgggtaacttcagcttg

SEQ ID NO: 377277 - DNA, 33 bp, Homo sapien
ccatcttctctgtcaaagttgactaagttaaca

SEQ ID NO: 377278 - DNA, 33 bp, Homo sapien
ccatcttctctgtcaaggttgactaagttaaca

SEQ ID NO: 377279 - DNA, 33 bp, Homo sapien
ttcaccatgaaaaaaacagacactctgctccac

SEQ ID NO: 377280 - DNA, 33 bp, Homo sapien
ttcaccatgaaaaaaagagacactctgctccac

SEQ ID NO: 377281 - DNA, 33 bp, Homo sapien
ctgagatatggtataaacttttgttaagtcaat

SEQ ID NO: 377282 - DNA, 33 bp, Homo sapien
ctgagatatggtataatcttttgttaagtcaat

SEQ ID NO: 377283 - DNA, 33 bp, Homo sapien
tgagccacagatgggactcagtttcttctgaaa

SEQ ID NO: 377284 - DNA, 33 bp, Homo sapien
tgagccacagatgggattcagtttcttctgaaa

SEQ ID NO: 377285 - DNA, 33 bp, Homo sapien
tgaagggcagtttccacagaaagttgcattggg

SEQ ID NO: 377286 - DNA, 33 bp, Homo sapien
tgaagggcagtttccatagaaagttgcattggg

SEQ ID NO: 377287 - DNA, 33 bp, Homo sapien
ctctgcctcaaacaacaatgttgtcctctgcac

SEQ ID NO: 377288 - DNA, 33 bp, Homo sapien
ctctgcctcaaacaacgatgttgtcctctgcac

SEQ ID NO: 377289 - DNA, 33 bp, Homo sapien
taatcttatgggtgaacataggtatgtaatttt

SEQ ID NO: 377290 - DNA, 33 bp, Homo sapien
taatcttatgggtgaatataggtatgtaatttt

SEQ ID NO: 377291 - DNA, 33 bp, Homo sapien
ggcaaatgaaaaagagaaaaatcatcagggata

SEQ ID NO: 377292 - DNA, 33 bp, Homo sapien
ggcaaatgaaaaagaggaaaatcatcagggata

SEQ ID NO: 377293 - DNA, 33 bp, Homo sapien
ctaacaaggaataataactggcctttgtttata

SEQ ID NO: 377294 - DNA, 33 bp, Homo sapien
ctaacaaggaataatacctggcctttgtttata

SEQ ID NO: 377295 - DNA, 33 bp, Homo sapien
agtcaaaccctttttcactattaacatgatatt

SEQ ID NO: 377296 - DNA, 33 bp, Homo sapien
agtcaaaccctttttcgctattaacatgatatt

SEQ ID NO: 377297 - DNA, 33 bp, Homo sapien
aggtgtaacctaactcgcaaagcactttattta

SEQ ID NO: 377298 - DNA, 33 bp, Homo sapien
aggtgtaacctaactctcaaagcactttattta

SEQ ID NO: 377299 - DNA, 33 bp, Homo sapien
atgatgtttcagacccaacaaggctcagggatc

SEQ ID NO: 377300 - DNA, 33 bp, Homo sapien
atgatgtttcagacccgacaaggctcagggatc

SEQ ID NO: 377301 - DNA, 33 bp, Homo sapien
ctcaaacatctcttgccatcaaatctacgttgg

SEQ ID NO: 377302 - DNA, 33 bp, Homo sapien
ctcaaacatctcttgctatcaaatctacgttgg

SEQ ID NO: 377303 - DNA, 33 bp, Homo sapien
ataggcaggagagataagatgggccaagatgga

SEQ ID NO: 377304 - DNA, 33 bp, Homo sapien
ataggcaggagagataggatgggccaagatgga

SEQ ID NO: 377305 - DNA, 33 bp, Homo sapien
gctcttgcccatcctgaagtgaagggaaccttc

SEQ ID NO: 377306 - DNA, 33 bp, Homo sapien
gctcttgcccatcctggagtgaagggaaccttc

SEQ ID NO: 377307 - DNA, 33 bp, Homo sapien
gtccattttgtcactcaatccattccataaata

SEQ ID NO: 377308 - DNA, 33 bp, Homo sapien
gtccattttgtcactcgatccattccataaata

SEQ ID NO: 377309 - DNA, 33 bp, Homo sapien
caggactttcttctcagcacatgcggtttcttg

SEQ ID NO: 377310 - DNA, 33 bp, Homo sapien
caggactttcttctcatcacatgcggtttcttg

SEQ ID NO: 377311 - DNA, 33 bp, Homo sapien
gcctaaaataacaccaggctagagggtattttc

SEQ ID NO: 377312 - DNA, 33 bp, Homo sapien
gcctaaaataacaccatgctagagggtattttc

SEQ ID NO: 377313 - DNA, 33 bp, Homo sapien
gcactgctgttttctacagaggttcaagggcat

SEQ ID NO: 377314 - DNA, 33 bp, Homo sapien
gcactgctgttttctatagaggttcaagggcat

SEQ ID NO: 377315 - DNA, 33 bp, Homo sapien
tcaagctgatttaagtaaaaaagagaggtgtat

SEQ ID NO: 377316 - DNA, 33 bp, Homo sapien
tcaagctgatttaagtgaaaaagagaggtgtat

SEQ ID NO: 377317 - DNA, 33 bp, Homo sapien
cgcaactggatgacaaactcttgtgtgttaaga

SEQ ID NO: 377318 - DNA, 33 bp, Homo sapien
cgcaactggatgacaagctcttgtgtgttaaga

SEQ ID NO: 377319 - DNA, 33 bp, Homo sapien
ttcctaaaccttcagcagatgtccattgcctat

SEQ ID NO: 377320 - DNA, 33 bp, Homo sapien
ttcctaaaccttcagcggatgtccattgcctat

SEQ ID NO: 377321 - DNA, 33 bp, Homo sapien
atcaccccatacgccaagcttccatcaaacttc

SEQ ID NO: 377322 - DNA, 33 bp, Homo sapien
atcaccccatacgccaggcttccatcaaacttc

SEQ ID NO: 377323 - DNA, 33 bp, Homo sapien
caatctgaggaaggccactaactcaggatgcat

SEQ ID NO: 377324 - DNA, 33 bp, Homo sapien
caatctgaggaaggccgctaactcaggatgcat

SEQ ID NO: 377325 - DNA, 33 bp, Homo sapien
ggaggactaattctaacgctttggagagtaaac

SEQ ID NO: 377326 - DNA, 33 bp, Homo sapien
ggaggactaattctaatgctttggagagtaaac

SEQ ID NO: 377327 - DNA, 33 bp, Homo sapien
gattggtccatctgacgaggacaaggacaaagt

SEQ ID NO: 377328 - DNA, 33 bp, Homo sapien
gattggtccatctgactaggacaaggacaaagt

SEQ ID NO: 377329 - DNA, 33 bp, Homo sapien
ccacttgtatccggaaccttctctccttctacg

SEQ ID NO: 377330 - DNA, 33 bp, Homo sapien
ccacttgtatccggaatcttctctccttctacg

SEQ ID NO: 377331 - DNA, 33 bp, Homo sapien
aaggacccagcatagaagtgccaggcaagtttc

SEQ ID NO: 377332 - DNA, 33 bp, Homo sapien
aaggacccagcatagaggtgccaggcaagtttc

SEQ ID NO: 377333 - DNA, 33 bp, Homo sapien
attttaataagctggaaccaatataatttggaa

SEQ ID NO: 377334 - DNA, 33 bp, Homo sapien
attttaataagctggacccaatataatttggaa

SEQ ID NO: 377335 - DNA, 33 bp, Homo sapien
cggtaaactggcgaaactggttacttcaaacca

SEQ ID NO: 377336 - DNA, 33 bp, Homo sapien
cggtaaactggcgaaattggttacttcaaacca

SEQ ID NO: 377337 - DNA, 33 bp, Homo sapien
caaaggaggagacagactcacgaatagatcatc

SEQ ID NO: 377338 - DNA, 33 bp, Homo sapien
caaaggaggagacagattcacgaatagatcatc

SEQ ID NO: 377339 - DNA, 33 bp, Homo sapien
aacccaatctttttcaataaccatgagtgactt

SEQ ID NO: 377340 - DNA, 33 bp, Homo sapien
aacccaatctttttcagtaaccatgagtgactt

SEQ ID NO: 377341 - DNA, 33 bp, Homo sapien
ctgaaatagcaggaacaattacagctgccgaac

SEQ ID NO: 377342 - DNA, 33 bp, Homo sapien
ctgaaatagcaggaaccattacagctgccgaac

SEQ ID NO: 377343 - DNA, 33 bp, Homo sapien
cttttgcaaaaaatctaaagcaagaggcagaaa

SEQ ID NO: 377344 - DNA, 33 bp, Homo sapien
cttttgcaaaaaatcttaagcaagaggcagaaa

SEQ ID NO: 377345 - DNA, 33 bp, Homo sapien
gcttaatttcacaatgacaagttcaagggttta

SEQ ID NO: 377346 - DNA, 33 bp, Homo sapien
gcttaatttcacaatggcaagttcaagggttta

SEQ ID NO: 377347 - DNA, 33 bp, Homo sapien
aattttacgaacagctaaaaatcctcactttga

SEQ ID NO: 377348 - DNA, 33 bp, Homo sapien
aattttacgaacagctgaaaatcctcactttga

SEQ ID NO: 377349 - DNA, 33 bp, Homo sapien
ttatgaattactcacaagagttcctttgcttga

SEQ ID NO: 377350 - DNA, 33 bp, Homo sapien
ttatgaattactcacaggagttcctttgcttga

SEQ ID NO: 377351 - DNA, 33 bp, Homo sapien
tttagatcatttaagcacatacggtggccttgc

SEQ ID NO: 377352 - DNA, 33 bp, Homo sapien
tttagatcatttaagcgcatacggtggccttgc

SEQ ID NO: 377353 - DNA, 33 bp, Homo sapien
gcattgcttggctacaacactgaccagaactca

SEQ ID NO: 377354 - DNA, 33 bp, Homo sapien
gcattgcttggctacaccactgaccagaactca

SEQ ID NO: 377355 - DNA, 33 bp, Homo sapien
aacaaattctatgggtaaaggtgtgtagagaaa

SEQ ID NO: 377356 - DNA, 33 bp, Homo sapien
aacaaattctatgggtgaaggtgtgtagagaaa

SEQ ID NO: 377357 - DNA, 33 bp, Homo sapien
agaaggcatattgacaacatccatcaaaatcac

SEQ ID NO: 377358 - DNA, 33 bp, Homo sapien
agaaggcatattgacagcatccatcaaaatcac

SEQ ID NO: 377359 - DNA, 33 bp, Homo sapien
ggggacctactgtgaacgctgctccttagctga

SEQ ID NO: 377360 - DNA, 33 bp, Homo sapien
ggggacctactgtgaatgctgctccttagctga

SEQ ID NO: 377361 - DNA, 33 bp, Homo sapien
gagggttcatcagcaagcaatacaggaaaaaaa

SEQ ID NO: 377362 - DNA, 33 bp, Homo sapien
gagggttcatcagcaatcaatacaggaaaaaaa

SEQ ID NO: 377363 - DNA, 33 bp, Homo sapien
ttgaatgactaaccaaatgaggtgtagacctta

SEQ ID NO: 377364 - DNA, 33 bp, Homo sapien
ttgaatgactaaccaagtgaggtgtagacctta

SEQ ID NO: 377365 - DNA, 33 bp, Homo sapien
aaggaattgtcagggaagattgaaatagacaaa

SEQ ID NO: 377366 - DNA, 33 bp, Homo sapien
aaggaattgtcagggacgattgaaatagacaaa

SEQ ID NO: 377367 - DNA, 33 bp, Homo sapien
gcttggcactgtgcgaagaagtaggtgtatgtg

SEQ ID NO: 377368 - DNA, 33 bp, Homo sapien
gcttggcactgtgcgaggaagtaggtgtatgtg

SEQ ID NO: 377369 - DNA, 33 bp, Homo sapien
ctcatattacaaaaaggcattgaggatgagaag

SEQ ID NO: 377370 - DNA, 33 bp, Homo sapien
ctcatattacaaaaagtcattgaggatgagaag

SEQ ID NO: 377371 - DNA, 33 bp, Homo sapien
accactttttacttggaatgtttcgtgtccctt

SEQ ID NO: 377372 - DNA, 33 bp, Homo sapien
accactttttacttgggatgtttcgtgtccctt

SEQ ID NO: 377373 - DNA, 33 bp, Homo sapien
caagagccctgaaagggaaggattactgtccct

SEQ ID NO: 377374 - DNA, 33 bp, Homo sapien
caagagccctgaaaggtaaggattactgtccct

SEQ ID NO: 377375 - DNA, 33 bp, Homo sapien
tacctggcttaggcaaatctctttacctctctg

SEQ ID NO: 377376 - DNA, 33 bp, Homo sapien
tacctggcttaggcaagtctctttacctctctg

SEQ ID NO: 377377 - DNA, 33 bp, Homo sapien
aacagagctgccttaacagatggggtgatgaag

SEQ ID NO: 377378 - DNA, 33 bp, Homo sapien
aacagagctgccttaatagatggggtgatgaag

SEQ ID NO: 377379 - DNA, 33 bp, Homo sapien
tagcagcgttcctagcacataggtaatgcccaa

SEQ ID NO: 377380 - DNA, 33 bp, Homo sapien
tagcagcgttcctagcgcataggtaatgcccaa

SEQ ID NO: 377381 - DNA, 33 bp, Homo sapien
ctggagccagcaaggacgtgctacccagcggga

SEQ ID NO: 377382 - DNA, 33 bp, Homo sapien
ctggagccagcaaggaggtgctacccagcggga

SEQ ID NO: 377383 - DNA, 33 bp, Homo sapien
agctgggagcatggaaagaaagactgccctaga

SEQ ID NO: 377384 - DNA, 33 bp, Homo sapien
agctgggagcatggaaggaaagactgccctaga

SEQ ID NO: 377385 - DNA, 33 bp, Homo sapien
ttgttcataggaggtacctgtcaacataccact

SEQ ID NO: 377386 - DNA, 33 bp, Homo sapien
ttgttcataggaggtatctgtcaacataccact

SEQ ID NO: 377387 - DNA, 33 bp, Homo sapien
ccttctctctggaaacgagccgatgcataaaat

SEQ ID NO: 377388 - DNA, 33 bp, Homo sapien
ccttctctctggaaactagccgatgcataaaat

SEQ ID NO: 377389 - DNA, 33 bp, Homo sapien
taacaattgaaactcaatcttgccactaacttt

SEQ ID NO: 377390 - DNA, 33 bp, Homo sapien
taacaattgaaactcagtcttgccactaacttt

SEQ ID NO: 377391 - DNA, 33 bp, Homo sapien
tttgctgtaagataatcaggctatcaatttcac

SEQ ID NO: 377392 - DNA, 33 bp, Homo sapien
tttgctgtaagataatgaggctatcaatttcac

SEQ ID NO: 377393 - DNA, 33 bp, Homo sapien
atgatttttttgtccaccatggattaatttagc

SEQ ID NO: 377394 - DNA, 33 bp, Homo sapien
atgatttttttgtccatcatggattaatttagc

SEQ ID NO: 377395 - DNA, 33 bp, Homo sapien
ctcctgtggtttggagacaggaattgaccaaga

SEQ ID NO: 377396 - DNA, 33 bp, Homo sapien
ctcctgtggtttggaggcaggaattgaccaaga

SEQ ID NO: 377397 - DNA, 33 bp, Homo sapien
caggaattgaccaagaagaggcatgaggaaact

SEQ ID NO: 377398 - DNA, 33 bp, Homo sapien
caggaattgaccaagaggaggcatgaggaaact

SEQ ID NO: 377399 - DNA, 33 bp, Homo sapien
tagggttaaagtcaaccaatgtctgcaacttat

SEQ ID NO: 377400 - DNA, 33 bp, Homo sapien
tagggttaaagtcaactaatgtctgcaacttat

SEQ ID NO: 377401 - DNA, 33 bp, Homo sapien
ttgacttcttttttgacgtatgatgggtttatc

SEQ ID NO: 377402 - DNA, 33 bp, Homo sapien
ttgacttcttttttgatgtatgatgggtttatc

SEQ ID NO: 377403 - DNA, 33 bp, Homo sapien
tatcaagaaaaccaagaaccagatgtgtttaga

SEQ ID NO: 377404 - DNA, 33 bp, Homo sapien
tatcaagaaaaccaaggaccagatgtgtttaga

SEQ ID NO: 377405 - DNA, 33 bp, Homo sapien
atataccatttagtgaataagtagtcaaagccc

SEQ ID NO: 377406 - DNA, 33 bp, Homo sapien
atataccatttagtgagtaagtagtcaaagccc

SEQ ID NO: 377407 - DNA, 33 bp, Homo sapien
cctgtgctgctctcacaatagtgaataaatctc

SEQ ID NO: 377408 - DNA, 33 bp, Homo sapien
cctgtgctgctctcacgatagtgaataaatctc

SEQ ID NO: 377409 - DNA, 33 bp, Homo sapien
cctgagtacaagggaaagttacacagcctcatg

SEQ ID NO: 377410 - DNA, 33 bp, Homo sapien
cctgagtacaagggaaggttacacagcctcatg

SEQ ID NO: 377411 - DNA, 33 bp, Homo sapien
tgtcacccgaactggaatacagtaccacgatta

SEQ ID NO: 377412 - DNA, 33 bp, Homo sapien
tgtcacccgaactggagtacagtaccacgatta

SEQ ID NO: 377413 - DNA, 33 bp, Homo sapien
attgcctaaggacacacggagtaactccagaaa

SEQ ID NO: 377414 - DNA, 33 bp, Homo sapien
attgcctaaggacacatggagtaactccagaaa

SEQ ID NO: 377415 - DNA, 33 bp, Homo sapien
aagtcctaggatacagaagcgtatgaaacagac

SEQ ID NO: 377416 - DNA, 33 bp, Homo sapien
aagtcctaggatacaggagcgtatgaaacagac

SEQ ID NO: 377417 - DNA, 33 bp, Homo sapien
gatttattcagcatcaacctaagcatagtggaa

SEQ ID NO: 377418 - DNA, 33 bp, Homo sapien
gatttattcagcatcagcctaagcatagtggaa

SEQ ID NO: 377419 - DNA, 33 bp, Homo sapien
gaatagggcagtgttcaacattacatcttgaac

SEQ ID NO: 377420 - DNA, 33 bp, Homo sapien
gaatagggcagtgttcgacattacatcttgaac

SEQ ID NO: 377421 - DNA, 33 bp, Homo sapien
ccggaataagcaaataagcaagttgaatctttg

SEQ ID NO: 377422 - DNA, 33 bp, Homo sapien
ccggaataagcaaataggcaagttgaatctttg

SEQ ID NO: 377423 - DNA, 33 bp, Homo sapien
gtcaagagtgaaatcaagagtgacacccactgc

SEQ ID NO: 377424 - DNA, 33 bp, Homo sapien
gtcaagagtgaaatcaggagtgacacccactgc

SEQ ID NO: 377425 - DNA, 33 bp, Homo sapien
tactgcccaagcacaaagcatttattaaaggcc

SEQ ID NO: 377426 - DNA, 33 bp, Homo sapien
tactgcccaagcacaaggcatttattaaaggcc

SEQ ID NO: 377427 - DNA, 33 bp, Homo sapien
cccaattgatagatgacgcagaggagagggttg

SEQ ID NO: 377428 - DNA, 33 bp, Homo sapien
cccaattgatagatgatgcagaggagagggttg

SEQ ID NO: 377429 - DNA, 33 bp, Homo sapien
cttctctaagcttccactctattattacctgcc

SEQ ID NO: 377430 - DNA, 33 bp, Homo sapien
cttctctaagcttccagtctattattacctgcc

SEQ ID NO: 377431 - DNA, 33 bp, Homo sapien
accttagccgttcccacgcattctggaaatcaa

SEQ ID NO: 377432 - DNA, 33 bp, Homo sapien
accttagccgttcccatgcattctggaaatcaa

SEQ ID NO: 377433 - DNA, 33 bp, Homo sapien
actttgctttagggcacatggttaaggagtggc

SEQ ID NO: 377434 - DNA, 33 bp, Homo sapien
actttgctttagggcatatggttaaggagtggc

SEQ ID NO: 377435 - DNA, 33 bp, Homo sapien
attcactgttgttacaaagtcttctgaaaaacg

SEQ ID NO: 377436 - DNA, 33 bp, Homo sapien
attcactgttgttacagagtcttctgaaaaacg

SEQ ID NO: 377437 - DNA, 33 bp, Homo sapien
gggtgtcagcattgaccggaagattatttgaag

SEQ ID NO: 377438 - DNA, 33 bp, Homo sapien
gggtgtcagcattgacgggaagattatttgaag

SEQ ID NO: 377439 - DNA, 33 bp, Homo sapien
gacacagtgactgtaaccctagttagacttgta

SEQ ID NO: 377440 - DNA, 33 bp, Homo sapien
gacacagtgactgtaatcctagttagacttgta

SEQ ID NO: 377441 - DNA, 33 bp, Homo sapien
ttccctggagccgctaatagccttgttttctgt

SEQ ID NO: 377442 - DNA, 33 bp, Homo sapien
ttccctggagccgctattagccttgttttctgt

SEQ ID NO: 377443 - DNA, 33 bp, Homo sapien
agagctctgttttgacactgtctttgcctggga

SEQ ID NO: 377444 - DNA, 33 bp, Homo sapien
agagctctgttttgactctgtctttgcctggga

SEQ ID NO: 377445 - DNA, 33 bp, Homo sapien
gccttgtggaccgtcaactttcccaaatgcagg

SEQ ID NO: 377446 - DNA, 33 bp, Homo sapien
gccttgtggaccgtcagctttcccaaatgcagg

SEQ ID NO: 377447 - DNA, 33 bp, Homo sapien
aatgggaacttttgtcccaccatgtagatccct

SEQ ID NO: 377448 - DNA, 33 bp, Homo sapien
aatgggaacttttgtctcaccatgtagatccct

SEQ ID NO: 377449 - DNA, 33 bp, Homo sapien
ttaaaataagagtgaaacttcctatcacagtct

SEQ ID NO: 377450 - DNA, 33 bp, Homo sapien
ttaaaataagagtgaaccttcctatcacagtct

SEQ ID NO: 377451 - DNA, 33 bp, Homo sapien
agattcaagttcaatacgttttgcaaggttatt

SEQ ID NO: 377452 - DNA, 33 bp, Homo sapien
agattcaagttcaatatgttttgcaaggttatt

SEQ ID NO: 377453 - DNA, 33 bp, Homo sapien
tttggatgctaatctgaactgtggtgactgcac

SEQ ID NO: 377454 - DNA, 33 bp, Homo sapien
tttggatgctaatctggactgtggtgactgcac

SEQ ID NO: 377455 - DNA, 33 bp, Homo sapien
accttgggagatttcaagggcctcttatgtgtc

SEQ ID NO: 377456 - DNA, 33 bp, Homo sapien
accttgggagatttcaggggcctcttatgtgtc

SEQ ID NO: 377457 - DNA, 33 bp, Homo sapien
aatccagaaaggcaaaaaggagacatggcaaaa

SEQ ID NO: 377458 - DNA, 33 bp, Homo sapien
aatccagaaaggcaaagaggagacatggcaaaa

SEQ ID NO: 377459 - DNA, 33 bp, Homo sapien
gtagagttgacttttgaccttgttccttgctac

SEQ ID NO: 377460 - DNA, 33 bp, Homo sapien
gtagagttgacttttggccttgttccttgctac

SEQ ID NO: 377461 - DNA, 33 bp, Homo sapien
tgaaggagaaacccctaaagttcactggaatgc

SEQ ID NO: 377462 - DNA, 33 bp, Homo sapien
tgaaggagaaacccctcaagttcactggaatgc

SEQ ID NO: 377463 - DNA, 33 bp, Homo sapien
gctgtgatcacccagcagcaagttggtgcttcc

SEQ ID NO: 377464 - DNA, 33 bp, Homo sapien
gctgtgatcacccagccgcaagttggtgcttcc

SEQ ID NO: 377465 - DNA, 33 bp, Homo sapien
cctctgagactgaaatcaaaacaagcagatttc

SEQ ID NO: 377466 - DNA, 33 bp, Homo sapien
cctctgagactgaaattaaaacaagcagatttc

SEQ ID NO: 377467 - DNA, 33 bp, Homo sapien
accttgtagtaagtacaaaagaccctaagatta

SEQ ID NO: 377468 - DNA, 33 bp, Homo sapien
accttgtagtaagtacgaaagaccctaagatta

SEQ ID NO: 377469 - DNA, 33 bp, Homo sapien
tgtaatgcacaagaacaaattatgaacacctcg

SEQ ID NO: 377470 - DNA, 33 bp, Homo sapien
tgtaatgcacaagaactaattatgaacacctcg

SEQ ID NO: 377471 - DNA, 33 bp, Homo sapien
tgagaggcttattttaccgattagtggacagag

SEQ ID NO: 377472 - DNA, 33 bp, Homo sapien
tgagaggcttattttatcgattagtggacagag

SEQ ID NO: 377473 - DNA, 33 bp, Homo sapien
ataggaattttgtttaagctcatgaggaagaga

SEQ ID NO: 377474 - DNA, 33 bp, Homo sapien
ataggaattttgtttacgctcatgaggaagaga

SEQ ID NO: 377475 - DNA, 33 bp, Homo sapien
aattttcttcagcctaataaaatggtctgagat

SEQ ID NO: 377476 - DNA, 33 bp, Homo sapien
aattttcttcagcctagtaaaatggtctgagat

SEQ ID NO: 377477 - DNA, 33 bp, Homo sapien
gagagggacagataaacatacaggattacagtg

SEQ ID NO: 377478 - DNA, 33 bp, Homo sapien
gagagggacagataaatatacaggattacagtg

SEQ ID NO: 377479 - DNA, 33 bp, Homo sapien
ggataccagctgatacacccttttttaaggcac

SEQ ID NO: 377480 - DNA, 33 bp, Homo sapien
ggataccagctgatacgcccttttttaaggcac

SEQ ID NO: 377481 - DNA, 33 bp, Homo sapien
ggaggtgccagcttacacattttgttaccctgt

SEQ ID NO: 377482 - DNA, 33 bp, Homo sapien
ggaggtgccagcttacgcattttgttaccctgt

SEQ ID NO: 377483 - DNA, 33 bp, Homo sapien
aattggtgatagtgcactaggttacatttatgg

SEQ ID NO: 377484 - DNA, 33 bp, Homo sapien
aattggtgatagtgcagtaggttacatttatgg

SEQ ID NO: 377485 - DNA, 33 bp, Homo sapien
tttcaaataggtaaacagggtacagagacatga

SEQ ID NO: 377486 - DNA, 33 bp, Homo sapien
tttcaaataggtaaacggggtacagagacatga

SEQ ID NO: 377487 - DNA, 33 bp, Homo sapien
atgcagtacctcatcccatccaaagattgagag

SEQ ID NO: 377488 - DNA, 33 bp, Homo sapien
atgcagtacctcatcctatccaaagattgagag

SEQ ID NO: 377489 - DNA, 33 bp, Homo sapien
ttacatggcaatgtcaagatgatctggtttagt

SEQ ID NO: 377490 - DNA, 33 bp, Homo sapien
ttacatggcaatgtcaggatgatctggtttagt

SEQ ID NO: 377491 - DNA, 33 bp, Homo sapien
tacataaaactactaaaagaattggagggggag

SEQ ID NO: 377492 - DNA, 33 bp, Homo sapien
tacataaaactactaagagaattggagggggag

SEQ ID NO: 377493 - DNA, 33 bp, Homo sapien
ggtggaaacatgtttgaatagaagtccagaggc

SEQ ID NO: 377494 - DNA, 33 bp, Homo sapien
ggtggaaacatgtttgtatagaagtccagaggc

SEQ ID NO: 377495 - DNA, 33 bp, Homo sapien
caccagtatctctttaacattgatcttaccaaa

SEQ ID NO: 377496 - DNA, 33 bp, Homo sapien
caccagtatctctttatcattgatcttaccaaa

SEQ ID NO: 377497 - DNA, 33 bp, Homo sapien
cctgcgttgctccgtacagcccagtaattctca

SEQ ID NO: 377498 - DNA, 33 bp, Homo sapien
cctgcgttgctccgtatagcccagtaattctca

SEQ ID NO: 377499 - DNA, 33 bp, Homo sapien
tgtcactcttgttaccagcatttccagcacaaa

SEQ ID NO: 377500 - DNA, 33 bp, Homo sapien
tgtcactcttgttaccggcatttccagcacaaa

SEQ ID NO: 377501 - DNA, 33 bp, Homo sapien
ctaagggcaacaaagaaaggtactaagaccaag

SEQ ID NO: 377502 - DNA, 33 bp, Homo sapien
ctaagggcaacaaagataggtactaagaccaag

SEQ ID NO: 377503 - DNA, 33 bp, Homo sapien
ctatacaccacccgtcaactaaagaagcaagaa

SEQ ID NO: 377504 - DNA, 33 bp, Homo sapien
ctatacaccacccgtcgactaaagaagcaagaa

SEQ ID NO: 377505 - DNA, 33 bp, Homo sapien
gaaaaaaatctaactccaattgcatgaaattat

SEQ ID NO: 377506 - DNA, 33 bp, Homo sapien
gaaaaaaatctaactctaattgcatgaaattat

SEQ ID NO: 377507 - DNA, 33 bp, Homo sapien
ttatgcagcatctcacaagttaatgtgttcata

SEQ ID NO: 377508 - DNA, 33 bp, Homo sapien
ttatgcagcatctcacgagttaatgtgttcata

SEQ ID NO: 377509 - DNA, 33 bp, Homo sapien
aaatggaatcaaatgaatcagactttttacatc

SEQ ID NO: 377510 - DNA, 33 bp, Homo sapien
aaatggaatcaaatgagtcagactttttacatc

SEQ ID NO: 377511 - DNA, 33 bp, Homo sapien
aattttaattaatggagacttgtaccttgtaga

SEQ ID NO: 377512 - DNA, 33 bp, Homo sapien
aattttaattaatggatacttgtaccttgtaga

SEQ ID NO: 377513 - DNA, 33 bp, Homo sapien
atgcaaaaattaggtccactgtgaactccatta

SEQ ID NO: 377514 - DNA, 33 bp, Homo sapien
atgcaaaaattaggtctactgtgaactccatta

SEQ ID NO: 377515 - DNA, 33 bp, Homo sapien
tccacaggagcctcaactctctgagtcgcctct

SEQ ID NO: 377516 - DNA, 33 bp, Homo sapien
tccacaggagcctcaattctctgagtcgcctct

SEQ ID NO: 377517 - DNA, 33 bp, Homo sapien
caccagctggggtcccacttccatcagattgaa

SEQ ID NO: 377518 - DNA, 33 bp, Homo sapien
caccagctggggtcccgcttccatcagattgaa

SEQ ID NO: 377519 - DNA, 33 bp, Homo sapien
tgaaagccaaactcaccaggtgaaatgcaacaa

SEQ ID NO: 377520 - DNA, 33 bp, Homo sapien
tgaaagccaaactcactaggtgaaatgcaacaa

SEQ ID NO: 377521 - DNA, 33 bp, Homo sapien
aggctgtagttataccaatctgttactccatga

SEQ ID NO: 377522 - DNA, 33 bp, Homo sapien
aggctgtagttatacctatctgttactccatga

SEQ ID NO: 377523 - DNA, 33 bp, Homo sapien
gaggcactgctgtgtaagtggtattgttattac

SEQ ID NO: 377524 - DNA, 33 bp, Homo sapien
gaggcactgctgtgtacgtggtattgttattac

SEQ ID NO: 377525 - DNA, 33 bp, Homo sapien
agtttttcctgaaaaaattctctgctgttacta

SEQ ID NO: 377526 - DNA, 33 bp, Homo sapien
agtttttcctgaaaaatttctctgctgttacta

SEQ ID NO: 377527 - DNA, 33 bp, Homo sapien
ggtctggattccttcacagttgatgaccacctc

SEQ ID NO: 377528 - DNA, 33 bp, Homo sapien
ggtctggattccttcatagttgatgaccacctc

SEQ ID NO: 377529 - DNA, 33 bp, Homo sapien
cagtatcactattcagaaaaaggaaagctcaat

SEQ ID NO: 377530 - DNA, 33 bp, Homo sapien
cagtatcactattcagtaaaaggaaagctcaat

SEQ ID NO: 377531 - DNA, 33 bp, Homo sapien
aataactgaaggattacagagaccaaaaacaaa

SEQ ID NO: 377532 - DNA, 33 bp, Homo sapien
aataactgaaggattatagagaccaaaaacaaa

SEQ ID NO: 377533 - DNA, 33 bp, Homo sapien
aacaacaacaaaacctcagagaattaattgcca

SEQ ID NO: 377534 - DNA, 33 bp, Homo sapien
aacaacaacaaaacctgagagaattaattgcca

SEQ ID NO: 377535 - DNA, 33 bp, Homo sapien
tcaaaggggcccattagccaatgtccagattct

SEQ ID NO: 377536 - DNA, 33 bp, Homo sapien
tcaaaggggcccattatccaatgtccagattct

SEQ ID NO: 377537 - DNA, 33 bp, Homo sapien
caaggtgtctttctcaagttaagcactgtactt

SEQ ID NO: 377538 - DNA, 33 bp, Homo sapien
caaggtgtctttctcaggttaagcactgtactt

SEQ ID NO: 377539 - DNA, 33 bp, Homo sapien
tgagctaaagtattacagaaaggaaacaggtta

SEQ ID NO: 377540 - DNA, 33 bp, Homo sapien
tgagctaaagtattacggaaaggaaacaggtta

SEQ ID NO: 377541 - DNA, 33 bp, Homo sapien
agacagacattcctacacacatctcttactctg

SEQ ID NO: 377542 - DNA, 33 bp, Homo sapien
agacagacattcctacgcacatctcttactctg

SEQ ID NO: 377543 - DNA, 33 bp, Homo sapien
aatatccaggtggttccctgaggacacaggttg

SEQ ID NO: 377544 - DNA, 33 bp, Homo sapien
aatatccaggtggttctctgaggacacaggttg

SEQ ID NO: 377545 - DNA, 33 bp, Homo sapien
gttaatgataatgatcgcactcaagcttcagga

SEQ ID NO: 377546 - DNA, 33 bp, Homo sapien
gttaatgataatgatctcactcaagcttcagga

SEQ ID NO: 377547 - DNA, 33 bp, Homo sapien
gaaacctaatcttcaaatctattcccagagctc

SEQ ID NO: 377548 - DNA, 33 bp, Homo sapien
gaaacctaatcttcaagtctattcccagagctc

SEQ ID NO: 377549 - DNA, 33 bp, Homo sapien
tcgtggtctacggttccagagatgtcctttctg

SEQ ID NO: 377550 - DNA, 33 bp, Homo sapien
tcgtggtctacggttctagagatgtcctttctg

SEQ ID NO: 377551 - DNA, 33 bp, Homo sapien
ggtgcactgtgaaagccgaggaaatcaggagat

SEQ ID NO: 377552 - DNA, 33 bp, Homo sapien
ggtgcactgtgaaagctgaggaaatcaggagat

SEQ ID NO: 377553 - DNA, 33 bp, Homo sapien
cagtgagatcaacacccctttggatggtgaaca

SEQ ID NO: 377554 - DNA, 33 bp, Homo sapien
cagtgagatcaacacctctttggatggtgaaca

SEQ ID NO: 377555 - DNA, 33 bp, Homo sapien
cttaccagttattcaaaagagaccaactttgcc

SEQ ID NO: 377556 - DNA, 33 bp, Homo sapien
cttaccagttattcaagagagaccaactttgcc

SEQ ID NO: 377557 - DNA, 33 bp, Homo sapien
gagtataaatagctagaaacacaaacaacggat

SEQ ID NO: 377558 - DNA, 33 bp, Homo sapien
gagtataaatagctaggaacacaaacaacggat

SEQ ID NO: 377559 - DNA, 33 bp, Homo sapien
ttagggactgaaatacactaccgtcgttgcagc

SEQ ID NO: 377560 - DNA, 33 bp, Homo sapien
ttagggactgaaatacgctaccgtcgttgcagc

SEQ ID NO: 377561 - DNA, 33 bp, Homo sapien
tagtaagttatcaggagacaatcaagctcattg

SEQ ID NO: 377562 - DNA, 33 bp, Homo sapien
tagtaagttatcaggatacaatcaagctcattg

SEQ ID NO: 377563 - DNA, 33 bp, Homo sapien
ccaaccagggactgtacgagctgaggttcacat

SEQ ID NO: 377564 - DNA, 33 bp, Homo sapien
ccaaccagggactgtatgagctgaggttcacat

SEQ ID NO: 377565 - DNA, 33 bp, Homo sapien
agaagagtggggtggaagctgaatttattcccc

SEQ ID NO: 377566 - DNA, 33 bp, Homo sapien
agaagagtggggtggaggctgaatttattcccc

SEQ ID NO: 377567 - DNA, 33 bp, Homo sapien
gaaaaggtaggaagcacagatgaacttcaattg

SEQ ID NO: 377568 - DNA, 33 bp, Homo sapien
gaaaaggtaggaagcatagatgaacttcaattg

SEQ ID NO: 377569 - DNA, 33 bp, Homo sapien
ctttcagcataaccaactaagttcttaccaggc

SEQ ID NO: 377570 - DNA, 33 bp, Homo sapien
ctttcagcataaccaagtaagttcttaccaggc

SEQ ID NO: 377571 - DNA, 33 bp, Homo sapien
agtgagttcatgtttgcataaatgctccaaaga

SEQ ID NO: 377572 - DNA, 33 bp, Homo sapien
agtgagttcatgtttgtataaatgctccaaaga

SEQ ID NO: 377573 - DNA, 33 bp, Homo sapien
agcctgacctgtaaaacggggctaccaagagca

SEQ ID NO: 377574 - DNA, 33 bp, Homo sapien
agcctgacctgtaaaatggggctaccaagagca

SEQ ID NO: 377575 - DNA, 33 bp, Homo sapien
tggtgactcaaaggaacgcaaaatggggtgatt

SEQ ID NO: 377576 - DNA, 33 bp, Homo sapien
tggtgactcaaaggaatgcaaaatggggtgatt

SEQ ID NO: 377577 - DNA, 33 bp, Homo sapien
ctatcattaatcattacgggaggccaacggttt

SEQ ID NO: 377578 - DNA, 33 bp, Homo sapien
ctatcattaatcattatgggaggccaacggttt

SEQ ID NO: 377579 - DNA, 33 bp, Homo sapien
tatttttgcaacaaccgcactattctatcatta

SEQ ID NO: 377580 - DNA, 33 bp, Homo sapien
tatttttgcaacaacctcactattctatcatta

SEQ ID NO: 377581 - DNA, 33 bp, Homo sapien
aggtgcagctttaaaaattggaacaaagtcagg

SEQ ID NO: 377582 - DNA, 33 bp, Homo sapien
aggtgcagctttaaaacttggaacaaagtcagg

SEQ ID NO: 377583 - DNA, 33 bp, Homo sapien
gaagtctcagctggcgcattaaggcatccgtgc

SEQ ID NO: 377584 - DNA, 33 bp, Homo sapien
gaagtctcagctggcgtattaaggcatccgtgc

SEQ ID NO: 377585 - DNA, 33 bp, Homo sapien
gtggctggtgcagagtaaatcctcaatgcctat

SEQ ID NO: 377586 - DNA, 33 bp, Homo sapien
gtggctggtgcagagtgaatcctcaatgcctat

SEQ ID NO: 377587 - DNA, 33 bp, Homo sapien
gtgttgcctgagtctacgaagataggaaagtct

SEQ ID NO: 377588 - DNA, 33 bp, Homo sapien
gtgttgcctgagtctatgaagataggaaagtct

SEQ ID NO: 377589 - DNA, 33 bp, Homo sapien
aaaggccaggtatcacagggctagatccctctg

SEQ ID NO: 377590 - DNA, 33 bp, Homo sapien
aaaggccaggtatcacggggctagatccctctg

SEQ ID NO: 377591 - DNA, 33 bp, Homo sapien
ttaccaggttgttttgatacttaagtgtgataa

SEQ ID NO: 377592 - DNA, 33 bp, Homo sapien
ttaccaggttgttttggtacttaagtgtgataa

SEQ ID NO: 377593 - DNA, 33 bp, Homo sapien
gtgataatgtgttagaaatattcagcaaacagt

SEQ ID NO: 377594 - DNA, 33 bp, Homo sapien
gtgataatgtgttagagatattcagcaaacagt

SEQ ID NO: 377595 - DNA, 33 bp, Homo sapien
tatccctgattcctgcacaaagtctggtgtccc

SEQ ID NO: 377596 - DNA, 33 bp, Homo sapien
tatccctgattcctgcccaaagtctggtgtccc

SEQ ID NO: 377597 - DNA, 33 bp, Homo sapien
acactgacagtgagtcaatatctcagctgatat

SEQ ID NO: 377598 - DNA, 33 bp, Homo sapien
acactgacagtgagtccatatctcagctgatat

SEQ ID NO: 377599 - DNA, 33 bp, Homo sapien
aagggtacatatcaacaaagactgacaaactca

SEQ ID NO: 377600 - DNA, 33 bp, Homo sapien
aagggtacatatcaacgaagactgacaaactca

SEQ ID NO: 377601 - DNA, 33 bp, Homo sapien
tcagaggacagatcccaagatttaaaaccacct

SEQ ID NO: 377602 - DNA, 33 bp, Homo sapien
tcagaggacagatcccgagatttaaaaccacct

SEQ ID NO: 377603 - DNA, 33 bp, Homo sapien
tctctgtgccttaagacgatgcagctccatttc

SEQ ID NO: 377604 - DNA, 33 bp, Homo sapien
tctctgtgccttaagatgatgcagctccatttc

SEQ ID NO: 377605 - DNA, 33 bp, Homo sapien
gttccttcccagggcaaaccttttcatgtctca

SEQ ID NO: 377606 - DNA, 33 bp, Homo sapien
gttccttcccagggcacaccttttcatgtctca

SEQ ID NO: 377607 - DNA, 33 bp, Homo sapien
tctagctcaggttatacggtttcaagagctgca

SEQ ID NO: 377608 - DNA, 33 bp, Homo sapien
tctagctcaggttatatggtttcaagagctgca

SEQ ID NO: 377609 - DNA, 33 bp, Homo sapien
tgttcctctccacatacgcactgatggaaagga

SEQ ID NO: 377610 - DNA, 33 bp, Homo sapien
tgttcctctccacatatgcactgatggaaagga

SEQ ID NO: 377611 - DNA, 33 bp, Homo sapien
acaaagacattttccaccctatttcttaactat

SEQ ID NO: 377612 - DNA, 33 bp, Homo sapien
acaaagacattttccatcctatttcttaactat

SEQ ID NO: 377613 - DNA, 33 bp, Homo sapien
tataagagctacttcaatcaatatgcagtaaga

SEQ ID NO: 377614 - DNA, 33 bp, Homo sapien
tataagagctacttcagtcaatatgcagtaaga

SEQ ID NO: 377615 - DNA, 33 bp, Homo sapien
tctctccttgagaggccatgcggcaacgtgctc

SEQ ID NO: 377616 - DNA, 33 bp, Homo sapien
tctctccttgagaggctatgcggcaacgtgctc

SEQ ID NO: 377617 - DNA, 33 bp, Homo sapien
tcaaacccccacctgacaatagaacgatcaaaa

SEQ ID NO: 377618 - DNA, 33 bp, Homo sapien
tcaaacccccacctgataatagaacgatcaaaa

SEQ ID NO: 377619 - DNA, 33 bp, Homo sapien
cctgaagtctcttccacaacccagctcctctga

SEQ ID NO: 377620 - DNA, 33 bp, Homo sapien
cctgaagtctcttccataacccagctcctctga

SEQ ID NO: 377621 - DNA, 33 bp, Homo sapien
caatattgtcatgaaacaaaggagcagctggat

SEQ ID NO: 377622 - DNA, 33 bp, Homo sapien
caatattgtcatgaaagaaaggagcagctggat

SEQ ID NO: 377623 - DNA, 33 bp, Homo sapien
cagactggcatctgcacgataacccaagagcta

SEQ ID NO: 377624 - DNA, 33 bp, Homo sapien
cagactggcatctgcatgataacccaagagcta

SEQ ID NO: 377625 - DNA, 33 bp, Homo sapien
gttagttgcaattgtgacaagagaagggcatgg

SEQ ID NO: 377626 - DNA, 33 bp, Homo sapien
gttagttgcaattgtgtcaagagaagggcatgg

SEQ ID NO: 377627 - DNA, 33 bp, Homo sapien
tattgccatggtatccaagggtctgagcaatgg

SEQ ID NO: 377628 - DNA, 33 bp, Homo sapien
tattgccatggtatccgagggtctgagcaatgg

SEQ ID NO: 377629 - DNA, 33 bp, Homo sapien
agagaagatggaaatgaatgtggccaggacttt

SEQ ID NO: 377630 - DNA, 33 bp, Homo sapien
agagaagatggaaatggatgtggccaggacttt

SEQ ID NO: 377631 - DNA, 33 bp, Homo sapien
cctaggtcctgaaatacggaatgaggacatctg

SEQ ID NO: 377632 - DNA, 33 bp, Homo sapien
cctaggtcctgaaatatggaatgaggacatctg

SEQ ID NO: 377633 - DNA, 33 bp, Homo sapien
ttcagacctgccataacatatccacttcagcaa

SEQ ID NO: 377634 - DNA, 33 bp, Homo sapien
ttcagacctgccataatatatccacttcagcaa

SEQ ID NO: 377635 - DNA, 33 bp, Homo sapien
aggagagcagaagggccgactcctcctggagga

SEQ ID NO: 377636 - DNA, 33 bp, Homo sapien
aggagagcagaagggcggactcctcctggagga

SEQ ID NO: 377637 - DNA, 33 bp, Homo sapien
ctttttagctgttaaggagggatgccaatcact

SEQ ID NO: 377638 - DNA, 33 bp, Homo sapien
ctttttagctgttaagtagggatgccaatcact

SEQ ID NO: 377639 - DNA, 33 bp, Homo sapien
gtgcctggcatgttcaaaatgttctgcctgtct

SEQ ID NO: 377640 - DNA, 33 bp, Homo sapien
gtgcctggcatgttcataatgttctgcctgtct

SEQ ID NO: 377641 - DNA, 33 bp, Homo sapien
actgtcttctttcccacagtgcaatcagtccct

SEQ ID NO: 377642 - DNA, 33 bp, Homo sapien
actgtcttctttcccatagtgcaatcagtccct

SEQ ID NO: 377643 - DNA, 33 bp, Homo sapien
tgagagtagatccaccggctgaagatagtggaa

SEQ ID NO: 377644 - DNA, 33 bp, Homo sapien
tgagagtagatccacctgctgaagatagtggaa

SEQ ID NO: 377645 - DNA, 33 bp, Homo sapien
agaggtccttcatgccacacaaagtcccctgag

SEQ ID NO: 377646 - DNA, 33 bp, Homo sapien
agaggtccttcatgccgcacaaagtcccctgag

SEQ ID NO: 377647 - DNA, 33 bp, Homo sapien
cttgttacagaactaacgctatcctaacatata

SEQ ID NO: 377648 - DNA, 33 bp, Homo sapien
cttgttacagaactaatgctatcctaacatata

SEQ ID NO: 377649 - DNA, 33 bp, Homo sapien
agtgaatgatggtgagaaataaactctgactca

SEQ ID NO: 377650 - DNA, 33 bp, Homo sapien
agtgaatgatggtgaggaataaactctgactca

SEQ ID NO: 377651 - DNA, 33 bp, Homo sapien
ttcatggaaatgacccagagagataagacagag

SEQ ID NO: 377652 - DNA, 33 bp, Homo sapien
ttcatggaaatgacccggagagataagacagag

SEQ ID NO: 377653 - DNA, 33 bp, Homo sapien
aagcctaatcctcttacgaaagcccagtattgg

SEQ ID NO: 377654 - DNA, 33 bp, Homo sapien
aagcctaatcctcttatgaaagcccagtattgg

SEQ ID NO: 377655 - DNA, 33 bp, Homo sapien
acataacactgcgaaggcattgcatcagatgag

SEQ ID NO: 377656 - DNA, 33 bp, Homo sapien
acataacactgcgaagtcattgcatcagatgag

SEQ ID NO: 377657 - DNA, 33 bp, Homo sapien
taatgaagtacaatgacgggtggatttcagaca

SEQ ID NO: 377658 - DNA, 33 bp, Homo sapien
taatgaagtacaatgatgggtggatttcagaca

SEQ ID NO: 377659 - DNA, 33 bp, Homo sapien
aattaccatagcttcgcaatctgctccaaacta

SEQ ID NO: 377660 - DNA, 33 bp, Homo sapien
aattaccatagcttcgtaatctgctccaaacta

SEQ ID NO: 377661 - DNA, 33 bp, Homo sapien
gcttcccactgtgggaaacctacaaacgcagtg

SEQ ID NO: 377662 - DNA, 33 bp, Homo sapien
gcttcccactgtgggagacctacaaacgcagtg

SEQ ID NO: 377663 - DNA, 33 bp, Homo sapien
cagccttcctatcaacacagtgaattttccact

SEQ ID NO: 377664 - DNA, 33 bp, Homo sapien
cagccttcctatcaacccagtgaattttccact

SEQ ID NO: 377665 - DNA, 33 bp, Homo sapien
tagagcaaattgaacacagagaatagtgcaaaa

SEQ ID NO: 377666 - DNA, 33 bp, Homo sapien
tagagcaaattgaacagagagaatagtgcaaaa

SEQ ID NO: 377667 - DNA, 33 bp, Homo sapien
tcaggagtagggatcaacaggtgacagaaactc

SEQ ID NO: 377668 - DNA, 33 bp, Homo sapien
tcaggagtagggatcagcaggtgacagaaactc

SEQ ID NO: 377669 - DNA, 33 bp, Homo sapien
agaaaaaataagaccccgaaatctatactcagc

SEQ ID NO: 377670 - DNA, 33 bp, Homo sapien
agaaaaaataagaccctgaaatctatactcagc

SEQ ID NO: 377671 - DNA, 33 bp, Homo sapien
ttcaccagaccttcgaaatgctggggtgagagc

SEQ ID NO: 377672 - DNA, 33 bp, Homo sapien
ttcaccagaccttcgagatgctggggtgagagc

SEQ ID NO: 377673 - DNA, 33 bp, Homo sapien
tttgtgttttgactttaaaaatgtcgtactctg

SEQ ID NO: 377674 - DNA, 33 bp, Homo sapien
tttgtgttttgacttttaaaatgtcgtactctg

SEQ ID NO: 377675 - DNA, 33 bp, Homo sapien
gatgggaggggtttgcagattctcgttttttgg

SEQ ID NO: 377676 - DNA, 33 bp, Homo sapien
gatgggaggggtttgcggattctcgttttttgg

SEQ ID NO: 377677 - DNA, 33 bp, Homo sapien
actggcttggatactcagaagaacgagggaagc

SEQ ID NO: 377678 - DNA, 33 bp, Homo sapien
actggcttggatactcggaagaacgagggaagc

SEQ ID NO: 377679 - DNA, 33 bp, Homo sapien
gcaattaacagagtgaactggagcagtcccctt

SEQ ID NO: 377680 - DNA, 33 bp, Homo sapien
gcaattaacagagtgacctggagcagtcccctt

SEQ ID NO: 377681 - DNA, 33 bp, Homo sapien
acactttcctagcttacgcacacaatgggtcgc

SEQ ID NO: 377682 - DNA, 33 bp, Homo sapien
acactttcctagcttatgcacacaatgggtcgc

SEQ ID NO: 377683 - DNA, 33 bp, Homo sapien
ggcacagtctggcatacagtaagcctacagagt

SEQ ID NO: 377684 - DNA, 33 bp, Homo sapien
ggcacagtctggcatatagtaagcctacagagt

SEQ ID NO: 377685 - DNA, 33 bp, Homo sapien
acagaaagactgatttaaaatacctctgcccat

SEQ ID NO: 377686 - DNA, 33 bp, Homo sapien
acagaaagactgatttcaaatacctctgcccat

SEQ ID NO: 377687 - DNA, 33 bp, Homo sapien
gaaacccatcaaagtaacttaggaaatgaaggc

SEQ ID NO: 377688 - DNA, 33 bp, Homo sapien
gaaacccatcaaagtagcttaggaaatgaaggc

SEQ ID NO: 377689 - DNA, 33 bp, Homo sapien
tcatcgggtcttcccaataacctctaaggtagt

SEQ ID NO: 377690 - DNA, 33 bp, Homo sapien
tcatcgggtcttcccagtaacctctaaggtagt

SEQ ID NO: 377691 - DNA, 33 bp, Homo sapien
aagtcccaagtgttccaaccagcgtaaatgccc

SEQ ID NO: 377692 - DNA, 33 bp, Homo sapien
aagtcccaagtgttccgaccagcgtaaatgccc

SEQ ID NO: 377693 - DNA, 33 bp, Homo sapien
acaatgttcctgttaaaaacgatggctagattt

SEQ ID NO: 377694 - DNA, 33 bp, Homo sapien
acaatgttcctgttaacaacgatggctagattt

SEQ ID NO: 377695 - DNA, 33 bp, Homo sapien
aataatggatttggcacgaactatcctctccaa

SEQ ID NO: 377696 - DNA, 33 bp, Homo sapien
aataatggatttggcatgaactatcctctccaa

SEQ ID NO: 377697 - DNA, 33 bp, Homo sapien
agataattttaaaagagagttctgaggccaaaa

SEQ ID NO: 377698 - DNA, 33 bp, Homo sapien
agataattttaaaagatagttctgaggccaaaa

SEQ ID NO: 377699 - DNA, 33 bp, Homo sapien
cttttgccatttctaacagctctcgatccaaga

SEQ ID NO: 377700 - DNA, 33 bp, Homo sapien
cttttgccatttctaatagctctcgatccaaga

SEQ ID NO: 377701 - DNA, 33 bp, Homo sapien
gtgagagtaggaagaacgcttttgccatttcta

SEQ ID NO: 377702 - DNA, 33 bp, Homo sapien
gtgagagtaggaagaatgcttttgccatttcta

SEQ ID NO: 377703 - DNA, 33 bp, Homo sapien
tatttagatagatgtactaatagttggtcttct

SEQ ID NO: 377704 - DNA, 33 bp, Homo sapien
tatttagatagatgtattaatagttggtcttct

SEQ ID NO: 377705 - DNA, 33 bp, Homo sapien
gcagccttgacagataccaaacctctttagcct

SEQ ID NO: 377706 - DNA, 33 bp, Homo sapien
gcagccttgacagatatcaaacctctttagcct

SEQ ID NO: 377707 - DNA, 33 bp, Homo sapien
aaaaatcttaaaagcacctgaggatacacacac

SEQ ID NO: 377708 - DNA, 33 bp, Homo sapien
aaaaatcttaaaagcatctgaggatacacacac

SEQ ID NO: 377709 - DNA, 33 bp, Homo sapien
tccccagttctcaatccgaggaatgtcaaaatt

SEQ ID NO: 377710 - DNA, 33 bp, Homo sapien
tccccagttctcaatctgaggaatgtcaaaatt

SEQ ID NO: 377711 - DNA, 33 bp, Homo sapien
gaatacacaaaattagaaggtattatattgccc

SEQ ID NO: 377712 - DNA, 33 bp, Homo sapien
gaatacacaaaattaggaggtattatattgccc

SEQ ID NO: 377713 - DNA, 33 bp, Homo sapien
ttcatataattcaaacaaaatctcattgagatt

SEQ ID NO: 377714 - DNA, 33 bp, Homo sapien
ttcatataattcaaaccaaatctcattgagatt

SEQ ID NO: 377715 - DNA, 33 bp, Homo sapien
gatccttgtcggtgtcaagtttacacgttcttc

SEQ ID NO: 377716 - DNA, 33 bp, Homo sapien
gatccttgtcggtgtcgagtttacacgttcttc

SEQ ID NO: 377717 - DNA, 33 bp, Homo sapien
tacacattttttttgaacatggatgagtatttt

SEQ ID NO: 377718 - DNA, 33 bp, Homo sapien
tacacattttttttgagcatggatgagtatttt

SEQ ID NO: 377719 - DNA, 33 bp, Homo sapien
atctgggtccaagtcgccatccttctttctgat

SEQ ID NO: 377720 - DNA, 33 bp, Homo sapien
atctgggtccaagtcgtcatccttctttctgat

SEQ ID NO: 377721 - DNA, 33 bp, Homo sapien
ccccacagtagcgcaacgctagataggggcgga

SEQ ID NO: 377722 - DNA, 33 bp, Homo sapien
ccccacagtagcgcaatgctagataggggcgga

SEQ ID NO: 377723 - DNA, 33 bp, Homo sapien
ctgacaggtccgattcaatgacacactaactcc

SEQ ID NO: 377724 - DNA, 33 bp, Homo sapien
ctgacaggtccgattcgatgacacactaactcc

SEQ ID NO: 377725 - DNA, 33 bp, Homo sapien
cgcccttcactcctggcagaaagtgccaatctc

SEQ ID NO: 377726 - DNA, 33 bp, Homo sapien
cgcccttcactcctggtagaaagtgccaatctc

SEQ ID NO: 377727 - DNA, 33 bp, Homo sapien
caccatatcaagcacccacaatgaatgccactg

SEQ ID NO: 377728 - DNA, 33 bp, Homo sapien
caccatatcaagcaccgacaatgaatgccactg

SEQ ID NO: 377729 - DNA, 33 bp, Homo sapien
catgtcctgcatcctccccgttgttaaacaaaa

SEQ ID NO: 377730 - DNA, 33 bp, Homo sapien
catgtcctgcatcctctccgttgttaaacaaaa

SEQ ID NO: 377731 - DNA, 33 bp, Homo sapien
acattttctacgtgaccgcttgccggaacctaa

SEQ ID NO: 377732 - DNA, 33 bp, Homo sapien
acattttctacgtgactgcttgccggaacctaa

SEQ ID NO: 377733 - DNA, 33 bp, Homo sapien
aataattgactggaagaaaaacctggctgtctc

SEQ ID NO: 377734 - DNA, 33 bp, Homo sapien
aataattgactggaaggaaaacctggctgtctc

SEQ ID NO: 377735 - DNA, 33 bp, Homo sapien
ggctcaactttctaaaacaggacttctcaaacc

SEQ ID NO: 377736 - DNA, 33 bp, Homo sapien
ggctcaactttctaaatcaggacttctcaaacc

SEQ ID NO: 377737 - DNA, 33 bp, Homo sapien
tatgatggatagaggcaagagggccagtaggct

SEQ ID NO: 377738 - DNA, 33 bp, Homo sapien
tatgatggatagaggcgagagggccagtaggct

SEQ ID NO: 377739 - DNA, 33 bp, Homo sapien
cccacaattgaacttgcaggaggagtctgacct

SEQ ID NO: 377740 - DNA, 33 bp, Homo sapien
cccacaattgaacttgtaggaggagtctgacct

SEQ ID NO: 377741 - DNA, 33 bp, Homo sapien
tcaagtctaggggtgacagaattttgtgaattt

SEQ ID NO: 377742 - DNA, 33 bp, Homo sapien
tcaagtctaggggtgagagaattttgtgaattt

SEQ ID NO: 377743 - DNA, 33 bp, Homo sapien
tctaacaaggtcagaccgattcagctaaagatc

SEQ ID NO: 377744 - DNA, 33 bp, Homo sapien
tctaacaaggtcagactgattcagctaaagatc

SEQ ID NO: 377745 - DNA, 33 bp, Homo sapien
tgtgggatccaatgaccgctctaatttcctact

SEQ ID NO: 377746 - DNA, 33 bp, Homo sapien
tgtgggatccaatgactgctctaatttcctact

SEQ ID NO: 377747 - DNA, 33 bp, Homo sapien
tgtctgacagcgaccaacctatcagcgttaagt

SEQ ID NO: 377748 - DNA, 33 bp, Homo sapien
tgtctgacagcgaccagcctatcagcgttaagt

SEQ ID NO: 377749 - DNA, 33 bp, Homo sapien
cccaggctccctgtgaaaatccaaataagacct

SEQ ID NO: 377750 - DNA, 33 bp, Homo sapien
cccaggctccctgtgagaatccaaataagacct

SEQ ID NO: 377751 - DNA, 33 bp, Homo sapien
aagcattacatggcaaagatgatagaaacaggc

SEQ ID NO: 377752 - DNA, 33 bp, Homo sapien
aagcattacatggcaaggatgatagaaacaggc

SEQ ID NO: 377753 - DNA, 33 bp, Homo sapien
cttgttggaattaaaaacagttgggcttgctga

SEQ ID NO: 377754 - DNA, 33 bp, Homo sapien
cttgttggaattaaaagcagttgggcttgctga

SEQ ID NO: 377755 - DNA, 33 bp, Homo sapien
aagagttgatgtaatgaaccctcctggccccaa

SEQ ID NO: 377756 - DNA, 33 bp, Homo sapien
aagagttgatgtaatggaccctcctggccccaa

SEQ ID NO: 377757 - DNA, 33 bp, Homo sapien
agaggtccttaatcaaagcaccggataggatat

SEQ ID NO: 377758 - DNA, 33 bp, Homo sapien
agaggtccttaatcaacgcaccggataggatat

SEQ ID NO: 377759 - DNA, 33 bp, Homo sapien
tgaactggtcaggtaccgattcatctatgatat

SEQ ID NO: 377760 - DNA, 33 bp, Homo sapien
tgaactggtcaggtactgattcatctatgatat

SEQ ID NO: 377761 - DNA, 33 bp, Homo sapien
ttcccaagagtgcggacgcctaactcactggta

SEQ ID NO: 377762 - DNA, 33 bp, Homo sapien
ttcccaagagtgcggatgcctaactcactggta

SEQ ID NO: 377763 - DNA, 33 bp, Homo sapien
tattcttgctcactgccagaaataataaagcaa

SEQ ID NO: 377764 - DNA, 33 bp, Homo sapien
tattcttgctcactgctagaaataataaagcaa

SEQ ID NO: 377765 - DNA, 33 bp, Homo sapien
gttatctgcttttgaaccttaataactaaagca

SEQ ID NO: 377766 - DNA, 33 bp, Homo sapien
gttatctgcttttgaatcttaataactaaagca

SEQ ID NO: 377767 - DNA, 33 bp, Homo sapien
actggaggtaaaaaggcacacagtggcttggtt

SEQ ID NO: 377768 - DNA, 33 bp, Homo sapien
actggaggtaaaaaggtacacagtggcttggtt

SEQ ID NO: 377769 - DNA, 33 bp, Homo sapien
agctgaaatatcatcagctccaagaagctttca

SEQ ID NO: 377770 - DNA, 33 bp, Homo sapien
agctgaaatatcatcatctccaagaagctttca

SEQ ID NO: 377771 - DNA, 33 bp, Homo sapien
caaatttgtcctttctcacttaggcactgtggt

SEQ ID NO: 377772 - DNA, 33 bp, Homo sapien
caaatttgtcctttctgacttaggcactgtggt

SEQ ID NO: 377773 - DNA, 33 bp, Homo sapien
tctgcctgttagttcacaaataaatgggacact

SEQ ID NO: 377774 - DNA, 33 bp, Homo sapien
tctgcctgttagttcataaataaatgggacact

SEQ ID NO: 377775 - DNA, 33 bp, Homo sapien
ttatgctaatcagttacgtgacctgagccagtg

SEQ ID NO: 377776 - DNA, 33 bp, Homo sapien
ttatgctaatcagttatgtgacctgagccagtg

SEQ ID NO: 377777 - DNA, 33 bp, Homo sapien
accaatgcctttggacactctgctgatatttta

SEQ ID NO: 377778 - DNA, 33 bp, Homo sapien
accaatgcctttggacgctctgctgatatttta

SEQ ID NO: 377779 - DNA, 33 bp, Homo sapien
cagatcatcctggaataacttatctaacaccat

SEQ ID NO: 377780 - DNA, 33 bp, Homo sapien
cagatcatcctggaatcacttatctaacaccat

SEQ ID NO: 377781 - DNA, 33 bp, Homo sapien
catggcctagacaatcaagaaagggagccatgg

SEQ ID NO: 377782 - DNA, 33 bp, Homo sapien
catggcctagacaatccagaaagggagccatgg

SEQ ID NO: 377783 - DNA, 33 bp, Homo sapien
aagcacctgagtagtaacatgtaccgtggtgtg

SEQ ID NO: 377784 - DNA, 33 bp, Homo sapien
aagcacctgagtagtagcatgtaccgtggtgtg

SEQ ID NO: 377785 - DNA, 33 bp, Homo sapien
aaattttggttgatagcaagagttggagagttg

SEQ ID NO: 377786 - DNA, 33 bp, Homo sapien
aaattttggttgatagtaagagttggagagttg

SEQ ID NO: 377787 - DNA, 33 bp, Homo sapien
gtcagaagaagccttgcaactttcatctcgacc

SEQ ID NO: 377788 - DNA, 33 bp, Homo sapien
gtcagaagaagccttgtaactttcatctcgacc

SEQ ID NO: 377789 - DNA, 33 bp, Homo sapien
aacagattcttggtgaaggaggaggacatttct

SEQ ID NO: 377790 - DNA, 33 bp, Homo sapien
aacagattcttggtgagggaggaggacatttct

SEQ ID NO: 377791 - DNA, 33 bp, Homo sapien
gacttcaccattttcaacacataacttccaaag

SEQ ID NO: 377792 - DNA, 33 bp, Homo sapien
gacttcaccattttcagcacataacttccaaag

SEQ ID NO: 377793 - DNA, 33 bp, Homo sapien
gtaattgggactgcaaacgtataccaccacacc

SEQ ID NO: 377794 - DNA, 33 bp, Homo sapien
gtaattgggactgcaagcgtataccaccacacc

SEQ ID NO: 377795 - DNA, 33 bp, Homo sapien
aagtaggtagagggaaagaggacacgtttgatg

SEQ ID NO: 377796 - DNA, 33 bp, Homo sapien
aagtaggtagagggaaggaggacacgtttgatg

SEQ ID NO: 377797 - DNA, 33 bp, Homo sapien
cccacatcaagggcagacattcaaaaagagtct

SEQ ID NO: 377798 - DNA, 33 bp, Homo sapien
cccacatcaagggcaggcattcaaaaagagtct

SEQ ID NO: 377799 - DNA, 33 bp, Homo sapien
tgttggttcgagctagaccttttaagaaaaaga

SEQ ID NO: 377800 - DNA, 33 bp, Homo sapien
tgttggttcgagctagcccttttaagaaaaaga

SEQ ID NO: 377801 - DNA, 33 bp, Homo sapien
aagaaaaagatggtaaatgaaaggccttcctct

SEQ ID NO: 377802 - DNA, 33 bp, Homo sapien
aagaaaaagatggtaagtgaaaggccttcctct

SEQ ID NO: 377803 - DNA, 33 bp, Homo sapien
attttttttaatgagccagaaatcagattagag

SEQ ID NO: 377804 - DNA, 33 bp, Homo sapien
attttttttaatgagctagaaatcagattagag

SEQ ID NO: 377805 - DNA, 33 bp, Homo sapien
aggagaagaaaagtaccatcaactgcaaatgaa

SEQ ID NO: 377806 - DNA, 33 bp, Homo sapien
aggagaagaaaagtactatcaactgcaaatgaa

SEQ ID NO: 377807 - DNA, 33 bp, Homo sapien
attactggagacttcaacttgtcgactttttgc

SEQ ID NO: 377808 - DNA, 33 bp, Homo sapien
attactggagacttcagcttgtcgactttttgc

SEQ ID NO: 377809 - DNA, 33 bp, Homo sapien
gtgcttgtctaagttcaactaatatgtcccaga

SEQ ID NO: 377810 - DNA, 33 bp, Homo sapien
gtgcttgtctaagttccactaatatgtcccaga

SEQ ID NO: 377811 - DNA, 33 bp, Homo sapien
gcttttgggtactgaacgtagatgttgcgctta

SEQ ID NO: 377812 - DNA, 33 bp, Homo sapien
gcttttgggtactgaatgtagatgttgcgctta

SEQ ID NO: 377813 - DNA, 33 bp, Homo sapien
atagggagttgattgacccacatcactaaaaag

SEQ ID NO: 377814 - DNA, 33 bp, Homo sapien
atagggagttgattgatccacatcactaaaaag

SEQ ID NO: 377815 - DNA, 33 bp, Homo sapien
tcacagctaaggggggcattggcactgcaatga

SEQ ID NO: 377816 - DNA, 33 bp, Homo sapien
tcacagctaaggggggtattggcactgcaatga

SEQ ID NO: 377817 - DNA, 33 bp, Homo sapien
ggaacagttgatgaaacacagggggtgacttca

SEQ ID NO: 377818 - DNA, 33 bp, Homo sapien
ggaacagttgatgaaatacagggggtgacttca

SEQ ID NO: 377819 - DNA, 33 bp, Homo sapien
tgaattataaaatctaactctaaaaggtcttca

SEQ ID NO: 377820 - DNA, 33 bp, Homo sapien
tgaattataaaatctagctctaaaaggtcttca

SEQ ID NO: 377821 - DNA, 33 bp, Homo sapien
atatacctactaaggacgaaaacatggggccag

SEQ ID NO: 377822 - DNA, 33 bp, Homo sapien
atatacctactaaggatgaaaacatggggccag

SEQ ID NO: 377823 - DNA, 33 bp, Homo sapien
gttatataagaaccgcagagggacccatagttt

SEQ ID NO: 377824 - DNA, 33 bp, Homo sapien
gttatataagaaccgcggagggacccatagttt

SEQ ID NO: 377825 - DNA, 33 bp, Homo sapien
aaagtccttttggtgaccgagtctgggctggtg

SEQ ID NO: 377826 - DNA, 33 bp, Homo sapien
aaagtccttttggtgatcgagtctgggctggtg

SEQ ID NO: 377827 - DNA, 33 bp, Homo sapien
gaaaagtgagatggaaagtcttcgggcaaggat

SEQ ID NO: 377828 - DNA, 33 bp, Homo sapien
gaaaagtgagatggaaggtcttcgggcaaggat

SEQ ID NO: 377829 - DNA, 33 bp, Homo sapien
actttatttagaaacacggtcattgctcatgag

SEQ ID NO: 377830 - DNA, 33 bp, Homo sapien
actttatttagaaacagggtcattgctcatgag

SEQ ID NO: 377831 - DNA, 33 bp, Homo sapien
tgtaccaggagcaaacactgactccagattttt

SEQ ID NO: 377832 - DNA, 33 bp, Homo sapien
tgtaccaggagcaaactctgactccagattttt

SEQ ID NO: 377833 - DNA, 33 bp, Homo sapien
gatgtcttcaaacataccaggcacatctttact

SEQ ID NO: 377834 - DNA, 33 bp, Homo sapien
gatgtcttcaaacatagcaggcacatctttact

SEQ ID NO: 377835 - DNA, 33 bp, Homo sapien
agatgttcagttgaacacatagtaacatacacc

SEQ ID NO: 377836 - DNA, 33 bp, Homo sapien
agatgttcagttgaactcatagtaacatacacc

SEQ ID NO: 377837 - DNA, 33 bp, Homo sapien
atgggcacctttctgaagttgtaggtagatatg

SEQ ID NO: 377838 - DNA, 33 bp, Homo sapien
atgggcacctttctgaggttgtaggtagatatg

SEQ ID NO: 377839 - DNA, 33 bp, Homo sapien
tctggcaaatgatataagagggctttttaccaa

SEQ ID NO: 377840 - DNA, 33 bp, Homo sapien
tctggcaaatgatataggagggctttttaccaa

SEQ ID NO: 377841 - DNA, 33 bp, Homo sapien
ccagatgagaagaggaggtgggaagacacttcc

SEQ ID NO: 377842 - DNA, 33 bp, Homo sapien
ccagatgagaagaggatgtgggaagacacttcc

SEQ ID NO: 377843 - DNA, 33 bp, Homo sapien
tgttttagaaagaacaccttttgctttacatct

SEQ ID NO: 377844 - DNA, 33 bp, Homo sapien
tgttttagaaagaacagcttttgctttacatct

SEQ ID NO: 377845 - DNA, 33 bp, Homo sapien
gctattgtgtctttaacgcctaacaagtactaa

SEQ ID NO: 377846 - DNA, 33 bp, Homo sapien
gctattgtgtctttaatgcctaacaagtactaa

SEQ ID NO: 377847 - DNA, 33 bp, Homo sapien
agaggaatatgaagaccatatccccacattagc

SEQ ID NO: 377848 - DNA, 33 bp, Homo sapien
agaggaatatgaagactatatccccacattagc

SEQ ID NO: 377849 - DNA, 33 bp, Homo sapien
ggcctcctgattttaaaggattgcttttcctga

SEQ ID NO: 377850 - DNA, 33 bp, Homo sapien
ggcctcctgattttaagggattgcttttcctga

SEQ ID NO: 377851 - DNA, 33 bp, Homo sapien
tggaattcttagcttgaatgggaaaaaaaaatg

SEQ ID NO: 377852 - DNA, 33 bp, Homo sapien
tggaattcttagcttggatgggaaaaaaaaatg

SEQ ID NO: 377853 - DNA, 33 bp, Homo sapien
ctgccttgacattctacgactttaaaatcaaag

SEQ ID NO: 377854 - DNA, 33 bp, Homo sapien
ctgccttgacattctatgactttaaaatcaaag

SEQ ID NO: 377855 - DNA, 33 bp, Homo sapien
tgtacagtcagcataacggttaagaacaccaac

SEQ ID NO: 377856 - DNA, 33 bp, Homo sapien
tgtacagtcagcataatggttaagaacaccaac

SEQ ID NO: 377857 - DNA, 33 bp, Homo sapien
ccatctttaaaaattgaactaacacttatcaag

SEQ ID NO: 377858 - DNA, 33 bp, Homo sapien
ccatctttaaaaattgcactaacacttatcaag

SEQ ID NO: 377859 - DNA, 33 bp, Homo sapien
ctgcacattattttgaagacaggtgttgagagc

SEQ ID NO: 377860 - DNA, 33 bp, Homo sapien
ctgcacattattttgaggacaggtgttgagagc

SEQ ID NO: 377861 - DNA, 33 bp, Homo sapien
ccttttcacataaaaaatccgagggtcaaacac

SEQ ID NO: 377862 - DNA, 33 bp, Homo sapien
ccttttcacataaaaagtccgagggtcaaacac

SEQ ID NO: 377863 - DNA, 33 bp, Homo sapien
gacaatgaaactaagaaaggaggtgagatttgg

SEQ ID NO: 377864 - DNA, 33 bp, Homo sapien
gacaatgaaactaagagaggaggtgagatttgg

SEQ ID NO: 377865 - DNA, 33 bp, Homo sapien
ggaagagagtaattcagagtatgagaaataata

SEQ ID NO: 377866 - DNA, 33 bp, Homo sapien
ggaagagagtaattcatagtatgagaaataata

SEQ ID NO: 377867 - DNA, 33 bp, Homo sapien
taattataattctccagcacacattactactta

SEQ ID NO: 377868 - DNA, 33 bp, Homo sapien
taattataattctccatcacacattactactta

SEQ ID NO: 377869 - DNA, 33 bp, Homo sapien
gagtgagacattgtagacacaacattgagccac

SEQ ID NO: 377870 - DNA, 33 bp, Homo sapien
gagtgagacattgtaggcacaacattgagccac

SEQ ID NO: 377871 - DNA, 33 bp, Homo sapien
ggcagcaacagctaacggatatagcaactaatt

SEQ ID NO: 377872 - DNA, 33 bp, Homo sapien
ggcagcaacagctaactgatatagcaactaatt

SEQ ID NO: 377873 - DNA, 33 bp, Homo sapien
ctggtcatggctgttacggatgaaatggtgcct

SEQ ID NO: 377874 - DNA, 33 bp, Homo sapien
ctggtcatggctgttatggatgaaatggtgcct

SEQ ID NO: 377875 - DNA, 33 bp, Homo sapien
atttcccatgcaccccaaataaggtctctctat

SEQ ID NO: 377876 - DNA, 33 bp, Homo sapien
atttcccatgcacccccaataaggtctctctat

SEQ ID NO: 377877 - DNA, 33 bp, Homo sapien
cagtaagtactcaccaaagacttttgatctttt

SEQ ID NO: 377878 - DNA, 33 bp, Homo sapien
cagtaagtactcaccagagacttttgatctttt

SEQ ID NO: 377879 - DNA, 33 bp, Homo sapien
gggcctctcctttctccgaccatttgtggtctt

SEQ ID NO: 377880 - DNA, 33 bp, Homo sapien
gggcctctcctttctctgaccatttgtggtctt

SEQ ID NO: 377881 - DNA, 33 bp, Homo sapien
gggatatgtttgttaccgcagcatcttttagtc

SEQ ID NO: 377882 - DNA, 33 bp, Homo sapien
gggatatgtttgttactgcagcatcttttagtc

SEQ ID NO: 377883 - DNA, 33 bp, Homo sapien
ggttgctttcattttacgactttgctagatcaa

SEQ ID NO: 377884 - DNA, 33 bp, Homo sapien
ggttgctttcattttatgactttgctagatcaa

SEQ ID NO: 377885 - DNA, 33 bp, Homo sapien
ccaagatgatgatgagaaaaacctctggtcagc

SEQ ID NO: 377886 - DNA, 33 bp, Homo sapien
ccaagatgatgatgagcaaaacctctggtcagc

SEQ ID NO: 377887 - DNA, 33 bp, Homo sapien
ggggcattggaggtcacgattatgtcttgatca

SEQ ID NO: 377888 - DNA, 33 bp, Homo sapien
ggggcattggaggtcatgattatgtcttgatca

SEQ ID NO: 377889 - DNA, 33 bp, Homo sapien
caagactggtttaataagatagaggtcacaaag

SEQ ID NO: 377890 - DNA, 33 bp, Homo sapien
caagactggtttaatacgatagaggtcacaaag

SEQ ID NO: 377891 - DNA, 33 bp, Homo sapien
gaaactccctaagatgccaagccttcacaaaag

SEQ ID NO: 377892 - DNA, 33 bp, Homo sapien
gaaactccctaagatgtcaagccttcacaaaag

SEQ ID NO: 377893 - DNA, 33 bp, Homo sapien
cccaatgtctcatggccagcaagtatgaaactc

SEQ ID NO: 377894 - DNA, 33 bp, Homo sapien
cccaatgtctcatggctagcaagtatgaaactc

SEQ ID NO: 377895 - DNA, 33 bp, Homo sapien
ggaggatggcatagacactggggatgatgaaga

SEQ ID NO: 377896 - DNA, 33 bp, Homo sapien
ggaggatggcatagacgctggggatgatgaaga

SEQ ID NO: 377897 - DNA, 33 bp, Homo sapien
tccgtgtgaagtatggcaacgccgatggggagt

SEQ ID NO: 377898 - DNA, 33 bp, Homo sapien
tccgtgtgaagtatgggaacgccgatggggagt

SEQ ID NO: 377899 - DNA, 33 bp, Homo sapien
acagctgcactgataccggccgcagcgatggct

SEQ ID NO: 377900 - DNA, 33 bp, Homo sapien
acagctgcactgatactggccgcagcgatggct

SEQ ID NO: 377901 - DNA, 33 bp, Homo sapien
gaagatgtcaaagtaggagcccagagtgtttag

SEQ ID NO: 377902 - DNA, 33 bp, Homo sapien
gaagatgtcaaagtagtagcccagagtgtttag

SEQ ID NO: 377903 - DNA, 33 bp, Homo sapien
cagccaactacgatgacgaccgcaagtggggct

SEQ ID NO: 377904 - DNA, 33 bp, Homo sapien
cagccaactacgatgatgaccgcaagtggggct

SEQ ID NO: 377905 - DNA, 33 bp, Homo sapien
ggccaaaatagtgaaaatggtgcttgagtgatg

SEQ ID NO: 377906 - DNA, 33 bp, Homo sapien
ggccaaaatagtgaaagtggtgcttgagtgatg

SEQ ID NO: 377907 - DNA, 33 bp, Homo sapien
agtctgagtttaatcaccctgcaatactgtcct

SEQ ID NO: 377908 - DNA, 33 bp, Homo sapien
agtctgagtttaatcatcctgcaatactgtcct

SEQ ID NO: 377909 - DNA, 33 bp, Homo sapien
ttcatattttgtccaccgccttcatgttccccc

SEQ ID NO: 377910 - DNA, 33 bp, Homo sapien
ttcatattttgtccactgccttcatgttccccc

SEQ ID NO: 377911 - DNA, 33 bp, Homo sapien
ttttctgtatgtcttacgtctttttaaatttct

SEQ ID NO: 377912 - DNA, 33 bp, Homo sapien
ttttctgtatgtcttaggtctttttaaatttct

SEQ ID NO: 377913 - DNA, 33 bp, Homo sapien
ctcaaaatttttggagaatgcactcacatttga

SEQ ID NO: 377914 - DNA, 33 bp, Homo sapien
ctcaaaatttttggaggatgcactcacatttga

SEQ ID NO: 377915 - DNA, 33 bp, Homo sapien
taggaaaatggtggtaaaatcaatatttagagg

SEQ ID NO: 377916 - DNA, 33 bp, Homo sapien
taggaaaatggtggtacaatcaatatttagagg

SEQ ID NO: 377917 - DNA, 33 bp, Homo sapien
ttcaaatgggtctcaaatgtttgctagttcgta

SEQ ID NO: 377918 - DNA, 33 bp, Homo sapien
ttcaaatgggtctcaagtgtttgctagttcgta

SEQ ID NO: 377919 - DNA, 33 bp, Homo sapien
tgataattgaagatacacaaataacgccaaaca

SEQ ID NO: 377920 - DNA, 33 bp, Homo sapien
tgataattgaagatacgcaaataacgccaaaca

SEQ ID NO: 377921 - DNA, 33 bp, Homo sapien
tgccaaattgaatgatatattttcacatcctga

SEQ ID NO: 377922 - DNA, 33 bp, Homo sapien
tgccaaattgaatgatgtattttcacatcctga

SEQ ID NO: 377923 - DNA, 33 bp, Homo sapien
ggttccgggagatatccagagaaaaaggttctg

SEQ ID NO: 377924 - DNA, 33 bp, Homo sapien
ggttccgggagatatctagagaaaaaggttctg

SEQ ID NO: 377925 - DNA, 33 bp, Homo sapien
aggctccagcttttccactacgtctgctgaggc

SEQ ID NO: 377926 - DNA, 33 bp, Homo sapien
aggctccagcttttccgctacgtctgctgaggc

SEQ ID NO: 377927 - DNA, 33 bp, Homo sapien
gttgaaatggttcatcaaagttaaatgacatac

SEQ ID NO: 377928 - DNA, 33 bp, Homo sapien
gttgaaatggttcatccaagttaaatgacatac

SEQ ID NO: 377929 - DNA, 33 bp, Homo sapien
agctccttcatagacacgatgttaattaataaa

SEQ ID NO: 377930 - DNA, 33 bp, Homo sapien
agctccttcatagacaggatgttaattaataaa

SEQ ID NO: 377931 - DNA, 33 bp, Homo sapien
cacaccaagatggatgcaatctttagccagcct

SEQ ID NO: 377932 - DNA, 33 bp, Homo sapien
cacaccaagatggatggaatctttagccagcct

SEQ ID NO: 377933 - DNA, 33 bp, Homo sapien
acatggtttgatgaccaaaataaccagggcttt

SEQ ID NO: 377934 - DNA, 33 bp, Homo sapien
acatggtttgatgaccgaaataaccagggcttt

SEQ ID NO: 377935 - DNA, 33 bp, Homo sapien
tggcagacagtttgaaagcccaacaaaaatgtg

SEQ ID NO: 377936 - DNA, 33 bp, Homo sapien
tggcagacagtttgaaggcccaacaaaaatgtg

SEQ ID NO: 377937 - DNA, 33 bp, Homo sapien
ctttggaaaggtctcacatctttgaaaaacaaa

SEQ ID NO: 377938 - DNA, 33 bp, Homo sapien
ctttggaaaggtctcatatctttgaaaaacaaa

SEQ ID NO: 377939 - DNA, 33 bp, Homo sapien
tgtgagaactgttttaaaggtacagaagatacc

SEQ ID NO: 377940 - DNA, 33 bp, Homo sapien
tgtgagaactgttttataggtacagaagatacc

SEQ ID NO: 377941 - DNA, 33 bp, Homo sapien
ctttgcctcagtagaactcattgatcccttttt

SEQ ID NO: 377942 - DNA, 33 bp, Homo sapien
ctttgcctcagtagaattcattgatcccttttt

SEQ ID NO: 377943 - DNA, 33 bp, Homo sapien
agcagacagaggaaccaagcacttgcaaatgta

SEQ ID NO: 377944 - DNA, 33 bp, Homo sapien
agcagacagaggaaccgagcacttgcaaatgta

SEQ ID NO: 377945 - DNA, 33 bp, Homo sapien
ttttgaatgtttctggaagtttgctgttcatag

SEQ ID NO: 377946 - DNA, 33 bp, Homo sapien
ttttgaatgtttctggtagtttgctgttcatag

SEQ ID NO: 377947 - DNA, 33 bp, Homo sapien
aacatctactgtggcaagggctagaaatatgta

SEQ ID NO: 377948 - DNA, 33 bp, Homo sapien
aacatctactgtggcatgggctagaaatatgta

SEQ ID NO: 377949 - DNA, 33 bp, Homo sapien
acatactgactgcttacagaccaagttgcttgc

SEQ ID NO: 377950 - DNA, 33 bp, Homo sapien
acatactgactgcttatagaccaagttgcttgc

SEQ ID NO: 377951 - DNA, 33 bp, Homo sapien
gggaactagataacctaagaacctgctggccac

SEQ ID NO: 377952 - DNA, 33 bp, Homo sapien
gggaactagataacctgagaacctgctggccac

SEQ ID NO: 377953 - DNA, 33 bp, Homo sapien
cctgtcttcacagacaagcacattgagggctag

SEQ ID NO: 377954 - DNA, 33 bp, Homo sapien
cctgtcttcacagacaggcacattgagggctag

SEQ ID NO: 377955 - DNA, 33 bp, Homo sapien
ttaaaagctctctgtcccttttcatgtatctat

SEQ ID NO: 377956 - DNA, 33 bp, Homo sapien
ttaaaagctctctgtctcttttcatgtatctat

SEQ ID NO: 377957 - DNA, 33 bp, Homo sapien
ttgtcctgtcaaatggcatagtttagcaaagtg

SEQ ID NO: 377958 - DNA, 33 bp, Homo sapien
ttgtcctgtcaaatgggatagtttagcaaagtg

SEQ ID NO: 377959 - DNA, 33 bp, Homo sapien
ggaaagctaagttacagcttctcacttatcccc

SEQ ID NO: 377960 - DNA, 33 bp, Homo sapien
ggaaagctaagttacatcttctcacttatcccc

SEQ ID NO: 377961 - DNA, 33 bp, Homo sapien
tctcacttatccccaacatccgctaatagatcc

SEQ ID NO: 377962 - DNA, 33 bp, Homo sapien
tctcacttatccccaatatccgctaatagatcc

SEQ ID NO: 377963 - DNA, 33 bp, Homo sapien
attattagtgtatgtcccagaaagctgtccttt

SEQ ID NO: 377964 - DNA, 33 bp, Homo sapien
attattagtgtatgtctcagaaagctgtccttt

SEQ ID NO: 377965 - DNA, 33 bp, Homo sapien
ctgccatgaatgacccaagctaaccaggtctct

SEQ ID NO: 377966 - DNA, 33 bp, Homo sapien
ctgccatgaatgacccgagctaaccaggtctct

SEQ ID NO: 377967 - DNA, 33 bp, Homo sapien
gacaggaacgataggaagtaaagtacacctgga

SEQ ID NO: 377968 - DNA, 33 bp, Homo sapien
gacaggaacgataggaggtaaagtacacctgga

SEQ ID NO: 377969 - DNA, 33 bp, Homo sapien
cctgttcactccagtacctattctgttctcagg

SEQ ID NO: 377970 - DNA, 33 bp, Homo sapien
cctgttcactccagtatctattctgttctcagg

SEQ ID NO: 377971 - DNA, 33 bp, Homo sapien
tggacgaagcagaaataaactccagagtgacac

SEQ ID NO: 377972 - DNA, 33 bp, Homo sapien
tggacgaagcagaaatgaactccagagtgacac

SEQ ID NO: 377973 - DNA, 33 bp, Homo sapien
aaactctcaaacatcacagaggctggtcagaaa

SEQ ID NO: 377974 - DNA, 33 bp, Homo sapien
aaactctcaaacatcagagaggctggtcagaaa

SEQ ID NO: 377975 - DNA, 33 bp, Homo sapien
ctgtgtgcggagtgccacttacagaccagtctt

SEQ ID NO: 377976 - DNA, 33 bp, Homo sapien
ctgtgtgcggagtgccgcttacagaccagtctt

SEQ ID NO: 377977 - DNA, 33 bp, Homo sapien
gtcttgtggtctgcaacgcctaaggtccatgca

SEQ ID NO: 377978 - DNA, 33 bp, Homo sapien
gtcttgtggtctgcaatgcctaaggtccatgca

SEQ ID NO: 377979 - DNA, 33 bp, Homo sapien
aagtataattgatctaaggtaacttcactcatc

SEQ ID NO: 377980 - DNA, 33 bp, Homo sapien
aagtataattgatctagggtaacttcactcatc

SEQ ID NO: 377981 - DNA, 33 bp, Homo sapien
ttaaaatataggtcaccgaggtgggctgccaag

SEQ ID NO: 377982 - DNA, 33 bp, Homo sapien
ttaaaatataggtcactgaggtgggctgccaag

SEQ ID NO: 377983 - DNA, 33 bp, Homo sapien
actgggatgaggttccagcccaagttcctgagg

SEQ ID NO: 377984 - DNA, 33 bp, Homo sapien
actgggatgaggttccggcccaagttcctgagg

SEQ ID NO: 377985 - DNA, 33 bp, Homo sapien
aggtcaagggccataacagctgtactgcaggtc

SEQ ID NO: 377986 - DNA, 33 bp, Homo sapien
aggtcaagggccataagagctgtactgcaggtc

SEQ ID NO: 377987 - DNA, 33 bp, Homo sapien
agatctgcaaggtcccaccaagctccaactatc

SEQ ID NO: 377988 - DNA, 33 bp, Homo sapien
agatctgcaaggtccctccaagctccaactatc

SEQ ID NO: 377989 - DNA, 33 bp, Homo sapien
ttttgctaatagcgtccctcccatttttttctc

SEQ ID NO: 377990 - DNA, 33 bp, Homo sapien
ttttgctaatagcgtctctcccatttttttctc

SEQ ID NO: 377991 - DNA, 33 bp, Homo sapien
gatagttgaacattgccctggcatcactctgaa

SEQ ID NO: 377992 - DNA, 33 bp, Homo sapien
gatagttgaacattgctctggcatcactctgaa

SEQ ID NO: 377993 - DNA, 33 bp, Homo sapien
agaaccggctccgacaagtggtcccagggtctt

SEQ ID NO: 377994 - DNA, 33 bp, Homo sapien
agaaccggctccgacacgtggtcccagggtctt

SEQ ID NO: 377995 - DNA, 33 bp, Homo sapien
ggtattaccagaaagaagggtagcaaatcatta

SEQ ID NO: 377996 - DNA, 33 bp, Homo sapien
ggtattaccagaaagaggggtagcaaatcatta

SEQ ID NO: 377997 - DNA, 33 bp, Homo sapien
ttcgtgcccaggatcccgaacctactaagttgt

SEQ ID NO: 377998 - DNA, 33 bp, Homo sapien
ttcgtgcccaggatcctgaacctactaagttgt

SEQ ID NO: 377999 - DNA, 33 bp, Homo sapien
caggtgcctttgattacccaggtagtgatgtcc

SEQ ID NO: 378000 - DNA, 33 bp, Homo sapien
caggtgcctttgattatccaggtagtgatgtcc

SEQ ID NO: 378001 - DNA, 33 bp, Homo sapien
gaataaggcactggccacgggtagctggctgtt

SEQ ID NO: 378002 - DNA, 33 bp, Homo sapien
gaataaggcactggccgcgggtagctggctgtt

SEQ ID NO: 378003 - DNA, 33 bp, Homo sapien
cttagtggattctgaccctgcgaggtgactcac

SEQ ID NO: 378004 - DNA, 33 bp, Homo sapien
cttagtggattctgactctgcgaggtgactcac

SEQ ID NO: 378005 - DNA, 33 bp, Homo sapien
gcctaaatttacatgacggagtttctaattttg

SEQ ID NO: 378006 - DNA, 33 bp, Homo sapien
gcctaaatttacatgatggagtttctaattttg

SEQ ID NO: 378007 - DNA, 33 bp, Homo sapien
tttaagagcagttacacaccccagaaagtgttg

SEQ ID NO: 378008 - DNA, 33 bp, Homo sapien
tttaagagcagttacataccccagaaagtgttg

SEQ ID NO: 378009 - DNA, 33 bp, Homo sapien
acatcatcagttcctacgtcacctcctcagaga

SEQ ID NO: 378010 - DNA, 33 bp, Homo sapien
acatcatcagttcctatgtcacctcctcagaga

SEQ ID NO: 378011 - DNA, 33 bp, Homo sapien
aaggtggccttttacacataaagttacagagct

SEQ ID NO: 378012 - DNA, 33 bp, Homo sapien
aaggtggccttttacagataaagttacagagct

SEQ ID NO: 378013 - DNA, 33 bp, Homo sapien
tctgatgcttaattccacttcttcctgtgcctt

SEQ ID NO: 378014 - DNA, 33 bp, Homo sapien
tctgatgcttaattccgcttcttcctgtgcctt

SEQ ID NO: 378015 - DNA, 33 bp, Homo sapien
gaaagcatcgaggtccagaggataacaatgaaa

SEQ ID NO: 378016 - DNA, 33 bp, Homo sapien
gaaagcatcgaggtccggaggataacaatgaaa

SEQ ID NO: 378017 - DNA, 33 bp, Homo sapien
gctaaggaaaggtcaaataagactgactgctga

SEQ ID NO: 378018 - DNA, 33 bp, Homo sapien
gctaaggaaaggtcaagtaagactgactgctga

SEQ ID NO: 378019 - DNA, 33 bp, Homo sapien
gtctcagtctctagaccaggtattctcagattc

SEQ ID NO: 378020 - DNA, 33 bp, Homo sapien
gtctcagtctctagacgaggtattctcagattc

SEQ ID NO: 378021 - DNA, 33 bp, Homo sapien
atatggaccttttgggaaggatcattttttgtt

SEQ ID NO: 378022 - DNA, 33 bp, Homo sapien
atatggaccttttgggcaggatcattttttgtt

SEQ ID NO: 378023 - DNA, 33 bp, Homo sapien
atctggggagattccacgctcatggctgctttt

SEQ ID NO: 378024 - DNA, 33 bp, Homo sapien
atctggggagattccaggctcatggctgctttt

SEQ ID NO: 378025 - DNA, 33 bp, Homo sapien
ggattttgtgtttcctcggatacagaaataagt

SEQ ID NO: 378026 - DNA, 33 bp, Homo sapien
ggattttgtgtttccttggatacagaaataagt

SEQ ID NO: 378027 - DNA, 33 bp, Homo sapien
acacccacctgattaaggtagactgttgcgctg

SEQ ID NO: 378028 - DNA, 33 bp, Homo sapien
acacccacctgattaatgtagactgttgcgctg

SEQ ID NO: 378029 - DNA, 33 bp, Homo sapien
gctctcaatggcatgaacaagaactctaagagt

SEQ ID NO: 378030 - DNA, 33 bp, Homo sapien
gctctcaatggcatgaccaagaactctaagagt

SEQ ID NO: 378031 - DNA, 33 bp, Homo sapien
accctggaaccacacaaattatccatagaaata

SEQ ID NO: 378032 - DNA, 33 bp, Homo sapien
accctggaaccacacagattatccatagaaata

SEQ ID NO: 378033 - DNA, 33 bp, Homo sapien
cactcccttgttctaaaaaggtctttatggaaa

SEQ ID NO: 378034 - DNA, 33 bp, Homo sapien
cactcccttgttctaagaaggtctttatggaaa

SEQ ID NO: 378035 - DNA, 33 bp, Homo sapien
gggtaagtgataaatcagaaagttagtggacga

SEQ ID NO: 378036 - DNA, 33 bp, Homo sapien
gggtaagtgataaatcggaaagttagtggacga

SEQ ID NO: 378037 - DNA, 33 bp, Homo sapien
tttacctaacaatccaatcattcatctacacca

SEQ ID NO: 378038 - DNA, 33 bp, Homo sapien
tttacctaacaatccagtcattcatctacacca

SEQ ID NO: 378039 - DNA, 33 bp, Homo sapien
aaccatctggcatttaagttataggccttctca

SEQ ID NO: 378040 - DNA, 33 bp, Homo sapien
aaccatctggcatttaggttataggccttctca

SEQ ID NO: 378041 - DNA, 33 bp, Homo sapien
ggtgagaaggaatagcaaggaaacctatataac

SEQ ID NO: 378042 - DNA, 33 bp, Homo sapien
ggtgagaaggaatagcgaggaaacctatataac

SEQ ID NO: 378043 - DNA, 33 bp, Homo sapien
ggcaaagactaggtccccatagcaccagatgcc

SEQ ID NO: 378044 - DNA, 33 bp, Homo sapien
ggcaaagactaggtcctcatagcaccagatgcc

SEQ ID NO: 378045 - DNA, 33 bp, Homo sapien
ccctgtccagaggcccaaactatggtgaaagtg

SEQ ID NO: 378046 - DNA, 33 bp, Homo sapien
ccctgtccagaggccccaactatggtgaaagtg

SEQ ID NO: 378047 - DNA, 33 bp, Homo sapien
ctggtgcaggaagtagcctaactgcttatggat

SEQ ID NO: 378048 - DNA, 33 bp, Homo sapien
ctggtgcaggaagtaggctaactgcttatggat

SEQ ID NO: 378049 - DNA, 33 bp, Homo sapien
tacctctaatgcactccgaggaccccaagcttt

SEQ ID NO: 378050 - DNA, 33 bp, Homo sapien
tacctctaatgcactctgaggaccccaagcttt

SEQ ID NO: 378051 - DNA, 33 bp, Homo sapien
tcagattgaagtcaggcaatgtgctgtatgcat

SEQ ID NO: 378052 - DNA, 33 bp, Homo sapien
tcagattgaagtcagggaatgtgctgtatgcat

SEQ ID NO: 378053 - DNA, 33 bp, Homo sapien
gaatgcatagaaagaaatagttcagaaatctct

SEQ ID NO: 378054 - DNA, 33 bp, Homo sapien
gaatgcatagaaagaattagttcagaaatctct

SEQ ID NO: 378055 - DNA, 33 bp, Homo sapien
tacacttatattccacaaagagaacaactttta

SEQ ID NO: 378056 - DNA, 33 bp, Homo sapien
tacacttatattccacgaagagaacaactttta

SEQ ID NO: 378057 - DNA, 33 bp, Homo sapien
gaaggtggaatgctacaaattatgtaagggagg

SEQ ID NO: 378058 - DNA, 33 bp, Homo sapien
gaaggtggaatgctacgaattatgtaagggagg

SEQ ID NO: 378059 - DNA, 33 bp, Homo sapien
aagatatcagaccctaaaaaatgcctttcctaa

SEQ ID NO: 378060 - DNA, 33 bp, Homo sapien
aagatatcagaccctacaaaatgcctttcctaa

SEQ ID NO: 378061 - DNA, 33 bp, Homo sapien
tacctggtggtcatgacggtgatcaaggctggc

SEQ ID NO: 378062 - DNA, 33 bp, Homo sapien
tacctggtggtcatgatggtgatcaaggctggc

SEQ ID NO: 378063 - DNA, 33 bp, Homo sapien
taactaactggccttcaatggttcacttttccc

SEQ ID NO: 378064 - DNA, 33 bp, Homo sapien
taactaactggccttcgatggttcacttttccc

SEQ ID NO: 378065 - DNA, 33 bp, Homo sapien
aggtatgcatggaaaacgtgtgactgcattttt

SEQ ID NO: 378066 - DNA, 33 bp, Homo sapien
aggtatgcatggaaaatgtgtgactgcattttt

SEQ ID NO: 378067 - DNA, 33 bp, Homo sapien; identical to SEQ ID NO: 378065

SEQ ID NO: 378068 - DNA, 33 bp, Homo sapien; identical to SEQ ID NO: 378066

SEQ ID NO: 378069 - DNA, 33 bp, Homo sapien
aagcactccgcgtacccatggggcagcccttgt

SEQ ID NO: 378070 - DNA, 33 bp, Homo sapien
aagcactccgcgtacctatggggcagcccttgt

SEQ ID NO: 378071 - DNA, 33 bp, Homo sapien
ctgaggtaggtctcccactggatgcccccaacc

SEQ ID NO: 378072 - DNA, 33 bp, Homo sapien
ctgaggtaggtctcccgctggatgcccccaacc

SEQ ID NO: 378073 - DNA, 33 bp, Homo sapien
cttgccctgactccccaactgtggagcctgcct

SEQ ID NO: 378074 - DNA, 33 bp, Homo sapien
cttgccctgactccccgactgtggagcctgcct

SEQ ID NO: 378075 - DNA, 33 bp, Homo sapien
tttagaactcaccattaaagcacatttgctact

SEQ ID NO: 378076 - DNA, 33 bp, Homo sapien
tttagaactcaccattgaagcacatttgctact

SEQ ID NO: 378077 - DNA, 33 bp, Homo sapien
gagaaaccaaggcccaaacaaatcaggtggact

SEQ ID NO: 378078 - DNA, 33 bp, Homo sapien
gagaaaccaaggcccagacaaatcaggtggact

SEQ ID NO: 378079 - DNA, 33 bp, Homo sapien
ctaccttatctctattaaaatggacataatcat

SEQ ID NO: 378080 - DNA, 33 bp, Homo sapien
ctaccttatctctattgaaatggacataatcat

SEQ ID NO: 378081 - DNA, 33 bp, Homo sapien
ttcatctgatttcccacaactttgagttcagag

SEQ ID NO: 378082 - DNA, 33 bp, Homo sapien
ttcatctgatttcccataactttgagttcagag

SEQ ID NO: 378083 - DNA, 33 bp, Homo sapien; identical to SEQ ID NO: 378081

SEQ ID NO: 378084 - DNA, 33 bp, Homo sapien; identical to SEQ ID NO: 378082

SEQ ID NO: 378085 - DNA, 33 bp, Homo sapien
tttgccaggactacacagatcttatcaactttc

SEQ ID NO: 378086 - DNA, 33 bp, Homo sapien
tttgccaggactacaccgatcttatcaactttc

SEQ ID NO: 378087 - DNA, 33 bp, Homo sapien; identical to SEQ ID NO: 378085

SEQ ID NO: 378088 - DNA, 33 bp, Homo sapien; identical to SEQ ID NO: 378086

SEQ ID NO: 378089 - DNA, 33 bp, Homo sapien
gtgtattagagcaggaagaagctgggggacaac

SEQ ID NO: 378090 - DNA, 33 bp, Homo sapien
gtgtattagagcaggaggaagctgggggacaac

SEQ ID NO: 378091 - DNA, 33 bp, Homo sapien
tcctgctgactataaaccgtaattcataatcct

SEQ ID NO: 378092 - DNA, 33 bp, Homo sapien
tcctgctgactataaatcgtaattcataatcct

SEQ ID NO: 378093 - DNA, 33 bp, Homo sapien
gcaggattcactgtgacaggattgaatgtcatt

SEQ ID NO: 378094 - DNA, 33 bp, Homo sapien
gcaggattcactgtgataggattgaatgtcatt

SEQ ID NO: 378095 - DNA, 33 bp, Homo sapien
gggtagaagctttatacgaacagattggctaaa

SEQ ID NO: 378096 - DNA, 33 bp, Homo sapien
gggtagaagctttatatgaacagattggctaaa

SEQ ID NO: 378097 - DNA, 33 bp, Homo sapien
ttctccccagcccttcccatcgcagggaataat

SEQ ID NO: 378098 - DNA, 33 bp, Homo sapien
ttctccccagcccttctcatcgcagggaataat

SEQ ID NO: 378099 - DNA, 33 bp, Homo sapien
agtcctttacctatgcaaaaaataagccgttga

SEQ ID NO: 378100 - DNA, 33 bp, Homo sapien
agtcctttacctatgcgaaaaataagccgttga

SEQ ID NO: 378101 - DNA, 33 bp, Homo sapien
tgaaaggagaaaataacaggttataaactgttg

SEQ ID NO: 378102 - DNA, 33 bp, Homo sapien
tgaaaggagaaaataataggttataaactgttg

SEQ ID NO: 378103 - DNA, 33 bp, Homo sapien
atatcttcctgatgtacaaaagcaagagaaatg

SEQ ID NO: 378104 - DNA, 33 bp, Homo sapien
atatcttcctgatgtataaaagcaagagaaatg

SEQ ID NO: 378105 - DNA, 33 bp, Homo sapien
agaagtacagacgatacgctgatgaggcaaaaa

SEQ ID NO: 378106 - DNA, 33 bp, Homo sapien
agaagtacagacgatatgctgatgaggcaaaaa

SEQ ID NO: 378107 - DNA, 33 bp, Homo sapien
agatcctgagatttgggcagacctttgtgcagt

SEQ ID NO: 378108 - DNA, 33 bp, Homo sapien
agatcctgagatttggtcagacctttgtgcagt

SEQ ID NO: 378109 - DNA, 33 bp, Homo sapien
ttgtctcaaaatacaaagaaattcattgcaaag

SEQ ID NO: 378110 - DNA, 33 bp, Homo sapien
ttgtctcaaaatacaaggaaattcattgcaaag

SEQ ID NO: 378111 - DNA, 33 bp, Homo sapien
tggtgctggtccaaaaatccacccgcggttctt

SEQ ID NO: 378112 - DNA, 33 bp, Homo sapien
tggtgctggtccaaaactccacccgcggttctt

SEQ ID NO: 378113 - DNA, 33 bp, Homo sapien
tgttcaagtccagctgcaggtactgctcagtca

SEQ ID NO: 378114 - DNA, 33 bp, Homo sapien
tgttcaagtccagctggaggtactgctcagtca

SEQ ID NO: 378115 - DNA, 33 bp, Homo sapien
gtgccttgtatttgatgaatccttttcacaccc

SEQ ID NO: 378116 - DNA, 33 bp, Homo sapien
gtgccttgtatttgattaatccttttcacaccc

SEQ ID NO: 378117 - DNA, 33 bp, Homo sapien
cttacaagcctaccaaatcactgtacccatttt

SEQ ID NO: 378118 - DNA, 33 bp, Homo sapien
cttacaagcctaccaagtcactgtacccatttt

SEQ ID NO: 378119 - DNA, 33 bp, Homo sapien
gtgtccccacctatcaagtcttggatgtataga

SEQ ID NO: 378120 - DNA, 33 bp, Homo sapien
gtgtccccacctatcacgtcttggatgtataga

SEQ ID NO: 378121 - DNA, 33 bp, Homo sapien
ctactgccttctcagacgtgagctcttcatcac

SEQ ID NO: 378122 - DNA, 33 bp, Homo sapien
ctactgccttctcagatgtgagctcttcatcac

SEQ ID NO: 378123 - DNA, 33 bp, Homo sapien
tcttgttcattataggccaaaatggttaaaacc

SEQ ID NO: 378124 - DNA, 33 bp, Homo sapien
tcttgttcattataggtcaaaatggttaaaacc

SEQ ID NO: 378125 - DNA, 33 bp, Homo sapien
gataattgaaaactgacgttcaaacaaaaattg

SEQ ID NO: 378126 - DNA, 33 bp, Homo sapien
gataattgaaaactgatgttcaaacaaaaattg

SEQ ID NO: 378127 - DNA, 33 bp, Homo sapien
tggagctcagtgcaaagtaaaaacataaactgc

SEQ ID NO: 378128 - DNA, 33 bp, Homo sapien
tggagctcagtgcaaattaaaaacataaactgc

SEQ ID NO: 378129 - DNA, 33 bp, Homo sapien; identical to SEQ ID NO: 378127

SEQ ID NO: 378130 - DNA, 33 bp, Homo sapien; identical to SEQ ID NO: 378128

SEQ ID NO: 378131 - DNA, 33 bp, Homo sapien
taagccatctggtcatcagaaggtaaacccatc

SEQ ID NO: 378132 - DNA, 33 bp, Homo sapien
taagccatctggtcatgagaaggtaaacccatc

SEQ ID NO: 378133 - DNA, 33 bp, Homo sapien
ggaagcggttccacaactgtaccagactccaca

SEQ ID NO: 378134 - DNA, 33 bp, Homo sapien
ggaagcggttccacaattgtaccagactccaca

SEQ ID NO: 378135 - DNA, 33 bp, Homo sapien; identical to SEQ ID NO: 378133

SEQ ID NO: 378136 - DNA, 33 bp, Homo sapien; identical to SEQ ID NO: 378134

SEQ ID NO: 378137 - DNA, 33 bp, Homo sapien
gccatctcttgagtataaatcatttttgtggta

SEQ ID NO: 378138 - DNA, 33 bp, Homo sapien
gccatctcttgagtattaatcatttttgtggta

SEQ ID NO: 378139 - DNA, 33 bp, Homo sapien
tgacagctgtcctgtacgtgaaatgagactgag

SEQ ID NO: 378140 - DNA, 33 bp, Homo sapien
tgacagctgtcctgtatgtgaaatgagactgag

SEQ ID NO: 378141 - DNA, 33 bp, Homo sapien
tttctagtacagatcaactctcaggaatggatt

SEQ ID NO: 378142 - DNA, 33 bp, Homo sapien
tttctagtacagatcacctctcaggaatggatt

SEQ ID NO: 378143 - DNA, 33 bp, Homo sapien
tgtgttggataaagccaaaactccatgtatggc

SEQ ID NO: 378144 - DNA, 33 bp, Homo sapien
tgtgttggataaagcccaaactccatgtatggc

SEQ ID NO: 378145 - DNA, 33 bp, Homo sapien; identical to SEQ ID NO: 378143

SEQ ID NO: 378146 - DNA, 33 bp, Homo sapien; identical to SEQ ID NO: 378144

SEQ ID NO: 378147 - DNA, 33 bp, Homo sapien
gccagcagccgccgtcaatgttcacagagtgca

SEQ ID NO: 378148 - DNA, 33 bp, Homo sapien
gccagcagccgccgtcgatgttcacagagtgca

SEQ ID NO: 378149 - DNA, 33 bp, Homo sapien
tgtgctaaggatgaaaagtgtgctaagtagtga

SEQ ID NO: 378150 - DNA, 33 bp, Homo sapien
tgtgctaaggatgaaatgtgtgctaagtagtga

SEQ ID NO: 378151 - DNA, 33 bp, Homo sapien
gtggagaccacaacaaagcaaggacttctgcaa

SEQ ID NO: 378152 - DNA, 33 bp, Homo sapien
gtggagaccacaacaacgcaaggacttctgcaa

SEQ ID NO: 378153 - DNA, 33 bp, Homo sapien
ccaactatggcttccaatcattgaaccagggca

SEQ ID NO: 378154 - DNA, 33 bp, Homo sapien
ccaactatggcttccagtcattgaaccagggca

SEQ ID NO: 378155 - DNA, 33 bp, Homo sapien
tccttaccagaattgacacctactcaggatatg

SEQ ID NO: 378156 - DNA, 33 bp, Homo sapien
tccttaccagaattgatacctactcaggatatg

SEQ ID NO: 378157 - DNA, 33 bp, Homo sapien
agcttcctgttattcaagcgaacaattctagta

SEQ ID NO: 378158 - DNA, 33 bp, Homo sapien
agcttcctgttattcaggcgaacaattctagta

SEQ ID NO: 378159 - DNA, 33 bp, Homo sapien
gcaaaaatctcaactaaagacccttacattcac

SEQ ID NO: 378160 - DNA, 33 bp, Homo sapien
gcaaaaatctcaactagagacccttacattcac

SEQ ID NO: 378161 - DNA, 33 bp, Homo sapien
ttagagagtttatttcaccaaggttgaggatgg

SEQ ID NO: 378162 - DNA, 33 bp, Homo sapien
ttagagagtttatttcgccaaggttgaggatgg

SEQ ID NO: 378163 - DNA, 33 bp, Homo sapien
gccacatgacacagataaaaactgagagcattc

SEQ ID NO: 378164 - DNA, 33 bp, Homo sapien
gccacatgacacagatcaaaactgagagcattc

SEQ ID NO: 378165 - DNA, 33 bp, Homo sapien
accaggaaacagggacaatctcagtcagacgtt

SEQ ID NO: 378166 - DNA, 33 bp, Homo sapien
accaggaaacagggacgatctcagtcagacgtt

SEQ ID NO: 378167 - DNA, 33 bp, Homo sapien
aattgacatgaaggaaatacattgtcagcttca

SEQ ID NO: 378168 - DNA, 33 bp, Homo sapien
aattgacatgaaggaactacattgtcagcttca

SEQ ID NO: 378169 - DNA, 33 bp, Homo sapien
aatggtatggggcaccaaggggatgtaggcata

SEQ ID NO: 378170 - DNA, 33 bp, Homo sapien
aatggtatggggcaccgaggggatgtaggcata

SEQ ID NO: 378171 - DNA, 33 bp, Homo sapien
gccagtgggctctaagactccacaagctggaac

SEQ ID NO: 378172 - DNA, 33 bp, Homo sapien
gccagtgggctctaagtctccacaagctggaac

SEQ ID NO: 378173 - DNA, 33 bp, Homo sapien
gaatactgagttccacaagtgaataagctatgt

SEQ ID NO: 378174 - DNA, 33 bp, Homo sapien
gaatactgagttccacgagtgaataagctatgt

SEQ ID NO: 378175 - DNA, 33 bp, Homo sapien
tgtctcccaaattataccacaaagctatgcaaa

SEQ ID NO: 378176 - DNA, 33 bp, Homo sapien
tgtctcccaaattatatcacaaagctatgcaaa

SEQ ID NO: 378177 - DNA, 33 bp, Homo sapien
agattccttgatgaatcagattaatgtggtgtt

SEQ ID NO: 378178 - DNA, 33 bp, Homo sapien
agattccttgatgaattagattaatgtggtgtt

SEQ ID NO: 378179 - DNA, 33 bp, Homo sapien
tatcaaacaaaatagaactcaaggcaaagaaca

SEQ ID NO: 378180 - DNA, 33 bp, Homo sapien
tatcaaacaaaatagagctcaaggcaaagaaca

SEQ ID NO: 378181 - DNA, 33 bp, Homo sapien
ttcatttccatgacctaactatgtgcagagact

SEQ ID NO: 378182 - DNA, 33 bp, Homo sapien
ttcatttccatgacctcactatgtgcagagact

SEQ ID NO: 378183 - DNA, 33 bp, Homo sapien
ctcccctggcccataagaggtgttcgatatgtg

SEQ ID NO: 378184 - DNA, 33 bp, Homo sapien
ctcccctggcccataataggtgttcgatatgtg

SEQ ID NO: 378185 - DNA, 33 bp, Homo sapien
atgtacttgcagttccagccttccatctcaaag

SEQ ID NO: 378186 - DNA, 33 bp, Homo sapien
atgtacttgcagttccggccttccatctcaaag

SEQ ID NO: 378187 - DNA, 33 bp, Homo sapien
ccaactcccaccacagaattttaaagtagaaaa

SEQ ID NO: 378188 - DNA, 33 bp, Homo sapien
ccaactcccaccacaggattttaaagtagaaaa

SEQ ID NO: 378189 - DNA, 33 bp, Homo sapien
atttctctagaaaagcacaggttctgggcctgt

SEQ ID NO: 378190 - DNA, 33 bp, Homo sapien
atttctctagaaaagcgcaggttctgggcctgt

SEQ ID NO: 378191 - DNA, 33 bp, Homo sapien
tcattagggatttcaaatgaagtctgaaatgtc

SEQ ID NO: 378192 - DNA, 33 bp, Homo sapien
tcattagggatttcaagtgaagtctgaaatgtc

SEQ ID NO: 378193 - DNA, 33 bp, Homo sapien
gggccttaacctatgcacttctttcttggttta

SEQ ID NO: 378194 - DNA, 33 bp, Homo sapien
gggccttaacctatgcgcttctttcttggttta

SEQ ID NO: 378195 - DNA, 33 bp, Homo sapien
gttcccaaggcctaagacagctgaccctcacgg

SEQ ID NO: 378196 - DNA, 33 bp, Homo sapien
gttcccaaggcctaaggcagctgaccctcacgg

SEQ ID NO: 378197 - DNA, 33 bp, Homo sapien
ggattgtgatggaagacgtagcccgaaagactt

SEQ ID NO: 378198 - DNA, 33 bp, Homo sapien
ggattgtgatggaagaggtagcccgaaagactt

SEQ ID NO: 378199 - DNA, 33 bp, Homo sapien
ggaaaagacatcctaaaggcatttcagaagtct

SEQ ID NO: 378200 - DNA, 33 bp, Homo sapien
ggaaaagacatcctaatggcatttcagaagtct

SEQ ID NO: 378201 - DNA, 33 bp, Homo sapien
gttaaccaatctctaaagaattccaaactttcc

SEQ ID NO: 378202 - DNA, 33 bp, Homo sapien
gttaaccaatctctaaggaattccaaactttcc

SEQ ID NO: 378203 - DNA, 33 bp, Homo sapien
acttggattgtgtcctaacatatagtcaatcct

SEQ ID NO: 378204 - DNA, 33 bp, Homo sapien
acttggattgtgtcctgacatatagtcaatcct

SEQ ID NO: 378205 - DNA, 33 bp, Homo sapien
cacagaaacagcagaagacgtgagaaagggagt

SEQ ID NO: 378206 - DNA, 33 bp, Homo sapien
cacagaaacagcagaatacgtgagaaagggagt

SEQ ID NO: 378207 - DNA, 33 bp, Homo sapien
taaatgagacaagggacgccataggaagagagg

SEQ ID NO: 378208 - DNA, 33 bp, Homo sapien
taaatgagacaagggatgccataggaagagagg

SEQ ID NO: 378209 - DNA, 33 bp, Homo sapien
ataggaggaactcatgacagttacatgtggagc

SEQ ID NO: 378210 - DNA, 33 bp, Homo sapien
ataggaggaactcatggcagttacatgtggagc

SEQ ID NO: 378211 - DNA, 33 bp, Homo sapien
ggtaaccctggcaagacacaaaaaagctcagat

SEQ ID NO: 378212 - DNA, 33 bp, Homo sapien
ggtaaccctggcaagatacaaaaaagctcagat

SEQ ID NO: 378213 - DNA, 33 bp, Homo sapien
ggaccactcctcagcaaaatgtagagaattctt

SEQ ID NO: 378214 - DNA, 33 bp, Homo sapien
ggaccactcctcagcagaatgtagagaattctt

SEQ ID NO: 378215 - DNA, 33 bp, Homo sapien
ggggtgaaaaggaaaacgaacctcatttagctg

SEQ ID NO: 378216 - DNA, 33 bp, Homo sapien
ggggtgaaaaggaaaaggaacctcatttagctg

SEQ ID NO: 378217 - DNA, 33 bp, Homo sapien
gttaatccgaacccaacttcccatgtaaaatgt

SEQ ID NO: 378218 - DNA, 33 bp, Homo sapien
gttaatccgaacccaatttcccatgtaaaatgt

SEQ ID NO: 378219 - DNA, 33 bp, Homo sapien
ttcacctagtacgataggtgcatcagtcagagt

SEQ ID NO: 378220 - DNA, 33 bp, Homo sapien
ttcacctagtacgatatgtgcatcagtcagagt

SEQ ID NO: 378221 - DNA, 33 bp, Homo sapien
agatgccctgctgctacgcttctctgtggttct

SEQ ID NO: 378222 - DNA, 33 bp, Homo sapien
agatgccctgctgctatgcttctctgtggttct

SEQ ID NO: 378223 - DNA, 33 bp, Homo sapien
catcaaagaatcacagcctactccaaacaacca

SEQ ID NO: 378224 - DNA, 33 bp, Homo sapien
catcaaagaatcacagtctactccaaacaacca

SEQ ID NO: 378225 - DNA, 33 bp, Homo sapien
tcattgtttcacactgcatgatttcactgatac

SEQ ID NO: 378226 - DNA, 33 bp, Homo sapien
tcattgtttcacactgtatgatttcactgatac

SEQ ID NO: 378227 - DNA, 33 bp, Homo sapien
aaatggcattagtttacgtttttcaaggaatta

SEQ ID NO: 378228 - DNA, 33 bp, Homo sapien
aaatggcattagtttatgtttttcaaggaatta

SEQ ID NO: 378229 - DNA, 33 bp, Homo sapien
attggcagagtgaattaaaacacatattgaaac

SEQ ID NO: 378230 - DNA, 33 bp, Homo sapien
attggcagagtgaatttaaacacatattgaaac

SEQ ID NO: 378231 - DNA, 33 bp, Homo sapien
aagaaaacagagaacccgaaatagagagaacag

SEQ ID NO: 378232 - DNA, 33 bp, Homo sapien
aagaaaacagagaacctgaaatagagagaacag

SEQ ID NO: 378233 - DNA, 33 bp, Homo sapien
aagtggatttgcgtcccgaaaaaccatttcact

SEQ ID NO: 378234 - DNA, 33 bp, Homo sapien
aagtggatttgcgtcctgaaaaaccatttcact

SEQ ID NO: 378235 - DNA, 33 bp, Homo sapien
tatgattactccgtcacgctagactactgtgct

SEQ ID NO: 378236 - DNA, 33 bp, Homo sapien
tatgattactccgtcaggctagactactgtgct

SEQ ID NO: 378237 - DNA, 33 bp, Homo sapien
gtcttttgggtgacacagtggaacttcagtttg

SEQ ID NO: 378238 - DNA, 33 bp, Homo sapien
gtcttttgggtgacacggtggaacttcagtttg

SEQ ID NO: 378239 - DNA, 33 bp, Homo sapien
acatgcatgggacagaaccactgagtgtcactg

SEQ ID NO: 378240 - DNA, 33 bp, Homo sapien
acatgcatgggacagagccactgagtgtcactg

SEQ ID NO: 378241 - DNA, 33 bp, Homo sapien
ttgcttttcctctttaaaccactccttctctac

SEQ ID NO: 378242 - DNA, 33 bp, Homo sapien
ttgcttttcctctttagaccactccttctctac

SEQ ID NO: 378243 - DNA, 33 bp, Homo sapien
gttttcctttaaatgacgtatcagctgtcacta

SEQ ID NO: 378244 - DNA, 33 bp, Homo sapien
gttttcctttaaatgatgtatcagctgtcacta

SEQ ID NO: 378245 - DNA, 33 bp, Homo sapien
acatagttagggagaaaatttaagtaccaataa

SEQ ID NO: 378246 - DNA, 33 bp, Homo sapien
acatagttagggagaagatttaagtaccaataa

SEQ ID NO: 378247 - DNA, 33 bp, Homo sapien
gtggccaccagcaggcccccgcttttctcttag

SEQ ID NO: 378248 - DNA, 33 bp, Homo sapien
gtggccaccagcaggcgcccgcttttctcttag

SEQ ID NO: 378249 - DNA, 33 bp, Homo sapien
ttcatctaagtatggaaggagtaggagtagcca

SEQ ID NO: 378250 - DNA, 33 bp, Homo sapien
ttcatctaagtatggacggagtaggagtagcca

SEQ ID NO: 378251 - DNA, 33 bp, Homo sapien
ccagaaagctggcccaactccttttactgttgc

SEQ ID NO: 378252 - DNA, 33 bp, Homo sapien
ccagaaagctggcccatctccttttactgttgc

SEQ ID NO: 378253 - DNA, 33 bp, Homo sapien
ggaaatgaaaccatacagacccacgctgactca

SEQ ID NO: 378254 - DNA, 33 bp, Homo sapien
ggaaatgaaaccatacggacccacgctgactca

SEQ ID NO: 378255 - DNA, 33 bp, Homo sapien
tttctgatctgcttggcaccctaatctctgcac

SEQ ID NO: 378256 - DNA, 33 bp, Homo sapien
tttctgatctgcttgggaccctaatctctgcac

SEQ ID NO: 378257 - DNA, 33 bp, Homo sapien
aatatcttttggtgccaactatgtaccaggcac

SEQ ID NO: 378258 - DNA, 33 bp, Homo sapien
aatatcttttggtgccgactatgtaccaggcac

SEQ ID NO: 378259 - DNA, 33 bp, Homo sapien
aacttagtaaagatgacattcttgcaggaaaca

SEQ ID NO: 378260 - DNA, 33 bp, Homo sapien
aacttagtaaagatgatattcttgcaggaaaca

SEQ ID NO: 378261 - DNA, 33 bp, Homo sapien
ttgaagatcttaaccacattgccaactggagca

SEQ ID NO: 378262 - DNA, 33 bp, Homo sapien
ttgaagatcttaaccatattgccaactggagca

SEQ ID NO: 378263 - DNA, 33 bp, Homo sapien
acggtgtctcatgtaccacttaccctagttctt

SEQ ID NO: 378264 - DNA, 33 bp, Homo sapien
acggtgtctcatgtactacttaccctagttctt

SEQ ID NO: 378265 - DNA, 33 bp, Homo sapien
aaaatcctatatcagacgcctttcacccaagta

SEQ ID NO: 378266 - DNA, 33 bp, Homo sapien
aaaatcctatatcagatgcctttcacccaagta

SEQ ID NO: 378267 - DNA, 33 bp, Homo sapien
tgctagtagctgacaacagactttccagtaaaa

SEQ ID NO: 378268 - DNA, 33 bp, Homo sapien
tgctagtagctgacaagagactttccagtaaaa

SEQ ID NO: 378269 - DNA, 33 bp, Homo sapien
taagataaaactctcaccttaccacctcctatg

SEQ ID NO: 378270 - DNA, 33 bp, Homo sapien
taagataaaactctcatcttaccacctcctatg

SEQ ID NO: 378271 - DNA, 33 bp, Homo sapien
cagacactccaggtcaataatggacatcagagt

SEQ ID NO: 378272 - DNA, 33 bp, Homo sapien
cagacactccaggtcattaatggacatcagagt

SEQ ID NO: 378273 - DNA, 33 bp, Homo sapien
aatgatgaaattataacgcagaaattgtcaaac

SEQ ID NO: 378274 - DNA, 33 bp, Homo sapien
aatgatgaaattataatgcagaaattgtcaaac

SEQ ID NO: 378275 - DNA, 33 bp, Homo sapien
tcctttgccttgcttccaagaccctatggtcta

SEQ ID NO: 378276 - DNA, 33 bp, Homo sapien
tcctttgccttgcttctaagaccctatggtcta

SEQ ID NO: 378277 - DNA, 33 bp, Homo sapien
tttctcatttgtaatacgggatgaataaaaaca

SEQ ID NO: 378278 - DNA, 33 bp, Homo sapien
tttctcatttgtaatatgggatgaataaaaaca

SEQ ID NO: 378279 - DNA, 33 bp, Homo sapien
ggagaaacttagcagccagagatgggtttttga

SEQ ID NO: 378280 - DNA, 33 bp, Homo sapien
ggagaaacttagcagcgagagatgggtttttga

SEQ ID NO: 378281 - DNA, 33 bp, Homo sapien
tggcaagcacttgttccaagttctaaggcacag

SEQ ID NO: 378282 - DNA, 33 bp, Homo sapien
tggcaagcacttgttctaagttctaaggcacag

SEQ ID NO: 378283 - DNA, 33 bp, Homo sapien
gcccataattgtcccccgacttagaagtggtct

SEQ ID NO: 378284 - DNA, 33 bp, Homo sapien
gcccataattgtcccctgacttagaagtggtct

SEQ ID NO: 378285 - DNA, 33 bp, Homo sapien
ggatctgacttccatgcagcttcatgaacttag

SEQ ID NO: 378286 - DNA, 33 bp, Homo sapien
ggatctgacttccatggagcttcatgaacttag

SEQ ID NO: 378287 - DNA, 33 bp, Homo sapien
agttcagtgacataaaagacatggaaccttaaa

SEQ ID NO: 378288 - DNA, 33 bp, Homo sapien
agttcagtgacataaaggacatggaaccttaaa

SEQ ID NO: 378289 - DNA, 33 bp, Homo sapien
actaagtgaaaggagccgagactgggcaggctg

SEQ ID NO: 378290 - DNA, 33 bp, Homo sapien
actaagtgaaaggagctgagactgggcaggctg

SEQ ID NO: 378291 - DNA, 33 bp, Homo sapien
ggttattttaaggttcactggcctcttcacatg

SEQ ID NO: 378292 - DNA, 33 bp, Homo sapien
ggttattttaaggttcgctggcctcttcacatg

SEQ ID NO: 378293 - DNA, 33 bp, Homo sapien
tacccttgtctcaataagaacttctcagcttta

SEQ ID NO: 378294 - DNA, 33 bp, Homo sapien
tacccttgtctcaataggaacttctcagcttta

SEQ ID NO: 378295 - DNA, 33 bp, Homo sapien
gcttgtggaatcagaaagtcttcacctttgagc

SEQ ID NO: 378296 - DNA, 33 bp, Homo sapien
gcttgtggaatcagaacgtcttcacctttgagc

SEQ ID NO: 378297 - DNA, 33 bp, Homo sapien
ggactggtggctttataaggagaaaagagacct

SEQ ID NO: 378298 - DNA, 33 bp, Homo sapien
ggactggtggctttatgaggagaaaagagacct

SEQ ID NO: 378299 - DNA, 33 bp, Homo sapien
ctttgcggatcagtaccaaatattttataattt

SEQ ID NO: 378300 - DNA, 33 bp, Homo sapien
ctttgcggatcagtactaaatattttataattt

SEQ ID NO: 378301 - DNA, 33 bp, Homo sapien
tcttgagttgcctacaacattaattttcaattt

SEQ ID NO: 378302 - DNA, 33 bp, Homo sapien
tcttgagttgcctacatcattaattttcaattt

SEQ ID NO: 378303 - DNA, 33 bp, Homo sapien
caaagaaattaggacaatgcaactccagagatg

SEQ ID NO: 378304 - DNA, 33 bp, Homo sapien
caaagaaattaggacagtgcaactccagagatg

SEQ ID NO: 378305 - DNA, 33 bp, Homo sapien
ttcaaagaatgagtcacacaaaaatggagatgg

SEQ ID NO: 378306 - DNA, 33 bp, Homo sapien
ttcaaagaatgagtcatacaaaaatggagatgg

SEQ ID NO: 378307 - DNA, 33 bp, Homo sapien
gtcagatgatgcttctcagaactcaacaaagac

SEQ ID NO: 378308 - DNA, 33 bp, Homo sapien
gtcagatgatgcttctgagaactcaacaaagac

SEQ ID NO: 378309 - DNA, 33 bp, Homo sapien
atcttgcaagagagtcaaaggagttaacactct

SEQ ID NO: 378310 - DNA, 33 bp, Homo sapien
atcttgcaagagagtcgaaggagttaacactct

SEQ ID NO: 378311 - DNA, 33 bp, Homo sapien
tctaattatacatacactagctggcttaaagtt

SEQ ID NO: 378312 - DNA, 33 bp, Homo sapien
tctaattatacatacattagctggcttaaagtt

SEQ ID NO: 378313 - DNA, 33 bp, Homo sapien
gggatttctcagtgataaaaacattctaaaatt

SEQ ID NO: 378314 - DNA, 33 bp, Homo sapien
gggatttctcagtgatgaaaacattctaaaatt

SEQ ID NO: 378315 - DNA, 33 bp, Homo sapien
gtactgtgggaatggacgcacaaccaaagtgct

SEQ ID NO: 378316 - DNA, 33 bp, Homo sapien
gtactgtgggaatggatgcacaaccaaagtgct

SEQ ID NO: 378317 - DNA, 33 bp, Homo sapien
tactaaatgacaggcaataatggaggtgaatag

SEQ ID NO: 378318 - DNA, 33 bp, Homo sapien
tactaaatgacaggcattaatggaggtgaatag

SEQ ID NO: 378319 - DNA, 33 bp, Homo sapien
acgtggaaagaaaaagcaaggctgtgaatctga

SEQ ID NO: 378320 - DNA, 33 bp, Homo sapien
acgtggaaagaaaaaggaaggctgtgaatctga

SEQ ID NO: 378321 - DNA, 33 bp, Homo sapien
ttgtatttaagcatccaagttggtaaaaagtag

SEQ ID NO: 378322 - DNA, 33 bp, Homo sapien
ttgtatttaagcatccgagttggtaaaaagtag

SEQ ID NO: 378323 - DNA, 33 bp, Homo sapien
atatttttaattttcccatgtagcattcataaa

SEQ ID NO: 378324 - DNA, 33 bp, Homo sapien
atatttttaattttcctatgtagcattcataaa

SEQ ID NO: 378325 - DNA, 33 bp, Homo sapien
atatacagtgttttccaaagtggtaattccatc

SEQ ID NO: 378326 - DNA, 33 bp, Homo sapien
atatacagtgttttccgaagtggtaattccatc

SEQ ID NO: 378327 - DNA, 33 bp, Homo sapien
gggctgcctctattaaagctctgctagcatctc

SEQ ID NO: 378328 - DNA, 33 bp, Homo sapien
gggctgcctctattaaggctctgctagcatctc

SEQ ID NO: 378329 - DNA, 33 bp, Homo sapien
ttgtaaactccattgcaaaacttctgtgcttga

SEQ ID NO: 378330 - DNA, 33 bp, Homo sapien
ttgtaaactccattgcgaaacttctgtgcttga

SEQ ID NO: 378331 - DNA, 33 bp, Homo sapien
acagctcttaccgttgaagcacagtgatgtctt

SEQ ID NO: 378332 - DNA, 33 bp, Homo sapien
acagctcttaccgttgcagcacagtgatgtctt

SEQ ID NO: 378333 - DNA, 33 bp, Homo sapien
caaaaggcagaaaaaccatgcctccgagcctca

SEQ ID NO: 378334 - DNA, 33 bp, Homo sapien
caaaaggcagaaaaacgatgcctccgagcctca

SEQ ID NO: 378335 - DNA, 33 bp, Homo sapien
gaccatccagcccttgcatttctcagatgggga

SEQ ID NO: 378336 - DNA, 33 bp, Homo sapien
gaccatccagcccttggatttctcagatgggga

SEQ ID NO: 378337 - DNA, 33 bp, Homo sapien
gcactggttgatagcacgtacaattataagaga

SEQ ID NO: 378338 - DNA, 33 bp, Homo sapien
gcactggttgatagcatgtacaattataagaga

SEQ ID NO: 378339 - DNA, 33 bp, Homo sapien
ttcaggttctaatgaaaaattattgcagtgatg

SEQ ID NO: 378340 - DNA, 33 bp, Homo sapien
ttcaggttctaatgaagaattattgcagtgatg

SEQ ID NO: 378341 - DNA, 33 bp, Homo sapien
caaaagcctgacctataaacatctttgtggaga

SEQ ID NO: 378342 - DNA, 33 bp, Homo sapien
caaaagcctgacctatgaacatctttgtggaga

SEQ ID NO: 378343 - DNA, 33 bp, Homo sapien
aattcgattctgatataaggctcagataaaagt

SEQ ID NO: 378344 - DNA, 33 bp, Homo sapien
aattcgattctgatatgaggctcagataaaagt

SEQ ID NO: 378345 - DNA, 33 bp, Homo sapien
taatagctggatgaacaaatatttgcaaacatc

SEQ ID NO: 378346 - DNA, 33 bp, Homo sapien
taatagctggatgaacgaatatttgcaaacatc

SEQ ID NO: 378347 - DNA, 33 bp, Homo sapien
gcagaaagttgtttaacctctatcacttcttga

SEQ ID NO: 378348 - DNA, 33 bp, Homo sapien
gcagaaagttgtttaatctctatcacttcttga

SEQ ID NO: 378349 - DNA, 33 bp, Homo sapien
tggcaggtgctgctacaacaccgtttccttcag

SEQ ID NO: 378350 - DNA, 33 bp, Homo sapien
tggcaggtgctgctacgacaccgtttccttcag

SEQ ID NO: 378351 - DNA, 33 bp, Homo sapien
gcctggattgtctgtcaatgccaggaaagtgcg

SEQ ID NO: 378352 - DNA, 33 bp, Homo sapien
gcctggattgtctgtcgatgccaggaaagtgcg

SEQ ID NO: 378353 - DNA, 33 bp, Homo sapien
cttttcaatctgtagagtcagttcttttttcag

SEQ ID NO: 378354 - DNA, 33 bp, Homo sapien
cttttcaatctgtagattcagttcttttttcag

SEQ ID NO: 378355 - DNA, 33 bp, Homo sapien
ctttgttctttgtaccactggttatggagccca

SEQ ID NO: 378356 - DNA, 33 bp, Homo sapien
ctttgttctttgtacctctggttatggagccca

SEQ ID NO: 378357 - DNA, 33 bp, Homo sapien
agttctttccggcatccatggcttttgatcctt

SEQ ID NO: 378358 - DNA, 33 bp, Homo sapien
agttctttccggcatctatggcttttgatcctt

SEQ ID NO: 378359 - DNA, 33 bp, Homo sapien
cagtcatcagttgacggacaataatgattcctg

SEQ ID NO: 378360 - DNA, 33 bp, Homo sapien
cagtcatcagttgacgtacaataatgattcctg

SEQ ID NO: 378361 - DNA, 33 bp, Homo sapien
gtgtgagatcttccagaagcaaatgtattcatc

SEQ ID NO: 378362 - DNA, 33 bp, Homo sapien
gtgtgagatcttccaggagcaaatgtattcatc

SEQ ID NO: 378363 - DNA, 33 bp, Homo sapien
gcagcaaacaagcccacaagtaggtgactgcat

SEQ ID NO: 378364 - DNA, 33 bp, Homo sapien
gcagcaaacaagcccagaagtaggtgactgcat

SEQ ID NO: 378365 - DNA, 33 bp, Homo sapien
tgtggttttcaccctcaactccacagcatcact

SEQ ID NO: 378366 - DNA, 33 bp, Homo sapien
tgtggttttcaccctcgactccacagcatcact

SEQ ID NO: 378367 - DNA, 33 bp, Homo sapien
tttttgccatccatcaatgagagtggttcaggg

SEQ ID NO: 378368 - DNA, 33 bp, Homo sapien
tttttgccatccatcagtgagagtggttcaggg

SEQ ID NO: 378369 - DNA, 33 bp, Homo sapien
agagaaacagtcatcaaggaaacaaacctgtct

SEQ ID NO: 378370 - DNA, 33 bp, Homo sapien
agagaaacagtcatcagggaaacaaacctgtct

SEQ ID NO: 378371 - DNA, 33 bp, Homo sapien
gcatttctgtgcttcccatgacacaggctgggg

SEQ ID NO: 378372 - DNA, 33 bp, Homo sapien
gcatttctgtgcttcctatgacacaggctgggg

SEQ ID NO: 378373 - DNA, 33 bp, Homo sapien
atggagaaggaaagcaagattagagatggcact

SEQ ID NO: 378374 - DNA, 33 bp, Homo sapien
atggagaaggaaagcaggattagagatggcact

SEQ ID NO: 378375 - DNA, 33 bp, Homo sapien
aaaaggatagaagaccacattctccactcacac

SEQ ID NO: 378376 - DNA, 33 bp, Homo sapien
aaaaggatagaagacctcattctccactcacac

SEQ ID NO: 378377 - DNA, 33 bp, Homo sapien
acacctagattgtccacagggcaaatgccgaag

SEQ ID NO: 378378 - DNA, 33 bp, Homo sapien
acacctagattgtccagagggcaaatgccgaag

SEQ ID NO: 378379 - DNA, 33 bp, Homo sapien
gcctggtctgtccccacagcaggaggtagcagg

SEQ ID NO: 378380 - DNA, 33 bp, Homo sapien
gcctggtctgtccccatagcaggaggtagcagg

SEQ ID NO: 378381 - DNA, 33 bp, Homo sapien
agaccctgaggacccaagtaatcccagagctgg

SEQ ID NO: 378382 - DNA, 33 bp, Homo sapien
agaccctgaggacccacgtaatcccagagctgg

SEQ ID NO: 378383 - DNA, 33 bp, Homo sapien
cacctcctcctctgtaaatggtgacaatggtag

SEQ ID NO: 378384 - DNA, 33 bp, Homo sapien
cacctcctcctctgtagatggtgacaatggtag

SEQ ID NO: 378385 - DNA, 33 bp, Homo sapien
ctgaatgttgtagccaaaggagctattcactga

SEQ ID NO: 378386 - DNA, 33 bp, Homo sapien
ctgaatgttgtagccacaggagctattcactga

SEQ ID NO: 378387 - DNA, 33 bp, Homo sapien
tttgagtcttgcagcaaccccgtgtgagttaca

SEQ ID NO: 378388 - DNA, 33 bp, Homo sapien
tttgagtcttgcagcagccccgtgtgagttaca

SEQ ID NO: 378389 - DNA, 33 bp, Homo sapien
tcagaagcagccggcaaaagggggatgctggcc

SEQ ID NO: 378390 - DNA, 33 bp, Homo sapien
tcagaagcagccggcagaagggggatgctggcc

SEQ ID NO: 378391 - DNA, 33 bp, Homo sapien
ttgtttctcaggttccaactgcccttcgctggg

SEQ ID NO: 378392 - DNA, 33 bp, Homo sapien
ttgtttctcaggttccgactgcccttcgctggg

SEQ ID NO: 378393 - DNA, 33 bp, Homo sapien
tcatttcaatctaccacaatctactgtccaacc

SEQ ID NO: 378394 - DNA, 33 bp, Homo sapien
tcatttcaatctaccataatctactgtccaacc

SEQ ID NO: 378395 - DNA, 33 bp, Homo sapien
gctgcttaattcaaacccagcaaggcagcttcc

SEQ ID NO: 378396 - DNA, 33 bp, Homo sapien
gctgcttaattcaaactcagcaaggcagcttcc

SEQ ID NO: 378397 - DNA, 33 bp, Homo sapien
aaaggttagattatccaccacagaaataaaatg

SEQ ID NO: 378398 - DNA, 33 bp, Homo sapien
aaaggttagattatccgccacagaaataaaatg

SEQ ID NO: 378399 - DNA, 33 bp, Homo sapien
agtttaacacttccataaagaagaatgagcagt

SEQ ID NO: 378400 - DNA, 33 bp, Homo sapien
agtttaacacttccatgaagaagaatgagcagt

SEQ ID NO: 378401 - DNA, 33 bp, Homo sapien
aatggttctactcttccactggagaaaacagaa

SEQ ID NO: 378402 - DNA, 33 bp, Homo sapien
aatggttctactcttctactggagaaaacagaa

SEQ ID NO: 378403 - DNA, 33 bp, Homo sapien
aaggtcataaataagcacctgttggtggccaac

SEQ ID NO: 378404 - DNA, 33 bp, Homo sapien
aaggtcataaataagcccctgttggtggccaac

SEQ ID NO: 378405 - DNA, 33 bp, Homo sapien
ctagtcaaatagttacagatcaaatgtttgaga

SEQ ID NO: 378406 - DNA, 33 bp, Homo sapien
ctagtcaaatagttacggatcaaatgtttgaga

SEQ ID NO: 378407 - DNA, 33 bp, Homo sapien
ggaagaggctcttagaagactttggccacctcc

SEQ ID NO: 378408 - DNA, 33 bp, Homo sapien
ggaagaggctcttagaggactttggccacctcc

SEQ ID NO: 378409 - DNA, 33 bp, Homo sapien
taaagcaagccaatgaggtatccagtcttcacc

SEQ ID NO: 378410 - DNA, 33 bp, Homo sapien
taaagcaagccaatgatgtatccagtcttcacc

SEQ ID NO: 378411 - DNA, 33 bp, Homo sapien
cctttccaagggaataatactacactaagccta

SEQ ID NO: 378412 - DNA, 33 bp, Homo sapien
cctttccaagggaatactactacactaagccta

SEQ ID NO: 378413 - DNA, 33 bp, Homo sapien
caaggaagcagaaatacagccagagatttatac

SEQ ID NO: 378414 - DNA, 33 bp, Homo sapien
caaggaagcagaaatatagccagagatttatac

SEQ ID NO: 378415 - DNA, 33 bp, Homo sapien
gcctccagatctaccactatctttctatacagg

SEQ ID NO: 378416 - DNA, 33 bp, Homo sapien
gcctccagatctaccattatctttctatacagg

SEQ ID NO: 378417 - DNA, 33 bp, Homo sapien
ctggtttctttctgtccacttacaacgttcaca

SEQ ID NO: 378418 - DNA, 33 bp, Homo sapien
ctggtttctttctgtcgacttacaacgttcaca

SEQ ID NO: 378419 - DNA, 33 bp, Homo sapien
gcactacctggcatacaataggtacataataaa

SEQ ID NO: 378420 - DNA, 33 bp, Homo sapien
gcactacctggcatacgataggtacataataaa

SEQ ID NO: 378421 - DNA, 33 bp, Homo sapien
agtcattatgaaatcacggaaatccagtggttc

SEQ ID NO: 378422 - DNA, 33 bp, Homo sapien
agtcattatgaaatcatggaaatccagtggttc

SEQ ID NO: 378423 - DNA, 33 bp, Homo sapien
ttttaggacacttccacgtatattgtatgttat

SEQ ID NO: 378424 - DNA, 33 bp, Homo sapien
ttttaggacacttccatgtatattgtatgttat

SEQ ID NO: 378425 - DNA, 33 bp, Homo sapien
tgtcccttctctttagaccccagattctaccta

SEQ ID NO: 378426 - DNA, 33 bp, Homo sapien
tgtcccttctctttagtccccagattctaccta

SEQ ID NO: 378427 - DNA, 33 bp, Homo sapien
ctttcctgctggaaacggacttgatacacagac

SEQ ID NO: 378428 - DNA, 33 bp, Homo sapien
ctttcctgctggaaactgacttgatacacagac

SEQ ID NO: 378429 - DNA, 33 bp, Homo sapien
ggatgatgttaggctagaatgtttcttgcaggg

SEQ ID NO: 378430 - DNA, 33 bp, Homo sapien
ggatgatgttaggctataatgtttcttgcaggg

SEQ ID NO: 378431 - DNA, 33 bp, Homo sapien
acttagcaggcacttactaaaagtaactacaac

SEQ ID NO: 378432 - DNA, 33 bp, Homo sapien
acttagcaggcacttagtaaaagtaactacaac

SEQ ID NO: 378433 - DNA, 33 bp, Homo sapien
catgtacctgctgacacgggcccgaggacatag

SEQ ID NO: 378434 - DNA, 33 bp, Homo sapien
catgtacctgctgacatgggcccgaggacatag

SEQ ID NO: 378435 - DNA, 33 bp, Homo sapien
ttcaaggaatggcagacgatattaaggtttcat

SEQ ID NO: 378436 - DNA, 33 bp, Homo sapien
ttcaaggaatggcagatgatattaaggtttcat

SEQ ID NO: 378437 - DNA, 33 bp, Homo sapien
agaaaggcaaaaaaccagcctggccataaacag

SEQ ID NO: 378438 - DNA, 33 bp, Homo sapien
agaaaggcaaaaaaccggcctggccataaacag

SEQ ID NO: 378439 - DNA, 33 bp, Homo sapien
catgagtgagagagtggatatataagtgaacaa

SEQ ID NO: 378440 - DNA, 33 bp, Homo sapien
catgagtgagagagtgtatatataagtgaacaa

SEQ ID NO: 378441 - DNA, 33 bp, Homo sapien
taatcagatgagtaataaaatgactgaaggcat

SEQ ID NO: 378442 - DNA, 33 bp, Homo sapien
taatcagatgagtaatcaaatgactgaaggcat

SEQ ID NO: 378443 - DNA, 33 bp, Homo sapien
ctgccatccgtacccaatcgccatggagaaatt

SEQ ID NO: 378444 - DNA, 33 bp, Homo sapien
ctgccatccgtacccagtcgccatggagaaatt

SEQ ID NO: 378445 - DNA, 33 bp, Homo sapien
gatctgaaatgagaaccatgtagagacctatgg

SEQ ID NO: 378446 - DNA, 33 bp, Homo sapien
gatctgaaatgagaactatgtagagacctatgg

SEQ ID NO: 378447 - DNA, 33 bp, Homo sapien
caaacagaaaacggccacctataaacaagaaag

SEQ ID NO: 378448 - DNA, 33 bp, Homo sapien
caaacagaaaacggccgcctataaacaagaaag

SEQ ID NO: 378449 - DNA, 33 bp, Homo sapien
actgttatgaggcagccgaagtggtcatcccag

SEQ ID NO: 378450 - DNA, 33 bp, Homo sapien
actgttatgaggcagctgaagtggtcatcccag

SEQ ID NO: 378451 - DNA, 33 bp, Homo sapien
tatatctcttgtcgtcaaatggcccaacttttc

SEQ ID NO: 378452 - DNA, 33 bp, Homo sapien
tatatctcttgtcgtctaatggcccaacttttc

SEQ ID NO: 378453 - DNA, 33 bp, Homo sapien
gtagaaagaacaaagaacgtgaaacagcagtgc

SEQ ID NO: 378454 - DNA, 33 bp, Homo sapien
gtagaaagaacaaagagcgtgaaacagcagtgc

SEQ ID NO: 378455 - DNA, 33 bp, Homo sapien
atgcacaaatgtttacagccatttataaacata

SEQ ID NO: 378456 - DNA, 33 bp, Homo sapien
atgcacaaatgtttacggccatttataaacata

SEQ ID NO: 378457 - DNA, 33 bp, Homo sapien
tgcagtgactctgtcacggtttactgtggcgtc

SEQ ID NO: 378458 - DNA, 33 bp, Homo sapien
tgcagtgactctgtcatggtttactgtggcgtc

SEQ ID NO: 378459 - DNA, 33 bp, Homo sapien
tccccagccactttgacggtttaagtagccaac

SEQ ID NO: 378460 - DNA, 33 bp, Homo sapien
tccccagccactttgatggtttaagtagccaac

SEQ ID NO: 378461 - DNA, 33 bp, Homo sapien
cacttttcaagctgtccagggtcgagattgatg

SEQ ID NO: 378462 - DNA, 33 bp, Homo sapien
cacttttcaagctgtctagggtcgagattgatg

SEQ ID NO: 378463 - DNA, 33 bp, Homo sapien
ttctcccagatgttaacagaacaagctgcacaa

SEQ ID NO: 378464 - DNA, 33 bp, Homo sapien
ttctcccagatgttaatagaacaagctgcacaa

SEQ ID NO: 378465 - DNA, 33 bp, Homo sapien
tcttctttgaacatcaaatagcaattcccgcaa

SEQ ID NO: 378466 - DNA, 33 bp, Homo sapien
tcttctttgaacatcagatagcaattcccgcaa

SEQ ID NO: 378467 - DNA, 33 bp, Homo sapien
ttagaatgcatacctcccattaagtgacacatg

SEQ ID NO: 378468 - DNA, 33 bp, Homo sapien
ttagaatgcatacctctcattaagtgacacatg

SEQ ID NO: 378469 - DNA, 33 bp, Homo sapien
aatctggacaatgacaatacaaggagttcaagc

SEQ ID NO: 378470 - DNA, 33 bp, Homo sapien
aatctggacaatgacagtacaaggagttcaagc

SEQ ID NO: 378471 - DNA, 33 bp, Homo sapien
aagattcaacaggaaaaatttcaataagtatac

SEQ ID NO: 378472 - DNA, 33 bp, Homo sapien
aagattcaacaggaaacatttcaataagtatac

SEQ ID NO: 378473 - DNA, 33 bp, Homo sapien
agtggtgagtagtctacaatattagctattgct

SEQ ID NO: 378474 - DNA, 33 bp, Homo sapien
agtggtgagtagtctataatattagctattgct

SEQ ID NO: 378475 - DNA, 33 bp, Homo sapien
tttcatatagttctcccggactatcccaggcct

SEQ ID NO: 378476 - DNA, 33 bp, Homo sapien
tttcatatagttctcctggactatcccaggcct

SEQ ID NO: 378477 - DNA, 33 bp, Homo sapien
cggtcaatcaaggagactagtgggtatttctct

SEQ ID NO: 378478 - DNA, 33 bp, Homo sapien
cggtcaatcaaggagagtagtgggtatttctct

SEQ ID NO: 378479 - DNA, 33 bp, Homo sapien
ctgggaagatgacaacagtctaagtggtgatga

SEQ ID NO: 378480 - DNA, 33 bp, Homo sapien
ctgggaagatgacaacggtctaagtggtgatga

SEQ ID NO: 378481 - DNA, 33 bp, Homo sapien
ggaggtcatattttgccatctgagctgaagagg

SEQ ID NO: 378482 - DNA, 33 bp, Homo sapien
ggaggtcatattttgcgatctgagctgaagagg

SEQ ID NO: 378483 - DNA, 33 bp, Homo sapien
gagcatgctggtttgaagtagtcaagggctgga

SEQ ID NO: 378484 - DNA, 33 bp, Homo sapien
gagcatgctggtttgaggtagtcaagggctgga

SEQ ID NO: 378485 - DNA, 33 bp, Homo sapien
tgcacatggcaaatgacctataatattaactat

SEQ ID NO: 378486 - DNA, 33 bp, Homo sapien
tgcacatggcaaatgatctataatattaactat

SEQ ID NO: 378487 - DNA, 33 bp, Homo sapien
ctagggatggaaaaacacaggcaggtaacatga

SEQ ID NO: 378488 - DNA, 33 bp, Homo sapien
ctagggatggaaaaacgcaggcaggtaacatga

SEQ ID NO: 378489 - DNA, 33 bp, Homo sapien
gtcaaggacacaaataaattcaacatagagtga

SEQ ID NO: 378490 - DNA, 33 bp, Homo sapien
gtcaaggacacaaatatattcaacatagagtga

SEQ ID NO: 378491 - DNA, 33 bp, Homo sapien
ttccttaaacaagtcacaaaagaattgattata

SEQ ID NO: 378492 - DNA, 33 bp, Homo sapien
ttccttaaacaagtcagaaaagaattgattata

SEQ ID NO: 378493 - DNA, 33 bp, Homo sapien
gttgagacggatccaaatccatgtttcctggtg

SEQ ID NO: 378494 - DNA, 33 bp, Homo sapien
gttgagacggatccaattccatgtttcctggtg

SEQ ID NO: 378495 - DNA, 33 bp, Homo sapien
tcaggtaagacctgcgaaagaactgaaggaagc

SEQ ID NO: 378496 - DNA, 33 bp, Homo sapien
tcaggtaagacctgcggaagaactgaaggaagc

SEQ ID NO: 378497 - DNA, 33 bp, Homo sapien
caccctggatcaggccaaggctttccccttcca

SEQ ID NO: 378498 - DNA, 33 bp, Homo sapien
caccctggatcaggccgaggctttccccttcca

SEQ ID NO: 378499 - DNA, 33 bp, Homo sapien
cttcagcttatgagaccaaaatgctgccagctg

SEQ ID NO: 378500 - DNA, 33 bp, Homo sapien
cttcagcttatgagacgaaaatgctgccagctg

SEQ ID NO: 378501 - DNA, 33 bp, Homo sapien
aagaatattcaaaagcacaattcaaccagacga

SEQ ID NO: 378502 - DNA, 33 bp, Homo sapien
aagaatattcaaaagcgcaattcaaccagacga

SEQ ID NO: 378503 - DNA, 33 bp, Homo sapien
ttgagatgagaaaaaaaaggcaacaggagcagt

SEQ ID NO: 378504 - DNA, 33 bp, Homo sapien
ttgagatgagaaaaaagaggcaacaggagcagt

SEQ ID NO: 378505 - DNA, 33 bp, Homo sapien
ccactagagagggagacatatgtgtgatgaaat

SEQ ID NO: 378506 - DNA, 33 bp, Homo sapien
ccactagagagggagatatatgtgtgatgaaat

SEQ ID NO: 378507 - DNA, 33 bp, Homo sapien
accttatcattattcaaaaggtagagttctgga

SEQ ID NO: 378508 - DNA, 33 bp, Homo sapien
accttatcattattcagaaggtagagttctgga

SEQ ID NO: 378509 - DNA, 33 bp, Homo sapien
ttccagctaatgaagacggaattaggataccac

SEQ ID NO: 378510 - DNA, 33 bp, Homo sapien
ttccagctaatgaagatggaattaggataccac

SEQ ID NO: 378511 - DNA, 33 bp, Homo sapien
atctatgtttctcatcaccagagtgctggggca

SEQ ID NO: 378512 - DNA, 33 bp, Homo sapien
atctatgtttctcatctccagagtgctggggca

SEQ ID NO: 378513 - DNA, 33 bp, Homo sapien
ccaccacaccagcataaagtaagagcactgcat

SEQ ID NO: 378514 - DNA, 33 bp, Homo sapien
ccaccacaccagcatagagtaagagcactgcat

SEQ ID NO: 378515 - DNA, 33 bp, Homo sapien
gaccaggatcttcaacaaagttttactgtaaaa

SEQ ID NO: 378516 - DNA, 33 bp, Homo sapien
gaccaggatcttcaaccaagttttactgtaaaa

SEQ ID NO: 378517 - DNA, 33 bp, Homo sapien
ttcacctcaccataaaaaagcacactgtctttt

SEQ ID NO: 378518 - DNA, 33 bp, Homo sapien
ttcacctcaccataaagaagcacactgtctttt

SEQ ID NO: 378519 - DNA, 33 bp, Homo sapien
gcttacagcacatgaacgtaacaactctgccca

SEQ ID NO: 378520 - DNA, 33 bp, Homo sapien
gcttacagcacatgaatgtaacaactctgccca

SEQ ID NO: 378521 - DNA, 33 bp, Homo sapien
ggtagcatagtagataccattatggttattgtt

SEQ ID NO: 378522 - DNA, 33 bp, Homo sapien
ggtagcatagtagatatcattatggttattgtt

SEQ ID NO: 378523 - DNA, 33 bp, Homo sapien
tgttacacggcaataacaacaaccagttaggag

SEQ ID NO: 378524 - DNA, 33 bp, Homo sapien
tgttacacggcaataataacaaccagttaggag

SEQ ID NO: 378525 - DNA, 33 bp, Homo sapien
tgcaagcctcaataggaaagttcttcctcatgc

SEQ ID NO: 378526 - DNA, 33 bp, Homo sapien
tgcaagcctcaatagggaagttcttcctcatgc

SEQ ID NO: 378527 - DNA, 33 bp, Homo sapien
atagttagctttaaaagttgtaggcaaaagtcc

SEQ ID NO: 378528 - DNA, 33 bp, Homo sapien
atagttagctttaaaatttgtaggcaaaagtcc

SEQ ID NO: 378529 - DNA, 33 bp, Homo sapien
gttgtttttaaggagcaatttacaggcagaagg

SEQ ID NO: 378530 - DNA, 33 bp, Homo sapien
gttgtttttaaggagccatttacaggcagaagg

SEQ ID NO: 378531 - DNA, 33 bp, Homo sapien
ctggactacaggtactaacaactttctctgtgt

SEQ ID NO: 378532 - DNA, 33 bp, Homo sapien
ctggactacaggtactgacaactttctctgtgt

SEQ ID NO: 378533 - DNA, 33 bp, Homo sapien
tcttgatatgacattagtaatgctgccaagaaa

SEQ ID NO: 378534 - DNA, 33 bp, Homo sapien
tcttgatatgacattattaatgctgccaagaaa

SEQ ID NO: 378535 - DNA, 33 bp, Homo sapien
ttggattatgttttcactcaaagaccagcatat

SEQ ID NO: 378536 - DNA, 33 bp, Homo sapien
ttggattatgttttcattcaaagaccagcatat

SEQ ID NO: 378537 - DNA, 33 bp, Homo sapien
tagaaaggtgagttaaatgcatccttagagaaa

SEQ ID NO: 378538 - DNA, 33 bp, Homo sapien
tagaaaggtgagttaagtgcatccttagagaaa

SEQ ID NO: 378539 - DNA, 33 bp, Homo sapien
aattaaaccagacttcacagatcaaccagaaac

SEQ ID NO: 378540 - DNA, 33 bp, Homo sapien
aattaaaccagacttcgcagatcaaccagaaac

SEQ ID NO: 378541 - DNA, 33 bp, Homo sapien
tgatcagagttaagcactaaaataccctctagc

SEQ ID NO: 378542 - DNA, 33 bp, Homo sapien
tgatcagagttaagcattaaaataccctctagc

SEQ ID NO: 378543 - DNA, 33 bp, Homo sapien
gtgcagtgaccgcggactaagctatcaccccat

SEQ ID NO: 378544 - DNA, 33 bp, Homo sapien
gtgcagtgaccgcggagtaagctatcaccccat

SEQ ID NO: 378545 - DNA, 33 bp, Homo sapien
aaacaaacaggaaccacaagttgaacttgacat

SEQ ID NO: 378546 - DNA, 33 bp, Homo sapien
aaacaaacaggaaccagaagttgaacttgacat

SEQ ID NO: 378547 - DNA, 33 bp, Homo sapien
gtcactacctgatgaaagagtgagatttacttt

SEQ ID NO: 378548 - DNA, 33 bp, Homo sapien
gtcactacctgatgaacgagtgagatttacttt

SEQ ID NO: 378549 - DNA, 33 bp, Homo sapien
tggcacagatgacagaactgaggctcagagagg

SEQ ID NO: 378550 - DNA, 33 bp, Homo sapien
tggcacagatgacagacctgaggctcagagagg

SEQ ID NO: 378551 - DNA, 33 bp, Homo sapien
acagctgcaggtcagaaaatgcggggagaggac

SEQ ID NO: 378552 - DNA, 33 bp, Homo sapien
acagctgcaggtcagagaatgcggggagaggac

SEQ ID NO: 378553 - DNA, 33 bp, Homo sapien
tcaggtgacaggtctacgcttggaaactcccag

SEQ ID NO: 378554 - DNA, 33 bp, Homo sapien
tcaggtgacaggtctaggcttggaaactcccag

SEQ ID NO: 378555 - DNA, 33 bp, Homo sapien
tcccctacaggacttacggcttggtggcacaac

SEQ ID NO: 378556 - DNA, 33 bp, Homo sapien
tcccctacaggacttatggcttggtggcacaac

SEQ ID NO: 378557 - DNA, 33 bp, Homo sapien
ggatgccagcaagggcaagtgaggtcaaggatg

SEQ ID NO: 378558 - DNA, 33 bp, Homo sapien
ggatgccagcaagggcgagtgaggtcaaggatg

SEQ ID NO: 378559 - DNA, 33 bp, Homo sapien
caagttctctctgctacgaaatgtgagagctga

SEQ ID NO: 378560 - DNA, 33 bp, Homo sapien
caagttctctctgctatgaaatgtgagagctga

SEQ ID NO: 378561 - DNA, 33 bp, Homo sapien
actcaatccttcaccacgtctatggcctcatta

SEQ ID NO: 378562 - DNA, 33 bp, Homo sapien
actcaatccttcaccatgtctatggcctcatta

SEQ ID NO: 378563 - DNA, 33 bp, Homo sapien
ccacatgctaagaatcaccagggctatgtttat

SEQ ID NO: 378564 - DNA, 33 bp, Homo sapien
ccacatgctaagaatcgccagggctatgtttat

SEQ ID NO: 378565 - DNA, 33 bp, Homo sapien
cttcacctgtttgaacccttctataaatctgca

SEQ ID NO: 378566 - DNA, 33 bp, Homo sapien
cttcacctgtttgaacgcttctataaatctgca

SEQ ID NO: 378567 - DNA, 33 bp, Homo sapien
cttcagaggaaacaaacggtcgtctatgtcctt

SEQ ID NO: 378568 - DNA, 33 bp, Homo sapien
cttcagaggaaacaaatggtcgtctatgtcctt

SEQ ID NO: 378569 - DNA, 33 bp, Homo sapien
aatgtcaagacggtgaaagcagggcattagata

SEQ ID NO: 378570 - DNA, 33 bp, Homo sapien
aatgtcaagacggtgagagcagggcattagata

SEQ ID NO: 378571 - DNA, 33 bp, Homo sapien
agccacaaagaaaggcaacttcagatctaacct

SEQ ID NO: 378572 - DNA, 33 bp, Homo sapien
agccacaaagaaaggcgacttcagatctaacct

SEQ ID NO: 378573 - DNA, 33 bp, Homo sapien
atccaacacacctatggcagactttcaagcttc

SEQ ID NO: 378574 - DNA, 33 bp, Homo sapien
atccaacacacctatgtcagactttcaagcttc

SEQ ID NO: 378575 - DNA, 33 bp, Homo sapien
tttcctggtttcctcgaatcaggatgactggag

SEQ ID NO: 378576 - DNA, 33 bp, Homo sapien
tttcctggtttcctcggatcaggatgactggag

SEQ ID NO: 378577 - DNA, 33 bp, Homo sapien
ttgcctgacacagagacgtaacaggttgagtga

SEQ ID NO: 378578 - DNA, 33 bp, Homo sapien
ttgcctgacacagagaggtaacaggttgagtga

SEQ ID NO: 378579 - DNA, 33 bp, Homo sapien
gaggcctcccagagacacgaaggggcatatctg

SEQ ID NO: 378580 - DNA, 33 bp, Homo sapien
gaggcctcccagagacgcgaaggggcatatctg

SEQ ID NO: 378581 - DNA, 33 bp, Homo sapien
caggatgattcgagcacattacatttattgtgc

SEQ ID NO: 378582 - DNA, 33 bp, Homo sapien
caggatgattcgagcatattacatttattgtgc

SEQ ID NO: 378583 - DNA, 33 bp, Homo sapien
ttcttcctccatcctccatctgaatctatagtg

SEQ ID NO: 378584 - DNA, 33 bp, Homo sapien
ttcttcctccatcctctatctgaatctatagtg

SEQ ID NO: 378585 - DNA, 33 bp, Homo sapien
ttcaaatcgaagagacagaagaatggaatttac

SEQ ID NO: 378586 - DNA, 33 bp, Homo sapien
ttcaaatcgaagagacggaagaatggaatttac

SEQ ID NO: 378587 - DNA, 33 bp, Homo sapien
agtggttctgctggtaagatttgattcctgttg

SEQ ID NO: 378588 - DNA, 33 bp, Homo sapien
agtggttctgctggtacgatttgattcctgttg

SEQ ID NO: 378589 - DNA, 33 bp, Homo sapien
cttgtttttcagaagaagactgtttgtgccggt

SEQ ID NO: 378590 - DNA, 33 bp, Homo sapien
cttgtttttcagaagaggactgtttgtgccggt

SEQ ID NO: 378591 - DNA, 33 bp, Homo sapien
tgattggagactgacaatgaattcagaggagct

SEQ ID NO: 378592 - DNA, 33 bp, Homo sapien
tgattggagactgacagtgaattcagaggagct

SEQ ID NO: 378593 - DNA, 33 bp, Homo sapien
agctggagttctatgaaggaagagcgaggaggc

SEQ ID NO: 378594 - DNA, 33 bp, Homo sapien
agctggagttctatgagggaagagcgaggaggc

SEQ ID NO: 378595 - DNA, 33 bp, Homo sapien
gaggtcgtatttgtcacatttctccactgtgaa

SEQ ID NO: 378596 - DNA, 33 bp, Homo sapien
gaggtcgtatttgtcagatttctccactgtgaa

SEQ ID NO: 378597 - DNA, 33 bp, Homo sapien
tgaggagcagtggtcacgtatactgtaggatgc

SEQ ID NO: 378598 - DNA, 33 bp, Homo sapien
tgaggagcagtggtcatgtatactgtaggatgc

SEQ ID NO: 378599 - DNA, 33 bp, Homo sapien
aggaggcagcacttggccatctggtcacagttg

SEQ ID NO: 378600 - DNA, 33 bp, Homo sapien
aggaggcagcacttggtcatctggtcacagttg

SEQ ID NO: 378601 - DNA, 33 bp, Homo sapien
cagaggctgtatacccacccagagttattttat

SEQ ID NO: 378602 - DNA, 33 bp, Homo sapien
cagaggctgtatacccccccagagttattttat

SEQ ID NO: 378603 - DNA, 33 bp, Homo sapien
ctgactctggagcagacggatacatgtatgaat

SEQ ID NO: 378604 - DNA, 33 bp, Homo sapien
ctgactctggagcagatggatacatgtatgaat

SEQ ID NO: 378605 - DNA, 33 bp, Homo sapien
taagaaaagagagaaaatattacctaagctgtg

SEQ ID NO: 378606 - DNA, 33 bp, Homo sapien
taagaaaagagagaaactattacctaagctgtg

SEQ ID NO: 378607 - DNA, 33 bp, Homo sapien
atcctgaaataaaaaaacgatgataatttgacc

SEQ ID NO: 378608 - DNA, 33 bp, Homo sapien
atcctgaaataaaaaagcgatgataatttgacc

SEQ ID NO: 378609 - DNA, 33 bp, Homo sapien
ccttctttatggaaatcatcctaactgggttgg

SEQ ID NO: 378610 - DNA, 33 bp, Homo sapien
ccttctttatggaaatgatcctaactgggttgg

SEQ ID NO: 378611 - DNA, 33 bp, Homo sapien
ccagattatttctaagcaacatttaacctcata

SEQ ID NO: 378612 - DNA, 33 bp, Homo sapien
ccagattatttctaaggaacatttaacctcata

SEQ ID NO: 378613 - DNA, 33 bp, Homo sapien
tcattgtcccttcaaaccaccttccgtttctct

SEQ ID NO: 378614 - DNA, 33 bp, Homo sapien
tcattgtcccttcaaatcaccttccgtttctct

SEQ ID NO: 378615 - DNA, 33 bp, Homo sapien
agaggctcttttaacaactccacaattccctgt

SEQ ID NO: 378616 - DNA, 33 bp, Homo sapien
agaggctcttttaacagctccacaattccctgt

SEQ ID NO: 378617 - DNA, 33 bp, Homo sapien
gggactggatgatgaaagggcatttgtttattt

SEQ ID NO: 378618 - DNA, 33 bp, Homo sapien
gggactggatgatgaaggggcatttgtttattt

SEQ ID NO: 378619 - DNA, 33 bp, Homo sapien
cgatattcaaatgcataaagttttttactgttc

SEQ ID NO: 378620 - DNA, 33 bp, Homo sapien
cgatattcaaatgcattaagttttttactgttc

SEQ ID NO: 378621 - DNA, 33 bp, Homo sapien
acctttaatgaagttaaaagtcaatccctttgg

SEQ ID NO: 378622 - DNA, 33 bp, Homo sapien
acctttaatgaagttagaagtcaatccctttgg

SEQ ID NO: 378623 - DNA, 33 bp, Homo sapien
tcaaatttctcctccagccagtctaacacaata

SEQ ID NO: 378624 - DNA, 33 bp, Homo sapien
tcaaatttctcctccatccagtctaacacaata

SEQ ID NO: 378625 - DNA, 33 bp, Homo sapien
atagtaccagaaagtacatccggaaatgtgata

SEQ ID NO: 378626 - DNA, 33 bp, Homo sapien
atagtaccagaaagtagatccggaaatgtgata

SEQ ID NO: 378627 - DNA, 33 bp, Homo sapien
cactgaggggaaacacaggacattgaggggcaa

SEQ ID NO: 378628 - DNA, 33 bp, Homo sapien
cactgaggggaaacaccggacattgaggggcaa

SEQ ID NO: 378629 - DNA, 33 bp, Homo sapien
tcgtctgtccctgacccatttgcaagtgtgtca

SEQ ID NO: 378630 - DNA, 33 bp, Homo sapien
tcgtctgtccctgacctatttgcaagtgtgtca

SEQ ID NO: 378631 - DNA, 33 bp, Homo sapien
ctcttgcaggattcataaagcaaagacataatc

SEQ ID NO: 378632 - DNA, 33 bp, Homo sapien
ctcttgcaggattcatcaagcaaagacataatc

SEQ ID NO: 378633 - DNA, 33 bp, Homo sapien
gatgtggtctggacacactagaggaagttaaaa

SEQ ID NO: 378634 - DNA, 33 bp, Homo sapien
gatgtggtctggacacgctagaggaagttaaaa

SEQ ID NO: 378635 - DNA, 33 bp, Homo sapien
cttttcgggatggagaaattcccatggcgtcca

SEQ ID NO: 378636 - DNA, 33 bp, Homo sapien
cttttcgggatggagatattcccatggcgtcca

SEQ ID NO: 378637 - DNA, 33 bp, Homo sapien
gaggtccccgtgttcgcaatcagcagtaagggt

SEQ ID NO: 378638 - DNA, 33 bp, Homo sapien
gaggtccccgtgttcgtaatcagcagtaagggt

SEQ ID NO: 378639 - DNA, 33 bp, Homo sapien
ggatataggctgctcacggtttatacctctgga

SEQ ID NO: 378640 - DNA, 33 bp, Homo sapien
ggatataggctgctcatggtttatacctctgga

SEQ ID NO: 378641 - DNA, 33 bp, Homo sapien
tggcacctagacagacggacaaagagggaccaa

SEQ ID NO: 378642 - DNA, 33 bp, Homo sapien
tggcacctagacagactgacaaagagggaccaa

SEQ ID NO: 378643 - DNA, 33 bp, Homo sapien
ctggggatgcagcgctgacggaaccctaagaac

SEQ ID NO: 378644 - DNA, 33 bp, Homo sapien
ctggggatgcagcgcttacggaaccctaagaac

SEQ ID NO: 378645 - DNA, 33 bp, Homo sapien
atgtggcagaagccataagggaacatctctgag

SEQ ID NO: 378646 - DNA, 33 bp, Homo sapien
atgtggcagaagccatcagggaacatctctgag

SEQ ID NO: 378647 - DNA, 33 bp, Homo sapien
ccagggatatgggaaacataaaaagaacatgtc

SEQ ID NO: 378648 - DNA, 33 bp, Homo sapien
ccagggatatgggaaagataaaaagaacatgtc

SEQ ID NO: 378649 - DNA, 33 bp, Homo sapien
ccatctgtcccagagactccacaaggcacacag

SEQ ID NO: 378650 - DNA, 33 bp, Homo sapien
ccatctgtcccagagattccacaaggcacacag

SEQ ID NO: 378651 - DNA, 33 bp, Homo sapien
ggtccatccagaaacacggcggtttgtgttcac

SEQ ID NO: 378652 - DNA, 33 bp, Homo sapien
ggtccatccagaaacatggcggtttgtgttcac

SEQ ID NO: 378653 - DNA, 33 bp, Homo sapien
ttgcaaagccttacacacccaggaattcatatg

SEQ ID NO: 378654 - DNA, 33 bp, Homo sapien
ttgcaaagccttacacgcccaggaattcatatg

SEQ ID NO: 378655 - DNA, 33 bp, Homo sapien
caatcatgtatcctgccacttgggatgccagca

SEQ ID NO: 378656 - DNA, 33 bp, Homo sapien
caatcatgtatcctgctacttgggatgccagca

SEQ ID NO: 378657 - DNA, 33 bp, Homo sapien
tgtgtttattgatcaaacctggcttcgagtgtg

SEQ ID NO: 378658 - DNA, 33 bp, Homo sapien
tgtgtttattgatcaagcctggcttcgagtgtg

SEQ ID NO: 378659 - DNA, 33 bp, Homo sapien
aggactggacagcagcacaaacaacagagaggt

SEQ ID NO: 378660 - DNA, 33 bp, Homo sapien
aggactggacagcagcgcaaacaacagagaggt

SEQ ID NO: 378661 - DNA, 33 bp, Homo sapien
gtgtcaccgtcacataataggaagagcatgtgg

SEQ ID NO: 378662 - DNA, 33 bp, Homo sapien
gtgtcaccgtcacatagtaggaagagcatgtgg

SEQ ID NO: 378663 - DNA, 33 bp, Homo sapien
ttctttcactgggcataatattttccaagtttg

SEQ ID NO: 378664 - DNA, 33 bp, Homo sapien
ttctttcactgggcatgatattttccaagtttg

SEQ ID NO: 378665 - DNA, 33 bp, Homo sapien
gcctcgtttaattcacagacaaggggctaggtt

SEQ ID NO: 378666 - DNA, 33 bp, Homo sapien
gcctcgtttaattcacggacaaggggctaggtt

SEQ ID NO: 378667 - DNA, 33 bp, Homo sapien
gaggccctgaaagagaggtacctgcccaaagtc

SEQ ID NO: 378668 - DNA, 33 bp, Homo sapien
gaggccctgaaagagatgtacctgcccaaagtc

SEQ ID NO: 378669 - DNA, 33 bp, Homo sapien
ctgacatcttgaccttcaacggagtgctttttt

SEQ ID NO: 378670 - DNA, 33 bp, Homo sapien
ctgacatcttgacctttaacggagtgctttttt

SEQ ID NO: 378671 - DNA, 33 bp, Homo sapien
aacagtgacaaattgagacactctgtgtcaggt

SEQ ID NO: 378672 - DNA, 33 bp, Homo sapien
aacagtgacaaattgatacactctgtgtcaggt

SEQ ID NO: 378673 - DNA, 33 bp, Homo sapien
ttgtaattagatcaggcccatcagctttttttg

SEQ ID NO: 378674 - DNA, 33 bp, Homo sapien
ttgtaattagatcaggtccatcagctttttttg

SEQ ID NO: 378675 - DNA, 33 bp, Homo sapien
gatggagcaaagttagacgggaagaaacgatag

SEQ ID NO: 378676 - DNA, 33 bp, Homo sapien
gatggagcaaagttaggcgggaagaaacgatag

SEQ ID NO: 378677 - DNA, 33 bp, Homo sapien
cacacagcttcccttcactgactttccgtggta

SEQ ID NO: 378678 - DNA, 33 bp, Homo sapien
cacacagcttcccttctctgactttccgtggta

SEQ ID NO: 378679 - DNA, 33 bp, Homo sapien
gccattgtttgttgacagaatgaatttgggacc

SEQ ID NO: 378680 - DNA, 33 bp, Homo sapien
gccattgtttgttgacggaatgaatttgggacc

SEQ ID NO: 378681 - DNA, 33 bp, Homo sapien
ctggagaaagcaaatccattcgtgctgagcagg

SEQ ID NO: 378682 - DNA, 33 bp, Homo sapien
ctggagaaagcaaatctattcgtgctgagcagg

SEQ ID NO: 378683 - DNA, 33 bp, Homo sapien
tttagagtctagtgaaatgaacactctagaagt

SEQ ID NO: 378684 - DNA, 33 bp, Homo sapien
tttagagtctagtgaagtgaacactctagaagt

SEQ ID NO: 378685 - DNA, 33 bp, Homo sapien
tgatgatggtcggcaacgtctagttcacatcct

SEQ ID NO: 378686 - DNA, 33 bp, Homo sapien
tgatgatggtcggcaatgtctagttcacatcct

SEQ ID NO: 378687 - DNA, 33 bp, Homo sapien
gaaagagtaattcacacagagccggttgtgcag

SEQ ID NO: 378688 - DNA, 33 bp, Homo sapien
gaaagagtaattcacagagagccggttgtgcag

SEQ ID NO: 378689 - DNA, 33 bp, Homo sapien
cactatcttggtgaacacttccaatagctcctg

SEQ ID NO: 378690 - DNA, 33 bp, Homo sapien
cactatcttggtgaacccttccaatagctcctg

SEQ ID NO: 378691 - DNA, 33 bp, Homo sapien
gaaccccatccagagccaagggaaggcattcaa

SEQ ID NO: 378692 - DNA, 33 bp, Homo sapien
gaaccccatccagagcgaagggaaggcattcaa

SEQ ID NO: 378693 - DNA, 33 bp, Homo sapien
ttcggtctagtcgtatcagtttccctggttttt

SEQ ID NO: 378694 - DNA, 33 bp, Homo sapien
ttcggtctagtcgtattagtttccctggttttt

SEQ ID NO: 378695 - DNA, 33 bp, Homo sapien
tgatgttcaagtcacactgtacttcaaaatgca

SEQ ID NO: 378696 - DNA, 33 bp, Homo sapien
tgatgttcaagtcacattgtacttcaaaatgca

SEQ ID NO: 378697 - DNA, 33 bp, Homo sapien
tgtggctactggtttgcactctcccatgtgctt

SEQ ID NO: 378698 - DNA, 33 bp, Homo sapien
tgtggctactggtttggactctcccatgtgctt

SEQ ID NO: 378699 - DNA, 33 bp, Homo sapien
agaaaatagtactagccccatttcacagttaag

SEQ ID NO: 378700 - DNA, 33 bp, Homo sapien
agaaaatagtactagctccatttcacagttaag

SEQ ID NO: 378701 - DNA, 33 bp, Homo sapien
gtaagtgttttaagcaagtatcagtgggtattg

SEQ ID NO: 378702 - DNA, 33 bp, Homo sapien
gtaagtgttttaagcacgtatcagtgggtattg

SEQ ID NO: 378703 - DNA, 33 bp, Homo sapien
ccacaaggggagaccaccgtgtgaagacagagg

SEQ ID NO: 378704 - DNA, 33 bp, Homo sapien
ccacaaggggagaccatcgtgtgaagacagagg

SEQ ID NO: 378705 - DNA, 33 bp, Homo sapien
taatacaaagcactcaaatagtagaaagggtaa

SEQ ID NO: 378706 - DNA, 33 bp, Homo sapien
taatacaaagcactcagatagtagaaagggtaa

SEQ ID NO: 378707 - DNA, 33 bp, Homo sapien
tcagacattgcaatcccagtgtgaccaagccct

SEQ ID NO: 378708 - DNA, 33 bp, Homo sapien
tcagacattgcaatccgagtgtgaccaagccct

SEQ ID NO: 378709 - DNA, 33 bp, Homo sapien
acatgaatccattggcaagagaaaacaaaacaa

SEQ ID NO: 378710 - DNA, 33 bp, Homo sapien
acatgaatccattggccagagaaaacaaaacaa

SEQ ID NO: 378711 - DNA, 33 bp, Homo sapien
acagaagagttaaagcaatgtatctttaaaagc

SEQ ID NO: 378712 - DNA, 33 bp, Homo sapien
acagaagagttaaagcgatgtatctttaaaagc

SEQ ID NO: 378713 - DNA, 33 bp, Homo sapien
aggaaataaatgagaaaatggaagctaattctc

SEQ ID NO: 378714 - DNA, 33 bp, Homo sapien
aggaaataaatgagaagatggaagctaattctc

SEQ ID NO: 378715 - DNA, 33 bp, Homo sapien
aacaaacaaaaacacaccagttactccatcaca

SEQ ID NO: 378716 - DNA, 33 bp, Homo sapien
aacaaacaaaaacacagcagttactccatcaca

SEQ ID NO: 378717 - DNA, 33 bp, Homo sapien
agcaggagcttggtaaataaatagtacatgagt

SEQ ID NO: 378718 - DNA, 33 bp, Homo sapien
agcaggagcttggtaagtaaatagtacatgagt

SEQ ID NO: 378719 - DNA, 33 bp, Homo sapien
taaactggcataagtgaaaaagggcattggctc

SEQ ID NO: 378720 - DNA, 33 bp, Homo sapien
taaactggcataagtgtaaaagggcattggctc

SEQ ID NO: 378721 - DNA, 33 bp, Homo sapien
tcatacattccactgcacctcacagtccctggg

SEQ ID NO: 378722 - DNA, 33 bp, Homo sapien
tcatacattccactgctcctcacagtccctggg

SEQ ID NO: 378723 - DNA, 33 bp, Homo sapien
ggaaggggagctttcaccactgtttgcaaagga

SEQ ID NO: 378724 - DNA, 33 bp, Homo sapien
ggaaggggagctttcatcactgtttgcaaagga

SEQ ID NO: 378725 - DNA, 33 bp, Homo sapien
cttggctcctctgttgaaaatcaactggcatca

SEQ ID NO: 378726 - DNA, 33 bp, Homo sapien
cttggctcctctgttgcaaatcaactggcatca

SEQ ID NO: 378727 - DNA, 33 bp, Homo sapien
tattatatctaagaaacggttgcctaacccatg

SEQ ID NO: 378728 - DNA, 33 bp, Homo sapien
tattatatctaagaaatggttgcctaacccatg

SEQ ID NO: 378729 - DNA, 33 bp, Homo sapien
gagcttgtcagacccacgatggaggggccctga

SEQ ID NO: 378730 - DNA, 33 bp, Homo sapien
gagcttgtcagacccaggatggaggggccctga

SEQ ID NO: 378731 - DNA, 33 bp, Homo sapien
ctgaggtgtctgcggacagtgagatctggaaag

SEQ ID NO: 378732 - DNA, 33 bp, Homo sapien
ctgaggtgtctgcggatagtgagatctggaaag

SEQ ID NO: 378733 - DNA, 33 bp, Homo sapien
gaagccctgattgctgcacttgtccccagagaa

SEQ ID NO: 378734 - DNA, 33 bp, Homo sapien
gaagccctgattgctgtacttgtccccagagaa

SEQ ID NO: 378735 - DNA, 33 bp, Homo sapien
caagcaggaaattcccagccattcatttctgtg

SEQ ID NO: 378736 - DNA, 33 bp, Homo sapien
caagcaggaaattcccggccattcatttctgtg

SEQ ID NO: 378737 - DNA, 33 bp, Homo sapien
caagcaatgaaaaaaccatacatggccctgcaa

SEQ ID NO: 378738 - DNA, 33 bp, Homo sapien
caagcaatgaaaaaacgatacatggccctgcaa

SEQ ID NO: 378739 - DNA, 33 bp, Homo sapien
atgagagctatccctaaaccttgaggcaagacc

SEQ ID NO: 378740 - DNA, 33 bp, Homo sapien
atgagagctatccctacaccttgaggcaagacc

SEQ ID NO: 378741 - DNA, 33 bp, Homo sapien
tttgacacgtcgcacaatgccacctgggtcatg

SEQ ID NO: 378742 - DNA, 33 bp, Homo sapien
tttgacacgtcgcacagtgccacctgggtcatg

SEQ ID NO: 378743 - DNA, 33 bp, Homo sapien
tagaatgtgagttgggaccatgttgtagttcag

SEQ ID NO: 378744 - DNA, 33 bp, Homo sapien
tagaatgtgagttgggcccatgttgtagttcag

SEQ ID NO: 378745 - DNA, 33 bp, Homo sapien
gaaactaattcagccccagaatggtttgacagt

SEQ ID NO: 378746 - DNA, 33 bp, Homo sapien
gaaactaattcagccctagaatggtttgacagt

SEQ ID NO: 378747 - DNA, 33 bp, Homo sapien
ttgggatgtaatacaactatgaaaatgaaccag

SEQ ID NO: 378748 - DNA, 33 bp, Homo sapien
ttgggatgtaatacaattatgaaaatgaaccag

SEQ ID NO: 378749 - DNA, 33 bp, Homo sapien
ctcattgccggttaacgcttgaagcttatccac

SEQ ID NO: 378750 - DNA, 33 bp, Homo sapien
ctcattgccggttaactcttgaagcttatccac

SEQ ID NO: 378751 - DNA, 33 bp, Homo sapien; identical to SEQ ID NO: 378749

SEQ ID NO: 378752 - DNA, 33 bp, Homo sapien; identical to SEQ ID NO: 378750

SEQ ID NO: 378753 - DNA, 33 bp, Homo sapien
caacctaacttgtaaccgcccactagggaatgc

SEQ ID NO: 378754 - DNA, 33 bp, Homo sapien
caacctaacttgtaactgcccactagggaatgc

SEQ ID NO: 378755 - DNA, 33 bp, Homo sapien
tttttaaaaagtgagaatcaacaatgaaacagg

SEQ ID NO: 378756 - DNA, 33 bp, Homo sapien
tttttaaaaagtgagactcaacaatgaaacagg

SEQ ID NO: 378757 - DNA, 33 bp, Homo sapien
aagcaacacagacttacggggccatacctcatt

SEQ ID NO: 378758 - DNA, 33 bp, Homo sapien
aagcaacacagacttatggggccatacctcatt

SEQ ID NO: 378759 - DNA, 33 bp, Homo sapien
ttctcaagatttaggaatcacctgacactaaac

SEQ ID NO: 378760 - DNA, 33 bp, Homo sapien
ttctcaagatttaggattcacctgacactaaac

SEQ ID NO: 378761 - DNA, 33 bp, Homo sapien
gtataccagattgtcacagcccacaagaacctg

SEQ ID NO: 378762 - DNA, 33 bp, Homo sapien
gtataccagattgtcatagcccacaagaacctg

SEQ ID NO: 378763 - DNA, 33 bp, Homo sapien
aagaggatgctctcccacactgaccggaatgac

SEQ ID NO: 378764 - DNA, 33 bp, Homo sapien
aagaggatgctctcccgcactgaccggaatgac

SEQ ID NO: 378765 - DNA, 33 bp, Homo sapien
gcacttctagggatcagattaaggcagagggta

SEQ ID NO: 378766 - DNA, 33 bp, Homo sapien
gcacttctagggatcatattaaggcagagggta

SEQ ID NO: 378767 - DNA, 33 bp, Homo sapien
ctaacgatgcccaagaagaatccagaattagca

SEQ ID NO: 378768 - DNA, 33 bp, Homo sapien
ctaacgatgcccaagaggaatccagaattagca

SEQ ID NO: 378769 - DNA, 33 bp, Homo sapien
cacacatctggaaaaacggtctaaagccaattt

SEQ ID NO: 378770 - DNA, 33 bp, Homo sapien
cacacatctggaaaaatggtctaaagccaattt

SEQ ID NO: 378771 - DNA, 33 bp, Homo sapien
ctgccacagctctgccacgggagaaaggccctg

SEQ ID NO: 378772 - DNA, 33 bp, Homo sapien
ctgccacagctctgccgcgggagaaaggccctg

SEQ ID NO: 378773 - DNA, 33 bp, Homo sapien
catagaaagatagagaatattaccaggacagct

SEQ ID NO: 378774 - DNA, 33 bp, Homo sapien
catagaaagatagagactattaccaggacagct

SEQ ID NO: 378775 - DNA, 33 bp, Homo sapien
ttgtcatcactttaccaggctgtcaggagcatc

SEQ ID NO: 378776 - DNA, 33 bp, Homo sapien
ttgtcatcactttaccgggctgtcaggagcatc

SEQ ID NO: 378777 - DNA, 33 bp, Homo sapien
ctacaggattttgttacacacctgagtccagtt

SEQ ID NO: 378778 - DNA, 33 bp, Homo sapien
ctacaggattttgttatacacctgagtccagtt

SEQ ID NO: 378779 - DNA, 33 bp, Homo sapien
aaggccacacagctgactagacatgaaactggg

SEQ ID NO: 378780 - DNA, 33 bp, Homo sapien
aaggccacacagctgattagacatgaaactggg

SEQ ID NO: 378781 - DNA, 33 bp, Homo sapien
taagaaaaaaagtgccagaaggcattccagctg

SEQ ID NO: 378782 - DNA, 33 bp, Homo sapien
taagaaaaaaagtgcccgaaggcattccagctg

SEQ ID NO: 378783 - DNA, 33 bp, Homo sapien
cgaatcagctaacttccaggcaagttgctggat

SEQ ID NO: 378784 - DNA, 33 bp, Homo sapien
cgaatcagctaacttctaggcaagttgctggat

SEQ ID NO: 378785 - DNA, 33 bp, Homo sapien
ccatatgtaatgttaaaagacaagtgacaaatt

SEQ ID NO: 378786 - DNA, 33 bp, Homo sapien
ccatatgtaatgttaacagacaagtgacaaatt

SEQ ID NO: 378787 - DNA, 33 bp, Homo sapien
gcctcatattggaagcagatgccatctaagagt

SEQ ID NO: 378788 - DNA, 33 bp, Homo sapien
gcctcatattggaagcggatgccatctaagagt

SEQ ID NO: 378789 - DNA, 33 bp, Homo sapien
aaatttggacttaaacaaagaaatgaagagtat

SEQ ID NO: 378790 - DNA, 33 bp, Homo sapien
aaatttggacttaaaccaagaaatgaagagtat

SEQ ID NO: 378791 - DNA, 33 bp, Homo sapien
tcatgtgtttcatccagcaaagataatgtgttc

SEQ ID NO: 378792 - DNA, 33 bp, Homo sapien
tcatgtgtttcatccatcaaagataatgtgttc

SEQ ID NO: 378793 - DNA, 33 bp, Homo sapien
aagttgtacaagaaaacgaaatgccgctacatg

SEQ ID NO: 378794 - DNA, 33 bp, Homo sapien
aagttgtacaagaaaatgaaatgccgctacatg

SEQ ID NO: 378795 - DNA, 33 bp, Homo sapien
gctggggcagcaggaaaacgccaaaagaaaaga

SEQ ID NO: 378796 - DNA, 33 bp, Homo sapien
gctggggcagcaggaagacgccaaaagaaaaga

SEQ ID NO: 378797 - DNA, 33 bp, Homo sapien
ctccagccctaccgtacagcgagtttaagatgg

SEQ ID NO: 378798 - DNA, 33 bp, Homo sapien
ctccagccctaccgtagagcgagtttaagatgg

SEQ ID NO: 378799 - DNA, 33 bp, Homo sapien
atgttgtgatcatctccattagtgcattgtgct

SEQ ID NO: 378800 - DNA, 33 bp, Homo sapien
atgttgtgatcatctctattagtgcattgtgct

SEQ ID NO: 378801 - DNA, 33 bp, Homo sapien
tatgttttctccaaacggtgttaaagttgtacc

SEQ ID NO: 378802 - DNA, 33 bp, Homo sapien
tatgttttctccaaactgtgttaaagttgtacc

SEQ ID NO: 378803 - DNA, 33 bp, Homo sapien
aaaaatgtgcaaaaaaaccatgaaccagcattt

SEQ ID NO: 378804 - DNA, 33 bp, Homo sapien
aaaaatgtgcaaaaaagccatgaaccagcattt

SEQ ID NO: 378805 - DNA, 33 bp, Homo sapien
tgtgtctgctatagagccaaatgacccaataag

SEQ ID NO: 378806 - DNA, 33 bp, Homo sapien
tgtgtctgctatagagtcaaatgacccaataag

SEQ ID NO: 378807 - DNA, 33 bp, Homo sapien
ttctttgccttttaacaggagcatttagttcat

SEQ ID NO: 378808 - DNA, 33 bp, Homo sapien
ttctttgccttttaacgggagcatttagttcat

SEQ ID NO: 378809 - DNA, 33 bp, Homo sapien
aatgtcagctgaatgacagcgagcatacgccac

SEQ ID NO: 378810 - DNA, 33 bp, Homo sapien
aatgtcagctgaatgagagcgagcatacgccac

SEQ ID NO: 378811 - DNA, 33 bp, Homo sapien
aatggcagtagaagcacgttatttatggctctg

SEQ ID NO: 378812 - DNA, 33 bp, Homo sapien
aatggcagtagaagcatgttatttatggctctg

SEQ ID NO: 378813 - DNA, 33 bp, Homo sapien
ctgtgaagacaggaacagaagtataattttagt

SEQ ID NO: 378814 - DNA, 33 bp, Homo sapien
ctgtgaagacaggaacggaagtataattttagt

SEQ ID NO: 378815 - DNA, 33 bp, Homo sapien
ctccattctggccacaactggaaggtggtctcc

SEQ ID NO: 378816 - DNA, 33 bp, Homo sapien
ctccattctggccacatctggaaggtggtctcc

SEQ ID NO: 378817 - DNA, 33 bp, Homo sapien
accaactccaggtatcactactatgagaaccag

SEQ ID NO: 378818 - DNA, 33 bp, Homo sapien
accaactccaggtatcgctactatgagaaccag

SEQ ID NO: 378819 - DNA, 33 bp, Homo sapien
agctgccactctggccacataggagaggcttat

SEQ ID NO: 378820 - DNA, 33 bp, Homo sapien
agctgccactctggccgcataggagaggcttat

SEQ ID NO: 378821 - DNA, 33 bp, Homo sapien
ttcagggcctgatcaactggtaacccgggcagc

SEQ ID NO: 378822 - DNA, 33 bp, Homo sapien
ttcagggcctgatcaattggtaacccgggcagc

SEQ ID NO: 378823 - DNA, 33 bp, Homo sapien
atgaagagagttgatagaggaaagcatatggga

SEQ ID NO: 378824 - DNA, 33 bp, Homo sapien
atgaagagagttgatataggaaagcatatggga

SEQ ID NO: 378825 - DNA, 33 bp, Homo sapien
cctcaccaaagcacgaatcaggctggaggtggg

SEQ ID NO: 378826 - DNA, 33 bp, Homo sapien
cctcaccaaagcacgagtcaggctggaggtggg

SEQ ID NO: 378827 - DNA, 33 bp, Homo sapien
ggaatttggggcaaaaatggctgcaaagtatgt

SEQ ID NO: 378828 - DNA, 33 bp, Homo sapien
ggaatttggggcaaaagtggctgcaaagtatgt

SEQ ID NO: 378829 - DNA, 33 bp, Homo sapien
cccttgctctcccttacccaacaggcttgaacc

SEQ ID NO: 378830 - DNA, 33 bp, Homo sapien
cccttgctctcccttatccaacaggcttgaacc

SEQ ID NO: 378831 - DNA, 33 bp, Homo sapien
gacttagaacctaaagaagaaacagggattagg

SEQ ID NO: 378832 - DNA, 33 bp, Homo sapien
gacttagaacctaaaggagaaacagggattagg

SEQ ID NO: 378833 - DNA, 33 bp, Homo sapien
ggagggctgaagtgacacggtggttctgctttg

SEQ ID NO: 378834 - DNA, 33 bp, Homo sapien
ggagggctgaagtgacgcggtggttctgctttg

SEQ ID NO: 378835 - DNA, 33 bp, Homo sapien
cagatgctctggaccccgggtactggctccccc

SEQ ID NO: 378836 - DNA, 33 bp, Homo sapien
cagatgctctggaccctgggtactggctccccc

SEQ ID NO: 378837 - DNA, 33 bp, Homo sapien
gaggaagacaaccacaataataaaccagatact

SEQ ID NO: 378838 - DNA, 33 bp, Homo sapien
gaggaagacaaccacagtaataaaccagatact

SEQ ID NO: 378839 - DNA, 33 bp, Homo sapien
gattatccactgtttacagcaagtgcgcttgtt

SEQ ID NO: 378840 - DNA, 33 bp, Homo sapien
gattatccactgtttatagcaagtgcgcttgtt

SEQ ID NO: 378841 - DNA, 33 bp, Homo sapien
ccacctttgatggctacatgcttgcctgctcat

SEQ ID NO: 378842 - DNA, 33 bp, Homo sapien
ccacctttgatggctatatgcttgcctgctcat

SEQ ID NO: 378843 - DNA, 33 bp, Homo sapien
atcagctgttgtaatcacctagcaaactggcgt

SEQ ID NO: 378844 - DNA, 33 bp, Homo sapien
atcagctgttgtaatcgcctagcaaactggcgt

SEQ ID NO: 378845 - DNA, 33 bp, Homo sapien
ccatggcctctggagacgcaccatgtgtttgtg

SEQ ID NO: 378846 - DNA, 33 bp, Homo sapien
ccatggcctctggagatgcaccatgtgtttgtg

SEQ ID NO: 378847 - DNA, 33 bp, Homo sapien
caggcagcccttgataaatgaatgaacggagcc

SEQ ID NO: 378848 - DNA, 33 bp, Homo sapien
caggcagcccttgatagatgaatgaacggagcc

SEQ ID NO: 378849 - DNA, 33 bp, Homo sapien
ttaggtgaaagggaaccgaactaaaagtcacaa

SEQ ID NO: 378850 - DNA, 33 bp, Homo sapien
ttaggtgaaagggaactgaactaaaagtcacaa

SEQ ID NO: 378851 - DNA, 33 bp, Homo sapien
taagtccttctgcgtaaggggtcctacagaggt

SEQ ID NO: 378852 - DNA, 33 bp, Homo sapien
taagtccttctgcgtatggggtcctacagaggt

SEQ ID NO: 378853 - DNA, 33 bp, Homo sapien
ggaaaaagatagagaacgtatctgctttggttt

SEQ ID NO: 378854 - DNA, 33 bp, Homo sapien
ggaaaaagatagagaatgtatctgctttggttt

SEQ ID NO: 378855 - DNA, 33 bp, Homo sapien
tcattctctctccactcaccctttactacccat

SEQ ID NO: 378856 - DNA, 33 bp, Homo sapien
tcattctctctccacttaccctttactacccat

SEQ ID NO: 378857 - DNA, 33 bp, Homo sapien
aactttagagccttgcaaacctgcttacgtgga

SEQ ID NO: 378858 - DNA, 33 bp, Homo sapien
aactttagagccttgctaacctgcttacgtgga

SEQ ID NO: 378859 - DNA, 33 bp, Homo sapien
atcccatgcatacatacagttcagtgaaatccc

SEQ ID NO: 378860 - DNA, 33 bp, Homo sapien
atcccatgcatacatagagttcagtgaaatccc

SEQ ID NO: 378861 - DNA, 33 bp, Homo sapien
atatactacttgcataaattgctggtgcatgct

SEQ ID NO: 378862 - DNA, 33 bp, Homo sapien
atatactacttgcatacattgctggtgcatgct

SEQ ID NO: 378863 - DNA, 33 bp, Homo sapien; identical to SEQ ID NO: 378861

SEQ ID NO: 378864 - DNA, 33 bp, Homo sapien; identical to SEQ ID NO: 378862

SEQ ID NO: 378865 - DNA, 33 bp, Homo sapien
agaaatgtcactgtcccgccctacatcttcaaa

SEQ ID NO: 378866 - DNA, 33 bp, Homo sapien
agaaatgtcactgtcctgccctacatcttcaaa

SEQ ID NO: 378867 - DNA, 33 bp, Homo sapien
aaacaatcattcaaacagtaagtgatcaagaca

SEQ ID NO: 378868 - DNA, 33 bp, Homo sapien
aaacaatcattcaaaccgtaagtgatcaagaca

SEQ ID NO: 378869 - DNA, 33 bp, Homo sapien
ttaagtcacttacccaaagcgatacagctggta

SEQ ID NO: 378870 - DNA, 33 bp, Homo sapien
ttaagtcacttacccagagcgatacagctggta

SEQ ID NO: 378871 - DNA, 33 bp, Homo sapien
tagcacccttttgagacggtctacactgctgtg

SEQ ID NO: 378872 - DNA, 33 bp, Homo sapien
tagcacccttttgagatggtctacactgctgtg

SEQ ID NO: 378873 - DNA, 33 bp, Homo sapien
ctccaggaaagctaaaaggggcgccacataccc

SEQ ID NO: 378874 - DNA, 33 bp, Homo sapien
ctccaggaaagctaaagggggcgccacataccc

SEQ ID NO: 378875 - DNA, 33 bp, Homo sapien
agcgtttgactaggaaagctagcccctcagagg

SEQ ID NO: 378876 - DNA, 33 bp, Homo sapien
agcgtttgactaggaaggctagcccctcagagg

SEQ ID NO: 378877 - DNA, 33 bp, Homo sapien
aacctaaaaggcagaaaagctgcaccttccaaa

SEQ ID NO: 378878 - DNA, 33 bp, Homo sapien
aacctaaaaggcagaagagctgcaccttccaaa

SEQ ID NO: 378879 - DNA, 33 bp, Homo sapien
tcctcttcaacccagacggctgctgcctgtaca

SEQ ID NO: 378880 - DNA, 33 bp, Homo sapien
tcctcttcaacccagatggctgctgcctgtaca

SEQ ID NO: 378881 - DNA, 33 bp, Homo sapien
ttttgcatcttttttccacctgtgaaatgtaac

SEQ ID NO: 378882 - DNA, 33 bp, Homo sapien
ttttgcatcttttttctacctgtgaaatgtaac

SEQ ID NO: 378883 - DNA, 33 bp, Homo sapien
ccccatcctgggtacaaacaagaaaggcaaaaa

SEQ ID NO: 378884 - DNA, 33 bp, Homo sapien
ccccatcctgggtacagacaagaaaggcaaaaa

SEQ ID NO: 378885 - DNA, 33 bp, Homo sapien
gtcagggcatgtttaggacttttcttgcagaac

SEQ ID NO: 378886 - DNA, 33 bp, Homo sapien
gtcagggcatgtttagtacttttcttgcagaac

SEQ ID NO: 378887 - DNA, 33 bp, Homo sapien
cagcctgggagagcccacttttcctcagcagac

SEQ ID NO: 378888 - DNA, 33 bp, Homo sapien
cagcctgggagagcccgcttttcctcagcagac

SEQ ID NO: 378889 - DNA, 33 bp, Homo sapien
ctctgggtccttccgccactgatgggcagtaat

SEQ ID NO: 378890 - DNA, 33 bp, Homo sapien
ctctgggtccttccgctactgatgggcagtaat

SEQ ID NO: 378891 - DNA, 33 bp, Homo sapien
ctgtccattcttacaaaagatccacccccaaac

SEQ ID NO: 378892 - DNA, 33 bp, Homo sapien
ctgtccattcttacaacagatccacccccaaac

SEQ ID NO: 378893 - DNA, 33 bp, Homo sapien
acgagaaatcaaaagaacaagaaacgtcatgcc

SEQ ID NO: 378894 - DNA, 33 bp, Homo sapien
acgagaaatcaaaagagcaagaaacgtcatgcc

SEQ ID NO: 378895 - DNA, 33 bp, Homo sapien
acaaggagccttgcccaaaaggagcccagcacc

SEQ ID NO: 378896 - DNA, 33 bp, Homo sapien
acaaggagccttgcccgaaaggagcccagcacc

SEQ ID NO: 378897 - DNA, 33 bp, Homo sapien
tgggccaagaaagcagcactctctctcatttac

SEQ ID NO: 378898 - DNA, 33 bp, Homo sapien
tgggccaagaaagcaggactctctctcatttac

SEQ ID NO: 378899 - DNA, 33 bp, Homo sapien
catcccgctactgtccccatgctatagatttga

SEQ ID NO: 378900 - DNA, 33 bp, Homo sapien
catcccgctactgtcctcatgctatagatttga

SEQ ID NO: 378901 - DNA, 33 bp, Homo sapien
atcattcttagtattacggttcaaggtcggttg

SEQ ID NO: 378902 - DNA, 33 bp, Homo sapien
atcattcttagtattatggttcaaggtcggttg

SEQ ID NO: 378903 - DNA, 33 bp, Homo sapien
tgtctgttctctgccaacagcaaggccagctat

SEQ ID NO: 378904 - DNA, 33 bp, Homo sapien
tgtctgttctctgccagcagcaaggccagctat

SEQ ID NO: 378905 - DNA, 33 bp, Homo sapien
gtcccttcttggctggcagcaactggaggaaca

SEQ ID NO: 378906 - DNA, 33 bp, Homo sapien
gtcccttcttggctgggagcaactggaggaaca

SEQ ID NO: 378907 - DNA, 33 bp, Homo sapien
tgcccagccaatagtacggattttgtgggaccc

SEQ ID NO: 378908 - DNA, 33 bp, Homo sapien
tgcccagccaatagtatggattttgtgggaccc

SEQ ID NO: 378909 - DNA, 33 bp, Homo sapien
ctacctccttgggaaaagctattggcagcagtg

SEQ ID NO: 378910 - DNA, 33 bp, Homo sapien
ctacctccttgggaaaggctattggcagcagtg

SEQ ID NO: 378911 - DNA, 33 bp, Homo sapien
tgaaatcgtctatcaccgactcttcaaatatcg

SEQ ID NO: 378912 - DNA, 33 bp, Homo sapien
tgaaatcgtctatcactgactcttcaaatatcg

SEQ ID NO: 378913 - DNA, 33 bp, Homo sapien
ctcctttgtgaaatggaccaacagtaagtagtg

SEQ ID NO: 378914 - DNA, 33 bp, Homo sapien
ctcctttgtgaaatgggccaacagtaagtagtg

SEQ ID NO: 378915 - DNA, 33 bp, Homo sapien
tatgaagctaatctccaattctgtgtgcagact

SEQ ID NO: 378916 - DNA, 33 bp, Homo sapien
tatgaagctaatctccgattctgtgtgcagact

SEQ ID NO: 378917 - DNA, 33 bp, Homo sapien
atctccaagtgcttgaaagttacacaacacact

SEQ ID NO: 378918 - DNA, 33 bp, Homo sapien
atctccaagtgcttgacagttacacaacacact

SEQ ID NO: 378919 - DNA, 33 bp, Homo sapien
ctcttttaggacaatacaacaaaatgaggaagt

SEQ ID NO: 378920 - DNA, 33 bp, Homo sapien
ctcttttaggacaatataacaaaatgaggaagt

SEQ ID NO: 378921 - DNA, 33 bp, Homo sapien
gtatttatgtctgagacggggtatcactctgtc

SEQ ID NO: 378922 - DNA, 33 bp, Homo sapien
gtatttatgtctgagatggggtatcactctgtc

SEQ ID NO: 378923 - DNA, 33 bp, Homo sapien
catggtgactccaacacggtgacctaagccagg

SEQ ID NO: 378924 - DNA, 33 bp, Homo sapien
catggtgactccaacatggtgacctaagccagg

SEQ ID NO: 378925 - DNA, 33 bp, Homo sapien
gtgtacagattaaaagacccggttggatttcgt

SEQ ID NO: 378926 - DNA, 33 bp, Homo sapien
gtgtacagattaaaagtcccggttggatttcgt

SEQ ID NO: 378927 - DNA, 33 bp, Homo sapien
atgttgtttgacagtaaaagtctggtgagtgac

SEQ ID NO: 378928 - DNA, 33 bp, Homo sapien
atgttgtttgacagtagaagtctggtgagtgac

SEQ ID NO: 378929 - DNA, 33 bp, Homo sapien
aaagcagagatgacacaatgggaaaactcgtcc

SEQ ID NO: 378930 - DNA, 33 bp, Homo sapien
aaagcagagatgacacgatgggaaaactcgtcc

SEQ ID NO: 378931 - DNA, 33 bp, Homo sapien
cttgcctgaacttttcaattacgtgacccctaa

SEQ ID NO: 378932 - DNA, 33 bp, Homo sapien
cttgcctgaacttttcgattacgtgacccctaa

SEQ ID NO: 378933 - DNA, 33 bp, Homo sapien
ttcctcgtagccagacacatcacatcatcgctc

SEQ ID NO: 378934 - DNA, 33 bp, Homo sapien
ttcctcgtagccagacgcatcacatcatcgctc

SEQ ID NO: 378935 - DNA, 33 bp, Homo sapien
tccattcctacagcacagtgatgtatcgagtac

SEQ ID NO: 378936 - DNA, 33 bp, Homo sapien
tccattcctacagcaccgtgatgtatcgagtac

SEQ ID NO: 378937 - DNA, 33 bp, Homo sapien
atggccttaatcccaaattaaaccgaatgcatg

SEQ ID NO: 378938 - DNA, 33 bp, Homo sapien
atggccttaatcccaagttaaaccgaatgcatg

SEQ ID NO: 378939 - DNA, 33 bp, Homo sapien
ttctacaagatccccaagtccgtgcagaaccgc

SEQ ID NO: 378940 - DNA, 33 bp, Homo sapien
ttctacaagatccccaggtccgtgcagaaccgc

SEQ ID NO: 378941 - DNA, 33 bp, Homo sapien
tgatgagggtcttcacagcaaagtagtaacagc

SEQ ID NO: 378942 - DNA, 33 bp, Homo sapien
tgatgagggtcttcacggcaaagtagtaacagc

SEQ ID NO: 378943 - DNA, 33 bp, Homo sapien
gagtcctaactgcctcaatgaaaaggaaaagtg

SEQ ID NO: 378944 - DNA, 33 bp, Homo sapien
gagtcctaactgcctcgatgaaaaggaaaagtg

SEQ ID NO: 378945 - DNA, 33 bp, Homo sapien
cctttctgcatccaaactctattagggtgtgca

SEQ ID NO: 378946 - DNA, 33 bp, Homo sapien
cctttctgcatccaaagtctattagggtgtgca

SEQ ID NO: 378947 - DNA, 33 bp, Homo sapien
aaaagagccaggtcaccacatcttccccaagct

SEQ ID NO: 378948 - DNA, 33 bp, Homo sapien
aaaagagccaggtcactacatcttccccaagct

SEQ ID NO: 378949 - DNA, 33 bp, Homo sapien
aggacatgcgaaataactacctgaagtctcgcc

SEQ ID NO: 378950 - DNA, 33 bp, Homo sapien
aggacatgcgaaataattacctgaagtctcgcc

SEQ ID NO: 378951 - DNA, 33 bp, Homo sapien
tgatacgttcaaattacgcacatcagatattgc

SEQ ID NO: 378952 - DNA, 33 bp, Homo sapien
tgatacgttcaaattatgcacatcagatattgc

SEQ ID NO: 378953 - DNA, 33 bp, Homo sapien
ctagagcatcagccagacaaggctcttcaccag

SEQ ID NO: 378954 - DNA, 33 bp, Homo sapien
ctagagcatcagccaggcaaggctcttcaccag

SEQ ID NO: 378955 - DNA, 33 bp, Homo sapien
tacttttgaaaggtataaaagatcatgaaccca

SEQ ID NO: 378956 - DNA, 33 bp, Homo sapien
tacttttgaaaggtatgaaagatcatgaaccca

SEQ ID NO: 378957 - DNA, 33 bp, Homo sapien
ctgtaattggtaagaacttctgggtgggcaccc

SEQ ID NO: 378958 - DNA, 33 bp, Homo sapien
ctgtaattggtaagaatttctgggtgggcaccc

SEQ ID NO: 378959 - DNA, 33 bp, Homo sapien
agtcttgaagctggaaaacatagccatattgaa

SEQ ID NO: 378960 - DNA, 33 bp, Homo sapien
agtcttgaagctggaagacatagccatattgaa

SEQ ID NO: 378961 - DNA, 33 bp, Homo sapien
gctgctggacctcaaacggacctcaaaagctga

SEQ ID NO: 378962 - DNA, 33 bp, Homo sapien
gctgctggacctcaaatggacctcaaaagctga

SEQ ID NO: 378963 - DNA, 33 bp, Homo sapien
gtgggaggtttcttcccgaaggatctgagaagc

SEQ ID NO: 378964 - DNA, 33 bp, Homo sapien
gtgggaggtttcttcctgaaggatctgagaagc

SEQ ID NO: 378965 - DNA, 33 bp, Homo sapien
ttggtttactgagaaacgcaaaagcctgggaaa

SEQ ID NO: 378966 - DNA, 33 bp, Homo sapien
ttggtttactgagaaatgcaaaagcctgggaaa

SEQ ID NO: 378967 - DNA, 33 bp, Homo sapien
cagttatccaaataggaagtagcacacactaca

SEQ ID NO: 378968 - DNA, 33 bp, Homo sapien
cagttatccaaatagggagtagcacacactaca

SEQ ID NO: 378969 - DNA, 33 bp, Homo sapien
catcctgactggtcccaaccgagagatccaagt

SEQ ID NO: 378970 - DNA, 33 bp, Homo sapien
catcctgactggtcccgaccgagagatccaagt

SEQ ID NO: 378971 - DNA, 33 bp, Homo sapien
tcatgattgccaagtcaccttccacagggatgt

SEQ ID NO: 378972 - DNA, 33 bp, Homo sapien
tcatgattgccaagtcgccttccacagggatgt

SEQ ID NO: 378973 - DNA, 33 bp, Homo sapien
attctgccaagagacacaggtggagaggaggga

SEQ ID NO: 378974 - DNA, 33 bp, Homo sapien
attctgccaagagacataggtggagaggaggga

SEQ ID NO: 378975 - DNA, 33 bp, Homo sapien
aggtggaaccagaaccaaatcctgaggaggccg

SEQ ID NO: 378976 - DNA, 33 bp, Homo sapien
aggtggaaccagaaccgaatcctgaggaggccg

SEQ ID NO: 378977 - DNA, 33 bp, Homo sapien
gaggagcagaatgggaaccggggagcctggagc

SEQ ID NO: 378978 - DNA, 33 bp, Homo sapien
gaggagcagaatgggacccggggagcctggagc

SEQ ID NO: 378979 - DNA, 33 bp, Homo sapien
ttggagggaaaatcatcagcactactttgttaa

SEQ ID NO: 378980 - DNA, 33 bp, Homo sapien
ttggagggaaaatcatgagcactactttgttaa

SEQ ID NO: 378981 - DNA, 33 bp, Homo sapien
gctttataattactgccgcaggttgtcccttgt

SEQ ID NO: 378982 - DNA, 33 bp, Homo sapien
gctttataattactgctgcaggttgtcccttgt

SEQ ID NO: 378983 - DNA, 33 bp, Homo sapien
catgcttctctgtcaccgtaagaaggctgacca

SEQ ID NO: 378984 - DNA, 33 bp, Homo sapien
catgcttctctgtcactgtaagaaggctgacca

SEQ ID NO: 378985 - DNA, 33 bp, Homo sapien
tagagaatgctaacagaataaatgtactcattt

SEQ ID NO: 378986 - DNA, 33 bp, Homo sapien
tagagaatgctaacaggataaatgtactcattt

SEQ ID NO: 378987 - DNA, 33 bp, Homo sapien
cccagtgagtgcatcaaacagggaggctcgctt

SEQ ID NO: 378988 - DNA, 33 bp, Homo sapien
cccagtgagtgcatcagacagggaggctcgctt

SEQ ID NO: 378989 - DNA, 33 bp, Homo sapien
taactgtggtgtgatagggtcaggagtgggtag

SEQ ID NO: 378990 - DNA, 33 bp, Homo sapien
taactgtggtgtgatatggtcaggagtgggtag

SEQ ID NO: 378991 - DNA, 33 bp, Homo sapien
tgaagcttattaacaacacagatctttgccccc

SEQ ID NO: 378992 - DNA, 33 bp, Homo sapien
tgaagcttattaacaatacagatctttgccccc

SEQ ID NO: 378993 - DNA, 33 bp, Homo sapien
ctttgggtttgtttccgcatttgcaaaaggaga

SEQ ID NO: 378994 - DNA, 33 bp, Homo sapien
ctttgggtttgtttcctcatttgcaaaaggaga

SEQ ID NO: 378995 - DNA, 33 bp, Homo sapien
ccctgtgtttgtctccagatcactacactcaat

SEQ ID NO: 378996 - DNA, 33 bp, Homo sapien
ccctgtgtttgtctccggatcactacactcaat

SEQ ID NO: 378997 - DNA, 33 bp, Homo sapien
gattggcctggacacccgcttaaagctggagtt

SEQ ID NO: 378998 - DNA, 33 bp, Homo sapien
gattggcctggacacctgcttaaagctggagtt

SEQ ID NO: 378999 - DNA, 33 bp, Homo sapien
attttgacagctttgaagggaaccattaagggc

SEQ ID NO: 379000 - DNA, 33 bp, Homo sapien
attttgacagctttgaggggaaccattaagggc

SEQ ID NO: 379001 - DNA, 33 bp, Homo sapien
gcccattacagtattaactcaaaatccaaaatt

SEQ ID NO: 379002 - DNA, 33 bp, Homo sapien
gcccattacagtattacctcaaaatccaaaatt

SEQ ID NO: 379003 - DNA, 33 bp, Homo sapien
gcacccagggcatagacagttgaggttaatgct

SEQ ID NO: 379004 - DNA, 33 bp, Homo sapien
gcacccagggcatagagagttgaggttaatgct

SEQ ID NO: 379005 - DNA, 33 bp, Homo sapien; identical to SEQ ID NO: 379003

SEQ ID NO: 379006 - DNA, 33 bp, Homo sapien; identical to SEQ ID NO: 379004

SEQ ID NO: 379007 - DNA, 33 bp, Homo sapien
cacaaatttctttgtacgcctcttgggctaccg

SEQ ID NO: 379008 - DNA, 33 bp, Homo sapien
cacaaatttctttgtatgcctcttgggctaccg

SEQ ID NO: 379009 - DNA, 33 bp, Homo sapien
ttcttgccgtcgtcccagagatgcctttggaaa

SEQ ID NO: 379010 - DNA, 33 bp, Homo sapien
ttcttgccgtcgtcccggagatgcctttggaaa

SEQ ID NO: 379011 - DNA, 33 bp, Homo sapien
tgccagcaacgaactccagaaccctccgtgccc

SEQ ID NO: 379012 - DNA, 33 bp, Homo sapien
tgccagcaacgaactcgagaaccctccgtgccc

SEQ ID NO: 379013 - DNA, 33 bp, Homo sapien
ccaatgaacacattgtaaagttgaaaaactgta

SEQ ID NO: 379014 - DNA, 33 bp, Homo sapien
ccaatgaacacattgtgaagttgaaaaactgta

SEQ ID NO: 379015 - DNA, 33 bp, Homo sapien
agtaccaccaatagcagcacatattcggcaaag

SEQ ID NO: 379016 - DNA, 33 bp, Homo sapien
agtaccaccaatagcatcacatattcggcaaag

SEQ ID NO: 379017 - DNA, 33 bp, Homo sapien
aaggaaactgttaaccaggctctcttagatcta

SEQ ID NO: 379018 - DNA, 33 bp, Homo sapien
aaggaaactgttaaccgggctctcttagatcta

SEQ ID NO: 379019 - DNA, 33 bp, Homo sapien
ctattgagtgtatgacacagaccaagctttcct

SEQ ID NO: 379020 - DNA, 33 bp, Homo sapien
ctattgagtgtatgacgcagaccaagctttcct

SEQ ID NO: 379021 - DNA, 33 bp, Homo sapien
taaacctgtattgatacgtcaggcagcaaaact

SEQ ID NO: 379022 - DNA, 33 bp, Homo sapien
taaacctgtattgatatgtcaggcagcaaaact

SEQ ID NO: 379023 - DNA, 33 bp, Homo sapien
cccggagcaagtgttgaatccattttgcaaacc

SEQ ID NO: 379024 - DNA, 33 bp, Homo sapien
cccggagcaagtgttggatccattttgcaaacc

SEQ ID NO: 379025 - DNA, 33 bp, Homo sapien
aagaataagcaaacacacaaagtgaatccacac

SEQ ID NO: 379026 - DNA, 33 bp, Homo sapien
aagaataagcaaacacgcaaagtgaatccacac

SEQ ID NO: 379027 - DNA, 33 bp, Homo sapien
aattttagaaacttgcgatctattaactcaggg

SEQ ID NO: 379028 - DNA, 33 bp, Homo sapien
aattttagaaacttgctatctattaactcaggg

SEQ ID NO: 379029 - DNA, 33 bp, Homo sapien
cggagaaaaatgcaaactcacaatgttgcagtt

SEQ ID NO: 379030 - DNA, 33 bp, Homo sapien
cggagaaaaatgcaaattcacaatgttgcagtt

SEQ ID NO: 379031 - DNA, 33 bp, Homo sapien
gggaccccttgtctatcagaaggtcaggcttac

SEQ ID NO: 379032 - DNA, 33 bp, Homo sapien
gggaccccttgtctattagaaggtcaggcttac

SEQ ID NO: 379033 - DNA, 33 bp, Homo sapien
gtgctccaccaagatactaatttcatcacctgc

SEQ ID NO: 379034 - DNA, 33 bp, Homo sapien
gtgctccaccaagatattaatttcatcacctgc

SEQ ID NO: 379035 - DNA, 33 bp, Homo sapien
agggtggtgtagtgtaagaagtgctgtaaatga

SEQ ID NO: 379036 - DNA, 33 bp, Homo sapien
agggtggtgtagtgtaggaagtgctgtaaatga

SEQ ID NO: 379037 - DNA, 33 bp, Homo sapien
tcttcctgaaacaacacattagtggtatttatc

SEQ ID NO: 379038 - DNA, 33 bp, Homo sapien
tcttcctgaaacaacatattagtggtatttatc

SEQ ID NO: 379039 - DNA, 33 bp, Homo sapien
cacattaaacagggatcacctataccagctgcc

SEQ ID NO: 379040 - DNA, 33 bp, Homo sapien
cacattaaacagggattacctataccagctgcc

SEQ ID NO: 379041 - DNA, 33 bp, Homo sapien
gaaggaaaatttagccaacccttcatgctaatt

SEQ ID NO: 379042 - DNA, 33 bp, Homo sapien
gaaggaaaatttagccgacccttcatgctaatt

SEQ ID NO: 379043 - DNA, 33 bp, Homo sapien
gtcagagaccttcagtaaatacagtgctacccc

SEQ ID NO: 379044 - DNA, 33 bp, Homo sapien
gtcagagaccttcagtgaatacagtgctacccc

SEQ ID NO: 379045 - DNA, 33 bp, Homo sapien
ttaacctgaatctaataataaggacaccatcag

SEQ ID NO: 379046 - DNA, 33 bp, Homo sapien
ttaacctgaatctaatgataaggacaccatcag

SEQ ID NO: 379047 - DNA, 33 bp, Homo sapien
aatttcccctgcagtaaccttctattaggttgg

SEQ ID NO: 379048 - DNA, 33 bp, Homo sapien
aatttcccctgcagtacccttctattaggttgg

SEQ ID NO: 379049 - DNA, 33 bp, Homo sapien
tataaagactcaagtacggagatgtccgcaggc

SEQ ID NO: 379050 - DNA, 33 bp, Homo sapien
tataaagactcaagtatggagatgtccgcaggc

SEQ ID NO: 379051 - DNA, 33 bp, Homo sapien
caaaaaaataaaggacactagacatggcagaag

SEQ ID NO: 379052 - DNA, 33 bp, Homo sapien
caaaaaaataaaggactctagacatggcagaag

SEQ ID NO: 379053 - DNA, 33 bp, Homo sapien
ttcacacagactttcacatatcatccccgtttt

SEQ ID NO: 379054 - DNA, 33 bp, Homo sapien
ttcacacagactttcatatatcatccccgtttt

SEQ ID NO: 379055 - DNA, 33 bp, Homo sapien
taccagtataacctgcagaactctgagccagtt

SEQ ID NO: 379056 - DNA, 33 bp, Homo sapien
taccagtataacctgcggaactctgagccagtt

SEQ ID NO: 379057 - DNA, 33 bp, Homo sapien
ctccagctgtctacaacgctaactggctggata

SEQ ID NO: 379058 - DNA, 33 bp, Homo sapien
ctccagctgtctacaatgctaactggctggata

SEQ ID NO: 379059 - DNA, 33 bp, Homo sapien
cttgtcctgtactcagactgaggatgctacttg

SEQ ID NO: 379060 - DNA, 33 bp, Homo sapien
cttgtcctgtactcaggctgaggatgctacttg

SEQ ID NO: 379061 - DNA, 33 bp, Homo sapien
tgtatgtccaacattgaagagatccttagactc

SEQ ID NO: 379062 - DNA, 33 bp, Homo sapien
tgtatgtccaacattgcagagatccttagactc

SEQ ID NO: 379063 - DNA, 33 bp, Homo sapien
ctgtggcaagagtggactcaggtggtgggtaaa

SEQ ID NO: 379064 - DNA, 33 bp, Homo sapien
ctgtggcaagagtggattcaggtggtgggtaaa

SEQ ID NO: 379065 - DNA, 33 bp, Homo sapien
tttgtaaaacaaaaacaatgattactgaataac

SEQ ID NO: 379066 - DNA, 33 bp, Homo sapien
tttgtaaaacaaaaactatgattactgaataac

SEQ ID NO: 379067 - DNA, 33 bp, Homo sapien
cccactctattcaaaaatcttcccaatgatcac

SEQ ID NO: 379068 - DNA, 33 bp, Homo sapien
cccactctattcaaaagtcttcccaatgatcac

SEQ ID NO: 379069 - DNA, 33 bp, Homo sapien
gtttggttctgtggaccggagatccacgggcca

SEQ ID NO: 379070 - DNA, 33 bp, Homo sapien
gtttggttctgtggactggagatccacgggcca

SEQ ID NO: 379071 - DNA, 33 bp, Homo sapien
gtaatttctagacaccaaagatgcctgatgtcc

SEQ ID NO: 379072 - DNA, 33 bp, Homo sapien
gtaatttctagacaccgaagatgcctgatgtcc

SEQ ID NO: 379073 - DNA, 33 bp, Homo sapien
aaaaacaacacaatatcagataaaggaactcag

SEQ ID NO: 379074 - DNA, 33 bp, Homo sapien
aaaaacaacacaatatgagataaaggaactcag

SEQ ID NO: 379075 - DNA, 33 bp, Homo sapien
ccagtcacaaaaagacaatagtatatgaccctg

SEQ ID NO: 379076 - DNA, 33 bp, Homo sapien
ccagtcacaaaaagacgatagtatatgaccctg

SEQ ID NO: 379077 - DNA, 33 bp, Homo sapien
gaatgtctggaaaagaacattctgatcttcaag

SEQ ID NO: 379078 - DNA, 33 bp, Homo sapien
gaatgtctggaaaagaccattctgatcttcaag

SEQ ID NO: 379079 - DNA, 33 bp, Homo sapien
tttctggatcccgagtcactcaagcaatagtcc

SEQ ID NO: 379080 - DNA, 33 bp, Homo sapien
tttctggatcccgagtgactcaagcaatagtcc

SEQ ID NO: 379081 - DNA, 33 bp, Homo sapien
cagaattttttcttgcactgaactcaaatctcc

SEQ ID NO: 379082 - DNA, 33 bp, Homo sapien
cagaattttttcttgcgctgaactcaaatctcc

SEQ ID NO: 379083 - DNA, 33 bp, Homo sapien
ctcccagtccagtatgcatcccacctaactcag

SEQ ID NO: 379084 - DNA, 33 bp, Homo sapien
ctcccagtccagtatgtatcccacctaactcag

SEQ ID NO: 379085 - DNA, 33 bp, Homo sapien
aatgatgctttgtcaaactctaaaactgtttgt

SEQ ID NO: 379086 - DNA, 33 bp, Homo sapien
aatgatgctttgtcaacctctaaaactgtttgt

SEQ ID NO: 379087 - DNA, 33 bp, Homo sapien
ggttttcagttgcatcactgccctctacctact

SEQ ID NO: 379088 - DNA, 33 bp, Homo sapien
ggttttcagttgcatcgctgccctctacctact

SEQ ID NO: 379089 - DNA, 33 bp, Homo sapien
tcacttggaaaactgggaccttggcgttttcac

SEQ ID NO: 379090 - DNA, 33 bp, Homo sapien
tcacttggaaaactggtaccttggcgttttcac

SEQ ID NO: 379091 - DNA, 33 bp, Homo sapien
cgcaggagaggcaggacaaagtaacacaggaaa

SEQ ID NO: 379092 - DNA, 33 bp, Homo sapien
cgcaggagaggcaggagaaagtaacacaggaaa

SEQ ID NO: 379093 - DNA, 33 bp, Homo sapien
agacatggaatggggccgcaattaacaacagga

SEQ ID NO: 379094 - DNA, 33 bp, Homo sapien
agacatggaatggggctgcaattaacaacagga

SEQ ID NO: 379095 - DNA, 33 bp, Homo sapien
attttcctcaggacacccatcgtcatgtgattt

SEQ ID NO: 379096 - DNA, 33 bp, Homo sapien
attttcctcaggacactcatcgtcatgtgattt

SEQ ID NO: 379097 - DNA, 33 bp, Homo sapien
agtgaaagaaaacaacaatggcttagacaagag

SEQ ID NO: 379098 - DNA, 33 bp, Homo sapien
agtgaaagaaaacaacgatggcttagacaagag

SEQ ID NO: 379099 - DNA, 33 bp, Homo sapien
gaagaattaacacaggaaatatgagctggatga

SEQ ID NO: 379100 - DNA, 33 bp, Homo sapien
gaagaattaacacagggaatatgagctggatga

SEQ ID NO: 379101 - DNA, 33 bp, Homo sapien
tgaaggccaaatcaaaagcagcataaaggagaa

SEQ ID NO: 379102 - DNA, 33 bp, Homo sapien
tgaaggccaaatcaaaggcagcataaaggagaa

SEQ ID NO: 379103 - DNA, 33 bp, Homo sapien
aatgtcccaaaaagaaatcagaccaaagataag

SEQ ID NO: 379104 - DNA, 33 bp, Homo sapien
aatgtcccaaaaagaactcagaccaaagataag

SEQ ID NO: 379105 - DNA, 33 bp, Homo sapien
gctggggaaacaaaacccaatgactccatcctc

SEQ ID NO: 379106 - DNA, 33 bp, Homo sapien
gctggggaaacaaaactcaatgactccatcctc

SEQ ID NO: 379107 - DNA, 33 bp, Homo sapien
gaggcatagaaaaccccgcatgtgtttgggaag

SEQ ID NO: 379108 - DNA, 33 bp, Homo sapien
gaggcatagaaaaccctgcatgtgtttgggaag

SEQ ID NO: 379109 - DNA, 33 bp, Homo sapien
gccatttacctcacgaactggttaaaattgacc

SEQ ID NO: 379110 - DNA, 33 bp, Homo sapien
gccatttacctcacgagctggttaaaattgacc

SEQ ID NO: 379111 - DNA, 33 bp, Homo sapien
tgaatgagtgattgaacggaagcgaggttcaca

SEQ ID NO: 379112 - DNA, 33 bp, Homo sapien
tgaatgagtgattgaatggaagcgaggttcaca

SEQ ID NO: 379113 - DNA, 33 bp, Homo sapien
ccaccattcttgtggcgcgacaggatatcttgg

SEQ ID NO: 379114 - DNA, 33 bp, Homo sapien
ccaccattcttgtggctcgacaggatatcttgg

SEQ ID NO: 379115 - DNA, 33 bp, Homo sapien
actagaaaaccgggacgaagcagacttgtttgc

SEQ ID NO: 379116 - DNA, 33 bp, Homo sapien
actagaaaaccgggactaagcagacttgtttgc

SEQ ID NO: 379117 - DNA, 33 bp, Homo sapien
gcagccaaaaaaagaactctctggggacttggt

SEQ ID NO: 379118 - DNA, 33 bp, Homo sapien
gcagccaaaaaaagaagtctctggggacttggt

SEQ ID NO: 379119 - DNA, 33 bp, Homo sapien
actcctaaaagaatacaaggcaagcgaccgcca

SEQ ID NO: 379120 - DNA, 33 bp, Homo sapien
actcctaaaagaatactaggcaagcgaccgcca

SEQ ID NO: 379121 - DNA, 33 bp, Homo sapien
agcagaactgtaatcaagttgaaactgagctgg

SEQ ID NO: 379122 - DNA, 33 bp, Homo sapien
agcagaactgtaatcacgttgaaactgagctgg

SEQ ID NO: 379123 - DNA, 33 bp, Homo sapien
gaaattccaaaaagtaaaataggactgatcatc

SEQ ID NO: 379124 - DNA, 33 bp, Homo sapien
gaaattccaaaaagtacaataggactgatcatc

SEQ ID NO: 379125 - DNA, 33 bp, Homo sapien
gactccactacaaatcaccatggttgagcccca

SEQ ID NO: 379126 - DNA, 33 bp, Homo sapien
gactccactacaaatcgccatggttgagcccca

SEQ ID NO: 379127 - DNA, 33 bp, Homo sapien
aactatatcccagggcagaaatgaggaagtgtc

SEQ ID NO: 379128 - DNA, 33 bp, Homo sapien
aactatatcccagggcggaaatgaggaagtgtc

SEQ ID NO: 379129 - DNA, 33 bp, Homo sapien
agcaattgagtagaaacggctgctggaaatgct

SEQ ID NO: 379130 - DNA, 33 bp, Homo sapien
agcaattgagtagaaatggctgctggaaatgct

SEQ ID NO: 379131 - DNA, 33 bp, Homo sapien
aatatatacacaatgacagtttcatgatgagcc

SEQ ID NO: 379132 - DNA, 33 bp, Homo sapien
aatatatacacaatgatagtttcatgatgagcc

SEQ ID NO: 379133 - DNA, 33 bp, Homo sapien
ttcatctccatttaacgcagctgaacactttgt

SEQ ID NO: 379134 - DNA, 33 bp, Homo sapien
ttcatctccatttaactcagctgaacactttgt

SEQ ID NO: 379135 - DNA, 33 bp, Homo sapien
ttttggttactgtctacatagaaacaggctcca

SEQ ID NO: 379136 - DNA, 33 bp, Homo sapien
ttttggttactgtctagatagaaacaggctcca

SEQ ID NO: 379137 - DNA, 33 bp, Homo sapien
ctaggactggttaacaatggtaaagaaaatgca

SEQ ID NO: 379138 - DNA, 33 bp, Homo sapien
ctaggactggttaacagtggtaaagaaaatgca

SEQ ID NO: 379139 - DNA, 33 bp, Homo sapien
cttctccactattaccagcatttccatctgttg

SEQ ID NO: 379140 - DNA, 33 bp, Homo sapien
cttctccactattaccggcatttccatctgttg

SEQ ID NO: 379141 - DNA, 33 bp, Homo sapien
ctggacaatgctccccaactcttgtgtcagaag

SEQ ID NO: 379142 - DNA, 33 bp, Homo sapien
ctggacaatgctccccgactcttgtgtcagaag

SEQ ID NO: 379143 - DNA, 33 bp, Homo sapien
gggttgtaggtacttacggcattgagagctctg

SEQ ID NO: 379144 - DNA, 33 bp, Homo sapien
gggttgtaggtacttatggcattgagagctctg

SEQ ID NO: 379145 - DNA, 33 bp, Homo sapien
tgcagttttccaagggccagaaatctgaacaga

SEQ ID NO: 379146 - DNA, 33 bp, Homo sapien
tgcagttttccaagggtcagaaatctgaacaga

SEQ ID NO: 379147 - DNA, 33 bp, Homo sapien
gttttacaaatggagaagctaaagccagaaggg

SEQ ID NO: 379148 - DNA, 33 bp, Homo sapien
gttttacaaatggagacgctaaagccagaaggg

SEQ ID NO: 379149 - DNA, 33 bp, Homo sapien
gggagacagtggctccgctgattctgggcttgt

SEQ ID NO: 379150 - DNA, 33 bp, Homo sapien
gggagacagtggctcctctgattctgggcttgt

SEQ ID NO: 379151 - DNA, 33 bp, Homo sapien
tgcactgagaacagcacggtgggttggagtctg

SEQ ID NO: 379152 - DNA, 33 bp, Homo sapien
tgcactgagaacagcatggtgggttggagtctg

SEQ ID NO: 379153 - DNA, 33 bp, Homo sapien
tcccagctgatcccgcaactaccctgggggcaa

SEQ ID NO: 379154 - DNA, 33 bp, Homo sapien
tcccagctgatcccgcgactaccctgggggcaa

SEQ ID NO: 379155 - DNA, 33 bp, Homo sapien
aatgcgagaattcgtgacaaaaagtgccagttg

SEQ ID NO: 379156 - DNA, 33 bp, Homo sapien
aatgcgagaattcgtgccaaaaagtgccagttg

SEQ ID NO: 379157 - DNA, 33 bp, Homo sapien
aacactgcctgaaagtaacatgcttccatttac

SEQ ID NO: 379158 - DNA, 33 bp, Homo sapien
aacactgcctgaaagttacatgcttccatttac

SEQ ID NO: 379159 - DNA, 33 bp, Homo sapien
cccccagtgggagcaacgcgaggatcagtgtga

SEQ ID NO: 379160 - DNA, 33 bp, Homo sapien
cccccagtgggagcaatgcgaggatcagtgtga

SEQ ID NO: 379161 - DNA, 33 bp, Homo sapien
cagtaggtgctcagtcacttgatgtttctttca

SEQ ID NO: 379162 - DNA, 33 bp, Homo sapien
cagtaggtgctcagtcgcttgatgtttctttca

SEQ ID NO: 379163 - DNA, 33 bp, Homo sapien
ggttggcctggttcaccacgttcccaatctgct

SEQ ID NO: 379164 - DNA, 33 bp, Homo sapien
ggttggcctggttcactacgttcccaatctgct

SEQ ID NO: 379165 - DNA, 33 bp, Homo sapien
tcgctacggatccaggccattcctgggtgagcc

SEQ ID NO: 379166 - DNA, 33 bp, Homo sapien
tcgctacggatccaggtcattcctgggtgagcc

SEQ ID NO: 379167 - DNA, 33 bp, Homo sapien
caaaggcagtcaccacaaagttctcaggggcac

SEQ ID NO: 379168 - DNA, 33 bp, Homo sapien
caaaggcagtcaccacgaagttctcaggggcac

SEQ ID NO: 379169 - DNA, 33 bp, Homo sapien
agtctgcagcgtggacgacaaaacaggcaccac

SEQ ID NO: 379170 - DNA, 33 bp, Homo sapien
agtctgcagcgtggactacaaaacaggcaccac

SEQ ID NO: 379171 - DNA, 33 bp, Homo sapien
ttagtacaaaaagtagaaatttccagaatgagc

SEQ ID NO: 379172 - DNA, 33 bp, Homo sapien
ttagtacaaaaagtagtaatttccagaatgagc

SEQ ID NO: 379173 - DNA, 33 bp, Homo sapien
tagggaattataaatcacaatcatggcttaaat

SEQ ID NO: 379174 - DNA, 33 bp, Homo sapien
tagggaattataaatcgcaatcatggcttaaat

SEQ ID NO: 379175 - DNA, 33 bp, Homo sapien
ttattattttgaaacccaagtccaagaaaaatc

SEQ ID NO: 379176 - DNA, 33 bp, Homo sapien
ttattattttgaaaccgaagtccaagaaaaatc

SEQ ID NO: 379177 - DNA, 33 bp, Homo sapien
aatttattgtagtcaaaattgcagatttttaaa

SEQ ID NO: 379178 - DNA, 33 bp, Homo sapien
aatttattgtagtcaatattgcagatttttaaa

SEQ ID NO: 379179 - DNA, 33 bp, Homo sapien
tctgatttgtgttttacgtaggtccttggtata

SEQ ID NO: 379180 - DNA, 33 bp, Homo sapien
tctgatttgtgttttatgtaggtccttggtata

SEQ ID NO: 379181 - DNA, 33 bp, Homo sapien
gtttcacgagcagtgcaatgagtcgaacaaagg

SEQ ID NO: 379182 - DNA, 33 bp, Homo sapien
gtttcacgagcagtgcgatgagtcgaacaaagg

SEQ ID NO: 379183 - DNA, 33 bp, Homo sapien
taagaataagtggtaacgcccagtgccatatat

SEQ ID NO: 379184 - DNA, 33 bp, Homo sapien
taagaataagtggtaatgcccagtgccatatat

SEQ ID NO: 379185 - DNA, 33 bp, Homo sapien
caccacacattactctaaatccaacagtaagta

SEQ ID NO: 379186 - DNA, 33 bp, Homo sapien
caccacacattactctgaatccaacagtaagta

SEQ ID NO: 379187 - DNA, 33 bp, Homo sapien
ctagtcattagtcataactcattttctcccaga

SEQ ID NO: 379188 - DNA, 33 bp, Homo sapien
ctagtcattagtcatacctcattttctcccaga

SEQ ID NO: 379189 - DNA, 33 bp, Homo sapien
catttaaataaacgtcactgaacttattaaggc

SEQ ID NO: 379190 - DNA, 33 bp, Homo sapien
catttaaataaacgtctctgaacttattaaggc

SEQ ID NO: 379191 - DNA, 33 bp, Homo sapien
cactgtgataaggaaaactgcttaaatgaaatt

SEQ ID NO: 379192 - DNA, 33 bp, Homo sapien
cactgtgataaggaaagctgcttaaatgaaatt

SEQ ID NO: 379193 - DNA, 33 bp, Homo sapien
ctggctgaaatgaaaaaacactgaacactgacc

SEQ ID NO: 379194 - DNA, 33 bp, Homo sapien
ctggctgaaatgaaaagacactgaacactgacc

SEQ ID NO: 379195 - DNA, 33 bp, Homo sapien
cccataaagaacgtcacggtaattgcatagttt

SEQ ID NO: 379196 - DNA, 33 bp, Homo sapien
cccataaagaacgtcatggtaattgcatagttt

SEQ ID NO: 379197 - DNA, 33 bp, Homo sapien
gactctgtctcaaaaaataagtgaggaaaagtt

SEQ ID NO: 379198 - DNA, 33 bp, Homo sapien
gactctgtctcaaaaagtaagtgaggaaaagtt

SEQ ID NO: 379199 - DNA, 33 bp, Homo sapien
ctaggattctgacagacggttgaaggactttga

SEQ ID NO: 379200 - DNA, 33 bp, Homo sapien
ctaggattctgacagatggttgaaggactttga

SEQ ID NO: 379201 - DNA, 33 bp, Homo sapien
agctggggtcctcacagaatgcagtgttttcct

SEQ ID NO: 379202 - DNA, 33 bp, Homo sapien
agctggggtcctcacataatgcagtgttttcct

SEQ ID NO: 379203 - DNA, 33 bp, Homo sapien
agtcactggagaaggacaggtagaatgtggaag

SEQ ID NO: 379204 - DNA, 33 bp, Homo sapien
agtcactggagaaggataggtagaatgtggaag

SEQ ID NO: 379205 - DNA, 33 bp, Homo sapien
aggtgctggattggaacgtggctttgtgggggc

SEQ ID NO: 379206 - DNA, 33 bp, Homo sapien
aggtgctggattggaatgtggctttgtgggggc

SEQ ID NO: 379207 - DNA, 33 bp, Homo sapien
aggtgtaataactttcccaagatcacatgggta

SEQ ID NO: 379208 - DNA, 33 bp, Homo sapien
aggtgtaataactttctcaagatcacatgggta

SEQ ID NO: 379209 - DNA, 33 bp, Homo sapien
ttgttgaatgacgaaacgggcatccagtcctgg

SEQ ID NO: 379210 - DNA, 33 bp, Homo sapien
ttgttgaatgacgaaatgggcatccagtcctgg

SEQ ID NO: 379211 - DNA, 33 bp, Homo sapien
gatgcatggagaggtaagtgcagtggagagcat

SEQ ID NO: 379212 - DNA, 33 bp, Homo sapien
gatgcatggagaggtaggtgcagtggagagcat

SEQ ID NO: 379213 - DNA, 33 bp, Homo sapien
ctgtcctgctgctgtcaaggagtgtcccgtatg

SEQ ID NO: 379214 - DNA, 33 bp, Homo sapien
ctgtcctgctgctgtccaggagtgtcccgtatg

SEQ ID NO: 379215 - DNA, 33 bp, Homo sapien
aatccttaaggctgaaataacaggacactagac

SEQ ID NO: 379216 - DNA, 33 bp, Homo sapien
aatccttaaggctgaagtaacaggacactagac

SEQ ID NO: 379217 - DNA, 33 bp, Homo sapien
cataatggctgtctcaagagagcgagaagggag

SEQ ID NO: 379218 - DNA, 33 bp, Homo sapien
cataatggctgtctcaggagagcgagaagggag

SEQ ID NO: 379219 - DNA, 33 bp, Homo sapien
tcaattgagattatccagcctatggaagagaaa

SEQ ID NO: 379220 - DNA, 33 bp, Homo sapien
tcaattgagattatccggcctatggaagagaaa

SEQ ID NO: 379221 - DNA, 33 bp, Homo sapien
ctgatagtagtttgccagctcagagagaatagt

SEQ ID NO: 379222 - DNA, 33 bp, Homo sapien
ctgatagtagtttgcctgctcagagagaatagt

SEQ ID NO: 379223 - DNA, 33 bp, Homo sapien
ctgcaagaagtgaaaggcatggctgaccgcatc

SEQ ID NO: 379224 - DNA, 33 bp, Homo sapien
ctgcaagaagtgaaagtcatggctgaccgcatc

SEQ ID NO: 379225 - DNA, 33 bp, Homo sapien
aatcctggaagactcaacttatacccaggactc

SEQ ID NO: 379226 - DNA, 33 bp, Homo sapien
aatcctggaagactcatcttatacccaggactc

SEQ ID NO: 379227 - DNA, 33 bp, Homo sapien
cctgtgaagtcaaaaccgcaagtcttggggtca

SEQ ID NO: 379228 - DNA, 33 bp, Homo sapien
cctgtgaagtcaaaactgcaagtcttggggtca

SEQ ID NO: 379229 - DNA, 33 bp, Homo sapien
taccctaaagatcttacaaattgtcttcaaggc

SEQ ID NO: 379230 - DNA, 33 bp, Homo sapien
taccctaaagatcttagaaattgtcttcaaggc

SEQ ID NO: 379231 - DNA, 33 bp, Homo sapien
ttgtcaaatgaatcaaaaagtataacaagctgc

SEQ ID NO: 379232 - DNA, 33 bp, Homo sapien
ttgtcaaatgaatcaataagtataacaagctgc

SEQ ID NO: 379233 - DNA, 33 bp, Homo sapien
gctgatcaccacagtggactagtcaggtggtaa

SEQ ID NO: 379234 - DNA, 33 bp, Homo sapien
gctgatcaccacagtgtactagtcaggtggtaa

SEQ ID NO: 379235 - DNA, 33 bp, Homo sapien
cttctccaagctattacgtcctctgctcagggc

SEQ ID NO: 379236 - DNA, 33 bp, Homo sapien
cttctccaagctattaggtcctctgctcagggc

SEQ ID NO: 379237 - DNA, 33 bp, Homo sapien
aaacactcaaaacctaaattggcagagtgcctg

SEQ ID NO: 379238 - DNA, 33 bp, Homo sapien
aaacactcaaaacctagattggcagagtgcctg

SEQ ID NO: 379239 - DNA, 33 bp, Homo sapien
aacatatagggcaatgaatagactgaaattttc

SEQ ID NO: 379240 - DNA, 33 bp, Homo sapien
aacatatagggcaatggatagactgaaattttc

SEQ ID NO: 379241 - DNA, 33 bp, Homo sapien
aggagcatatggttcaagcccacgatgttctca

SEQ ID NO: 379242 - DNA, 33 bp, Homo sapien
aggagcatatggttcaggcccacgatgttctca

SEQ ID NO: 379243 - DNA, 33 bp, Homo sapien
ctcgttccgcttctcacctggctttctgctgga

SEQ ID NO: 379244 - DNA, 33 bp, Homo sapien
ctcgttccgcttctcatctggctttctgctgga

SEQ ID NO: 379245 - DNA, 33 bp, Homo sapien
ggaaactaaatagtacacatctaaataacccac

SEQ ID NO: 379246 - DNA, 33 bp, Homo sapien
ggaaactaaatagtactcatctaaataacccac

SEQ ID NO: 379247 - DNA, 33 bp, Homo sapien
atttactgagtcctaaatatctttcttatatca

SEQ ID NO: 379248 - DNA, 33 bp, Homo sapien
atttactgagtcctaagtatctttcttatatca

SEQ ID NO: 379249 - DNA, 33 bp, Homo sapien
cagctgtagggaatgaaggatttactttgttta

SEQ ID NO: 379250 - DNA, 33 bp, Homo sapien
cagctgtagggaatgagggatttactttgttta

SEQ ID NO: 379251 - DNA, 33 bp, Homo sapien
tcacggtgccagtctcaagtcaagagaaaaggt

SEQ ID NO: 379252 - DNA, 33 bp, Homo sapien
tcacggtgccagtctcgagtcaagagaaaaggt

SEQ ID NO: 379253 - DNA, 33 bp, Homo sapien
ccatttcagtgtttcaagtctaccctgtgattt

SEQ ID NO: 379254 - DNA, 33 bp, Homo sapien
ccatttcagtgtttcaggtctaccctgtgattt

SEQ ID NO: 379255 - DNA, 33 bp, Homo sapien
taaatttgagggctacagaattgacttcaaaca

SEQ ID NO: 379256 - DNA, 33 bp, Homo sapien
taaatttgagggctacggaattgacttcaaaca

SEQ ID NO: 379257 - DNA, 33 bp, Homo sapien
ttcctttgcagaggctcaaaaatgcaaggtatt

SEQ ID NO: 379258 - DNA, 33 bp, Homo sapien
ttcctttgcagaggctgaaaaatgcaaggtatt

SEQ ID NO: 379259 - DNA, 33 bp, Homo sapien
gactttgatcagttgcaagaagaaggattcaga

SEQ ID NO: 379260 - DNA, 33 bp, Homo sapien
gactttgatcagttgcgagaagaaggattcaga

SEQ ID NO: 379261 - DNA, 33 bp, Homo sapien
tctgttaagacaatggaagactgacctcaaaag

SEQ ID NO: 379262 - DNA, 33 bp, Homo sapien
tctgttaagacaatggcagactgacctcaaaag

SEQ ID NO: 379263 - DNA, 33 bp, Homo sapien
ctgtaactacatgaataagactaagtaagactc

SEQ ID NO: 379264 - DNA, 33 bp, Homo sapien
ctgtaactacatgaatgagactaagtaagactc

SEQ ID NO: 379265 - DNA, 33 bp, Homo sapien
agcatgcaaaatcagacgaattattatttcagc

SEQ ID NO: 379266 - DNA, 33 bp, Homo sapien
agcatgcaaaatcagatgaattattatttcagc

SEQ ID NO: 379267 - DNA, 33 bp, Homo sapien
aaactactaggcatacaaaaaagacaagcaaaa

SEQ ID NO: 379268 - DNA, 33 bp, Homo sapien
aaactactaggcatacgaaaaagacaagcaaaa

SEQ ID NO: 379269 - DNA, 33 bp, Homo sapien
tgtctccaaaataaaaataactaggcacagtgg

SEQ ID NO: 379270 - DNA, 33 bp, Homo sapien
tgtctccaaaataaaactaactaggcacagtgg

SEQ ID NO: 379271 - DNA, 33 bp, Homo sapien
tggcttaacagattcaaatacctggtgttcctt

SEQ ID NO: 379272 - DNA, 33 bp, Homo sapien
tggcttaacagattcagatacctggtgttcctt

SEQ ID NO: 379273 - DNA, 33 bp, Homo sapien
ccacttcccagtgactaaacaaggtccaacaca

SEQ ID NO: 379274 - DNA, 33 bp, Homo sapien
ccacttcccagtgactgaacaaggtccaacaca

SEQ ID NO: 379275 - DNA, 33 bp, Homo sapien
atgggtatattgcatacgagtagggatttggct

SEQ ID NO: 379276 - DNA, 33 bp, Homo sapien
atgggtatattgcatatgagtagggatttggct

SEQ ID NO: 379277 - DNA, 33 bp, Homo sapien
tttatgaccatgaatacctattgtttagctccc

SEQ ID NO: 379278 - DNA, 33 bp, Homo sapien
tttatgaccatgaatatctattgtttagctccc

SEQ ID NO: 379279 - DNA, 33 bp, Homo sapien
aagccattaaaagcccagcaaagccaaagtaat

SEQ ID NO: 379280 - DNA, 33 bp, Homo sapien
aagccattaaaagcccggcaaagccaaagtaat

SEQ ID NO: 379281 - DNA, 33 bp, Homo sapien
ccccagtcacatagaacggtgagttaattacac

SEQ ID NO: 379282 - DNA, 33 bp, Homo sapien
ccccagtcacatagaatggtgagttaattacac

SEQ ID NO: 379283 - DNA, 33 bp, Homo sapien
tgctggttcaaagtaaccttgggtgtgactata

SEQ ID NO: 379284 - DNA, 33 bp, Homo sapien
tgctggttcaaagtaagcttgggtgtgactata

SEQ ID NO: 379285 - DNA, 33 bp, Homo sapien
accacttaaagttgacactgagatgaggacttg

SEQ ID NO: 379286 - DNA, 33 bp, Homo sapien
accacttaaagttgactctgagatgaggacttg

SEQ ID NO: 379287 - DNA, 33 bp, Homo sapien
ggctaaagctgtgtcacaaaaagaggttacatt

SEQ ID NO: 379288 - DNA, 33 bp, Homo sapien
ggctaaagctgtgtcataaaaagaggttacatt

SEQ ID NO: 379289 - DNA, 33 bp, Homo sapien
agtaaggcatgatttgaatccaattataagaat

SEQ ID NO: 379290 - DNA, 33 bp, Homo sapien
agtaaggcatgatttgcatccaattataagaat

SEQ ID NO: 379291 - DNA, 33 bp, Homo sapien
gccttacttcaggaaacaggctgcaaagatact

SEQ ID NO: 379292 - DNA, 33 bp, Homo sapien
gccttacttcaggaaataggctgcaaagatact

SEQ ID NO: 379293 - DNA, 33 bp, Homo sapien
agagagatacatctgaaaaatcttaaaggaaaa

SEQ ID NO: 379294 - DNA, 33 bp, Homo sapien
agagagatacatctgagaaatcttaaaggaaaa

SEQ ID NO: 379295 - DNA, 33 bp, Homo sapien
ggtgactcataaaatcaaagaaaggttgaacaa

SEQ ID NO: 379296 - DNA, 33 bp, Homo sapien
ggtgactcataaaatctaagaaaggttgaacaa

SEQ ID NO: 379297 - DNA, 33 bp, Homo sapien
acctacaaagactcagaaagatatggaactcaa

SEQ ID NO: 379298 - DNA, 33 bp, Homo sapien
acctacaaagactcaggaagatatggaactcaa

SEQ ID NO: 379299 - DNA, 33 bp, Homo sapien
gcttgccaactctctcactgtcatttctcatca

SEQ ID NO: 379300 - DNA, 33 bp, Homo sapien
gcttgccaactctctcgctgtcatttctcatca

SEQ ID NO: 379301 - DNA, 33 bp, Homo sapien
aagagatagctaaaggaagggatagagtgaagc

SEQ ID NO: 379302 - DNA, 33 bp, Homo sapien
aagagatagctaaaggtagggatagagtgaagc

SEQ ID NO: 379303 - DNA, 33 bp, Homo sapien
tgcatcttccagctgcaatgcacaaatatgtta

SEQ ID NO: 379304 - DNA, 33 bp, Homo sapien
tgcatcttccagctgcgatgcacaaatatgtta

SEQ ID NO: 379305 - DNA, 33 bp, Homo sapien
aactttcataatttgcaaaaagaactggagagt

SEQ ID NO: 379306 - DNA, 33 bp, Homo sapien
aactttcataatttgcgaaaagaactggagagt

SEQ ID NO: 379307 - DNA, 33 bp, Homo sapien
ctaagactttactaggcatggtcaatctatctc

SEQ ID NO: 379308 - DNA, 33 bp, Homo sapien
ctaagactttactaggtatggtcaatctatctc

SEQ ID NO: 379309 - DNA, 33 bp, Homo sapien
tattatatcattgatcccctcaatcccatgagg

SEQ ID NO: 379310 - DNA, 33 bp, Homo sapien
tattatatcattgatctcctcaatcccatgagg

SEQ ID NO: 379311 - DNA, 33 bp, Homo sapien
tttggtgttactttcccaccattcctgcaaact

SEQ ID NO: 379312 - DNA, 33 bp, Homo sapien
tttggtgttactttcctaccattcctgcaaact

SEQ ID NO: 379313 - DNA, 33 bp, Homo sapien
cacatttactaaaggaaatccaactaccaaaaa

SEQ ID NO: 379314 - DNA, 33 bp, Homo sapien
cacatttactaaaggagatccaactaccaaaaa

SEQ ID NO: 379315 - DNA, 33 bp, Homo sapien
agcaaagcaaagaacagaacattgtcctgaatg

SEQ ID NO: 379316 - DNA, 33 bp, Homo sapien
agcaaagcaaagaacataacattgtcctgaatg

SEQ ID NO: 379317 - DNA, 33 bp, Homo sapien
gggatcctgatggtaacagttacatttgatggc

SEQ ID NO: 379318 - DNA, 33 bp, Homo sapien
gggatcctgatggtaagagttacatttgatggc

SEQ ID NO: 379319 - DNA, 33 bp, Homo sapien
agattagcccctgaaacgttgtattattcaaag

SEQ ID NO: 379320 - DNA, 33 bp, Homo sapien
agattagcccctgaaatgttgtattattcaaag

SEQ ID NO: 379321 - DNA, 33 bp, Homo sapien
gcttagtggagtctaacgaaggctgtctgtaca

SEQ ID NO: 379322 - DNA, 33 bp, Homo sapien
gcttagtggagtctaatgaaggctgtctgtaca

SEQ ID NO: 379323 - DNA, 33 bp, Homo sapien
aagatgaaccaagaaaataatctacctgctttt

SEQ ID NO: 379324 - DNA, 33 bp, Homo sapien
aagatgaaccaagaaagtaatctacctgctttt

SEQ ID NO: 379325 - DNA, 33 bp, Homo sapien
tgttcatgcttgttcaataccatctagtgctta

SEQ ID NO: 379326 - DNA, 33 bp, Homo sapien
tgttcatgcttgttcagtaccatctagtgctta

SEQ ID NO: 379327 - DNA, 33 bp, Homo sapien
catcttctcagccaaacccaacaatccaccagc

SEQ ID NO: 379328 - DNA, 33 bp, Homo sapien
catcttctcagccaaatccaacaatccaccagc

SEQ ID NO: 379329 - DNA, 33 bp, Homo sapien
caagattggaattcaaatgattggaaaactgaa

SEQ ID NO: 379330 - DNA, 33 bp, Homo sapien
caagattggaattcaagtgattggaaaactgaa

SEQ ID NO: 379331 - DNA, 33 bp, Homo sapien
tatttcatttctctcagccttaaatttgtacat

SEQ ID NO: 379332 - DNA, 33 bp, Homo sapien
tatttcatttctctcatccttaaatttgtacat

SEQ ID NO: 379333 - DNA, 33 bp, Homo sapien
tagacatttgggatgcacattgattctctaata

SEQ ID NO: 379334 - DNA, 33 bp, Homo sapien
tagacatttgggatgcgcattgattctctaata

SEQ ID NO: 379335 - DNA, 33 bp, Homo sapien
agaatggtagaaagtacgaagagtgctaagaaa

SEQ ID NO: 379336 - DNA, 33 bp, Homo sapien
agaatggtagaaagtaggaagagtgctaagaaa

SEQ ID NO: 379337 - DNA, 33 bp, Homo sapien
ccctttccattgatcaaaaactgaaagcaaaac

SEQ ID NO: 379338 - DNA, 33 bp, Homo sapien
ccctttccattgatcagaaactgaaagcaaaac

SEQ ID NO: 379339 - DNA, 33 bp, Homo sapien
attcttctacaatctccctataccaggacttac

SEQ ID NO: 379340 - DNA, 33 bp, Homo sapien
attcttctacaatctctctataccaggacttac

SEQ ID NO: 379341 - DNA, 33 bp, Homo sapien
ctcccaatgtttcctgcaggataagacaagact

SEQ ID NO: 379342 - DNA, 33 bp, Homo sapien
ctcccaatgtttcctgtaggataagacaagact

SEQ ID NO: 379343 - DNA, 33 bp, Homo sapien
caggctgtaggaaacacggtcctttggtcttct

SEQ ID NO: 379344 - DNA, 33 bp, Homo sapien
caggctgtaggaaacatggtcctttggtcttct

SEQ ID NO: 379345 - DNA, 33 bp, Homo sapien
cttaagtagagcaccaagtttgatggagttgcc

SEQ ID NO: 379346 - DNA, 33 bp, Homo sapien
cttaagtagagcaccaggtttgatggagttgcc

SEQ ID NO: 379347 - DNA, 33 bp, Homo sapien
gagaccccctcatgtccacacagaagtttgcag

SEQ ID NO: 379348 - DNA, 33 bp, Homo sapien
gagaccccctcatgtctacacagaagtttgcag

SEQ ID NO: 379349 - DNA, 33 bp, Homo sapien
gataacagccaaaaaaatcatatggagattata

SEQ ID NO: 379350 - DNA, 33 bp, Homo sapien
gataacagccaaaaaagtcatatggagattata

SEQ ID NO: 379351 - DNA, 33 bp, Homo sapien
gatacaggaagcttaaatatttccacatagatg

SEQ ID NO: 379352 - DNA, 33 bp, Homo sapien
gatacaggaagcttaagtatttccacatagatg

SEQ ID NO: 379353 - DNA, 33 bp, Homo sapien
ggtgaaaattctggcacagtcccgagcatttgc

SEQ ID NO: 379354 - DNA, 33 bp, Homo sapien
ggtgaaaattctggcatagtcccgagcatttgc

SEQ ID NO: 379355 - DNA, 33 bp, Homo sapien
gggcctcgattatgaaccttgtgcaaagtcatg

SEQ ID NO: 379356 - DNA, 33 bp, Homo sapien
gggcctcgattatgaatcttgtgcaaagtcatg

SEQ ID NO: 379357 - DNA, 33 bp, Homo sapien
ctttacttagggttcaacatattagagtttatt

SEQ ID NO: 379358 - DNA, 33 bp, Homo sapien
ctttacttagggttcagcatattagagtttatt

SEQ ID NO: 379359 - DNA, 33 bp, Homo sapien
cctatgtggcaacatacaatgtgaaagttataa

SEQ ID NO: 379360 - DNA, 33 bp, Homo sapien
cctatgtggcaacatataatgtgaaagttataa

SEQ ID NO: 379361 - DNA, 33 bp, Homo sapien
ttaataaggtgaaggactatggagtagaaggta

SEQ ID NO: 379362 - DNA, 33 bp, Homo sapien
ttaataaggtgaaggattatggagtagaaggta

SEQ ID NO: 379363 - DNA, 33 bp, Homo sapien
cagtgaatggtattgaactctgcttagaaatct

SEQ ID NO: 379364 - DNA, 33 bp, Homo sapien
cagtgaatggtattgatctctgcttagaaatct

SEQ ID NO: 379365 - DNA, 33 bp, Homo sapien
ttctctgtacgtactaccccaagacggcatttg

SEQ ID NO: 379366 - DNA, 33 bp, Homo sapien
ttctctgtacgtactagcccaagacggcatttg

SEQ ID NO: 379367 - DNA, 33 bp, Homo sapien
tacctcctatgaaaccagaatgcatctacaaat

SEQ ID NO: 379368 - DNA, 33 bp, Homo sapien
tacctcctatgaaaccggaatgcatctacaaat

SEQ ID NO: 379369 - DNA, 33 bp, Homo sapien
gtatagttccattaaaggtagcataataaaggg

SEQ ID NO: 379370 - DNA, 33 bp, Homo sapien
gtatagttccattaaatgtagcataataaaggg

SEQ ID NO: 379371 - DNA, 33 bp, Homo sapien
gtttgagctaaggtagaaaagagctaatgtgtc

SEQ ID NO: 379372 - DNA, 33 bp, Homo sapien
gtttgagctaaggtaggaaagagctaatgtgtc

SEQ ID NO: 379373 - DNA, 33 bp, Homo sapien
tgttggacattgttccaggaaaactctacttct

SEQ ID NO: 379374 - DNA, 33 bp, Homo sapien
tgttggacattgttccgggaaaactctacttct

SEQ ID NO: 379375 - DNA, 33 bp, Homo sapien
catttgttttctattacgtgtcaagtgtaatgc

SEQ ID NO: 379376 - DNA, 33 bp, Homo sapien
catttgttttctattatgtgtcaagtgtaatgc

SEQ ID NO: 379377 - DNA, 33 bp, Homo sapien
accctaccattagctacccatgcaacttagaca

SEQ ID NO: 379378 - DNA, 33 bp, Homo sapien
accctaccattagctatccatgcaacttagaca

SEQ ID NO: 379379 - DNA, 33 bp, Homo sapien
attcaggtacaagctaaagaaaacttgactaac

SEQ ID NO: 379380 - DNA, 33 bp, Homo sapien
attcaggtacaagctagagaaaacttgactaac

SEQ ID NO: 379381 - DNA, 33 bp, Homo sapien
aaaagaaaagctaaacaaatgagtataaaacac

SEQ ID NO: 379382 - DNA, 33 bp, Homo sapien
aaaagaaaagctaaacgaatgagtataaaacac

SEQ ID NO: 379383 - DNA, 33 bp, Homo sapien
tattgaggtaagactaaagaatggggcattgct

SEQ ID NO: 379384 - DNA, 33 bp, Homo sapien
tattgaggtaagactagagaatggggcattgct

SEQ ID NO: 379385 - DNA, 33 bp, Homo sapien
ttagtaatataatatccatgtcagagatagagt

SEQ ID NO: 379386 - DNA, 33 bp, Homo sapien
ttagtaatataatatcgatgtcagagatagagt

SEQ ID NO: 379387 - DNA, 33 bp, Homo sapien
gagtaccatggaataaaagacaatagcgaagta

SEQ ID NO: 379388 - DNA, 33 bp, Homo sapien
gagtaccatggaataagagacaatagcgaagta

SEQ ID NO: 379389 - DNA, 33 bp, Homo sapien
agacctttgcaagacactgagaatataaatttg

SEQ ID NO: 379390 - DNA, 33 bp, Homo sapien
agacctttgcaagacagtgagaatataaatttg

SEQ ID NO: 379391 - DNA, 33 bp, Homo sapien
tacagaatatttttcaacacaaacttcagaaag

SEQ ID NO: 379392 - DNA, 33 bp, Homo sapien
tacagaatatttttcagcacaaacttcagaaag

SEQ ID NO: 379393 - DNA, 33 bp, Homo sapien
tctctcctggacttaccaaatcctttctaggac

SEQ ID NO: 379394 - DNA, 33 bp, Homo sapien
tctctcctggacttacgaaatcctttctaggac

SEQ ID NO: 379395 - DNA, 33 bp, Homo sapien
aagttaaagtcctaccaaagtgagattcattgt

SEQ ID NO: 379396 - DNA, 33 bp, Homo sapien
aagttaaagtcctaccgaagtgagattcattgt

SEQ ID NO: 379397 - DNA, 33 bp, Homo sapien
aagaggaaaagggtagaaagtggatacgagaag

SEQ ID NO: 379398 - DNA, 33 bp, Homo sapien
aagaggaaaagggtaggaagtggatacgagaag

SEQ ID NO: 379399 - DNA, 33 bp, Homo sapien
ttaatttggcagaagcaagaagatcatttcagc

SEQ ID NO: 379400 - DNA, 33 bp, Homo sapien
ttaatttggcagaagcgagaagatcatttcagc

SEQ ID NO: 379401 - DNA, 33 bp, Homo sapien
aacacaggaggatgaaacctttctcatttgatg

SEQ ID NO: 379402 - DNA, 33 bp, Homo sapien
aacacaggaggatgaagcctttctcatttgatg

SEQ ID NO: 379403 - DNA, 33 bp, Homo sapien
cctcgacactttgtgcaaaatttatctcctaaa

SEQ ID NO: 379404 - DNA, 33 bp, Homo sapien
cctcgacactttgtgcgaaatttatctcctaaa

SEQ ID NO: 379405 - DNA, 33 bp, Homo sapien
tcatattgaacactcaccaagcatcccagtggc

SEQ ID NO: 379406 - DNA, 33 bp, Homo sapien
tcatattgaacactcatcaagcatcccagtggc

SEQ ID NO: 379407 - DNA, 33 bp, Homo sapien
acatttgaaggcccaaagcagcgtttttgtagc

SEQ ID NO: 379408 - DNA, 33 bp, Homo sapien
acatttgaaggcccaaggcagcgtttttgtagc

SEQ ID NO: 379409 - DNA, 33 bp, Homo sapien
ccctagggataagaaaagcatatgtgaaatacg

SEQ ID NO: 379410 - DNA, 33 bp, Homo sapien
ccctagggataagaaacgcatatgtgaaatacg

SEQ ID NO: 379411 - DNA, 33 bp, Homo sapien
agttattattgttccaaatcttagtggcttaaa

SEQ ID NO: 379412 - DNA, 33 bp, Homo sapien
agttattattgttccagatcttagtggcttaaa

SEQ ID NO: 379413 - DNA, 33 bp, Homo sapien
aaggttattatggccaatagctcaaaataactc

SEQ ID NO: 379414 - DNA, 33 bp, Homo sapien
aaggttattatggccagtagctcaaaataactc

SEQ ID NO: 379415 - DNA, 33 bp, Homo sapien
atataatgtctatgaaagtgccatggaaaagct

SEQ ID NO: 379416 - DNA, 33 bp, Homo sapien
atataatgtctatgaaggtgccatggaaaagct

SEQ ID NO: 379417 - DNA, 33 bp, Homo sapien
tttacaaaatggcttacatagtgcaatgttatt

SEQ ID NO: 379418 - DNA, 33 bp, Homo sapien
tttacaaaatggcttatatagtgcaatgttatt

SEQ ID NO: 379419 - DNA, 33 bp, Homo sapien
ggcagcttggaggtcaaaaacgagatggagtca

SEQ ID NO: 379420 - DNA, 33 bp, Homo sapien
ggcagcttggaggtcagaaacgagatggagtca

SEQ ID NO: 379421 - DNA, 33 bp, Homo sapien
cccccaaaatagttaaataattcacacaaaaac

SEQ ID NO: 379422 - DNA, 33 bp, Homo sapien
cccccaaaatagttaagtaattcacacaaaaac

SEQ ID NO: 379423 - DNA, 33 bp, Homo sapien
ggaagatccagagtgaataactggacaacaaaa

SEQ ID NO: 379424 - DNA, 33 bp, Homo sapien
ggaagatccagagtgactaactggacaacaaaa

SEQ ID NO: 379425 - DNA, 33 bp, Homo sapien
atactggtgttgggataagcctcactcaaagtg

SEQ ID NO: 379426 - DNA, 33 bp, Homo sapien
atactggtgttgggatgagcctcactcaaagtg

SEQ ID NO: 379427 - DNA, 33 bp, Homo sapien
taaatgtagtcatggcagaaagctgagtgggtg

SEQ ID NO: 379428 - DNA, 33 bp, Homo sapien
taaatgtagtcatggccgaaagctgagtgggtg

SEQ ID NO: 379429 - DNA, 33 bp, Homo sapien
ttgttggttattgggacagatgttgaattccat

SEQ ID NO: 379430 - DNA, 33 bp, Homo sapien
ttgttggttattgggatagatgttgaattccat

SEQ ID NO: 379431 - DNA, 33 bp, Homo sapien
gtttctaaatccagacagtattatgagacgctt

SEQ ID NO: 379432 - DNA, 33 bp, Homo sapien
gtttctaaatccagacggtattatgagacgctt

SEQ ID NO: 379433 - DNA, 33 bp, Homo sapien
ttctcgttgagtattaagtgcaggaggcaaagg

SEQ ID NO: 379434 - DNA, 33 bp, Homo sapien
ttctcgttgagtattaggtgcaggaggcaaagg

SEQ ID NO: 379435 - DNA, 33 bp, Homo sapien
gtggctgaattatctgcataaatttgcaaatca

SEQ ID NO: 379436 - DNA, 33 bp, Homo sapien
gtggctgaattatctgtataaatttgcaaatca

SEQ ID NO: 379437 - DNA, 33 bp, Homo sapien
agactgcatacttgccagagtaaatggtcaatg

SEQ ID NO: 379438 - DNA, 33 bp, Homo sapien
agactgcatacttgccggagtaaatggtcaatg

SEQ ID NO: 379439 - DNA, 33 bp, Homo sapien
tctctgagtgtctctaagtctcagcaatgtgaa

SEQ ID NO: 379440 - DNA, 33 bp, Homo sapien
tctctgagtgtctctaggtctcagcaatgtgaa

SEQ ID NO: 379441 - DNA, 33 bp, Homo sapien
atagaggttaggactgcattaggggagaaagat

SEQ ID NO: 379442 - DNA, 33 bp, Homo sapien
atagaggttaggactgtattaggggagaaagat

SEQ ID NO: 379443 - DNA, 33 bp, Homo sapien
tagagacttcttggtcaatagtccagaaatgct

SEQ ID NO: 379444 - DNA, 33 bp, Homo sapien
tagagacttcttggtcgatagtccagaaatgct

SEQ ID NO: 379445 - DNA, 33 bp, Homo sapien
aaagtaaaaatgagtacattagacaagaggttg

SEQ ID NO: 379446 - DNA, 33 bp, Homo sapien
aaagtaaaaatgagtatattagacaagaggttg

SEQ ID NO: 379447 - DNA, 33 bp, Homo sapien
ggggataactcgagaccatgggagatgagaata

SEQ ID NO: 379448 - DNA, 33 bp, Homo sapien
ggggataactcgagactatgggagatgagaata

SEQ ID NO: 379449 - DNA, 33 bp, Homo sapien
actgcagccttggaagactgggcacaagcaatc

SEQ ID NO: 379450 - DNA, 33 bp, Homo sapien
actgcagccttggaagcctgggcacaagcaatc

SEQ ID NO: 379451 - DNA, 33 bp, Homo sapien
ttatttgttaaggcaccgatataggagcacagt

SEQ ID NO: 379452 - DNA, 33 bp, Homo sapien
ttatttgttaaggcactgatataggagcacagt

SEQ ID NO: 379453 - DNA, 33 bp, Homo sapien
aaaacatcccaatgccaaagttataaaatagga

SEQ ID NO: 379454 - DNA, 33 bp, Homo sapien
aaaacatcccaatgcccaagttataaaatagga

SEQ ID NO: 379455 - DNA, 33 bp, Homo sapien
cacctccagacattaacactaactcctttgagc

SEQ ID NO: 379456 - DNA, 33 bp, Homo sapien
cacctccagacattaatactaactcctttgagc

SEQ ID NO: 379457 - DNA, 33 bp, Homo sapien
ggaaatacatttcataagatgatagctcccaaa

SEQ ID NO: 379458 - DNA, 33 bp, Homo sapien
ggaaatacatttcataggatgatagctcccaaa

SEQ ID NO: 379459 - DNA, 33 bp, Homo sapien
gccttctctaggagtaagttttcaatgtactga

SEQ ID NO: 379460 - DNA, 33 bp, Homo sapien
gccttctctaggagtatgttttcaatgtactga

SEQ ID NO: 379461 - DNA, 33 bp, Homo sapien
actttaagtaacaaaagcaaccactgagaaaac

SEQ ID NO: 379462 - DNA, 33 bp, Homo sapien
actttaagtaacaaaatcaaccactgagaaaac

SEQ ID NO: 379463 - DNA, 33 bp, Homo sapien
gttgccaccagtagtacaaaagttctgattgct

SEQ ID NO: 379464 - DNA, 33 bp, Homo sapien
gttgccaccagtagtataaaagttctgattgct

SEQ ID NO: 379465 - DNA, 33 bp, Homo sapien
cctgagtctcttggaaagtgaactaatttggac

SEQ ID NO: 379466 - DNA, 33 bp, Homo sapien
cctgagtctcttggaatgtgaactaatttggac

SEQ ID NO: 379467 - DNA, 33 bp, Homo sapien
agaaatatgcctcgtacgatcttcacaaaagta

SEQ ID NO: 379468 - DNA, 33 bp, Homo sapien
agaaatatgcctcgtatgatcttcacaaaagta

SEQ ID NO: 379469 - DNA, 33 bp, Homo sapien
tgcaatgaaaatatcaatacttcaaggccatct

SEQ ID NO: 379470 - DNA, 33 bp, Homo sapien
tgcaatgaaaatatcagtacttcaaggccatct

SEQ ID NO: 379471 - DNA, 33 bp, Homo sapien
tagtaccagctaatcacatataacacaaaaaca

SEQ ID NO: 379472 - DNA, 33 bp, Homo sapien
tagtaccagctaatcatatataacacaaaaaca

SEQ ID NO: 379473 - DNA, 33 bp, Homo sapien
taaaatattgtttaccaaaatttatctcatatt

SEQ ID NO: 379474 - DNA, 33 bp, Homo sapien
taaaatattgtttacctaaatttatctcatatt

SEQ ID NO: 379475 - DNA, 33 bp, Homo sapien
cattacttacaaatcactaaacagaaagaagac

SEQ ID NO: 379476 - DNA, 33 bp, Homo sapien
cattacttacaaatcattaaacagaaagaagac

SEQ ID NO: 379477 - DNA, 33 bp, Homo sapien
taatttataatctcaaagcagaaagactttttc

SEQ ID NO: 379478 - DNA, 33 bp, Homo sapien
taatttataatctcaatgcagaaagactttttc

SEQ ID NO: 379479 - DNA, 33 bp, Homo sapien
attctccttttgcctcaatccctggaatgcttg

SEQ ID NO: 379480 - DNA, 33 bp, Homo sapien
attctccttttgcctctatccctggaatgcttg

SEQ ID NO: 379481 - DNA, 33 bp, Homo sapien
ctgccttgtcctattcaatggctattttgcttg

SEQ ID NO: 379482 - DNA, 33 bp, Homo sapien
ctgccttgtcctattcgatggctattttgcttg

SEQ ID NO: 379483 - DNA, 33 bp, Homo sapien
ggcactcaatgactcacggaataataaagtatc

SEQ ID NO: 379484 - DNA, 33 bp, Homo sapien
ggcactcaatgactcatggaataataaagtatc

SEQ ID NO: 379485 - DNA, 33 bp, Homo sapien
tgattactgtaaaagtgaaaatagctgagttga

SEQ ID NO: 379486 - DNA, 33 bp, Homo sapien
tgattactgtaaaagttaaaatagctgagttga

SEQ ID NO: 379487 - DNA, 33 bp, Homo sapien
gttctatttcttaatacgagtggtgatttcaaa

SEQ ID NO: 379488 - DNA, 33 bp, Homo sapien
gttctatttcttaatatgagtggtgatttcaaa

SEQ ID NO: 379489 - DNA, 33 bp, Homo sapien
tttttcccatgctaataaatgtcctttttgcca

SEQ ID NO: 379490 - DNA, 33 bp, Homo sapien
tttttcccatgctaattaatgtcctttttgcca

SEQ ID NO: 379491 - DNA, 33 bp, Homo sapien
gggaaacgagagaaacagatatacacaactatt

SEQ ID NO: 379492 - DNA, 33 bp, Homo sapien
gggaaacgagagaaacggatatacacaactatt

SEQ ID NO: 379493 - DNA, 33 bp, Homo sapien
cacttttgtgccatcacgtttagtgcttctaat

SEQ ID NO: 379494 - DNA, 33 bp, Homo sapien
cacttttgtgccatcatgtttagtgcttctaat

SEQ ID NO: 379495 - DNA, 33 bp, Homo sapien
ggtgttgacatggaatgacagcaataaaaagat

SEQ ID NO: 379496 - DNA, 33 bp, Homo sapien
ggtgttgacatggaattacagcaataaaaagat

SEQ ID NO: 379497 - DNA, 33 bp, Homo sapien
acatgcctccatccaccgaaggcagccctgcat

SEQ ID NO: 379498 - DNA, 33 bp, Homo sapien
acatgcctccatccactgaaggcagccctgcat

SEQ ID NO: 379499 - DNA, 33 bp, Homo sapien
aaagatagtttcgaaaatacttctttacttgct

SEQ ID NO: 379500 - DNA, 33 bp, Homo sapien
aaagatagtttcgaaagtacttctttacttgct

SEQ ID NO: 379501 - DNA, 33 bp, Homo sapien
taacatacaaaagagcacctgacacattataaa

SEQ ID NO: 379502 - DNA, 33 bp, Homo sapien
taacatacaaaagagcgcctgacacattataaa

SEQ ID NO: 379503 - DNA, 33 bp, Homo sapien
tgatatgtgtacataaagtggaataattaaagc

SEQ ID NO: 379504 - DNA, 33 bp, Homo sapien
tgatatgtgtacataatgtggaataattaaagc

SEQ ID NO: 379505 - DNA, 33 bp, Homo sapien
atccaggagccaattacgtgttagtaaatgatg

SEQ ID NO: 379506 - DNA, 33 bp, Homo sapien
atccaggagccaattaggtgttagtaaatgatg

SEQ ID NO: 379507 - DNA, 33 bp, Homo sapien
gataagatgggcttgactacactttaaggggaa

SEQ ID NO: 379508 - DNA, 33 bp, Homo sapien
gataagatgggcttgattacactttaaggggaa

SEQ ID NO: 379509 - DNA, 33 bp, Homo sapien
tcactaaactataccaagagaaatcatcaatgc

SEQ ID NO: 379510 - DNA, 33 bp, Homo sapien
tcactaaactataccaggagaaatcatcaatgc

SEQ ID NO: 379511 - DNA, 33 bp, Homo sapien
agtctttcaattgttcaccattgttcttaggat

SEQ ID NO: 379512 - DNA, 33 bp, Homo sapien
agtctttcaattgttcgccattgttcttaggat

SEQ ID NO: 379513 - DNA, 33 bp, Homo sapien
aaagtctagctcaataagtaacagtttactggt

SEQ ID NO: 379514 - DNA, 33 bp, Homo sapien
aaagtctagctcaatatgtaacagtttactggt

SEQ ID NO: 379515 - DNA, 33 bp, Homo sapien
ggcaaataaatagccgccaaattttacatagat

SEQ ID NO: 379516 - DNA, 33 bp, Homo sapien
ggcaaataaatagccgtcaaattttacatagat

SEQ ID NO: 379517 - DNA, 33 bp, Homo sapien
ttttactatgtaatgacggctctagtatttcct

SEQ ID NO: 379518 - DNA, 33 bp, Homo sapien
ttttactatgtaatgatggctctagtatttcct

SEQ ID NO: 379519 - DNA, 33 bp, Homo sapien
tcaacttgacaatgcaatcataagatgtttgga

SEQ ID NO: 379520 - DNA, 33 bp, Homo sapien
tcaacttgacaatgcagtcataagatgtttgga

SEQ ID NO: 379521 - DNA, 33 bp, Homo sapien
ctaaccataatccttgaataaagaagaactgca

SEQ ID NO: 379522 - DNA, 33 bp, Homo sapien
ctaaccataatccttggataaagaagaactgca

SEQ ID NO: 379523 - DNA, 33 bp, Homo sapien
ctgatgtgctacagaaagtcctgacaccatttt

SEQ ID NO: 379524 - DNA, 33 bp, Homo sapien
ctgatgtgctacagaaggtcctgacaccatttt

SEQ ID NO: 379525 - DNA, 33 bp, Homo sapien
cttgtaaatgctaagaagagtaaatgttctccc

SEQ ID NO: 379526 - DNA, 33 bp, Homo sapien
cttgtaaatgctaagatgagtaaatgttctccc

SEQ ID NO: 379527 - DNA, 33 bp, Homo sapien
tcaagaaattgtgaaaaaaacacacaaatgagc

SEQ ID NO: 379528 - DNA, 33 bp, Homo sapien
tcaagaaattgtgaaagaaacacacaaatgagc

SEQ ID NO: 379529 - DNA, 33 bp, Homo sapien
ctttagtactccttgcaatacttggcattcgtg

SEQ ID NO: 379530 - DNA, 33 bp, Homo sapien
ctttagtactccttgcgatacttggcattcgtg

SEQ ID NO: 379531 - DNA, 33 bp, Homo sapien
gattttgcaatagccgaaagttactgagatttc

SEQ ID NO: 379532 - DNA, 33 bp, Homo sapien
gattttgcaatagccggaagttactgagatttc

SEQ ID NO: 379533 - DNA, 33 bp, Homo sapien
ttgcaccaattaatcccgaagactgataatata

SEQ ID NO: 379534 - DNA, 33 bp, Homo sapien
ttgcaccaattaatcctgaagactgataatata

SEQ ID NO: 379535 - DNA, 33 bp, Homo sapien
caaacatctctcatgactagatttaccgggagt

SEQ ID NO: 379536 - DNA, 33 bp, Homo sapien
caaacatctctcatgattagatttaccgggagt

SEQ ID NO: 379537 - DNA, 33 bp, Homo sapien
gctaaaagaagtctctcaaaaccatatcccagg

SEQ ID NO: 379538 - DNA, 33 bp, Homo sapien
gctaaaagaagtctctgaaaaccatatcccagg

SEQ ID NO: 379539 - DNA, 33 bp, Homo sapien
tgaagaaatgcctgagaccaggtaattcataaa

SEQ ID NO: 379540 - DNA, 33 bp, Homo sapien
tgaagaaatgcctgagtccaggtaattcataaa

SEQ ID NO: 379541 - DNA, 33 bp, Homo sapien
aaaacctattgtaagcaagattgagtgttgaag

SEQ ID NO: 379542 - DNA, 33 bp, Homo sapien
aaaacctattgtaagcgagattgagtgttgaag

SEQ ID NO: 379543 - DNA, 33 bp, Homo sapien
catgtgatgctttaagactcttcactcatagct

SEQ ID NO: 379544 - DNA, 33 bp, Homo sapien
catgtgatgctttaagcctcttcactcatagct

SEQ ID NO: 379545 - DNA, 33 bp, Homo sapien
gagaaatctaccagagacgtgaggacctcattt

SEQ ID NO: 379546 - DNA, 33 bp, Homo sapien
gagaaatctaccagaggcgtgaggacctcattt

SEQ ID NO: 379547 - DNA, 33 bp, Homo sapien
taaatatgtactaaaaatcaactatgtgtcatg

SEQ ID NO: 379548 - DNA, 33 bp, Homo sapien
taaatatgtactaaaagtcaactatgtgtcatg

SEQ ID NO: 379549 - DNA, 33 bp, Homo sapien
acaggctaatattctaccctcccctcaggctga

SEQ ID NO: 379550 - DNA, 33 bp, Homo sapien
acaggctaatattctatcctcccctcaggctga

SEQ ID NO: 379551 - DNA, 33 bp, Homo sapien
caatcactccttttcaatagtcctcaaaagtcc

SEQ ID NO: 379552 - DNA, 33 bp, Homo sapien
caatcactccttttcagtagtcctcaaaagtcc

SEQ ID NO: 379553 - DNA, 33 bp, Homo sapien
acagttttcatgtgaaccactcaagactttttc

SEQ ID NO: 379554 - DNA, 33 bp, Homo sapien
acagttttcatgtgaatcactcaagactttttc

SEQ ID NO: 379555 - DNA, 33 bp, Homo sapien
atggactagttaaggacagctcttcaaaggaga

SEQ ID NO: 379556 - DNA, 33 bp, Homo sapien
atggactagttaaggatagctcttcaaaggaga

SEQ ID NO: 379557 - DNA, 33 bp, Homo sapien
agtgcccaaatgcataaacttgtggctcactga

SEQ ID NO: 379558 - DNA, 33 bp, Homo sapien
agtgcccaaatgcatacacttgtggctcactga

SEQ ID NO: 379559 - DNA, 33 bp, Homo sapien
tggggtgaaatgaagacaataacaaaagtgaaa

SEQ ID NO: 379560 - DNA, 33 bp, Homo sapien
tggggtgaaatgaagataataacaaaagtgaaa

SEQ ID NO: 379561 - DNA, 33 bp, Homo sapien
aatccagatgtccaacaattaataaagggataa

SEQ ID NO: 379562 - DNA, 33 bp, Homo sapien
aatccagatgtccaacgattaataaagggataa

SEQ ID NO: 379563 - DNA, 33 bp, Homo sapien
agcaagggtggaataaatcatccattcagtaac

SEQ ID NO: 379564 - DNA, 33 bp, Homo sapien
agcaagggtggaataagtcatccattcagtaac

SEQ ID NO: 379565 - DNA, 33 bp, Homo sapien
aacaatagttcaataacaggcaatcgacccagg

SEQ ID NO: 379566 - DNA, 33 bp, Homo sapien
aacaatagttcaataataggcaatcgacccagg

SEQ ID NO: 379567 - DNA, 33 bp, Homo sapien
catgtttgtatcagggcccacatggtacagtgc

SEQ ID NO: 379568 - DNA, 33 bp, Homo sapien
catgtttgtatcagggtccacatggtacagtgc

SEQ ID NO: 379569 - DNA, 33 bp, Homo sapien
agtaaaattggagatacgaataatgaagtttct

SEQ ID NO: 379570 - DNA, 33 bp, Homo sapien
agtaaaattggagatatgaataatgaagtttct

SEQ ID NO: 379571 - DNA, 33 bp, Homo sapien
tgctgtataactgataactcccatttattctgt

SEQ ID NO: 379572 - DNA, 33 bp, Homo sapien
tgctgtataactgatagctcccatttattctgt

SEQ ID NO: 379573 - DNA, 33 bp, Homo sapien
ttaactcaggttttaacgttgaaagatagaatg

SEQ ID NO: 379574 - DNA, 33 bp, Homo sapien
ttaactcaggttttaatgttgaaagatagaatg

SEQ ID NO: 379575 - DNA, 33 bp, Homo sapien
cattccaggtggtgagcatgaggattatgggaa

SEQ ID NO: 379576 - DNA, 33 bp, Homo sapien
cattccaggtggtgagtatgaggattatgggaa

SEQ ID NO: 379577 - DNA, 33 bp, Homo sapien
ctggggtagaaggagcacaaaataaaccaaaac

SEQ ID NO: 379578 - DNA, 33 bp, Homo sapien
ctggggtagaaggagcgcaaaataaaccaaaac

SEQ ID NO: 379579 - DNA, 33 bp, Homo sapien
gggaagaaaatagtcccgagatttccagctaat

SEQ ID NO: 379580 - DNA, 33 bp, Homo sapien
gggaagaaaatagtcctgagatttccagctaat

SEQ ID NO: 379581 - DNA, 33 bp, Homo sapien
tactgactataagatacattttgccagaatgaa

SEQ ID NO: 379582 - DNA, 33 bp, Homo sapien
tactgactataagatatattttgccagaatgaa

SEQ ID NO: 379583 - DNA, 33 bp, Homo sapien
acccaaggaatctgtaaactacttctgacttat

SEQ ID NO: 379584 - DNA, 33 bp, Homo sapien
acccaaggaatctgtacactacttctgacttat

SEQ ID NO: 379585 - DNA, 33 bp, Homo sapien
ctgaaaaatttctgcccattacctctaccacca

SEQ ID NO: 379586 - DNA, 33 bp, Homo sapien
ctgaaaaatttctgcctattacctctaccacca

SEQ ID NO: 379587 - DNA, 33 bp, Homo sapien
ttgtgtttactgaaaaaatataaaggcagatca

SEQ ID NO: 379588 - DNA, 33 bp, Homo sapien
ttgtgtttactgaaaagatataaaggcagatca

SEQ ID NO: 379589 - DNA, 33 bp, Homo sapien
taaaacacacaaagtacctaccttcagaaaatt

SEQ ID NO: 379590 - DNA, 33 bp, Homo sapien
taaaacacacaaagtagctaccttcagaaaatt

SEQ ID NO: 379591 - DNA, 33 bp, Homo sapien
atccttgtgtctatcaacagcccagaatgccag

SEQ ID NO: 379592 - DNA, 33 bp, Homo sapien
atccttgtgtctatcaccagcccagaatgccag

SEQ ID NO: 379593 - DNA, 33 bp, Homo sapien
agcagatgctgttaacacctcacccatgtctcc

SEQ ID NO: 379594 - DNA, 33 bp, Homo sapien
agcagatgctgttaacccctcacccatgtctcc

SEQ ID NO: 379595 - DNA, 33 bp, Homo sapien
aagattgtaccagggccccatcttcttaaccag

SEQ ID NO: 379596 - DNA, 33 bp, Homo sapien
aagattgtaccagggctccatcttcttaaccag

SEQ ID NO: 379597 - DNA, 33 bp, Homo sapien
aggcaatgaggtgatacggaaattacattgggt

SEQ ID NO: 379598 - DNA, 33 bp, Homo sapien
aggcaatgaggtgatatggaaattacattgggt

SEQ ID NO: 379599 - DNA, 33 bp, Homo sapien
atcaacagagcctataatacccattttttctac

SEQ ID NO: 379600 - DNA, 33 bp, Homo sapien
atcaacagagcctatagtacccattttttctac

SEQ ID NO: 379601 - DNA, 33 bp, Homo sapien
atactgatttcagataataggtctctaaaactt

SEQ ID NO: 379602 - DNA, 33 bp, Homo sapien
atactgatttcagatattaggtctctaaaactt

SEQ ID NO: 379603 - DNA, 33 bp, Homo sapien
gttagcataatgtaaaccttccacttataattt

SEQ ID NO: 379604 - DNA, 33 bp, Homo sapien
gttagcataatgtaaatcttccacttataattt

SEQ ID NO: 379605 - DNA, 33 bp, Homo sapien
aaaacatcaatatatcaatgcagtaaggagtaa

SEQ ID NO: 379606 - DNA, 33 bp, Homo sapien
aaaacatcaatatatcgatgcagtaaggagtaa

SEQ ID NO: 379607 - DNA, 33 bp, Homo sapien
ggtttttgctttggaaagtgagtcacaaggcta

SEQ ID NO: 379608 - DNA, 33 bp, Homo sapien
ggtttttgctttggaaggtgagtcacaaggcta

SEQ ID NO: 379609 - DNA, 33 bp, Homo sapien
ttttttctataagatacggcttttgctctgatc

SEQ ID NO: 379610 - DNA, 33 bp, Homo sapien
ttttttctataagatatggcttttgctctgatc

SEQ ID NO: 379611 - DNA, 33 bp, Homo sapien
gcacagggcatcaagactcactcactgcttcac

SEQ ID NO: 379612 - DNA, 33 bp, Homo sapien
gcacagggcatcaagagtcactcactgcttcac

SEQ ID NO: 379613 - DNA, 33 bp, Homo sapien
tactcctacaaggaccaaataaaggagatattt

SEQ ID NO: 379614 - DNA, 33 bp, Homo sapien
tactcctacaaggaccgaataaaggagatattt

SEQ ID NO: 379615 - DNA, 33 bp, Homo sapien
tgatgatcacacaaaaccatgacatcaaatgtc

SEQ ID NO: 379616 - DNA, 33 bp, Homo sapien
tgatgatcacacaaaatcatgacatcaaatgtc

SEQ ID NO: 379617 - DNA, 33 bp, Homo sapien
atcttgaattagagtaatacagaagatcattat

SEQ ID NO: 379618 - DNA, 33 bp, Homo sapien
atcttgaattagagtagtacagaagatcattat

SEQ ID NO: 379619 - DNA, 33 bp, Homo sapien
aaaagccatgtggaccagcaaactacatttcca

SEQ ID NO: 379620 - DNA, 33 bp, Homo sapien
aaaagccatgtggaccggcaaactacatttcca

SEQ ID NO: 379621 - DNA, 33 bp, Homo sapien
caggtgggcattggaaaacatgagatagttgac

SEQ ID NO: 379622 - DNA, 33 bp, Homo sapien
caggtgggcattggaagacatgagatagttgac

SEQ ID NO: 379623 - DNA, 33 bp, Homo sapien
cttccaaaaaaatgtcactgtcagttaaacctt

SEQ ID NO: 379624 - DNA, 33 bp, Homo sapien
cttccaaaaaaatgtcgctgtcagttaaacctt

SEQ ID NO: 379625 - DNA, 33 bp, Homo sapien
tcagccttataatcaacgttcagtagttatttt

SEQ ID NO: 379626 - DNA, 33 bp, Homo sapien
tcagccttataatcaatgttcagtagttatttt

SEQ ID NO: 379627 - DNA, 33 bp, Homo sapien
atgtatgtgatgtataccgttgtttgacgttag

SEQ ID NO: 379628 - DNA, 33 bp, Homo sapien
atgtatgtgatgtatatcgttgtttgacgttag

SEQ ID NO: 379629 - DNA, 33 bp, Homo sapien
agttacctgacaactcaaaataattgctttaag

SEQ ID NO: 379630 - DNA, 33 bp, Homo sapien
agttacctgacaactcgaaataattgctttaag

SEQ ID NO: 379631 - DNA, 33 bp, Homo sapien
gttctggagagtacagccattggacagacctta

SEQ ID NO: 379632 - DNA, 33 bp, Homo sapien
gttctggagagtacagtcattggacagacctta

SEQ ID NO: 379633 - DNA, 33 bp, Homo sapien
ctgagaacaaacaagacgtgctgcacacagcta

SEQ ID NO: 379634 - DNA, 33 bp, Homo sapien
ctgagaacaaacaagaggtgctgcacacagcta

SEQ ID NO: 379635 - DNA, 33 bp, Homo sapien
tagggtgaaattgtgaaataatgattagggatg

SEQ ID NO: 379636 - DNA, 33 bp, Homo sapien
tagggtgaaattgtgatataatgattagggatg

SEQ ID NO: 379637 - DNA, 33 bp, Homo sapien
aagttattttggaacaatatatatgcgagcatg

SEQ ID NO: 379638 - DNA, 33 bp, Homo sapien
aagttattttggaacagtatatatgcgagcatg

SEQ ID NO: 379639 - DNA, 33 bp, Homo sapien
aaatatgattatactgaactcctttagtctttg

SEQ ID NO: 379640 - DNA, 33 bp, Homo sapien
aaatatgattatactgcactcctttagtctttg

SEQ ID NO: 379641 - DNA, 33 bp, Homo sapien
cgtatcggttgttgaacacaatcgctttttaaa

SEQ ID NO: 379642 - DNA, 33 bp, Homo sapien
cgtatcggttgttgaatacaatcgctttttaaa

SEQ ID NO: 379643 - DNA, 33 bp, Homo sapien
gagactacaccatgtacgaattgataaggtcaa

SEQ ID NO: 379644 - DNA, 33 bp, Homo sapien
gagactacaccatgtatgaattgataaggtcaa

SEQ ID NO: 379645 - DNA, 33 bp, Homo sapien
ggttctgagagaaatacgagtaacattgcataa

SEQ ID NO: 379646 - DNA, 33 bp, Homo sapien
ggttctgagagaaatatgagtaacattgcataa

SEQ ID NO: 379647 - DNA, 33 bp, Homo sapien
agaaaacaacaacaacaatgatggagtcagaat

SEQ ID NO: 379648 - DNA, 33 bp, Homo sapien
agaaaacaacaacaaccatgatggagtcagaat

SEQ ID NO: 379649 - DNA, 33 bp, Homo sapien
tacatggaataagaaacctggcatcttctggta

SEQ ID NO: 379650 - DNA, 33 bp, Homo sapien
tacatggaataagaaatctggcatcttctggta

SEQ ID NO: 379651 - DNA, 33 bp, Homo sapien
ttaaatggtattcaaactagaaatgcttaaaat

SEQ ID NO: 379652 - DNA, 33 bp, Homo sapien
ttaaatggtattcaaattagaaatgcttaaaat

SEQ ID NO: 379653 - DNA, 33 bp, Homo sapien
gaaaatattgaagcagacctctagaatatcaac

SEQ ID NO: 379654 - DNA, 33 bp, Homo sapien
gaaaatattgaagcaggcctctagaatatcaac

SEQ ID NO: 379655 - DNA, 33 bp, Homo sapien
agttctcacatttgcaaacacggtactcacttt

SEQ ID NO: 379656 - DNA, 33 bp, Homo sapien
agttctcacatttgcagacacggtactcacttt

SEQ ID NO: 379657 - DNA, 33 bp, Homo sapien
cctcttcttctgtgaaatgatggtgtcccagaa

SEQ ID NO: 379658 - DNA, 33 bp, Homo sapien
cctcttcttctgtgaagtgatggtgtcccagaa

SEQ ID NO: 379659 - DNA, 33 bp, Homo sapien
ctactaatttacaaaaatgcaatatggtttact

SEQ ID NO: 379660 - DNA, 33 bp, Homo sapien
ctactaatttacaaaagtgcaatatggtttact

SEQ ID NO: 379661 - DNA, 33 bp, Homo sapien
gattattagaaagtgaaggaagtatgatcagac

SEQ ID NO: 379662 - DNA, 33 bp, Homo sapien
gattattagaaagtgatggaagtatgatcagac

SEQ ID NO: 379663 - DNA, 33 bp, Homo sapien
aatgtcatatggagaaactcttatctcatgcaa

SEQ ID NO: 379664 - DNA, 33 bp, Homo sapien
aatgtcatatggagaatctcttatctcatgcaa

SEQ ID NO: 379665 - DNA, 33 bp, Homo sapien
atgggggtttctattacagggcttctactcttg

SEQ ID NO: 379666 - DNA, 33 bp, Homo sapien
atgggggtttctattagagggcttctactcttg

SEQ ID NO: 379667 - DNA, 33 bp, Homo sapien
gttcgaaataatacagacgtgtcctaacacaga

SEQ ID NO: 379668 - DNA, 33 bp, Homo sapien
gttcgaaataatacagccgtgtcctaacacaga

SEQ ID NO: 379669 - DNA, 33 bp, Homo sapien
ggagctaggaaatgtaataactggttcaacaat

SEQ ID NO: 379670 - DNA, 33 bp, Homo sapien
ggagctaggaaatgtagtaactggttcaacaat

SEQ ID NO: 379671 - DNA, 33 bp, Homo sapien
aaaacctgtacaacaccaagccagtacaccttt

SEQ ID NO: 379672 - DNA, 33 bp, Homo sapien
aaaacctgtacaacactaagccagtacaccttt

SEQ ID NO: 379673 - DNA, 33 bp, Homo sapien
atgtggatttacattgacaaagcagctgatgct

SEQ ID NO: 379674 - DNA, 33 bp, Homo sapien
atgtggatttacattgtcaaagcagctgatgct

SEQ ID NO: 379675 - DNA, 33 bp, Homo sapien
gaatgaaagggtgtgaaagaatagctttggata

SEQ ID NO: 379676 - DNA, 33 bp, Homo sapien
gaatgaaagggtgtgagagaatagctttggata

SEQ ID NO: 379677 - DNA, 33 bp, Homo sapien
ccaccctatgatcaaagaatttatagccatctc

SEQ ID NO: 379678 - DNA, 33 bp, Homo sapien
ccaccctatgatcaaataatttatagccatctc

SEQ ID NO: 379679 - DNA, 33 bp, Homo sapien
tagccatctctaactccccacaattacttctac

SEQ ID NO: 379680 - DNA, 33 bp, Homo sapien
tagccatctctaactctccacaattacttctac

SEQ ID NO: 379681 - DNA, 33 bp, Homo sapien
gcaactaacttggcacaacatttttctataaaa

SEQ ID NO: 379682 - DNA, 33 bp, Homo sapien
gcaactaacttggcacgacatttttctataaaa

SEQ ID NO: 379683 - DNA, 33 bp, Homo sapien
accattttatggataaccatgctcatttacaaa

SEQ ID NO: 379684 - DNA, 33 bp, Homo sapien
accattttatggataatcatgctcatttacaaa

SEQ ID NO: 379685 - DNA, 33 bp, Homo sapien
ttgctgaaagttttgcaatcctagctctgaaat

SEQ ID NO: 379686 - DNA, 33 bp, Homo sapien
ttgctgaaagttttgcgatcctagctctgaaat

SEQ ID NO: 379687 - DNA, 33 bp, Homo sapien
cataccaaatcaaatacgtgcagaaaaatatgt

SEQ ID NO: 379688 - DNA, 33 bp, Homo sapien
cataccaaatcaaatatgtgcagaaaaatatgt

SEQ ID NO: 379689 - DNA, 33 bp, Homo sapien
aagaagtggcaaagccaaagttaaaagttctgc

SEQ ID NO: 379690 - DNA, 33 bp, Homo sapien
aagaagtggcaaagccgaagttaaaagttctgc

SEQ ID NO: 379691 - DNA, 33 bp, Homo sapien
ctggccatttactataagtgctcgttaaacttc

SEQ ID NO: 379692 - DNA, 33 bp, Homo sapien
ctggccatttactataggtgctcgttaaacttc

SEQ ID NO: 379693 - DNA, 33 bp, Homo sapien
caaacctcaaatcaaacatttcactgatgtctc

SEQ ID NO: 379694 - DNA, 33 bp, Homo sapien
caaacctcaaatcaaatatttcactgatgtctc

SEQ ID NO: 379695 - DNA, 33 bp, Homo sapien
tctttttccttttcaaatcaaattgtgctctgc

SEQ ID NO: 379696 - DNA, 33 bp, Homo sapien
tctttttccttttcaactcaaattgtgctctgc

SEQ ID NO: 379697 - DNA, 33 bp, Homo sapien
caaagatgtagagagaaattgcagatcacgtaa

SEQ ID NO: 379698 - DNA, 33 bp, Homo sapien
caaagatgtagagagagattgcagatcacgtaa

SEQ ID NO: 379699 - DNA, 33 bp, Homo sapien
tgccacagcaaaaatgaatgttgagttggagtc

SEQ ID NO: 379700 - DNA, 33 bp, Homo sapien
tgccacagcaaaaatggatgttgagttggagtc

SEQ ID NO: 379701 - DNA, 33 bp, Homo sapien
aggataaaacattccacaggagaaaaaacacaa

SEQ ID NO: 379702 - DNA, 33 bp, Homo sapien
aggataaaacattccagaggagaaaaaacacaa

SEQ ID NO: 379703 - DNA, 33 bp, Homo sapien
ttgactttggtttcccgcttggtagtcgaagtc

SEQ ID NO: 379704 - DNA, 33 bp, Homo sapien
ttgactttggtttccctcttggtagtcgaagtc

SEQ ID NO: 379705 - DNA, 33 bp, Homo sapien
agttgagagttactgcaaaagagtcaaaaagtt

SEQ ID NO: 379706 - DNA, 33 bp, Homo sapien
agttgagagttactgccaaagagtcaaaaagtt

SEQ ID NO: 379707 - DNA, 33 bp, Homo sapien
aagaaaagttttcaatcacacagttcctacagt

SEQ ID NO: 379708 - DNA, 33 bp, Homo sapien
aagaaaagttttcaattacacagttcctacagt

SEQ ID NO: 379709 - DNA, 33 bp, Homo sapien
aagctgtccttcactcaccactgaactgcagca

SEQ ID NO: 379710 - DNA, 33 bp, Homo sapien
aagctgtccttcactcgccactgaactgcagca

SEQ ID NO: 379711 - DNA, 33 bp, Homo sapien
cctacgactgattggaatatctgaaagagctgt

SEQ ID NO: 379712 - DNA, 33 bp, Homo sapien
cctacgactgattggattatctgaaagagctgt

SEQ ID NO: 379713 - DNA, 33 bp, Homo sapien
tgcggtactggtataaatatagacatataaatc

SEQ ID NO: 379714 - DNA, 33 bp, Homo sapien
tgcggtactggtataagtatagacatataaatc

SEQ ID NO: 379715 - DNA, 33 bp, Homo sapien
ggtatttgtgaaggaacagacgtatagacccat

SEQ ID NO: 379716 - DNA, 33 bp, Homo sapien
ggtatttgtgaaggaatagacgtatagacccat

SEQ ID NO: 379717 - DNA, 33 bp, Homo sapien
caatgcataaatgaaccgtggtgcatctctgcc

SEQ ID NO: 379718 - DNA, 33 bp, Homo sapien
caatgcataaatgaactgtggtgcatctctgcc

SEQ ID NO: 379719 - DNA, 33 bp, Homo sapien
gataatactgttttcaatccgtattttgggcat

SEQ ID NO: 379720 - DNA, 33 bp, Homo sapien
gataatactgttttcagtccgtattttgggcat

SEQ ID NO: 379721 - DNA, 33 bp, Homo sapien
aggggaattctgatacaaagagtaagctcatta

SEQ ID NO: 379722 - DNA, 33 bp, Homo sapien
aggggaattctgatacgaagagtaagctcatta

SEQ ID NO: 379723 - DNA, 33 bp, Homo sapien
ttcttcaattctgacaaaaggctacagattatt

SEQ ID NO: 379724 - DNA, 33 bp, Homo sapien
ttcttcaattctgacagaaggctacagattatt

SEQ ID NO: 379725 - DNA, 33 bp, Homo sapien
tagaggtctgtttacagtagagtctattttcag

SEQ ID NO: 379726 - DNA, 33 bp, Homo sapien
tagaggtctgtttacattagagtctattttcag

SEQ ID NO: 379727 - DNA, 33 bp, Homo sapien
gagacaaaaaatagagaaattgaatacagaagt

SEQ ID NO: 379728 - DNA, 33 bp, Homo sapien
gagacaaaaaatagaggaattgaatacagaagt

SEQ ID NO: 379729 - DNA, 33 bp, Homo sapien
agacagaagatttcaaattatcacccaagctgc

SEQ ID NO: 379730 - DNA, 33 bp, Homo sapien
agacagaagatttcaatttatcacccaagctgc

SEQ ID NO: 379731 - DNA, 33 bp, Homo sapien
caatattaagagtgcccatgagaaaaaaaaatt

SEQ ID NO: 379732 - DNA, 33 bp, Homo sapien
caatattaagagtgcctatgagaaaaaaaaatt

SEQ ID NO: 379733 - DNA, 33 bp, Homo sapien
gtctttaatgaacaaaagcctttcaagagactc

SEQ ID NO: 379734 - DNA, 33 bp, Homo sapien
gtctttaatgaacaaatgcctttcaagagactc

SEQ ID NO: 379735 - DNA, 33 bp, Homo sapien
agctctctatctctcaaagtggcggtcaaggcc

SEQ ID NO: 379736 - DNA, 33 bp, Homo sapien
agctctctatctctcagagtggcggtcaaggcc

SEQ ID NO: 379737 - DNA, 33 bp, Homo sapien
atgactgtttaaaaaccatgatgaggccgggcg

SEQ ID NO: 379738 - DNA, 33 bp, Homo sapien
atgactgtttaaaaacgatgatgaggccgggcg

SEQ ID NO: 379739 - DNA, 33 bp, Homo sapien
ctctcatgcatacctacgtctccaacacctgta

SEQ ID NO: 379740 - DNA, 33 bp, Homo sapien
ctctcatgcatacctatgtctccaacacctgta

SEQ ID NO: 379741 - DNA, 33 bp, Homo sapien
ttagtgcccagttatccatagagcatagtcaag

SEQ ID NO: 379742 - DNA, 33 bp, Homo sapien
ttagtgcccagttatctatagagcatagtcaag

SEQ ID NO: 379743 - DNA, 33 bp, Homo sapien
gcaggataattcaagaagtgcctttagcatcac

SEQ ID NO: 379744 - DNA, 33 bp, Homo sapien
gcaggataattcaagaggtgcctttagcatcac

SEQ ID NO: 379745 - DNA, 33 bp, Homo sapien
gatgacagggctactaccagagctatttcttga

SEQ ID NO: 379746 - DNA, 33 bp, Homo sapien
gatgacagggctactatcagagctatttcttga

SEQ ID NO: 379747 - DNA, 33 bp, Homo sapien
acattcttcccttgtaacttccattgacttctt

SEQ ID NO: 379748 - DNA, 33 bp, Homo sapien
acattcttcccttgtagcttccattgacttctt

SEQ ID NO: 379749 - DNA, 33 bp, Homo sapien
tttgaacacctgcataacttcacataaccacca

SEQ ID NO: 379750 - DNA, 33 bp, Homo sapien
tttgaacacctgcataccttcacataaccacca

SEQ ID NO: 379751 - DNA, 33 bp, Homo sapien
ttgtcatcagttttgcaagataagaaacccaaa

SEQ ID NO: 379752 - DNA, 33 bp, Homo sapien
ttgtcatcagttttgcgagataagaaacccaaa

SEQ ID NO: 379753 - DNA, 33 bp, Homo sapien
tctcttttgataccacagaagaaaagcaatccc

SEQ ID NO: 379754 - DNA, 33 bp, Homo sapien
tctcttttgataccacggaagaaaagcaatccc

SEQ ID NO: 379755 - DNA, 33 bp, Homo sapien
gaaggatggtgtaaaaagattgccagacggtcc

SEQ ID NO: 379756 - DNA, 33 bp, Homo sapien
gaaggatggtgtaaaatgattgccagacggtcc

SEQ ID NO: 379757 - DNA, 33 bp, Homo sapien
gctgatgatcattaacacttaaaagctgaggct

SEQ ID NO: 379758 - DNA, 33 bp, Homo sapien
gctgatgatcattaacgcttaaaagctgaggct

SEQ ID NO: 379759 - DNA, 33 bp, Homo sapien
taaatgtgtgcaaatgaatattttgaaggcttt

SEQ ID NO: 379760 - DNA, 33 bp, Homo sapien
taaatgtgtgcaaatggatattttgaaggcttt

SEQ ID NO: 379761 - DNA, 33 bp, Homo sapien
tacttatgaaacaaaacagttcgaatttcttct

SEQ ID NO: 379762 - DNA, 33 bp, Homo sapien
tacttatgaaacaaaagagttcgaatttcttct

SEQ ID NO: 379763 - DNA, 33 bp, Homo sapien
tggctctccacaacaccaatgcatacttcttcc

SEQ ID NO: 379764 - DNA, 33 bp, Homo sapien
tggctctccacaacacgaatgcatacttcttcc

SEQ ID NO: 379765 - DNA, 33 bp, Homo sapien
accttaatatctatcaaagattgcataaacctg

SEQ ID NO: 379766 - DNA, 33 bp, Homo sapien
accttaatatctatcagagattgcataaacctg

SEQ ID NO: 379767 - DNA, 33 bp, Homo sapien
gttgtcacttgttgggaccattaactagacaag

SEQ ID NO: 379768 - DNA, 33 bp, Homo sapien
gttgtcacttgttggggccattaactagacaag

SEQ ID NO: 379769 - DNA, 33 bp, Homo sapien
cttgtctgtgagcttacgtcttaaagtcattag

SEQ ID NO: 379770 - DNA, 33 bp, Homo sapien
cttgtctgtgagcttatgtcttaaagtcattag

SEQ ID NO: 379771 - DNA, 33 bp, Homo sapien
agcaaagtttgtttgaggtatcatgattagcaa

SEQ ID NO: 379772 - DNA, 33 bp, Homo sapien
agcaaagtttgtttgatgtatcatgattagcaa

SEQ ID NO: 379773 - DNA, 33 bp, Homo sapien
cagagaggttctgaaacttgcccaaggacacac

SEQ ID NO: 379774 - DNA, 33 bp, Homo sapien
cagagaggttctgaaatttgcccaaggacacac

SEQ ID NO: 379775 - DNA, 33 bp, Homo sapien
gctgaggacaaactaactcatcaaatgttgagt

SEQ ID NO: 379776 - DNA, 33 bp, Homo sapien
gctgaggacaaactaattcatcaaatgttgagt

SEQ ID NO: 379777 - DNA, 33 bp, Homo sapien
tcacaattggtaacaacgctgaaaattaactgt

SEQ ID NO: 379778 - DNA, 33 bp, Homo sapien
tcacaattggtaacaatgctgaaaattaactgt

SEQ ID NO: 379779 - DNA, 33 bp, Homo sapien
cttggaaactgagaaggcatgggatgattgact

SEQ ID NO: 379780 - DNA, 33 bp, Homo sapien
cttggaaactgagaagtcatgggatgattgact

SEQ ID NO: 379781 - DNA, 33 bp, Homo sapien
gaacacctcataatacagagttaaggcttgcaa

SEQ ID NO: 379782 - DNA, 33 bp, Homo sapien
gaacacctcataatacggagttaaggcttgcaa

SEQ ID NO: 379783 - DNA, 33 bp, Homo sapien
tgcccagacaaccagacggtctagtgagaaaag

SEQ ID NO: 379784 - DNA, 33 bp, Homo sapien
tgcccagacaaccagatggtctagtgagaaaag

SEQ ID NO: 379785 - DNA, 33 bp, Homo sapien
caagaatatacctggaactcttaagattcaaca

SEQ ID NO: 379786 - DNA, 33 bp, Homo sapien
caagaatatacctggagctcttaagattcaaca

SEQ ID NO: 379787 - DNA, 33 bp, Homo sapien
aggtcacttgcgttccaatgattatcaacccca

SEQ ID NO: 379788 - DNA, 33 bp, Homo sapien
aggtcacttgcgttccgatgattatcaacccca

SEQ ID NO: 379789 - DNA, 33 bp, Homo sapien
ggaacggtaattgcaactgagccagtgttttag

SEQ ID NO: 379790 - DNA, 33 bp, Homo sapien
ggaacggtaattgcaattgagccagtgttttag

SEQ ID NO: 379791 - DNA, 33 bp, Homo sapien
agatgaattaagaacaataactttcatcaagat

SEQ ID NO: 379792 - DNA, 33 bp, Homo sapien
agatgaattaagaacagtaactttcatcaagat

SEQ ID NO: 379793 - DNA, 33 bp, Homo sapien
tgtgttacttgttttcaaccatatcagaagagc

SEQ ID NO: 379794 - DNA, 33 bp, Homo sapien
tgtgttacttgttttcgaccatatcagaagagc

SEQ ID NO: 379795 - DNA, 33 bp, Homo sapien
ctcacacacaaatacccataccctgtttccacc

SEQ ID NO: 379796 - DNA, 33 bp, Homo sapien
ctcacacacaaatacctataccctgtttccacc

SEQ ID NO: 379797 - DNA, 33 bp, Homo sapien
gtagaggtgggtgtagaattatactagggattc

SEQ ID NO: 379798 - DNA, 33 bp, Homo sapien
gtagaggtgggtgtaggattatactagggattc

SEQ ID NO: 379799 - DNA, 33 bp, Homo sapien
acatgtttagggagtacaattcatggggcattc

SEQ ID NO: 379800 - DNA, 33 bp, Homo sapien
acatgtttagggagtataattcatggggcattc

SEQ ID NO: 379801 - DNA, 33 bp, Homo sapien
ttagaggttaagaacaagtgtactgtgaataga

SEQ ID NO: 379802 - DNA, 33 bp, Homo sapien
ttagaggttaagaacacgtgtactgtgaataga

SEQ ID NO: 379803 - DNA, 33 bp, Homo sapien
ttcaaagattttagcacattgcctgtcttttta

SEQ ID NO: 379804 - DNA, 33 bp, Homo sapien
ttcaaagattttagcagattgcctgtcttttta

SEQ ID NO: 379805 - DNA, 33 bp, Homo sapien
tatttcctaccacaagaacagtataaggaaacc

SEQ ID NO: 379806 - DNA, 33 bp, Homo sapien
tatttcctaccacaaggacagtataaggaaacc

SEQ ID NO: 379807 - DNA, 33 bp, Homo sapien
aaattatggtatctaacgtaaagtattatgcag

SEQ ID NO: 379808 - DNA, 33 bp, Homo sapien
aaattatggtatctaaggtaaagtattatgcag

SEQ ID NO: 379809 - DNA, 33 bp, Homo sapien
gtatttttgcaagcaacggctatattataattt

SEQ ID NO: 379810 - DNA, 33 bp, Homo sapien
gtatttttgcaagcaatggctatattataattt

SEQ ID NO: 379811 - DNA, 33 bp, Homo sapien
attcatgtgtaattgagataactttcagcaatt

SEQ ID NO: 379812 - DNA, 33 bp, Homo sapien
attcatgtgtaattgatataactttcagcaatt

SEQ ID NO: 379813 - DNA, 33 bp, Homo sapien
aaatgttgattacttaagaaaaaggccagacgt

SEQ ID NO: 379814 - DNA, 33 bp, Homo sapien
aaatgttgattacttatgaaaaaggccagacgt

SEQ ID NO: 379815 - DNA, 33 bp, Homo sapien
ccaagtgtccttccaacctctgaacatttcagt

SEQ ID NO: 379816 - DNA, 33 bp, Homo sapien
ccaagtgtccttccaatctctgaacatttcagt

SEQ ID NO: 379817 - DNA, 33 bp, Homo sapien
actcagtttgttcccaatcagaatgctttgtgg

SEQ ID NO: 379818 - DNA, 33 bp, Homo sapien
actcagtttgttcccagtcagaatgctttgtgg

SEQ ID NO: 379819 - DNA, 33 bp, Homo sapien
ttataaaacaaacctcagaaagcttattcactg

SEQ ID NO: 379820 - DNA, 33 bp, Homo sapien
ttataaaacaaacctcggaaagcttattcactg

SEQ ID NO: 379821 - DNA, 33 bp, Homo sapien
agtttctatattagtccgaagtattttggtagg

SEQ ID NO: 379822 - DNA, 33 bp, Homo sapien
agtttctatattagtctgaagtattttggtagg

SEQ ID NO: 379823 - DNA, 33 bp, Homo sapien
gccagaccctgctagaacctttggaagaaagaa

SEQ ID NO: 379824 - DNA, 33 bp, Homo sapien
gccagaccctgctagagcctttggaagaaagaa

SEQ ID NO: 379825 - DNA, 33 bp, Homo sapien
ctctctagcagtcctaactacagctgtataaag

SEQ ID NO: 379826 - DNA, 33 bp, Homo sapien
ctctctagcagtcctacctacagctgtataaag

SEQ ID NO: 379827 - DNA, 33 bp, Homo sapien
ctcttcctgtctgtatcagcagaaaattatagc

SEQ ID NO: 379828 - DNA, 33 bp, Homo sapien
ctcttcctgtctgtattagcagaaaattatagc

SEQ ID NO: 379829 - DNA, 33 bp, Homo sapien
ggtatcttaataggaaacaacatatcaagaaaa

SEQ ID NO: 379830 - DNA, 33 bp, Homo sapien
ggtatcttaataggaagcaacatatcaagaaaa

SEQ ID NO: 379831 - DNA, 33 bp, Homo sapien
agcaaggctaatcatcagaatcacacaagaaaa

SEQ ID NO: 379832 - DNA, 33 bp, Homo sapien
agcaaggctaatcatcggaatcacacaagaaaa

SEQ ID NO: 379833 - DNA, 33 bp, Homo sapien
agccttctcggacttcaagcctagttcttagac

SEQ ID NO: 379834 - DNA, 33 bp, Homo sapien
agccttctcggacttccagcctagttcttagac

SEQ ID NO: 379835 - DNA, 33 bp, Homo sapien
agacattttaatcttacggcagtgttactgaat

SEQ ID NO: 379836 - DNA, 33 bp, Homo sapien
agacattttaatcttatggcagtgttactgaat

SEQ ID NO: 379837 - DNA, 33 bp, Homo sapien
tagaccttggctaatcaataagctattttagta

SEQ ID NO: 379838 - DNA, 33 bp, Homo sapien
tagaccttggctaatcgataagctattttagta

SEQ ID NO: 379839 - DNA, 33 bp, Homo sapien
ggctgctgtatggaaacggtttgatgcagaaac

SEQ ID NO: 379840 - DNA, 33 bp, Homo sapien
ggctgctgtatggaaatggtttgatgcagaaac

SEQ ID NO: 379841 - DNA, 33 bp, Homo sapien
tttgggagataatgggaaaaaacactttctagc

SEQ ID NO: 379842 - DNA, 33 bp, Homo sapien
tttgggagataatggggaaaaacactttctagc

SEQ ID NO: 379843 - DNA, 33 bp, Homo sapien
aagcactttggcatcacgttgtaaaagatacaa

SEQ ID NO: 379844 - DNA, 33 bp, Homo sapien
aagcactttggcatcatgttgtaaaagatacaa

SEQ ID NO: 379845 - DNA, 33 bp, Homo sapien
aaagcaaggagaaccaagtaaaataggtggaaa

SEQ ID NO: 379846 - DNA, 33 bp, Homo sapien
aaagcaaggagaaccaggtaaaataggtggaaa

SEQ ID NO: 379847 - DNA, 33 bp, Homo sapien
tacatgagtcaagtaaaaaatacagaatttgag

SEQ ID NO: 379848 - DNA, 33 bp, Homo sapien
tacatgagtcaagtaataaatacagaatttgag

SEQ ID NO: 379849 - DNA, 33 bp, Homo sapien
cacaatcctctcattgcaaagtctctggggttg

SEQ ID NO: 379850 - DNA, 33 bp, Homo sapien
cacaatcctctcattggaaagtctctggggttg

SEQ ID NO: 379851 - DNA, 33 bp, Homo sapien
actccagaacagtgaccaatttaagtggtgttt

SEQ ID NO: 379852 - DNA, 33 bp, Homo sapien
actccagaacagtgactaatttaagtggtgttt

SEQ ID NO: 379853 - DNA, 33 bp, Homo sapien
acagcaaagaacatacacaagtatcgacaccca

SEQ ID NO: 379854 - DNA, 33 bp, Homo sapien
acagcaaagaacatacgcaagtatcgacaccca

SEQ ID NO: 379855 - DNA, 33 bp, Homo sapien
tctaaaacgtgctgaaatcagatgtgacccagc

SEQ ID NO: 379856 - DNA, 33 bp, Homo sapien
tctaaaacgtgctgaattcagatgtgacccagc

SEQ ID NO: 379857 - DNA, 33 bp, Homo sapien
ggtgtgtctggaaataccatttggaagctgggt

SEQ ID NO: 379858 - DNA, 33 bp, Homo sapien
ggtgtgtctggaaatatcatttggaagctgggt

SEQ ID NO: 379859 - DNA, 33 bp, Homo sapien
ggtattcaagatgcaaagcaaagtcctctttat

SEQ ID NO: 379860 - DNA, 33 bp, Homo sapien
ggtattcaagatgcaaggcaaagtcctctttat

SEQ ID NO: 379861 - DNA, 33 bp, Homo sapien
taatcagagctacaaccgaaaagcttctaactc

SEQ ID NO: 379862 - DNA, 33 bp, Homo sapien
taatcagagctacaactgaaaagcttctaactc

SEQ ID NO: 379863 - DNA, 33 bp, Homo sapien
ggacttcagttacaaaatacaaattcaaagaca

SEQ ID NO: 379864 - DNA, 33 bp, Homo sapien
ggacttcagttacaaagtacaaattcaaagaca

SEQ ID NO: 379865 - DNA, 33 bp, Homo sapien
ctactatcttttttagcaaccattactagtgtc

SEQ ID NO: 379866 - DNA, 33 bp, Homo sapien
ctactatcttttttaggaaccattactagtgtc

SEQ ID NO: 379867 - DNA, 33 bp, Homo sapien
ttcatcatatctgcaaaaagtctctacttatct

SEQ ID NO: 379868 - DNA, 33 bp, Homo sapien
ttcatcatatctgcaacaagtctctacttatct

SEQ ID NO: 379869 - DNA, 33 bp, Homo sapien
agacactggaaacaaacgccattgaattgctga

SEQ ID NO: 379870 - DNA, 33 bp, Homo sapien
agacactggaaacaaatgccattgaattgctga

SEQ ID NO: 379871 - DNA, 33 bp, Homo sapien
aaccttgcagtgttgaagaagaaaaacaactga

SEQ ID NO: 379872 - DNA, 33 bp, Homo sapien
aaccttgcagtgttgaggaagaaaaacaactga

SEQ ID NO: 379873 - DNA, 33 bp, Homo sapien
atctttgaaaaggcaaagttgtgtagattaata

SEQ ID NO: 379874 - DNA, 33 bp, Homo sapien
atctttgaaaaggcaatgttgtgtagattaata

SEQ ID NO: 379875 - DNA, 33 bp, Homo sapien
ttctctccgatttcaaacgtagtcctgaatctg

SEQ ID NO: 379876 - DNA, 33 bp, Homo sapien
ttctctccgatttcaatcgtagtcctgaatctg

SEQ ID NO: 379877 - DNA, 33 bp, Homo sapien
acagtggatatataaaacagacagcctgggttc

SEQ ID NO: 379878 - DNA, 33 bp, Homo sapien
acagtggatatataaagcagacagcctgggttc

SEQ ID NO: 379879 - DNA, 33 bp, Homo sapien
tgtggtttttcatgcccctttgcctttgaataa

SEQ ID NO: 379880 - DNA, 33 bp, Homo sapien
tgtggtttttcatgcctctttgcctttgaataa

SEQ ID NO: 379881 - DNA, 33 bp, Homo sapien
accagctttgtcaaagaccaggtgattcagaaa

SEQ ID NO: 379882 - DNA, 33 bp, Homo sapien
accagctttgtcaaaggccaggtgattcagaaa

SEQ ID NO: 379883 - DNA, 33 bp, Homo sapien
tatctgttcaaacataagagaagtctatttttg

SEQ ID NO: 379884 - DNA, 33 bp, Homo sapien
tatctgttcaaacatatgagaagtctatttttg

SEQ ID NO: 379885 - DNA, 33 bp, Homo sapien
gaggtattccctcaaacgttcacagggtcaaac

SEQ ID NO: 379886 - DNA, 33 bp, Homo sapien
gaggtattccctcaaaggttcacagggtcaaac

SEQ ID NO: 379887 - DNA, 33 bp, Homo sapien
aaagaatttgtgaagacgcagagacatggggcg

SEQ ID NO: 379888 - DNA, 33 bp, Homo sapien
aaagaatttgtgaagatgcagagacatggggcg

SEQ ID NO: 379889 - DNA, 33 bp, Homo sapien
taagcacaaattaacactgacctttttactcag

SEQ ID NO: 379890 - DNA, 33 bp, Homo sapien
taagcacaaattaacattgacctttttactcag

SEQ ID NO: 379891 - DNA, 33 bp, Homo sapien
gtttggacataatgctaaaacctaatcaatgca

SEQ ID NO: 379892 - DNA, 33 bp, Homo sapien
gtttggacataatgctgaaacctaatcaatgca

SEQ ID NO: 379893 - DNA, 33 bp, Homo sapien
gagaaggtatatgttgaataagtctttctatac

SEQ ID NO: 379894 - DNA, 33 bp, Homo sapien
gagaaggtatatgttggataagtctttctatac

SEQ ID NO: 379895 - DNA, 33 bp, Homo sapien
acatggtacctgattacgaagactggaacagtc

SEQ ID NO: 379896 - DNA, 33 bp, Homo sapien
acatggtacctgattatgaagactggaacagtc

SEQ ID NO: 379897 - DNA, 33 bp, Homo sapien
gtggttgacaagcaacactttctgaatcaagta

SEQ ID NO: 379898 - DNA, 33 bp, Homo sapien
gtggttgacaagcaactctttctgaatcaagta

SEQ ID NO: 379899 - DNA, 33 bp, Homo sapien
ctatcattgttggataaatgggttggttccagg

SEQ ID NO: 379900 - DNA, 33 bp, Homo sapien
ctatcattgttggatatatgggttggttccagg

SEQ ID NO: 379901 - DNA, 33 bp, Homo sapien
agagggaaagagtaaacatcagagctattagta

SEQ ID NO: 379902 - DNA, 33 bp, Homo sapien
agagggaaagagtaaagatcagagctattagta

SEQ ID NO: 379903 - DNA, 33 bp, Homo sapien
tgctcaatccatatgacggtcaattttgttaag

SEQ ID NO: 379904 - DNA, 33 bp, Homo sapien
tgctcaatccatatgatggtcaattttgttaag

SEQ ID NO: 379905 - DNA, 33 bp, Homo sapien
ttctgtggccttgagaaaattatctaatatctc

SEQ ID NO: 379906 - DNA, 33 bp, Homo sapien
ttctgtggccttgagagaattatctaatatctc

SEQ ID NO: 379907 - DNA, 33 bp, Homo sapien
gagctgccatattttcccaatttcctgagttgc

SEQ ID NO: 379908 - DNA, 33 bp, Homo sapien
gagctgccatattttctcaatttcctgagttgc

SEQ ID NO: 379909 - DNA, 33 bp, Homo sapien
atggcagagtttccccagcaaataattgaaaaa

SEQ ID NO: 379910 - DNA, 33 bp, Homo sapien
atggcagagtttcccccgcaaataattgaaaaa

SEQ ID NO: 379911 - DNA, 33 bp, Homo sapien
ttgattattacttgcgacctaaaataacaataa

SEQ ID NO: 379912 - DNA, 33 bp, Homo sapien
ttgattattacttgcggcctaaaataacaataa

SEQ ID NO: 379913 - DNA, 33 bp, Homo sapien
cacacaaactcatacacatgcatacacattttt

SEQ ID NO: 379914 - DNA, 33 bp, Homo sapien
cacacaaactcatacagatgcatacacattttt

SEQ ID NO: 379915 - DNA, 33 bp, Homo sapien
cagagccttaggtggcaatccgtggtctgtaga

SEQ ID NO: 379916 - DNA, 33 bp, Homo sapien
cagagccttaggtggccatccgtggtctgtaga

SEQ ID NO: 379917 - DNA, 33 bp, Homo sapien
gacacaccatcccaaacgtctgaaagtttctta

SEQ ID NO: 379918 - DNA, 33 bp, Homo sapien
gacacaccatcccaaatgtctgaaagtttctta

SEQ ID NO: 379919 - DNA, 33 bp, Homo sapien
tagtcctataactagaggctttctacaatttta

SEQ ID NO: 379920 - DNA, 33 bp, Homo sapien
tagtcctataactagatgctttctacaatttta

SEQ ID NO: 379921 - DNA, 33 bp, Homo sapien
tatacatgttattttaaagctcacatttattca

SEQ ID NO: 379922 - DNA, 33 bp, Homo sapien
tatacatgttattttagagctcacatttattca

SEQ ID NO: 379923 - DNA, 33 bp, Homo sapien
gacacagacaccaatacaggtgaacacacagat

SEQ ID NO: 379924 - DNA, 33 bp, Homo sapien
gacacagacaccaatataggtgaacacacagat

SEQ ID NO: 379925 - DNA, 33 bp, Homo sapien
aaactatcattgtttaagtagaggaggttcaat

SEQ ID NO: 379926 - DNA, 33 bp, Homo sapien
aaactatcattgtttaggtagaggaggttcaat

SEQ ID NO: 379927 - DNA, 33 bp, Homo sapien
attagatttttcgtatcacttacattttagatt

SEQ ID NO: 379928 - DNA, 33 bp, Homo sapien
attagatttttcgtatgacttacattttagatt

SEQ ID NO: 379929 - DNA, 33 bp, Homo sapien
ttttgaaaacattaagccccaataagccttttg

SEQ ID NO: 379930 - DNA, 33 bp, Homo sapien
ttttgaaaacattaagtcccaataagccttttg

SEQ ID NO: 379931 - DNA, 33 bp, Homo sapien
acattggattccttaactggtaaaagttcgaag

SEQ ID NO: 379932 - DNA, 33 bp, Homo sapien
acattggattccttaattggtaaaagttcgaag

SEQ ID NO: 379933 - DNA, 33 bp, Homo sapien
ggcattcaaagagaaccgtagaatatggtaagg

SEQ ID NO: 379934 - DNA, 33 bp, Homo sapien
ggcattcaaagagaactgtagaatatggtaagg

SEQ ID NO: 379935 - DNA, 33 bp, Homo sapien
ttttgactgcactgaccggctactaggcagtca

SEQ ID NO: 379936 - DNA, 33 bp, Homo sapien
ttttgactgcactgactggctactaggcagtca

SEQ ID NO: 379937 - DNA, 33 bp, Homo sapien
aagagctgcctcctcacaacaggtcaagtgcta

SEQ ID NO: 379938 - DNA, 33 bp, Homo sapien
aagagctgcctcctcataacaggtcaagtgcta

SEQ ID NO: 379939 - DNA, 33 bp, Homo sapien
tggtggaatatggtacaagtaatgctcagtgac

SEQ ID NO: 379940 - DNA, 33 bp, Homo sapien
tggtggaatatggtactagtaatgctcagtgac

SEQ ID NO: 379941 - DNA, 33 bp, Homo sapien
gaagaagactccctcaagctatttaaaaatcaa

SEQ ID NO: 379942 - DNA, 33 bp, Homo sapien
gaagaagactccctcacgctatttaaaaatcaa

SEQ ID NO: 379943 - DNA, 33 bp, Homo sapien
aaaagatattccatgccaatataaaccaaaaaa

SEQ ID NO: 379944 - DNA, 33 bp, Homo sapien
aaaagatattccatgctaatataaaccaaaaaa

SEQ ID NO: 379945 - DNA, 33 bp, Homo sapien
gtaaatgtgtgttagtcaatggagaaacccctt

SEQ ID NO: 379946 - DNA, 33 bp, Homo sapien
gtaaatgtgtgttagtgaatggagaaacccctt

SEQ ID NO: 379947 - DNA, 33 bp, Homo sapien
aatgttcgactaccgaagtcttgacattgcatg

SEQ ID NO: 379948 - DNA, 33 bp, Homo sapien
aatgttcgactaccgatgtcttgacattgcatg

SEQ ID NO: 379949 - DNA, 33 bp, Homo sapien
aacaacaattgtggacaagatcttatattctca

SEQ ID NO: 379950 - DNA, 33 bp, Homo sapien
aacaacaattgtggacgagatcttatattctca

SEQ ID NO: 379951 - DNA, 33 bp, Homo sapien
tgcagtcaaattctaaaagtcagagaatgaata

SEQ ID NO: 379952 - DNA, 33 bp, Homo sapien
tgcagtcaaattctaagagtcagagaatgaata

SEQ ID NO: 379953 - DNA, 33 bp, Homo sapien
aatagaaagtaatcacccttctgaattgtcagc

SEQ ID NO: 379954 - DNA, 33 bp, Homo sapien
aatagaaagtaatcactcttctgaattgtcagc

SEQ ID NO: 379955 - DNA, 33 bp, Homo sapien
taaaaaaatgtaatgcaaggtcagataaccccg

SEQ ID NO: 379956 - DNA, 33 bp, Homo sapien
taaaaaaatgtaatgcgaggtcagataaccccg

SEQ ID NO: 379957 - DNA, 33 bp, Homo sapien
ttttctacaggagataagactttcgctcagggc

SEQ ID NO: 379958 - DNA, 33 bp, Homo sapien
ttttctacaggagataggactttcgctcagggc

SEQ ID NO: 379959 - DNA, 33 bp, Homo sapien
tgttgatcttcctcaacaattcaatacaagttt

SEQ ID NO: 379960 - DNA, 33 bp, Homo sapien
tgttgatcttcctcaataattcaatacaagttt

SEQ ID NO: 379961 - DNA, 33 bp, Homo sapien
tctgtgttcattgatccaatacctgacacataa

SEQ ID NO: 379962 - DNA, 33 bp, Homo sapien
tctgtgttcattgatctaatacctgacacataa

SEQ ID NO: 379963 - DNA, 33 bp, Homo sapien
ggcttaattatgatgaagtacagttaacctgaa

SEQ ID NO: 379964 - DNA, 33 bp, Homo sapien
ggcttaattatgatgacgtacagttaacctgaa

SEQ ID NO: 379965 - DNA, 33 bp, Homo sapien
ttttctccaaggtctgaaatagccacgaaaaac

SEQ ID NO: 379966 - DNA, 33 bp, Homo sapien
ttttctccaaggtctgtaatagccacgaaaaac

SEQ ID NO: 379967 - DNA, 33 bp, Homo sapien
ttgatgctttatgacaatggtacttaagtgtgt

SEQ ID NO: 379968 - DNA, 33 bp, Homo sapien
ttgatgctttatgacagtggtacttaagtgtgt

SEQ ID NO: 379969 - DNA, 33 bp, Homo sapien
ctcaaatctatttaggcccattggcacattttt

SEQ ID NO: 379970 - DNA, 33 bp, Homo sapien
ctcaaatctatttaggtccattggcacattttt

SEQ ID NO: 379971 - DNA, 33 bp, Homo sapien
taacttattaaattggccaacattaagtatcta

SEQ ID NO: 379972 - DNA, 33 bp, Homo sapien
taacttattaaattggtcaacattaagtatcta

SEQ ID NO: 379973 - DNA, 33 bp, Homo sapien
ttgttaccattacacacccctttgttcctgctc

SEQ ID NO: 379974 - DNA, 33 bp, Homo sapien
ttgttaccattacacatccctttgttcctgctc

SEQ ID NO: 379975 - DNA, 33 bp, Homo sapien
ttatttccttcctggaggcactgcttaacgttt

SEQ ID NO: 379976 - DNA, 33 bp, Homo sapien
ttatttccttcctggatgcactgcttaacgttt

SEQ ID NO: 379977 - DNA, 33 bp, Homo sapien
gtataattttatgatacaccacaataaaacaga

SEQ ID NO: 379978 - DNA, 33 bp, Homo sapien
gtataattttatgatagaccacaataaaacaga

SEQ ID NO: 379979 - DNA, 33 bp, Homo sapien
tgttaaacagaaagacaattcttcacacattgg

SEQ ID NO: 379980 - DNA, 33 bp, Homo sapien
tgttaaacagaaagacgattcttcacacattgg

SEQ ID NO: 379981 - DNA, 33 bp, Homo sapien
catcaggtttgggctacagcatttgtgaccaca

SEQ ID NO: 379982 - DNA, 33 bp, Homo sapien
catcaggtttgggctatagcatttgtgaccaca

SEQ ID NO: 379983 - DNA, 33 bp, Homo sapien
aagagagttttgtaccagaagacaatgtaatat

SEQ ID NO: 379984 - DNA, 33 bp, Homo sapien
aagagagttttgtaccggaagacaatgtaatat

SEQ ID NO: 379985 - DNA, 33 bp, Homo sapien
aggatctgcttcacccaaaactaaaggtacatt

SEQ ID NO: 379986 - DNA, 33 bp, Homo sapien
aggatctgcttcacccgaaactaaaggtacatt

SEQ ID NO: 379987 - DNA, 33 bp, Homo sapien
tgctgaaatttctagaacataaacaatgcaaaa

SEQ ID NO: 379988 - DNA, 33 bp, Homo sapien
tgctgaaatttctagatcataaacaatgcaaaa

SEQ ID NO: 379989 - DNA, 33 bp, Homo sapien
agaggctttttatctaacagcagtcaacaaaga

SEQ ID NO: 379990 - DNA, 33 bp, Homo sapien
agaggctttttatctagcagcagtcaacaaaga

SEQ ID NO: 379991 - DNA, 33 bp, Homo sapien
ccatattttgttgctcccaacacctctgtgctt

SEQ ID NO: 379992 - DNA, 33 bp, Homo sapien
ccatattttgttgctctcaacacctctgtgctt

SEQ ID NO: 379993 - DNA, 33 bp, Homo sapien
tccttgcagacaaggtaaatcactatctctgtc

SEQ ID NO: 379994 - DNA, 33 bp, Homo sapien
tccttgcagacaaggtgaatcactatctctgtc

SEQ ID NO: 379995 - DNA, 33 bp, Homo sapien
aacaaatttgctgctgaatttctatgcttttac

SEQ ID NO: 379996 - DNA, 33 bp, Homo sapien
aacaaatttgctgctggatttctatgcttttac

SEQ ID NO: 379997 - DNA, 33 bp, Homo sapien
gcaagatacatgagacaaaatagtgagcagaaa

SEQ ID NO: 379998 - DNA, 33 bp, Homo sapien
gcaagatacatgagacgaaatagtgagcagaaa

SEQ ID NO: 379999 - DNA, 33 bp, Homo sapien
ttttcagatatcttaacggaacactcttacata

SEQ ID NO: 380000 - DNA, 33 bp, Homo sapien
ttttcagatatcttaatggaacactcttacata

SEQ ID NO: 380001 - DNA, 33 bp, Homo sapien
gataaacaaaatggaacaccttaagtgtaatta

SEQ ID NO: 380002 - DNA, 33 bp, Homo sapien
gataaacaaaatggaataccttaagtgtaatta

SEQ ID NO: 380003 - DNA, 33 bp, Homo sapien
ccagtactacttttgacatctcagtactctcat

SEQ ID NO: 380004 - DNA, 33 bp, Homo sapien
ccagtactacttttgatatctcagtactctcat

SEQ ID NO: 380005 - DNA, 33 bp, Homo sapien
cccaaactggaatcacaaagccatggatattag

SEQ ID NO: 380006 - DNA, 33 bp, Homo sapien
cccaaactggaatcacgaagccatggatattag

SEQ ID NO: 380007 - DNA, 33 bp, Homo sapien
ggtgttttagggtatgcatgagagttttataga

SEQ ID NO: 380008 - DNA, 33 bp, Homo sapien
ggtgttttagggtatgtatgagagttttataga

SEQ ID NO: 380009 - DNA, 33 bp, Homo sapien
aatagatgaaacgaaacagactattcacctgca

SEQ ID NO: 380010 - DNA, 33 bp, Homo sapien
aatagatgaaacgaaatagactattcacctgca

SEQ ID NO: 380011 - DNA, 33 bp, Homo sapien
gcggttttcatctcttaaaatcgtgaccatcat

SEQ ID NO: 380012 - DNA, 33 bp, Homo sapien
gcggttttcatctcttcaaatcgtgaccatcat

SEQ ID NO: 380013 - DNA, 33 bp, Homo sapien
gaccgctgcaccgtgacggagtttacaaaccta

SEQ ID NO: 380014 - DNA, 33 bp, Homo sapien
gaccgctgcaccgtgatggagtttacaaaccta

SEQ ID NO: 380015 - DNA, 33 bp, Homo sapien
aattacattatctcaactggcttacatggatcc

SEQ ID NO: 380016 - DNA, 33 bp, Homo sapien
aattacattatctcaagtggcttacatggatcc

SEQ ID NO: 380017 - DNA, 33 bp, Homo sapien
atgggaagataaccaccgtcgcgactggagttc

SEQ ID NO: 380018 - DNA, 33 bp, Homo sapien
atgggaagataaccactgtcgcgactggagttc

SEQ ID NO: 380019 - DNA, 33 bp, Homo sapien
gttcctttcggaaaagacacgctcatagatgaa

SEQ ID NO: 380020 - DNA, 33 bp, Homo sapien
gttcctttcggaaaagtcacgctcatagatgaa

SEQ ID NO: 380021 - DNA, 33 bp, Homo sapien
gtgcttttgcttctgacggctgtgtctggctat

SEQ ID NO: 380022 - DNA, 33 bp, Homo sapien
gtgcttttgcttctgatggctgtgtctggctat

SEQ ID NO: 380023 - DNA, 33 bp, Homo sapien
agggcctctgaccgcaactgtttctagtccacc

SEQ ID NO: 380024 - DNA, 33 bp, Homo sapien
agggcctctgaccgcacctgtttctagtccacc

SEQ ID NO: 380025 - DNA, 33 bp, Homo sapien
aactaaaacagcaacaaaaaactgcctttacat

SEQ ID NO: 380026 - DNA, 33 bp, Homo sapien
aactaaaacagcaacagaaaactgcctttacat

SEQ ID NO: 380027 - DNA, 33 bp, Homo sapien
atatggtgaaagttcccaggaatgtatgcaaga

SEQ ID NO: 380028 - DNA, 33 bp, Homo sapien
atatggtgaaagttcctaggaatgtatgcaaga

SEQ ID NO: 380029 - DNA, 33 bp, Homo sapien
acttgtttgataaataagaaggatggactaaat

SEQ ID NO: 380030 - DNA, 33 bp, Homo sapien
acttgtttgataaatatgaaggatggactaaat

SEQ ID NO: 380031 - DNA, 33 bp, Homo sapien
atattctaaaatctaccgcatgatcagacataa

SEQ ID NO: 380032 - DNA, 33 bp, Homo sapien
atattctaaaatctactgcatgatcagacataa

SEQ ID NO: 380033 - DNA, 33 bp, Homo sapien
tttaaccagaccttgacggaaaatctgaagaaa

SEQ ID NO: 380034 - DNA, 33 bp, Homo sapien
tttaaccagaccttgatggaaaatctgaagaaa

SEQ ID NO: 380035 - DNA, 33 bp, Homo sapien
ttggaacaactggatgcattccttctgggtatc

SEQ ID NO: 380036 - DNA, 33 bp, Homo sapien
ttggaacaactggatgtattccttctgggtatc

SEQ ID NO: 380037 - DNA, 33 bp, Homo sapien
aggatttagtacacaaagtaagataacaatcaa

SEQ ID NO: 380038 - DNA, 33 bp, Homo sapien
aggatttagtacacaaggtaagataacaatcaa

SEQ ID NO: 380039 - DNA, 33 bp, Homo sapien
aacaccaaatgtctcacctgactataactttcc

SEQ ID NO: 380040 - DNA, 33 bp, Homo sapien
aacaccaaatgtctcatctgactataactttcc

SEQ ID NO: 380041 - DNA, 33 bp, Homo sapien
actggcatgaaacaaaattgtgattagaattct

SEQ ID NO: 380042 - DNA, 33 bp, Homo sapien
actggcatgaaacaaatttgtgattagaattct

SEQ ID NO: 380043 - DNA, 33 bp, Homo sapien
caacgttattagcagcagaaaaaaacatgtgtc

SEQ ID NO: 380044 - DNA, 33 bp, Homo sapien
caacgttattagcagcggaaaaaaacatgtgtc

SEQ ID NO: 380045 - DNA, 33 bp, Homo sapien
tacattggtcccaggaagcaaaatctagaatga

SEQ ID NO: 380046 - DNA, 33 bp, Homo sapien
tacattggtcccaggatgcaaaatctagaatga

SEQ ID NO: 380047 - DNA, 33 bp, Homo sapien
ccactacctagttctacaatttttttcactacc

SEQ ID NO: 380048 - DNA, 33 bp, Homo sapien
ccactacctagttctagaatttttttcactacc

SEQ ID NO: 380049 - DNA, 33 bp, Homo sapien
tatttttacttatagcaaactgagatgtgatac

SEQ ID NO: 380050 - DNA, 33 bp, Homo sapien
tatttttacttatagcgaactgagatgtgatac

SEQ ID NO: 380051 - DNA, 33 bp, Homo sapien
atgatgtagcccctcaataaacatttttctcat

SEQ ID NO: 380052 - DNA, 33 bp, Homo sapien
atgatgtagcccctcagtaaacatttttctcat

SEQ ID NO: 380053 - DNA, 33 bp, Homo sapien
ggaatcagagttgatgaatgaatagcccagctt

SEQ ID NO: 380054 - DNA, 33 bp, Homo sapien
ggaatcagagttgatgcatgaatagcccagctt

SEQ ID NO: 380055 - DNA, 33 bp, Homo sapien
ttgaagctcaaggttacgaaccaagagtcattc

SEQ ID NO: 380056 - DNA, 33 bp, Homo sapien
ttgaagctcaaggttatgaaccaagagtcattc

SEQ ID NO: 380057 - DNA, 33 bp, Homo sapien
acagatggtattcccacgtagaggatgccttgg

SEQ ID NO: 380058 - DNA, 33 bp, Homo sapien
acagatggtattcccatgtagaggatgccttgg

SEQ ID NO: 380059 - DNA, 33 bp, Homo sapien
ccaacacctgaggagcaagttcaatttattctt

SEQ ID NO: 380060 - DNA, 33 bp, Homo sapien
ccaacacctgaggagcgagttcaatttattctt

SEQ ID NO: 380061 - DNA, 33 bp, Homo sapien
ccaatacatataacgaaacaataaatcagctag

SEQ ID NO: 380062 - DNA, 33 bp, Homo sapien
ccaatacatataacgagacaataaatcagctag

SEQ ID NO: 380063 - DNA, 33 bp, Homo sapien
ttgaccatttgtcatacagtaatagaaaactga

SEQ ID NO: 380064 - DNA, 33 bp, Homo sapien
ttgaccatttgtcatagagtaatagaaaactga

SEQ ID NO: 380065 - DNA, 33 bp, Homo sapien
ttacttcatgcaaaatgaggtatgtatgaacat

SEQ ID NO: 380066 - DNA, 33 bp, Homo sapien
ttacttcatgcaaaattaggtatgtatgaacat

SEQ ID NO: 380067 - DNA, 33 bp, Homo sapien
gttgtttgttcctgaaacttacttcgtctaaac

SEQ ID NO: 380068 - DNA, 33 bp, Homo sapien
gttgtttgttcctgaaccttacttcgtctaaac

SEQ ID NO: 380069 - DNA, 33 bp, Homo sapien
cactggatgcttacaacaattaaatgatatgac

SEQ ID NO: 380070 - DNA, 33 bp, Homo sapien
cactggatgcttacaagaattaaatgatatgac

SEQ ID NO: 380071 - DNA, 33 bp, Homo sapien
taagagacagaaaatacgtattccacaaatggg

SEQ ID NO: 380072 - DNA, 33 bp, Homo sapien
taagagacagaaaatatgtattccacaaatggg

SEQ ID NO: 380073 - DNA, 33 bp, Homo sapien
aattcagtcacaaatacagacactgcacaaaac

SEQ ID NO: 380074 - DNA, 33 bp, Homo sapien
aattcagtcacaaatagagacactgcacaaaac

SEQ ID NO: 380075 - DNA, 33 bp, Homo sapien
tacatacaaatatcaggatgttaacctttagat

SEQ ID NO: 380076 - DNA, 33 bp, Homo sapien
tacatacaaatatcagtatgttaacctttagat

SEQ ID NO: 380077 - DNA, 33 bp, Homo sapien
tgatgtgaaaaatctaagctttgtgattgtcca

SEQ ID NO: 380078 - DNA, 33 bp, Homo sapien
tgatgtgaaaaatctaggctttgtgattgtcca

SEQ ID NO: 380079 - DNA, 33 bp, Homo sapien
cttgatgcaatacccaatatgaaatttcatatt

SEQ ID NO: 380080 - DNA, 33 bp, Homo sapien
cttgatgcaatacccagtatgaaatttcatatt

SEQ ID NO: 380081 - DNA, 33 bp, Homo sapien
tatcgtagagtcactcaatggaattctatgcac

SEQ ID NO: 380082 - DNA, 33 bp, Homo sapien
tatcgtagagtcactccatggaattctatgcac

SEQ ID NO: 380083 - DNA, 33 bp, Homo sapien
caaagcatcagaagtacacagtgtttagcaaac

SEQ ID NO: 380084 - DNA, 33 bp, Homo sapien
caaagcatcagaagtatacagtgtttagcaaac

SEQ ID NO: 380085 - DNA, 33 bp, Homo sapien
tggtaggaaagtgcaaatgtagaggtcctatta

SEQ ID NO: 380086 - DNA, 33 bp, Homo sapien
tggtaggaaagtgcaagtgtagaggtcctatta

SEQ ID NO: 380087 - DNA, 33 bp, Homo sapien
ttttctgattggatgcagagagattgcctttta

SEQ ID NO: 380088 - DNA, 33 bp, Homo sapien
ttttctgattggatgcggagagattgcctttta

SEQ ID NO: 380089 - DNA, 33 bp, Homo sapien
tacttggctgtaagagactaatggaggtgtaat

SEQ ID NO: 380090 - DNA, 33 bp, Homo sapien
tacttggctgtaagagcctaatggaggtgtaat

SEQ ID NO: 380091 - DNA, 33 bp, Homo sapien
tacctttcctctagcacataaagtgagttagta

SEQ ID NO: 380092 - DNA, 33 bp, Homo sapien
tacctttcctctagcagataaagtgagttagta

SEQ ID NO: 380093 - DNA, 33 bp, Homo sapien
ataaaggaaataatcaatagctgttaagactag

SEQ ID NO: 380094 - DNA, 33 bp, Homo sapien
ataaaggaaataatcattagctgttaagactag

SEQ ID NO: 380095 - DNA, 33 bp, Homo sapien
gcatctatctcccaccaatctattcacataaag

SEQ ID NO: 380096 - DNA, 33 bp, Homo sapien
gcatctatctcccacccatctattcacataaag

SEQ ID NO: 380097 - DNA, 33 bp, Homo sapien
acataaggagatcaaacatgaaactgataactt

SEQ ID NO: 380098 - DNA, 33 bp, Homo sapien
acataaggagatcaaatatgaaactgataactt

SEQ ID NO: 380099 - DNA, 33 bp, Homo sapien
aagtcctggtatatgactcactctataaatttt

SEQ ID NO: 380100 - DNA, 33 bp, Homo sapien
aagtcctggtatatgagtcactctataaatttt

SEQ ID NO: 380101 - DNA, 33 bp, Homo sapien
aaatcaaaagccataacacagagtgagaagtcc

SEQ ID NO: 380102 - DNA, 33 bp, Homo sapien
aaatcaaaagccataagacagagtgagaagtcc

SEQ ID NO: 380103 - DNA, 33 bp, Homo sapien
tgtgatgtctactcacaaattttttttaaaggg

SEQ ID NO: 380104 - DNA, 33 bp, Homo sapien
tgtgatgtctactcaccaattttttttaaaggg

SEQ ID NO: 380105 - DNA, 33 bp, Homo sapien
cacaatctgtatctcacgctctacttttatggg

SEQ ID NO: 380106 - DNA, 33 bp, Homo sapien
cacaatctgtatctcaggctctacttttatggg

SEQ ID NO: 380107 - DNA, 33 bp, Homo sapien
tctcttgtgcttgccaaggtatcctgcaattgg

SEQ ID NO: 380108 - DNA, 33 bp, Homo sapien
tctcttgtgcttgccacggtatcctgcaattgg

SEQ ID NO: 380109 - DNA, 33 bp, Homo sapien
ttttcttctccttacaatgcattgaatttgctc

SEQ ID NO: 380110 - DNA, 33 bp, Homo sapien
ttttcttctccttacattgcattgaatttgctc

SEQ ID NO: 380111 - DNA, 33 bp, Homo sapien
taattatcaaaactgagtagtggctaagtaaat

SEQ ID NO: 380112 - DNA, 33 bp, Homo sapien
taattatcaaaactgattagtggctaagtaaat

SEQ ID NO: 380113 - DNA, 33 bp, Homo sapien
gaatattgagtaaggacgtaagtgtggcaagtt

SEQ ID NO: 380114 - DNA, 33 bp, Homo sapien
gaatattgagtaaggatgtaagtgtggcaagtt

SEQ ID NO: 380115 - DNA, 33 bp, Homo sapien
gtacacgaaaataaaacgacatggttctcaatt

SEQ ID NO: 380116 - DNA, 33 bp, Homo sapien
gtacacgaaaataaaatgacatggttctcaatt

SEQ ID NO: 380117 - DNA, 33 bp, Homo sapien
tgtgctcttttcatcactgagacatttcattag

SEQ ID NO: 380118 - DNA, 33 bp, Homo sapien
tgtgctcttttcatcattgagacatttcattag

SEQ ID NO: 380119 - DNA, 33 bp, Homo sapien
tcttaatgatatggaaagtcattgaggagtttt

SEQ ID NO: 380120 - DNA, 33 bp, Homo sapien
tcttaatgatatggaaggtcattgaggagtttt

SEQ ID NO: 380121 - DNA, 33 bp, Homo sapien
ggttattgtggtaaatcagaaccttctagcgtg

SEQ ID NO: 380122 - DNA, 33 bp, Homo sapien
ggttattgtggtaaatgagaaccttctagcgtg

SEQ ID NO: 380123 - DNA, 33 bp, Homo sapien
caatacataaaaggaactcaaaaatgcctgttc

SEQ ID NO: 380124 - DNA, 33 bp, Homo sapien
caatacataaaaggaattcaaaaatgcctgttc

SEQ ID NO: 380125 - DNA, 33 bp, Homo sapien
gctacagccctgtagcacattacttaaaaggtg

SEQ ID NO: 380126 - DNA, 33 bp, Homo sapien
gctacagccctgtagcgcattacttaaaaggtg

SEQ ID NO: 380127 - DNA, 33 bp, Homo sapien
gcccttaactatcacccagaagagactgaaatt

SEQ ID NO: 380128 - DNA, 33 bp, Homo sapien
gcccttaactatcacctagaagagactgaaatt

SEQ ID NO: 380129 - DNA, 33 bp, Homo sapien
gcaaactgaggacaacagcagaagggtagatgc

SEQ ID NO: 380130 - DNA, 33 bp, Homo sapien
gcaaactgaggacaacggcagaagggtagatgc

SEQ ID NO: 380131 - DNA, 33 bp, Homo sapien
aacctgtagaacgtaacatcacaaagcgagatc

SEQ ID NO: 380132 - DNA, 33 bp, Homo sapien
aacctgtagaacgtaatatcacaaagcgagatc

SEQ ID NO: 380133 - DNA, 33 bp, Homo sapien
agacatgactaaatcaaaagaacaaagtgaatt

SEQ ID NO: 380134 - DNA, 33 bp, Homo sapien
agacatgactaaatcagaagaacaaagtgaatt

SEQ ID NO: 380135 - DNA, 33 bp, Homo sapien
tatgtcaaatttcccaagtcttcggagaacata

SEQ ID NO: 380136 - DNA, 33 bp, Homo sapien
tatgtcaaatttcccatgtcttcggagaacata

SEQ ID NO: 380137 - DNA, 33 bp, Homo sapien
tgagttgctatcacaacatggcatagattgggt

SEQ ID NO: 380138 - DNA, 33 bp, Homo sapien
tgagttgctatcacaatatggcatagattgggt

SEQ ID NO: 380139 - DNA, 33 bp, Homo sapien
gaacttcaactgctaactgtaatgaggtttagt

SEQ ID NO: 380140 - DNA, 33 bp, Homo sapien
gaacttcaactgctaattgtaatgaggtttagt

SEQ ID NO: 380141 - DNA, 33 bp, Homo sapien
gccaagtattacatccacattttatataggatg

SEQ ID NO: 380142 - DNA, 33 bp, Homo sapien
gccaagtattacatccgcattttatataggatg

SEQ ID NO: 380143 - DNA, 33 bp, Homo sapien
tgagaagattgcagaccgaggttattggaataa

SEQ ID NO: 380144 - DNA, 33 bp, Homo sapien
tgagaagattgcagactgaggttattggaataa

SEQ ID NO: 380145 - DNA, 33 bp, Homo sapien
atcatcaaaaacagaacgcaatgctaaaaggaa

SEQ ID NO: 380146 - DNA, 33 bp, Homo sapien
atcatcaaaaacagaatgcaatgctaaaaggaa

SEQ ID NO: 380147 - DNA, 33 bp, Homo sapien
ttctgaggttagaaatcatgtctaatatatgcg

SEQ ID NO: 380148 - DNA, 33 bp, Homo sapien
ttctgaggttagaaattatgtctaatatatgcg

SEQ ID NO: 380149 - DNA, 33 bp, Homo sapien
gacatattttgggatgcattagtgcactgggac

SEQ ID NO: 380150 - DNA, 33 bp, Homo sapien
gacatattttgggatgtattagtgcactgggac

SEQ ID NO: 380151 - DNA, 33 bp, Homo sapien
gctctgtcagctgaaagattgcagaagcaacaa

SEQ ID NO: 380152 - DNA, 33 bp, Homo sapien
gctctgtcagctgaaatattgcagaagcaacaa

SEQ ID NO: 380153 - DNA, 33 bp, Homo sapien
aatccatcaacatacacagtcaaatcagtgaag

SEQ ID NO: 380154 - DNA, 33 bp, Homo sapien
aatccatcaacatacatagtcaaatcagtgaag

SEQ ID NO: 380155 - DNA, 33 bp, Homo sapien
atccaaaggcttactacggggctagtttagtgg

SEQ ID NO: 380156 - DNA, 33 bp, Homo sapien
atccaaaggcttactatggggctagtttagtgg

SEQ ID NO: 380157 - DNA, 33 bp, Homo sapien
gctggagaggttgggcacaatttgagaccagtc

SEQ ID NO: 380158 - DNA, 33 bp, Homo sapien
gctggagaggttgggcgcaatttgagaccagtc

SEQ ID NO: 380159 - DNA, 33 bp, Homo sapien
aaagcactgggaagtcactgcaggcaggtgtgt

SEQ ID NO: 380160 - DNA, 33 bp, Homo sapien
aaagcactgggaagtcgctgcaggcaggtgtgt

SEQ ID NO: 380161 - DNA, 33 bp, Homo sapien
ccctgcagggtcgaaaatgtctgcgatcactcc

SEQ ID NO: 380162 - DNA, 33 bp, Homo sapien
ccctgcagggtcgaaagtgtctgcgatcactcc

SEQ ID NO: 380163 - DNA, 33 bp, Homo sapien
tacattttttctttccaaagtatcaatcatcaa

SEQ ID NO: 380164 - DNA, 33 bp, Homo sapien
tacattttttctttccgaagtatcaatcatcaa

SEQ ID NO: 380165 - DNA, 33 bp, Homo sapien
gacataactctaaggagaaacaggcataagatt

SEQ ID NO: 380166 - DNA, 33 bp, Homo sapien
gacataactctaaggataaacaggcataagatt

SEQ ID NO: 380167 - DNA, 33 bp, Homo sapien
tgttgttcactccacaagaaagtcttaagcaac

SEQ ID NO: 380168 - DNA, 33 bp, Homo sapien
tgttgttcactccacacgaaagtcttaagcaac

SEQ ID NO: 380169 - DNA, 33 bp, Homo sapien
agaatgatttccgggaaagtaaccatgatagct

SEQ ID NO: 380170 - DNA, 33 bp, Homo sapien
agaatgatttccgggagagtaaccatgatagct

SEQ ID NO: 380171 - DNA, 33 bp, Homo sapien
ttttagcccaggtttcaaacctcaatcctgccc

SEQ ID NO: 380172 - DNA, 33 bp, Homo sapien
ttttagcccaggtttcgaacctcaatcctgccc

SEQ ID NO: 380173 - DNA, 33 bp, Homo sapien
acaattttgataacaactcctgagaagtcttag

SEQ ID NO: 380174 - DNA, 33 bp, Homo sapien
acaattttgataacaagtcctgagaagtcttag

SEQ ID NO: 380175 - DNA, 33 bp, Homo sapien
acaaaatatacttgccactcttccagagtaaaa

SEQ ID NO: 380176 - DNA, 33 bp, Homo sapien
acaaaatatacttgcctctcttccagagtaaaa

SEQ ID NO: 380177 - DNA, 33 bp, Homo sapien
taaaaccttttacaggacatactagaagcacta

SEQ ID NO: 380178 - DNA, 33 bp, Homo sapien
taaaaccttttacagggcatactagaagcacta

SEQ ID NO: 380179 - DNA, 33 bp, Homo sapien
aatggcttctaattcacgtctagctccacctcc

SEQ ID NO: 380180 - DNA, 33 bp, Homo sapien
aatggcttctaattcaggtctagctccacctcc

SEQ ID NO: 380181 - DNA, 33 bp, Homo sapien
aaatgttagcagtagggcatagtataaaaatca

SEQ ID NO: 380182 - DNA, 33 bp, Homo sapien
aaatgttagcagtaggtcatagtataaaaatca

SEQ ID NO: 380183 - DNA, 33 bp, Homo sapien
gtagttgcagtaataaccaatagtaatattcca

SEQ ID NO: 380184 - DNA, 33 bp, Homo sapien
gtagttgcagtaataatcaatagtaatattcca

SEQ ID NO: 380185 - DNA, 33 bp, Homo sapien
gggcatgatgtaggtacctaaaagtctagagtt

SEQ ID NO: 380186 - DNA, 33 bp, Homo sapien
gggcatgatgtaggtatctaaaagtctagagtt

SEQ ID NO: 380187 - DNA, 33 bp, Homo sapien
tcattagagtgagtggcacaaaatagaaaatag

SEQ ID NO: 380188 - DNA, 33 bp, Homo sapien
tcattagagtgagtggtacaaaatagaaaatag

SEQ ID NO: 380189 - DNA, 33 bp, Homo sapien
aaatatgacccacagcagaaaaacagctggcaa

SEQ ID NO: 380190 - DNA, 33 bp, Homo sapien
aaatatgacccacagcggaaaaacagctggcaa

SEQ ID NO: 380191 - DNA, 33 bp, Homo sapien
gatacaatttcctagaagacactaaatatttct

SEQ ID NO: 380192 - DNA, 33 bp, Homo sapien
gatacaatttcctagaggacactaaatatttct

SEQ ID NO: 380193 - DNA, 33 bp, Homo sapien
agcatttccccttccaaattccatgatattcca

SEQ ID NO: 380194 - DNA, 33 bp, Homo sapien
agcatttccccttccatattccatgatattcca

SEQ ID NO: 380195 - DNA, 33 bp, Homo sapien
attcctttgtccctgaagccctaaagcacatgt

SEQ ID NO: 380196 - DNA, 33 bp, Homo sapien
attcctttgtccctgacgccctaaagcacatgt

SEQ ID NO: 380197 - DNA, 33 bp, Homo sapien
ggtaaaataattgtagaaagccatattctcata

SEQ ID NO: 380198 - DNA, 33 bp, Homo sapien
ggtaaaataattgtaggaagccatattctcata

SEQ ID NO: 380199 - DNA, 33 bp, Homo sapien
gtttaaccatggcatagactacaatgaagcagt

SEQ ID NO: 380200 - DNA, 33 bp, Homo sapien
gtttaaccatggcatatactacaatgaagcagt

SEQ ID NO: 380201 - DNA, 33 bp, Homo sapien
gaatgggaatgatgcccaaatacttgtgttgct

SEQ ID NO: 380202 - DNA, 33 bp, Homo sapien
gaatgggaatgatgcctaaatacttgtgttgct

SEQ ID NO: 380203 - DNA, 33 bp, Homo sapien
taacagatttaacctacgtaatttctagctatt

SEQ ID NO: 380204 - DNA, 33 bp, Homo sapien
taacagatttaacctatgtaatttctagctatt

SEQ ID NO: 380205 - DNA, 33 bp, Homo sapien
ccgttggcaaatcagaatactaaaagtgaaagc

SEQ ID NO: 380206 - DNA, 33 bp, Homo sapien
ccgttggcaaatcagagtactaaaagtgaaagc

SEQ ID NO: 380207 - DNA, 33 bp, Homo sapien
ggcatttccaggagaagctttcaccaccatgcg

SEQ ID NO: 380208 - DNA, 33 bp, Homo sapien
ggcatttccaggagaatctttcaccaccatgcg

SEQ ID NO: 380209 - DNA, 33 bp, Homo sapien
aaattgaggccaataccgaaatgtggtcaacaa

SEQ ID NO: 380210 - DNA, 33 bp, Homo sapien
aaattgaggccaatactgaaatgtggtcaacaa

SEQ ID NO: 380211 - DNA, 33 bp, Homo sapien
aactagcaatatcacagaatcataaatacaaat

SEQ ID NO: 380212 - DNA, 33 bp, Homo sapien
aactagcaatatcacataatcataaatacaaat

SEQ ID NO: 380213 - DNA, 33 bp, Homo sapien
acttaccactcaagtgcaagaagcacaatttca

SEQ ID NO: 380214 - DNA, 33 bp, Homo sapien
acttaccactcaagtgtaagaagcacaatttca

SEQ ID NO: 380215 - DNA, 33 bp, Homo sapien
atataaaagctgagaccgaaaaagactatgagt

SEQ ID NO: 380216 - DNA, 33 bp, Homo sapien
atataaaagctgagactgaaaaagactatgagt

SEQ ID NO: 380217 - DNA, 33 bp, Homo sapien
tgtcgaatgaaaagaaggagtgttacagagtta

SEQ ID NO: 380218 - DNA, 33 bp, Homo sapien
tgtcgaatgaaaagaatgagtgttacagagtta

SEQ ID NO: 380219 - DNA, 33 bp, Homo sapien
aactcaaaacactaaaagttgctatgaaagaca

SEQ ID NO: 380220 - DNA, 33 bp, Homo sapien
aactcaaaacactaaaggttgctatgaaagaca

SEQ ID NO: 380221 - DNA, 33 bp, Homo sapien
agtagaccgaaaaaccaaagatagagaacattt

SEQ ID NO: 380222 - DNA, 33 bp, Homo sapien
agtagaccgaaaaaccgaagatagagaacattt

SEQ ID NO: 380223 - DNA, 33 bp, Homo sapien
ctgcaaatcaccctgcacttgtttagcaacaga

SEQ ID NO: 380224 - DNA, 33 bp, Homo sapien
ctgcaaatcaccctgcgcttgtttagcaacaga

SEQ ID NO: 380225 - DNA, 33 bp, Homo sapien
tgtcctttgaactcacagaggattagagtcctt

SEQ ID NO: 380226 - DNA, 33 bp, Homo sapien
tgtcctttgaactcacggaggattagagtcctt

SEQ ID NO: 380227 - DNA, 33 bp, Homo sapien
ctgctcaagagaaaaactacgcagtctctcaag

SEQ ID NO: 380228 - DNA, 33 bp, Homo sapien
ctgctcaagagaaaaattacgcagtctctcaag

SEQ ID NO: 380229 - DNA, 33 bp, Homo sapien
caccatttcacattccacttcactctcccactg

SEQ ID NO: 380230 - DNA, 33 bp, Homo sapien
caccatttcacattccccttcactctcccactg

SEQ ID NO: 380231 - DNA, 33 bp, Homo sapien
ccccatatcttgacagactgatgtatttttctt

SEQ ID NO: 380232 - DNA, 33 bp, Homo sapien
ccccatatcttgacagtctgatgtatttttctt

SEQ ID NO: 380233 - DNA, 33 bp, Homo sapien
tcacattcagacagtactaagtttgagacctta

SEQ ID NO: 380234 - DNA, 33 bp, Homo sapien
tcacattcagacagtattaagtttgagacctta

SEQ ID NO: 380235 - DNA, 33 bp, Homo sapien
ttacaattcttccagccattttgaaatatacaa

SEQ ID NO: 380236 - DNA, 33 bp, Homo sapien
ttacaattcttccagctattttgaaatatacaa

SEQ ID NO: 380237 - DNA, 33 bp, Homo sapien
tattttttgaagcttcccaggtgatcctaatat

SEQ ID NO: 380238 - DNA, 33 bp, Homo sapien
tattttttgaagcttcgcaggtgatcctaatat

SEQ ID NO: 380239 - DNA, 33 bp, Homo sapien
actaagctcataacagaaacttcaaatctacca

SEQ ID NO: 380240 - DNA, 33 bp, Homo sapien
actaagctcataacaggaacttcaaatctacca

SEQ ID NO: 380241 - DNA, 33 bp, Homo sapien
ttcacattagctgccagacagtgagtgaatttt

SEQ ID NO: 380242 - DNA, 33 bp, Homo sapien
ttcacattagctgccatacagtgagtgaatttt

SEQ ID NO: 380243 - DNA, 33 bp, Homo sapien
aaggaaaaggaatctaacactgtgcttggtaca

SEQ ID NO: 380244 - DNA, 33 bp, Homo sapien
aaggaaaaggaatctagcactgtgcttggtaca

SEQ ID NO: 380245 - DNA, 33 bp, Homo sapien
atcagcaaactctaggaccaggtataaaaggct

SEQ ID NO: 380246 - DNA, 33 bp, Homo sapien
atcagcaaactctagggccaggtataaaaggct

SEQ ID NO: 380247 - DNA, 33 bp, Homo sapien
ttagaattgatattaacgtgacccaaggagccc

SEQ ID NO: 380248 - DNA, 33 bp, Homo sapien
ttagaattgatattaatgtgacccaaggagccc

SEQ ID NO: 380249 - DNA, 33 bp, Homo sapien
ccctgttcctcttccacacttgttctgtccaat

SEQ ID NO: 380250 - DNA, 33 bp, Homo sapien
ccctgttcctcttccatacttgttctgtccaat

SEQ ID NO: 380251 - DNA, 33 bp, Homo sapien
gcagtgggtaccctgaagaatactgtgatgttt

SEQ ID NO: 380252 - DNA, 33 bp, Homo sapien
gcagtgggtaccctgacgaatactgtgatgttt

SEQ ID NO: 380253 - DNA, 33 bp, Homo sapien
tacccaaagaagggacaaatgctgtttcaaagc

SEQ ID NO: 380254 - DNA, 33 bp, Homo sapien
tacccaaagaagggacgaatgctgtttcaaagc

SEQ ID NO: 380255 - DNA, 33 bp, Homo sapien
tgctagttcttcagcacctatggttctacccaa

SEQ ID NO: 380256 - DNA, 33 bp, Homo sapien
tgctagttcttcagcatctatggttctacccaa

SEQ ID NO: 380257 - DNA, 33 bp, Homo sapien
agaatgcaagtctgtcaaggttcaaagagacag

SEQ ID NO: 380258 - DNA, 33 bp, Homo sapien
agaatgcaagtctgtcgaggttcaaagagacag

SEQ ID NO: 380259 - DNA, 33 bp, Homo sapien
ctccaccaatatacatcaacctaggaggctgtg

SEQ ID NO: 380260 - DNA, 33 bp, Homo sapien
ctccaccaatatacattaacctaggaggctgtg

SEQ ID NO: 380261 - DNA, 33 bp, Homo sapien
cttccttttgattgtaagcacctttgctagaaa

SEQ ID NO: 380262 - DNA, 33 bp, Homo sapien
cttccttttgattgtatgcacctttgctagaaa

SEQ ID NO: 380263 - DNA, 33 bp, Homo sapien
tacaagtggacttatacactatccattttgtgt

SEQ ID NO: 380264 - DNA, 33 bp, Homo sapien
tacaagtggacttatatactatccattttgtgt

SEQ ID NO: 380265 - DNA, 33 bp, Homo sapien
aaaatgtattgaaaacgctacgtgacataatta

SEQ ID NO: 380266 - DNA, 33 bp, Homo sapien
aaaatgtattgaaaactctacgtgacataatta

SEQ ID NO: 380267 - DNA, 33 bp, Homo sapien
atctaatgaaatgataccaagaaaattgaatag

SEQ ID NO: 380268 - DNA, 33 bp, Homo sapien
atctaatgaaatgatagcaagaaaattgaatag

SEQ ID NO: 380269 - DNA, 33 bp, Homo sapien
atatatagtgtgagaaaaagggactaaggaagt

SEQ ID NO: 380270 - DNA, 33 bp, Homo sapien
atatatagtgtgagaagaagggactaaggaagt

SEQ ID NO: 380271 - DNA, 33 bp, Homo sapien
ggcacagaaagaaacactattgcctagactgta

SEQ ID NO: 380272 - DNA, 33 bp, Homo sapien
ggcacagaaagaaacattattgcctagactgta

SEQ ID NO: 380273 - DNA, 33 bp, Homo sapien
cgtaaaatgcatagaaacaatctgtatcccaac

SEQ ID NO: 380274 - DNA, 33 bp, Homo sapien
cgtaaaatgcatagaaccaatctgtatcccaac

SEQ ID NO: 380275 - DNA, 33 bp, Homo sapien
cacaattctgatcccaacacaaacccactgtat

SEQ ID NO: 380276 - DNA, 33 bp, Homo sapien
cacaattctgatcccatcacaaacccactgtat

SEQ ID NO: 380277 - DNA, 33 bp, Homo sapien
caatttaatttgcaaaataggctgacctcaaga

SEQ ID NO: 380278 - DNA, 33 bp, Homo sapien
caatttaatttgcaaagtaggctgacctcaaga

SEQ ID NO: 380279 - DNA, 33 bp, Homo sapien
gaaaggatgaattagaaagttctctggcctaaa

SEQ ID NO: 380280 - DNA, 33 bp, Homo sapien
gaaaggatgaattagagagttctctggcctaaa

SEQ ID NO: 380281 - DNA, 33 bp, Homo sapien
agcagactactggtgaagcttaatgagtaaaaa

SEQ ID NO: 380282 - DNA, 33 bp, Homo sapien
agcagactactggtgaggcttaatgagtaaaaa

SEQ ID NO: 380283 - DNA, 33 bp, Homo sapien
ccttgtatgataaaagcagtaggcagaatctaa

SEQ ID NO: 380284 - DNA, 33 bp, Homo sapien
ccttgtatgataaaagtagtaggcagaatctaa

SEQ ID NO: 380285 - DNA, 33 bp, Homo sapien
agatggacacaaatacagaggcccttggtaatg

SEQ ID NO: 380286 - DNA, 33 bp, Homo sapien
agatggacacaaatacggaggcccttggtaatg

SEQ ID NO: 380287 - DNA, 33 bp, Homo sapien
gtggattaggcaatcgacattaccaagggcctc

SEQ ID NO: 380288 - DNA, 33 bp, Homo sapien
gtggattaggcaatcgccattaccaagggcctc

SEQ ID NO: 380289 - DNA, 33 bp, Homo sapien
aaatattttttccttacactatgtgatcatgag

SEQ ID NO: 380290 - DNA, 33 bp, Homo sapien
aaatattttttccttagactatgtgatcatgag

SEQ ID NO: 380291 - DNA, 33 bp, Homo sapien
ttagtcacagcaacaacagagagccaatacagt

SEQ ID NO: 380292 - DNA, 33 bp, Homo sapien
ttagtcacagcaacaagagagagccaatacagt

SEQ ID NO: 380293 - DNA, 33 bp, Homo sapien
gctgtaaagttggtgacaagatcttccctacat

SEQ ID NO: 380294 - DNA, 33 bp, Homo sapien
gctgtaaagttggtgagaagatcttccctacat

SEQ ID NO: 380295 - DNA, 33 bp, Homo sapien
agagtactaggctaaaagttgagatcttttttc

SEQ ID NO: 380296 - DNA, 33 bp, Homo sapien
agagtactaggctaaaggttgagatcttttttc

SEQ ID NO: 380297 - DNA, 33 bp, Homo sapien
atgttagattttggctctgttctcaacttcttc

SEQ ID NO: 380298 - DNA, 33 bp, Homo sapien
atgttagattttggctgtgttctcaacttcttc

SEQ ID NO: 380299 - DNA, 33 bp, Homo sapien
ttttactctatttaccagatgtgcataagagtt

SEQ ID NO: 380300 - DNA, 33 bp, Homo sapien
ttttactctatttaccggatgtgcataagagtt

SEQ ID NO: 380301 - DNA, 33 bp, Homo sapien
aggttttctgagtatgccaaattttcccataac

SEQ ID NO: 380302 - DNA, 33 bp, Homo sapien
aggttttctgagtatggcaaattttcccataac

SEQ ID NO: 380303 - DNA, 33 bp, Homo sapien
tatttctctctttccaataccaccacatttcct

SEQ ID NO: 380304 - DNA, 33 bp, Homo sapien
tatttctctctttccagtaccaccacatttcct

SEQ ID NO: 380305 - DNA, 33 bp, Homo sapien
cttaacctcagactcacacttttatagataaga

SEQ ID NO: 380306 - DNA, 33 bp, Homo sapien
cttaacctcagactcagacttttatagataaga

SEQ ID NO: 380307 - DNA, 33 bp, Homo sapien
tttgcctgcggttctccactttgcagactcaaa

SEQ ID NO: 380308 - DNA, 33 bp, Homo sapien
tttgcctgcggttctctactttgcagactcaaa

SEQ ID NO: 380309 - DNA, 33 bp, Homo sapien
aatttttctgtcttccaagataataccaaattg

SEQ ID NO: 380310 - DNA, 33 bp, Homo sapien
aatttttctgtcttccgagataataccaaattg

SEQ ID NO: 380311 - DNA, 33 bp, Homo sapien
gcattagagtctaaggaatgaaaaacatgtgct

SEQ ID NO: 380312 - DNA, 33 bp, Homo sapien
gcattagagtctaagggatgaaaaacatgtgct

SEQ ID NO: 380313 - DNA, 33 bp, Homo sapien
tcacgggcttggacaaattatataatatcttaa

SEQ ID NO: 380314 - DNA, 33 bp, Homo sapien
tcacgggcttggacaagttatataatatcttaa

SEQ ID NO: 380315 - DNA, 33 bp, Homo sapien
attatattgctaattgaactgtattgagattgt

SEQ ID NO: 380316 - DNA, 33 bp, Homo sapien
attatattgctaattgtactgtattgagattgt

SEQ ID NO: 380317 - DNA, 33 bp, Homo sapien
agaaggaaggaaacacaaaacaaattgtttaga

SEQ ID NO: 380318 - DNA, 33 bp, Homo sapien
agaaggaaggaaacacgaaacaaattgtttaga

SEQ ID NO: 380319 - DNA, 33 bp, Homo sapien
gttgtttaaagagtgaatagcccactattgtat

SEQ ID NO: 380320 - DNA, 33 bp, Homo sapien
gttgtttaaagagtgagtagcccactattgtat

SEQ ID NO: 380321 - DNA, 33 bp, Homo sapien
ccatctgtaatgctgacggattcacaaaagcct

SEQ ID NO: 380322 - DNA, 33 bp, Homo sapien
ccatctgtaatgctgatggattcacaaaagcct

SEQ ID NO: 380323 - DNA, 33 bp, Homo sapien
cccctatttctaagtcagaacattggacaagag

SEQ ID NO: 380324 - DNA, 33 bp, Homo sapien
cccctatttctaagtcggaacattggacaagag

SEQ ID NO: 380325 - DNA, 33 bp, Homo sapien
gggaaatgttcgcagaaaagttttccagaaaat

SEQ ID NO: 380326 - DNA, 33 bp, Homo sapien
gggaaatgttcgcagagaagttttccagaaaat

SEQ ID NO: 380327 - DNA, 33 bp, Homo sapien
gccaatacagagaaaacggagtccagaacaaag

SEQ ID NO: 380328 - DNA, 33 bp, Homo sapien
gccaatacagagaaaatggagtccagaacaaag

SEQ ID NO: 380329 - DNA, 33 bp, Homo sapien
gttggcctgggttctacaatagcagaacaatga

SEQ ID NO: 380330 - DNA, 33 bp, Homo sapien
gttggcctgggttctataatagcagaacaatga

SEQ ID NO: 380331 - DNA, 33 bp, Homo sapien
agtatgtgtgtctgacaaagcaatctactttat

SEQ ID NO: 380332 - DNA, 33 bp, Homo sapien
agtatgtgtgtctgacgaagcaatctactttat

SEQ ID NO: 380333 - DNA, 33 bp, Homo sapien
cgaagacttctttttgaaaatattctgctcagt

SEQ ID NO: 380334 - DNA, 33 bp, Homo sapien
cgaagacttctttttggaaatattctgctcagt

SEQ ID NO: 380335 - DNA, 33 bp, Homo sapien
ttacctacattgatgacgttttctgaacagctg

SEQ ID NO: 380336 - DNA, 33 bp, Homo sapien
ttacctacattgatgaggttttctgaacagctg

SEQ ID NO: 380337 - DNA, 33 bp, Homo sapien
ctcctataataaagccggaggtgacagcccaag

SEQ ID NO: 380338 - DNA, 33 bp, Homo sapien
ctcctataataaagcctgaggtgacagcccaag

SEQ ID NO: 380339 - DNA, 33 bp, Homo sapien
cgcaggcacggagccgacggcatgtcaaggact

SEQ ID NO: 380340 - DNA, 33 bp, Homo sapien
cgcaggcacggagccggcggcatgtcaaggact

SEQ ID NO: 380341 - DNA, 33 bp, Homo sapien
agagcttgtactgtctcactcaaattaatgaga

SEQ ID NO: 380342 - DNA, 33 bp, Homo sapien
agagcttgtactgtctgactcaaattaatgaga

SEQ ID NO: 380343 - DNA, 33 bp, Homo sapien
gatgcaaagtgattaaactttcaatggatttta

SEQ ID NO: 380344 - DNA, 33 bp, Homo sapien
gatgcaaagtgattaacctttcaatggatttta

SEQ ID NO: 380345 - DNA, 33 bp, Homo sapien
ttcaggcattcattccactctcaattagccctt

SEQ ID NO: 380346 - DNA, 33 bp, Homo sapien
ttcaggcattcattccgctctcaattagccctt

SEQ ID NO: 380347 - DNA, 33 bp, Homo sapien
agtgctaaagtagctgaaacttttcctgaagaa

SEQ ID NO: 380348 - DNA, 33 bp, Homo sapien
agtgctaaagtagctggaacttttcctgaagaa

SEQ ID NO: 380349 - DNA, 33 bp, Homo sapien
tatctggagatagagcccaagtatttgtgggtt

SEQ ID NO: 380350 - DNA, 33 bp, Homo sapien
tatctggagatagagctcaagtatttgtgggtt

SEQ ID NO: 380351 - DNA, 33 bp, Homo sapien
gaaagctattttgctcaataaaaactcaataac

SEQ ID NO: 380352 - DNA, 33 bp, Homo sapien
gaaagctattttgctccataaaaactcaataac

SEQ ID NO: 380353 - DNA, 33 bp, Homo sapien
tctttctttaggtgtaaattgcattgagaaaga

SEQ ID NO: 380354 - DNA, 33 bp, Homo sapien
tctttctttaggtgtacattgcattgagaaaga

SEQ ID NO: 380355 - DNA, 33 bp, Homo sapien
gagctctgaagttccaagcagatttttatatgt

SEQ ID NO: 380356 - DNA, 33 bp, Homo sapien
gagctctgaagttccaggcagatttttatatgt

SEQ ID NO: 380357 - DNA, 33 bp, Homo sapien
actcatgctgagataccgagattgtattcagtt

SEQ ID NO: 380358 - DNA, 33 bp, Homo sapien
actcatgctgagatactgagattgtattcagtt

SEQ ID NO: 380359 - DNA, 33 bp, Homo sapien
aattttaacaaatgccactttaatgtctccata

SEQ ID NO: 380360 - DNA, 33 bp, Homo sapien
aattttaacaaatgccgctttaatgtctccata

SEQ ID NO: 380361 - DNA, 33 bp, Homo sapien
tagatgtgaaaaatcaatcatgttctctctctc

SEQ ID NO: 380362 - DNA, 33 bp, Homo sapien
tagatgtgaaaaatcagtcatgttctctctctc

SEQ ID NO: 380363 - DNA, 33 bp, Homo sapien
tctgcaactggaagagaaccttcaccagcatga

SEQ ID NO: 380364 - DNA, 33 bp, Homo sapien
tctgcaactggaagaggaccttcaccagcatga

SEQ ID NO: 380365 - DNA, 33 bp, Homo sapien
gaggggtttgctgttacagaagagaggattggg

SEQ ID NO: 380366 - DNA, 33 bp, Homo sapien
gaggggtttgctgttatagaagagaggattggg

SEQ ID NO: 380367 - DNA, 33 bp, Homo sapien
cttagagaacaaaatgaaagaattagagaacca

SEQ ID NO: 380368 - DNA, 33 bp, Homo sapien
cttagagaacaaaatggaagaattagagaacca

SEQ ID NO: 380369 - DNA, 33 bp, Homo sapien
accattggccctataacgcttgggttcaagaga

SEQ ID NO: 380370 - DNA, 33 bp, Homo sapien
accattggccctataatgcttgggttcaagaga

SEQ ID NO: 380371 - DNA, 33 bp, Homo sapien
tgccctgctacgaactgaactttgccccctcaa

SEQ ID NO: 380372 - DNA, 33 bp, Homo sapien
tgccctgctacgaacttaactttgccccctcaa

SEQ ID NO: 380373 - DNA, 33 bp, Homo sapien
agatgaagtctgactgcattagggtgggccata

SEQ ID NO: 380374 - DNA, 33 bp, Homo sapien
agatgaagtctgactgtattagggtgggccata

SEQ ID NO: 380375 - DNA, 33 bp, Homo sapien
cagtccctatttcagacatgacattgtagtggt

SEQ ID NO: 380376 - DNA, 33 bp, Homo sapien
cagtccctatttcagatatgacattgtagtggt

SEQ ID NO: 380377 - DNA, 33 bp, Homo sapien
ccataatgaagcatgaaattatgtcattcgcag

SEQ ID NO: 380378 - DNA, 33 bp, Homo sapien
ccataatgaagcatgatattatgtcattcgcag

SEQ ID NO: 380379 - DNA, 33 bp, Homo sapien
ttctagtcagccatacactttcaatcttgagtg

SEQ ID NO: 380380 - DNA, 33 bp, Homo sapien
ttctagtcagccatacgctttcaatcttgagtg

SEQ ID NO: 380381 - DNA, 33 bp, Homo sapien
atgccctttcagacacactcagaaataatgttt

SEQ ID NO: 380382 - DNA, 33 bp, Homo sapien
atgccctttcagacacgctcagaaataatgttt

SEQ ID NO: 380383 - DNA, 33 bp, Homo sapien
aaagagacctgttcgagctatgcttcatatgcc

SEQ ID NO: 380384 - DNA, 33 bp, Homo sapien
aaagagacctgttcgatctatgcttcatatgcc

SEQ ID NO: 380385 - DNA, 33 bp, Homo sapien
ctcttcatttccagataaattttagaagcagct

SEQ ID NO: 380386 - DNA, 33 bp, Homo sapien
ctcttcatttccagatgaattttagaagcagct

SEQ ID NO: 380387 - DNA, 33 bp, Homo sapien
atgacaatgacagaaaaggctgacataaagatt

SEQ ID NO: 380388 - DNA, 33 bp, Homo sapien
atgacaatgacagaaagggctgacataaagatt

SEQ ID NO: 380389 - DNA, 33 bp, Homo sapien
tgaatttgaatcctacaaagggtttacagacat

SEQ ID NO: 380390 - DNA, 33 bp, Homo sapien
tgaatttgaatcctacgaagggtttacagacat

SEQ ID NO: 380391 - DNA, 33 bp, Homo sapien
taaattgtgttcaataaatggaaaattctcttt

SEQ ID NO: 380392 - DNA, 33 bp, Homo sapien
taaattgtgttcaatatatggaaaattctcttt

SEQ ID NO: 380393 - DNA, 33 bp, Homo sapien
gagttcatgcttttaaccatgacatacactgtc

SEQ ID NO: 380394 - DNA, 33 bp, Homo sapien
gagttcatgcttttaatcatgacatacactgtc

SEQ ID NO: 380395 - DNA, 33 bp, Homo sapien
agtatccctgatacaacgtgaactttgccagcc

SEQ ID NO: 380396 - DNA, 33 bp, Homo sapien
agtatccctgatacaatgtgaactttgccagcc

SEQ ID NO: 380397 - DNA, 33 bp, Homo sapien
taggcatagatgtgaacagtctaaggcatcctg

SEQ ID NO: 380398 - DNA, 33 bp, Homo sapien
taggcatagatgtgaagagtctaaggcatcctg

SEQ ID NO: 380399 - DNA, 33 bp, Homo sapien
ctgtactaccacacaccggaagggcaagaaaag

SEQ ID NO: 380400 - DNA, 33 bp, Homo sapien
ctgtactaccacacactggaagggcaagaaaag

SEQ ID NO: 380401 - DNA, 33 bp, Homo sapien
aagaatcattacggaacagaactggtcctgaat

SEQ ID NO: 380402 - DNA, 33 bp, Homo sapien
aagaatcattacggaatagaactggtcctgaat

SEQ ID NO: 380403 - DNA, 33 bp, Homo sapien
tttctcttgtttaaaacgacaaatttcaaagca

SEQ ID NO: 380404 - DNA, 33 bp, Homo sapien
tttctcttgtttaaaatgacaaatttcaaagca

SEQ ID NO: 380405 - DNA, 33 bp, Homo sapien
aaaaagtaacacatccaaagtattaatttgttc

SEQ ID NO: 380406 - DNA, 33 bp, Homo sapien
aaaaagtaacacatccgaagtattaatttgttc

SEQ ID NO: 380407 - DNA, 33 bp, Homo sapien
aagtttggcaagcaatcataaatggaaagtgtt

SEQ ID NO: 380408 - DNA, 33 bp, Homo sapien
aagtttggcaagcaattataaatggaaagtgtt

SEQ ID NO: 380409 - DNA, 33 bp, Homo sapien
tagtacagaatagtgacgttaaatgaaggattg

SEQ ID NO: 380410 - DNA, 33 bp, Homo sapien
tagtacagaatagtgatgttaaatgaaggattg

SEQ ID NO: 380411 - DNA, 33 bp, Homo sapien
tttaaatgcagctcataaacgatatacatattt

SEQ ID NO: 380412 - DNA, 33 bp, Homo sapien
tttaaatgcagctcatcaacgatatacatattt

SEQ ID NO: 380413 - DNA, 33 bp, Homo sapien
caaatctctggaaatcaattccaatcaacacaa

SEQ ID NO: 380414 - DNA, 33 bp, Homo sapien
caaatctctggaaatcgattccaatcaacacaa

SEQ ID NO: 380415 - DNA, 33 bp, Homo sapien
atactcttaaaaacaacgaaacagctgttgaag

SEQ ID NO: 380416 - DNA, 33 bp, Homo sapien
atactcttaaaaacaatgaaacagctgttgaag

SEQ ID NO: 380417 - DNA, 33 bp, Homo sapien
tgaaaacggacaaatacactcatccttgttatt

SEQ ID NO: 380418 - DNA, 33 bp, Homo sapien
tgaaaacggacaaatatactcatccttgttatt

SEQ ID NO: 380419 - DNA, 33 bp, Homo sapien
tgtatttagatattcacgttttctgacagaaac

SEQ ID NO: 380420 - DNA, 33 bp, Homo sapien
tgtatttagatattcatgttttctgacagaaac

SEQ ID NO: 380421 - DNA, 33 bp, Homo sapien
aatactcatgactggaagtagaagaggaaaaac

SEQ ID NO: 380422 - DNA, 33 bp, Homo sapien
aatactcatgactggaggtagaagaggaaaaac

SEQ ID NO: 380423 - DNA, 33 bp, Homo sapien
atagtatgggacctataactggttttaatatgt

SEQ ID NO: 380424 - DNA, 33 bp, Homo sapien
atagtatgggacctatgactggttttaatatgt

SEQ ID NO: 380425 - DNA, 33 bp, Homo sapien
actgcaaaaggagctcgcgaggcttcacacaag

SEQ ID NO: 380426 - DNA, 33 bp, Homo sapien
actgcaaaaggagctctcgaggcttcacacaag

SEQ ID NO: 380427 - DNA, 33 bp, Homo sapien
taatattaatatgtaaaacatttgtggaacata

SEQ ID NO: 380428 - DNA, 33 bp, Homo sapien
taatattaatatgtaagacatttgtggaacata

SEQ ID NO: 380429 - DNA, 33 bp, Homo sapien
cctggatagaagtttacactacttagtctaatt

SEQ ID NO: 380430 - DNA, 33 bp, Homo sapien
cctggatagaagtttatactacttagtctaatt

SEQ ID NO: 380431 - DNA, 33 bp, Homo sapien
ccactatttttgctaggattggaatatccaaca

SEQ ID NO: 380432 - DNA, 33 bp, Homo sapien
ccactatttttgctagtattggaatatccaaca

SEQ ID NO: 380433 - DNA, 33 bp, Homo sapien
tttccactcacattcccggaactgtttcatcca

SEQ ID NO: 380434 - DNA, 33 bp, Homo sapien
tttccactcacattcctggaactgtttcatcca

SEQ ID NO: 380435 - DNA, 33 bp, Homo sapien
aacagtttgagtttaaccacatacctattctag

SEQ ID NO: 380436 - DNA, 33 bp, Homo sapien
aacagtttgagtttaatcacatacctattctag

SEQ ID NO: 380437 - DNA, 33 bp, Homo sapien
ggtgttgctggtgtataaaatttagatagcaat

SEQ ID NO: 380438 - DNA, 33 bp, Homo sapien
ggtgttgctggtgtatgaaatttagatagcaat

SEQ ID NO: 380439 - DNA, 33 bp, Homo sapien
cggcctcacataaatacaccgtgcttaaactaa

SEQ ID NO: 380440 - DNA, 33 bp, Homo sapien
cggcctcacataaatataccgtgcttaaactaa

SEQ ID NO: 380441 - DNA, 33 bp, Homo sapien
ctgtgtgttagaaatacaggtgtaaatgagagg

SEQ ID NO: 380442 - DNA, 33 bp, Homo sapien
ctgtgtgttagaaatagaggtgtaaatgagagg

SEQ ID NO: 380443 - DNA, 33 bp, Homo sapien
aaacacattaaaatgaccttcttgtctatcttc

SEQ ID NO: 380444 - DNA, 33 bp, Homo sapien
aaacacattaaaatgatcttcttgtctatcttc

SEQ ID NO: 380445 - DNA, 33 bp, Homo sapien
ctgaagttagaggggaagccaagaatatctgtt

SEQ ID NO: 380446 - DNA, 33 bp, Homo sapien
ctgaagttagaggggacgccaagaatatctgtt

SEQ ID NO: 380447 - DNA, 33 bp, Homo sapien
tccttaagccctcataaagactccacaccctgg

SEQ ID NO: 380448 - DNA, 33 bp, Homo sapien
tccttaagccctcatagagactccacaccctgg

SEQ ID NO: 380449 - DNA, 33 bp, Homo sapien
tgctctcctcttaccccgcacaaagaagtcaca

SEQ ID NO: 380450 - DNA, 33 bp, Homo sapien
tgctctcctcttaccctgcacaaagaagtcaca

SEQ ID NO: 380451 - DNA, 33 bp, Homo sapien
ataaaggtggaaaggacgtcatgctctacaaat

SEQ ID NO: 380452 - DNA, 33 bp, Homo sapien
ataaaggtggaaaggatgtcatgctctacaaat

SEQ ID NO: 380453 - DNA, 33 bp, Homo sapien
gtaaatacctagcaacaagaaatatatggtttc

SEQ ID NO: 380454 - DNA, 33 bp, Homo sapien
gtaaatacctagcaacgagaaatatatggtttc

SEQ ID NO: 380455 - DNA, 33 bp, Homo sapien
tgaagatcaagcaaaacattgcatatagcactg

SEQ ID NO: 380456 - DNA, 33 bp, Homo sapien
tgaagatcaagcaaaagattgcatatagcactg

SEQ ID NO: 380457 - DNA, 33 bp, Homo sapien
ctaatcaggatttctacgctgcctttttaattg

SEQ ID NO: 380458 - DNA, 33 bp, Homo sapien
ctaatcaggatttctatgctgcctttttaattg

SEQ ID NO: 380459 - DNA, 33 bp, Homo sapien
ggcagcagaatgtatcagagtcatatggcagca

SEQ ID NO: 380460 - DNA, 33 bp, Homo sapien
ggcagcagaatgtatcggagtcatatggcagca

SEQ ID NO: 380461 - DNA, 33 bp, Homo sapien
gatgctaagactttcacggatgctgtgggggaa

SEQ ID NO: 380462 - DNA, 33 bp, Homo sapien
gatgctaagactttcatggatgctgtgggggaa

SEQ ID NO: 380463 - DNA, 33 bp, Homo sapien
aacagactttctcctacagaggattgacctata

SEQ ID NO: 380464 - DNA, 33 bp, Homo sapien
aacagactttctcctatagaggattgacctata

SEQ ID NO: 380465 - DNA, 33 bp, Homo sapien
gaaaagatgtgctccaagttagaagtagatgaa

SEQ ID NO: 380466 - DNA, 33 bp, Homo sapien
gaaaagatgtgctccaggttagaagtagatgaa

SEQ ID NO: 380467 - DNA, 33 bp, Homo sapien
gtcacctgatagatagcccagtgtatggtccaa

SEQ ID NO: 380468 - DNA, 33 bp, Homo sapien
gtcacctgatagatagtccagtgtatggtccaa

SEQ ID NO: 380469 - DNA, 33 bp, Homo sapien
caattattcaactgcactgacgcagaatcactg

SEQ ID NO: 380470 - DNA, 33 bp, Homo sapien
caattattcaactgcattgacgcagaatcactg

SEQ ID NO: 380471 - DNA, 33 bp, Homo sapien
ttttgatgctgtcacagtaatagaatcggaatc

SEQ ID NO: 380472 - DNA, 33 bp, Homo sapien
ttttgatgctgtcacattaatagaatcggaatc

SEQ ID NO: 380473 - DNA, 33 bp, Homo sapien
tcagtgaagcatttgaagaagactgctgttaat

SEQ ID NO: 380474 - DNA, 33 bp, Homo sapien
tcagtgaagcatttgaggaagactgctgttaat

SEQ ID NO: 380475 - DNA, 33 bp, Homo sapien
atgttaaaatgtcatcaaagtagcattctattt

SEQ ID NO: 380476 - DNA, 33 bp, Homo sapien
atgttaaaatgtcatcgaagtagcattctattt

SEQ ID NO: 380477 - DNA, 33 bp, Homo sapien
ttaaattgatccataaaacttgtgtgtggtaac

SEQ ID NO: 380478 - DNA, 33 bp, Homo sapien
ttaaattgatccataagacttgtgtgtggtaac

SEQ ID NO: 380479 - DNA, 33 bp, Homo sapien
gtatgtacccttgatacgaagtgatgaaaatag

SEQ ID NO: 380480 - DNA, 33 bp, Homo sapien
gtatgtacccttgatatgaagtgatgaaaatag

SEQ ID NO: 380481 - DNA, 33 bp, Homo sapien
taaagataagtacagacatagtttccctcaact

SEQ ID NO: 380482 - DNA, 33 bp, Homo sapien
taaagataagtacagatatagtttccctcaact

SEQ ID NO: 380483 - DNA, 33 bp, Homo sapien
gctttaacatttgccccacatgcatatgctggg

SEQ ID NO: 380484 - DNA, 33 bp, Homo sapien
gctttaacatttgccctacatgcatatgctggg

SEQ ID NO: 380485 - DNA, 33 bp, Homo sapien
aatgagtgcctctttaagtcaagctactttaca

SEQ ID NO: 380486 - DNA, 33 bp, Homo sapien
aatgagtgcctctttacgtcaagctactttaca

SEQ ID NO: 380487 - DNA, 33 bp, Homo sapien; identical to SEQ ID NO: 380485

SEQ ID NO: 380488 - DNA, 33 bp, Homo sapien; identical to SEQ ID NO: 380486

SEQ ID NO: 380489 - DNA, 33 bp, Homo sapien
gggttgactggcacccaaagtagtagtttgaca

SEQ ID NO: 380490 - DNA, 33 bp, Homo sapien
gggttgactggcacccgaagtagtagtttgaca

SEQ ID NO: 380491 - DNA, 33 bp, Homo sapien
cagaaacattctgttacgatagtataccaggaa

SEQ ID NO: 380492 - DNA, 33 bp, Homo sapien
cagaaacattctgttatgatagtataccaggaa

SEQ ID NO: 380493 - DNA, 33 bp, Homo sapien
ctctttatctcactcacaccttcacgtgtaaag

SEQ ID NO: 380494 - DNA, 33 bp, Homo sapien
ctctttatctcactcataccttcacgtgtaaag

SEQ ID NO: 380495 - DNA, 33 bp, Homo sapien
ggattgtgaataaccgcatggtatttgaagtag

SEQ ID NO: 380496 - DNA, 33 bp, Homo sapien
ggattgtgaataaccgtatggtatttgaagtag

SEQ ID NO: 380497 - DNA, 33 bp, Homo sapien
tcaggccaagaagacaaagccttaattttaatc

SEQ ID NO: 380498 - DNA, 33 bp, Homo sapien
tcaggccaagaagacagagccttaattttaatc

SEQ ID NO: 380499 - DNA, 33 bp, Homo sapien
acaggaaaaacacctaccagtagaagctcgtac

SEQ ID NO: 380500 - DNA, 33 bp, Homo sapien
acaggaaaaacacctatcagtagaagctcgtac

SEQ ID NO: 380501 - DNA, 33 bp, Homo sapien
tgtaactggagccttacgtataatattgcaagt

SEQ ID NO: 380502 - DNA, 33 bp, Homo sapien
tgtaactggagccttatgtataatattgcaagt

SEQ ID NO: 380503 - DNA, 33 bp, Homo sapien
tagattgagattatgcaacaccaatgtgtaaaa

SEQ ID NO: 380504 - DNA, 33 bp, Homo sapien
tagattgagattatgcgacaccaatgtgtaaaa

SEQ ID NO: 380505 - DNA, 33 bp, Homo sapien
agccagaaatgagcaggcaaggaagacccctgg

SEQ ID NO: 380506 - DNA, 33 bp, Homo sapien
agccagaaatgagcagtcaaggaagacccctgg

SEQ ID NO: 380507 - DNA, 33 bp, Homo sapien
gggaaagcagaaactcacctgagcatagcctgc

SEQ ID NO: 380508 - DNA, 33 bp, Homo sapien
gggaaagcagaaactcgcctgagcatagcctgc

SEQ ID NO: 380509 - DNA, 33 bp, Homo sapien
tatggtgcataagaccaagtgaataacattcag

SEQ ID NO: 380510 - DNA, 33 bp, Homo sapien
tatggtgcataagaccgagtgaataacattcag

SEQ ID NO: 380511 - DNA, 33 bp, Homo sapien
tttgcttcctggggccaccataactaagtacca

SEQ ID NO: 380512 - DNA, 33 bp, Homo sapien
tttgcttcctggggccgccataactaagtacca

SEQ ID NO: 380513 - DNA, 33 bp, Homo sapien
tctacttctcaaattacctcttctcccaagctt

SEQ ID NO: 380514 - DNA, 33 bp, Homo sapien
tctacttctcaaattatctcttctcccaagctt

SEQ ID NO: 380515 - DNA, 33 bp, Homo sapien
agttgctgctcagcgaatattagactcaattgt

SEQ ID NO: 380516 - DNA, 33 bp, Homo sapien
agttgctgctcagcgagtattagactcaattgt

SEQ ID NO: 380517 - DNA, 33 bp, Homo sapien
gatttgttcttgtttgaaaactgaatatctcaa

SEQ ID NO: 380518 - DNA, 33 bp, Homo sapien
gatttgttcttgtttggaaactgaatatctcaa

SEQ ID NO: 380519 - DNA, 33 bp, Homo sapien
tcaaggtgcagtgagaagggcttgtgtgcttgt

SEQ ID NO: 380520 - DNA, 33 bp, Homo sapien
tcaaggtgcagtgagaggggcttgtgtgcttgt

SEQ ID NO: 380521 - DNA, 33 bp, Homo sapien
cagaaaccttgaggaaactgcttaatttttcta

SEQ ID NO: 380522 - DNA, 33 bp, Homo sapien
cagaaaccttgaggaagctgcttaatttttcta

SEQ ID NO: 380523 - DNA, 33 bp, Homo sapien
cacatgaaagacagacaaggacttaacactata

SEQ ID NO: 380524 - DNA, 33 bp, Homo sapien
cacatgaaagacagacgaggacttaacactata

SEQ ID NO: 380525 - DNA, 33 bp, Homo sapien
caaccttacaagtgcccaggagacacgggaaaa

SEQ ID NO: 380526 - DNA, 33 bp, Homo sapien
caaccttacaagtgccgaggagacacgggaaaa

SEQ ID NO: 380527 - DNA, 33 bp, Homo sapien
attataaacagatttacattgtgtggtcatcaa

SEQ ID NO: 380528 - DNA, 33 bp, Homo sapien
attataaacagatttagattgtgtggtcatcaa

SEQ ID NO: 380529 - DNA, 33 bp, Homo sapien
gttttggtctcccagcaagtaggatcataagtg

SEQ ID NO: 380530 - DNA, 33 bp, Homo sapien
gttttggtctcccagcgagtaggatcataagtg

SEQ ID NO: 380531 - DNA, 33 bp, Homo sapien
gtccttgactttgttacaccatttattaaatct

SEQ ID NO: 380532 - DNA, 33 bp, Homo sapien
gtccttgactttgttagaccatttattaaatct

SEQ ID NO: 380533 - DNA, 33 bp, Homo sapien
gcctcttaggtagtaaaaataatgcagaagtac

SEQ ID NO: 380534 - DNA, 33 bp, Homo sapien
gcctcttaggtagtaagaataatgcagaagtac

SEQ ID NO: 380535 - DNA, 33 bp, Homo sapien
agctctttgggaaaacggttgatcttgattttg

SEQ ID NO: 380536 - DNA, 33 bp, Homo sapien
agctctttgggaaaactgttgatcttgattttg

SEQ ID NO: 380537 - DNA, 33 bp, Homo sapien
aaggttgctgactagacgcagctgaaatgtgcc

SEQ ID NO: 380538 - DNA, 33 bp, Homo sapien
aaggttgctgactagatgcagctgaaatgtgcc

SEQ ID NO: 380539 - DNA, 33 bp, Homo sapien
attaaccactgatagaaacttaggttgattctg

SEQ ID NO: 380540 - DNA, 33 bp, Homo sapien
attaaccactgatagacacttaggttgattctg

SEQ ID NO: 380541 - DNA, 33 bp, Homo sapien
aagaaaccagttagcacggcaatgtggaggaac

SEQ ID NO: 380542 - DNA, 33 bp, Homo sapien
aagaaaccagttagcatggcaatgtggaggaac

SEQ ID NO: 380543 - DNA, 33 bp, Homo sapien
gtatctgttctagaaaataatatcctgtgtatc

SEQ ID NO: 380544 - DNA, 33 bp, Homo sapien
gtatctgttctagaaagtaatatcctgtgtatc

SEQ ID NO: 380545 - DNA, 33 bp, Homo sapien
ccaaagtgaaaaacaacgacctctggttccttc

SEQ ID NO: 380546 - DNA, 33 bp, Homo sapien
ccaaagtgaaaaacaatgacctctggttccttc

SEQ ID NO: 380547 - DNA, 33 bp, Homo sapien
gggatgcgcataatgacatagtgatgaattcaa

SEQ ID NO: 380548 - DNA, 33 bp, Homo sapien
gggatgcgcataatgatatagtgatgaattcaa

SEQ ID NO: 380549 - DNA, 33 bp, Homo sapien
tattccttggtttgtaaatgctttgttgcaatc

SEQ ID NO: 380550 - DNA, 33 bp, Homo sapien
tattccttggtttgtagatgctttgttgcaatc

SEQ ID NO: 380551 - DNA, 33 bp, Homo sapien
ttaagattaggtcgtaagggactaggatgacca

SEQ ID NO: 380552 - DNA, 33 bp, Homo sapien
ttaagattaggtcgtatgggactaggatgacca

SEQ ID NO: 380553 - DNA, 33 bp, Homo sapien
tgatgtctaaagaacaaactaggttcatcagta

SEQ ID NO: 380554 - DNA, 33 bp, Homo sapien
tgatgtctaaagaacagactaggttcatcagta

SEQ ID NO: 380555 - DNA, 33 bp, Homo sapien
tgagcaaggtcccaaacggaagtcatggtggct

SEQ ID NO: 380556 - DNA, 33 bp, Homo sapien
tgagcaaggtcccaaatggaagtcatggtggct

SEQ ID NO: 380557 - DNA, 33 bp, Homo sapien
tttgaccaattgaaacaagccttgcttgaggca

SEQ ID NO: 380558 - DNA, 33 bp, Homo sapien
tttgaccaattgaaacgagccttgcttgaggca

SEQ ID NO: 380559 - DNA, 33 bp, Homo sapien
attttacaatgagaataacttaaccatttatac

SEQ ID NO: 380560 - DNA, 33 bp, Homo sapien
attttacaatgagaatgacttaaccatttatac

SEQ ID NO: 380561 - DNA, 33 bp, Homo sapien
aaagaacttctgtccacaaagagagtccagtct

SEQ ID NO: 380562 - DNA, 33 bp, Homo sapien
aaagaacttctgtccataaagagagtccagtct

SEQ ID NO: 380563 - DNA, 33 bp, Homo sapien
tcctgtagaaatagaaatggccacctctcgggg

SEQ ID NO: 380564 - DNA, 33 bp, Homo sapien
tcctgtagaaatagaattggccacctctcgggg

SEQ ID NO: 380565 - DNA, 33 bp, Homo sapien
cacattaagcgagaaaaataaaataaagcaaaa

SEQ ID NO: 380566 - DNA, 33 bp, Homo sapien
cacattaagcgagaaagataaaataaagcaaaa

SEQ ID NO: 380567 - DNA, 33 bp, Homo sapien
taaatgtgtatgtgaaaagcaattatataattg

SEQ ID NO: 380568 - DNA, 33 bp, Homo sapien
taaatgtgtatgtgaagagcaattatataattg

SEQ ID NO: 380569 - DNA, 33 bp, Homo sapien
tcatcatttggaagtacgctcagtaggtgaaag

SEQ ID NO: 380570 - DNA, 33 bp, Homo sapien
tcatcatttggaagtaggctcagtaggtgaaag

SEQ ID NO: 380571 - DNA, 33 bp, Homo sapien
agctgccagcataatacgaagaccttgggttcc

SEQ ID NO: 380572 - DNA, 33 bp, Homo sapien
agctgccagcataataggaagaccttgggttcc

SEQ ID NO: 380573 - DNA, 33 bp, Homo sapien
cagttccccaatcaacactcttataatttccta

SEQ ID NO: 380574 - DNA, 33 bp, Homo sapien
cagttccccaatcaacgctcttataatttccta

SEQ ID NO: 380575 - DNA, 33 bp, Homo sapien
tgtccaggcttgctcgacattagctgtagcatg

SEQ ID NO: 380576 - DNA, 33 bp, Homo sapien
tgtccaggcttgctcggcattagctgtagcatg

SEQ ID NO: 380577 - DNA, 33 bp, Homo sapien
acattaatctttgtaacataaaccatgcaattt

SEQ ID NO: 380578 - DNA, 33 bp, Homo sapien
acattaatctttgtaatataaaccatgcaattt

SEQ ID NO: 380579 - DNA, 33 bp, Homo sapien
tataatcaggctataactagatatattccagaa

SEQ ID NO: 380580 - DNA, 33 bp, Homo sapien
tataatcaggctataagtagatatattccagaa

SEQ ID NO: 380581 - DNA, 33 bp, Homo sapien
agctttcttcactatcagataaaatgttcttga

SEQ ID NO: 380582 - DNA, 33 bp, Homo sapien
agctttcttcactatctgataaaatgttcttga

SEQ ID NO: 380583 - DNA, 33 bp, Homo sapien
taaatgtggttgaaaacggaagcaaaaataaaa

SEQ ID NO: 380584 - DNA, 33 bp, Homo sapien
taaatgtggttgaaaatggaagcaaaaataaaa

SEQ ID NO: 380585 - DNA, 33 bp, Homo sapien
aataatcaaagtttataaccagaaatatgaata

SEQ ID NO: 380586 - DNA, 33 bp, Homo sapien
aataatcaaagtttattaccagaaatatgaata

SEQ ID NO: 380587 - DNA, 33 bp, Homo sapien
ttgttattgatgttgacgtatctccctctagtg

SEQ ID NO: 380588 - DNA, 33 bp, Homo sapien
ttgttattgatgttgatgtatctccctctagtg

SEQ ID NO: 380589 - DNA, 33 bp, Homo sapien
atcacacttatgtacacaaaggtgcaactttac

SEQ ID NO: 380590 - DNA, 33 bp, Homo sapien
atcacacttatgtacagaaaggtgcaactttac

SEQ ID NO: 380591 - DNA, 33 bp, Homo sapien
caaacacatacacacacaaacttatcaatatat

SEQ ID NO: 380592 - DNA, 33 bp, Homo sapien
caaacacatacacacataaacttatcaatatat

SEQ ID NO: 380593 - DNA, 33 bp, Homo sapien
agcagaacctgaaataaaggcttgaatatgcac

SEQ ID NO: 380594 - DNA, 33 bp, Homo sapien
agcagaacctgaaatacaggcttgaatatgcac

SEQ ID NO: 380595 - DNA, 33 bp, Homo sapien
atgttctgatcagatacgcttgctggacttgtt

SEQ ID NO: 380596 - DNA, 33 bp, Homo sapien
atgttctgatcagatatgcttgctggacttgtt

SEQ ID NO: 380597 - DNA, 33 bp, Homo sapien
aagttcattccccacaatcacagcttctccagc

SEQ ID NO: 380598 - DNA, 33 bp, Homo sapien
aagttcattccccacagtcacagcttctccagc

SEQ ID NO: 380599 - DNA, 33 bp, Homo sapien
gtagaccgagggaacacaatagagaaaccagaa

SEQ ID NO: 380600 - DNA, 33 bp, Homo sapien
gtagaccgagggaacataatagagaaaccagaa

SEQ ID NO: 380601 - DNA, 33 bp, Homo sapien
cacagccacgtagccacgctgattccctcagtt

SEQ ID NO: 380602 - DNA, 33 bp, Homo sapien
cacagccacgtagccatgctgattccctcagtt

SEQ ID NO: 380603 - DNA, 33 bp, Homo sapien
ccattagtttttagcacattcttgcaccacaaa

SEQ ID NO: 380604 - DNA, 33 bp, Homo sapien
ccattagtttttagcatattcttgcaccacaaa

SEQ ID NO: 380605 - DNA, 33 bp, Homo sapien
gctggtgaaatttctcagaaaactgactgctca

SEQ ID NO: 380606 - DNA, 33 bp, Homo sapien
gctggtgaaatttctcggaaaactgactgctca

SEQ ID NO: 380607 - DNA, 33 bp, Homo sapien
ttgtctttgtttttatcaccaactaatggaaga

SEQ ID NO: 380608 - DNA, 33 bp, Homo sapien
ttgtctttgtttttatgaccaactaatggaaga

SEQ ID NO: 380609 - DNA, 33 bp, Homo sapien
agagagagactgaaaacgatggaaattaagtgt

SEQ ID NO: 380610 - DNA, 33 bp, Homo sapien
agagagagactgaaaatgatggaaattaagtgt

SEQ ID NO: 380611 - DNA, 33 bp, Homo sapien
gttcaattcaactcaaccacttggagctctctg

SEQ ID NO: 380612 - DNA, 33 bp, Homo sapien
gttcaattcaactcaatcacttggagctctctg

SEQ ID NO: 380613 - DNA, 33 bp, Homo sapien
ggttctcaagcttagcaacacaatcatatcatc

SEQ ID NO: 380614 - DNA, 33 bp, Homo sapien
ggttctcaagcttagcgacacaatcatatcatc

SEQ ID NO: 380615 - DNA, 33 bp, Homo sapien
aagggacgttaaaggcaaaacatcggttaggag

SEQ ID NO: 380616 - DNA, 33 bp, Homo sapien
aagggacgttaaaggcgaaacatcggttaggag

SEQ ID NO: 380617 - DNA, 33 bp, Homo sapien
aaaagtcatcaggtaacgctaaatattcgaagc

SEQ ID NO: 380618 - DNA, 33 bp, Homo sapien
aaaagtcatcaggtaatgctaaatattcgaagc

SEQ ID NO: 380619 - DNA, 33 bp, Homo sapien
ctattctattgtaatacgatgtagagctctgta

SEQ ID NO: 380620 - DNA, 33 bp, Homo sapien
ctattctattgtaatatgatgtagagctctgta

SEQ ID NO: 380621 - DNA, 33 bp, Homo sapien
ttattattgttggacacatgatgacactctcaa

SEQ ID NO: 380622 - DNA, 33 bp, Homo sapien
ttattattgttggacatatgatgacactctcaa

SEQ ID NO: 380623 - DNA, 33 bp, Homo sapien
tctaatttcattctgaccttcaaatatgtaatt

SEQ ID NO: 380624 - DNA, 33 bp, Homo sapien
tctaatttcattctgatcttcaaatatgtaatt

SEQ ID NO: 380625 - DNA, 33 bp, Homo sapien
cttagttttctggtacaagttttattatagttg

SEQ ID NO: 380626 - DNA, 33 bp, Homo sapien
cttagttttctggtaccagttttattatagttg

SEQ ID NO: 380627 - DNA, 33 bp, Homo sapien
tttacttgcaatgacccaattcaactattatgt

SEQ ID NO: 380628 - DNA, 33 bp, Homo sapien
tttacttgcaatgacctaattcaactattatgt

SEQ ID NO: 380629 - DNA, 33 bp, Homo sapien
cccatagttgtgcttcaaataattgtttttgtc

SEQ ID NO: 380630 - DNA, 33 bp, Homo sapien
cccatagttgtgcttctaataattgtttttgtc

SEQ ID NO: 380631 - DNA, 33 bp, Homo sapien
ttccctagttgtgatggatatgggaaaattcct

SEQ ID NO: 380632 - DNA, 33 bp, Homo sapien
ttccctagttgtgatgtatatgggaaaattcct

SEQ ID NO: 380633 - DNA, 33 bp, Homo sapien
tgaaaatgtctgctaagaatatgtaagtgaaag

SEQ ID NO: 380634 - DNA, 33 bp, Homo sapien
tgaaaatgtctgctaataatatgtaagtgaaag

SEQ ID NO: 380635 - DNA, 33 bp, Homo sapien
cccatttcccagggcacgttctggacccaggtg

SEQ ID NO: 380636 - DNA, 33 bp, Homo sapien
cccatttcccagggcatgttctggacccaggtg

SEQ ID NO: 380637 - DNA, 33 bp, Homo sapien
tttccttctagttttaacctgaaagcatctttg

SEQ ID NO: 380638 - DNA, 33 bp, Homo sapien
tttccttctagttttatcctgaaagcatctttg

SEQ ID NO: 380639 - DNA, 33 bp, Homo sapien
acccttgatggacattcaagtttattccatgtc

SEQ ID NO: 380640 - DNA, 33 bp, Homo sapien
acccttgatggacatttaagtttattccatgtc

SEQ ID NO: 380641 - DNA, 33 bp, Homo sapien
ttcttttaaaatataactgctagtttttcaaag

SEQ ID NO: 380642 - DNA, 33 bp, Homo sapien
ttcttttaaaatataattgctagtttttcaaag

SEQ ID NO: 380643 - DNA, 33 bp, Homo sapien
aagcgtaaatgccactaaagaaaatttaaaaga

SEQ ID NO: 380644 - DNA, 33 bp, Homo sapien
aagcgtaaatgccactgaagaaaatttaaaaga

SEQ ID NO: 380645 - DNA, 33 bp, Homo sapien
tctttttctctattccaccatttagaattctgc

SEQ ID NO: 380646 - DNA, 33 bp, Homo sapien
tctttttctctattccgccatttagaattctgc

SEQ ID NO: 380647 - DNA, 33 bp, Homo sapien
aggtcacagttgaacactgccattatctgaaac

SEQ ID NO: 380648 - DNA, 33 bp, Homo sapien
aggtcacagttgaacattgccattatctgaaac

SEQ ID NO: 380649 - DNA, 33 bp, Homo sapien
tgtccattaatgctataacacaaacatttccca

SEQ ID NO: 380650 - DNA, 33 bp, Homo sapien
tgtccattaatgctatgacacaaacatttccca

SEQ ID NO: 380651 - DNA, 33 bp, Homo sapien
agtttgaaggtgcatgaatttttgacattgtgc

SEQ ID NO: 380652 - DNA, 33 bp, Homo sapien
agtttgaaggtgcatggatttttgacattgtgc

SEQ ID NO: 380653 - DNA, 33 bp, Homo sapien
aggtattctaaatatacagcaaaacaggaaaaa

SEQ ID NO: 380654 - DNA, 33 bp, Homo sapien
aggtattctaaatatatagcaaaacaggaaaaa

SEQ ID NO: 380655 - DNA, 33 bp, Homo sapien
aatttcattgaggttcaatttacttatatgtaa

SEQ ID NO: 380656 - DNA, 33 bp, Homo sapien
aatttcattgaggttcgatttacttatatgtaa

SEQ ID NO: 380657 - DNA, 33 bp, Homo sapien
aatcctgtgaaaactaccctcagtggtttccta

SEQ ID NO: 380658 - DNA, 33 bp, Homo sapien
aatcctgtgaaaactatcctcagtggtttccta

SEQ ID NO: 380659 - DNA, 33 bp, Homo sapien
atgaatgaacaggtgacgaataacaagtgaata

SEQ ID NO: 380660 - DNA, 33 bp, Homo sapien
atgaatgaacaggtgatgaataacaagtgaata

SEQ ID NO: 380661 - DNA, 33 bp, Homo sapien
gaagagtaaactgtaacagcacttggagcagtg

SEQ ID NO: 380662 - DNA, 33 bp, Homo sapien
gaagagtaaactgtaatagcacttggagcagtg

SEQ ID NO: 380663 - DNA, 33 bp, Homo sapien
gccaccatcctcccgaacccagaatggtagatc

SEQ ID NO: 380664 - DNA, 33 bp, Homo sapien
gccaccatcctcccgaccccagaatggtagatc

SEQ ID NO: 380665 - DNA, 33 bp, Homo sapien
tacatcaaaatgcctacgccattcacttcactg

SEQ ID NO: 380666 - DNA, 33 bp, Homo sapien
tacatcaaaatgcctatgccattcacttcactg

SEQ ID NO: 380667 - DNA, 33 bp, Homo sapien
cttgatcccattactacgtcaacagggttaaac

SEQ ID NO: 380668 - DNA, 33 bp, Homo sapien
cttgatcccattactatgtcaacagggttaaac

SEQ ID NO: 380669 - DNA, 33 bp, Homo sapien
ttctctactttctagcactgaatccttgggtta

SEQ ID NO: 380670 - DNA, 33 bp, Homo sapien
ttctctactttctagctctgaatccttgggtta

SEQ ID NO: 380671 - DNA, 33 bp, Homo sapien
ctaggatagttccccactgcagaactgggtcca

SEQ ID NO: 380672 - DNA, 33 bp, Homo sapien
ctaggatagttccccattgcagaactgggtcca

SEQ ID NO: 380673 - DNA, 33 bp, Homo sapien
gagcaagcaggagacaaagtggcaagaagaaca

SEQ ID NO: 380674 - DNA, 33 bp, Homo sapien
gagcaagcaggagacagagtggcaagaagaaca

SEQ ID NO: 380675 - DNA, 33 bp, Homo sapien
ttccaggccatggccgaatgggaagttagacaa

SEQ ID NO: 380676 - DNA, 33 bp, Homo sapien
ttccaggccatggccggatgggaagttagacaa

SEQ ID NO: 380677 - DNA, 33 bp, Homo sapien
aataactgatggctacacttctgaattttatta

SEQ ID NO: 380678 - DNA, 33 bp, Homo sapien
aataactgatggctacccttctgaattttatta

SEQ ID NO: 380679 - DNA, 33 bp, Homo sapien
caagttacatcattcaatatttgtgaagagtta

SEQ ID NO: 380680 - DNA, 33 bp, Homo sapien
caagttacatcattcagtatttgtgaagagtta

SEQ ID NO: 380681 - DNA, 33 bp, Homo sapien
tgatgttggcaagtgacagacccctatggccaa

SEQ ID NO: 380682 - DNA, 33 bp, Homo sapien
tgatgttggcaagtgagagacccctatggccaa

SEQ ID NO: 380683 - DNA, 33 bp, Homo sapien
tataccggaccacaaaaccagtttgtatctgtt

SEQ ID NO: 380684 - DNA, 33 bp, Homo sapien
tataccggaccacaaagccagtttgtatctgtt

SEQ ID NO: 380685 - DNA, 33 bp, Homo sapien
tgggtaaaattgtagcaatctatggccttgatt

SEQ ID NO: 380686 - DNA, 33 bp, Homo sapien
tgggtaaaattgtagctatctatggccttgatt

SEQ ID NO: 380687 - DNA, 33 bp, Homo sapien
ccagccatgaagtaaaatctgaatattgtcagg

SEQ ID NO: 380688 - DNA, 33 bp, Homo sapien
ccagccatgaagtaaagtctgaatattgtcagg

SEQ ID NO: 380689 - DNA, 33 bp, Homo sapien
tcctgttaacaatctacgccttggcagattttt

SEQ ID NO: 380690 - DNA, 33 bp, Homo sapien
tcctgttaacaatctatgccttggcagattttt

SEQ ID NO: 380691 - DNA, 33 bp, Homo sapien
ctgcctagccaccttcaccacctatttctctca

SEQ ID NO: 380692 - DNA, 33 bp, Homo sapien
ctgcctagccaccttcgccacctatttctctca

SEQ ID NO: 380693 - DNA, 33 bp, Homo sapien
atgctggtcttgaaaaatttgctccgtaatttg

SEQ ID NO: 380694 - DNA, 33 bp, Homo sapien
atgctggtcttgaaaattttgctccgtaatttg

SEQ ID NO: 380695 - DNA, 33 bp, Homo sapien
acacgtaatattgctacggaacaatacccttca

SEQ ID NO: 380696 - DNA, 33 bp, Homo sapien
acacgtaatattgctatggaacaatacccttca

SEQ ID NO: 380697 - DNA, 33 bp, Homo sapien
atctgaaagaaagagacagtcagaatccatgtg

SEQ ID NO: 380698 - DNA, 33 bp, Homo sapien
atctgaaagaaagagatagtcagaatccatgtg

SEQ ID NO: 380699 - DNA, 33 bp, Homo sapien
tctaaatatacacaaaattcttacaggttaagt

SEQ ID NO: 380700 - DNA, 33 bp, Homo sapien
tctaaatatacacaaagttcttacaggttaagt

SEQ ID NO: 380701 - DNA, 33 bp, Homo sapien
ttccctttcttccaaaacctcattaacatctgt

SEQ ID NO: 380702 - DNA, 33 bp, Homo sapien
ttccctttcttccaaatcctcattaacatctgt

SEQ ID NO: 380703 - DNA, 33 bp, Homo sapien
tattccggcttgtactcaattactagaacaact

SEQ ID NO: 380704 - DNA, 33 bp, Homo sapien
tattccggcttgtactgaattactagaacaact

SEQ ID NO: 380705 - DNA, 33 bp, Homo sapien
tgaaaggttaggtctaaaatgtgtctgaaggtg

SEQ ID NO: 380706 - DNA, 33 bp, Homo sapien
tgaaaggttaggtctagaatgtgtctgaaggtg

SEQ ID NO: 380707 - DNA, 33 bp, Homo sapien
aagtcagttaaccaaaacactgtgatctatcat

SEQ ID NO: 380708 - DNA, 33 bp, Homo sapien
aagtcagttaaccaaagcactgtgatctatcat

SEQ ID NO: 380709 - DNA, 33 bp, Homo sapien
tttccctgcctcttccaagcttcaagtattccc

SEQ ID NO: 380710 - DNA, 33 bp, Homo sapien
tttccctgcctcttccgagcttcaagtattccc

SEQ ID NO: 380711 - DNA, 33 bp, Homo sapien
atgcagctacaagccaaagaatgccaacaatcc

SEQ ID NO: 380712 - DNA, 33 bp, Homo sapien
atgcagctacaagccagagaatgccaacaatcc

SEQ ID NO: 380713 - DNA, 33 bp, Homo sapien
ctaatgtctttatacactggaagcagcagaaaa

SEQ ID NO: 380714 - DNA, 33 bp, Homo sapien
ctaatgtctttatacattggaagcagcagaaaa

SEQ ID NO: 380715 - DNA, 33 bp, Homo sapien
attcattgcaatcacaatcaaaatgtcgtcagg

SEQ ID NO: 380716 - DNA, 33 bp, Homo sapien
attcattgcaatcacagtcaaaatgtcgtcagg

SEQ ID NO: 380717 - DNA, 33 bp, Homo sapien
cataatgctttgaaatgagctattgcggacagt

SEQ ID NO: 380718 - DNA, 33 bp, Homo sapien
cataatgctttgaaattagctattgcggacagt

SEQ ID NO: 380719 - DNA, 33 bp, Homo sapien
tagttcacattaatgacgagccatcggtgcttt

SEQ ID NO: 380720 - DNA, 33 bp, Homo sapien
tagttcacattaatgatgagccatcggtgcttt

SEQ ID NO: 380721 - DNA, 33 bp, Homo sapien
cttttgataagaaaagccattaattcatttatg

SEQ ID NO: 380722 - DNA, 33 bp, Homo sapien
cttttgataagaaaaggcattaattcatttatg

SEQ ID NO: 380723 - DNA, 33 bp, Homo sapien
gaatagaaatttgccaatatgaattataccatg

SEQ ID NO: 380724 - DNA, 33 bp, Homo sapien
gaatagaaatttgccagtatgaattataccatg

SEQ ID NO: 380725 - DNA, 33 bp, Homo sapien
aagaatgcttaaaaaaacatctctcaaaaggga

SEQ ID NO: 380726 - DNA, 33 bp, Homo sapien
aagaatgcttaaaaaaccatctctcaaaaggga

SEQ ID NO: 380727 - DNA, 33 bp, Homo sapien
ccaagtgaggaggagcccttttctactgcctct

SEQ ID NO: 380728 - DNA, 33 bp, Homo sapien
ccaagtgaggaggagctcttttctactgcctct

SEQ ID NO: 380729 - DNA, 33 bp, Homo sapien
agcttccaagtgtcaaaactcagaatttgattt

SEQ ID NO: 380730 - DNA, 33 bp, Homo sapien
agcttccaagtgtcaagactcagaatttgattt

SEQ ID NO: 380731 - DNA, 33 bp, Homo sapien
tgggactttctccatcgaaatggtggttctaac

SEQ ID NO: 380732 - DNA, 33 bp, Homo sapien
tgggactttctccatctaaatggtggttctaac

SEQ ID NO: 380733 - DNA, 33 bp, Homo sapien
atgtgtacataaattcaaagtgtctcttttttc

SEQ ID NO: 380734 - DNA, 33 bp, Homo sapien
atgtgtacataaattccaagtgtctcttttttc

SEQ ID NO: 380735 - DNA, 33 bp, Homo sapien
ataagccactgttgacgcagaagatggtggata

SEQ ID NO: 380736 - DNA, 33 bp, Homo sapien
ataagccactgttgactcagaagatggtggata

SEQ ID NO: 380737 - DNA, 33 bp, Homo sapien
acagaagtggaagaaccattttctgaagccatt

SEQ ID NO: 380738 - DNA, 33 bp, Homo sapien
acagaagtggaagaacgattttctgaagccatt

SEQ ID NO: 380739 - DNA, 33 bp, Homo sapien
ataatgcctgactcctcagaaaaacacagaaac

SEQ ID NO: 380740 - DNA, 33 bp, Homo sapien
ataatgcctgactccttagaaaaacacagaaac

SEQ ID NO: 380741 - DNA, 33 bp, Homo sapien
tatactctaaataaaaatcttgaggagagtgtc

SEQ ID NO: 380742 - DNA, 33 bp, Homo sapien
tatactctaaataaaagtcttgaggagagtgtc

SEQ ID NO: 380743 - DNA, 33 bp, Homo sapien
acactcttttaggtaacccttgagctatgtttt

SEQ ID NO: 380744 - DNA, 33 bp, Homo sapien
acactcttttaggtaatccttgagctatgtttt

SEQ ID NO: 380745 - DNA, 33 bp, Homo sapien
aaagatgacatccacactgagggtatgagcagt

SEQ ID NO: 380746 - DNA, 33 bp, Homo sapien
aaagatgacatccacattgagggtatgagcagt

SEQ ID NO: 380747 - DNA, 33 bp, Homo sapien
ctccatgaagcttctcaaacacaccaggtatag

SEQ ID NO: 380748 - DNA, 33 bp, Homo sapien
ctccatgaagcttctcgaacacaccaggtatag

SEQ ID NO: 380749 - DNA, 33 bp, Homo sapien
tgaaaggaatgggtgacgactgctaagtactgg

SEQ ID NO: 380750 - DNA, 33 bp, Homo sapien
tgaaaggaatgggtgatgactgctaagtactgg

SEQ ID NO: 380751 - DNA, 33 bp, Homo sapien
aataattgacacatagcaggtatcaagtgaatt

SEQ ID NO: 380752 - DNA, 33 bp, Homo sapien
aataattgacacatagtaggtatcaagtgaatt

SEQ ID NO: 380753 - DNA, 33 bp, Homo sapien
aatgtcagaagggctacgggttgtctctgggat

SEQ ID NO: 380754 - DNA, 33 bp, Homo sapien
aatgtcagaagggctatgggttgtctctgggat

SEQ ID NO: 380755 - DNA, 33 bp, Homo sapien
aagagattttgtgagaagtgtggatgagacaac

SEQ ID NO: 380756 - DNA, 33 bp, Homo sapien
aagagattttgtgagacgtgtggatgagacaac

SEQ ID NO: 380757 - DNA, 33 bp, Homo sapien
atttgtgctaaaaaaaaaaatgagttaacatat

SEQ ID NO: 380758 - DNA, 33 bp, Homo sapien
atttgtgctaaaaaaacaaatgagttaacatat

SEQ ID NO: 380759 - DNA, 33 bp, Homo sapien
tatctgttagttcttacagagtttccaactaaa

SEQ ID NO: 380760 - DNA, 33 bp, Homo sapien
tatctgttagttcttatagagtttccaactaaa

SEQ ID NO: 380761 - DNA, 33 bp, Homo sapien
gcaagagtcagagatacaagtgtagagctggcg

SEQ ID NO: 380762 - DNA, 33 bp, Homo sapien
gcaagagtcagagatagaagtgtagagctggcg

SEQ ID NO: 380763 - DNA, 33 bp, Homo sapien
ttttgtcttggatcaaactcctacagggtccag

SEQ ID NO: 380764 - DNA, 33 bp, Homo sapien
ttttgtcttggatcaagctcctacagggtccag

SEQ ID NO: 380765 - DNA, 33 bp, Homo sapien
gaagtcagagtccctaacacatactcatggata

SEQ ID NO: 380766 - DNA, 33 bp, Homo sapien
gaagtcagagtccctagcacatactcatggata

SEQ ID NO: 380767 - DNA, 33 bp, Homo sapien
ttcaaaagacgatatccaaatggccaaaacaaa

SEQ ID NO: 380768 - DNA, 33 bp, Homo sapien
ttcaaaagacgatatcgaaatggccaaaacaaa

SEQ ID NO: 380769 - DNA, 33 bp, Homo sapien
ctgtggctttgctacacgctcatagaagttctg

SEQ ID NO: 380770 - DNA, 33 bp, Homo sapien
ctgtggctttgctacatgctcatagaagttctg

SEQ ID NO: 380771 - DNA, 33 bp, Homo sapien
ataaaagcctgcataacggggagtaccaagctt

SEQ ID NO: 380772 - DNA, 33 bp, Homo sapien
ataaaagcctgcataatggggagtaccaagctt

SEQ ID NO: 380773 - DNA, 33 bp, Homo sapien
tgtgccaaacctttacacactttatattgcttt

SEQ ID NO: 380774 - DNA, 33 bp, Homo sapien
tgtgccaaacctttacgcactttatattgcttt

SEQ ID NO: 380775 - DNA, 33 bp, Homo sapien
aactgtgtctacgttacatctggtctctgttat

SEQ ID NO: 380776 - DNA, 33 bp, Homo sapien
aactgtgtctacgttagatctggtctctgttat

SEQ ID NO: 380777 - DNA, 33 bp, Homo sapien
acaatttcttctcacaatgtacaagatgttggg

SEQ ID NO: 380778 - DNA, 33 bp, Homo sapien
acaatttcttctcacattgtacaagatgttggg

SEQ ID NO: 380779 - DNA, 33 bp, Homo sapien
atgttttggggagacaatattatatctacataa

SEQ ID NO: 380780 - DNA, 33 bp, Homo sapien
atgttttggggagacagtattatatctacataa

SEQ ID NO: 380781 - DNA, 33 bp, Homo sapien
gtacaaaagttaatcagtaatgtatcctctgaa

SEQ ID NO: 380782 - DNA, 33 bp, Homo sapien
gtacaaaagttaatcattaatgtatcctctgaa

SEQ ID NO: 380783 - DNA, 33 bp, Homo sapien
tgagactgccgtgctaaagaggcaacaactttg

SEQ ID NO: 380784 - DNA, 33 bp, Homo sapien
tgagactgccgtgctagagaggcaacaactttg

SEQ ID NO: 380785 - DNA, 33 bp, Homo sapien
tataaaatgcttagaaataactctcttcatcag

SEQ ID NO: 380786 - DNA, 33 bp, Homo sapien
tataaaatgcttagaagtaactctcttcatcag

SEQ ID NO: 380787 - DNA, 33 bp, Homo sapien
tgcatctattgtttaacaaaggacttctggtta

SEQ ID NO: 380788 - DNA, 33 bp, Homo sapien
tgcatctattgtttaataaaggacttctggtta

SEQ ID NO: 380789 - DNA, 33 bp, Homo sapien
cccctctcatttctcccagttctacattttcac

SEQ ID NO: 380790 - DNA, 33 bp, Homo sapien
cccctctcatttctcctagttctacattttcac

SEQ ID NO: 380791 - DNA, 33 bp, Homo sapien
caaagagttcaattcacagagcctgaaagtggc

SEQ ID NO: 380792 - DNA, 33 bp, Homo sapien
caaagagttcaattcatagagcctgaaagtggc

SEQ ID NO: 380793 - DNA, 33 bp, Homo sapien
agcctaactaaacactcagagactccatgttct

SEQ ID NO: 380794 - DNA, 33 bp, Homo sapien
agcctaactaaacactgagagactccatgttct

SEQ ID NO: 380795 - DNA, 33 bp, Homo sapien
aagtctgattttattacgtgccttttctttgta

SEQ ID NO: 380796 - DNA, 33 bp, Homo sapien
aagtctgattttattatgtgccttttctttgta

SEQ ID NO: 380797 - DNA, 33 bp, Homo sapien
ggcagctagaccagaaggtgcctatcatgtggg

SEQ ID NO: 380798 - DNA, 33 bp, Homo sapien
ggcagctagaccagaatgtgcctatcatgtggg

SEQ ID NO: 380799 - DNA, 33 bp, Homo sapien
cttcctcaacaggtagaaaacatctggagccag

SEQ ID NO: 380800 - DNA, 33 bp, Homo sapien
cttcctcaacaggtagcaaacatctggagccag

SEQ ID NO: 380801 - DNA, 33 bp, Homo sapien
ttatatcagcactttacaaatgagagtatagaa

SEQ ID NO: 380802 - DNA, 33 bp, Homo sapien
ttatatcagcactttataaatgagagtatagaa

SEQ ID NO: 380803 - DNA, 33 bp, Homo sapien
cgtgtacaaattttgcaacatcttgggaatctg

SEQ ID NO: 380804 - DNA, 33 bp, Homo sapien
cgtgtacaaattttgcgacatcttgggaatctg

SEQ ID NO: 380805 - DNA, 33 bp, Homo sapien
catcccattacactaaatcctcaaatgcacatt

SEQ ID NO: 380806 - DNA, 33 bp, Homo sapien
catcccattacactaagtcctcaaatgcacatt

SEQ ID NO: 380807 - DNA, 33 bp, Homo sapien
aaaatatagcaaatacaagaaactgcttcatgg

SEQ ID NO: 380808 - DNA, 33 bp, Homo sapien
aaaatatagcaaatacgagaaactgcttcatgg

SEQ ID NO: 380809 - DNA, 33 bp, Homo sapien
gctttacaggttgtcaactgaggctacaggaat

SEQ ID NO: 380810 - DNA, 33 bp, Homo sapien
gctttacaggttgtcagctgaggctacaggaat

SEQ ID NO: 380811 - DNA, 33 bp, Homo sapien
cagtcagaaaagcaaaatcaatagtccaggtca

SEQ ID NO: 380812 - DNA, 33 bp, Homo sapien
cagtcagaaaagcaaactcaatagtccaggtca

SEQ ID NO: 380813 - DNA, 33 bp, Homo sapien
ataatggcactaaatacgtataaacaagcatct

SEQ ID NO: 380814 - DNA, 33 bp, Homo sapien
ataatggcactaaatatgtataaacaagcatct

SEQ ID NO: 380815 - DNA, 33 bp, Homo sapien
agcatgattcaaaaaaaacatgttggtttcata

SEQ ID NO: 380816 - DNA, 33 bp, Homo sapien
agcatgattcaaaaaatacatgttggtttcata

SEQ ID NO: 380817 - DNA, 33 bp, Homo sapien
gagaaattaacacccacggtgcaagcccctgcc

SEQ ID NO: 380818 - DNA, 33 bp, Homo sapien
gagaaattaacacccatggtgcaagcccctgcc

SEQ ID NO: 380819 - DNA, 33 bp, Homo sapien
tagactaaggatctcaagcgtatctggaagagt

SEQ ID NO: 380820 - DNA, 33 bp, Homo sapien
tagactaaggatctcaggcgtatctggaagagt

SEQ ID NO: 380821 - DNA, 33 bp, Homo sapien
aactccttgatgtgcacacaaccctatacctgc

SEQ ID NO: 380822 - DNA, 33 bp, Homo sapien
aactccttgatgtgcatacaaccctatacctgc

SEQ ID NO: 380823 - DNA, 33 bp, Homo sapien
tccatcccactctatcacctccattgtagcctt

SEQ ID NO: 380824 - DNA, 33 bp, Homo sapien
tccatcccactctatcgcctccattgtagcctt

SEQ ID NO: 380825 - DNA, 33 bp, Homo sapien
taatacaaaataatcacgagagttttaaagaaa

SEQ ID NO: 380826 - DNA, 33 bp, Homo sapien
taatacaaaataatcatgagagttttaaagaaa

SEQ ID NO: 380827 - DNA, 33 bp, Homo sapien
accctgacagtcatcacaatttgtatttctgaa

SEQ ID NO: 380828 - DNA, 33 bp, Homo sapien
accctgacagtcatcataatttgtatttctgaa

SEQ ID NO: 380829 - DNA, 33 bp, Homo sapien
cttggttatcagatcaactgttgcaccatcaca

SEQ ID NO: 380830 - DNA, 33 bp, Homo sapien
cttggttatcagatcagctgttgcaccatcaca

SEQ ID NO: 380831 - DNA, 33 bp, Homo sapien
taactggatttgcaccaagtgcccaagaaaaac

SEQ ID NO: 380832 - DNA, 33 bp, Homo sapien
taactggatttgcaccgagtgcccaagaaaaac

SEQ ID NO: 380833 - DNA, 33 bp, Homo sapien
acaaagctatggttaacgttatcaagtaaagct

SEQ ID NO: 380834 - DNA, 33 bp, Homo sapien
acaaagctatggttaaggttatcaagtaaagct

SEQ ID NO: 380835 - DNA, 33 bp, Homo sapien
tcttgtgagataaagcaagaaagatatcagtgt

SEQ ID NO: 380836 - DNA, 33 bp, Homo sapien
tcttgtgagataaagcgagaaagatatcagtgt

SEQ ID NO: 380837 - DNA, 33 bp, Homo sapien
atctgttctgtgtttcaagaaaggaaattctca

SEQ ID NO: 380838 - DNA, 33 bp, Homo sapien
atctgttctgtgtttcgagaaaggaaattctca

SEQ ID NO: 380839 - DNA, 33 bp, Homo sapien
tcaattttggtatccacatatttattgctaaat

SEQ ID NO: 380840 - DNA, 33 bp, Homo sapien
tcaattttggtatccagatatttattgctaaat

SEQ ID NO: 380841 - DNA, 33 bp, Homo sapien
cttgttgagattttgaaagcaaatgaataaaac

SEQ ID NO: 380842 - DNA, 33 bp, Homo sapien
cttgttgagattttgatagcaaatgaataaaac

SEQ ID NO: 380843 - DNA, 33 bp, Homo sapien
cttaagaagcttgtcacatagtagggctcacca

SEQ ID NO: 380844 - DNA, 33 bp, Homo sapien
cttaagaagcttgtcatatagtagggctcacca

SEQ ID NO: 380845 - DNA, 33 bp, Homo sapien
tgaaattatcagtaaacctgaatcatctatggc

SEQ ID NO: 380846 - DNA, 33 bp, Homo sapien
tgaaattatcagtaaatctgaatcatctatggc

SEQ ID NO: 380847 - DNA, 33 bp, Homo sapien
gtctgtgaaatcagcacatacctattgtggcaa

SEQ ID NO: 380848 - DNA, 33 bp, Homo sapien
gtctgtgaaatcagcatatacctattgtggcaa

SEQ ID NO: 380849 - DNA, 33 bp, Homo sapien
tccttgagttctgttacgttcatggttttggta

SEQ ID NO: 380850 - DNA, 33 bp, Homo sapien
tccttgagttctgttatgttcatggttttggta

SEQ ID NO: 380851 - DNA, 33 bp, Homo sapien
ggagttatgaccttacagaagattaggagtcaa

SEQ ID NO: 380852 - DNA, 33 bp, Homo sapien
ggagttatgaccttacggaagattaggagtcaa

SEQ ID NO: 380853 - DNA, 33 bp, Homo sapien
aaacaaagagctttacagagaggcgctggcaat

SEQ ID NO: 380854 - DNA, 33 bp, Homo sapien
aaacaaagagctttacggagaggcgctggcaat

SEQ ID NO: 380855 - DNA, 33 bp, Homo sapien
attttggacaataccaatatagagacagggtaa

SEQ ID NO: 380856 - DNA, 33 bp, Homo sapien
attttggacaataccagtatagagacagggtaa

SEQ ID NO: 380857 - DNA, 33 bp, Homo sapien
ccggagtatctggagcaacaggcatgtgcaacc

SEQ ID NO: 380858 - DNA, 33 bp, Homo sapien
ccggagtatctggagcgacaggcatgtgcaacc

SEQ ID NO: 380859 - DNA, 33 bp, Homo sapien
aaaccagtcagatagacatggatgattagtgtc

SEQ ID NO: 380860 - DNA, 33 bp, Homo sapien
aaaccagtcagatagatatggatgattagtgtc

SEQ ID NO: 380861 - DNA, 33 bp, Homo sapien
gtgcatagagacaaatgaatccattcacgtggg

SEQ ID NO: 380862 - DNA, 33 bp, Homo sapien
gtgcatagagacaaattaatccattcacgtggg

SEQ ID NO: 380863 - DNA, 33 bp, Homo sapien
atctgacatgagggcaacagtgctattgaaaag

SEQ ID NO: 380864 - DNA, 33 bp, Homo sapien
atctgacatgagggcagcagtgctattgaaaag

SEQ ID NO: 380865 - DNA, 33 bp, Homo sapien
tggcaattatatcatccgagcatctaatatgta

SEQ ID NO: 380866 - DNA, 33 bp, Homo sapien
tggcaattatatcatctgagcatctaatatgta

SEQ ID NO: 380867 - DNA, 33 bp, Homo sapien
tttccattaatacgcacggtacccagaagaaca

SEQ ID NO: 380868 - DNA, 33 bp, Homo sapien
tttccattaatacgcatggtacccagaagaaca

SEQ ID NO: 380869 - DNA, 33 bp, Homo sapien
atcactttctcaccaccgatgttatttatttat

SEQ ID NO: 380870 - DNA, 33 bp, Homo sapien
atcactttctcaccactgatgttatttatttat

SEQ ID NO: 380871 - DNA, 33 bp, Homo sapien
tggtaaagttgagctaaaggtcacacctgagac

SEQ ID NO: 380872 - DNA, 33 bp, Homo sapien
tggtaaagttgagctagaggtcacacctgagac

SEQ ID NO: 380873 - DNA, 33 bp, Homo sapien
gtctgactgcaaataccacactctcatacacag

SEQ ID NO: 380874 - DNA, 33 bp, Homo sapien
gtctgactgcaaatactacactctcatacacag

SEQ ID NO: 380875 - DNA, 33 bp, Homo sapien
caggaataactgagatgaggaattactgcttta

SEQ ID NO: 380876 - DNA, 33 bp, Homo sapien
caggaataactgagattaggaattactgcttta

SEQ ID NO: 380877 - DNA, 33 bp, Homo sapien
ccttttcatgatgctacactccttaaacagtta

SEQ ID NO: 380878 - DNA, 33 bp, Homo sapien
ccttttcatgatgctatactccttaaacagtta

SEQ ID NO: 380879 - DNA, 33 bp, Homo sapien
tgagcgagaagccaaacctgattactgagaggt

SEQ ID NO: 380880 - DNA, 33 bp, Homo sapien
tgagcgagaagccaaatctgattactgagaggt

SEQ ID NO: 380881 - DNA, 33 bp, Homo sapien
ataatggatggcatggaaacacatgggaaaaaa

SEQ ID NO: 380882 - DNA, 33 bp, Homo sapien
ataatggatggcatggcaacacatgggaaaaaa

SEQ ID NO: 380883 - DNA, 33 bp, Homo sapien
tggaatctggaatggaaatgatgtgacccaatg

SEQ ID NO: 380884 - DNA, 33 bp, Homo sapien
tggaatctggaatggatatgatgtgacccaatg

SEQ ID NO: 380885 - DNA, 33 bp, Homo sapien
actgtctatatttacgccatttcagctgaccct

SEQ ID NO: 380886 - DNA, 33 bp, Homo sapien
actgtctatatttacgtcatttcagctgaccct

SEQ ID NO: 380887 - DNA, 33 bp, Homo sapien
gttgatgcttttctaccgtaactttcttctgcg

SEQ ID NO: 380888 - DNA, 33 bp, Homo sapien
gttgatgcttttctactgtaactttcttctgcg

SEQ ID NO: 380889 - DNA, 33 bp, Homo sapien
tgggggccaataaagacggaatagtggagcaga

SEQ ID NO: 380890 - DNA, 33 bp, Homo sapien
tgggggccaataaagatggaatagtggagcaga

SEQ ID NO: 380891 - DNA, 33 bp, Homo sapien
gagcctataactttccacagtagatgagatggt

SEQ ID NO: 380892 - DNA, 33 bp, Homo sapien
gagcctataactttccgcagtagatgagatggt

SEQ ID NO: 380893 - DNA, 33 bp, Homo sapien
aaggtgctgcagatgaactgtttgttttgcttt

SEQ ID NO: 380894 - DNA, 33 bp, Homo sapien
aaggtgctgcagatgatctgtttgttttgcttt

SEQ ID NO: 380895 - DNA, 33 bp, Homo sapien
ttattcatactcaagcaagagatgagaggattc

SEQ ID NO: 380896 - DNA, 33 bp, Homo sapien
ttattcatactcaagcgagagatgagaggattc

SEQ ID NO: 380897 - DNA, 33 bp, Homo sapien
ttttgaatgttggacaaaaaatcatgtatgcaa

SEQ ID NO: 380898 - DNA, 33 bp, Homo sapien
ttttgaatgttggacacaaaatcatgtatgcaa

SEQ ID NO: 380899 - DNA, 33 bp, Homo sapien
ccacctgctgattgccaactttttatttattca

SEQ ID NO: 380900 - DNA, 33 bp, Homo sapien
ccacctgctgattgccgactttttatttattca

SEQ ID NO: 380901 - DNA, 33 bp, Homo sapien
aaaaatctctgtcatacccagtaactccaatac

SEQ ID NO: 380902 - DNA, 33 bp, Homo sapien
aaaaatctctgtcatagccagtaactccaatac

SEQ ID NO: 380903 - DNA, 33 bp, Homo sapien
tcccagagatgctaccaaagaccccaaaagacc

SEQ ID NO: 380904 - DNA, 33 bp, Homo sapien
tcccagagatgctaccgaagaccccaaaagacc

SEQ ID NO: 380905 - DNA, 33 bp, Homo sapien
taccaaagcaatctatcaggtctgtaagaggtt

SEQ ID NO: 380906 - DNA, 33 bp, Homo sapien
taccaaagcaatctatgaggtctgtaagaggtt

SEQ ID NO: 380907 - DNA, 33 bp, Homo sapien
aaagatctaaaggctcaagagataagacaacca

SEQ ID NO: 380908 - DNA, 33 bp, Homo sapien
aaagatctaaaggctctagagataagacaacca

SEQ ID NO: 380909 - DNA, 33 bp, Homo sapien
ccaactgttactgcaagagacctatgtagttca

SEQ ID NO: 380910 - DNA, 33 bp, Homo sapien
ccaactgttactgcaatagacctatgtagttca

SEQ ID NO: 380911 - DNA, 33 bp, Homo sapien
actctctgctcagggaataagcaagcctccata

SEQ ID NO: 380912 - DNA, 33 bp, Homo sapien
actctctgctcagggactaagcaagcctccata

SEQ ID NO: 380913 - DNA, 33 bp, Homo sapien
agaacttccttcaatactagatgacctatacat

SEQ ID NO: 380914 - DNA, 33 bp, Homo sapien
agaacttccttcaatagtagatgacctatacat

SEQ ID NO: 380915 - DNA, 33 bp, Homo sapien
ccctcaaatatttttcaactgagtatatggatt

SEQ ID NO: 380916 - DNA, 33 bp, Homo sapien
ccctcaaatatttttcgactgagtatatggatt

SEQ ID NO: 380917 - DNA, 33 bp, Homo sapien
atgaaggggtgatacccaacaaactccaagaca

SEQ ID NO: 380918 - DNA, 33 bp, Homo sapien
atgaaggggtgatacctaacaaactccaagaca

SEQ ID NO: 380919 - DNA, 33 bp, Homo sapien
tgaactttatgtccacagtagacaggaataaga

SEQ ID NO: 380920 - DNA, 33 bp, Homo sapien
tgaactttatgtccaccgtagacaggaataaga

SEQ ID NO: 380921 - DNA, 33 bp, Homo sapien
ctgctgtggagaactgaattaaataacctttaa

SEQ ID NO: 380922 - DNA, 33 bp, Homo sapien
ctgctgtggagaactggattaaataacctttaa

SEQ ID NO: 380923 - DNA, 33 bp, Homo sapien
aatctctaaaactggcccagtgcttgcatacta

SEQ ID NO: 380924 - DNA, 33 bp, Homo sapien
aatctctaaaactggctcagtgcttgcatacta

SEQ ID NO: 380925 - DNA, 33 bp, Homo sapien
ctgccactagtgcaaacacacgcatggaggctg

SEQ ID NO: 380926 - DNA, 33 bp, Homo sapien
ctgccactagtgcaaatacacgcatggaggctg

SEQ ID NO: 380927 - DNA, 33 bp, Homo sapien
tctcaataacccataaccgcaatctcatcacag

SEQ ID NO: 380928 - DNA, 33 bp, Homo sapien
tctcaataacccataatcgcaatctcatcacag

SEQ ID NO: 380929 - DNA, 33 bp, Homo sapien
gtaagatgtatcagtacagaagacattggggtt

SEQ ID NO: 380930 - DNA, 33 bp, Homo sapien
gtaagatgtatcagtatagaagacattggggtt

SEQ ID NO: 380931 - DNA, 33 bp, Homo sapien
gatgctatggggttgacactaagaaattcatga

SEQ ID NO: 380932 - DNA, 33 bp, Homo sapien
gatgctatggggttgatactaagaaattcatga

SEQ ID NO: 380933 - DNA, 33 bp, Homo sapien
tacccaaaacaggatcccaaaagagaagaagca

SEQ ID NO: 380934 - DNA, 33 bp, Homo sapien
tacccaaaacaggatctcaaaagagaagaagca

SEQ ID NO: 380935 - DNA, 33 bp, Homo sapien
cagacctttcatattccccttcagccttcatca

SEQ ID NO: 380936 - DNA, 33 bp, Homo sapien
cagacctttcatattcgccttcagccttcatca

SEQ ID NO: 380937 - DNA, 33 bp, Homo sapien
atttgccccattttgccaggcatttggtaatcc

SEQ ID NO: 380938 - DNA, 33 bp, Homo sapien
atttgccccattttgcgaggcatttggtaatcc

SEQ ID NO: 380939 - DNA, 33 bp, Homo sapien
aaggcaaagatggcaacgtagctgtagcagatt

SEQ ID NO: 380940 - DNA, 33 bp, Homo sapien
aaggcaaagatggcaatgtagctgtagcagatt

SEQ ID NO: 380941 - DNA, 33 bp, Homo sapien
aggtgttggtatcagaaagatcttgatttgaat

SEQ ID NO: 380942 - DNA, 33 bp, Homo sapien
aggtgttggtatcagagagatcttgatttgaat

SEQ ID NO: 380943 - DNA, 33 bp, Homo sapien
agagaagaaggctttgcagtaagagtagaaaat

SEQ ID NO: 380944 - DNA, 33 bp, Homo sapien
agagaagaaggctttggagtaagagtagaaaat

SEQ ID NO: 380945 - DNA, 33 bp, Homo sapien
atgtagactttgatgacgccagtggaagctgtc

SEQ ID NO: 380946 - DNA, 33 bp, Homo sapien
atgtagactttgatgatgccagtggaagctgtc

SEQ ID NO: 380947 - DNA, 33 bp, Homo sapien
ccagtggaagctgtccaaggagatatattcaaa

SEQ ID NO: 380948 - DNA, 33 bp, Homo sapien
ccagtggaagctgtccgaggagatatattcaaa

SEQ ID NO: 380949 - DNA, 33 bp, Homo sapien
aagttagcaaacaagagtattgtacactattga

SEQ ID NO: 380950 - DNA, 33 bp, Homo sapien
aagttagcaaacaagattattgtacactattga

SEQ ID NO: 380951 - DNA, 33 bp, Homo sapien
tattcaaaatgtgccaaagaaatatatttgttt

SEQ ID NO: 380952 - DNA, 33 bp, Homo sapien
tattcaaaatgtgccagagaaatatatttgttt

SEQ ID NO: 380953 - DNA, 33 bp, Homo sapien
atcctcaactgccctcactgctaattagcataa

SEQ ID NO: 380954 - DNA, 33 bp, Homo sapien
atcctcaactgccctcgctgctaattagcataa

SEQ ID NO: 380955 - DNA, 33 bp, Homo sapien
tgtcaggacaagatcccattttggttagcaaag

SEQ ID NO: 380956 - DNA, 33 bp, Homo sapien
tgtcaggacaagatcctattttggttagcaaag

SEQ ID NO: 380957 - DNA, 33 bp, Homo sapien
ttgttgaagaaatgaaaaaagtaactctcctgt

SEQ ID NO: 380958 - DNA, 33 bp, Homo sapien
ttgttgaagaaatgaacaaagtaactctcctgt

SEQ ID NO: 380959 - DNA, 33 bp, Homo sapien
gttaagatttttgctacgtaaatgtttatttct

SEQ ID NO: 380960 - DNA, 33 bp, Homo sapien
gttaagatttttgctatgtaaatgtttatttct

SEQ ID NO: 380961 - DNA, 33 bp, Homo sapien
ctgtctgaattaagtaagtgaatatgacaggcc

SEQ ID NO: 380962 - DNA, 33 bp, Homo sapien
ctgtctgaattaagtacgtgaatatgacaggcc

SEQ ID NO: 380963 - DNA, 33 bp, Homo sapien
ggagaggttacctcacagagattccacccacag

SEQ ID NO: 380964 - DNA, 33 bp, Homo sapien
ggagaggttacctcacggagattccacccacag

SEQ ID NO: 380965 - DNA, 33 bp, Homo sapien
aaaaagtctgccaaaactgatagaatcagcaca

SEQ ID NO: 380966 - DNA, 33 bp, Homo sapien
aaaaagtctgccaaaattgatagaatcagcaca

SEQ ID NO: 380967 - DNA, 33 bp, Homo sapien
catttattgaatagataagaatggttgaaataa

SEQ ID NO: 380968 - DNA, 33 bp, Homo sapien
catttattgaatagatgagaatggttgaaataa

SEQ ID NO: 380969 - DNA, 33 bp, Homo sapien
gtgcaatgatagaaccagaataaacaaataata

SEQ ID NO: 380970 - DNA, 33 bp, Homo sapien
gtgcaatgatagaaccggaataaacaaataata

SEQ ID NO: 380971 - DNA, 33 bp, Homo sapien
cacctaggggcacgtaaggtcactgttaacggt

SEQ ID NO: 380972 - DNA, 33 bp, Homo sapien
cacctaggggcacgtagggtcactgttaacggt

SEQ ID NO: 380973 - DNA, 33 bp, Homo sapien
actatctctagaaataacacctatcaaatacta

SEQ ID NO: 380974 - DNA, 33 bp, Homo sapien
actatctctagaaatagcacctatcaaatacta

SEQ ID NO: 380975 - DNA, 33 bp, Homo sapien
acaatagagattcatgaaagggcattgcagata

SEQ ID NO: 380976 - DNA, 33 bp, Homo sapien
acaatagagattcatgcaagggcattgcagata

SEQ ID NO: 380977 - DNA, 33 bp, Homo sapien
gcattctgcccattatcaactgcttttaacatt

SEQ ID NO: 380978 - DNA, 33 bp, Homo sapien
gcattctgcccattattaactgcttttaacatt

SEQ ID NO: 380979 - DNA, 33 bp, Homo sapien
cttcaaagagcaagggcaattgaagaatactat

SEQ ID NO: 380980 - DNA, 33 bp, Homo sapien
cttcaaagagcaagggtaattgaagaatactat

SEQ ID NO: 380981 - DNA, 33 bp, Homo sapien
ggtaggtatctcaaaacgaccataatattgaac

SEQ ID NO: 380982 - DNA, 33 bp, Homo sapien
ggtaggtatctcaaaatgaccataatattgaac

SEQ ID NO: 380983 - DNA, 33 bp, Homo sapien
gtcattcagtgctgagaaaaataagtgtggtct

SEQ ID NO: 380984 - DNA, 33 bp, Homo sapien
gtcattcagtgctgagcaaaataagtgtggtct

SEQ ID NO: 380985 - DNA, 33 bp, Homo sapien
aaatttcctctatcctcaaaattattttacaat

SEQ ID NO: 380986 - DNA, 33 bp, Homo sapien
aaatttcctctatcctgaaaattattttacaat

SEQ ID NO: 380987 - DNA, 33 bp, Homo sapien
ggattgtctggtgaaactgaggtccagcttatc

SEQ ID NO: 380988 - DNA, 33 bp, Homo sapien
ggattgtctggtgaaattgaggtccagcttatc

SEQ ID NO: 380989 - DNA, 33 bp, Homo sapien
ctacattcctgctgtcaactgaatcgtaatggg

SEQ ID NO: 380990 - DNA, 33 bp, Homo sapien
ctacattcctgctgtcgactgaatcgtaatggg

SEQ ID NO: 380991 - DNA, 33 bp, Homo sapien
tctataaatgttgaatccagaagtagcagctgt

SEQ ID NO: 380992 - DNA, 33 bp, Homo sapien
tctataaatgttgaattcagaagtagcagctgt

SEQ ID NO: 380993 - DNA, 33 bp, Homo sapien
tagttggaaatgataacaggacacaccagaagg

SEQ ID NO: 380994 - DNA, 33 bp, Homo sapien
tagttggaaatgataagaggacacaccagaagg

SEQ ID NO: 380995 - DNA, 33 bp, Homo sapien
ttagtgttatgatcccaaaatttccttcacatt

SEQ ID NO: 380996 - DNA, 33 bp, Homo sapien
ttagtgttatgatcccgaaatttccttcacatt

SEQ ID NO: 380997 - DNA, 33 bp, Homo sapien
tgttcaaccatttcagacaaacaagtttaatct

SEQ ID NO: 380998 - DNA, 33 bp, Homo sapien
tgttcaaccatttcaggcaaacaagtttaatct

SEQ ID NO: 380999 - DNA, 33 bp, Homo sapien
tgagaaattatagacaaccttacatagctgaac

SEQ ID NO: 381000 - DNA, 33 bp, Homo sapien
tgagaaattatagacagccttacatagctgaac

SEQ ID NO: 381001 - DNA, 33 bp, Homo sapien
ttatttctttggccaacgagaggcaatcttact

SEQ ID NO: 381002 - DNA, 33 bp, Homo sapien
ttatttctttggccaatgagaggcaatcttact

SEQ ID NO: 381003 - DNA, 33 bp, Homo sapien
ggagagtgacagaaaaacatatctctattctga

SEQ ID NO: 381004 - DNA, 33 bp, Homo sapien
ggagagtgacagaaaagcatatctctattctga

SEQ ID NO: 381005 - DNA, 33 bp, Homo sapien
actcccttatgtaactaaagtctgtactctacc

SEQ ID NO: 381006 - DNA, 33 bp, Homo sapien
actcccttatgtaacttaagtctgtactctacc

SEQ ID NO: 381007 - DNA, 33 bp, Homo sapien
caatcttagcttgcaaactgatccattaggcat

SEQ ID NO: 381008 - DNA, 33 bp, Homo sapien
caatcttagcttgcaacctgatccattaggcat

SEQ ID NO: 381009 - DNA, 33 bp, Homo sapien
gatcaaccgtgtttaaccatgcccaatgagggt

SEQ ID NO: 381010 - DNA, 33 bp, Homo sapien
gatcaaccgtgtttaagcatgcccaatgagggt

SEQ ID NO: 381011 - DNA, 33 bp, Homo sapien
atccactttggctcagaaaacatcataggcaat

SEQ ID NO: 381012 - DNA, 33 bp, Homo sapien
atccactttggctcaggaaacatcataggcaat

SEQ ID NO: 381013 - DNA, 33 bp, Homo sapien
cactgcctgatgtgcacaaaacagagtggcacg

SEQ ID NO: 381014 - DNA, 33 bp, Homo sapien
cactgcctgatgtgcataaaacagagtggcacg

SEQ ID NO: 381015 - DNA, 33 bp, Homo sapien
tcctttacaattgcaccggttgtgtaggcttta

SEQ ID NO: 381016 - DNA, 33 bp, Homo sapien
tcctttacaattgcacgggttgtgtaggcttta

SEQ ID NO: 381017 - DNA, 33 bp, Homo sapien
cccttacattaataccacactttacagattaca

SEQ ID NO: 381018 - DNA, 33 bp, Homo sapien
cccttacattaataccgcactttacagattaca

SEQ ID NO: 381019 - DNA, 33 bp, Homo sapien
tgtcacaagaggtgcaaagttagagataaccag

SEQ ID NO: 381020 - DNA, 33 bp, Homo sapien
tgtcacaagaggtgcacagttagagataaccag

SEQ ID NO: 381021 - DNA, 33 bp, Homo sapien
tccaactattcaaacaaaactgagatgcttgta

SEQ ID NO: 381022 - DNA, 33 bp, Homo sapien
tccaactattcaaacacaactgagatgcttgta

SEQ ID NO: 381023 - DNA, 33 bp, Homo sapien
gtttatgagtatttgcagattctccagctatct

SEQ ID NO: 381024 - DNA, 33 bp, Homo sapien
gtttatgagtatttgcggattctccagctatct

SEQ ID NO: 381025 - DNA, 33 bp, Homo sapien
cataaagattaacacaatggacaaatataacat

SEQ ID NO: 381026 - DNA, 33 bp, Homo sapien
cataaagattaacacagtggacaaatataacat

SEQ ID NO: 381027 - DNA, 33 bp, Homo sapien
ttgacaaatcttcccacgaactacagtttgtct

SEQ ID NO: 381028 - DNA, 33 bp, Homo sapien
ttgacaaatcttcccatgaactacagtttgtct

SEQ ID NO: 381029 - DNA, 33 bp, Homo sapien
agtcccttgatcttaaatgtagccttattgtct

SEQ ID NO: 381030 - DNA, 33 bp, Homo sapien
agtcccttgatcttaattgtagccttattgtct

SEQ ID NO: 381031 - DNA, 33 bp, Homo sapien
catagcttgaatgtggaatgcactttgagcagt

SEQ ID NO: 381032 - DNA, 33 bp, Homo sapien
catagcttgaatgtgggatgcactttgagcagt

SEQ ID NO: 381033 - DNA, 33 bp, Homo sapien
ctcaggctaactccccaattttacactctagtt

SEQ ID NO: 381034 - DNA, 33 bp, Homo sapien
ctcaggctaactccccgattttacactctagtt

SEQ ID NO: 381035 - DNA, 33 bp, Homo sapien
acagtagagccatgtacaaaagtgaattaaaag

SEQ ID NO: 381036 - DNA, 33 bp, Homo sapien
acagtagagccatgtataaaagtgaattaaaag

SEQ ID NO: 381037 - DNA, 33 bp, Homo sapien
taagtacgctgttaaaaaagatgatcaaattgt

SEQ ID NO: 381038 - DNA, 33 bp, Homo sapien
taagtacgctgttaaagaagatgatcaaattgt

SEQ ID NO: 381039 - DNA, 33 bp, Homo sapien
ttgaaagggtcatggaaatccagaactgcacac

SEQ ID NO: 381040 - DNA, 33 bp, Homo sapien
ttgaaagggtcatggagatccagaactgcacac

SEQ ID NO: 381041 - DNA, 33 bp, Homo sapien
gagccttatgtaaagacaatggttacgatttga

SEQ ID NO: 381042 - DNA, 33 bp, Homo sapien
gagccttatgtaaagagaatggttacgatttga

SEQ ID NO: 381043 - DNA, 33 bp, Homo sapien
agtatccatatggagcacactacatcagaactc

SEQ ID NO: 381044 - DNA, 33 bp, Homo sapien
agtatccatatggagcgcactacatcagaactc

SEQ ID NO: 381045 - DNA, 33 bp, Homo sapien
aaaggtgtgagaactaaatgaggaaacacaggc

SEQ ID NO: 381046 - DNA, 33 bp, Homo sapien
aaaggtgtgagaactagatgaggaaacacaggc

SEQ ID NO: 381047 - DNA, 33 bp, Homo sapien
aacaatcaaatactggccagagaaatagtatga

SEQ ID NO: 381048 - DNA, 33 bp, Homo sapien
aacaatcaaatactggtcagagaaatagtatga

SEQ ID NO: 381049 - DNA, 33 bp, Homo sapien
ataatacgaaggcaaaatctgttctgaaagtgc

SEQ ID NO: 381050 - DNA, 33 bp, Homo sapien
ataatacgaaggcaaattctgttctgaaagtgc

SEQ ID NO: 381051 - DNA, 33 bp, Homo sapien
ttatctccttctccacccacactgtagcatcac

SEQ ID NO: 381052 - DNA, 33 bp, Homo sapien
ttatctccttctccactcacactgtagcatcac

SEQ ID NO: 381053 - DNA, 33 bp, Homo sapien
ttgtaacaatctaacaatcttgctttatcttcc

SEQ ID NO: 381054 - DNA, 33 bp, Homo sapien
ttgtaacaatctaacagtcttgctttatcttcc

SEQ ID NO: 381055 - DNA, 33 bp, Homo sapien
ttgaagccctctagtgcaacatgatgtgacttt

SEQ ID NO: 381056 - DNA, 33 bp, Homo sapien
ttgaagccctctagtgtaacatgatgtgacttt

SEQ ID NO: 381057 - DNA, 33 bp, Homo sapien
taaaaagagccacatgcaatggactgtgaactt

SEQ ID NO: 381058 - DNA, 33 bp, Homo sapien
taaaaagagccacatggaatggactgtgaactt

SEQ ID NO: 381059 - DNA, 33 bp, Homo sapien
gtttgtatacaggaaactgctttgtgatctacg

SEQ ID NO: 381060 - DNA, 33 bp, Homo sapien
gtttgtatacaggaaattgctttgtgatctacg

SEQ ID NO: 381061 - DNA, 33 bp, Homo sapien
catggatatgcatacacaccatagcgtggatta

SEQ ID NO: 381062 - DNA, 33 bp, Homo sapien
catggatatgcatacataccatagcgtggatta

SEQ ID NO: 381063 - DNA, 33 bp, Homo sapien
tttttcttgcattcataaagtctggagataaag

SEQ ID NO: 381064 - DNA, 33 bp, Homo sapien
tttttcttgcattcatgaagtctggagataaag

SEQ ID NO: 381065 - DNA, 33 bp, Homo sapien
aagttttatggacataccctgaacatcttccat

SEQ ID NO: 381066 - DNA, 33 bp, Homo sapien
aagttttatggacatatcctgaacatcttccat

SEQ ID NO: 381067 - DNA, 33 bp, Homo sapien
atatatgttactggaaaggtagggtttgaacag

SEQ ID NO: 381068 - DNA, 33 bp, Homo sapien
atatatgttactggaatggtagggtttgaacag

SEQ ID NO: 381069 - DNA, 33 bp, Homo sapien
tacatctgtcaaatagaactcataattagcatt

SEQ ID NO: 381070 - DNA, 33 bp, Homo sapien
tacatctgtcaaataggactcataattagcatt

SEQ ID NO: 381071 - DNA, 33 bp, Homo sapien
taaatcagaaatctgcaaatagaagatgtgttt

SEQ ID NO: 381072 - DNA, 33 bp, Homo sapien
taaatcagaaatctgcgaatagaagatgtgttt

SEQ ID NO: 381073 - DNA, 33 bp, Homo sapien
gggaatctccatactcactgtattgaacaaaag

SEQ ID NO: 381074 - DNA, 33 bp, Homo sapien
gggaatctccatactcgctgtattgaacaaaag

SEQ ID NO: 381075 - DNA, 33 bp, Homo sapien
ccatcctatccttctacgtgatgaatttgggag

SEQ ID NO: 381076 - DNA, 33 bp, Homo sapien
ccatcctatccttctatgtgatgaatttgggag

SEQ ID NO: 381077 - DNA, 33 bp, Homo sapien
gaatgacgacaataaacacaattacagagctct

SEQ ID NO: 381078 - DNA, 33 bp, Homo sapien
gaatgacgacaataaatacaattacagagctct

SEQ ID NO: 381079 - DNA, 33 bp, Homo sapien
tgtcaactcttaggctcagaaatcaaatttggc

SEQ ID NO: 381080 - DNA, 33 bp, Homo sapien
tgtcaactcttaggctgagaaatcaaatttggc

SEQ ID NO: 381081 - DNA, 33 bp, Homo sapien
ataatgttttgtacacaagctgagttctaaagc

SEQ ID NO: 381082 - DNA, 33 bp, Homo sapien
ataatgttttgtacaccagctgagttctaaagc

SEQ ID NO: 381083 - DNA, 33 bp, Homo sapien
ccctgttatctaaatgaagatacgtgaatttta

SEQ ID NO: 381084 - DNA, 33 bp, Homo sapien
ccctgttatctaaatgcagatacgtgaatttta

SEQ ID NO: 381085 - DNA, 33 bp, Homo sapien
acacaatgttagttaaagtcaagaagcctatgt

SEQ ID NO: 381086 - DNA, 33 bp, Homo sapien
acacaatgttagttaaggtcaagaagcctatgt

SEQ ID NO: 381087 - DNA, 33 bp, Homo sapien
ttgaacatcacttatcactggtgcaatttaatt

SEQ ID NO: 381088 - DNA, 33 bp, Homo sapien
ttgaacatcacttatccctggtgcaatttaatt

SEQ ID NO: 381089 - DNA, 33 bp, Homo sapien
cattttacagacaaaaaaattgaggcccaaaaa

SEQ ID NO: 381090 - DNA, 33 bp, Homo sapien
cattttacagacaaaataattgaggcccaaaaa

SEQ ID NO: 381091 - DNA, 33 bp, Homo sapien
aattcagttcataagaagttcacattggtcttt

SEQ ID NO: 381092 - DNA, 33 bp, Homo sapien
aattcagttcataagaggttcacattggtcttt

SEQ ID NO: 381093 - DNA, 33 bp, Homo sapien
acctgtttatgtactacggccctatggagggtc

SEQ ID NO: 381094 - DNA, 33 bp, Homo sapien
acctgtttatgtactatggccctatggagggtc

SEQ ID NO: 381095 - DNA, 33 bp, Homo sapien
tttgtcctcttgtgcacgtaccatgatgtctag

SEQ ID NO: 381096 - DNA, 33 bp, Homo sapien
tttgtcctcttgtgcatgtaccatgatgtctag

SEQ ID NO: 381097 - DNA, 33 bp, Homo sapien
gaaaagacctaatggacaaatggaagaatccat

SEQ ID NO: 381098 - DNA, 33 bp, Homo sapien
gaaaagacctaatggagaaatggaagaatccat

SEQ ID NO: 381099 - DNA, 33 bp, Homo sapien
catacctgattgaaccaaactgtgagccctaga

SEQ ID NO: 381100 - DNA, 33 bp, Homo sapien
catacctgattgaaccgaactgtgagccctaga

SEQ ID NO: 381101 - DNA, 33 bp, Homo sapien
ccaaaattaatccagaaaatgtgtctatatata

SEQ ID NO: 381102 - DNA, 33 bp, Homo sapien
ccaaaattaatccagagaatgtgtctatatata

SEQ ID NO: 381103 - DNA, 33 bp, Homo sapien
aaagatcagttattgacgacgtttgtgaagttt

SEQ ID NO: 381104 - DNA, 33 bp, Homo sapien
aaagatcagttattgatgacgtttgtgaagttt

SEQ ID NO: 381105 - DNA, 33 bp, Homo sapien
tcctggcctgaaagaaacagattttgcaactta

SEQ ID NO: 381106 - DNA, 33 bp, Homo sapien
tcctggcctgaaagaaccagattttgcaactta

SEQ ID NO: 381107 - DNA, 33 bp, Homo sapien
tatcctgctttataacagagacctggtgaaaga

SEQ ID NO: 381108 - DNA, 33 bp, Homo sapien
tatcctgctttataacggagacctggtgaaaga

SEQ ID NO: 381109 - DNA, 33 bp, Homo sapien
tttctgttgtgtaaaccatgcagtgtatggcat

SEQ ID NO: 381110 - DNA, 33 bp, Homo sapien
tttctgttgtgtaaactatgcagtgtatggcat

SEQ ID NO: 381111 - DNA, 33 bp, Homo sapien
gctttctgagcatctacaaaattttgaacgcct

SEQ ID NO: 381112 - DNA, 33 bp, Homo sapien
gctttctgagcatctataaaattttgaacgcct

SEQ ID NO: 381113 - DNA, 33 bp, Homo sapien
gccagatggaatacccaacgacaatctcctgca

SEQ ID NO: 381114 - DNA, 33 bp, Homo sapien
gccagatggaatacccgacgacaatctcctgca

SEQ ID NO: 381115 - DNA, 33 bp, Homo sapien
ctttgtttcaaatggaaattagcaagtgttaga

SEQ ID NO: 381116 - DNA, 33 bp, Homo sapien
ctttgtttcaaatggatattagcaagtgttaga

SEQ ID NO: 381117 - DNA, 33 bp, Homo sapien
caaagctctgaacctaagggaagcttttttctt

SEQ ID NO: 381118 - DNA, 33 bp, Homo sapien
caaagctctgaacctaggggaagcttttttctt

SEQ ID NO: 381119 - DNA, 33 bp, Homo sapien
tcgctggactcctaccaaccaaactatctgaaa

SEQ ID NO: 381120 - DNA, 33 bp, Homo sapien
tcgctggactcctacccaccaaactatctgaaa

SEQ ID NO: 381121 - DNA, 33 bp, Homo sapien
agagaactgaaatgaacgtcaggatttggagag

SEQ ID NO: 381122 - DNA, 33 bp, Homo sapien
agagaactgaaatgaatgtcaggatttggagag

SEQ ID NO: 381123 - DNA, 33 bp, Homo sapien
attcatttgcctggtacgggagaaatctgcaca

SEQ ID NO: 381124 - DNA, 33 bp, Homo sapien
attcatttgcctggtatgggagaaatctgcaca

SEQ ID NO: 381125 - DNA, 33 bp, Homo sapien
catgggtatgattcaccattgctggtcaagata

SEQ ID NO: 381126 - DNA, 33 bp, Homo sapien
catgggtatgattcactattgctggtcaagata

SEQ ID NO: 381127 - DNA, 33 bp, Homo sapien
cttttcaaagtcagaaataaagtggagaataga

SEQ ID NO: 381128 - DNA, 33 bp, Homo sapien
cttttcaaagtcagaagtaaagtggagaataga

SEQ ID NO: 381129 - DNA, 33 bp, Homo sapien
gtcattggaagcagacactacttgaggtccaca

SEQ ID NO: 381130 - DNA, 33 bp, Homo sapien
gtcattggaagcagacgctacttgaggtccaca

SEQ ID NO: 381131 - DNA, 33 bp, Homo sapien
atagtaattgcaaaaaacaatttgatgaacgtt

SEQ ID NO: 381132 - DNA, 33 bp, Homo sapien
atagtaattgcaaaaaccaatttgatgaacgtt

SEQ ID NO: 381133 - DNA, 33 bp, Homo sapien
acctttggtctctacaaacactttttcaccatt

SEQ ID NO: 381134 - DNA, 33 bp, Homo sapien
acctttggtctctacatacactttttcaccatt

SEQ ID NO: 381135 - DNA, 33 bp, Homo sapien
gggagtttcataattccgaatggctattagaaa

SEQ ID NO: 381136 - DNA, 33 bp, Homo sapien
gggagtttcataattctgaatggctattagaaa

SEQ ID NO: 381137 - DNA, 33 bp, Homo sapien
cagcctgctgatacaaataattgacaagtctta

SEQ ID NO: 381138 - DNA, 33 bp, Homo sapien
cagcctgctgatacaagtaattgacaagtctta

SEQ ID NO: 381139 - DNA, 33 bp, Homo sapien
acagatgtcaggactaccagttgtggaaaggaa

SEQ ID NO: 381140 - DNA, 33 bp, Homo sapien
acagatgtcaggactatcagttgtggaaaggaa

SEQ ID NO: 381141 - DNA, 33 bp, Homo sapien
aagcaggtcatcccaacgagtgtccaactctca

SEQ ID NO: 381142 - DNA, 33 bp, Homo sapien
aagcaggtcatcccaatgagtgtccaactctca

SEQ ID NO: 381143 - DNA, 33 bp, Homo sapien
gtaccttgagttcatcaagtttttcattattat

SEQ ID NO: 381144 - DNA, 33 bp, Homo sapien
gtaccttgagttcatcgagtttttcattattat

SEQ ID NO: 381145 - DNA, 33 bp, Homo sapien
gacagagatgcacaaagaactggagagcattaa

SEQ ID NO: 381146 - DNA, 33 bp, Homo sapien
gacagagatgcacaaataactggagagcattaa

SEQ ID NO: 381147 - DNA, 33 bp, Homo sapien
gtttttaggtaaatcacgtgaagctgtatatat

SEQ ID NO: 381148 - DNA, 33 bp, Homo sapien
gtttttaggtaaatcatgtgaagctgtatatat

SEQ ID NO: 381149 - DNA, 33 bp, Homo sapien
gtatttagataacagaaaattagacaggtagaa

SEQ ID NO: 381150 - DNA, 33 bp, Homo sapien
gtatttagataacagataattagacaggtagaa

SEQ ID NO: 381151 - DNA, 33 bp, Homo sapien
atctatacatattgacaggtgtataggataatg

SEQ ID NO: 381152 - DNA, 33 bp, Homo sapien
atctatacatattgacgggtgtataggataatg

SEQ ID NO: 381153 - DNA, 33 bp, Homo sapien
gggatatttttagtgagaaagtggactaagaaa

SEQ ID NO: 381154 - DNA, 33 bp, Homo sapien
gggatatttttagtgataaagtggactaagaaa

SEQ ID NO: 381155 - DNA, 33 bp, Homo sapien
tttgtaacgtctcatacataggtttgatatttg

SEQ ID NO: 381156 - DNA, 33 bp, Homo sapien
tttgtaacgtctcatatataggtttgatatttg

SEQ ID NO: 381157 - DNA, 33 bp, Homo sapien
tattttcagctttattaaaaaaaaggagtgttt

SEQ ID NO: 381158 - DNA, 33 bp, Homo sapien
tattttcagctttatttaaaaaaaggagtgttt

SEQ ID NO: 381159 - DNA, 33 bp, Homo sapien
ttaagccttcttaaaacgtccttttgtttgaaa

SEQ ID NO: 381160 - DNA, 33 bp, Homo sapien
ttaagccttcttaaaatgtccttttgtttgaaa

SEQ ID NO: 381161 - DNA, 33 bp, Homo sapien
atatatgatgctttccaatagtgaaactgacct

SEQ ID NO: 381162 - DNA, 33 bp, Homo sapien
atatatgatgctttcctatagtgaaactgacct

SEQ ID NO: 381163 - DNA, 33 bp, Homo sapien
atggagttgaaaaataactgaatccatcttcat

SEQ ID NO: 381164 - DNA, 33 bp, Homo sapien
atggagttgaaaaatagctgaatccatcttcat

SEQ ID NO: 381165 - DNA, 33 bp, Homo sapien
gtttaacagataaccacgtaatacaaattgttt

SEQ ID NO: 381166 - DNA, 33 bp, Homo sapien
gtttaacagataaccaggtaatacaaattgttt

SEQ ID NO: 381167 - DNA, 33 bp, Homo sapien
gaagagtcattcttaacatggtctaatatattt

SEQ ID NO: 381168 - DNA, 33 bp, Homo sapien
gaagagtcattcttaatatggtctaatatattt

SEQ ID NO: 381169 - DNA, 33 bp, Homo sapien
gatgaactatcacttccatgactgtgtatatta

SEQ ID NO: 381170 - DNA, 33 bp, Homo sapien
gatgaactatcacttctatgactgtgtatatta

SEQ ID NO: 381171 - DNA, 33 bp, Homo sapien
aatgttgtattaaaagacttatggttggaaata

SEQ ID NO: 381172 - DNA, 33 bp, Homo sapien
aatgttgtattaaaagtcttatggttggaaata

SEQ ID NO: 381173 - DNA, 33 bp, Homo sapien
tcaattctcagttataccttgatagcatatttt

SEQ ID NO: 381174 - DNA, 33 bp, Homo sapien
tcaattctcagttatatcttgatagcatatttt

SEQ ID NO: 381175 - DNA, 33 bp, Homo sapien
gctgtgactgatgtgacggttcttgaaactatt

SEQ ID NO: 381176 - DNA, 33 bp, Homo sapien
gctgtgactgatgtgatggttcttgaaactatt

SEQ ID NO: 381177 - DNA, 33 bp, Homo sapien
tctctgaaaaacctccagcaaatggcttacctt

SEQ ID NO: 381178 - DNA, 33 bp, Homo sapien
tctctgaaaaacctccggcaaatggcttacctt

SEQ ID NO: 381179 - DNA, 33 bp, Homo sapien
ttatcattattttcatcagctgaacagcacccc

SEQ ID NO: 381180 - DNA, 33 bp, Homo sapien
ttatcattattttcattagctgaacagcacccc

SEQ ID NO: 381181 - DNA, 33 bp, Homo sapien
ttttgataagcactcaatacagtaggagatgta

SEQ ID NO: 381182 - DNA, 33 bp, Homo sapien
ttttgataagcactcagtacagtaggagatgta

SEQ ID NO: 381183 - DNA, 33 bp, Homo sapien
gtgcacaatctttttacggtgataatcgtttta

SEQ ID NO: 381184 - DNA, 33 bp, Homo sapien
gtgcacaatctttttatggtgataatcgtttta

SEQ ID NO: 381185 - DNA, 33 bp, Homo sapien
aatgaaccaactaatgaagatgtattctccctg

SEQ ID NO: 381186 - DNA, 33 bp, Homo sapien
aatgaaccaactaatgcagatgtattctccctg

SEQ ID NO: 381187 - DNA, 33 bp, Homo sapien
acgtgtcaactcttcacgtatgtggcccaaatg

SEQ ID NO: 381188 - DNA, 33 bp, Homo sapien
acgtgtcaactcttcatgtatgtggcccaaatg

SEQ ID NO: 381189 - DNA, 33 bp, Homo sapien
agagctctgtggtggaaaacatgactttgcatg

SEQ ID NO: 381190 - DNA, 33 bp, Homo sapien
agagctctgtggtggagaacatgactttgcatg

SEQ ID NO: 381191 - DNA, 33 bp, Homo sapien
aacattgtaatgaaagacacaaagcacagatag

SEQ ID NO: 381192 - DNA, 33 bp, Homo sapien
aacattgtaatgaaagccacaaagcacagatag

SEQ ID NO: 381193 - DNA, 33 bp, Homo sapien
gaatgcttctaagaaccaatttcgtaacatttc

SEQ ID NO: 381194 - DNA, 33 bp, Homo sapien
gaatgcttctaagaactaatttcgtaacatttc

SEQ ID NO: 381195 - DNA, 33 bp, Homo sapien
tggaagctttttgaagcataaacatttggatac

SEQ ID NO: 381196 - DNA, 33 bp, Homo sapien
tggaagctttttgaagtataaacatttggatac

SEQ ID NO: 381197 - DNA, 33 bp, Homo sapien
atttgctttaagtaagcagatttttgacgttgc

SEQ ID NO: 381198 - DNA, 33 bp, Homo sapien
atttgctttaagtaagtagatttttgacgttgc

SEQ ID NO: 381199 - DNA, 33 bp, Homo sapien
attaaacaggggcatcacatgatcttatttgca

SEQ ID NO: 381200 - DNA, 33 bp, Homo sapien
attaaacaggggcatcgcatgatcttatttgca

SEQ ID NO: 381201 - DNA, 33 bp, Homo sapien
caagacattaaacaaacgagccaaatgtacaag

SEQ ID NO: 381202 - DNA, 33 bp, Homo sapien
caagacattaaacaaaggagccaaatgtacaag

SEQ ID NO: 381203 - DNA, 33 bp, Homo sapien
ttagatagtatgctcacgattttacggttaagg

SEQ ID NO: 381204 - DNA, 33 bp, Homo sapien
ttagatagtatgctcatgattttacggttaagg

SEQ ID NO: 381205 - DNA, 33 bp, Homo sapien
tgaggtcttgctgatacgtgttggcaacccctc

SEQ ID NO: 381206 - DNA, 33 bp, Homo sapien
tgaggtcttgctgatatgtgttggcaacccctc

SEQ ID NO: 381207 - DNA, 33 bp, Homo sapien
tcatttaagggaggcaacaatgttaagaataac

SEQ ID NO: 381208 - DNA, 33 bp, Homo sapien
tcatttaagggaggcaccaatgttaagaataac

SEQ ID NO: 381209 - DNA, 33 bp, Homo sapien
tataaattattgacgccaatacctccctgtctg

SEQ ID NO: 381210 - DNA, 33 bp, Homo sapien
tataaattattgacgctaatacctccctgtctg

SEQ ID NO: 381211 - DNA, 33 bp, Homo sapien
acaacaacggatattaaccctgcttactctgtc

SEQ ID NO: 381212 - DNA, 33 bp, Homo sapien
acaacaacggatattagccctgcttactctgtc

SEQ ID NO: 381213 - DNA, 33 bp, Homo sapien
gttatggttattgagacatctaggctttctgtt

SEQ ID NO: 381214 - DNA, 33 bp, Homo sapien
gttatggttattgagagatctaggctttctgtt

SEQ ID NO: 381215 - DNA, 33 bp, Homo sapien
attagggtcatataaagttcctatagccattag

SEQ ID NO: 381216 - DNA, 33 bp, Homo sapien
attagggtcatataaatttcctatagccattag

SEQ ID NO: 381217 - DNA, 33 bp, Homo sapien
agatcaaaaagattgaagattttgcctaaaatt

SEQ ID NO: 381218 - DNA, 33 bp, Homo sapien
agatcaaaaagattgaggattttgcctaaaatt

SEQ ID NO: 381219 - DNA, 33 bp, Homo sapien
tccactgcctttttaccctgaagcttgagtatc

SEQ ID NO: 381220 - DNA, 33 bp, Homo sapien
tccactgcctttttactctgaagcttgagtatc

SEQ ID NO: 381221 - DNA, 33 bp, Homo sapien
cttacatttccttatgcatcaattgtctatctt

SEQ ID NO: 381222 - DNA, 33 bp, Homo sapien
cttacatttccttatgtatcaattgtctatctt

SEQ ID NO: 381223 - DNA, 33 bp, Homo sapien
tcacacaaccgaactaactcatgatattttcat

SEQ ID NO: 381224 - DNA, 33 bp, Homo sapien
tcacacaaccgaactatctcatgatattttcat

SEQ ID NO: 381225 - DNA, 33 bp, Homo sapien
tcaagtggcactaataaaaaataataataacat

SEQ ID NO: 381226 - DNA, 33 bp, Homo sapien
tcaagtggcactaatacaaaataataataacat

SEQ ID NO: 381227 - DNA, 33 bp, Homo sapien
attggaggctctgtataataagactaagctcaa

SEQ ID NO: 381228 - DNA, 33 bp, Homo sapien
attggaggctctgtatgataagactaagctcaa

SEQ ID NO: 381229 - DNA, 33 bp, Homo sapien
agactcagtagctgaacacttgtgcttatgcaa

SEQ ID NO: 381230 - DNA, 33 bp, Homo sapien
agactcagtagctgaagacttgtgcttatgcaa

SEQ ID NO: 381231 - DNA, 33 bp, Homo sapien
atacaaaaaacacaaacaggattccagtttagc

SEQ ID NO: 381232 - DNA, 33 bp, Homo sapien
atacaaaaaacacaaagaggattccagtttagc

SEQ ID NO: 381233 - DNA, 33 bp, Homo sapien
atatggttggaaaatcagatcctaggtgtaatg

SEQ ID NO: 381234 - DNA, 33 bp, Homo sapien
atatggttggaaaatcggatcctaggtgtaatg

SEQ ID NO: 381235 - DNA, 33 bp, Homo sapien
tatgtttgccagtctccataacattatttaggg

SEQ ID NO: 381236 - DNA, 33 bp, Homo sapien
tatgtttgccagtctctataacattatttaggg

SEQ ID NO: 381237 - DNA, 33 bp, Homo sapien
tgcattgtttttgataaagcagaatggatttat

SEQ ID NO: 381238 - DNA, 33 bp, Homo sapien
tgcattgtttttgatatagcagaatggatttat

SEQ ID NO: 381239 - DNA, 33 bp, Homo sapien
tttggggggctaagaaaatatttgaattggttt

SEQ ID NO: 381240 - DNA, 33 bp, Homo sapien
tttggggggctaagaagatatttgaattggttt

SEQ ID NO: 381241 - DNA, 33 bp, Homo sapien
gcctcttctcactaccaggcaattccccttcca

SEQ ID NO: 381242 - DNA, 33 bp, Homo sapien
gcctcttctcactaccgggcaattccccttcca

SEQ ID NO: 381243 - DNA, 33 bp, Homo sapien
taacctccacaaagaactgctccacaggctgat

SEQ ID NO: 381244 - DNA, 33 bp, Homo sapien
taacctccacaaagaagtgctccacaggctgat

SEQ ID NO: 381245 - DNA, 33 bp, Homo sapien
atcctattgttcaaagcatttttaagtagaatt

SEQ ID NO: 381246 - DNA, 33 bp, Homo sapien
atcctattgttcaaagtatttttaagtagaatt

SEQ ID NO: 381247 - DNA, 33 bp, Homo sapien
cacctttatgcaacagaaagctccaccacaggc

SEQ ID NO: 381248 - DNA, 33 bp, Homo sapien
cacctttatgcaacagcaagctccaccacaggc

SEQ ID NO: 381249 - DNA, 33 bp, Homo sapien
tactatgtgccgtatacgctgctaatttcaagg

SEQ ID NO: 381250 - DNA, 33 bp, Homo sapien
tactatgtgccgtatatgctgctaatttcaagg

SEQ ID NO: 381251 - DNA, 33 bp, Homo sapien
gccaatcctaagggaaggtccaactgcagctct

SEQ ID NO: 381252 - DNA, 33 bp, Homo sapien
gccaatcctaagggaatgtccaactgcagctct

SEQ ID NO: 381253 - DNA, 33 bp, Homo sapien
ccttaggattggcttcacttcaggactggcagc

SEQ ID NO: 381254 - DNA, 33 bp, Homo sapien
ccttaggattggcttcccttcaggactggcagc

SEQ ID NO: 381255 - DNA, 33 bp, Homo sapien
tttcagatgtcagataagccttccaaccttcac

SEQ ID NO: 381256 - DNA, 33 bp, Homo sapien
tttcagatgtcagatatgccttccaaccttcac

SEQ ID NO: 381257 - DNA, 33 bp, Homo sapien
agtcagggatgctcaaatgtagccctggtgatt

SEQ ID NO: 381258 - DNA, 33 bp, Homo sapien
agtcagggatgctcaattgtagccctggtgatt

SEQ ID NO: 381259 - DNA, 33 bp, Homo sapien
tagcacatagctaaaaagttcatagtttggaca

SEQ ID NO: 381260 - DNA, 33 bp, Homo sapien
tagcacatagctaaaatgttcatagtttggaca

SEQ ID NO: 381261 - DNA, 33 bp, Homo sapien
cccgaaaatgggcaaacaattttggaactgggt

SEQ ID NO: 381262 - DNA, 33 bp, Homo sapien
cccgaaaatgggcaaataattttggaactgggt

SEQ ID NO: 381263 - DNA, 33 bp, Homo sapien
attaaactgctttgaagtatatttcttgtgtgc

SEQ ID NO: 381264 - DNA, 33 bp, Homo sapien
attaaactgctttgaattatatttcttgtgtgc

SEQ ID NO: 381265 - DNA, 33 bp, Homo sapien
gctaaaatgtctgaaacgtaggtttgagcaggg

SEQ ID NO: 381266 - DNA, 33 bp, Homo sapien
gctaaaatgtctgaaatgtaggtttgagcaggg

SEQ ID NO: 381267 - DNA, 33 bp, Homo sapien
tttaggcagccagaaaaggtgaaagtactctgt

SEQ ID NO: 381268 - DNA, 33 bp, Homo sapien
tttaggcagccagaaagggtgaaagtactctgt

SEQ ID NO: 381269 - DNA, 33 bp, Homo sapien
aaccattttattaagaatctgccacaggaaatt

SEQ ID NO: 381270 - DNA, 33 bp, Homo sapien
aaccattttattaagattctgccacaggaaatt

SEQ ID NO: 381271 - DNA, 33 bp, Homo sapien
tttaagctatgcgaagaacatttgtattctccc

SEQ ID NO: 381272 - DNA, 33 bp, Homo sapien
tttaagctatgcgaaggacatttgtattctccc

SEQ ID NO: 381273 - DNA, 33 bp, Homo sapien
tctcgagagcatgaaacggggagagactgtctc

SEQ ID NO: 381274 - DNA, 33 bp, Homo sapien
tctcgagagcatgaaagggggagagactgtctc

SEQ ID NO: 381275 - DNA, 33 bp, Homo sapien
tctattccttgctacagccgatataaaaaatcc

SEQ ID NO: 381276 - DNA, 33 bp, Homo sapien
tctattccttgctacatccgatataaaaaatcc

SEQ ID NO: 381277 - DNA, 33 bp, Homo sapien
aaatctccaacccatccgaaacgatttaaaagc

SEQ ID NO: 381278 - DNA, 33 bp, Homo sapien
aaatctccaacccatctgaaacgatttaaaagc

SEQ ID NO: 381279 - DNA, 33 bp, Homo sapien
gtcccgtatgctgaaacgatgcaacaagctctc

SEQ ID NO: 381280 - DNA, 33 bp, Homo sapien
gtcccgtatgctgaaatgatgcaacaagctctc

SEQ ID NO: 381281 - DNA, 33 bp, Homo sapien
tcaaaacgtcaaagtcacaacagtagagagtag

SEQ ID NO: 381282 - DNA, 33 bp, Homo sapien
tcaaaacgtcaaagtcccaacagtagagagtag

SEQ ID NO: 381283 - DNA, 33 bp, Homo sapien
ataatctttgaggagaactgaattccacattgt

SEQ ID NO: 381284 - DNA, 33 bp, Homo sapien
ataatctttgaggagagctgaattccacattgt

SEQ ID NO: 381285 - DNA, 33 bp, Homo sapien
atcaatttttggccagacctggtagctcactcc

SEQ ID NO: 381286 - DNA, 33 bp, Homo sapien
atcaatttttggccaggcctggtagctcactcc

SEQ ID NO: 381287 - DNA, 33 bp, Homo sapien
aggcaggcagagataaaagacatcatgaaattg

SEQ ID NO: 381288 - DNA, 33 bp, Homo sapien
aggcaggcagagataagagacatcatgaaattg

SEQ ID NO: 381289 - DNA, 33 bp, Homo sapien
ggtcttctccacatggcattggctaaagtttct

SEQ ID NO: 381290 - DNA, 33 bp, Homo sapien
ggtcttctccacatggtattggctaaagtttct

SEQ ID NO: 381291 - DNA, 33 bp, Homo sapien
catcaaatctctggcagaaatggcaaaacagga

SEQ ID NO: 381292 - DNA, 33 bp, Homo sapien
catcaaatctctggcataaatggcaaaacagga

SEQ ID NO: 381293 - DNA, 33 bp, Homo sapien
ctagagcctgagtctgcagatgtaatcctggaa

SEQ ID NO: 381294 - DNA, 33 bp, Homo sapien
ctagagcctgagtctgtagatgtaatcctggaa

SEQ ID NO: 381295 - DNA, 33 bp, Homo sapien
ccattagcaacaaacacggtctttccatttgta

SEQ ID NO: 381296 - DNA, 33 bp, Homo sapien
ccattagcaacaaacatggtctttccatttgta

SEQ ID NO: 381297 - DNA, 33 bp, Homo sapien
tttctttatggtctctcagacgttttccattat

SEQ ID NO: 381298 - DNA, 33 bp, Homo sapien
tttctttatggtctcttagacgttttccattat

SEQ ID NO: 381299 - DNA, 33 bp, Homo sapien
tttctgtctctatcaccgaatggtaagtcatat

SEQ ID NO: 381300 - DNA, 33 bp, Homo sapien
tttctgtctctatcactgaatggtaagtcatat

SEQ ID NO: 381301 - DNA, 33 bp, Homo sapien
aatctggtgcaataaaaggaaaagttctaaatc

SEQ ID NO: 381302 - DNA, 33 bp, Homo sapien
aatctggtgcaataaagggaaaagttctaaatc

SEQ ID NO: 381303 - DNA, 33 bp, Homo sapien
acttgcctgaaacacaatgaattggactctcac

SEQ ID NO: 381304 - DNA, 33 bp, Homo sapien
acttgcctgaaacacagtgaattggactctcac

SEQ ID NO: 381305 - DNA, 33 bp, Homo sapien
ctgcaggtgagggaaggacaaaaagagactaag

SEQ ID NO: 381306 - DNA, 33 bp, Homo sapien
ctgcaggtgagggaagtacaaaaagagactaag

SEQ ID NO: 381307 - DNA, 33 bp, Homo sapien
ttcttgcctacctaaccgaggcattgttaactc

SEQ ID NO: 381308 - DNA, 33 bp, Homo sapien
ttcttgcctacctaactgaggcattgttaactc

SEQ ID NO: 381309 - DNA, 33 bp, Homo sapien
tcccattttggataataacattcataatcaccc

SEQ ID NO: 381310 - DNA, 33 bp, Homo sapien
tcccattttggataatgacattcataatcaccc

SEQ ID NO: 381311 - DNA, 33 bp, Homo sapien
gacaatttcacaatgacgctttttagtatagcc

SEQ ID NO: 381312 - DNA, 33 bp, Homo sapien
gacaatttcacaatgatgctttttagtatagcc

SEQ ID NO: 381313 - DNA, 33 bp, Homo sapien
tgtgttcagagcatgaaaggttccgtggtaggc

SEQ ID NO: 381314 - DNA, 33 bp, Homo sapien
tgtgttcagagcatgataggttccgtggtaggc

SEQ ID NO: 381315 - DNA, 33 bp, Homo sapien
agaacttcagcaagaacacaaagattataggat

SEQ ID NO: 381316 - DNA, 33 bp, Homo sapien
agaacttcagcaagaagacaaagattataggat

SEQ ID NO: 381317 - DNA, 33 bp, Homo sapien
aaacgtttactccagaactagtttaatcattat

SEQ ID NO: 381318 - DNA, 33 bp, Homo sapien
aaacgtttactccagatctagtttaatcattat

SEQ ID NO: 381319 - DNA, 33 bp, Homo sapien
tgtacagagataactgcaacagctggtacatcc

SEQ ID NO: 381320 - DNA, 33 bp, Homo sapien
tgtacagagataactggaacagctggtacatcc

SEQ ID NO: 381321 - DNA, 33 bp, Homo sapien
tttaactgtgaggctaaatgtggactagcaatt

SEQ ID NO: 381322 - DNA, 33 bp, Homo sapien
tttaactgtgaggctagatgtggactagcaatt

SEQ ID NO: 381323 - DNA, 33 bp, Homo sapien
caacttttattttttccatcaagatttcacata

SEQ ID NO: 381324 - DNA, 33 bp, Homo sapien
caacttttattttttctatcaagatttcacata

SEQ ID NO: 381325 - DNA, 33 bp, Homo sapien
tatctccacctttacagatgcactgactcttgt

SEQ ID NO: 381326 - DNA, 33 bp, Homo sapien
tatctccacctttacatatgcactgactcttgt

SEQ ID NO: 381327 - DNA, 33 bp, Homo sapien
attggcagcagttagaaaatgaggtaaggaaat

SEQ ID NO: 381328 - DNA, 33 bp, Homo sapien
attggcagcagttagagaatgaggtaaggaaat

SEQ ID NO: 381329 - DNA, 33 bp, Homo sapien
agacattttagacctcaaaattaaagagatgga

SEQ ID NO: 381330 - DNA, 33 bp, Homo sapien
agacattttagacctcgaaattaaagagatgga

SEQ ID NO: 381331 - DNA, 33 bp, Homo sapien
acaatgtgttaatttacgttcattgattgtaac

SEQ ID NO: 381332 - DNA, 33 bp, Homo sapien
acaatgtgttaatttatgttcattgattgtaac

SEQ ID NO: 381333 - DNA, 33 bp, Homo sapien
attctctttctcaaaactatcggccatcttgac

SEQ ID NO: 381334 - DNA, 33 bp, Homo sapien
attctctttctcaaaattatcggccatcttgac

SEQ ID NO: 381335 - DNA, 33 bp, Homo sapien
gttattgggcagaaacccttaagagaccatttc

SEQ ID NO: 381336 - DNA, 33 bp, Homo sapien
gttattgggcagaaactcttaagagaccatttc

SEQ ID NO: 381337 - DNA, 33 bp, Homo sapien
ataagtggttaagaaacgtggatatacatcact

SEQ ID NO: 381338 - DNA, 33 bp, Homo sapien
ataagtggttaagaaatgtggatatacatcact

SEQ ID NO: 381339 - DNA, 33 bp, Homo sapien
tgactattagcaaatacgatgctataattaatc

SEQ ID NO: 381340 - DNA, 33 bp, Homo sapien
tgactattagcaaatatgatgctataattaatc

SEQ ID NO: 381341 - DNA, 33 bp, Homo sapien
tatggaattgaaaataagggaaagctaaatgag

SEQ ID NO: 381342 - DNA, 33 bp, Homo sapien
tatggaattgaaaataggggaaagctaaatgag

SEQ ID NO: 381343 - DNA, 33 bp, Homo sapien
gttttgcatataaataaggaccgctaaaaatcg

SEQ ID NO: 381344 - DNA, 33 bp, Homo sapien
gttttgcatataaatacggaccgctaaaaatcg

SEQ ID NO: 381345 - DNA, 33 bp, Homo sapien
gaagagtgcaatattcccaaggatagatgaaag

SEQ ID NO: 381346 - DNA, 33 bp, Homo sapien
gaagagtgcaatattctcaaggatagatgaaag

SEQ ID NO: 381347 - DNA, 33 bp, Homo sapien
atgtggtacatatacaataaggaatactatgca

SEQ ID NO: 381348 - DNA, 33 bp, Homo sapien
atgtggtacatatacactaaggaatactatgca

SEQ ID NO: 381349 - DNA, 33 bp, Homo sapien
aattgttcttctcagaccaattgctatggccag

SEQ ID NO: 381350 - DNA, 33 bp, Homo sapien
aattgttcttctcagatcaattgctatggccag

SEQ ID NO: 381351 - DNA, 33 bp, Homo sapien
ataaggcttttctaaactccattagaagctgga

SEQ ID NO: 381352 - DNA, 33 bp, Homo sapien
ataaggcttttctaaagtccattagaagctgga

SEQ ID NO: 381353 - DNA, 33 bp, Homo sapien
ctgcctttcagttctgcattataaatattaaca

SEQ ID NO: 381354 - DNA, 33 bp, Homo sapien
ctgcctttcagttctggattataaatattaaca

SEQ ID NO: 381355 - DNA, 33 bp, Homo sapien
gtccaattatgtggtcaactttaaagtatgtgc

SEQ ID NO: 381356 - DNA, 33 bp, Homo sapien
gtccaattatgtggtcgactttaaagtatgtgc

SEQ ID NO: 381357 - DNA, 33 bp, Homo sapien
cagactggcacctgcagtaaacgtctgatagta

SEQ ID NO: 381358 - DNA, 33 bp, Homo sapien
cagactggcacctgcattaaacgtctgatagta

SEQ ID NO: 381359 - DNA, 33 bp, Homo sapien
attcacataggctaagaacaggatcttactatg

SEQ ID NO: 381360 - DNA, 33 bp, Homo sapien
attcacataggctaaggacaggatcttactatg

SEQ ID NO: 381361 - DNA, 33 bp, Homo sapien
ggcttggtttggaaaaaaatccatcacgagatg

SEQ ID NO: 381362 - DNA, 33 bp, Homo sapien
ggcttggtttggaaaagaatccatcacgagatg

SEQ ID NO: 381363 - DNA, 33 bp, Homo sapien
tccaatgggagaatccaatgtaaaccactggag

SEQ ID NO: 381364 - DNA, 33 bp, Homo sapien
tccaatgggagaatccgatgtaaaccactggag

SEQ ID NO: 381365 - DNA, 33 bp, Homo sapien
atatatgaattactaagtaggacaactccaatg

SEQ ID NO: 381366 - DNA, 33 bp, Homo sapien
atatatgaattactaattaggacaactccaatg

SEQ ID NO: 381367 - DNA, 33 bp, Homo sapien
cacaaggagctctacaactaaaatcaagcaact

SEQ ID NO: 381368 - DNA, 33 bp, Homo sapien
cacaaggagctctacagctaaaatcaagcaact

SEQ ID NO: 381369 - DNA, 33 bp, Homo sapien
atctcaagctgttatacgtctagtgtccaggat

SEQ ID NO: 381370 - DNA, 33 bp, Homo sapien
atctcaagctgttataggtctagtgtccaggat

SEQ ID NO: 381371 - DNA, 33 bp, Homo sapien
ttctcactttcttgtcccgggagaatgaaattt

SEQ ID NO: 381372 - DNA, 33 bp, Homo sapien
ttctcactttcttgtctcgggagaatgaaattt

SEQ ID NO: 381373 - DNA, 33 bp, Homo sapien
gaatgactagcttatcactttcttcggtgagac

SEQ ID NO: 381374 - DNA, 33 bp, Homo sapien
gaatgactagcttatccctttcttcggtgagac

SEQ ID NO: 381375 - DNA, 33 bp, Homo sapien
catttgttatgggcaaaaggctgggccagactg

SEQ ID NO: 381376 - DNA, 33 bp, Homo sapien
catttgttatgggcaagaggctgggccagactg

SEQ ID NO: 381377 - DNA, 33 bp, Homo sapien
agcaatggaaacattcacaaaatcttttctcca

SEQ ID NO: 381378 - DNA, 33 bp, Homo sapien
agcaatggaaacattcgcaaaatcttttctcca

SEQ ID NO: 381379 - DNA, 33 bp, Homo sapien
gcctaggtggttgttacgttaacttgaattgtg

SEQ ID NO: 381380 - DNA, 33 bp, Homo sapien
gcctaggtggttgttatgttaacttgaattgtg

SEQ ID NO: 381381 - DNA, 33 bp, Homo sapien
gatatatagtggtcataacaacactgtactcat

SEQ ID NO: 381382 - DNA, 33 bp, Homo sapien
gatatatagtggtcattacaacactgtactcat

SEQ ID NO: 381383 - DNA, 33 bp, Homo sapien
aggaatgtattcaccaacagattaaaaccagca

SEQ ID NO: 381384 - DNA, 33 bp, Homo sapien
aggaatgtattcaccaccagattaaaaccagca

SEQ ID NO: 381385 - DNA, 33 bp, Homo sapien
tgttctaaactttgggcatcatctctacaatac

SEQ ID NO: 381386 - DNA, 33 bp, Homo sapien
tgttctaaactttggggatcatctctacaatac

SEQ ID NO: 381387 - DNA, 33 bp, Homo sapien
gaagagaagaaaccaaacccttggtcattattg

SEQ ID NO: 381388 - DNA, 33 bp, Homo sapien
gaagagaagaaaccaagcccttggtcattattg

SEQ ID NO: 381389 - DNA, 33 bp, Homo sapien
tatgaattcaaagacaaggatgggtatagcaat

SEQ ID NO: 381390 - DNA, 33 bp, Homo sapien
tatgaattcaaagacagggatgggtatagcaat

SEQ ID NO: 381391 - DNA, 33 bp, Homo sapien
gtcttagtgaaaataactctttggtatgtgatc

SEQ ID NO: 381392 - DNA, 33 bp, Homo sapien
gtcttagtgaaaataagtctttggtatgtgatc

SEQ ID NO: 381393 - DNA, 33 bp, Homo sapien
atgccttctatgaaccacaagatggccctcaac

SEQ ID NO: 381394 - DNA, 33 bp, Homo sapien
atgccttctatgaaccgcaagatggccctcaac

SEQ ID NO: 381395 - DNA, 33 bp, Homo sapien
tgctcacaccttgtgcggactcttgtggctcta

SEQ ID NO: 381396 - DNA, 33 bp, Homo sapien
tgctcacaccttgtgctgactcttgtggctcta

SEQ ID NO: 381397 - DNA, 33 bp, Homo sapien
attaaaaagtatgcaacgtacctccccacttag

SEQ ID NO: 381398 - DNA, 33 bp, Homo sapien
attaaaaagtatgcaatgtacctccccacttag

SEQ ID NO: 381399 - DNA, 33 bp, Homo sapien
ttacagagctttttgaaaaattgcaatcctatg

SEQ ID NO: 381400 - DNA, 33 bp, Homo sapien
ttacagagctttttgataaattgcaatcctatg

SEQ ID NO: 381401 - DNA, 33 bp, Homo sapien
tacctcaatccaggtacggtgctgtaattgatg

SEQ ID NO: 381402 - DNA, 33 bp, Homo sapien
tacctcaatccaggtatggtgctgtaattgatg

SEQ ID NO: 381403 - DNA, 33 bp, Homo sapien
tgcagaagaaacataacacctagtgctggtaag

SEQ ID NO: 381404 - DNA, 33 bp, Homo sapien
tgcagaagaaacataatacctagtgctggtaag

SEQ ID NO: 381405 - DNA, 33 bp, Homo sapien
catggaaggagagggtcaagttagtggttcagt

SEQ ID NO: 381406 - DNA, 33 bp, Homo sapien
catggaaggagagggtgaagttagtggttcagt

SEQ ID NO: 381407 - DNA, 33 bp, Homo sapien
atggcctctctttgtcaccttttacaatgattg

SEQ ID NO: 381408 - DNA, 33 bp, Homo sapien
atggcctctctttgtctccttttacaatgattg

SEQ ID NO: 381409 - DNA, 33 bp, Homo sapien
ggtgctaaccaaaaccgccttttctctcttact

SEQ ID NO: 381410 - DNA, 33 bp, Homo sapien
ggtgctaaccaaaacctccttttctctcttact

SEQ ID NO: 381411 - DNA, 33 bp, Homo sapien
ttcttcctttgcatcacataacatcctatgcct

SEQ ID NO: 381412 - DNA, 33 bp, Homo sapien
ttcttcctttgcatcatataacatcctatgcct

SEQ ID NO: 381413 - DNA, 33 bp, Homo sapien
ttgtaacagttatgaagtgtggtttgtggtttt

SEQ ID NO: 381414 - DNA, 33 bp, Homo sapien
ttgtaacagttatgaattgtggtttgtggtttt

SEQ ID NO: 381415 - DNA, 33 bp, Homo sapien
catgtacatcaaggcaacccaaccttctcttgg

SEQ ID NO: 381416 - DNA, 33 bp, Homo sapien
catgtacatcaaggcagcccaaccttctcttgg

SEQ ID NO: 381417 - DNA, 33 bp, Homo sapien
tggactttgttagaaccatcaaggaagaggtgc

SEQ ID NO: 381418 - DNA, 33 bp, Homo sapien
tggactttgttagaactatcaaggaagaggtgc

SEQ ID NO: 381419 - DNA, 33 bp, Homo sapien
agcaataatgtcaatgaaatcaagggctgctct

SEQ ID NO: 381420 - DNA, 33 bp, Homo sapien
agcaataatgtcaatgtaatcaagggctgctct

SEQ ID NO: 381421 - DNA, 33 bp, Homo sapien
aaatgagacacacaaaaaagatgacctttccaa

SEQ ID NO: 381422 - DNA, 33 bp, Homo sapien
aaatgagacacacaaagaagatgacctttccaa

SEQ ID NO: 381423 - DNA, 33 bp, Homo sapien
tactgcttacctaaaaactagtccagggtctct

SEQ ID NO: 381424 - DNA, 33 bp, Homo sapien
tactgcttacctaaaatctagtccagggtctct

SEQ ID NO: 381425 - DNA, 33 bp, Homo sapien
catccttatctgaaaaattgtgtcaactgtgat

SEQ ID NO: 381426 - DNA, 33 bp, Homo sapien
catccttatctgaaaagttgtgtcaactgtgat

SEQ ID NO: 381427 - DNA, 33 bp, Homo sapien
tatctattgaatgaaaacaaatatactgatgag

SEQ ID NO: 381428 - DNA, 33 bp, Homo sapien
tatctattgaatgaaagcaaatatactgatgag

SEQ ID NO: 381429 - DNA, 33 bp, Homo sapien
cttgttattttgtatcaatgacaactctttaaa

SEQ ID NO: 381430 - DNA, 33 bp, Homo sapien
cttgttattttgtatcgatgacaactctttaaa

SEQ ID NO: 381431 - DNA, 33 bp, Homo sapien
aagctccatgaattcactcgaggtaggaccaag

SEQ ID NO: 381432 - DNA, 33 bp, Homo sapien
aagctccatgaattcattcgaggtaggaccaag

SEQ ID NO: 381433 - DNA, 33 bp, Homo sapien
caagaagttcacagtcccacagaggtcaaagtg

SEQ ID NO: 381434 - DNA, 33 bp, Homo sapien
caagaagttcacagtctcacagaggtcaaagtg

SEQ ID NO: 381435 - DNA, 33 bp, Homo sapien
tggcaactgtgctaagcagctttatgaatggaa

SEQ ID NO: 381436 - DNA, 33 bp, Homo sapien
tggcaactgtgctaagtagctttatgaatggaa

SEQ ID NO: 381437 - DNA, 33 bp, Homo sapien
atgatgatgtagcccaatgaggaaatatatgag

SEQ ID NO: 381438 - DNA, 33 bp, Homo sapien
atgatgatgtagcccagtgaggaaatatatgag

SEQ ID NO: 381439 - DNA, 33 bp, Homo sapien
caaaaataggtggtgaaaaaaaagatgaagaac

SEQ ID NO: 381440 - DNA, 33 bp, Homo sapien
caaaaataggtggtgagaaaaaagatgaagaac

SEQ ID NO: 381441 - DNA, 33 bp, Homo sapien
acttccactctgtaaacgtgtgattcaagcccc

SEQ ID NO: 381442 - DNA, 33 bp, Homo sapien
acttccactctgtaaatgtgtgattcaagcccc

SEQ ID NO: 381443 - DNA, 33 bp, Homo sapien
agctaatgacaaaaataagagggtgataagaag

SEQ ID NO: 381444 - DNA, 33 bp, Homo sapien
agctaatgacaaaaatgagagggtgataagaag

SEQ ID NO: 381445 - DNA, 33 bp, Homo sapien
gaggaaattggaggcaatgcaagacaaagtgac

SEQ ID NO: 381446 - DNA, 33 bp, Homo sapien
gaggaaattggaggcactgcaagacaaagtgac

SEQ ID NO: 381447 - DNA, 33 bp, Homo sapien
tggatggggaattttacagtcaagaggttctgg

SEQ ID NO: 381448 - DNA, 33 bp, Homo sapien
tggatggggaattttagagtcaagaggttctgg

SEQ ID NO: 381449 - DNA, 33 bp, Homo sapien
gaaagcgtttgtaaagaagagccagataagatt

SEQ ID NO: 381450 - DNA, 33 bp, Homo sapien
gaaagcgtttgtaaaggagagccagataagatt

SEQ ID NO: 381451 - DNA, 33 bp, Homo sapien
ttctcccctagtcaaagagcctgtggacctccc

SEQ ID NO: 381452 - DNA, 33 bp, Homo sapien
ttctcccctagtcaaatagcctgtggacctccc

SEQ ID NO: 381453 - DNA, 33 bp, Homo sapien
ttttatctcaagtgaacctggagaagcaacaat

SEQ ID NO: 381454 - DNA, 33 bp, Homo sapien
ttttatctcaagtgaatctggagaagcaacaat

SEQ ID NO: 381455 - DNA, 33 bp, Homo sapien
ccgttgtgatttcaaacgattccataccatctc

SEQ ID NO: 381456 - DNA, 33 bp, Homo sapien
ccgttgtgatttcaaatgattccataccatctc

SEQ ID NO: 381457 - DNA, 33 bp, Homo sapien
atgatctgtacaaggacaatttcgaaacactgc

SEQ ID NO: 381458 - DNA, 33 bp, Homo sapien
atgatctgtacaaggagaatttcgaaacactgc

SEQ ID NO: 381459 - DNA, 33 bp, Homo sapien
ttaggtcctgcttgtcaatttttatttttgttg

SEQ ID NO: 381460 - DNA, 33 bp, Homo sapien
ttaggtcctgcttgtccatttttatttttgttg

SEQ ID NO: 381461 - DNA, 33 bp, Homo sapien
aacatcaatgagcccgcaaaggtgagaataatg

SEQ ID NO: 381462 - DNA, 33 bp, Homo sapien
aacatcaatgagcccgtaaaggtgagaataatg

SEQ ID NO: 381463 - DNA, 33 bp, Homo sapien
cccaatcttcattcagccaagtttccttaatga

SEQ ID NO: 381464 - DNA, 33 bp, Homo sapien
cccaatcttcattcagtcaagtttccttaatga

SEQ ID NO: 381465 - DNA, 33 bp, Homo sapien
gtaaagcttttagaacagtagctaaggaaaaga

SEQ ID NO: 381466 - DNA, 33 bp, Homo sapien
gtaaagcttttagaacggtagctaaggaaaaga

SEQ ID NO: 381467 - DNA, 33 bp, Homo sapien
caatatacctccaataagtagactgttctcaaa

SEQ ID NO: 381468 - DNA, 33 bp, Homo sapien
caatatacctccaatatgtagactgttctcaaa

SEQ ID NO: 381469 - DNA, 33 bp, Homo sapien
agaatgagatatggtaagctgcattgccaggag

SEQ ID NO: 381470 - DNA, 33 bp, Homo sapien
agaatgagatatggtaggctgcattgccaggag

SEQ ID NO: 381471 - DNA, 33 bp, Homo sapien
tactgtagcttagtgagtaaaagtttgctctta

SEQ ID NO: 381472 - DNA, 33 bp, Homo sapien
tactgtagcttagtgattaaaagtttgctctta

SEQ ID NO: 381473 - DNA, 33 bp, Homo sapien
ggaactgtaggaaggcagccagacgataaatat

SEQ ID NO: 381474 - DNA, 33 bp, Homo sapien
ggaactgtaggaaggcggccagacgataaatat

SEQ ID NO: 381475 - DNA, 33 bp, Homo sapien
gaggcagttggtcaagaaagacttagtggataa

SEQ ID NO: 381476 - DNA, 33 bp, Homo sapien
gaggcagttggtcaaggaagacttagtggataa

SEQ ID NO: 381477 - DNA, 33 bp, Homo sapien
attccatcacctcccccattgattcactctcga

SEQ ID NO: 381478 - DNA, 33 bp, Homo sapien
attccatcacctccccgattgattcactctcga

SEQ ID NO: 381479 - DNA, 33 bp, Homo sapien
atgagtactaggttcaaagccgacctctgccct

SEQ ID NO: 381480 - DNA, 33 bp, Homo sapien
atgagtactaggttcatagccgacctctgccct

SEQ ID NO: 381481 - DNA, 33 bp, Homo sapien
tctctctcactgaatgacagaaaccttaggcta

SEQ ID NO: 381482 - DNA, 33 bp, Homo sapien
tctctctcactgaatggcagaaaccttaggcta

SEQ ID NO: 381483 - DNA, 33 bp, Homo sapien
gccttcccaaatagacagtatgttcttggaaag

SEQ ID NO: 381484 - DNA, 33 bp, Homo sapien
gccttcccaaatagacggtatgttcttggaaag

SEQ ID NO: 381485 - DNA, 33 bp, Homo sapien
ttcctcaaggagtttacggtcaggtaactgcat

SEQ ID NO: 381486 - DNA, 33 bp, Homo sapien
ttcctcaaggagtttatggtcaggtaactgcat

SEQ ID NO: 381487 - DNA, 33 bp, Homo sapien
aggagctgaatgttccacagacacaacttaatc

SEQ ID NO: 381488 - DNA, 33 bp, Homo sapien
aggagctgaatgttccgcagacacaacttaatc

SEQ ID NO: 381489 - DNA, 33 bp, Homo sapien
actgttcagtaaatataagtcaataccatcagg

SEQ ID NO: 381490 - DNA, 33 bp, Homo sapien
actgttcagtaaatatgagtcaataccatcagg

SEQ ID NO: 381491 - DNA, 33 bp, Homo sapien
ctgtgcaagacacaaagcaacaatcttaaacat

SEQ ID NO: 381492 - DNA, 33 bp, Homo sapien
ctgtgcaagacacaaatcaacaatcttaaacat

SEQ ID NO: 381493 - DNA, 33 bp, Homo sapien
agcatctttctgccagaaggacctgagagcaag

SEQ ID NO: 381494 - DNA, 33 bp, Homo sapien
agcatctttctgccaggaggacctgagagcaag

SEQ ID NO: 381495 - DNA, 33 bp, Homo sapien
cttagccacagctttaacaacagccatgaataa

SEQ ID NO: 381496 - DNA, 33 bp, Homo sapien
cttagccacagctttagcaacagccatgaataa

SEQ ID NO: 381497 - DNA, 33 bp, Homo sapien
gtgtaggaagaagaagacagcactcactgacta

SEQ ID NO: 381498 - DNA, 33 bp, Homo sapien
gtgtaggaagaagaaggcagcactcactgacta

SEQ ID NO: 381499 - DNA, 33 bp, Homo sapien
tgactgcctggctgtaagcaatgtataatccag

SEQ ID NO: 381500 - DNA, 33 bp, Homo sapien
tgactgcctggctgtaggcaatgtataatccag

SEQ ID NO: 381501 - DNA, 33 bp, Homo sapien
ttgttggaaacatagacgtgatttgtagtgtga

SEQ ID NO: 381502 - DNA, 33 bp, Homo sapien
ttgttggaaacatagatgtgatttgtagtgtga

SEQ ID NO: 381503 - DNA, 33 bp, Homo sapien
ggaaactagagggaaccgctattccattctttt

SEQ ID NO: 381504 - DNA, 33 bp, Homo sapien
ggaaactagagggaactgctattccattctttt

SEQ ID NO: 381505 - DNA, 33 bp, Homo sapien
atcattatagtccctaacgtcaaaatgctaata

SEQ ID NO: 381506 - DNA, 33 bp, Homo sapien
atcattatagtccctaccgtcaaaatgctaata

SEQ ID NO: 381507 - DNA, 33 bp, Homo sapien
aagacagaattacaagcattggtggcatacaaa

SEQ ID NO: 381508 - DNA, 33 bp, Homo sapien
aagacagaattacaagtattggtggcatacaaa

SEQ ID NO: 381509 - DNA, 33 bp, Homo sapien
atggacgtatgcttgcaataaaatgttaagagg

SEQ ID NO: 381510 - DNA, 33 bp, Homo sapien
atggacgtatgcttgcgataaaatgttaagagg

SEQ ID NO: 381511 - DNA, 33 bp, Homo sapien
acagactactatatgccaaaattgcttaagtca

SEQ ID NO: 381512 - DNA, 33 bp, Homo sapien
acagactactatatgctaaaattgcttaagtca

SEQ ID NO: 381513 - DNA, 33 bp, Homo sapien
aaccctttaattcaccaatccaataaaactggg

SEQ ID NO: 381514 - DNA, 33 bp, Homo sapien
aaccctttaattcacccatccaataaaactggg

SEQ ID NO: 381515 - DNA, 33 bp, Homo sapien
gtgataactcaacaaaccaagctgctttcaaca

SEQ ID NO: 381516 - DNA, 33 bp, Homo sapien
gtgataactcaacaaatcaagctgctttcaaca

SEQ ID NO: 381517 - DNA, 33 bp, Homo sapien
gatggcgattattacaacaatgatgaaaaaata

SEQ ID NO: 381518 - DNA, 33 bp, Homo sapien
gatggcgattattacagcaatgatgaaaaaata

SEQ ID NO: 381519 - DNA, 33 bp, Homo sapien
tgtaacaccttaataacgatggcgattattaca

SEQ ID NO: 381520 - DNA, 33 bp, Homo sapien
tgtaacaccttaataatgatggcgattattaca

SEQ ID NO: 381521 - DNA, 33 bp, Homo sapien
tagcgaattatggagaagatgtaagatttaaat

SEQ ID NO: 381522 - DNA, 33 bp, Homo sapien
tagcgaattatggagaggatgtaagatttaaat

SEQ ID NO: 381523 - DNA, 33 bp, Homo sapien
gctttaatgagtagacaattgaaagttgattac

SEQ ID NO: 381524 - DNA, 33 bp, Homo sapien
gctttaatgagtagacgattgaaagttgattac

SEQ ID NO: 381525 - DNA, 33 bp, Homo sapien
tgcacccatcaatgccaagagttcctatgtatt

SEQ ID NO: 381526 - DNA, 33 bp, Homo sapien
tgcacccatcaatgccgagagttcctatgtatt

SEQ ID NO: 381527 - DNA, 33 bp, Homo sapien
ggttctgtaaagaacaaagtaagaatgatgtcc

SEQ ID NO: 381528 - DNA, 33 bp, Homo sapien
ggttctgtaaagaacagagtaagaatgatgtcc

SEQ ID NO: 381529 - DNA, 33 bp, Homo sapien
ttaattcacccaaataaattaattcattcaaaa

SEQ ID NO: 381530 - DNA, 33 bp, Homo sapien
ttaattcacccaaatacattaattcattcaaaa

SEQ ID NO: 381531 - DNA, 33 bp, Homo sapien
gaagtttaggtgtccaaacggagctttctcatt

SEQ ID NO: 381532 - DNA, 33 bp, Homo sapien
gaagtttaggtgtccagacggagctttctcatt

SEQ ID NO: 381533 - DNA, 33 bp, Homo sapien
tcctttcattcaagccacatttgcttctgttgt

SEQ ID NO: 381534 - DNA, 33 bp, Homo sapien
tcctttcattcaagccgcatttgcttctgttgt

SEQ ID NO: 381535 - DNA, 33 bp, Homo sapien
tctttcagtaaaaaagccagagtcctggaaatt

SEQ ID NO: 381536 - DNA, 33 bp, Homo sapien
tctttcagtaaaaaagtcagagtcctggaaatt

SEQ ID NO: 381537 - DNA, 33 bp, Homo sapien
aatttggcagtgatcaaatgaaaaagtgaagcc

SEQ ID NO: 381538 - DNA, 33 bp, Homo sapien
aatttggcagtgatcagatgaaaaagtgaagcc

SEQ ID NO: 381539 - DNA, 33 bp, Homo sapien
tgtctatgtccataggaataaaaaatataggag

SEQ ID NO: 381540 - DNA, 33 bp, Homo sapien
tgtctatgtccataggcataaaaaatataggag

SEQ ID NO: 381541 - DNA, 33 bp, Homo sapien
gctcaaccaatattcacggaacacctactatat

SEQ ID NO: 381542 - DNA, 33 bp, Homo sapien
gctcaaccaatattcatggaacacctactatat

SEQ ID NO: 381543 - DNA, 33 bp, Homo sapien
caagggaatagggatggacgtaaacatggttca

SEQ ID NO: 381544 - DNA, 33 bp, Homo sapien
caagggaatagggatgtacgtaaacatggttca

SEQ ID NO: 381545 - DNA, 33 bp, Homo sapien
ttttgtgactgaacataagtaatatttgagaga

SEQ ID NO: 381546 - DNA, 33 bp, Homo sapien
ttttgtgactgaacatcagtaatatttgagaga

SEQ ID NO: 381547 - DNA, 33 bp, Homo sapien
acttgagtcttcacgccatcatgagtaggagct

SEQ ID NO: 381548 - DNA, 33 bp, Homo sapien
acttgagtcttcacgctatcatgagtaggagct

SEQ ID NO: 381549 - DNA, 33 bp, Homo sapien
tgacctctcaggtcctcaatgtcataatctctg

SEQ ID NO: 381550 - DNA, 33 bp, Homo sapien
tgacctctcaggtccttaatgtcataatctctg

SEQ ID NO: 381551 - DNA, 33 bp, Homo sapien
tgtctatacaatttaccgagcccctcctctttc

SEQ ID NO: 381552 - DNA, 33 bp, Homo sapien
tgtctatacaatttactgagcccctcctctttc

SEQ ID NO: 381553 - DNA, 33 bp, Homo sapien
acaactcgatgatagacatttaatgcactacac

SEQ ID NO: 381554 - DNA, 33 bp, Homo sapien
acaactcgatgatagatatttaatgcactacac

SEQ ID NO: 381555 - DNA, 33 bp, Homo sapien
gaaagggagcagaatacaatctaagctggccgg

SEQ ID NO: 381556 - DNA, 33 bp, Homo sapien
gaaagggagcagaatagaatctaagctggccgg

SEQ ID NO: 381557 - DNA, 33 bp, Homo sapien
taaagaaggatttttcaaagcctggaatacaaa

SEQ ID NO: 381558 - DNA, 33 bp, Homo sapien
taaagaaggatttttccaagcctggaatacaaa

SEQ ID NO: 381559 - DNA, 33 bp, Homo sapien
cacaaaagagtaagcaacaggcttaagagtctt

SEQ ID NO: 381560 - DNA, 33 bp, Homo sapien
cacaaaagagtaagcatcaggcttaagagtctt

SEQ ID NO: 381561 - DNA, 33 bp, Homo sapien
atgtctctcataagtgaaaaaccattatcaatc

SEQ ID NO: 381562 - DNA, 33 bp, Homo sapien
atgtctctcataagtggaaaaccattatcaatc

SEQ ID NO: 381563 - DNA, 33 bp, Homo sapien
ggaattttgggaaataaccagctagcgtaagag

SEQ ID NO: 381564 - DNA, 33 bp, Homo sapien
ggaattttgggaaatacccagctagcgtaagag

SEQ ID NO: 381565 - DNA, 33 bp, Homo sapien
cttgaggccaagctaaacattgctactggcctt

SEQ ID NO: 381566 - DNA, 33 bp, Homo sapien
cttgaggccaagctaagcattgctactggcctt

SEQ ID NO: 381567 - DNA, 33 bp, Homo sapien
aatttaatcgagtatacagcttgccagtttata

SEQ ID NO: 381568 - DNA, 33 bp, Homo sapien
aatttaatcgagtatatagcttgccagtttata

SEQ ID NO: 381569 - DNA, 33 bp, Homo sapien
ccagggtttcatctacaataatgttaatactca

SEQ ID NO: 381570 - DNA, 33 bp, Homo sapien
ccagggtttcatctacgataatgttaatactca

SEQ ID NO: 381571 - DNA, 33 bp, Homo sapien
tgggttaaaatgtgaaataaataagtgaacaaa

SEQ ID NO: 381572 - DNA, 33 bp, Homo sapien
tgggttaaaatgtgaactaaataagtgaacaaa

SEQ ID NO: 381573 - DNA, 33 bp, Homo sapien
ataaactcgcaataagaaaaacagactttattt

SEQ ID NO: 381574 - DNA, 33 bp, Homo sapien
ataaactcgcaataaggaaaacagactttattt

SEQ ID NO: 381575 - DNA, 33 bp, Homo sapien
ctgggcaaagggaaaccaaactattctaagaga

SEQ ID NO: 381576 - DNA, 33 bp, Homo sapien
ctgggcaaagggaaacgaaactattctaagaga

SEQ ID NO: 381577 - DNA, 33 bp, Homo sapien
taaatggatgtcaaaactgttggaatggatgag

SEQ ID NO: 381578 - DNA, 33 bp, Homo sapien
taaatggatgtcaaaattgttggaatggatgag

SEQ ID NO: 381579 - DNA, 33 bp, Homo sapien
ctaagtcactgttgtaccctagcaagttatttc

SEQ ID NO: 381580 - DNA, 33 bp, Homo sapien
ctaagtcactgttgtagcctagcaagttatttc

SEQ ID NO: 381581 - DNA, 33 bp, Homo sapien
tttcaggcctgattaacaccgcataaaatcgag

SEQ ID NO: 381582 - DNA, 33 bp, Homo sapien
tttcaggcctgattaataccgcataaaatcgag

SEQ ID NO: 381583 - DNA, 33 bp, Homo sapien
ggttctagaaaagtcagtcgaagggacagggca

SEQ ID NO: 381584 - DNA, 33 bp, Homo sapien
ggttctagaaaagtcattcgaagggacagggca

SEQ ID NO: 381585 - DNA, 33 bp, Homo sapien
ccaaccttcatcaaaacctcacattccagtagt

SEQ ID NO: 381586 - DNA, 33 bp, Homo sapien
ccaaccttcatcaaaatctcacattccagtagt

SEQ ID NO: 381587 - DNA, 33 bp, Homo sapien
gcatagggtaaatgctacttaactggtagttac

SEQ ID NO: 381588 - DNA, 33 bp, Homo sapien
gcatagggtaaatgcttcttaactggtagttac

SEQ ID NO: 381589 - DNA, 33 bp, Homo sapien
aaagccaactctcttgaaattaacaaataaaca

SEQ ID NO: 381590 - DNA, 33 bp, Homo sapien
aaagccaactctcttgcaattaacaaataaaca

SEQ ID NO: 381591 - DNA, 33 bp, Homo sapien
tgatgtacaggtgttcaaaatagcatgtaccag

SEQ ID NO: 381592 - DNA, 33 bp, Homo sapien
tgatgtacaggtgttcgaaatagcatgtaccag

SEQ ID NO: 381593 - DNA, 33 bp, Homo sapien
cacatcaggctgtggacatagaccagagtcagc

SEQ ID NO: 381594 - DNA, 33 bp, Homo sapien
cacatcaggctgtggagatagaccagagtcagc

SEQ ID NO: 381595 - DNA, 33 bp, Homo sapien
ttagtatcataactagaatcctgtaagtgctca

SEQ ID NO: 381596 - DNA, 33 bp, Homo sapien
ttagtatcataactagtatcctgtaagtgctca

SEQ ID NO: 381597 - DNA, 33 bp, Homo sapien
tttatctaaactacaaacaaagaacaatagctt

SEQ ID NO: 381598 - DNA, 33 bp, Homo sapien
tttatctaaactacaagcaaagaacaatagctt

SEQ ID NO: 381599 - DNA, 33 bp, Homo sapien
acctcaaactgtacccagatctttatatcatag

SEQ ID NO: 381600 - DNA, 33 bp, Homo sapien
acctcaaactgtacccggatctttatatcatag

SEQ ID NO: 381601 - DNA, 33 bp, Homo sapien
agagttgtaggtgcaaacaattggaagcaacca

SEQ ID NO: 381602 - DNA, 33 bp, Homo sapien
agagttgtaggtgcaagcaattggaagcaacca

SEQ ID NO: 381603 - DNA, 33 bp, Homo sapien
gtaaatgttagctttaaaattgtatcgatattt

SEQ ID NO: 381604 - DNA, 33 bp, Homo sapien
gtaaatgttagctttagaattgtatcgatattt

SEQ ID NO: 381605 - DNA, 33 bp, Homo sapien
gagtgtctgtcttgaactggactgggatggcca

SEQ ID NO: 381606 - DNA, 33 bp, Homo sapien
gagtgtctgtcttgaattggactgggatggcca

SEQ ID NO: 381607 - DNA, 33 bp, Homo sapien
agctaagtactgtagcgctcttcatccactcct

SEQ ID NO: 381608 - DNA, 33 bp, Homo sapien
agctaagtactgtagctctcttcatccactcct

SEQ ID NO: 381609 - DNA, 33 bp, Homo sapien
agttgactaccataccagccaattaggttctaa

SEQ ID NO: 381610 - DNA, 33 bp, Homo sapien
agttgactaccataccggccaattaggttctaa

SEQ ID NO: 381611 - DNA, 33 bp, Homo sapien
tcatcactggcttcacaaggaaaggctcagcca

SEQ ID NO: 381612 - DNA, 33 bp, Homo sapien
tcatcactggcttcacgaggaaaggctcagcca

SEQ ID NO: 381613 - DNA, 33 bp, Homo sapien
acaaaccagcaaggaaaatatacaggtctttaa

SEQ ID NO: 381614 - DNA, 33 bp, Homo sapien
acaaaccagcaaggaagatatacaggtctttaa

SEQ ID NO: 381615 - DNA, 33 bp, Homo sapien
aatgccctcaaagtaccgacagcaccatcttgc

SEQ ID NO: 381616 - DNA, 33 bp, Homo sapien
aatgccctcaaagtacggacagcaccatcttgc

SEQ ID NO: 381617 - DNA, 33 bp, Homo sapien
cttaatacctgtgtgacaaaaataatctgtaca

SEQ ID NO: 381618 - DNA, 33 bp, Homo sapien
cttaatacctgtgtgagaaaaataatctgtaca

SEQ ID NO: 381619 - DNA, 33 bp, Homo sapien; identical to SEQ ID NO: 381617

SEQ ID NO: 381620 - DNA, 33 bp, Homo sapien; identical to SEQ ID NO: 381618

SEQ ID NO: 381621 - DNA, 33 bp, Homo sapien
cctagagaaataatacaactatttgaggccatt

SEQ ID NO: 381622 - DNA, 33 bp, Homo sapien
cctagagaaataatacgactatttgaggccatt

SEQ ID NO: 381623 - DNA, 33 bp, Homo sapien
gcaaccattcagagcaatagtaccttggacatg

SEQ ID NO: 381624 - DNA, 33 bp, Homo sapien
gcaaccattcagagcagtagtaccttggacatg

SEQ ID NO: 381625 - DNA, 33 bp, Homo sapien
tgggcagctgtaggtgaaacagtgaattcaact

SEQ ID NO: 381626 - DNA, 33 bp, Homo sapien
tgggcagctgtaggtggaacagtgaattcaact

SEQ ID NO: 381627 - DNA, 33 bp, Homo sapien
cctggcagtgttctggacacatacgcacattaa

SEQ ID NO: 381628 - DNA, 33 bp, Homo sapien
cctggcagtgttctgggcacatacgcacattaa

SEQ ID NO: 381629 - DNA, 33 bp, Homo sapien
aaaggaaatacagaacaggtagtgaaagaaggt

SEQ ID NO: 381630 - DNA, 33 bp, Homo sapien
aaaggaaatacagaacgggtagtgaaagaaggt

SEQ ID NO: 381631 - DNA, 33 bp, Homo sapien
ataatatctcataccagtaggtttacccaataa

SEQ ID NO: 381632 - DNA, 33 bp, Homo sapien
ataatatctcataccattaggtttacccaataa

SEQ ID NO: 381633 - DNA, 33 bp, Homo sapien
tccactaggtgtaagaaacttttataagccaca

SEQ ID NO: 381634 - DNA, 33 bp, Homo sapien
tccactaggtgtaagacacttttataagccaca

SEQ ID NO: 381635 - DNA, 33 bp, Homo sapien
atttctgctttacgtacagagttatggttttgc

SEQ ID NO: 381636 - DNA, 33 bp, Homo sapien
atttctgctttacgtatagagttatggttttgc

SEQ ID NO: 381637 - DNA, 33 bp, Homo sapien
gatcattgtcagtttacgtctcacccagtattg

SEQ ID NO: 381638 - DNA, 33 bp, Homo sapien
gatcattgtcagtttatgtctcacccagtattg

SEQ ID NO: 381639 - DNA, 33 bp, Homo sapien
atggaagcaggaattacgtctgttttttgctgt

SEQ ID NO: 381640 - DNA, 33 bp, Homo sapien
atggaagcaggaattatgtctgttttttgctgt

SEQ ID NO: 381641 - DNA, 33 bp, Homo sapien
tctggacctagacagacaacctgttagcagatt

SEQ ID NO: 381642 - DNA, 33 bp, Homo sapien
tctggacctagacagagaacctgttagcagatt

SEQ ID NO: 381643 - DNA, 33 bp, Homo sapien
agttcctgcctcaataaggttcactagaatcag

SEQ ID NO: 381644 - DNA, 33 bp, Homo sapien
agttcctgcctcaatagggttcactagaatcag

SEQ ID NO: 381645 - DNA, 33 bp, Homo sapien
acagatcagaaggcaacgtaatgtcataataga

SEQ ID NO: 381646 - DNA, 33 bp, Homo sapien
acagatcagaaggcaatgtaatgtcataataga

SEQ ID NO: 381647 - DNA, 33 bp, Homo sapien
tgcctagaatagctcaaataacaaaacactcac

SEQ ID NO: 381648 - DNA, 33 bp, Homo sapien
tgcctagaatagctcagataacaaaacactcac

SEQ ID NO: 381649 - DNA, 33 bp, Homo sapien
agaggtctattgcttccactcttttgcatatgg

SEQ ID NO: 381650 - DNA, 33 bp, Homo sapien
agaggtctattgcttctactcttttgcatatgg

SEQ ID NO: 381651 - DNA, 33 bp, Homo sapien
ccccattatttattcactcatttgcttattcta

SEQ ID NO: 381652 - DNA, 33 bp, Homo sapien
ccccattatttattcattcatttgcttattcta

SEQ ID NO: 381653 - DNA, 33 bp, Homo sapien
gattcggaattatcggccattcaaatacctcat

SEQ ID NO: 381654 - DNA, 33 bp, Homo sapien
gattcggaattatcggtcattcaaatacctcat

SEQ ID NO: 381655 - DNA, 33 bp, Homo sapien
ggaaactgggtctgcaatagcttaagaaacttg

SEQ ID NO: 381656 - DNA, 33 bp, Homo sapien
ggaaactgggtctgcagtagcttaagaaacttg

SEQ ID NO: 381657 - DNA, 33 bp, Homo sapien
gttttatctttcctaccgctaagttgtagtcaa

SEQ ID NO: 381658 - DNA, 33 bp, Homo sapien
gttttatctttcctactgctaagttgtagtcaa

SEQ ID NO: 381659 - DNA, 33 bp, Homo sapien
aaggattggcactaacacagaggcaagaccaac

SEQ ID NO: 381660 - DNA, 33 bp, Homo sapien
aaggattggcactaacccagaggcaagaccaac

SEQ ID NO: 381661 - DNA, 33 bp, Homo sapien
ccaggcaaagtcatcaactgctgtgtactcatt

SEQ ID NO: 381662 - DNA, 33 bp, Homo sapien
ccaggcaaagtcatcagctgctgtgtactcatt

SEQ ID NO: 381663 - DNA, 33 bp, Homo sapien
acagagagctgaagtcacttcacaaagcatttt

SEQ ID NO: 381664 - DNA, 33 bp, Homo sapien
acagagagctgaagtcgcttcacaaagcatttt

SEQ ID NO: 381665 - DNA, 33 bp, Homo sapien
atttgatattgtaagacgacatgtgctgtaaca

SEQ ID NO: 381666 - DNA, 33 bp, Homo sapien
atttgatattgtaagatgacatgtgctgtaaca

SEQ ID NO: 381667 - DNA, 33 bp, Homo sapien
agttcattttttttccaatcttcaaagtcagca

SEQ ID NO: 381668 - DNA, 33 bp, Homo sapien
agttcattttttttccgatcttcaaagtcagca

SEQ ID NO: 381669 - DNA, 33 bp, Homo sapien
agtaaactgactcctacgagaataagtggctgc

SEQ ID NO: 381670 - DNA, 33 bp, Homo sapien
agtaaactgactcctatgagaataagtggctgc

SEQ ID NO: 381671 - DNA, 33 bp, Homo sapien
aagtagaaaaggaggaaaaactgtggctttggg

SEQ ID NO: 381672 - DNA, 33 bp, Homo sapien
aagtagaaaaggaggacaaactgtggctttggg

SEQ ID NO: 381673 - DNA, 33 bp, Homo sapien
agtatttaaacggttcaagaaataatgttcctc

SEQ ID NO: 381674 - DNA, 33 bp, Homo sapien
agtatttaaacggttcgagaaataatgttcctc

SEQ ID NO: 381675 - DNA, 33 bp, Homo sapien
tactagtactagcaacaatgacagcaacaatac

SEQ ID NO: 381676 - DNA, 33 bp, Homo sapien
tactagtactagcaacgatgacagcaacaatac

SEQ ID NO: 381677 - DNA, 33 bp, Homo sapien
ctatagacaccactgaccttggtggatgaaacc

SEQ ID NO: 381678 - DNA, 33 bp, Homo sapien
ctatagacaccactgatcttggtggatgaaacc

SEQ ID NO: 381679 - DNA, 33 bp, Homo sapien
gctgccctggtgataacgagctcctgggaatat

SEQ ID NO: 381680 - DNA, 33 bp, Homo sapien
gctgccctggtgataatgagctcctgggaatat

SEQ ID NO: 381681 - DNA, 33 bp, Homo sapien
tttcctagagtttagacagtttcattacatttt

SEQ ID NO: 381682 - DNA, 33 bp, Homo sapien
tttcctagagtttagatagtttcattacatttt

SEQ ID NO: 381683 - DNA, 33 bp, Homo sapien
cctcctcaattctgcacgatattggtatatttc

SEQ ID NO: 381684 - DNA, 33 bp, Homo sapien
cctcctcaattctgcatgatattggtatatttc

SEQ ID NO: 381685 - DNA, 33 bp, Homo sapien
acaaaatattatccacaggcttattgccattgt

SEQ ID NO: 381686 - DNA, 33 bp, Homo sapien
acaaaatattatccacgggcttattgccattgt

SEQ ID NO: 381687 - DNA, 33 bp, Homo sapien
acaggatgacttagtaaccaaatcaggtttcaa

SEQ ID NO: 381688 - DNA, 33 bp, Homo sapien
acaggatgacttagtagccaaatcaggtttcaa

SEQ ID NO: 381689 - DNA, 33 bp, Homo sapien
ctgagtggtcacccaacgccggtgcccaatttg

SEQ ID NO: 381690 - DNA, 33 bp, Homo sapien
ctgagtggtcacccaaggccggtgcccaatttg

SEQ ID NO: 381691 - DNA, 33 bp, Homo sapien
gaggaatagtgtgagagcacgttggaaaggttg

SEQ ID NO: 381692 - DNA, 33 bp, Homo sapien
gaggaatagtgtgagatcacgttggaaaggttg

SEQ ID NO: 381693 - DNA, 33 bp, Homo sapien
acttacttcaagaaaacttactgcaagtgaaag

SEQ ID NO: 381694 - DNA, 33 bp, Homo sapien
acttacttcaagaaaatttactgcaagtgaaag

SEQ ID NO: 381695 - DNA, 33 bp, Homo sapien
tgattctggatgaacactatttaaatcaaaatg

SEQ ID NO: 381696 - DNA, 33 bp, Homo sapien
tgattctggatgaacattatttaaatcaaaatg

SEQ ID NO: 381697 - DNA, 33 bp, Homo sapien
gagtcatacccaggccagacatgtgttcctggc

SEQ ID NO: 381698 - DNA, 33 bp, Homo sapien
gagtcatacccaggccggacatgtgttcctggc

SEQ ID NO: 381699 - DNA, 33 bp, Homo sapien
tttttgaaaactcagaaggtaataaaatgaact

SEQ ID NO: 381700 - DNA, 33 bp, Homo sapien
tttttgaaaactcagatggtaataaaatgaact

SEQ ID NO: 381701 - DNA, 33 bp, Homo sapien
aagaggcacagagaagcctaatcagaagaggga

SEQ ID NO: 381702 - DNA, 33 bp, Homo sapien
aagaggcacagagaaggctaatcagaagaggga

SEQ ID NO: 381703 - DNA, 33 bp, Homo sapien
aaagcatggcaagccaatcttacacaaatgctg

SEQ ID NO: 381704 - DNA, 33 bp, Homo sapien
aaagcatggcaagccagtcttacacaaatgctg

SEQ ID NO: 381705 - DNA, 33 bp, Homo sapien
ggaaataaaagattgacgcgaactttactgtgt

SEQ ID NO: 381706 - DNA, 33 bp, Homo sapien
ggaaataaaagattgatgcgaactttactgtgt

SEQ ID NO: 381707 - DNA, 33 bp, Homo sapien
caactaccttcatatcacattgaacagaagtga

SEQ ID NO: 381708 - DNA, 33 bp, Homo sapien
caactaccttcatatctcattgaacagaagtga

SEQ ID NO: 381709 - DNA, 33 bp, Homo sapien
agcaaaggactgtaagcatggaacactgatgtt

SEQ ID NO: 381710 - DNA, 33 bp, Homo sapien
agcaaaggactgtaagtatggaacactgatgtt

SEQ ID NO: 381711 - DNA, 33 bp, Homo sapien
gcggccaagaaagccaataagtttctgccacaa

SEQ ID NO: 381712 - DNA, 33 bp, Homo sapien
gcggccaagaaagccagtaagtttctgccacaa

SEQ ID NO: 381713 - DNA, 33 bp, Homo sapien
atatcattattttttcaccagctataggttcta

SEQ ID NO: 381714 - DNA, 33 bp, Homo sapien
atatcattattttttcgccagctataggttcta

SEQ ID NO: 381715 - DNA, 33 bp, Homo sapien
gacttgtccagattcacagagttagtaaggaac

SEQ ID NO: 381716 - DNA, 33 bp, Homo sapien
gacttgtccagattcatagagttagtaaggaac

SEQ ID NO: 381717 - DNA, 33 bp, Homo sapien
tgataaatgcaaaatacgtgcgtctgataggca

SEQ ID NO: 381718 - DNA, 33 bp, Homo sapien
tgataaatgcaaaatatgtgcgtctgataggca

SEQ ID NO: 381719 - DNA, 33 bp, Homo sapien
cctgatttgattactacgcattttagatgtgta

SEQ ID NO: 381720 - DNA, 33 bp, Homo sapien
cctgatttgattactatgcattttagatgtgta

SEQ ID NO: 381721 - DNA, 33 bp, Homo sapien
gtgtaggagctacaaaccctaatcacatggagg

SEQ ID NO: 381722 - DNA, 33 bp, Homo sapien
gtgtaggagctacaaatcctaatcacatggagg

SEQ ID NO: 381723 - DNA, 33 bp, Homo sapien
gggttccaggagaaaacgatccccttgtcagat

SEQ ID NO: 381724 - DNA, 33 bp, Homo sapien
gggttccaggagaaaatgatccccttgtcagat

SEQ ID NO: 381725 - DNA, 33 bp, Homo sapien
aatggaaaaactctcacaaaaagtttcatatcc

SEQ ID NO: 381726 - DNA, 33 bp, Homo sapien
aatggaaaaactctcagaaaaagtttcatatcc

SEQ ID NO: 381727 - DNA, 33 bp, Homo sapien
tacaaattttcaagctcactgacccattaaagc

SEQ ID NO: 381728 - DNA, 33 bp, Homo sapien
tacaaattttcaagctgactgacccattaaagc

SEQ ID NO: 381729 - DNA, 33 bp, Homo sapien
gaacttccaactctaccaactagacacagaggt

SEQ ID NO: 381730 - DNA, 33 bp, Homo sapien
gaacttccaactctactaactagacacagaggt

SEQ ID NO: 381731 - DNA, 33 bp, Homo sapien
ctcaaggtgtgacccaatcaattcaggcccaag

SEQ ID NO: 381732 - DNA, 33 bp, Homo sapien
ctcaaggtgtgacccagtcaattcaggcccaag

SEQ ID NO: 381733 - DNA, 33 bp, Homo sapien
tggaccactaaagggcaaaggaatgaagggggc

SEQ ID NO: 381734 - DNA, 33 bp, Homo sapien
tggaccactaaagggcgaaggaatgaagggggc

SEQ ID NO: 381735 - DNA, 33 bp, Homo sapien
tagatacagagacagcaatagagatcttaaagt

SEQ ID NO: 381736 - DNA, 33 bp, Homo sapien
tagatacagagacagcgatagagatcttaaagt

SEQ ID NO: 381737 - DNA, 33 bp, Homo sapien
tacatcaccagtgccaatctagaagggatgctt

SEQ ID NO: 381738 - DNA, 33 bp, Homo sapien
tacatcaccagtgccagtctagaagggatgctt

SEQ ID NO: 381739 - DNA, 33 bp, Homo sapien
ccctgacttctcataaagccatgaccatcttgc

SEQ ID NO: 381740 - DNA, 33 bp, Homo sapien
ccctgacttctcataatgccatgaccatcttgc

SEQ ID NO: 381741 - DNA, 33 bp, Homo sapien
gtcaaactgctagtatcaggttaagttaggata

SEQ ID NO: 381742 - DNA, 33 bp, Homo sapien
gtcaaactgctagtatgaggttaagttaggata

SEQ ID NO: 381743 - DNA, 33 bp, Homo sapien
tttgaataatgagctaataagtatggatgaaag

SEQ ID NO: 381744 - DNA, 33 bp, Homo sapien
tttgaataatgagctagtaagtatggatgaaag

SEQ ID NO: 381745 - DNA, 33 bp, Homo sapien
acctgtcttctgtctacggctctcctgtcgacc

SEQ ID NO: 381746 - DNA, 33 bp, Homo sapien
acctgtcttctgtctatggctctcctgtcgacc

SEQ ID NO: 381747 - DNA, 33 bp, Homo sapien
ccaaacgttggatccactcatctccctttgaga

SEQ ID NO: 381748 - DNA, 33 bp, Homo sapien
ccaaacgttggatccattcatctccctttgaga

SEQ ID NO: 381749 - DNA, 33 bp, Homo sapien
atctggaggttaggtcaatgcagctaggtctgc

SEQ ID NO: 381750 - DNA, 33 bp, Homo sapien
atctggaggttaggtcgatgcagctaggtctgc

SEQ ID NO: 381751 - DNA, 33 bp, Homo sapien
ctaaagtccactgaaggatgaaattccttgtta

SEQ ID NO: 381752 - DNA, 33 bp, Homo sapien
ctaaagtccactgaagtatgaaattccttgtta

SEQ ID NO: 381753 - DNA, 33 bp, Homo sapien
ctaaaaatatcactcacggtgttttcaactcat

SEQ ID NO: 381754 - DNA, 33 bp, Homo sapien
ctaaaaatatcactcatggtgttttcaactcat

SEQ ID NO: 381755 - DNA, 33 bp, Homo sapien
atgaagtttgctcaaaagaaatagacctttcaa

SEQ ID NO: 381756 - DNA, 33 bp, Homo sapien
atgaagtttgctcaaaggaaatagacctttcaa

SEQ ID NO: 381757 - DNA, 33 bp, Homo sapien
tcgagaatggagtctacgagccctggttggttg

SEQ ID NO: 381758 - DNA, 33 bp, Homo sapien
tcgagaatggagtctatgagccctggttggttg

SEQ ID NO: 381759 - DNA, 33 bp, Homo sapien
cctgaaataaccccacaaagaaatgaccagtgt

SEQ ID NO: 381760 - DNA, 33 bp, Homo sapien
cctgaaataaccccaccaagaaatgaccagtgt

SEQ ID NO: 381761 - DNA, 33 bp, Homo sapien
aaacactaatctgaaccaggcattaacctctct

SEQ ID NO: 381762 - DNA, 33 bp, Homo sapien
aaacactaatctgaactaggcattaacctctct

SEQ ID NO: 381763 - DNA, 33 bp, Homo sapien
tataaaagaagaactcacatcttcagaatgata

SEQ ID NO: 381764 - DNA, 33 bp, Homo sapien
tataaaagaagaactcgcatcttcagaatgata

SEQ ID NO: 381765 - DNA, 33 bp, Homo sapien
ccaattttaaacagcactatccctggtcttctt

SEQ ID NO: 381766 - DNA, 33 bp, Homo sapien
ccaattttaaacagcattatccctggtcttctt

SEQ ID NO: 381767 - DNA, 33 bp, Homo sapien
agctcacagcagcaggcaggatgggcttgccaa

SEQ ID NO: 381768 - DNA, 33 bp, Homo sapien
agctcacagcagcaggtaggatgggcttgccaa

SEQ ID NO: 381769 - DNA, 33 bp, Homo sapien
attggagttggaagtccgaagatgggagagaag

SEQ ID NO: 381770 - DNA, 33 bp, Homo sapien
attggagttggaagtctgaagatgggagagaag

SEQ ID NO: 381771 - DNA, 33 bp, Homo sapien
gacattcgggctgcccagacttaaaggtgtatg

SEQ ID NO: 381772 - DNA, 33 bp, Homo sapien
gacattcgggctgcccggacttaaaggtgtatg

SEQ ID NO: 381773 - DNA, 33 bp, Homo sapien
aaagcttgtgatttgacggagatgaagctcaga

SEQ ID NO: 381774 - DNA, 33 bp, Homo sapien
aaagcttgtgatttgatggagatgaagctcaga

SEQ ID NO: 381775 - DNA, 33 bp, Homo sapien
aaatattcattaagcaactacaactctcttctg

SEQ ID NO: 381776 - DNA, 33 bp, Homo sapien
aaatattcattaagcatctacaactctcttctg

SEQ ID NO: 381777 - DNA, 33 bp, Homo sapien
tttctaagcttgcctcaagtagggactggtttg

SEQ ID NO: 381778 - DNA, 33 bp, Homo sapien
tttctaagcttgcctcgagtagggactggtttg

SEQ ID NO: 381779 - DNA, 33 bp, Homo sapien
agtccctgttccctgacgattttatgggctgta

SEQ ID NO: 381780 - DNA, 33 bp, Homo sapien
agtccctgttccctgatgattttatgggctgta

SEQ ID NO: 381781 - DNA, 33 bp, Homo sapien
tacattccaaacaggacgtgcctgacattgctt

SEQ ID NO: 381782 - DNA, 33 bp, Homo sapien
tacattccaaacaggatgtgcctgacattgctt

SEQ ID NO: 381783 - DNA, 33 bp, Homo sapien
gtcactttgttaataaatgttacatcctgtgct

SEQ ID NO: 381784 - DNA, 33 bp, Homo sapien
gtcactttgttaataattgttacatcctgtgct

SEQ ID NO: 381785 - DNA, 33 bp, Homo sapien
aggctctctatattaccggtggcttgatgattc

SEQ ID NO: 381786 - DNA, 33 bp, Homo sapien
aggctctctatattactggtggcttgatgattc

SEQ ID NO: 381787 - DNA, 33 bp, Homo sapien
attctcacctgttaaacgaggggtttggcaggg

SEQ ID NO: 381788 - DNA, 33 bp, Homo sapien
attctcacctgttaaatgaggggtttggcaggg

SEQ ID NO: 381789 - DNA, 33 bp, Homo sapien
ctgtgacagtgtgaaacggtgggaactgatgtc

SEQ ID NO: 381790 - DNA, 33 bp, Homo sapien
ctgtgacagtgtgaaatggtgggaactgatgtc

SEQ ID NO: 381791 - DNA, 33 bp, Homo sapien
acaaacactgaaggaccgcagggaaaattataa

SEQ ID NO: 381792 - DNA, 33 bp, Homo sapien
acaaacactgaaggactgcagggaaaattataa

SEQ ID NO: 381793 - DNA, 33 bp, Homo sapien
tcatgtgaaggttacaaatctctaattctacca

SEQ ID NO: 381794 - DNA, 33 bp, Homo sapien
tcatgtgaaggttacagatctctaattctacca

SEQ ID NO: 381795 - DNA, 33 bp, Homo sapien
tcctcccggctggaacgcttcagtatgacaaag

SEQ ID NO: 381796 - DNA, 33 bp, Homo sapien
tcctcccggctggaactcttcagtatgacaaag

SEQ ID NO: 381797 - DNA, 33 bp, Homo sapien
ttttcaactttggagcactaagctttgctctgc

SEQ ID NO: 381798 - DNA, 33 bp, Homo sapien
ttttcaactttggagcgctaagctttgctctgc

SEQ ID NO: 381799 - DNA, 33 bp, Homo sapien
accaagggtgaggtagaagcaaaagtttaacaa

SEQ ID NO: 381800 - DNA, 33 bp, Homo sapien
accaagggtgaggtaggagcaaaagtttaacaa

SEQ ID NO: 381801 - DNA, 33 bp, Homo sapien
agctctcctttccaaagttatgaagtttgccat

SEQ ID NO: 381802 - DNA, 33 bp, Homo sapien
agctctcctttccaaatttatgaagtttgccat

SEQ ID NO: 381803 - DNA, 33 bp, Homo sapien
gagagagattagattcaactcaaaacgtatatg

SEQ ID NO: 381804 - DNA, 33 bp, Homo sapien
gagagagattagattcgactcaaaacgtatatg

SEQ ID NO: 381805 - DNA, 33 bp, Homo sapien
tcttcctccttagatgaaaaaagcaagaagaag

SEQ ID NO: 381806 - DNA, 33 bp, Homo sapien
tcttcctccttagatgcaaaaagcaagaagaag

SEQ ID NO: 381807 - DNA, 33 bp, Homo sapien
cacacctgctcagtgcaaatggaatgggttttg

SEQ ID NO: 381808 - DNA, 33 bp, Homo sapien
cacacctgctcagtgcgaatggaatgggttttg

SEQ ID NO: 381809 - DNA, 33 bp, Homo sapien
ctaagggagcatctagcagcatcctcagccatc

SEQ ID NO: 381810 - DNA, 33 bp, Homo sapien
ctaagggagcatctagtagcatcctcagccatc

SEQ ID NO: 381811 - DNA, 33 bp, Homo sapien
aacctcgtaagtcatgcaaatgctcccagaaag

SEQ ID NO: 381812 - DNA, 33 bp, Homo sapien
aacctcgtaagtcatggaaatgctcccagaaag

SEQ ID NO: 381813 - DNA, 33 bp, Homo sapien
cagaggccaggtcaataatatgcctgaaaatgt

SEQ ID NO: 381814 - DNA, 33 bp, Homo sapien
cagaggccaggtcaatcatatgcctgaaaatgt

SEQ ID NO: 381815 - DNA, 33 bp, Homo sapien
tacaagtgaggagtgaagatctaaaaaatattc

SEQ ID NO: 381816 - DNA, 33 bp, Homo sapien
tacaagtgaggagtgaggatctaaaaaatattc

SEQ ID NO: 381817 - DNA, 33 bp, Homo sapien
ctaatgccatttagaaagtctcgtactttacta

SEQ ID NO: 381818 - DNA, 33 bp, Homo sapien
ctaatgccatttagaaggtctcgtactttacta

SEQ ID NO: 381819 - DNA, 33 bp, Homo sapien
ttaaaatagtcagtaaacttggtagctggatat

SEQ ID NO: 381820 - DNA, 33 bp, Homo sapien
ttaaaatagtcagtaagcttggtagctggatat

SEQ ID NO: 381821 - DNA, 33 bp, Homo sapien
aatgctctgcagacacaactctccgttatggtc

SEQ ID NO: 381822 - DNA, 33 bp, Homo sapien
aatgctctgcagacaccactctccgttatggtc

SEQ ID NO: 381823 - DNA, 33 bp, Homo sapien
ggccctttccacaacactctcagttctgctctg

SEQ ID NO: 381824 - DNA, 33 bp, Homo sapien
ggccctttccacaacagtctcagttctgctctg

SEQ ID NO: 381825 - DNA, 33 bp, Homo sapien
acagccaataagattcccacagttcctcctagc

SEQ ID NO: 381826 - DNA, 33 bp, Homo sapien
acagccaataagattctcacagttcctcctagc

SEQ ID NO: 381827 - DNA, 33 bp, Homo sapien
ccaccaaagcttatcccatctttcccaggttcc

SEQ ID NO: 381828 - DNA, 33 bp, Homo sapien
ccaccaaagcttatccgatctttcccaggttcc

SEQ ID NO: 381829 - DNA, 33 bp, Homo sapien
tgctccatggatgctcactgaatgcagactgag

SEQ ID NO: 381830 - DNA, 33 bp, Homo sapien
tgctccatggatgctcgctgaatgcagactgag

SEQ ID NO: 381831 - DNA, 33 bp, Homo sapien
aggcctatagatggccaagggcagaggcaaggt

SEQ ID NO: 381832 - DNA, 33 bp, Homo sapien
aggcctatagatggccgagggcagaggcaaggt

SEQ ID NO: 381833 - DNA, 33 bp, Homo sapien
gacattgaaatcataaatcttctgtttaaggat

SEQ ID NO: 381834 - DNA, 33 bp, Homo sapien
gacattgaaatcataagtcttctgtttaaggat

SEQ ID NO: 381835 - DNA, 33 bp, Homo sapien
agcactgacccaagtaaggcaaccagtcttact

SEQ ID NO: 381836 - DNA, 33 bp, Homo sapien
agcactgacccaagtagggcaaccagtcttact

SEQ ID NO: 381837 - DNA, 33 bp, Homo sapien
tatttcaaaagaaaccaaatggccttaccatat

SEQ ID NO: 381838 - DNA, 33 bp, Homo sapien
tatttcaaaagaaacccaatggccttaccatat

SEQ ID NO: 381839 - DNA, 33 bp, Homo sapien
aggattaaataaatggaagcacgttgaatccag

SEQ ID NO: 381840 - DNA, 33 bp, Homo sapien
aggattaaataaatggcagcacgttgaatccag

SEQ ID NO: 381841 - DNA, 33 bp, Homo sapien
gctaaatattctacaacgcacaacctgggtatc

SEQ ID NO: 381842 - DNA, 33 bp, Homo sapien
gctaaatattctacaatgcacaacctgggtatc

SEQ ID NO: 381843 - DNA, 33 bp, Homo sapien
cctatttgcttttgccagagctttcttgcatca

SEQ ID NO: 381844 - DNA, 33 bp, Homo sapien
cctatttgcttttgccggagctttcttgcatca

SEQ ID NO: 381845 - DNA, 33 bp, Homo sapien
ttgcaacctgagaaagaccctggcccagcctta

SEQ ID NO: 381846 - DNA, 33 bp, Homo sapien
ttgcaacctgagaaagtccctggcccagcctta

SEQ ID NO: 381847 - DNA, 33 bp, Homo sapien
agagtggaataacagacaccggacacagcaaaa

SEQ ID NO: 381848 - DNA, 33 bp, Homo sapien
agagtggaataacagagaccggacacagcaaaa

SEQ ID NO: 381849 - DNA, 33 bp, Homo sapien
ctgagacagagattaacaagcttatgagggtgt

SEQ ID NO: 381850 - DNA, 33 bp, Homo sapien
ctgagacagagattaataagcttatgagggtgt

SEQ ID NO: 381851 - DNA, 33 bp, Homo sapien
tcctgtctgaagactcaaaatctgactccattc

SEQ ID NO: 381852 - DNA, 33 bp, Homo sapien
tcctgtctgaagactcgaaatctgactccattc

SEQ ID NO: 381853 - DNA, 33 bp, Homo sapien
tctgggttatttctaactgagaaggtgacgatt

SEQ ID NO: 381854 - DNA, 33 bp, Homo sapien
tctgggttatttctaattgagaaggtgacgatt

SEQ ID NO: 381855 - DNA, 33 bp, Homo sapien
aggacatggagtgacacacattcggccattctt

SEQ ID NO: 381856 - DNA, 33 bp, Homo sapien
aggacatggagtgacagacattcggccattctt

SEQ ID NO: 381857 - DNA, 33 bp, Homo sapien
cagaaaaataccaccaatagatgctcctaatca

SEQ ID NO: 381858 - DNA, 33 bp, Homo sapien
cagaaaaataccaccattagatgctcctaatca

SEQ ID NO: 381859 - DNA, 33 bp, Homo sapien
gttgagagagccattcacatttcaagtttttca

SEQ ID NO: 381860 - DNA, 33 bp, Homo sapien
gttgagagagccattcgcatttcaagtttttca

SEQ ID NO: 381861 - DNA, 33 bp, Homo sapien
tgattggagctaacaaggtaacaatctagcaca

SEQ ID NO: 381862 - DNA, 33 bp, Homo sapien
tgattggagctaacaatgtaacaatctagcaca

SEQ ID NO: 381863 - DNA, 33 bp, Homo sapien
ggctttgcagagatgaaggataagagcagacat

SEQ ID NO: 381864 - DNA, 33 bp, Homo sapien
ggctttgcagagatgagggataagagcagacat

SEQ ID NO: 381865 - DNA, 33 bp, Homo sapien
ctacgtgccagtattacctccaaggacaggcag

SEQ ID NO: 381866 - DNA, 33 bp, Homo sapien
ctacgtgccagtattatctccaaggacaggcag

SEQ ID NO: 381867 - DNA, 33 bp, Homo sapien
tcaagtctttagttccaaatggccccaaagcca

SEQ ID NO: 381868 - DNA, 33 bp, Homo sapien
tcaagtctttagttccgaatggccccaaagcca

SEQ ID NO: 381869 - DNA, 33 bp, Homo sapien
aaatactcctgacaaacaatacagggaatactg

SEQ ID NO: 381870 - DNA, 33 bp, Homo sapien
aaatactcctgacaaagaatacagggaatactg

SEQ ID NO: 381871 - DNA, 33 bp, Homo sapien
actcccagttgctccccgcatcaacacaaaacc

SEQ ID NO: 381872 - DNA, 33 bp, Homo sapien
actcccagttgctcccggcatcaacacaaaacc

SEQ ID NO: 381873 - DNA, 33 bp, Homo sapien
ggcggatgacgccttcacctcattgatggctga

SEQ ID NO: 381874 - DNA, 33 bp, Homo sapien
ggcggatgacgccttcgcctcattgatggctga

SEQ ID NO: 381875 - DNA, 33 bp, Homo sapien
tattgacttaggccagaaaccatcaggtgcttc

SEQ ID NO: 381876 - DNA, 33 bp, Homo sapien
tattgacttaggccaggaaccatcaggtgcttc

SEQ ID NO: 381877 - DNA, 33 bp, Homo sapien
aaggttgatgatgatacaaggtgacagaaacac

SEQ ID NO: 381878 - DNA, 33 bp, Homo sapien
aaggttgatgatgatataaggtgacagaaacac

SEQ ID NO: 381879 - DNA, 33 bp, Homo sapien
aaatgtaaccaggaaaagtaatgttgattacaa

SEQ ID NO: 381880 - DNA, 33 bp, Homo sapien
aaatgtaaccaggaaatgtaatgttgattacaa

SEQ ID NO: 381881 - DNA, 33 bp, Homo sapien
gctcccatctgaagtcaaacacgggtacactgt

SEQ ID NO: 381882 - DNA, 33 bp, Homo sapien
gctcccatctgaagtcgaacacgggtacactgt

SEQ ID NO: 381883 - DNA, 33 bp, Homo sapien
cttacacgtatcaataaggagacataaggaaga

SEQ ID NO: 381884 - DNA, 33 bp, Homo sapien
cttacacgtatcaatatggagacataaggaaga

SEQ ID NO: 381885 - DNA, 33 bp, Homo sapien
tcacttgactcagcagcagcacttgatgcaaat

SEQ ID NO: 381886 - DNA, 33 bp, Homo sapien
tcacttgactcagcaggagcacttgatgcaaat

SEQ ID NO: 381887 - DNA, 33 bp, Homo sapien
gacctacatgatgcagaacccaaaggtcgttac

SEQ ID NO: 381888 - DNA, 33 bp, Homo sapien
gacctacatgatgcaggacccaaaggtcgttac

SEQ ID NO: 381889 - DNA, 33 bp, Homo sapien
tccaagtagagagtgaaggacctatcatgcagg

SEQ ID NO: 381890 - DNA, 33 bp, Homo sapien
tccaagtagagagtgatggacctatcatgcagg

SEQ ID NO: 381891 - DNA, 33 bp, Homo sapien
tattcagagaggtgaagtgagttcactaaggtc

SEQ ID NO: 381892 - DNA, 33 bp, Homo sapien
tattcagagaggtgaattgagttcactaaggtc

SEQ ID NO: 381893 - DNA, 33 bp, Homo sapien
agaatattcactgtaaacctcactgcctttcca

SEQ ID NO: 381894 - DNA, 33 bp, Homo sapien
agaatattcactgtaaccctcactgcctttcca

SEQ ID NO: 381895 - DNA, 33 bp, Homo sapien
actccccgactatctccgaaccattgtcaattc

SEQ ID NO: 381896 - DNA, 33 bp, Homo sapien
actccccgactatctctgaaccattgtcaattc

SEQ ID NO: 381897 - DNA, 33 bp, Homo sapien
cgcatggaatttctggaaacattaaccagataa

SEQ ID NO: 381898 - DNA, 33 bp, Homo sapien
cgcatggaatttctgggaacattaaccagataa

SEQ ID NO: 381899 - DNA, 33 bp, Homo sapien
aaactcctgtgctgtcaaaaatccatatgcaat

SEQ ID NO: 381900 - DNA, 33 bp, Homo sapien
aaactcctgtgctgtcgaaaatccatatgcaat

SEQ ID NO: 381901 - DNA, 33 bp, Homo sapien
tcatgatggtaggttacgctgccatatgcgttt

SEQ ID NO: 381902 - DNA, 33 bp, Homo sapien
tcatgatggtaggttatgctgccatatgcgttt

SEQ ID NO: 381903 - DNA, 33 bp, Homo sapien
ggtgtttaggagcctaaaagttttgtttgttca

SEQ ID NO: 381904 - DNA, 33 bp, Homo sapien
ggtgtttaggagcctagaagttttgtttgttca

SEQ ID NO: 381905 - DNA, 33 bp, Homo sapien
gaataaaggaggttgacgtggtgaccttcagct

SEQ ID NO: 381906 - DNA, 33 bp, Homo sapien
gaataaaggaggttgatgtggtgaccttcagct

SEQ ID NO: 381907 - DNA, 33 bp, Homo sapien
aagaagacaaacagataaacggcggaatgacac

SEQ ID NO: 381908 - DNA, 33 bp, Homo sapien
aagaagacaaacagatgaacggcggaatgacac

SEQ ID NO: 381909 - DNA, 33 bp, Homo sapien
tccctggctgcagaacaagtggactcctgaccc

SEQ ID NO: 381910 - DNA, 33 bp, Homo sapien
tccctggctgcagaacgagtggactcctgaccc

SEQ ID NO: 381911 - DNA, 33 bp, Homo sapien
atcccagccattcttaacagcgggagttatcaa

SEQ ID NO: 381912 - DNA, 33 bp, Homo sapien
atcccagccattcttaccagcgggagttatcaa

SEQ ID NO: 381913 - DNA, 33 bp, Homo sapien
acatgctggaacagtacgctgtgatgccttcgg

SEQ ID NO: 381914 - DNA, 33 bp, Homo sapien
acatgctggaacagtatgctgtgatgccttcgg

SEQ ID NO: 381915 - DNA, 33 bp, Homo sapien
attcaacaaacacatacatctaaaatgcctctc

SEQ ID NO: 381916 - DNA, 33 bp, Homo sapien
attcaacaaacacatatatctaaaatgcctctc

SEQ ID NO: 381917 - DNA, 33 bp, Homo sapien
ctcagccgtgatgggagaccatggttgtggaga

SEQ ID NO: 381918 - DNA, 33 bp, Homo sapien
ctcagccgtgatgggataccatggttgtggaga

SEQ ID NO: 381919 - DNA, 33 bp, Homo sapien
cctcacagaggtaatacgatctggagctggaat

SEQ ID NO: 381920 - DNA, 33 bp, Homo sapien
cctcacagaggtaatatgatctggagctggaat

SEQ ID NO: 381921 - DNA, 33 bp, Homo sapien
gatctatggcatattcaaacattaaacatcagc

SEQ ID NO: 381922 - DNA, 33 bp, Homo sapien
gatctatggcatattcgaacattaaacatcagc

SEQ ID NO: 381923 - DNA, 33 bp, Homo sapien
tgcttcttgtctctacgccctcggcaagctcct

SEQ ID NO: 381924 - DNA, 33 bp, Homo sapien
tgcttcttgtctctactccctcggcaagctcct

SEQ ID NO: 381925 - DNA, 33 bp, Homo sapien
cacagctagcaaacaacggaaccaattcaacct

SEQ ID NO: 381926 - DNA, 33 bp, Homo sapien
cacagctagcaaacaatggaaccaattcaacct

SEQ ID NO: 381927 - DNA, 33 bp, Homo sapien
aatcgtgtacatctgacgtcagttggattctga

SEQ ID NO: 381928 - DNA, 33 bp, Homo sapien
aatcgtgtacatctgatgtcagttggattctga

SEQ ID NO: 381929 - DNA, 33 bp, Homo sapien
cttttgccgcatccatcatgaagttgtgttgtc

SEQ ID NO: 381930 - DNA, 33 bp, Homo sapien
cttttgccgcatccattatgaagttgtgttgtc

SEQ ID NO: 381931 - DNA, 33 bp, Homo sapien
gagccgatcaagaccacaggtaaatgtatcatg

SEQ ID NO: 381932 - DNA, 33 bp, Homo sapien
gagccgatcaagaccataggtaaatgtatcatg

SEQ ID NO: 381933 - DNA, 33 bp, Homo sapien
ggtctacctgcatccagtctgaccctctttgac

SEQ ID NO: 381934 - DNA, 33 bp, Homo sapien
ggtctacctgcatccattctgaccctctttgac

SEQ ID NO: 381935 - DNA, 33 bp, Homo sapien
catctggaaaggaggaaaataatgactgtcctg

SEQ ID NO: 381936 - DNA, 33 bp, Homo sapien
catctggaaaggaggataataatgactgtcctg

SEQ ID NO: 381937 - DNA, 33 bp, Homo sapien
tgacattactacacagcctgctatgcagcaagg

SEQ ID NO: 381938 - DNA, 33 bp, Homo sapien
tgacattactacacagtctgctatgcagcaagg

SEQ ID NO: 381939 - DNA, 33 bp, Homo sapien
ttatctccattttctaagtaaggacactggagc

SEQ ID NO: 381940 - DNA, 33 bp, Homo sapien
ttatctccattttctaggtaaggacactggagc

SEQ ID NO: 381941 - DNA, 33 bp, Homo sapien
agcaccccagcataccacttttggttaagtaac

SEQ ID NO: 381942 - DNA, 33 bp, Homo sapien
agcaccccagcataccgcttttggttaagtaac

SEQ ID NO: 381943 - DNA, 33 bp, Homo sapien
tggtttccttggccacaagtgtgaatacgagac

SEQ ID NO: 381944 - DNA, 33 bp, Homo sapien
tggtttccttggccacgagtgtgaatacgagac

SEQ ID NO: 381945 - DNA, 33 bp, Homo sapien
gacataaaaggcagtaaagaccgggcacagtgg

SEQ ID NO: 381946 - DNA, 33 bp, Homo sapien
gacataaaaggcagtagagaccgggcacagtgg

SEQ ID NO: 381947 - DNA, 33 bp, Homo sapien
tttaccagccagaatcagagtccagttgctgat

SEQ ID NO: 381948 - DNA, 33 bp, Homo sapien
tttaccagccagaatcggagtccagttgctgat

SEQ ID NO: 381949 - DNA, 33 bp, Homo sapien
ggccacaaagcagagacggaacaaaaacccagg

SEQ ID NO: 381950 - DNA, 33 bp, Homo sapien
ggccacaaagcagagatggaacaaaaacccagg

SEQ ID NO: 381951 - DNA, 33 bp, Homo sapien
gagaaccactggtccacggaagaacagtcttat

SEQ ID NO: 381952 - DNA, 33 bp, Homo sapien
gagaaccactggtccagggaagaacagtcttat

SEQ ID NO: 381953 - DNA, 33 bp, Homo sapien
gacttttcctagatgacgcaacacagtcatgtt

SEQ ID NO: 381954 - DNA, 33 bp, Homo sapien
gacttttcctagatgatgcaacacagtcatgtt

SEQ ID NO: 381955 - DNA, 33 bp, Homo sapien
cacaagctaataaaaacctctgtgccacatggt

SEQ ID NO: 381956 - DNA, 33 bp, Homo sapien
cacaagctaataaaaatctctgtgccacatggt

SEQ ID NO: 381957 - DNA, 33 bp, Homo sapien
caaggtcagcctacaaatcaaggtcagggcatg

SEQ ID NO: 381958 - DNA, 33 bp, Homo sapien
caaggtcagcctacaagtcaaggtcagggcatg

SEQ ID NO: 381959 - DNA, 33 bp, Homo sapien
aggactggtgtgagtacgatcagactgacattc

SEQ ID NO: 381960 - DNA, 33 bp, Homo sapien
aggactggtgtgagtatgatcagactgacattc

SEQ ID NO: 381961 - DNA, 33 bp, Homo sapien
caagcagtaaagggtcaaattctccaggcttac

SEQ ID NO: 381962 - DNA, 33 bp, Homo sapien
caagcagtaaagggtcgaattctccaggcttac

SEQ ID NO: 381963 - DNA, 33 bp, Homo sapien
aataactcagaactacggaaggactaattgctt

SEQ ID NO: 381964 - DNA, 33 bp, Homo sapien
aataactcagaactactgaaggactaattgctt

SEQ ID NO: 381965 - DNA, 33 bp, Homo sapien
ttggctgatacttggaatagctctgctcaaaaa

SEQ ID NO: 381966 - DNA, 33 bp, Homo sapien
ttggctgatacttggagtagctctgctcaaaaa

SEQ ID NO: 381967 - DNA, 33 bp, Homo sapien
gtaatggagattgaaaaccattttttgagctgg

SEQ ID NO: 381968 - DNA, 33 bp, Homo sapien
gtaatggagattgaaagccattttttgagctgg

SEQ ID NO: 381969 - DNA, 33 bp, Homo sapien
tacatctgtcaaattcccagtggtcataggaag

SEQ ID NO: 381970 - DNA, 33 bp, Homo sapien
tacatctgtcaaattctcagtggtcataggaag

SEQ ID NO: 381971 - DNA, 33 bp, Homo sapien
gacgtctctgcagctccattcaaatatcatttt

SEQ ID NO: 381972 - DNA, 33 bp, Homo sapien
gacgtctctgcagctctattcaaatatcatttt

SEQ ID NO: 381973 - DNA, 33 bp, Homo sapien
agctttgaacatcttaacagctgaaataacaaa

SEQ ID NO: 381974 - DNA, 33 bp, Homo sapien
agctttgaacatcttagcagctgaaataacaaa

SEQ ID NO: 381975 - DNA, 33 bp, Homo sapien
cttttgaggtcaccaaatagctccatgtaacta

SEQ ID NO: 381976 - DNA, 33 bp, Homo sapien
cttttgaggtcaccaagtagctccatgtaacta

SEQ ID NO: 381977 - DNA, 33 bp, Homo sapien
gcaaattctgagacaacttgaatgaaaggaaca

SEQ ID NO: 381978 - DNA, 33 bp, Homo sapien
gcaaattctgagacaatttgaatgaaaggaaca

SEQ ID NO: 381979 - DNA, 33 bp, Homo sapien
tgaataatatgggaaactgacctagtttgaaaa

SEQ ID NO: 381980 - DNA, 33 bp, Homo sapien
tgaataatatgggaaattgacctagtttgaaaa

SEQ ID NO: 381981 - DNA, 33 bp, Homo sapien
aaccctgagaatgcacaccacataaacacggct

SEQ ID NO: 381982 - DNA, 33 bp, Homo sapien
aaccctgagaatgcacgccacataaacacggct

SEQ ID NO: 381983 - DNA, 33 bp, Homo sapien
tccttttaacgttcaaatcagggatggcattct

SEQ ID NO: 381984 - DNA, 33 bp, Homo sapien
tccttttaacgttcaattcagggatggcattct

SEQ ID NO: 381985 - DNA, 33 bp, Homo sapien
atgtgtcccacataagacctccaaatggtacag

SEQ ID NO: 381986 - DNA, 33 bp, Homo sapien
atgtgtcccacataagtcctccaaatggtacag

SEQ ID NO: 381987 - DNA, 33 bp, Homo sapien
cagacttagagggaacacagtgtgcgctgagac

SEQ ID NO: 381988 - DNA, 33 bp, Homo sapien
cagacttagagggaacgcagtgtgcgctgagac

SEQ ID NO: 381989 - DNA, 33 bp, Homo sapien
cttgatgagtcttgtgcaatctgtgtttctcaa

SEQ ID NO: 381990 - DNA, 33 bp, Homo sapien
cttgatgagtcttgtgtaatctgtgtttctcaa

SEQ ID NO: 381991 - DNA, 33 bp, Homo sapien
tttcccagcatttttacggccagagaatgggaa

SEQ ID NO: 381992 - DNA, 33 bp, Homo sapien
tttcccagcatttttatggccagagaatgggaa

SEQ ID NO: 381993 - DNA, 33 bp, Homo sapien
ttgaatgaatgctgaaaagactgacctctgacc

SEQ ID NO: 381994 - DNA, 33 bp, Homo sapien
ttgaatgaatgctgaacagactgacctctgacc

SEQ ID NO: 381995 - DNA, 33 bp, Homo sapien
caatcaagtgaatagaaggacaaaatagcagga

SEQ ID NO: 381996 - DNA, 33 bp, Homo sapien
caatcaagtgaatagagggacaaaatagcagga

SEQ ID NO: 381997 - DNA, 33 bp, Homo sapien
gcaatgagtcagaacacgtacagatgactcagc

SEQ ID NO: 381998 - DNA, 33 bp, Homo sapien
gcaatgagtcagaacaggtacagatgactcagc

SEQ ID NO: 381999 - DNA, 33 bp, Homo sapien
agaactcagaaccctcaagactgtcctcagcta

SEQ ID NO: 382000 - DNA, 33 bp, Homo sapien
agaactcagaaccctcgagactgtcctcagcta

SEQ ID NO: 382001 - DNA, 33 bp, Homo sapien
ctcagtttcttgtaaaatgcagttaaaatcttt

SEQ ID NO: 382002 - DNA, 33 bp, Homo sapien
ctcagtttcttgtaaagtgcagttaaaatcttt

SEQ ID NO: 382003 - DNA, 33 bp, Homo sapien
caaatgaaatctaccaagaaccaagtggcttga

SEQ ID NO: 382004 - DNA, 33 bp, Homo sapien
caaatgaaatctaccacgaaccaagtggcttga

SEQ ID NO: 382005 - DNA, 33 bp, Homo sapien
ttcacataacttgaaacgtcaggggttgagcca

SEQ ID NO: 382006 - DNA, 33 bp, Homo sapien
ttcacataacttgaaaggtcaggggttgagcca

SEQ ID NO: 382007 - DNA, 33 bp, Homo sapien
cttatgtaacagtaagaatgcattgctgtgcag

SEQ ID NO: 382008 - DNA, 33 bp, Homo sapien
cttatgtaacagtaagtatgcattgctgtgcag

SEQ ID NO: 382009 - DNA, 33 bp, Homo sapien
aatgctttcctttctcactcattgaatgagata

SEQ ID NO: 382010 - DNA, 33 bp, Homo sapien
aatgctttcctttctctctcattgaatgagata

SEQ ID NO: 382011 - DNA, 33 bp, Homo sapien
tcatgcccagcacagaagttgggacacagtagg

SEQ ID NO: 382012 - DNA, 33 bp, Homo sapien
tcatgcccagcacagacgttgggacacagtagg

SEQ ID NO: 382013 - DNA, 33 bp, Homo sapien
caggcaaaaagaaatcaagtccttgaaagtggc

SEQ ID NO: 382014 - DNA, 33 bp, Homo sapien
caggcaaaaagaaatccagtccttgaaagtggc

SEQ ID NO: 382015 - DNA, 33 bp, Homo sapien
tatttcttgatcattcgatgtacccattgcagg

SEQ ID NO: 382016 - DNA, 33 bp, Homo sapien
tatttcttgatcattctatgtacccattgcagg

SEQ ID NO: 382017 - DNA, 33 bp, Homo sapien
tggaggcccagcaatagcctgatgcaaaggcaa

SEQ ID NO: 382018 - DNA, 33 bp, Homo sapien
tggaggcccagcaatatcctgatgcaaaggcaa

SEQ ID NO: 382019 - DNA, 33 bp, Homo sapien
ttctccttccacaaagcagtacatggcccattt

SEQ ID NO: 382020 - DNA, 33 bp, Homo sapien
ttctccttccacaaagtagtacatggcccattt

SEQ ID NO: 382021 - DNA, 33 bp, Homo sapien
tgtactatgtacttcactaattttcactgttgt

SEQ ID NO: 382022 - DNA, 33 bp, Homo sapien
tgtactatgtacttcattaattttcactgttgt

SEQ ID NO: 382023 - DNA, 33 bp, Homo sapien
ataaaaagattacaagactatcaccattgaagt

SEQ ID NO: 382024 - DNA, 33 bp, Homo sapien
ataaaaagattacaaggctatcaccattgaagt

SEQ ID NO: 382025 - DNA, 33 bp, Homo sapien
ggaccaatgaacgggacctttgccagaggaaat

SEQ ID NO: 382026 - DNA, 33 bp, Homo sapien
ggaccaatgaacgggagctttgccagaggaaat

SEQ ID NO: 382027 - DNA, 33 bp, Homo sapien
gtggtcacatcacatcaaatgtgcctcctcatg

SEQ ID NO: 382028 - DNA, 33 bp, Homo sapien
gtggtcacatcacatcgaatgtgcctcctcatg

SEQ ID NO: 382029 - DNA, 33 bp, Homo sapien
aaagaatttctagaacaatgcaacaagcctata

SEQ ID NO: 382030 - DNA, 33 bp, Homo sapien
aaagaatttctagaaccatgcaacaagcctata

SEQ ID NO: 382031 - DNA, 33 bp, Homo sapien
ggagcagagccatccacgccggaagcctaagcc

SEQ ID NO: 382032 - DNA, 33 bp, Homo sapien
ggagcagagccatccatgccggaagcctaagcc

SEQ ID NO: 382033 - DNA, 33 bp, Homo sapien
gaggagctgttccgtaactgacaatactacaag

SEQ ID NO: 382034 - DNA, 33 bp, Homo sapien
gaggagctgttccgtagctgacaatactacaag

SEQ ID NO: 382035 - DNA, 33 bp, Homo sapien
tacatctccactttggcactatgagctgccact

SEQ ID NO: 382036 - DNA, 33 bp, Homo sapien
tacatctccactttggtactatgagctgccact

SEQ ID NO: 382037 - DNA, 33 bp, Homo sapien
atctatactgtgatcacgttcattgtttcatat

SEQ ID NO: 382038 - DNA, 33 bp, Homo sapien
atctatactgtgatcatgttcattgtttcatat

SEQ ID NO: 382039 - DNA, 33 bp, Homo sapien
actcctctcaacaccaataaaaatggtttactc

SEQ ID NO: 382040 - DNA, 33 bp, Homo sapien
actcctctcaacaccagtaaaaatggtttactc

SEQ ID NO: 382041 - DNA, 33 bp, Homo sapien
tctactgtgatttaataatggactttaacatac

SEQ ID NO: 382042 - DNA, 33 bp, Homo sapien
tctactgtgatttaatgatggactttaacatac

SEQ ID NO: 382043 - DNA, 33 bp, Homo sapien
ttgctttagagaatcccgagttagctaggcagc

SEQ ID NO: 382044 - DNA, 33 bp, Homo sapien
ttgctttagagaatcctgagttagctaggcagc

SEQ ID NO: 382045 - DNA, 33 bp, Homo sapien
aaaaaagtaaatctaacattcagcgttcttacc

SEQ ID NO: 382046 - DNA, 33 bp, Homo sapien
aaaaaagtaaatctaatattcagcgttcttacc

SEQ ID NO: 382047 - DNA, 33 bp, Homo sapien
cttttgaatcctctccccattattcagttcgaa

SEQ ID NO: 382048 - DNA, 33 bp, Homo sapien
cttttgaatcctctcctcattattcagttcgaa

SEQ ID NO: 382049 - DNA, 33 bp, Homo sapien
acaaaaagccaggaaccagggcaagtccatgga

SEQ ID NO: 382050 - DNA, 33 bp, Homo sapien
acaaaaagccaggaacgagggcaagtccatgga

SEQ ID NO: 382051 - DNA, 33 bp, Homo sapien
ctaacctaatcaccacagaacacttttaataat

SEQ ID NO: 382052 - DNA, 33 bp, Homo sapien
ctaacctaatcaccacggaacacttttaataat

SEQ ID NO: 382053 - DNA, 33 bp, Homo sapien
cattgtcaagatcaaaagaggaaatgcatataa

SEQ ID NO: 382054 - DNA, 33 bp, Homo sapien
cattgtcaagatcaaatgaggaaatgcatataa

SEQ ID NO: 382055 - DNA, 33 bp, Homo sapien
ctcacagcatctgccgcactaaccaggaagaag

SEQ ID NO: 382056 - DNA, 33 bp, Homo sapien
ctcacagcatctgccgtactaaccaggaagaag

SEQ ID NO: 382057 - DNA, 33 bp, Homo sapien
aatgaatgacctcgaaactgaaaatgaaacaag

SEQ ID NO: 382058 - DNA, 33 bp, Homo sapien
aatgaatgacctcgaacctgaaaatgaaacaag

SEQ ID NO: 382059 - DNA, 33 bp, Homo sapien
acaatgaacgcctttgaatttttcttctaaaag

SEQ ID NO: 382060 - DNA, 33 bp, Homo sapien
acaatgaacgcctttgtatttttcttctaaaag

SEQ ID NO: 382061 - DNA, 33 bp, Homo sapien
atatagttcaacaaatcatatcgtgaaaattga

SEQ ID NO: 382062 - DNA, 33 bp, Homo sapien
atatagttcaacaaattatatcgtgaaaattga

SEQ ID NO: 382063 - DNA, 33 bp, Homo sapien
accttcagaatgagaacaataagggcatatagt

SEQ ID NO: 382064 - DNA, 33 bp, Homo sapien
accttcagaatgagaataataagggcatatagt

SEQ ID NO: 382065 - DNA, 33 bp, Homo sapien
tagaagttggtatagactaaaacaccttcagaa

SEQ ID NO: 382066 - DNA, 33 bp, Homo sapien
tagaagttggtatagattaaaacaccttcagaa

SEQ ID NO: 382067 - DNA, 33 bp, Homo sapien
agaacatattgaaaaacggaactcttaccttca

SEQ ID NO: 382068 - DNA, 33 bp, Homo sapien
agaacatattgaaaaagggaactcttaccttca

SEQ ID NO: 382069 - DNA, 33 bp, Homo sapien
attgagctaaccggccgctgtgtgaattagaac

SEQ ID NO: 382070 - DNA, 33 bp, Homo sapien
attgagctaaccggcctctgtgtgaattagaac

SEQ ID NO: 382071 - DNA, 33 bp, Homo sapien
caagtggcagaaacccaccttcatctgggttaa

SEQ ID NO: 382072 - DNA, 33 bp, Homo sapien
caagtggcagaaacccgccttcatctgggttaa

SEQ ID NO: 382073 - DNA, 33 bp, Homo sapien
tctttctgcagctcacaagtatttcagaaaatg

SEQ ID NO: 382074 - DNA, 33 bp, Homo sapien
tctttctgcagctcacgagtatttcagaaaatg

SEQ ID NO: 382075 - DNA, 33 bp, Homo sapien
aattgacaaagagggaaaaatatagactttgga

SEQ ID NO: 382076 - DNA, 33 bp, Homo sapien
aattgacaaagagggagaaatatagactttgga

SEQ ID NO: 382077 - DNA, 33 bp, Homo sapien
ggcagacctccaggaccgagggaagctaaggaa

SEQ ID NO: 382078 - DNA, 33 bp, Homo sapien
ggcagacctccaggactgagggaagctaaggaa

SEQ ID NO: 382079 - DNA, 33 bp, Homo sapien
acccagaagacccacacggtaccaaaaacttgg

SEQ ID NO: 382080 - DNA, 33 bp, Homo sapien
acccagaagacccacatggtaccaaaaacttgg

SEQ ID NO: 382081 - DNA, 33 bp, Homo sapien
gctgccataatcatgcaagaccaatccacctca

SEQ ID NO: 382082 - DNA, 33 bp, Homo sapien
gctgccataatcatgccagaccaatccacctca

SEQ ID NO: 382083 - DNA, 33 bp, Homo sapien
cagacctgtcttgaccccaaagtctaaggtgtt

SEQ ID NO: 382084 - DNA, 33 bp, Homo sapien
cagacctgtcttgacctcaaagtctaaggtgtt

SEQ ID NO: 382085 - DNA, 33 bp, Homo sapien
aagtctaaggtgttaaactcgagggtctcctgc

SEQ ID NO: 382086 - DNA, 33 bp, Homo sapien
aagtctaaggtgttaacctcgagggtctcctgc

SEQ ID NO: 382087 - DNA, 33 bp, Homo sapien
atttaaaagattagccaggaaggaagatcccac

SEQ ID NO: 382088 - DNA, 33 bp, Homo sapien
atttaaaagattagccgggaaggaagatcccac

SEQ ID NO: 382089 - DNA, 33 bp, Homo sapien
tcactctagaccctgaagacaagccctatacat

SEQ ID NO: 382090 - DNA, 33 bp, Homo sapien
tcactctagaccctgaggacaagccctatacat

SEQ ID NO: 382091 - DNA, 33 bp, Homo sapien
gatgagggagatggacaattcatcaggcctgaa

SEQ ID NO: 382092 - DNA, 33 bp, Homo sapien
gatgagggagatggacgattcatcaggcctgaa

SEQ ID NO: 382093 - DNA, 33 bp, Homo sapien
tgcccagtaaaaggcaaccttcacagatatctg

SEQ ID NO: 382094 - DNA, 33 bp, Homo sapien
tgcccagtaaaaggcacccttcacagatatctg

SEQ ID NO: 382095 - DNA, 33 bp, Homo sapien
aaaacggaactggctgcacccttgatcaccaaa

SEQ ID NO: 382096 - DNA, 33 bp, Homo sapien
aaaacggaactggctgtacccttgatcaccaaa

SEQ ID NO: 382097 - DNA, 33 bp, Homo sapien
gttttctgtttaaagcagaatgtttcgagagcc

SEQ ID NO: 382098 - DNA, 33 bp, Homo sapien
gttttctgtttaaagcggaatgtttcgagagcc

SEQ ID NO: 382099 - DNA, 33 bp, Homo sapien
ggaatccaaagagggcaaatattaaatgtaatt

SEQ ID NO: 382100 - DNA, 33 bp, Homo sapien
ggaatccaaagagggcgaatattaaatgtaatt

SEQ ID NO: 382101 - DNA, 33 bp, Homo sapien
atgtcatgttgagacactacagtttggacatcc

SEQ ID NO: 382102 - DNA, 33 bp, Homo sapien
atgtcatgttgagacagtacagtttggacatcc

SEQ ID NO: 382103 - DNA, 33 bp, Homo sapien
gttgagaaggaggcaaaataatcagtcatcagg

SEQ ID NO: 382104 - DNA, 33 bp, Homo sapien
gttgagaaggaggcaacataatcagtcatcagg

SEQ ID NO: 382105 - DNA, 33 bp, Homo sapien
ttttatttatgaggaaactcaggtgtaaacagg

SEQ ID NO: 382106 - DNA, 33 bp, Homo sapien
ttttatttatgaggaacctcaggtgtaaacagg

SEQ ID NO: 382107 - DNA, 33 bp, Homo sapien
gctgggggaaccatatcatatggtagcatttgt

SEQ ID NO: 382108 - DNA, 33 bp, Homo sapien
gctgggggaaccatatgatatggtagcatttgt

SEQ ID NO: 382109 - DNA, 33 bp, Homo sapien
ctgaaataaatgcttgaaagtgggatcagcata

SEQ ID NO: 382110 - DNA, 33 bp, Homo sapien
ctgaaataaatgcttggaagtgggatcagcata

SEQ ID NO: 382111 - DNA, 33 bp, Homo sapien
tctggaagaattcagggagacctggctgtgtgg

SEQ ID NO: 382112 - DNA, 33 bp, Homo sapien
tctggaagaattcaggtagacctggctgtgtgg

SEQ ID NO: 382113 - DNA, 33 bp, Homo sapien
aatttctatcttgaacagtgcaacccaataatt

SEQ ID NO: 382114 - DNA, 33 bp, Homo sapien
aatttctatcttgaacggtgcaacccaataatt

SEQ ID NO: 382115 - DNA, 33 bp, Homo sapien
tgagaaaggcaagtcacgtagtacagggcaatg

SEQ ID NO: 382116 - DNA, 33 bp, Homo sapien
tgagaaaggcaagtcatgtagtacagggcaatg

SEQ ID NO: 382117 - DNA, 33 bp, Homo sapien
gaaatgccagacaccacgattctcaataaacgt

SEQ ID NO: 382118 - DNA, 33 bp, Homo sapien
gaaatgccagacaccatgattctcaataaacgt

SEQ ID NO: 382119 - DNA, 33 bp, Homo sapien
tacatcgttgcagataactatagggggtgtgtc

SEQ ID NO: 382120 - DNA, 33 bp, Homo sapien
tacatcgttgcagatacctatagggggtgtgtc

SEQ ID NO: 382121 - DNA, 33 bp, Homo sapien
ctcctcaatcagaaagaaccagatcacacctgt

SEQ ID NO: 382122 - DNA, 33 bp, Homo sapien
ctcctcaatcagaaagtaccagatcacacctgt

SEQ ID NO: 382123 - DNA, 33 bp, Homo sapien
gatgagttgatcacctgactgggtttcccaaga

SEQ ID NO: 382124 - DNA, 33 bp, Homo sapien
gatgagttgatcaccttactgggtttcccaaga

SEQ ID NO: 382125 - DNA, 33 bp, Homo sapien
acccaggaagtgaggaactctggacaaaaggag

SEQ ID NO: 382126 - DNA, 33 bp, Homo sapien
acccaggaagtgaggagctctggacaaaaggag

SEQ ID NO: 382127 - DNA, 33 bp, Homo sapien
tcatgcatcacgtaaacagcagtgtctcgggaa

SEQ ID NO: 382128 - DNA, 33 bp, Homo sapien
tcatgcatcacgtaaatagcagtgtctcgggaa

SEQ ID NO: 382129 - DNA, 33 bp, Homo sapien
cctgaatgtgcttgacaatgctcagagagtttt

SEQ ID NO: 382130 - DNA, 33 bp, Homo sapien
cctgaatgtgcttgacgatgctcagagagtttt

SEQ ID NO: 382131 - DNA, 33 bp, Homo sapien
ttgtttaaagctcaatcaatggtgctaaattgc

SEQ ID NO: 382132 - DNA, 33 bp, Homo sapien
ttgtttaaagctcaatgaatggtgctaaattgc

SEQ ID NO: 382133 - DNA, 33 bp, Homo sapien
agaaccaagacactaaccctgcagcatgttcca

SEQ ID NO: 382134 - DNA, 33 bp, Homo sapien
agaaccaagacactaagcctgcagcatgttcca

SEQ ID NO: 382135 - DNA, 33 bp, Homo sapien
caagccaagagttcaacctggtttctctggctc

SEQ ID NO: 382136 - DNA, 33 bp, Homo sapien
caagccaagagttcaatctggtttctctggctc

SEQ ID NO: 382137 - DNA, 33 bp, Homo sapien
tagctccccgcacatcaattcccttctgatgct

SEQ ID NO: 382138 - DNA, 33 bp, Homo sapien
tagctccccgcacatcgattcccttctgatgct

SEQ ID NO: 382139 - DNA, 33 bp, Homo sapien
agcacatctatttccacggaatgtgcatctgat

SEQ ID NO: 382140 - DNA, 33 bp, Homo sapien
agcacatctatttccatggaatgtgcatctgat

SEQ ID NO: 382141 - DNA, 33 bp, Homo sapien
caggtgaaggtaaaaaacaggatagaagattct

SEQ ID NO: 382142 - DNA, 33 bp, Homo sapien
caggtgaaggtaaaaagcaggatagaagattct

SEQ ID NO: 382143 - DNA, 33 bp, Homo sapien
ataaaagctggccagaagcagcattaaatccag

SEQ ID NO: 382144 - DNA, 33 bp, Homo sapien
ataaaagctggccagacgcagcattaaatccag

SEQ ID NO: 382145 - DNA, 33 bp, Homo sapien
ccgcttattttggaaacggttagcacagggttt

SEQ ID NO: 382146 - DNA, 33 bp, Homo sapien
ccgcttattttggaaatggttagcacagggttt

SEQ ID NO: 382147 - DNA, 33 bp, Homo sapien
accatttatggagcatcagaggttgcaatggag

SEQ ID NO: 382148 - DNA, 33 bp, Homo sapien
accatttatggagcattagaggttgcaatggag

SEQ ID NO: 382149 - DNA, 33 bp, Homo sapien
tcagaaaaactagacacgtgtatttgatggtgg

SEQ ID NO: 382150 - DNA, 33 bp, Homo sapien
tcagaaaaactagacatgtgtatttgatggtgg

SEQ ID NO: 382151 - DNA, 33 bp, Homo sapien
ccatggccaggcgatagcattttcagcttcagt

SEQ ID NO: 382152 - DNA, 33 bp, Homo sapien
ccatggccaggcgatatcattttcagcttcagt

SEQ ID NO: 382153 - DNA, 33 bp, Homo sapien
atcctatgcacaactcacatggaattccccaag

SEQ ID NO: 382154 - DNA, 33 bp, Homo sapien
atcctatgcacaactcgcatggaattccccaag

SEQ ID NO: 382155 - DNA, 33 bp, Homo sapien
catcagcaacctttccggagcacttactacaag

SEQ ID NO: 382156 - DNA, 33 bp, Homo sapien
catcagcaacctttcctgagcacttactacaag

SEQ ID NO: 382157 - DNA, 33 bp, Homo sapien
gttaaattaaacttacagccagttatcagagtc

SEQ ID NO: 382158 - DNA, 33 bp, Homo sapien
gttaaattaaacttacggccagttatcagagtc

SEQ ID NO: 382159 - DNA, 33 bp, Homo sapien
gcccactgaaagttaaccatcttcttgcagttc

SEQ ID NO: 382160 - DNA, 33 bp, Homo sapien
gcccactgaaagttaatcatcttcttgcagttc

SEQ ID NO: 382161 - DNA, 33 bp, Homo sapien
aaaaagtttcacagtcaagtccgtcactcagta

SEQ ID NO: 382162 - DNA, 33 bp, Homo sapien
aaaaagtttcacagtcgagtccgtcactcagta

SEQ ID NO: 382163 - DNA, 33 bp, Homo sapien
aaccaaagcctttcacaaagacagccaggagtg

SEQ ID NO: 382164 - DNA, 33 bp, Homo sapien
aaccaaagcctttcacgaagacagccaggagtg

SEQ ID NO: 382165 - DNA, 33 bp, Homo sapien
taggaacttgtaaaaaacacagtgctgcagccc

SEQ ID NO: 382166 - DNA, 33 bp, Homo sapien
taggaacttgtaaaaaccacagtgctgcagccc

SEQ ID NO: 382167 - DNA, 33 bp, Homo sapien
atgcggacctcttcacaggccattattctgcca

SEQ ID NO: 382168 - DNA, 33 bp, Homo sapien
atgcggacctcttcacgggccattattctgcca

SEQ ID NO: 382169 - DNA, 33 bp, Homo sapien
agtcactaacacactacgaaaatcaaatgcaat

SEQ ID NO: 382170 - DNA, 33 bp, Homo sapien
agtcactaacacactatgaaaatcaaatgcaat

SEQ ID NO: 382171 - DNA, 33 bp, Homo sapien
cgctggggagggagtacgtccagtagaagtcaa

SEQ ID NO: 382172 - DNA, 33 bp, Homo sapien
cgctggggagggagtatgtccagtagaagtcaa

SEQ ID NO: 382173 - DNA, 33 bp, Homo sapien
aacgtgtcttgctttacggtaattcattttatg

SEQ ID NO: 382174 - DNA, 33 bp, Homo sapien
aacgtgtcttgctttatggtaattcattttatg

SEQ ID NO: 382175 - DNA, 33 bp, Homo sapien
cattggtcaggaagcccggctgaatatcttaac

SEQ ID NO: 382176 - DNA, 33 bp, Homo sapien
cattggtcaggaagcctggctgaatatcttaac

SEQ ID NO: 382177 - DNA, 33 bp, Homo sapien
catgtgacggatacacagaaggcttgggcagtg

SEQ ID NO: 382178 - DNA, 33 bp, Homo sapien
catgtgacggatacacggaaggcttgggcagtg

SEQ ID NO: 382179 - DNA, 33 bp, Homo sapien
cagcaggaagcaatgcacaggccagtgtatccc

SEQ ID NO: 382180 - DNA, 33 bp, Homo sapien
cagcaggaagcaatgcgcaggccagtgtatccc

SEQ ID NO: 382181 - DNA, 33 bp, Homo sapien
gtaagacttggggaagaagctacagtcacacgt

SEQ ID NO: 382182 - DNA, 33 bp, Homo sapien
gtaagacttggggaaggagctacagtcacacgt

SEQ ID NO: 382183 - DNA, 33 bp, Homo sapien
agtgtgcttacacaaacaaatctggatcgtata

SEQ ID NO: 382184 - DNA, 33 bp, Homo sapien
agtgtgcttacacaaagaaatctggatcgtata

SEQ ID NO: 382185 - DNA, 33 bp, Homo sapien
agaattcatcgcttccgaattgttttgctacct

SEQ ID NO: 382186 - DNA, 33 bp, Homo sapien
agaattcatcgcttcctaattgttttgctacct

SEQ ID NO: 382187 - DNA, 33 bp, Homo sapien
gttaagtgacttctacagggcaaaaatatcctt

SEQ ID NO: 382188 - DNA, 33 bp, Homo sapien
gttaagtgacttctacggggcaaaaatatcctt

SEQ ID NO: 382189 - DNA, 33 bp, Homo sapien
tatgtcttccccattcactgagacctttgctga

SEQ ID NO: 382190 - DNA, 33 bp, Homo sapien
tatgtcttccccattcgctgagacctttgctga

SEQ ID NO: 382191 - DNA, 33 bp, Homo sapien
gtggtaagatctgacagtcaagaaagcaaccaa

SEQ ID NO: 382192 - DNA, 33 bp, Homo sapien
gtggtaagatctgacattcaagaaagcaaccaa

SEQ ID NO: 382193 - DNA, 33 bp, Homo sapien
ctgcagatctccgcaacagacaaggacataaca

SEQ ID NO: 382194 - DNA, 33 bp, Homo sapien
ctgcagatctccgcaatagacaaggacataaca

SEQ ID NO: 382195 - DNA, 33 bp, Homo sapien
ggctgagcagggaaagacctatagacacagggc

SEQ ID NO: 382196 - DNA, 33 bp, Homo sapien
ggctgagcagggaaaggcctatagacacagggc

SEQ ID NO: 382197 - DNA, 33 bp, Homo sapien
caggatagatgtcgacgccttcttgctcctcct

SEQ ID NO: 382198 - DNA, 33 bp, Homo sapien
caggatagatgtcgactccttcttgctcctcct

SEQ ID NO: 382199 - DNA, 33 bp, Homo sapien
aactagtaggaaccaacttgggccattttaaca

SEQ ID NO: 382200 - DNA, 33 bp, Homo sapien
aactagtaggaaccaagttgggccattttaaca

SEQ ID NO: 382201 - DNA, 33 bp, Homo sapien
cattaatttcccatcaatcatgccatgatgttt

SEQ ID NO: 382202 - DNA, 33 bp, Homo sapien
cattaatttcccatcagtcatgccatgatgttt

SEQ ID NO: 382203 - DNA, 33 bp, Homo sapien
ttagtctatggttgtccctcttctgatctggga

SEQ ID NO: 382204 - DNA, 33 bp, Homo sapien
ttagtctatggttgtctctcttctgatctggga

SEQ ID NO: 382205 - DNA, 33 bp, Homo sapien
tgaactgatgaaaaaaaaaaggatgtggaaaac

SEQ ID NO: 382206 - DNA, 33 bp, Homo sapien
tgaactgatgaaaaaagaaaggatgtggaaaac

SEQ ID NO: 382207 - DNA, 33 bp, Homo sapien
ggtgttgccagtcaccaaggaacagaacactag

SEQ ID NO: 382208 - DNA, 33 bp, Homo sapien
ggtgttgccagtcaccgaggaacagaacactag

SEQ ID NO: 382209 - DNA, 33 bp, Homo sapien
tttccccagaaaggccactggagataggagagg

SEQ ID NO: 382210 - DNA, 33 bp, Homo sapien
tttccccagaaaggccgctggagataggagagg

SEQ ID NO: 382211 - DNA, 33 bp, Homo sapien
gggatgaatgacatcacggatcctgttctttgc

SEQ ID NO: 382212 - DNA, 33 bp, Homo sapien
gggatgaatgacatcatggatcctgttctttgc

SEQ ID NO: 382213 - DNA, 33 bp, Homo sapien
gatgtctgctctgagcacagaagtggtgaattt

SEQ ID NO: 382214 - DNA, 33 bp, Homo sapien
gatgtctgctctgagcgcagaagtggtgaattt

SEQ ID NO: 382215 - DNA, 33 bp, Homo sapien
ctgaaccccacattcacgtacccaactgtctgc

SEQ ID NO: 382216 - DNA, 33 bp, Homo sapien
ctgaaccccacattcatgtacccaactgtctgc

SEQ ID NO: 382217 - DNA, 33 bp, Homo sapien
tcctgcaaaaagcgtccagaaatttccccaata

SEQ ID NO: 382218 - DNA, 33 bp, Homo sapien
tcctgcaaaaagcgtctagaaatttccccaata

SEQ ID NO: 382219 - DNA, 33 bp, Homo sapien
agcacctacctcataaagctgctaagatttgta

SEQ ID NO: 382220 - DNA, 33 bp, Homo sapien
agcacctacctcataaggctgctaagatttgta

SEQ ID NO: 382221 - DNA, 33 bp, Homo sapien
taaaacactctgaccacgcccctctttgccctt

SEQ ID NO: 382222 - DNA, 33 bp, Homo sapien
taaaacactctgaccatgcccctctttgccctt

SEQ ID NO: 382223 - DNA, 33 bp, Homo sapien
agaacaggaggtcctcacacatccctggatgat

SEQ ID NO: 382224 - DNA, 33 bp, Homo sapien
agaacaggaggtcctcgcacatccctggatgat

SEQ ID NO: 382225 - DNA, 33 bp, Homo sapien
tcttttctttataaataatccggcctcaggtat

SEQ ID NO: 382226 - DNA, 33 bp, Homo sapien
tcttttctttataaattatccggcctcaggtat

SEQ ID NO: 382227 - DNA, 33 bp, Homo sapien
caaacttgtatacacacagacatctacactgac

SEQ ID NO: 382228 - DNA, 33 bp, Homo sapien
caaacttgtatacacatagacatctacactgac

SEQ ID NO: 382229 - DNA, 33 bp, Homo sapien
gagacacagagtagaacgcacctcaaagtgacg

SEQ ID NO: 382230 - DNA, 33 bp, Homo sapien
gagacacagagtagaatgcacctcaaagtgacg

SEQ ID NO: 382231 - DNA, 33 bp, Homo sapien
gcttgtcactctgaaaagctgagattggagggt

SEQ ID NO: 382232 - DNA, 33 bp, Homo sapien
gcttgtcactctgaaaggctgagattggagggt

SEQ ID NO: 382233 - DNA, 33 bp, Homo sapien
ccagtgctctaaggacaaggccctgttgtgccc

SEQ ID NO: 382234 - DNA, 33 bp, Homo sapien
ccagtgctctaaggacgaggccctgttgtgccc

SEQ ID NO: 382235 - DNA, 33 bp, Homo sapien
agcccaatgctgccacaactacattgtcaccct

SEQ ID NO: 382236 - DNA, 33 bp, Homo sapien
agcccaatgctgccacgactacattgtcaccct

SEQ ID NO: 382237 - DNA, 33 bp, Homo sapien
acattttgctactgtgcatcctgttcgtgtcct

SEQ ID NO: 382238 - DNA, 33 bp, Homo sapien
acattttgctactgtgtatcctgttcgtgtcct

SEQ ID NO: 382239 - DNA, 33 bp, Homo sapien
agtaatctgcattttgaaggagccgaaacctct

SEQ ID NO: 382240 - DNA, 33 bp, Homo sapien
agtaatctgcattttggaggagccgaaacctct

SEQ ID NO: 382241 - DNA, 33 bp, Homo sapien
ctctgccttcagaggaatccgatgaaagggtct

SEQ ID NO: 382242 - DNA, 33 bp, Homo sapien
ctctgccttcagaggattccgatgaaagggtct

SEQ ID NO: 382243 - DNA, 33 bp, Homo sapien
gaaagagcaaggaaaccagcgtaactggactgg

SEQ ID NO: 382244 - DNA, 33 bp, Homo sapien
gaaagagcaaggaaactagcgtaactggactgg

SEQ ID NO: 382245 - DNA, 33 bp, Homo sapien
actattagcaacacataatctcaaactactcca

SEQ ID NO: 382246 - DNA, 33 bp, Homo sapien
actattagcaacacatcatctcaaactactcca

SEQ ID NO: 382247 - DNA, 33 bp, Homo sapien
gataggaaaacttgaccgagttcagaaaaagaa

SEQ ID NO: 382248 - DNA, 33 bp, Homo sapien
gataggaaaacttgactgagttcagaaaaagaa

SEQ ID NO: 382249 - DNA, 33 bp, Homo sapien
tgcctctggacaaaaccgtactgcctctctagt

SEQ ID NO: 382250 - DNA, 33 bp, Homo sapien
tgcctctggacaaaactgtactgcctctctagt

SEQ ID NO: 382251 - DNA, 33 bp, Homo sapien
gctcccagtcatccccaaaaaagaggatactgt

SEQ ID NO: 382252 - DNA, 33 bp, Homo sapien
gctcccagtcatcccccaaaaagaggatactgt

SEQ ID NO: 382253 - DNA, 33 bp, Homo sapien
ggacagtagcaggaaaagacaggggctccgaat

SEQ ID NO: 382254 - DNA, 33 bp, Homo sapien
ggacagtagcaggaaaggacaggggctccgaat

SEQ ID NO: 382255 - DNA, 33 bp, Homo sapien
ctttgatgcagacttacgctggtaaaaatgggt

SEQ ID NO: 382256 - DNA, 33 bp, Homo sapien
ctttgatgcagacttatgctggtaaaaatgggt

SEQ ID NO: 382257 - DNA, 33 bp, Homo sapien
tgaactgtccattggagctaaggtttgccttgc

SEQ ID NO: 382258 - DNA, 33 bp, Homo sapien
tgaactgtccattggatctaaggtttgccttgc

SEQ ID NO: 382259 - DNA, 33 bp, Homo sapien
acccattgtaagtatacagtttgatgtgttttg

SEQ ID NO: 382260 - DNA, 33 bp, Homo sapien
acccattgtaagtatatagtttgatgtgttttg

SEQ ID NO: 382261 - DNA, 33 bp, Homo sapien
gctctaaaagcaactgaagaactttcaaaataa

SEQ ID NO: 382262 - DNA, 33 bp, Homo sapien
gctctaaaagcaactggagaactttcaaaataa

SEQ ID NO: 382263 - DNA, 33 bp, Homo sapien
agtgactacataaaaacagagatgcagcaaagg

SEQ ID NO: 382264 - DNA, 33 bp, Homo sapien
agtgactacataaaaatagagatgcagcaaagg

SEQ ID NO: 382265 - DNA, 33 bp, Homo sapien
tcaaacaggtcctcccacagggtttcacagccc

SEQ ID NO: 382266 - DNA, 33 bp, Homo sapien
tcaaacaggtcctcccgcagggtttcacagccc

SEQ ID NO: 382267 - DNA, 33 bp, Homo sapien
tttaggtccagtctgaaaagtatgtaaatgtct

SEQ ID NO: 382268 - DNA, 33 bp, Homo sapien
tttaggtccagtctgagaagtatgtaaatgtct

SEQ ID NO: 382269 - DNA, 33 bp, Homo sapien
aaataacacactgtaccgatgagttacaaatgt

SEQ ID NO: 382270 - DNA, 33 bp, Homo sapien
aaataacacactgtactgatgagttacaaatgt

SEQ ID NO: 382271 - DNA, 33 bp, Homo sapien
ttaggcactgatgacaatagaattctgtactta

SEQ ID NO: 382272 - DNA, 33 bp, Homo sapien
ttaggcactgatgacagtagaattctgtactta

SEQ ID NO: 382273 - DNA, 33 bp, Homo sapien
ttttaggttgccactacattgtttcgagcaacg

SEQ ID NO: 382274 - DNA, 33 bp, Homo sapien
ttttaggttgccactatattgtttcgagcaacg

SEQ ID NO: 382275 - DNA, 33 bp, Homo sapien
acagagtacagcacacaaggcataaagtgaccc

SEQ ID NO: 382276 - DNA, 33 bp, Homo sapien
acagagtacagcacacgaggcataaagtgaccc

SEQ ID NO: 382277 - DNA, 33 bp, Homo sapien
cttcccagtcaacaccaaactcaggtggtctta

SEQ ID NO: 382278 - DNA, 33 bp, Homo sapien
cttcccagtcaacaccgaactcaggtggtctta

SEQ ID NO: 382279 - DNA, 33 bp, Homo sapien
ttcagaccccagacaaccctgaagtgtcagagg

SEQ ID NO: 382280 - DNA, 33 bp, Homo sapien
ttcagaccccagacaatcctgaagtgtcagagg

SEQ ID NO: 382281 - DNA, 33 bp, Homo sapien
gaggctaaagcataacaaagcatcatgttcaga

SEQ ID NO: 382282 - DNA, 33 bp, Homo sapien
gaggctaaagcataacgaagcatcatgttcaga

SEQ ID NO: 382283 - DNA, 33 bp, Homo sapien
gtgtaaataatttgcacggctgttcggtcctgc

SEQ ID NO: 382284 - DNA, 33 bp, Homo sapien
gtgtaaataatttgcatggctgttcggtcctgc

SEQ ID NO: 382285 - DNA, 33 bp, Homo sapien
taccaagtatctttgacggaaaactaggccttg

SEQ ID NO: 382286 - DNA, 33 bp, Homo sapien
taccaagtatctttgatggaaaactaggccttg

SEQ ID NO: 382287 - DNA, 33 bp, Homo sapien
gtttcgtgtttgaaagaagcggatgtccctgtc

SEQ ID NO: 382288 - DNA, 33 bp, Homo sapien
gtttcgtgtttgaaaggagcggatgtccctgtc

SEQ ID NO: 382289 - DNA, 33 bp, Homo sapien
tctagcttgagtttcaactaatcatggtggtat

SEQ ID NO: 382290 - DNA, 33 bp, Homo sapien
tctagcttgagtttcagctaatcatggtggtat

SEQ ID NO: 382291 - DNA, 33 bp, Homo sapien
taagatagttcagtcccgcacaaaatctatact

SEQ ID NO: 382292 - DNA, 33 bp, Homo sapien
taagatagttcagtcctgcacaaaatctatact

SEQ ID NO: 382293 - DNA, 33 bp, Homo sapien
tgcctctccatccttgaagcactactcaaccac

SEQ ID NO: 382294 - DNA, 33 bp, Homo sapien
tgcctctccatccttgcagcactactcaaccac

SEQ ID NO: 382295 - DNA, 33 bp, Homo sapien
gtaaaggcatcgtagcaaatgaatgttatcaat

SEQ ID NO: 382296 - DNA, 33 bp, Homo sapien
gtaaaggcatcgtagcgaatgaatgttatcaat

SEQ ID NO: 382297 - DNA, 33 bp, Homo sapien
gcatgtgggaagtcacaaagagcttgcagtggt

SEQ ID NO: 382298 - DNA, 33 bp, Homo sapien
gcatgtgggaagtcacgaagagcttgcagtggt

SEQ ID NO: 382299 - DNA, 33 bp, Homo sapien
catacagggtattttaacattgctacctttaag

SEQ ID NO: 382300 - DNA, 33 bp, Homo sapien
catacagggtattttaccattgctacctttaag

SEQ ID NO: 382301 - DNA, 33 bp, Homo sapien
gagccatgcagccttcagaagctgagagatgct

SEQ ID NO: 382302 - DNA, 33 bp, Homo sapien
gagccatgcagccttcggaagctgagagatgct

SEQ ID NO: 382303 - DNA, 33 bp, Homo sapien
ctattcctgcctaacaaaagaaagggtcagtgg

SEQ ID NO: 382304 - DNA, 33 bp, Homo sapien
ctattcctgcctaacacaagaaagggtcagtgg

SEQ ID NO: 382305 - DNA, 33 bp, Homo sapien
tcatagctgtcaccttcaagatcttcctgatgt

SEQ ID NO: 382306 - DNA, 33 bp, Homo sapien
tcatagctgtcacctttaagatcttcctgatgt

SEQ ID NO: 382307 - DNA, 33 bp, Homo sapien
ttgcagtggttgtgacaaagactgtggatgcat

SEQ ID NO: 382308 - DNA, 33 bp, Homo sapien
ttgcagtggttgtgacgaagactgtggatgcat

SEQ ID NO: 382309 - DNA, 33 bp, Homo sapien
gaattctagagatacaacctttgcatgtgacat

SEQ ID NO: 382310 - DNA, 33 bp, Homo sapien
gaattctagagatacatcctttgcatgtgacat

SEQ ID NO: 382311 - DNA, 33 bp, Homo sapien
tttccaagcgcggtaaagcaggacaacaacgcg

SEQ ID NO: 382312 - DNA, 33 bp, Homo sapien
tttccaagcgcggtaaggcaggacaacaacgcg

SEQ ID NO: 382313 - DNA, 33 bp, Homo sapien
tggggcagagggttagaaaaaggacacaatcag

SEQ ID NO: 382314 - DNA, 33 bp, Homo sapien
tggggcagagggttagtaaaaggacacaatcag

SEQ ID NO: 382315 - DNA, 33 bp, Homo sapien
aacttaatatttgatcacttaactctgtgctat

SEQ ID NO: 382316 - DNA, 33 bp, Homo sapien
aacttaatatttgatcccttaactctgtgctat

SEQ ID NO: 382317 - DNA, 33 bp, Homo sapien
gcatttccacaggctgcagtctcaaagaaagta

SEQ ID NO: 382318 - DNA, 33 bp, Homo sapien
gcatttccacaggctgtagtctcaaagaaagta

SEQ ID NO: 382319 - DNA, 33 bp, Homo sapien
aatcccccaatttatgcaacaggcaaacatact

SEQ ID NO: 382320 - DNA, 33 bp, Homo sapien
aatcccccaatttatggaacaggcaaacatact

SEQ ID NO: 382321 - DNA, 33 bp, Homo sapien
aggcgattcctccatacatttgacagctgtctg

SEQ ID NO: 382322 - DNA, 33 bp, Homo sapien
aggcgattcctccatatatttgacagctgtctg

SEQ ID NO: 382323 - DNA, 33 bp, Homo sapien
cctgaaataaggtgaaaatgaacacagatcccc

SEQ ID NO: 382324 - DNA, 33 bp, Homo sapien
cctgaaataaggtgaacatgaacacagatcccc

SEQ ID NO: 382325 - DNA, 33 bp, Homo sapien
gtgtttcctttcatgaagtccataggtatgaga

SEQ ID NO: 382326 - DNA, 33 bp, Homo sapien
gtgtttcctttcatgacgtccataggtatgaga

SEQ ID NO: 382327 - DNA, 33 bp, Homo sapien
ttatgactgggccttacgactgggtagagtggt

SEQ ID NO: 382328 - DNA, 33 bp, Homo sapien
ttatgactgggccttatgactgggtagagtggt

SEQ ID NO: 382329 - DNA, 33 bp, Homo sapien
aactttcttgccttgacacccagtgagctgggg

SEQ ID NO: 382330 - DNA, 33 bp, Homo sapien
aactttcttgccttgatacccagtgagctgggg

SEQ ID NO: 382331 - DNA, 33 bp, Homo sapien
gaggcatagatcctatcagctgaaaaccaaaac

SEQ ID NO: 382332 - DNA, 33 bp, Homo sapien
gaggcatagatcctattagctgaaaaccaaaac

SEQ ID NO: 382333 - DNA, 33 bp, Homo sapien
ttgtgcttatccatgcaatgtgttcccaggaaa

SEQ ID NO: 382334 - DNA, 33 bp, Homo sapien
ttgtgcttatccatgcgatgtgttcccaggaaa

SEQ ID NO: 382335 - DNA, 33 bp, Homo sapien
agtcctatacccgcaccacatggcccaggtgag

SEQ ID NO: 382336 - DNA, 33 bp, Homo sapien
agtcctatacccgcactacatggcccaggtgag

SEQ ID NO: 382337 - DNA, 33 bp, Homo sapien
actgcttgttgacaccacagtacacacagtgcc

SEQ ID NO: 382338 - DNA, 33 bp, Homo sapien
actgcttgttgacaccgcagtacacacagtgcc

SEQ ID NO: 382339 - DNA, 33 bp, Homo sapien
cccttcggcacctggagccaatgtcttctgaat

SEQ ID NO: 382340 - DNA, 33 bp, Homo sapien
cccttcggcacctggatccaatgtcttctgaat

SEQ ID NO: 382341 - DNA, 33 bp, Homo sapien
cttcccaccaagttacaggccacaggctctggg

SEQ ID NO: 382342 - DNA, 33 bp, Homo sapien
cttcccaccaagttacgggccacaggctctggg

SEQ ID NO: 382343 - DNA, 33 bp, Homo sapien
catttcttggacctgacagtgagaagcttctca

SEQ ID NO: 382344 - DNA, 33 bp, Homo sapien
catttcttggacctgatagtgagaagcttctca

SEQ ID NO: 382345 - DNA, 33 bp, Homo sapien
tgaatttgagcaccacactcgtggaataatcgt

SEQ ID NO: 382346 - DNA, 33 bp, Homo sapien
tgaatttgagcaccacgctcgtggaataatcgt

SEQ ID NO: 382347 - DNA, 33 bp, Homo sapien
gcagttgaccaggggaaagaattgagctttttg

SEQ ID NO: 382348 - DNA, 33 bp, Homo sapien
gcagttgaccaggggagagaattgagctttttg

SEQ ID NO: 382349 - DNA, 33 bp, Homo sapien
tatccatcattttcccacaagactgacagctga

SEQ ID NO: 382350 - DNA, 33 bp, Homo sapien
tatccatcattttccctcaagactgacagctga

SEQ ID NO: 382351 - DNA, 33 bp, Homo sapien
caagggaatcatgaagcctctgggccagtctat

SEQ ID NO: 382352 - DNA, 33 bp, Homo sapien
caagggaatcatgaaggctctgggccagtctat

SEQ ID NO: 382353 - DNA, 33 bp, Homo sapien
gggacaggctcagagaaagagatgataaacaaa

SEQ ID NO: 382354 - DNA, 33 bp, Homo sapien
gggacaggctcagagagagagatgataaacaaa

SEQ ID NO: 382355 - DNA, 33 bp, Homo sapien
tgtcttggtctctaagaaaaggtaggcactatg

SEQ ID NO: 382356 - DNA, 33 bp, Homo sapien
tgtcttggtctctaaggaaaggtaggcactatg

SEQ ID NO: 382357 - DNA, 33 bp, Homo sapien
gggccttaccctttccagagagcctgatttagt

SEQ ID NO: 382358 - DNA, 33 bp, Homo sapien
gggccttaccctttccggagagcctgatttagt

SEQ ID NO: 382359 - DNA, 33 bp, Homo sapien
ggtcagtgcctcagcaaacctcctcaagaatgt

SEQ ID NO: 382360 - DNA, 33 bp, Homo sapien
ggtcagtgcctcagcagacctcctcaagaatgt

SEQ ID NO: 382361 - DNA, 33 bp, Homo sapien
gacatctgcaggggcacgactgggaaacctagc

SEQ ID NO: 382362 - DNA, 33 bp, Homo sapien
gacatctgcaggggcatgactgggaaacctagc

SEQ ID NO: 382363 - DNA, 33 bp, Homo sapien
tactgtgaggacaagacgagcgaaagatgaggc

SEQ ID NO: 382364 - DNA, 33 bp, Homo sapien
tactgtgaggacaagatgagcgaaagatgaggc

SEQ ID NO: 382365 - DNA, 33 bp, Homo sapien
caagacctacagaagaagactcgtggtcaacat

SEQ ID NO: 382366 - DNA, 33 bp, Homo sapien
caagacctacagaagacgactcgtggtcaacat

SEQ ID NO: 382367 - DNA, 33 bp, Homo sapien
gaagccagtgagatagaagagccaaaagctggc

SEQ ID NO: 382368 - DNA, 33 bp, Homo sapien
gaagccagtgagataggagagccaaaagctggc

SEQ ID NO: 382369 - DNA, 33 bp, Homo sapien
cctagatcttttcccaatctgcacacttcggtg

SEQ ID NO: 382370 - DNA, 33 bp, Homo sapien
cctagatcttttcccagtctgcacacttcggtg

SEQ ID NO: 382371 - DNA, 33 bp, Homo sapien
aatctctgcaaatggccctaaatgagggtaaat

SEQ ID NO: 382372 - DNA, 33 bp, Homo sapien
aatctctgcaaatggctctaaatgagggtaaat

SEQ ID NO: 382373 - DNA, 33 bp, Homo sapien
gcctgtggcggcaacacgtaggtagcatttcca

SEQ ID NO: 382374 - DNA, 33 bp, Homo sapien
gcctgtggcggcaacatgtaggtagcatttcca

SEQ ID NO: 382375 - DNA, 33 bp, Homo sapien
ggcatagaagcaaggaagtaggcacttacattg

SEQ ID NO: 382376 - DNA, 33 bp, Homo sapien
ggcatagaagcaaggaggtaggcacttacattg

SEQ ID NO: 382377 - DNA, 33 bp, Homo sapien
gccgggcagccgaggaaagcctgcggagcttgg

SEQ ID NO: 382378 - DNA, 33 bp, Homo sapien
gccgggcagccgaggagagcctgcggagcttgg

SEQ ID NO: 382379 - DNA, 33 bp, Homo sapien
atccaagaagaggaaacggcaagtgaaaaagtg

SEQ ID NO: 382380 - DNA, 33 bp, Homo sapien
atccaagaagaggaaatggcaagtgaaaaagtg

SEQ ID NO: 382381 - DNA, 33 bp, Homo sapien
taatgagctaacctagaattctaagtcccagcc

SEQ ID NO: 382382 - DNA, 33 bp, Homo sapien
taatgagctaacctaggattctaagtcccagcc

SEQ ID NO: 382383 - DNA, 33 bp, Homo sapien
cctgtcctcggaggccaatggtaaaatgcagat

SEQ ID NO: 382384 - DNA, 33 bp, Homo sapien
cctgtcctcggaggcccatggtaaaatgcagat

SEQ ID NO: 382385 - DNA, 33 bp, Homo sapien
ccgaatgaagagcaaacggctgaagtgccctcc

SEQ ID NO: 382386 - DNA, 33 bp, Homo sapien
ccgaatgaagagcaaatggctgaagtgccctcc

SEQ ID NO: 382387 - DNA, 33 bp, Homo sapien
cgctcctgcctcctgaaaagggtcatcatctgg

SEQ ID NO: 382388 - DNA, 33 bp, Homo sapien
cgctcctgcctcctgagaagggtcatcatctgg

SEQ ID NO: 382389 - DNA, 33 bp, Homo sapien
ggaaagaatgactcaacagggggagataaatag

SEQ ID NO: 382390 - DNA, 33 bp, Homo sapien
ggaaagaatgactcaatagggggagataaatag

SEQ ID NO: 382391 - DNA, 33 bp, Homo sapien
caacaggacaggagcaaaagaggggtgaagtga

SEQ ID NO: 382392 - DNA, 33 bp, Homo sapien
caacaggacaggagcagaagaggggtgaagtga

SEQ ID NO: 382393 - DNA, 33 bp, Homo sapien
gatattaaaatctagcacatgaaacccatttct

SEQ ID NO: 382394 - DNA, 33 bp, Homo sapien
gatattaaaatctagcccatgaaacccatttct

SEQ ID NO: 382395 - DNA, 33 bp, Homo sapien
ctagagaagccaggaacgtgtgcacgtgaatga

SEQ ID NO: 382396 - DNA, 33 bp, Homo sapien
ctagagaagccaggaatgtgtgcacgtgaatga

SEQ ID NO: 382397 - DNA, 33 bp, Homo sapien
gagagtcacctcccaaatccaggaagcaaaagg

SEQ ID NO: 382398 - DNA, 33 bp, Homo sapien
gagagtcacctcccaagtccaggaagcaaaagg

SEQ ID NO: 382399 - DNA, 33 bp, Homo sapien
aggacagacagaaaaacagccagttaagtggtc

SEQ ID NO: 382400 - DNA, 33 bp, Homo sapien
aggacagacagaaaaatagccagttaagtggtc

SEQ ID NO: 382401 - DNA, 33 bp, Homo sapien
agtggctatacctggacaggggccctgcagctc

SEQ ID NO: 382402 - DNA, 33 bp, Homo sapien
agtggctatacctggataggggccctgcagctc

SEQ ID NO: 382403 - DNA, 33 bp, Homo sapien
catttcaatgatcagaaggacaaaagagaaaga

SEQ ID NO: 382404 - DNA, 33 bp, Homo sapien
catttcaatgatcagagggacaaaagagaaaga

SEQ ID NO: 382405 - DNA, 33 bp, Homo sapien
actttatggatacttcaaaaggaccgcactttg

SEQ ID NO: 382406 - DNA, 33 bp, Homo sapien
actttatggatacttcgaaaggaccgcactttg

SEQ ID NO: 382407 - DNA, 33 bp, Homo sapien
ttaaacggatgggtgcacttaaagcatcagaaa

SEQ ID NO: 382408 - DNA, 33 bp, Homo sapien
ttaaacggatgggtgcgcttaaagcatcagaaa

SEQ ID NO: 382409 - DNA, 33 bp, Homo sapien
gttaggtactaccagaaatagatagaggatgtc

SEQ ID NO: 382410 - DNA, 33 bp, Homo sapien
gttaggtactaccagagatagatagaggatgtc

SEQ ID NO: 382411 - DNA, 33 bp, Homo sapien
gattccaatatttataaaaggtctgttccaagt

SEQ ID NO: 382412 - DNA, 33 bp, Homo sapien
gattccaatatttatagaaggtctgttccaagt

SEQ ID NO: 382413 - DNA, 33 bp, Homo sapien
tttctaaattcaggccaacttcatgttttttgt

SEQ ID NO: 382414 - DNA, 33 bp, Homo sapien
tttctaaattcaggccgacttcatgttttttgt

SEQ ID NO: 382415 - DNA, 33 bp, Homo sapien
attatcctctatattcaagaaacacttacttca

SEQ ID NO: 382416 - DNA, 33 bp, Homo sapien
attatcctctatattcgagaaacacttacttca

SEQ ID NO: 382417 - DNA, 33 bp, Homo sapien
tttttcaacaaataacactgggacatctggata

SEQ ID NO: 382418 - DNA, 33 bp, Homo sapien
tttttcaacaaataacgctgggacatctggata

SEQ ID NO: 382419 - DNA, 33 bp, Homo sapien
agctccaaggagcaaacacagtttacaatccta

SEQ ID NO: 382420 - DNA, 33 bp, Homo sapien
agctccaaggagcaaatacagtttacaatccta

SEQ ID NO: 382421 - DNA, 33 bp, Homo sapien
agacctatgagtctgacgggtaactagcttgac

SEQ ID NO: 382422 - DNA, 33 bp, Homo sapien
agacctatgagtctgatgggtaactagcttgac

SEQ ID NO: 382423 - DNA, 33 bp, Homo sapien
agtgtttacacttagaaacctggattctttttt

SEQ ID NO: 382424 - DNA, 33 bp, Homo sapien
agtgtttacacttagagacctggattctttttt

SEQ ID NO: 382425 - DNA, 33 bp, Homo sapien
ggaaggcttttcagataaggagcaggcagccag

SEQ ID NO: 382426 - DNA, 33 bp, Homo sapien
ggaaggcttttcagatgaggagcaggcagccag

SEQ ID NO: 382427 - DNA, 33 bp, Homo sapien
tgtaggggagacatgacggccaacagggacctg

SEQ ID NO: 382428 - DNA, 33 bp, Homo sapien
tgtaggggagacatgagggccaacagggacctg

SEQ ID NO: 382429 - DNA, 33 bp, Homo sapien
tggggaaagctctccccgctatgacagatagga

SEQ ID NO: 382430 - DNA, 33 bp, Homo sapien
tggggaaagctctccctgctatgacagatagga

SEQ ID NO: 382431 - DNA, 33 bp, Homo sapien
taaaatctgagcagcactcttgcctattcttcc

SEQ ID NO: 382432 - DNA, 33 bp, Homo sapien
taaaatctgagcagcattcttgcctattcttcc

SEQ ID NO: 382433 - DNA, 33 bp, Homo sapien
tgcctcatccttgtgcagcaatatcccaaccac

SEQ ID NO: 382434 - DNA, 33 bp, Homo sapien
tgcctcatccttgtgcggcaatatcccaaccac

SEQ ID NO: 382435 - DNA, 33 bp, Homo sapien
gaagcttcacaaccaccggcactgtcaggttgc

SEQ ID NO: 382436 - DNA, 33 bp, Homo sapien
gaagcttcacaaccactggcactgtcaggttgc

SEQ ID NO: 382437 - DNA, 33 bp, Homo sapien
cagggtcaatggggtaaaagatgttgatagtgt

SEQ ID NO: 382438 - DNA, 33 bp, Homo sapien
cagggtcaatggggtagaagatgttgatagtgt

SEQ ID NO: 382439 - DNA, 33 bp, Homo sapien
tgtctgtaagtagggaagaaagccagggtgcag

SEQ ID NO: 382440 - DNA, 33 bp, Homo sapien
tgtctgtaagtagggatgaaagccagggtgcag

SEQ ID NO: 382441 - DNA, 33 bp, Homo sapien
ggactctgagctcaaagtggccctcacctgtgc

SEQ ID NO: 382442 - DNA, 33 bp, Homo sapien
ggactctgagctcaaattggccctcacctgtgc

SEQ ID NO: 382443 - DNA, 33 bp, Homo sapien
gaagaaaggggtccagaaagaggaagcagcagg

SEQ ID NO: 382444 - DNA, 33 bp, Homo sapien
gaagaaaggggtccaggaagaggaagcagcagg

SEQ ID NO: 382445 - DNA, 33 bp, Homo sapien
caggagtgtcacagtacgtcatcttgcagaaag

SEQ ID NO: 382446 - DNA, 33 bp, Homo sapien
caggagtgtcacagtatgtcatcttgcagaaag

SEQ ID NO: 382447 - DNA, 33 bp, Homo sapien
acttttaactgagtataagggactattctctgg

SEQ ID NO: 382448 - DNA, 33 bp, Homo sapien
acttttaactgagtattagggactattctctgg

SEQ ID NO: 382449 - DNA, 33 bp, Homo sapien
gctcacggaagaggtcacttcccatacccatta

SEQ ID NO: 382450 - DNA, 33 bp, Homo sapien
gctcacggaagaggtcgcttcccatacccatta

SEQ ID NO: 382451 - DNA, 33 bp, Homo sapien
ctcagagcccgtgccaaaagtgttcctaggaga

SEQ ID NO: 382452 - DNA, 33 bp, Homo sapien
ctcagagcccgtgccagaagtgttcctaggaga

SEQ ID NO: 382453 - DNA, 33 bp, Homo sapien
catctgtcctcagtaccgagggctcaacatttg

SEQ ID NO: 382454 - DNA, 33 bp, Homo sapien
catctgtcctcagtacggagggctcaacatttg

SEQ ID NO: 382455 - DNA, 33 bp, Homo sapien
ggacgtcattcctctaagggacaagcttttggc

SEQ ID NO: 382456 - DNA, 33 bp, Homo sapien
ggacgtcattcctctacgggacaagcttttggc

SEQ ID NO: 382457 - DNA, 33 bp, Homo sapien
cttcttccatgaaaaaactactgcagctaagac

SEQ ID NO: 382458 - DNA, 33 bp, Homo sapien
cttcttccatgaaaaacctactgcagctaagac

SEQ ID NO: 382459 - DNA, 33 bp, Homo sapien
cataggtggcactggaatcattctttttcccaa

SEQ ID NO: 382460 - DNA, 33 bp, Homo sapien
cataggtggcactggagtcattctttttcccaa

SEQ ID NO: 382461 - DNA, 33 bp, Homo sapien
actttgatttacctagccaaccataagcaaaca

SEQ ID NO: 382462 - DNA, 33 bp, Homo sapien
actttgatttacctaggcaaccataagcaaaca

SEQ ID NO: 382463 - DNA, 33 bp, Homo sapien
accctggttcacactccaccccaaacaaatgtg

SEQ ID NO: 382464 - DNA, 33 bp, Homo sapien
accctggttcacactctaccccaaacaaatgtg

SEQ ID NO: 382465 - DNA, 33 bp, Homo sapien
ttccaggaactcccccaacaagcttgtcaagga

SEQ ID NO: 382466 - DNA, 33 bp, Homo sapien
ttccaggaactccccccacaagcttgtcaagga

SEQ ID NO: 382467 - DNA, 33 bp, Homo sapien
gttctgagcagagtaaactggaaggacccaagt

SEQ ID NO: 382468 - DNA, 33 bp, Homo sapien
gttctgagcagagtaacctggaaggacccaagt

SEQ ID NO: 382469 - DNA, 33 bp, Homo sapien
agtttactctaaggagaaattggcctttgtctt

SEQ ID NO: 382470 - DNA, 33 bp, Homo sapien
agtttactctaaggaggaattggcctttgtctt

SEQ ID NO: 382471 - DNA, 33 bp, Homo sapien
cccaaccgaagataataatgcttctcaattctc

SEQ ID NO: 382472 - DNA, 33 bp, Homo sapien
cccaaccgaagataatcatgcttctcaattctc

SEQ ID NO: 382473 - DNA, 33 bp, Homo sapien
tacttctgcatgtaagcagggccatgtgactac

SEQ ID NO: 382474 - DNA, 33 bp, Homo sapien
tacttctgcatgtaagtagggccatgtgactac

SEQ ID NO: 382475 - DNA, 33 bp, Homo sapien
catattttaagtatcactgagacatttatgaag

SEQ ID NO: 382476 - DNA, 33 bp, Homo sapien
catattttaagtatcagtgagacatttatgaag

SEQ ID NO: 382477 - DNA, 33 bp, Homo sapien
atttcagatgttgaaaagctgttatatctgctt

SEQ ID NO: 382478 - DNA, 33 bp, Homo sapien
atttcagatgttgaaacgctgttatatctgctt

SEQ ID NO: 382479 - DNA, 33 bp, Homo sapien
tagagatggaaacatcactccacaaactactct

SEQ ID NO: 382480 - DNA, 33 bp, Homo sapien
tagagatggaaacatcgctccacaaactactct

SEQ ID NO: 382481 - DNA, 33 bp, Homo sapien
attcagatgacatcagcagagcgagccctagct

SEQ ID NO: 382482 - DNA, 33 bp, Homo sapien
attcagatgacatcagtagagcgagccctagct

SEQ ID NO: 382483 - DNA, 33 bp, Homo sapien
attcctgaaagcagagacatctgaggcatgaat

SEQ ID NO: 382484 - DNA, 33 bp, Homo sapien
attcctgaaagcagaggcatctgaggcatgaat

SEQ ID NO: 382485 - DNA, 33 bp, Homo sapien
catgcctttcacctcaagtaacactgggagggg

SEQ ID NO: 382486 - DNA, 33 bp, Homo sapien
catgcctttcacctcaggtaacactgggagggg

SEQ ID NO: 382487 - DNA, 33 bp, Homo sapien
gctttccatcgctccaactccttgcatccagct

SEQ ID NO: 382488 - DNA, 33 bp, Homo sapien
gctttccatcgctccatctccttgcatccagct

SEQ ID NO: 382489 - DNA, 33 bp, Homo sapien
tgcactgcctctatggcactggcgtccccacac

SEQ ID NO: 382490 - DNA, 33 bp, Homo sapien
tgcactgcctctatggtactggcgtccccacac

SEQ ID NO: 382491 - DNA, 33 bp, Homo sapien
tgagaagaatttgaagccattggtgcacctaac

SEQ ID NO: 382492 - DNA, 33 bp, Homo sapien
tgagaagaatttgaagtcattggtgcacctaac

SEQ ID NO: 382493 - DNA, 33 bp, Homo sapien
gattctgggtccttcacaggtaggttaatgtgg

SEQ ID NO: 382494 - DNA, 33 bp, Homo sapien
gattctgggtccttcataggtaggttaatgtgg

SEQ ID NO: 382495 - DNA, 33 bp, Homo sapien
caatgcttttgcaagcagagatgtggaaagaac

SEQ ID NO: 382496 - DNA, 33 bp, Homo sapien
caatgcttttgcaagcggagatgtggaaagaac

SEQ ID NO: 382497 - DNA, 33 bp, Homo sapien
cctattaactaggtaaaccttatgttagctgat

SEQ ID NO: 382498 - DNA, 33 bp, Homo sapien
cctattaactaggtaatccttatgttagctgat

SEQ ID NO: 382499 - DNA, 33 bp, Homo sapien
gtccttcctgttgttgaagaggaaggagcaggt

SEQ ID NO: 382500 - DNA, 33 bp, Homo sapien
gtccttcctgttgttgcagaggaaggagcaggt

SEQ ID NO: 382501 - DNA, 33 bp, Homo sapien
tgccttaagtccttggcatttataatcaatgct

SEQ ID NO: 382502 - DNA, 33 bp, Homo sapien
tgccttaagtccttggtatttataatcaatgct

SEQ ID NO: 382503 - DNA, 33 bp, Homo sapien
acaatcgggaacaaaaacagacctttctgagaa

SEQ ID NO: 382504 - DNA, 33 bp, Homo sapien
acaatcgggaacaaaagcagacctttctgagaa

SEQ ID NO: 382505 - DNA, 33 bp, Homo sapien
cttacatcccttatcaccatctgacactgaata

SEQ ID NO: 382506 - DNA, 33 bp, Homo sapien
cttacatcccttatcatcatctgacactgaata

SEQ ID NO: 382507 - DNA, 33 bp, Homo sapien
cgccgctctctccaaaccctccgacgtcttctg

SEQ ID NO: 382508 - DNA, 33 bp, Homo sapien
cgccgctctctccaaatcctccgacgtcttctg

SEQ ID NO: 382509 - DNA, 33 bp, Homo sapien
tagttggaaacaacaaagtcccacaataactgg

SEQ ID NO: 382510 - DNA, 33 bp, Homo sapien
tagttggaaacaacaaggtcccacaataactgg

SEQ ID NO: 382511 - DNA, 33 bp, Homo sapien
catctaaaaacatcaaggcaaatcctagaaata

SEQ ID NO: 382512 - DNA, 33 bp, Homo sapien
catctaaaaacatcaatgcaaatcctagaaata

SEQ ID NO: 382513 - DNA, 33 bp, Homo sapien
tcacaagttaaagccaactgaatctcagccctt

SEQ ID NO: 382514 - DNA, 33 bp, Homo sapien
tcacaagttaaagccagctgaatctcagccctt

SEQ ID NO: 382515 - DNA, 33 bp, Homo sapien
aggtcatagcatagaaatgggacctctctgtgt

SEQ ID NO: 382516 - DNA, 33 bp, Homo sapien
aggtcatagcatagaagtgggacctctctgtgt

SEQ ID NO: 382517 - DNA, 33 bp, Homo sapien
tgaacagtgtggaagaatcttaccagcatcacg

SEQ ID NO: 382518 - DNA, 33 bp, Homo sapien
tgaacagtgtggaagagtcttaccagcatcacg

SEQ ID NO: 382519 - DNA, 33 bp, Homo sapien
aaaaagcaaaaccaacaaagtctagcactcaac

SEQ ID NO: 382520 - DNA, 33 bp, Homo sapien
aaaaagcaaaaccaacgaagtctagcactcaac

SEQ ID NO: 382521 - DNA, 33 bp, Homo sapien
cgattcttctggtttacacagagtttgagctct

SEQ ID NO: 382522 - DNA, 33 bp, Homo sapien
cgattcttctggtttagacagagtttgagctct

SEQ ID NO: 382523 - DNA, 33 bp, Homo sapien
gttgtgactgctggggaattgctgtcaatcagc

SEQ ID NO: 382524 - DNA, 33 bp, Homo sapien
gttgtgactgctgggggattgctgtcaatcagc

SEQ ID NO: 382525 - DNA, 33 bp, Homo sapien
tctcctgggtacacacaaatgggcactgacaca

SEQ ID NO: 382526 - DNA, 33 bp, Homo sapien
tctcctgggtacacacgaatgggcactgacaca

SEQ ID NO: 382527 - DNA, 33 bp, Homo sapien
tatcttacaactaataacgtggtgttccctcta

SEQ ID NO: 382528 - DNA, 33 bp, Homo sapien
tatcttacaactaatagcgtggtgttccctcta

SEQ ID NO: 382529 - DNA, 33 bp, Homo sapien
gaacgaaatgggtgaacctcaaagacattatgc

SEQ ID NO: 382530 - DNA, 33 bp, Homo sapien
gaacgaaatgggtgaatctcaaagacattatgc

SEQ ID NO: 382531 - DNA, 33 bp, Homo sapien
gagatgccctaaaaacaaacctctgacaaggaa

SEQ ID NO: 382532 - DNA, 33 bp, Homo sapien
gagatgccctaaaaacgaacctctgacaaggaa

SEQ ID NO: 382533 - DNA, 33 bp, Homo sapien
ggtttcccagcaaccaccatgacacctgcctgg

SEQ ID NO: 382534 - DNA, 33 bp, Homo sapien
ggtttcccagcaaccatcatgacacctgcctgg

SEQ ID NO: 382535 - DNA, 33 bp, Homo sapien
ccactggccaaatgacacttcagaaaaccgtgg

SEQ ID NO: 382536 - DNA, 33 bp, Homo sapien
ccactggccaaatgacgcttcagaaaaccgtgg

SEQ ID NO: 382537 - DNA, 33 bp, Homo sapien
agtccctgccgtgtccacaagctcatgtctaaa

SEQ ID NO: 382538 - DNA, 33 bp, Homo sapien
agtccctgccgtgtccgcaagctcatgtctaaa

SEQ ID NO: 382539 - DNA, 33 bp, Homo sapien
cctgatgtctcctttacgtgttcctcatccatt

SEQ ID NO: 382540 - DNA, 33 bp, Homo sapien
cctgatgtctcctttatgtgttcctcatccatt

SEQ ID NO: 382541 - DNA, 33 bp, Homo sapien
ctctgggttctcagaccctcattcaaatgctga

SEQ ID NO: 382542 - DNA, 33 bp, Homo sapien
ctctgggttctcagactctcattcaaatgctga

SEQ ID NO: 382543 - DNA, 33 bp, Homo sapien
gatctgctagttttgcactggattgaacttttt

SEQ ID NO: 382544 - DNA, 33 bp, Homo sapien
gatctgctagttttgcgctggattgaacttttt

SEQ ID NO: 382545 - DNA, 33 bp, Homo sapien
cagttctgacactcacggatgctggcctgggtg

SEQ ID NO: 382546 - DNA, 33 bp, Homo sapien
cagttctgacactcactgatgctggcctgggtg

SEQ ID NO: 382547 - DNA, 33 bp, Homo sapien
tatgtagcaggtactcaaaaaatgttcttccat

SEQ ID NO: 382548 - DNA, 33 bp, Homo sapien
tatgtagcaggtactcgaaaaatgttcttccat

SEQ ID NO: 382549 - DNA, 33 bp, Homo sapien
gactctttaatgggtcgaactcaatggtgccct

SEQ ID NO: 382550 - DNA, 33 bp, Homo sapien
gactctttaatgggtctaactcaatggtgccct

SEQ ID NO: 382551 - DNA, 33 bp, Homo sapien
ataaatggggttgtcaaagatcaaataaggtta

SEQ ID NO: 382552 - DNA, 33 bp, Homo sapien
ataaatggggttgtcagagatcaaataaggtta

SEQ ID NO: 382553 - DNA, 33 bp, Homo sapien
ctgcttggcctccataaaagtgactcattgatg

SEQ ID NO: 382554 - DNA, 33 bp, Homo sapien
ctgcttggcctccatacaagtgactcattgatg

SEQ ID NO: 382555 - DNA, 33 bp, Homo sapien
tcattttgaaaagcacagagaagggcacagccc

SEQ ID NO: 382556 - DNA, 33 bp, Homo sapien
tcattttgaaaagcacggagaagggcacagccc

SEQ ID NO: 382557 - DNA, 33 bp, Homo sapien
ggaggcaatagaacgcagatcagtggagtgaga

SEQ ID NO: 382558 - DNA, 33 bp, Homo sapien
ggaggcaatagaacgcggatcagtggagtgaga

SEQ ID NO: 382559 - DNA, 33 bp, Homo sapien
tccacctcaattcacccgctatgctttgagtca

SEQ ID NO: 382560 - DNA, 33 bp, Homo sapien
tccacctcaattcacctgctatgctttgagtca

SEQ ID NO: 382561 - DNA, 33 bp, Homo sapien
gtcttgtcaaaggccaataagtggcagagtagc

SEQ ID NO: 382562 - DNA, 33 bp, Homo sapien
gtcttgtcaaaggccagtaagtggcagagtagc

SEQ ID NO: 382563 - DNA, 33 bp, Homo sapien
cgaggaaagatttcaagccatttacataagcat

SEQ ID NO: 382564 - DNA, 33 bp, Homo sapien
cgaggaaagatttcaatccatttacataagcat

SEQ ID NO: 382565 - DNA, 33 bp, Homo sapien
accagatgatggccagcagaacaacagaaagag

SEQ ID NO: 382566 - DNA, 33 bp, Homo sapien
accagatgatggccaggagaacaacagaaagag

SEQ ID NO: 382567 - DNA, 33 bp, Homo sapien
gctgctacctaacaccaataaacagcattttac

SEQ ID NO: 382568 - DNA, 33 bp, Homo sapien
gctgctacctaacaccgataaacagcattttac

SEQ ID NO: 382569 - DNA, 33 bp, Homo sapien
catctttgacttttaccagtttcctccacgccc

SEQ ID NO: 382570 - DNA, 33 bp, Homo sapien
catctttgacttttactagtttcctccacgccc

SEQ ID NO: 382571 - DNA, 33 bp, Homo sapien
atgtgacacagtaaagaagcaagtttaggcagg

SEQ ID NO: 382572 - DNA, 33 bp, Homo sapien
atgtgacacagtaaaggagcaagtttaggcagg

SEQ ID NO: 382573 - DNA, 33 bp, Homo sapien
ggaaacgcatttcaaaaactagagcctcccccc

SEQ ID NO: 382574 - DNA, 33 bp, Homo sapien
ggaaacgcatttcaaagactagagcctcccccc

SEQ ID NO: 382575 - DNA, 33 bp, Homo sapien
aacaaaagtagcaaaactttctgctctcaggaa

SEQ ID NO: 382576 - DNA, 33 bp, Homo sapien
aacaaaagtagcaaaagtttctgctctcaggaa

SEQ ID NO: 382577 - DNA, 33 bp, Homo sapien
tcctgttgagaaagcgaatggtggcaatgatga

SEQ ID NO: 382578 - DNA, 33 bp, Homo sapien
tcctgttgagaaagcggatggtggcaatgatga

SEQ ID NO: 382579 - DNA, 33 bp, Homo sapien
ccagtttcaggccacaagtgaagaggttttgca

SEQ ID NO: 382580 - DNA, 33 bp, Homo sapien
ccagtttcaggccacaggtgaagaggttttgca

SEQ ID NO: 382581 - DNA, 33 bp, Homo sapien
gcacatgcccttgccaaatgaaaaatgagattc

SEQ ID NO: 382582 - DNA, 33 bp, Homo sapien
gcacatgcccttgccagatgaaaaatgagattc

SEQ ID NO: 382583 - DNA, 33 bp, Homo sapien
tatatccttcagagacagcaaccattctgggaa

SEQ ID NO: 382584 - DNA, 33 bp, Homo sapien
tatatccttcagagaccgcaaccattctgggaa

SEQ ID NO: 382585 - DNA, 33 bp, Homo sapien
ggctcaggatccctgacgttaggaggtggtaca

SEQ ID NO: 382586 - DNA, 33 bp, Homo sapien
ggctcaggatccctgatgttaggaggtggtaca

SEQ ID NO: 382587 - DNA, 33 bp, Homo sapien
agctctgggaatgtgaacccttgaggaccccaa

SEQ ID NO: 382588 - DNA, 33 bp, Homo sapien
agctctgggaatgtgaccccttgaggaccccaa

SEQ ID NO: 382589 - DNA, 33 bp, Homo sapien
cactgtgacctagaaaatggagatggaggctag

SEQ ID NO: 382590 - DNA, 33 bp, Homo sapien
cactgtgacctagaaactggagatggaggctag

SEQ ID NO: 382591 - DNA, 33 bp, Homo sapien
gtctaggattgtagccaaccatctaatggtgca

SEQ ID NO: 382592 - DNA, 33 bp, Homo sapien
gtctaggattgtagccgaccatctaatggtgca

SEQ ID NO: 382593 - DNA, 33 bp, Homo sapien
tctggccaattttagccaaccaggagagctaag

SEQ ID NO: 382594 - DNA, 33 bp, Homo sapien
tctggccaattttagcgaaccaggagagctaag

SEQ ID NO: 382595 - DNA, 33 bp, Homo sapien
tccctaagcaagatagaaattctaaaaacctag

SEQ ID NO: 382596 - DNA, 33 bp, Homo sapien
tccctaagcaagatagcaattctaaaaacctag

SEQ ID NO: 382597 - DNA, 33 bp, Homo sapien
ggtgctacctgcaaccagacagttcccaggagg

SEQ ID NO: 382598 - DNA, 33 bp, Homo sapien
ggtgctacctgcaaccggacagttcccaggagg

SEQ ID NO: 382599 - DNA, 33 bp, Homo sapien
gataatagttcctttaaagaggtgttttgatga

SEQ ID NO: 382600 - DNA, 33 bp, Homo sapien
gataatagttcctttagagaggtgttttgatga

SEQ ID NO: 382601 - DNA, 33 bp, Homo sapien
aaaataaaatacacaccgaatttcaaagattta

SEQ ID NO: 382602 - DNA, 33 bp, Homo sapien
aaaataaaatacacactgaatttcaaagattta

SEQ ID NO: 382603 - DNA, 33 bp, Homo sapien
tccttatgctgacatacaaggatcttggccaaa

SEQ ID NO: 382604 - DNA, 33 bp, Homo sapien
tccttatgctgacatagaaggatcttggccaaa

SEQ ID NO: 382605 - DNA, 33 bp, Homo sapien
caagaacagattccgagaaaaaggacacttgtg

SEQ ID NO: 382606 - DNA, 33 bp, Homo sapien
caagaacagattccgataaaaaggacacttgtg

SEQ ID NO: 382607 - DNA, 33 bp, Homo sapien
cacctcgccgtattaagaataaaatgcgacagg

SEQ ID NO: 382608 - DNA, 33 bp, Homo sapien
cacctcgccgtattaataataaaatgcgacagg

SEQ ID NO: 382609 - DNA, 33 bp, Homo sapien
tcctacaagtctggggcatctgacagtgaaagc

SEQ ID NO: 382610 - DNA, 33 bp, Homo sapien
tcctacaagtctggggtatctgacagtgaaagc

SEQ ID NO: 382611 - DNA, 33 bp, Homo sapien
cctaaagctaagcagcacttaacaagcgaggaa

SEQ ID NO: 382612 - DNA, 33 bp, Homo sapien
cctaaagctaagcagctcttaacaagcgaggaa

SEQ ID NO: 382613 - DNA, 33 bp, Homo sapien
cctaataaaatgttgaaagaggaaatcacaata

SEQ ID NO: 382614 - DNA, 33 bp, Homo sapien
cctaataaaatgttgagagaggaaatcacaata

SEQ ID NO: 382615 - DNA, 33 bp, Homo sapien
gtgaagaaatgatagcaaagactgcagattcag

SEQ ID NO: 382616 - DNA, 33 bp, Homo sapien
gtgaagaaatgatagcgaagactgcagattcag

SEQ ID NO: 382617 - DNA, 33 bp, Homo sapien
ccatgatgagagaaagacaatgaatcctgctat

SEQ ID NO: 382618 - DNA, 33 bp, Homo sapien
ccatgatgagagaaaggcaatgaatcctgctat

SEQ ID NO: 382619 - DNA, 33 bp, Homo sapien
aattgagctacacatactacatttcagccccca

SEQ ID NO: 382620 - DNA, 33 bp, Homo sapien
aattgagctacacatattacatttcagccccca

SEQ ID NO: 382621 - DNA, 33 bp, Homo sapien
cccccttttcctcttgaaacaatctgattgtat

SEQ ID NO: 382622 - DNA, 33 bp, Homo sapien
cccccttttcctcttgcaacaatctgattgtat

SEQ ID NO: 382623 - DNA, 33 bp, Homo sapien
ctctagcctgcctgcaaaaggccgtctggtcca

SEQ ID NO: 382624 - DNA, 33 bp, Homo sapien
ctctagcctgcctgcacaaggccgtctggtcca

SEQ ID NO: 382625 - DNA, 33 bp, Homo sapien
atttccatcatcccccaaaaaagcttcgtgtcc

SEQ ID NO: 382626 - DNA, 33 bp, Homo sapien
atttccatcatccccccaaaaagcttcgtgtcc

SEQ ID NO: 382627 - DNA, 33 bp, Homo sapien
gactagaggtgaccaacgggccctaatttagta

SEQ ID NO: 382628 - DNA, 33 bp, Homo sapien
gactagaggtgaccaatgggccctaatttagta

SEQ ID NO: 382629 - DNA, 33 bp, Homo sapien
agatatcctgaaatcagtatgtcaaaacttaaa

SEQ ID NO: 382630 - DNA, 33 bp, Homo sapien
agatatcctgaaatcattatgtcaaaacttaaa

SEQ ID NO: 382631 - DNA, 33 bp, Homo sapien
gaaagtaagccaagtcccccttctgcagccact

SEQ ID NO: 382632 - DNA, 33 bp, Homo sapien
gaaagtaagccaagtctcccttctgcagccact

SEQ ID NO: 382633 - DNA, 33 bp, Homo sapien
cattctggtcggtcacgatgatggagatgttca

SEQ ID NO: 382634 - DNA, 33 bp, Homo sapien
cattctggtcggtcactatgatggagatgttca

SEQ ID NO: 382635 - DNA, 33 bp, Homo sapien
acgacctcatgttcacaattcaccggagcacag

SEQ ID NO: 382636 - DNA, 33 bp, Homo sapien
acgacctcatgttcaccattcaccggagcacag

SEQ ID NO: 382637 - DNA, 33 bp, Homo sapien
accagtacgtgctgctcactgagcccagctcct

SEQ ID NO: 382638 - DNA, 33 bp, Homo sapien
accagtacgtgctgcttactgagcccagctcct

SEQ ID NO: 382639 - DNA, 33 bp, Homo sapien
tctccaactttcacgccaactggttgaatccct

SEQ ID NO: 382640 - DNA, 33 bp, Homo sapien
tctccaactttcacgctaactggttgaatccct

SEQ ID NO: 382641 - DNA, 33 bp, Homo sapien
aacatcagcattaggaaagtcccttcagcctta

SEQ ID NO: 382642 - DNA, 33 bp, Homo sapien
aacatcagcattaggagagtcccttcagcctta

SEQ ID NO: 382643 - DNA, 33 bp, Homo sapien
aaagccctgtgcgccacgtgctgaacatcacgg

SEQ ID NO: 382644 - DNA, 33 bp, Homo sapien
aaagccctgtgcgccaggtgctgaacatcacgg

SEQ ID NO: 382645 - DNA, 33 bp, Homo sapien
tgacaggcacagggtaccatcatgtcaggcctc

SEQ ID NO: 382646 - DNA, 33 bp, Homo sapien
tgacaggcacagggtatcatcatgtcaggcctc

SEQ ID NO: 382647 - DNA, 33 bp, Homo sapien
actgaaagttatcagaaggttttgagcagaggg

SEQ ID NO: 382648 - DNA, 33 bp, Homo sapien
actgaaagttatcagacggttttgagcagaggg

SEQ ID NO: 382649 - DNA, 33 bp, Homo sapien
aattagccacagacttcaagaacaagataatgc

SEQ ID NO: 382650 - DNA, 33 bp, Homo sapien
aattagccacagactttaagaacaagataatgc

SEQ ID NO: 382651 - DNA, 33 bp, Homo sapien
gaggcataggctgggaacaaatcttgccagcct

SEQ ID NO: 382652 - DNA, 33 bp, Homo sapien
gaggcataggctgggaccaaatcttgccagcct

SEQ ID NO: 382653 - DNA, 33 bp, Homo sapien
ccttgaagtcttctacagcagaggctccaaact

SEQ ID NO: 382654 - DNA, 33 bp, Homo sapien
ccttgaagtcttctacggcagaggctccaaact

SEQ ID NO: 382655 - DNA, 33 bp, Homo sapien
gaaaggctaaggaagcaaccactctaacgtcag

SEQ ID NO: 382656 - DNA, 33 bp, Homo sapien
gaaaggctaaggaagccaccactctaacgtcag

SEQ ID NO: 382657 - DNA, 33 bp, Homo sapien
atttttagtacaaaaaggtgtgtgtaggccggg

SEQ ID NO: 382658 - DNA, 33 bp, Homo sapien
atttttagtacaaaaatgtgtgtgtaggccggg

SEQ ID NO: 382659 - DNA, 33 bp, Homo sapien
gacagccctaagatggaagttttgagagtgcac

SEQ ID NO: 382660 - DNA, 33 bp, Homo sapien
gacagccctaagatgggagttttgagagtgcac

SEQ ID NO: 382661 - DNA, 33 bp, Homo sapien
ggtcttttgtttcttacgctactccagaggcta

SEQ ID NO: 382662 - DNA, 33 bp, Homo sapien
ggtcttttgtttcttatgctactccagaggcta

SEQ ID NO: 382663 - DNA, 33 bp, Homo sapien
gtcaccagcaagtcccagacacagctgtcaggc

SEQ ID NO: 382664 - DNA, 33 bp, Homo sapien
gtcaccagcaagtcccggacacagctgtcaggc

SEQ ID NO: 382665 - DNA, 33 bp, Homo sapien
ggtgaaataacctaaccaaacatggcagacggg

SEQ ID NO: 382666 - DNA, 33 bp, Homo sapien
ggtgaaataacctaactaaacatggcagacggg

SEQ ID NO: 382667 - DNA, 33 bp, Homo sapien
caatgatattgaggaactactgtgaattttatt

SEQ ID NO: 382668 - DNA, 33 bp, Homo sapien
caatgatattgaggaattactgtgaattttatt

SEQ ID NO: 382669 - DNA, 33 bp, Homo sapien
tgcattttcatcctgaatcagaactaccatgct

SEQ ID NO: 382670 - DNA, 33 bp, Homo sapien
tgcattttcatcctgagtcagaactaccatgct

SEQ ID NO: 382671 - DNA, 33 bp, Homo sapien
ggccttatcgttgtgacaatctagagtttgctt

SEQ ID NO: 382672 - DNA, 33 bp, Homo sapien
ggccttatcgttgtgataatctagagtttgctt

SEQ ID NO: 382673 - DNA, 33 bp, Homo sapien
tgtaaaaaacttcgaacgacttccaaagttcaa

SEQ ID NO: 382674 - DNA, 33 bp, Homo sapien
tgtaaaaaacttcgaatgacttccaaagttcaa

SEQ ID NO: 382675 - DNA, 33 bp, Homo sapien
gataacttctgatccaatagaaagctctagagc

SEQ ID NO: 382676 - DNA, 33 bp, Homo sapien
gataacttctgatccagtagaaagctctagagc

SEQ ID NO: 382677 - DNA, 33 bp, Homo sapien
aaggaagagaaaagaccaactgcggatgcttca

SEQ ID NO: 382678 - DNA, 33 bp, Homo sapien
aaggaagagaaaagacgaactgcggatgcttca

SEQ ID NO: 382679 - DNA, 33 bp, Homo sapien
tcccactccagttctacacaacctccacgagca

SEQ ID NO: 382680 - DNA, 33 bp, Homo sapien
tcccactccagttctatacaacctccacgagca

SEQ ID NO: 382681 - DNA, 33 bp, Homo sapien
cacaacagtgcttggcacataacagcccctcca

SEQ ID NO: 382682 - DNA, 33 bp, Homo sapien
cacaacagtgcttggcgcataacagcccctcca

SEQ ID NO: 382683 - DNA, 33 bp, Homo sapien
catagaaacctaattacgcaactgatcttgttt

SEQ ID NO: 382684 - DNA, 33 bp, Homo sapien
catagaaacctaattatgcaactgatcttgttt

SEQ ID NO: 382685 - DNA, 33 bp, Homo sapien
ttttccccacagactcaattcatctctggactc

SEQ ID NO: 382686 - DNA, 33 bp, Homo sapien
ttttccccacagactctattcatctctggactc

SEQ ID NO: 382687 - DNA, 33 bp, Homo sapien
tacctggccgtgtccagtagctcttagtagcaa

SEQ ID NO: 382688 - DNA, 33 bp, Homo sapien
tacctggccgtgtccattagctcttagtagcaa

SEQ ID NO: 382689 - DNA, 33 bp, Homo sapien
atgaatgctcaataaacctgtaatgttactgat

SEQ ID NO: 382690 - DNA, 33 bp, Homo sapien
atgaatgctcaataaatctgtaatgttactgat

SEQ ID NO: 382691 - DNA, 33 bp, Homo sapien
ccgccatctgggatcacgaggtctccttgagga

SEQ ID NO: 382692 - DNA, 33 bp, Homo sapien
ccgccatctgggatcatgaggtctccttgagga

SEQ ID NO: 382693 - DNA, 33 bp, Homo sapien
gagtcatgcctgaaaaaactgcacgtggaagtg

SEQ ID NO: 382694 - DNA, 33 bp, Homo sapien
gagtcatgcctgaaaacactgcacgtggaagtg

SEQ ID NO: 382695 - DNA, 33 bp, Homo sapien
acagcttcctaatgtccgaaatggggataatat

SEQ ID NO: 382696 - DNA, 33 bp, Homo sapien
acagcttcctaatgtctgaaatggggataatat

SEQ ID NO: 382697 - DNA, 33 bp, Homo sapien
acacattatcgaactccgacttctaagtgagaa

SEQ ID NO: 382698 - DNA, 33 bp, Homo sapien
acacattatcgaactctgacttctaagtgagaa

SEQ ID NO: 382699 - DNA, 33 bp, Homo sapien
gacagtgatatgtgaactcaagcatggtcctta

SEQ ID NO: 382700 - DNA, 33 bp, Homo sapien
gacagtgatatgtgaattcaagcatggtcctta

SEQ ID NO: 382701 - DNA, 33 bp, Homo sapien
ttgtactgtacataccaacttcagggatgtgag

SEQ ID NO: 382702 - DNA, 33 bp, Homo sapien
ttgtactgtacataccgacttcagggatgtgag

SEQ ID NO: 382703 - DNA, 33 bp, Homo sapien
ctagctaaaaactcaaaagaaacaaagcagacc

SEQ ID NO: 382704 - DNA, 33 bp, Homo sapien
ctagctaaaaactcaagagaaacaaagcagacc

SEQ ID NO: 382705 - DNA, 33 bp, Homo sapien
gtcctatgaaaattagcaaggcacacagcctat

SEQ ID NO: 382706 - DNA, 33 bp, Homo sapien
gtcctatgaaaattagtaaggcacacagcctat

SEQ ID NO: 382707 - DNA, 33 bp, Homo sapien
ggccagacaaagacacaaacttcttaccctaaa

SEQ ID NO: 382708 - DNA, 33 bp, Homo sapien
ggccagacaaagacacgaacttcttaccctaaa

SEQ ID NO: 382709 - DNA, 33 bp, Homo sapien
tccacgttttgactgacgccatctccatgcatc

SEQ ID NO: 382710 - DNA, 33 bp, Homo sapien
tccacgttttgactgaggccatctccatgcatc

SEQ ID NO: 382711 - DNA, 33 bp, Homo sapien
ctccaccacatactcaaagagattagagagtct

SEQ ID NO: 382712 - DNA, 33 bp, Homo sapien
ctccaccacatactcatagagattagagagtct

SEQ ID NO: 382713 - DNA, 33 bp, Homo sapien
ttgaaaagattatagacctggatgagtatgtat

SEQ ID NO: 382714 - DNA, 33 bp, Homo sapien
ttgaaaagattatagatctggatgagtatgtat

SEQ ID NO: 382715 - DNA, 33 bp, Homo sapien
aatttagtgtcttagcaatcggtacatgatggt

SEQ ID NO: 382716 - DNA, 33 bp, Homo sapien
aatttagtgtcttagcgatcggtacatgatggt

SEQ ID NO: 382717 - DNA, 33 bp, Homo sapien
tcctttttttcttcttcaaaaggctcgggctca

SEQ ID NO: 382718 - DNA, 33 bp, Homo sapien
tcctttttttcttctttaaaaggctcgggctca

SEQ ID NO: 382719 - DNA, 33 bp, Homo sapien
tccaagtgacatccacagagttttgtggccatt

SEQ ID NO: 382720 - DNA, 33 bp, Homo sapien
tccaagtgacatccacggagttttgtggccatt

SEQ ID NO: 382721 - DNA, 33 bp, Homo sapien
cccttgagccataacactacagttctccttggt

SEQ ID NO: 382722 - DNA, 33 bp, Homo sapien
cccttgagccataacagtacagttctccttggt

SEQ ID NO: 382723 - DNA, 33 bp, Homo sapien
tcacccattttaaggcacactggaaaactgcag

SEQ ID NO: 382724 - DNA, 33 bp, Homo sapien
tcacccattttaaggcgcactggaaaactgcag

SEQ ID NO: 382725 - DNA, 33 bp, Homo sapien
caaagacctgtttgtaagggacaacttcttatg

SEQ ID NO: 382726 - DNA, 33 bp, Homo sapien
caaagacctgtttgtaggggacaacttcttatg

SEQ ID NO: 382727 - DNA, 33 bp, Homo sapien
ccaatgatcaggggacaataagagggaagtgac

SEQ ID NO: 382728 - DNA, 33 bp, Homo sapien
ccaatgatcaggggacgataagagggaagtgac

SEQ ID NO: 382729 - DNA, 33 bp, Homo sapien
cctacagtcctaactacgtggtaggctgaggca

SEQ ID NO: 382730 - DNA, 33 bp, Homo sapien
cctacagtcctaactatgtggtaggctgaggca

SEQ ID NO: 382731 - DNA, 33 bp, Homo sapien
gaaccaggccgcataactggaggtgagcagcgc

SEQ ID NO: 382732 - DNA, 33 bp, Homo sapien
gaaccaggccgcataattggaggtgagcagcgc

SEQ ID NO: 382733 - DNA, 33 bp, Homo sapien
atttctcacaaggatacggaaggaaaacaactg

SEQ ID NO: 382734 - DNA, 33 bp, Homo sapien
atttctcacaaggatatggaaggaaaacaactg

SEQ ID NO: 382735 - DNA, 33 bp, Homo sapien
ctatgcaggtgacagaatagaaatggtgcaact

SEQ ID NO: 382736 - DNA, 33 bp, Homo sapien
ctatgcaggtgacagagtagaaatggtgcaact

SEQ ID NO: 382737 - DNA, 33 bp, Homo sapien
cttacttttcattgatcacacatacaccttttg

SEQ ID NO: 382738 - DNA, 33 bp, Homo sapien
cttacttttcattgatgacacatacaccttttg

SEQ ID NO: 382739 - DNA, 33 bp, Homo sapien
atctggaagggatcacagagaaaacgggaagaa

SEQ ID NO: 382740 - DNA, 33 bp, Homo sapien
atctggaagggatcacggagaaaacgggaagaa

SEQ ID NO: 382741 - DNA, 33 bp, Homo sapien
cttgcatactgactggacactttagatcatgta

SEQ ID NO: 382742 - DNA, 33 bp, Homo sapien
cttgcatactgactggccactttagatcatgta

SEQ ID NO: 382743 - DNA, 33 bp, Homo sapien
tgtgagtacaagagaaaaggatcaaattgcagc

SEQ ID NO: 382744 - DNA, 33 bp, Homo sapien
tgtgagtacaagagaagaggatcaaattgcagc

SEQ ID NO: 382745 - DNA, 33 bp, Homo sapien
aattatgtataaagtcactgagttccggttacc

SEQ ID NO: 382746 - DNA, 33 bp, Homo sapien
aattatgtataaagtctctgagttccggttacc

SEQ ID NO: 382747 - DNA, 33 bp, Homo sapien
taaaactgtagtgtcaaatggaaaccaaacaga

SEQ ID NO: 382748 - DNA, 33 bp, Homo sapien
taaaactgtagtgtcacatggaaaccaaacaga

SEQ ID NO: 382749 - DNA, 33 bp, Homo sapien
gtgctagctcactaaaccttgaattactgggct

SEQ ID NO: 382750 - DNA, 33 bp, Homo sapien
gtgctagctcactaaatcttgaattactgggct

SEQ ID NO: 382751 - DNA, 33 bp, Homo sapien
gcctcatttctcctggacagataacaacttccc

SEQ ID NO: 382752 - DNA, 33 bp, Homo sapien
gcctcatttctcctgggcagataacaacttccc

SEQ ID NO: 382753 - DNA, 33 bp, Homo sapien
acacgagaatggtaaacttagatgaaaaataag

SEQ ID NO: 382754 - DNA, 33 bp, Homo sapien
acacgagaatggtaaatttagatgaaaaataag

SEQ ID NO: 382755 - DNA, 33 bp, Homo sapien
gaacacagccctaaaacggaacctcattctcaa

SEQ ID NO: 382756 - DNA, 33 bp, Homo sapien
gaacacagccctaaaatggaacctcattctcaa

SEQ ID NO: 382757 - DNA, 33 bp, Homo sapien
agttatataacttgtccatgctactaaaggtta

SEQ ID NO: 382758 - DNA, 33 bp, Homo sapien
agttatataacttgtctatgctactaaaggtta

SEQ ID NO: 382759 - DNA, 33 bp, Homo sapien
gtagaacaggatgatcacacattttactcaact

SEQ ID NO: 382760 - DNA, 33 bp, Homo sapien
gtagaacaggatgatcgcacattttactcaact

SEQ ID NO: 382761 - DNA, 33 bp, Homo sapien
tattgcatcctttgaccattttatgcttttacc

SEQ ID NO: 382762 - DNA, 33 bp, Homo sapien
tattgcatcctttgacgattttatgcttttacc

SEQ ID NO: 382763 - DNA, 33 bp, Homo sapien
caagtgagagagctgaaaaaattttaacctgcc

SEQ ID NO: 382764 - DNA, 33 bp, Homo sapien
caagtgagagagctgacaaaattttaacctgcc

SEQ ID NO: 382765 - DNA, 33 bp, Homo sapien
ttgaaccgtaaggctccgagatcctaattcatc

SEQ ID NO: 382766 - DNA, 33 bp, Homo sapien
ttgaaccgtaaggctctgagatcctaattcatc

SEQ ID NO: 382767 - DNA, 33 bp, Homo sapien
atcgtaggtccaagtgaaaacacgctttagaga

SEQ ID NO: 382768 - DNA, 33 bp, Homo sapien
atcgtaggtccaagtggaaacacgctttagaga

SEQ ID NO: 382769 - DNA, 33 bp, Homo sapien
aaacatatacgtcttgaaacaatcttgattgca

SEQ ID NO: 382770 - DNA, 33 bp, Homo sapien
aaacatatacgtcttgtaacaatcttgattgca

SEQ ID NO: 382771 - DNA, 33 bp, Homo sapien
tggtgatttctcagaaaggaagctgttcaattt

SEQ ID NO: 382772 - DNA, 33 bp, Homo sapien
tggtgatttctcagaagggaagctgttcaattt

SEQ ID NO: 382773 - DNA, 33 bp, Homo sapien
tggtgaagttgcagacaagttagcaaaccaact

SEQ ID NO: 382774 - DNA, 33 bp, Homo sapien
tggtgaagttgcagacgagttagcaaaccaact

SEQ ID NO: 382775 - DNA, 33 bp, Homo sapien
ttatcataggagttcacatttgatacatgctag

SEQ ID NO: 382776 - DNA, 33 bp, Homo sapien
ttatcataggagttcatatttgatacatgctag

SEQ ID NO: 382777 - DNA, 33 bp, Homo sapien
tctttactgaccgtcccgacgctttcagtgaag

SEQ ID NO: 382778 - DNA, 33 bp, Homo sapien
tctttactgaccgtcctgacgctttcagtgaag

SEQ ID NO: 382779 - DNA, 33 bp, Homo sapien
ttcgccatctccagtgaactttcctattcctaa

SEQ ID NO: 382780 - DNA, 33 bp, Homo sapien
ttcgccatctccagtgcactttcctattcctaa

SEQ ID NO: 382781 - DNA, 33 bp, Homo sapien
gtaggagctcctgtgaataggtacttttgacac

SEQ ID NO: 382782 - DNA, 33 bp, Homo sapien
gtaggagctcctgtgagtaggtacttttgacac

SEQ ID NO: 382783 - DNA, 33 bp, Homo sapien
cccacagtacgggcaactatcttatgaaaccca

SEQ ID NO: 382784 - DNA, 33 bp, Homo sapien
cccacagtacgggcaattatcttatgaaaccca

SEQ ID NO: 382785 - DNA, 33 bp, Homo sapien
ttcttcctccttggcacaaacttgcccttctcc

SEQ ID NO: 382786 - DNA, 33 bp, Homo sapien
ttcttcctccttggcataaacttgcccttctcc

SEQ ID NO: 382787 - DNA, 33 bp, Homo sapien
gctaatatgctttgcaagttacacccaccagca

SEQ ID NO: 382788 - DNA, 33 bp, Homo sapien
gctaatatgctttgcaggttacacccaccagca

SEQ ID NO: 382789 - DNA, 33 bp, Homo sapien
gactatgtataagccacgaactagtaattataa

SEQ ID NO: 382790 - DNA, 33 bp, Homo sapien
gactatgtataagccatgaactagtaattataa

SEQ ID NO: 382791 - DNA, 33 bp, Homo sapien
cagggtcctcctggtacgcggcaatgcacagtg

SEQ ID NO: 382792 - DNA, 33 bp, Homo sapien
cagggtcctcctggtatgcggcaatgcacagtg

SEQ ID NO: 382793 - DNA, 33 bp, Homo sapien
ttcctcaatgacagaaacccatttttaccaagg

SEQ ID NO: 382794 - DNA, 33 bp, Homo sapien
ttcctcaatgacagaagcccatttttaccaagg

SEQ ID NO: 382795 - DNA, 33 bp, Homo sapien
agtttgttagcagaacaagaagaaagttaaagt

SEQ ID NO: 382796 - DNA, 33 bp, Homo sapien
agtttgttagcagaacgagaagaaagttaaagt

SEQ ID NO: 382797 - DNA, 33 bp, Homo sapien
gcctggcccttccataccttttgaaaccagcac

SEQ ID NO: 382798 - DNA, 33 bp, Homo sapien
gcctggcccttccatatcttttgaaaccagcac

SEQ ID NO: 382799 - DNA, 33 bp, Homo sapien
gtgttttgaaacccaaagagccttgaataaggc

SEQ ID NO: 382800 - DNA, 33 bp, Homo sapien
gtgttttgaaacccaaggagccttgaataaggc

SEQ ID NO: 382801 - DNA, 33 bp, Homo sapien
agagaaactgcaatgacaagaaatgggagacag

SEQ ID NO: 382802 - DNA, 33 bp, Homo sapien
agagaaactgcaatgagaagaaatgggagacag

SEQ ID NO: 382803 - DNA, 33 bp, Homo sapien
ttatagacagctgtaaaacaaaagtcagaataa

SEQ ID NO: 382804 - DNA, 33 bp, Homo sapien
ttatagacagctgtaagacaaaagtcagaataa

SEQ ID NO: 382805 - DNA, 33 bp, Homo sapien
tcatactacaagtgaaaaagagtactcaccagt

SEQ ID NO: 382806 - DNA, 33 bp, Homo sapien
tcatactacaagtgaagaagagtactcaccagt

SEQ ID NO: 382807 - DNA, 33 bp, Homo sapien
taacaggagtgttagacagtaaggagacccaga

SEQ ID NO: 382808 - DNA, 33 bp, Homo sapien
taacaggagtgttagatagtaaggagacccaga

SEQ ID NO: 382809 - DNA, 33 bp, Homo sapien
tttaaagtttgagcaacaggctgggtggtggct

SEQ ID NO: 382810 - DNA, 33 bp, Homo sapien
tttaaagtttgagcaagaggctgggtggtggct

SEQ ID NO: 382811 - DNA, 33 bp, Homo sapien
gtttctgtagaaacccagggttgtgggagtggg

SEQ ID NO: 382812 - DNA, 33 bp, Homo sapien
gtttctgtagaaacccggggttgtgggagtggg

SEQ ID NO: 382813 - DNA, 33 bp, Homo sapien
ctctagaaaatagtcagcctgatatacgatctg

SEQ ID NO: 382814 - DNA, 33 bp, Homo sapien
ctctagaaaatagtcatcctgatatacgatctg

SEQ ID NO: 382815 - DNA, 33 bp, Homo sapien
tactcaatattccacactctaaagtcaccacac

SEQ ID NO: 382816 - DNA, 33 bp, Homo sapien
tactcaatattccacattctaaagtcaccacac

SEQ ID NO: 382817 - DNA, 33 bp, Homo sapien
ctggcatttggactcaatgaaaagggcacctaa

SEQ ID NO: 382818 - DNA, 33 bp, Homo sapien
ctggcatttggactcagtgaaaagggcacctaa

SEQ ID NO: 382819 - DNA, 33 bp, Homo sapien
cgaattagagtaaggccgaggaacattccagac

SEQ ID NO: 382820 - DNA, 33 bp, Homo sapien
cgaattagagtaaggctgaggaacattccagac

SEQ ID NO: 382821 - DNA, 33 bp, Homo sapien
tctccatcctctgagaaactcactgactgtgtt

SEQ ID NO: 382822 - DNA, 33 bp, Homo sapien
tctccatcctctgagacactcactgactgtgtt

SEQ ID NO: 382823 - DNA, 33 bp, Homo sapien
gacccctgccaacttgaatgagtctgaaatgga

SEQ ID NO: 382824 - DNA, 33 bp, Homo sapien
gacccctgccaacttgcatgagtctgaaatgga

SEQ ID NO: 382825 - DNA, 33 bp, Homo sapien
catgttttcctcaaaccgtctatctcctgaaca

SEQ ID NO: 382826 - DNA, 33 bp, Homo sapien
catgttttcctcaaactgtctatctcctgaaca

SEQ ID NO: 382827 - DNA, 33 bp, Homo sapien
cccccttaaaattgtccctctcataggacggca

SEQ ID NO: 382828 - DNA, 33 bp, Homo sapien
cccccttaaaattgtctctctcataggacggca

SEQ ID NO: 382829 - DNA, 33 bp, Homo sapien
accaaaaaacagagacccatttataatacagaa

SEQ ID NO: 382830 - DNA, 33 bp, Homo sapien
accaaaaaacagagacgcatttataatacagaa

SEQ ID NO: 382831 - DNA, 33 bp, Homo sapien
tatcatgctgtccaagaatggtgaactcagtat

SEQ ID NO: 382832 - DNA, 33 bp, Homo sapien
tatcatgctgtccaaggatggtgaactcagtat

SEQ ID NO: 382833 - DNA, 33 bp, Homo sapien
ggtataaaacaaattcaccctggattgtcccag

SEQ ID NO: 382834 - DNA, 33 bp, Homo sapien
ggtataaaacaaattcgccctggattgtcccag

SEQ ID NO: 382835 - DNA, 33 bp, Homo sapien
ctcctcctaactgtaacgggctgagtggtcctg

SEQ ID NO: 382836 - DNA, 33 bp, Homo sapien
ctcctcctaactgtaatgggctgagtggtcctg

SEQ ID NO: 382837 - DNA, 33 bp, Homo sapien
ggcaactgatgtcaaacgcccttgaatatgcag

SEQ ID NO: 382838 - DNA, 33 bp, Homo sapien
ggcaactgatgtcaaatgcccttgaatatgcag

SEQ ID NO: 382839 - DNA, 33 bp, Homo sapien
ggaatctgtatatataacgatgctccctcagga

SEQ ID NO: 382840 - DNA, 33 bp, Homo sapien
ggaatctgtatatatagcgatgctccctcagga

SEQ ID NO: 382841 - DNA, 33 bp, Homo sapien
agtagaaatttcagaaagagaaccacacttata

SEQ ID NO: 382842 - DNA, 33 bp, Homo sapien
agtagaaatttcagaaggagaaccacacttata

SEQ ID NO: 382843 - DNA, 33 bp, Homo sapien
acaaaggacatgaatgaaataatggaaaataat

SEQ ID NO: 382844 - DNA, 33 bp, Homo sapien
acaaaggacatgaatgcaataatggaaaataat

SEQ ID NO: 382845 - DNA, 33 bp, Homo sapien
cgatgggaagggaagcagaacactggagaccct

SEQ ID NO: 382846 - DNA, 33 bp, Homo sapien
cgatgggaagggaagcggaacactggagaccct

SEQ ID NO: 382847 - DNA, 33 bp, Homo sapien
tcgaaccagactttcacctggaggatcgggcga

SEQ ID NO: 382848 - DNA, 33 bp, Homo sapien
tcgaaccagactttcatctggaggatcgggcga

SEQ ID NO: 382849 - DNA, 33 bp, Homo sapien
ttacatgaaatagtcaacactttattgtaagat

SEQ ID NO: 382850 - DNA, 33 bp, Homo sapien
ttacatgaaatagtcagcactttattgtaagat

SEQ ID NO: 382851 - DNA, 33 bp, Homo sapien
atacgaaggcctcgacaaaaacccaaagagccc

SEQ ID NO: 382852 - DNA, 33 bp, Homo sapien
atacgaaggcctcgacgaaaacccaaagagccc

SEQ ID NO: 382853 - DNA, 33 bp, Homo sapien
ctgggcatggacataaacagctagatatgcctc

SEQ ID NO: 382854 - DNA, 33 bp, Homo sapien
ctgggcatggacataaccagctagatatgcctc

SEQ ID NO: 382855 - DNA, 33 bp, Homo sapien
ttacataaaatgttcacaacaggacaatcaata

SEQ ID NO: 382856 - DNA, 33 bp, Homo sapien
ttacataaaatgttcagaacaggacaatcaata

SEQ ID NO: 382857 - DNA, 33 bp, Homo sapien
gtagaatatgagaaaaagatttaagcactttac

SEQ ID NO: 382858 - DNA, 33 bp, Homo sapien
gtagaatatgagaaaacgatttaagcactttac

SEQ ID NO: 382859 - DNA, 33 bp, Homo sapien
gtaaccgcaagagactaaagaatccaaaagtag

SEQ ID NO: 382860 - DNA, 33 bp, Homo sapien
gtaaccgcaagagactgaagaatccaaaagtag

SEQ ID NO: 382861 - DNA, 33 bp, Homo sapien
cccttgtgttccaccacatactcattcgttact

SEQ ID NO: 382862 - DNA, 33 bp, Homo sapien
cccttgtgttccaccagatactcattcgttact

SEQ ID NO: 382863 - DNA, 33 bp, Homo sapien
tgacataagaatgaacagcaaaatgtatatgac

SEQ ID NO: 382864 - DNA, 33 bp, Homo sapien
tgacataagaatgaacggcaaaatgtatatgac

SEQ ID NO: 382865 - DNA, 33 bp, Homo sapien
aattggactgaaacatcatgtcccatgcttaac

SEQ ID NO: 382866 - DNA, 33 bp, Homo sapien
aattggactgaaacatgatgtcccatgcttaac

SEQ ID NO: 382867 - DNA, 33 bp, Homo sapien
tggcaaatgtcccagtaaacgctggaaggagcc

SEQ ID NO: 382868 - DNA, 33 bp, Homo sapien
tggcaaatgtcccagtgaacgctggaaggagcc

SEQ ID NO: 382869 - DNA, 33 bp, Homo sapien
ttgtaatttcaccacccgacgctaattcttttt

SEQ ID NO: 382870 - DNA, 33 bp, Homo sapien
ttgtaatttcaccacctgacgctaattcttttt

SEQ ID NO: 382871 - DNA, 33 bp, Homo sapien
ctgtttcttatgttcacggagctctcggccgcc

SEQ ID NO: 382872 - DNA, 33 bp, Homo sapien
ctgtttcttatgttcatggagctctcggccgcc

SEQ ID NO: 382873 - DNA, 33 bp, Homo sapien
tcatttgttcatggaacgtggaatggtaagtag

SEQ ID NO: 382874 - DNA, 33 bp, Homo sapien
tcatttgttcatggaatgtggaatggtaagtag

SEQ ID NO: 382875 - DNA, 33 bp, Homo sapien
gtcctgtctttgacagaagagcctcagcagttt

SEQ ID NO: 382876 - DNA, 33 bp, Homo sapien
gtcctgtctttgacaggagagcctcagcagttt

SEQ ID NO: 382877 - DNA, 33 bp, Homo sapien
agggagtgaaggtggcaagagtagttggattct

SEQ ID NO: 382878 - DNA, 33 bp, Homo sapien
agggagtgaaggtggcgagagtagttggattct

SEQ ID NO: 382879 - DNA, 33 bp, Homo sapien
atgatcatttcttaaaaccgaattcataaccaa

SEQ ID NO: 382880 - DNA, 33 bp, Homo sapien
atgatcatttcttaaagccgaattcataaccaa

SEQ ID NO: 382881 - DNA, 33 bp, Homo sapien
cggtgaaaacctgcaacgtgaagtcttattcca

SEQ ID NO: 382882 - DNA, 33 bp, Homo sapien
cggtgaaaacctgcaatgtgaagtcttattcca

SEQ ID NO: 382883 - DNA, 33 bp, Homo sapien
atcagacatttacaacaaagtatgaatttaggc

SEQ ID NO: 382884 - DNA, 33 bp, Homo sapien
atcagacatttacaacgaagtatgaatttaggc

SEQ ID NO: 382885 - DNA, 33 bp, Homo sapien
ctagaactttcatctaagtctgccacaaacagg

SEQ ID NO: 382886 - DNA, 33 bp, Homo sapien
ctagaactttcatctaggtctgccacaaacagg

SEQ ID NO: 382887 - DNA, 33 bp, Homo sapien
tttctcatctgtgaaacgggaatgctaataaca

SEQ ID NO: 382888 - DNA, 33 bp, Homo sapien
tttctcatctgtgaaatgggaatgctaataaca

SEQ ID NO: 382889 - DNA, 33 bp, Homo sapien
tattgtttgtgaagtacaaccccccacacacct

SEQ ID NO: 382890 - DNA, 33 bp, Homo sapien
tattgtttgtgaagtataaccccccacacacct

SEQ ID NO: 382891 - DNA, 33 bp, Homo sapien
tgctgtgttctgtcaacttagagagcaaaggaa

SEQ ID NO: 382892 - DNA, 33 bp, Homo sapien
tgctgtgttctgtcaatttagagagcaaaggaa

SEQ ID NO: 382893 - DNA, 33 bp, Homo sapien
gtcacaagctagtaaactgtagaaccagaattc

SEQ ID NO: 382894 - DNA, 33 bp, Homo sapien
gtcacaagctagtaaattgtagaaccagaattc

SEQ ID NO: 382895 - DNA, 33 bp, Homo sapien
accccattaatagatacagctgaaaacaggatc

SEQ ID NO: 382896 - DNA, 33 bp, Homo sapien
accccattaatagatatagctgaaaacaggatc

SEQ ID NO: 382897 - DNA, 33 bp, Homo sapien
tttgagaataagttgccgacatgtttcctcatt

SEQ ID NO: 382898 - DNA, 33 bp, Homo sapien
tttgagaataagttgctgacatgtttcctcatt

SEQ ID NO: 382899 - DNA, 33 bp, Homo sapien
tttgcaaattgtcccaataatttcctgtatagc

SEQ ID NO: 382900 - DNA, 33 bp, Homo sapien
tttgcaaattgtcccagtaatttcctgtatagc

SEQ ID NO: 382901 - DNA, 33 bp, Homo sapien
gcactctatgtccaaacagctgatcacccaaat

SEQ ID NO: 382902 - DNA, 33 bp, Homo sapien
gcactctatgtccaaagagctgatcacccaaat

SEQ ID NO: 382903 - DNA, 33 bp, Homo sapien
gttgaccaaaatgccaaggtaagtgcactgctt

SEQ ID NO: 382904 - DNA, 33 bp, Homo sapien
gttgaccaaaatgccacggtaagtgcactgctt

SEQ ID NO: 382905 - DNA, 33 bp, Homo sapien
atatgccctgactaaaaattttcagtttgttaa

SEQ ID NO: 382906 - DNA, 33 bp, Homo sapien
atatgccctgactaaacattttcagtttgttaa

SEQ ID NO: 382907 - DNA, 33 bp, Homo sapien
atctgtaggtgaattacctttctcgttagtggg

SEQ ID NO: 382908 - DNA, 33 bp, Homo sapien
atctgtaggtgaattatctttctcgttagtggg

SEQ ID NO: 382909 - DNA, 33 bp, Homo sapien
tttatgctgaagtctgcattattagagagcaaa

SEQ ID NO: 382910 - DNA, 33 bp, Homo sapien
tttatgctgaagtctgtattattagagagcaaa

SEQ ID NO: 382911 - DNA, 33 bp, Homo sapien
aacttgggcctatagccattaattcagaaacaa

SEQ ID NO: 382912 - DNA, 33 bp, Homo sapien
aacttgggcctatagctattaattcagaaacaa

SEQ ID NO: 382913 - DNA, 33 bp, Homo sapien
attaacttgcttctacaacccagaatgttccaa

SEQ ID NO: 382914 - DNA, 33 bp, Homo sapien
attaacttgcttctacgacccagaatgttccaa

SEQ ID NO: 382915 - DNA, 33 bp, Homo sapien
tataattgatatctggaataatcagcagctctt

SEQ ID NO: 382916 - DNA, 33 bp, Homo sapien
tataattgatatctgggataatcagcagctctt

SEQ ID NO: 382917 - DNA, 33 bp, Homo sapien
ttcaggaatttagccaactcttttatgaaaatg

SEQ ID NO: 382918 - DNA, 33 bp, Homo sapien
ttcaggaatttagccagctcttttatgaaaatg

SEQ ID NO: 382919 - DNA, 33 bp, Homo sapien
ttaaatgcagttgttcgcaatcctgggtgtagg

SEQ ID NO: 382920 - DNA, 33 bp, Homo sapien
ttaaatgcagttgttctcaatcctgggtgtagg

SEQ ID NO: 382921 - DNA, 33 bp, Homo sapien
tgctgcttgttgcagtaactaaccaccaatgtt

SEQ ID NO: 382922 - DNA, 33 bp, Homo sapien
tgctgcttgttgcagtgactaaccaccaatgtt

SEQ ID NO: 382923 - DNA, 33 bp, Homo sapien
taggaaacagatattggaacagaaatcttcatc

SEQ ID NO: 382924 - DNA, 33 bp, Homo sapien
taggaaacagatattgtaacagaaatcttcatc

SEQ ID NO: 382925 - DNA, 33 bp, Homo sapien
ctctgctttatgaccacaggttttatccctaac

SEQ ID NO: 382926 - DNA, 33 bp, Homo sapien
ctctgctttatgaccataggttttatccctaac

SEQ ID NO: 382927 - DNA, 33 bp, Homo sapien
cttccaagtcttagaacctcaactgacatatag

SEQ ID NO: 382928 - DNA, 33 bp, Homo sapien
cttccaagtcttagaatctcaactgacatatag

SEQ ID NO: 382929 - DNA, 33 bp, Homo sapien
aacaggaatcgctaaccgcaggattcgctaact

SEQ ID NO: 382930 - DNA, 33 bp, Homo sapien
aacaggaatcgctaactgcaggattcgctaact

SEQ ID NO: 382931 - DNA, 33 bp, Homo sapien
aggaggaggccgggtaaatttgcttactctttt

SEQ ID NO: 382932 - DNA, 33 bp, Homo sapien
aggaggaggccgggtagatttgcttactctttt

SEQ ID NO: 382933 - DNA, 33 bp, Homo sapien
ttaggcagctgaagaacgaactgatacagggtg

SEQ ID NO: 382934 - DNA, 33 bp, Homo sapien
ttaggcagctgaagaatgaactgatacagggtg

SEQ ID NO: 382935 - DNA, 33 bp, Homo sapien
tgacaccccggcgatgaagtcaggggcgaacac

SEQ ID NO: 382936 - DNA, 33 bp, Homo sapien
tgacaccccggcgatgtagtcaggggcgaacac

SEQ ID NO: 382937 - DNA, 33 bp, Homo sapien
agtgagttgcttttgagcgactttgagtccctt

SEQ ID NO: 382938 - DNA, 33 bp, Homo sapien
agtgagttgcttttgatcgactttgagtccctt

SEQ ID NO: 382939 - DNA, 33 bp, Homo sapien
agactctgtctcaagaaaaataaccgtaactat

SEQ ID NO: 382940 - DNA, 33 bp, Homo sapien
agactctgtctcaagagaaataaccgtaactat

SEQ ID NO: 382941 - DNA, 33 bp, Homo sapien
gagccctcagccttcccaaaactccaaagacag

SEQ ID NO: 382942 - DNA, 33 bp, Homo sapien
gagccctcagccttcctaaaactccaaagacag

SEQ ID NO: 382943 - DNA, 33 bp, Homo sapien
aatgatttaggctagaggtatttgacagtttca

SEQ ID NO: 382944 - DNA, 33 bp, Homo sapien
aatgatttaggctagatgtatttgacagtttca

SEQ ID NO: 382945 - DNA, 33 bp, Homo sapien
ccgagtaagcacagggaactatttgtaatacta

SEQ ID NO: 382946 - DNA, 33 bp, Homo sapien
ccgagtaagcacagggcactatttgtaatacta

SEQ ID NO: 382947 - DNA, 33 bp, Homo sapien
taaagtatattctagacgtcctgacattttatc

SEQ ID NO: 382948 - DNA, 33 bp, Homo sapien
taaagtatattctagatgtcctgacattttatc

SEQ ID NO: 382949 - DNA, 33 bp, Homo sapien
cattctcctcttccacagacagaattcgttctt

SEQ ID NO: 382950 - DNA, 33 bp, Homo sapien
cattctcctcttccacggacagaattcgttctt

SEQ ID NO: 382951 - DNA, 33 bp, Homo sapien
ctgacagacagtgtacccatttattttaaagta

SEQ ID NO: 382952 - DNA, 33 bp, Homo sapien
ctgacagacagtgtacgcatttattttaaagta

SEQ ID NO: 382953 - DNA, 33 bp, Homo sapien
cagtttttcagctggaagataaataaaactact

SEQ ID NO: 382954 - DNA, 33 bp, Homo sapien
cagtttttcagctggaggataaataaaactact

SEQ ID NO: 382955 - DNA, 33 bp, Homo sapien
tatgaaattttacacaccttttacagtcataca

SEQ ID NO: 382956 - DNA, 33 bp, Homo sapien
tatgaaattttacacagcttttacagtcataca

SEQ ID NO: 382957 - DNA, 33 bp, Homo sapien
actgaattaattgtaacgttcctaaaagcaggg

SEQ ID NO: 382958 - DNA, 33 bp, Homo sapien
actgaattaattgtaaggttcctaaaagcaggg

SEQ ID NO: 382959 - DNA, 33 bp, Homo sapien
ccaggatttactgttacgatggctcttcggctt

SEQ ID NO: 382960 - DNA, 33 bp, Homo sapien
ccaggatttactgttatgatggctcttcggctt

SEQ ID NO: 382961 - DNA, 33 bp, Homo sapien
gtccagtttcttcaacaacacactgcaaggagt

SEQ ID NO: 382962 - DNA, 33 bp, Homo sapien
gtccagtttcttcaacgacacactgcaaggagt

SEQ ID NO: 382963 - DNA, 33 bp, Homo sapien
atcctctcccagcttaacattcttcatccccct

SEQ ID NO: 382964 - DNA, 33 bp, Homo sapien
atcctctcccagcttagcattcttcatccccct

SEQ ID NO: 382965 - DNA, 33 bp, Homo sapien
cgattgcatagtttcaaggggctagatttggca

SEQ ID NO: 382966 - DNA, 33 bp, Homo sapien
cgattgcatagtttcagggggctagatttggca

SEQ ID NO: 382967 - DNA, 33 bp, Homo sapien
tgactcagtagttaagaaagctaatagaggagt

SEQ ID NO: 382968 - DNA, 33 bp, Homo sapien
tgactcagtagttaaggaagctaatagaggagt

SEQ ID NO: 382969 - DNA, 33 bp, Homo sapien
aaataaattgttgaagcctctatatatagcttc

SEQ ID NO: 382970 - DNA, 33 bp, Homo sapien
aaataaattgttgaaggctctatatatagcttc

SEQ ID NO: 382971 - DNA, 33 bp, Homo sapien
aataaaagtcatttagaaatgttgacatgtaag

SEQ ID NO: 382972 - DNA, 33 bp, Homo sapien
aataaaagtcatttagtaatgttgacatgtaag

SEQ ID NO: 382973 - DNA, 33 bp, Homo sapien
gacaagtttagagagaagccaataaaaagagta

SEQ ID NO: 382974 - DNA, 33 bp, Homo sapien
gacaagtttagagagacgccaataaaaagagta

SEQ ID NO: 382975 - DNA, 33 bp, Homo sapien
actcttgggcctgtaacctccagtactttgcat

SEQ ID NO: 382976 - DNA, 33 bp, Homo sapien
actcttgggcctgtaatctccagtactttgcat

SEQ ID NO: 382977 - DNA, 33 bp, Homo sapien
aaggtggcaatttcatcagactaaaaaaactca

SEQ ID NO: 382978 - DNA, 33 bp, Homo sapien
aaggtggcaatttcattagactaaaaaaactca

SEQ ID NO: 382979 - DNA, 33 bp, Homo sapien
cctgaatctggggtcaatgaacctccctttcat

SEQ ID NO: 382980 - DNA, 33 bp, Homo sapien
cctgaatctggggtcagtgaacctccctttcat

SEQ ID NO: 382981 - DNA, 33 bp, Homo sapien
gcatacagccaggtagccactatcataatcaag

SEQ ID NO: 382982 - DNA, 33 bp, Homo sapien
gcatacagccaggtagtcactatcataatcaag

SEQ ID NO: 382983 - DNA, 33 bp, Homo sapien
taattactccacatgaactgttgcaaaggtgac

SEQ ID NO: 382984 - DNA, 33 bp, Homo sapien
taattactccacatgatctgttgcaaaggtgac

SEQ ID NO: 382985 - DNA, 33 bp, Homo sapien
accggatgttccagcaaaaggatacagtgggtg

SEQ ID NO: 382986 - DNA, 33 bp, Homo sapien
accggatgttccagcacaaggatacagtgggtg

SEQ ID NO: 382987 - DNA, 33 bp, Homo sapien
aaatgtaggggaaatacagctctattgaaatgt

SEQ ID NO: 382988 - DNA, 33 bp, Homo sapien
aaatgtaggggaaatatagctctattgaaatgt

SEQ ID NO: 382989 - DNA, 33 bp, Homo sapien
ctagagataaggacaacaagtaatggtacctaa

SEQ ID NO: 382990 - DNA, 33 bp, Homo sapien
ctagagataaggacaataagtaatggtacctaa

SEQ ID NO: 382991 - DNA, 33 bp, Homo sapien
tttcttcatgatgttacgttatcaaaataaata

SEQ ID NO: 382992 - DNA, 33 bp, Homo sapien
tttcttcatgatgttatgttatcaaaataaata

SEQ ID NO: 382993 - DNA, 33 bp, Homo sapien
ctgcaaatctagttagaaaggttccctccaggg

SEQ ID NO: 382994 - DNA, 33 bp, Homo sapien
ctgcaaatctagttaggaaggttccctccaggg

SEQ ID NO: 382995 - DNA, 33 bp, Homo sapien
taagataactactaaacgaaaaagtgcagaaca

SEQ ID NO: 382996 - DNA, 33 bp, Homo sapien
taagataactactaaatgaaaaagtgcagaaca

SEQ ID NO: 382997 - DNA, 33 bp, Homo sapien
tatggacttagcatcagatcccagaggcagcca

SEQ ID NO: 382998 - DNA, 33 bp, Homo sapien
tatggacttagcatcatatcccagaggcagcca

SEQ ID NO: 382999 - DNA, 33 bp, Homo sapien
tgttcatgtaacagaacaccgtatagcagttta

SEQ ID NO: 383000 - DNA, 33 bp, Homo sapien
tgttcatgtaacagaataccgtatagcagttta

SEQ ID NO: 383001 - DNA, 33 bp, Homo sapien
ctctgggaaacaaaagacgcatgggaggccaag

SEQ ID NO: 383002 - DNA, 33 bp, Homo sapien
ctctgggaaacaaaaggcgcatgggaggccaag

SEQ ID NO: 383003 - DNA, 33 bp, Homo sapien
ttattgctcccggataaaaggacccattctcat

SEQ ID NO: 383004 - DNA, 33 bp, Homo sapien
ttattgctcccggatagaaggacccattctcat

SEQ ID NO: 383005 - DNA, 33 bp, Homo sapien
tgatcactgtgaaacaagaggattgaggaggcc

SEQ ID NO: 383006 - DNA, 33 bp, Homo sapien
tgatcactgtgaaacaggaggattgaggaggcc

SEQ ID NO: 383007 - DNA, 33 bp, Homo sapien
caattttttgtttttcgaagagatagtgtctca

SEQ ID NO: 383008 - DNA, 33 bp, Homo sapien
caattttttgtttttctaagagatagtgtctca

SEQ ID NO: 383009 - DNA, 33 bp, Homo sapien
cagagcagtcttcaaacgttactgtcattgcat

SEQ ID NO: 383010 - DNA, 33 bp, Homo sapien
cagagcagtcttcaaatgttactgtcattgcat

SEQ ID NO: 383011 - DNA, 33 bp, Homo sapien
gcattccctgcaaagcactcaaatgtggaagcc

SEQ ID NO: 383012 - DNA, 33 bp, Homo sapien
gcattccctgcaaagcgctcaaatgtggaagcc

SEQ ID NO: 383013 - DNA, 33 bp, Homo sapien
gctgtctctaggaagcgagttttcattcctagg

SEQ ID NO: 383014 - DNA, 33 bp, Homo sapien
gctgtctctaggaagctagttttcattcctagg

SEQ ID NO: 383015 - DNA, 33 bp, Homo sapien
ccctgtgacaagcacccgggctaacctatatga

SEQ ID NO: 383016 - DNA, 33 bp, Homo sapien
ccctgtgacaagcacctgggctaacctatatga

SEQ ID NO: 383017 - DNA, 33 bp, Homo sapien
ttttcctcctgtctcacgaggtgctcaacccta

SEQ ID NO: 383018 - DNA, 33 bp, Homo sapien
ttttcctcctgtctcatgaggtgctcaacccta

SEQ ID NO: 383019 - DNA, 33 bp, Homo sapien
cgggggctgccgttcacgccacgctgcctcctg

SEQ ID NO: 383020 - DNA, 33 bp, Homo sapien
cgggggctgccgttcatgccacgctgcctcctg

SEQ ID NO: 383021 - DNA, 33 bp, Homo sapien
tccatgttgctttgtacaggacttgtcaagagg

SEQ ID NO: 383022 - DNA, 33 bp, Homo sapien
tccatgttgctttgtataggacttgtcaagagg

SEQ ID NO: 383023 - DNA, 33 bp, Homo sapien
tcttatagaggctggaaaagagctcaggggcca

SEQ ID NO: 383024 - DNA, 33 bp, Homo sapien
tcttatagaggctggacaagagctcaggggcca

SEQ ID NO: 383025 - DNA, 33 bp, Homo sapien
ttgttgtcgttatgaaatacagcatacaaaaaa

SEQ ID NO: 383026 - DNA, 33 bp, Homo sapien
ttgttgtcgttatgaagtacagcatacaaaaaa

SEQ ID NO: 383027 - DNA, 33 bp, Homo sapien
aaatcgtttacacatacgatttttaaatatacc

SEQ ID NO: 383028 - DNA, 33 bp, Homo sapien
aaatcgtttacacatatgatttttaaatatacc

SEQ ID NO: 383029 - DNA, 33 bp, Homo sapien
ggggtcgcttctcccccattcccagccctgagt

SEQ ID NO: 383030 - DNA, 33 bp, Homo sapien
ggggtcgcttctccccgattcccagccctgagt

SEQ ID NO: 383031 - DNA, 33 bp, Homo sapien
cacttcgacaaaggacaccaagcccgcgggtag

SEQ ID NO: 383032 - DNA, 33 bp, Homo sapien
cacttcgacaaaggacgccaagcccgcgggtag

SEQ ID NO: 383033 - DNA, 33 bp, Homo sapien; identical to SEQ ID NO: 383031

SEQ ID NO: 383034 - DNA, 33 bp, Homo sapien; identical to SEQ ID NO: 383032

SEQ ID NO: 383035 - DNA, 33 bp, Homo sapien; identical to SEQ ID NO: 383031

SEQ ID NO: 383036 - DNA, 33 bp, Homo sapien; identical to SEQ ID NO: 383032

SEQ ID NO: 383037 - DNA, 33 bp, Homo sapien
cattatcatataagaaagtgagttacataagag

SEQ ID NO: 383038 - DNA, 33 bp, Homo sapien
cattatcatataagaatgtgagttacataagag

SEQ ID NO: 383039 - DNA, 33 bp, Homo sapien
ggaccactggagaagcagaagggatgaatctaa

SEQ ID NO: 383040 - DNA, 33 bp, Homo sapien
ggaccactggagaagcggaagggatgaatctaa

SEQ ID NO: 383041 - DNA, 33 bp, Homo sapien
tggtgataagagcacaatactgccactcatcac

SEQ ID NO: 383042 - DNA, 33 bp, Homo sapien
tggtgataagagcacagtactgccactcatcac

SEQ ID NO: 383043 - DNA, 33 bp, Homo sapien
tgaggtgcctagtataaaagctataaaatgaaa

SEQ ID NO: 383044 - DNA, 33 bp, Homo sapien
tgaggtgcctagtatacaagctataaaatgaaa

SEQ ID NO: 383045 - DNA, 33 bp, Homo sapien
agccctactattcataccttcatgagcattttt

SEQ ID NO: 383046 - DNA, 33 bp, Homo sapien
agccctactattcatatcttcatgagcattttt

SEQ ID NO: 383047 - DNA, 33 bp, Homo sapien
gccctttacagaaaaactctgccaactcctaat

SEQ ID NO: 383048 - DNA, 33 bp, Homo sapien
gccctttacagaaaaagtctgccaactcctaat

SEQ ID NO: 383049 - DNA, 33 bp, Homo sapien
gtcaccgggcccggccaagaatacttacttcca

SEQ ID NO: 383050 - DNA, 33 bp, Homo sapien
gtcaccgggcccggccgagaatacttacttcca

SEQ ID NO: 383051 - DNA, 33 bp, Homo sapien
tcaagtcactaagtcacacaaagacaatcatag

SEQ ID NO: 383052 - DNA, 33 bp, Homo sapien
tcaagtcactaagtcatacaaagacaatcatag

SEQ ID NO: 383053 - DNA, 33 bp, Homo sapien
atgttctgaacatcacagactctcttactcaac

SEQ ID NO: 383054 - DNA, 33 bp, Homo sapien
atgttctgaacatcacggactctcttactcaac

SEQ ID NO: 383055 - DNA, 33 bp, Homo sapien
catggcctcttggagagcaggaacgtttttgtt

SEQ ID NO: 383056 - DNA, 33 bp, Homo sapien
catggcctcttggagatcaggaacgtttttgtt

SEQ ID NO: 383057 - DNA, 33 bp, Homo sapien
aggctttgcaaatatacgtgactactggccttt

SEQ ID NO: 383058 - DNA, 33 bp, Homo sapien
aggctttgcaaatatatgtgactactggccttt

SEQ ID NO: 383059 - DNA, 33 bp, Homo sapien
tctcaggcgcttctccaggaaccataaatccca

SEQ ID NO: 383060 - DNA, 33 bp, Homo sapien
tctcaggcgcttctccgggaaccataaatccca

SEQ ID NO: 383061 - DNA, 33 bp, Homo sapien
gaaggtctgctgcttaggaactttctgtctctt

SEQ ID NO: 383062 - DNA, 33 bp, Homo sapien
gaaggtctgctgcttatgaactttctgtctctt

SEQ ID NO: 383063 - DNA, 33 bp, Homo sapien
tagactaggaagaagaactgatgtgacaggaaa

SEQ ID NO: 383064 - DNA, 33 bp, Homo sapien
tagactaggaagaagatctgatgtgacaggaaa

SEQ ID NO: 383065 - DNA, 33 bp, Homo sapien
tggtgctgacctggggaacttgacacaggcacg

SEQ ID NO: 383066 - DNA, 33 bp, Homo sapien
tggtgctgacctgggggacttgacacaggcacg

SEQ ID NO: 383067 - DNA, 33 bp, Homo sapien
ggggtatgttgctgcaaggcctaccgccggggc

SEQ ID NO: 383068 - DNA, 33 bp, Homo sapien
ggggtatgttgctgcagggcctaccgccggggc

SEQ ID NO: 383069 - DNA, 33 bp, Homo sapien
cttatcgcacataataccttcttgcgagctatt

SEQ ID NO: 383070 - DNA, 33 bp, Homo sapien
cttatcgcacataatagcttcttgcgagctatt

SEQ ID NO: 383071 - DNA, 33 bp, Homo sapien
ctaggctcacgtgggaataaatgcaggaggctg

SEQ ID NO: 383072 - DNA, 33 bp, Homo sapien
ctaggctcacgtgggagtaaatgcaggaggctg

SEQ ID NO: 383073 - DNA, 33 bp, Homo sapien
tccaaggagtctatgccatgggtttcaatcgtc

SEQ ID NO: 383074 - DNA, 33 bp, Homo sapien
tccaaggagtctatgcgatgggtttcaatcgtc

SEQ ID NO: 383075 - DNA, 33 bp, Homo sapien
agatctggcctaaatacggagatgcgtacaaag

SEQ ID NO: 383076 - DNA, 33 bp, Homo sapien
agatctggcctaaatatggagatgcgtacaaag

SEQ ID NO: 383077 - DNA, 33 bp, Homo sapien
gctcaatgcagatttacatcactgttggctcta

SEQ ID NO: 383078 - DNA, 33 bp, Homo sapien
gctcaatgcagatttatatcactgttggctcta

SEQ ID NO: 383079 - DNA, 33 bp, Homo sapien
cttgacttttgctccaccactcccctgaaatag

SEQ ID NO: 383080 - DNA, 33 bp, Homo sapien
cttgacttttgctccatcactcccctgaaatag

SEQ ID NO: 383081 - DNA, 33 bp, Homo sapien
ccaagttatctcccaacggagtccacagagtgt

SEQ ID NO: 383082 - DNA, 33 bp, Homo sapien
ccaagttatctcccaatggagtccacagagtgt

SEQ ID NO: 383083 - DNA, 33 bp, Homo sapien
gtgagaacgtctctcaaaaagaagtagttagtg

SEQ ID NO: 383084 - DNA, 33 bp, Homo sapien
gtgagaacgtctctcagaaagaagtagttagtg

SEQ ID NO: 383085 - DNA, 33 bp, Homo sapien
tttccagtctcaaacaacaaatacttagaaaat

SEQ ID NO: 383086 - DNA, 33 bp, Homo sapien
tttccagtctcaaacagcaaatacttagaaaat

SEQ ID NO: 383087 - DNA, 33 bp, Homo sapien
ccagtcccgtccctgaggaagacagcttgggag

SEQ ID NO: 383088 - DNA, 33 bp, Homo sapien
ccagtcccgtccctgatgaagacagcttgggag

SEQ ID NO: 383089 - DNA, 33 bp, Homo sapien
gtttctgccaagatcaaatgttggagaaagcct

SEQ ID NO: 383090 - DNA, 33 bp, Homo sapien
gtttctgccaagatcatatgttggagaaagcct

SEQ ID NO: 383091 - DNA, 33 bp, Homo sapien
aaggctgcactcctaaaaggtccagtcacatag

SEQ ID NO: 383092 - DNA, 33 bp, Homo sapien
aaggctgcactcctaagaggtccagtcacatag

SEQ ID NO: 383093 - DNA, 33 bp, Homo sapien
gtcatacccacaggcacctgagttaaaggtttc

SEQ ID NO: 383094 - DNA, 33 bp, Homo sapien
gtcatacccacaggcatctgagttaaaggtttc

SEQ ID NO: 383095 - DNA, 33 bp, Homo sapien
aatctttattggaaaacggacaccaaaatagat

SEQ ID NO: 383096 - DNA, 33 bp, Homo sapien
aatctttattggaaaatggacaccaaaatagat

SEQ ID NO: 383097 - DNA, 33 bp, Homo sapien
ttgtgtgggttgttcaacagtatcagcctacag

SEQ ID NO: 383098 - DNA, 33 bp, Homo sapien
ttgtgtgggttgttcagcagtatcagcctacag

SEQ ID NO: 383099 - DNA, 33 bp, Homo sapien
gccgggctccggagtccaagcctaggtaggtgc

SEQ ID NO: 383100 - DNA, 33 bp, Homo sapien
gccgggctccggagtctaagcctaggtaggtgc

SEQ ID NO: 383101 - DNA, 33 bp, Homo sapien
tagatgcttgtgaaacagctcgttgggaggtag

SEQ ID NO: 383102 - DNA, 33 bp, Homo sapien
tagatgcttgtgaaacggctcgttgggaggtag

SEQ ID NO: 383103 - DNA, 33 bp, Homo sapien
gaagctgggccagataaactccaacagtgacag

SEQ ID NO: 383104 - DNA, 33 bp, Homo sapien
gaagctgggccagatagactccaacagtgacag

SEQ ID NO: 383105 - DNA, 33 bp, Homo sapien
agggagcagagctaggaccagtgtacccagaat

SEQ ID NO: 383106 - DNA, 33 bp, Homo sapien
agggagcagagctagggccagtgtacccagaat

SEQ ID NO: 383107 - DNA, 33 bp, Homo sapien
ctcaaagcaggaccaagaaatatgacatgcctc

SEQ ID NO: 383108 - DNA, 33 bp, Homo sapien
ctcaaagcaggaccaataaatatgacatgcctc

SEQ ID NO: 383109 - DNA, 33 bp, Homo sapien
attctgatacctgcacaggagaacaaacattcc

SEQ ID NO: 383110 - DNA, 33 bp, Homo sapien
attctgatacctgcacgggagaacaaacattcc

SEQ ID NO: 383111 - DNA, 33 bp, Homo sapien
ttaacattgtatgatacctgtcaatggtcttga

SEQ ID NO: 383112 - DNA, 33 bp, Homo sapien
ttaacattgtatgatatctgtcaatggtcttga

SEQ ID NO: 383113 - DNA, 33 bp, Homo sapien
ccataatgcaacaaacggcctatcactaagtta

SEQ ID NO: 383114 - DNA, 33 bp, Homo sapien
ccataatgcaacaaactgcctatcactaagtta

SEQ ID NO: 383115 - DNA, 33 bp, Homo sapien
atggactctctctaagaaactcgctactctcca

SEQ ID NO: 383116 - DNA, 33 bp, Homo sapien
atggactctctctaaggaactcgctactctcca

SEQ ID NO: 383117 - DNA, 33 bp, Homo sapien
gccaacctagtgacaacagtgcgctttattccg

SEQ ID NO: 383118 - DNA, 33 bp, Homo sapien
gccaacctagtgacaatagtgcgctttattccg

SEQ ID NO: 383119 - DNA, 33 bp, Homo sapien
cttggcatcctttccacactgggggatgtggat

SEQ ID NO: 383120 - DNA, 33 bp, Homo sapien
cttggcatcctttccatactgggggatgtggat

SEQ ID NO: 383121 - DNA, 33 bp, Homo sapien
gtcccaggtctagcccaatagtgcggaagtagc

SEQ ID NO: 383122 - DNA, 33 bp, Homo sapien
gtcccaggtctagcccgatagtgcggaagtagc

SEQ ID NO: 383123 - DNA, 33 bp, Homo sapien
ctatatatcaaaagcacgatccttgaaataaaa

SEQ ID NO: 383124 - DNA, 33 bp, Homo sapien
ctatatatcaaaagcatgatccttgaaataaaa

SEQ ID NO: 383125 - DNA, 33 bp, Homo sapien
agaggcacaaagaggaccgtggtcatgacaggc

SEQ ID NO: 383126 - DNA, 33 bp, Homo sapien
agaggcacaaagaggatcgtggtcatgacaggc

SEQ ID NO: 383127 - DNA, 33 bp, Homo sapien
tctttctattgctgaggagattccatcgtatgg

SEQ ID NO: 383128 - DNA, 33 bp, Homo sapien
tctttctattgctgagtagattccatcgtatgg

SEQ ID NO: 383129 - DNA, 33 bp, Homo sapien
taaaaatcaggaaaagaaggaattgatggataa

SEQ ID NO: 383130 - DNA, 33 bp, Homo sapien
taaaaatcaggaaaagtaggaattgatggataa

SEQ ID NO: 383131 - DNA, 33 bp, Homo sapien
tgccagctttacaagccacagaatcaccaaaac

SEQ ID NO: 383132 - DNA, 33 bp, Homo sapien
tgccagctttacaagcgacagaatcaccaaaac

SEQ ID NO: 383133 - DNA, 33 bp, Homo sapien
ccgcttgtatcgtgacaaagggcttgagcttga

SEQ ID NO: 383134 - DNA, 33 bp, Homo sapien
ccgcttgtatcgtgacgaagggcttgagcttga

SEQ ID NO: 383135 - DNA, 33 bp, Homo sapien
ggcattatcccaccataaggaccccatccttgt

SEQ ID NO: 383136 - DNA, 33 bp, Homo sapien
ggcattatcccaccatgaggaccccatccttgt

SEQ ID NO: 383137 - DNA, 33 bp, Homo sapien
catgccatttcaccagcatgtagggatttttaa

SEQ ID NO: 383138 - DNA, 33 bp, Homo sapien
catgccatttcaccagtatgtagggatttttaa

SEQ ID NO: 383139 - DNA, 33 bp, Homo sapien
aaggtctttacattcactgaatctctcacaaca

SEQ ID NO: 383140 - DNA, 33 bp, Homo sapien
aaggtctttacattcattgaatctctcacaaca

SEQ ID NO: 383141 - DNA, 33 bp, Homo sapien
cagaactgtgagacgacacattcctgttgctct

SEQ ID NO: 383142 - DNA, 33 bp, Homo sapien
cagaactgtgagacgatacattcctgttgctct

SEQ ID NO: 383143 - DNA, 33 bp, Homo sapien
taaatatgactgcaaaaggccccgagctgctcc

SEQ ID NO: 383144 - DNA, 33 bp, Homo sapien
taaatatgactgcaaacggccccgagctgctcc

SEQ ID NO: 383145 - DNA, 33 bp, Homo sapien
ggggaaggctgttttaaagtggactgaagtatg

SEQ ID NO: 383146 - DNA, 33 bp, Homo sapien
ggggaaggctgttttacagtggactgaagtatg

SEQ ID NO: 383147 - DNA, 33 bp, Homo sapien
atacaaagacacaagccgctagaaaggaagcta

SEQ ID NO: 383148 - DNA, 33 bp, Homo sapien
atacaaagacacaagctgctagaaaggaagcta

SEQ ID NO: 383149 - DNA, 33 bp, Homo sapien
ttccaagcacattccaagccattgtctcatgac

SEQ ID NO: 383150 - DNA, 33 bp, Homo sapien
ttccaagcacattccaggccattgtctcatgac

SEQ ID NO: 383151 - DNA, 33 bp, Homo sapien
ggagttgaatgtacacaatgttcctaatgtact

SEQ ID NO: 383152 - DNA, 33 bp, Homo sapien
ggagttgaatgtacacgatgttcctaatgtact

SEQ ID NO: 383153 - DNA, 33 bp, Homo sapien
actctgcctctgtctcagaagaactcagcaggc

SEQ ID NO: 383154 - DNA, 33 bp, Homo sapien
actctgcctctgtctcggaagaactcagcaggc

SEQ ID NO: 383155 - DNA, 33 bp, Homo sapien
gtgtccgttggaaacactcttgcagcttcttcc

SEQ ID NO: 383156 - DNA, 33 bp, Homo sapien
gtgtccgttggaaacattcttgcagcttcttcc

SEQ ID NO: 383157 - DNA, 33 bp, Homo sapien
cctactgtgggctgaacggactgtcctcacaga

SEQ ID NO: 383158 - DNA, 33 bp, Homo sapien
cctactgtgggctgaatggactgtcctcacaga

SEQ ID NO: 383159 - DNA, 33 bp, Homo sapien
acacctcggggtaactaagatcactcctggacc

SEQ ID NO: 383160 - DNA, 33 bp, Homo sapien
acacctcggggtaactgagatcactcctggacc

SEQ ID NO: 383161 - DNA, 33 bp, Homo sapien
ctctggttcttccttccctacccaggtgacact

SEQ ID NO: 383162 - DNA, 33 bp, Homo sapien
ctctggttcttccttctctacccaggtgacact

SEQ ID NO: 383163 - DNA, 33 bp, Homo sapien
ctgccctcattgaacaaaggaaaactgagatgc

SEQ ID NO: 383164 - DNA, 33 bp, Homo sapien
ctgccctcattgaacagaggaaaactgagatgc

SEQ ID NO: 383165 - DNA, 33 bp, Homo sapien
tgctggagttagggcacgaatccaggcagttgg

SEQ ID NO: 383166 - DNA, 33 bp, Homo sapien
tgctggagttagggcatgaatccaggcagttgg

SEQ ID NO: 383167 - DNA, 33 bp, Homo sapien
aatgtaccactaggagccccctacgttgatgga

SEQ ID NO: 383168 - DNA, 33 bp, Homo sapien
aatgtaccactaggagtcccctacgttgatgga

SEQ ID NO: 383169 - DNA, 33 bp, Homo sapien
gtggtacatttcataaacggctgcacctgcgtg

SEQ ID NO: 383170 - DNA, 33 bp, Homo sapien
gtggtacatttcataatcggctgcacctgcgtg

SEQ ID NO: 383171 - DNA, 33 bp, Homo sapien
cagttgccttgactcagcgctgtctgtttgtcc

SEQ ID NO: 383172 - DNA, 33 bp, Homo sapien
cagttgccttgactcatcgctgtctgtttgtcc

SEQ ID NO: 383173 - DNA, 33 bp, Homo sapien
cacatgaaaccttgtacatcaatcatgttcaca

SEQ ID NO: 383174 - DNA, 33 bp, Homo sapien
cacatgaaaccttgtatatcaatcatgttcaca

SEQ ID NO: 383175 - DNA, 33 bp, Homo sapien
cactgtgtctgtgcccaagtcttcctccaagtg

SEQ ID NO: 383176 - DNA, 33 bp, Homo sapien
cactgtgtctgtgcccgagtcttcctccaagtg

SEQ ID NO: 383177 - DNA, 33 bp, Homo sapien
ctttttcctggattcacgggaaagagttgtttt

SEQ ID NO: 383178 - DNA, 33 bp, Homo sapien
ctttttcctggattcatgggaaagagttgtttt

SEQ ID NO: 383179 - DNA, 33 bp, Homo sapien
tgaagctggtcacccccgaggacgacgagctgg

SEQ ID NO: 383180 - DNA, 33 bp, Homo sapien
tgaagctggtcacccctgaggacgacgagctgg

SEQ ID NO: 383181 - DNA, 33 bp, Homo sapien
ctcaaattcagtctctcacgattaaactaaagg

SEQ ID NO: 383182 - DNA, 33 bp, Homo sapien
ctcaaattcagtctcttacgattaaactaaagg

SEQ ID NO: 383183 - DNA, 33 bp, Homo sapien
ttttcctaaattctgcaaagatctagaacctgg

SEQ ID NO: 383184 - DNA, 33 bp, Homo sapien
ttttcctaaattctgcgaagatctagaacctgg

SEQ ID NO: 383185 - DNA, 33 bp, Homo sapien
gcatgtactgagcatacagtggatccaaccagt

SEQ ID NO: 383186 - DNA, 33 bp, Homo sapien
gcatgtactgagcatatagtggatccaaccagt

SEQ ID NO: 383187 - DNA, 33 bp, Homo sapien
gagtgatttcagaaaactggaaagaagcaggct

SEQ ID NO: 383188 - DNA, 33 bp, Homo sapien
gagtgatttcagaaaattggaaagaagcaggct

SEQ ID NO: 383189 - DNA, 33 bp, Homo sapien
ttagaagaaatttgaactggaagagagactctc

SEQ ID NO: 383190 - DNA, 33 bp, Homo sapien
ttagaagaaatttgaagtggaagagagactctc

SEQ ID NO: 383191 - DNA, 33 bp, Homo sapien
ctgggaatgttataaacttgtgtccttataact

SEQ ID NO: 383192 - DNA, 33 bp, Homo sapien
ctgggaatgttataaagttgtgtccttataact

SEQ ID NO: 383193 - DNA, 33 bp, Homo sapien
ataaacagtcactttaagcccggcacggtggct

SEQ ID NO: 383194 - DNA, 33 bp, Homo sapien
ataaacagtcactttaggcccggcacggtggct

SEQ ID NO: 383195 - DNA, 33 bp, Homo sapien
tatgactccgggtgtaggaaatttgaagaataa

SEQ ID NO: 383196 - DNA, 33 bp, Homo sapien
tatgactccgggtgtatgaaatttgaagaataa

SEQ ID NO: 383197 - DNA, 33 bp, Homo sapien
aggagaaaggtgttaacgctttaatcatagatc

SEQ ID NO: 383198 - DNA, 33 bp, Homo sapien
aggagaaaggtgttaatgctttaatcatagatc

SEQ ID NO: 383199 - DNA, 33 bp, Homo sapien
agagcctttgtaaaaaaattctctgctacatcc

SEQ ID NO: 383200 - DNA, 33 bp, Homo sapien
agagcctttgtaaaaacattctctgctacatcc

SEQ ID NO: 383201 - DNA, 33 bp, Homo sapien
cccaggatctgaaccaagaagcagtgcagggaa

SEQ ID NO: 383202 - DNA, 33 bp, Homo sapien
cccaggatctgaaccaggaagcagtgcagggaa

SEQ ID NO: 383203 - DNA, 33 bp, Homo sapien
tgttcattttcacaaaaacagtatagggcttta

SEQ ID NO: 383204 - DNA, 33 bp, Homo sapien
tgttcattttcacaaacacagtatagggcttta

SEQ ID NO: 383205 - DNA, 33 bp, Homo sapien
accaatgagtcacatactaccttgtgattgaga

SEQ ID NO: 383206 - DNA, 33 bp, Homo sapien
accaatgagtcacatattaccttgtgattgaga

SEQ ID NO: 383207 - DNA, 33 bp, Homo sapien
tgtaggacagagtgtacatgccaccctgtcttt

SEQ ID NO: 383208 - DNA, 33 bp, Homo sapien
tgtaggacagagtgtatatgccaccctgtcttt

SEQ ID NO: 383209 - DNA, 33 bp, Homo sapien
ttcagctggggaactaccttgtccaggaagcct

SEQ ID NO: 383210 - DNA, 33 bp, Homo sapien
ttcagctggggaactatcttgtccaggaagcct

SEQ ID NO: 383211 - DNA, 33 bp, Homo sapien
tttcagctcttggcccacctggattttatgtat

SEQ ID NO: 383212 - DNA, 33 bp, Homo sapien
tttcagctcttggcccgcctggattttatgtat

SEQ ID NO: 383213 - DNA, 33 bp, Homo sapien
ataaatttggtaaggacatttgcagacaaataa

SEQ ID NO: 383214 - DNA, 33 bp, Homo sapien
ataaatttggtaaggatatttgcagacaaataa

SEQ ID NO: 383215 - DNA, 33 bp, Homo sapien
acatgaggatcttaggcagaaacataataataa

SEQ ID NO: 383216 - DNA, 33 bp, Homo sapien
acatgaggatcttaggtagaaacataataataa

SEQ ID NO: 383217 - DNA, 33 bp, Homo sapien
ctttaaatctttgagcactattagggataaatt

SEQ ID NO: 383218 - DNA, 33 bp, Homo sapien
ctttaaatctttgagcgctattagggataaatt

SEQ ID NO: 383219 - DNA, 33 bp, Homo sapien
taggaggacacagctccacaatctgggatagga

SEQ ID NO: 383220 - DNA, 33 bp, Homo sapien
taggaggacacagctctacaatctgggatagga

SEQ ID NO: 383221 - DNA, 33 bp, Homo sapien
ggactgctactttaagccattctttttttctga

SEQ ID NO: 383222 - DNA, 33 bp, Homo sapien
ggactgctactttaaggcattctttttttctga

SEQ ID NO: 383223 - DNA, 33 bp, Homo sapien
atcaccagccctttgcccgcatcgtcgacattt

SEQ ID NO: 383224 - DNA, 33 bp, Homo sapien
atcaccagccctttgctcgcatcgtcgacattt

SEQ ID NO: 383225 - DNA, 33 bp, Homo sapien
ctccaataaggtaagacgctcccaatggcccct

SEQ ID NO: 383226 - DNA, 33 bp, Homo sapien
ctccaataaggtaagatgctcccaatggcccct

SEQ ID NO: 383227 - DNA, 33 bp, Homo sapien
accattgggagaaaaacgctcactggagtgtgg

SEQ ID NO: 383228 - DNA, 33 bp, Homo sapien
accattgggagaaaaatgctcactggagtgtgg

SEQ ID NO: 383229 - DNA, 33 bp, Homo sapien
tggacaattttaacaacatgattaatggacttg

SEQ ID NO: 383230 - DNA, 33 bp, Homo sapien
tggacaattttaacaatatgattaatggacttg

SEQ ID NO: 383231 - DNA, 33 bp, Homo sapien
tttgggttaggtctccaaaaggctccatattag

SEQ ID NO: 383232 - DNA, 33 bp, Homo sapien
tttgggttaggtctccgaaaggctccatattag

SEQ ID NO: 383233 - DNA, 33 bp, Homo sapien
tgggaaccattagccactaactcttccagattt

SEQ ID NO: 383234 - DNA, 33 bp, Homo sapien
tgggaaccattagccagtaactcttccagattt

SEQ ID NO: 383235 - DNA, 33 bp, Homo sapien
acaggatggggaagagaacacagtttgcagaaa

SEQ ID NO: 383236 - DNA, 33 bp, Homo sapien
acaggatggggaagaggacacagtttgcagaaa

SEQ ID NO: 383237 - DNA, 33 bp, Homo sapien
gtaccacagcaaagacaggtgagacagctgggg

SEQ ID NO: 383238 - DNA, 33 bp, Homo sapien
gtaccacagcaaagacgggtgagacagctgggg

SEQ ID NO: 383239 - DNA, 33 bp, Homo sapien
gccatggtgctcagtccgaaagccgtgttcccc

SEQ ID NO: 383240 - DNA, 33 bp, Homo sapien
gccatggtgctcagtctgaaagccgtgttcccc

SEQ ID NO: 383241 - DNA, 33 bp, Homo sapien
tccaccatgagatgaacgcctgaaagcaacagc

SEQ ID NO: 383242 - DNA, 33 bp, Homo sapien
tccaccatgagatgaatgcctgaaagcaacagc

SEQ ID NO: 383243 - DNA, 33 bp, Homo sapien
gggaggaggtaggaaacagaaccactgcccccc

SEQ ID NO: 383244 - DNA, 33 bp, Homo sapien
gggaggaggtaggaaatagaaccactgcccccc

SEQ ID NO: 383245 - DNA, 33 bp, Homo sapien
tttcacggtgtcagaacaacgtaagactgaagt

SEQ ID NO: 383246 - DNA, 33 bp, Homo sapien
tttcacggtgtcagaagaacgtaagactgaagt

SEQ ID NO: 383247 - DNA, 33 bp, Homo sapien
gatgaaaccattaatccaagttgtgggagggct

SEQ ID NO: 383248 - DNA, 33 bp, Homo sapien
gatgaaaccattaatctaagttgtgggagggct

SEQ ID NO: 383249 - DNA, 33 bp, Homo sapien
acttagaaccactaaaccatatacttataaatg

SEQ ID NO: 383250 - DNA, 33 bp, Homo sapien
acttagaaccactaaatcatatacttataaatg

SEQ ID NO: 383251 - DNA, 33 bp, Homo sapien
gtgccaagtattgagacaagcattttatataaa

SEQ ID NO: 383252 - DNA, 33 bp, Homo sapien
gtgccaagtattgagataagcattttatataaa

SEQ ID NO: 383253 - DNA, 33 bp, Homo sapien
gctatgttccaatacaacttgatttacgaaaac

SEQ ID NO: 383254 - DNA, 33 bp, Homo sapien
gctatgttccaatacagcttgatttacgaaaac

SEQ ID NO: 383255 - DNA, 33 bp, Homo sapien
ggtgggtacatttctaagatgaggttacagaga

SEQ ID NO: 383256 - DNA, 33 bp, Homo sapien
ggtgggtacatttctaggatgaggttacagaga

SEQ ID NO: 383257 - DNA, 33 bp, Homo sapien
ccgcaattaagatccaaaactattccattacca

SEQ ID NO: 383258 - DNA, 33 bp, Homo sapien
ccgcaattaagatccagaactattccattacca

SEQ ID NO: 383259 - DNA, 33 bp, Homo sapien
tgtccccactgtcatcaccattgcttacagcac

SEQ ID NO: 383260 - DNA, 33 bp, Homo sapien
tgtccccactgtcatctccattgcttacagcac

SEQ ID NO: 383261 - DNA, 33 bp, Homo sapien
accagagcactgttaccatcattaccattatgt

SEQ ID NO: 383262 - DNA, 33 bp, Homo sapien
accagagcactgttacgatcattaccattatgt

SEQ ID NO: 383263 - DNA, 33 bp, Homo sapien
aaatatggaaatagaacgctggtagagtttttt

SEQ ID NO: 383264 - DNA, 33 bp, Homo sapien
aaatatggaaatagaatgctggtagagtttttt

SEQ ID NO: 383265 - DNA, 33 bp, Homo sapien
cagtgacagatatcagacattagatcctcataa

SEQ ID NO: 383266 - DNA, 33 bp, Homo sapien
cagtgacagatatcaggcattagatcctcataa

SEQ ID NO: 383267 - DNA, 33 bp, Homo sapien
agtagaccatctgatacaacatttgagcaaaac

SEQ ID NO: 383268 - DNA, 33 bp, Homo sapien
agtagaccatctgatataacatttgagcaaaac

SEQ ID NO: 383269 - DNA, 33 bp, Homo sapien
tcagtcgggtcctatacgcacatggttgcaaga

SEQ ID NO: 383270 - DNA, 33 bp, Homo sapien
tcagtcgggtcctatatgcacatggttgcaaga

SEQ ID NO: 383271 - DNA, 33 bp, Homo sapien
tacccaggtgggagcaactgattcaccaagaaa

SEQ ID NO: 383272 - DNA, 33 bp, Homo sapien
tacccaggtgggagcagctgattcaccaagaaa

SEQ ID NO: 383273 - DNA, 33 bp, Homo sapien
acagagggagaatcgacgctggagagcaaatga

SEQ ID NO: 383274 - DNA, 33 bp, Homo sapien
acagagggagaatcgatgctggagagcaaatga

SEQ ID NO: 383275 - DNA, 33 bp, Homo sapien
ggctccaatgatgacactgtatgatccttgctt

SEQ ID NO: 383276 - DNA, 33 bp, Homo sapien
ggctccaatgatgacattgtatgatccttgctt

SEQ ID NO: 383277 - DNA, 33 bp, Homo sapien
aaacctgaccctaagcaaaaattaaaggaaagg

SEQ ID NO: 383278 - DNA, 33 bp, Homo sapien
aaacctgaccctaagcgaaaattaaaggaaagg

SEQ ID NO: 383279 - DNA, 33 bp, Homo sapien
ttttcatcttttgacaacttttataattctgac

SEQ ID NO: 383280 - DNA, 33 bp, Homo sapien
ttttcatcttttgacaccttttataattctgac

SEQ ID NO: 383281 - DNA, 33 bp, Homo sapien
aactaataattagggaacactcctcctagcccc

SEQ ID NO: 383282 - DNA, 33 bp, Homo sapien
aactaataattagggaccactcctcctagcccc

SEQ ID NO: 383283 - DNA, 33 bp, Homo sapien
tacttatgtggattaacctttatagaaaatatt

SEQ ID NO: 383284 - DNA, 33 bp, Homo sapien
tacttatgtggattaatctttatagaaaatatt

SEQ ID NO: 383285 - DNA, 33 bp, Homo sapien
taaattgtatgtcacaagtttggtgtgcagatt

SEQ ID NO: 383286 - DNA, 33 bp, Homo sapien
taaattgtatgtcacaggtttggtgtgcagatt

SEQ ID NO: 383287 - DNA, 33 bp, Homo sapien
gggaactagtgatgtcaccttacgtttctttgt

SEQ ID NO: 383288 - DNA, 33 bp, Homo sapien
gggaactagtgatgtcgccttacgtttctttgt

SEQ ID NO: 383289 - DNA, 33 bp, Homo sapien
aaaaagcaccatgttcacagtaaccaaaatggc

SEQ ID NO: 383290 - DNA, 33 bp, Homo sapien
aaaaagcaccatgttcgcagtaaccaaaatggc

SEQ ID NO: 383291 - DNA, 33 bp, Homo sapien
tgagccttcaaaatagccatgggccctcatcta

SEQ ID NO: 383292 - DNA, 33 bp, Homo sapien
tgagccttcaaaatagtcatgggccctcatcta

SEQ ID NO: 383293 - DNA, 33 bp, Homo sapien
agggagccacacttaccaacctttttctttatg

SEQ ID NO: 383294 - DNA, 33 bp, Homo sapien
agggagccacacttactaacctttttctttatg

SEQ ID NO: 383295 - DNA, 33 bp, Homo sapien
ttagtctatttgcctacgctttaaagtacatta

SEQ ID NO: 383296 - DNA, 33 bp, Homo sapien
ttagtctatttgcctatgctttaaagtacatta

SEQ ID NO: 383297 - DNA, 33 bp, Homo sapien
gatgtatctcacatcacagaaaaatgtagaaag

SEQ ID NO: 383298 - DNA, 33 bp, Homo sapien
gatgtatctcacatcatagaaaaatgtagaaag

SEQ ID NO: 383299 - DNA, 33 bp, Homo sapien
tgtactgatctcatgacatatactatacattca

SEQ ID NO: 383300 - DNA, 33 bp, Homo sapien
tgtactgatctcatgatatatactatacattca

SEQ ID NO: 383301 - DNA, 33 bp, Homo sapien
cattttctttctgcacagctgtaaacatgaact

SEQ ID NO: 383302 - DNA, 33 bp, Homo sapien
cattttctttctgcactgctgtaaacatgaact

SEQ ID NO: 383303 - DNA, 33 bp, Homo sapien
gctcttgaaaagacacagagaattgcacagaat

SEQ ID NO: 383304 - DNA, 33 bp, Homo sapien
gctcttgaaaagacacggagaattgcacagaat

SEQ ID NO: 383305 - DNA, 33 bp, Homo sapien
gtgggttaaagtacacagtgatttcagctgatg

SEQ ID NO: 383306 - DNA, 33 bp, Homo sapien
gtgggttaaagtacacggtgatttcagctgatg

SEQ ID NO: 383307 - DNA, 33 bp, Homo sapien
ggactgaggagtatgacaaatgcaatccctgta

SEQ ID NO: 383308 - DNA, 33 bp, Homo sapien
ggactgaggagtatgagaaatgcaatccctgta

SEQ ID NO: 383309 - DNA, 33 bp, Homo sapien
tagcacctacttcatacggttatagtgaggatt

SEQ ID NO: 383310 - DNA, 33 bp, Homo sapien
tagcacctacttcatatggttatagtgaggatt

SEQ ID NO: 383311 - DNA, 33 bp, Homo sapien
tagagattctaactcaatatgatgtgaccacaa

SEQ ID NO: 383312 - DNA, 33 bp, Homo sapien
tagagattctaactcagtatgatgtgaccacaa

SEQ ID NO: 383313 - DNA, 33 bp, Homo sapien
tttctcattgaagccaccagcgttctcagttgc

SEQ ID NO: 383314 - DNA, 33 bp, Homo sapien
tttctcattgaagccatcagcgttctcagttgc

SEQ ID NO: 383315 - DNA, 33 bp, Homo sapien
gagaatggcccatgagaatatagaaataaattt

SEQ ID NO: 383316 - DNA, 33 bp, Homo sapien
gagaatggcccatgagtatatagaaataaattt

SEQ ID NO: 383317 - DNA, 33 bp, Homo sapien
gggcaagtacttagcccagcatttagcaagtag

SEQ ID NO: 383318 - DNA, 33 bp, Homo sapien
gggcaagtacttagcctagcatttagcaagtag

SEQ ID NO: 383319 - DNA, 33 bp, Homo sapien
cttcctacaaaaatgacggtgtaggaatctcac

SEQ ID NO: 383320 - DNA, 33 bp, Homo sapien
cttcctacaaaaatgagggtgtaggaatctcac

SEQ ID NO: 383321 - DNA, 33 bp, Homo sapien
ctaggtaaacgcaaacacgcgcattttttcctg

SEQ ID NO: 383322 - DNA, 33 bp, Homo sapien
ctaggtaaacgcaaacgcgcgcattttttcctg

SEQ ID NO: 383323 - DNA, 33 bp, Homo sapien
agctaataaaggaaacagatgaggtggtctaag

SEQ ID NO: 383324 - DNA, 33 bp, Homo sapien
agctaataaaggaaacggatgaggtggtctaag

SEQ ID NO: 383325 - DNA, 33 bp, Homo sapien
taagtagtagatgtgaaaggcaattttatgtgt

SEQ ID NO: 383326 - DNA, 33 bp, Homo sapien
taagtagtagatgtgataggcaattttatgtgt

SEQ ID NO: 383327 - DNA, 33 bp, Homo sapien
gaggtcaagggtctagaaagccttcagagaaag

SEQ ID NO: 383328 - DNA, 33 bp, Homo sapien
gaggtcaagggtctaggaagccttcagagaaag

SEQ ID NO: 383329 - DNA, 33 bp, Homo sapien
tcttagatccagccacaaacttctgagtcatct

SEQ ID NO: 383330 - DNA, 33 bp, Homo sapien
tcttagatccagccacgaacttctgagtcatct

SEQ ID NO: 383331 - DNA, 33 bp, Homo sapien
gccatcacacatgacgaatgttcatttggagaa

SEQ ID NO: 383332 - DNA, 33 bp, Homo sapien
gccatcacacatgacgtatgttcatttggagaa

SEQ ID NO: 383333 - DNA, 33 bp, Homo sapien
agcactcaatcgagaacggtcaaactagcttgc

SEQ ID NO: 383334 - DNA, 33 bp, Homo sapien
agcactcaatcgagaagggtcaaactagcttgc

SEQ ID NO: 383335 - DNA, 33 bp, Homo sapien
gttttatgtcagattgaatggtcaattttagaa

SEQ ID NO: 383336 - DNA, 33 bp, Homo sapien
gttttatgtcagattgcatggtcaattttagaa

SEQ ID NO: 383337 - DNA, 33 bp, Homo sapien
ccacaaagccacatatcaactggtgaaatattt

SEQ ID NO: 383338 - DNA, 33 bp, Homo sapien
ccacaaagccacatattaactggtgaaatattt

SEQ ID NO: 383339 - DNA, 33 bp, Homo sapien
atcccaatgtggtaagaataagatatggggaga

SEQ ID NO: 383340 - DNA, 33 bp, Homo sapien
atcccaatgtggtaaggataagatatggggaga

SEQ ID NO: 383341 - DNA, 33 bp, Homo sapien
tttcttagaaaactgacgctcgggcctcccaga

SEQ ID NO: 383342 - DNA, 33 bp, Homo sapien
tttcttagaaaactgatgctcgggcctcccaga

SEQ ID NO: 383343 - DNA, 33 bp, Homo sapien
ggcagagactgtgcagaaatagtcaccactgat

SEQ ID NO: 383344 - DNA, 33 bp, Homo sapien
ggcagagactgtgcaggaatagtcaccactgat

SEQ ID NO: 383345 - DNA, 33 bp, Homo sapien
ctaaacttgatacaaacgatgcagcaagtgggc

SEQ ID NO: 383346 - DNA, 33 bp, Homo sapien
ctaaacttgatacaaatgatgcagcaagtgggc

SEQ ID NO: 383347 - DNA, 33 bp, Homo sapien
tcccatgatgggttaccgatatcaaaaggtgtt

SEQ ID NO: 383348 - DNA, 33 bp, Homo sapien
tcccatgatgggttactgatatcaaaaggtgtt

SEQ ID NO: 383349 - DNA, 33 bp, Homo sapien
tggagctcaatagccagggtttgaatcctagct

SEQ ID NO: 383350 - DNA, 33 bp, Homo sapien
tggagctcaatagccatggtttgaatcctagct

SEQ ID NO: 383351 - DNA, 33 bp, Homo sapien
attgtggttgcaattcacatttccctggtgacc

SEQ ID NO: 383352 - DNA, 33 bp, Homo sapien
attgtggttgcaattcgcatttccctggtgacc

SEQ ID NO: 383353 - DNA, 33 bp, Homo sapien
cccaaactaggtcaaaaatttatatccatgtgt

SEQ ID NO: 383354 - DNA, 33 bp, Homo sapien
cccaaactaggtcaaagatttatatccatgtgt

SEQ ID NO: 383355 - DNA, 33 bp, Homo sapien
caacctgctctacctacagccttcaccatctca

SEQ ID NO: 383356 - DNA, 33 bp, Homo sapien
caacctgctctacctatagccttcaccatctca

SEQ ID NO: 383357 - DNA, 33 bp, Homo sapien
aataccagctgttaaacgtaatgagaaaatgta

SEQ ID NO: 383358 - DNA, 33 bp, Homo sapien
aataccagctgttaaatgtaatgagaaaatgta

SEQ ID NO: 383359 - DNA, 33 bp, Homo sapien
cattgtcgttttattacctcctgctcataatat

SEQ ID NO: 383360 - DNA, 33 bp, Homo sapien
cattgtcgttttattatctcctgctcataatat

SEQ ID NO: 383361 - DNA, 33 bp, Homo sapien
agtgcctccaggaaaaccatttgtgtaactgag

SEQ ID NO: 383362 - DNA, 33 bp, Homo sapien
agtgcctccaggaaaagcatttgtgtaactgag

SEQ ID NO: 383363 - DNA, 33 bp, Homo sapien
ctcctaagatcagtccaaaatgttttatccagc

SEQ ID NO: 383364 - DNA, 33 bp, Homo sapien
ctcctaagatcagtccgaaatgttttatccagc

SEQ ID NO: 383365 - DNA, 33 bp, Homo sapien
agacacattgtgaagccacatctggactcagca

SEQ ID NO: 383366 - DNA, 33 bp, Homo sapien
agacacattgtgaagctacatctggactcagca

SEQ ID NO: 383367 - DNA, 33 bp, Homo sapien
actattaggtgaaataccaatgggacacacata

SEQ ID NO: 383368 - DNA, 33 bp, Homo sapien
actattaggtgaaatatcaatgggacacacata

SEQ ID NO: 383369 - DNA, 33 bp, Homo sapien
ctggttgattttagaaatatagcaccctatctt

SEQ ID NO: 383370 - DNA, 33 bp, Homo sapien
ctggttgattttagaactatagcaccctatctt

SEQ ID NO: 383371 - DNA, 33 bp, Homo sapien
aaattctctgtaaaggaccgatagtaaaacttc

SEQ ID NO: 383372 - DNA, 33 bp, Homo sapien
aaattctctgtaaagggccgatagtaaaacttc

SEQ ID NO: 383373 - DNA, 33 bp, Homo sapien
ttatgtaaataagagcacaggtggtataaagat

SEQ ID NO: 383374 - DNA, 33 bp, Homo sapien
ttatgtaaataagagcgcaggtggtataaagat

SEQ ID NO: 383375 - DNA, 33 bp, Homo sapien
aagccatcttgcttatcaaaactgaaaggaatt

SEQ ID NO: 383376 - DNA, 33 bp, Homo sapien
aagccatcttgcttatgaaaactgaaaggaatt

SEQ ID NO: 383377 - DNA, 33 bp, Homo sapien
ctttttcctgaagaggaaagaagcaaatgaagg

SEQ ID NO: 383378 - DNA, 33 bp, Homo sapien
ctttttcctgaagagggaagaagcaaatgaagg

SEQ ID NO: 383379 - DNA, 33 bp, Homo sapien
agttttaaggagtgccaatcagctattttgtag

SEQ ID NO: 383380 - DNA, 33 bp, Homo sapien
agttttaaggagtgccgatcagctattttgtag

SEQ ID NO: 383381 - DNA, 33 bp, Homo sapien
atgtagactgggctaaagtatccttgttcttaa

SEQ ID NO: 383382 - DNA, 33 bp, Homo sapien
atgtagactgggctaaggtatccttgttcttaa

SEQ ID NO: 383383 - DNA, 33 bp, Homo sapien
ttggtataccaaagaaaatctcagcctgcctca

SEQ ID NO: 383384 - DNA, 33 bp, Homo sapien
ttggtataccaaagaagatctcagcctgcctca

SEQ ID NO: 383385 - DNA, 33 bp, Homo sapien
tgagcttccaaacaccagaataattcaaaaaga

SEQ ID NO: 383386 - DNA, 33 bp, Homo sapien
tgagcttccaaacaccggaataattcaaaaaga

SEQ ID NO: 383387 - DNA, 33 bp, Homo sapien
gtcctgccaccaatgcactatgaacaggcatcc

SEQ ID NO: 383388 - DNA, 33 bp, Homo sapien
gtcctgccaccaatgcgctatgaacaggcatcc

SEQ ID NO: 383389 - DNA, 33 bp, Homo sapien
ccagtgtcagcaggaacgttttctgggtgggat

SEQ ID NO: 383390 - DNA, 33 bp, Homo sapien
ccagtgtcagcaggaatgttttctgggtgggat

SEQ ID NO: 383391 - DNA, 33 bp, Homo sapien
ttgccttcatcattcactctgagccagtgactg

SEQ ID NO: 383392 - DNA, 33 bp, Homo sapien
ttgccttcatcattcattctgagccagtgactg

SEQ ID NO: 383393 - DNA, 33 bp, Homo sapien
tgttaaagggccggataatattctacacctggc

SEQ ID NO: 383394 - DNA, 33 bp, Homo sapien
tgttaaagggccggatgatattctacacctggc

SEQ ID NO: 383395 - DNA, 33 bp, Homo sapien
aagttcatacagtggacaaagggtggtgtgaga

SEQ ID NO: 383396 - DNA, 33 bp, Homo sapien
aagttcatacagtggataaagggtggtgtgaga

SEQ ID NO: 383397 - DNA, 33 bp, Homo sapien
tgggagctggaaacagacaaccttttggaacca

SEQ ID NO: 383398 - DNA, 33 bp, Homo sapien
tgggagctggaaacaggcaaccttttggaacca

SEQ ID NO: 383399 - DNA, 33 bp, Homo sapien
aggatctgcgtggttacggacagtgctcttgct

SEQ ID NO: 383400 - DNA, 33 bp, Homo sapien
aggatctgcgtggttatggacagtgctcttgct

SEQ ID NO: 383401 - DNA, 33 bp, Homo sapien
tttgggagggttccaacgttgtctctcaaaggc

SEQ ID NO: 383402 - DNA, 33 bp, Homo sapien
tttgggagggttccaatgttgtctctcaaaggc

SEQ ID NO: 383403 - DNA, 33 bp, Homo sapien
tgtctaatcagaaccacaaataaaggacagtgt

SEQ ID NO: 383404 - DNA, 33 bp, Homo sapien
tgtctaatcagaaccataaataaaggacagtgt

SEQ ID NO: 383405 - DNA, 33 bp, Homo sapien
gctcgcagatggtcagcaaaataggagcccggt

SEQ ID NO: 383406 - DNA, 33 bp, Homo sapien
gctcgcagatggtcagtaaaataggagcccggt

SEQ ID NO: 383407 - DNA, 33 bp, Homo sapien
tcttccaggggcaagcagacattcatggggcca

SEQ ID NO: 383408 - DNA, 33 bp, Homo sapien
tcttccaggggcaagcggacattcatggggcca

SEQ ID NO: 383409 - DNA, 33 bp, Homo sapien
cacacataatctttccagacacacgggcatggc

SEQ ID NO: 383410 - DNA, 33 bp, Homo sapien
cacacataatctttccggacacacgggcatggc

SEQ ID NO: 383411 - DNA, 33 bp, Homo sapien
tcctctaatctgggtacgacagagggaggagaa

SEQ ID NO: 383412 - DNA, 33 bp, Homo sapien
tcctctaatctgggtatgacagagggaggagaa

SEQ ID NO: 383413 - DNA, 33 bp, Homo sapien
ccaatattctttctaccatataacagctgctct

SEQ ID NO: 383414 - DNA, 33 bp, Homo sapien
ccaatattctttctactatataacagctgctct

SEQ ID NO: 383415 - DNA, 33 bp, Homo sapien
ttccaggttcccttcaaattaagtcatctcttc

SEQ ID NO: 383416 - DNA, 33 bp, Homo sapien
ttccaggttcccttcacattaagtcatctcttc

SEQ ID NO: 383417 - DNA, 33 bp, Homo sapien
ccacccctatctttggccattgtttgtcacttc

SEQ ID NO: 383418 - DNA, 33 bp, Homo sapien
ccacccctatctttggtcattgtttgtcacttc

SEQ ID NO: 383419 - DNA, 33 bp, Homo sapien
gggttgggttgataaagtattcaagaaagacag

SEQ ID NO: 383420 - DNA, 33 bp, Homo sapien
gggttgggttgataaattattcaagaaagacag

SEQ ID NO: 383421 - DNA, 33 bp, Homo sapien
aaattgttttgacctcacagaattcctgtccta

SEQ ID NO: 383422 - DNA, 33 bp, Homo sapien
aaattgttttgacctcgcagaattcctgtccta

SEQ ID NO: 383423 - DNA, 33 bp, Homo sapien
tgatcgtgacctaccacgtactgcggagtgtgc

SEQ ID NO: 383424 - DNA, 33 bp, Homo sapien
tgatcgtgacctaccatgtactgcggagtgtgc

SEQ ID NO: 383425 - DNA, 33 bp, Homo sapien
cccaggacagagctgaagccatccagagaccct

SEQ ID NO: 383426 - DNA, 33 bp, Homo sapien
cccaggacagagctgacgccatccagagaccct

SEQ ID NO: 383427 - DNA, 33 bp, Homo sapien
gacaagcaatgcagacacaggcagaaggagaca

SEQ ID NO: 383428 - DNA, 33 bp, Homo sapien
gacaagcaatgcagacgcaggcagaaggagaca

SEQ ID NO: 383429 - DNA, 33 bp, Homo sapien
aatgagaggactcaacactgctaggataatctg

SEQ ID NO: 383430 - DNA, 33 bp, Homo sapien
aatgagaggactcaacgctgctaggataatctg

SEQ ID NO: 383431 - DNA, 33 bp, Homo sapien
tcttaaagccaggcacactgcacagaggattgt

SEQ ID NO: 383432 - DNA, 33 bp, Homo sapien
tcttaaagccaggcacgctgcacagaggattgt

SEQ ID NO: 383433 - DNA, 33 bp, Homo sapien
aagtctaagaaacttacggtcctctttaccaaa

SEQ ID NO: 383434 - DNA, 33 bp, Homo sapien
aagtctaagaaacttatggtcctctttaccaaa

SEQ ID NO: 383435 - DNA, 33 bp, Homo sapien
aagggaacctgtcctcagaacatggctagacca

SEQ ID NO: 383436 - DNA, 33 bp, Homo sapien
aagggaacctgtcctcggaacatggctagacca

SEQ ID NO: 383437 - DNA, 33 bp, Homo sapien
ccttaagtttgctgtaagtctgctctacgttca

SEQ ID NO: 383438 - DNA, 33 bp, Homo sapien
ccttaagtttgctgtaggtctgctctacgttca

SEQ ID NO: 383439 - DNA, 33 bp, Homo sapien
ctggccggctactctcccctttgcatcactaag

SEQ ID NO: 383440 - DNA, 33 bp, Homo sapien
ctggccggctactctctcctttgcatcactaag

SEQ ID NO: 383441 - DNA, 33 bp, Homo sapien
cggctcagggttgacaatgacctgggaatgact

SEQ ID NO: 383442 - DNA, 33 bp, Homo sapien
cggctcagggttgacagtgacctgggaatgact

SEQ ID NO: 383443 - DNA, 33 bp, Homo sapien
ccccaaatgtttgcataataaacccattgccta

SEQ ID NO: 383444 - DNA, 33 bp, Homo sapien
ccccaaatgtttgcatcataaacccattgccta

SEQ ID NO: 383445 - DNA, 33 bp, Homo sapien
ataaatatagcaactaccctagagttgttatgc

SEQ ID NO: 383446 - DNA, 33 bp, Homo sapien
ataaatatagcaactatcctagagttgttatgc

SEQ ID NO: 383447 - DNA, 33 bp, Homo sapien
tatgaagagtgtgctacaattaactccatgtta

SEQ ID NO: 383448 - DNA, 33 bp, Homo sapien
tatgaagagtgtgctataattaactccatgtta

SEQ ID NO: 383449 - DNA, 33 bp, Homo sapien
taatgagaaaatgtgaaagaactggatattaga

SEQ ID NO: 383450 - DNA, 33 bp, Homo sapien
taatgagaaaatgtgacagaactggatattaga

SEQ ID NO: 383451 - DNA, 33 bp, Homo sapien
gatggattttcccttgaaaagcgtagcctggtg

SEQ ID NO: 383452 - DNA, 33 bp, Homo sapien
gatggattttcccttggaaagcgtagcctggtg

SEQ ID NO: 383453 - DNA, 33 bp, Homo sapien
gtcccatatatacatacaaagagagggtgtctc

SEQ ID NO: 383454 - DNA, 33 bp, Homo sapien
gtcccatatatacatagaaagagagggtgtctc

SEQ ID NO: 383455 - DNA, 33 bp, Homo sapien
gggctcaggaaatgccaatgttcattccactta

SEQ ID NO: 383456 - DNA, 33 bp, Homo sapien
gggctcaggaaatgcccatgttcattccactta

SEQ ID NO: 383457 - DNA, 33 bp, Homo sapien
tgagtggcaatctccacaggtgcattgttagat

SEQ ID NO: 383458 - DNA, 33 bp, Homo sapien
tgagtggcaatctccataggtgcattgttagat

SEQ ID NO: 383459 - DNA, 33 bp, Homo sapien
tctgtgactaacataacaaaataatttggacaa

SEQ ID NO: 383460 - DNA, 33 bp, Homo sapien
tctgtgactaacataagaaaataatttggacaa

SEQ ID NO: 383461 - DNA, 33 bp, Homo sapien
aagtctgagatatccaatgaggtccagaatcta

SEQ ID NO: 383462 - DNA, 33 bp, Homo sapien
aagtctgagatatccagtgaggtccagaatcta

SEQ ID NO: 383463 - DNA, 33 bp, Homo sapien
tcagcacttagacatcaaaatccatactgattt

SEQ ID NO: 383464 - DNA, 33 bp, Homo sapien
tcagcacttagacatcgaaatccatactgattt

SEQ ID NO: 383465 - DNA, 33 bp, Homo sapien
gcacccagctcagtaagtcctttttgaaagagt

SEQ ID NO: 383466 - DNA, 33 bp, Homo sapien
gcacccagctcagtaattcctttttgaaagagt

SEQ ID NO: 383467 - DNA, 33 bp, Homo sapien
ctggatatgttaccgagaaagtcagaccagaaa

SEQ ID NO: 383468 - DNA, 33 bp, Homo sapien
ctggatatgttaccgataaagtcagaccagaaa

SEQ ID NO: 383469 - DNA, 33 bp, Homo sapien
tggagggagtgtgatagcatctgccacgtggag

SEQ ID NO: 383470 - DNA, 33 bp, Homo sapien
tggagggagtgtgatatcatctgccacgtggag

SEQ ID NO: 383471 - DNA, 33 bp, Homo sapien
agattaaagggctgtaaaatgtccaggtgtcag

SEQ ID NO: 383472 - DNA, 33 bp, Homo sapien
agattaaagggctgtataatgtccaggtgtcag

SEQ ID NO: 383473 - DNA, 33 bp, Homo sapien
atgtaaagacaaaggcaagaggttataacttac

SEQ ID NO: 383474 - DNA, 33 bp, Homo sapien
atgtaaagacaaaggccagaggttataacttac

SEQ ID NO: 383475 - DNA, 33 bp, Homo sapien
aagtcattaaaaatagacccctcattgaagagt

SEQ ID NO: 383476 - DNA, 33 bp, Homo sapien
aagtcattaaaaatagccccctcattgaagagt

SEQ ID NO: 383477 - DNA, 33 bp, Homo sapien
gtgtggatgcttacaccgatgccgtctcctaat

SEQ ID NO: 383478 - DNA, 33 bp, Homo sapien
gtgtggatgcttacactgatgccgtctcctaat

SEQ ID NO: 383479 - DNA, 33 bp, Homo sapien
atgtacgtgaattaaaacctgatcaccttccct

SEQ ID NO: 383480 - DNA, 33 bp, Homo sapien
atgtacgtgaattaaaccctgatcaccttccct

SEQ ID NO: 383481 - DNA, 33 bp, Homo sapien
atgctcttcagcaatgcaaccttgccaggtccc

SEQ ID NO: 383482 - DNA, 33 bp, Homo sapien
atgctcttcagcaatgtaaccttgccaggtccc

SEQ ID NO: 383483 - DNA, 33 bp, Homo sapien
catctcattctttttcactctgtccctaccagt

SEQ ID NO: 383484 - DNA, 33 bp, Homo sapien
catctcattctttttcgctctgtccctaccagt

SEQ ID NO: 383485 - DNA, 33 bp, Homo sapien
tgaaccaagtcaaacccggagaggtgggacagg

SEQ ID NO: 383486 - DNA, 33 bp, Homo sapien
tgaaccaagtcaaacctggagaggtgggacagg

SEQ ID NO: 383487 - DNA, 33 bp, Homo sapien
acaattctagtgattacacacaaaatactgccc

SEQ ID NO: 383488 - DNA, 33 bp, Homo sapien
acaattctagtgattatacacaaaatactgccc

SEQ ID NO: 383489 - DNA, 33 bp, Homo sapien
tccccatctcatttaccgggatttagctttgct

SEQ ID NO: 383490 - DNA, 33 bp, Homo sapien
tccccatctcatttactgggatttagctttgct

SEQ ID NO: 383491 - DNA, 33 bp, Homo sapien
atcacctcttggcagaactatgtgtaatcgcct

SEQ ID NO: 383492 - DNA, 33 bp, Homo sapien
atcacctcttggcagacctatgtgtaatcgcct

SEQ ID NO: 383493 - DNA, 33 bp, Homo sapien
acttctccattcagcaacttttccttctctggg

SEQ ID NO: 383494 - DNA, 33 bp, Homo sapien
acttctccattcagcatcttttccttctctggg

SEQ ID NO: 383495 - DNA, 33 bp, Homo sapien
tggatctcttgtgaacacagagcaacaactcac

SEQ ID NO: 383496 - DNA, 33 bp, Homo sapien
tggatctcttgtgaacgcagagcaacaactcac

SEQ ID NO: 383497 - DNA, 33 bp, Homo sapien
tggagagttcagtgtggaaaaacgtgtggagta

SEQ ID NO: 383498 - DNA, 33 bp, Homo sapien
tggagagttcagtgtgtaaaaacgtgtggagta

SEQ ID NO: 383499 - DNA, 33 bp, Homo sapien
ttgcacaaaaccgtaagatatgagcccactgtc

SEQ ID NO: 383500 - DNA, 33 bp, Homo sapien
ttgcacaaaaccgtaatatatgagcccactgtc

SEQ ID NO: 383501 - DNA, 33 bp, Homo sapien
ggtgatgtacacattaggtaaacctgattacag

SEQ ID NO: 383502 - DNA, 33 bp, Homo sapien
ggtgatgtacacattatgtaaacctgattacag

SEQ ID NO: 383503 - DNA, 33 bp, Homo sapien
ttcattcagaaacatacaaacttgaatttcata

SEQ ID NO: 383504 - DNA, 33 bp, Homo sapien
ttcattcagaaacatagaaacttgaatttcata

SEQ ID NO: 383505 - DNA, 33 bp, Homo sapien
ctttattgcttttcaaaggctaaagtgcagaaa

SEQ ID NO: 383506 - DNA, 33 bp, Homo sapien
ctttattgcttttcaagggctaaagtgcagaaa

SEQ ID NO: 383507 - DNA, 33 bp, Homo sapien
atagatggattcattccataacttgggtcccag

SEQ ID NO: 383508 - DNA, 33 bp, Homo sapien
atagatggattcattctataacttgggtcccag

SEQ ID NO: 383509 - DNA, 33 bp, Homo sapien
gaatccatctatcactcactattacggttgagg

SEQ ID NO: 383510 - DNA, 33 bp, Homo sapien
gaatccatctatcactgactattacggttgagg

SEQ ID NO: 383511 - DNA, 33 bp, Homo sapien
gacctagctgagcttacaaatacagaatagaaa

SEQ ID NO: 383512 - DNA, 33 bp, Homo sapien
gacctagctgagcttagaaatacagaatagaaa

SEQ ID NO: 383513 - DNA, 33 bp, Homo sapien
cccatggcccaaaacaatctggactcaaattaa

SEQ ID NO: 383514 - DNA, 33 bp, Homo sapien
cccatggcccaaaacattctggactcaaattaa

SEQ ID NO: 383515 - DNA, 33 bp, Homo sapien
ttgctccactgcttaaaacatcagttaactgct

SEQ ID NO: 383516 - DNA, 33 bp, Homo sapien
ttgctccactgcttaacacatcagttaactgct

SEQ ID NO: 383517 - DNA, 33 bp, Homo sapien
ccacacctggctgtaacagtctgtttcttgagg

SEQ ID NO: 383518 - DNA, 33 bp, Homo sapien
ccacacctggctgtaagagtctgtttcttgagg

SEQ ID NO: 383519 - DNA, 33 bp, Homo sapien
cacagatacacttgaaaaattcacaaaaagcag

SEQ ID NO: 383520 - DNA, 33 bp, Homo sapien
cacagatacacttgaacaattcacaaaaagcag

SEQ ID NO: 383521 - DNA, 33 bp, Homo sapien
gaaaatgaatcattcactcagggcaggagacga

SEQ ID NO: 383522 - DNA, 33 bp, Homo sapien
gaaaatgaatcattcagtcagggcaggagacga

SEQ ID NO: 383523 - DNA, 33 bp, Homo sapien
tatttttagtacagaaatgctttcaccatgttg

SEQ ID NO: 383524 - DNA, 33 bp, Homo sapien
tatttttagtacagaagtgctttcaccatgttg

SEQ ID NO: 383525 - DNA, 33 bp, Homo sapien
ataccaaagctgacaacagtaatacggtaatca

SEQ ID NO: 383526 - DNA, 33 bp, Homo sapien
ataccaaagctgacaatagtaatacggtaatca

SEQ ID NO: 383527 - DNA, 33 bp, Homo sapien
gttcctattgtggcaaaccttttgttttaatat

SEQ ID NO: 383528 - DNA, 33 bp, Homo sapien
gttcctattgtggcaatccttttgttttaatat

SEQ ID NO: 383529 - DNA, 33 bp, Homo sapien
accattgggaagtatgcaagataaggttggtaa

SEQ ID NO: 383530 - DNA, 33 bp, Homo sapien
accattgggaagtatgtaagataaggttggtaa

SEQ ID NO: 383531 - DNA, 33 bp, Homo sapien
ccagcacatcacataacattaccctgggacaca

SEQ ID NO: 383532 - DNA, 33 bp, Homo sapien
ccagcacatcacataagattaccctgggacaca

SEQ ID NO: 383533 - DNA, 33 bp, Homo sapien
tatagaacagatcataactagcttgcattgtgt

SEQ ID NO: 383534 - DNA, 33 bp, Homo sapien
tatagaacagatcatacctagcttgcattgtgt

SEQ ID NO: 383535 - DNA, 33 bp, Homo sapien
ccccaccagaaaaagacggacaatccctgagca

SEQ ID NO: 383536 - DNA, 33 bp, Homo sapien
ccccaccagaaaaagatggacaatccctgagca

SEQ ID NO: 383537 - DNA, 33 bp, Homo sapien
aattatggtacatccacgctataagacacaata

SEQ ID NO: 383538 - DNA, 33 bp, Homo sapien
aattatggtacatccatgctataagacacaata

SEQ ID NO: 383539 - DNA, 33 bp, Homo sapien
cagccttacaagagagaaagaattccactaggt

SEQ ID NO: 383540 - DNA, 33 bp, Homo sapien
cagccttacaagagagtaagaattccactaggt

SEQ ID NO: 383541 - DNA, 33 bp, Homo sapien
tcctagatgcagctgactactgtctagaattgt

SEQ ID NO: 383542 - DNA, 33 bp, Homo sapien
tcctagatgcagctgattactgtctagaattgt

SEQ ID NO: 383543 - DNA, 33 bp, Homo sapien
gcccggaaacccagaacgtgtttatctaatata

SEQ ID NO: 383544 - DNA, 33 bp, Homo sapien
gcccggaaacccagaatgtgtttatctaatata

SEQ ID NO: 383545 - DNA, 33 bp, Homo sapien
ggagtcttgggttgtcacttctattaagattcg

SEQ ID NO: 383546 - DNA, 33 bp, Homo sapien
ggagtcttgggttgtcgcttctattaagattcg

SEQ ID NO: 383547 - DNA, 33 bp, Homo sapien
gtgcttgcaaatctaaatcaaggtgtcacctgg

SEQ ID NO: 383548 - DNA, 33 bp, Homo sapien
gtgcttgcaaatctaagtcaaggtgtcacctgg

SEQ ID NO: 383549 - DNA, 33 bp, Homo sapien
gtcctctttttctggacaaacacatgcccacac

SEQ ID NO: 383550 - DNA, 33 bp, Homo sapien
gtcctctttttctggataaacacatgcccacac

SEQ ID NO: 383551 - DNA, 33 bp, Homo sapien
ttgatgagtactaattcaacaccccagtgtgga

SEQ ID NO: 383552 - DNA, 33 bp, Homo sapien
ttgatgagtactaattgaacaccccagtgtgga

SEQ ID NO: 383553 - DNA, 33 bp, Homo sapien
cccagactttgacactcaacatcatatattttc

SEQ ID NO: 383554 - DNA, 33 bp, Homo sapien
cccagactttgacactgaacatcatatattttc

SEQ ID NO: 383555 - DNA, 33 bp, Homo sapien
atagtagaggctttccaaagatttagtggtcct

SEQ ID NO: 383556 - DNA, 33 bp, Homo sapien
atagtagaggctttcccaagatttagtggtcct

SEQ ID NO: 383557 - DNA, 33 bp, Homo sapien
caacggctgtgggttacgtgacgcatgcaaaac

SEQ ID NO: 383558 - DNA, 33 bp, Homo sapien
caacggctgtgggttatgtgacgcatgcaaaac

SEQ ID NO: 383559 - DNA, 33 bp, Homo sapien
gcctcaggaaaagttacacagatcaccacccag

SEQ ID NO: 383560 - DNA, 33 bp, Homo sapien
gcctcaggaaaagttagacagatcaccacccag

SEQ ID NO: 383561 - DNA, 33 bp, Homo sapien
ggccggggctttgtgcactgttgagctgcggga

SEQ ID NO: 383562 - DNA, 33 bp, Homo sapien
ggccggggctttgtgcgctgttgagctgcggga

SEQ ID NO: 383563 - DNA, 33 bp, Homo sapien
tgctggtcagcatccacactgctgtcatcctct

SEQ ID NO: 383564 - DNA, 33 bp, Homo sapien
tgctggtcagcatccatactgctgtcatcctct

SEQ ID NO: 383565 - DNA, 33 bp, Homo sapien
agcaaatggacgcactaaaagaaaagcatgaca

SEQ ID NO: 383566 - DNA, 33 bp, Homo sapien
agcaaatggacgcactgaaagaaaagcatgaca

SEQ ID NO: 383567 - DNA, 33 bp, Homo sapien
aattctgggtgctgctcaaggaagatactgaat

SEQ ID NO: 383568 - DNA, 33 bp, Homo sapien
aattctgggtgctgctgaaggaagatactgaat

SEQ ID NO: 383569 - DNA, 33 bp, Homo sapien
cgtaaaaataaatacaaaagtgtagctcttatt

SEQ ID NO: 383570 - DNA, 33 bp, Homo sapien
cgtaaaaataaatacagaagtgtagctcttatt

SEQ ID NO: 383571 - DNA, 33 bp, Homo sapien
gtgttggcataaagcaaacactcaacaggttat

SEQ ID NO: 383572 - DNA, 33 bp, Homo sapien
gtgttggcataaagcagacactcaacaggttat

SEQ ID NO: 383573 - DNA, 33 bp, Homo sapien
aacgttgggctgtataagtgctgtcaaattggc

SEQ ID NO: 383574 - DNA, 33 bp, Homo sapien
aacgttgggctgtatatgtgctgtcaaattggc

SEQ ID NO: 383575 - DNA, 33 bp, Homo sapien
gagaagggtcagaaaaaggggcaacagtagaag

SEQ ID NO: 383576 - DNA, 33 bp, Homo sapien
gagaagggtcagaaaagggggcaacagtagaag

SEQ ID NO: 383577 - DNA, 33 bp, Homo sapien
gttttgaaatcgtgtcgccttctgtcacccagg

SEQ ID NO: 383578 - DNA, 33 bp, Homo sapien
gttttgaaatcgtgtctccttctgtcacccagg

SEQ ID NO: 383579 - DNA, 33 bp, Homo sapien
tttatcttccatatcaaggactaatttttccac

SEQ ID NO: 383580 - DNA, 33 bp, Homo sapien
tttatcttccatatcagggactaatttttccac

SEQ ID NO: 383581 - DNA, 33 bp, Homo sapien
atattgctgcttcctaccctctgtgtctttcct

SEQ ID NO: 383582 - DNA, 33 bp, Homo sapien
atattgctgcttcctatcctctgtgtctttcct

SEQ ID NO: 383583 - DNA, 33 bp, Homo sapien
ttccatttatgctggacgttgcaaacttttttg

SEQ ID NO: 383584 - DNA, 33 bp, Homo sapien
ttccatttatgctggaggttgcaaacttttttg

SEQ ID NO: 383585 - DNA, 33 bp, Homo sapien
tcaaaggagaatattacgcttagtatggaattt

SEQ ID NO: 383586 - DNA, 33 bp, Homo sapien
tcaaaggagaatattatgcttagtatggaattt

SEQ ID NO: 383587 - DNA, 33 bp, Homo sapien
ttccctctgaagcccaaatgctgactgaattat

SEQ ID NO: 383588 - DNA, 33 bp, Homo sapien
ttccctctgaagcccagatgctgactgaattat

SEQ ID NO: 383589 - DNA, 33 bp, Homo sapien
aaacatatccatcatcacacattagttacccac

SEQ ID NO: 383590 - DNA, 33 bp, Homo sapien
aaacatatccatcatctcacattagttacccac

SEQ ID NO: 383591 - DNA, 33 bp, Homo sapien
gtaggatgaacaagtcaagagatttagtgtaca

SEQ ID NO: 383592 - DNA, 33 bp, Homo sapien
gtaggatgaacaagtcgagagatttagtgtaca

SEQ ID NO: 383593 - DNA, 33 bp, Homo sapien
cttcagtgtgggaaccaatgccgactggcatta

SEQ ID NO: 383594 - DNA, 33 bp, Homo sapien
cttcagtgtgggaacccatgccgactggcatta

SEQ ID NO: 383595 - DNA, 33 bp, Homo sapien
aaaggcgaaggctgcagtcccctaaacttctca

SEQ ID NO: 383596 - DNA, 33 bp, Homo sapien
aaaggcgaaggctgcattcccctaaacttctca

SEQ ID NO: 383597 - DNA, 33 bp, Homo sapien
ctaattacatgacataaaataataatgctcaga

SEQ ID NO: 383598 - DNA, 33 bp, Homo sapien
ctaattacatgacatacaataataatgctcaga

SEQ ID NO: 383599 - DNA, 33 bp, Homo sapien
ctgtttagttactttacgttttcatacaaatga

SEQ ID NO: 383600 - DNA, 33 bp, Homo sapien
ctgtttagttactttatgttttcatacaaatga

SEQ ID NO: 383601 - DNA, 33 bp, Homo sapien
agcaaaagccctttgaacccctccagctcctcc

SEQ ID NO: 383602 - DNA, 33 bp, Homo sapien
agcaaaagccctttgagcccctccagctcctcc

SEQ ID NO: 383603 - DNA, 33 bp, Homo sapien
gtaacccctcgaactgcagatggtcaaaaatat

SEQ ID NO: 383604 - DNA, 33 bp, Homo sapien
gtaacccctcgaactgtagatggtcaaaaatat

SEQ ID NO: 383605 - DNA, 33 bp, Homo sapien
cctagtcataccttgcagagacctacaaagtca

SEQ ID NO: 383606 - DNA, 33 bp, Homo sapien
cctagtcataccttgcggagacctacaaagtca

SEQ ID NO: 383607 - DNA, 33 bp, Homo sapien
accatttggggatagccgagcaatttggtccca

SEQ ID NO: 383608 - DNA, 33 bp, Homo sapien
accatttggggatagctgagcaatttggtccca

SEQ ID NO: 383609 - DNA, 33 bp, Homo sapien
agtattgagatggtaaatggatggagtggaagg

SEQ ID NO: 383610 - DNA, 33 bp, Homo sapien
agtattgagatggtaattggatggagtggaagg

SEQ ID NO: 383611 - DNA, 33 bp, Homo sapien
ggtaagtggcatttataaaagaaacattccttc

SEQ ID NO: 383612 - DNA, 33 bp, Homo sapien
ggtaagtggcatttatgaaagaaacattccttc

SEQ ID NO: 383613 - DNA, 33 bp, Homo sapien
cccatcgcatctaaaaatggcccaggacacttg

SEQ ID NO: 383614 - DNA, 33 bp, Homo sapien
cccatcgcatctaaaactggcccaggacacttg

SEQ ID NO: 383615 - DNA, 33 bp, Homo sapien
agagggagaaagggatcagaacagcacagcagg

SEQ ID NO: 383616 - DNA, 33 bp, Homo sapien
agagggagaaagggatgagaacagcacagcagg

SEQ ID NO: 383617 - DNA, 33 bp, Homo sapien
cttctgctcagcttcaaaaagatcaagaattaa

SEQ ID NO: 383618 - DNA, 33 bp, Homo sapien
cttctgctcagcttcataaagatcaagaattaa

SEQ ID NO: 383619 - DNA, 33 bp, Homo sapien
ttgaaacgctgaaaaacgagagccagagatatt

SEQ ID NO: 383620 - DNA, 33 bp, Homo sapien
ttgaaacgctgaaaaatgagagccagagatatt

SEQ ID NO: 383621 - DNA, 33 bp, Homo sapien
ggcagtgaagaaaaaacagggacgtggaagcaa

SEQ ID NO: 383622 - DNA, 33 bp, Homo sapien
ggcagtgaagaaaaaatagggacgtggaagcaa

SEQ ID NO: 383623 - DNA, 33 bp, Homo sapien
gaaaccttctgaattccgaatactctgacattg

SEQ ID NO: 383624 - DNA, 33 bp, Homo sapien
gaaaccttctgaattctgaatactctgacattg

SEQ ID NO: 383625 - DNA, 33 bp, Homo sapien
tctttcctgaaaacccagaaacatgttttagat

SEQ ID NO: 383626 - DNA, 33 bp, Homo sapien
tctttcctgaaaacccggaaacatgttttagat

SEQ ID NO: 383627 - DNA, 33 bp, Homo sapien
gacctcatacttttcaaaagcatccttcagttt

SEQ ID NO: 383628 - DNA, 33 bp, Homo sapien
gacctcatacttttcacaagcatccttcagttt

SEQ ID NO: 383629 - DNA, 33 bp, Homo sapien
gtatgtgttgtagtaaacgtgaacaaatcagag

SEQ ID NO: 383630 - DNA, 33 bp, Homo sapien
gtatgtgttgtagtaaccgtgaacaaatcagag

SEQ ID NO: 383631 - DNA, 33 bp, Homo sapien
aacaaatgaagtagacagcagttcctttcactg

SEQ ID NO: 383632 - DNA, 33 bp, Homo sapien
aacaaatgaagtagacggcagttcctttcactg

SEQ ID NO: 383633 - DNA, 33 bp, Homo sapien
ccaccctgtgttcactaaggtcagaagcaaaat

SEQ ID NO: 383634 - DNA, 33 bp, Homo sapien
ccaccctgtgttcactgaggtcagaagcaaaat

SEQ ID NO: 383635 - DNA, 33 bp, Homo sapien
cctgcactggccagaaaacgtgggccctggtgc

SEQ ID NO: 383636 - DNA, 33 bp, Homo sapien
cctgcactggccagaagacgtgggccctggtgc

SEQ ID NO: 383637 - DNA, 33 bp, Homo sapien
tcccaaactggagataacgtccaggtctgtttt

SEQ ID NO: 383638 - DNA, 33 bp, Homo sapien
tcccaaactggagatagcgtccaggtctgtttt

SEQ ID NO: 383639 - DNA, 33 bp, Homo sapien
tctgggaaattcctaaacattattggtgcagaa

SEQ ID NO: 383640 - DNA, 33 bp, Homo sapien
tctgggaaattcctaaccattattggtgcagaa

SEQ ID NO: 383641 - DNA, 33 bp, Homo sapien
cttaggatttggaaacaaaggaaggagattgtc

SEQ ID NO: 383642 - DNA, 33 bp, Homo sapien
cttaggatttggaaactaaggaaggagattgtc

SEQ ID NO: 383643 - DNA, 33 bp, Homo sapien
ctgagggtcaatattacgtcttgtatttgttct

SEQ ID NO: 383644 - DNA, 33 bp, Homo sapien
ctgagggtcaatattatgtcttgtatttgttct

SEQ ID NO: 383645 - DNA, 33 bp, Homo sapien
agttccaaaattgaaggaggacatgagccctta

SEQ ID NO: 383646 - DNA, 33 bp, Homo sapien
agttccaaaattgaagtaggacatgagccctta

SEQ ID NO: 383647 - DNA, 33 bp, Homo sapien
tagcaggtttgtaaacagaaataaatgggaatg

SEQ ID NO: 383648 - DNA, 33 bp, Homo sapien
tagcaggtttgtaaacggaaataaatgggaatg

SEQ ID NO: 383649 - DNA, 33 bp, Homo sapien
gttgtttttatgtatgacacaatttacttcttc

SEQ ID NO: 383650 - DNA, 33 bp, Homo sapien
gttgtttttatgtatgtcacaatttacttcttc

SEQ ID NO: 383651 - DNA, 33 bp, Homo sapien
tgaataatcttgggtactaataaaaggctagcc

SEQ ID NO: 383652 - DNA, 33 bp, Homo sapien
tgaataatcttgggtattaataaaaggctagcc

SEQ ID NO: 383653 - DNA, 33 bp, Homo sapien
gcaggtcacctgcccaaatcataagtaagggcc

SEQ ID NO: 383654 - DNA, 33 bp, Homo sapien
gcaggtcacctgcccagatcataagtaagggcc

SEQ ID NO: 383655 - DNA, 33 bp, Homo sapien
ctttcagtaaagcttgaagtttcagaaggtaag

SEQ ID NO: 383656 - DNA, 33 bp, Homo sapien
ctttcagtaaagcttgtagtttcagaaggtaag

SEQ ID NO: 383657 - DNA, 33 bp, Homo sapien
agctacatatttgtacgctttgttatccaatcc

SEQ ID NO: 383658 - DNA, 33 bp, Homo sapien
agctacatatttgtactctttgttatccaatcc

SEQ ID NO: 383659 - DNA, 33 bp, Homo sapien
aaaactgcttctcgggacaaaaataaatggcag

SEQ ID NO: 383660 - DNA, 33 bp, Homo sapien
aaaactgcttctcggggcaaaaataaatggcag

SEQ ID NO: 383661 - DNA, 33 bp, Homo sapien
tatttaaaacataaaaattaggcctgaaggaac

SEQ ID NO: 383662 - DNA, 33 bp, Homo sapien
tatttaaaacataaaagttaggcctgaaggaac

SEQ ID NO: 383663 - DNA, 33 bp, Homo sapien
cttacagacctgatgcacagccttcctttccca

SEQ ID NO: 383664 - DNA, 33 bp, Homo sapien
cttacagacctgatgcgcagccttcctttccca

SEQ ID NO: 383665 - DNA, 33 bp, Homo sapien
ctggagcctaaaaacaataaggagaaggagttc

SEQ ID NO: 383666 - DNA, 33 bp, Homo sapien
ctggagcctaaaaacagtaaggagaaggagttc

SEQ ID NO: 383667 - DNA, 33 bp, Homo sapien
attcacatttccaccactgacagggaacttaca

SEQ ID NO: 383668 - DNA, 33 bp, Homo sapien
attcacatttccaccagtgacagggaacttaca

SEQ ID NO: 383669 - DNA, 33 bp, Homo sapien
agatgttgtttgaatccgagctttggaaaaata

SEQ ID NO: 383670 - DNA, 33 bp, Homo sapien
agatgttgtttgaatctgagctttggaaaaata

SEQ ID NO: 383671 - DNA, 33 bp, Homo sapien
gctcctataggagggaaaaacgagtacattgaa

SEQ ID NO: 383672 - DNA, 33 bp, Homo sapien
gctcctataggagggacaaacgagtacattgaa

SEQ ID NO: 383673 - DNA, 33 bp, Homo sapien
ctccggaactgctcacacttcaagttggcggct

SEQ ID NO: 383674 - DNA, 33 bp, Homo sapien
ctccggaactgctcacgcttcaagttggcggct

SEQ ID NO: 383675 - DNA, 33 bp, Homo sapien
ttggctgccacagaaaaaaaaatttcgacctgt

SEQ ID NO: 383676 - DNA, 33 bp, Homo sapien
ttggctgccacagaaagaaaaatttcgacctgt

SEQ ID NO: 383677 - DNA, 33 bp, Homo sapien
tcacatcttgcctaccgcacaaggttgttgtaa

SEQ ID NO: 383678 - DNA, 33 bp, Homo sapien
tcacatcttgcctacctcacaaggttgttgtaa

SEQ ID NO: 383679 - DNA, 33 bp, Homo sapien
agagcaggtgctaatacagaacttctttctttg

SEQ ID NO: 383680 - DNA, 33 bp, Homo sapien
agagcaggtgctaatagagaacttctttctttg

SEQ ID NO: 383681 - DNA, 33 bp, Homo sapien
tctctggaactaccaaccttctaacatcttact

SEQ ID NO: 383682 - DNA, 33 bp, Homo sapien
tctctggaactaccaatcttctaacatcttact

SEQ ID NO: 383683 - DNA, 33 bp, Homo sapien
atgcacatggcatcaacctggggtgaatctatg

SEQ ID NO: 383684 - DNA, 33 bp, Homo sapien
atgcacatggcatcaagctggggtgaatctatg

SEQ ID NO: 383685 - DNA, 33 bp, Homo sapien
tgagtaaacaatagccccatggcctcagagata

SEQ ID NO: 383686 - DNA, 33 bp, Homo sapien
tgagtaaacaatagccgcatggcctcagagata

SEQ ID NO: 383687 - DNA, 33 bp, Homo sapien
agcacctactaacaaacgcttggtttacttagg

SEQ ID NO: 383688 - DNA, 33 bp, Homo sapien
agcacctactaacaaatgcttggtttacttagg

SEQ ID NO: 383689 - DNA, 33 bp, Homo sapien
gagagcagtacctctacaaattcaaatagtctc

SEQ ID NO: 383690 - DNA, 33 bp, Homo sapien
gagagcagtacctctagaaattcaaatagtctc

SEQ ID NO: 383691 - DNA, 33 bp, Homo sapien
cagagcaaaactgtataaaccaataaagtctgt

SEQ ID NO: 383692 - DNA, 33 bp, Homo sapien
cagagcaaaactgtatcaaccaataaagtctgt

SEQ ID NO: 383693 - DNA, 33 bp, Homo sapien
aaccatctgccacatactatgcttattacctgg

SEQ ID NO: 383694 - DNA, 33 bp, Homo sapien
aaccatctgccacatagtatgcttattacctgg

SEQ ID NO: 383695 - DNA, 33 bp, Homo sapien
caaaagtgggttttataaggcaatataagctat

SEQ ID NO: 383696 - DNA, 33 bp, Homo sapien
caaaagtgggttttattaggcaatataagctat

SEQ ID NO: 383697 - DNA, 33 bp, Homo sapien
tccctgatctagctaaatccagaaaggtggcag

SEQ ID NO: 383698 - DNA, 33 bp, Homo sapien
tccctgatctagctaagtccagaaaggtggcag

SEQ ID NO: 383699 - DNA, 33 bp, Homo sapien
aagacgttgtaaggcccgcatgttcttcagaaa

SEQ ID NO: 383700 - DNA, 33 bp, Homo sapien
aagacgttgtaaggcctgcatgttcttcagaaa

SEQ ID NO: 383701 - DNA, 33 bp, Homo sapien
tccaaatgtcctgaaacagcagagtggtctgag

SEQ ID NO: 383702 - DNA, 33 bp, Homo sapien
tccaaatgtcctgaaatagcagagtggtctgag

SEQ ID NO: 383703 - DNA, 33 bp, Homo sapien
aataagatgggctgtaggtacttatatggaaag

SEQ ID NO: 383704 - DNA, 33 bp, Homo sapien
aataagatgggctgtatgtacttatatggaaag

SEQ ID NO: 383705 - DNA, 33 bp, Homo sapien
tcatccagccaaatcaaataaccaattctctgt

SEQ ID NO: 383706 - DNA, 33 bp, Homo sapien
tcatccagccaaatcagataaccaattctctgt

SEQ ID NO: 383707 - DNA, 33 bp, Homo sapien
tctcagggtggattacacaaaagtaggaatgtt

SEQ ID NO: 383708 - DNA, 33 bp, Homo sapien
tctcagggtggattacccaaaagtaggaatgtt

SEQ ID NO: 383709 - DNA, 33 bp, Homo sapien
gcaccatcataaaataagagacttcgtaatact

SEQ ID NO: 383710 - DNA, 33 bp, Homo sapien
gcaccatcataaaataggagacttcgtaatact

SEQ ID NO: 383711 - DNA, 33 bp, Homo sapien
gtgaaaagccagatgcagaatcaatgcagttcc

SEQ ID NO: 383712 - DNA, 33 bp, Homo sapien
gtgaaaagccagatgcggaatcaatgcagttcc

SEQ ID NO: 383713 - DNA, 33 bp, Homo sapien
ttgtatttcaatgaagccattttttaaaaatta

SEQ ID NO: 383714 - DNA, 33 bp, Homo sapien
ttgtatttcaatgaaggcattttttaaaaatta

SEQ ID NO: 383715 - DNA, 33 bp, Homo sapien
atttgaagagtcaccaatagtggctaaccagct

SEQ ID NO: 383716 - DNA, 33 bp, Homo sapien
atttgaagagtcaccagtagtggctaaccagct

SEQ ID NO: 383717 - DNA, 33 bp, Homo sapien
ggcctgataatatttacgttggttaattctcat

SEQ ID NO: 383718 - DNA, 33 bp, Homo sapien
ggcctgataatatttatgttggttaattctcat

SEQ ID NO: 383719 - DNA, 33 bp, Homo sapien
gagaagaaacatgataaaaagcacctgggtaag

SEQ ID NO: 383720 - DNA, 33 bp, Homo sapien
gagaagaaacatgatagaaagcacctgggtaag

SEQ ID NO: 383721 - DNA, 33 bp, Homo sapien
tgagtattgtgcaatacgtgtgttcaatgcata

SEQ ID NO: 383722 - DNA, 33 bp, Homo sapien
tgagtattgtgcaatatgtgtgttcaatgcata

SEQ ID NO: 383723 - DNA, 33 bp, Homo sapien
agcataggttattcaactgagagaaaaactaga

SEQ ID NO: 383724 - DNA, 33 bp, Homo sapien
agcataggttattcaattgagagaaaaactaga

SEQ ID NO: 383725 - DNA, 33 bp, Homo sapien
cactaacaattctctcaaaacatcctcctttcc

SEQ ID NO: 383726 - DNA, 33 bp, Homo sapien
cactaacaattctctccaaacatcctcctttcc

SEQ ID NO: 383727 - DNA, 33 bp, Homo sapien
attaaatataccaaaacgtttcactgtctttat

SEQ ID NO: 383728 - DNA, 33 bp, Homo sapien
attaaatataccaaaatgtttcactgtctttat

SEQ ID NO: 383729 - DNA, 33 bp, Homo sapien
atcttctaccactaacactttctccacattggc

SEQ ID NO: 383730 - DNA, 33 bp, Homo sapien
atcttctaccactaacgctttctccacattggc

SEQ ID NO: 383731 - DNA, 33 bp, Homo sapien
tcacgtggtagtccaaagttcagttggcatatt

SEQ ID NO: 383732 - DNA, 33 bp, Homo sapien
tcacgtggtagtccaatgttcagttggcatatt

SEQ ID NO: 383733 - DNA, 33 bp, Homo sapien
catagagtaaagttgaataagtaccaactcagg

SEQ ID NO: 383734 - DNA, 33 bp, Homo sapien
catagagtaaagttgagtaagtaccaactcagg

SEQ ID NO: 383735 - DNA, 33 bp, Homo sapien
gggccattaacagcctcaatttgtgatagtgtc

SEQ ID NO: 383736 - DNA, 33 bp, Homo sapien
gggccattaacagcctgaatttgtgatagtgtc

SEQ ID NO: 383737 - DNA, 33 bp, Homo sapien
gtgcaatatatacataccaaaagtacaaggcac

SEQ ID NO: 383738 - DNA, 33 bp, Homo sapien
gtgcaatatatacatagcaaaagtacaaggcac

SEQ ID NO: 383739 - DNA, 33 bp, Homo sapien
agtaacagaaatttaagactgaatctgggaaat

SEQ ID NO: 383740 - DNA, 33 bp, Homo sapien
agtaacagaaatttaatactgaatctgggaaat

SEQ ID NO: 383741 - DNA, 33 bp, Homo sapien
ccccagactatgttaaatctgccatcacaatat

SEQ ID NO: 383742 - DNA, 33 bp, Homo sapien
ccccagactatgttaattctgccatcacaatat

SEQ ID NO: 383743 - DNA, 33 bp, Homo sapien
tgggttccaggaccctaaaggataccaaaatcc

SEQ ID NO: 383744 - DNA, 33 bp, Homo sapien
tgggttccaggaccctcaaggataccaaaatcc

SEQ ID NO: 383745 - DNA, 33 bp, Homo sapien
gaaaatgaatgcacaaacagggaaaagccaaat

SEQ ID NO: 383746 - DNA, 33 bp, Homo sapien
gaaaatgaatgcacaaccagggaaaagccaaat

SEQ ID NO: 383747 - DNA, 33 bp, Homo sapien
tctgtttagctttcacactgaatatagagtaga

SEQ ID NO: 383748 - DNA, 33 bp, Homo sapien
tctgtttagctttcaccctgaatatagagtaga

SEQ ID NO: 383749 - DNA, 33 bp, Homo sapien
tacatgaaaaagccaacaggagggaatggccaa

SEQ ID NO: 383750 - DNA, 33 bp, Homo sapien
tacatgaaaaagccaagaggagggaatggccaa

SEQ ID NO: 383751 - DNA, 33 bp, Homo sapien
tagaggatttcccatacagaataagatccagca

SEQ ID NO: 383752 - DNA, 33 bp, Homo sapien
tagaggatttcccatatagaataagatccagca

SEQ ID NO: 383753 - DNA, 33 bp, Homo sapien
agataaaacatggtgaagtcaaatgtcagtgtt

SEQ ID NO: 383754 - DNA, 33 bp, Homo sapien
agataaaacatggtgaggtcaaatgtcagtgtt

SEQ ID NO: 383755 - DNA, 33 bp, Homo sapien
aattagtgtttgaggaaggagcatagccagtat

SEQ ID NO: 383756 - DNA, 33 bp, Homo sapien
aattagtgtttgaggagggagcatagccagtat

SEQ ID NO: 383757 - DNA, 33 bp, Homo sapien
aaaaatagtttccccgaacaatctctcttctct

SEQ ID NO: 383758 - DNA, 33 bp, Homo sapien
aaaaatagtttccccgcacaatctctcttctct

SEQ ID NO: 383759 - DNA, 33 bp, Homo sapien
aagaaggaaaagacaacgtacagaaagaacagc

SEQ ID NO: 383760 - DNA, 33 bp, Homo sapien
aagaaggaaaagacaaggtacagaaagaacagc

SEQ ID NO: 383761 - DNA, 33 bp, Homo sapien
tatatgtcctaaatcaatccacgcaccacaaga

SEQ ID NO: 383762 - DNA, 33 bp, Homo sapien
tatatgtcctaaatcagtccacgcaccacaaga

SEQ ID NO: 383763 - DNA, 33 bp, Homo sapien
gcaataactattagaacgctcaatagtgaattc

SEQ ID NO: 383764 - DNA, 33 bp, Homo sapien
gcaataactattagaatgctcaatagtgaattc

SEQ ID NO: 383765 - DNA, 33 bp, Homo sapien
acaacagtaacaacacaaacttataaatacact

SEQ ID NO: 383766 - DNA, 33 bp, Homo sapien
acaacagtaacaacacgaacttataaatacact

SEQ ID NO: 383767 - DNA, 33 bp, Homo sapien
tggcatatccctttgaagatgtaattccattgt

SEQ ID NO: 383768 - DNA, 33 bp, Homo sapien
tggcatatccctttgaggatgtaattccattgt

SEQ ID NO: 383769 - DNA, 33 bp, Homo sapien
tactctcaaaactatgaatcgtacactttaaag

SEQ ID NO: 383770 - DNA, 33 bp, Homo sapien
tactctcaaaactatggatcgtacactttaaag

SEQ ID NO: 383771 - DNA, 33 bp, Homo sapien
caatgtgcccagccgaaacttccattttttata

SEQ ID NO: 383772 - DNA, 33 bp, Homo sapien
caatgtgcccagccgagacttccattttttata

SEQ ID NO: 383773 - DNA, 33 bp, Homo sapien
tgttgagaaagagaacgggcctggaaataagag

SEQ ID NO: 383774 - DNA, 33 bp, Homo sapien
tgttgagaaagagaactggcctggaaataagag

SEQ ID NO: 383775 - DNA, 33 bp, Homo sapien
ctttctatttcttacacacagcatctcagttta

SEQ ID NO: 383776 - DNA, 33 bp, Homo sapien
ctttctatttcttacatacagcatctcagttta

SEQ ID NO: 383777 - DNA, 33 bp, Homo sapien
ttcttatttagcaaacagtcagataaaagaatt

SEQ ID NO: 383778 - DNA, 33 bp, Homo sapien
ttcttatttagcaaactgtcagataaaagaatt

SEQ ID NO: 383779 - DNA, 33 bp, Homo sapien
tttcgcaagtttgatcaagtcataatatggaaa

SEQ ID NO: 383780 - DNA, 33 bp, Homo sapien
tttcgcaagtttgatcgagtcataatatggaaa

SEQ ID NO: 383781 - DNA, 33 bp, Homo sapien
gcaggggaaaacagcacattggagctgcagtca

SEQ ID NO: 383782 - DNA, 33 bp, Homo sapien
gcaggggaaaacagcagattggagctgcagtca

SEQ ID NO: 383783 - DNA, 33 bp, Homo sapien
gtgaatgagggaagatcaaatacactaactttt

SEQ ID NO: 383784 - DNA, 33 bp, Homo sapien
gtgaatgagggaagatgaaatacactaactttt

SEQ ID NO: 383785 - DNA, 33 bp, Homo sapien
tcctttgataaggttacatgcaaaggcattaaa

SEQ ID NO: 383786 - DNA, 33 bp, Homo sapien
tcctttgataaggttatatgcaaaggcattaaa

SEQ ID NO: 383787 - DNA, 33 bp, Homo sapien
aggctcagcactgatacgtgttgctggcaagtg

SEQ ID NO: 383788 - DNA, 33 bp, Homo sapien
aggctcagcactgatatgtgttgctggcaagtg

SEQ ID NO: 383789 - DNA, 33 bp, Homo sapien
tagtcagaaacacggaagactgaaagatacaga

SEQ ID NO: 383790 - DNA, 33 bp, Homo sapien
tagtcagaaacacggaggactgaaagatacaga

SEQ ID NO: 383791 - DNA, 33 bp, Homo sapien
cttgttcccagccccactcaaagctggcagcct

SEQ ID NO: 383792 - DNA, 33 bp, Homo sapien
cttgttcccagccccagtcaaagctggcagcct

SEQ ID NO: 383793 - DNA, 33 bp, Homo sapien
catttgctattccttccatgacagtgctaagta

SEQ ID NO: 383794 - DNA, 33 bp, Homo sapien
catttgctattccttctatgacagtgctaagta

SEQ ID NO: 383795 - DNA, 33 bp, Homo sapien
ggcctgccaagagccaagagagtaagcttgtaa

SEQ ID NO: 383796 - DNA, 33 bp, Homo sapien
ggcctgccaagagccaggagagtaagcttgtaa

SEQ ID NO: 383797 - DNA, 33 bp, Homo sapien
cagtgcaattctgaaagccagttactccaatgt

SEQ ID NO: 383798 - DNA, 33 bp, Homo sapien
cagtgcaattctgaaatccagttactccaatgt

SEQ ID NO: 383799 - DNA, 33 bp, Homo sapien
acaggcccagggataacactacatgaagacacc

SEQ ID NO: 383800 - DNA, 33 bp, Homo sapien
acaggcccagggataagactacatgaagacacc

SEQ ID NO: 383801 - DNA, 33 bp, Homo sapien
tgaagagccataaacaatcctgccaacagagcc

SEQ ID NO: 383802 - DNA, 33 bp, Homo sapien
tgaagagccataaacagtcctgccaacagagcc

SEQ ID NO: 383803 - DNA, 33 bp, Homo sapien
accatcctgccacttacgccaatccctgcaggt

SEQ ID NO: 383804 - DNA, 33 bp, Homo sapien
accatcctgccacttatgccaatccctgcaggt

SEQ ID NO: 383805 - DNA, 33 bp, Homo sapien
tctccttctcagttctcacctctctgcgcacac

SEQ ID NO: 383806 - DNA, 33 bp, Homo sapien
tctccttctcagttcttacctctctgcgcacac

SEQ ID NO: 383807 - DNA, 33 bp, Homo sapien
ttttatgggctttccaatgaagagcggaaagcc

SEQ ID NO: 383808 - DNA, 33 bp, Homo sapien
ttttatgggctttccagtgaagagcggaaagcc

SEQ ID NO: 383809 - DNA, 33 bp, Homo sapien
gaactgtctggtcctgcagaaataaaataggac

SEQ ID NO: 383810 - DNA, 33 bp, Homo sapien
gaactgtctggtcctggagaaataaaataggac

SEQ ID NO: 383811 - DNA, 33 bp, Homo sapien
ggcaaaatagcatcccactttgaaacagagatc

SEQ ID NO: 383812 - DNA, 33 bp, Homo sapien
ggcaaaatagcatcccgctttgaaacagagatc

SEQ ID NO: 383813 - DNA, 33 bp, Homo sapien
ttaacatgaaaacacacacaggagggggtgctc

SEQ ID NO: 383814 - DNA, 33 bp, Homo sapien
ttaacatgaaaacacatacaggagggggtgctc

SEQ ID NO: 383815 - DNA, 33 bp, Homo sapien
aggctggattttgccaagcactagtaagtaagt

SEQ ID NO: 383816 - DNA, 33 bp, Homo sapien
aggctggattttgccaggcactagtaagtaagt

SEQ ID NO: 383817 - DNA, 33 bp, Homo sapien
agattgtgttccgttaaaagtttctattgtagc

SEQ ID NO: 383818 - DNA, 33 bp, Homo sapien
agattgtgttccgttataagtttctattgtagc

SEQ ID NO: 383819 - DNA, 33 bp, Homo sapien
cccagaagacctaatcacttggaagttacctct

SEQ ID NO: 383820 - DNA, 33 bp, Homo sapien
cccagaagacctaatcgcttggaagttacctct

SEQ ID NO: 383821 - DNA, 33 bp, Homo sapien
tggtggcttaccaaaaaaaagtggccaaactgc

SEQ ID NO: 383822 - DNA, 33 bp, Homo sapien
tggtggcttaccaaaacaaagtggccaaactgc

SEQ ID NO: 383823 - DNA, 33 bp, Homo sapien
atcaaggttcttctaccaccaaacacaataaga

SEQ ID NO: 383824 - DNA, 33 bp, Homo sapien
atcaaggttcttctactaccaaacacaataaga

SEQ ID NO: 383825 - DNA, 33 bp, Homo sapien
ttttttgtgtgcacaaaggtgactttacagcct

SEQ ID NO: 383826 - DNA, 33 bp, Homo sapien
ttttttgtgtgcacaacggtgactttacagcct

SEQ ID NO: 383827 - DNA, 33 bp, Homo sapien
aggagatttgggcaatcatcatcaatggctaat

SEQ ID NO: 383828 - DNA, 33 bp, Homo sapien
aggagatttgggcaatgatcatcaatggctaat

SEQ ID NO: 383829 - DNA, 33 bp, Homo sapien
acggctcataaattgaacaacacttccattaga

SEQ ID NO: 383830 - DNA, 33 bp, Homo sapien
acggctcataaattgagcaacacttccattaga

SEQ ID NO: 383831 - DNA, 33 bp, Homo sapien
tgggccagtgcatttccagccaggatagcccaa

SEQ ID NO: 383832 - DNA, 33 bp, Homo sapien
tgggccagtgcatttctagccaggatagcccaa

SEQ ID NO: 383833 - DNA, 33 bp, Homo sapien
gtgcagtgaccagaggcatcattagaagaggaa

SEQ ID NO: 383834 - DNA, 33 bp, Homo sapien
gtgcagtgaccagaggtatcattagaagaggaa

SEQ ID NO: 383835 - DNA, 33 bp, Homo sapien
cccttgcacccaattacatttatgtattactta

SEQ ID NO: 383836 - DNA, 33 bp, Homo sapien
cccttgcacccaattatatttatgtattactta

SEQ ID NO: 383837 - DNA, 33 bp, Homo sapien
tgatccgtagtgagtaccagagagtggaacagg

SEQ ID NO: 383838 - DNA, 33 bp, Homo sapien
tgatccgtagtgagtagcagagagtggaacagg

SEQ ID NO: 383839 - DNA, 33 bp, Homo sapien
ctggggatgaggtccacaactcagaaaggacaa

SEQ ID NO: 383840 - DNA, 33 bp, Homo sapien
ctggggatgaggtccagaactcagaaaggacaa

SEQ ID NO: 383841 - DNA, 33 bp, Homo sapien
atcttgccaacttgtacgtaagaatgggatgag

SEQ ID NO: 383842 - DNA, 33 bp, Homo sapien
atcttgccaacttgtatgtaagaatgggatgag

SEQ ID NO: 383843 - DNA, 33 bp, Homo sapien
aaagtggcagacagaagaattcatggcagtgta

SEQ ID NO: 383844 - DNA, 33 bp, Homo sapien
aaagtggcagacagaataattcatggcagtgta

SEQ ID NO: 383845 - DNA, 33 bp, Homo sapien
gccccatgatggaagaagctgcccgttacagca

SEQ ID NO: 383846 - DNA, 33 bp, Homo sapien
gccccatgatggaagaggctgcccgttacagca

SEQ ID NO: 383847 - DNA, 33 bp, Homo sapien
cacgactatcgctcagcatgaaggagatacata

SEQ ID NO: 383848 - DNA, 33 bp, Homo sapien
cacgactatcgctcaggatgaaggagatacata

SEQ ID NO: 383849 - DNA, 33 bp, Homo sapien
agagcgctgggagtgacggtcgttccataaggc

SEQ ID NO: 383850 - DNA, 33 bp, Homo sapien
agagcgctgggagtgatggtcgttccataaggc

SEQ ID NO: 383851 - DNA, 33 bp, Homo sapien
cgctgtagctctttcacctcttccatggattta

SEQ ID NO: 383852 - DNA, 33 bp, Homo sapien
cgctgtagctctttcagctcttccatggattta

SEQ ID NO: 383853 - DNA, 33 bp, Homo sapien
aggtttacgaaatttacaggaaagtctccaatc

SEQ ID NO: 383854 - DNA, 33 bp, Homo sapien
aggtttacgaaatttataggaaagtctccaatc

SEQ ID NO: 383855 - DNA, 33 bp, Homo sapien
tttcagatgttaaagacggtttcgcattaagtt

SEQ ID NO: 383856 - DNA, 33 bp, Homo sapien
tttcagatgttaaagatggtttcgcattaagtt

SEQ ID NO: 383857 - DNA, 33 bp, Homo sapien
gaggaatccaagctccacctccttcagatgagg

SEQ ID NO: 383858 - DNA, 33 bp, Homo sapien
gaggaatccaagctcctcctccttcagatgagg

SEQ ID NO: 383859 - DNA, 33 bp, Homo sapien
gggaaagcctctttgacgaccagatattgaatg

SEQ ID NO: 383860 - DNA, 33 bp, Homo sapien
gggaaagcctctttgaggaccagatattgaatg

SEQ ID NO: 383861 - DNA, 33 bp, Homo sapien
aatacaacctattggacgaatgtggatgaagat

SEQ ID NO: 383862 - DNA, 33 bp, Homo sapien
aatacaacctattggaggaatgtggatgaagat

SEQ ID NO: 383863 - DNA, 33 bp, Homo sapien
accaaccatcaagccacggaaatgaaccgcagg

SEQ ID NO: 383864 - DNA, 33 bp, Homo sapien
accaaccatcaagccatggaaatgaaccgcagg

SEQ ID NO: 383865 - DNA, 33 bp, Homo sapien
cacggggatcccaagacggtaaatgttaggacg

SEQ ID NO: 383866 - DNA, 33 bp, Homo sapien
cacggggatcccaagatggtaaatgttaggacg

SEQ ID NO: 383867 - DNA, 33 bp, Homo sapien
caggcaacgaagacaacatcatcaggttttgta

SEQ ID NO: 383868 - DNA, 33 bp, Homo sapien
caggcaacgaagacaatatcatcaggttttgta

SEQ ID NO: 383869 - DNA, 33 bp, Homo sapien
gccctttggtccctcagtacgactaagatcaaa

SEQ ID NO: 383870 - DNA, 33 bp, Homo sapien
gccctttggtccctcattacgactaagatcaaa

SEQ ID NO: 383871 - DNA, 33 bp, Homo sapien
tgacattgattttacaatcgggctgttaaccct

SEQ ID NO: 383872 - DNA, 33 bp, Homo sapien
tgacattgattttacagtcgggctgttaaccct

SEQ ID NO: 383873 - DNA, 33 bp, Homo sapien
ccaattaattggtaaacgcttgcaggtttctct

SEQ ID NO: 383874 - DNA, 33 bp, Homo sapien
ccaattaattggtaaatgcttgcaggtttctct

SEQ ID NO: 383875 - DNA, 33 bp, Homo sapien
actctgtctgtaaacacggtttcccgtaaaatc

SEQ ID NO: 383876 - DNA, 33 bp, Homo sapien
actctgtctgtaaacatggtttcccgtaaaatc

SEQ ID NO: 383877 - DNA, 33 bp, Homo sapien
acctacagctaatcgccaattcctcaggatcat

SEQ ID NO: 383878 - DNA, 33 bp, Homo sapien
acctacagctaatcgctaattcctcaggatcat

SEQ ID NO: 383879 - DNA, 33 bp, Homo sapien
gaacagaagtaagtgccatcattcaaggctgca

SEQ ID NO: 383880 - DNA, 33 bp, Homo sapien
gaacagaagtaagtgctatcattcaaggctgca

SEQ ID NO: 383881 - DNA, 33 bp, Homo sapien
tctgagtttgtttgaaagacttccaaattccaa

SEQ ID NO: 383882 - DNA, 33 bp, Homo sapien
tctgagtttgtttgaatgacttccaaattccaa

SEQ ID NO: 383883 - DNA, 33 bp, Homo sapien
gcaaaaatggcacagacggtctttctcctcttg

SEQ ID NO: 383884 - DNA, 33 bp, Homo sapien
gcaaaaatggcacagatggtctttctcctcttg

SEQ ID NO: 383885 - DNA, 33 bp, Homo sapien
atacaacatcatagcagaaattgaggcccgggc

SEQ ID NO: 383886 - DNA, 33 bp, Homo sapien
atacaacatcatagcataaattgaggcccgggc

SEQ ID NO: 383887 - DNA, 33 bp, Homo sapien
gaagcccctgttcctaccgtgatagaaaacaat

SEQ ID NO: 383888 - DNA, 33 bp, Homo sapien
gaagcccctgttcctagcgtgatagaaaacaat

SEQ ID NO: 383889 - DNA, 33 bp, Homo sapien
aaccacatgtcaaacaacattcctaccatctgt

SEQ ID NO: 383890 - DNA, 33 bp, Homo sapien
aaccacatgtcaaacaccattcctaccatctgt

SEQ ID NO: 383891 - DNA, 33 bp, Homo sapien
aagaatatgggccaaacgagttagcagtaacag

SEQ ID NO: 383892 - DNA, 33 bp, Homo sapien
aagaatatgggccaaatgagttagcagtaacag

SEQ ID NO: 383893 - DNA, 33 bp, Homo sapien
cagtagatgcttaataagggttagctattaatg

SEQ ID NO: 383894 - DNA, 33 bp, Homo sapien
cagtagatgcttaataggggttagctattaatg

SEQ ID NO: 383895 - DNA, 33 bp, Homo sapien
attaaaggggtcaccacaaacaagctgttcaaa

SEQ ID NO: 383896 - DNA, 33 bp, Homo sapien
attaaaggggtcaccataaacaagctgttcaaa

SEQ ID NO: 383897 - DNA, 33 bp, Homo sapien
gtacatgtgactagggcagaaataattcagaat

SEQ ID NO: 383898 - DNA, 33 bp, Homo sapien
gtacatgtgactagggtagaaataattcagaat

SEQ ID NO: 383899 - DNA, 33 bp, Homo sapien
ggttttacacaccatacgggcactggccatgtt

SEQ ID NO: 383900 - DNA, 33 bp, Homo sapien
ggttttacacaccataggggcactggccatgtt

SEQ ID NO: 383901 - DNA, 33 bp, Homo sapien
aattttcctcagtgaccgctgtgatttttatcc

SEQ ID NO: 383902 - DNA, 33 bp, Homo sapien
aattttcctcagtgactgctgtgatttttatcc

SEQ ID NO: 383903 - DNA, 33 bp, Homo sapien
tgggaaggttttcacaatcaggtgagcaccccc

SEQ ID NO: 383904 - DNA, 33 bp, Homo sapien
tgggaaggttttcacagtcaggtgagcaccccc

SEQ ID NO: 383905 - DNA, 33 bp, Homo sapien
cccttgacactcaacccagtctggcgacaaagc

SEQ ID NO: 383906 - DNA, 33 bp, Homo sapien
cccttgacactcaacctagtctggcgacaaagc

SEQ ID NO: 383907 - DNA, 33 bp, Homo sapien
atcttcccaaaccgcaatcttttcaaaactgac

SEQ ID NO: 383908 - DNA, 33 bp, Homo sapien
atcttcccaaaccgcagtcttttcaaaactgac

SEQ ID NO: 383909 - DNA, 33 bp, Homo sapien
gtgttaccagttgtgacacagaagggaaccata

SEQ ID NO: 383910 - DNA, 33 bp, Homo sapien
gtgttaccagttgtgatacagaagggaaccata

SEQ ID NO: 383911 - DNA, 33 bp, Homo sapien
ttctcaggtatgctaaagaacaaattaagaaac

SEQ ID NO: 383912 - DNA, 33 bp, Homo sapien
ttctcaggtatgctaaggaacaaattaagaaac

SEQ ID NO: 383913 - DNA, 33 bp, Homo sapien
agtgtttggaaggtcaaaaatctatacacacat

SEQ ID NO: 383914 - DNA, 33 bp, Homo sapien
agtgtttggaaggtcagaaatctatacacacat

SEQ ID NO: 383915 - DNA, 33 bp, Homo sapien
ggttatgaaatgcaccaatctccatccagactg

SEQ ID NO: 383916 - DNA, 33 bp, Homo sapien
ggttatgaaatgcaccgatctccatccagactg

SEQ ID NO: 383917 - DNA, 33 bp, Homo sapien
ccaggattacacaagacggaagatgtacaaact

SEQ ID NO: 383918 - DNA, 33 bp, Homo sapien
ccaggattacacaagatggaagatgtacaaact

SEQ ID NO: 383919 - DNA, 33 bp, Homo sapien
taagtgctttcccccaatagactgagaaagggg

SEQ ID NO: 383920 - DNA, 33 bp, Homo sapien
taagtgctttcccccagtagactgagaaagggg

SEQ ID NO: 383921 - DNA, 33 bp, Homo sapien
tctacattacatgggcagaaggttaaaacaaat

SEQ ID NO: 383922 - DNA, 33 bp, Homo sapien
tctacattacatgggcggaaggttaaaacaaat

SEQ ID NO: 383923 - DNA, 33 bp, Homo sapien
caggctggccattcacaaggtggcaaaacttat

SEQ ID NO: 383924 - DNA, 33 bp, Homo sapien
caggctggccattcacgaggtggcaaaacttat

SEQ ID NO: 383925 - DNA, 33 bp, Homo sapien
cattgggtcgtaaccacagtcagaggttttgtt

SEQ ID NO: 383926 - DNA, 33 bp, Homo sapien
cattgggtcgtaaccatagtcagaggttttgtt

SEQ ID NO: 383927 - DNA, 33 bp, Homo sapien
atgactgtctatgaacaaggaagtgagccctca

SEQ ID NO: 383928 - DNA, 33 bp, Homo sapien
atgactgtctatgaaccaggaagtgagccctca

SEQ ID NO: 383929 - DNA, 33 bp, Homo sapien
caaaaaaaacaaacatcaactgtgtatttcact

SEQ ID NO: 383930 - DNA, 33 bp, Homo sapien
caaaaaaaacaaacatgaactgtgtatttcact

SEQ ID NO: 383931 - DNA, 33 bp, Homo sapien
atcaggatgaatcaggaccaatgatagccatta

SEQ ID NO: 383932 - DNA, 33 bp, Homo sapien
atcaggatgaatcaggtccaatgatagccatta

SEQ ID NO: 383933 - DNA, 33 bp, Homo sapien
taaccactcttaaccccggaatgtcgaattttc

SEQ ID NO: 383934 - DNA, 33 bp, Homo sapien
taaccactcttaaccctggaatgtcgaattttc

SEQ ID NO: 383935 - DNA, 33 bp, Homo sapien
gaaaagtagaacttggacaaagagatgagagag

SEQ ID NO: 383936 - DNA, 33 bp, Homo sapien
gaaaagtagaacttgggcaaagagatgagagag

SEQ ID NO: 383937 - DNA, 33 bp, Homo sapien
gctgcagccttgcttccaaagccctgcctacac

SEQ ID NO: 383938 - DNA, 33 bp, Homo sapien
gctgcagccttgcttctaaagccctgcctacac

SEQ ID NO: 383939 - DNA, 33 bp, Homo sapien
aaaaagtgagaacctaagtgtttcaggatttgt

SEQ ID NO: 383940 - DNA, 33 bp, Homo sapien
aaaaagtgagaacctaggtgtttcaggatttgt

SEQ ID NO: 383941 - DNA, 33 bp, Homo sapien
tcaggtttccatacatcagcctgtgtttgaaaa

SEQ ID NO: 383942 - DNA, 33 bp, Homo sapien
tcaggtttccatacatgagcctgtgtttgaaaa

SEQ ID NO: 383943 - DNA, 33 bp, Homo sapien
tcagtgatttcaccaccctatagacatagacaa

SEQ ID NO: 383944 - DNA, 33 bp, Homo sapien
tcagtgatttcaccacgctatagacatagacaa

SEQ ID NO: 383945 - DNA, 33 bp, Homo sapien
agtgttgaaaatttggaatgtgggccccatgca

SEQ ID NO: 383946 - DNA, 33 bp, Homo sapien
agtgttgaaaatttgggatgtgggccccatgca

SEQ ID NO: 383947 - DNA, 33 bp, Homo sapien
ccttgggcgtggaccacgataggctatacttca

SEQ ID NO: 383948 - DNA, 33 bp, Homo sapien
ccttgggcgtggaccatgataggctatacttca

SEQ ID NO: 383949 - DNA, 33 bp, Homo sapien
ttcttcaaaccgagtcagaagtactctccccgc

SEQ ID NO: 383950 - DNA, 33 bp, Homo sapien
ttcttcaaaccgagtcggaagtactctccccgc

SEQ ID NO: 383951 - DNA, 33 bp, Homo sapien
gaatgttcagggacaaaagaaccatccaatggc

SEQ ID NO: 383952 - DNA, 33 bp, Homo sapien
gaatgttcagggacaatagaaccatccaatggc

SEQ ID NO: 383953 - DNA, 33 bp, Homo sapien
gtaactgacgagaaacaaacaagaaagaatgtt

SEQ ID NO: 383954 - DNA, 33 bp, Homo sapien
gtaactgacgagaaacgaacaagaaagaatgtt

SEQ ID NO: 383955 - DNA, 33 bp, Homo sapien
aaagaagtcgctaacaaaaaatactgaattatt

SEQ ID NO: 383956 - DNA, 33 bp, Homo sapien
aaagaagtcgctaacagaaaatactgaattatt

SEQ ID NO: 383957 - DNA, 33 bp, Homo sapien
tacggttagctctaccggctcttttctcatttt

SEQ ID NO: 383958 - DNA, 33 bp, Homo sapien
tacggttagctctacctgctcttttctcatttt

SEQ ID NO: 383959 - DNA, 33 bp, Homo sapien
ttacattaactcctgacgcaaacttgttgccaa

SEQ ID NO: 383960 - DNA, 33 bp, Homo sapien
ttacattaactcctgatgcaaacttgttgccaa

SEQ ID NO: 383961 - DNA, 33 bp, Homo sapien
tcaatgtgtgaatttaccatgccctcctgatag

SEQ ID NO: 383962 - DNA, 33 bp, Homo sapien
tcaatgtgtgaatttatcatgccctcctgatag

SEQ ID NO: 383963 - DNA, 33 bp, Homo sapien
gaaccccagtcaagtacgttcttcaaatacctc

SEQ ID NO: 383964 - DNA, 33 bp, Homo sapien
gaaccccagtcaagtatgttcttcaaatacctc

SEQ ID NO: 383965 - DNA, 33 bp, Homo sapien
ctaagataggcagttacgtatttgatcatggtt

SEQ ID NO: 383966 - DNA, 33 bp, Homo sapien
ctaagataggcagttatgtatttgatcatggtt

SEQ ID NO: 383967 - DNA, 33 bp, Homo sapien
aaattcctgcttcacaaggcaattataaagtaa

SEQ ID NO: 383968 - DNA, 33 bp, Homo sapien
aaattcctgcttcacatggcaattataaagtaa

SEQ ID NO: 383969 - DNA, 33 bp, Homo sapien
aggtctacctactcaaactgcattataaataag

SEQ ID NO: 383970 - DNA, 33 bp, Homo sapien
aggtctacctactcaagctgcattataaataag

SEQ ID NO: 383971 - DNA, 33 bp, Homo sapien
gcaagcaggttgtggacagaaggatttggctta

SEQ ID NO: 383972 - DNA, 33 bp, Homo sapien
gcaagcaggttgtggatagaaggatttggctta

SEQ ID NO: 383973 - DNA, 33 bp, Homo sapien
ccacctatgggccacaactgcaggacatcttta

SEQ ID NO: 383974 - DNA, 33 bp, Homo sapien
ccacctatgggccacacctgcaggacatcttta

SEQ ID NO: 383975 - DNA, 33 bp, Homo sapien
gctttcctttgtgcaaatattaatctgcccggt

SEQ ID NO: 383976 - DNA, 33 bp, Homo sapien
gctttcctttgtgcaagtattaatctgcccggt

SEQ ID NO: 383977 - DNA, 33 bp, Homo sapien
agctgctgtcctgctacgaatttttattcttgt

SEQ ID NO: 383978 - DNA, 33 bp, Homo sapien
agctgctgtcctgctatgaatttttattcttgt

SEQ ID NO: 383979 - DNA, 33 bp, Homo sapien
attcagcagtccagataagtgccccacagagga

SEQ ID NO: 383980 - DNA, 33 bp, Homo sapien
attcagcagtccagatgagtgccccacagagga

SEQ ID NO: 383981 - DNA, 33 bp, Homo sapien
atccttttgtcacgtgccacaatttcaagctcc

SEQ ID NO: 383982 - DNA, 33 bp, Homo sapien
atccttttgtcacgtgtcacaatttcaagctcc

SEQ ID NO: 383983 - DNA, 33 bp, Homo sapien
gcaacaaccttgacacactatcattaagtcagt

SEQ ID NO: 383984 - DNA, 33 bp, Homo sapien
gcaacaaccttgacacgctatcattaagtcagt

SEQ ID NO: 383985 - DNA, 33 bp, Homo sapien
aaaaatggcacaaacacgtacacagcccacact

SEQ ID NO: 383986 - DNA, 33 bp, Homo sapien
aaaaatggcacaaacatgtacacagcccacact

SEQ ID NO: 383987 - DNA, 33 bp, Homo sapien
ccctgtggcctgtttaaaatatttactctctgg

SEQ ID NO: 383988 - DNA, 33 bp, Homo sapien
ccctgtggcctgtttacaatatttactctctgg

SEQ ID NO: 383989 - DNA, 33 bp, Homo sapien
tcccttctaggaaaatcacttctcatttgatat

SEQ ID NO: 383990 - DNA, 33 bp, Homo sapien
tcccttctaggaaaattacttctcatttgatat

SEQ ID NO: 383991 - DNA, 33 bp, Homo sapien
ggcttctttcacttagcatcgtgtttttaaggt

SEQ ID NO: 383992 - DNA, 33 bp, Homo sapien
ggcttctttcacttaggatcgtgtttttaaggt

SEQ ID NO: 383993 - DNA, 33 bp, Homo sapien
ttcaacagtttggcacacttttcgtactaaaat

SEQ ID NO: 383994 - DNA, 33 bp, Homo sapien
ttcaacagtttggcacccttttcgtactaaaat

SEQ ID NO: 383995 - DNA, 33 bp, Homo sapien
caaacaaatgaagacacgtttattttccctatg

SEQ ID NO: 383996 - DNA, 33 bp, Homo sapien
caaacaaatgaagacaggtttattttccctatg

SEQ ID NO: 383997 - DNA, 33 bp, Homo sapien
aatttctggaaaaatcaaagtcatagggaaaat

SEQ ID NO: 383998 - DNA, 33 bp, Homo sapien
aatttctggaaaaatcgaagtcatagggaaaat

SEQ ID NO: 383999 - DNA, 33 bp, Homo sapien
cagtcatatattggcaagtttgcatgattccat

SEQ ID NO: 384000 - DNA, 33 bp, Homo sapien
cagtcatatattggcacgtttgcatgattccat

SEQ ID NO: 384001 - DNA, 33 bp, Homo sapien
gtgccattatttgtgacgttatctttaatgact

SEQ ID NO: 384002 - DNA, 33 bp, Homo sapien
gtgccattatttgtgatgttatctttaatgact

SEQ ID NO: 384003 - DNA, 33 bp, Homo sapien
catctcagttttgacacctgcttgtgaatctgg

SEQ ID NO: 384004 - DNA, 33 bp, Homo sapien
catctcagttttgacagctgcttgtgaatctgg

SEQ ID NO: 384005 - DNA, 33 bp, Homo sapien
aaacaaacttcttccacctgattctacttcctg

SEQ ID NO: 384006 - DNA, 33 bp, Homo sapien
aaacaaacttcttccatctgattctacttcctg

SEQ ID NO: 384007 - DNA, 33 bp, Homo sapien
gtcttgctctaggtcaatccaattagcagggtt

SEQ ID NO: 384008 - DNA, 33 bp, Homo sapien
gtcttgctctaggtcagtccaattagcagggtt

SEQ ID NO: 384009 - DNA, 33 bp, Homo sapien
ttcagtcgagtaacaaatattcttgctggggtt

SEQ ID NO: 384010 - DNA, 33 bp, Homo sapien
ttcagtcgagtaacaagtattcttgctggggtt

SEQ ID NO: 384011 - DNA, 33 bp, Homo sapien
agggtagaaatttacacaccatcggcaaaggct

SEQ ID NO: 384012 - DNA, 33 bp, Homo sapien
agggtagaaatttacataccatcggcaaaggct

SEQ ID NO: 384013 - DNA, 33 bp, Homo sapien
tccagtcctaagaacacggcacctctcagcctt

SEQ ID NO: 384014 - DNA, 33 bp, Homo sapien
tccagtcctaagaacatggcacctctcagcctt

SEQ ID NO: 384015 - DNA, 33 bp, Homo sapien
agaagatagctccagaagttccatgccacagct

SEQ ID NO: 384016 - DNA, 33 bp, Homo sapien
agaagatagctccagacgttccatgccacagct

SEQ ID NO: 384017 - DNA, 33 bp, Homo sapien
agacactgcagtcttacgttaaaactgtgttct

SEQ ID NO: 384018 - DNA, 33 bp, Homo sapien
agacactgcagtcttatgttaaaactgtgttct

SEQ ID NO: 384019 - DNA, 33 bp, Homo sapien
caaattccattaattaagtgatattgttggcaa

SEQ ID NO: 384020 - DNA, 33 bp, Homo sapien
caaattccattaattacgtgatattgttggcaa

SEQ ID NO: 384021 - DNA, 33 bp, Homo sapien
aaccaagatggctcaccgcccagaagaccacat

SEQ ID NO: 384022 - DNA, 33 bp, Homo sapien
aaccaagatggctcactgcccagaagaccacat

SEQ ID NO: 384023 - DNA, 33 bp, Homo sapien
caggctgttgagcagaataaatgaattaatgaa

SEQ ID NO: 384024 - DNA, 33 bp, Homo sapien
caggctgttgagcagattaaatgaattaatgaa

SEQ ID NO: 384025 - DNA, 33 bp, Homo sapien
ctagaacctagaaaaaaagctcaccacagcaac

SEQ ID NO: 384026 - DNA, 33 bp, Homo sapien
ctagaacctagaaaaagagctcaccacagcaac

SEQ ID NO: 384027 - DNA, 33 bp, Homo sapien
tttggcttgttagcacaatcagaatcaccttga

SEQ ID NO: 384028 - DNA, 33 bp, Homo sapien
tttggcttgttagcactatcagaatcaccttga

SEQ ID NO: 384029 - DNA, 33 bp, Homo sapien
gtttactactaattacacaagtcatttgtcacg

SEQ ID NO: 384030 - DNA, 33 bp, Homo sapien
gtttactactaattacgcaagtcatttgtcacg

SEQ ID NO: 384031 - DNA, 33 bp, Homo sapien
tgggtcgttagtgctacagagtttcacacagtc

SEQ ID NO: 384032 - DNA, 33 bp, Homo sapien
tgggtcgttagtgctatagagtttcacacagtc

SEQ ID NO: 384033 - DNA, 33 bp, Homo sapien
ggtacttaatgtttaacggttcatcatactttt

SEQ ID NO: 384034 - DNA, 33 bp, Homo sapien
ggtacttaatgtttaatggttcatcatactttt

SEQ ID NO: 384035 - DNA, 33 bp, Homo sapien
taacttgagtcagctgcaatcaaagaaagtctt

SEQ ID NO: 384036 - DNA, 33 bp, Homo sapien
taacttgagtcagctgtaatcaaagaaagtctt

SEQ ID NO: 384037 - DNA, 33 bp, Homo sapien
ttcattcctcacccgaaggcagcaattttgaaa

SEQ ID NO: 384038 - DNA, 33 bp, Homo sapien
ttcattcctcacccgatggcagcaattttgaaa

SEQ ID NO: 384039 - DNA, 33 bp, Homo sapien
atgggtttttagtgtaccgtggaagcagcactc

SEQ ID NO: 384040 - DNA, 33 bp, Homo sapien
atgggtttttagtgtagcgtggaagcagcactc

SEQ ID NO: 384041 - DNA, 33 bp, Homo sapien
ttaaacaggatatttcaaaagcggctagtgcag

SEQ ID NO: 384042 - DNA, 33 bp, Homo sapien
ttaaacaggatatttcgaaagcggctagtgcag

SEQ ID NO: 384043 - DNA, 33 bp, Homo sapien
tggcagtggatcttaagcagccctacaaaaatg

SEQ ID NO: 384044 - DNA, 33 bp, Homo sapien
tggcagtggatcttaatcagccctacaaaaatg

SEQ ID NO: 384045 - DNA, 33 bp, Homo sapien
tgtaagcctccacacacatttcaaagagagacg

SEQ ID NO: 384046 - DNA, 33 bp, Homo sapien
tgtaagcctccacacagatttcaaagagagacg

SEQ ID NO: 384047 - DNA, 33 bp, Homo sapien
ggttctctatcatcaacgaagacgttcaagttt

SEQ ID NO: 384048 - DNA, 33 bp, Homo sapien
ggttctctatcatcaatgaagacgttcaagttt

SEQ ID NO: 384049 - DNA, 33 bp, Homo sapien
tgctttatacagataaagagacatgctatataa

SEQ ID NO: 384050 - DNA, 33 bp, Homo sapien
tgctttatacagataaggagacatgctatataa

SEQ ID NO: 384051 - DNA, 33 bp, Homo sapien
tggtcaataagttctacgtccacaaccagaaat

SEQ ID NO: 384052 - DNA, 33 bp, Homo sapien
tggtcaataagttctatgtccacaaccagaaat

SEQ ID NO: 384053 - DNA, 33 bp, Homo sapien
actacaattttagggccgaaggatggtctattt

SEQ ID NO: 384054 - DNA, 33 bp, Homo sapien
actacaattttagggctgaaggatggtctattt

SEQ ID NO: 384055 - DNA, 33 bp, Homo sapien
taaagcacacagactcaaagtaacttgcccagg

SEQ ID NO: 384056 - DNA, 33 bp, Homo sapien
taaagcacacagactcgaagtaacttgcccagg

SEQ ID NO: 384057 - DNA, 33 bp, Homo sapien
agacagggccctgtgacagagaatccgaagaga

SEQ ID NO: 384058 - DNA, 33 bp, Homo sapien
agacagggccctgtgatagagaatccgaagaga

SEQ ID NO: 384059 - DNA, 33 bp, Homo sapien
cttgtggttgttcccagtctcttcggattctct

SEQ ID NO: 384060 - DNA, 33 bp, Homo sapien
cttgtggttgttcccattctcttcggattctct

SEQ ID NO: 384061 - DNA, 33 bp, Homo sapien
gactgaggttctaaagacggaaattcacatcag

SEQ ID NO: 384062 - DNA, 33 bp, Homo sapien
gactgaggttctaaagtcggaaattcacatcag

SEQ ID NO: 384063 - DNA, 33 bp, Homo sapien
agtttctgacctttcccgaaacatattcccagg

SEQ ID NO: 384064 - DNA, 33 bp, Homo sapien
agtttctgacctttcctgaaacatattcccagg

SEQ ID NO: 384065 - DNA, 33 bp, Homo sapien
ggagttaatttagtgcagaaggagaatgggcat

SEQ ID NO: 384066 - DNA, 33 bp, Homo sapien
ggagttaatttagtgccgaaggagaatgggcat

SEQ ID NO: 384067 - DNA, 33 bp, Homo sapien
taccaaaaagatgtaaatgatttaattgaatta

SEQ ID NO: 384068 - DNA, 33 bp, Homo sapien
taccaaaaagatgtaactgatttaattgaatta

SEQ ID NO: 384069 - DNA, 33 bp, Homo sapien
accacagcagaagtggaatgtttcagaagatga

SEQ ID NO: 384070 - DNA, 33 bp, Homo sapien
accacagcagaagtgggatgtttcagaagatga

SEQ ID NO: 384071 - DNA, 33 bp, Homo sapien
tttcctcttttgctctcagagagtgttggagtc

SEQ ID NO: 384072 - DNA, 33 bp, Homo sapien
tttcctcttttgctctgagagagtgttggagtc

SEQ ID NO: 384073 - DNA, 33 bp, Homo sapien
tgacaatcttattaccacagaagaaaacacctc

SEQ ID NO: 384074 - DNA, 33 bp, Homo sapien
tgacaatcttattaccgcagaagaaaacacctc

SEQ ID NO: 384075 - DNA, 33 bp, Homo sapien
ataccttgatccagtgaacaggaattacatggc

SEQ ID NO: 384076 - DNA, 33 bp, Homo sapien
ataccttgatccagtgcacaggaattacatggc

SEQ ID NO: 384077 - DNA, 33 bp, Homo sapien
ctctactagctcccaacgaggtcctgctgagaa

SEQ ID NO: 384078 - DNA, 33 bp, Homo sapien
ctctactagctcccaatgaggtcctgctgagaa

SEQ ID NO: 384079 - DNA, 33 bp, Homo sapien
gcatgatggattggcacaaaggaggtaaagtag

SEQ ID NO: 384080 - DNA, 33 bp, Homo sapien
gcatgatggattggcataaaggaggtaaagtag

SEQ ID NO: 384081 - DNA, 33 bp, Homo sapien
atggcatctaaggacacaagttgctacggagta

SEQ ID NO: 384082 - DNA, 33 bp, Homo sapien
atggcatctaaggacataagttgctacggagta

SEQ ID NO: 384083 - DNA, 33 bp, Homo sapien
tattggtatgcgtcgtaacccctggcttggagt

SEQ ID NO: 384084 - DNA, 33 bp, Homo sapien
tattggtatgcgtcgttacccctggcttggagt

SEQ ID NO: 384085 - DNA, 33 bp, Homo sapien
tttgccattattaaaaatagagttcccttcatg

SEQ ID NO: 384086 - DNA, 33 bp, Homo sapien
tttgccattattaaaagtagagttcccttcatg

SEQ ID NO: 384087 - DNA, 33 bp, Homo sapien
catctgtgtctcctcaactcatgctcgaggtca

SEQ ID NO: 384088 - DNA, 33 bp, Homo sapien
catctgtgtctcctcagctcatgctcgaggtca

SEQ ID NO: 384089 - DNA, 33 bp, Homo sapien
tgcaaccacagggaacactaagaaagatgacac

SEQ ID NO: 384090 - DNA, 33 bp, Homo sapien
tgcaaccacagggaacgctaagaaagatgacac

SEQ ID NO: 384091 - DNA, 33 bp, Homo sapien
tataggaggcatggtgacacaggatgacagact

SEQ ID NO: 384092 - DNA, 33 bp, Homo sapien
tataggaggcatggtggcacaggatgacagact

SEQ ID NO: 384093 - DNA, 33 bp, Homo sapien
ccagaaaatggcatcacgtgtgaggatcggccc

SEQ ID NO: 384094 - DNA, 33 bp, Homo sapien
ccagaaaatggcatcatgtgtgaggatcggccc

SEQ ID NO: 384095 - DNA, 33 bp, Homo sapien
ctggactgtatctaaacagctgaatgttcttca

SEQ ID NO: 384096 - DNA, 33 bp, Homo sapien
ctggactgtatctaaagagctgaatgttcttca

SEQ ID NO: 384097 - DNA, 33 bp, Homo sapien
ttgataggtattcctcaaaggcagaattcctca

SEQ ID NO: 384098 - DNA, 33 bp, Homo sapien
ttgataggtattcctcgaaggcagaattcctca

SEQ ID NO: 384099 - DNA, 33 bp, Homo sapien
gtagtgaggatgccaccgatttctgaatggttt

SEQ ID NO: 384100 - DNA, 33 bp, Homo sapien
gtagtgaggatgccacggatttctgaatggttt

SEQ ID NO: 384101 - DNA, 33 bp, Homo sapien
aagatggtagacagtacggagctgagaaccaca

SEQ ID NO: 384102 - DNA, 33 bp, Homo sapien
aagatggtagacagtatggagctgagaaccaca

SEQ ID NO: 384103 - DNA, 33 bp, Homo sapien
ctggtctaaaggagccaacacttaatgactccg

SEQ ID NO: 384104 - DNA, 33 bp, Homo sapien
ctggtctaaaggagccgacacttaatgactccg

SEQ ID NO: 384105 - DNA, 33 bp, Homo sapien
gggtgagatgataggcaatgtgcaagcattaag

SEQ ID NO: 384106 - DNA, 33 bp, Homo sapien
gggtgagatgataggctatgtgcaagcattaag

SEQ ID NO: 384107 - DNA, 33 bp, Homo sapien
ctcagcacagttcttacgttggttgaagtgtca

SEQ ID NO: 384108 - DNA, 33 bp, Homo sapien
ctcagcacagttcttatgttggttgaagtgtca

SEQ ID NO: 384109 - DNA, 33 bp, Homo sapien
tcattaattactatcaactttgtgcacacgcat

SEQ ID NO: 384110 - DNA, 33 bp, Homo sapien
tcattaattactatcagctttgtgcacacgcat

SEQ ID NO: 384111 - DNA, 33 bp, Homo sapien
ggtagggaaacatagtgaagaagagatgagaac

SEQ ID NO: 384112 - DNA, 33 bp, Homo sapien
ggtagggaaacatagttaagaagagatgagaac

SEQ ID NO: 384113 - DNA, 33 bp, Homo sapien
caaaaaaccaggccaaagatttcactttgaggg

SEQ ID NO: 384114 - DNA, 33 bp, Homo sapien
caaaaaaccaggccaaggatttcactttgaggg

SEQ ID NO: 384115 - DNA, 33 bp, Homo sapien
gggttagatctcaggacgactcaagtggagaaa

SEQ ID NO: 384116 - DNA, 33 bp, Homo sapien
gggttagatctcaggatgactcaagtggagaaa

SEQ ID NO: 384117 - DNA, 33 bp, Homo sapien
aacaatcaaatttgcacacaaggtaaagtggat

SEQ ID NO: 384118 - DNA, 33 bp, Homo sapien
aacaatcaaatttgcatacaaggtaaagtggat

SEQ ID NO: 384119 - DNA, 33 bp, Homo sapien
ggaatgaaaagcaccaagagagattcgtggcac

SEQ ID NO: 384120 - DNA, 33 bp, Homo sapien
ggaatgaaaagcaccaggagagattcgtggcac

SEQ ID NO: 384121 - DNA, 33 bp, Homo sapien
tttaagtaagcagatacatgtaaacatttccaa

SEQ ID NO: 384122 - DNA, 33 bp, Homo sapien
tttaagtaagcagatagatgtaaacatttccaa

SEQ ID NO: 384123 - DNA, 33 bp, Homo sapien
tgtcaaacttcattgacggaataataatgaatt

SEQ ID NO: 384124 - DNA, 33 bp, Homo sapien
tgtcaaacttcattgatggaataataatgaatt

SEQ ID NO: 384125 - DNA, 33 bp, Homo sapien
atgggaacataacacaagacttcttctgaaatg

SEQ ID NO: 384126 - DNA, 33 bp, Homo sapien
atgggaacataacacacgacttcttctgaaatg

SEQ ID NO: 384127 - DNA, 33 bp, Homo sapien
aaaaagaggatctcacagaaaagaggtcttaaa

SEQ ID NO: 384128 - DNA, 33 bp, Homo sapien
aaaaagaggatctcacggaaaagaggtcttaaa

SEQ ID NO: 384129 - DNA, 33 bp, Homo sapien
ggaaataacataaagaagaggacgtgcaggaag

SEQ ID NO: 384130 - DNA, 33 bp, Homo sapien
ggaaataacataaagatgaggacgtgcaggaag

SEQ ID NO: 384131 - DNA, 33 bp, Homo sapien
ttgatcactgatcccactggaaaagcaatcttg

SEQ ID NO: 384132 - DNA, 33 bp, Homo sapien
ttgatcactgatcccattggaaaagcaatcttg

SEQ ID NO: 384133 - DNA, 33 bp, Homo sapien
tattgttttcctagaaggtatttatgctgtgtg

SEQ ID NO: 384134 - DNA, 33 bp, Homo sapien
tattgttttcctagaatgtatttatgctgtgtg

SEQ ID NO: 384135 - DNA, 33 bp, Homo sapien
gaatcaggaatttggaaggtgaacgtcattttc

SEQ ID NO: 384136 - DNA, 33 bp, Homo sapien
gaatcaggaatttggagggtgaacgtcattttc

SEQ ID NO: 384137 - DNA, 33 bp, Homo sapien
ggttagaagagaatcacctggacatactgagca

SEQ ID NO: 384138 - DNA, 33 bp, Homo sapien
ggttagaagagaatcatctggacatactgagca

SEQ ID NO: 384139 - DNA, 33 bp, Homo sapien
ttaattgattttcagaggtctattaaaaattca

SEQ ID NO: 384140 - DNA, 33 bp, Homo sapien
ttaattgattttcagatgtctattaaaaattca

SEQ ID NO: 384141 - DNA, 33 bp, Homo sapien
caacactgtcatcaggaactctagcccccacga

SEQ ID NO: 384142 - DNA, 33 bp, Homo sapien
caacactgtcatcagggactctagcccccacga

SEQ ID NO: 384143 - DNA, 33 bp, Homo sapien
ctagcccccacgacaccaatgtgtgacagaaaa

SEQ ID NO: 384144 - DNA, 33 bp, Homo sapien
ctagcccccacgacactaatgtgtgacagaaaa

SEQ ID NO: 384145 - DNA, 33 bp, Homo sapien
cgctcttctcttatatcaccccatcaagttggt

SEQ ID NO: 384146 - DNA, 33 bp, Homo sapien
cgctcttctcttatattaccccatcaagttggt

SEQ ID NO: 384147 - DNA, 33 bp, Homo sapien
agcacgtggactacacaagtactatctgtgatt

SEQ ID NO: 384148 - DNA, 33 bp, Homo sapien
agcacgtggactacacgagtactatctgtgatt

SEQ ID NO: 384149 - DNA, 33 bp, Homo sapien
agttagcttggtgtgacggtctgcacctatagt

SEQ ID NO: 384150 - DNA, 33 bp, Homo sapien
agttagcttggtgtgatggtctgcacctatagt

SEQ ID NO: 384151 - DNA, 33 bp, Homo sapien
catgctgcagcctcgcacaatggcaatgacggt

SEQ ID NO: 384152 - DNA, 33 bp, Homo sapien
catgctgcagcctcgcgcaatggcaatgacggt

SEQ ID NO: 384153 - DNA, 33 bp, Homo sapien
attagagaggcattaactgaaacagcctgtgac

SEQ ID NO: 384154 - DNA, 33 bp, Homo sapien
attagagaggcattaattgaaacagcctgtgac

SEQ ID NO: 384155 - DNA, 33 bp, Homo sapien
ataacagccctgatacaaaaacagaatgcagaa

SEQ ID NO: 384156 - DNA, 33 bp, Homo sapien
ataacagccctgatacgaaaacagaatgcagaa

SEQ ID NO: 384157 - DNA, 33 bp, Homo sapien
agatgtacacacaaaacggattttcaggatgaa

SEQ ID NO: 384158 - DNA, 33 bp, Homo sapien
agatgtacacacaaaatggattttcaggatgaa

SEQ ID NO: 384159 - DNA, 33 bp, Homo sapien
tttcatttaacatctacgaaacttgagcaaaag

SEQ ID NO: 384160 - DNA, 33 bp, Homo sapien
tttcatttaacatctatgaaacttgagcaaaag

SEQ ID NO: 384161 - DNA, 33 bp, Homo sapien
ctccctgaggagaatggcaaaatttctttgatg

SEQ ID NO: 384162 - DNA, 33 bp, Homo sapien
ctccctgaggagaatgtcaaaatttctttgatg

SEQ ID NO: 384163 - DNA, 33 bp, Homo sapien
gccaacactcggagaaagaatacattaattatt

SEQ ID NO: 384164 - DNA, 33 bp, Homo sapien
gccaacactcggagaatgaatacattaattatt

SEQ ID NO: 384165 - DNA, 33 bp, Homo sapien
taccagttttggtcaccatgtctggaccttttt

SEQ ID NO: 384166 - DNA, 33 bp, Homo sapien
taccagttttggtcacgatgtctggaccttttt

SEQ ID NO: 384167 - DNA, 33 bp, Homo sapien
acatgggtcctcttaactggcaatcatcacaaa

SEQ ID NO: 384168 - DNA, 33 bp, Homo sapien
acatgggtcctcttaattggcaatcatcacaaa

SEQ ID NO: 384169 - DNA, 33 bp, Homo sapien
gattaaaatatatgctaaacactctcacaagaa

SEQ ID NO: 384170 - DNA, 33 bp, Homo sapien
gattaaaatatatgctgaacactctcacaagaa

SEQ ID NO: 384171 - DNA, 33 bp, Homo sapien
acaaacagtctgttaactgaaacactacattaa

SEQ ID NO: 384172 - DNA, 33 bp, Homo sapien
acaaacagtctgttaattgaaacactacattaa

SEQ ID NO: 384173 - DNA, 33 bp, Homo sapien
tagatacatagattctaaattcaaaggattgtc

SEQ ID NO: 384174 - DNA, 33 bp, Homo sapien
tagatacatagattctgaattcaaaggattgtc

SEQ ID NO: 384175 - DNA, 33 bp, Homo sapien
aaacagctgaaacatcaactcaagctgtcaccc

SEQ ID NO: 384176 - DNA, 33 bp, Homo sapien
aaacagctgaaacatctactcaagctgtcaccc

SEQ ID NO: 384177 - DNA, 33 bp, Homo sapien
ccttgagcatccgttacagagaagtgacagcag

SEQ ID NO: 384178 - DNA, 33 bp, Homo sapien
ccttgagcatccgttatagagaagtgacagcag

SEQ ID NO: 384179 - DNA, 33 bp, Homo sapien
tttcaaaattcttcccaaagctatataaatgtt

SEQ ID NO: 384180 - DNA, 33 bp, Homo sapien
tttcaaaattcttcccgaagctatataaatgtt

SEQ ID NO: 384181 - DNA, 33 bp, Homo sapien
tcatcataaaccaacacgtcagacaaagcatct

SEQ ID NO: 384182 - DNA, 33 bp, Homo sapien
tcatcataaaccaacatgtcagacaaagcatct

SEQ ID NO: 384183 - DNA, 33 bp, Homo sapien
tgctcatggttggacgaatgcaactaaacacaa

SEQ ID NO: 384184 - DNA, 33 bp, Homo sapien
tgctcatggttggacggatgcaactaaacacaa

SEQ ID NO: 384185 - DNA, 33 bp, Homo sapien
tatgacagaagtaaaaagagagcgtggatccta

SEQ ID NO: 384186 - DNA, 33 bp, Homo sapien
tatgacagaagtaaaaggagagcgtggatccta

SEQ ID NO: 384187 - DNA, 33 bp, Homo sapien
gaaataagggagaaacactgtgaccgtgggtca

SEQ ID NO: 384188 - DNA, 33 bp, Homo sapien
gaaataagggagaaacgctgtgaccgtgggtca

SEQ ID NO: 384189 - DNA, 33 bp, Homo sapien
ttcccttgtccaaatcgcaggtttcctgaagaa

SEQ ID NO: 384190 - DNA, 33 bp, Homo sapien
ttcccttgtccaaatctcaggtttcctgaagaa

SEQ ID NO: 384191 - DNA, 33 bp, Homo sapien
accaccctctaagccactgcagatctatgtgtg

SEQ ID NO: 384192 - DNA, 33 bp, Homo sapien
accaccctctaagccagtgcagatctatgtgtg

SEQ ID NO: 384193 - DNA, 33 bp, Homo sapien
atgtctacctagacaggaaatgcacatacctca

SEQ ID NO: 384194 - DNA, 33 bp, Homo sapien
atgtctacctagacagtaaatgcacatacctca

SEQ ID NO: 384195 - DNA, 33 bp, Homo sapien
aattataaaagacgaaatggctcaggagggaag

SEQ ID NO: 384196 - DNA, 33 bp, Homo sapien
aattataaaagacgaactggctcaggagggaag

SEQ ID NO: 384197 - DNA, 33 bp, Homo sapien
aatccttaaggaaaaaagagtcatttgcaaatg

SEQ ID NO: 384198 - DNA, 33 bp, Homo sapien
aatccttaaggaaaaaggagtcatttgcaaatg

SEQ ID NO: 384199 - DNA, 33 bp, Homo sapien
agtctaaactccccttaaaggaaagccaggaaa

SEQ ID NO: 384200 - DNA, 33 bp, Homo sapien
agtctaaactccccttcaaggaaagccaggaaa

SEQ ID NO: 384201 - DNA, 33 bp, Homo sapien
catacattaacctatacacatctctctcattat

SEQ ID NO: 384202 - DNA, 33 bp, Homo sapien
catacattaacctatatacatctctctcattat

SEQ ID NO: 384203 - DNA, 33 bp, Homo sapien
taaatgttcatttttcaataacaggaatgagta

SEQ ID NO: 384204 - DNA, 33 bp, Homo sapien
taaatgttcatttttcgataacaggaatgagta

SEQ ID NO: 384205 - DNA, 33 bp, Homo sapien
aagaccagcagctgtacattaagcactgaaatt

SEQ ID NO: 384206 - DNA, 33 bp, Homo sapien
aagaccagcagctgtatattaagcactgaaatt

SEQ ID NO: 384207 - DNA, 33 bp, Homo sapien
tatatctttttggcaaatgatttggatttaatt

SEQ ID NO: 384208 - DNA, 33 bp, Homo sapien
tatatctttttggcaagtgatttggatttaatt

SEQ ID NO: 384209 - DNA, 33 bp, Homo sapien
tttgatttggcttctaagatgctcagagttatc

SEQ ID NO: 384210 - DNA, 33 bp, Homo sapien
tttgatttggcttctaggatgctcagagttatc

SEQ ID NO: 384211 - DNA, 33 bp, Homo sapien
gcataggccccgtacaaggatgctaagatacga

SEQ ID NO: 384212 - DNA, 33 bp, Homo sapien
gcataggccccgtacatggatgctaagatacga

SEQ ID NO: 384213 - DNA, 33 bp, Homo sapien
gcttctgtgattaccaactaacatggtatggtc

SEQ ID NO: 384214 - DNA, 33 bp, Homo sapien
gcttctgtgattaccagctaacatggtatggtc

SEQ ID NO: 384215 - DNA, 33 bp, Homo sapien
agcacctcctctatgcaaaagatctgaagagct

SEQ ID NO: 384216 - DNA, 33 bp, Homo sapien
agcacctcctctatgcgaaagatctgaagagct

SEQ ID NO: 384217 - DNA, 33 bp, Homo sapien
taacaatgaaattagaaccattgaagaaacaaa

SEQ ID NO: 384218 - DNA, 33 bp, Homo sapien
taacaatgaaattagacccattgaagaaacaaa

SEQ ID NO: 384219 - DNA, 33 bp, Homo sapien
tggctctttggttcagaatcatgacccaaccca

SEQ ID NO: 384220 - DNA, 33 bp, Homo sapien
tggctctttggttcagtatcatgacccaaccca

SEQ ID NO: 384221 - DNA, 33 bp, Homo sapien
tcaaatgttcacccaccgatattagcatccata

SEQ ID NO: 384222 - DNA, 33 bp, Homo sapien
tcaaatgttcacccactgatattagcatccata

SEQ ID NO: 384223 - DNA, 33 bp, Homo sapien
ccaatcagtactcattaaaactgtcaaggtcat

SEQ ID NO: 384224 - DNA, 33 bp, Homo sapien
ccaatcagtactcattgaaactgtcaaggtcat

SEQ ID NO: 384225 - DNA, 33 bp, Homo sapien
aataacaataacgacaagaaaaccaacatcact

SEQ ID NO: 384226 - DNA, 33 bp, Homo sapien
aataacaataacgacaggaaaaccaacatcact

SEQ ID NO: 384227 - DNA, 33 bp, Homo sapien
acataagacactgctaccaatgggctcacgtat

SEQ ID NO: 384228 - DNA, 33 bp, Homo sapien
acataagacactgctatcaatgggctcacgtat

SEQ ID NO: 384229 - DNA, 33 bp, Homo sapien
gcgggagcaggactaacagattaccatgtgaga

SEQ ID NO: 384230 - DNA, 33 bp, Homo sapien
gcgggagcaggactaatagattaccatgtgaga

SEQ ID NO: 384231 - DNA, 33 bp, Homo sapien
aaaggaagcatttttaaaaggcaatgaacgatt

SEQ ID NO: 384232 - DNA, 33 bp, Homo sapien
aaaggaagcatttttagaaggcaatgaacgatt

SEQ ID NO: 384233 - DNA, 33 bp, Homo sapien
cagtaattaagttttacgctcctcctgctaaga

SEQ ID NO: 384234 - DNA, 33 bp, Homo sapien
cagtaattaagttttaggctcctcctgctaaga

SEQ ID NO: 384235 - DNA, 33 bp, Homo sapien
acaagcctcttagaaaccacatggaaaactaca

SEQ ID NO: 384236 - DNA, 33 bp, Homo sapien
acaagcctcttagaaatcacatggaaaactaca

SEQ ID NO: 384237 - DNA, 33 bp, Homo sapien
cacagggagatttgaacccagtgtacactgcct

SEQ ID NO: 384238 - DNA, 33 bp, Homo sapien
cacagggagatttgaatccagtgtacactgcct

SEQ ID NO: 384239 - DNA, 33 bp, Homo sapien
tagaaagtgaaagttcaaagtgaccaagattct

SEQ ID NO: 384240 - DNA, 33 bp, Homo sapien
tagaaagtgaaagttcgaagtgaccaagattct

SEQ ID NO: 384241 - DNA, 33 bp, Homo sapien
aagtttgcaaaagtaacatatgtgaagcagtga

SEQ ID NO: 384242 - DNA, 33 bp, Homo sapien
aagtttgcaaaagtaagatatgtgaagcagtga

SEQ ID NO: 384243 - DNA, 33 bp, Homo sapien
aaagccaaattcagtgaaaccagattccaaaat

SEQ ID NO: 384244 - DNA, 33 bp, Homo sapien
aaagccaaattcagtgtaaccagattccaaaat

SEQ ID NO: 384245 - DNA, 33 bp, Homo sapien
actgcttagggcctggaataagagaacaaaatg

SEQ ID NO: 384246 - DNA, 33 bp, Homo sapien
actgcttagggcctgggataagagaacaaaatg

SEQ ID NO: 384247 - DNA, 33 bp, Homo sapien
taatggtagaagaaaaatcaaaacttgtcatct

SEQ ID NO: 384248 - DNA, 33 bp, Homo sapien
taatggtagaagaaaattcaaaacttgtcatct

SEQ ID NO: 384249 - DNA, 33 bp, Homo sapien
tacagttccaccttaaataagcaggagctgttt

SEQ ID NO: 384250 - DNA, 33 bp, Homo sapien
tacagttccaccttaactaagcaggagctgttt

SEQ ID NO: 384251 - DNA, 33 bp, Homo sapien
atctgtcagagcctagccaggaaagcagaaact

SEQ ID NO: 384252 - DNA, 33 bp, Homo sapien
atctgtcagagcctagtcaggaaagcagaaact

SEQ ID NO: 384253 - DNA, 33 bp, Homo sapien
tcttctctacccccaaagacctctttcatgtcc

SEQ ID NO: 384254 - DNA, 33 bp, Homo sapien
tcttctctacccccaatgacctctttcatgtcc

SEQ ID NO: 384255 - DNA, 33 bp, Homo sapien
gtagctcctagaattaacattcctctacacact

SEQ ID NO: 384256 - DNA, 33 bp, Homo sapien
gtagctcctagaattagcattcctctacacact

SEQ ID NO: 384257 - DNA, 33 bp, Homo sapien
ttttttgtagggcattcaaagcatggtaaaatg

SEQ ID NO: 384258 - DNA, 33 bp, Homo sapien
ttttttgtagggcatttaaagcatggtaaaatg

SEQ ID NO: 384259 - DNA, 33 bp, Homo sapien
acttaaaaaatgtggaaagtctattcatataga

SEQ ID NO: 384260 - DNA, 33 bp, Homo sapien
acttaaaaaatgtggagagtctattcatataga

SEQ ID NO: 384261 - DNA, 33 bp, Homo sapien
ccagttttggaggctacgcaactggtcgtggta

SEQ ID NO: 384262 - DNA, 33 bp, Homo sapien
ccagttttggaggctatgcaactggtcgtggta

SEQ ID NO: 384263 - DNA, 33 bp, Homo sapien
catacaaaagaaaaacaggtctctgcttctgtt

SEQ ID NO: 384264 - DNA, 33 bp, Homo sapien
catacaaaagaaaaacgggtctctgcttctgtt

SEQ ID NO: 384265 - DNA, 33 bp, Homo sapien
accaagggctcttcaacgagacagtgatataat

SEQ ID NO: 384266 - DNA, 33 bp, Homo sapien
accaagggctcttcaatgagacagtgatataat

SEQ ID NO: 384267 - DNA, 33 bp, Homo sapien
ttttttcttcctgggacgatacaaaaagatcca

SEQ ID NO: 384268 - DNA, 33 bp, Homo sapien
ttttttcttcctgggatgatacaaaaagatcca

SEQ ID NO: 384269 - DNA, 33 bp, Homo sapien
tcaaaaataacacaatcaggcactggttgaaaa

SEQ ID NO: 384270 - DNA, 33 bp, Homo sapien
tcaaaaataacacaatgaggcactggttgaaaa

SEQ ID NO: 384271 - DNA, 33 bp, Homo sapien
tatgatgccttgatggaaatttagaaaagaaaa

SEQ ID NO: 384272 - DNA, 33 bp, Homo sapien
tatgatgccttgatgggaatttagaaaagaaaa

SEQ ID NO: 384273 - DNA, 33 bp, Homo sapien
ttctcagaaaaatgcccaggccagtagacctct

SEQ ID NO: 384274 - DNA, 33 bp, Homo sapien
ttctcagaaaaatgccgaggccagtagacctct

SEQ ID NO: 384275 - DNA, 33 bp, Homo sapien
gggagttactctcctacgtataaatggcaccat

SEQ ID NO: 384276 - DNA, 33 bp, Homo sapien
gggagttactctcctatgtataaatggcaccat

SEQ ID NO: 384277 - DNA, 33 bp, Homo sapien
aacatcttaattttcaaagacttaatgtatgag

SEQ ID NO: 384278 - DNA, 33 bp, Homo sapien
aacatcttaattttcacagacttaatgtatgag

SEQ ID NO: 384279 - DNA, 33 bp, Homo sapien
taatccctgaaatctacgaatgtgttacgttac

SEQ ID NO: 384280 - DNA, 33 bp, Homo sapien
taatccctgaaatctatgaatgtgttacgttac

SEQ ID NO: 384281 - DNA, 33 bp, Homo sapien
tacaatctgtatctgacgcatatttcaacttgt

SEQ ID NO: 384282 - DNA, 33 bp, Homo sapien
tacaatctgtatctgatgcatatttcaacttgt

SEQ ID NO: 384283 - DNA, 33 bp, Homo sapien
gatccatccatccgtccaacacataatggtatt

SEQ ID NO: 384284 - DNA, 33 bp, Homo sapien
gatccatccatccgtctaacacataatggtatt

SEQ ID NO: 384285 - DNA, 33 bp, Homo sapien
ttgagcatttgagatgcagctagtgaaacccag

SEQ ID NO: 384286 - DNA, 33 bp, Homo sapien
ttgagcatttgagatgtagctagtgaaacccag

SEQ ID NO: 384287 - DNA, 33 bp, Homo sapien
ctgttctccatctccactgatacaaacagtttg

SEQ ID NO: 384288 - DNA, 33 bp, Homo sapien
ctgttctccatctccagtgatacaaacagtttg

SEQ ID NO: 384289 - DNA, 33 bp, Homo sapien
tacaataggatggcctcactaagaataaaagca

SEQ ID NO: 384290 - DNA, 33 bp, Homo sapien
tacaataggatggccttactaagaataaaagca

SEQ ID NO: 384291 - DNA, 33 bp, Homo sapien
tacctttgatgaaacaataatcccaagcctttc

SEQ ID NO: 384292 - DNA, 33 bp, Homo sapien
tacctttgatgaaacagtaatcccaagcctttc

SEQ ID NO: 384293 - DNA, 33 bp, Homo sapien
aaagcaccattcctgaacaaagagagtctttct

SEQ ID NO: 384294 - DNA, 33 bp, Homo sapien
aaagcaccattcctgaccaaagagagtctttct

SEQ ID NO: 384295 - DNA, 33 bp, Homo sapien
ggaatggtgctttagacgctcagctggctctgt

SEQ ID NO: 384296 - DNA, 33 bp, Homo sapien
ggaatggtgctttagatgctcagctggctctgt

SEQ ID NO: 384297 - DNA, 33 bp, Homo sapien
gtaggtcactacctaacgtatcagcacttggat

SEQ ID NO: 384298 - DNA, 33 bp, Homo sapien
gtaggtcactacctaatgtatcagcacttggat

SEQ ID NO: 384299 - DNA, 33 bp, Homo sapien
gaagaaaagagaaaaacgaactcagaggaaaca

SEQ ID NO: 384300 - DNA, 33 bp, Homo sapien
gaagaaaagagaaaaatgaactcagaggaaaca

SEQ ID NO: 384301 - DNA, 33 bp, Homo sapien
ttgaaagaaatcacacaaatcataaatcacctc

SEQ ID NO: 384302 - DNA, 33 bp, Homo sapien
ttgaaagaaatcacacgaatcataaatcacctc

SEQ ID NO: 384303 - DNA, 33 bp, Homo sapien
tccattgtacagagggacagaaggaagaaatag

SEQ ID NO: 384304 - DNA, 33 bp, Homo sapien
tccattgtacagagggtcagaaggaagaaatag

SEQ ID NO: 384305 - DNA, 33 bp, Homo sapien
gaaataagaatccaagacatccttaggtatcac

SEQ ID NO: 384306 - DNA, 33 bp, Homo sapien
gaaataagaatccaagccatccttaggtatcac

SEQ ID NO: 384307 - DNA, 33 bp, Homo sapien
aaagaatcaggttacacatttgcagcagtttcc

SEQ ID NO: 384308 - DNA, 33 bp, Homo sapien
aaagaatcaggttacatatttgcagcagtttcc

SEQ ID NO: 384309 - DNA, 33 bp, Homo sapien
aattatatattatttcacttgctacaattaaga

SEQ ID NO: 384310 - DNA, 33 bp, Homo sapien
aattatatattatttcgcttgctacaattaaga

SEQ ID NO: 384311 - DNA, 33 bp, Homo sapien
ctgaggagttagacaccgcaatgtgtggagtgc

SEQ ID NO: 384312 - DNA, 33 bp, Homo sapien
ctgaggagttagacactgcaatgtgtggagtgc

SEQ ID NO: 384313 - DNA, 33 bp, Homo sapien
aaagatgataatagccaactatgtacttgaagt

SEQ ID NO: 384314 - DNA, 33 bp, Homo sapien
aaagatgataatagccgactatgtacttgaagt

SEQ ID NO: 384315 - DNA, 33 bp, Homo sapien
aattgacttgaacttcacaatctctctgtcaga

SEQ ID NO: 384316 - DNA, 33 bp, Homo sapien
aattgacttgaacttcccaatctctctgtcaga

SEQ ID NO: 384317 - DNA, 33 bp, Homo sapien
taactacattgcctcaaagtatttgcttttgcg

SEQ ID NO: 384318 - DNA, 33 bp, Homo sapien
taactacattgcctcagagtatttgcttttgcg

SEQ ID NO: 384319 - DNA, 33 bp, Homo sapien
tatctcccaatggcaacgatagctgaggccaga

SEQ ID NO: 384320 - DNA, 33 bp, Homo sapien
tatctcccaatggcaatgatagctgaggccaga

SEQ ID NO: 384321 - DNA, 33 bp, Homo sapien
tgcatttcacactacaacatctttgacttccca

SEQ ID NO: 384322 - DNA, 33 bp, Homo sapien
tgcatttcacactacagcatctttgacttccca

SEQ ID NO: 384323 - DNA, 33 bp, Homo sapien
tgcctttggaatgggccgccaagcatcagaaat

SEQ ID NO: 384324 - DNA, 33 bp, Homo sapien
tgcctttggaatgggctgccaagcatcagaaat

SEQ ID NO: 384325 - DNA, 33 bp, Homo sapien
tacatttgcctttgagcacagttgaggcactgc

SEQ ID NO: 384326 - DNA, 33 bp, Homo sapien
tacatttgcctttgagtacagttgaggcactgc

SEQ ID NO: 384327 - DNA, 33 bp, Homo sapien
aagtgctgggattataagctaaataaatttttg

SEQ ID NO: 384328 - DNA, 33 bp, Homo sapien
aagtgctgggattataggctaaataaatttttg

SEQ ID NO: 384329 - DNA, 33 bp, Homo sapien
tatttagaataagttaccaattccttgcaagat

SEQ ID NO: 384330 - DNA, 33 bp, Homo sapien
tatttagaataagttatcaattccttgcaagat

SEQ ID NO: 384331 - DNA, 33 bp, Homo sapien
ctccaaagtaaacgacaagggtggtatgtttga

SEQ ID NO: 384332 - DNA, 33 bp, Homo sapien
ctccaaagtaaacgacgagggtggtatgtttga

SEQ ID NO: 384333 - DNA, 33 bp, Homo sapien
tttcactgttggtgacagaacttagtacatcgc

SEQ ID NO: 384334 - DNA, 33 bp, Homo sapien
tttcactgttggtgacggaacttagtacatcgc

SEQ ID NO: 384335 - DNA, 33 bp, Homo sapien
tttccatactttgcaccgatgagttcagtttac

SEQ ID NO: 384336 - DNA, 33 bp, Homo sapien
tttccatactttgcactgatgagttcagtttac

SEQ ID NO: 384337 - DNA, 33 bp, Homo sapien
cccagcacataagagaatcaagagcccacatgt

SEQ ID NO: 384338 - DNA, 33 bp, Homo sapien
cccagcacataagagactcaagagcccacatgt

SEQ ID NO: 384339 - DNA, 33 bp, Homo sapien
gccttcctgaattatcagagaggaagtcaactt

SEQ ID NO: 384340 - DNA, 33 bp, Homo sapien
gccttcctgaattatcggagaggaagtcaactt

SEQ ID NO: 384341 - DNA, 33 bp, Homo sapien
gaggaagaagataaacaacgtgcaattgcataa

SEQ ID NO: 384342 - DNA, 33 bp, Homo sapien
gaggaagaagataaacgacgtgcaattgcataa

SEQ ID NO: 384343 - DNA, 33 bp, Homo sapien
atgaagagcttccccaatgaacacatggcgtgc

SEQ ID NO: 384344 - DNA, 33 bp, Homo sapien
atgaagagcttccccagtgaacacatggcgtgc

SEQ ID NO: 384345 - DNA, 33 bp, Homo sapien
ctttgttacacatgccaaaatgaactctgggct

SEQ ID NO: 384346 - DNA, 33 bp, Homo sapien
ctttgttacacatgccgaaatgaactctgggct

SEQ ID NO: 384347 - DNA, 33 bp, Homo sapien
atcatttttaagtgtaggtgtacccagtatcaa

SEQ ID NO: 384348 - DNA, 33 bp, Homo sapien
atcatttttaagtgtatgtgtacccagtatcaa

SEQ ID NO: 384349 - DNA, 33 bp, Homo sapien
atataccctgagattcaatatcaattttctagt

SEQ ID NO: 384350 - DNA, 33 bp, Homo sapien
atataccctgagattcgatatcaattttctagt

SEQ ID NO: 384351 - DNA, 33 bp, Homo sapien
agatgtgtgtaaaataagcaatccggttcatca

SEQ ID NO: 384352 - DNA, 33 bp, Homo sapien
agatgtgtgtaaaataggcaatccggttcatca

SEQ ID NO: 384353 - DNA, 33 bp, Homo sapien
caaccctttgatgatacaggcgagaagagtatg

SEQ ID NO: 384354 - DNA, 33 bp, Homo sapien
caaccctttgatgatataggcgagaagagtatg

SEQ ID NO: 384355 - DNA, 33 bp, Homo sapien
aaagtgcagtaaactcacaactaactccctgaa

SEQ ID NO: 384356 - DNA, 33 bp, Homo sapien
aaagtgcagtaaactcgcaactaactccctgaa

SEQ ID NO: 384357 - DNA, 33 bp, Homo sapien
acagaatccagagtgtcaacatggaagctacaa

SEQ ID NO: 384358 - DNA, 33 bp, Homo sapien
acagaatccagagtgtgaacatggaagctacaa

SEQ ID NO: 384359 - DNA, 33 bp, Homo sapien
attcaagagctgatgacgttcttattgctaaag

SEQ ID NO: 384360 - DNA, 33 bp, Homo sapien
attcaagagctgatgaggttcttattgctaaag

SEQ ID NO: 384361 - DNA, 33 bp, Homo sapien
ttcggtgatttatagacgaaaggttcttggagg

SEQ ID NO: 384362 - DNA, 33 bp, Homo sapien
ttcggtgatttatagaggaaaggttcttggagg

SEQ ID NO: 384363 - DNA, 33 bp, Homo sapien
caatcaactacccacggacaaaagtagaaaatt

SEQ ID NO: 384364 - DNA, 33 bp, Homo sapien
caatcaactacccacgtacaaaagtagaaaatt

SEQ ID NO: 384365 - DNA, 33 bp, Homo sapien
cttctagtctgagggcccaaaggaaattaagtg

SEQ ID NO: 384366 - DNA, 33 bp, Homo sapien
cttctagtctgagggctcaaaggaaattaagtg

SEQ ID NO: 384367 - DNA, 33 bp, Homo sapien
tggactaccagaaggaaagttgtgagagaggag

SEQ ID NO: 384368 - DNA, 33 bp, Homo sapien
tggactaccagaaggagagttgtgagagaggag

SEQ ID NO: 384369 - DNA, 33 bp, Homo sapien
ctcttctagctttctgaaaatatatgttaaatt

SEQ ID NO: 384370 - DNA, 33 bp, Homo sapien
ctcttctagctttctggaaatatatgttaaatt

SEQ ID NO: 384371 - DNA, 33 bp, Homo sapien
gaagtaatctgtataaaacagtgctaaataaag

SEQ ID NO: 384372 - DNA, 33 bp, Homo sapien
gaagtaatctgtataagacagtgctaaataaag

SEQ ID NO: 384373 - DNA, 33 bp, Homo sapien
attccactcatgtgaaagcaaaatatttagatg

SEQ ID NO: 384374 - DNA, 33 bp, Homo sapien
attccactcatgtgaaggcaaaatatttagatg

SEQ ID NO: 384375 - DNA, 33 bp, Homo sapien
tcttttggatacagaggaactttctgaacagtg

SEQ ID NO: 384376 - DNA, 33 bp, Homo sapien
tcttttggatacagagtaactttctgaacagtg

SEQ ID NO: 384377 - DNA, 33 bp, Homo sapien
agcacatgactgtaaacagcaataataatgcca

SEQ ID NO: 384378 - DNA, 33 bp, Homo sapien
agcacatgactgtaaatagcaataataatgcca

SEQ ID NO: 384379 - DNA, 33 bp, Homo sapien
taaaagtaaggcgggacggtgattttaataaga

SEQ ID NO: 384380 - DNA, 33 bp, Homo sapien
taaaagtaaggcgggatggtgattttaataaga

SEQ ID NO: 384381 - DNA, 33 bp, Homo sapien
aagttgatagaaattcaatttggggaagctagg

SEQ ID NO: 384382 - DNA, 33 bp, Homo sapien
aagttgatagaaattcgatttggggaagctagg

SEQ ID NO: 384383 - DNA, 33 bp, Homo sapien
aggcgattgctaagaccacctccctgcattagc

SEQ ID NO: 384384 - DNA, 33 bp, Homo sapien
aggcgattgctaagactacctccctgcattagc

SEQ ID NO: 384385 - DNA, 33 bp, Homo sapien
ttggcttaagatcctacaatacagacacttttc

SEQ ID NO: 384386 - DNA, 33 bp, Homo sapien
ttggcttaagatcctataatacagacacttttc

SEQ ID NO: 384387 - DNA, 33 bp, Homo sapien
tgaatcttgccaagcaaaggactgactgggtaa

SEQ ID NO: 384388 - DNA, 33 bp, Homo sapien
tgaatcttgccaagcagaggactgactgggtaa

SEQ ID NO: 384389 - DNA, 33 bp, Homo sapien
tatattgacattaagccgcactggggaaagtgg

SEQ ID NO: 384390 - DNA, 33 bp, Homo sapien
tatattgacattaagctgcactggggaaagtgg

SEQ ID NO: 384391 - DNA, 33 bp, Homo sapien
aggcatgctgtcacgactccttataagagcact

SEQ ID NO: 384392 - DNA, 33 bp, Homo sapien
aggcatgctgtcacgattccttataagagcact

SEQ ID NO: 384393 - DNA, 33 bp, Homo sapien
tcttatctctgctcctcaaagcccattgaaatg

SEQ ID NO: 384394 - DNA, 33 bp, Homo sapien
tcttatctctgctcctgaaagcccattgaaatg

SEQ ID NO: 384395 - DNA, 33 bp, Homo sapien
tccatgcagatagaaaataggtgattgtcaggt

SEQ ID NO: 384396 - DNA, 33 bp, Homo sapien
tccatgcagatagaaagtaggtgattgtcaggt

SEQ ID NO: 384397 - DNA, 33 bp, Homo sapien
gtaatggttgaatgtacctgtgaacaaatttta

SEQ ID NO: 384398 - DNA, 33 bp, Homo sapien
gtaatggttgaatgtatctgtgaacaaatttta

SEQ ID NO: 384399 - DNA, 33 bp, Homo sapien
cacttttcctataacaccttgtctccagatccc

SEQ ID NO: 384400 - DNA, 33 bp, Homo sapien
cacttttcctataacagcttgtctccagatccc

SEQ ID NO: 384401 - DNA, 33 bp, Homo sapien
ccttctttttaatgcaacttgactggccttttt

SEQ ID NO: 384402 - DNA, 33 bp, Homo sapien
ccttctttttaatgcaccttgactggccttttt

SEQ ID NO: 384403 - DNA, 33 bp, Homo sapien
gctaccccttaaggcacgatagcatggaccacc

SEQ ID NO: 384404 - DNA, 33 bp, Homo sapien
gctaccccttaaggcatgatagcatggaccacc

SEQ ID NO: 384405 - DNA, 33 bp, Homo sapien
cccctcggcctcttctcactgtgctcctaatga

SEQ ID NO: 384406 - DNA, 33 bp, Homo sapien
cccctcggcctcttctgactgtgctcctaatga

SEQ ID NO: 384407 - DNA, 33 bp, Homo sapien
cttggtctgctactccaaatattgtcattcagt

SEQ ID NO: 384408 - DNA, 33 bp, Homo sapien
cttggtctgctactcctaatattgtcattcagt

SEQ ID NO: 384409 - DNA, 33 bp, Homo sapien
gacagaccaaatagctaaagtccttgttcaatc

SEQ ID NO: 384410 - DNA, 33 bp, Homo sapien
gacagaccaaatagctgaagtccttgttcaatc

SEQ ID NO: 384411 - DNA, 33 bp, Homo sapien
agtacacaaaagaaagcccacaattttcaacag

SEQ ID NO: 384412 - DNA, 33 bp, Homo sapien
agtacacaaaagaaagtccacaattttcaacag

SEQ ID NO: 384413 - DNA, 33 bp, Homo sapien
ctgtatttttatcagcacctgggttattctgag

SEQ ID NO: 384414 - DNA, 33 bp, Homo sapien
ctgtatttttatcagcccctgggttattctgag

SEQ ID NO: 384415 - DNA, 33 bp, Homo sapien
aatagataaacaggtagcagaagtttctttact

SEQ ID NO: 384416 - DNA, 33 bp, Homo sapien
aatagataaacaggtatcagaagtttctttact

SEQ ID NO: 384417 - DNA, 33 bp, Homo sapien
tcatggcatttattacgacagttgaataaccac

SEQ ID NO: 384418 - DNA, 33 bp, Homo sapien
tcatggcatttattactacagttgaataaccac

SEQ ID NO: 384419 - DNA, 33 bp, Homo sapien
acatggtaatagtgccaactcaaatgcttcccg

SEQ ID NO: 384420 - DNA, 33 bp, Homo sapien
acatggtaatagtgccgactcaaatgcttcccg

SEQ ID NO: 384421 - DNA, 33 bp, Homo sapien
attccaaataggaaaagaactcacgtggggctc

SEQ ID NO: 384422 - DNA, 33 bp, Homo sapien
attccaaataggaaaataactcacgtggggctc

SEQ ID NO: 384423 - DNA, 33 bp, Homo sapien
tagactgtatgaattcaaaacaggcctaaggta

SEQ ID NO: 384424 - DNA, 33 bp, Homo sapien
tagactgtatgaattcgaaacaggcctaaggta

SEQ ID NO: 384425 - DNA, 33 bp, Homo sapien
tgacctgggtttgtgacagttttgtgggaaaca

SEQ ID NO: 384426 - DNA, 33 bp, Homo sapien
tgacctgggtttgtgagagttttgtgggaaaca

SEQ ID NO: 384427 - DNA, 33 bp, Homo sapien
attttcttggttgtgacaatgataatgtggtca

SEQ ID NO: 384428 - DNA, 33 bp, Homo sapien
attttcttggttgtgagaatgataatgtggtca

SEQ ID NO: 384429 - DNA, 33 bp, Homo sapien
aggcagtcttgagtccaccagtcctaatggagc

SEQ ID NO: 384430 - DNA, 33 bp, Homo sapien
aggcagtcttgagtccgccagtcctaatggagc

SEQ ID NO: 384431 - DNA, 33 bp, Homo sapien
atcataagaactaccacaaaaccatcccttgac

SEQ ID NO: 384432 - DNA, 33 bp, Homo sapien
atcataagaactaccagaaaaccatcccttgac

SEQ ID NO: 384433 - DNA, 33 bp, Homo sapien
aaagttctgtgaatatcaggggatccaaacatg

SEQ ID NO: 384434 - DNA, 33 bp, Homo sapien
aaagttctgtgaatatgaggggatccaaacatg

SEQ ID NO: 384435 - DNA, 33 bp, Homo sapien
gaaaattcacatgctacatgtttactgccatat

SEQ ID NO: 384436 - DNA, 33 bp, Homo sapien
gaaaattcacatgctatatgtttactgccatat

SEQ ID NO: 384437 - DNA, 33 bp, Homo sapien
gcaatctgtgtactcaaaattcaccaatttcaa

SEQ ID NO: 384438 - DNA, 33 bp, Homo sapien
gcaatctgtgtactcagaattcaccaatttcaa

SEQ ID NO: 384439 - DNA, 33 bp, Homo sapien
gtgtctcagaataagacgttttggaattttagg

SEQ ID NO: 384440 - DNA, 33 bp, Homo sapien
gtgtctcagaataagatgttttggaattttagg

SEQ ID NO: 384441 - DNA, 33 bp, Homo sapien
tgccagccacctgtatcaatactctatctagca

SEQ ID NO: 384442 - DNA, 33 bp, Homo sapien
tgccagccacctgtatgaatactctatctagca

SEQ ID NO: 384443 - DNA, 33 bp, Homo sapien
tttctaattagccataaagatatactaaagcct

SEQ ID NO: 384444 - DNA, 33 bp, Homo sapien
tttctaattagccatagagatatactaaagcct

SEQ ID NO: 384445 - DNA, 33 bp, Homo sapien
gagttcccagtcttaccaaacttgagccactga

SEQ ID NO: 384446 - DNA, 33 bp, Homo sapien
gagttcccagtcttactaaacttgagccactga

SEQ ID NO: 384447 - DNA, 33 bp, Homo sapien
taaatgtttcatgttacgttataaagtatccac

SEQ ID NO: 384448 - DNA, 33 bp, Homo sapien
taaatgtttcatgttatgttataaagtatccac

SEQ ID NO: 384449 - DNA, 33 bp, Homo sapien
aaaaacagatgttgaaagcatattggcttgatg

SEQ ID NO: 384450 - DNA, 33 bp, Homo sapien
aaaaacagatgttgaaggcatattggcttgatg

SEQ ID NO: 384451 - DNA, 33 bp, Homo sapien
tcattaagacaccaacaaggagcagagttaatt

SEQ ID NO: 384452 - DNA, 33 bp, Homo sapien
tcattaagacaccaacgaggagcagagttaatt

SEQ ID NO: 384453 - DNA, 33 bp, Homo sapien
tttgttccttatctcaatagtcctctgctgtgc

SEQ ID NO: 384454 - DNA, 33 bp, Homo sapien
tttgttccttatctcagtagtcctctgctgtgc

SEQ ID NO: 384455 - DNA, 33 bp, Homo sapien
ttcaactgttttcaaaccttgttcttgttttga

SEQ ID NO: 384456 - DNA, 33 bp, Homo sapien
ttcaactgttttcaaagcttgttcttgttttga

SEQ ID NO: 384457 - DNA, 33 bp, Homo sapien
gcaggcagggagaggccgccaggtggttttaga

SEQ ID NO: 384458 - DNA, 33 bp, Homo sapien
gcaggcagggagaggctgccaggtggttttaga

SEQ ID NO: 384459 - DNA, 33 bp, Homo sapien
atatctcaaaaagccaatcgaccacagtgatgt

SEQ ID NO: 384460 - DNA, 33 bp, Homo sapien
atatctcaaaaagccagtcgaccacagtgatgt

SEQ ID NO: 384461 - DNA, 33 bp, Homo sapien
cactgttaaaggttctcaccatcctggcatcca

SEQ ID NO: 384462 - DNA, 33 bp, Homo sapien
cactgttaaaggttctgaccatcctggcatcca

SEQ ID NO: 384463 - DNA, 33 bp, Homo sapien
attcctctttcttccagaccctggctggtcacg

SEQ ID NO: 384464 - DNA, 33 bp, Homo sapien
attcctctttcttccataccctggctggtcacg

SEQ ID NO: 384465 - DNA, 33 bp, Homo sapien
ctaatctaaatgttgccaagtagcatgagaaga

SEQ ID NO: 384466 - DNA, 33 bp, Homo sapien
ctaatctaaatgttgctaagtagcatgagaaga

SEQ ID NO: 384467 - DNA, 33 bp, Homo sapien
aggcgatctgatactccacatcgagaagctcca

SEQ ID NO: 384468 - DNA, 33 bp, Homo sapien
aggcgatctgatactctacatcgagaagctcca

SEQ ID NO: 384469 - DNA, 33 bp, Homo sapien
tagtatgaaaggtcaactcgaggatctgctatg

SEQ ID NO: 384470 - DNA, 33 bp, Homo sapien
tagtatgaaaggtcaagtcgaggatctgctatg

SEQ ID NO: 384471 - DNA, 33 bp, Homo sapien
gtgggaagtcctggacagcactgaagcgaagcg

SEQ ID NO: 384472 - DNA, 33 bp, Homo sapien
gtgggaagtcctggacggcactgaagcgaagcg

SEQ ID NO: 384473 - DNA, 33 bp, Homo sapien
ataacattttagaaacagcttgccatttttcca

SEQ ID NO: 384474 - DNA, 33 bp, Homo sapien
ataacattttagaaacggcttgccatttttcca

SEQ ID NO: 384475 - DNA, 33 bp, Homo sapien
cattagcaaaccagaccgaatctttagggtgaa

SEQ ID NO: 384476 - DNA, 33 bp, Homo sapien
cattagcaaaccagactgaatctttagggtgaa

SEQ ID NO: 384477 - DNA, 33 bp, Homo sapien
tatgtgcattttggtacatttacttgtatttca

SEQ ID NO: 384478 - DNA, 33 bp, Homo sapien
tatgtgcattttggtatatttacttgtatttca

SEQ ID NO: 384479 - DNA, 33 bp, Homo sapien
tgaaggatgcactaacacagaactgcagctggg

SEQ ID NO: 384480 - DNA, 33 bp, Homo sapien
tgaaggatgcactaactcagaactgcagctggg

SEQ ID NO: 384481 - DNA, 33 bp, Homo sapien
tgttagatgtccacaaagtattataaatcacgt

SEQ ID NO: 384482 - DNA, 33 bp, Homo sapien
tgttagatgtccacaaggtattataaatcacgt

SEQ ID NO: 384483 - DNA, 33 bp, Homo sapien
gtttatcagacactgtaacacttgaagacttgc

SEQ ID NO: 384484 - DNA, 33 bp, Homo sapien
gtttatcagacactgtgacacttgaagacttgc

SEQ ID NO: 384485 - DNA, 33 bp, Homo sapien
ccacacatacattaaactcaaggttcggcaggg

SEQ ID NO: 384486 - DNA, 33 bp, Homo sapien
ccacacatacattaaagtcaaggttcggcaggg

SEQ ID NO: 384487 - DNA, 33 bp, Homo sapien
aatgtagtacaaagaaatgaaaagtaccaaaga

SEQ ID NO: 384488 - DNA, 33 bp, Homo sapien
aatgtagtacaaagaactgaaaagtaccaaaga

SEQ ID NO: 384489 - DNA, 33 bp, Homo sapien
cccagaactgaaggaacacatagattgtgagat

SEQ ID NO: 384490 - DNA, 33 bp, Homo sapien
cccagaactgaaggaagacatagattgtgagat

SEQ ID NO: 384491 - DNA, 33 bp, Homo sapien
gtgaccctggcttctacatagcaaagtcgcctt

SEQ ID NO: 384492 - DNA, 33 bp, Homo sapien
gtgaccctggcttctagatagcaaagtcgcctt

SEQ ID NO: 384493 - DNA, 33 bp, Homo sapien
ctggggctatctacttcaaatactagaatcgtt

SEQ ID NO: 384494 - DNA, 33 bp, Homo sapien
ctggggctatctacttgaaatactagaatcgtt

SEQ ID NO: 384495 - DNA, 33 bp, Homo sapien
taataatgcctttaaacagagaaacccgtgcaa

SEQ ID NO: 384496 - DNA, 33 bp, Homo sapien
taataatgcctttaaagagagaaacccgtgcaa

SEQ ID NO: 384497 - DNA, 33 bp, Homo sapien
caacattcttttatgacagtatcctgataaaag

SEQ ID NO: 384498 - DNA, 33 bp, Homo sapien
caacattcttttatgagagtatcctgataaaag

SEQ ID NO: 384499 - DNA, 33 bp, Homo sapien
ttaaaacagacttggcaacagattgataaagtt

SEQ ID NO: 384500 - DNA, 33 bp, Homo sapien
ttaaaacagacttggccacagattgataaagtt

SEQ ID NO: 384501 - DNA, 33 bp, Homo sapien
aaggtgagtaactaaacctaagacataatttta

SEQ ID NO: 384502 - DNA, 33 bp, Homo sapien
aaggtgagtaactaaagctaagacataatttta

SEQ ID NO: 384503 - DNA, 33 bp, Homo sapien
aatgtgttttgcaaaaaaatacctacatatcaa

SEQ ID NO: 384504 - DNA, 33 bp, Homo sapien
aatgtgttttgcaaaagaatacctacatatcaa

SEQ ID NO: 384505 - DNA, 33 bp, Homo sapien
atgttctacatcatccaaagtctctgctctatc

SEQ ID NO: 384506 - DNA, 33 bp, Homo sapien
atgttctacatcatcccaagtctctgctctatc

SEQ ID NO: 384507 - DNA, 33 bp, Homo sapien
aatatctgcttggcaacgcgtttcacagatagg

SEQ ID NO: 384508 - DNA, 33 bp, Homo sapien
aatatctgcttggcaatgcgtttcacagatagg

SEQ ID NO: 384509 - DNA, 33 bp, Homo sapien
tctatagctcgtttaaactacttcctcttttat

SEQ ID NO: 384510 - DNA, 33 bp, Homo sapien
tctatagctcgtttaatctacttcctcttttat

SEQ ID NO: 384511 - DNA, 33 bp, Homo sapien
cagaatatgtaaagaaatcacacagagcaacaa

SEQ ID NO: 384512 - DNA, 33 bp, Homo sapien
cagaatatgtaaagaagtcacacagagcaacaa

SEQ ID NO: 384513 - DNA, 33 bp, Homo sapien
ttaaccagctatcatggcacatacctttagtct

SEQ ID NO: 384514 - DNA, 33 bp, Homo sapien
ttaaccagctatcatgtcacatacctttagtct

SEQ ID NO: 384515 - DNA, 33 bp, Homo sapien
atgtaatgaaagtggcactaatgtttataaact

SEQ ID NO: 384516 - DNA, 33 bp, Homo sapien
atgtaatgaaagtggcgctaatgtttataaact

SEQ ID NO: 384517 - DNA, 33 bp, Homo sapien
agatgcgtagctcaaacaaagagaccagggcta

SEQ ID NO: 384518 - DNA, 33 bp, Homo sapien
agatgcgtagctcaaagaaagagaccagggcta

SEQ ID NO: 384519 - DNA, 33 bp, Homo sapien
ttgtgctgcatagccaaacctatagattgtata

SEQ ID NO: 384520 - DNA, 33 bp, Homo sapien
ttgtgctgcatagccagacctatagattgtata

SEQ ID NO: 384521 - DNA, 33 bp, Homo sapien
actccaccaagttttccaagcccagaaaagtat

SEQ ID NO: 384522 - DNA, 33 bp, Homo sapien
actccaccaagttttcgaagcccagaaaagtat

SEQ ID NO: 384523 - DNA, 33 bp, Homo sapien
aatctaatgtctaaaacacaaggctttgtagct

SEQ ID NO: 384524 - DNA, 33 bp, Homo sapien
aatctaatgtctaaaatacaaggctttgtagct

SEQ ID NO: 384525 - DNA, 33 bp, Homo sapien
caccatgcccagctcaagtttaatttttcttac

SEQ ID NO: 384526 - DNA, 33 bp, Homo sapien
caccatgcccagctcaggtttaatttttcttac

SEQ ID NO: 384527 - DNA, 33 bp, Homo sapien
taccaggccttgctgacacctcttgttgcacgt

SEQ ID NO: 384528 - DNA, 33 bp, Homo sapien
taccaggccttgctgatacctcttgttgcacgt

SEQ ID NO: 384529 - DNA, 33 bp, Homo sapien
ttactcatttgtattaactgttaggtgcagtgt

SEQ ID NO: 384530 - DNA, 33 bp, Homo sapien
ttactcatttgtattacctgttaggtgcagtgt

SEQ ID NO: 384531 - DNA, 33 bp, Homo sapien
ggtaaatgtgtcctgagaattctgcatttatgt

SEQ ID NO: 384532 - DNA, 33 bp, Homo sapien
ggtaaatgtgtcctgataattctgcatttatgt

SEQ ID NO: 384533 - DNA, 33 bp, Homo sapien
aaattcacttaccataagattcaccctgtttac

SEQ ID NO: 384534 - DNA, 33 bp, Homo sapien
aaattcacttaccataggattcaccctgtttac

SEQ ID NO: 384535 - DNA, 33 bp, Homo sapien
ccggactgtttatataaatgttcttgaccttat

SEQ ID NO: 384536 - DNA, 33 bp, Homo sapien
ccggactgtttatatacatgttcttgaccttat

SEQ ID NO: 384537 - DNA, 33 bp, Homo sapien
attgatgtagaacttacattcctattctcctgg

SEQ ID NO: 384538 - DNA, 33 bp, Homo sapien
attgatgtagaacttatattcctattctcctgg

SEQ ID NO: 384539 - DNA, 33 bp, Homo sapien
tccttatcacatactaagcaacagtatcttctc

SEQ ID NO: 384540 - DNA, 33 bp, Homo sapien
tccttatcacatactaggcaacagtatcttctc

SEQ ID NO: 384541 - DNA, 33 bp, Homo sapien
agttaagtttgacatacgccaagtactacagtg

SEQ ID NO: 384542 - DNA, 33 bp, Homo sapien
agttaagtttgacatatgccaagtactacagtg

SEQ ID NO: 384543 - DNA, 33 bp, Homo sapien
caaaagggaagtaaccaaacattttcaagacta

SEQ ID NO: 384544 - DNA, 33 bp, Homo sapien
caaaagggaagtaaccgaacattttcaagacta

SEQ ID NO: 384545 - DNA, 33 bp, Homo sapien
acgtcatataccagaactgaaccattggccagt

SEQ ID NO: 384546 - DNA, 33 bp, Homo sapien
acgtcatataccagaattgaaccattggccagt

SEQ ID NO: 384547 - DNA, 33 bp, Homo sapien
tctgactttgatgtgacgtaagtttttgcaagt

SEQ ID NO: 384548 - DNA, 33 bp, Homo sapien
tctgactttgatgtgatgtaagtttttgcaagt

SEQ ID NO: 384549 - DNA, 33 bp, Homo sapien
ttactggattaaaaagaaaacagtaagctgttg

SEQ ID NO: 384550 - DNA, 33 bp, Homo sapien
ttactggattaaaaaggaaacagtaagctgttg

SEQ ID NO: 384551 - DNA, 33 bp, Homo sapien
gggctacagtagtccccccttagccacaaggaa

SEQ ID NO: 384552 - DNA, 33 bp, Homo sapien
gggctacagtagtcccgccttagccacaaggaa

SEQ ID NO: 384553 - DNA, 33 bp, Homo sapien
ctctctgctagagataactcatggatatatagt

SEQ ID NO: 384554 - DNA, 33 bp, Homo sapien
ctctctgctagagatacctcatggatatatagt

SEQ ID NO: 384555 - DNA, 33 bp, Homo sapien
actcctggaataacaaagcatactccagtttga

SEQ ID NO: 384556 - DNA, 33 bp, Homo sapien
actcctggaataacaaggcatactccagtttga

SEQ ID NO: 384557 - DNA, 33 bp, Homo sapien
taaaatccacaatttaaaagtgttcaattcagt

SEQ ID NO: 384558 - DNA, 33 bp, Homo sapien
taaaatccacaatttagaagtgttcaattcagt

SEQ ID NO: 384559 - DNA, 33 bp, Homo sapien
tcagtttcctgaattacgaaaaagttgatcctg

SEQ ID NO: 384560 - DNA, 33 bp, Homo sapien
tcagtttcctgaattatgaaaaagttgatcctg

SEQ ID NO: 384561 - DNA, 33 bp, Homo sapien
attgatgttctccacagtgtcttctcccaagac

SEQ ID NO: 384562 - DNA, 33 bp, Homo sapien
attgatgttctccacattgtcttctcccaagac

SEQ ID NO: 384563 - DNA, 33 bp, Homo sapien
gggagcttggtagaagaagaaagaagacagagg

SEQ ID NO: 384564 - DNA, 33 bp, Homo sapien
gggagcttggtagaagcagaaagaagacagagg

SEQ ID NO: 384565 - DNA, 33 bp, Homo sapien
aagccgtgagtatagaacagagatgagattcat

SEQ ID NO: 384566 - DNA, 33 bp, Homo sapien
aagccgtgagtatagagcagagatgagattcat

SEQ ID NO: 384567 - DNA, 33 bp, Homo sapien
cccaggttgggttgcactcatggtgtctgcctg

SEQ ID NO: 384568 - DNA, 33 bp, Homo sapien
cccaggttgggttgcagtcatggtgtctgcctg

SEQ ID NO: 384569 - DNA, 33 bp, Homo sapien
ttattccatttacattaaagattcagaaaaggc

SEQ ID NO: 384570 - DNA, 33 bp, Homo sapien
ttattccatttacattgaagattcagaaaaggc

SEQ ID NO: 384571 - DNA, 33 bp, Homo sapien
gcaaatctatagagacagaaggtaggactgttg

SEQ ID NO: 384572 - DNA, 33 bp, Homo sapien
gcaaatctatagagactgaaggtaggactgttg

SEQ ID NO: 384573 - DNA, 33 bp, Homo sapien
taaatgaagaagatgaagtgaagttgctcagtc

SEQ ID NO: 384574 - DNA, 33 bp, Homo sapien
taaatgaagaagatgaggtgaagttgctcagtc

SEQ ID NO: 384575 - DNA, 33 bp, Homo sapien
aaaatctttaaatagcgccgcagcaaacagtac

SEQ ID NO: 384576 - DNA, 33 bp, Homo sapien
aaaatctttaaatagctccgcagcaaacagtac

SEQ ID NO: 384577 - DNA, 33 bp, Homo sapien
gcactgttccatgtacggggcatatacagaggg

SEQ ID NO: 384578 - DNA, 33 bp, Homo sapien
gcactgttccatgtactgggcatatacagaggg

SEQ ID NO: 384579 - DNA, 33 bp, Homo sapien
taagcctcaggttaaacgcctaggcagctgcag

SEQ ID NO: 384580 - DNA, 33 bp, Homo sapien
taagcctcaggttaaatgcctaggcagctgcag

SEQ ID NO: 384581 - DNA, 33 bp, Homo sapien
ttcttgcccacgatgcgcatgggaacaattttg

SEQ ID NO: 384582 - DNA, 33 bp, Homo sapien
ttcttgcccacgatgctcatgggaacaattttg

SEQ ID NO: 384583 - DNA, 33 bp, Homo sapien
tttacacagactgagcaatcttgaactatgatc

SEQ ID NO: 384584 - DNA, 33 bp, Homo sapien
tttacacagactgagcgatcttgaactatgatc

SEQ ID NO: 384585 - DNA, 33 bp, Homo sapien
cagctgaccatgaataagaccctgaggccggtg

SEQ ID NO: 384586 - DNA, 33 bp, Homo sapien
cagctgaccatgaatacgaccctgaggccggtg

SEQ ID NO: 384587 - DNA, 33 bp, Homo sapien
attattagataataaaagacgcatttcaaaata

SEQ ID NO: 384588 - DNA, 33 bp, Homo sapien
attattagataataaatgacgcatttcaaaata

SEQ ID NO: 384589 - DNA, 33 bp, Homo sapien
tcaagagtggaagcagcaagagagttaagaggc

SEQ ID NO: 384590 - DNA, 33 bp, Homo sapien
tcaagagtggaagcagtaagagagttaagaggc

SEQ ID NO: 384591 - DNA, 33 bp, Homo sapien
atggcagccagagctaactgatcaaatgtagag

SEQ ID NO: 384592 - DNA, 33 bp, Homo sapien
atggcagccagagctatctgatcaaatgtagag

SEQ ID NO: 384593 - DNA, 33 bp, Homo sapien
gtggcagcaagtgatgcaatagaatagaaacat

SEQ ID NO: 384594 - DNA, 33 bp, Homo sapien
gtggcagcaagtgatggaatagaatagaaacat

SEQ ID NO: 384595 - DNA, 33 bp, Homo sapien
agccatgatgagagcagagtttgtaggcagcta

SEQ ID NO: 384596 - DNA, 33 bp, Homo sapien
agccatgatgagagcatagtttgtaggcagcta

SEQ ID NO: 384597 - DNA, 33 bp, Homo sapien
aggctctgtctgcctacgggatactgtctggca

SEQ ID NO: 384598 - DNA, 33 bp, Homo sapien
aggctctgtctgcctatgggatactgtctggca

SEQ ID NO: 384599 - DNA, 33 bp, Homo sapien
ggacttgcatcttggaaaggagaagcagcagcc

SEQ ID NO: 384600 - DNA, 33 bp, Homo sapien
ggacttgcatcttggacaggagaagcagcagcc

SEQ ID NO: 384601 - DNA, 33 bp, Homo sapien
cagtgcaacactgcgaactttaagtccttttca

SEQ ID NO: 384602 - DNA, 33 bp, Homo sapien
cagtgcaacactgcgatctttaagtccttttca

SEQ ID NO: 384603 - DNA, 33 bp, Homo sapien
tatcaatgaacaaaaccaattcggttcctgtct

SEQ ID NO: 384604 - DNA, 33 bp, Homo sapien
tatcaatgaacaaaacgaattcggttcctgtct

SEQ ID NO: 384605 - DNA, 33 bp, Homo sapien
tggctccatcccaaaaatcttcgggtggaggag

SEQ ID NO: 384606 - DNA, 33 bp, Homo sapien
tggctccatcccaaaagtcttcgggtggaggag

SEQ ID NO: 384607 - DNA, 33 bp, Homo sapien
atgggagtatattcaacggcatcttaattatcc

SEQ ID NO: 384608 - DNA, 33 bp, Homo sapien
atgggagtatattcaatggcatcttaattatcc

SEQ ID NO: 384609 - DNA, 33 bp, Homo sapien
caggtactgtcagtgacatgtaggactaacttc

SEQ ID NO: 384610 - DNA, 33 bp, Homo sapien
caggtactgtcagtgagatgtaggactaacttc

SEQ ID NO: 384611 - DNA, 33 bp, Homo sapien
atggcattaccacaaacgggcaaaagctcagag

SEQ ID NO: 384612 - DNA, 33 bp, Homo sapien
atggcattaccacaaatgggcaaaagctcagag

SEQ ID NO: 384613 - DNA, 33 bp, Homo sapien
gtggatgtttgagctgaaccccgaaatatagac

SEQ ID NO: 384614 - DNA, 33 bp, Homo sapien
gtggatgtttgagctggaccccgaaatatagac

SEQ ID NO: 384615 - DNA, 33 bp, Homo sapien
cacctaataagagaggcccaaaacatataaagc

SEQ ID NO: 384616 - DNA, 33 bp, Homo sapien
cacctaataagagaggtccaaaacatataaagc

SEQ ID NO: 384617 - DNA, 33 bp, Homo sapien
tccttgactctgaaaaatgaaagatcagtaaca

SEQ ID NO: 384618 - DNA, 33 bp, Homo sapien
tccttgactctgaaaattgaaagatcagtaaca

SEQ ID NO: 384619 - DNA, 33 bp, Homo sapien
gggtgaatagttcccaccaagtgatcctggcca

SEQ ID NO: 384620 - DNA, 33 bp, Homo sapien
gggtgaatagttcccatcaagtgatcctggcca

SEQ ID NO: 384621 - DNA, 33 bp, Homo sapien
gtttgcctgtgacccgaagacctgacagtgtgg

SEQ ID NO: 384622 - DNA, 33 bp, Homo sapien
gtttgcctgtgacccggagacctgacagtgtgg

SEQ ID NO: 384623 - DNA, 33 bp, Homo sapien
tttgatttatgatttccagttatgcaggctgtt

SEQ ID NO: 384624 - DNA, 33 bp, Homo sapien
tttgatttatgatttctagttatgcaggctgtt

SEQ ID NO: 384625 - DNA, 33 bp, Homo sapien
attttttaaatgtggcaaccaaacaatgacttt

SEQ ID NO: 384626 - DNA, 33 bp, Homo sapien
attttttaaatgtggcgaccaaacaatgacttt

SEQ ID NO: 384627 - DNA, 33 bp, Homo sapien
aatatggacgtccaaaaaaacgagctgaagttg

SEQ ID NO: 384628 - DNA, 33 bp, Homo sapien
aatatggacgtccaaagaaacgagctgaagttg

SEQ ID NO: 384629 - DNA, 33 bp, Homo sapien
cagcaccgtccagtagaactttccagtagacta

SEQ ID NO: 384630 - DNA, 33 bp, Homo sapien
cagcaccgtccagtagcactttccagtagacta

SEQ ID NO: 384631 - DNA, 33 bp, Homo sapien
agctttttcctctggcccagaaaatacagcata

SEQ ID NO: 384632 - DNA, 33 bp, Homo sapien
agctttttcctctggctcagaaaatacagcata

SEQ ID NO: 384633 - DNA, 33 bp, Homo sapien
gcctggctaatctggcaacaaagtgagatcctg

SEQ ID NO: 384634 - DNA, 33 bp, Homo sapien
gcctggctaatctggcgacaaagtgagatcctg

SEQ ID NO: 384635 - DNA, 33 bp, Homo sapien
tagtagtatttcacaacgttggctagaactggt

SEQ ID NO: 384636 - DNA, 33 bp, Homo sapien
tagtagtatttcacaatgttggctagaactggt

SEQ ID NO: 384637 - DNA, 33 bp, Homo sapien
atcacgatacatttgccaaagtctacccccagg

SEQ ID NO: 384638 - DNA, 33 bp, Homo sapien
atcacgatacatttgctaaagtctacccccagg

SEQ ID NO: 384639 - DNA, 33 bp, Homo sapien
gccaactccacttgcaaagtaacaaacccagtt

SEQ ID NO: 384640 - DNA, 33 bp, Homo sapien
gccaactccacttgcagagtaacaaacccagtt

SEQ ID NO: 384641 - DNA, 33 bp, Homo sapien
acccaacttgcttaaccgcaggtgtgttcctgc

SEQ ID NO: 384642 - DNA, 33 bp, Homo sapien
acccaacttgcttaactgcaggtgtgttcctgc

SEQ ID NO: 384643 - DNA, 33 bp, Homo sapien
ctggtcttcggctggaagtattcacagggattt

SEQ ID NO: 384644 - DNA, 33 bp, Homo sapien
ctggtcttcggctggaggtattcacagggattt

SEQ ID NO: 384645 - DNA, 33 bp, Homo sapien
agttctgcacatgtacacattttaaatcatgga

SEQ ID NO: 384646 - DNA, 33 bp, Homo sapien
agttctgcacatgtacgcattttaaatcatgga

SEQ ID NO: 384647 - DNA, 33 bp, Homo sapien
cccttgcactcatatcgctcagaactgacttca

SEQ ID NO: 384648 - DNA, 33 bp, Homo sapien
cccttgcactcatatctctcagaactgacttca

SEQ ID NO: 384649 - DNA, 33 bp, Homo sapien
acataaattacaacacaatctctaactactgac

SEQ ID NO: 384650 - DNA, 33 bp, Homo sapien
acataaattacaacaccatctctaactactgac

SEQ ID NO: 384651 - DNA, 33 bp, Homo sapien
cttggggctaggaagaaccttaaatgtcaaatt

SEQ ID NO: 384652 - DNA, 33 bp, Homo sapien
cttggggctaggaagagccttaaatgtcaaatt

SEQ ID NO: 384653 - DNA, 33 bp, Homo sapien
cttaaatgtcaaattccattttctcttgtcaga

SEQ ID NO: 384654 - DNA, 33 bp, Homo sapien
cttaaatgtcaaattctattttctcttgtcaga

SEQ ID NO: 384655 - DNA, 33 bp, Homo sapien
gcatttcctttaaaaaccggagcactgactttg

SEQ ID NO: 384656 - DNA, 33 bp, Homo sapien
gcatttcctttaaaaatcggagcactgactttg

SEQ ID NO: 384657 - DNA, 33 bp, Homo sapien
aaaaaatgattcaccaaaatgttgtttaacttt

SEQ ID NO: 384658 - DNA, 33 bp, Homo sapien
aaaaaatgattcaccataatgttgtttaacttt

SEQ ID NO: 384659 - DNA, 33 bp, Homo sapien
ctcagtaaatgtaccaccttctaaagccatgat

SEQ ID NO: 384660 - DNA, 33 bp, Homo sapien
ctcagtaaatgtaccagcttctaaagccatgat

SEQ ID NO: 384661 - DNA, 33 bp, Homo sapien
gcctccagcaagagtacccctatcacagtaaat

SEQ ID NO: 384662 - DNA, 33 bp, Homo sapien
gcctccagcaagagtatccctatcacagtaaat

SEQ ID NO: 384663 - DNA, 33 bp, Homo sapien
aaagctaggctacagaagggaagagaagaacca

SEQ ID NO: 384664 - DNA, 33 bp, Homo sapien
aaagctaggctacagatgggaagagaagaacca

SEQ ID NO: 384665 - DNA, 33 bp, Homo sapien
tactacaaatgatctacagaacgcatctcaaag

SEQ ID NO: 384666 - DNA, 33 bp, Homo sapien
tactacaaatgatctagagaacgcatctcaaag

SEQ ID NO: 384667 - DNA, 33 bp, Homo sapien
tctggctaactttcagacatgggcttaaacatg

SEQ ID NO: 384668 - DNA, 33 bp, Homo sapien
tctggctaactttcaggcatgggcttaaacatg

SEQ ID NO: 384669 - DNA, 33 bp, Homo sapien
acattgagtgataggaagacattaatattattc

SEQ ID NO: 384670 - DNA, 33 bp, Homo sapien
acattgagtgataggaggacattaatattattc

SEQ ID NO: 384671 - DNA, 33 bp, Homo sapien
cagacagaaccatacaatacttgtcatttataa

SEQ ID NO: 384672 - DNA, 33 bp, Homo sapien
cagacagaaccatacattacttgtcatttataa

SEQ ID NO: 384673 - DNA, 33 bp, Homo sapien
taacttcccaaatcaacgactcccagtttaaca

SEQ ID NO: 384674 - DNA, 33 bp, Homo sapien
taacttcccaaatcaatgactcccagtttaaca

SEQ ID NO: 384675 - DNA, 33 bp, Homo sapien
cacatccgatggattcaaatgtaccataataca

SEQ ID NO: 384676 - DNA, 33 bp, Homo sapien
cacatccgatggattccaatgtaccataataca

SEQ ID NO: 384677 - DNA, 33 bp, Homo sapien
tactcatattgttagcaaaggtgctttcaagaa

SEQ ID NO: 384678 - DNA, 33 bp, Homo sapien
tactcatattgttagcgaaggtgctttcaagaa

SEQ ID NO: 384679 - DNA, 33 bp, Homo sapien
ttaaatgagtgagagtaacagaatggaatgtaa

SEQ ID NO: 384680 - DNA, 33 bp, Homo sapien
ttaaatgagtgagagtgacagaatggaatgtaa

SEQ ID NO: 384681 - DNA, 33 bp, Homo sapien
acaaacagaaatttaggagactggaatcatttc

SEQ ID NO: 384682 - DNA, 33 bp, Homo sapien
acaaacagaaatttagtagactggaatcatttc

SEQ ID NO: 384683 - DNA, 33 bp, Homo sapien
acaaagtgaaaattaccagtcaatctattctgc

SEQ ID NO: 384684 - DNA, 33 bp, Homo sapien
acaaagtgaaaattacgagtcaatctattctgc

SEQ ID NO: 384685 - DNA, 33 bp, Homo sapien
gactttcttgaacaaactgattacgaaagtgaa

SEQ ID NO: 384686 - DNA, 33 bp, Homo sapien
gactttcttgaacaaagtgattacgaaagtgaa

SEQ ID NO: 384687 - DNA, 33 bp, Homo sapien
gtaagtgccagagccgcagcctttgattcttac

SEQ ID NO: 384688 - DNA, 33 bp, Homo sapien
gtaagtgccagagccgtagcctttgattcttac

SEQ ID NO: 384689 - DNA, 33 bp, Homo sapien
tagcacttgataccaaaaggagaagacaaaatg

SEQ ID NO: 384690 - DNA, 33 bp, Homo sapien
tagcacttgataccaagaggagaagacaaaatg

SEQ ID NO: 384691 - DNA, 33 bp, Homo sapien
ctgcatggcaattacacagattttcactttata

SEQ ID NO: 384692 - DNA, 33 bp, Homo sapien
ctgcatggcaattacatagattttcactttata

SEQ ID NO: 384693 - DNA, 33 bp, Homo sapien
gtatactaatgtgatcaaaaggtatttgtaaat

SEQ ID NO: 384694 - DNA, 33 bp, Homo sapien
gtatactaatgtgatcgaaaggtatttgtaaat

SEQ ID NO: 384695 - DNA, 33 bp, Homo sapien
ggacctgaatttggcaaaaaagagttgttatat

SEQ ID NO: 384696 - DNA, 33 bp, Homo sapien
ggacctgaatttggcagaaaagagttgttatat

SEQ ID NO: 384697 - DNA, 33 bp, Homo sapien
gaagatgaagcaaggaagagtattaggaggtgg

SEQ ID NO: 384698 - DNA, 33 bp, Homo sapien
gaagatgaagcaaggaggagtattaggaggtgg

SEQ ID NO: 384699 - DNA, 33 bp, Homo sapien
agccctgaaaatcagcacaacctcggacatcca

SEQ ID NO: 384700 - DNA, 33 bp, Homo sapien
agccctgaaaatcagcgcaacctcggacatcca

SEQ ID NO: 384701 - DNA, 33 bp, Homo sapien
ctcggacatccacagtgaaaggcagactctatt

SEQ ID NO: 384702 - DNA, 33 bp, Homo sapien
ctcggacatccacagttaaaggcagactctatt

SEQ ID NO: 384703 - DNA, 33 bp, Homo sapien; identical to SEQ ID NO: 384701

SEQ ID NO: 384704 - DNA, 33 bp, Homo sapien; identical to SEQ ID NO: 384702

SEQ ID NO: 384705 - DNA, 33 bp, Homo sapien
caacaacaaaactctgcagacaatgacatttgg

SEQ ID NO: 384706 - DNA, 33 bp, Homo sapien
caacaacaaaactctggagacaatgacatttgg

SEQ ID NO: 384707 - DNA, 33 bp, Homo sapien
ctattcaacattcactcaacacaaatctagcta

SEQ ID NO: 384708 - DNA, 33 bp, Homo sapien
ctattcaacattcactgaacacaaatctagcta

SEQ ID NO: 384709 - DNA, 33 bp, Homo sapien
ctagacatagatttaaaggactgatgagactaa

SEQ ID NO: 384710 - DNA, 33 bp, Homo sapien
ctagacatagatttaagggactgatgagactaa

SEQ ID NO: 384711 - DNA, 33 bp, Homo sapien
actgtgttttttcaggacacttgctagccaagc

SEQ ID NO: 384712 - DNA, 33 bp, Homo sapien
actgtgttttttcaggtcacttgctagccaagc

SEQ ID NO: 384713 - DNA, 33 bp, Homo sapien
ggctagttgctgataaaagcccagcccaggccc

SEQ ID NO: 384714 - DNA, 33 bp, Homo sapien
ggctagttgctgataagagcccagcccaggccc

SEQ ID NO: 384715 - DNA, 33 bp, Homo sapien
agttgtcagtgaaataaatgagggagttcagtg

SEQ ID NO: 384716 - DNA, 33 bp, Homo sapien
agttgtcagtgaaatacatgagggagttcagtg

SEQ ID NO: 384717 - DNA, 33 bp, Homo sapien
aggccagctccgggacagtaaagatgacccttg

SEQ ID NO: 384718 - DNA, 33 bp, Homo sapien
aggccagctccgggacggtaaagatgacccttg

SEQ ID NO: 384719 - DNA, 33 bp, Homo sapien
cttgtgttagttattaacatttgtagattttct

SEQ ID NO: 384720 - DNA, 33 bp, Homo sapien
cttgtgttagttattaccatttgtagattttct

SEQ ID NO: 384721 - DNA, 33 bp, Homo sapien
tttgctgccactggggacatgatgtgaatcggc

SEQ ID NO: 384722 - DNA, 33 bp, Homo sapien
tttgctgccactggggtcatgatgtgaatcggc

SEQ ID NO: 384723 - DNA, 33 bp, Homo sapien
gacatttctccatacaaagtaccgtaatgctgt

SEQ ID NO: 384724 - DNA, 33 bp, Homo sapien
gacatttctccatacagagtaccgtaatgctgt

SEQ ID NO: 384725 - DNA, 33 bp, Homo sapien
aggtttcttaacacaacgagtcgtcttgtcagc

SEQ ID NO: 384726 - DNA, 33 bp, Homo sapien
aggtttcttaacacaatgagtcgtcttgtcagc

SEQ ID NO: 384727 - DNA, 33 bp, Homo sapien
tgtgtacactcagaaacgtatccttccttatgc

SEQ ID NO: 384728 - DNA, 33 bp, Homo sapien
tgtgtacactcagaaatgtatccttccttatgc

SEQ ID NO: 384729 - DNA, 33 bp, Homo sapien
cctagcgaaatcctcacacaggtcaatcagaat

SEQ ID NO: 384730 - DNA, 33 bp, Homo sapien
cctagcgaaatcctcagacaggtcaatcagaat

SEQ ID NO: 384731 - DNA, 33 bp, Homo sapien
agatggccttgtaccaactacttagtaatattc

SEQ ID NO: 384732 - DNA, 33 bp, Homo sapien
agatggccttgtaccagctacttagtaatattc

SEQ ID NO: 384733 - DNA, 33 bp, Homo sapien
ctgccgggtgccatcaccgtttcctttgaacct

SEQ ID NO: 384734 - DNA, 33 bp, Homo sapien
ctgccgggtgccatcatcgtttcctttgaacct

SEQ ID NO: 384735 - DNA, 33 bp, Homo sapien
actctccctaccctgacggaaaggactttagat

SEQ ID NO: 384736 - DNA, 33 bp, Homo sapien
actctccctaccctgatggaaaggactttagat

SEQ ID NO: 384737 - DNA, 33 bp, Homo sapien
tttctaattttttccaatctactttcattgaaa

SEQ ID NO: 384738 - DNA, 33 bp, Homo sapien
tttctaattttttccattctactttcattgaaa

SEQ ID NO: 384739 - DNA, 33 bp, Homo sapien
gctaagggcctagcacactttgatgaggttcct

SEQ ID NO: 384740 - DNA, 33 bp, Homo sapien
gctaagggcctagcacgctttgatgaggttcct

SEQ ID NO: 384741 - DNA, 33 bp, Homo sapien
cctatataatccagcaactatctcctaagaatg

SEQ ID NO: 384742 - DNA, 33 bp, Homo sapien
cctatataatccagcatctatctcctaagaatg

SEQ ID NO: 384743 - DNA, 33 bp, Homo sapien
aatgtataaaactaaactgtgctctgaccacct

SEQ ID NO: 384744 - DNA, 33 bp, Homo sapien
aatgtataaaactaaattgtgctctgaccacct

SEQ ID NO: 384745 - DNA, 33 bp, Homo sapien
tccctcttcatgctcacgctttttttctgagac

SEQ ID NO: 384746 - DNA, 33 bp, Homo sapien
tccctcttcatgctcatgctttttttctgagac

SEQ ID NO: 384747 - DNA, 33 bp, Homo sapien
cttctcactggttgaccgaaaatttacagttca

SEQ ID NO: 384748 - DNA, 33 bp, Homo sapien
cttctcactggttgactgaaaatttacagttca

SEQ ID NO: 384749 - DNA, 33 bp, Homo sapien
accttgatcatcctgccgaaggtgtgtctccac

SEQ ID NO: 384750 - DNA, 33 bp, Homo sapien
accttgatcatcctgctgaaggtgtgtctccac

SEQ ID NO: 384751 - DNA, 33 bp, Homo sapien
caggatgatcaaggtccatattaacactcataa

SEQ ID NO: 384752 - DNA, 33 bp, Homo sapien
caggatgatcaaggtcgatattaacactcataa

SEQ ID NO: 384753 - DNA, 33 bp, Homo sapien
gaatatatgtacaaaagaaagtatccataatct

SEQ ID NO: 384754 - DNA, 33 bp, Homo sapien
gaatatatgtacaaaataaagtatccataatct

SEQ ID NO: 384755 - DNA, 33 bp, Homo sapien
gtattgcataatttccaagtttttggagatttt

SEQ ID NO: 384756 - DNA, 33 bp, Homo sapien
gtattgcataatttcctagtttttggagatttt

SEQ ID NO: 384757 - DNA, 33 bp, Homo sapien
aacatttcttctagtgcaggtctactgataatg

SEQ ID NO: 384758 - DNA, 33 bp, Homo sapien
aacatttcttctagtgtaggtctactgataatg

SEQ ID NO: 384759 - DNA, 33 bp, Homo sapien
ttcatttgtttggatacgatgtgtccatgtgtg

SEQ ID NO: 384760 - DNA, 33 bp, Homo sapien
ttcatttgtttggatatgatgtgtccatgtgtg

SEQ ID NO: 384761 - DNA, 33 bp, Homo sapien
attctagaaaagacacaactagggagatgagac

SEQ ID NO: 384762 - DNA, 33 bp, Homo sapien
attctagaaaagacacgactagggagatgagac

SEQ ID NO: 384763 - DNA, 33 bp, Homo sapien
catttcttcttagtaccgaatatgtcatgatgt

SEQ ID NO: 384764 - DNA, 33 bp, Homo sapien
catttcttcttagtactgaatatgtcatgatgt

SEQ ID NO: 384765 - DNA, 33 bp, Homo sapien
ctgccaaactcccttcaatgtggctgtaccatt

SEQ ID NO: 384766 - DNA, 33 bp, Homo sapien
ctgccaaactcccttccatgtggctgtaccatt

SEQ ID NO: 384767 - DNA, 33 bp, Homo sapien
caagggatactctcaacattccaggcatgagcc

SEQ ID NO: 384768 - DNA, 33 bp, Homo sapien
caagggatactctcaatattccaggcatgagcc

SEQ ID NO: 384769 - DNA, 33 bp, Homo sapien
tttttcagtatctctgcaatccagtatgcattc

SEQ ID NO: 384770 - DNA, 33 bp, Homo sapien
tttttcagtatctctgtaatccagtatgcattc

SEQ ID NO: 384771 - DNA, 33 bp, Homo sapien
cctcttataactgagcaaataaggacaaaagct

SEQ ID NO: 384772 - DNA, 33 bp, Homo sapien
cctcttataactgagccaataaggacaaaagct

SEQ ID NO: 384773 - DNA, 33 bp, Homo sapien
ttttcccctttcattcaattaatgcatattacg

SEQ ID NO: 384774 - DNA, 33 bp, Homo sapien
ttttcccctttcattcgattaatgcatattacg

SEQ ID NO: 384775 - DNA, 33 bp, Homo sapien
tgtgtacgcccgtgtcaccaagctcataccctg

SEQ ID NO: 384776 - DNA, 33 bp, Homo sapien
tgtgtacgcccgtgtcgccaagctcataccctg

SEQ ID NO: 384777 - DNA, 33 bp, Homo sapien
cagtttttgatgctctcaaacgtcagggaggca

SEQ ID NO: 384778 - DNA, 33 bp, Homo sapien
cagtttttgatgctctgaaacgtcagggaggca

SEQ ID NO: 384779 - DNA, 33 bp, Homo sapien
tttgttttctgcttccaatgtgccattttatgg

SEQ ID NO: 384780 - DNA, 33 bp, Homo sapien
tttgttttctgcttccgatgtgccattttatgg

SEQ ID NO: 384781 - DNA, 33 bp, Homo sapien
gcaagttcgtcatcctcagcgcccacaagctgg

SEQ ID NO: 384782 - DNA, 33 bp, Homo sapien
gcaagttcgtcatccttagcgcccacaagctgg

SEQ ID NO: 384783 - DNA, 33 bp, Homo sapien
tgccaccgtaatgaagacatgagcaatcggaaa

SEQ ID NO: 384784 - DNA, 33 bp, Homo sapien
tgccaccgtaatgaaggcatgagcaatcggaaa

SEQ ID NO: 384785 - DNA, 33 bp, Homo sapien
caaagtctatctacccaaaatccaaaaagtcag

SEQ ID NO: 384786 - DNA, 33 bp, Homo sapien
caaagtctatctaccccaaatccaaaaagtcag

SEQ ID NO: 384787 - DNA, 33 bp, Homo sapien
gtgaaacgtaaagacaagagagggtcaggaaga

SEQ ID NO: 384788 - DNA, 33 bp, Homo sapien
gtgaaacgtaaagacaggagagggtcaggaaga

SEQ ID NO: 384789 - DNA, 33 bp, Homo sapien
aaaacaggaagagaaactatctccattgtctca

SEQ ID NO: 384790 - DNA, 33 bp, Homo sapien
aaaacaggaagagaaagtatctccattgtctca

SEQ ID NO: 384791 - DNA, 33 bp, Homo sapien
cttcatgtagccatcaatcgaatcaaaataaca

SEQ ID NO: 384792 - DNA, 33 bp, Homo sapien
cttcatgtagccatcagtcgaatcaaaataaca

SEQ ID NO: 384793 - DNA, 33 bp, Homo sapien
tccattatgaccaaaaataaatcagggaaggca

SEQ ID NO: 384794 - DNA, 33 bp, Homo sapien
tccattatgaccaaaagtaaatcagggaaggca

SEQ ID NO: 384795 - DNA, 33 bp, Homo sapien
attctgacactacccagaattagcatacacccc

SEQ ID NO: 384796 - DNA, 33 bp, Homo sapien
attctgacactacccataattagcatacacccc

SEQ ID NO: 384797 - DNA, 33 bp, Homo sapien
gccaggagaatgcgtcaattgtaaagtagtcac

SEQ ID NO: 384798 - DNA, 33 bp, Homo sapien
gccaggagaatgcgtcgattgtaaagtagtcac

SEQ ID NO: 384799 - DNA, 33 bp, Homo sapien
cctatttgaaaaatgacctgaaatccaatagaa

SEQ ID NO: 384800 - DNA, 33 bp, Homo sapien
cctatttgaaaaatgatctgaaatccaatagaa

SEQ ID NO: 384801 - DNA, 33 bp, Homo sapien
caaatgatttattggaaacaaactgcccactgt

SEQ ID NO: 384802 - DNA, 33 bp, Homo sapien
caaatgatttattggagacaaactgcccactgt

SEQ ID NO: 384803 - DNA, 33 bp, Homo sapien
tcctggaaaaaacaggacccaactcacaggagt

SEQ ID NO: 384804 - DNA, 33 bp, Homo sapien
tcctggaaaaaacagggcccaactcacaggagt

SEQ ID NO: 384805 - DNA, 33 bp, Homo sapien
acctagtatcaccctaacccattctgaaacccc

SEQ ID NO: 384806 - DNA, 33 bp, Homo sapien
acctagtatcaccctatcccattctgaaacccc

SEQ ID NO: 384807 - DNA, 33 bp, Homo sapien
gaagccttccccaaaaacataatagcacaggtg

SEQ ID NO: 384808 - DNA, 33 bp, Homo sapien
gaagccttccccaaaagcataatagcacaggtg

SEQ ID NO: 384809 - DNA, 33 bp, Homo sapien
tgccacaaaggtacatcaaccaggctttcagga

SEQ ID NO: 384810 - DNA, 33 bp, Homo sapien
tgccacaaaggtacatgaaccaggctttcagga

SEQ ID NO: 384811 - DNA, 33 bp, Homo sapien
agacttttgtgtgccaaatgagtttttcccctt

SEQ ID NO: 384812 - DNA, 33 bp, Homo sapien
agacttttgtgtgccagatgagtttttcccctt

SEQ ID NO: 384813 - DNA, 33 bp, Homo sapien
tcagtcaactgaacaactcctcgtcagaatctg

SEQ ID NO: 384814 - DNA, 33 bp, Homo sapien
tcagtcaactgaacaattcctcgtcagaatctg

SEQ ID NO: 384815 - DNA, 33 bp, Homo sapien
acctggggaagcctggaaaagagttcatgactt

SEQ ID NO: 384816 - DNA, 33 bp, Homo sapien
acctggggaagcctgggaaagagttcatgactt

SEQ ID NO: 384817 - DNA, 33 bp, Homo sapien
gtctactcaactaccaaatcatctacagaatta

SEQ ID NO: 384818 - DNA, 33 bp, Homo sapien
gtctactcaactaccagatcatctacagaatta

SEQ ID NO: 384819 - DNA, 33 bp, Homo sapien
aagtgtcctcatgatgcataaaaacatgatggc

SEQ ID NO: 384820 - DNA, 33 bp, Homo sapien
aagtgtcctcatgatgtataaaaacatgatggc

SEQ ID NO: 384821 - DNA, 33 bp, Homo sapien
attaagagattaacaacgggacggtactattat

SEQ ID NO: 384822 - DNA, 33 bp, Homo sapien
attaagagattaacaatgggacggtactattat

SEQ ID NO: 384823 - DNA, 33 bp, Homo sapien
aaaatttcgagtgataaggtggctcttttgcta

SEQ ID NO: 384824 - DNA, 33 bp, Homo sapien
aaaatttcgagtgatagggtggctcttttgcta

SEQ ID NO: 384825 - DNA, 33 bp, Homo sapien
ccttgtgttcaagtacaatctagtcaatttagt

SEQ ID NO: 384826 - DNA, 33 bp, Homo sapien
ccttgtgttcaagtactatctagtcaatttagt

SEQ ID NO: 384827 - DNA, 33 bp, Homo sapien
ctaactgcccaatccaatgagtccttttaactc

SEQ ID NO: 384828 - DNA, 33 bp, Homo sapien
ctaactgcccaatccagtgagtccttttaactc

SEQ ID NO: 384829 - DNA, 33 bp, Homo sapien
ctttatgcatctaataatatcatctactgctac

SEQ ID NO: 384830 - DNA, 33 bp, Homo sapien
ctttatgcatctaatagtatcatctactgctac

SEQ ID NO: 384831 - DNA, 33 bp, Homo sapien
aggagagtcttcatcaagctgtcctcacagagc

SEQ ID NO: 384832 - DNA, 33 bp, Homo sapien
aggagagtcttcatcaggctgtcctcacagagc

SEQ ID NO: 384833 - DNA, 33 bp, Homo sapien
ccctgttaatactctaagcaagtactttgtaag

SEQ ID NO: 384834 - DNA, 33 bp, Homo sapien
ccctgttaatactctaggcaagtactttgtaag

SEQ ID NO: 384835 - DNA, 33 bp, Homo sapien
attcttttcttaacctaaatgtgagaagtaaag

SEQ ID NO: 384836 - DNA, 33 bp, Homo sapien
attcttttcttaacctcaatgtgagaagtaaag

SEQ ID NO: 384837 - DNA, 33 bp, Homo sapien
tcagataaagagagaaagagaaatgtttaatcc

SEQ ID NO: 384838 - DNA, 33 bp, Homo sapien
tcagataaagagagaaggagaaatgtttaatcc

SEQ ID NO: 384839 - DNA, 33 bp, Homo sapien
ggttttcttactcccacgtctgatgccagagct

SEQ ID NO: 384840 - DNA, 33 bp, Homo sapien
ggttttcttactcccaggtctgatgccagagct

SEQ ID NO: 384841 - DNA, 33 bp, Homo sapien
attcctcttttctcagaatggacttcagccatg

SEQ ID NO: 384842 - DNA, 33 bp, Homo sapien
attcctcttttctcaggatggacttcagccatg

SEQ ID NO: 384843 - DNA, 33 bp, Homo sapien
aattgagaaaacagcaaacgccctgaataccca

SEQ ID NO: 384844 - DNA, 33 bp, Homo sapien
aattgagaaaacagcagacgccctgaataccca

SEQ ID NO: 384845 - DNA, 33 bp, Homo sapien
ccagttagagagagacactcatttttgaaaatg

SEQ ID NO: 384846 - DNA, 33 bp, Homo sapien
ccagttagagagagacgctcatttttgaaaatg

SEQ ID NO: 384847 - DNA, 33 bp, Homo sapien
ctttgatcttttcagcaatctatgccattatag

SEQ ID NO: 384848 - DNA, 33 bp, Homo sapien
ctttgatcttttcagctatctatgccattatag

SEQ ID NO: 384849 - DNA, 33 bp, Homo sapien
ttattctgcatttgaaagacactgggttgtttc

SEQ ID NO: 384850 - DNA, 33 bp, Homo sapien
ttattctgcatttgaacgacactgggttgtttc

SEQ ID NO: 384851 - DNA, 33 bp, Homo sapien
atgcatgaggcacccacataaagaaaacaaaac

SEQ ID NO: 384852 - DNA, 33 bp, Homo sapien
atgcatgaggcacccatataaagaaaacaaaac

SEQ ID NO: 384853 - DNA, 33 bp, Homo sapien
ctccaaaacctgtgaacagattaacccacatgg

SEQ ID NO: 384854 - DNA, 33 bp, Homo sapien
ctccaaaacctgtgaatagattaacccacatgg

SEQ ID NO: 384855 - DNA, 33 bp, Homo sapien
ccagctcctataatagcccagtgcctggttggt

SEQ ID NO: 384856 - DNA, 33 bp, Homo sapien
ccagctcctataatagtccagtgcctggttggt

SEQ ID NO: 384857 - DNA, 33 bp, Homo sapien
agggaggaattccccaatagcccacatggcttt

SEQ ID NO: 384858 - DNA, 33 bp, Homo sapien
agggaggaattccccagtagcccacatggcttt

SEQ ID NO: 384859 - DNA, 33 bp, Homo sapien
agaattattgagagacagtagcttggcgggttg

SEQ ID NO: 384860 - DNA, 33 bp, Homo sapien
agaattattgagagacggtagcttggcgggttg

SEQ ID NO: 384861 - DNA, 33 bp, Homo sapien
aaggggcctctgcacacggaagatggcttgttc

SEQ ID NO: 384862 - DNA, 33 bp, Homo sapien
aaggggcctctgcacatggaagatggcttgttc

SEQ ID NO: 384863 - DNA, 33 bp, Homo sapien; identical to SEQ ID NO: 384861

SEQ ID NO: 384864 - DNA, 33 bp, Homo sapien; identical to SEQ ID NO: 384862

SEQ ID NO: 384865 - DNA, 33 bp, Homo sapien
gttatcgccacttcaaattcccatttattttgt

SEQ ID NO: 384866 - DNA, 33 bp, Homo sapien
gttatcgccacttcaagttcccatttattttgt

SEQ ID NO: 384867 - DNA, 33 bp, Homo sapien
caggtctcatagctccccattggcagtgctggg

SEQ ID NO: 384868 - DNA, 33 bp, Homo sapien
caggtctcatagctccgcattggcagtgctggg

SEQ ID NO: 384869 - DNA, 33 bp, Homo sapien
gaaaccaacaccaacactgcagagaagcaaaca

SEQ ID NO: 384870 - DNA, 33 bp, Homo sapien
gaaaccaacaccaacagtgcagagaagcaaaca

SEQ ID NO: 384871 - DNA, 33 bp, Homo sapien
gtatgtctgctattcacataggaacaaataatt

SEQ ID NO: 384872 - DNA, 33 bp, Homo sapien
gtatgtctgctattcatataggaacaaataatt

SEQ ID NO: 384873 - DNA, 33 bp, Homo sapien
aaaaacatctggatagcatttgtgcctttcagt

SEQ ID NO: 384874 - DNA, 33 bp, Homo sapien
aaaaacatctggatagtatttgtgcctttcagt

SEQ ID NO: 384875 - DNA, 33 bp, Homo sapien
ttgactttttcactataagggacaacatttctt

SEQ ID NO: 384876 - DNA, 33 bp, Homo sapien
ttgactttttcactattagggacaacatttctt

SEQ ID NO: 384877 - DNA, 33 bp, Homo sapien
gaggttagacggagccaatccactttccttttt

SEQ ID NO: 384878 - DNA, 33 bp, Homo sapien
gaggttagacggagcccatccactttccttttt

SEQ ID NO: 384879 - DNA, 33 bp, Homo sapien
acaaggccaccaataacgtagtgtagataccac

SEQ ID NO: 384880 - DNA, 33 bp, Homo sapien
acaaggccaccaataatgtagtgtagataccac

SEQ ID NO: 384881 - DNA, 33 bp, Homo sapien
acatcacacaactaggacatcctggtgccaaaa

SEQ ID NO: 384882 - DNA, 33 bp, Homo sapien
acatcacacaactaggtcatcctggtgccaaaa

SEQ ID NO: 384883 - DNA, 33 bp, Homo sapien
tcactggaggtcaaaaaggttcacaagaggcag

SEQ ID NO: 384884 - DNA, 33 bp, Homo sapien
tcactggaggtcaaaacggttcacaagaggcag

SEQ ID NO: 384885 - DNA, 33 bp, Homo sapien
agagcccaggttagtcaattgagacaaaattta

SEQ ID NO: 384886 - DNA, 33 bp, Homo sapien
agagcccaggttagtcgattgagacaaaattta

SEQ ID NO: 384887 - DNA, 33 bp, Homo sapien
cacccatagtgggtcacgtttatgctcttgtga

SEQ ID NO: 384888 - DNA, 33 bp, Homo sapien
cacccatagtgggtcaggtttatgctcttgtga

SEQ ID NO: 384889 - DNA, 33 bp, Homo sapien
gagtacggtccttccaactggactgatagtcag

SEQ ID NO: 384890 - DNA, 33 bp, Homo sapien
gagtacggtccttccatctggactgatagtcag

SEQ ID NO: 384891 - DNA, 33 bp, Homo sapien
ctggttctcctttccgaacttctgatggttgtg

SEQ ID NO: 384892 - DNA, 33 bp, Homo sapien
ctggttctcctttccgtacttctgatggttgtg

SEQ ID NO: 384893 - DNA, 33 bp, Homo sapien
ccaaattctaccaatccccaaaattattgtttc

SEQ ID NO: 384894 - DNA, 33 bp, Homo sapien
ccaaattctaccaatctccaaaattattgtttc

SEQ ID NO: 384895 - DNA, 33 bp, Homo sapien
aattgcctaaatgaaccacctcaggcagtgagg

SEQ ID NO: 384896 - DNA, 33 bp, Homo sapien
aattgcctaaatgaactacctcaggcagtgagg

SEQ ID NO: 384897 - DNA, 33 bp, Homo sapien
tagctgaaataatgcacggagacttccctggat

SEQ ID NO: 384898 - DNA, 33 bp, Homo sapien
tagctgaaataatgcatggagacttccctggat

SEQ ID NO: 384899 - DNA, 33 bp, Homo sapien
gctctgggactccaaacaggttaattctcagag

SEQ ID NO: 384900 - DNA, 33 bp, Homo sapien
gctctgggactccaaataggttaattctcagag

SEQ ID NO: 384901 - DNA, 33 bp, Homo sapien
agaactcctctcttaccatgttaattatccaca

SEQ ID NO: 384902 - DNA, 33 bp, Homo sapien
agaactcctctcttacgatgttaattatccaca

SEQ ID NO: 384903 - DNA, 33 bp, Homo sapien
aatcagatctaatccacgtaagactttatctta

SEQ ID NO: 384904 - DNA, 33 bp, Homo sapien
aatcagatctaatccatgtaagactttatctta

SEQ ID NO: 384905 - DNA, 33 bp, Homo sapien
acctgacccatcagaacactttcttggctgctt

SEQ ID NO: 384906 - DNA, 33 bp, Homo sapien
acctgacccatcagaatactttcttggctgctt

SEQ ID NO: 384907 - DNA, 33 bp, Homo sapien
aaacactcagctctcaaacatgacctacctagg

SEQ ID NO: 384908 - DNA, 33 bp, Homo sapien
aaacactcagctctcacacatgacctacctagg

SEQ ID NO: 384909 - DNA, 33 bp, Homo sapien
tattttgacaataacagaaggaggtacatgatc

SEQ ID NO: 384910 - DNA, 33 bp, Homo sapien
tattttgacaataacataaggaggtacatgatc

SEQ ID NO: 384911 - DNA, 33 bp, Homo sapien
attactgataaaacagactcctcaagtatgata

SEQ ID NO: 384912 - DNA, 33 bp, Homo sapien
attactgataaaacagtctcctcaagtatgata

SEQ ID NO: 384913 - DNA, 33 bp, Homo sapien
ccaaccacctgaccacaggaattttctcccttt

SEQ ID NO: 384914 - DNA, 33 bp, Homo sapien
ccaaccacctgaccacgggaattttctcccttt

SEQ ID NO: 384915 - DNA, 33 bp, Homo sapien
ttatttttcttgctcaaattcttccagcgggca

SEQ ID NO: 384916 - DNA, 33 bp, Homo sapien
ttatttttcttgctcacattcttccagcgggca

SEQ ID NO: 384917 - DNA, 33 bp, Homo sapien
agcagaatggagcccacgaatttattggtagac

SEQ ID NO: 384918 - DNA, 33 bp, Homo sapien
agcagaatggagcccatgaatttattggtagac

SEQ ID NO: 384919 - DNA, 33 bp, Homo sapien
tgaccatgaaagaaaacctcctttgatttgaag

SEQ ID NO: 384920 - DNA, 33 bp, Homo sapien
tgaccatgaaagaaaagctcctttgatttgaag

SEQ ID NO: 384921 - DNA, 33 bp, Homo sapien
gatatatgatagtctacgcaattctttacttcc

SEQ ID NO: 384922 - DNA, 33 bp, Homo sapien
gatatatgatagtctaggcaattctttacttcc

SEQ ID NO: 384923 - DNA, 33 bp, Homo sapien
atacccctggacctagaaaggctgcattcttca

SEQ ID NO: 384924 - DNA, 33 bp, Homo sapien
atacccctggacctaggaaggctgcattcttca

SEQ ID NO: 384925 - DNA, 33 bp, Homo sapien
actttctgggtattggcaaaacgtggagctcac

SEQ ID NO: 384926 - DNA, 33 bp, Homo sapien
actttctgggtattgggaaaacgtggagctcac

SEQ ID NO: 384927 - DNA, 33 bp, Homo sapien
ttatctctacttttggccagaagcaatccagtt

SEQ ID NO: 384928 - DNA, 33 bp, Homo sapien
ttatctctacttttggtcagaagcaatccagtt

SEQ ID NO: 384929 - DNA, 33 bp, Homo sapien
tacgttcagagaaatcactctaaataaaacatc

SEQ ID NO: 384930 - DNA, 33 bp, Homo sapien
tacgttcagagaaatcgctctaaataaaacatc

SEQ ID NO: 384931 - DNA, 33 bp, Homo sapien
gtaattactagatgccagaaaatgatccttcta

SEQ ID NO: 384932 - DNA, 33 bp, Homo sapien
gtaattactagatgccggaaaatgatccttcta

SEQ ID NO: 384933 - DNA, 33 bp, Homo sapien
aggaattagttaaacaaagataatagcacgaat

SEQ ID NO: 384934 - DNA, 33 bp, Homo sapien
aggaattagttaaacagagataatagcacgaat

SEQ ID NO: 384935 - DNA, 33 bp, Homo sapien
tgattacaggtctagaacaggaactacacaaaa

SEQ ID NO: 384936 - DNA, 33 bp, Homo sapien
tgattacaggtctagagcaggaactacacaaaa

SEQ ID NO: 384937 - DNA, 33 bp, Homo sapien
cattctgaccttaaaagtcctcaatgccaagtt

SEQ ID NO: 384938 - DNA, 33 bp, Homo sapien
cattctgaccttaaaattcctcaatgccaagtt

SEQ ID NO: 384939 - DNA, 33 bp, Homo sapien
taggattcaggaacacaatggcagtgtaaatgc

SEQ ID NO: 384940 - DNA, 33 bp, Homo sapien
taggattcaggaacacgatggcagtgtaaatgc

SEQ ID NO: 384941 - DNA, 33 bp, Homo sapien
aatctccaaagaattacctgagtgaaaataagc

SEQ ID NO: 384942 - DNA, 33 bp, Homo sapien
aatctccaaagaattagctgagtgaaaataagc

SEQ ID NO: 384943 - DNA, 33 bp, Homo sapien
cttgctgatggattcaaatgtagggtctacccc

SEQ ID NO: 384944 - DNA, 33 bp, Homo sapien
cttgctgatggattcagatgtagggtctacccc

SEQ ID NO: 384945 - DNA, 33 bp, Homo sapien
tgttgggtagaagaaaatgtctccagcacacat

SEQ ID NO: 384946 - DNA, 33 bp, Homo sapien
tgttgggtagaagaaagtgtctccagcacacat

SEQ ID NO: 384947 - DNA, 33 bp, Homo sapien
atcagctggtgactacagtagaatggcaactgt

SEQ ID NO: 384948 - DNA, 33 bp, Homo sapien
atcagctggtgactacggtagaatggcaactgt

SEQ ID NO: 384949 - DNA, 33 bp, Homo sapien
taaagtttgagccctaaaatatgttaatggaag

SEQ ID NO: 384950 - DNA, 33 bp, Homo sapien
taaagtttgagccctacaatatgttaatggaag

SEQ ID NO: 384951 - DNA, 33 bp, Homo sapien
attcttcagtcttagaaggaaaattaggtattt

SEQ ID NO: 384952 - DNA, 33 bp, Homo sapien
attcttcagtcttagagggaaaattaggtattt

SEQ ID NO: 384953 - DNA, 33 bp, Homo sapien
ctgtttgcagtctaaacagagatgtcaaggccg

SEQ ID NO: 384954 - DNA, 33 bp, Homo sapien
ctgtttgcagtctaaatagagatgtcaaggccg

SEQ ID NO: 384955 - DNA, 33 bp, Homo sapien
ttggccatcacttcctcaatctccatgtttcca

SEQ ID NO: 384956 - DNA, 33 bp, Homo sapien
ttggccatcacttcctgaatctccatgtttcca

SEQ ID NO: 384957 - DNA, 33 bp, Homo sapien
gaaatgttctacattacattgctcaaaactata

SEQ ID NO: 384958 - DNA, 33 bp, Homo sapien
gaaatgttctacattatattgctcaaaactata

SEQ ID NO: 384959 - DNA, 33 bp, Homo sapien
aatgttacataagaaaacatatctgagagtaac

SEQ ID NO: 384960 - DNA, 33 bp, Homo sapien
aatgttacataagaaagcatatctgagagtaac

SEQ ID NO: 384961 - DNA, 33 bp, Homo sapien
taggcataaatctaacaaaacatgtaaaatcaa

SEQ ID NO: 384962 - DNA, 33 bp, Homo sapien
taggcataaatctaacgaaacatgtaaaatcaa

SEQ ID NO: 384963 - DNA, 33 bp, Homo sapien
tgtattcgtaaggaaagataaagatcagctagt

SEQ ID NO: 384964 - DNA, 33 bp, Homo sapien
tgtattcgtaaggaaatataaagatcagctagt

SEQ ID NO: 384965 - DNA, 33 bp, Homo sapien
aattatcctttcctcaaattcttaagatgaaaa

SEQ ID NO: 384966 - DNA, 33 bp, Homo sapien
aattatcctttcctcagattcttaagatgaaaa

SEQ ID NO: 384967 - DNA, 33 bp, Homo sapien
tgttcagtcgtgaaaaatcatcagccaacacag

SEQ ID NO: 384968 - DNA, 33 bp, Homo sapien
tgttcagtcgtgaaaattcatcagccaacacag

SEQ ID NO: 384969 - DNA, 33 bp, Homo sapien
attggagtaatgcagccataagccagagtccac

SEQ ID NO: 384970 - DNA, 33 bp, Homo sapien
attggagtaatgcagctataagccagagtccac

SEQ ID NO: 384971 - DNA, 33 bp, Homo sapien
attctcttgggtcttccatgaaacatacatatc

SEQ ID NO: 384972 - DNA, 33 bp, Homo sapien
attctcttgggtcttctatgaaacatacatatc

SEQ ID NO: 384973 - DNA, 33 bp, Homo sapien
ccagtccttctacatgacaaagcacatatggat

SEQ ID NO: 384974 - DNA, 33 bp, Homo sapien
ccagtccttctacatggcaaagcacatatggat

SEQ ID NO: 384975 - DNA, 33 bp, Homo sapien
ggttacgaatggaaaacatcttcagaccctgta

SEQ ID NO: 384976 - DNA, 33 bp, Homo sapien
ggttacgaatggaaaatatcttcagaccctgta

SEQ ID NO: 384977 - DNA, 33 bp, Homo sapien
ttcctgggttatagaaacaggcttttaaagaga

SEQ ID NO: 384978 - DNA, 33 bp, Homo sapien
ttcctgggttatagaagcaggcttttaaagaga

SEQ ID NO: 384979 - DNA, 33 bp, Homo sapien
ggacccaggagccgtcgctttgaaatgtaaaca

SEQ ID NO: 384980 - DNA, 33 bp, Homo sapien
ggacccaggagccgtctctttgaaatgtaaaca

SEQ ID NO: 384981 - DNA, 33 bp, Homo sapien
catcttagtttaaacacagtttctgagtttgca

SEQ ID NO: 384982 - DNA, 33 bp, Homo sapien
catcttagtttaaacatagtttctgagtttgca

SEQ ID NO: 384983 - DNA, 33 bp, Homo sapien
atgttccaacaaacccattcataggtatacacc

SEQ ID NO: 384984 - DNA, 33 bp, Homo sapien
atgttccaacaaacccgttcataggtatacacc

SEQ ID NO: 384985 - DNA, 33 bp, Homo sapien
gaagttcaagaacagcaaaaactaatcaacagt

SEQ ID NO: 384986 - DNA, 33 bp, Homo sapien
gaagttcaagaacagccaaaactaatcaacagt

SEQ ID NO: 384987 - DNA, 33 bp, Homo sapien
atatgacttggatatagatacacacatgcacat

SEQ ID NO: 384988 - DNA, 33 bp, Homo sapien
atatgacttggatatatatacacacatgcacat

SEQ ID NO: 384989 - DNA, 33 bp, Homo sapien
gtggatatcctactccaccatcgttttcccatt

SEQ ID NO: 384990 - DNA, 33 bp, Homo sapien
gtggatatcctactccgccatcgttttcccatt

SEQ ID NO: 384991 - DNA, 33 bp, Homo sapien
aagtaaattctttgaactcaaaccttagggaat

SEQ ID NO: 384992 - DNA, 33 bp, Homo sapien
aagtaaattctttgaagtcaaaccttagggaat

SEQ ID NO: 384993 - DNA, 33 bp, Homo sapien
ccagtactccaatccccagaggcaaattgtccg

SEQ ID NO: 384994 - DNA, 33 bp, Homo sapien
ccagtactccaatccctagaggcaaattgtccg

SEQ ID NO: 384995 - DNA, 33 bp, Homo sapien
ggatatagaaaactgaaactggctatacattca

SEQ ID NO: 384996 - DNA, 33 bp, Homo sapien
ggatatagaaaactgacactggctatacattca

SEQ ID NO: 384997 - DNA, 33 bp, Homo sapien
aatattgtggctattaggataagcaaaatagac

SEQ ID NO: 384998 - DNA, 33 bp, Homo sapien
aatattgtggctattatgataagcaaaatagac

SEQ ID NO: 384999 - DNA, 33 bp, Homo sapien
gctgtattttattgacactgtctacatcctatg

SEQ ID NO: 385000 - DNA, 33 bp, Homo sapien
gctgtattttattgacgctgtctacatcctatg

SEQ ID NO: 385001 - DNA, 33 bp, Homo sapien
acagaggagcttttcacgatggttatagggcct

SEQ ID NO: 385002 - DNA, 33 bp, Homo sapien
acagaggagcttttcatgatggttatagggcct

SEQ ID NO: 385003 - DNA, 33 bp, Homo sapien
tctacacttgtttctaaaaattgcaagcacatg

SEQ ID NO: 385004 - DNA, 33 bp, Homo sapien
tctacacttgtttctataaattgcaagcacatg

SEQ ID NO: 385005 - DNA, 33 bp, Homo sapien
gactcaactgaggatccgagtaatgtgctaggt

SEQ ID NO: 385006 - DNA, 33 bp, Homo sapien
gactcaactgaggatctgagtaatgtgctaggt

SEQ ID NO: 385007 - DNA, 33 bp, Homo sapien
aaatggcataataacaacctttgtgcaccattg

SEQ ID NO: 385008 - DNA, 33 bp, Homo sapien
aaatggcataataacaccctttgtgcaccattg

SEQ ID NO: 385009 - DNA, 33 bp, Homo sapien
gatttttcactaagaaaccaagcaaattcaatg

SEQ ID NO: 385010 - DNA, 33 bp, Homo sapien
gatttttcactaagaagccaagcaaattcaatg

SEQ ID NO: 385011 - DNA, 33 bp, Homo sapien
ctagaagtggaattgcgctgtaaaatactattt

SEQ ID NO: 385012 - DNA, 33 bp, Homo sapien
ctagaagtggaattgctctgtaaaatactattt

SEQ ID NO: 385013 - DNA, 33 bp, Homo sapien
agtgttttataagagaacaaaaatgagtctgtg

SEQ ID NO: 385014 - DNA, 33 bp, Homo sapien
agtgttttataagagagcaaaaatgagtctgtg

SEQ ID NO: 385015 - DNA, 33 bp, Homo sapien
aacttatttcctcgctgactgggccacagactc

SEQ ID NO: 385016 - DNA, 33 bp, Homo sapien
aacttatttcctcgcttactgggccacagactc

SEQ ID NO: 385017 - DNA, 33 bp, Homo sapien
caagatggtattgacaaggacggcagggccaga

SEQ ID NO: 385018 - DNA, 33 bp, Homo sapien
caagatggtattgacagggacggcagggccaga

SEQ ID NO: 385019 - DNA, 33 bp, Homo sapien
cgaattctgcattaaacagcagggagagcaagg

SEQ ID NO: 385020 - DNA, 33 bp, Homo sapien
cgaattctgcattaaagagcagggagagcaagg

SEQ ID NO: 385021 - DNA, 33 bp, Homo sapien
aggtcagatcgaagagaatgctctgagtttagg

SEQ ID NO: 385022 - DNA, 33 bp, Homo sapien
aggtcagatcgaagaggatgctctgagtttagg

SEQ ID NO: 385023 - DNA, 33 bp, Homo sapien
agaaatctcataactgcatctaaccccaagtca

SEQ ID NO: 385024 - DNA, 33 bp, Homo sapien
agaaatctcataactggatctaaccccaagtca

SEQ ID NO: 385025 - DNA, 33 bp, Homo sapien
atcttccttattttccaagtatgagacaaagca

SEQ ID NO: 385026 - DNA, 33 bp, Homo sapien
atcttccttattttccgagtatgagacaaagca

SEQ ID NO: 385027 - DNA, 33 bp, Homo sapien
tgtcttggtataggtaacagagtcctcacacca

SEQ ID NO: 385028 - DNA, 33 bp, Homo sapien
tgtcttggtataggtagcagagtcctcacacca

SEQ ID NO: 385029 - DNA, 33 bp, Homo sapien
caatcaagatttacccaggcagattcatcttgt

SEQ ID NO: 385030 - DNA, 33 bp, Homo sapien
caatcaagatttacccgggcagattcatcttgt

SEQ ID NO: 385031 - DNA, 33 bp, Homo sapien
ttagtgtatgtcatggccaaaacaaaatttcaa

SEQ ID NO: 385032 - DNA, 33 bp, Homo sapien
ttagtgtatgtcatggtcaaaacaaaatttcaa

SEQ ID NO: 385033 - DNA, 33 bp, Homo sapien
cacaagataccatgacaacaacaaagaaaaaaa

SEQ ID NO: 385034 - DNA, 33 bp, Homo sapien
cacaagataccatgacgacaacaaagaaaaaaa

SEQ ID NO: 385035 - DNA, 33 bp, Homo sapien
ttctagattgtctacagtggcctccaaaacatt

SEQ ID NO: 385036 - DNA, 33 bp, Homo sapien
ttctagattgtctacattggcctccaaaacatt

SEQ ID NO: 385037 - DNA, 33 bp, Homo sapien
ggctcaagaaaatccaatcatggtgaatctcat

SEQ ID NO: 385038 - DNA, 33 bp, Homo sapien
ggctcaagaaaatccagtcatggtgaatctcat

SEQ ID NO: 385039 - DNA, 33 bp, Homo sapien
agaatttactaaacctcacctctttggcattac

SEQ ID NO: 385040 - DNA, 33 bp, Homo sapien
agaatttactaaacctgacctctttggcattac

SEQ ID NO: 385041 - DNA, 33 bp, Homo sapien
tcttggctccctatcaaatcaataaggaaacac

SEQ ID NO: 385042 - DNA, 33 bp, Homo sapien
tcttggctccctatcatatcaataaggaaacac

SEQ ID NO: 385043 - DNA, 33 bp, Homo sapien
ttatacatattactccaaaaatgtctttcattt

SEQ ID NO: 385044 - DNA, 33 bp, Homo sapien
ttatacatattactccgaaaatgtctttcattt

SEQ ID NO: 385045 - DNA, 33 bp, Homo sapien
gaacagattcggaaggccaaacaccacaataaa

SEQ ID NO: 385046 - DNA, 33 bp, Homo sapien
gaacagattcggaagggcaaacaccacaataaa

SEQ ID NO: 385047 - DNA, 33 bp, Homo sapien
ttccactggcagaagggcagcagagcagcagag

SEQ ID NO: 385048 - DNA, 33 bp, Homo sapien
ttccactggcagaaggtcagcagagcagcagag

SEQ ID NO: 385049 - DNA, 33 bp, Homo sapien
aaagcaaacatatccaaatagtcaataagcaca

SEQ ID NO: 385050 - DNA, 33 bp, Homo sapien
aaagcaaacatatccagatagtcaataagcaca

SEQ ID NO: 385051 - DNA, 33 bp, Homo sapien
gaactgaatggaaaaggagtacacacataactt

SEQ ID NO: 385052 - DNA, 33 bp, Homo sapien
gaactgaatggaaaagtagtacacacataactt

SEQ ID NO: 385053 - DNA, 33 bp, Homo sapien
tgtgagtttgtcacatgagtaaattgtatgttg

SEQ ID NO: 385054 - DNA, 33 bp, Homo sapien
tgtgagtttgtcacattagtaaattgtatgttg

SEQ ID NO: 385055 - DNA, 33 bp, Homo sapien
agtgcagaaatagacacaagtttgattaattcc

SEQ ID NO: 385056 - DNA, 33 bp, Homo sapien
agtgcagaaatagacataagtttgattaattcc

SEQ ID NO: 385057 - DNA, 33 bp, Homo sapien
atgtggagtgtccttcactaaaactcctatatt

SEQ ID NO: 385058 - DNA, 33 bp, Homo sapien
atgtggagtgtccttccctaaaactcctatatt

SEQ ID NO: 385059 - DNA, 33 bp, Homo sapien
acataattaatcccagaatgtgtgatgaaaaca

SEQ ID NO: 385060 - DNA, 33 bp, Homo sapien
acataattaatcccaggatgtgtgatgaaaaca

SEQ ID NO: 385061 - DNA, 33 bp, Homo sapien
cagtatagccaacacaatatttaagaagaacaa

SEQ ID NO: 385062 - DNA, 33 bp, Homo sapien
cagtatagccaacacagtatttaagaagaacaa

SEQ ID NO: 385063 - DNA, 33 bp, Homo sapien
attacacttttgtctcgcagagtgtcatacaat

SEQ ID NO: 385064 - DNA, 33 bp, Homo sapien
attacacttttgtctctcagagtgtcatacaat

SEQ ID NO: 385065 - DNA, 33 bp, Homo sapien
ttaggcatcaacagggcataattgccttaacac

SEQ ID NO: 385066 - DNA, 33 bp, Homo sapien
ttaggcatcaacaggggataattgccttaacac

SEQ ID NO: 385067 - DNA, 33 bp, Homo sapien
aaaatgtggaagtccacgatagacattacaaat

SEQ ID NO: 385068 - DNA, 33 bp, Homo sapien
aaaatgtggaagtccaggatagacattacaaat

SEQ ID NO: 385069 - DNA, 33 bp, Homo sapien
gacaacaaaaatcaaacagtgaaagtccagcat

SEQ ID NO: 385070 - DNA, 33 bp, Homo sapien
gacaacaaaaatcaaagagtgaaagtccagcat

SEQ ID NO: 385071 - DNA, 33 bp, Homo sapien
tgatgttatctttcagaattggtctgagtccat

SEQ ID NO: 385072 - DNA, 33 bp, Homo sapien
tgatgttatctttcagtattggtctgagtccat

SEQ ID NO: 385073 - DNA, 33 bp, Homo sapien
ccatagacaaaaaaacaataagtacgtgagtga

SEQ ID NO: 385074 - DNA, 33 bp, Homo sapien
ccatagacaaaaaaacgataagtacgtgagtga

SEQ ID NO: 385075 - DNA, 33 bp, Homo sapien
caaaaactatcagccaataaaggagtttagttt

SEQ ID NO: 385076 - DNA, 33 bp, Homo sapien
caaaaactatcagccagtaaaggagtttagttt

SEQ ID NO: 385077 - DNA, 33 bp, Homo sapien
agacaacagattataactgttggcaaggatgtg

SEQ ID NO: 385078 - DNA, 33 bp, Homo sapien
agacaacagattataattgttggcaaggatgtg

SEQ ID NO: 385079 - DNA, 33 bp, Homo sapien
agcctatatcttgcacaggctgaatattctcct

SEQ ID NO: 385080 - DNA, 33 bp, Homo sapien
agcctatatcttgcacgggctgaatattctcct

SEQ ID NO: 385081 - DNA, 33 bp, Homo sapien
ttctggcagagcttacagactttgttaaaaata

SEQ ID NO: 385082 - DNA, 33 bp, Homo sapien
ttctggcagagcttaccgactttgttaaaaata

SEQ ID NO: 385083 - DNA, 33 bp, Homo sapien
tctatgagcattttccaaggaacagaagaagtc

SEQ ID NO: 385084 - DNA, 33 bp, Homo sapien
tctatgagcattttcccaggaacagaagaagtc

SEQ ID NO: 385085 - DNA, 33 bp, Homo sapien
agggatgtctttccaaacttcattactacatat

SEQ ID NO: 385086 - DNA, 33 bp, Homo sapien
agggatgtctttccaaccttcattactacatat

SEQ ID NO: 385087 - DNA, 33 bp, Homo sapien
ttattaagatgtcatcaagttttctgtaagtca

SEQ ID NO: 385088 - DNA, 33 bp, Homo sapien
ttattaagatgtcatcgagttttctgtaagtca

SEQ ID NO: 385089 - DNA, 33 bp, Homo sapien
atgacttgcaacaaaccaagtatttgtaagaaa

SEQ ID NO: 385090 - DNA, 33 bp, Homo sapien
atgacttgcaacaaactaagtatttgtaagaaa

SEQ ID NO: 385091 - DNA, 33 bp, Homo sapien
acatttgcttttaataagtacagccaagttaaa

SEQ ID NO: 385092 - DNA, 33 bp, Homo sapien
acatttgcttttaataggtacagccaagttaaa

SEQ ID NO: 385093 - DNA, 33 bp, Homo sapien
tttccctctactgtaccaaacttagaaagcaca

SEQ ID NO: 385094 - DNA, 33 bp, Homo sapien
tttccctctactgtacgaaacttagaaagcaca

SEQ ID NO: 385095 - DNA, 33 bp, Homo sapien
tcatagcactaacctccatgtccataaaagtat

SEQ ID NO: 385096 - DNA, 33 bp, Homo sapien
tcatagcactaacctctatgtccataaaagtat

SEQ ID NO: 385097 - DNA, 33 bp, Homo sapien
aggcagttgaatgccaaaaaggaactcccagcc

SEQ ID NO: 385098 - DNA, 33 bp, Homo sapien
aggcagttgaatgccagaaaggaactcccagcc

SEQ ID NO: 385099 - DNA, 33 bp, Homo sapien
gactgaagaagaaagaaggaaacatatttttga

SEQ ID NO: 385100 - DNA, 33 bp, Homo sapien
gactgaagaagaaagagggaaacatatttttga

SEQ ID NO: 385101 - DNA, 33 bp, Homo sapien
ggtcttgcacaaaactcactcttcaaaagtgct

SEQ ID NO: 385102 - DNA, 33 bp, Homo sapien
ggtcttgcacaaaacttactcttcaaaagtgct

SEQ ID NO: 385103 - DNA, 33 bp, Homo sapien
agaccccttatattgaacttcatggctgctgta

SEQ ID NO: 385104 - DNA, 33 bp, Homo sapien
agaccccttatattgatcttcatggctgctgta

SEQ ID NO: 385105 - DNA, 33 bp, Homo sapien
tctgatgtgtcacaataactcagtgtctctgag

SEQ ID NO: 385106 - DNA, 33 bp, Homo sapien
tctgatgtgtcacaatcactcagtgtctctgag

SEQ ID NO: 385107 - DNA, 33 bp, Homo sapien
ttaggatatgaaatacacttttttaagtaacaa

SEQ ID NO: 385108 - DNA, 33 bp, Homo sapien
ttaggatatgaaatacgcttttttaagtaacaa

SEQ ID NO: 385109 - DNA, 33 bp, Homo sapien
ccctgtaatagatgctaataaacatttgggtaa

SEQ ID NO: 385110 - DNA, 33 bp, Homo sapien
ccctgtaatagatgctcataaacatttgggtaa

SEQ ID NO: 385111 - DNA, 33 bp, Homo sapien
catcatatagaagaggaaaagaatgtaagtggg

SEQ ID NO: 385112 - DNA, 33 bp, Homo sapien
catcatatagaagaggtaaagaatgtaagtggg

SEQ ID NO: 385113 - DNA, 33 bp, Homo sapien
aggcagaaagatcaaccgtgtgaaccaagctga

SEQ ID NO: 385114 - DNA, 33 bp, Homo sapien
aggcagaaagatcaactgtgtgaaccaagctga

SEQ ID NO: 385115 - DNA, 33 bp, Homo sapien
ggtttctaagccttaacataggaccccatcagg

SEQ ID NO: 385116 - DNA, 33 bp, Homo sapien
ggtttctaagccttaatataggaccccatcagg

SEQ ID NO: 385117 - DNA, 33 bp, Homo sapien
gtaggtcacaaagatcacacgcttcaaagggca

SEQ ID NO: 385118 - DNA, 33 bp, Homo sapien
gtaggtcacaaagatcgcacgcttcaaagggca

SEQ ID NO: 385119 - DNA, 33 bp, Homo sapien
tccgagtggctgtttacagactgccccccagga

SEQ ID NO: 385120 - DNA, 33 bp, Homo sapien
tccgagtggctgtttatagactgccccccagga

SEQ ID NO: 385121 - DNA, 33 bp, Homo sapien
gaagcagcgggtagtacattctctgagaacaaa

SEQ ID NO: 385122 - DNA, 33 bp, Homo sapien
gaagcagcgggtagtatattctctgagaacaaa

SEQ ID NO: 385123 - DNA, 33 bp, Homo sapien
cctgtgttgcggcactaaggaaacaccaggaat

SEQ ID NO: 385124 - DNA, 33 bp, Homo sapien
cctgtgttgcggcactgaggaaacaccaggaat

SEQ ID NO: 385125 - DNA, 33 bp, Homo sapien
ttctccttaatctgctaaccatagagttttgga

SEQ ID NO: 385126 - DNA, 33 bp, Homo sapien
ttctccttaatctgctgaccatagagttttgga

SEQ ID NO: 385127 - DNA, 33 bp, Homo sapien
ctctataaatttgtcaggcccaaaataaatgcg

SEQ ID NO: 385128 - DNA, 33 bp, Homo sapien
ctctataaatttgtcatgcccaaaataaatgcg

SEQ ID NO: 385129 - DNA, 33 bp, Homo sapien
agcagctacgtggatacagattttagaccctta

SEQ ID NO: 385130 - DNA, 33 bp, Homo sapien
agcagctacgtggatatagattttagaccctta

SEQ ID NO: 385131 - DNA, 33 bp, Homo sapien
aagcccaggcagtcacaaatcggatgttgtctg

SEQ ID NO: 385132 - DNA, 33 bp, Homo sapien
aagcccaggcagtcacgaatcggatgttgtctg

SEQ ID NO: 385133 - DNA, 33 bp, Homo sapien
ataaaaatttggaagacattgtgttcataatta

SEQ ID NO: 385134 - DNA, 33 bp, Homo sapien
ataaaaatttggaagatattgtgttcataatta

SEQ ID NO: 385135 - DNA, 33 bp, Homo sapien
tcagcccctagattcacctcctatccgtgtaat

SEQ ID NO: 385136 - DNA, 33 bp, Homo sapien
tcagcccctagattcagctcctatccgtgtaat

SEQ ID NO: 385137 - DNA, 33 bp, Homo sapien
gaacgaccatttctaaatcttaatgtgtcctcc

SEQ ID NO: 385138 - DNA, 33 bp, Homo sapien
gaacgaccatttctaactcttaatgtgtcctcc

SEQ ID NO: 385139 - DNA, 33 bp, Homo sapien
cacttgctttctaataccgctctattgctacaa

SEQ ID NO: 385140 - DNA, 33 bp, Homo sapien
cacttgctttctaatatcgctctattgctacaa

SEQ ID NO: 385141 - DNA, 33 bp, Homo sapien
tgaataggtgctattaacaaaggatgcatgagt

SEQ ID NO: 385142 - DNA, 33 bp, Homo sapien
tgaataggtgctattaccaaaggatgcatgagt

SEQ ID NO: 385143 - DNA, 33 bp, Homo sapien
ccaccaaccaggtaaaatgcctccaaccagtat

SEQ ID NO: 385144 - DNA, 33 bp, Homo sapien
ccaccaaccaggtaaagtgcctccaaccagtat

SEQ ID NO: 385145 - DNA, 33 bp, Homo sapien
agaagcagtgtgataaatgcaaaaagtaagtat

SEQ ID NO: 385146 - DNA, 33 bp, Homo sapien
agaagcagtgtgataagtgcaaaaagtaagtat

SEQ ID NO: 385147 - DNA, 33 bp, Homo sapien
aaaataggacaaccaaatgtacaataactctaa

SEQ ID NO: 385148 - DNA, 33 bp, Homo sapien
aaaataggacaaccaagtgtacaataactctaa

SEQ ID NO: 385149 - DNA, 33 bp, Homo sapien
attgatagataaaaaacagtgtcaaaatgcttc

SEQ ID NO: 385150 - DNA, 33 bp, Homo sapien
attgatagataaaaaatagtgtcaaaatgcttc

SEQ ID NO: 385151 - DNA, 33 bp, Homo sapien
aacaaactataacatacctgaagcattttgaca

SEQ ID NO: 385152 - DNA, 33 bp, Homo sapien
aacaaactataacatatctgaagcattttgaca

SEQ ID NO: 385153 - DNA, 33 bp, Homo sapien
tactaaggtaagataaggcagctttggaaatgg

SEQ ID NO: 385154 - DNA, 33 bp, Homo sapien
tactaaggtaagataatgcagctttggaaatgg

SEQ ID NO: 385155 - DNA, 33 bp, Homo sapien
aagggagagatcattaccttaacaaaaggaaga

SEQ ID NO: 385156 - DNA, 33 bp, Homo sapien
aagggagagatcattagcttaacaaaaggaaga

SEQ ID NO: 385157 - DNA, 33 bp, Homo sapien
gataaaatgttgccttaaaagtttgtgtgtaat

SEQ ID NO: 385158 - DNA, 33 bp, Homo sapien
gataaaatgttgccttcaaagtttgtgtgtaat

SEQ ID NO: 385159 - DNA, 33 bp, Homo sapien
gagctgacaggtagaaaaatctggatgcaaatt

SEQ ID NO: 385160 - DNA, 33 bp, Homo sapien
gagctgacaggtagaacaatctggatgcaaatt

SEQ ID NO: 385161 - DNA, 33 bp, Homo sapien
gactttgaatgtgaagcactgcaaattaacaaa

SEQ ID NO: 385162 - DNA, 33 bp, Homo sapien
gactttgaatgtgaaggactgcaaattaacaaa

SEQ ID NO: 385163 - DNA, 33 bp, Homo sapien
cgcacatttttttctacgagatccaccagtagc

SEQ ID NO: 385164 - DNA, 33 bp, Homo sapien
cgcacatttttttctatgagatccaccagtagc

SEQ ID NO: 385165 - DNA, 33 bp, Homo sapien
ctcagcaggattagtaccttttagatgcatgtg

SEQ ID NO: 385166 - DNA, 33 bp, Homo sapien
ctcagcaggattagtagcttttagatgcatgtg

SEQ ID NO: 385167 - DNA, 33 bp, Homo sapien
agggaaaaaaaactccagcagacaaaactgtaa

SEQ ID NO: 385168 - DNA, 33 bp, Homo sapien
agggaaaaaaaactccggcagacaaaactgtaa

SEQ ID NO: 385169 - DNA, 33 bp, Homo sapien
gtgggaaggtagataacagttgccaggacaaag

SEQ ID NO: 385170 - DNA, 33 bp, Homo sapien
gtgggaaggtagataagagttgccaggacaaag

SEQ ID NO: 385171 - DNA, 33 bp, Homo sapien
tccaaagcctgcttaccctgtcttagctgttct

SEQ ID NO: 385172 - DNA, 33 bp, Homo sapien
tccaaagcctgcttactctgtcttagctgttct

SEQ ID NO: 385173 - DNA, 33 bp, Homo sapien
atgattatataaataactggacagcatttgttc

SEQ ID NO: 385174 - DNA, 33 bp, Homo sapien
atgattatataaataattggacagcatttgttc

SEQ ID NO: 385175 - DNA, 33 bp, Homo sapien
aatctgagaaatgtcgccaataccatagaattc

SEQ ID NO: 385176 - DNA, 33 bp, Homo sapien
aatctgagaaatgtcgtcaataccatagaattc

SEQ ID NO: 385177 - DNA, 33 bp, Homo sapien
tgttagtagtgccaaaatgagaaatcctgactt

SEQ ID NO: 385178 - DNA, 33 bp, Homo sapien
tgttagtagtgccaaattgagaaatcctgactt

SEQ ID NO: 385179 - DNA, 33 bp, Homo sapien
atgaggggcagggatcaatttgtttcatttctc

SEQ ID NO: 385180 - DNA, 33 bp, Homo sapien
atgaggggcagggatccatttgtttcatttctc

SEQ ID NO: 385181 - DNA, 33 bp, Homo sapien
tttgtttgcatcattacgtaaggattctatgac

SEQ ID NO: 385182 - DNA, 33 bp, Homo sapien
tttgtttgcatcattatgtaaggattctatgac

SEQ ID NO: 385183 - DNA, 33 bp, Homo sapien
gataatatgagcatcactgacataagatacatg

SEQ ID NO: 385184 - DNA, 33 bp, Homo sapien
gataatatgagcatcattgacataagatacatg

SEQ ID NO: 385185 - DNA, 33 bp, Homo sapien
tatcacactgactagtaaagatttgtgtttgac

SEQ ID NO: 385186 - DNA, 33 bp, Homo sapien
tatcacactgactagttaagatttgtgtttgac

SEQ ID NO: 385187 - DNA, 33 bp, Homo sapien
acattcattcattcaacggctatcttttgagac

SEQ ID NO: 385188 - DNA, 33 bp, Homo sapien
acattcattcattcaatggctatcttttgagac

SEQ ID NO: 385189 - DNA, 33 bp, Homo sapien
aggtcatctgtttacaactctctctgtgtctga

SEQ ID NO: 385190 - DNA, 33 bp, Homo sapien
aggtcatctgtttacagctctctctgtgtctga

SEQ ID NO: 385191 - DNA, 33 bp, Homo sapien
gatacaattcgttttcccagattttacctatta

SEQ ID NO: 385192 - DNA, 33 bp, Homo sapien
gatacaattcgttttctcagattttacctatta

SEQ ID NO: 385193 - DNA, 33 bp, Homo sapien
agtagaaagataatgtcaactccaagggatttc

SEQ ID NO: 385194 - DNA, 33 bp, Homo sapien
agtagaaagataatgttaactccaagggatttc

SEQ ID NO: 385195 - DNA, 33 bp, Homo sapien
tttactatagttttagcaatgtgcagatgttgc

SEQ ID NO: 385196 - DNA, 33 bp, Homo sapien
tttactatagttttagtaatgtgcagatgttgc

SEQ ID NO: 385197 - DNA, 33 bp, Homo sapien
tttacagtctccagacagaggtgaatcagtatg

SEQ ID NO: 385198 - DNA, 33 bp, Homo sapien
tttacagtctccagacggaggtgaatcagtatg

SEQ ID NO: 385199 - DNA, 33 bp, Homo sapien
agtcactgaatcctaaccttaaagcttcttttc

SEQ ID NO: 385200 - DNA, 33 bp, Homo sapien
agtcactgaatcctaatcttaaagcttcttttc

SEQ ID NO: 385201 - DNA, 33 bp, Homo sapien
taatgatttgactactcacccacataaggttct

SEQ ID NO: 385202 - DNA, 33 bp, Homo sapien
taatgatttgactacttacccacataaggttct

SEQ ID NO: 385203 - DNA, 33 bp, Homo sapien
attgtagtcatttaaaagtgaacttggttgttt

SEQ ID NO: 385204 - DNA, 33 bp, Homo sapien
attgtagtcatttaaaggtgaacttggttgttt

SEQ ID NO: 385205 - DNA, 33 bp, Homo sapien
gctttgagtcctgaaccaaacttgagggataat

SEQ ID NO: 385206 - DNA, 33 bp, Homo sapien
gctttgagtcctgaactaaacttgagggataat

SEQ ID NO: 385207 - DNA, 33 bp, Homo sapien
ggacaaagatccaaaccgtatcagtagtgtagt

SEQ ID NO: 385208 - DNA, 33 bp, Homo sapien
ggacaaagatccaaactgtatcagtagtgtagt

SEQ ID NO: 385209 - DNA, 33 bp, Homo sapien
tgtgctccaggtaacactattggctcctttgct

SEQ ID NO: 385210 - DNA, 33 bp, Homo sapien
tgtgctccaggtaacattattggctcctttgct

SEQ ID NO: 385211 - DNA, 33 bp, Homo sapien
attcgcttctctcttggactctcctgtgaatta

SEQ ID NO: 385212 - DNA, 33 bp, Homo sapien
attcgcttctctcttgtactctcctgtgaatta

SEQ ID NO: 385213 - DNA, 33 bp, Homo sapien
ttacaattatattgaaatgtcccttccatcaaa

SEQ ID NO: 385214 - DNA, 33 bp, Homo sapien
ttacaattatattgaagtgtcccttccatcaaa

SEQ ID NO: 385215 - DNA, 33 bp, Homo sapien
aagcaaactcttatcacccttactactgtaccc

SEQ ID NO: 385216 - DNA, 33 bp, Homo sapien
aagcaaactcttatcagccttactactgtaccc

SEQ ID NO: 385217 - DNA, 33 bp, Homo sapien
acggcctttatttccaccagagaaaagaaagaa

SEQ ID NO: 385218 - DNA, 33 bp, Homo sapien
acggcctttatttccatcagagaaaagaaagaa

SEQ ID NO: 385219 - DNA, 33 bp, Homo sapien
catgcatatttaattgaaatacacagacaatca

SEQ ID NO: 385220 - DNA, 33 bp, Homo sapien
catgcatatttaattgcaatacacagacaatca

SEQ ID NO: 385221 - DNA, 33 bp, Homo sapien
aaatggttacagaaacaaatatgtcttttacga

SEQ ID NO: 385222 - DNA, 33 bp, Homo sapien
aaatggttacagaaactaatatgtcttttacga

SEQ ID NO: 385223 - DNA, 33 bp, Homo sapien
ggttctcgctctggcacgatagtaaattctaag

SEQ ID NO: 385224 - DNA, 33 bp, Homo sapien
ggttctcgctctggcatgatagtaaattctaag

SEQ ID NO: 385225 - DNA, 33 bp, Homo sapien
gcctgccacttcactccgactaatcaaaagggg

SEQ ID NO: 385226 - DNA, 33 bp, Homo sapien
gcctgccacttcactctgactaatcaaaagggg

SEQ ID NO: 385227 - DNA, 33 bp, Homo sapien
gccacaagagaaatgcactggaaaggatgggaa

SEQ ID NO: 385228 - DNA, 33 bp, Homo sapien
gccacaagagaaatgcgctggaaaggatgggaa

SEQ ID NO: 385229 - DNA, 33 bp, Homo sapien
ggctaagtagcctttgaatttatcttttcaaag

SEQ ID NO: 385230 - DNA, 33 bp, Homo sapien
ggctaagtagcctttggatttatcttttcaaag

SEQ ID NO: 385231 - DNA, 33 bp, Homo sapien
tgtatttctctaatataacggtatcttaaccca

SEQ ID NO: 385232 - DNA, 33 bp, Homo sapien
tgtatttctctaatatgacggtatcttaaccca

SEQ ID NO: 385233 - DNA, 33 bp, Homo sapien
tacccataaatagtaaatcatgcctctggagaa

SEQ ID NO: 385234 - DNA, 33 bp, Homo sapien
tacccataaatagtaagtcatgcctctggagaa

SEQ ID NO: 385235 - DNA, 33 bp, Homo sapien
atggatcacagtctgcgctttgttagagttact

SEQ ID NO: 385236 - DNA, 33 bp, Homo sapien
atggatcacagtctgctctttgttagagttact

SEQ ID NO: 385237 - DNA, 33 bp, Homo sapien
ccagatgaagacctaccggctaacctccttgga

SEQ ID NO: 385238 - DNA, 33 bp, Homo sapien
ccagatgaagacctactggctaacctccttgga

SEQ ID NO: 385239 - DNA, 33 bp, Homo sapien
aattgatgcttgccaacgtgccaatgttttgac

SEQ ID NO: 385240 - DNA, 33 bp, Homo sapien
aattgatgcttgccaatgtgccaatgttttgac

SEQ ID NO: 385241 - DNA, 33 bp, Homo sapien
cctcagatcatgctaacgccactgttttctgta

SEQ ID NO: 385242 - DNA, 33 bp, Homo sapien
cctcagatcatgctaatgccactgttttctgta

SEQ ID NO: 385243 - DNA, 33 bp, Homo sapien
gaatttgtgaatatgacggggtatcagtcctgt

SEQ ID NO: 385244 - DNA, 33 bp, Homo sapien
gaatttgtgaatatgatggggtatcagtcctgt

SEQ ID NO: 385245 - DNA, 33 bp, Homo sapien
taacaacaaaatcaatcaatctacgatctagtt

SEQ ID NO: 385246 - DNA, 33 bp, Homo sapien
taacaacaaaatcaatgaatctacgatctagtt

SEQ ID NO: 385247 - DNA, 33 bp, Homo sapien
ttgggtgctagtctcactacctgggtgcaatat

SEQ ID NO: 385248 - DNA, 33 bp, Homo sapien
ttgggtgctagtctcattacctgggtgcaatat

SEQ ID NO: 385249 - DNA, 33 bp, Homo sapien
ccattccttaatcctgaatctgtcaatggacta

SEQ ID NO: 385250 - DNA, 33 bp, Homo sapien
ccattccttaatcctgtatctgtcaatggacta

SEQ ID NO: 385251 - DNA, 33 bp, Homo sapien
ataaaaatatccattacagaacagactagaata

SEQ ID NO: 385252 - DNA, 33 bp, Homo sapien
ataaaaatatccattagagaacagactagaata

SEQ ID NO: 385253 - DNA, 33 bp, Homo sapien
tggtaaagcaactcagaaaactagtcttctcct

SEQ ID NO: 385254 - DNA, 33 bp, Homo sapien
tggtaaagcaactcagcaaactagtcttctcct

SEQ ID NO: 385255 - DNA, 33 bp, Homo sapien
gcaccaataaaacacacgatctagacttgcaaa

SEQ ID NO: 385256 - DNA, 33 bp, Homo sapien
gcaccaataaaacacaggatctagacttgcaaa

SEQ ID NO: 385257 - DNA, 33 bp, Homo sapien
agttcgattaatttgcgcttctcattgtgatag

SEQ ID NO: 385258 - DNA, 33 bp, Homo sapien
agttcgattaatttgctcttctcattgtgatag

SEQ ID NO: 385259 - DNA, 33 bp, Homo sapien
cagagtagggcattcacgaaagtaggaggaata

SEQ ID NO: 385260 - DNA, 33 bp, Homo sapien
cagagtagggcattcatgaaagtaggaggaata

SEQ ID NO: 385261 - DNA, 33 bp, Homo sapien
caacagtataatacacaccagtaaaagaaacaa

SEQ ID NO: 385262 - DNA, 33 bp, Homo sapien
caacagtataatacacgccagtaaaagaaacaa

SEQ ID NO: 385263 - DNA, 33 bp, Homo sapien
tcactcaaaaagaaaacgctagcattatctaca

SEQ ID NO: 385264 - DNA, 33 bp, Homo sapien
tcactcaaaaagaaaaggctagcattatctaca

SEQ ID NO: 385265 - DNA, 33 bp, Homo sapien
agatataacttttgtacaggattgaaaaatctc

SEQ ID NO: 385266 - DNA, 33 bp, Homo sapien
agatataacttttgtagaggattgaaaaatctc

SEQ ID NO: 385267 - DNA, 33 bp, Homo sapien
ctaaattctatgacaacgtactcttcttatgtg

SEQ ID NO: 385268 - DNA, 33 bp, Homo sapien
ctaaattctatgacaaggtactcttcttatgtg

SEQ ID NO: 385269 - DNA, 33 bp, Homo sapien
tctcttgtatgtactacgctttctgtttcttga

SEQ ID NO: 385270 - DNA, 33 bp, Homo sapien
tctcttgtatgtactatgctttctgtttcttga

SEQ ID NO: 385271 - DNA, 33 bp, Homo sapien
ctttccatcaaccctgcagttagtcctaggagc

SEQ ID NO: 385272 - DNA, 33 bp, Homo sapien
ctttccatcaaccctggagttagtcctaggagc

SEQ ID NO: 385273 - DNA, 33 bp, Homo sapien
agattgggttgggaaaaaaaatgcagattttca

SEQ ID NO: 385274 - DNA, 33 bp, Homo sapien
agattgggttgggaaagaaaatgcagattttca

SEQ ID NO: 385275 - DNA, 33 bp, Homo sapien
tctgattgcgctcccaatgcctactatttatgg

SEQ ID NO: 385276 - DNA, 33 bp, Homo sapien
tctgattgcgctcccagtgcctactatttatgg

SEQ ID NO: 385277 - DNA, 33 bp, Homo sapien
aaaagatttgctattaggaggtttatgtcaaaa

SEQ ID NO: 385278 - DNA, 33 bp, Homo sapien
aaaagatttgctattatgaggtttatgtcaaaa

SEQ ID NO: 385279 - DNA, 33 bp, Homo sapien
taaagaaatgccagtaagactgtattcctctat

SEQ ID NO: 385280 - DNA, 33 bp, Homo sapien
taaagaaatgccagtacgactgtattcctctat

SEQ ID NO: 385281 - DNA, 33 bp, Homo sapien
gcttaacagaagtacaacaattttcctgattga

SEQ ID NO: 385282 - DNA, 33 bp, Homo sapien
gcttaacagaagtacagcaattttcctgattga

SEQ ID NO: 385283 - DNA, 33 bp, Homo sapien
aagcaagtaaggtaaacggcagtgcctgggttt

SEQ ID NO: 385284 - DNA, 33 bp, Homo sapien
aagcaagtaaggtaaatggcagtgcctgggttt

SEQ ID NO: 385285 - DNA, 33 bp, Homo sapien
atatccccaatgtccacgcttttttcacacctt

SEQ ID NO: 385286 - DNA, 33 bp, Homo sapien
atatccccaatgtccatgcttttttcacacctt

SEQ ID NO: 385287 - DNA, 33 bp, Homo sapien
atactaacttcatatacgcaataaaggtttttg

SEQ ID NO: 385288 - DNA, 33 bp, Homo sapien
atactaacttcatataggcaataaaggtttttg

SEQ ID NO: 385289 - DNA, 33 bp, Homo sapien
tattgatactggcacactaaaatatggtataag

SEQ ID NO: 385290 - DNA, 33 bp, Homo sapien
tattgatactggcacattaaaatatggtataag

SEQ ID NO: 385291 - DNA, 33 bp, Homo sapien
tgcattctaattctgggacctagggagactgtc

SEQ ID NO: 385292 - DNA, 33 bp, Homo sapien
tgcattctaattctggtacctagggagactgtc

SEQ ID NO: 385293 - DNA, 33 bp, Homo sapien
tttcttaatatccaaacctctgcttttacatgt

SEQ ID NO: 385294 - DNA, 33 bp, Homo sapien
tttcttaatatccaaatctctgcttttacatgt

SEQ ID NO: 385295 - DNA, 33 bp, Homo sapien
attgacaaccaaggtacgctttattctatcagt

SEQ ID NO: 385296 - DNA, 33 bp, Homo sapien
attgacaaccaaggtatgctttattctatcagt

SEQ ID NO: 385297 - DNA, 33 bp, Homo sapien
tctaagtgaaacagaacgatgaggacagcctga

SEQ ID NO: 385298 - DNA, 33 bp, Homo sapien
tctaagtgaaacagaatgatgaggacagcctga

SEQ ID NO: 385299 - DNA, 33 bp, Homo sapien
gaaggtatgttactaaagacaaattgcctctat

SEQ ID NO: 385300 - DNA, 33 bp, Homo sapien
gaaggtatgttactaacgacaaattgcctctat

SEQ ID NO: 385301 - DNA, 33 bp, Homo sapien
ttcctttgcataccaaatgtgtgttgtaacctt

SEQ ID NO: 385302 - DNA, 33 bp, Homo sapien
ttcctttgcataccaagtgtgtgttgtaacctt

SEQ ID NO: 385303 - DNA, 33 bp, Homo sapien
ctgcacctagtaaatacgtgcctttaaatcaca

SEQ ID NO: 385304 - DNA, 33 bp, Homo sapien
ctgcacctagtaaatatgtgcctttaaatcaca

SEQ ID NO: 385305 - DNA, 33 bp, Homo sapien
accactgaatctttccaactctcttccatcatt

SEQ ID NO: 385306 - DNA, 33 bp, Homo sapien
accactgaatctttccgactctcttccatcatt

SEQ ID NO: 385307 - DNA, 33 bp, Homo sapien
accttcttcaactccacctgacttccgtattag

SEQ ID NO: 385308 - DNA, 33 bp, Homo sapien
accttcttcaactccatctgacttccgtattag

SEQ ID NO: 385309 - DNA, 33 bp, Homo sapien
gaaactgagtctcaataacattttgagtctgaa

SEQ ID NO: 385310 - DNA, 33 bp, Homo sapien
gaaactgagtctcaatcacattttgagtctgaa

SEQ ID NO: 385311 - DNA, 33 bp, Homo sapien
ctgaacatgactcttacagattctccaccaaat

SEQ ID NO: 385312 - DNA, 33 bp, Homo sapien
ctgaacatgactcttatagattctccaccaaat

SEQ ID NO: 385313 - DNA, 33 bp, Homo sapien
ctgtactgaacactggacatttatgatgtgttg

SEQ ID NO: 385314 - DNA, 33 bp, Homo sapien
ctgtactgaacactgggcatttatgatgtgttg

SEQ ID NO: 385315 - DNA, 33 bp, Homo sapien
gttcaggtatcacctacgacataaagccttccc

SEQ ID NO: 385316 - DNA, 33 bp, Homo sapien
gttcaggtatcacctatgacataaagccttccc

SEQ ID NO: 385317 - DNA, 33 bp, Homo sapien
caggccttattatttccagcatacagaggttct

SEQ ID NO: 385318 - DNA, 33 bp, Homo sapien
caggccttattatttctagcatacagaggttct

SEQ ID NO: 385319 - DNA, 33 bp, Homo sapien
tttcaattctcagccaccgcactgcaaagagca

SEQ ID NO: 385320 - DNA, 33 bp, Homo sapien
tttcaattctcagccatcgcactgcaaagagca

SEQ ID NO: 385321 - DNA, 33 bp, Homo sapien
agtttgaagtcagataacatgacgtctccagca

SEQ ID NO: 385322 - DNA, 33 bp, Homo sapien
agtttgaagtcagataccatgacgtctccagca

SEQ ID NO: 385323 - DNA, 33 bp, Homo sapien
attattttgttacccacgtattacgcctggtac

SEQ ID NO: 385324 - DNA, 33 bp, Homo sapien
attattttgttacccatgtattacgcctggtac

SEQ ID NO: 385325 - DNA, 33 bp, Homo sapien
aatagctactgggaaaaaacaattacaatactc

SEQ ID NO: 385326 - DNA, 33 bp, Homo sapien
aatagctactgggaaagaacaattacaatactc

SEQ ID NO: 385327 - DNA, 33 bp, Homo sapien
tgtttggcctacgtaacatttacatagcatttt

SEQ ID NO: 385328 - DNA, 33 bp, Homo sapien
tgtttggcctacgtaatatttacatagcatttt

SEQ ID NO: 385329 - DNA, 33 bp, Homo sapien
taagagtcaacagtaaaggcatgaaagttacaa

SEQ ID NO: 385330 - DNA, 33 bp, Homo sapien
taagagtcaacagtaagggcatgaaagttacaa

SEQ ID NO: 385331 - DNA, 33 bp, Homo sapien
ttcataattgacccaaagtataattcatatgtc

SEQ ID NO: 385332 - DNA, 33 bp, Homo sapien
ttcataattgacccaaggtataattcatatgtc

SEQ ID NO: 385333 - DNA, 33 bp, Homo sapien
gaataaacaatatcagcaatgcaaaagagcatc

SEQ ID NO: 385334 - DNA, 33 bp, Homo sapien
gaataaacaatatcagtaatgcaaaagagcatc

SEQ ID NO: 385335 - DNA, 33 bp, Homo sapien
ctttagtatatgtcagcattacttgaggtgttt

SEQ ID NO: 385336 - DNA, 33 bp, Homo sapien
ctttagtatatgtcaggattacttgaggtgttt

SEQ ID NO: 385337 - DNA, 33 bp, Homo sapien
agagtgtatagccataaagcaggcaaaagcatt

SEQ ID NO: 385338 - DNA, 33 bp, Homo sapien
agagtgtatagccatacagcaggcaaaagcatt

SEQ ID NO: 385339 - DNA, 33 bp, Homo sapien
gcaatcccgatgattcacctaaaaaatcgatta

SEQ ID NO: 385340 - DNA, 33 bp, Homo sapien
gcaatcccgatgattcgcctaaaaaatcgatta

SEQ ID NO: 385341 - DNA, 33 bp, Homo sapien
tataatttggagatgccatcacagctgtgcctg

SEQ ID NO: 385342 - DNA, 33 bp, Homo sapien
tataatttggagatgctatcacagctgtgcctg

SEQ ID NO: 385343 - DNA, 33 bp, Homo sapien
tctgcaatgtccttagaaagcagcaattaaacc

SEQ ID NO: 385344 - DNA, 33 bp, Homo sapien
tctgcaatgtccttaggaagcagcaattaaacc

SEQ ID NO: 385345 - DNA, 33 bp, Homo sapien
aaccaaaatagacttacccaacaaaacttgaaa

SEQ ID NO: 385346 - DNA, 33 bp, Homo sapien
aaccaaaatagacttatccaacaaaacttgaaa

SEQ ID NO: 385347 - DNA, 33 bp, Homo sapien
acagggtctaggtgatcagccagtaattcacct

SEQ ID NO: 385348 - DNA, 33 bp, Homo sapien
acagggtctaggtgatgagccagtaattcacct

SEQ ID NO: 385349 - DNA, 33 bp, Homo sapien
cctacactcctaacaggcctcatccctcccata

SEQ ID NO: 385350 - DNA, 33 bp, Homo sapien
cctacactcctaacagtcctcatccctcccata

SEQ ID NO: 385351 - DNA, 33 bp, Homo sapien
agaaaaatattcaagaccatgaactgagctcta

SEQ ID NO: 385352 - DNA, 33 bp, Homo sapien
agaaaaatattcaagatcatgaactgagctcta

SEQ ID NO: 385353 - DNA, 33 bp, Homo sapien
aaagagtcacaaatacaccaaatgtacttatta

SEQ ID NO: 385354 - DNA, 33 bp, Homo sapien
aaagagtcacaaatacgccaaatgtacttatta

SEQ ID NO: 385355 - DNA, 33 bp, Homo sapien
gcaatattgtaacacaacctgtatttgcttgcg

SEQ ID NO: 385356 - DNA, 33 bp, Homo sapien
gcaatattgtaacacatcctgtatttgcttgcg

SEQ ID NO: 385357 - DNA, 33 bp, Homo sapien
cctcctaggctgaaaacgtctgtaagttccaac

SEQ ID NO: 385358 - DNA, 33 bp, Homo sapien
cctcctaggctgaaaatgtctgtaagttccaac

SEQ ID NO: 385359 - DNA, 33 bp, Homo sapien
tgtcgcatacataaaacataaatggaaagtctt

SEQ ID NO: 385360 - DNA, 33 bp, Homo sapien
tgtcgcatacataaaatataaatggaaagtctt

SEQ ID NO: 385361 - DNA, 33 bp, Homo sapien
aatccttgatggtacaagactggattaaaataa

SEQ ID NO: 385362 - DNA, 33 bp, Homo sapien
aatccttgatggtacaggactggattaaaataa

SEQ ID NO: 385363 - DNA, 33 bp, Homo sapien
aatttgtgttagaccaaatatgtccagggcaaa

SEQ ID NO: 385364 - DNA, 33 bp, Homo sapien
aatttgtgttagaccatatatgtccagggcaaa

SEQ ID NO: 385365 - DNA, 33 bp, Homo sapien
cacttggtggatttcacggatgtatgaggctca

SEQ ID NO: 385366 - DNA, 33 bp, Homo sapien
cacttggtggatttcagggatgtatgaggctca

SEQ ID NO: 385367 - DNA, 33 bp, Homo sapien
atattttaaatgacaaaatttggaagacttggc

SEQ ID NO: 385368 - DNA, 33 bp, Homo sapien
atattttaaatgacaacatttggaagacttggc

SEQ ID NO: 385369 - DNA, 33 bp, Homo sapien
tattaattccagcaaacctttacattgtatgaa

SEQ ID NO: 385370 - DNA, 33 bp, Homo sapien
tattaattccagcaaatctttacattgtatgaa

SEQ ID NO: 385371 - DNA, 33 bp, Homo sapien
cttgaacaaatgcttacatcaacatacccaaac

SEQ ID NO: 385372 - DNA, 33 bp, Homo sapien
cttgaacaaatgcttatatcaacatacccaaac

SEQ ID NO: 385373 - DNA, 33 bp, Homo sapien
aagggttgaaaactaagaaaatgcagaacgtga

SEQ ID NO: 385374 - DNA, 33 bp, Homo sapien
aagggttgaaaactaataaaatgcagaacgtga

SEQ ID NO: 385375 - DNA, 33 bp, Homo sapien
tacaaggtttctacaccgataattagaaaacac

SEQ ID NO: 385376 - DNA, 33 bp, Homo sapien
tacaaggtttctacacggataattagaaaacac

SEQ ID NO: 385377 - DNA, 33 bp, Homo sapien
caatgaaattgtcacaatagattttgagcaacg

SEQ ID NO: 385378 - DNA, 33 bp, Homo sapien
caatgaaattgtcacagtagattttgagcaacg

SEQ ID NO: 385379 - DNA, 33 bp, Homo sapien
gggaatgaaattttcaaagtatacctccttatt

SEQ ID NO: 385380 - DNA, 33 bp, Homo sapien
gggaatgaaattttcagagtatacctccttatt

SEQ ID NO: 385381 - DNA, 33 bp, Homo sapien
ggtatttttttgtgaaagtagtgataagaaaag

SEQ ID NO: 385382 - DNA, 33 bp, Homo sapien
ggtatttttttgtgaaggtagtgataagaaaag

SEQ ID NO: 385383 - DNA, 33 bp, Homo sapien
ctagtagtaatgcttaacaacaataaaaattac

SEQ ID NO: 385384 - DNA, 33 bp, Homo sapien
ctagtagtaatgcttagcaacaataaaaattac

SEQ ID NO: 385385 - DNA, 33 bp, Homo sapien
ttatggaggcattggaaagttattgatgattag

SEQ ID NO: 385386 - DNA, 33 bp, Homo sapien
ttatggaggcattggagagttattgatgattag

SEQ ID NO: 385387 - DNA, 33 bp, Homo sapien
catgattccattgacagtctaatttcatcccag

SEQ ID NO: 385388 - DNA, 33 bp, Homo sapien
catgattccattgacattctaatttcatcccag

SEQ ID NO: 385389 - DNA, 33 bp, Homo sapien
catggtcacagtagttcaaagctctagtttctc

SEQ ID NO: 385390 - DNA, 33 bp, Homo sapien
catggtcacagtagttgaaagctctagtttctc

SEQ ID NO: 385391 - DNA, 33 bp, Homo sapien
cttcttgcctcctgtacctatttttagcgttga

SEQ ID NO: 385392 - DNA, 33 bp, Homo sapien
cttcttgcctcctgtatctatttttagcgttga

SEQ ID NO: 385393 - DNA, 33 bp, Homo sapien
ctcaatggcataaaataaaggaaatctgtccat

SEQ ID NO: 385394 - DNA, 33 bp, Homo sapien
ctcaatggcataaaatgaaggaaatctgtccat

SEQ ID NO: 385395 - DNA, 33 bp, Homo sapien
cacaccacaactctcaacattgcacccatggct

SEQ ID NO: 385396 - DNA, 33 bp, Homo sapien
cacaccacaactctcatcattgcacccatggct

SEQ ID NO: 385397 - DNA, 33 bp, Homo sapien
gagaaatataaagagcccagttttaggacatat

SEQ ID NO: 385398 - DNA, 33 bp, Homo sapien
gagaaatataaagagctcagttttaggacatat

SEQ ID NO: 385399 - DNA, 33 bp, Homo sapien
agctgcaggcttttgaagacagcattctatgga

SEQ ID NO: 385400 - DNA, 33 bp, Homo sapien
agctgcaggcttttgaggacagcattctatgga

SEQ ID NO: 385401 - DNA, 33 bp, Homo sapien
tctaaaataggccttaacatggtcaaactagag

SEQ ID NO: 385402 - DNA, 33 bp, Homo sapien
tctaaaataggccttagcatggtcaaactagag

SEQ ID NO: 385403 - DNA, 33 bp, Homo sapien
acacagtaaagaagaaagtcagagtgtggggtg

SEQ ID NO: 385404 - DNA, 33 bp, Homo sapien
acacagtaaagaagaaggtcagagtgtggggtg

SEQ ID NO: 385405 - DNA, 33 bp, Homo sapien
tagtggtgtgaagtgcaaagaaacttccttgga

SEQ ID NO: 385406 - DNA, 33 bp, Homo sapien
tagtggtgtgaagtgcgaagaaacttccttgga

SEQ ID NO: 385407 - DNA, 33 bp, Homo sapien
caaaaggggatcgatacagaaataagtgatgta

SEQ ID NO: 385408 - DNA, 33 bp, Homo sapien
caaaaggggatcgatagagaaataagtgatgta

SEQ ID NO: 385409 - DNA, 33 bp, Homo sapien
gctacgcactgaagacagtctatgacattttaa

SEQ ID NO: 385410 - DNA, 33 bp, Homo sapien
gctacgcactgaagaccgtctatgacattttaa

SEQ ID NO: 385411 - DNA, 33 bp, Homo sapien
catttcatccaccctaactctgtatgtcactaa

SEQ ID NO: 385412 - DNA, 33 bp, Homo sapien
catttcatccaccctatctctgtatgtcactaa

SEQ ID NO: 385413 - DNA, 33 bp, Homo sapien
ctcagatcctttgtccaattgtccttgaaatgt

SEQ ID NO: 385414 - DNA, 33 bp, Homo sapien
ctcagatcctttgtccgattgtccttgaaatgt

SEQ ID NO: 385415 - DNA, 33 bp, Homo sapien
ctttacctagttaacaacatatattccaaagcc

SEQ ID NO: 385416 - DNA, 33 bp, Homo sapien
ctttacctagttaacagcatatattccaaagcc

SEQ ID NO: 385417 - DNA, 33 bp, Homo sapien
aatcaaccacttcacaagatacgatagagacac

SEQ ID NO: 385418 - DNA, 33 bp, Homo sapien
aatcaaccacttcacacgatacgatagagacac

SEQ ID NO: 385419 - DNA, 33 bp, Homo sapien
tgcaagttgctgagcaaaagacttaaaaagcta

SEQ ID NO: 385420 - DNA, 33 bp, Homo sapien
tgcaagttgctgagcagaagacttaaaaagcta

SEQ ID NO: 385421 - DNA, 33 bp, Homo sapien
ccaacttgatgcatcaggggagtaaagcacctc

SEQ ID NO: 385422 - DNA, 33 bp, Homo sapien
ccaacttgatgcatcatgggagtaaagcacctc

SEQ ID NO: 385423 - DNA, 33 bp, Homo sapien
tatagtcatgagattacacaaagaccttcagat

SEQ ID NO: 385424 - DNA, 33 bp, Homo sapien
tatagtcatgagattatacaaagaccttcagat

SEQ ID NO: 385425 - DNA, 33 bp, Homo sapien
aatgaaatgatcaaaactcactggtttgcatca

SEQ ID NO: 385426 - DNA, 33 bp, Homo sapien
aatgaaatgatcaaaagtcactggtttgcatca

SEQ ID NO: 385427 - DNA, 33 bp, Homo sapien
tacatgatcttacttacgtgcagaatcttaaaa

SEQ ID NO: 385428 - DNA, 33 bp, Homo sapien
tacatgatcttacttatgtgcagaatcttaaaa

SEQ ID NO: 385429 - DNA, 33 bp, Homo sapien
gctatgaagaaatacactctagcctcatggaaa

SEQ ID NO: 385430 - DNA, 33 bp, Homo sapien
gctatgaagaaatacagtctagcctcatggaaa

SEQ ID NO: 385431 - DNA, 33 bp, Homo sapien
ggcagtagctttctgaaaagatgaactcattgg

SEQ ID NO: 385432 - DNA, 33 bp, Homo sapien
ggcagtagctttctgagaagatgaactcattgg

SEQ ID NO: 385433 - DNA, 33 bp, Homo sapien
tttctgaaggaaacacagtaaagtgtagagtta

SEQ ID NO: 385434 - DNA, 33 bp, Homo sapien
tttctgaaggaaacacggtaaagtgtagagtta

SEQ ID NO: 385435 - DNA, 33 bp, Homo sapien
tgatcactctaatcaaactaattgacatatccc

SEQ ID NO: 385436 - DNA, 33 bp, Homo sapien
tgatcactctaatcaacctaattgacatatccc

SEQ ID NO: 385437 - DNA, 33 bp, Homo sapien
cagtttagtttccaaacaataaaacagaatgat

SEQ ID NO: 385438 - DNA, 33 bp, Homo sapien
cagtttagtttccaaagaataaaacagaatgat

SEQ ID NO: 385439 - DNA, 33 bp, Homo sapien
tgactgcaagagcaaaccgtcaatcccaggaag

SEQ ID NO: 385440 - DNA, 33 bp, Homo sapien
tgactgcaagagcaaatcgtcaatcccaggaag

SEQ ID NO: 385441 - DNA, 33 bp, Homo sapien
atcacttctatttggaacaaaattcccaaggat

SEQ ID NO: 385442 - DNA, 33 bp, Homo sapien
atcacttctatttggatcaaaattcccaaggat

SEQ ID NO: 385443 - DNA, 33 bp, Homo sapien
tctccagcaatggttcgaagtgaaatgaccaaa

SEQ ID NO: 385444 - DNA, 33 bp, Homo sapien
tctccagcaatggttctaagtgaaatgaccaaa

SEQ ID NO: 385445 - DNA, 33 bp, Homo sapien
attaatggcttggtgaaatccccacagtaatga

SEQ ID NO: 385446 - DNA, 33 bp, Homo sapien
attaatggcttggtgacatccccacagtaatga

SEQ ID NO: 385447 - DNA, 33 bp, Homo sapien
gagatttctttttctagctttagcacaacctga

SEQ ID NO: 385448 - DNA, 33 bp, Homo sapien
gagatttctttttctatctttagcacaacctga

SEQ ID NO: 385449 - DNA, 33 bp, Homo sapien
attaaaacagagttggaaacagagcgacagcag

SEQ ID NO: 385450 - DNA, 33 bp, Homo sapien
attaaaacagagttgggaacagagcgacagcag

SEQ ID NO: 385451 - DNA, 33 bp, Homo sapien
gcataacgaaggcaaaataaagggcaaagggac

SEQ ID NO: 385452 - DNA, 33 bp, Homo sapien
gcataacgaaggcaaagtaaagggcaaagggac

SEQ ID NO: 385453 - DNA, 33 bp, Homo sapien
ttcattctaattacccaatcatgctcaataaca

SEQ ID NO: 385454 - DNA, 33 bp, Homo sapien
ttcattctaattacccgatcatgctcaataaca

SEQ ID NO: 385455 - DNA, 33 bp, Homo sapien
agctacttatctcctcgcataaactttaacttg

SEQ ID NO: 385456 - DNA, 33 bp, Homo sapien
agctacttatctcctctcataaactttaacttg

SEQ ID NO: 385457 - DNA, 33 bp, Homo sapien
ggaaataggtttgaccactaaaatgacagattt

SEQ ID NO: 385458 - DNA, 33 bp, Homo sapien
ggaaataggtttgacctctaaaatgacagattt

SEQ ID NO: 385459 - DNA, 33 bp, Homo sapien
cttaactttctgaacacagaacattgggaactt

SEQ ID NO: 385460 - DNA, 33 bp, Homo sapien
cttaactttctgaacagagaacattgggaactt

SEQ ID NO: 385461 - DNA, 33 bp, Homo sapien
ggataggaagaaaaaacgttctttatatgcaaa

SEQ ID NO: 385462 - DNA, 33 bp, Homo sapien
ggataggaagaaaaaatgttctttatatgcaaa

SEQ ID NO: 385463 - DNA, 33 bp, Homo sapien
aatcaattgattttcccattcttccagcagtgc

SEQ ID NO: 385464 - DNA, 33 bp, Homo sapien
aatcaattgattttcctattcttccagcagtgc

SEQ ID NO: 385465 - DNA, 33 bp, Homo sapien
aactcatagaaatgcaatctagaggttagttca

SEQ ID NO: 385466 - DNA, 33 bp, Homo sapien
aactcatagaaatgcagtctagaggttagttca

SEQ ID NO: 385467 - DNA, 33 bp, Homo sapien
ccactgggaatgcagccatctcaggctttctga

SEQ ID NO: 385468 - DNA, 33 bp, Homo sapien
ccactgggaatgcagctatctcaggctttctga

SEQ ID NO: 385469 - DNA, 33 bp, Homo sapien
tgaaattgaagagtcacctaggatgcatttttt

SEQ ID NO: 385470 - DNA, 33 bp, Homo sapien
tgaaattgaagagtcagctaggatgcatttttt

SEQ ID NO: 385471 - DNA, 33 bp, Homo sapien
agagtagagattcacccacatattcagcacaca

SEQ ID NO: 385472 - DNA, 33 bp, Homo sapien
agagtagagattcaccgacatattcagcacaca

SEQ ID NO: 385473 - DNA, 33 bp, Homo sapien
ttctttcgcttccaggcagcctttagaagcaga

SEQ ID NO: 385474 - DNA, 33 bp, Homo sapien
ttctttcgcttccaggtagcctttagaagcaga

SEQ ID NO: 385475 - DNA, 33 bp, Homo sapien
taaattggcaaacaagacaaaatcaatgcaagt

SEQ ID NO: 385476 - DNA, 33 bp, Homo sapien
taaattggcaaacaaggcaaaatcaatgcaagt

SEQ ID NO: 385477 - DNA, 33 bp, Homo sapien
ccatatttgttgcctaaagatgacctgaataaa

SEQ ID NO: 385478 - DNA, 33 bp, Homo sapien
ccatatttgttgcctacagatgacctgaataaa

SEQ ID NO: 385479 - DNA, 33 bp, Homo sapien
tggttcctccaacattaaagggcctagttgaac

SEQ ID NO: 385480 - DNA, 33 bp, Homo sapien
tggttcctccaacattgaagggcctagttgaac

SEQ ID NO: 385481 - DNA, 33 bp, Homo sapien
attatcctaagactcaataattcttctcgactc

SEQ ID NO: 385482 - DNA, 33 bp, Homo sapien
attatcctaagactcagtaattcttctcgactc

SEQ ID NO: 385483 - DNA, 33 bp, Homo sapien
tcagaagatattatcaactagcctatcccagat

SEQ ID NO: 385484 - DNA, 33 bp, Homo sapien
tcagaagatattatcacctagcctatcccagat

SEQ ID NO: 385485 - DNA, 33 bp, Homo sapien
ggcattattagcttcacaaaattaccctaagac

SEQ ID NO: 385486 - DNA, 33 bp, Homo sapien
ggcattattagcttcataaaattaccctaagac

SEQ ID NO: 385487 - DNA, 33 bp, Homo sapien
ggatgtcctgtctcaaagatgagtccagagcat

SEQ ID NO: 385488 - DNA, 33 bp, Homo sapien
ggatgtcctgtctcaaggatgagtccagagcat

SEQ ID NO: 385489 - DNA, 33 bp, Homo sapien
atcaaaagccttcttaacacctcttttataacg

SEQ ID NO: 385490 - DNA, 33 bp, Homo sapien
atcaaaagccttcttatcacctcttttataacg

SEQ ID NO: 385491 - DNA, 33 bp, Homo sapien
acagtgtactggggaaatagaaacagctggtgg

SEQ ID NO: 385492 - DNA, 33 bp, Homo sapien
acagtgtactggggaagtagaaacagctggtgg

SEQ ID NO: 385493 - DNA, 33 bp, Homo sapien
ggacctacagtggttagaagtcatggtcatttt

SEQ ID NO: 385494 - DNA, 33 bp, Homo sapien
ggacctacagtggttataagtcatggtcatttt

SEQ ID NO: 385495 - DNA, 33 bp, Homo sapien
ttactgcagtgccccccgacaaatctgccctga

SEQ ID NO: 385496 - DNA, 33 bp, Homo sapien
ttactgcagtgccccctgacaaatctgccctga

SEQ ID NO: 385497 - DNA, 33 bp, Homo sapien
agactacaaagtttcaagtgctttgcaattaaa

SEQ ID NO: 385498 - DNA, 33 bp, Homo sapien
agactacaaagtttcaggtgctttgcaattaaa

SEQ ID NO: 385499 - DNA, 33 bp, Homo sapien
actgattggagtcatcccaacaactgaaagtga

SEQ ID NO: 385500 - DNA, 33 bp, Homo sapien
actgattggagtcatctcaacaactgaaagtga

SEQ ID NO: 385501 - DNA, 33 bp, Homo sapien; identical to SEQ ID NO: 385499

SEQ ID NO: 385502 - DNA, 33 bp, Homo sapien; identical to SEQ ID NO: 385500

SEQ ID NO: 385503 - DNA, 33 bp, Homo sapien
gtgggacctgtgaacactgtctgccaggtaaag

SEQ ID NO: 385504 - DNA, 33 bp, Homo sapien
gtgggacctgtgaacattgtctgccaggtaaag

SEQ ID NO: 385505 - DNA, 33 bp, Homo sapien
atccaaataatgtcaactgcaacaccaaattaa

SEQ ID NO: 385506 - DNA, 33 bp, Homo sapien
atccaaataatgtcaattgcaacaccaaattaa

SEQ ID NO: 385507 - DNA, 33 bp, Homo sapien
gttcaaggtagcttataactgataaccttaaac

SEQ ID NO: 385508 - DNA, 33 bp, Homo sapien
gttcaaggtagcttatgactgataaccttaaac

SEQ ID NO: 385509 - DNA, 33 bp, Homo sapien
ccctcgacagtattgacattgtaacagttgtat

SEQ ID NO: 385510 - DNA, 33 bp, Homo sapien
ccctcgacagtattgagattgtaacagttgtat

SEQ ID NO: 385511 - DNA, 33 bp, Homo sapien
tgcatttgattagacaatgggagttggacaagc

SEQ ID NO: 385512 - DNA, 33 bp, Homo sapien
tgcatttgattagacactgggagttggacaagc

SEQ ID NO: 385513 - DNA, 33 bp, Homo sapien
gtacaaatgtctcaaccatcccatttctttgta

SEQ ID NO: 385514 - DNA, 33 bp, Homo sapien
gtacaaatgtctcaactatcccatttctttgta

SEQ ID NO: 385515 - DNA, 33 bp, Homo sapien
agaatatagctaaataccctaactatgccattt

SEQ ID NO: 385516 - DNA, 33 bp, Homo sapien
agaatatagctaaatatcctaactatgccattt

SEQ ID NO: 385517 - DNA, 33 bp, Homo sapien
taaacagcttcttacacatgacttgagaaatga

SEQ ID NO: 385518 - DNA, 33 bp, Homo sapien
taaacagcttcttacagatgacttgagaaatga

SEQ ID NO: 385519 - DNA, 33 bp, Homo sapien
gaaagttgatgtgcaactgaagaacaggtgtgc

SEQ ID NO: 385520 - DNA, 33 bp, Homo sapien
gaaagttgatgtgcaagtgaagaacaggtgtgc

SEQ ID NO: 385521 - DNA, 33 bp, Homo sapien
tgcacatcaactttcaagtgagtttggcaacat

SEQ ID NO: 385522 - DNA, 33 bp, Homo sapien
tgcacatcaactttcaggtgagtttggcaacat

SEQ ID NO: 385523 - DNA, 33 bp, Homo sapien
tttgtgagccttgtcacgttctcaaataaggta

SEQ ID NO: 385524 - DNA, 33 bp, Homo sapien
tttgtgagccttgtcatgttctcaaataaggta

SEQ ID NO: 385525 - DNA, 33 bp, Homo sapien
ttaagtaccacaagtaactcaatttttattgct

SEQ ID NO: 385526 - DNA, 33 bp, Homo sapien
ttaagtaccacaagtagctcaatttttattgct

SEQ ID NO: 385527 - DNA, 33 bp, Homo sapien
gaggagaagtggtccagtcagagacaaaaatgc

SEQ ID NO: 385528 - DNA, 33 bp, Homo sapien
gaggagaagtggtccattcagagacaaaaatgc

SEQ ID NO: 385529 - DNA, 33 bp, Homo sapien
atttttagctgagcctcactccacacagaggca

SEQ ID NO: 385530 - DNA, 33 bp, Homo sapien
atttttagctgagccttactccacacagaggca

SEQ ID NO: 385531 - DNA, 33 bp, Homo sapien
aggtaacatcattgccaatttagaagcagggca

SEQ ID NO: 385532 - DNA, 33 bp, Homo sapien
aggtaacatcattgccgatttagaagcagggca

SEQ ID NO: 385533 - DNA, 33 bp, Homo sapien
ttaaagataatggaagacaaagagaaatgtttg

SEQ ID NO: 385534 - DNA, 33 bp, Homo sapien
ttaaagataatggaaggcaaagagaaatgtttg

SEQ ID NO: 385535 - DNA, 33 bp, Homo sapien
taaatcttaccccacaaccaacatctgtatttt

SEQ ID NO: 385536 - DNA, 33 bp, Homo sapien
taaatcttaccccacagccaacatctgtatttt

SEQ ID NO: 385537 - DNA, 33 bp, Homo sapien
atttgaaagtattcaaagcacaacttacttctg

SEQ ID NO: 385538 - DNA, 33 bp, Homo sapien
atttgaaagtattcaatgcacaacttacttctg

SEQ ID NO: 385539 - DNA, 33 bp, Homo sapien
agctcaaaattaaatccagcagtcagttaataa

SEQ ID NO: 385540 - DNA, 33 bp, Homo sapien
agctcaaaattaaatctagcagtcagttaataa

SEQ ID NO: 385541 - DNA, 33 bp, Homo sapien
aaaagcaggaatcagactagatataacaagtga

SEQ ID NO: 385542 - DNA, 33 bp, Homo sapien
aaaagcaggaatcagattagatataacaagtga

SEQ ID NO: 385543 - DNA, 33 bp, Homo sapien
aattaaaaggagactaaaaacacgaatgggaag

SEQ ID NO: 385544 - DNA, 33 bp, Homo sapien
aattaaaaggagactagaaacacgaatgggaag

SEQ ID NO: 385545 - DNA, 33 bp, Homo sapien
aacatatttggaagacaagaaaatgaacccaga

SEQ ID NO: 385546 - DNA, 33 bp, Homo sapien
aacatatttggaagacgagaaaatgaacccaga

SEQ ID NO: 385547 - DNA, 33 bp, Homo sapien
ggactcctggttttctgaccattgagaggaggg

SEQ ID NO: 385548 - DNA, 33 bp, Homo sapien
ggactcctggttttcttaccattgagaggaggg

SEQ ID NO: 385549 - DNA, 33 bp, Homo sapien
tgctttagttcttttccatgttcatctcactac

SEQ ID NO: 385550 - DNA, 33 bp, Homo sapien
tgctttagttcttttctatgttcatctcactac

SEQ ID NO: 385551 - DNA, 33 bp, Homo sapien
aaatcctgatgggaccacttattggctaaaaga

SEQ ID NO: 385552 - DNA, 33 bp, Homo sapien
aaatcctgatgggacctcttattggctaaaaga

SEQ ID NO: 385553 - DNA, 33 bp, Homo sapien
tgaattaactgtgaaacgacttaactgcgaaaa

SEQ ID NO: 385554 - DNA, 33 bp, Homo sapien
tgaattaactgtgaaatgacttaactgcgaaaa

SEQ ID NO: 385555 - DNA, 33 bp, Homo sapien
gtgtagaggtttataactcctgaacgcaatgat

SEQ ID NO: 385556 - DNA, 33 bp, Homo sapien
gtgtagaggtttataattcctgaacgcaatgat

SEQ ID NO: 385557 - DNA, 33 bp, Homo sapien
tcgaaaattgttctgcactatataggtcaccat

SEQ ID NO: 385558 - DNA, 33 bp, Homo sapien
tcgaaaattgttctgcgctatataggtcaccat

SEQ ID NO: 385559 - DNA, 33 bp, Homo sapien
atttaaagcaagacacacaggaaatcaatgtgg

SEQ ID NO: 385560 - DNA, 33 bp, Homo sapien
atttaaagcaagacacgcaggaaatcaatgtgg

SEQ ID NO: 385561 - DNA, 33 bp, Homo sapien
agaaaaacttgtagaaaatagtgctaacctcat

SEQ ID NO: 385562 - DNA, 33 bp, Homo sapien
agaaaaacttgtagaagatagtgctaacctcat

SEQ ID NO: 385563 - DNA, 33 bp, Homo sapien
aggaggctgactgatacagttgttgaggctgtg

SEQ ID NO: 385564 - DNA, 33 bp, Homo sapien
aggaggctgactgatatagttgttgaggctgtg

SEQ ID NO: 385565 - DNA, 33 bp, Homo sapien
tgaaaaagaaactttcagaaacacagtaaaata

SEQ ID NO: 385566 - DNA, 33 bp, Homo sapien
tgaaaaagaaactttcggaaacacagtaaaata

SEQ ID NO: 385567 - DNA, 33 bp, Homo sapien
ctcaggaatgaataaacctctgtctctgtaccc

SEQ ID NO: 385568 - DNA, 33 bp, Homo sapien
ctcaggaatgaataaatctctgtctctgtaccc

SEQ ID NO: 385569 - DNA, 33 bp, Homo sapien
taatttgaatgcaataaaaaatggtccaatgca

SEQ ID NO: 385570 - DNA, 33 bp, Homo sapien
taatttgaatgcaatagaaaatggtccaatgca

SEQ ID NO: 385571 - DNA, 33 bp, Homo sapien
ggaattgaaatcaggaactcagtgatatgtggg

SEQ ID NO: 385572 - DNA, 33 bp, Homo sapien
ggaattgaaatcaggatctcagtgatatgtggg

SEQ ID NO: 385573 - DNA, 33 bp, Homo sapien
tagaaatgcatattgccgcaagtgacaataaat

SEQ ID NO: 385574 - DNA, 33 bp, Homo sapien
tagaaatgcatattgctgcaagtgacaataaat

SEQ ID NO: 385575 - DNA, 33 bp, Homo sapien
aaatgtgacctattagcatgtaagttttcttat

SEQ ID NO: 385576 - DNA, 33 bp, Homo sapien
aaatgtgacctattagtatgtaagttttcttat

SEQ ID NO: 385577 - DNA, 33 bp, Homo sapien
catccctggaccttgccaattcctatttaaatg

SEQ ID NO: 385578 - DNA, 33 bp, Homo sapien
catccctggaccttgctaattcctatttaaatg

SEQ ID NO: 385579 - DNA, 33 bp, Homo sapien
caacaaaaataatgacaatggctaatatttttt

SEQ ID NO: 385580 - DNA, 33 bp, Homo sapien
caacaaaaataatgacgatggctaatatttttt

SEQ ID NO: 385581 - DNA, 33 bp, Homo sapien
ttcagactactactgacacaatcattttttgat

SEQ ID NO: 385582 - DNA, 33 bp, Homo sapien
ttcagactactactgagacaatcattttttgat

SEQ ID NO: 385583 - DNA, 33 bp, Homo sapien
gcaaaagcatacctaaatgttagccaccgcagt

SEQ ID NO: 385584 - DNA, 33 bp, Homo sapien
gcaaaagcatacctaagtgttagccaccgcagt

SEQ ID NO: 385585 - DNA, 33 bp, Homo sapien
ttgaagctgaatgtgacatttgaactcaaatcc

SEQ ID NO: 385586 - DNA, 33 bp, Homo sapien
ttgaagctgaatgtgatatttgaactcaaatcc

SEQ ID NO: 385587 - DNA, 33 bp, Homo sapien
agctaattttaccatcccttctgcttcatgcta

SEQ ID NO: 385588 - DNA, 33 bp, Homo sapien
agctaattttaccatctcttctgcttcatgcta

SEQ ID NO: 385589 - DNA, 33 bp, Homo sapien
tgtactgcaaaactgcccttggccatgcattgt

SEQ ID NO: 385590 - DNA, 33 bp, Homo sapien
tgtactgcaaaactgctcttggccatgcattgt

SEQ ID NO: 385591 - DNA, 33 bp, Homo sapien
gcaagctaaagatgaaaaattacgttattttat

SEQ ID NO: 385592 - DNA, 33 bp, Homo sapien
gcaagctaaagatgaacaattacgttattttat

SEQ ID NO: 385593 - DNA, 33 bp, Homo sapien
acataaagaaggaacaactgagaaaatggctct

SEQ ID NO: 385594 - DNA, 33 bp, Homo sapien
acataaagaaggaacatctgagaaaatggctct

SEQ ID NO: 385595 - DNA, 33 bp, Homo sapien
taatctatcttttcaactctcccataatcttga

SEQ ID NO: 385596 - DNA, 33 bp, Homo sapien
taatctatcttttcaattctcccataatcttga

SEQ ID NO: 385597 - DNA, 33 bp, Homo sapien
cttaatactgctaatacgacgaaatacgttatt

SEQ ID NO: 385598 - DNA, 33 bp, Homo sapien
cttaatactgctaatatgacgaaatacgttatt

SEQ ID NO: 385599 - DNA, 33 bp, Homo sapien
ctgcaggttttagagaacttatgtctgatggtt

SEQ ID NO: 385600 - DNA, 33 bp, Homo sapien
ctgcaggttttagagatcttatgtctgatggtt

SEQ ID NO: 385601 - DNA, 33 bp, Homo sapien
ttcttgagataacatcaccggtaggaatgagga

SEQ ID NO: 385602 - DNA, 33 bp, Homo sapien
ttcttgagataacatcgccggtaggaatgagga

SEQ ID NO: 385603 - DNA, 33 bp, Homo sapien
tgcctctttaaaattcacacaatagtggttcat

SEQ ID NO: 385604 - DNA, 33 bp, Homo sapien
tgcctctttaaaattcgcacaatagtggttcat

SEQ ID NO: 385605 - DNA, 33 bp, Homo sapien
attgcattgtaaacccacaaaggcaagggtagg

SEQ ID NO: 385606 - DNA, 33 bp, Homo sapien
attgcattgtaaacccgcaaaggcaagggtagg

SEQ ID NO: 385607 - DNA, 33 bp, Homo sapien
agaaatgtgtccaaaaaaggagtggcatttgtt

SEQ ID NO: 385608 - DNA, 33 bp, Homo sapien
agaaatgtgtccaaaataggagtggcatttgtt

SEQ ID NO: 385609 - DNA, 33 bp, Homo sapien
gattaaagattatccacaggcaagatgaacaac

SEQ ID NO: 385610 - DNA, 33 bp, Homo sapien
gattaaagattatccataggcaagatgaacaac

SEQ ID NO: 385611 - DNA, 33 bp, Homo sapien
gcctgggccagaattgcagaaattttgataaga

SEQ ID NO: 385612 - DNA, 33 bp, Homo sapien
gcctgggccagaattggagaaattttgataaga

SEQ ID NO: 385613 - DNA, 33 bp, Homo sapien
gagtgtcatctttatcaaagtcaaaagtccagg

SEQ ID NO: 385614 - DNA, 33 bp, Homo sapien
gagtgtcatctttatcgaagtcaaaagtccagg

SEQ ID NO: 385615 - DNA, 33 bp, Homo sapien
atccttagaaaaatttaaaatacctggcagatt

SEQ ID NO: 385616 - DNA, 33 bp, Homo sapien
atccttagaaaaatttgaaatacctggcagatt

SEQ ID NO: 385617 - DNA, 33 bp, Homo sapien
aggtaatctaaaatacaaaatagttggctgtct

SEQ ID NO: 385618 - DNA, 33 bp, Homo sapien
aggtaatctaaaatacgaaatagttggctgtct

SEQ ID NO: 385619 - DNA, 33 bp, Homo sapien
caaacacaaatgtcccaatgggggtgctcatgg

SEQ ID NO: 385620 - DNA, 33 bp, Homo sapien
caaacacaaatgtcccgatgggggtgctcatgg

SEQ ID NO: 385621 - DNA, 33 bp, Homo sapien
gatgtgtgattaggctaagcaggttgtcatgag

SEQ ID NO: 385622 - DNA, 33 bp, Homo sapien
gatgtgtgattaggctgagcaggttgtcatgag

SEQ ID NO: 385623 - DNA, 33 bp, Homo sapien
gtattttgggaatgtgaacaaatctagcccatg

SEQ ID NO: 385624 - DNA, 33 bp, Homo sapien
gtattttgggaatgtgcacaaatctagcccatg

SEQ ID NO: 385625 - DNA, 33 bp, Homo sapien
acgatgtgtgtctggaagaggggtttaatattg

SEQ ID NO: 385626 - DNA, 33 bp, Homo sapien
acgatgtgtgtctggaggaggggtttaatattg

SEQ ID NO: 385627 - DNA, 33 bp, Homo sapien
acctgggggtatcacacgggtccttttaagcaa

SEQ ID NO: 385628 - DNA, 33 bp, Homo sapien
acctgggggtatcacatgggtccttttaagcaa

SEQ ID NO: 385629 - DNA, 33 bp, Homo sapien
attgcaaaataactaaaggatattgccagagtt

SEQ ID NO: 385630 - DNA, 33 bp, Homo sapien
attgcaaaataactaatggatattgccagagtt

SEQ ID NO: 385631 - DNA, 33 bp, Homo sapien
gccagagcaaatgaaacgacaaatgaaaaaccg

SEQ ID NO: 385632 - DNA, 33 bp, Homo sapien
gccagagcaaatgaaatgacaaatgaaaaaccg

SEQ ID NO: 385633 - DNA, 33 bp, Homo sapien
ttttatactttattaaccaggaacatagcagca

SEQ ID NO: 385634 - DNA, 33 bp, Homo sapien
ttttatactttattaagcaggaacatagcagca

SEQ ID NO: 385635 - DNA, 33 bp, Homo sapien
atattgcaatcctcaaaactcagaatgtggaat

SEQ ID NO: 385636 - DNA, 33 bp, Homo sapien
atattgcaatcctcaatactcagaatgtggaat

SEQ ID NO: 385637 - DNA, 33 bp, Homo sapien
tctttgtaattttgaaatggcttccaattatct

SEQ ID NO: 385638 - DNA, 33 bp, Homo sapien
tctttgtaattttgaagtggcttccaattatct

SEQ ID NO: 385639 - DNA, 33 bp, Homo sapien
aggattcaaggaagaaatcagagtggctagaat

SEQ ID NO: 385640 - DNA, 33 bp, Homo sapien
aggattcaaggaagaactcagagtggctagaat

SEQ ID NO: 385641 - DNA, 33 bp, Homo sapien
actgtagtataacgtgcaactcatttgctccgt

SEQ ID NO: 385642 - DNA, 33 bp, Homo sapien
actgtagtataacgtgtaactcatttgctccgt

SEQ ID NO: 385643 - DNA, 33 bp, Homo sapien
acagcaatcaggtacaacaagtgacccgcgggg

SEQ ID NO: 385644 - DNA, 33 bp, Homo sapien
acagcaatcaggtacaccaagtgacccgcgggg

SEQ ID NO: 385645 - DNA, 33 bp, Homo sapien
tgacaagacataaaagcaaaagcttgaatcctc

SEQ ID NO: 385646 - DNA, 33 bp, Homo sapien
tgacaagacataaaagtaaaagcttgaatcctc

SEQ ID NO: 385647 - DNA, 33 bp, Homo sapien
ctcaagccacatggtcaaaattttaaataatgg

SEQ ID NO: 385648 - DNA, 33 bp, Homo sapien
ctcaagccacatggtctaaattttaaataatgg

SEQ ID NO: 385649 - DNA, 33 bp, Homo sapien
tgactctcttgcttaactcaggtcttagctcaa

SEQ ID NO: 385650 - DNA, 33 bp, Homo sapien
tgactctcttgcttaattcaggtcttagctcaa

SEQ ID NO: 385651 - DNA, 33 bp, Homo sapien
gcaggattcaacatgaagggaagtttgaatatt

SEQ ID NO: 385652 - DNA, 33 bp, Homo sapien
gcaggattcaacatgatgggaagtttgaatatt

SEQ ID NO: 385653 - DNA, 33 bp, Homo sapien
ctcatgcctgaccataaaaagataaatacttta

SEQ ID NO: 385654 - DNA, 33 bp, Homo sapien
ctcatgcctgaccatacaaagataaatacttta

SEQ ID NO: 385655 - DNA, 33 bp, Homo sapien
cattcccatgctagaacgaaaaaatccaactcc

SEQ ID NO: 385656 - DNA, 33 bp, Homo sapien
cattcccatgctagaaggaaaaaatccaactcc

SEQ ID NO: 385657 - DNA, 33 bp, Homo sapien
gtaaaaccagtgcaaagtgagttataccctagg

SEQ ID NO: 385658 - DNA, 33 bp, Homo sapien
gtaaaaccagtgcaaattgagttataccctagg

SEQ ID NO: 385659 - DNA, 33 bp, Homo sapien
ttggtggaataaaagcacatgatcttgggacgc

SEQ ID NO: 385660 - DNA, 33 bp, Homo sapien
ttggtggaataaaagcgcatgatcttgggacgc

SEQ ID NO: 385661 - DNA, 33 bp, Homo sapien
taatacaaggtgataacgggaacctcttgcagt

SEQ ID NO: 385662 - DNA, 33 bp, Homo sapien
taatacaaggtgataatgggaacctcttgcagt

SEQ ID NO: 385663 - DNA, 33 bp, Homo sapien
acagaataaattccaagtgcatcaaagatttag

SEQ ID NO: 385664 - DNA, 33 bp, Homo sapien
acagaataaattccaattgcatcaaagatttag

SEQ ID NO: 385665 - DNA, 33 bp, Homo sapien
ctcacactttgtgcctaaaatatcatgcacagg

SEQ ID NO: 385666 - DNA, 33 bp, Homo sapien
ctcacactttgtgcctcaaatatcatgcacagg

SEQ ID NO: 385667 - DNA, 33 bp, Homo sapien
atttggaaaatgctagaaatcgtatctcacacc

SEQ ID NO: 385668 - DNA, 33 bp, Homo sapien
atttggaaaatgctaggaatcgtatctcacacc

SEQ ID NO: 385669 - DNA, 33 bp, Homo sapien
ggttctggtaggcctaaaagagttaatacacac

SEQ ID NO: 385670 - DNA, 33 bp, Homo sapien
ggttctggtaggcctagaagagttaatacacac

SEQ ID NO: 385671 - DNA, 33 bp, Homo sapien
acagagttctccacacagtgaatagctccgaga

SEQ ID NO: 385672 - DNA, 33 bp, Homo sapien
acagagttctccacacggtgaatagctccgaga

SEQ ID NO: 385673 - DNA, 33 bp, Homo sapien
taattatgaacaaaacacagtagaataaacaca

SEQ ID NO: 385674 - DNA, 33 bp, Homo sapien
taattatgaacaaaacgcagtagaataaacaca

SEQ ID NO: 385675 - DNA, 33 bp, Homo sapien
tttccctgaccatcacaaacatttttctaataa

SEQ ID NO: 385676 - DNA, 33 bp, Homo sapien
tttccctgaccatcaccaacatttttctaataa

SEQ ID NO: 385677 - DNA, 33 bp, Homo sapien
aacagagagaaatgcaaaaaagcactaaaatat

SEQ ID NO: 385678 - DNA, 33 bp, Homo sapien
aacagagagaaatgcataaaagcactaaaatat

SEQ ID NO: 385679 - DNA, 33 bp, Homo sapien
ggcttttatattgacaagcattgccattgggcc

SEQ ID NO: 385680 - DNA, 33 bp, Homo sapien
ggcttttatattgacaggcattgccattgggcc

SEQ ID NO: 385681 - DNA, 33 bp, Homo sapien
cttgaaactgttagaaaaaggtggaggccacat

SEQ ID NO: 385682 - DNA, 33 bp, Homo sapien
cttgaaactgttagaacaaggtggaggccacat

SEQ ID NO: 385683 - DNA, 33 bp, Homo sapien
cagcgagggagataagcctattttggccaagga

SEQ ID NO: 385684 - DNA, 33 bp, Homo sapien
cagcgagggagataaggctattttggccaagga

SEQ ID NO: 385685 - DNA, 33 bp, Homo sapien
tttggccaaggaaacaagatgtgtaaaggcatc

SEQ ID NO: 385686 - DNA, 33 bp, Homo sapien
tttggccaaggaaacaggatgtgtaaaggcatc

SEQ ID NO: 385687 - DNA, 33 bp, Homo sapien
gcatggacttcccacaaatgtttctgtagcatt

SEQ ID NO: 385688 - DNA, 33 bp, Homo sapien
gcatggacttcccacatatgtttctgtagcatt

SEQ ID NO: 385689 - DNA, 33 bp, Homo sapien
ggctggaggatgtactcacagaatccttatagt

SEQ ID NO: 385690 - DNA, 33 bp, Homo sapien
ggctggaggatgtacttacagaatccttatagt

SEQ ID NO: 385691 - DNA, 33 bp, Homo sapien
agtaccattttccccaatctagcagtgagtaaa

SEQ ID NO: 385692 - DNA, 33 bp, Homo sapien
agtaccattttccccagtctagcagtgagtaaa

SEQ ID NO: 385693 - DNA, 33 bp, Homo sapien
tgagaggagagagacacggggagttattgttta

SEQ ID NO: 385694 - DNA, 33 bp, Homo sapien
tgagaggagagagacatggggagttattgttta

SEQ ID NO: 385695 - DNA, 33 bp, Homo sapien
agaattttggctgctgaagaaaactccataatg

SEQ ID NO: 385696 - DNA, 33 bp, Homo sapien
agaattttggctgctgcagaaaactccataatg

SEQ ID NO: 385697 - DNA, 33 bp, Homo sapien
ctttccaattatatgcaacctaagcaaataaat

SEQ ID NO: 385698 - DNA, 33 bp, Homo sapien
ctttccaattatatgcgacctaagcaaataaat

SEQ ID NO: 385699 - DNA, 33 bp, Homo sapien
ggcagttaagcaacaacgggccagttcatacaa

SEQ ID NO: 385700 - DNA, 33 bp, Homo sapien
ggcagttaagcaacaaggggccagttcatacaa

SEQ ID NO: 385701 - DNA, 33 bp, Homo sapien
agaggtaaccactggcaattgttggatatgtgt

SEQ ID NO: 385702 - DNA, 33 bp, Homo sapien
agaggtaaccactggccattgttggatatgtgt

SEQ ID NO: 385703 - DNA, 33 bp, Homo sapien
agtcaaatgggaaacacggtgatacagaaggca

SEQ ID NO: 385704 - DNA, 33 bp, Homo sapien
agtcaaatgggaaacatggtgatacagaaggca

SEQ ID NO: 385705 - DNA, 33 bp, Homo sapien
cccacctcttcttccagtacacttttagtaagg

SEQ ID NO: 385706 - DNA, 33 bp, Homo sapien
cccacctcttcttccattacacttttagtaagg

SEQ ID NO: 385707 - DNA, 33 bp, Homo sapien
caatgaggtgaaaagacatgaagaaagaggact

SEQ ID NO: 385708 - DNA, 33 bp, Homo sapien
caatgaggtgaaaagatatgaagaaagaggact

SEQ ID NO: 385709 - DNA, 33 bp, Homo sapien
attttcagcctagaaaatgagcatttatcacca

SEQ ID NO: 385710 - DNA, 33 bp, Homo sapien
attttcagcctagaaattgagcatttatcacca

SEQ ID NO: 385711 - DNA, 33 bp, Homo sapien
ctgtatctcaaacgccagagtcatgagtttacc

SEQ ID NO: 385712 - DNA, 33 bp, Homo sapien
ctgtatctcaaacgccggagtcatgagtttacc

SEQ ID NO: 385713 - DNA, 33 bp, Homo sapien
gagaggttcaggaaataaaactactgggtacta

SEQ ID NO: 385714 - DNA, 33 bp, Homo sapien
gagaggttcaggaaatgaaactactgggtacta

SEQ ID NO: 385715 - DNA, 33 bp, Homo sapien
acctcaattatcaccaagacaaaaaactgcaaa

SEQ ID NO: 385716 - DNA, 33 bp, Homo sapien
acctcaattatcaccaggacaaaaaactgcaaa

SEQ ID NO: 385717 - DNA, 33 bp, Homo sapien
ttaagaaacctgaggaaagttcaaaggccaatg

SEQ ID NO: 385718 - DNA, 33 bp, Homo sapien
ttaagaaacctgaggagagttcaaaggccaatg

SEQ ID NO: 385719 - DNA, 33 bp, Homo sapien
acgagaagcaagaaaaagtgtacaaaaatagat

SEQ ID NO: 385720 - DNA, 33 bp, Homo sapien
acgagaagcaagaaaaggtgtacaaaaatagat

SEQ ID NO: 385721 - DNA, 33 bp, Homo sapien
gagagtttcagctggaccaagaattatgagcca

SEQ ID NO: 385722 - DNA, 33 bp, Homo sapien
gagagtttcagctggagcaagaattatgagcca

SEQ ID NO: 385723 - DNA, 33 bp, Homo sapien
catcgtctttgtcaaggccactcaggcagcgag

SEQ ID NO: 385724 - DNA, 33 bp, Homo sapien
catcgtctttgtcaagtccactcaggcagcgag

SEQ ID NO: 385725 - DNA, 33 bp, Homo sapien
acatagagttgctggaaaaacagctcaggcaaa

SEQ ID NO: 385726 - DNA, 33 bp, Homo sapien
acatagagttgctggagaaacagctcaggcaaa

SEQ ID NO: 385727 - DNA, 33 bp, Homo sapien
tttgttggaatgatgacgtctacctcactggat

SEQ ID NO: 385728 - DNA, 33 bp, Homo sapien
tttgttggaatgatgatgtctacctcactggat

SEQ ID NO: 385729 - DNA, 33 bp, Homo sapien
ctttttctcctgttgagcaccttctgattgttg

SEQ ID NO: 385730 - DNA, 33 bp, Homo sapien
ctttttctcctgttgatcaccttctgattgttg

SEQ ID NO: 385731 - DNA, 33 bp, Homo sapien
actaacaagcagcagcacacatttctcttacta

SEQ ID NO: 385732 - DNA, 33 bp, Homo sapien
actaacaagcagcagcgcacatttctcttacta

SEQ ID NO: 385733 - DNA, 33 bp, Homo sapien
aacatggaatggaaataaagtgtagtgtgtttg

SEQ ID NO: 385734 - DNA, 33 bp, Homo sapien
aacatggaatggaaatgaagtgtagtgtgtttg

SEQ ID NO: 385735 - DNA, 33 bp, Homo sapien
atacgggtatcatccacactctaaacctagaaa

SEQ ID NO: 385736 - DNA, 33 bp, Homo sapien
atacgggtatcatccatactctaaacctagaaa

SEQ ID NO: 385737 - DNA, 33 bp, Homo sapien
ttgaagtggtgatagcaaagcaaaatgcgttca

SEQ ID NO: 385738 - DNA, 33 bp, Homo sapien
ttgaagtggtgatagcgaagcaaaatgcgttca

SEQ ID NO: 385739 - DNA, 33 bp, Homo sapien
ctgaacttcctttggaaaattactccttatgat

SEQ ID NO: 385740 - DNA, 33 bp, Homo sapien
ctgaacttcctttggacaattactccttatgat

SEQ ID NO: 385741 - DNA, 33 bp, Homo sapien
gggacaacctaaagcaactttctgtcagctatt

SEQ ID NO: 385742 - DNA, 33 bp, Homo sapien
gggacaacctaaagcagctttctgtcagctatt

SEQ ID NO: 385743 - DNA, 33 bp, Homo sapien
tgagtatccaacacccagcccatgatcgaaatc

SEQ ID NO: 385744 - DNA, 33 bp, Homo sapien
tgagtatccaacacccggcccatgatcgaaatc

SEQ ID NO: 385745 - DNA, 33 bp, Homo sapien
tatccagctagtcactcagatcccagcaagtca

SEQ ID NO: 385746 - DNA, 33 bp, Homo sapien
tatccagctagtcactgagatcccagcaagtca

SEQ ID NO: 385747 - DNA, 33 bp, Homo sapien
catgcatcccatcttcaaccaggcgccggcagg

SEQ ID NO: 385748 - DNA, 33 bp, Homo sapien
catgcatcccatcttcgaccaggcgccggcagg

SEQ ID NO: 385749 - DNA, 33 bp, Homo sapien
ccacccgtctcaaacactccaaaacacgtgtcc

SEQ ID NO: 385750 - DNA, 33 bp, Homo sapien
ccacccgtctcaaacattccaaaacacgtgtcc

SEQ ID NO: 385751 - DNA, 33 bp, Homo sapien
gcctggtacccagcagacaatcggcaaatgcct

SEQ ID NO: 385752 - DNA, 33 bp, Homo sapien
gcctggtacccagcaggcaatcggcaaatgcct

SEQ ID NO: 385753 - DNA, 33 bp, Homo sapien
aaattgggaataacagcaagaatagcagtgaga

SEQ ID NO: 385754 - DNA, 33 bp, Homo sapien
aaattgggaataacagtaagaatagcagtgaga

SEQ ID NO: 385755 - DNA, 33 bp, Homo sapien
aagagtccacaaactacagcctacaggtcaaat

SEQ ID NO: 385756 - DNA, 33 bp, Homo sapien
aagagtccacaaactatagcctacaggtcaaat

SEQ ID NO: 385757 - DNA, 33 bp, Homo sapien
aataccccaaggaccactgcagtaaggacagag

SEQ ID NO: 385758 - DNA, 33 bp, Homo sapien
aataccccaaggaccattgcagtaaggacagag

SEQ ID NO: 385759 - DNA, 33 bp, Homo sapien
atgtactggctttaaccgaggggatttcctgct

SEQ ID NO: 385760 - DNA, 33 bp, Homo sapien
atgtactggctttaactgaggggatttcctgct

SEQ ID NO: 385761 - DNA, 33 bp, Homo sapien
acctcactgcgtgtgacaactacagatccaagc

SEQ ID NO: 385762 - DNA, 33 bp, Homo sapien
acctcactgcgtgtgagaactacagatccaagc

SEQ ID NO: 385763 - DNA, 33 bp, Homo sapien
aaagaaaactctgaagaatacagaaagagccga

SEQ ID NO: 385764 - DNA, 33 bp, Homo sapien
aaagaaaactctgaagcatacagaaagagccga

SEQ ID NO: 385765 - DNA, 33 bp, Homo sapien
ttagcttgcatgggaacagagatagaataattg

SEQ ID NO: 385766 - DNA, 33 bp, Homo sapien
ttagcttgcatgggaatagagatagaataattg

SEQ ID NO: 385767 - DNA, 33 bp, Homo sapien
ggaagaaagaccatcaacaaataattacataaa

SEQ ID NO: 385768 - DNA, 33 bp, Homo sapien
ggaagaaagaccatcagcaaataattacataaa

SEQ ID NO: 385769 - DNA, 33 bp, Homo sapien
ttcttggtagaattaaataatgtgaaacaacat

SEQ ID NO: 385770 - DNA, 33 bp, Homo sapien
ttcttggtagaattaagtaatgtgaaacaacat

SEQ ID NO: 385771 - DNA, 33 bp, Homo sapien
aaaaacagctcaaataagtcaaaggaggcccac

SEQ ID NO: 385772 - DNA, 33 bp, Homo sapien
aaaaacagctcaaataggtcaaaggaggcccac

SEQ ID NO: 385773 - DNA, 33 bp, Homo sapien
agcttcagaatcatcaacaaatacatgatcgtg

SEQ ID NO: 385774 - DNA, 33 bp, Homo sapien
agcttcagaatcatcagcaaatacatgatcgtg

SEQ ID NO: 385775 - DNA, 33 bp, Homo sapien
gattttcaagtgattccaatatgcacccctaga

SEQ ID NO: 385776 - DNA, 33 bp, Homo sapien
gattttcaagtgattctaatatgcacccctaga

SEQ ID NO: 385777 - DNA, 33 bp, Homo sapien
gatctcaaacaacctaatacctcagatgaacta

SEQ ID NO: 385778 - DNA, 33 bp, Homo sapien
gatctcaaacaacctagtacctcagatgaacta

SEQ ID NO: 385779 - DNA, 33 bp, Homo sapien
taacatttggggaaaacgattggctaatcaaaa

SEQ ID NO: 385780 - DNA, 33 bp, Homo sapien
taacatttggggaaaatgattggctaatcaaaa

SEQ ID NO: 385781 - DNA, 33 bp, Homo sapien
gcaaagagaacattggaaaaaaaatggaatcaa

SEQ ID NO: 385782 - DNA, 33 bp, Homo sapien
gcaaagagaacattgggaaaaaaatggaatcaa

SEQ ID NO: 385783 - DNA, 33 bp, Homo sapien
gactattttcctgaaaaaaaacaggcacacaac

SEQ ID NO: 385784 - DNA, 33 bp, Homo sapien
gactattttcctgaaataaaacaggcacacaac

SEQ ID NO: 385785 - DNA, 33 bp, Homo sapien
ttgcttctatgtatccaagtactttagatttta

SEQ ID NO: 385786 - DNA, 33 bp, Homo sapien
ttgcttctatgtatccgagtactttagatttta

SEQ ID NO: 385787 - DNA, 33 bp, Homo sapien
ttgactaagagcaaggcatttgcatccctacga

SEQ ID NO: 385788 - DNA, 33 bp, Homo sapien
ttgactaagagcaaggtatttgcatccctacga

SEQ ID NO: 385789 - DNA, 33 bp, Homo sapien
aataaaattagccattaaacagaaatcagaggc

SEQ ID NO: 385790 - DNA, 33 bp, Homo sapien
aataaaattagccattcaacagaaatcagaggc

SEQ ID NO: 385791 - DNA, 33 bp, Homo sapien
tgaggccaaaaaataaaataggaagtgcttgga

SEQ ID NO: 385792 - DNA, 33 bp, Homo sapien
tgaggccaaaaaataagataggaagtgcttgga

SEQ ID NO: 385793 - DNA, 33 bp, Homo sapien
ttttttggcctcagaccggtggttccaaaccta

SEQ ID NO: 385794 - DNA, 33 bp, Homo sapien
ttttttggcctcagactggtggttccaaaccta

SEQ ID NO: 385795 - DNA, 33 bp, Homo sapien
ggtccattaacagtcacagcacttggggagatg

SEQ ID NO: 385796 - DNA, 33 bp, Homo sapien
ggtccattaacagtcagagcacttggggagatg

SEQ ID NO: 385797 - DNA, 33 bp, Homo sapien
cgagctctatcagcaaaggcacaattaagtgga

SEQ ID NO: 385798 - DNA, 33 bp, Homo sapien
cgagctctatcagcaacggcacaattaagtgga

SEQ ID NO: 385799 - DNA, 33 bp, Homo sapien
aatacagtcactacaaatggtttacaaaactca

SEQ ID NO: 385800 - DNA, 33 bp, Homo sapien
aatacagtcactacaactggtttacaaaactca

SEQ ID NO: 385801 - DNA, 33 bp, Homo sapien
atccaggggtgactgacgaaaaccgtcttaggt

SEQ ID NO: 385802 - DNA, 33 bp, Homo sapien
atccaggggtgactgatgaaaaccgtcttaggt

SEQ ID NO: 385803 - DNA, 33 bp, Homo sapien
atatgcataaggattccatgctttgtctgtttt

SEQ ID NO: 385804 - DNA, 33 bp, Homo sapien
atatgcataaggattcgatgctttgtctgtttt

SEQ ID NO: 385805 - DNA, 33 bp, Homo sapien
ctctatcccagggtaacgcaacacagtcacgag

SEQ ID NO: 385806 - DNA, 33 bp, Homo sapien
ctctatcccagggtaatgcaacacagtcacgag

SEQ ID NO: 385807 - DNA, 33 bp, Homo sapien
atctttttttctgtcacgtattttatctgcatc

SEQ ID NO: 385808 - DNA, 33 bp, Homo sapien
atctttttttctgtcatgtattttatctgcatc

SEQ ID NO: 385809 - DNA, 33 bp, Homo sapien
ctcaaaatattacttagagaagcaagtgagaac

SEQ ID NO: 385810 - DNA, 33 bp, Homo sapien
ctcaaaatattacttatagaagcaagtgagaac

SEQ ID NO: 385811 - DNA, 33 bp, Homo sapien
gtttttcagaaggcaacggggttgtagtagaga

SEQ ID NO: 385812 - DNA, 33 bp, Homo sapien
gtttttcagaaggcaatggggttgtagtagaga

SEQ ID NO: 385813 - DNA, 33 bp, Homo sapien
caccacttcttgcatacaacagtgcaaatcaaa

SEQ ID NO: 385814 - DNA, 33 bp, Homo sapien
caccacttcttgcatataacagtgcaaatcaaa

SEQ ID NO: 385815 - DNA, 33 bp, Homo sapien
gatttagatgccaagaaaagactctgaccatta

SEQ ID NO: 385816 - DNA, 33 bp, Homo sapien
gatttagatgccaagacaagactctgaccatta

SEQ ID NO: 385817 - DNA, 33 bp, Homo sapien
tctaatccaagatcaacgtctgatcctccctat

SEQ ID NO: 385818 - DNA, 33 bp, Homo sapien
tctaatccaagatcaatgtctgatcctccctat

SEQ ID NO: 385819 - DNA, 33 bp, Homo sapien
gtcaagtcagtgtggagtcaactctatttttat

SEQ ID NO: 385820 - DNA, 33 bp, Homo sapien
gtcaagtcagtgtggattcaactctatttttat

SEQ ID NO: 385821 - DNA, 33 bp, Homo sapien
tccttgctccttccaccgtacaatgctgcctgc

SEQ ID NO: 385822 - DNA, 33 bp, Homo sapien
tccttgctccttccactgtacaatgctgcctgc

SEQ ID NO: 385823 - DNA, 33 bp, Homo sapien
taaatgcatgagtgtagggctacatgaaagatc

SEQ ID NO: 385824 - DNA, 33 bp, Homo sapien
taaatgcatgagtgtatggctacatgaaagatc

SEQ ID NO: 385825 - DNA, 33 bp, Homo sapien
aagaatcttgcacaagaccaaaaaaaaaatagc

SEQ ID NO: 385826 - DNA, 33 bp, Homo sapien
aagaatcttgcacaaggccaaaaaaaaaatagc

SEQ ID NO: 385827 - DNA, 33 bp, Homo sapien
tagtcatcagtgaatacgtattgccctaggact

SEQ ID NO: 385828 - DNA, 33 bp, Homo sapien
tagtcatcagtgaatatgtattgccctaggact

SEQ ID NO: 385829 - DNA, 33 bp, Homo sapien
gcttgtgacagtaaacccagaacttgaggccag

SEQ ID NO: 385830 - DNA, 33 bp, Homo sapien
gcttgtgacagtaaacgcagaacttgaggccag

SEQ ID NO: 385831 - DNA, 33 bp, Homo sapien
ctgatggagcagacaacttgaggaaggccggcc

SEQ ID NO: 385832 - DNA, 33 bp, Homo sapien
ctgatggagcagacaagttgaggaaggccggcc

SEQ ID NO: 385833 - DNA, 33 bp, Homo sapien
ttaatgttaggacataactgttagcacaagggt

SEQ ID NO: 385834 - DNA, 33 bp, Homo sapien
ttaatgttaggacatatctgttagcacaagggt

SEQ ID NO: 385835 - DNA, 33 bp, Homo sapien
gaatggggtgatactaaaaagtgcagttgagta

SEQ ID NO: 385836 - DNA, 33 bp, Homo sapien
gaatggggtgatactagaaagtgcagttgagta

SEQ ID NO: 385837 - DNA, 33 bp, Homo sapien
actggcatggagtctccaatttacagctggcaa

SEQ ID NO: 385838 - DNA, 33 bp, Homo sapien
actggcatggagtctctaatttacagctggcaa

SEQ ID NO: 385839 - DNA, 33 bp, Homo sapien
tttccatattgcttaaacaaaggacaaagtcag

SEQ ID NO: 385840 - DNA, 33 bp, Homo sapien
tttccatattgcttaaccaaaggacaaagtcag

SEQ ID NO: 385841 - DNA, 33 bp, Homo sapien
atttttaaaggagttacggtttcattcaaaagt

SEQ ID NO: 385842 - DNA, 33 bp, Homo sapien
atttttaaaggagttatggtttcattcaaaagt

SEQ ID NO: 385843 - DNA, 33 bp, Homo sapien
gcaaggcacgtccaatcaatcatacaagtttcc

SEQ ID NO: 385844 - DNA, 33 bp, Homo sapien
gcaaggcacgtccaattaatcatacaagtttcc

SEQ ID NO: 385845 - DNA, 33 bp, Homo sapien
aacgacaattttgtatcactggagatattgctg

SEQ ID NO: 385846 - DNA, 33 bp, Homo sapien
aacgacaattttgtattactggagatattgctg

SEQ ID NO: 385847 - DNA, 33 bp, Homo sapien
tcttccccaggttcaactggatatgtataatat

SEQ ID NO: 385848 - DNA, 33 bp, Homo sapien
tcttccccaggttcaattggatatgtataatat

SEQ ID NO: 385849 - DNA, 33 bp, Homo sapien
tccttacctggaattcaagaaccattttcctat

SEQ ID NO: 385850 - DNA, 33 bp, Homo sapien
tccttacctggaattctagaaccattttcctat

SEQ ID NO: 385851 - DNA, 33 bp, Homo sapien
gttcttggtgctgaggaaagcgacatagtgctt

SEQ ID NO: 385852 - DNA, 33 bp, Homo sapien
gttcttggtgctgagggaagcgacatagtgctt

SEQ ID NO: 385853 - DNA, 33 bp, Homo sapien
aatctgtctggaagaaacttagaaccatgtatc

SEQ ID NO: 385854 - DNA, 33 bp, Homo sapien
aatctgtctggaagaagcttagaaccatgtatc

SEQ ID NO: 385855 - DNA, 33 bp, Homo sapien
gagttatacaacttgcccagtcatctaataatg

SEQ ID NO: 385856 - DNA, 33 bp, Homo sapien
gagttatacaacttgctcagtcatctaataatg

SEQ ID NO: 385857 - DNA, 33 bp, Homo sapien
aatcagtcctgttatcacccttaaagaaattct

SEQ ID NO: 385858 - DNA, 33 bp, Homo sapien
aatcagtcctgttatcgcccttaaagaaattct

SEQ ID NO: 385859 - DNA, 33 bp, Homo sapien
ggggaggaagataacaaataaatgaccacataa

SEQ ID NO: 385860 - DNA, 33 bp, Homo sapien
ggggaggaagataacagataaatgaccacataa

SEQ ID NO: 385861 - DNA, 33 bp, Homo sapien
tgttctgtgcaaaagcgcaacatgaacctatat

SEQ ID NO: 385862 - DNA, 33 bp, Homo sapien
tgttctgtgcaaaagctcaacatgaacctatat

SEQ ID NO: 385863 - DNA, 33 bp, Homo sapien
gaacctggacagaataagccaccatactgaggc

SEQ ID NO: 385864 - DNA, 33 bp, Homo sapien
gaacctggacagaatatgccaccatactgaggc

SEQ ID NO: 385865 - DNA, 33 bp, Homo sapien
aatatgatgagggtcaagaatatcccttcagtt

SEQ ID NO: 385866 - DNA, 33 bp, Homo sapien
aatatgatgagggtcaggaatatcccttcagtt

SEQ ID NO: 385867 - DNA, 33 bp, Homo sapien
agaacataaataatgacgatgtaaaggcaagct

SEQ ID NO: 385868 - DNA, 33 bp, Homo sapien
agaacataaataatgaggatgtaaaggcaagct

SEQ ID NO: 385869 - DNA, 33 bp, Homo sapien
ttttatgttacttttacatgctctaactcccac

SEQ ID NO: 385870 - DNA, 33 bp, Homo sapien
ttttatgttacttttatatgctctaactcccac

SEQ ID NO: 385871 - DNA, 33 bp, Homo sapien
tccagtatgaccagacaaaagagtgcccacagg

SEQ ID NO: 385872 - DNA, 33 bp, Homo sapien
tccagtatgaccagaccaaagagtgcccacagg

SEQ ID NO: 385873 - DNA, 33 bp, Homo sapien
gtgttgtctctcagtggcaaggcaggcttcctt

SEQ ID NO: 385874 - DNA, 33 bp, Homo sapien
gtgttgtctctcagtgtcaaggcaggcttcctt

SEQ ID NO: 385875 - DNA, 33 bp, Homo sapien
acactccagatgaaacaagtaaaaccagggcac

SEQ ID NO: 385876 - DNA, 33 bp, Homo sapien
acactccagatgaaacgagtaaaaccagggcac

SEQ ID NO: 385877 - DNA, 33 bp, Homo sapien
gaaggaagaatctgagaaaaccgtatatgaatg

SEQ ID NO: 385878 - DNA, 33 bp, Homo sapien
gaaggaagaatctgaggaaaccgtatatgaatg

SEQ ID NO: 385879 - DNA, 33 bp, Homo sapien
tggtgttttaaaataacgtggtgtggcagttgt

SEQ ID NO: 385880 - DNA, 33 bp, Homo sapien
tggtgttttaaaataatgtggtgtggcagttgt

SEQ ID NO: 385881 - DNA, 33 bp, Homo sapien
tctatagggcatgtcaaaagctcaatgacagct

SEQ ID NO: 385882 - DNA, 33 bp, Homo sapien
tctatagggcatgtcagaagctcaatgacagct

SEQ ID NO: 385883 - DNA, 33 bp, Homo sapien
aaatgaaaattccaaaataaaagattgagtcaa

SEQ ID NO: 385884 - DNA, 33 bp, Homo sapien
aaatgaaaattccaaagtaaaagattgagtcaa

SEQ ID NO: 385885 - DNA, 33 bp, Homo sapien
cctcttgttcacttcaatctaaaggattcatta

SEQ ID NO: 385886 - DNA, 33 bp, Homo sapien
cctcttgttcacttcattctaaaggattcatta

SEQ ID NO: 385887 - DNA, 33 bp, Homo sapien
tagcatggtataaaaaattctctccaactatga

SEQ ID NO: 385888 - DNA, 33 bp, Homo sapien
tagcatggtataaaaacttctctccaactatga

SEQ ID NO: 385889 - DNA, 33 bp, Homo sapien
tttctgactatacaaacggctcactaaaggcta

SEQ ID NO: 385890 - DNA, 33 bp, Homo sapien
tttctgactatacaaagggctcactaaaggcta

SEQ ID NO: 385891 - DNA, 33 bp, Homo sapien
ggaaactgtgcgccaaattggataccacagcca

SEQ ID NO: 385892 - DNA, 33 bp, Homo sapien
ggaaactgtgcgccaagttggataccacagcca

SEQ ID NO: 385893 - DNA, 33 bp, Homo sapien
ttgctactggccttaaagagtaaatgaatggct

SEQ ID NO: 385894 - DNA, 33 bp, Homo sapien
ttgctactggccttaaggagtaaatgaatggct

SEQ ID NO: 385895 - DNA, 33 bp, Homo sapien
tgagagataaatggaacgtatgcagtgatttcc

SEQ ID NO: 385896 - DNA, 33 bp, Homo sapien
tgagagataaatggaatgtatgcagtgatttcc

SEQ ID NO: 385897 - DNA, 33 bp, Homo sapien
aagagaatttgcatgacggttaggtgagccaag

SEQ ID NO: 385898 - DNA, 33 bp, Homo sapien
aagagaatttgcatgatggttaggtgagccaag

SEQ ID NO: 385899 - DNA, 33 bp, Homo sapien
tcatggatcactttacaatgtttttcaaaattt

SEQ ID NO: 385900 - DNA, 33 bp, Homo sapien
tcatggatcactttacgatgtttttcaaaattt

SEQ ID NO: 385901 - DNA, 33 bp, Homo sapien
attaccaataaaagcacataaccagcttcttgg

SEQ ID NO: 385902 - DNA, 33 bp, Homo sapien
attaccaataaaagcagataaccagcttcttgg

SEQ ID NO: 385903 - DNA, 33 bp, Homo sapien
aaaattacatctttctaacactacaggaatgtc

SEQ ID NO: 385904 - DNA, 33 bp, Homo sapien
aaaattacatctttctgacactacaggaatgtc

SEQ ID NO: 385905 - DNA, 33 bp, Homo sapien
gtagaggcctttggaccataatgggcccagccc

SEQ ID NO: 385906 - DNA, 33 bp, Homo sapien
gtagaggcctttggactataatgggcccagccc

SEQ ID NO: 385907 - DNA, 33 bp, Homo sapien
ccattctttcttcaaccgtcctttgacaaacag

SEQ ID NO: 385908 - DNA, 33 bp, Homo sapien
ccattctttcttcaactgtcctttgacaaacag

SEQ ID NO: 385909 - DNA, 33 bp, Homo sapien
cctccttggaccagaaataaagttgttgtgaag

SEQ ID NO: 385910 - DNA, 33 bp, Homo sapien
cctccttggaccagaagtaaagttgttgtgaag

SEQ ID NO: 385911 - DNA, 33 bp, Homo sapien
aatatcatgactatcactgaagcttggagtagc

SEQ ID NO: 385912 - DNA, 33 bp, Homo sapien
aatatcatgactatcattgaagcttggagtagc

SEQ ID NO: 385913 - DNA, 33 bp, Homo sapien
acacagagaccaggtgaattccaaaaacattac

SEQ ID NO: 385914 - DNA, 33 bp, Homo sapien
acacagagaccaggtgtattccaaaaacattac

SEQ ID NO: 385915 - DNA, 33 bp, Homo sapien
acaacaaacagtagccactatattaaccgctta

SEQ ID NO: 385916 - DNA, 33 bp, Homo sapien
acaacaaacagtagccgctatattaaccgctta

SEQ ID NO: 385917 - DNA, 33 bp, Homo sapien
acgaataacaatctaaaaatgagcaagatctct

SEQ ID NO: 385918 - DNA, 33 bp, Homo sapien
acgaataacaatctaagaatgagcaagatctct

SEQ ID NO: 385919 - DNA, 33 bp, Homo sapien
aaattggcaaactaacactaaaatgcaaagaac

SEQ ID NO: 385920 - DNA, 33 bp, Homo sapien
aaattggcaaactaacgctaaaatgcaaagaac

SEQ ID NO: 385921 - DNA, 33 bp, Homo sapien
gagagaaagcggtatgcaggattgcagaagcac

SEQ ID NO: 385922 - DNA, 33 bp, Homo sapien
gagagaaagcggtatgtaggattgcagaagcac

SEQ ID NO: 385923 - DNA, 33 bp, Homo sapien
acagatttacaatggaaaactgaatcctgagat

SEQ ID NO: 385924 - DNA, 33 bp, Homo sapien
acagatttacaatggagaactgaatcctgagat

SEQ ID NO: 385925 - DNA, 33 bp, Homo sapien
aactgaagcctagaaacgggaaataatttgcac

SEQ ID NO: 385926 - DNA, 33 bp, Homo sapien
aactgaagcctagaaaggggaaataatttgcac

SEQ ID NO: 385927 - DNA, 33 bp, Homo sapien
tcactagttttggaagaccattacatcttttcc

SEQ ID NO: 385928 - DNA, 33 bp, Homo sapien
tcactagttttggaagtccattacatcttttcc

SEQ ID NO: 385929 - DNA, 33 bp, Homo sapien
gtttgtccttcaaacagtagtttcagagaatat

SEQ ID NO: 385930 - DNA, 33 bp, Homo sapien
gtttgtccttcaaacattagtttcagagaatat

SEQ ID NO: 385931 - DNA, 33 bp, Homo sapien
tgaatcaacaagaccaataatgtatccaagatg

SEQ ID NO: 385932 - DNA, 33 bp, Homo sapien
tgaatcaacaagaccagtaatgtatccaagatg

SEQ ID NO: 385933 - DNA, 33 bp, Homo sapien
ttccctcagttccctacgcaaatactgtcattc

SEQ ID NO: 385934 - DNA, 33 bp, Homo sapien
ttccctcagttccctatgcaaatactgtcattc

SEQ ID NO: 385935 - DNA, 33 bp, Homo sapien
aaaggttaaatgattacgtcagctggtgagtct

SEQ ID NO: 385936 - DNA, 33 bp, Homo sapien
aaaggttaaatgattaggtcagctggtgagtct

SEQ ID NO: 385937 - DNA, 33 bp, Homo sapien
caattggattgttagacgtggaacctaattctt

SEQ ID NO: 385938 - DNA, 33 bp, Homo sapien
caattggattgttagatgtggaacctaattctt

SEQ ID NO: 385939 - DNA, 33 bp, Homo sapien
tagtctcagcagctaactacctcaaacatagat

SEQ ID NO: 385940 - DNA, 33 bp, Homo sapien
tagtctcagcagctaagtacctcaaacatagat

SEQ ID NO: 385941 - DNA, 33 bp, Homo sapien
catcctgccatgttaaactgtgacaccaccatg

SEQ ID NO: 385942 - DNA, 33 bp, Homo sapien
catcctgccatgttaagctgtgacaccaccatg

SEQ ID NO: 385943 - DNA, 33 bp, Homo sapien
ggctaggtaaatgttacgggctttagagatgca

SEQ ID NO: 385944 - DNA, 33 bp, Homo sapien
ggctaggtaaatgttatgggctttagagatgca

SEQ ID NO: 385945 - DNA, 33 bp, Homo sapien
tgtgacaagatgtagagatattcattagcatat

SEQ ID NO: 385946 - DNA, 33 bp, Homo sapien
tgtgacaagatgtagatatattcattagcatat

SEQ ID NO: 385947 - DNA, 33 bp, Homo sapien
caaatgtttttggtcacgaaagccttagtgcta

SEQ ID NO: 385948 - DNA, 33 bp, Homo sapien
caaatgtttttggtcatgaaagccttagtgcta

SEQ ID NO: 385949 - DNA, 33 bp, Homo sapien
gtgatgctgctgaaaaataacatggagatatat

SEQ ID NO: 385950 - DNA, 33 bp, Homo sapien
gtgatgctgctgaaaagtaacatggagatatat

SEQ ID NO: 385951 - DNA, 33 bp, Homo sapien
tttgtggaatgcatcacaccatgtaagtgtgac

SEQ ID NO: 385952 - DNA, 33 bp, Homo sapien
tttgtggaatgcatcataccatgtaagtgtgac

SEQ ID NO: 385953 - DNA, 33 bp, Homo sapien
taatgactttctcatcactgtgctagtcagagg

SEQ ID NO: 385954 - DNA, 33 bp, Homo sapien
taatgactttctcatccctgtgctagtcagagg

SEQ ID NO: 385955 - DNA, 33 bp, Homo sapien
cacttccctgagtaaaaactgcctactgttatg

SEQ ID NO: 385956 - DNA, 33 bp, Homo sapien
cacttccctgagtaaatactgcctactgttatg

SEQ ID NO: 385957 - DNA, 33 bp, Homo sapien
gtggtactacttcacaactatcaatcagaacag

SEQ ID NO: 385958 - DNA, 33 bp, Homo sapien
gtggtactacttcacacctatcaatcagaacag

SEQ ID NO: 385959 - DNA, 33 bp, Homo sapien
tcatatcagtactcaaaagtttcagattttgga

SEQ ID NO: 385960 - DNA, 33 bp, Homo sapien
tcatatcagtactcaacagtttcagattttgga

SEQ ID NO: 385961 - DNA, 33 bp, Homo sapien
tttttttattattggacatgatgttgcctccta

SEQ ID NO: 385962 - DNA, 33 bp, Homo sapien
tttttttattattggatatgatgttgcctccta

SEQ ID NO: 385963 - DNA, 33 bp, Homo sapien
gggtagtggtagtggaagtagatgtattactct

SEQ ID NO: 385964 - DNA, 33 bp, Homo sapien
gggtagtggtagtggaggtagatgtattactct

SEQ ID NO: 385965 - DNA, 33 bp, Homo sapien
ggtcattagtttcaaacgctacaatgatttaaa

SEQ ID NO: 385966 - DNA, 33 bp, Homo sapien
ggtcattagtttcaaatgctacaatgatttaaa

SEQ ID NO: 385967 - DNA, 33 bp, Homo sapien
gctctgtgacctcagccagtgatctcacctatc

SEQ ID NO: 385968 - DNA, 33 bp, Homo sapien
gctctgtgacctcagctagtgatctcacctatc

SEQ ID NO: 385969 - DNA, 33 bp, Homo sapien
ggtctctctcccctacaatggaactttctgaga

SEQ ID NO: 385970 - DNA, 33 bp, Homo sapien
ggtctctctcccctactatggaactttctgaga

SEQ ID NO: 385971 - DNA, 33 bp, Homo sapien
ccttgaaatgtgaacaccatcaatgtgatccct

SEQ ID NO: 385972 - DNA, 33 bp, Homo sapien
ccttgaaatgtgaacagcatcaatgtgatccct

SEQ ID NO: 385973 - DNA, 33 bp, Homo sapien
ttccacctgtgtaatgcaaacctcattctatga

SEQ ID NO: 385974 - DNA, 33 bp, Homo sapien
ttccacctgtgtaatgtaaacctcattctatga

SEQ ID NO: 385975 - DNA, 33 bp, Homo sapien
atgagtattagatatcccgtttcttacaagtca

SEQ ID NO: 385976 - DNA, 33 bp, Homo sapien
atgagtattagatatctcgtttcttacaagtca

SEQ ID NO: 385977 - DNA, 33 bp, Homo sapien
ccactagtcctgagataataagctataaacact

SEQ ID NO: 385978 - DNA, 33 bp, Homo sapien
ccactagtcctgagatcataagctataaacact

SEQ ID NO: 385979 - DNA, 33 bp, Homo sapien
ggagagacttataaaactgccccccagttcatg

SEQ ID NO: 385980 - DNA, 33 bp, Homo sapien
ggagagacttataaaattgccccccagttcatg

SEQ ID NO: 385981 - DNA, 33 bp, Homo sapien
ggagagaaggaacacaagcatggaaatccactt

SEQ ID NO: 385982 - DNA, 33 bp, Homo sapien
ggagagaaggaacacaggcatggaaatccactt

SEQ ID NO: 385983 - DNA, 33 bp, Homo sapien
cattagatagtgacaaattctatgatgaaaata

SEQ ID NO: 385984 - DNA, 33 bp, Homo sapien
cattagatagtgacaagttctatgatgaaaata

SEQ ID NO: 385985 - DNA, 33 bp, Homo sapien
agcagtctccaccatgcacaaaggctgctagca

SEQ ID NO: 385986 - DNA, 33 bp, Homo sapien
agcagtctccaccatgtacaaaggctgctagca

SEQ ID NO: 385987 - DNA, 33 bp, Homo sapien
ctatttgtgctgttacaacaacataccattaca

SEQ ID NO: 385988 - DNA, 33 bp, Homo sapien
ctatttgtgctgttacgacaacataccattaca

SEQ ID NO: 385989 - DNA, 33 bp, Homo sapien
atgagtaatgatttcaagtctcaagtctgccac

SEQ ID NO: 385990 - DNA, 33 bp, Homo sapien
atgagtaatgatttcacgtctcaagtctgccac

SEQ ID NO: 385991 - DNA, 33 bp, Homo sapien
atgacctctccattaacacaactcacaatatgg

SEQ ID NO: 385992 - DNA, 33 bp, Homo sapien
atgacctctccattaagacaactcacaatatgg

SEQ ID NO: 385993 - DNA, 33 bp, Homo sapien
agcagaggaaacaacacatggaagggaaaacgc

SEQ ID NO: 385994 - DNA, 33 bp, Homo sapien
agcagaggaaacaacagatggaagggaaaacgc

SEQ ID NO: 385995 - DNA, 33 bp, Homo sapien
cggtgagctccttggcagcagagtatttcttca

SEQ ID NO: 385996 - DNA, 33 bp, Homo sapien
cggtgagctccttggcggcagagtatttcttca

SEQ ID NO: 385997 - DNA, 33 bp, Homo sapien
gaacttctggctgcccaattctcaacaggaatg

SEQ ID NO: 385998 - DNA, 33 bp, Homo sapien
gaacttctggctgcccgattctcaacaggaatg

SEQ ID NO: 385999 - DNA, 33 bp, Homo sapien
gtttgtgctttaaagaccacagggaaccttggc

SEQ ID NO: 386000 - DNA, 33 bp, Homo sapien
gtttgtgctttaaagatcacagggaaccttggc

SEQ ID NO: 386001 - DNA, 33 bp, Homo sapien
cctgcttctccctggacgacttcctgcatcacc

SEQ ID NO: 386002 - DNA, 33 bp, Homo sapien
cctgcttctccctggatgacttcctgcatcacc

SEQ ID NO: 386003 - DNA, 33 bp, Homo sapien
ctttgatcaaaatatgccactcatcctctgctg

SEQ ID NO: 386004 - DNA, 33 bp, Homo sapien
ctttgatcaaaatatgtcactcatcctctgctg

SEQ ID NO: 386005 - DNA, 33 bp, Homo sapien
tacaggacaacgcataactgtagggagagtcac

SEQ ID NO: 386006 - DNA, 33 bp, Homo sapien
tacaggacaacgcatagctgtagggagagtcac

SEQ ID NO: 386007 - DNA, 33 bp, Homo sapien
acagagctggggtacacgtctatccaaatcctt

SEQ ID NO: 386008 - DNA, 33 bp, Homo sapien
acagagctggggtacatgtctatccaaatcctt

SEQ ID NO: 386009 - DNA, 33 bp, Homo sapien
aatgcaatagtcttacaaaagaagaatcacaca

SEQ ID NO: 386010 - DNA, 33 bp, Homo sapien
aatgcaatagtcttacgaaagaagaatcacaca

SEQ ID NO: 386011 - DNA, 33 bp, Homo sapien
gtgccacatccttcaacaaaatatcatactaca

SEQ ID NO: 386012 - DNA, 33 bp, Homo sapien
gtgccacatccttcaataaaatatcatactaca

SEQ ID NO: 386013 - DNA, 33 bp, Homo sapien
ctcatttttaaaatgacgacagtgccaccttat

SEQ ID NO: 386014 - DNA, 33 bp, Homo sapien
ctcatttttaaaatgatgacagtgccaccttat

SEQ ID NO: 386015 - DNA, 33 bp, Homo sapien
ttccaactctctcctacgacctactttgcacat

SEQ ID NO: 386016 - DNA, 33 bp, Homo sapien
ttccaactctctcctatgacctactttgcacat

SEQ ID NO: 386017 - DNA, 33 bp, Homo sapien
gaggccatcacttcccaagcaggacggctcctc

SEQ ID NO: 386018 - DNA, 33 bp, Homo sapien
gaggccatcacttcccgagcaggacggctcctc

SEQ ID NO: 386019 - DNA, 33 bp, Homo sapien
cattacagtttctcatcatgaccagcaggcagg

SEQ ID NO: 386020 - DNA, 33 bp, Homo sapien
cattacagtttctcatgatgaccagcaggcagg

SEQ ID NO: 386021 - DNA, 33 bp, Homo sapien
aaatgtgtatatagaacggccactgcgttgaag

SEQ ID NO: 386022 - DNA, 33 bp, Homo sapien
aaatgtgtatatagaatggccactgcgttgaag

SEQ ID NO: 386023 - DNA, 33 bp, Homo sapien
ttgccaaatacccacaatgaacaaagcactagg

SEQ ID NO: 386024 - DNA, 33 bp, Homo sapien
ttgccaaatacccacagtgaacaaagcactagg

SEQ ID NO: 386025 - DNA, 33 bp, Homo sapien
taaccatactgacagacgagaagtagctgtgaa

SEQ ID NO: 386026 - DNA, 33 bp, Homo sapien
taaccatactgacagatgagaagtagctgtgaa

SEQ ID NO: 386027 - DNA, 33 bp, Homo sapien
acaagtggaatttcaaactttatttctcatgtt

SEQ ID NO: 386028 - DNA, 33 bp, Homo sapien
acaagtggaatttcaagctttatttctcatgtt

SEQ ID NO: 386029 - DNA, 33 bp, Homo sapien
ccagccaataatacaccggactaattaacacca

SEQ ID NO: 386030 - DNA, 33 bp, Homo sapien
ccagccaataatacactggactaattaacacca

SEQ ID NO: 386031 - DNA, 33 bp, Homo sapien
gtcaagcagaaaataacatagaattgtcaagaa

SEQ ID NO: 386032 - DNA, 33 bp, Homo sapien
gtcaagcagaaaataatatagaattgtcaagaa

SEQ ID NO: 386033 - DNA, 33 bp, Homo sapien
aagaatctggatgataagctgacttagggttag

SEQ ID NO: 386034 - DNA, 33 bp, Homo sapien
aagaatctggatgatatgctgacttagggttag

SEQ ID NO: 386035 - DNA, 33 bp, Homo sapien
gaacgtgcaccagcaacgtgacacaaaagttct

SEQ ID NO: 386036 - DNA, 33 bp, Homo sapien
gaacgtgcaccagcaatgtgacacaaaagttct

SEQ ID NO: 386037 - DNA, 33 bp, Homo sapien
tattagcaaatattcaatctcggctgggcacgg

SEQ ID NO: 386038 - DNA, 33 bp, Homo sapien
tattagcaaatattcattctcggctgggcacgg

SEQ ID NO: 386039 - DNA, 33 bp, Homo sapien
atatgacagatggactcaggtgtgtattatatc

SEQ ID NO: 386040 - DNA, 33 bp, Homo sapien
atatgacagatggacttaggtgtgtattatatc

SEQ ID NO: 386041 - DNA, 33 bp, Homo sapien
ttcccttattccttccacagtcataagcaatga

SEQ ID NO: 386042 - DNA, 33 bp, Homo sapien
ttcccttattccttccgcagtcataagcaatga

SEQ ID NO: 386043 - DNA, 33 bp, Homo sapien
gagaaagacattaagagatgaactcagacaggc

SEQ ID NO: 386044 - DNA, 33 bp, Homo sapien
gagaaagacattaagatatgaactcagacaggc

SEQ ID NO: 386045 - DNA, 33 bp, Homo sapien
ccagccaatgactgagaagagttagtgaataaa

SEQ ID NO: 386046 - DNA, 33 bp, Homo sapien
ccagccaatgactgaggagagttagtgaataaa

SEQ ID NO: 386047 - DNA, 33 bp, Homo sapien
gggttgtatgttgttacggacttttcatagaac

SEQ ID NO: 386048 - DNA, 33 bp, Homo sapien
gggttgtatgttgttatggacttttcatagaac

SEQ ID NO: 386049 - DNA, 33 bp, Homo sapien
tgggattcaaccgcacactctctgatgccaaag

SEQ ID NO: 386050 - DNA, 33 bp, Homo sapien
tgggattcaaccgcacgctctctgatgccaaag

SEQ ID NO: 386051 - DNA, 33 bp, Homo sapien
gtctgtccaggctgaaactattgaacaattaca

SEQ ID NO: 386052 - DNA, 33 bp, Homo sapien
gtctgtccaggctgaagctattgaacaattaca

SEQ ID NO: 386053 - DNA, 33 bp, Homo sapien
taatcataaagcagcacatttccaagctctgaa

SEQ ID NO: 386054 - DNA, 33 bp, Homo sapien
taatcataaagcagcatatttccaagctctgaa

SEQ ID NO: 386055 - DNA, 33 bp, Homo sapien
aagtgagaggactttgaaaacacatcagttgaa

SEQ ID NO: 386056 - DNA, 33 bp, Homo sapien
aagtgagaggactttgcaaacacatcagttgaa

SEQ ID NO: 386057 - DNA, 33 bp, Homo sapien
catccagaggtaaaaacataagcttggagctat

SEQ ID NO: 386058 - DNA, 33 bp, Homo sapien
catccagaggtaaaaatataagcttggagctat

SEQ ID NO: 386059 - DNA, 33 bp, Homo sapien
acactgcaaaagagaaatatatgacaccagctc

SEQ ID NO: 386060 - DNA, 33 bp, Homo sapien
acactgcaaaagagaagtatatgacaccagctc

SEQ ID NO: 386061 - DNA, 33 bp, Homo sapien
ttgaattagattcatgaaagctataaaaaataa

SEQ ID NO: 386062 - DNA, 33 bp, Homo sapien
ttgaattagattcatgtaagctataaaaaataa

SEQ ID NO: 386063 - DNA, 33 bp, Homo sapien
atgtaccccctccgaaatgaaaatgaaagttga

SEQ ID NO: 386064 - DNA, 33 bp, Homo sapien
atgtaccccctccgaattgaaaatgaaagttga

SEQ ID NO: 386065 - DNA, 33 bp, Homo sapien
tagactacaacaccaacagggaaacctgatgta

SEQ ID NO: 386066 - DNA, 33 bp, Homo sapien
tagactacaacaccaagagggaaacctgatgta

SEQ ID NO: 386067 - DNA, 33 bp, Homo sapien
aattcctacttgagtcaaacgcattcagcccca

SEQ ID NO: 386068 - DNA, 33 bp, Homo sapien
aattcctacttgagtcgaacgcattcagcccca

SEQ ID NO: 386069 - DNA, 33 bp, Homo sapien
gctaacagtttgttgacgtattccaatctccag

SEQ ID NO: 386070 - DNA, 33 bp, Homo sapien
gctaacagtttgttgatgtattccaatctccag

SEQ ID NO: 386071 - DNA, 33 bp, Homo sapien
cttctttgggatgacaatattgatgtgaatcat

SEQ ID NO: 386072 - DNA, 33 bp, Homo sapien
cttctttgggatgacactattgatgtgaatcat

SEQ ID NO: 386073 - DNA, 33 bp, Homo sapien
agggctttttatgggacgagatagcaagaagaa

SEQ ID NO: 386074 - DNA, 33 bp, Homo sapien
agggctttttatgggatgagatagcaagaagaa

SEQ ID NO: 386075 - DNA, 33 bp, Homo sapien
gaggtagagagaaaacaaggagctgagtcaatt

SEQ ID NO: 386076 - DNA, 33 bp, Homo sapien
gaggtagagagaaaacgaggagctgagtcaatt

SEQ ID NO: 386077 - DNA, 33 bp, Homo sapien
ataactccagctgccaatatttccaacgacctt

SEQ ID NO: 386078 - DNA, 33 bp, Homo sapien
ataactccagctgccagtatttccaacgacctt

SEQ ID NO: 386079 - DNA, 33 bp, Homo sapien
aatcactattccaccacctatttcaatatgatc

SEQ ID NO: 386080 - DNA, 33 bp, Homo sapien
aatcactattccaccatctatttcaatatgatc

SEQ ID NO: 386081 - DNA, 33 bp, Homo sapien
acaaaacaaaacaactcaacttcttaatgtagc

SEQ ID NO: 386082 - DNA, 33 bp, Homo sapien
acaaaacaaaacaactgaacttcttaatgtagc

SEQ ID NO: 386083 - DNA, 33 bp, Homo sapien
ttcttggttctctcaacgtatatgtcattcctt

SEQ ID NO: 386084 - DNA, 33 bp, Homo sapien
ttcttggttctctcaatgtatatgtcattcctt

SEQ ID NO: 386085 - DNA, 33 bp, Homo sapien
acggtatcagaaaatacagatgttggtatatac

SEQ ID NO: 386086 - DNA, 33 bp, Homo sapien
acggtatcagaaaatatagatgttggtatatac

SEQ ID NO: 386087 - DNA, 33 bp, Homo sapien
gaatctctaattgaaaaggtattgtgcccttgc

SEQ ID NO: 386088 - DNA, 33 bp, Homo sapien
gaatctctaattgaaacggtattgtgcccttgc

SEQ ID NO: 386089 - DNA, 33 bp, Homo sapien
attcacagcatcttaaaaagtcctaatgtacaa

SEQ ID NO: 386090 - DNA, 33 bp, Homo sapien
attcacagcatcttaagaagtcctaatgtacaa

SEQ ID NO: 386091 - DNA, 33 bp, Homo sapien
actagaggatttaaaacgcaagtccattttaat

SEQ ID NO: 386092 - DNA, 33 bp, Homo sapien
actagaggatttaaaaggcaagtccattttaat

SEQ ID NO: 386093 - DNA, 33 bp, Homo sapien
cagttggttggcaagactattggtgatggggca

SEQ ID NO: 386094 - DNA, 33 bp, Homo sapien
cagttggttggcaagattattggtgatggggca

SEQ ID NO: 386095 - DNA, 33 bp, Homo sapien
cttgagtgcatgggccacattttctcatcaagt

SEQ ID NO: 386096 - DNA, 33 bp, Homo sapien
cttgagtgcatgggccgcattttctcatcaagt

SEQ ID NO: 386097 - DNA, 33 bp, Homo sapien
cccattgtttctaggactcaaacttccagttct

SEQ ID NO: 386098 - DNA, 33 bp, Homo sapien
cccattgtttctaggagtcaaacttccagttct

SEQ ID NO: 386099 - DNA, 33 bp, Homo sapien
tcttagaagcctttcaaaggtattcataagcac

SEQ ID NO: 386100 - DNA, 33 bp, Homo sapien
tcttagaagcctttcagaggtattcataagcac

SEQ ID NO: 386101 - DNA, 33 bp, Homo sapien
acataccacacttgaccctctaatcattccatg

SEQ ID NO: 386102 - DNA, 33 bp, Homo sapien
acataccacacttgactctctaatcattccatg

SEQ ID NO: 386103 - DNA, 33 bp, Homo sapien
attccatgaagtttacggctgcctcctcagcta

SEQ ID NO: 386104 - DNA, 33 bp, Homo sapien
attccatgaagtttactgctgcctcctcagcta

SEQ ID NO: 386105 - DNA, 33 bp, Homo sapien
cacatgtgcagagctaacatcacacagtgggag

SEQ ID NO: 386106 - DNA, 33 bp, Homo sapien
cacatgtgcagagctatcatcacacagtgggag

SEQ ID NO: 386107 - DNA, 33 bp, Homo sapien
tgaaatgagagcaaacaggtgaaatcatccttc

SEQ ID NO: 386108 - DNA, 33 bp, Homo sapien
tgaaatgagagcaaacgggtgaaatcatccttc

SEQ ID NO: 386109 - DNA, 33 bp, Homo sapien
gtatgcttttcaacacgatgattgtggtctgtc

SEQ ID NO: 386110 - DNA, 33 bp, Homo sapien
gtatgcttttcaacactatgattgtggtctgtc

SEQ ID NO: 386111 - DNA, 33 bp, Homo sapien
atgttgatggttttaaatccttactaacacctg

SEQ ID NO: 386112 - DNA, 33 bp, Homo sapien
atgttgatggttttaagtccttactaacacctg

SEQ ID NO: 386113 - DNA, 33 bp, Homo sapien
tcgttacttggtaatcccctcgaaggcagaagc

SEQ ID NO: 386114 - DNA, 33 bp, Homo sapien
tcgttacttggtaatctcctcgaaggcagaagc

SEQ ID NO: 386115 - DNA, 33 bp, Homo sapien
ggcttagcttagagtacaattcttgtagatggt

SEQ ID NO: 386116 - DNA, 33 bp, Homo sapien
ggcttagcttagagtataattcttgtagatggt

SEQ ID NO: 386117 - DNA, 33 bp, Homo sapien
gactgagaacaactcaatatggtcttgtcgctt

SEQ ID NO: 386118 - DNA, 33 bp, Homo sapien
gactgagaacaactcagtatggtcttgtcgctt

SEQ ID NO: 386119 - DNA, 33 bp, Homo sapien
tagctggcgtggtcaggagaaaaccctatagaa

SEQ ID NO: 386120 - DNA, 33 bp, Homo sapien
tagctggcgtggtcagtagaaaaccctatagaa

SEQ ID NO: 386121 - DNA, 33 bp, Homo sapien
ctgtaaaatgggttgacagagtttcctgcatat

SEQ ID NO: 386122 - DNA, 33 bp, Homo sapien
ctgtaaaatgggttgatagagtttcctgcatat

SEQ ID NO: 386123 - DNA, 33 bp, Homo sapien
aagccaataacgtaagaaaagcgctacccactt

SEQ ID NO: 386124 - DNA, 33 bp, Homo sapien
aagccaataacgtaaggaaagcgctacccactt

SEQ ID NO: 386125 - DNA, 33 bp, Homo sapien
tacttttacctagcaccagtctgaggccttttg

SEQ ID NO: 386126 - DNA, 33 bp, Homo sapien
tacttttacctagcactagtctgaggccttttg

SEQ ID NO: 386127 - DNA, 33 bp, Homo sapien
tgaagggatcttggcacgtgttctgctctggga

SEQ ID NO: 386128 - DNA, 33 bp, Homo sapien
tgaagggatcttggcatgtgttctgctctggga

SEQ ID NO: 386129 - DNA, 33 bp, Homo sapien
gttcttctgctagaaaaccaatgtctccaaaag

SEQ ID NO: 386130 - DNA, 33 bp, Homo sapien
gttcttctgctagaaagccaatgtctccaaaag

SEQ ID NO: 386131 - DNA, 33 bp, Homo sapien
tcattgattctctatacatacgttgttgcattt

SEQ ID NO: 386132 - DNA, 33 bp, Homo sapien
tcattgattctctatatatacgttgttgcattt

SEQ ID NO: 386133 - DNA, 33 bp, Homo sapien
aagatatttggcaaccaagtccctcaagtaaag

SEQ ID NO: 386134 - DNA, 33 bp, Homo sapien
aagatatttggcaacctagtccctcaagtaaag

SEQ ID NO: 386135 - DNA, 33 bp, Homo sapien
gtatgtctgtgctccaataaaactgtatttaca

SEQ ID NO: 386136 - DNA, 33 bp, Homo sapien
gtatgtctgtgctccagtaaaactgtatttaca

SEQ ID NO: 386137 - DNA, 33 bp, Homo sapien
gtttttaatataaatactagagatgccacagga

SEQ ID NO: 386138 - DNA, 33 bp, Homo sapien
gtttttaatataaatagtagagatgccacagga

SEQ ID NO: 386139 - DNA, 33 bp, Homo sapien
gacggacaatcagacaatattcattctgcaaat

SEQ ID NO: 386140 - DNA, 33 bp, Homo sapien
gacggacaatcagacattattcattctgcaaat

SEQ ID NO: 386141 - DNA, 33 bp, Homo sapien
ataaatattaatgaccggctctacggcggccta

SEQ ID NO: 386142 - DNA, 33 bp, Homo sapien
ataaatattaatgacctgctctacggcggccta

SEQ ID NO: 386143 - DNA, 33 bp, Homo sapien
tgatggaaaagttgcacaacagcaaaaagctgg

SEQ ID NO: 386144 - DNA, 33 bp, Homo sapien
tgatggaaaagttgcataacagcaaaaagctgg

SEQ ID NO: 386145 - DNA, 33 bp, Homo sapien
ctataaagattttaccacaagttgcaatagttc

SEQ ID NO: 386146 - DNA, 33 bp, Homo sapien
ctataaagattttaccccaagttgcaatagttc

SEQ ID NO: 386147 - DNA, 33 bp, Homo sapien
gcttgggaaacaggaaatgcttgggaattgagg

SEQ ID NO: 386148 - DNA, 33 bp, Homo sapien
gcttgggaaacaggaagtgcttgggaattgagg

SEQ ID NO: 386149 - DNA, 33 bp, Homo sapien
gtaactttatcaaaatcaggaaatgagtcttta

SEQ ID NO: 386150 - DNA, 33 bp, Homo sapien
gtaactttatcaaaattaggaaatgagtcttta

SEQ ID NO: 386151 - DNA, 33 bp, Homo sapien
ccccaccgttctttcccctgatcacatcatgct

SEQ ID NO: 386152 - DNA, 33 bp, Homo sapien
ccccaccgttctttcctctgatcacatcatgct

SEQ ID NO: 386153 - DNA, 33 bp, Homo sapien
ctctgagtagtcctcaaaggtaactatctcggg

SEQ ID NO: 386154 - DNA, 33 bp, Homo sapien
ctctgagtagtcctcagaggtaactatctcggg

SEQ ID NO: 386155 - DNA, 33 bp, Homo sapien
ccaggcagttacaacaatgcttgctctgcttca

SEQ ID NO: 386156 - DNA, 33 bp, Homo sapien
ccaggcagttacaacagtgcttgctctgcttca

SEQ ID NO: 386157 - DNA, 33 bp, Homo sapien
ttgaaggtgtctccctaagagagttgcttctga

SEQ ID NO: 386158 - DNA, 33 bp, Homo sapien
ttgaaggtgtctccctcagagagttgcttctga

SEQ ID NO: 386159 - DNA, 33 bp, Homo sapien
cattatctgcaggaccgccagaataatgggtgg

SEQ ID NO: 386160 - DNA, 33 bp, Homo sapien
cattatctgcaggacctccagaataatgggtgg

SEQ ID NO: 386161 - DNA, 33 bp, Homo sapien
ttgagatatccttccccggacttgctttttgtc

SEQ ID NO: 386162 - DNA, 33 bp, Homo sapien
ttgagatatccttccctggacttgctttttgtc

SEQ ID NO: 386163 - DNA, 33 bp, Homo sapien
gatacgttcacaagcactgcagttttgatgtga

SEQ ID NO: 386164 - DNA, 33 bp, Homo sapien
gatacgttcacaagcattgcagttttgatgtga

SEQ ID NO: 386165 - DNA, 33 bp, Homo sapien
tactctgtctttcaaacgttctcccatgttttc

SEQ ID NO: 386166 - DNA, 33 bp, Homo sapien
tactctgtctttcaaatgttctcccatgttttc

SEQ ID NO: 386167 - DNA, 33 bp, Homo sapien
taatcaaggaacaaaacaggattttagcaaagc

SEQ ID NO: 386168 - DNA, 33 bp, Homo sapien
taatcaaggaacaaaagaggattttagcaaagc

SEQ ID NO: 386169 - DNA, 33 bp, Homo sapien
actctggaagacagaaattaatcaaggaacaaa

SEQ ID NO: 386170 - DNA, 33 bp, Homo sapien
actctggaagacagaagttaatcaaggaacaaa

SEQ ID NO: 386171 - DNA, 33 bp, Homo sapien
accaagatgaacaaacagaacattgactctgga

SEQ ID NO: 386172 - DNA, 33 bp, Homo sapien
accaagatgaacaaacggaacattgactctgga

SEQ ID NO: 386173 - DNA, 33 bp, Homo sapien
aaacattttacatttacgccaaggaatactaca

SEQ ID NO: 386174 - DNA, 33 bp, Homo sapien
aaacattttacatttatgccaaggaatactaca

SEQ ID NO: 386175 - DNA, 33 bp, Homo sapien
tcatagcaattatcatcagcattatctaactaa

SEQ ID NO: 386176 - DNA, 33 bp, Homo sapien
tcatagcaattatcatgagcattatctaactaa

SEQ ID NO: 386177 - DNA, 33 bp, Homo sapien
actctctcaactataccgcactgaccactacct

SEQ ID NO: 386178 - DNA, 33 bp, Homo sapien
actctctcaactatacggcactgaccactacct

SEQ ID NO: 386179 - DNA, 33 bp, Homo sapien
agaatactgaggctcgcagagtttaataactga

SEQ ID NO: 386180 - DNA, 33 bp, Homo sapien
agaatactgaggctcggagagtttaataactga

SEQ ID NO: 386181 - DNA, 33 bp, Homo sapien
actttgcaattttgcacatgctcattttacagt

SEQ ID NO: 386182 - DNA, 33 bp, Homo sapien
actttgcaattttgcatatgctcattttacagt

SEQ ID NO: 386183 - DNA, 33 bp, Homo sapien
gctaaagtcgtgaggcaatggacagcaggtgtc

SEQ ID NO: 386184 - DNA, 33 bp, Homo sapien
gctaaagtcgtgaggcgatggacagcaggtgtc

SEQ ID NO: 386185 - DNA, 33 bp, Homo sapien
agctgaaattttaacccacactgttttcagttt

SEQ ID NO: 386186 - DNA, 33 bp, Homo sapien
agctgaaattttaacctacactgttttcagttt

SEQ ID NO: 386187 - DNA, 33 bp, Homo sapien
atcaatgatcacattacaaaaaagatctcagcc

SEQ ID NO: 386188 - DNA, 33 bp, Homo sapien
atcaatgatcacattagaaaaaagatctcagcc

SEQ ID NO: 386189 - DNA, 33 bp, Homo sapien
cttgacagcttccgcaaatattttacaaggatt

SEQ ID NO: 386190 - DNA, 33 bp, Homo sapien
cttgacagcttccgcatatattttacaaggatt

SEQ ID NO: 386191 - DNA, 33 bp, Homo sapien
acaggaaaaaattcaaataactgattgaaagag

SEQ ID NO: 386192 - DNA, 33 bp, Homo sapien
acaggaaaaaattcaagtaactgattgaaagag

SEQ ID NO: 386193 - DNA, 33 bp, Homo sapien
aatccaatttctaaaacttcatacaatgtcaaa

SEQ ID NO: 386194 - DNA, 33 bp, Homo sapien
aatccaatttctaaaagttcatacaatgtcaaa

SEQ ID NO: 386195 - DNA, 33 bp, Homo sapien
cagtatggcaggtgacaagtgcttacaaatatt

SEQ ID NO: 386196 - DNA, 33 bp, Homo sapien
cagtatggcaggtgacgagtgcttacaaatatt

SEQ ID NO: 386197 - DNA, 33 bp, Homo sapien
ggagcctacagttcaacgggtgtgatgaacctg

SEQ ID NO: 386198 - DNA, 33 bp, Homo sapien
ggagcctacagttcaatgggtgtgatgaacctg

SEQ ID NO: 386199 - DNA, 33 bp, Homo sapien
ttatggtcatcaactaacttttgggaacttgga

SEQ ID NO: 386200 - DNA, 33 bp, Homo sapien
ttatggtcatcaactagcttttgggaacttgga

SEQ ID NO: 386201 - DNA, 33 bp, Homo sapien
agacaaagcctcccaaccttggctctcaatcag

SEQ ID NO: 386202 - DNA, 33 bp, Homo sapien
agacaaagcctcccaatcttggctctcaatcag

SEQ ID NO: 386203 - DNA, 33 bp, Homo sapien
cctgaaactcacttacagcaaagtgttatctta

SEQ ID NO: 386204 - DNA, 33 bp, Homo sapien
cctgaaactcacttacggcaaagtgttatctta

SEQ ID NO: 386205 - DNA, 33 bp, Homo sapien
ctgttgctagaaattgacaagcaaggagcttaa

SEQ ID NO: 386206 - DNA, 33 bp, Homo sapien
ctgttgctagaaattggcaagcaaggagcttaa

SEQ ID NO: 386207 - DNA, 33 bp, Homo sapien
accacctgttccacaaaaacccattgaaattta

SEQ ID NO: 386208 - DNA, 33 bp, Homo sapien
accacctgttccacaagaacccattgaaattta

SEQ ID NO: 386209 - DNA, 33 bp, Homo sapien
ttgattatcatcatcaccgtcttttcctacctc

SEQ ID NO: 386210 - DNA, 33 bp, Homo sapien
ttgattatcatcatcatcgtcttttcctacctc

SEQ ID NO: 386211 - DNA, 33 bp, Homo sapien
agctcatggaattttcacaaactgtatacacct

SEQ ID NO: 386212 - DNA, 33 bp, Homo sapien
agctcatggaattttctcaaactgtatacacct

SEQ ID NO: 386213 - DNA, 33 bp, Homo sapien
ttggatgtggtgagtaatacaaagacacgtaga

SEQ ID NO: 386214 - DNA, 33 bp, Homo sapien
ttggatgtggtgagtagtacaaagacacgtaga

SEQ ID NO: 386215 - DNA, 33 bp, Homo sapien
tttgcagtgaaagagacaccttgaagatctcag

SEQ ID NO: 386216 - DNA, 33 bp, Homo sapien
tttgcagtgaaagagataccttgaagatctcag

SEQ ID NO: 386217 - DNA, 33 bp, Homo sapien
tgtaaccaaatactcccaccgcattttctagaa

SEQ ID NO: 386218 - DNA, 33 bp, Homo sapien
tgtaaccaaatactcctaccgcattttctagaa

SEQ ID NO: 386219 - DNA, 33 bp, Homo sapien
taaacaaagaccaatacgatctaggttatggct

SEQ ID NO: 386220 - DNA, 33 bp, Homo sapien
taaacaaagaccaatatgatctaggttatggct

SEQ ID NO: 386221 - DNA, 33 bp, Homo sapien
atccaaaaatgccgaacactctgtttgacccat

SEQ ID NO: 386222 - DNA, 33 bp, Homo sapien
atccaaaaatgccgaagactctgtttgacccat

SEQ ID NO: 386223 - DNA, 33 bp, Homo sapien
ctacaatactaaagcactcttcccagttctgag

SEQ ID NO: 386224 - DNA, 33 bp, Homo sapien
ctacaatactaaagcattcttcccagttctgag

SEQ ID NO: 386225 - DNA, 33 bp, Homo sapien
ctaactttcacttcacagagcttgaaaacatta

SEQ ID NO: 386226 - DNA, 33 bp, Homo sapien
ctaactttcacttcacggagcttgaaaacatta

SEQ ID NO: 386227 - DNA, 33 bp, Homo sapien
tttgataaaccacatgaattagactaccaacct

SEQ ID NO: 386228 - DNA, 33 bp, Homo sapien
tttgataaaccacatgcattagactaccaacct

SEQ ID NO: 386229 - DNA, 33 bp, Homo sapien
aagggcattgtacatacaggaaattgcttatac

SEQ ID NO: 386230 - DNA, 33 bp, Homo sapien
aagggcattgtacatagaggaaattgcttatac

SEQ ID NO: 386231 - DNA, 33 bp, Homo sapien
gacactctagtcgggccgcacatctgtcacctc

SEQ ID NO: 386232 - DNA, 33 bp, Homo sapien
gacactctagtcgggctgcacatctgtcacctc

SEQ ID NO: 386233 - DNA, 33 bp, Homo sapien
ataatctacagtaaagcagcacagtccagcaga

SEQ ID NO: 386234 - DNA, 33 bp, Homo sapien
ataatctacagtaaagtagcacagtccagcaga

SEQ ID NO: 386235 - DNA, 33 bp, Homo sapien
gttatgatagaggaaaaagggttagaaggtggc

SEQ ID NO: 386236 - DNA, 33 bp, Homo sapien
gttatgatagaggaaagagggttagaaggtggc

SEQ ID NO: 386237 - DNA, 33 bp, Homo sapien
tagataataggaaacacatttttggccagtgag

SEQ ID NO: 386238 - DNA, 33 bp, Homo sapien
tagataataggaaacatatttttggccagtgag

SEQ ID NO: 386239 - DNA, 33 bp, Homo sapien
tcagcacagatcattcccaagaatccaagcagg

SEQ ID NO: 386240 - DNA, 33 bp, Homo sapien
tcagcacagatcattctcaagaatccaagcagg

SEQ ID NO: 386241 - DNA, 33 bp, Homo sapien
atcgaggcaaattagactcctttaaatgcgtcc

SEQ ID NO: 386242 - DNA, 33 bp, Homo sapien
atcgaggcaaattagattcctttaaatgcgtcc

SEQ ID NO: 386243 - DNA, 33 bp, Homo sapien
gaaacaatcacaaatccattgaatggtaaatgc

SEQ ID NO: 386244 - DNA, 33 bp, Homo sapien
gaaacaatcacaaatctattgaatggtaaatgc

SEQ ID NO: 386245 - DNA, 33 bp, Homo sapien
agtcttcatgtggacacgtgttttccgttcctt

SEQ ID NO: 386246 - DNA, 33 bp, Homo sapien
agtcttcatgtggacatgtgttttccgttcctt

SEQ ID NO: 386247 - DNA, 33 bp, Homo sapien
ggctgggtagttataccaaactgcaaccaattg

SEQ ID NO: 386248 - DNA, 33 bp, Homo sapien
ggctgggtagttatactaaactgcaaccaattg

SEQ ID NO: 386249 - DNA, 33 bp, Homo sapien
gagccagaaaaagagacatggagttttattagg

SEQ ID NO: 386250 - DNA, 33 bp, Homo sapien
gagccagaaaaagagatatggagttttattagg

SEQ ID NO: 386251 - DNA, 33 bp, Homo sapien
gctgcaagaccccttacgatctagccttttcag

SEQ ID NO: 386252 - DNA, 33 bp, Homo sapien
gctgcaagaccccttatgatctagccttttcag

SEQ ID NO: 386253 - DNA, 33 bp, Homo sapien
cttactaacttgtccaaatggtggcagagcagg

SEQ ID NO: 386254 - DNA, 33 bp, Homo sapien
cttactaacttgtccagatggtggcagagcagg

SEQ ID NO: 386255 - DNA, 33 bp, Homo sapien
agtggagctgtgatgactagaacttgagtcaaa

SEQ ID NO: 386256 - DNA, 33 bp, Homo sapien
agtggagctgtgatgagtagaacttgagtcaaa

SEQ ID NO: 386257 - DNA, 33 bp, Homo sapien
gagagcactgggctgacagtggagttgtttctg

SEQ ID NO: 386258 - DNA, 33 bp, Homo sapien
gagagcactgggctgagagtggagttgtttctg

SEQ ID NO: 386259 - DNA, 33 bp, Homo sapien
gctttgtagacacaaaacgatgccaggggtagg

SEQ ID NO: 386260 - DNA, 33 bp, Homo sapien
gctttgtagacacaaagcgatgccaggggtagg

SEQ ID NO: 386261 - DNA, 33 bp, Homo sapien
aggaagggagtatcaccagtaatcactggcttt

SEQ ID NO: 386262 - DNA, 33 bp, Homo sapien
aggaagggagtatcactagtaatcactggcttt

SEQ ID NO: 386263 - DNA, 33 bp, Homo sapien
tactctaatagagcctaaatcccttttcaactt

SEQ ID NO: 386264 - DNA, 33 bp, Homo sapien
tactctaatagagcctgaatcccttttcaactt

SEQ ID NO: 386265 - DNA, 33 bp, Homo sapien
tgtttgtcttctgctcccattagtccttaaaat

SEQ ID NO: 386266 - DNA, 33 bp, Homo sapien
tgtttgtcttctgctcgcattagtccttaaaat

SEQ ID NO: 386267 - DNA, 33 bp, Homo sapien
gtgtgatatatcatacactcacttctaaccctc

SEQ ID NO: 386268 - DNA, 33 bp, Homo sapien
gtgtgatatatcatacgctcacttctaaccctc

SEQ ID NO: 386269 - DNA, 33 bp, Homo sapien
taggtgtacataatgacgtgataaaataggttg

SEQ ID NO: 386270 - DNA, 33 bp, Homo sapien
taggtgtacataatgatgtgataaaataggttg

SEQ ID NO: 386271 - DNA, 33 bp, Homo sapien
gtataattgagcaataaatttgtaaaataactg

SEQ ID NO: 386272 - DNA, 33 bp, Homo sapien
gtataattgagcaatacatttgtaaaataactg

SEQ ID NO: 386273 - DNA, 33 bp, Homo sapien
ttctctttaagtgtatcaaaggcaatgaatcgt

SEQ ID NO: 386274 - DNA, 33 bp, Homo sapien
ttctctttaagtgtatgaaaggcaatgaatcgt

SEQ ID NO: 386275 - DNA, 33 bp, Homo sapien
agaaaatttaaagtcacatatgtggcctgcaat

SEQ ID NO: 386276 - DNA, 33 bp, Homo sapien
agaaaatttaaagtcatatatgtggcctgcaat

SEQ ID NO: 386277 - DNA, 33 bp, Homo sapien
gtttgagcaaatgagaatacactgttgggcttt

SEQ ID NO: 386278 - DNA, 33 bp, Homo sapien
gtttgagcaaatgagagtacactgttgggcttt

SEQ ID NO: 386279 - DNA, 33 bp, Homo sapien
actccctgaatccaaacatcatactattctgcg

SEQ ID NO: 386280 - DNA, 33 bp, Homo sapien
actccctgaatccaaatatcatactattctgcg

SEQ ID NO: 386281 - DNA, 33 bp, Homo sapien
aatgaattatgcttagcaggtcttgaaactcac

SEQ ID NO: 386282 - DNA, 33 bp, Homo sapien
aatgaattatgcttagtaggtcttgaaactcac

SEQ ID NO: 386283 - DNA, 33 bp, Homo sapien
ttccagaatttcatgcacattaacaatctgcaa

SEQ ID NO: 386284 - DNA, 33 bp, Homo sapien
ttccagaatttcatgcccattaacaatctgcaa

SEQ ID NO: 386285 - DNA, 33 bp, Homo sapien
gctttgtgtctttgacaaggtagtctccttaag

SEQ ID NO: 386286 - DNA, 33 bp, Homo sapien
gctttgtgtctttgacgaggtagtctccttaag

SEQ ID NO: 386287 - DNA, 33 bp, Homo sapien
tgcccattgtaagttaacagtttgcacgatact

SEQ ID NO: 386288 - DNA, 33 bp, Homo sapien
tgcccattgtaagttaccagtttgcacgatact

SEQ ID NO: 386289 - DNA, 33 bp, Homo sapien
gggttttaccacttaactacgcagagtctgcca

SEQ ID NO: 386290 - DNA, 33 bp, Homo sapien
gggttttaccacttaagtacgcagagtctgcca

SEQ ID NO: 386291 - DNA, 33 bp, Homo sapien
agtgtgtgccttacaaaaaatctatgaggtggt

SEQ ID NO: 386292 - DNA, 33 bp, Homo sapien
agtgtgtgccttacaacaaatctatgaggtggt

SEQ ID NO: 386293 - DNA, 33 bp, Homo sapien
cctttcttcttggacacataggagactcctctt

SEQ ID NO: 386294 - DNA, 33 bp, Homo sapien
cctttcttcttggacatataggagactcctctt

SEQ ID NO: 386295 - DNA, 33 bp, Homo sapien
tttctgtgggaaggcacctttgcatagtgggca

SEQ ID NO: 386296 - DNA, 33 bp, Homo sapien
tttctgtgggaaggcagctttgcatagtgggca

SEQ ID NO: 386297 - DNA, 33 bp, Homo sapien
aatgaggacaaaatatcagtaactgcttcatac

SEQ ID NO: 386298 - DNA, 33 bp, Homo sapien
aatgaggacaaaatattagtaactgcttcatac

SEQ ID NO: 386299 - DNA, 33 bp, Homo sapien
ttctcttgcctacttccagtcccagagaatggg

SEQ ID NO: 386300 - DNA, 33 bp, Homo sapien
ttctcttgcctacttcgagtcccagagaatggg

SEQ ID NO: 386301 - DNA, 33 bp, Homo sapien
atgatgtgaggtagtaaattaattagctagatt

SEQ ID NO: 386302 - DNA, 33 bp, Homo sapien
atgatgtgaggtagtacattaattagctagatt

SEQ ID NO: 386303 - DNA, 33 bp, Homo sapien
ctctagacttcataaacactagacacttaggct

SEQ ID NO: 386304 - DNA, 33 bp, Homo sapien
ctctagacttcataaatactagacacttaggct

SEQ ID NO: 386305 - DNA, 33 bp, Homo sapien
tttacacgatgatgaaatcgcctaatgcatttt

SEQ ID NO: 386306 - DNA, 33 bp, Homo sapien
tttacacgatgatgaagtcgcctaatgcatttt

SEQ ID NO: 386307 - DNA, 33 bp, Homo sapien
tcttgaacactcaccaccgactgcaaatatgtc

SEQ ID NO: 386308 - DNA, 33 bp, Homo sapien
tcttgaacactcaccagcgactgcaaatatgtc

SEQ ID NO: 386309 - DNA, 33 bp, Homo sapien
ccaaatggaaaagtaactgacacatttcgtgtg

SEQ ID NO: 386310 - DNA, 33 bp, Homo sapien
ccaaatggaaaagtaattgacacatttcgtgtg

SEQ ID NO: 386311 - DNA, 33 bp, Homo sapien
gctcctgaattctatccacccacatgcagaact

SEQ ID NO: 386312 - DNA, 33 bp, Homo sapien
gctcctgaattctatctacccacatgcagaact

SEQ ID NO: 386313 - DNA, 33 bp, Homo sapien
ttaagagccacgtagaatagattatgcttataa

SEQ ID NO: 386314 - DNA, 33 bp, Homo sapien
ttaagagccacgtagattagattatgcttataa

SEQ ID NO: 386315 - DNA, 33 bp, Homo sapien
cagcttaaactctaccaccatagaagacaggga

SEQ ID NO: 386316 - DNA, 33 bp, Homo sapien
cagcttaaactctaccgccatagaagacaggga

SEQ ID NO: 386317 - DNA, 33 bp, Homo sapien
caactttcacccataacccattggcctaaagta

SEQ ID NO: 386318 - DNA, 33 bp, Homo sapien
caactttcacccataatccattggcctaaagta

SEQ ID NO: 386319 - DNA, 33 bp, Homo sapien
agaatggaagagcaataaaagtcagtcgtgtgt

SEQ ID NO: 386320 - DNA, 33 bp, Homo sapien
agaatggaagagcaatgaaagtcagtcgtgtgt

SEQ ID NO: 386321 - DNA, 33 bp, Homo sapien
ttcattgatccagtaacgagcttgatgagcctg

SEQ ID NO: 386322 - DNA, 33 bp, Homo sapien
ttcattgatccagtaatgagcttgatgagcctg

SEQ ID NO: 386323 - DNA, 33 bp, Homo sapien
acttaataaggttcaacgtttagatgcctgtct

SEQ ID NO: 386324 - DNA, 33 bp, Homo sapien
acttaataaggttcaatgtttagatgcctgtct

SEQ ID NO: 386325 - DNA, 33 bp, Homo sapien
aagcctgggataacaaactgagtctgggcagaa

SEQ ID NO: 386326 - DNA, 33 bp, Homo sapien
aagcctgggataacaagctgagtctgggcagaa

SEQ ID NO: 386327 - DNA, 33 bp, Homo sapien
tttcatgggacttgtcaattttgaaaaccttca

SEQ ID NO: 386328 - DNA, 33 bp, Homo sapien
tttcatgggacttgtcgattttgaaaaccttca

SEQ ID NO: 386329 - DNA, 33 bp, Homo sapien
cttgcttcacaaaacacgacctgacataacaag

SEQ ID NO: 386330 - DNA, 33 bp, Homo sapien
cttgcttcacaaaacatgacctgacataacaag

SEQ ID NO: 386331 - DNA, 33 bp, Homo sapien
cacacagctggtgagaagcaaagcaggatttga

SEQ ID NO: 386332 - DNA, 33 bp, Homo sapien
cacacagctggtgagaggcaaagcaggatttga

SEQ ID NO: 386333 - DNA, 33 bp, Homo sapien
ttagatcaggtcagaacaccacttcagaagcag

SEQ ID NO: 386334 - DNA, 33 bp, Homo sapien
ttagatcaggtcagaataccacttcagaagcag

SEQ ID NO: 386335 - DNA, 33 bp, Homo sapien
ccctgcagcctgtctgaagagagtggtcagtcc

SEQ ID NO: 386336 - DNA, 33 bp, Homo sapien
ccctgcagcctgtctggagagagtggtcagtcc

SEQ ID NO: 386337 - DNA, 33 bp, Homo sapien
atggattttttgcatcaattttgattttttaga

SEQ ID NO: 386338 - DNA, 33 bp, Homo sapien
atggattttttgcatcgattttgattttttaga

SEQ ID NO: 386339 - DNA, 33 bp, Homo sapien
aggaataggaaagtaactcctgtcatacagtcc

SEQ ID NO: 386340 - DNA, 33 bp, Homo sapien
aggaataggaaagtaagtcctgtcatacagtcc

SEQ ID NO: 386341 - DNA, 33 bp, Homo sapien
gcaaagacaaaacaccacattgtcccagagaga

SEQ ID NO: 386342 - DNA, 33 bp, Homo sapien
gcaaagacaaaacaccgcattgtcccagagaga

SEQ ID NO: 386343 - DNA, 33 bp, Homo sapien
tttttgcttggtagaggcggaaattcactctaa

SEQ ID NO: 386344 - DNA, 33 bp, Homo sapien
tttttgcttggtagagtcggaaattcactctaa

SEQ ID NO: 386345 - DNA, 33 bp, Homo sapien
ctgcaagtgtccaggaatatttttgaacaatcg

SEQ ID NO: 386346 - DNA, 33 bp, Homo sapien
ctgcaagtgtccaggagtatttttgaacaatcg

SEQ ID NO: 386347 - DNA, 33 bp, Homo sapien
aaggaatagtctatgccgatcttcccaattcca

SEQ ID NO: 386348 - DNA, 33 bp, Homo sapien
aaggaatagtctatgctgatcttcccaattcca

SEQ ID NO: 386349 - DNA, 33 bp, Homo sapien
gacttttggcctctcacaaacacctggaagccc

SEQ ID NO: 386350 - DNA, 33 bp, Homo sapien
gacttttggcctctcagaaacacctggaagccc

SEQ ID NO: 386351 - DNA, 33 bp, Homo sapien
tttactttactaatgccaaaggaaaacaaacac

SEQ ID NO: 386352 - DNA, 33 bp, Homo sapien
tttactttactaatgcgaaaggaaaacaaacac

SEQ ID NO: 386353 - DNA, 33 bp, Homo sapien
ttctatctcattataactagcatgttcctttga

SEQ ID NO: 386354 - DNA, 33 bp, Homo sapien
ttctatctcattataattagcatgttcctttga

SEQ ID NO: 386355 - DNA, 33 bp, Homo sapien
tgccaaaaacatcaaaaaatagtagacttagga

SEQ ID NO: 386356 - DNA, 33 bp, Homo sapien
tgccaaaaacatcaaacaatagtagacttagga

SEQ ID NO: 386357 - DNA, 33 bp, Homo sapien
aaggtgtatggttcgcccctaactgatacaagt

SEQ ID NO: 386358 - DNA, 33 bp, Homo sapien
aaggtgtatggttcgctcctaactgatacaagt

SEQ ID NO: 386359 - DNA, 33 bp, Homo sapien
ctcttggtgtaaatcactctgggaaaataaatg

SEQ ID NO: 386360 - DNA, 33 bp, Homo sapien
ctcttggtgtaaatcattctgggaaaataaatg

SEQ ID NO: 386361 - DNA, 33 bp, Homo sapien
aattctaatatgtcacaagggtatagtaaattg

SEQ ID NO: 386362 - DNA, 33 bp, Homo sapien
aattctaatatgtcacgagggtatagtaaattg

SEQ ID NO: 386363 - DNA, 33 bp, Homo sapien
atggcaattcatgtcccagttctgtatgtaaaa

SEQ ID NO: 386364 - DNA, 33 bp, Homo sapien
atggcaattcatgtcctagttctgtatgtaaaa

SEQ ID NO: 386365 - DNA, 33 bp, Homo sapien
aaatagatgttccagtgaaagaagctgttttat

SEQ ID NO: 386366 - DNA, 33 bp, Homo sapien
aaatagatgttccagttaaagaagctgttttat

SEQ ID NO: 386367 - DNA, 33 bp, Homo sapien
tgtatggctagtgccacgttaagaaaggaatca

SEQ ID NO: 386368 - DNA, 33 bp, Homo sapien
tgtatggctagtgccaggttaagaaaggaatca

SEQ ID NO: 386369 - DNA, 33 bp, Homo sapien
cagatgagaggcagtaggcttcttggttataaa

SEQ ID NO: 386370 - DNA, 33 bp, Homo sapien
cagatgagaggcagtatgcttcttggttataaa

SEQ ID NO: 386371 - DNA, 33 bp, Homo sapien
aaggagcctcataaaaattcaccatcagtgaca

SEQ ID NO: 386372 - DNA, 33 bp, Homo sapien
aaggagcctcataaaacttcaccatcagtgaca

SEQ ID NO: 386373 - DNA, 33 bp, Homo sapien
ttgttgagatggaaaaactaaggcccaaggtca

SEQ ID NO: 386374 - DNA, 33 bp, Homo sapien
ttgttgagatggaaaagctaaggcccaaggtca

SEQ ID NO: 386375 - DNA, 33 bp, Homo sapien
tgccaagaaaaggaaaactcatcgatgctcaca

SEQ ID NO: 386376 - DNA, 33 bp, Homo sapien
tgccaagaaaaggaaagctcatcgatgctcaca

SEQ ID NO: 386377 - DNA, 33 bp, Homo sapien
tgagcagagattactacaggcagtaagcaagca

SEQ ID NO: 386378 - DNA, 33 bp, Homo sapien
tgagcagagattactataggcagtaagcaagca

SEQ ID NO: 386379 - DNA, 33 bp, Homo sapien
atgctggattgtgtaagaagatgatttccaata

SEQ ID NO: 386380 - DNA, 33 bp, Homo sapien
atgctggattgtgtaataagatgatttccaata

SEQ ID NO: 386381 - DNA, 33 bp, Homo sapien
aacaagcatgtttatggaatttgaatatttgcc

SEQ ID NO: 386382 - DNA, 33 bp, Homo sapien
aacaagcatgtttatgtaatttgaatatttgcc

SEQ ID NO: 386383 - DNA, 33 bp, Homo sapien
atccacggtgcaggaacgttgtggaaatatcaa

SEQ ID NO: 386384 - DNA, 33 bp, Homo sapien
atccacggtgcaggaatgttgtggaaatatcaa

SEQ ID NO: 386385 - DNA, 33 bp, Homo sapien
tgacaccccgtcctcacggagcacagcaggcag

SEQ ID NO: 386386 - DNA, 33 bp, Homo sapien
tgacaccccgtcctcatggagcacagcaggcag

SEQ ID NO: 386387 - DNA, 33 bp, Homo sapien
aaataatagctcattcaatcctcatcacaacct

SEQ ID NO: 386388 - DNA, 33 bp, Homo sapien
aaataatagctcattcgatcctcatcacaacct

SEQ ID NO: 386389 - DNA, 33 bp, Homo sapien
gacaggctaggaaaacccggtgcaccgtggcca

SEQ ID NO: 386390 - DNA, 33 bp, Homo sapien
gacaggctaggaaaacgcggtgcaccgtggcca

SEQ ID NO: 386391 - DNA, 33 bp, Homo sapien
aaggacagagaatggacggcttaggaaaatgtc

SEQ ID NO: 386392 - DNA, 33 bp, Homo sapien
aaggacagagaatggatggcttaggaaaatgtc

SEQ ID NO: 386393 - DNA, 33 bp, Homo sapien
tgatggcaaagacccgaagttgtctctaagatg

SEQ ID NO: 386394 - DNA, 33 bp, Homo sapien
tgatggcaaagacccgcagttgtctctaagatg

SEQ ID NO: 386395 - DNA, 33 bp, Homo sapien
ggagaagggagaatacagattttctataaatgt

SEQ ID NO: 386396 - DNA, 33 bp, Homo sapien
ggagaagggagaatacggattttctataaatgt

SEQ ID NO: 386397 - DNA, 33 bp, Homo sapien
gttggagtaaagcgtgcatttaattaacctatg

SEQ ID NO: 386398 - DNA, 33 bp, Homo sapien
gttggagtaaagcgtggatttaattaacctatg

SEQ ID NO: 386399 - DNA, 33 bp, Homo sapien
tcatggcaaatgctaactgtggtggctgaagtt

SEQ ID NO: 386400 - DNA, 33 bp, Homo sapien
tcatggcaaatgctaattgtggtggctgaagtt

SEQ ID NO: 386401 - DNA, 33 bp, Homo sapien
actccctaacacacaccgaacttcagccaccac

SEQ ID NO: 386402 - DNA, 33 bp, Homo sapien
actccctaacacacacggaacttcagccaccac

SEQ ID NO: 386403 - DNA, 33 bp, Homo sapien
gatgagactcttgaaaactcttaaatggagtaa

SEQ ID NO: 386404 - DNA, 33 bp, Homo sapien
gatgagactcttgaaagctcttaaatggagtaa

SEQ ID NO: 386405 - DNA, 33 bp, Homo sapien
ttcaaatctgcaaagaactctacatttctgaca

SEQ ID NO: 386406 - DNA, 33 bp, Homo sapien
ttcaaatctgcaaagagctctacatttctgaca

SEQ ID NO: 386407 - DNA, 33 bp, Homo sapien
agattttgaaggagaacgagagaatgacctatg

SEQ ID NO: 386408 - DNA, 33 bp, Homo sapien
agattttgaaggagaatgagagaatgacctatg

SEQ ID NO: 386409 - DNA, 33 bp, Homo sapien
aagtagaatgctaagaagttcgtaagtttttaa

SEQ ID NO: 386410 - DNA, 33 bp, Homo sapien
aagtagaatgctaagacgttcgtaagtttttaa

SEQ ID NO: 386411 - DNA, 33 bp, Homo sapien
gccctcatgtcatgtccaaaatccagcccacta

SEQ ID NO: 386412 - DNA, 33 bp, Homo sapien
gccctcatgtcatgtcgaaaatccagcccacta

SEQ ID NO: 386413 - DNA, 33 bp, Homo sapien
aatgctttgtctaatgcagtacaaatgtggctt

SEQ ID NO: 386414 - DNA, 33 bp, Homo sapien
aatgctttgtctaatggagtacaaatgtggctt

SEQ ID NO: 386415 - DNA, 33 bp, Homo sapien
gagaaagagaagcttacgagttagactaacgtg

SEQ ID NO: 386416 - DNA, 33 bp, Homo sapien
gagaaagagaagcttatgagttagactaacgtg

SEQ ID NO: 386417 - DNA, 33 bp, Homo sapien
tacaatggtctgaagacgacaaaaaaatgcttg

SEQ ID NO: 386418 - DNA, 33 bp, Homo sapien
tacaatggtctgaagatgacaaaaaaatgcttg

SEQ ID NO: 386419 - DNA, 33 bp, Homo sapien
aggatcatttcaactgacagtaaatgcaatgga

SEQ ID NO: 386420 - DNA, 33 bp, Homo sapien
aggatcatttcaactggcagtaaatgcaatgga

SEQ ID NO: 386421 - DNA, 33 bp, Homo sapien
tggatgcttggcctcagtcatcctctctgtccc

SEQ ID NO: 386422 - DNA, 33 bp, Homo sapien
tggatgcttggcctcattcatcctctctgtccc

SEQ ID NO: 386423 - DNA, 33 bp, Homo sapien
agtttggggtgcagtacctgttttggatgcttg

SEQ ID NO: 386424 - DNA, 33 bp, Homo sapien
agtttggggtgcagtatctgttttggatgcttg

SEQ ID NO: 386425 - DNA, 33 bp, Homo sapien
tgaaatctgccatagtgaagttggactttccac

SEQ ID NO: 386426 - DNA, 33 bp, Homo sapien
tgaaatctgccatagttaagttggactttccac

SEQ ID NO: 386427 - DNA, 33 bp, Homo sapien
caaactgcctaggtctcaaagctggttttgcca

SEQ ID NO: 386428 - DNA, 33 bp, Homo sapien
caaactgcctaggtctgaaagctggttttgcca

SEQ ID NO: 386429 - DNA, 33 bp, Homo sapien
gttctggtctttcccaacatagtggagacgcta

SEQ ID NO: 386430 - DNA, 33 bp, Homo sapien
gttctggtctttcccagcatagtggagacgcta

SEQ ID NO: 386431 - DNA, 33 bp, Homo sapien
ggaggaatggttttaccgaagagtcgacaccag

SEQ ID NO: 386432 - DNA, 33 bp, Homo sapien
ggaggaatggttttacggaagagtcgacaccag

SEQ ID NO: 386433 - DNA, 33 bp, Homo sapien
aacacaggatatgccccgcgaaagatttctggg

SEQ ID NO: 386434 - DNA, 33 bp, Homo sapien
aacacaggatatgccctgcgaaagatttctggg

SEQ ID NO: 386435 - DNA, 33 bp, Homo sapien
ggttgataagaagaccgagatgcggagagcgga

SEQ ID NO: 386436 - DNA, 33 bp, Homo sapien
ggttgataagaagacctagatgcggagagcgga

SEQ ID NO: 386437 - DNA, 33 bp, Homo sapien
aattccattagaaaacaaagcatacacagccct

SEQ ID NO: 386438 - DNA, 33 bp, Homo sapien
aattccattagaaaacgaagcatacacagccct

SEQ ID NO: 386439 - DNA, 33 bp, Homo sapien
tacagtgttccacgctcaacaaggagagaggtt

SEQ ID NO: 386440 - DNA, 33 bp, Homo sapien
tacagtgttccacgctgaacaaggagagaggtt

SEQ ID NO: 386441 - DNA, 33 bp, Homo sapien
agatttctttaatgcaaggcttctcagagtctt

SEQ ID NO: 386442 - DNA, 33 bp, Homo sapien
agatttctttaatgcagggcttctcagagtctt

SEQ ID NO: 386443 - DNA, 33 bp, Homo sapien
gtgtgacatagtagaaagacaaacattcagtac

SEQ ID NO: 386444 - DNA, 33 bp, Homo sapien
gtgtgacatagtagaaggacaaacattcagtac

SEQ ID NO: 386445 - DNA, 33 bp, Homo sapien
tgtaagtttaatatggaaaggcaatgaatgcat

SEQ ID NO: 386446 - DNA, 33 bp, Homo sapien
tgtaagtttaatatgggaaggcaatgaatgcat

SEQ ID NO: 386447 - DNA, 33 bp, Homo sapien
ggggagaggaagtgcactgaatccaactaggca

SEQ ID NO: 386448 - DNA, 33 bp, Homo sapien
ggggagaggaagtgcattgaatccaactaggca

SEQ ID NO: 386449 - DNA, 33 bp, Homo sapien
ttgctctgtgaattctcaatttctgaattcttg

SEQ ID NO: 386450 - DNA, 33 bp, Homo sapien
ttgctctgtgaattctgaatttctgaattcttg

SEQ ID NO: 386451 - DNA, 33 bp, Homo sapien
ctgtttgcacaaggacactgatgccaaatctta

SEQ ID NO: 386452 - DNA, 33 bp, Homo sapien
ctgtttgcacaaggactctgatgccaaatctta

SEQ ID NO: 386453 - DNA, 33 bp, Homo sapien
agaagggccattactgacaggaatagcatcatg

SEQ ID NO: 386454 - DNA, 33 bp, Homo sapien
agaagggccattactgtcaggaatagcatcatg

SEQ ID NO: 386455 - DNA, 33 bp, Homo sapien
acagccgatgcaaaaagaggaatgtaactaatt

SEQ ID NO: 386456 - DNA, 33 bp, Homo sapien
acagccgatgcaaaaataggaatgtaactaatt

SEQ ID NO: 386457 - DNA, 33 bp, Homo sapien
tttgtattaggccctaaggagtttcaagacaag

SEQ ID NO: 386458 - DNA, 33 bp, Homo sapien
tttgtattaggccctagggagtttcaagacaag

SEQ ID NO: 386459 - DNA, 33 bp, Homo sapien
agataataagtggaagaactggtatcggaagtt

SEQ ID NO: 386460 - DNA, 33 bp, Homo sapien
agataataagtggaagcactggtatcggaagtt

SEQ ID NO: 386461 - DNA, 33 bp, Homo sapien
ttccagggcccgtgccccgcttatatctcaagg

SEQ ID NO: 386462 - DNA, 33 bp, Homo sapien
ttccagggcccgtgcctcgcttatatctcaagg

SEQ ID NO: 386463 - DNA, 33 bp, Homo sapien
aacattcccatgaactaaatgctcaggcgtgga

SEQ ID NO: 386464 - DNA, 33 bp, Homo sapien
aacattcccatgaactcaatgctcaggcgtgga

SEQ ID NO: 386465 - DNA, 33 bp, Homo sapien
aaattttccagattcccgattgtgcctccctct

SEQ ID NO: 386466 - DNA, 33 bp, Homo sapien
aaattttccagattcctgattgtgcctccctct

SEQ ID NO: 386467 - DNA, 33 bp, Homo sapien
gtcattcaagcaaaaactgatggtagcctggat

SEQ ID NO: 386468 - DNA, 33 bp, Homo sapien
gtcattcaagcaaaaattgatggtagcctggat

SEQ ID NO: 386469 - DNA, 33 bp, Homo sapien
ttattggcagattggacgtaaagattgagggga

SEQ ID NO: 386470 - DNA, 33 bp, Homo sapien
ttattggcagattggatgtaaagattgagggga

SEQ ID NO: 386471 - DNA, 33 bp, Homo sapien
ataaatactcacttcagtctccagagcatcctg

SEQ ID NO: 386472 - DNA, 33 bp, Homo sapien
ataaatactcacttcattctccagagcatcctg

SEQ ID NO: 386473 - DNA, 33 bp, Homo sapien
ttgaaaaggcgagttgaatcccttgaattacat

SEQ ID NO: 386474 - DNA, 33 bp, Homo sapien
ttgaaaaggcgagttggatcccttgaattacat

SEQ ID NO: 386475 - DNA, 33 bp, Homo sapien
cacagataccacaagccatgttttttgtgctct

SEQ ID NO: 386476 - DNA, 33 bp, Homo sapien
cacagataccacaagctatgttttttgtgctct

SEQ ID NO: 386477 - DNA, 33 bp, Homo sapien
tgtgttgccatggtaacgagataaaaacaggct

SEQ ID NO: 386478 - DNA, 33 bp, Homo sapien
tgtgttgccatggtaatgagataaaaacaggct

SEQ ID NO: 386479 - DNA, 33 bp, Homo sapien
taattagcactagaagcagatggtcttgtgagc

SEQ ID NO: 386480 - DNA, 33 bp, Homo sapien
taattagcactagaaggagatggtcttgtgagc

SEQ ID NO: 386481 - DNA, 33 bp, Homo sapien
cccaggacacccaataccactgtcactcacgcc

SEQ ID NO: 386482 - DNA, 33 bp, Homo sapien
cccaggacacccaatagcactgtcactcacgcc

SEQ ID NO: 386483 - DNA, 33 bp, Homo sapien
acggtgtcacagttgagcatttgagtgctggaa

SEQ ID NO: 386484 - DNA, 33 bp, Homo sapien
acggtgtcacagttgatcatttgagtgctggaa

SEQ ID NO: 386485 - DNA, 33 bp, Homo sapien
tcattctagtagttccggccagagctggttgct

SEQ ID NO: 386486 - DNA, 33 bp, Homo sapien
tcattctagtagttcctgccagagctggttgct

SEQ ID NO: 386487 - DNA, 33 bp, Homo sapien
aggcgctcatgaacagaacacaatatggtctct

SEQ ID NO: 386488 - DNA, 33 bp, Homo sapien
aggcgctcatgaacaggacacaatatggtctct

SEQ ID NO: 386489 - DNA, 33 bp, Homo sapien
ccttcttcgctctccactgcttccaacccactg

SEQ ID NO: 386490 - DNA, 33 bp, Homo sapien
ccttcttcgctctccattgcttccaacccactg

SEQ ID NO: 386491 - DNA, 33 bp, Homo sapien
gagcatctccataagcgaaagtacctcacatgt

SEQ ID NO: 386492 - DNA, 33 bp, Homo sapien
gagcatctccataagctaaagtacctcacatgt

SEQ ID NO: 386493 - DNA, 33 bp, Homo sapien
gaaccatgaattaatccactggaagggtagaga

SEQ ID NO: 386494 - DNA, 33 bp, Homo sapien
gaaccatgaattaatcgactggaagggtagaga

SEQ ID NO: 386495 - DNA, 33 bp, Homo sapien
tagggtacaaatgacaccacttaataaccatag

SEQ ID NO: 386496 - DNA, 33 bp, Homo sapien
tagggtacaaatgacagcacttaataaccatag

SEQ ID NO: 386497 - DNA, 33 bp, Homo sapien
agtctttgttggctgcacgtctattcacagaga

SEQ ID NO: 386498 - DNA, 33 bp, Homo sapien
agtctttgttggctgcgcgtctattcacagaga

SEQ ID NO: 386499 - DNA, 33 bp, Homo sapien
tcctaagtcaaatgaagaaccgtggtgctacct

SEQ ID NO: 386500 - DNA, 33 bp, Homo sapien
tcctaagtcaaatgaataaccgtggtgctacct

SEQ ID NO: 386501 - DNA, 33 bp, Homo sapien
tccttaaacccacctacattagtgtcctgtaag

SEQ ID NO: 386502 - DNA, 33 bp, Homo sapien
tccttaaacccacctatattagtgtcctgtaag

SEQ ID NO: 386503 - DNA, 33 bp, Homo sapien
cgtgaagcaagaaaaacgcacgtggcctctgga

SEQ ID NO: 386504 - DNA, 33 bp, Homo sapien
cgtgaagcaagaaaaatgcacgtggcctctgga

SEQ ID NO: 386505 - DNA, 33 bp, Homo sapien
atttggctagtaaaaactgccacgtgctgtcag

SEQ ID NO: 386506 - DNA, 33 bp, Homo sapien
atttggctagtaaaaattgccacgtgctgtcag

SEQ ID NO: 386507 - DNA, 33 bp, Homo sapien
gcaaagcaaagtctgcacaaaagagacattgct

SEQ ID NO: 386508 - DNA, 33 bp, Homo sapien
gcaaagcaaagtctgcgcaaaagagacattgct

SEQ ID NO: 386509 - DNA, 33 bp, Homo sapien
atgttttatctgtgaaactgtggtgcttaactc

SEQ ID NO: 386510 - DNA, 33 bp, Homo sapien
atgttttatctgtgaatctgtggtgcttaactc

SEQ ID NO: 386511 - DNA, 33 bp, Homo sapien
ctcactactctgtctacggcatagctattgttt

SEQ ID NO: 386512 - DNA, 33 bp, Homo sapien
ctcactactctgtctatggcatagctattgttt

SEQ ID NO: 386513 - DNA, 33 bp, Homo sapien
cacgtggttgctctgaatacccattctctactg

SEQ ID NO: 386514 - DNA, 33 bp, Homo sapien
cacgtggttgctctgattacccattctctactg

SEQ ID NO: 386515 - DNA, 33 bp, Homo sapien
ttgaggttaaacagaacacatggagatgcagga

SEQ ID NO: 386516 - DNA, 33 bp, Homo sapien
ttgaggttaaacagaagacatggagatgcagga

SEQ ID NO: 386517 - DNA, 33 bp, Homo sapien
cccaactttgtgttctgaaaaacatcagaggga

SEQ ID NO: 386518 - DNA, 33 bp, Homo sapien
cccaactttgtgttcttaaaaacatcagaggga

SEQ ID NO: 386519 - DNA, 33 bp, Homo sapien
cagccttcgttttcatgatcttaaatcctcaag

SEQ ID NO: 386520 - DNA, 33 bp, Homo sapien
cagccttcgttttcattatcttaaatcctcaag

SEQ ID NO: 386521 - DNA, 33 bp, Homo sapien
taaatcctcaaggttaccaaagagatactaaga

SEQ ID NO: 386522 - DNA, 33 bp, Homo sapien
taaatcctcaaggttatcaaagagatactaaga

SEQ ID NO: 386523 - DNA, 33 bp, Homo sapien
tgtgacttcctaagaaattcaccaacagcatga

SEQ ID NO: 386524 - DNA, 33 bp, Homo sapien
tgtgacttcctaagaatttcaccaacagcatga

SEQ ID NO: 386525 - DNA, 33 bp, Homo sapien
ggcatttgacacataccctcactgaatcgcggc

SEQ ID NO: 386526 - DNA, 33 bp, Homo sapien
ggcatttgacacatacgctcactgaatcgcggc

SEQ ID NO: 386527 - DNA, 33 bp, Homo sapien
tctatccaaggccaacaggagaggacccagcag

SEQ ID NO: 386528 - DNA, 33 bp, Homo sapien
tctatccaaggccaacgggagaggacccagcag

SEQ ID NO: 386529 - DNA, 33 bp, Homo sapien
aaacttcaaattactaaaacattcatttgacct

SEQ ID NO: 386530 - DNA, 33 bp, Homo sapien
aaacttcaaattactagaacattcatttgacct

SEQ ID NO: 386531 - DNA, 33 bp, Homo sapien
ttgtccatgaatagaaagcaattataagcatta

SEQ ID NO: 386532 - DNA, 33 bp, Homo sapien
ttgtccatgaatagaaggcaattataagcatta

SEQ ID NO: 386533 - DNA, 33 bp, Homo sapien
catttgactacagttgaatattagttattgctg

SEQ ID NO: 386534 - DNA, 33 bp, Homo sapien
catttgactacagttgcatattagttattgctg

SEQ ID NO: 386535 - DNA, 33 bp, Homo sapien
ttattagagttgtcgacgaaaaaaatctaactt

SEQ ID NO: 386536 - DNA, 33 bp, Homo sapien
ttattagagttgtcgatgaaaaaaatctaactt

SEQ ID NO: 386537 - DNA, 33 bp, Homo sapien
aaactaaagctttgaagcagaactcactgtatc

SEQ ID NO: 386538 - DNA, 33 bp, Homo sapien
aaactaaagctttgaatcagaactcactgtatc

SEQ ID NO: 386539 - DNA, 33 bp, Homo sapien
ttcattctcaagatcaacttttccttgtccctt

SEQ ID NO: 386540 - DNA, 33 bp, Homo sapien
ttcattctcaagatcagcttttccttgtccctt

SEQ ID NO: 386541 - DNA, 33 bp, Homo sapien
gtacgtgagttctagcaagatgccagagaatcc

SEQ ID NO: 386542 - DNA, 33 bp, Homo sapien
gtacgtgagttctagcgagatgccagagaatcc

SEQ ID NO: 386543 - DNA, 33 bp, Homo sapien
atctgtgagaaaaacccactgaagcagcattgt

SEQ ID NO: 386544 - DNA, 33 bp, Homo sapien
atctgtgagaaaaacctactgaagcagcattgt

SEQ ID NO: 386545 - DNA, 33 bp, Homo sapien
taatactcagttcttacggaggattttggcaga

SEQ ID NO: 386546 - DNA, 33 bp, Homo sapien
taatactcagttcttatggaggattttggcaga

SEQ ID NO: 386547 - DNA, 33 bp, Homo sapien
ctaaagaacacctgacgaagtatctatgaaaca

SEQ ID NO: 386548 - DNA, 33 bp, Homo sapien
ctaaagaacacctgactaagtatctatgaaaca

SEQ ID NO: 386549 - DNA, 33 bp, Homo sapien
agcagctaaatatgaaaagagagcagaagacac

SEQ ID NO: 386550 - DNA, 33 bp, Homo sapien
agcagctaaatatgaagagagagcagaagacac

SEQ ID NO: 386551 - DNA, 33 bp, Homo sapien
tgcaaatcctgttgcacctccttaaaaaatcct

SEQ ID NO: 386552 - DNA, 33 bp, Homo sapien
tgcaaatcctgttgcatctccttaaaaaatcct

SEQ ID NO: 386553 - DNA, 33 bp, Homo sapien
atttcgtgtgtattcagggatttaatctctacc

SEQ ID NO: 386554 - DNA, 33 bp, Homo sapien
atttcgtgtgtattcatggatttaatctctacc

SEQ ID NO: 386555 - DNA, 33 bp, Homo sapien
aaaaaagttgtgattacctgagcaatgtggtga

SEQ ID NO: 386556 - DNA, 33 bp, Homo sapien
aaaaaagttgtgattagctgagcaatgtggtga

SEQ ID NO: 386557 - DNA, 33 bp, Homo sapien
tctagctttcttgaccactaaatcttttctggc

SEQ ID NO: 386558 - DNA, 33 bp, Homo sapien
tctagctttcttgaccgctaaatcttttctggc

SEQ ID NO: 386559 - DNA, 33 bp, Homo sapien
gttgcagagtgaaccactgggaaagtttgcctt

SEQ ID NO: 386560 - DNA, 33 bp, Homo sapien
gttgcagagtgaaccattgggaaagtttgcctt

SEQ ID NO: 386561 - DNA, 33 bp, Homo sapien
gcaggatcaggcaaaaatcacaataaattttat

SEQ ID NO: 386562 - DNA, 33 bp, Homo sapien
gcaggatcaggcaaaattcacaataaattttat

SEQ ID NO: 386563 - DNA, 33 bp, Homo sapien
cctatattttatcatcaagtatctatttccgca

SEQ ID NO: 386564 - DNA, 33 bp, Homo sapien
cctatattttatcatcgagtatctatttccgca

SEQ ID NO: 386565 - DNA, 33 bp, Homo sapien
caaaacaggaagtcacaattaccaaaatctcta

SEQ ID NO: 386566 - DNA, 33 bp, Homo sapien
caaaacaggaagtcaccattaccaaaatctcta

SEQ ID NO: 386567 - DNA, 33 bp, Homo sapien
caaagaagcagctgggaacagttcataccaagc

SEQ ID NO: 386568 - DNA, 33 bp, Homo sapien
caaagaagcagctggggacagttcataccaagc

SEQ ID NO: 386569 - DNA, 33 bp, Homo sapien
agtaatttgttcaagagatacacagctagttaa

SEQ ID NO: 386570 - DNA, 33 bp, Homo sapien
agtaatttgttcaagatatacacagctagttaa

SEQ ID NO: 386571 - DNA, 33 bp, Homo sapien
tgactctccagtgctacggcctaaaactatctt

SEQ ID NO: 386572 - DNA, 33 bp, Homo sapien
tgactctccagtgctatggcctaaaactatctt

SEQ ID NO: 386573 - DNA, 33 bp, Homo sapien
ttttgccaggaatcaaaacaactcatctgttga

SEQ ID NO: 386574 - DNA, 33 bp, Homo sapien
ttttgccaggaatcaagacaactcatctgttga

SEQ ID NO: 386575 - DNA, 33 bp, Homo sapien
tttcatcacctaatgacacagcttttttattta

SEQ ID NO: 386576 - DNA, 33 bp, Homo sapien
tttcatcacctaatgagacagcttttttattta

SEQ ID NO: 386577 - DNA, 33 bp, Homo sapien
actaaggtatctatgacctttcttattcaatcc

SEQ ID NO: 386578 - DNA, 33 bp, Homo sapien
actaaggtatctatgagctttcttattcaatcc

SEQ ID NO: 386579 - DNA, 33 bp, Homo sapien
gggttatactgagaacactccaaaagaaagggc

SEQ ID NO: 386580 - DNA, 33 bp, Homo sapien
gggttatactgagaacgctccaaaagaaagggc

SEQ ID NO: 386581 - DNA, 33 bp, Homo sapien
tgacattctagaaaaaaaggcagcatgacagaa

SEQ ID NO: 386582 - DNA, 33 bp, Homo sapien
tgacattctagaaaaagaggcagcatgacagaa

SEQ ID NO: 386583 - DNA, 33 bp, Homo sapien
ttttttgtatgccccacagatctcacacatagc

SEQ ID NO: 386584 - DNA, 33 bp, Homo sapien
ttttttgtatgccccagagatctcacacatagc

SEQ ID NO: 386585 - DNA, 33 bp, Homo sapien
actcccaaagtaccaaaatttgtatgcttgcca

SEQ ID NO: 386586 - DNA, 33 bp, Homo sapien
actcccaaagtaccaagatttgtatgcttgcca

SEQ ID NO: 386587 - DNA, 33 bp, Homo sapien
tatttctattctacaacttaggaaattttggcg

SEQ ID NO: 386588 - DNA, 33 bp, Homo sapien
tatttctattctacaagttaggaaattttggcg

SEQ ID NO: 386589 - DNA, 33 bp, Homo sapien
agttttaattacagcaatgacttcctcattttt

SEQ ID NO: 386590 - DNA, 33 bp, Homo sapien
agttttaattacagcagtgacttcctcattttt

SEQ ID NO: 386591 - DNA, 33 bp, Homo sapien
tttctttcattcttgaacaagggcacaaggaag

SEQ ID NO: 386592 - DNA, 33 bp, Homo sapien
tttctttcattcttgagcaagggcacaaggaag

SEQ ID NO: 386593 - DNA, 33 bp, Homo sapien
atccaggagcagaaaaacattccttccttgtgc

SEQ ID NO: 386594 - DNA, 33 bp, Homo sapien
atccaggagcagaaaaccattccttccttgtgc

SEQ ID NO: 386595 - DNA, 33 bp, Homo sapien
tgactgtgtccaactacgctcatcctgcaatct

SEQ ID NO: 386596 - DNA, 33 bp, Homo sapien
tgactgtgtccaactatgctcatcctgcaatct

SEQ ID NO: 386597 - DNA, 33 bp, Homo sapien
acacagtttctgaaccacaggaattcaggatgg

SEQ ID NO: 386598 - DNA, 33 bp, Homo sapien
acacagtttctgaaccgcaggaattcaggatgg

SEQ ID NO: 386599 - DNA, 33 bp, Homo sapien
gctaagtcaggaacgacgatttataacctgggc

SEQ ID NO: 386600 - DNA, 33 bp, Homo sapien
gctaagtcaggaacgatgatttataacctgggc

SEQ ID NO: 386601 - DNA, 33 bp, Homo sapien
aacttgatcagagtaaactacttaaaatgcaaa

SEQ ID NO: 386602 - DNA, 33 bp, Homo sapien
aacttgatcagagtaagctacttaaaatgcaaa

SEQ ID NO: 386603 - DNA, 33 bp, Homo sapien
aaattctctcaattctaaagtctgcaagtctgc

SEQ ID NO: 386604 - DNA, 33 bp, Homo sapien
aaattctctcaattctgaagtctgcaagtctgc

SEQ ID NO: 386605 - DNA, 33 bp, Homo sapien
catttcgaatttgacacagggaattcattacac

SEQ ID NO: 386606 - DNA, 33 bp, Homo sapien
catttcgaatttgacagagggaattcattacac

SEQ ID NO: 386607 - DNA, 33 bp, Homo sapien
tcaaaagataaattacaggaaactaacatggga

SEQ ID NO: 386608 - DNA, 33 bp, Homo sapien
tcaaaagataaattactggaaactaacatggga

SEQ ID NO: 386609 - DNA, 33 bp, Homo sapien
tttaacctccttgctaataatcaatgtgattca

SEQ ID NO: 386610 - DNA, 33 bp, Homo sapien
tttaacctccttgctagtaatcaatgtgattca

SEQ ID NO: 386611 - DNA, 33 bp, Homo sapien
ttaacctcatagaacccaacaaataagttataa

SEQ ID NO: 386612 - DNA, 33 bp, Homo sapien
ttaacctcatagaacctaacaaataagttataa

SEQ ID NO: 386613 - DNA, 33 bp, Homo sapien
ggactgctactaaaaaatactcctggctaggcg

SEQ ID NO: 386614 - DNA, 33 bp, Homo sapien
ggactgctactaaaaagtactcctggctaggcg

SEQ ID NO: 386615 - DNA, 33 bp, Homo sapien
cctccgtccctgcaaaagctactggagctctgc

SEQ ID NO: 386616 - DNA, 33 bp, Homo sapien
cctccgtccctgcaaaggctactggagctctgc

SEQ ID NO: 386617 - DNA, 33 bp, Homo sapien
tggctgtcctcaccgtcaagtctagatctccct

SEQ ID NO: 386618 - DNA, 33 bp, Homo sapien
tggctgtcctcaccgtgaagtctagatctccct

SEQ ID NO: 386619 - DNA, 33 bp, Homo sapien
ccttaaacctgaaagaactggggcccactgaat

SEQ ID NO: 386620 - DNA, 33 bp, Homo sapien
ccttaaacctgaaagatctggggcccactgaat

SEQ ID NO: 386621 - DNA, 33 bp, Homo sapien
tttacatcatagagtgccacaataaaaattgta

SEQ ID NO: 386622 - DNA, 33 bp, Homo sapien
tttacatcatagagtggcacaataaaaattgta

SEQ ID NO: 386623 - DNA, 33 bp, Homo sapien
cctgttgggaggaataacagcacactcctgaat

SEQ ID NO: 386624 - DNA, 33 bp, Homo sapien
cctgttgggaggaatagcagcacactcctgaat

SEQ ID NO: 386625 - DNA, 33 bp, Homo sapien
atgaatagaaaaatcaaactgctagaacctcca

SEQ ID NO: 386626 - DNA, 33 bp, Homo sapien
atgaatagaaaaatcagactgctagaacctcca

SEQ ID NO: 386627 - DNA, 33 bp, Homo sapien
aaacagtctaggtacactgaagaaaacacatct

SEQ ID NO: 386628 - DNA, 33 bp, Homo sapien
aaacagtctaggtacattgaagaaaacacatct

SEQ ID NO: 386629 - DNA, 33 bp, Homo sapien
agactgtttccttaaaaaattgcttttgtatgg

SEQ ID NO: 386630 - DNA, 33 bp, Homo sapien
agactgtttccttaaagaattgcttttgtatgg

SEQ ID NO: 386631 - DNA, 33 bp, Homo sapien
ccaggaccaatggacaaaatctgcaaggaggca

SEQ ID NO: 386632 - DNA, 33 bp, Homo sapien
ccaggaccaatggacagaatctgcaaggaggca

SEQ ID NO: 386633 - DNA, 33 bp, Homo sapien
atattctattactgaacgtgtctcattgttttc

SEQ ID NO: 386634 - DNA, 33 bp, Homo sapien
atattctattactgaatgtgtctcattgttttc

SEQ ID NO: 386635 - DNA, 33 bp, Homo sapien
ttctctgtggatattacgagatataggcttctc

SEQ ID NO: 386636 - DNA, 33 bp, Homo sapien
ttctctgtggatattatgagatataggcttctc

SEQ ID NO: 386637 - DNA, 33 bp, Homo sapien
acaccctcagtccatacgttcacaactcaatca

SEQ ID NO: 386638 - DNA, 33 bp, Homo sapien
acaccctcagtccatatgttcacaactcaatca

SEQ ID NO: 386639 - DNA, 33 bp, Homo sapien
gcaaggatgtttcctgaataatgtgcactgagc

SEQ ID NO: 386640 - DNA, 33 bp, Homo sapien
gcaaggatgtttcctggataatgtgcactgagc

SEQ ID NO: 386641 - DNA, 33 bp, Homo sapien
ctccatatggttagcccggcatgtgtatttgac

SEQ ID NO: 386642 - DNA, 33 bp, Homo sapien
ctccatatggttagcctggcatgtgtatttgac

SEQ ID NO: 386643 - DNA, 33 bp, Homo sapien
agattagaaagaaggaagctttaaccctatctc

SEQ ID NO: 386644 - DNA, 33 bp, Homo sapien
agattagaaagaaggaggctttaaccctatctc

SEQ ID NO: 386645 - DNA, 33 bp, Homo sapien
ttttagatgctccaaacttagaagagaaaaaat

SEQ ID NO: 386646 - DNA, 33 bp, Homo sapien
ttttagatgctccaaagttagaagagaaaaaat

SEQ ID NO: 386647 - DNA, 33 bp, Homo sapien
tcctgttttcaagatgcagtggactctctttta

SEQ ID NO: 386648 - DNA, 33 bp, Homo sapien
tcctgttttcaagatggagtggactctctttta

SEQ ID NO: 386649 - DNA, 33 bp, Homo sapien
catgtgagttctctaaatctgggacaacgatag

SEQ ID NO: 386650 - DNA, 33 bp, Homo sapien
catgtgagttctctaagtctgggacaacgatag

SEQ ID NO: 386651 - DNA, 33 bp, Homo sapien
acaaaatgaaaacacaagtgtcagtatctatga

SEQ ID NO: 386652 - DNA, 33 bp, Homo sapien
acaaaatgaaaacacaggtgtcagtatctatga

SEQ ID NO: 386653 - DNA, 33 bp, Homo sapien
ggattgcctgagctcaaaagctggcgaccagcc

SEQ ID NO: 386654 - DNA, 33 bp, Homo sapien
ggattgcctgagctcagaagctggcgaccagcc

SEQ ID NO: 386655 - DNA, 33 bp, Homo sapien
gggcactgacactgaacacatgataggcacctt

SEQ ID NO: 386656 - DNA, 33 bp, Homo sapien
gggcactgacactgaagacatgataggcacctt

SEQ ID NO: 386657 - DNA, 33 bp, Homo sapien
cagcattaactccagaacctgtggaaggccagc

SEQ ID NO: 386658 - DNA, 33 bp, Homo sapien
cagcattaactccagaccctgtggaaggccagc

SEQ ID NO: 386659 - DNA, 33 bp, Homo sapien
gcctgtattatggcccaagctcaagaatattcg

SEQ ID NO: 386660 - DNA, 33 bp, Homo sapien
gcctgtattatggcccgagctcaagaatattcg

SEQ ID NO: 386661 - DNA, 33 bp, Homo sapien
atgcttccttccaccacatcagaaggtcctcag

SEQ ID NO: 386662 - DNA, 33 bp, Homo sapien
atgcttccttccaccatatcagaaggtcctcag

SEQ ID NO: 386663 - DNA, 33 bp, Homo sapien
ctgggatcactggaaagaatacccctgtttgac

SEQ ID NO: 386664 - DNA, 33 bp, Homo sapien
ctgggatcactggaaataatacccctgtttgac

SEQ ID NO: 386665 - DNA, 33 bp, Homo sapien
tccagcacatgtgtccacacttggtattaatag

SEQ ID NO: 386666 - DNA, 33 bp, Homo sapien
tccagcacatgtgtccgcacttggtattaatag

SEQ ID NO: 386667 - DNA, 33 bp, Homo sapien
tggatggcttaccaaccgctaccaggagacagt

SEQ ID NO: 386668 - DNA, 33 bp, Homo sapien
tggatggcttaccaactgctaccaggagacagt

SEQ ID NO: 386669 - DNA, 33 bp, Homo sapien
agagcccattctccatcagtatttattgaagga

SEQ ID NO: 386670 - DNA, 33 bp, Homo sapien
agagcccattctccattagtatttattgaagga

SEQ ID NO: 386671 - DNA, 33 bp, Homo sapien
cctgctctgcggatccagcatcatgacctttgt

SEQ ID NO: 386672 - DNA, 33 bp, Homo sapien
cctgctctgcggatccggcatcatgacctttgt

SEQ ID NO: 386673 - DNA, 33 bp, Homo sapien
gacattactggtctggaatcaactaggtttgtg

SEQ ID NO: 386674 - DNA, 33 bp, Homo sapien
gacattactggtctgggatcaactaggtttgtg

SEQ ID NO: 386675 - DNA, 33 bp, Homo sapien
aagaaattgtcttaggcccaaagtgaaacgtct

SEQ ID NO: 386676 - DNA, 33 bp, Homo sapien
aagaaattgtcttaggtccaaagtgaaacgtct

SEQ ID NO: 386677 - DNA, 33 bp, Homo sapien
aacagagttagcacacagattctaagcacacag

SEQ ID NO: 386678 - DNA, 33 bp, Homo sapien
aacagagttagcacactgattctaagcacacag

SEQ ID NO: 386679 - DNA, 33 bp, Homo sapien
gggcagaggctgatcaatctaggctggtaggaa

SEQ ID NO: 386680 - DNA, 33 bp, Homo sapien
gggcagaggctgatcagtctaggctggtaggaa

SEQ ID NO: 386681 - DNA, 33 bp, Homo sapien
ggagaattcaggttaccggtgaaattaaggttg

SEQ ID NO: 386682 - DNA, 33 bp, Homo sapien
ggagaattcaggttactggtgaaattaaggttg

SEQ ID NO: 386683 - DNA, 33 bp, Homo sapien
tgaagaaactgtctgccgaaagaatgcatgaat

SEQ ID NO: 386684 - DNA, 33 bp, Homo sapien
tgaagaaactgtctgctgaaagaatgcatgaat

SEQ ID NO: 386685 - DNA, 33 bp, Homo sapien
actcaagaaactatcaaacaaaatcccaacatg

SEQ ID NO: 386686 - DNA, 33 bp, Homo sapien
actcaagaaactatcacacaaaatcccaacatg

SEQ ID NO: 386687 - DNA, 33 bp, Homo sapien
gcaaagatgaggttacaaatcatagtgttcata

SEQ ID NO: 386688 - DNA, 33 bp, Homo sapien
gcaaagatgaggttacgaatcatagtgttcata

SEQ ID NO: 386689 - DNA, 33 bp, Homo sapien
ggcactgcgtattagacggattgaaagatgctg

SEQ ID NO: 386690 - DNA, 33 bp, Homo sapien
ggcactgcgtattagatggattgaaagatgctg

SEQ ID NO: 386691 - DNA, 33 bp, Homo sapien
caatgcacataaatcaatcagactttgaatcat

SEQ ID NO: 386692 - DNA, 33 bp, Homo sapien
caatgcacataaatcagtcagactttgaatcat

SEQ ID NO: 386693 - DNA, 33 bp, Homo sapien
aggcaggctctgatagcaacaggaggaagcaga

SEQ ID NO: 386694 - DNA, 33 bp, Homo sapien
aggcaggctctgatagtaacaggaggaagcaga

SEQ ID NO: 386695 - DNA, 33 bp, Homo sapien
accaaagagctgtgtacggaaaaagcctcatat

SEQ ID NO: 386696 - DNA, 33 bp, Homo sapien
accaaagagctgtgtatggaaaaagcctcatat

SEQ ID NO: 386697 - DNA, 33 bp, Homo sapien
tggttccatcaatcaccgctgttcatgtatagc

SEQ ID NO: 386698 - DNA, 33 bp, Homo sapien
tggttccatcaatcactgctgttcatgtatagc

SEQ ID NO: 386699 - DNA, 33 bp, Homo sapien
aacaaggttaaaagaacggactcatgactgatg

SEQ ID NO: 386700 - DNA, 33 bp, Homo sapien
aacaaggttaaaagaatggactcatgactgatg

SEQ ID NO: 386701 - DNA, 33 bp, Homo sapien
ctcaggacctcaatcccctgtttggcctgtgtt

SEQ ID NO: 386702 - DNA, 33 bp, Homo sapien
ctcaggacctcaatcctctgtttggcctgtgtt

SEQ ID NO: 386703 - DNA, 33 bp, Homo sapien
ttctattgctgcaaaactcttctagctaacttc

SEQ ID NO: 386704 - DNA, 33 bp, Homo sapien
ttctattgctgcaaaattcttctagctaacttc

SEQ ID NO: 386705 - DNA, 33 bp, Homo sapien
aagatgtttaccaagccaacttgtcaattttaa

SEQ ID NO: 386706 - DNA, 33 bp, Homo sapien
aagatgtttaccaagctaacttgtcaattttaa

SEQ ID NO: 386707 - DNA, 33 bp, Homo sapien
tgccaggagacgtagacgagcttttattgtttt

SEQ ID NO: 386708 - DNA, 33 bp, Homo sapien
tgccaggagacgtagatgagcttttattgtttt

SEQ ID NO: 386709 - DNA, 33 bp, Homo sapien
aactcatgcaatctcaaggccttatttcccctt

SEQ ID NO: 386710 - DNA, 33 bp, Homo sapien
aactcatgcaatctcatggccttatttcccctt

SEQ ID NO: 386711 - DNA, 33 bp, Homo sapien
tcaataatgcaaattgcaagacctagtacaggc

SEQ ID NO: 386712 - DNA, 33 bp, Homo sapien
tcaataatgcaaattggaagacctagtacaggc

SEQ ID NO: 386713 - DNA, 33 bp, Homo sapien
tcagatctctctggaacttcaataaaagttttt

SEQ ID NO: 386714 - DNA, 33 bp, Homo sapien
tcagatctctctggaatttcaataaaagttttt

SEQ ID NO: 386715 - DNA, 33 bp, Homo sapien
tctcgatgtcttccaaaaataaaataattgtaa

SEQ ID NO: 386716 - DNA, 33 bp, Homo sapien
tctcgatgtcttccaagaataaaataattgtaa

SEQ ID NO: 386717 - DNA, 33 bp, Homo sapien
ccccgttccctaatggaaaaatgaggtccaatt

SEQ ID NO: 386718 - DNA, 33 bp, Homo sapien
ccccgttccctaatggtaaaatgaggtccaatt

SEQ ID NO: 386719 - DNA, 33 bp, Homo sapien
attacatcagcattcccaaacttacatgttaac

SEQ ID NO: 386720 - DNA, 33 bp, Homo sapien
attacatcagcattcctaaacttacatgttaac

SEQ ID NO: 386721 - DNA, 33 bp, Homo sapien
gattcacctcatgaacaaagggaagaataagag

SEQ ID NO: 386722 - DNA, 33 bp, Homo sapien
gattcacctcatgaacgaagggaagaataagag

SEQ ID NO: 386723 - DNA, 33 bp, Homo sapien
cacccactgagtaataccctccacttcacgcta

SEQ ID NO: 386724 - DNA, 33 bp, Homo sapien
cacccactgagtaatagcctccacttcacgcta

SEQ ID NO: 386725 - DNA, 33 bp, Homo sapien
accagctgttccaataagagcatctatcttccc

SEQ ID NO: 386726 - DNA, 33 bp, Homo sapien
accagctgttccaataggagcatctatcttccc

SEQ ID NO: 386727 - DNA, 33 bp, Homo sapien
tgaagttgaatctgcactagttgagttaacctt

SEQ ID NO: 386728 - DNA, 33 bp, Homo sapien
tgaagttgaatctgcagtagttgagttaacctt

SEQ ID NO: 386729 - DNA, 33 bp, Homo sapien
tgtgtgtagcataagaaaattcgtgggtagaag

SEQ ID NO: 386730 - DNA, 33 bp, Homo sapien
tgtgtgtagcataagacaattcgtgggtagaag

SEQ ID NO: 386731 - DNA, 33 bp, Homo sapien
cggcattgccagtcatgaaacagttaacacgca

SEQ ID NO: 386732 - DNA, 33 bp, Homo sapien
cggcattgccagtcattaaacagttaacacgca

SEQ ID NO: 386733 - DNA, 33 bp, Homo sapien
acatgatagaacgtctaaacagtgctggcttat

SEQ ID NO: 386734 - DNA, 33 bp, Homo sapien
acatgatagaacgtctgaacagtgctggcttat

SEQ ID NO: 386735 - DNA, 33 bp, Homo sapien
gctgaaaaggttccacagtatttggaccgctgc

SEQ ID NO: 386736 - DNA, 33 bp, Homo sapien
gctgaaaaggttccacggtatttggaccgctgc

SEQ ID NO: 386737 - DNA, 33 bp, Homo sapien
catttattcttttatacctctggagtcagaaga

SEQ ID NO: 386738 - DNA, 33 bp, Homo sapien
catttattcttttatagctctggagtcagaaga

SEQ ID NO: 386739 - DNA, 33 bp, Homo sapien
tcatatcgggaaagaaatcactctgtcatcata

SEQ ID NO: 386740 - DNA, 33 bp, Homo sapien
tcatatcgggaaagaagtcactctgtcatcata

SEQ ID NO: 386741 - DNA, 33 bp, Homo sapien
ttctgagaatttaggcgctttaggctagaggat

SEQ ID NO: 386742 - DNA, 33 bp, Homo sapien
ttctgagaatttaggctctttaggctagaggat

SEQ ID NO: 386743 - DNA, 33 bp, Homo sapien
ctattcaaactctcagcagctgggaatccatga

SEQ ID NO: 386744 - DNA, 33 bp, Homo sapien
ctattcaaactctcaggagctgggaatccatga

SEQ ID NO: 386745 - DNA, 33 bp, Homo sapien
accagagaattgttcaaggcagagaattatttt

SEQ ID NO: 386746 - DNA, 33 bp, Homo sapien
accagagaattgttcatggcagagaattatttt

SEQ ID NO: 386747 - DNA, 33 bp, Homo sapien
ttggagctctgaatcactattgtcactgaggga

SEQ ID NO: 386748 - DNA, 33 bp, Homo sapien
ttggagctctgaatcattattgtcactgaggga

SEQ ID NO: 386749 - DNA, 33 bp, Homo sapien
tctttgaaggacaccactcagattgcaatagga

SEQ ID NO: 386750 - DNA, 33 bp, Homo sapien
tctttgaaggacaccagtcagattgcaatagga

SEQ ID NO: 386751 - DNA, 33 bp, Homo sapien
atagcataggtacttacctttctcagcaccaca

SEQ ID NO: 386752 - DNA, 33 bp, Homo sapien
atagcataggtacttatctttctcagcaccaca

SEQ ID NO: 386753 - DNA, 33 bp, Homo sapien
taaaagcatcatgcaccaggtaaaatgtttaat

SEQ ID NO: 386754 - DNA, 33 bp, Homo sapien
taaaagcatcatgcactaggtaaaatgtttaat

SEQ ID NO: 386755 - DNA, 33 bp, Homo sapien
acatctatatcctcaaaccaaggagaaaaagga

SEQ ID NO: 386756 - DNA, 33 bp, Homo sapien
acatctatatcctcaacccaaggagaaaaagga

SEQ ID NO: 386757 - DNA, 33 bp, Homo sapien
gactgagaaatgcagaaaaaggcagacaggaag

SEQ ID NO: 386758 - DNA, 33 bp, Homo sapien
gactgagaaatgcagagaaaggcagacaggaag

SEQ ID NO: 386759 - DNA, 33 bp, Homo sapien
atgtggaaaattaggaacatcatagctaatgta

SEQ ID NO: 386760 - DNA, 33 bp, Homo sapien
atgtggaaaattaggagcatcatagctaatgta

SEQ ID NO: 386761 - DNA, 33 bp, Homo sapien
tcactatcttttggaacttactgtgacagagga

SEQ ID NO: 386762 - DNA, 33 bp, Homo sapien
tcactatcttttggaatttactgtgacagagga

SEQ ID NO: 386763 - DNA, 33 bp, Homo sapien
atctaagcatgaaggacaccctagaatttgcac

SEQ ID NO: 386764 - DNA, 33 bp, Homo sapien
atctaagcatgaaggagaccctagaatttgcac

SEQ ID NO: 386765 - DNA, 33 bp, Homo sapien
gttactctccttagggaaattagcagctgtcag

SEQ ID NO: 386766 - DNA, 33 bp, Homo sapien
gttactctccttaggggaattagcagctgtcag

SEQ ID NO: 386767 - DNA, 33 bp, Homo sapien
caacctctttttcctacgctgtggaaagaggag

SEQ ID NO: 386768 - DNA, 33 bp, Homo sapien
caacctctttttcctatgctgtggaaagaggag

SEQ ID NO: 386769 - DNA, 33 bp, Homo sapien
taaattcacacattgaaaggcagaaaccaagac

SEQ ID NO: 386770 - DNA, 33 bp, Homo sapien
taaattcacacattgagaggcagaaaccaagac

SEQ ID NO: 386771 - DNA, 33 bp, Homo sapien
ttaaacaagcatgggaagatggatgattggatg

SEQ ID NO: 386772 - DNA, 33 bp, Homo sapien
ttaaacaagcatgggaggatggatgattggatg

SEQ ID NO: 386773 - DNA, 33 bp, Homo sapien
aacaaccagaagatcacgagctaaaccaataaa

SEQ ID NO: 386774 - DNA, 33 bp, Homo sapien
aacaaccagaagatcatgagctaaaccaataaa

SEQ ID NO: 386775 - DNA, 33 bp, Homo sapien
gtgattcaagtccacacactgttattcaggcaa

SEQ ID NO: 386776 - DNA, 33 bp, Homo sapien
gtgattcaagtccacatactgttattcaggcaa

SEQ ID NO: 386777 - DNA, 33 bp, Homo sapien
aaaatcagaacatataactctaagggaaaaagg

SEQ ID NO: 386778 - DNA, 33 bp, Homo sapien
aaaatcagaacatatacctctaagggaaaaagg

SEQ ID NO: 386779 - DNA, 33 bp, Homo sapien
gttcagcgtaattgcacctggtttatcttggct

SEQ ID NO: 386780 - DNA, 33 bp, Homo sapien
gttcagcgtaattgcagctggtttatcttggct

SEQ ID NO: 386781 - DNA, 33 bp, Homo sapien
cccaagttcccgcctaacaagaaaccaggagaa

SEQ ID NO: 386782 - DNA, 33 bp, Homo sapien
cccaagttcccgcctagcaagaaaccaggagaa

SEQ ID NO: 386783 - DNA, 33 bp, Homo sapien
atactctggcttgatcacatacaggctttgaaa

SEQ ID NO: 386784 - DNA, 33 bp, Homo sapien
atactctggcttgatcgcatacaggctttgaaa

SEQ ID NO: 386785 - DNA, 33 bp, Homo sapien
aaaagaggaggcacaaaagaaatgtttcttgtt

SEQ ID NO: 386786 - DNA, 33 bp, Homo sapien
aaaagaggaggcacaacagaaatgtttcttgtt

SEQ ID NO: 386787 - DNA, 33 bp, Homo sapien
ggattcaaataaggtcgatgcatttttaatcta

SEQ ID NO: 386788 - DNA, 33 bp, Homo sapien
ggattcaaataaggtctatgcatttttaatcta

SEQ ID NO: 386789 - DNA, 33 bp, Homo sapien
ctggataagtgaggtacagcaggacacactgca

SEQ ID NO: 386790 - DNA, 33 bp, Homo sapien
ctggataagtgaggtatagcaggacacactgca

SEQ ID NO: 386791 - DNA, 33 bp, Homo sapien
aaaactttttttgcccacacctcatcatttatt

SEQ ID NO: 386792 - DNA, 33 bp, Homo sapien
aaaactttttttgccctcacctcatcatttatt

SEQ ID NO: 386793 - DNA, 33 bp, Homo sapien
ttttgaaggttggcatcataaaaagttatcaaa

SEQ ID NO: 386794 - DNA, 33 bp, Homo sapien
ttttgaaggttggcattataaaaagttatcaaa

SEQ ID NO: 386795 - DNA, 33 bp, Homo sapien
tgtcacttcttaaaccaaaaatgagtcatgtaa

SEQ ID NO: 386796 - DNA, 33 bp, Homo sapien
tgtcacttcttaaaccgaaaatgagtcatgtaa

SEQ ID NO: 386797 - DNA, 33 bp, Homo sapien
ttctggaattcactataagaagttgcaaatggt

SEQ ID NO: 386798 - DNA, 33 bp, Homo sapien
ttctggaattcactatgagaagttgcaaatggt

SEQ ID NO: 386799 - DNA, 33 bp, Homo sapien
aataataattaactggcaatggattctgctgtc

SEQ ID NO: 386800 - DNA, 33 bp, Homo sapien
aataataattaactgggaatggattctgctgtc

SEQ ID NO: 386801 - DNA, 33 bp, Homo sapien
atggtgcctaaaagagaatatttcctgttttct

SEQ ID NO: 386802 - DNA, 33 bp, Homo sapien
atggtgcctaaaagaggatatttcctgttttct

SEQ ID NO: 386803 - DNA, 33 bp, Homo sapien
tccatccagatacctaaaaaagttttacttctt

SEQ ID NO: 386804 - DNA, 33 bp, Homo sapien
tccatccagatacctagaaaagttttacttctt

SEQ ID NO: 386805 - DNA, 33 bp, Homo sapien
gggctgggtaaaataacattgagacctactggg

SEQ ID NO: 386806 - DNA, 33 bp, Homo sapien
gggctgggtaaaataagattgagacctactggg

SEQ ID NO: 386807 - DNA, 33 bp, Homo sapien
aatatttacagactatcaaaaggaaaagttcaa

SEQ ID NO: 386808 - DNA, 33 bp, Homo sapien
aatatttacagactatgaaaaggaaaagttcaa

SEQ ID NO: 386809 - DNA, 33 bp, Homo sapien
acatccaacaacagagaagtggataaataatga

SEQ ID NO: 386810 - DNA, 33 bp, Homo sapien
acatccaacaacagaggagtggataaataatga

SEQ ID NO: 386811 - DNA, 33 bp, Homo sapien
aggcttattaggatacagaactttcagtgtgaa

SEQ ID NO: 386812 - DNA, 33 bp, Homo sapien
aggcttattaggatacggaactttcagtgtgaa

SEQ ID NO: 386813 - DNA, 33 bp, Homo sapien
tggtgggaatctagaaaacggagaaagaatttc

SEQ ID NO: 386814 - DNA, 33 bp, Homo sapien
tggtgggaatctagaagacggagaaagaatttc

SEQ ID NO: 386815 - DNA, 33 bp, Homo sapien
cctgcgagatgaaatcaaattgttttataatga

SEQ ID NO: 386816 - DNA, 33 bp, Homo sapien
cctgcgagatgaaatccaattgttttataatga

SEQ ID NO: 386817 - DNA, 33 bp, Homo sapien
tttcccttgtttcaagcattgctctaaaggtaa

SEQ ID NO: 386818 - DNA, 33 bp, Homo sapien
tttcccttgtttcaagtattgctctaaaggtaa

SEQ ID NO: 386819 - DNA, 33 bp, Homo sapien
ccacagctggatatcacggtgattttttgggtg

SEQ ID NO: 386820 - DNA, 33 bp, Homo sapien
ccacagctggatatcatggtgattttttgggtg

SEQ ID NO: 386821 - DNA, 33 bp, Homo sapien
acctacatggcatagaaaacagggacaaggatt

SEQ ID NO: 386822 - DNA, 33 bp, Homo sapien
acctacatggcatagacaacagggacaaggatt

SEQ ID NO: 386823 - DNA, 33 bp, Homo sapien
cctagagaaacctgcaaacttgtgtctccacct

SEQ ID NO: 386824 - DNA, 33 bp, Homo sapien
cctagagaaacctgcacacttgtgtctccacct

SEQ ID NO: 386825 - DNA, 33 bp, Homo sapien
gtctggtctcagtaataacattgtccagcccat

SEQ ID NO: 386826 - DNA, 33 bp, Homo sapien
gtctggtctcagtaatcacattgtccagcccat

SEQ ID NO: 386827 - DNA, 33 bp, Homo sapien
tagtgtgtcttagtaacagcagatgcccaacct

SEQ ID NO: 386828 - DNA, 33 bp, Homo sapien
tagtgtgtcttagtaatagcagatgcccaacct

SEQ ID NO: 386829 - DNA, 33 bp, Homo sapien
gtcaccagctttctgaccctgtctcattacgat

SEQ ID NO: 386830 - DNA, 33 bp, Homo sapien
gtcaccagctttctgagcctgtctcattacgat

SEQ ID NO: 386831 - DNA, 33 bp, Homo sapien
ataaggagtgctactacgagtcaggcagtattc

SEQ ID NO: 386832 - DNA, 33 bp, Homo sapien
ataaggagtgctactaggagtcaggcagtattc

SEQ ID NO: 386833 - DNA, 33 bp, Homo sapien
tgtaaatgattcaagagatcccatcatatgcaa

SEQ ID NO: 386834 - DNA, 33 bp, Homo sapien
tgtaaatgattcaagatatcccatcatatgcaa

SEQ ID NO: 386835 - DNA, 33 bp, Homo sapien
accagtaagatgtcagcaaaattcattctaact

SEQ ID NO: 386836 - DNA, 33 bp, Homo sapien
accagtaagatgtcagtaaaattcattctaact

SEQ ID NO: 386837 - DNA, 33 bp, Homo sapien
tctggatttcaccacacctggtttttgttgtca

SEQ ID NO: 386838 - DNA, 33 bp, Homo sapien
tctggatttcaccacatctggtttttgttgtca

SEQ ID NO: 386839 - DNA, 33 bp, Homo sapien
gaggtgacacagagaaagaatattgttggaaat

SEQ ID NO: 386840 - DNA, 33 bp, Homo sapien
gaggtgacacagagaatgaatattgttggaaat

SEQ ID NO: 386841 - DNA, 33 bp, Homo sapien
atggcacacgcaaatgcagaaagtagattttgc

SEQ ID NO: 386842 - DNA, 33 bp, Homo sapien
atggcacacgcaaatgtagaaagtagattttgc

SEQ ID NO: 386843 - DNA, 33 bp, Homo sapien
aagaggagagatcagaagacatttacaaaatca

SEQ ID NO: 386844 - DNA, 33 bp, Homo sapien
aagaggagagatcagaggacatttacaaaatca

SEQ ID NO: 386845 - DNA, 33 bp, Homo sapien
ctattgctttttaccacggatggacaatgccta

SEQ ID NO: 386846 - DNA, 33 bp, Homo sapien
ctattgctttttaccatggatggacaatgccta

SEQ ID NO: 386847 - DNA, 33 bp, Homo sapien
tatctcttgaccatgccattgattagttatgtg

SEQ ID NO: 386848 - DNA, 33 bp, Homo sapien
tatctcttgaccatgctattgattagttatgtg

SEQ ID NO: 386849 - DNA, 33 bp, Homo sapien
ctgataaaagcttgaaatagacattatagcact

SEQ ID NO: 386850 - DNA, 33 bp, Homo sapien
ctgataaaagcttgaattagacattatagcact

SEQ ID NO: 386851 - DNA, 33 bp, Homo sapien
acactgagtttgcagagtcatccttttgcttcc

SEQ ID NO: 386852 - DNA, 33 bp, Homo sapien
acactgagtttgcagattcatccttttgcttcc

SEQ ID NO: 386853 - DNA, 33 bp, Homo sapien
ttgttgctgtatcccactccaactcatttgatc

SEQ ID NO: 386854 - DNA, 33 bp, Homo sapien
ttgttgctgtatcccattccaactcatttgatc

SEQ ID NO: 386855 - DNA, 33 bp, Homo sapien
agactcaagaaagatacctaagtcaagtcattc

SEQ ID NO: 386856 - DNA, 33 bp, Homo sapien
agactcaagaaagatagctaagtcaagtcattc

SEQ ID NO: 386857 - DNA, 33 bp, Homo sapien
ggctggctagcactgacaggaagctcttcttag

SEQ ID NO: 386858 - DNA, 33 bp, Homo sapien
ggctggctagcactgagaggaagctcttcttag

SEQ ID NO: 386859 - DNA, 33 bp, Homo sapien
gtcattatggatcttacataaacaagaaataaa

SEQ ID NO: 386860 - DNA, 33 bp, Homo sapien
gtcattatggatcttatataaacaagaaataaa

SEQ ID NO: 386861 - DNA, 33 bp, Homo sapien
ttaggtgttatgatgccaatttgcccacacatt

SEQ ID NO: 386862 - DNA, 33 bp, Homo sapien
ttaggtgttatgatgctaatttgcccacacatt

SEQ ID NO: 386863 - DNA, 33 bp, Homo sapien
aacaatgttaacacttaaaatttcagcagaacc

SEQ ID NO: 386864 - DNA, 33 bp, Homo sapien
aacaatgttaacacttcaaatttcagcagaacc

SEQ ID NO: 386865 - DNA, 33 bp, Homo sapien
tcttcatcactacaaaatatcttctgtgatgat

SEQ ID NO: 386866 - DNA, 33 bp, Homo sapien
tcttcatcactacaaagtatcttctgtgatgat

SEQ ID NO: 386867 - DNA, 33 bp, Homo sapien
attaataggatatgtccagagttctgctttaga

SEQ ID NO: 386868 - DNA, 33 bp, Homo sapien
attaataggatatgtctagagttctgctttaga

SEQ ID NO: 386869 - DNA, 33 bp, Homo sapien
tattgtgttggctactaagcccttagagatatg

SEQ ID NO: 386870 - DNA, 33 bp, Homo sapien
tattgtgttggctacttagcccttagagatatg

SEQ ID NO: 386871 - DNA, 33 bp, Homo sapien
gagtctagacagtggtcaaaggcaggattcatg

SEQ ID NO: 386872 - DNA, 33 bp, Homo sapien
gagtctagacagtggtgaaaggcaggattcatg

SEQ ID NO: 386873 - DNA, 33 bp, Homo sapien
tgctatttcagagcaactgaacttttaatttta

SEQ ID NO: 386874 - DNA, 33 bp, Homo sapien
tgctatttcagagcaattgaacttttaatttta

SEQ ID NO: 386875 - DNA, 33 bp, Homo sapien
aatgctcttttggatacatctgctttaaagcat

SEQ ID NO: 386876 - DNA, 33 bp, Homo sapien
aatgctcttttggatagatctgctttaaagcat

SEQ ID NO: 386877 - DNA, 33 bp, Homo sapien
cttacattgaaaagtacgggaccctgaaagtgg

SEQ ID NO: 386878 - DNA, 33 bp, Homo sapien
cttacattgaaaagtatgggaccctgaaagtgg

SEQ ID NO: 386879 - DNA, 33 bp, Homo sapien
attcctgaccatcagaagactggagagggtacc

SEQ ID NO: 386880 - DNA, 33 bp, Homo sapien
attcctgaccatcagaggactggagagggtacc

SEQ ID NO: 386881 - DNA, 33 bp, Homo sapien
tacttccatcaactcaagacagttcaaagcagc

SEQ ID NO: 386882 - DNA, 33 bp, Homo sapien
tacttccatcaactcaggacagttcaaagcagc

SEQ ID NO: 386883 - DNA, 33 bp, Homo sapien
ttcaacctctgcttcactaatgagggctgtgga

SEQ ID NO: 386884 - DNA, 33 bp, Homo sapien
ttcaacctctgcttcagtaatgagggctgtgga

SEQ ID NO: 386885 - DNA, 33 bp, Homo sapien
tcatatctgttcgtagaagtgggcgtcaagatt

SEQ ID NO: 386886 - DNA, 33 bp, Homo sapien
tcatatctgttcgtagtagtgggcgtcaagatt

SEQ ID NO: 386887 - DNA, 33 bp, Homo sapien
gtctaacacactcatgaatatcgagagccatct

SEQ ID NO: 386888 - DNA, 33 bp, Homo sapien
gtctaacacactcatgcatatcgagagccatct

SEQ ID NO: 386889 - DNA, 33 bp, Homo sapien
ttcaggacagcttccgcaaactcaatcacttct

SEQ ID NO: 386890 - DNA, 33 bp, Homo sapien
ttcaggacagcttccggaaactcaatcacttct

SEQ ID NO: 386891 - DNA, 33 bp, Homo sapien
caaagacggaacattaataagagactcccttca

SEQ ID NO: 386892 - DNA, 33 bp, Homo sapien
caaagacggaacattagtaagagactcccttca

SEQ ID NO: 386893 - DNA, 33 bp, Homo sapien
cagagcaggatttagacactctgcagagactgc

SEQ ID NO: 386894 - DNA, 33 bp, Homo sapien
cagagcaggatttagatactctgcagagactgc

SEQ ID NO: 386895 - DNA, 33 bp, Homo sapien
aaaaaaaagagctcacaaatgtccctgctgttt

SEQ ID NO: 386896 - DNA, 33 bp, Homo sapien
aaaaaaaagagctcacgaatgtccctgctgttt

SEQ ID NO: 386897 - DNA, 33 bp, Homo sapien
tatttttaacactaaacgatttgttcagattgg

SEQ ID NO: 386898 - DNA, 33 bp, Homo sapien
tatttttaacactaaatgatttgttcagattgg

SEQ ID NO: 386899 - DNA, 33 bp, Homo sapien
agctattcaccttgtacgtccttgataaggaaa

SEQ ID NO: 386900 - DNA, 33 bp, Homo sapien
agctattcaccttgtatgtccttgataaggaaa

SEQ ID NO: 386901 - DNA, 33 bp, Homo sapien
ccttttggaagtgcacagtattgtttaacacac

SEQ ID NO: 386902 - DNA, 33 bp, Homo sapien
ccttttggaagtgcacggtattgtttaacacac

SEQ ID NO: 386903 - DNA, 33 bp, Homo sapien
ggactgtctcctgctcactgttatggtcctaga

SEQ ID NO: 386904 - DNA, 33 bp, Homo sapien
ggactgtctcctgctcgctgttatggtcctaga

SEQ ID NO: 386905 - DNA, 33 bp, Homo sapien
cagcagtaaatcaccaaacctaaaattccccga

SEQ ID NO: 386906 - DNA, 33 bp, Homo sapien
cagcagtaaatcaccagacctaaaattccccga

SEQ ID NO: 386907 - DNA, 33 bp, Homo sapien
ggtgtcttttgctgaactatggagttttagttt

SEQ ID NO: 386908 - DNA, 33 bp, Homo sapien
ggtgtcttttgctgaattatggagttttagttt

SEQ ID NO: 386909 - DNA, 33 bp, Homo sapien
gggagttaactatggcaaagatgttagtaatgg

SEQ ID NO: 386910 - DNA, 33 bp, Homo sapien
gggagttaactatggccaagatgttagtaatgg

SEQ ID NO: 386911 - DNA, 33 bp, Homo sapien
aacaacacaacagcaaagcagactagcatggtt

SEQ ID NO: 386912 - DNA, 33 bp, Homo sapien
aacaacacaacagcaaggcagactagcatggtt

SEQ ID NO: 386913 - DNA, 33 bp, Homo sapien
tcagtacagacccagacagcatgtacaacagcg

SEQ ID NO: 386914 - DNA, 33 bp, Homo sapien
tcagtacagacccagagagcatgtacaacagcg

SEQ ID NO: 386915 - DNA, 33 bp, Homo sapien
tgtctctttctctggaaggccaagtgatgcagg

SEQ ID NO: 386916 - DNA, 33 bp, Homo sapien
tgtctctttctctggacggccaagtgatgcagg

SEQ ID NO: 386917 - DNA, 33 bp, Homo sapien
gcaccccagcaaagtgaaacatatttccctggc

SEQ ID NO: 386918 - DNA, 33 bp, Homo sapien
gcaccccagcaaagtgtaacatatttccctggc

SEQ ID NO: 386919 - DNA, 33 bp, Homo sapien
acagtttgaaagagagccagcaaaaaggttgga

SEQ ID NO: 386920 - DNA, 33 bp, Homo sapien
acagtttgaaagagaggcagcaaaaaggttgga

SEQ ID NO: 386921 - DNA, 33 bp, Homo sapien
gaaaagggggctgggacacgttggtgatttttt

SEQ ID NO: 386922 - DNA, 33 bp, Homo sapien
gaaaagggggctgggatacgttggtgatttttt

SEQ ID NO: 386923 - DNA, 33 bp, Homo sapien
atggagtcttccatccactggtaaaatctggaa

SEQ ID NO: 386924 - DNA, 33 bp, Homo sapien
atggagtcttccatccgctggtaaaatctggaa

SEQ ID NO: 386925 - DNA, 33 bp, Homo sapien
cagttttaaaaatgcaaagacaaagatcatggc

SEQ ID NO: 386926 - DNA, 33 bp, Homo sapien
cagttttaaaaatgcacagacaaagatcatggc

SEQ ID NO: 386927 - DNA, 33 bp, Homo sapien
agttttaatgacttcaaagatacaaagctagaa

SEQ ID NO: 386928 - DNA, 33 bp, Homo sapien
agttttaatgacttcagagatacaaagctagaa

SEQ ID NO: 386929 - DNA, 33 bp, Homo sapien
catggttaataaataactgaaataccaggtgta

SEQ ID NO: 386930 - DNA, 33 bp, Homo sapien
catggttaataaataagtgaaataccaggtgta

SEQ ID NO: 386931 - DNA, 33 bp, Homo sapien
attttcaagaatcctcatacaaattgtccaggg

SEQ ID NO: 386932 - DNA, 33 bp, Homo sapien
attttcaagaatcctcgtacaaattgtccaggg

SEQ ID NO: 386933 - DNA, 33 bp, Homo sapien
ctcagattaagaactccagatattctagaaagt

SEQ ID NO: 386934 - DNA, 33 bp, Homo sapien
ctcagattaagaactcgagatattctagaaagt

SEQ ID NO: 386935 - DNA, 33 bp, Homo sapien
tttcatactgagttaacacacttgccaagactc

SEQ ID NO: 386936 - DNA, 33 bp, Homo sapien
tttcatactgagttaatacacttgccaagactc

SEQ ID NO: 386937 - DNA, 33 bp, Homo sapien
catcttacttttttaacgcttcgtacctagatt

SEQ ID NO: 386938 - DNA, 33 bp, Homo sapien
catcttacttttttaatgcttcgtacctagatt

SEQ ID NO: 386939 - DNA, 33 bp, Homo sapien
tctctctacagaatcacatcatctgggtaattt

SEQ ID NO: 386940 - DNA, 33 bp, Homo sapien
tctctctacagaatcagatcatctgggtaattt

SEQ ID NO: 386941 - DNA, 33 bp, Homo sapien
cacgtccacagaagtcactacccaaaaaactcg

SEQ ID NO: 386942 - DNA, 33 bp, Homo sapien
cacgtccacagaagtcgctacccaaaaaactcg

SEQ ID NO: 386943 - DNA, 33 bp, Homo sapien
aatgccagagctgtaaaatgactgagatataaa

SEQ ID NO: 386944 - DNA, 33 bp, Homo sapien
aatgccagagctgtaatatgactgagatataaa

SEQ ID NO: 386945 - DNA, 33 bp, Homo sapien
ctctggcatttctggggaacactttagaatact

SEQ ID NO: 386946 - DNA, 33 bp, Homo sapien
ctctggcatttctgggtaacactttagaatact

SEQ ID NO: 386947 - DNA, 33 bp, Homo sapien
gacaagcttgtctgaacaggtgcgaattcggag

SEQ ID NO: 386948 - DNA, 33 bp, Homo sapien
gacaagcttgtctgaagaggtgcgaattcggag

SEQ ID NO: 386949 - DNA, 33 bp, Homo sapien
caatataaacaaaacaatgaaggcttgatcagt

SEQ ID NO: 386950 - DNA, 33 bp, Homo sapien
caatataaacaaaacagtgaaggcttgatcagt

SEQ ID NO: 386951 - DNA, 33 bp, Homo sapien
catgcacgttgcaggcacgttgaatgtgaaggt

SEQ ID NO: 386952 - DNA, 33 bp, Homo sapien
catgcacgttgcaggcgcgttgaatgtgaaggt

SEQ ID NO: 386953 - DNA, 33 bp, Homo sapien
tcctttgtcaagcaaactaatagtgaaaacctg

SEQ ID NO: 386954 - DNA, 33 bp, Homo sapien
tcctttgtcaagcaaattaatagtgaaaacctg

SEQ ID NO: 386955 - DNA, 33 bp, Homo sapien
ccagggccgcagattacgaccacttcacctttg

SEQ ID NO: 386956 - DNA, 33 bp, Homo sapien
ccagggccgcagattaggaccacttcacctttg

SEQ ID NO: 386957 - DNA, 33 bp, Homo sapien
catctaattaccaagcccaaagacataggaagg

SEQ ID NO: 386958 - DNA, 33 bp, Homo sapien
catctaattaccaagctcaaagacataggaagg

SEQ ID NO: 386959 - DNA, 33 bp, Homo sapien
gaaactgaagctccaaacatctaattaccaagc

SEQ ID NO: 386960 - DNA, 33 bp, Homo sapien
gaaactgaagctccaagcatctaattaccaagc

SEQ ID NO: 386961 - DNA, 33 bp, Homo sapien
aaaaagcacagtgatacactctgtaggtacata

SEQ ID NO: 386962 - DNA, 33 bp, Homo sapien
aaaaagcacagtgatagactctgtaggtacata

SEQ ID NO: 386963 - DNA, 33 bp, Homo sapien
aacatgtatttactggacatctagatttcattt

SEQ ID NO: 386964 - DNA, 33 bp, Homo sapien
aacatgtatttactgggcatctagatttcattt

SEQ ID NO: 386965 - DNA, 33 bp, Homo sapien
aacagctaaacaaaaactagacctatccacttg

SEQ ID NO: 386966 - DNA, 33 bp, Homo sapien
aacagctaaacaaaaagtagacctatccacttg

SEQ ID NO: 386967 - DNA, 33 bp, Homo sapien
atagctgtctcatgtacaagattaaattagaaa

SEQ ID NO: 386968 - DNA, 33 bp, Homo sapien
atagctgtctcatgtataagattaaattagaaa

SEQ ID NO: 386969 - DNA, 33 bp, Homo sapien
taatttcttcatcctaaaactctagctcctagc

SEQ ID NO: 386970 - DNA, 33 bp, Homo sapien
taatttcttcatcctacaactctagctcctagc

SEQ ID NO: 386971 - DNA, 33 bp, Homo sapien
ttctttttcttctaacgggagatataaaaatca

SEQ ID NO: 386972 - DNA, 33 bp, Homo sapien
ttctttttcttctaactggagatataaaaatca

SEQ ID NO: 386973 - DNA, 33 bp, Homo sapien
agaatctgttcactgacgaccagggctggtgtg

SEQ ID NO: 386974 - DNA, 33 bp, Homo sapien
agaatctgttcactgatgaccagggctggtgtg

SEQ ID NO: 386975 - DNA, 33 bp, Homo sapien
tctcactttcttccgccacaatgaagacctgga

SEQ ID NO: 386976 - DNA, 33 bp, Homo sapien
tctcactttcttccgctacaatgaagacctgga

SEQ ID NO: 386977 - DNA, 33 bp, Homo sapien
gatcagagatcccgagaaagggcttcagtttca

SEQ ID NO: 386978 - DNA, 33 bp, Homo sapien
gatcagagatcccgaggaagggcttcagtttca

SEQ ID NO: 386979 - DNA, 33 bp, Homo sapien
ctgcggcttctgcccccctactccctagctcca

SEQ ID NO: 386980 - DNA, 33 bp, Homo sapien
ctgcggcttctgccccgctactccctagctcca

SEQ ID NO: 386981 - DNA, 33 bp, Homo sapien
ttctagtgaatccccaaaggtacatgttgaaat

SEQ ID NO: 386982 - DNA, 33 bp, Homo sapien
ttctagtgaatccccagaggtacatgttgaaat

SEQ ID NO: 386983 - DNA, 33 bp, Homo sapien
cacacaacctaaggacaactttgaatcaattct

SEQ ID NO: 386984 - DNA, 33 bp, Homo sapien
cacacaacctaaggacgactttgaatcaattct

SEQ ID NO: 386985 - DNA, 33 bp, Homo sapien
aaaaaagagcgagatacaagtcaaatggaaagg

SEQ ID NO: 386986 - DNA, 33 bp, Homo sapien
aaaaaagagcgagatagaagtcaaatggaaagg

SEQ ID NO: 386987 - DNA, 33 bp, Homo sapien
cctgcttcatcaacacagaaaccaacaagactc

SEQ ID NO: 386988 - DNA, 33 bp, Homo sapien
cctgcttcatcaacacggaaaccaacaagactc

SEQ ID NO: 386989 - DNA, 33 bp, Homo sapien
cagtgtccaggaggaacgaggtctcatgagcaa

SEQ ID NO: 386990 - DNA, 33 bp, Homo sapien
cagtgtccaggaggaatgaggtctcatgagcaa

SEQ ID NO: 386991 - DNA, 33 bp, Homo sapien
caggtcagccagttggaaacagagttgacggag

SEQ ID NO: 386992 - DNA, 33 bp, Homo sapien
caggtcagccagttgggaacagagttgacggag

SEQ ID NO: 386993 - DNA, 33 bp, Homo sapien
tgcagcctctgttcgaagagtacaaggatctcc

SEQ ID NO: 386994 - DNA, 33 bp, Homo sapien
tgcagcctctgttcgaggagtacaaggatctcc

SEQ ID NO: 386995 - DNA, 33 bp, Homo sapien
caatttataaacactacctgtaaacttctgaac

SEQ ID NO: 386996 - DNA, 33 bp, Homo sapien
caatttataaacactagctgtaaacttctgaac

SEQ ID NO: 386997 - DNA, 33 bp, Homo sapien
tgcaatcccatgcaaacaaagctgagcatggga

SEQ ID NO: 386998 - DNA, 33 bp, Homo sapien
tgcaatcccatgcaaagaaagctgagcatggga

SEQ ID NO: 386999 - DNA, 33 bp, Homo sapien
tcagagaacagaatgaccagttcaggagttcag

SEQ ID NO: 387000 - DNA, 33 bp, Homo sapien
tcagagaacagaatgagcagttcaggagttcag

SEQ ID NO: 387001 - DNA, 33 bp, Homo sapien
ccaaatcagacaccaacataaactgtagagtta

SEQ ID NO: 387002 - DNA, 33 bp, Homo sapien
ccaaatcagacaccaatataaactgtagagtta

SEQ ID NO: 387003 - DNA, 33 bp, Homo sapien
ggtgacctcaaattcacgagcccaagcgatctt

SEQ ID NO: 387004 - DNA, 33 bp, Homo sapien
ggtgacctcaaattcatgagcccaagcgatctt

SEQ ID NO: 387005 - DNA, 33 bp, Homo sapien
atttccttcagataaaatgagagtggagagacc

SEQ ID NO: 387006 - DNA, 33 bp, Homo sapien
atttccttcagataaagtgagagtggagagacc

SEQ ID NO: 387007 - DNA, 33 bp, Homo sapien
ttgttatagtgtctccaatgtaaaggctcaatc

SEQ ID NO: 387008 - DNA, 33 bp, Homo sapien
ttgttatagtgtctccgatgtaaaggctcaatc

SEQ ID NO: 387009 - DNA, 33 bp, Homo sapien
gttaacgggctgcagccaaaaggcaaatattga

SEQ ID NO: 387010 - DNA, 33 bp, Homo sapien
gttaacgggctgcagctaaaaggcaaatattga

SEQ ID NO: 387011 - DNA, 33 bp, Homo sapien
tgagtgcaagtgactcaaacaaatatattaaca

SEQ ID NO: 387012 - DNA, 33 bp, Homo sapien
tgagtgcaagtgactcgaacaaatatattaaca

SEQ ID NO: 387013 - DNA, 33 bp, Homo sapien
agaacgagagctcatacggcatccacgcgtgtc

SEQ ID NO: 387014 - DNA, 33 bp, Homo sapien
agaacgagagctcatatggcatccacgcgtgtc

SEQ ID NO: 387015 - DNA, 33 bp, Homo sapien
ttcattttgcccggaaatgcgacacataagtgc

SEQ ID NO: 387016 - DNA, 33 bp, Homo sapien
ttcattttgcccggaagtgcgacacataagtgc

SEQ ID NO: 387017 - DNA, 33 bp, Homo sapien
cacaagttcaaaatcactctcacctggtcaaga

SEQ ID NO: 387018 - DNA, 33 bp, Homo sapien
cacaagttcaaaatcagtctcacctggtcaaga

SEQ ID NO: 387019 - DNA, 33 bp, Homo sapien
aggctatccgcggaagaagagaatataagcttt

SEQ ID NO: 387020 - DNA, 33 bp, Homo sapien
aggctatccgcggaagtagagaatataagcttt

SEQ ID NO: 387021 - DNA, 33 bp, Homo sapien
ttctttcaactctgaaatgatgacagccatgcc

SEQ ID NO: 387022 - DNA, 33 bp, Homo sapien
ttctttcaactctgaactgatgacagccatgcc

SEQ ID NO: 387023 - DNA, 33 bp, Homo sapien
cggtgtcatgtcctgcacattaaggatatacaa

SEQ ID NO: 387024 - DNA, 33 bp, Homo sapien
cggtgtcatgtcctgcgcattaaggatatacaa

SEQ ID NO: 387025 - DNA, 33 bp, Homo sapien
tcagtgtggcccagataaacctgtcccttcttt

SEQ ID NO: 387026 - DNA, 33 bp, Homo sapien
tcagtgtggcccagatcaacctgtcccttcttt

SEQ ID NO: 387027 - DNA, 33 bp, Homo sapien
ttcataattgattccaaacgtgcatgaatcttt

SEQ ID NO: 387028 - DNA, 33 bp, Homo sapien
ttcataattgattccagacgtgcatgaatcttt

SEQ ID NO: 387029 - DNA, 33 bp, Homo sapien
tcacttattgacgtagcatcactttattgagca

SEQ ID NO: 387030 - DNA, 33 bp, Homo sapien
tcacttattgacgtagtatcactttattgagca

SEQ ID NO: 387031 - DNA, 33 bp, Homo sapien
tgggttcagctcctaacgccaaaaagcatatgc

SEQ ID NO: 387032 - DNA, 33 bp, Homo sapien
tgggttcagctcctaatgccaaaaagcatatgc

SEQ ID NO: 387033 - DNA, 33 bp, Homo sapien
ccttgttagcagcagccaaatgcaattcctaat

SEQ ID NO: 387034 - DNA, 33 bp, Homo sapien
ccttgttagcagcagcgaaatgcaattcctaat

SEQ ID NO: 387035 - DNA, 33 bp, Homo sapien
atcccaacgaatattacgttccacaggctgcag

SEQ ID NO: 387036 - DNA, 33 bp, Homo sapien
atcccaacgaatattatgttccacaggctgcag

SEQ ID NO: 387037 - DNA, 33 bp, Homo sapien
tgcacacctgtcacgaactcgccaacctcaatc

SEQ ID NO: 387038 - DNA, 33 bp, Homo sapien
tgcacacctgtcacgatctcgccaacctcaatc

SEQ ID NO: 387039 - DNA, 33 bp, Homo sapien
ccccacactctcttgacgctatcctcaataaac

SEQ ID NO: 387040 - DNA, 33 bp, Homo sapien
ccccacactctcttgatgctatcctcaataaac

SEQ ID NO: 387041 - DNA, 33 bp, Homo sapien
gagacttgttcactatcacgagtaaagcacagg

SEQ ID NO: 387042 - DNA, 33 bp, Homo sapien
gagacttgttcactatgacgagtaaagcacagg

SEQ ID NO: 387043 - DNA, 33 bp, Homo sapien
cgtttcgagcatataggaagtttccgaggtcag

SEQ ID NO: 387044 - DNA, 33 bp, Homo sapien
cgtttcgagcatatagtaagtttccgaggtcag

SEQ ID NO: 387045 - DNA, 33 bp, Homo sapien
gtacaaattattttacacatagaatttcactag

SEQ ID NO: 387046 - DNA, 33 bp, Homo sapien
gtacaaattattttacccatagaatttcactag

SEQ ID NO: 387047 - DNA, 33 bp, Homo sapien
cagaaaaggaagctgacgttagagattagtctc

SEQ ID NO: 387048 - DNA, 33 bp, Homo sapien
cagaaaaggaagctgaggttagagattagtctc

SEQ ID NO: 387049 - DNA, 33 bp, Homo sapien
aacacaatctgggtaaatgaattgctcaaaaat

SEQ ID NO: 387050 - DNA, 33 bp, Homo sapien
aacacaatctgggtaagtgaattgctcaaaaat

SEQ ID NO: 387051 - DNA, 33 bp, Homo sapien
atgtgaccagaatgtgacaaagtctttgctcta

SEQ ID NO: 387052 - DNA, 33 bp, Homo sapien
atgtgaccagaatgtggcaaagtctttgctcta

SEQ ID NO: 387053 - DNA, 33 bp, Homo sapien
aagacttacaggatcacagaatgtcaagattgg

SEQ ID NO: 387054 - DNA, 33 bp, Homo sapien
aagacttacaggatcatagaatgtcaagattgg

SEQ ID NO: 387055 - DNA, 33 bp, Homo sapien
attttggaaaagttgactagacaaaaggtgcag

SEQ ID NO: 387056 - DNA, 33 bp, Homo sapien
attttggaaaagttgagtagacaaaaggtgcag

SEQ ID NO: 387057 - DNA, 33 bp, Homo sapien
aagtgtggaaatgatacgcttcagctcttattt

SEQ ID NO: 387058 - DNA, 33 bp, Homo sapien
aagtgtggaaatgatatgcttcagctcttattt

SEQ ID NO: 387059 - DNA, 33 bp, Homo sapien
cgcccggctgtccctacaactttgaacagctcc

SEQ ID NO: 387060 - DNA, 33 bp, Homo sapien
cgcccggctgtccctagaactttgaacagctcc

SEQ ID NO: 387061 - DNA, 33 bp, Homo sapien
agcacttcagattccaatcgaatacattagagc

SEQ ID NO: 387062 - DNA, 33 bp, Homo sapien
agcacttcagattccactcgaatacattagagc

SEQ ID NO: 387063 - DNA, 33 bp, Homo sapien
tatcaagagccgtaagaccttggaaaatgcaaa

SEQ ID NO: 387064 - DNA, 33 bp, Homo sapien
tatcaagagccgtaagtccttggaaaatgcaaa

SEQ ID NO: 387065 - DNA, 33 bp, Homo sapien
agatgataattattcacgttttctaggcatacg

SEQ ID NO: 387066 - DNA, 33 bp, Homo sapien
agatgataattattcatgttttctaggcatacg

SEQ ID NO: 387067 - DNA, 33 bp, Homo sapien
gtcgcctaattgctacacatgggtgacttggta

SEQ ID NO: 387068 - DNA, 33 bp, Homo sapien
gtcgcctaattgctactcatgggtgacttggta

SEQ ID NO: 387069 - DNA, 33 bp, Homo sapien
caggcttaagaatacactagtaggtacagcagg

SEQ ID NO: 387070 - DNA, 33 bp, Homo sapien
caggcttaagaatacattagtaggtacagcagg

SEQ ID NO: 387071 - DNA, 33 bp, Homo sapien
ataggaaagagcttgacagattctggtaacagc

SEQ ID NO: 387072 - DNA, 33 bp, Homo sapien
ataggaaagagcttgatagattctggtaacagc

SEQ ID NO: 387073 - DNA, 33 bp, Homo sapien
caagctctttcctatcgaagggttttttccatg

SEQ ID NO: 387074 - DNA, 33 bp, Homo sapien
caagctctttcctatctaagggttttttccatg

SEQ ID NO: 387075 - DNA, 33 bp, Homo sapien
ggcctctctgagaaagaagcatttatactgaca

SEQ ID NO: 387076 - DNA, 33 bp, Homo sapien
ggcctctctgagaaaggagcatttatactgaca

SEQ ID NO: 387077 - DNA, 33 bp, Homo sapien
gttggttcttttaaaggctctggcacctcccct

SEQ ID NO: 387078 - DNA, 33 bp, Homo sapien
gttggttcttttaaagtctctggcacctcccct

SEQ ID NO: 387079 - DNA, 33 bp, Homo sapien
ccggactttgctcttccgaaataaatgtgtaag

SEQ ID NO: 387080 - DNA, 33 bp, Homo sapien
ccggactttgctcttctgaaataaatgtgtaag

SEQ ID NO: 387081 - DNA, 33 bp, Homo sapien
caatgtactgatgagccctacaattactgggct

SEQ ID NO: 387082 - DNA, 33 bp, Homo sapien
caatgtactgatgagcgctacaattactgggct

SEQ ID NO: 387083 - DNA, 33 bp, Homo sapien
atagtgatcaccataactcaaggaaaatccaga

SEQ ID NO: 387084 - DNA, 33 bp, Homo sapien
atagtgatcaccataagtcaaggaaaatccaga

SEQ ID NO: 387085 - DNA, 33 bp, Homo sapien
tttatttacaagcttgcaatccctgctagtgag

SEQ ID NO: 387086 - DNA, 33 bp, Homo sapien
tttatttacaagcttggaatccctgctagtgag

SEQ ID NO: 387087 - DNA, 33 bp, Homo sapien
atatccaacacaaatacgtcacttgtttctgtt

SEQ ID NO: 387088 - DNA, 33 bp, Homo sapien
atatccaacacaaatatgtcacttgtttctgtt

SEQ ID NO: 387089 - DNA, 33 bp, Homo sapien
atcacgggagggtcggaaaagacagatgcacag

SEQ ID NO: 387090 - DNA, 33 bp, Homo sapien
atcacgggagggtcgggaaagacagatgcacag

SEQ ID NO: 387091 - DNA, 33 bp, Homo sapien
aggaaaccagtatagacaacttgtgatggttta

SEQ ID NO: 387092 - DNA, 33 bp, Homo sapien
aggaaaccagtatagataacttgtgatggttta

SEQ ID NO: 387093 - DNA, 33 bp, Homo sapien
tacattgaagacaccacaaaatagtgtatggat

SEQ ID NO: 387094 - DNA, 33 bp, Homo sapien
tacattgaagacaccagaaaatagtgtatggat

SEQ ID NO: 387095 - DNA, 33 bp, Homo sapien
tagacctgagttcatcacaagagataagataga

SEQ ID NO: 387096 - DNA, 33 bp, Homo sapien
tagacctgagttcatcgcaagagataagataga

SEQ ID NO: 387097 - DNA, 33 bp, Homo sapien
gggtcaagattttgacagagggctggaagggag

SEQ ID NO: 387098 - DNA, 33 bp, Homo sapien
gggtcaagattttgacggagggctggaagggag

SEQ ID NO: 387099 - DNA, 33 bp, Homo sapien
gagataggtctttttacgtcgttcaggctggtc

SEQ ID NO: 387100 - DNA, 33 bp, Homo sapien
gagataggtctttttatgtcgttcaggctggtc

SEQ ID NO: 387101 - DNA, 33 bp, Homo sapien
cacacattacaagtgcgaaacatccggacacat

SEQ ID NO: 387102 - DNA, 33 bp, Homo sapien
cacacattacaagtgctaaacatccggacacat

SEQ ID NO: 387103 - DNA, 33 bp, Homo sapien
cattcatctataaaacaataaaggaaacatcct

SEQ ID NO: 387104 - DNA, 33 bp, Homo sapien
cattcatctataaaacgataaaggaaacatcct

SEQ ID NO: 387105 - DNA, 33 bp, Homo sapien
ttttgaagtcataattaaaagggctctgattca

SEQ ID NO: 387106 - DNA, 33 bp, Homo sapien
ttttgaagtcataatttaaagggctctgattca

SEQ ID NO: 387107 - DNA, 33 bp, Homo sapien
ggtgttaacctgattagccccagcccagctctt

SEQ ID NO: 387108 - DNA, 33 bp, Homo sapien
ggtgttaacctgattatccccagcccagctctt

SEQ ID NO: 387109 - DNA, 33 bp, Homo sapien
acaggcacgagctgccacgcctcacctcttgtt

SEQ ID NO: 387110 - DNA, 33 bp, Homo sapien
acaggcacgagctgccgcgcctcacctcttgtt

SEQ ID NO: 387111 - DNA, 33 bp, Homo sapien
agttaaatatccaacagtcgtgatttagggcat

SEQ ID NO: 387112 - DNA, 33 bp, Homo sapien
agttaaatatccaacattcgtgatttagggcat

SEQ ID NO: 387113 - DNA, 33 bp, Homo sapien
aggtggcacaagtaaaactctgttccttgtgac

SEQ ID NO: 387114 - DNA, 33 bp, Homo sapien
aggtggcacaagtaaacctctgttccttgtgac

SEQ ID NO: 387115 - DNA, 33 bp, Homo sapien
catgtgcgagccaaaactgtgagggagaagaat

SEQ ID NO: 387116 - DNA, 33 bp, Homo sapien
catgtgcgagccaaaattgtgagggagaagaat

SEQ ID NO: 387117 - DNA, 33 bp, Homo sapien
atgagctaaaaaggaagcatgtgcgagccaaaa

SEQ ID NO: 387118 - DNA, 33 bp, Homo sapien
atgagctaaaaaggaatcatgtgcgagccaaaa

SEQ ID NO: 387119 - DNA, 33 bp, Homo sapien
cagctgaaaccaagatgaacctggaagaagata

SEQ ID NO: 387120 - DNA, 33 bp, Homo sapien
cagctgaaaccaagattaacctggaagaagata

SEQ ID NO: 387121 - DNA, 33 bp, Homo sapien
agaagcatgaaattaaaagggtcttcttgtttc

SEQ ID NO: 387122 - DNA, 33 bp, Homo sapien
agaagcatgaaattaagagggtcttcttgtttc

SEQ ID NO: 387123 - DNA, 33 bp, Homo sapien
taacagtactttgacaacaaatgttcatatttc

SEQ ID NO: 387124 - DNA, 33 bp, Homo sapien
taacagtactttgacaccaaatgttcatatttc

SEQ ID NO: 387125 - DNA, 33 bp, Homo sapien
gcccagcctggttacaccatttcaccagcttct

SEQ ID NO: 387126 - DNA, 33 bp, Homo sapien
gcccagcctggttacatcatttcaccagcttct

SEQ ID NO: 387127 - DNA, 33 bp, Homo sapien
aagacatggaatgatacggtgtgatatatgaaa

SEQ ID NO: 387128 - DNA, 33 bp, Homo sapien
aagacatggaatgatatggtgtgatatatgaaa

SEQ ID NO: 387129 - DNA, 33 bp, Homo sapien
ttctcagtcgtaaaatcaggctaataacacctc

SEQ ID NO: 387130 - DNA, 33 bp, Homo sapien
ttctcagtcgtaaaattaggctaataacacctc

SEQ ID NO: 387131 - DNA, 33 bp, Homo sapien
attcagctgtcagacaaagtgttctctaaagtg

SEQ ID NO: 387132 - DNA, 33 bp, Homo sapien
attcagctgtcagacacagtgttctctaaagtg

SEQ ID NO: 387133 - DNA, 33 bp, Homo sapien
aagtccgtctgaacccagagtcagtgaccataa

SEQ ID NO: 387134 - DNA, 33 bp, Homo sapien
aagtccgtctgaacccggagtcagtgaccataa

SEQ ID NO: 387135 - DNA, 33 bp, Homo sapien
agtgaccgtatgaaataagcagcagttgtcaag

SEQ ID NO: 387136 - DNA, 33 bp, Homo sapien
agtgaccgtatgaaatgagcagcagttgtcaag

SEQ ID NO: 387137 - DNA, 33 bp, Homo sapien
atctgaatacatcaccacagaactgccagggta

SEQ ID NO: 387138 - DNA, 33 bp, Homo sapien
atctgaatacatcaccgcagaactgccagggta

SEQ ID NO: 387139 - DNA, 33 bp, Homo sapien
taaattcttctttttcccttatgtcaagcttct

SEQ ID NO: 387140 - DNA, 33 bp, Homo sapien
taaattcttctttttcgcttatgtcaagcttct

SEQ ID NO: 387141 - DNA, 33 bp, Homo sapien
atttagtcattccaacggtgtggagagatagag

SEQ ID NO: 387142 - DNA, 33 bp, Homo sapien
atttagtcattccaactgtgtggagagatagag

SEQ ID NO: 387143 - DNA, 33 bp, Homo sapien
atactcatgaatttgacgatatgtgtgttgtca

SEQ ID NO: 387144 - DNA, 33 bp, Homo sapien
atactcatgaatttgatgatatgtgtgttgtca

SEQ ID NO: 387145 - DNA, 33 bp, Homo sapien
gacttcctctgccaccagaataaaggaatagag

SEQ ID NO: 387146 - DNA, 33 bp, Homo sapien
gacttcctctgccaccggaataaaggaatagag

SEQ ID NO: 387147 - DNA, 33 bp, Homo sapien
cactgttgggtgcctcaaaaattgttggctaaa

SEQ ID NO: 387148 - DNA, 33 bp, Homo sapien
cactgttgggtgcctccaaaattgttggctaaa

SEQ ID NO: 387149 - DNA, 33 bp, Homo sapien
aaaacattgcaaggaaaagacatttaaatgggt

SEQ ID NO: 387150 - DNA, 33 bp, Homo sapien
aaaacattgcaaggaatagacatttaaatgggt

SEQ ID NO: 387151 - DNA, 33 bp, Homo sapien
ctgcatttctattacccgaaaacagtgtggaaa

SEQ ID NO: 387152 - DNA, 33 bp, Homo sapien
ctgcatttctattacctgaaaacagtgtggaaa

SEQ ID NO: 387153 - DNA, 33 bp, Homo sapien
tgactataggagccaacactagtttagagtgga

SEQ ID NO: 387154 - DNA, 33 bp, Homo sapien
tgactataggagccaagactagtttagagtgga

SEQ ID NO: 387155 - DNA, 33 bp, Homo sapien
aaagccaatcatgcaaacacatctcaagactct

SEQ ID NO: 387156 - DNA, 33 bp, Homo sapien
aaagccaatcatgcaagcacatctcaagactct

SEQ ID NO: 387157 - DNA, 33 bp, Homo sapien
cagcatcctgcagccgaaataaccatgcttctt

SEQ ID NO: 387158 - DNA, 33 bp, Homo sapien
cagcatcctgcagccgcaataaccatgcttctt

SEQ ID NO: 387159 - DNA, 33 bp, Homo sapien
agaccccatcatcccaacatgtaatatcatggt

SEQ ID NO: 387160 - DNA, 33 bp, Homo sapien
agaccccatcatcccagcatgtaatatcatggt

SEQ ID NO: 387161 - DNA, 33 bp, Homo sapien
agagccggaagactgaaaacaatatggcaccct

SEQ ID NO: 387162 - DNA, 33 bp, Homo sapien
agagccggaagactgagaacaatatggcaccct

SEQ ID NO: 387163 - DNA, 33 bp, Homo sapien
agctcacagggaattacgacttgccaggttctg

SEQ ID NO: 387164 - DNA, 33 bp, Homo sapien
agctcacagggaattaggacttgccaggttctg

SEQ ID NO: 387165 - DNA, 33 bp, Homo sapien
agtgggtttgtaaaatcaagactgttttcatcc

SEQ ID NO: 387166 - DNA, 33 bp, Homo sapien
agtgggtttgtaaaattaagactgttttcatcc

SEQ ID NO: 387167 - DNA, 33 bp, Homo sapien
ttctgaagcaactaggccacagtagaaaaaagt

SEQ ID NO: 387168 - DNA, 33 bp, Homo sapien
ttctgaagcaactaggtcacagtagaaaaaagt

SEQ ID NO: 387169 - DNA, 33 bp, Homo sapien
ttttgtggaacgagaaagtgaatattcacacca

SEQ ID NO: 387170 - DNA, 33 bp, Homo sapien
ttttgtggaacgagaaggtgaatattcacacca

SEQ ID NO: 387171 - DNA, 33 bp, Homo sapien
atgagtgcttactatacaccaggcgctgttaca

SEQ ID NO: 387172 - DNA, 33 bp, Homo sapien
atgagtgcttactatataccaggcgctgttaca

SEQ ID NO: 387173 - DNA, 33 bp, Homo sapien
tcagtctagctctctcacaaaaaaaaagttaaa

SEQ ID NO: 387174 - DNA, 33 bp, Homo sapien
tcagtctagctctctctcaaaaaaaaagttaaa

SEQ ID NO: 387175 - DNA, 33 bp, Homo sapien
gtcggtatcctaagcccctagaacagtgcctaa

SEQ ID NO: 387176 - DNA, 33 bp, Homo sapien
gtcggtatcctaagccgctagaacagtgcctaa

SEQ ID NO: 387177 - DNA, 33 bp, Homo sapien
ctgaacattcctgaaaccttagggatagggagt

SEQ ID NO: 387178 - DNA, 33 bp, Homo sapien
ctgaacattcctgaaatcttagggatagggagt

SEQ ID NO: 387179 - DNA, 33 bp, Homo sapien
tccattccaagctaggaaacagctgaacattcc

SEQ ID NO: 387180 - DNA, 33 bp, Homo sapien
tccattccaagctaggcaacagctgaacattcc

SEQ ID NO: 387181 - DNA, 33 bp, Homo sapien
acaagtatgcgaatgacgccaacagaagttaaa

SEQ ID NO: 387182 - DNA, 33 bp, Homo sapien
acaagtatgcgaatgatgccaacagaagttaaa

SEQ ID NO: 387183 - DNA, 33 bp, Homo sapien
tcgggcagtttcttgaaagacccattttgtgtg

SEQ ID NO: 387184 - DNA, 33 bp, Homo sapien
tcgggcagtttcttgacagacccattttgtgtg

SEQ ID NO: 387185 - DNA, 33 bp, Homo sapien
ttggccgggctgaatacagtcctgataatcttt

SEQ ID NO: 387186 - DNA, 33 bp, Homo sapien
ttggccgggctgaatatagtcctgataatcttt

SEQ ID NO: 387187 - DNA, 33 bp, Homo sapien
atatactctgtaaaaacgagatgccatgagtgg

SEQ ID NO: 387188 - DNA, 33 bp, Homo sapien
atatactctgtaaaaatgagatgccatgagtgg

SEQ ID NO: 387189 - DNA, 33 bp, Homo sapien
acctaaacttcattcccaattttcctcattttc

SEQ ID NO: 387190 - DNA, 33 bp, Homo sapien
acctaaacttcattcctaattttcctcattttc

SEQ ID NO: 387191 - DNA, 33 bp, Homo sapien
gacattatgtcaatacaggcatatttattagtt

SEQ ID NO: 387192 - DNA, 33 bp, Homo sapien
gacattatgtcaataccggcatatttattagtt

SEQ ID NO: 387193 - DNA, 33 bp, Homo sapien
tgtgaaatgggaacatcacttaccatctactca

SEQ ID NO: 387194 - DNA, 33 bp, Homo sapien
tgtgaaatgggaacatgacttaccatctactca

SEQ ID NO: 387195 - DNA, 33 bp, Homo sapien
tctcttgaaaaactcaaaccaaagagcacaccg

SEQ ID NO: 387196 - DNA, 33 bp, Homo sapien
tctcttgaaaaactcataccaaagagcacaccg

SEQ ID NO: 387197 - DNA, 33 bp, Homo sapien
tagagatcactctatcacctaaaattctctctt

SEQ ID NO: 387198 - DNA, 33 bp, Homo sapien
tagagatcactctatcgcctaaaattctctctt

SEQ ID NO: 387199 - DNA, 33 bp, Homo sapien
tttatgttttccaacactgagatatgtagaaga

SEQ ID NO: 387200 - DNA, 33 bp, Homo sapien
tttatgttttccaacagtgagatatgtagaaga

SEQ ID NO: 387201 - DNA, 33 bp, Homo sapien
tctgaattgcagccacaaatcaataatgaaaag

SEQ ID NO: 387202 - DNA, 33 bp, Homo sapien
tctgaattgcagccactaatcaataatgaaaag

SEQ ID NO: 387203 - DNA, 33 bp, Homo sapien
cattaatttatttcaacacttgagaaaaagtat

SEQ ID NO: 387204 - DNA, 33 bp, Homo sapien
cattaatttatttcaagacttgagaaaaagtat

SEQ ID NO: 387205 - DNA, 33 bp, Homo sapien
ttcttgtcttccccgactcaagaagcttaaggg

SEQ ID NO: 387206 - DNA, 33 bp, Homo sapien
ttcttgtcttccccgattcaagaagcttaaggg

SEQ ID NO: 387207 - DNA, 33 bp, Homo sapien
ttgtcttcttcccccgaatcacggaagtcctgt

SEQ ID NO: 387208 - DNA, 33 bp, Homo sapien
ttgtcttcttcccccgcatcacggaagtcctgt

SEQ ID NO: 387209 - DNA, 33 bp, Homo sapien
agtttaatttctttaactccctcatcacagttt

SEQ ID NO: 387210 - DNA, 33 bp, Homo sapien
agtttaatttctttaattccctcatcacagttt

SEQ ID NO: 387211 - DNA, 33 bp, Homo sapien
ggaaggagaggaaggactaatatttgtgtggta

SEQ ID NO: 387212 - DNA, 33 bp, Homo sapien
ggaaggagaggaaggagtaatatttgtgtggta

SEQ ID NO: 387213 - DNA, 33 bp, Homo sapien
aagtgtcttttgctagcaggcgctctcagcaaa

SEQ ID NO: 387214 - DNA, 33 bp, Homo sapien
aagtgtcttttgctagtaggcgctctcagcaaa

SEQ ID NO: 387215 - DNA, 33 bp, Homo sapien
gaaaacacttgctaccacttactgctttattat

SEQ ID NO: 387216 - DNA, 33 bp, Homo sapien
gaaaacacttgctaccccttactgctttattat

SEQ ID NO: 387217 - DNA, 33 bp, Homo sapien
cgaggaggcaagagaaatgttttcagtgaacac

SEQ ID NO: 387218 - DNA, 33 bp, Homo sapien
cgaggaggcaagagaagtgttttcagtgaacac

SEQ ID NO: 387219 - DNA, 33 bp, Homo sapien
cctcctcaattccataagcagagattcggagtg

SEQ ID NO: 387220 - DNA, 33 bp, Homo sapien
cctcctcaattccatacgcagagattcggagtg

SEQ ID NO: 387221 - DNA, 33 bp, Homo sapien
gaactgttggatcctgaaagactaatttatata

SEQ ID NO: 387222 - DNA, 33 bp, Homo sapien
gaactgttggatcctgcaagactaatttatata

SEQ ID NO: 387223 - DNA, 33 bp, Homo sapien
cagcccttattaaaaacttgtgacagcgacagg

SEQ ID NO: 387224 - DNA, 33 bp, Homo sapien
cagcccttattaaaaagttgtgacagcgacagg

SEQ ID NO: 387225 - DNA, 33 bp, Homo sapien
ctgactctacgaaaaacatgaaaaatacaaaca

SEQ ID NO: 387226 - DNA, 33 bp, Homo sapien
ctgactctacgaaaaatatgaaaaatacaaaca

SEQ ID NO: 387227 - DNA, 33 bp, Homo sapien; identical to SEQ ID NO: 387225

SEQ ID NO: 387228 - DNA, 33 bp, Homo sapien; identical to SEQ ID NO: 387226

SEQ ID NO: 387229 - DNA, 33 bp, Homo sapien
atagattaggacacaagaaacctaaataatggc

SEQ ID NO: 387230 - DNA, 33 bp, Homo sapien
atagattaggacacaataaacctaaataatggc

SEQ ID NO: 387231 - DNA, 33 bp, Homo sapien
atgtcctcttttaacccctctgaatatgctcct

SEQ ID NO: 387232 - DNA, 33 bp, Homo sapien
atgtcctcttttaacctctctgaatatgctcct

SEQ ID NO: 387233 - DNA, 33 bp, Homo sapien
gttcctgggttgcaaacggatccatagtccaaa

SEQ ID NO: 387234 - DNA, 33 bp, Homo sapien
gttcctgggttgcaaagggatccatagtccaaa

SEQ ID NO: 387235 - DNA, 33 bp, Homo sapien
tgaatttccgatgtcacagaagggtgttcttaa

SEQ ID NO: 387236 - DNA, 33 bp, Homo sapien
tgaatttccgatgtcatagaagggtgttcttaa

SEQ ID NO: 387237 - DNA, 33 bp, Homo sapien
agtaaattgagatgcggaggttctaatttgccc

SEQ ID NO: 387238 - DNA, 33 bp, Homo sapien
agtaaattgagatgcgtaggttctaatttgccc

SEQ ID NO: 387239 - DNA, 33 bp, Homo sapien
atggctccaccaagccacacaactatattttgt

SEQ ID NO: 387240 - DNA, 33 bp, Homo sapien
atggctccaccaagccgcacaactatattttgt

SEQ ID NO: 387241 - DNA, 33 bp, Homo sapien
tggtgctgagatttgccagatgaacaggatacc

SEQ ID NO: 387242 - DNA, 33 bp, Homo sapien
tggtgctgagatttgctagatgaacaggatacc

SEQ ID NO: 387243 - DNA, 33 bp, Homo sapien
ttgatggaaatttccaaacctaaaccagtgaat

SEQ ID NO: 387244 - DNA, 33 bp, Homo sapien
ttgatggaaatttccagacctaaaccagtgaat

SEQ ID NO: 387245 - DNA, 33 bp, Homo sapien
actggctccaattcagaaaagacgaaactaagg

SEQ ID NO: 387246 - DNA, 33 bp, Homo sapien
actggctccaattcaggaaagacgaaactaagg

SEQ ID NO: 387247 - DNA, 33 bp, Homo sapien
ctctgctcctgttgtacactgtcccttcaataa

SEQ ID NO: 387248 - DNA, 33 bp, Homo sapien
ctctgctcctgttgtatactgtcccttcaataa

SEQ ID NO: 387249 - DNA, 33 bp, Homo sapien
tgtggcccttccttgaaatataatgacaacctt

SEQ ID NO: 387250 - DNA, 33 bp, Homo sapien
tgtggcccttccttgagatataatgacaacctt

SEQ ID NO: 387251 - DNA, 33 bp, Homo sapien
ctttgtcacctgtgaacgaccacatgcctcagt

SEQ ID NO: 387252 - DNA, 33 bp, Homo sapien
ctttgtcacctgtgaatgaccacatgcctcagt

SEQ ID NO: 387253 - DNA, 33 bp, Homo sapien
aaaaagctttcacccagcaatgtaactctcatc

SEQ ID NO: 387254 - DNA, 33 bp, Homo sapien
aaaaagctttcacccatcaatgtaactctcatc

SEQ ID NO: 387255 - DNA, 33 bp, Homo sapien
aaaggtaattcctaaacaagagtcatttgtaaa

SEQ ID NO: 387256 - DNA, 33 bp, Homo sapien
aaaggtaattcctaaagaagagtcatttgtaaa

SEQ ID NO: 387257 - DNA, 33 bp, Homo sapien
agtgtattcaaacttcaaagcatgcaataaaag

SEQ ID NO: 387258 - DNA, 33 bp, Homo sapien
agtgtattcaaacttctaagcatgcaataaaag

SEQ ID NO: 387259 - DNA, 33 bp, Homo sapien
aaatgaggaagaagcgaacgtgagaacccctgg

SEQ ID NO: 387260 - DNA, 33 bp, Homo sapien
aaatgaggaagaagcgcacgtgagaacccctgg

SEQ ID NO: 387261 - DNA, 33 bp, Homo sapien
cgaggtaactcaatcacgtgggccggtctttcc

SEQ ID NO: 387262 - DNA, 33 bp, Homo sapien
cgaggtaactcaatcatgtgggccggtctttcc

SEQ ID NO: 387263 - DNA, 33 bp, Homo sapien; identical to SEQ ID NO: 387261

SEQ ID NO: 387264 - DNA, 33 bp, Homo sapien; identical to SEQ ID NO: 387262

SEQ ID NO: 387265 - DNA, 33 bp, Homo sapien
gattgtgcctctcttagatctcactagagcaag

SEQ ID NO: 387266 - DNA, 33 bp, Homo sapien
gattgtgcctctcttatatctcactagagcaag

SEQ ID NO: 387267 - DNA, 33 bp, Homo sapien
atggcatcttcaaagccgaacggaatcagtttc

SEQ ID NO: 387268 - DNA, 33 bp, Homo sapien
atggcatcttcaaagctgaacggaatcagtttc

SEQ ID NO: 387269 - DNA, 33 bp, Homo sapien
ctggttcccatcctgaaataacaacactggctg

SEQ ID NO: 387270 - DNA, 33 bp, Homo sapien
ctggttcccatcctgagataacaacactggctg

SEQ ID NO: 387271 - DNA, 33 bp, Homo sapien
gcccagtgcagtgctgaactttagatggtagac

SEQ ID NO: 387272 - DNA, 33 bp, Homo sapien
gcccagtgcagtgctggactttagatggtagac

SEQ ID NO: 387273 - DNA, 33 bp, Homo sapien
cctggctccaccattgcaagggaggtctatcaa

SEQ ID NO: 387274 - DNA, 33 bp, Homo sapien
cctggctccaccattggaagggaggtctatcaa

SEQ ID NO: 387275 - DNA, 33 bp, Homo sapien
agggatgcaacacagaataagacacagtccttg

SEQ ID NO: 387276 - DNA, 33 bp, Homo sapien
agggatgcaacacagagtaagacacagtccttg

SEQ ID NO: 387277 - DNA, 33 bp, Homo sapien
ttaggcaagtcacgtcacatctctgtttcctac

SEQ ID NO: 387278 - DNA, 33 bp, Homo sapien
ttaggcaagtcacgtcgcatctctgtttcctac

SEQ ID NO: 387279 - DNA, 33 bp, Homo sapien
cccagattatattaacaagaagttccagaattg

SEQ ID NO: 387280 - DNA, 33 bp, Homo sapien
cccagattatattaacgagaagttccagaattg

SEQ ID NO: 387281 - DNA, 33 bp, Homo sapien
tccagttgctgttttaaatccactctggttccc

SEQ ID NO: 387282 - DNA, 33 bp, Homo sapien
tccagttgctgttttatatccactctggttccc

SEQ ID NO: 387283 - DNA, 33 bp, Homo sapien
aacatttccatctataccaggatcctccagttg

SEQ ID NO: 387284 - DNA, 33 bp, Homo sapien
aacatttccatctatatcaggatcctccagttg

SEQ ID NO: 387285 - DNA, 33 bp, Homo sapien
tgacttaacaaagccaatcgcccattcctatgc

SEQ ID NO: 387286 - DNA, 33 bp, Homo sapien
tgacttaacaaagccagtcgcccattcctatgc

SEQ ID NO: 387287 - DNA, 33 bp, Homo sapien
acaaacccacaaatgaaatgttttgactctttg

SEQ ID NO: 387288 - DNA, 33 bp, Homo sapien
acaaacccacaaatgacatgttttgactctttg

SEQ ID NO: 387289 - DNA, 33 bp, Homo sapien
ggatctttggccctgacagaacaacaaagactg

SEQ ID NO: 387290 - DNA, 33 bp, Homo sapien
ggatctttggccctgagagaacaacaaagactg

SEQ ID NO: 387291 - DNA, 33 bp, Homo sapien
cccttaggcaacaccacataaaggactttccat

SEQ ID NO: 387292 - DNA, 33 bp, Homo sapien
cccttaggcaacaccagataaaggactttccat

SEQ ID NO: 387293 - DNA, 33 bp, Homo sapien
tgtatttccttaatgacccgaaaaatctattta

SEQ ID NO: 387294 - DNA, 33 bp, Homo sapien
tgtatttccttaatgagccgaaaaatctattta

SEQ ID NO: 387295 - DNA, 33 bp, Homo sapien
tgactctgtagcaacacgcccaaaggtgagtgc

SEQ ID NO: 387296 - DNA, 33 bp, Homo sapien
tgactctgtagcaacatgcccaaaggtgagtgc

SEQ ID NO: 387297 - DNA, 33 bp, Homo sapien
agtccttatagctcataaactcttcaataactg

SEQ ID NO: 387298 - DNA, 33 bp, Homo sapien
agtccttatagctcatgaactcttcaataactg

SEQ ID NO: 387299 - DNA, 33 bp, Homo sapien
ataaatcttggctgaggcaatacgtttcaaaat

SEQ ID NO: 387300 - DNA, 33 bp, Homo sapien
ataaatcttggctgagtcaatacgtttcaaaat

SEQ ID NO: 387301 - DNA, 33 bp, Homo sapien
gattgttctaagtaaacggcagagcacgcaaat

SEQ ID NO: 387302 - DNA, 33 bp, Homo sapien
gattgttctaagtaaatggcagagcacgcaaat

SEQ ID NO: 387303 - DNA, 33 bp, Homo sapien
agtggagaagatgagacagacaaaactgcaact

SEQ ID NO: 387304 - DNA, 33 bp, Homo sapien
agtggagaagatgagagagacaaaactgcaact

SEQ ID NO: 387305 - DNA, 33 bp, Homo sapien
agcttagctctaaccaaaaagatttattatccc

SEQ ID NO: 387306 - DNA, 33 bp, Homo sapien
agcttagctctaaccagaaagatttattatccc

SEQ ID NO: 387307 - DNA, 33 bp, Homo sapien
gaagagaggaagggaacgttggaaccaatgctg

SEQ ID NO: 387308 - DNA, 33 bp, Homo sapien
gaagagaggaagggaatgttggaaccaatgctg

SEQ ID NO: 387309 - DNA, 33 bp, Homo sapien
aggaaatgcactaggtaacaggctctagagaaa

SEQ ID NO: 387310 - DNA, 33 bp, Homo sapien
aggaaatgcactaggtgacaggctctagagaaa

SEQ ID NO: 387311 - DNA, 33 bp, Homo sapien
ttcacaaactgaatacccatggaaccaagaccc

SEQ ID NO: 387312 - DNA, 33 bp, Homo sapien
ttcacaaactgaatacgcatggaaccaagaccc

SEQ ID NO: 387313 - DNA, 33 bp, Homo sapien
caggcagatcagacacgcgagaattagagaaat

SEQ ID NO: 387314 - DNA, 33 bp, Homo sapien
caggcagatcagacactcgagaattagagaaat

SEQ ID NO: 387315 - DNA, 33 bp, Homo sapien
ccagtggatacttactcagccagtactagttat

SEQ ID NO: 387316 - DNA, 33 bp, Homo sapien
ccagtggatacttactgagccagtactagttat

SEQ ID NO: 387317 - DNA, 33 bp, Homo sapien
agttgcaacatctggaaaaagagctggttgggc

SEQ ID NO: 387318 - DNA, 33 bp, Homo sapien
agttgcaacatctggacaaagagctggttgggc

SEQ ID NO: 387319 - DNA, 33 bp, Homo sapien
tgtgacaatgtaagagcaagtgaagattgcatc

SEQ ID NO: 387320 - DNA, 33 bp, Homo sapien
tgtgacaatgtaagaggaagtgaagattgcatc

SEQ ID NO: 387321 - DNA, 33 bp, Homo sapien
tgatttccatccaagaagcaacattgtttgtgc

SEQ ID NO: 387322 - DNA, 33 bp, Homo sapien
tgatttccatccaagaggcaacattgtttgtgc

SEQ ID NO: 387323 - DNA, 33 bp, Homo sapien
aggaaccggcaccagcaatgtcgtaggctgagg

SEQ ID NO: 387324 - DNA, 33 bp, Homo sapien
aggaaccggcaccagcgatgtcgtaggctgagg

SEQ ID NO: 387325 - DNA, 33 bp, Homo sapien
tttaacttgtgcgatacagttccctattttgtt

SEQ ID NO: 387326 - DNA, 33 bp, Homo sapien
tttaacttgtgcgatatagttccctattttgtt

SEQ ID NO: 387327 - DNA, 33 bp, Homo sapien
tattttgttttgttccacctcgatcacaacagc

SEQ ID NO: 387328 - DNA, 33 bp, Homo sapien
tattttgttttgttccgcctcgatcacaacagc

SEQ ID NO: 387329 - DNA, 33 bp, Homo sapien
caggtgattgtgatacaataggagccggtgtcc

SEQ ID NO: 387330 - DNA, 33 bp, Homo sapien
caggtgattgtgatactataggagccggtgtcc

SEQ ID NO: 387331 - DNA, 33 bp, Homo sapien
aaaaggattgtagaatcactggcttcccaaaac

SEQ ID NO: 387332 - DNA, 33 bp, Homo sapien
aaaaggattgtagaatgactggcttcccaaaac

SEQ ID NO: 387333 - DNA, 33 bp, Homo sapien
tagctacggttacaggcatatgtcacaatggcc

SEQ ID NO: 387334 - DNA, 33 bp, Homo sapien
tagctacggttacaggtatatgtcacaatggcc

SEQ ID NO: 387335 - DNA, 33 bp, Homo sapien
tgagttcataaaaagaggcattagtcactagga

SEQ ID NO: 387336 - DNA, 33 bp, Homo sapien
tgagttcataaaaagatgcattagtcactagga

SEQ ID NO: 387337 - DNA, 33 bp, Homo sapien
acaatccaagtctgtcactgcccaggatagagg

SEQ ID NO: 387338 - DNA, 33 bp, Homo sapien
acaatccaagtctgtcgctgcccaggatagagg

SEQ ID NO: 387339 - DNA, 33 bp, Homo sapien
gatcaatcccattcccactccattatgtgtgta

SEQ ID NO: 387340 - DNA, 33 bp, Homo sapien
gatcaatcccattccccctccattatgtgtgta

SEQ ID NO: 387341 - DNA, 33 bp, Homo sapien
ttgacactacagcacaaaggatggtttcagaca

SEQ ID NO: 387342 - DNA, 33 bp, Homo sapien
ttgacactacagcacacaggatggtttcagaca

SEQ ID NO: 387343 - DNA, 33 bp, Homo sapien
agtgctctttgatatgcaaatatagcctgataa

SEQ ID NO: 387344 - DNA, 33 bp, Homo sapien
agtgctctttgatatggaaatatagcctgataa

SEQ ID NO: 387345 - DNA, 33 bp, Homo sapien
taggtgaagttaggaacaatatgtcaagcttcc

SEQ ID NO: 387346 - DNA, 33 bp, Homo sapien
taggtgaagttaggaataatatgtcaagcttcc

SEQ ID NO: 387347 - DNA, 33 bp, Homo sapien
actataaactttcatacggttagtatgccaggg

SEQ ID NO: 387348 - DNA, 33 bp, Homo sapien
actataaactttcatagggttagtatgccaggg

SEQ ID NO: 387349 - DNA, 33 bp, Homo sapien
tgtaaacacaatgataacatcgtgtctgcacac

SEQ ID NO: 387350 - DNA, 33 bp, Homo sapien
tgtaaacacaatgatagcatcgtgtctgcacac

SEQ ID NO: 387351 - DNA, 33 bp, Homo sapien
ggaagttttaatcagccctttctactgcagggg

SEQ ID NO: 387352 - DNA, 33 bp, Homo sapien
ggaagttttaatcagcgctttctactgcagggg

SEQ ID NO: 387353 - DNA, 33 bp, Homo sapien
ttcaagaagctcgttcaacagctgtaaagctat

SEQ ID NO: 387354 - DNA, 33 bp, Homo sapien
ttcaagaagctcgttcgacagctgtaaagctat

SEQ ID NO: 387355 - DNA, 33 bp, Homo sapien
tctcatttctctctcaaaagtattcaaaatcca

SEQ ID NO: 387356 - DNA, 33 bp, Homo sapien
tctcatttctctctcagaagtattcaaaatcca

SEQ ID NO: 387357 - DNA, 33 bp, Homo sapien
tcttctacttgctatcaaaagggtttaacactg

SEQ ID NO: 387358 - DNA, 33 bp, Homo sapien
tcttctacttgctatcgaaagggtttaacactg

SEQ ID NO: 387359 - DNA, 33 bp, Homo sapien
gccagctcttgacggcactacagtgtagacaag

SEQ ID NO: 387360 - DNA, 33 bp, Homo sapien
gccagctcttgacggccctacagtgtagacaag

SEQ ID NO: 387361 - DNA, 33 bp, Homo sapien
agcaggctctgctggacgccggtgtcatgttct

SEQ ID NO: 387362 - DNA, 33 bp, Homo sapien
agcaggctctgctggaggccggtgtcatgttct

SEQ ID NO: 387363 - DNA, 33 bp, Homo sapien
cactgcctggtcagtacaagaagcacttctctg

SEQ ID NO: 387364 - DNA, 33 bp, Homo sapien
cactgcctggtcagtataagaagcacttctctg

SEQ ID NO: 387365 - DNA, 33 bp, Homo sapien
ttgggagggtaagtaactggttgtgattgaaag

SEQ ID NO: 387366 - DNA, 33 bp, Homo sapien
ttgggagggtaagtaattggttgtgattgaaag

SEQ ID NO: 387367 - DNA, 33 bp, Homo sapien
tctggtaagaatttcacaattccaggacgtctc

SEQ ID NO: 387368 - DNA, 33 bp, Homo sapien
tctggtaagaatttcagaattccaggacgtctc

SEQ ID NO: 387369 - DNA, 33 bp, Homo sapien
aataatcaacatgcgcaacatccctaatgtcct

SEQ ID NO: 387370 - DNA, 33 bp, Homo sapien
aataatcaacatgcgcgacatccctaatgtcct

SEQ ID NO: 387371 - DNA, 33 bp, Homo sapien
catttagtccaccaaacagtgatgtgcggtggg

SEQ ID NO: 387372 - DNA, 33 bp, Homo sapien
catttagtccaccaaatagtgatgtgcggtggg

SEQ ID NO: 387373 - DNA, 33 bp, Homo sapien
ttctgacaacagaaaaccaggcaatggaggcct

SEQ ID NO: 387374 - DNA, 33 bp, Homo sapien
ttctgacaacagaaaatcaggcaatggaggcct

SEQ ID NO: 387375 - DNA, 33 bp, Homo sapien
gtacataaaacagacaaataattccaattcaat

SEQ ID NO: 387376 - DNA, 33 bp, Homo sapien
gtacataaaacagacatataattccaattcaat

SEQ ID NO: 387377 - DNA, 33 bp, Homo sapien
caaacgtgtcttgagcaccttgaagataagaca

SEQ ID NO: 387378 - DNA, 33 bp, Homo sapien
caaacgtgtcttgagcgccttgaagataagaca

SEQ ID NO: 387379 - DNA, 33 bp, Homo sapien
catgctcgaatctccgcaaaagcaattggatgg

SEQ ID NO: 387380 - DNA, 33 bp, Homo sapien
catgctcgaatctccgtaaaagcaattggatgg

SEQ ID NO: 387381 - DNA, 33 bp, Homo sapien
aattaaaagtagtacaccatgacatacagcatt

SEQ ID NO: 387382 - DNA, 33 bp, Homo sapien
aattaaaagtagtacagcatgacatacagcatt

SEQ ID NO: 387383 - DNA, 33 bp, Homo sapien
ctaccttgcggggcaaacacaacaagtaaaagg

SEQ ID NO: 387384 - DNA, 33 bp, Homo sapien
ctaccttgcggggcaatcacaacaagtaaaagg

SEQ ID NO: 387385 - DNA, 33 bp, Homo sapien
gcatgaaaagtgcttcacatatcctttacctgg

SEQ ID NO: 387386 - DNA, 33 bp, Homo sapien
gcatgaaaagtgcttcgcatatcctttacctgg

SEQ ID NO: 387387 - DNA, 33 bp, Homo sapien
gggaatattggaaaagcatggattagacatgga

SEQ ID NO: 387388 - DNA, 33 bp, Homo sapien
gggaatattggaaaaggatggattagacatgga

SEQ ID NO: 387389 - DNA, 33 bp, Homo sapien
tctttcagttgaattacggtctttagctcaaat

SEQ ID NO: 387390 - DNA, 33 bp, Homo sapien
tctttcagttgaattatggtctttagctcaaat

SEQ ID NO: 387391 - DNA, 33 bp, Homo sapien
taagaattttgaggtgcaatcctttttccttgg

SEQ ID NO: 387392 - DNA, 33 bp, Homo sapien
taagaattttgaggtggaatcctttttccttgg

SEQ ID NO: 387393 - DNA, 33 bp, Homo sapien
ggcttcccagttgccaatcaatccccatctttg

SEQ ID NO: 387394 - DNA, 33 bp, Homo sapien
ggcttcccagttgccagtcaatccccatctttg

SEQ ID NO: 387395 - DNA, 33 bp, Homo sapien
gcagttattatccctgaagcctggtgtgcttac

SEQ ID NO: 387396 - DNA, 33 bp, Homo sapien
gcagttattatccctgcagcctggtgtgcttac

SEQ ID NO: 387397 - DNA, 33 bp, Homo sapien
tttaaaaccagcaaatcattcatatttacttta

SEQ ID NO: 387398 - DNA, 33 bp, Homo sapien
tttaaaaccagcaaatgattcatatttacttta

SEQ ID NO: 387399 - DNA, 33 bp, Homo sapien
ctcaattttggctcccaaactaaaacagttcta

SEQ ID NO: 387400 - DNA, 33 bp, Homo sapien
ctcaattttggctccccaactaaaacagttcta

SEQ ID NO: 387401 - DNA, 33 bp, Homo sapien
aacttataacagtcatcataatgtcccgttgct

SEQ ID NO: 387402 - DNA, 33 bp, Homo sapien
aacttataacagtcatgataatgtcccgttgct

SEQ ID NO: 387403 - DNA, 33 bp, Homo sapien
agcaaaagacagaagcaaacaaatcatctgatt

SEQ ID NO: 387404 - DNA, 33 bp, Homo sapien
agcaaaagacagaagcgaacaaatcatctgatt

SEQ ID NO: 387405 - DNA, 33 bp, Homo sapien
gcaggtaaggcaagagacccgtaattgattcat

SEQ ID NO: 387406 - DNA, 33 bp, Homo sapien
gcaggtaaggcaagaggcccgtaattgattcat

SEQ ID NO: 387407 - DNA, 33 bp, Homo sapien
gggcaagcggaggtcaagatggaattcagcctt

SEQ ID NO: 387408 - DNA, 33 bp, Homo sapien
gggcaagcggaggtcatgatggaattcagcctt

SEQ ID NO: 387409 - DNA, 33 bp, Homo sapien
ttgttgtccatcctcgaatatcctgcaccgttc

SEQ ID NO: 387410 - DNA, 33 bp, Homo sapien
ttgttgtccatcctcgtatatcctgcaccgttc

SEQ ID NO: 387411 - DNA, 33 bp, Homo sapien
tttgtcagagaggttcaagctcttaaatttaaa

SEQ ID NO: 387412 - DNA, 33 bp, Homo sapien
tttgtcagagaggttcgagctcttaaatttaaa

SEQ ID NO: 387413 - DNA, 33 bp, Homo sapien
taaggcaaatgaacagcatctggaggatctcag

SEQ ID NO: 387414 - DNA, 33 bp, Homo sapien
taaggcaaatgaacaggatctggaggatctcag

SEQ ID NO: 387415 - DNA, 33 bp, Homo sapien
attctgtcctcgccccacaagcaaagcacacac

SEQ ID NO: 387416 - DNA, 33 bp, Homo sapien
attctgtcctcgccccgcaagcaaagcacacac

SEQ ID NO: 387417 - DNA, 33 bp, Homo sapien
aatggtgtgtaaataccgcatctatttccaaaa

SEQ ID NO: 387418 - DNA, 33 bp, Homo sapien
aatggtgtgtaaatactgcatctatttccaaaa

SEQ ID NO: 387419 - DNA, 33 bp, Homo sapien
taaaatatcccaaataagcaaacctactgagac

SEQ ID NO: 387420 - DNA, 33 bp, Homo sapien
taaaatatcccaaataggcaaacctactgagac

SEQ ID NO: 387421 - DNA, 33 bp, Homo sapien
atcaaaatgtacctgaagaaataacaagcgctg

SEQ ID NO: 387422 - DNA, 33 bp, Homo sapien
atcaaaatgtacctgaggaaataacaagcgctg

SEQ ID NO: 387423 - DNA, 33 bp, Homo sapien
atgaaggaattcctaacgatggagtttgatgcc

SEQ ID NO: 387424 - DNA, 33 bp, Homo sapien
atgaaggaattcctaatgatggagtttgatgcc

SEQ ID NO: 387425 - DNA, 33 bp, Homo sapien
gtgttgacaaggcacactggagacaacacaaca

SEQ ID NO: 387426 - DNA, 33 bp, Homo sapien
gtgttgacaaggcacattggagacaacacaaca

SEQ ID NO: 387427 - DNA, 33 bp, Homo sapien
aattttccactggggaagatagaaaaacttatt

SEQ ID NO: 387428 - DNA, 33 bp, Homo sapien
aattttccactggggatgatagaaaaacttatt

SEQ ID NO: 387429 - DNA, 33 bp, Homo sapien
gggagtttcaggatgcacaagagactccttttg

SEQ ID NO: 387430 - DNA, 33 bp, Homo sapien
gggagtttcaggatgcgcaagagactccttttg

SEQ ID NO: 387431 - DNA, 33 bp, Homo sapien
cgggaggtctttgaaacttaatgtctccctgca

SEQ ID NO: 387432 - DNA, 33 bp, Homo sapien
cgggaggtctttgaaatttaatgtctccctgca

SEQ ID NO: 387433 - DNA, 33 bp, Homo sapien
caactctcattagcgcaaaatgaattcacgtta

SEQ ID NO: 387434 - DNA, 33 bp, Homo sapien
caactctcattagcgcgaaatgaattcacgtta

SEQ ID NO: 387435 - DNA, 33 bp, Homo sapien
cctcttaactgcatggaaaatctagaagattcg

SEQ ID NO: 387436 - DNA, 33 bp, Homo sapien
cctcttaactgcatggcaaatctagaagattcg

SEQ ID NO: 387437 - DNA, 33 bp, Homo sapien
gcatgatcagtgacacaagcgtcaattttatag

SEQ ID NO: 387438 - DNA, 33 bp, Homo sapien
gcatgatcagtgacacgagcgtcaattttatag

SEQ ID NO: 387439 - DNA, 33 bp, Homo sapien
cagcatctcgaagagggagtataacttagtgat

SEQ ID NO: 387440 - DNA, 33 bp, Homo sapien
cagcatctcgaagaggtagtataacttagtgat

SEQ ID NO: 387441 - DNA, 33 bp, Homo sapien
cttcttcatctgataacagtgctttccttataa

SEQ ID NO: 387442 - DNA, 33 bp, Homo sapien
cttcttcatctgataatagtgctttccttataa

SEQ ID NO: 387443 - DNA, 33 bp, Homo sapien
tggtatccgagaaagacctctccattcacatcc

SEQ ID NO: 387444 - DNA, 33 bp, Homo sapien
tggtatccgagaaagagctctccattcacatcc

SEQ ID NO: 387445 - DNA, 33 bp, Homo sapien
atccctctaaataatacaaggcttgtttgcaat

SEQ ID NO: 387446 - DNA, 33 bp, Homo sapien
atccctctaaataatataaggcttgtttgcaat

SEQ ID NO: 387447 - DNA, 33 bp, Homo sapien
gaagataaaagagttaccagaactgagcagaga

SEQ ID NO: 387448 - DNA, 33 bp, Homo sapien
gaagataaaagagttatcagaactgagcagaga

SEQ ID NO: 387449 - DNA, 33 bp, Homo sapien
aagcgacgaaatgcagacgattgctcagttccc

SEQ ID NO: 387450 - DNA, 33 bp, Homo sapien
aagcgacgaaatgcaggcgattgctcagttccc

SEQ ID NO: 387451 - DNA, 33 bp, Homo sapien
cagctactcagtgcctaagactttgaatagttt

SEQ ID NO: 387452 - DNA, 33 bp, Homo sapien
cagctactcagtgccttagactttgaatagttt

SEQ ID NO: 387453 - DNA, 33 bp, Homo sapien
cgacacatccaaatttaaaagacagaggttcag

SEQ ID NO: 387454 - DNA, 33 bp, Homo sapien
cgacacatccaaatttgaaagacagaggttcag

SEQ ID NO: 387455 - DNA, 33 bp, Homo sapien
tctgtaataccttgtaccccaatgagtacaatg

SEQ ID NO: 387456 - DNA, 33 bp, Homo sapien
tctgtaataccttgtatcccaatgagtacaatg

SEQ ID NO: 387457 - DNA, 33 bp, Homo sapien
agagtctgtgctttgcactttctggctttgtga

SEQ ID NO: 387458 - DNA, 33 bp, Homo sapien
agagtctgtgctttgcgctttctggctttgtga

SEQ ID NO: 387459 - DNA, 33 bp, Homo sapien
tatatacacagtaccacgctaaactctatttac

SEQ ID NO: 387460 - DNA, 33 bp, Homo sapien
tatatacacagtaccatgctaaactctatttac

SEQ ID NO: 387461 - DNA, 33 bp, Homo sapien
tcctcttcagaccttaaaggacgccccactatg

SEQ ID NO: 387462 - DNA, 33 bp, Homo sapien
tcctcttcagaccttataggacgccccactatg

SEQ ID NO: 387463 - DNA, 33 bp, Homo sapien
ctgcaagagcctctcacctaatctccctgcccc

SEQ ID NO: 387464 - DNA, 33 bp, Homo sapien
ctgcaagagcctctcagctaatctccctgcccc

SEQ ID NO: 387465 - DNA, 33 bp, Homo sapien
accctgtttattgatactaagaagagcctccaa

SEQ ID NO: 387466 - DNA, 33 bp, Homo sapien
accctgtttattgatagtaagaagagcctccaa

SEQ ID NO: 387467 - DNA, 33 bp, Homo sapien
tataacaatgaccgaactcacgataggaaagga

SEQ ID NO: 387468 - DNA, 33 bp, Homo sapien
tataacaatgaccgaattcacgataggaaagga

SEQ ID NO: 387469 - DNA, 33 bp, Homo sapien
ttccaagcctaagacacgtgctgtttctatgct

SEQ ID NO: 387470 - DNA, 33 bp, Homo sapien
ttccaagcctaagacatgtgctgtttctatgct

SEQ ID NO: 387471 - DNA, 33 bp, Homo sapien
ccctttccagcttaacgaaaattttctgatact

SEQ ID NO: 387472 - DNA, 33 bp, Homo sapien
ccctttccagcttaactaaaattttctgatact

SEQ ID NO: 387473 - DNA, 33 bp, Homo sapien
aggcgaatggttttccaatcttcaaaccaacct

SEQ ID NO: 387474 - DNA, 33 bp, Homo sapien
aggcgaatggttttccgatcttcaaaccaacct

SEQ ID NO: 387475 - DNA, 33 bp, Homo sapien
cagtttccgcgtgaaaactcaaagacgtggaac

SEQ ID NO: 387476 - DNA, 33 bp, Homo sapien
cagtttccgcgtgaaacctcaaagacgtggaac

SEQ ID NO: 387477 - DNA, 33 bp, Homo sapien
ctgttccatttccaaaatcctcactgccccaag

SEQ ID NO: 387478 - DNA, 33 bp, Homo sapien
ctgttccatttccaaagtcctcactgccccaag

SEQ ID NO: 387479 - DNA, 33 bp, Homo sapien
aggaagcataaacgcacatggtcactttactgg

SEQ ID NO: 387480 - DNA, 33 bp, Homo sapien
aggaagcataaacgcatatggtcactttactgg

SEQ ID NO: 387481 - DNA, 33 bp, Homo sapien
gcactggaggagagaaaccctaatgaagaagtc

SEQ ID NO: 387482 - DNA, 33 bp, Homo sapien
gcactggaggagagaatccctaatgaagaagtc

SEQ ID NO: 387483 - DNA, 33 bp, Homo sapien
catacttagcctaatacactactcgggagactg

SEQ ID NO: 387484 - DNA, 33 bp, Homo sapien
catacttagcctaatagactactcgggagactg

SEQ ID NO: 387485 - DNA, 33 bp, Homo sapien
aggagcagccggagtacaccttccacttatggg

SEQ ID NO: 387486 - DNA, 33 bp, Homo sapien
aggagcagccggagtataccttccacttatggg

SEQ ID NO: 387487 - DNA, 33 bp, Homo sapien
ttaagccaagagctccaataattcaggcagagg

SEQ ID NO: 387488 - DNA, 33 bp, Homo sapien
ttaagccaagagctccgataattcaggcagagg

SEQ ID NO: 387489 - DNA, 33 bp, Homo sapien
tgggggttcgttacatcaagttgtggggtctgt

SEQ ID NO: 387490 - DNA, 33 bp, Homo sapien
tgggggttcgttacatgaagttgtggggtctgt

SEQ ID NO: 387491 - DNA, 33 bp, Homo sapien
taaacctctacgttgggattcttaaatttaaca

SEQ ID NO: 387492 - DNA, 33 bp, Homo sapien
taaacctctacgttggtattcttaaatttaaca

SEQ ID NO: 387493 - DNA, 33 bp, Homo sapien
ttctttttgcaggtgacgctcatgttacggttt

SEQ ID NO: 387494 - DNA, 33 bp, Homo sapien
ttctttttgcaggtgatgctcatgttacggttt

SEQ ID NO: 387495 - DNA, 33 bp, Homo sapien
acagttgggtcccaagcagaatccttttgccca

SEQ ID NO: 387496 - DNA, 33 bp, Homo sapien
acagttgggtcccaagtagaatccttttgccca

SEQ ID NO: 387497 - DNA, 33 bp, Homo sapien
acacttggatacatacggacaataataataaca

SEQ ID NO: 387498 - DNA, 33 bp, Homo sapien
acacttggatacatactgacaataataataaca

SEQ ID NO: 387499 - DNA, 33 bp, Homo sapien
aggtctggaatgggagcagtttaaacaggtcat

SEQ ID NO: 387500 - DNA, 33 bp, Homo sapien
aggtctggaatgggaggagtttaaacaggtcat

SEQ ID NO: 387501 - DNA, 33 bp, Homo sapien
agtggttgaggagaaacgagaaattacagccca

SEQ ID NO: 387502 - DNA, 33 bp, Homo sapien
agtggttgaggagaaatgagaaattacagccca

SEQ ID NO: 387503 - DNA, 33 bp, Homo sapien
aagcattgcacacttacgttttagtagggtctc

SEQ ID NO: 387504 - DNA, 33 bp, Homo sapien
aagcattgcacacttaggttttagtagggtctc

SEQ ID NO: 387505 - DNA, 33 bp, Homo sapien
catctgggagaccttccctcttcttatccctgc

SEQ ID NO: 387506 - DNA, 33 bp, Homo sapien
catctgggagaccttctctcttcttatccctgc

SEQ ID NO: 387507 - DNA, 33 bp, Homo sapien
cagatcagagaatgaaagaattactgaaatgga

SEQ ID NO: 387508 - DNA, 33 bp, Homo sapien
cagatcagagaatgaaggaattactgaaatgga

SEQ ID NO: 387509 - DNA, 33 bp, Homo sapien
ttgttgtttctgtgtcaaccaccattgtcctca

SEQ ID NO: 387510 - DNA, 33 bp, Homo sapien
ttgttgtttctgtgtcgaccaccattgtcctca

SEQ ID NO: 387511 - DNA, 33 bp, Homo sapien
aagcattcaggtgcccacttaattcaatcggcg

SEQ ID NO: 387512 - DNA, 33 bp, Homo sapien
aagcattcaggtgccctcttaattcaatcggcg

SEQ ID NO: 387513 - DNA, 33 bp, Homo sapien
ataaaaatagtagcaacggtaactaatgatgtt

SEQ ID NO: 387514 - DNA, 33 bp, Homo sapien
ataaaaatagtagcaatggtaactaatgatgtt

SEQ ID NO: 387515 - DNA, 33 bp, Homo sapien
ttgggtctgatgcccacgcttaaccgattccca

SEQ ID NO: 387516 - DNA, 33 bp, Homo sapien
ttgggtctgatgcccatgcttaaccgattccca

SEQ ID NO: 387517 - DNA, 33 bp, Homo sapien
ttttactcaccaccgagggaaaattctcatagt

SEQ ID NO: 387518 - DNA, 33 bp, Homo sapien
ttttactcaccaccgatggaaaattctcatagt

SEQ ID NO: 387519 - DNA, 33 bp, Homo sapien
cagattgattttgacacaaaccacactcctgtg

SEQ ID NO: 387520 - DNA, 33 bp, Homo sapien
cagattgattttgacataaaccacactcctgtg

SEQ ID NO: 387521 - DNA, 33 bp, Homo sapien
ttcgcttggcaaggaagggcttcactccatcag

SEQ ID NO: 387522 - DNA, 33 bp, Homo sapien
ttcgcttggcaaggaatggcttcactccatcag

SEQ ID NO: 387523 - DNA, 33 bp, Homo sapien
agggacaaaaacacggaagtaccatttctgtct

SEQ ID NO: 387524 - DNA, 33 bp, Homo sapien
agggacaaaaacacgggagtaccatttctgtct

SEQ ID NO: 387525 - DNA, 33 bp, Homo sapien
acatttctctagtgcaacaattcgaagaagtca

SEQ ID NO: 387526 - DNA, 33 bp, Homo sapien
acatttctctagtgcaccaattcgaagaagtca

SEQ ID NO: 387527 - DNA, 33 bp, Homo sapien
catcacaattcactccccgccaacgacttttac

SEQ ID NO: 387528 - DNA, 33 bp, Homo sapien
catcacaattcactcctcgccaacgacttttac

SEQ ID NO: 387529 - DNA, 33 bp, Homo sapien
aataatatgttttcaacaacgtttacattaatt

SEQ ID NO: 387530 - DNA, 33 bp, Homo sapien
aataatatgttttcaataacgtttacattaatt

SEQ ID NO: 387531 - DNA, 33 bp, Homo sapien
caatggtcaaaatcaacagatctgaactgcgat

SEQ ID NO: 387532 - DNA, 33 bp, Homo sapien
caatggtcaaaatcaatagatctgaactgcgat

SEQ ID NO: 387533 - DNA, 33 bp, Homo sapien
ccccaaagcattaatacgtctggaacattgcct

SEQ ID NO: 387534 - DNA, 33 bp, Homo sapien
ccccaaagcattaatatgtctggaacattgcct

SEQ ID NO: 387535 - DNA, 33 bp, Homo sapien
gatacataaactttcaggtagcacctaatgatt

SEQ ID NO: 387536 - DNA, 33 bp, Homo sapien
gatacataaactttcatgtagcacctaatgatt

SEQ ID NO: 387537 - DNA, 33 bp, Homo sapien
aatgaggttgctaagcgaaagtctgaaagccca

SEQ ID NO: 387538 - DNA, 33 bp, Homo sapien
aatgaggttgctaagctaaagtctgaaagccca

SEQ ID NO: 387539 - DNA, 33 bp, Homo sapien
tatactctcatatcacacttagatctttctttg

SEQ ID NO: 387540 - DNA, 33 bp, Homo sapien
tatactctcatatcactcttagatctttctttg

SEQ ID NO: 387541 - DNA, 33 bp, Homo sapien
ataagagaaaaaaacaatgataggactgacctg

SEQ ID NO: 387542 - DNA, 33 bp, Homo sapien
ataagagaaaaaaacagtgataggactgacctg

SEQ ID NO: 387543 - DNA, 33 bp, Homo sapien
aacttgaaacttctacacgcaggtcagtcctat

SEQ ID NO: 387544 - DNA, 33 bp, Homo sapien
aacttgaaacttctacgcgcaggtcagtcctat

SEQ ID NO: 387545 - DNA, 33 bp, Homo sapien
ttatatttatgaatacaacactggctccagcaa

SEQ ID NO: 387546 - DNA, 33 bp, Homo sapien
ttatatttatgaataccacactggctccagcaa

SEQ ID NO: 387547 - DNA, 33 bp, Homo sapien
ttctgatgctgagaacaaattgttttaatatcc

SEQ ID NO: 387548 - DNA, 33 bp, Homo sapien
ttctgatgctgagaacgaattgttttaatatcc

SEQ ID NO: 387549 - DNA, 33 bp, Homo sapien
cgctatattaaatccgaagcacgtaagtagggt

SEQ ID NO: 387550 - DNA, 33 bp, Homo sapien
cgctatattaaatccgtagcacgtaagtagggt

SEQ ID NO: 387551 - DNA, 33 bp, Homo sapien
gtagggaagcaacagactacccactagtgagag

SEQ ID NO: 387552 - DNA, 33 bp, Homo sapien
gtagggaagcaacagagtacccactagtgagag

SEQ ID NO: 387553 - DNA, 33 bp, Homo sapien
gagaaactgattgatacacagcaacaatagtta

SEQ ID NO: 387554 - DNA, 33 bp, Homo sapien
gagaaactgattgatatacagcaacaatagtta

SEQ ID NO: 387555 - DNA, 33 bp, Homo sapien
tcagcatcttttgttacacccgaagtgcattcc

SEQ ID NO: 387556 - DNA, 33 bp, Homo sapien
tcagcatcttttgttatacccgaagtgcattcc

SEQ ID NO: 387557 - DNA, 33 bp, Homo sapien
actgtcctcattttcaagctgaagaaccaagct

SEQ ID NO: 387558 - DNA, 33 bp, Homo sapien
actgtcctcattttcaggctgaagaaccaagct

SEQ ID NO: 387559 - DNA, 33 bp, Homo sapien
gcattgttggccataaatgaaactagtgagatg

SEQ ID NO: 387560 - DNA, 33 bp, Homo sapien
gcattgttggccataagtgaaactagtgagatg

SEQ ID NO: 387561 - DNA, 33 bp, Homo sapien
ctatcacatactcttaggcaatttatgaaatgt

SEQ ID NO: 387562 - DNA, 33 bp, Homo sapien
ctatcacatactcttatgcaatttatgaaatgt

SEQ ID NO: 387563 - DNA, 33 bp, Homo sapien
aacgagtacggtctctaacagtaaagtacagaa

SEQ ID NO: 387564 - DNA, 33 bp, Homo sapien
aacgagtacggtctctgacagtaaagtacagaa

SEQ ID NO: 387565 - DNA, 33 bp, Homo sapien
tgcactgaccaccagtcaagggcaggtagcttt

SEQ ID NO: 387566 - DNA, 33 bp, Homo sapien
tgcactgaccaccagtgaagggcaggtagcttt

SEQ ID NO: 387567 - DNA, 33 bp, Homo sapien
tctatttcctcgatagaccttatagaaatcacc

SEQ ID NO: 387568 - DNA, 33 bp, Homo sapien
tctatttcctcgataggccttatagaaatcacc

SEQ ID NO: 387569 - DNA, 33 bp, Homo sapien
tgagaatattttcaccacggaaattggcacatg

SEQ ID NO: 387570 - DNA, 33 bp, Homo sapien
tgagaatattttcaccccggaaattggcacatg

SEQ ID NO: 387571 - DNA, 33 bp, Homo sapien
taaaatagaagcctcacagatgggaaaacatgg

SEQ ID NO: 387572 - DNA, 33 bp, Homo sapien
taaaatagaagcctcagagatgggaaaacatgg

SEQ ID NO: 387573 - DNA, 33 bp, Homo sapien
ttgcaaggcaacgcaacggaattttgtggtgat

SEQ ID NO: 387574 - DNA, 33 bp, Homo sapien
ttgcaaggcaacgcaagggaattttgtggtgat

SEQ ID NO: 387575 - DNA, 33 bp, Homo sapien
tttccacgtggcaacactcagctggacgtcaat

SEQ ID NO: 387576 - DNA, 33 bp, Homo sapien
tttccacgtggcaacattcagctggacgtcaat

SEQ ID NO: 387577 - DNA, 33 bp, Homo sapien
aggacagtaaccaataccgctccttctacatga

SEQ ID NO: 387578 - DNA, 33 bp, Homo sapien
aggacagtaaccaatatcgctccttctacatga

SEQ ID NO: 387579 - DNA, 33 bp, Homo sapien
tatcctcggctatttacatgtgatatttcatgg

SEQ ID NO: 387580 - DNA, 33 bp, Homo sapien
tatcctcggctatttatatgtgatatttcatgg

SEQ ID NO: 387581 - DNA, 33 bp, Homo sapien
aaaaatacaacccttacgctgatggatgtacac

SEQ ID NO: 387582 - DNA, 33 bp, Homo sapien
aaaaatacaacccttatgctgatggatgtacac

SEQ ID NO: 387583 - DNA, 33 bp, Homo sapien
acagcaggaaaaactacatggttggctggattt

SEQ ID NO: 387584 - DNA, 33 bp, Homo sapien
acagcaggaaaaactagatggttggctggattt

SEQ ID NO: 387585 - DNA, 33 bp, Homo sapien
tccttcatcttcattcaatgtttagaaatcaac

SEQ ID NO: 387586 - DNA, 33 bp, Homo sapien
tccttcatcttcattcgatgtttagaaatcaac

SEQ ID NO: 387587 - DNA, 33 bp, Homo sapien
actggtttggaattcacagtcacaatttcttgc

SEQ ID NO: 387588 - DNA, 33 bp, Homo sapien
actggtttggaattcatagtcacaatttcttgc

SEQ ID NO: 387589 - DNA, 33 bp, Homo sapien
atgaaaatgtttctgaataagttatgtctaagt

SEQ ID NO: 387590 - DNA, 33 bp, Homo sapien
atgaaaatgtttctgagtaagttatgtctaagt

SEQ ID NO: 387591 - DNA, 33 bp, Homo sapien
gaattacagagcaacaagaggcagagagcaaca

SEQ ID NO: 387592 - DNA, 33 bp, Homo sapien
gaattacagagcaacaggaggcagagagcaaca

SEQ ID NO: 387593 - DNA, 33 bp, Homo sapien
gtagaagtagttacaacgctagtgacctcatat

SEQ ID NO: 387594 - DNA, 33 bp, Homo sapien
gtagaagtagttacaatgctagtgacctcatat

SEQ ID NO: 387595 - DNA, 33 bp, Homo sapien
aaaaaaatacgaaaaacagaatcagagcaaatt

SEQ ID NO: 387596 - DNA, 33 bp, Homo sapien
aaaaaaatacgaaaaatagaatcagagcaaatt

SEQ ID NO: 387597 - DNA, 33 bp, Homo sapien
ccacaccatacgggcaatagtccgcattttcaa

SEQ ID NO: 387598 - DNA, 33 bp, Homo sapien
ccacaccatacgggcagtagtccgcattttcaa

SEQ ID NO: 387599 - DNA, 33 bp, Homo sapien
tttaaaaaattagcaaagaagcaaatatgacaa

SEQ ID NO: 387600 - DNA, 33 bp, Homo sapien
tttaaaaaattagcaaggaagcaaatatgacaa

SEQ ID NO: 387601 - DNA, 33 bp, Homo sapien
ctttccaatgcaatgaaatggattcacagaggc

SEQ ID NO: 387602 - DNA, 33 bp, Homo sapien
ctttccaatgcaatgagatggattcacagaggc

SEQ ID NO: 387603 - DNA, 33 bp, Homo sapien
gtgcttagggcggacacagaaattcactggaca

SEQ ID NO: 387604 - DNA, 33 bp, Homo sapien
gtgcttagggcggacatagaaattcactggaca

SEQ ID NO: 387605 - DNA, 33 bp, Homo sapien
gatgtggctgttagtgcaatcatgagtaattag

SEQ ID NO: 387606 - DNA, 33 bp, Homo sapien
gatgtggctgttagtggaatcatgagtaattag

SEQ ID NO: 387607 - DNA, 33 bp, Homo sapien
tttataccagagactgcagatgctaatggggag

SEQ ID NO: 387608 - DNA, 33 bp, Homo sapien
tttataccagagactggagatgctaatggggag

SEQ ID NO: 387609 - DNA, 33 bp, Homo sapien
tagattcaaagtttaacgacatgaagacacaca

SEQ ID NO: 387610 - DNA, 33 bp, Homo sapien
tagattcaaagtttaatgacatgaagacacaca

SEQ ID NO: 387611 - DNA, 33 bp, Homo sapien
ttaaactttgaatctacggacatgtctttttct

SEQ ID NO: 387612 - DNA, 33 bp, Homo sapien
ttaaactttgaatctatggacatgtctttttct

SEQ ID NO: 387613 - DNA, 33 bp, Homo sapien
ttggcatttgtaaggcaaaaagacccctggaaa

SEQ ID NO: 387614 - DNA, 33 bp, Homo sapien
ttggcatttgtaaggcgaaaagacccctggaaa

SEQ ID NO: 387615 - DNA, 33 bp, Homo sapien
taccttgcaggagtatcataaactcacatttcc

SEQ ID NO: 387616 - DNA, 33 bp, Homo sapien
taccttgcaggagtatgataaactcacatttcc

SEQ ID NO: 387617 - DNA, 33 bp, Homo sapien
gtggtgaatgaacataaaaaccgattacaacat

SEQ ID NO: 387618 - DNA, 33 bp, Homo sapien
gtggtgaatgaacatacaaaccgattacaacat

SEQ ID NO: 387619 - DNA, 33 bp, Homo sapien
aggcgtgatttgctaacagtacctctcatggct

SEQ ID NO: 387620 - DNA, 33 bp, Homo sapien
aggcgtgatttgctaagagtacctctcatggct

SEQ ID NO: 387621 - DNA, 33 bp, Homo sapien
aatattacgctattaaatcacatacattccact

SEQ ID NO: 387622 - DNA, 33 bp, Homo sapien
aatattacgctattaagtcacatacattccact

SEQ ID NO: 387623 - DNA, 33 bp, Homo sapien
catcccccttattactcagcctttgggtggtat

SEQ ID NO: 387624 - DNA, 33 bp, Homo sapien
catcccccttattactgagcctttgggtggtat

SEQ ID NO: 387625 - DNA, 33 bp, Homo sapien
attcctggccctgccccatgatataccagcgcc

SEQ ID NO: 387626 - DNA, 33 bp, Homo sapien
attcctggccctgcccgatgatataccagcgcc

SEQ ID NO: 387627 - DNA, 33 bp, Homo sapien
atgttgtcatcaaaacaaccggaaatgcctttt

SEQ ID NO: 387628 - DNA, 33 bp, Homo sapien
atgttgtcatcaaaacgaccggaaatgcctttt

SEQ ID NO: 387629 - DNA, 33 bp, Homo sapien
cagtaaattagcacaacgattatggttggatgc

SEQ ID NO: 387630 - DNA, 33 bp, Homo sapien
cagtaaattagcacaatgattatggttggatgc

SEQ ID NO: 387631 - DNA, 33 bp, Homo sapien
tctgcatcacactaacactgtcactcagtcctt

SEQ ID NO: 387632 - DNA, 33 bp, Homo sapien
tctgcatcacactaactctgtcactcagtcctt

SEQ ID NO: 387633 - DNA, 33 bp, Homo sapien
ttgttataggttgaataatgtcccgaagaatat

SEQ ID NO: 387634 - DNA, 33 bp, Homo sapien
ttgttataggttgaatcatgtcccgaagaatat

SEQ ID NO: 387635 - DNA, 33 bp, Homo sapien
ttcaactataattcctcacacatttgcatctac

SEQ ID NO: 387636 - DNA, 33 bp, Homo sapien
ttcaactataattcctgacacatttgcatctac

SEQ ID NO: 387637 - DNA, 33 bp, Homo sapien
gatgctgttcctctcaagtgggaaaaatttggt

SEQ ID NO: 387638 - DNA, 33 bp, Homo sapien
gatgctgttcctctcacgtgggaaaaatttggt

SEQ ID NO: 387639 - DNA, 33 bp, Homo sapien
cttggtggagcaacctaactagagacattaatc

SEQ ID NO: 387640 - DNA, 33 bp, Homo sapien
cttggtggagcaacctcactagagacattaatc

SEQ ID NO: 387641 - DNA, 33 bp, Homo sapien
gccgccaggtggcacaaaatcaaaactgcatca

SEQ ID NO: 387642 - DNA, 33 bp, Homo sapien
gccgccaggtggcacagaatcaaaactgcatca

SEQ ID NO: 387643 - DNA, 33 bp, Homo sapien
atagaatgcaaactttaaaaaagacataccttt

SEQ ID NO: 387644 - DNA, 33 bp, Homo sapien
atagaatgcaaactttgaaaaagacataccttt

SEQ ID NO: 387645 - DNA, 33 bp, Homo sapien
taaagcacttgatgccaatagactagaaacaaa

SEQ ID NO: 387646 - DNA, 33 bp, Homo sapien
taaagcacttgatgcccatagactagaaacaaa

SEQ ID NO: 387647 - DNA, 33 bp, Homo sapien
gggaggatttcaggacaaaccacaaacaagctg

SEQ ID NO: 387648 - DNA, 33 bp, Homo sapien
gggaggatttcaggacgaaccacaaacaagctg

SEQ ID NO: 387649 - DNA, 33 bp, Homo sapien
tagggtctcacaataacagcaggtctcagaaag

SEQ ID NO: 387650 - DNA, 33 bp, Homo sapien
tagggtctcacaataatagcaggtctcagaaag

SEQ ID NO: 387651 - DNA, 33 bp, Homo sapien
gaaacacaggccctgacagcgtaccaaggtcac

SEQ ID NO: 387652 - DNA, 33 bp, Homo sapien
gaaacacaggccctgagagcgtaccaaggtcac

SEQ ID NO: 387653 - DNA, 33 bp, Homo sapien
tgagtttcttgcaagagcactaagaagttttaa

SEQ ID NO: 387654 - DNA, 33 bp, Homo sapien
tgagtttcttgcaagatcactaagaagttttaa

SEQ ID NO: 387655 - DNA, 33 bp, Homo sapien
tctaaagaattttttgcatagcattagcaaagg

SEQ ID NO: 387656 - DNA, 33 bp, Homo sapien
tctaaagaattttttgtatagcattagcaaagg

SEQ ID NO: 387657 - DNA, 33 bp, Homo sapien
actctggcaagacggaaaaaatgcttctgctga

SEQ ID NO: 387658 - DNA, 33 bp, Homo sapien
actctggcaagacggagaaaatgcttctgctga

SEQ ID NO: 387659 - DNA, 33 bp, Homo sapien
tatcagaagttatctacgttacttgaagatgaa

SEQ ID NO: 387660 - DNA, 33 bp, Homo sapien
tatcagaagttatctaggttacttgaagatgaa

SEQ ID NO: 387661 - DNA, 33 bp, Homo sapien
ttagagtggaaattcaaagtgagtctacattca

SEQ ID NO: 387662 - DNA, 33 bp, Homo sapien
ttagagtggaaattcagagtgagtctacattca

SEQ ID NO: 387663 - DNA, 33 bp, Homo sapien
cttctctaagctgaacaagtgggaattccattg

SEQ ID NO: 387664 - DNA, 33 bp, Homo sapien
cttctctaagctgaacgagtgggaattccattg

SEQ ID NO: 387665 - DNA, 33 bp, Homo sapien
cacattgtagctgctcccaaaatatctattgac

SEQ ID NO: 387666 - DNA, 33 bp, Homo sapien
cacattgtagctgctctcaaaatatctattgac

SEQ ID NO: 387667 - DNA, 33 bp, Homo sapien
attgtattagtaagacagcaacgaagagaaaat

SEQ ID NO: 387668 - DNA, 33 bp, Homo sapien
attgtattagtaagactgcaacgaagagaaaat

SEQ ID NO: 387669 - DNA, 33 bp, Homo sapien
ataattctatttcagacatccgaagctctccca

SEQ ID NO: 387670 - DNA, 33 bp, Homo sapien
ataattctatttcagatatccgaagctctccca

SEQ ID NO: 387671 - DNA, 33 bp, Homo sapien
ttggctgcaaactacaccagatgaactctacgc

SEQ ID NO: 387672 - DNA, 33 bp, Homo sapien
ttggctgcaaactacagcagatgaactctacgc

SEQ ID NO: 387673 - DNA, 33 bp, Homo sapien
gaactctacgcaccaaccttttgtttcagaaca

SEQ ID NO: 387674 - DNA, 33 bp, Homo sapien
gaactctacgcaccaagcttttgtttcagaaca

SEQ ID NO: 387675 - DNA, 33 bp, Homo sapien
tagaaaattttgcccaaatgttatcagtaggtg

SEQ ID NO: 387676 - DNA, 33 bp, Homo sapien
tagaaaattttgcccagatgttatcagtaggtg

SEQ ID NO: 387677 - DNA, 33 bp, Homo sapien
gggagaaggtaagtcacggaggattcgagccag

SEQ ID NO: 387678 - DNA, 33 bp, Homo sapien
gggagaaggtaagtcatggaggattcgagccag

SEQ ID NO: 387679 - DNA, 33 bp, Homo sapien
tcctgtgtctcacataatagttgctcaaaaaat

SEQ ID NO: 387680 - DNA, 33 bp, Homo sapien
tcctgtgtctcacatagtagttgctcaaaaaat

SEQ ID NO: 387681 - DNA, 33 bp, Homo sapien
cttatgcatgtaatacactataaagtcaggata

SEQ ID NO: 387682 - DNA, 33 bp, Homo sapien
cttatgcatgtaatactctataaagtcaggata

SEQ ID NO: 387683 - DNA, 33 bp, Homo sapien
atctcagaagcctagaacaacaaagttcaattt

SEQ ID NO: 387684 - DNA, 33 bp, Homo sapien
atctcagaagcctagagcaacaaagttcaattt

SEQ ID NO: 387685 - DNA, 33 bp, Homo sapien
tcacaaattagagggacagagtgtgtatgagtg

SEQ ID NO: 387686 - DNA, 33 bp, Homo sapien
tcacaaattagagggatagagtgtgtatgagtg

SEQ ID NO: 387687 - DNA, 33 bp, Homo sapien
catgactgacaatgggacagaatgtttaaaatc

SEQ ID NO: 387688 - DNA, 33 bp, Homo sapien
catgactgacaatggggcagaatgtttaaaatc

SEQ ID NO: 387689 - DNA, 33 bp, Homo sapien
tggtctcccatttcccaagactgtctctgaact

SEQ ID NO: 387690 - DNA, 33 bp, Homo sapien
tggtctcccatttcccgagactgtctctgaact

SEQ ID NO: 387691 - DNA, 33 bp, Homo sapien
atcaacattttatagaaaggaaccagtggcttc

SEQ ID NO: 387692 - DNA, 33 bp, Homo sapien
atcaacattttatagacaggaaccagtggcttc

SEQ ID NO: 387693 - DNA, 33 bp, Homo sapien
gcttatgagtttcatcaaaggcatgtttcaaac

SEQ ID NO: 387694 - DNA, 33 bp, Homo sapien
gcttatgagtttcatcgaaggcatgtttcaaac

SEQ ID NO: 387695 - DNA, 33 bp, Homo sapien
ttttctttgttcatcactgagtttaaaaattat

SEQ ID NO: 387696 - DNA, 33 bp, Homo sapien
ttttctttgttcatcattgagtttaaaaattat

SEQ ID NO: 387697 - DNA, 33 bp, Homo sapien
ctatatgcttttctgaagactgaaagaaaggga

SEQ ID NO: 387698 - DNA, 33 bp, Homo sapien
ctatatgcttttctgatgactgaaagaaaggga

SEQ ID NO: 387699 - DNA, 33 bp, Homo sapien
cagcataggcaaagacacatctattgaaatatc

SEQ ID NO: 387700 - DNA, 33 bp, Homo sapien
cagcataggcaaagacgcatctattgaaatatc

SEQ ID NO: 387701 - DNA, 33 bp, Homo sapien
tgagaaactgaagccacgttctttgcccaaggc

SEQ ID NO: 387702 - DNA, 33 bp, Homo sapien
tgagaaactgaagccatgttctttgcccaaggc

SEQ ID NO: 387703 - DNA, 33 bp, Homo sapien
ataaggctaagaaagagcaagtgagacgatgct

SEQ ID NO: 387704 - DNA, 33 bp, Homo sapien
ataaggctaagaaagatcaagtgagacgatgct

SEQ ID NO: 387705 - DNA, 33 bp, Homo sapien
gttttgaataacagcaaatgccaacatttaact

SEQ ID NO: 387706 - DNA, 33 bp, Homo sapien
gttttgaataacagcagatgccaacatttaact

SEQ ID NO: 387707 - DNA, 33 bp, Homo sapien
taggaatagctttctacaaaattcagtctcttc

SEQ ID NO: 387708 - DNA, 33 bp, Homo sapien
taggaatagctttctataaaattcagtctcttc

SEQ ID NO: 387709 - DNA, 33 bp, Homo sapien
ccttgttttaatgacaatggtgataatatctga

SEQ ID NO: 387710 - DNA, 33 bp, Homo sapien
ccttgttttaatgacagtggtgataatatctga

SEQ ID NO: 387711 - DNA, 33 bp, Homo sapien
tggctgaaccttgtgcaaatgacactaagattg

SEQ ID NO: 387712 - DNA, 33 bp, Homo sapien
tggctgaaccttgtgccaatgacactaagattg

SEQ ID NO: 387713 - DNA, 33 bp, Homo sapien
caccagaaaagatagacgttaatgtccttttac

SEQ ID NO: 387714 - DNA, 33 bp, Homo sapien
caccagaaaagatagatgttaatgtccttttac

SEQ ID NO: 387715 - DNA, 33 bp, Homo sapien
aaatacccttatcaccaatgcaagcggagataa

SEQ ID NO: 387716 - DNA, 33 bp, Homo sapien
aaatacccttatcaccgatgcaagcggagataa

SEQ ID NO: 387717 - DNA, 33 bp, Homo sapien
cccagacatggcattcaatcttcgtggcacgct

SEQ ID NO: 387718 - DNA, 33 bp, Homo sapien
cccagacatggcattcgatcttcgtggcacgct

SEQ ID NO: 387719 - DNA, 33 bp, Homo sapien
gcagacatcctgtgaacgtaggtgctagtccac

SEQ ID NO: 387720 - DNA, 33 bp, Homo sapien
gcagacatcctgtgaatgtaggtgctagtccac

SEQ ID NO: 387721 - DNA, 33 bp, Homo sapien
tgaggctgggcttggtcaagtagctttcccaag

SEQ ID NO: 387722 - DNA, 33 bp, Homo sapien
tgaggctgggcttggttaagtagctttcccaag

SEQ ID NO: 387723 - DNA, 33 bp, Homo sapien
gtcagacagagttggaggtgaaacctagattca

SEQ ID NO: 387724 - DNA, 33 bp, Homo sapien
gtcagacagagttggatgtgaaacctagattca

SEQ ID NO: 387725 - DNA, 33 bp, Homo sapien
atctagaacattgcacaagctgaaagttctctg

SEQ ID NO: 387726 - DNA, 33 bp, Homo sapien
atctagaacattgcacgagctgaaagttctctg

SEQ ID NO: 387727 - DNA, 33 bp, Homo sapien
cttattttccctgagcaaagagccacatcctgg

SEQ ID NO: 387728 - DNA, 33 bp, Homo sapien
cttattttccctgagcgaagagccacatcctgg

SEQ ID NO: 387729 - DNA, 33 bp, Homo sapien
gaggaggagatacatcacttctgcagggtacat

SEQ ID NO: 387730 - DNA, 33 bp, Homo sapien
gaggaggagatacatcgcttctgcagggtacat

SEQ ID NO: 387731 - DNA, 33 bp, Homo sapien
gaatagattttcagaaaagagaaacgcagatga

SEQ ID NO: 387732 - DNA, 33 bp, Homo sapien
gaatagattttcagaagagagaaacgcagatga

SEQ ID NO: 387733 - DNA, 33 bp, Homo sapien
taatccttacaactcaaagggttgggaattctt

SEQ ID NO: 387734 - DNA, 33 bp, Homo sapien
taatccttacaactcacagggttgggaattctt

SEQ ID NO: 387735 - DNA, 33 bp, Homo sapien
acaaaatattgcaaaccccggacatgaaggcca

SEQ ID NO: 387736 - DNA, 33 bp, Homo sapien
acaaaatattgcaaacgccggacatgaaggcca

SEQ ID NO: 387737 - DNA, 33 bp, Homo sapien
tttgcagctaggatcactccgtcccacatcccc

SEQ ID NO: 387738 - DNA, 33 bp, Homo sapien
tttgcagctaggatcagtccgtcccacatcccc

SEQ ID NO: 387739 - DNA, 33 bp, Homo sapien
acccataaaacacagacagcagtcaggcatggt

SEQ ID NO: 387740 - DNA, 33 bp, Homo sapien
acccataaaacacagagagcagtcaggcatggt

SEQ ID NO: 387741 - DNA, 33 bp, Homo sapien
tttgagcagagtgacaaaagatgaccagaagtt

SEQ ID NO: 387742 - DNA, 33 bp, Homo sapien
tttgagcagagtgacagaagatgaccagaagtt

SEQ ID NO: 387743 - DNA, 33 bp, Homo sapien
atagctggtttaggtccatagagtccatgcttt

SEQ ID NO: 387744 - DNA, 33 bp, Homo sapien
atagctggtttaggtctatagagtccatgcttt

SEQ ID NO: 387745 - DNA, 33 bp, Homo sapien
ataagtggggtagagacacataagcagatcatt

SEQ ID NO: 387746 - DNA, 33 bp, Homo sapien
ataagtggggtagagatacataagcagatcatt

SEQ ID NO: 387747 - DNA, 33 bp, Homo sapien
catccctgaccttccactgaatccatctgttta

SEQ ID NO: 387748 - DNA, 33 bp, Homo sapien
catccctgaccttccattgaatccatctgttta

SEQ ID NO: 387749 - DNA, 33 bp, Homo sapien
aagaagaaatcttttacatttgagccaacttgg

SEQ ID NO: 387750 - DNA, 33 bp, Homo sapien
aagaagaaatcttttatatttgagccaacttgg

SEQ ID NO: 387751 - DNA, 33 bp, Homo sapien
catgagttccaaataacattctgaacaaccaga

SEQ ID NO: 387752 - DNA, 33 bp, Homo sapien
catgagttccaaataagattctgaacaaccaga

SEQ ID NO: 387753 - DNA, 33 bp, Homo sapien
cacatgatgttcaaagacagagactgacagtaa

SEQ ID NO: 387754 - DNA, 33 bp, Homo sapien
cacatgatgttcaaaggcagagactgacagtaa

SEQ ID NO: 387755 - DNA, 33 bp, Homo sapien
ttcaagtaccttcacacggtgtccaagagcaat

SEQ ID NO: 387756 - DNA, 33 bp, Homo sapien
ttcaagtaccttcacatggtgtccaagagcaat

SEQ ID NO: 387757 - DNA, 33 bp, Homo sapien
caagaatctgagagaacgaggtgggagactggg

SEQ ID NO: 387758 - DNA, 33 bp, Homo sapien
caagaatctgagagaatgaggtgggagactggg

SEQ ID NO: 387759 - DNA, 33 bp, Homo sapien
tcagaaggctgttttacgccatcactttctttc

SEQ ID NO: 387760 - DNA, 33 bp, Homo sapien
tcagaaggctgttttatgccatcactttctttc

SEQ ID NO: 387761 - DNA, 33 bp, Homo sapien
ggaagtcatggacacacatcaaacatggtccct

SEQ ID NO: 387762 - DNA, 33 bp, Homo sapien
ggaagtcatggacacagatcaaacatggtccct

SEQ ID NO: 387763 - DNA, 33 bp, Homo sapien
agatgagccatatacaaacggaaatcttccgta

SEQ ID NO: 387764 - DNA, 33 bp, Homo sapien
agatgagccatatacacacggaaatcttccgta

SEQ ID NO: 387765 - DNA, 33 bp, Homo sapien
cttttcttggcactcactagaaatgtcacggag

SEQ ID NO: 387766 - DNA, 33 bp, Homo sapien
cttttcttggcactcagtagaaatgtcacggag

SEQ ID NO: 387767 - DNA, 33 bp, Homo sapien
ctcaaaaaaccaattacctttgaatgtcatttc

SEQ ID NO: 387768 - DNA, 33 bp, Homo sapien
ctcaaaaaaccaattatctttgaatgtcatttc

SEQ ID NO: 387769 - DNA, 33 bp, Homo sapien
tttccttgttactagacattctggtttggcctc

SEQ ID NO: 387770 - DNA, 33 bp, Homo sapien
tttccttgttactagagattctggtttggcctc

SEQ ID NO: 387771 - DNA, 33 bp, Homo sapien
tccattgttttctccacctccaaacactagtaa

SEQ ID NO: 387772 - DNA, 33 bp, Homo sapien
tccattgttttctccatctccaaacactagtaa

SEQ ID NO: 387773 - DNA, 33 bp, Homo sapien
cccaggctgggatacaatagcgtaatcttggct

SEQ ID NO: 387774 - DNA, 33 bp, Homo sapien
cccaggctgggatacagtagcgtaatcttggct

SEQ ID NO: 387775 - DNA, 33 bp, Homo sapien
caatgcatgagtcccaatgggaagttattagtg

SEQ ID NO: 387776 - DNA, 33 bp, Homo sapien
caatgcatgagtcccagtgggaagttattagtg

SEQ ID NO: 387777 - DNA, 33 bp, Homo sapien
acttaagctttgagaaaggagaagtaagtgaaa

SEQ ID NO: 387778 - DNA, 33 bp, Homo sapien
acttaagctttgagaagggagaagtaagtgaaa

SEQ ID NO: 387779 - DNA, 33 bp, Homo sapien
tattcaaatatcacacaacttcattatttacac

SEQ ID NO: 387780 - DNA, 33 bp, Homo sapien
tattcaaatatcacacgacttcattatttacac

SEQ ID NO: 387781 - DNA, 33 bp, Homo sapien
gataaattaccatgaacgtagtcactaaaaaca

SEQ ID NO: 387782 - DNA, 33 bp, Homo sapien
gataaattaccatgaaggtagtcactaaaaaca

SEQ ID NO: 387783 - DNA, 33 bp, Homo sapien
agaagtataaactccaactcatgtttgtagtac

SEQ ID NO: 387784 - DNA, 33 bp, Homo sapien
agaagtataaactccatctcatgtttgtagtac

SEQ ID NO: 387785 - DNA, 33 bp, Homo sapien
ccttcacgggtttcccaggaggcgaaagagata

SEQ ID NO: 387786 - DNA, 33 bp, Homo sapien
ccttcacgggtttccctggaggcgaaagagata

SEQ ID NO: 387787 - DNA, 33 bp, Homo sapien
tgaaagtcgactgctggagtttcacaaacatga

SEQ ID NO: 387788 - DNA, 33 bp, Homo sapien
tgaaagtcgactgctgtagtttcacaaacatga

SEQ ID NO: 387789 - DNA, 33 bp, Homo sapien
aatcctgcctctctcagaatggatttcagctct

SEQ ID NO: 387790 - DNA, 33 bp, Homo sapien
aatcctgcctctctcataatggatttcagctct

SEQ ID NO: 387791 - DNA, 33 bp, Homo sapien
atggattcctagatgacatggatttactgccat

SEQ ID NO: 387792 - DNA, 33 bp, Homo sapien
atggattcctagatgatatggatttactgccat

SEQ ID NO: 387793 - DNA, 33 bp, Homo sapien
acaatgccactgaacaactttcattgtctatgt

SEQ ID NO: 387794 - DNA, 33 bp, Homo sapien
acaatgccactgaacagctttcattgtctatgt

SEQ ID NO: 387795 - DNA, 33 bp, Homo sapien
tgatagtaaaaactgccctttgttctgttacaa

SEQ ID NO: 387796 - DNA, 33 bp, Homo sapien
tgatagtaaaaactgctctttgttctgttacaa

SEQ ID NO: 387797 - DNA, 33 bp, Homo sapien
actgcgaacacactccaaatttctatgagtaaa

SEQ ID NO: 387798 - DNA, 33 bp, Homo sapien
actgcgaacacactccgaatttctatgagtaaa

SEQ ID NO: 387799 - DNA, 33 bp, Homo sapien
agttgtgttcagataaagggccagttgacaccc

SEQ ID NO: 387800 - DNA, 33 bp, Homo sapien
agttgtgttcagataaggggccagttgacaccc

SEQ ID NO: 387801 - DNA, 33 bp, Homo sapien
tatagaaacaatcagacatcacttggtaaaata

SEQ ID NO: 387802 - DNA, 33 bp, Homo sapien
tatagaaacaatcagatatcacttggtaaaata

SEQ ID NO: 387803 - DNA, 33 bp, Homo sapien
cagcagaaaaattatgaaccagatattttaggt

SEQ ID NO: 387804 - DNA, 33 bp, Homo sapien
cagcagaaaaattatggaccagatattttaggt

SEQ ID NO: 387805 - DNA, 33 bp, Homo sapien
aggatggaacaatggcaaatagctaggctggct

SEQ ID NO: 387806 - DNA, 33 bp, Homo sapien
aggatggaacaatggcgaatagctaggctggct

SEQ ID NO: 387807 - DNA, 33 bp, Homo sapien
ggtagacatcaccgatgaatggggctgttcaag

SEQ ID NO: 387808 - DNA, 33 bp, Homo sapien
ggtagacatcaccgattaatggggctgttcaag

SEQ ID NO: 387809 - DNA, 33 bp, Homo sapien
atcgtgtgcttaaagaactaggtagacatcacc

SEQ ID NO: 387810 - DNA, 33 bp, Homo sapien
atcgtgtgcttaaagagctaggtagacatcacc

SEQ ID NO: 387811 - DNA, 33 bp, Homo sapien
tttcactccctcacaacagaaacttctgccttg

SEQ ID NO: 387812 - DNA, 33 bp, Homo sapien
tttcactccctcacaatagaaacttctgccttg

SEQ ID NO: 387813 - DNA, 33 bp, Homo sapien
cctcgacattcttaaccaattacacatgtgaag

SEQ ID NO: 387814 - DNA, 33 bp, Homo sapien
cctcgacattcttaactaattacacatgtgaag

SEQ ID NO: 387815 - DNA, 33 bp, Homo sapien
gatatcggtgatgacacaatccttgaaataatt

SEQ ID NO: 387816 - DNA, 33 bp, Homo sapien
gatatcggtgatgacataatccttgaaataatt

SEQ ID NO: 387817 - DNA, 33 bp, Homo sapien
gggcagccatgtcaaactatggtgcaaattctt

SEQ ID NO: 387818 - DNA, 33 bp, Homo sapien
gggcagccatgtcaaagtatggtgcaaattctt

SEQ ID NO: 387819 - DNA, 33 bp, Homo sapien
agaatcagttagtttacaccctacactctgtgc

SEQ ID NO: 387820 - DNA, 33 bp, Homo sapien
agaatcagttagtttataccctacactctgtgc

SEQ ID NO: 387821 - DNA, 33 bp, Homo sapien
cactctctattaccaaaagaagactactttgcc

SEQ ID NO: 387822 - DNA, 33 bp, Homo sapien
cactctctattaccaacagaagactactttgcc

SEQ ID NO: 387823 - DNA, 33 bp, Homo sapien
cttgtctagggttagaatcactgagaaaagttt

SEQ ID NO: 387824 - DNA, 33 bp, Homo sapien
cttgtctagggttagagtcactgagaaaagttt

SEQ ID NO: 387825 - DNA, 33 bp, Homo sapien
tgaactgggtgacctacggtttatttttagcaa

SEQ ID NO: 387826 - DNA, 33 bp, Homo sapien
tgaactgggtgacctatggtttatttttagcaa

SEQ ID NO: 387827 - DNA, 33 bp, Homo sapien
gactgatctgtgtgtacgtttcaccttcaccat

SEQ ID NO: 387828 - DNA, 33 bp, Homo sapien
gactgatctgtgtgtatgtttcaccttcaccat

SEQ ID NO: 387829 - DNA, 33 bp, Homo sapien
ccccaaaggatttgaaacttcccaggcatgggg

SEQ ID NO: 387830 - DNA, 33 bp, Homo sapien
ccccaaaggatttgaatcttcccaggcatgggg

SEQ ID NO: 387831 - DNA, 33 bp, Homo sapien
aggataatttcccccaaagaggcgaatacaaaa

SEQ ID NO: 387832 - DNA, 33 bp, Homo sapien
aggataatttcccccatagaggcgaatacaaaa

SEQ ID NO: 387833 - DNA, 33 bp, Homo sapien
tctatgtccaggatctcaaacgaacaatgcact

SEQ ID NO: 387834 - DNA, 33 bp, Homo sapien
tctatgtccaggatcttaaacgaacaatgcact

SEQ ID NO: 387835 - DNA, 33 bp, Homo sapien
atcatctcccttttgagtaagtcgaactgatta

SEQ ID NO: 387836 - DNA, 33 bp, Homo sapien
atcatctcccttttgattaagtcgaactgatta

SEQ ID NO: 387837 - DNA, 33 bp, Homo sapien
gttcaaacaatgaaataaagtgtgcatcgacat

SEQ ID NO: 387838 - DNA, 33 bp, Homo sapien
gttcaaacaatgaaatgaagtgtgcatcgacat

SEQ ID NO: 387839 - DNA, 33 bp, Homo sapien
ggaacactaggagagaacactggaatgacacac

SEQ ID NO: 387840 - DNA, 33 bp, Homo sapien
ggaacactaggagagaccactggaatgacacac

SEQ ID NO: 387841 - DNA, 33 bp, Homo sapien
ccccagcatatctgtacaccattctggtgcacc

SEQ ID NO: 387842 - DNA, 33 bp, Homo sapien
ccccagcatatctgtataccattctggtgcacc

SEQ ID NO: 387843 - DNA, 33 bp, Homo sapien
gcactaagatatgatacaggtatgctggggtgg

SEQ ID NO: 387844 - DNA, 33 bp, Homo sapien
gcactaagatatgatataggtatgctggggtgg

SEQ ID NO: 387845 - DNA, 33 bp, Homo sapien
gggaccaaagactatgaaaagtgaacctggctg

SEQ ID NO: 387846 - DNA, 33 bp, Homo sapien
gggaccaaagactatggaaagtgaacctggctg

SEQ ID NO: 387847 - DNA, 33 bp, Homo sapien
aagaaggttctgcagaaaatgctgtttggttat

SEQ ID NO: 387848 - DNA, 33 bp, Homo sapien
aagaaggttctgcagacaatgctgtttggttat

SEQ ID NO: 387849 - DNA, 33 bp, Homo sapien
caattcttaagtgcataataggcccacgaattt

SEQ ID NO: 387850 - DNA, 33 bp, Homo sapien
caattcttaagtgcatgataggcccacgaattt

SEQ ID NO: 387851 - DNA, 33 bp, Homo sapien
tgatgaacgagaggtaagaaagctgctttgtgc

SEQ ID NO: 387852 - DNA, 33 bp, Homo sapien
tgatgaacgagaggtaggaaagctgctttgtgc

SEQ ID NO: 387853 - DNA, 33 bp, Homo sapien
agctagtgctttcaggaagaggaatcccctcta

SEQ ID NO: 387854 - DNA, 33 bp, Homo sapien
agctagtgctttcaggcagaggaatcccctcta

SEQ ID NO: 387855 - DNA, 33 bp, Homo sapien
gttagaaatagcagaactgtgttaccttcactg

SEQ ID NO: 387856 - DNA, 33 bp, Homo sapien
gttagaaatagcagaattgtgttaccttcactg

SEQ ID NO: 387857 - DNA, 33 bp, Homo sapien
aatggggcaaacaccaacctgagtgggcagtta

SEQ ID NO: 387858 - DNA, 33 bp, Homo sapien
aatggggcaaacaccagcctgagtgggcagtta

SEQ ID NO: 387859 - DNA, 33 bp, Homo sapien
tgtgacagcttcagaactgactgggactcgaga

SEQ ID NO: 387860 - DNA, 33 bp, Homo sapien
tgtgacagcttcagaattgactgggactcgaga

SEQ ID NO: 387861 - DNA, 33 bp, Homo sapien
ttacttgtctggagcacaatattttttattttg

SEQ ID NO: 387862 - DNA, 33 bp, Homo sapien
ttacttgtctggagcagaatattttttattttg

SEQ ID NO: 387863 - DNA, 33 bp, Homo sapien
gatagcactggctagacagataggaagtaggtg

SEQ ID NO: 387864 - DNA, 33 bp, Homo sapien
gatagcactggctagagagataggaagtaggtg

SEQ ID NO: 387865 - DNA, 33 bp, Homo sapien
aattttaaagaaagacaggatctgaccctgtat

SEQ ID NO: 387866 - DNA, 33 bp, Homo sapien
aattttaaagaaagaccggatctgaccctgtat

SEQ ID NO: 387867 - DNA, 33 bp, Homo sapien
tcctggaggcactgggaaaaaattgggtttgcc

SEQ ID NO: 387868 - DNA, 33 bp, Homo sapien
tcctggaggcactgggcaaaaattgggtttgcc

SEQ ID NO: 387869 - DNA, 33 bp, Homo sapien
aaaaattgggtttgcccattcacagggttggca

SEQ ID NO: 387870 - DNA, 33 bp, Homo sapien
aaaaattgggtttgccgattcacagggttggca

SEQ ID NO: 387871 - DNA, 33 bp, Homo sapien
agttatgcagatcccgcagatgaagggctcagt

SEQ ID NO: 387872 - DNA, 33 bp, Homo sapien
agttatgcagatcccgtagatgaagggctcagt

SEQ ID NO: 387873 - DNA, 33 bp, Homo sapien
gctatagtaggcggaacggtggcttcctgctag

SEQ ID NO: 387874 - DNA, 33 bp, Homo sapien
gctatagtaggcggaatggtggcttcctgctag

SEQ ID NO: 387875 - DNA, 33 bp, Homo sapien
aatctgcacacccaacacaaagaacaatggata

SEQ ID NO: 387876 - DNA, 33 bp, Homo sapien
aatctgcacacccaacgcaaagaacaatggata

SEQ ID NO: 387877 - DNA, 33 bp, Homo sapien
ggaaagacagagctaaagtctcagggccaagtt

SEQ ID NO: 387878 - DNA, 33 bp, Homo sapien
ggaaagacagagctaacgtctcagggccaagtt

SEQ ID NO: 387879 - DNA, 33 bp, Homo sapien
ttgagtttccagacaaaagaagcagagctgtag

SEQ ID NO: 387880 - DNA, 33 bp, Homo sapien
ttgagtttccagacaatagaagcagagctgtag

SEQ ID NO: 387881 - DNA, 33 bp, Homo sapien
gggctgtgtcatagcacggttgagagaatgtaa

SEQ ID NO: 387882 - DNA, 33 bp, Homo sapien
gggctgtgtcatagcatggttgagagaatgtaa

SEQ ID NO: 387883 - DNA, 33 bp, Homo sapien
cagagaaggacaccaaaattcccaggcaagcca

SEQ ID NO: 387884 - DNA, 33 bp, Homo sapien
cagagaaggacaccaacattcccaggcaagcca

SEQ ID NO: 387885 - DNA, 33 bp, Homo sapien
ggtttgggggcttggacaagtcagtgaacctct

SEQ ID NO: 387886 - DNA, 33 bp, Homo sapien
ggtttgggggcttggagaagtcagtgaacctct

SEQ ID NO: 387887 - DNA, 33 bp, Homo sapien
ttcatattcagaactcagaagaggccctagtct

SEQ ID NO: 387888 - DNA, 33 bp, Homo sapien
ttcatattcagaactcggaagaggccctagtct

SEQ ID NO: 387889 - DNA, 33 bp, Homo sapien
attatataagatggccccagctgctaagaagag

SEQ ID NO: 387890 - DNA, 33 bp, Homo sapien
attatataagatggcctcagctgctaagaagag

SEQ ID NO: 387891 - DNA, 33 bp, Homo sapien
catcttatataattcacatcaactggcactcct

SEQ ID NO: 387892 - DNA, 33 bp, Homo sapien
catcttatataattcagatcaactggcactcct

SEQ ID NO: 387893 - DNA, 33 bp, Homo sapien
ttcttctacatagtcaacatctcttagaagaaa

SEQ ID NO: 387894 - DNA, 33 bp, Homo sapien
ttcttctacatagtcaccatctcttagaagaaa

SEQ ID NO: 387895 - DNA, 33 bp, Homo sapien
ttttgttttttgcccccgaaagcctgttgtaaa

SEQ ID NO: 387896 - DNA, 33 bp, Homo sapien
ttttgttttttgccccggaaagcctgttgtaaa

SEQ ID NO: 387897 - DNA, 33 bp, Homo sapien
tgctttaaaaccatcaccctcttgtctgttttt

SEQ ID NO: 387898 - DNA, 33 bp, Homo sapien
tgctttaaaaccatcatcctcttgtctgttttt

SEQ ID NO: 387899 - DNA, 33 bp, Homo sapien
caaactggactgggtactccctattgtttctgg

SEQ ID NO: 387900 - DNA, 33 bp, Homo sapien
caaactggactgggtattccctattgtttctgg

SEQ ID NO: 387901 - DNA, 33 bp, Homo sapien
ccctcctgccttggttcttctcaaaccagagtg

SEQ ID NO: 387902 - DNA, 33 bp, Homo sapien
ccctcctgccttggttgttctcaaaccagagtg

SEQ ID NO: 387903 - DNA, 33 bp, Homo sapien
ctgcactgaaatgtacaagcttcttactcactg

SEQ ID NO: 387904 - DNA, 33 bp, Homo sapien
ctgcactgaaatgtaccagcttcttactcactg

SEQ ID NO: 387905 - DNA, 33 bp, Homo sapien
cacactcacacacgaacgctttatgacgcatat

SEQ ID NO: 387906 - DNA, 33 bp, Homo sapien
cacactcacacacgaatgctttatgacgcatat

SEQ ID NO: 387907 - DNA, 33 bp, Homo sapien
ctgcttaatgtcagtgcactaagcaaggtagtg

SEQ ID NO: 387908 - DNA, 33 bp, Homo sapien
ctgcttaatgtcagtgtactaagcaaggtagtg

SEQ ID NO: 387909 - DNA, 33 bp, Homo sapien
tttcttctagttctagacccttacagtcagtac

SEQ ID NO: 387910 - DNA, 33 bp, Homo sapien
tttcttctagttctaggcccttacagtcagtac

SEQ ID NO: 387911 - DNA, 33 bp, Homo sapien
atggcggtatcacatacagctaaactattgctt

SEQ ID NO: 387912 - DNA, 33 bp, Homo sapien
atggcggtatcacatatagctaaactattgctt

SEQ ID NO: 387913 - DNA, 33 bp, Homo sapien
acatggaattcactgcaaatttctgccagtcaa

SEQ ID NO: 387914 - DNA, 33 bp, Homo sapien
acatggaattcactgccaatttctgccagtcaa

SEQ ID NO: 387915 - DNA, 33 bp, Homo sapien
tgagaatagattcaccaaatgacccactttatc

SEQ ID NO: 387916 - DNA, 33 bp, Homo sapien
tgagaatagattcaccgaatgacccactttatc

SEQ ID NO: 387917 - DNA, 33 bp, Homo sapien
attgttcagctgtaaacatcgcattgacccttg

SEQ ID NO: 387918 - DNA, 33 bp, Homo sapien
attgttcagctgtaaatatcgcattgacccttg

SEQ ID NO: 387919 - DNA, 33 bp, Homo sapien
atttgggggtgatgacagaacattttaattcac

SEQ ID NO: 387920 - DNA, 33 bp, Homo sapien
atttgggggtgatgacggaacattttaattcac

SEQ ID NO: 387921 - DNA, 33 bp, Homo sapien
tcagggtctttttctacgtagtgtcttgccatg

SEQ ID NO: 387922 - DNA, 33 bp, Homo sapien
tcagggtctttttctatgtagtgtcttgccatg

SEQ ID NO: 387923 - DNA, 33 bp, Homo sapien
ctctacacacacttacacaaaaaataaaagaag

SEQ ID NO: 387924 - DNA, 33 bp, Homo sapien
ctctacacacacttacccaaaaaataaaagaag

SEQ ID NO: 387925 - DNA, 33 bp, Homo sapien
agaaaccaggctggaaaagtgtttgtctggagt

SEQ ID NO: 387926 - DNA, 33 bp, Homo sapien
agaaaccaggctggaacagtgtttgtctggagt

SEQ ID NO: 387927 - DNA, 33 bp, Homo sapien
aagcagacctcctaaactgttccatttcaggag

SEQ ID NO: 387928 - DNA, 33 bp, Homo sapien
aagcagacctcctaaattgttccatttcaggag

SEQ ID NO: 387929 - DNA, 33 bp, Homo sapien
tggtctctcatgtgtcaacatttaccaagcctt

SEQ ID NO: 387930 - DNA, 33 bp, Homo sapien
tggtctctcatgtgtcgacatttaccaagcctt

SEQ ID NO: 387931 - DNA, 33 bp, Homo sapien
tcccctctacacctgaaagtctggaaaattctg

SEQ ID NO: 387932 - DNA, 33 bp, Homo sapien
tcccctctacacctgagagtctggaaaattctg

SEQ ID NO: 387933 - DNA, 33 bp, Homo sapien
cctgctccctttcctgaaggttccagtgtaaaa

SEQ ID NO: 387934 - DNA, 33 bp, Homo sapien
cctgctccctttcctggaggttccagtgtaaaa

SEQ ID NO: 387935 - DNA, 33 bp, Homo sapien
cactgggcagctattacctcttgttggtcttca

SEQ ID NO: 387936 - DNA, 33 bp, Homo sapien
cactgggcagctattagctcttgttggtcttca

SEQ ID NO: 387937 - DNA, 33 bp, Homo sapien
ggtcttcagcgttctaacacattccttgctcta

SEQ ID NO: 387938 - DNA, 33 bp, Homo sapien
ggtcttcagcgttctagcacattccttgctcta

SEQ ID NO: 387939 - DNA, 33 bp, Homo sapien
gccagggtgtagatgacgtaaagaaatgttttg

SEQ ID NO: 387940 - DNA, 33 bp, Homo sapien
gccagggtgtagatgatgtaaagaaatgttttg

SEQ ID NO: 387941 - DNA, 33 bp, Homo sapien
ctgaacacagacctaaaaacacaaatttctcaa

SEQ ID NO: 387942 - DNA, 33 bp, Homo sapien
ctgaacacagacctaagaacacaaatttctcaa

SEQ ID NO: 387943 - DNA, 33 bp, Homo sapien
gaccttattcggctataaactgattcctcactt

SEQ ID NO: 387944 - DNA, 33 bp, Homo sapien
gaccttattcggctatgaactgattcctcactt

SEQ ID NO: 387945 - DNA, 33 bp, Homo sapien
cttcttccatcagggaagttatcaggctcaaag

SEQ ID NO: 387946 - DNA, 33 bp, Homo sapien
cttcttccatcagggaggttatcaggctcaaag

SEQ ID NO: 387947 - DNA, 33 bp, Homo sapien
catcctgtaggccaaacgtagtgggttcaaatc

SEQ ID NO: 387948 - DNA, 33 bp, Homo sapien
catcctgtaggccaaatgtagtgggttcaaatc

SEQ ID NO: 387949 - DNA, 33 bp, Homo sapien
atcctctgctctcctaagttcaggcaggataga

SEQ ID NO: 387950 - DNA, 33 bp, Homo sapien
atcctctgctctcctaggttcaggcaggataga

SEQ ID NO: 387951 - DNA, 33 bp, Homo sapien
ctgaggcttctagacaccaacttcaactcactt

SEQ ID NO: 387952 - DNA, 33 bp, Homo sapien
ctgaggcttctagacagcaacttcaactcactt

SEQ ID NO: 387953 - DNA, 33 bp, Homo sapien
agaatagcattgatgtcaatgaagaactaggaa

SEQ ID NO: 387954 - DNA, 33 bp, Homo sapien
agaatagcattgatgttaatgaagaactaggaa

SEQ ID NO: 387955 - DNA, 33 bp, Homo sapien
aatcttgctatcatccacctcagaggctttgta

SEQ ID NO: 387956 - DNA, 33 bp, Homo sapien
aatcttgctatcatccgcctcagaggctttgta

SEQ ID NO: 387957 - DNA, 33 bp, Homo sapien
gttttttaaatggtcacaaaaggacactctctt

SEQ ID NO: 387958 - DNA, 33 bp, Homo sapien
gttttttaaatggtcataaaaggacactctctt

SEQ ID NO: 387959 - DNA, 33 bp, Homo sapien
ctacatgtgctgaggtcaaaaacgggctgctta

SEQ ID NO: 387960 - DNA, 33 bp, Homo sapien
ctacatgtgctgaggtgaaaaacgggctgctta

SEQ ID NO: 387961 - DNA, 33 bp, Homo sapien
gtaaattacaaatacaatgcacatagcatatta

SEQ ID NO: 387962 - DNA, 33 bp, Homo sapien
gtaaattacaaatacagtgcacatagcatatta

SEQ ID NO: 387963 - DNA, 33 bp, Homo sapien
tcaaatcaggctgatacggttagtgttggagtg

SEQ ID NO: 387964 - DNA, 33 bp, Homo sapien
tcaaatcaggctgatagggttagtgttggagtg

SEQ ID NO: 387965 - DNA, 33 bp, Homo sapien
ttagatgatgcttgccaagggaaaacacaatcc

SEQ ID NO: 387966 - DNA, 33 bp, Homo sapien
ttagatgatgcttgccgagggaaaacacaatcc

SEQ ID NO: 387967 - DNA, 33 bp, Homo sapien
ggaaaaatttacatcaagtagccaaatcgggtg

SEQ ID NO: 387968 - DNA, 33 bp, Homo sapien
ggaaaaatttacatcaggtagccaaatcgggtg

SEQ ID NO: 387969 - DNA, 33 bp, Homo sapien
ggcccctcatggaaaaaatgctttctgaaatta

SEQ ID NO: 387970 - DNA, 33 bp, Homo sapien
ggcccctcatggaaaagatgctttctgaaatta

SEQ ID NO: 387971 - DNA, 33 bp, Homo sapien
cagtggacagaagacaaatcatggtcaccctca

SEQ ID NO: 387972 - DNA, 33 bp, Homo sapien
cagtggacagaagacagatcatggtcaccctca

SEQ ID NO: 387973 - DNA, 33 bp, Homo sapien
tctgccagagaaacaacgaagcatgaaaaagta

SEQ ID NO: 387974 - DNA, 33 bp, Homo sapien
tctgccagagaaacaatgaagcatgaaaaagta

SEQ ID NO: 387975 - DNA, 33 bp, Homo sapien
gctggcagcattcaggaacaacttctgcactgg

SEQ ID NO: 387976 - DNA, 33 bp, Homo sapien
gctggcagcattcagggacaacttctgcactgg

SEQ ID NO: 387977 - DNA, 33 bp, Homo sapien
agctttctggacaaccgcaagaactgtgggaat

SEQ ID NO: 387978 - DNA, 33 bp, Homo sapien
agctttctggacaacctcaagaactgtgggaat

SEQ ID NO: 387979 - DNA, 33 bp, Homo sapien
tcccaaagactctgcgacacagaagcacttatt

SEQ ID NO: 387980 - DNA, 33 bp, Homo sapien
tcccaaagactctgcggcacagaagcacttatt

SEQ ID NO: 387981 - DNA, 33 bp, Homo sapien
gcctagctaactcacactgatagctgagacttc

SEQ ID NO: 387982 - DNA, 33 bp, Homo sapien
gcctagctaactcacattgatagctgagacttc

SEQ ID NO: 387983 - DNA, 33 bp, Homo sapien
cttctgcttcaaaacactcgcaaaatcatgaga

SEQ ID NO: 387984 - DNA, 33 bp, Homo sapien
cttctgcttcaaaacagtcgcaaaatcatgaga

SEQ ID NO: 387985 - DNA, 33 bp, Homo sapien
gagcatgaccattatacggggtaatttgaagag

SEQ ID NO: 387986 - DNA, 33 bp, Homo sapien
gagcatgaccattatatggggtaatttgaagag

SEQ ID NO: 387987 - DNA, 33 bp, Homo sapien
aactatgctttgggacgactggaaagtacaatt

SEQ ID NO: 387988 - DNA, 33 bp, Homo sapien
aactatgctttgggactactggaaagtacaatt

SEQ ID NO: 387989 - DNA, 33 bp, Homo sapien
cacacttgtatgggtacaaaaaactaataaaag

SEQ ID NO: 387990 - DNA, 33 bp, Homo sapien
cacacttgtatgggtataaaaaactaataaaag

SEQ ID NO: 387991 - DNA, 33 bp, Homo sapien
gtgacctttaaccccaagaatgctgatggagca

SEQ ID NO: 387992 - DNA, 33 bp, Homo sapien
gtgacctttaaccccaggaatgctgatggagca

SEQ ID NO: 387993 - DNA, 33 bp, Homo sapien
aaacactttctaatcactatttcagacacacca

SEQ ID NO: 387994 - DNA, 33 bp, Homo sapien
aaacactttctaatcattatttcagacacacca

SEQ ID NO: 387995 - DNA, 33 bp, Homo sapien
aataatcgtacatttccagagcccttactccag

SEQ ID NO: 387996 - DNA, 33 bp, Homo sapien
aataatcgtacatttctagagcccttactccag

SEQ ID NO: 387997 - DNA, 33 bp, Homo sapien
gaaactgtttcctccactcagaatgccttccac

SEQ ID NO: 387998 - DNA, 33 bp, Homo sapien
gaaactgtttcctccagtcagaatgccttccac

SEQ ID NO: 387999 - DNA, 33 bp, Homo sapien
tgctaatctgggtatacatttcccctgcccaaa

SEQ ID NO: 388000 - DNA, 33 bp, Homo sapien
tgctaatctgggtatatatttcccctgcccaaa

SEQ ID NO: 388001 - DNA, 33 bp, Homo sapien
gtgctcttccactgccaagaaatccttctgaaa

SEQ ID NO: 388002 - DNA, 33 bp, Homo sapien
gtgctcttccactgccgagaaatccttctgaaa

SEQ ID NO: 388003 - DNA, 33 bp, Homo sapien
gattttagattcagcaaattctcagtttgagcc

SEQ ID NO: 388004 - DNA, 33 bp, Homo sapien
gattttagattcagcagattctcagtttgagcc

SEQ ID NO: 388005 - DNA, 33 bp, Homo sapien
tgcaggcattccgtgacgccaataatttatcaa

SEQ ID NO: 388006 - DNA, 33 bp, Homo sapien
tgcaggcattccgtgaggccaataatttatcaa

SEQ ID NO: 388007 - DNA, 33 bp, Homo sapien
ggggaagagtcaacaaagtttgaaggctccaga

SEQ ID NO: 388008 - DNA, 33 bp, Homo sapien
ggggaagagtcaacaaggtttgaaggctccaga

SEQ ID NO: 388009 - DNA, 33 bp, Homo sapien
ctcacctcacagcggcaacattagacaggtgac

SEQ ID NO: 388010 - DNA, 33 bp, Homo sapien
ctcacctcacagcggccacattagacaggtgac

SEQ ID NO: 388011 - DNA, 33 bp, Homo sapien
tgaaatgtattcttccaattgattgattgataa

SEQ ID NO: 388012 - DNA, 33 bp, Homo sapien
tgaaatgtattcttccgattgattgattgataa

SEQ ID NO: 388013 - DNA, 33 bp, Homo sapien
atttcaccaagatatacggagttatttaaagga

SEQ ID NO: 388014 - DNA, 33 bp, Homo sapien
atttcaccaagatatatggagttatttaaagga

SEQ ID NO: 388015 - DNA, 33 bp, Homo sapien
caccactactgaaagacgtgtctcacaatatga

SEQ ID NO: 388016 - DNA, 33 bp, Homo sapien
caccactactgaaagatgtgtctcacaatatga

SEQ ID NO: 388017 - DNA, 33 bp, Homo sapien
caggccctgtcctgaaagaaggtcagtctgatt

SEQ ID NO: 388018 - DNA, 33 bp, Homo sapien
caggccctgtcctgaatgaaggtcagtctgatt

SEQ ID NO: 388019 - DNA, 33 bp, Homo sapien
aaaacaggagaaatacaagaataggttgctaaa

SEQ ID NO: 388020 - DNA, 33 bp, Homo sapien
aaaacaggagaaatacgagaataggttgctaaa

SEQ ID NO: 388021 - DNA, 33 bp, Homo sapien
acaggaaggcatttcaataatcattcagcgagg

SEQ ID NO: 388022 - DNA, 33 bp, Homo sapien
acaggaaggcatttcagtaatcattcagcgagg

SEQ ID NO: 388023 - DNA, 33 bp, Homo sapien
taggataaatatagatgaaaagccgacttcctc

SEQ ID NO: 388024 - DNA, 33 bp, Homo sapien
taggataaatatagattaaaagccgacttcctc

SEQ ID NO: 388025 - DNA, 33 bp, Homo sapien
accgggctccaaagcacaattgctttctttccc

SEQ ID NO: 388026 - DNA, 33 bp, Homo sapien
accgggctccaaagcagaattgctttctttccc

SEQ ID NO: 388027 - DNA, 33 bp, Homo sapien
ggaatctgtggcattgcatctgagtgtattctg

SEQ ID NO: 388028 - DNA, 33 bp, Homo sapien
ggaatctgtggcattgtatctgagtgtattctg

SEQ ID NO: 388029 - DNA, 33 bp, Homo sapien
catcacccatgcaaaccaggctgggttacttgc

SEQ ID NO: 388030 - DNA, 33 bp, Homo sapien
catcacccatgcaaacgaggctgggttacttgc

SEQ ID NO: 388031 - DNA, 33 bp, Homo sapien
gttgactcaaatttcgacaaacacatatacttg

SEQ ID NO: 388032 - DNA, 33 bp, Homo sapien
gttgactcaaatttcgtcaaacacatatacttg

SEQ ID NO: 388033 - DNA, 33 bp, Homo sapien
gtttagaggcgccagaaaaagggtgaacaggga

SEQ ID NO: 388034 - DNA, 33 bp, Homo sapien
gtttagaggcgccagagaaagggtgaacaggga

SEQ ID NO: 388035 - DNA, 33 bp, Homo sapien
gaagatggtaatgaaaaaataggaggttgcctc

SEQ ID NO: 388036 - DNA, 33 bp, Homo sapien
gaagatggtaatgaaagaataggaggttgcctc

SEQ ID NO: 388037 - DNA, 33 bp, Homo sapien
attccctgatacctacaagttagattaggtgtc

SEQ ID NO: 388038 - DNA, 33 bp, Homo sapien
attccctgatacctaccagttagattaggtgtc

SEQ ID NO: 388039 - DNA, 33 bp, Homo sapien
cataaaacaaatgagcaaaacaaggcatatctg

SEQ ID NO: 388040 - DNA, 33 bp, Homo sapien
cataaaacaaatgagcgaaacaaggcatatctg

SEQ ID NO: 388041 - DNA, 33 bp, Homo sapien
ataaacttgctgagtgcacaactctggcccaga

SEQ ID NO: 388042 - DNA, 33 bp, Homo sapien
ataaacttgctgagtggacaactctggcccaga

SEQ ID NO: 388043 - DNA, 33 bp, Homo sapien
ggttttaaactgagacacataggctaagccatt

SEQ ID NO: 388044 - DNA, 33 bp, Homo sapien
ggttttaaactgagacccataggctaagccatt

SEQ ID NO: 388045 - DNA, 33 bp, Homo sapien
cccagatagatccgaacgaagacgcaactttca

SEQ ID NO: 388046 - DNA, 33 bp, Homo sapien
cccagatagatccgaatgaagacgcaactttca

SEQ ID NO: 388047 - DNA, 33 bp, Homo sapien
cgcccccactacaaagaattatctggttcccaa

SEQ ID NO: 388048 - DNA, 33 bp, Homo sapien
cgcccccactacaaagcattatctggttcccaa

SEQ ID NO: 388049 - DNA, 33 bp, Homo sapien
aacatttcaaaccataaaattatatgtaaccat

SEQ ID NO: 388050 - DNA, 33 bp, Homo sapien
aacatttcaaaccatagaattatatgtaaccat

SEQ ID NO: 388051 - DNA, 33 bp, Homo sapien
gggaaagttgttgagaaaaaaatgaataacctt

SEQ ID NO: 388052 - DNA, 33 bp, Homo sapien
gggaaagttgttgagagaaaaatgaataacctt

SEQ ID NO: 388053 - DNA, 33 bp, Homo sapien
gagtaccaggaagtgacgatgtgactcggcatc

SEQ ID NO: 388054 - DNA, 33 bp, Homo sapien
gagtaccaggaagtgatgatgtgactcggcatc

SEQ ID NO: 388055 - DNA, 33 bp, Homo sapien
tagggattttgatgtaaataactcaagaccact

SEQ ID NO: 388056 - DNA, 33 bp, Homo sapien
tagggattttgatgtagataactcaagaccact

SEQ ID NO: 388057 - DNA, 33 bp, Homo sapien
tgaattcaggcttcaaactattttggttgactg

SEQ ID NO: 388058 - DNA, 33 bp, Homo sapien
tgaattcaggcttcaagctattttggttgactg

SEQ ID NO: 388059 - DNA, 33 bp, Homo sapien
ttgtgtgagggcaaccaaagcatcacggagtag

SEQ ID NO: 388060 - DNA, 33 bp, Homo sapien
ttgtgtgagggcaaccgaagcatcacggagtag

SEQ ID NO: 388061 - DNA, 33 bp, Homo sapien
aaatcaaagcaaaggaagactcaagataacaaa

SEQ ID NO: 388062 - DNA, 33 bp, Homo sapien
aaatcaaagcaaaggaggactcaagataacaaa

SEQ ID NO: 388063 - DNA, 33 bp, Homo sapien
tggtgtgtttactgcccaactaactagactgtg

SEQ ID NO: 388064 - DNA, 33 bp, Homo sapien
tggtgtgtttactgcctaactaactagactgtg

SEQ ID NO: 388065 - DNA, 33 bp, Homo sapien
tgtcctggattttacaatctttctgaaccttgt

SEQ ID NO: 388066 - DNA, 33 bp, Homo sapien
tgtcctggattttacagtctttctgaaccttgt

SEQ ID NO: 388067 - DNA, 33 bp, Homo sapien
agatcttccaagcacaatcaaatagctgttggc

SEQ ID NO: 388068 - DNA, 33 bp, Homo sapien
agatcttccaagcacagtcaaatagctgttggc

SEQ ID NO: 388069 - DNA, 33 bp, Homo sapien
tgtatgcagtttagcccaagcagaattgtgtag

SEQ ID NO: 388070 - DNA, 33 bp, Homo sapien
tgtatgcagtttagccgaagcagaattgtgtag

SEQ ID NO: 388071 - DNA, 33 bp, Homo sapien
gactcaccagggctacccagatacaaagaaaat

SEQ ID NO: 388072 - DNA, 33 bp, Homo sapien
gactcaccagggctactcagatacaaagaaaat

SEQ ID NO: 388073 - DNA, 33 bp, Homo sapien
ttatttaaactcaaacaactagtacttcttgga

SEQ ID NO: 388074 - DNA, 33 bp, Homo sapien
ttatttaaactcaaactactagtacttcttgga

SEQ ID NO: 388075 - DNA, 33 bp, Homo sapien
ggtgatgttgaagagacagaaaccaaatagaga

SEQ ID NO: 388076 - DNA, 33 bp, Homo sapien
ggtgatgttgaagagatagaaaccaaatagaga

SEQ ID NO: 388077 - DNA, 33 bp, Homo sapien
tttttttcagggattacagaactaaagctggct

SEQ ID NO: 388078 - DNA, 33 bp, Homo sapien
tttttttcagggattatagaactaaagctggct

SEQ ID NO: 388079 - DNA, 33 bp, Homo sapien
attctggtgcctcttacagcacacaaaggcaca

SEQ ID NO: 388080 - DNA, 33 bp, Homo sapien
attctggtgcctcttatagcacacaaaggcaca

SEQ ID NO: 388081 - DNA, 33 bp, Homo sapien
tagacatcttgtgctcaagcttacagattgatc

SEQ ID NO: 388082 - DNA, 33 bp, Homo sapien
tagacatcttgtgctctagcttacagattgatc

SEQ ID NO: 388083 - DNA, 33 bp, Homo sapien
cttcttccattgatcccaagtgaatagcagtgc

SEQ ID NO: 388084 - DNA, 33 bp, Homo sapien
cttcttccattgatcctaagtgaatagcagtgc

SEQ ID NO: 388085 - DNA, 33 bp, Homo sapien
cccttgtgttacccaactgacattagactgaaa

SEQ ID NO: 388086 - DNA, 33 bp, Homo sapien
cccttgtgttacccaagtgacattagactgaaa

SEQ ID NO: 388087 - DNA, 33 bp, Homo sapien
ttccagcagagccacaaaatcaatccatgtctc

SEQ ID NO: 388088 - DNA, 33 bp, Homo sapien
ttccagcagagccacagaatcaatccatgtctc

SEQ ID NO: 388089 - DNA, 33 bp, Homo sapien
ttaaaataccatcgaaaagaataaaacgcttgg

SEQ ID NO: 388090 - DNA, 33 bp, Homo sapien
ttaaaataccatcgaagagaataaaacgcttgg

SEQ ID NO: 388091 - DNA, 33 bp, Homo sapien
acaagacttatgcaccaaaaactacaacacact

SEQ ID NO: 388092 - DNA, 33 bp, Homo sapien
acaagacttatgcaccgaaaactacaacacact

SEQ ID NO: 388093 - DNA, 33 bp, Homo sapien
tcagataggaaagacaatcccacgagagtgtaa

SEQ ID NO: 388094 - DNA, 33 bp, Homo sapien
tcagataggaaagacagtcccacgagagtgtaa

SEQ ID NO: 388095 - DNA, 33 bp, Homo sapien
gtagctgaaaccatgcgaggcataaattagtca

SEQ ID NO: 388096 - DNA, 33 bp, Homo sapien
gtagctgaaaccatgctaggcataaattagtca

SEQ ID NO: 388097 - DNA, 33 bp, Homo sapien
aaaaaaaaaagcatgaactcagaaaacctagtt

SEQ ID NO: 388098 - DNA, 33 bp, Homo sapien
aaaaaaaaaagcatgagctcagaaaacctagtt

SEQ ID NO: 388099 - DNA, 33 bp, Homo sapien
taacctgtaacagaagcagtttacagctgaatc

SEQ ID NO: 388100 - DNA, 33 bp, Homo sapien
taacctgtaacagaaggagtttacagctgaatc

SEQ ID NO: 388101 - DNA, 33 bp, Homo sapien
atagtcattgtttataacagtattttcagcaaa

SEQ ID NO: 388102 - DNA, 33 bp, Homo sapien
atagtcattgtttatagcagtattttcagcaaa

SEQ ID NO: 388103 - DNA, 33 bp, Homo sapien
tcctgacacttatacaccactgttgctcaagtc

SEQ ID NO: 388104 - DNA, 33 bp, Homo sapien
tcctgacacttatacatcactgttgctcaagtc

SEQ ID NO: 388105 - DNA, 33 bp, Homo sapien
tttgaccaggatggtcgactttctgtttttcac

SEQ ID NO: 388106 - DNA, 33 bp, Homo sapien
tttgaccaggatggtctactttctgtttttcac

SEQ ID NO: 388107 - DNA, 33 bp, Homo sapien
atccatttttgcaactaacggtgagcctgttta

SEQ ID NO: 388108 - DNA, 33 bp, Homo sapien
atccatttttgcaactcacggtgagcctgttta

SEQ ID NO: 388109 - DNA, 33 bp, Homo sapien
tgcagttaatgcaacacacaaattacagcaaca

SEQ ID NO: 388110 - DNA, 33 bp, Homo sapien
tgcagttaatgcaacatacaaattacagcaaca

SEQ ID NO: 388111 - DNA, 33 bp, Homo sapien
ttggtgttccttcttaaatcagaaacattgatg

SEQ ID NO: 388112 - DNA, 33 bp, Homo sapien
ttggtgttccttcttacatcagaaacattgatg

SEQ ID NO: 388113 - DNA, 33 bp, Homo sapien
catcttaccaagcttccatgtgacttgggagca

SEQ ID NO: 388114 - DNA, 33 bp, Homo sapien
catcttaccaagcttctatgtgacttgggagca

SEQ ID NO: 388115 - DNA, 33 bp, Homo sapien
atgtcttctatagcaaagtcctcaaggacaaga

SEQ ID NO: 388116 - DNA, 33 bp, Homo sapien
atgtcttctatagcaaggtcctcaaggacaaga

SEQ ID NO: 388117 - DNA, 33 bp, Homo sapien
tctccatggcctaacaatggaaatccttctata

SEQ ID NO: 388118 - DNA, 33 bp, Homo sapien
tctccatggcctaacagtggaaatccttctata

SEQ ID NO: 388119 - DNA, 33 bp, Homo sapien
tttagaatcccaagaacgcaggagaggttgtag

SEQ ID NO: 388120 - DNA, 33 bp, Homo sapien
tttagaatcccaagaatgcaggagaggttgtag

SEQ ID NO: 388121 - DNA, 33 bp, Homo sapien
aaacattatatccacaacattcctaaaatggtt

SEQ ID NO: 388122 - DNA, 33 bp, Homo sapien
aaacattatatccacatcattcctaaaatggtt

SEQ ID NO: 388123 - DNA, 33 bp, Homo sapien
attcctaaaatggttacgtttcctgtttgagcc

SEQ ID NO: 388124 - DNA, 33 bp, Homo sapien
attcctaaaatggttatgtttcctgtttgagcc

SEQ ID NO: 388125 - DNA, 33 bp, Homo sapien
actttatcctcttatgcatccatgacaaatact

SEQ ID NO: 388126 - DNA, 33 bp, Homo sapien
actttatcctcttatgtatccatgacaaatact

SEQ ID NO: 388127 - DNA, 33 bp, Homo sapien
tgggatcgcactgtaaatctttaggcagccctg

SEQ ID NO: 388128 - DNA, 33 bp, Homo sapien
tgggatcgcactgtaactctttaggcagccctg

SEQ ID NO: 388129 - DNA, 33 bp, Homo sapien
aagaatctgtgctccaagactgggcctgcctac

SEQ ID NO: 388130 - DNA, 33 bp, Homo sapien
aagaatctgtgctccaggactgggcctgcctac

SEQ ID NO: 388131 - DNA, 33 bp, Homo sapien
gttttctgtttcttccgatcaccacataatttt

SEQ ID NO: 388132 - DNA, 33 bp, Homo sapien
gttttctgtttcttcctatcaccacataatttt

SEQ ID NO: 388133 - DNA, 33 bp, Homo sapien
tggttgcaattctccaaatcaaactagtgacag

SEQ ID NO: 388134 - DNA, 33 bp, Homo sapien
tggttgcaattctccagatcaaactagtgacag

SEQ ID NO: 388135 - DNA, 33 bp, Homo sapien
tctttggcaagaatcaccatttttttcctgcag

SEQ ID NO: 388136 - DNA, 33 bp, Homo sapien
tctttggcaagaatcatcatttttttcctgcag

SEQ ID NO: 388137 - DNA, 33 bp, Homo sapien
gatacttagcagtacaagaccagttattgctaa

SEQ ID NO: 388138 - DNA, 33 bp, Homo sapien
gatacttagcagtacaggaccagttattgctaa

SEQ ID NO: 388139 - DNA, 33 bp, Homo sapien
agagattcatcctgaaatattcctattgccaaa

SEQ ID NO: 388140 - DNA, 33 bp, Homo sapien
agagattcatcctgaagtattcctattgccaaa

SEQ ID NO: 388141 - DNA, 33 bp, Homo sapien
caaaagtgggcaaaagcctggcaggaaaagaat

SEQ ID NO: 388142 - DNA, 33 bp, Homo sapien
caaaagtgggcaaaagtctggcaggaaaagaat

SEQ ID NO: 388143 - DNA, 33 bp, Homo sapien
aatcttccataagccacaagactgggtcaggtc

SEQ ID NO: 388144 - DNA, 33 bp, Homo sapien
aatcttccataagccagaagactgggtcaggtc

SEQ ID NO: 388145 - DNA, 33 bp, Homo sapien
aataaggaaattagagcccatattgattaagca

SEQ ID NO: 388146 - DNA, 33 bp, Homo sapien
aataaggaaattagagtccatattgattaagca

SEQ ID NO: 388147 - DNA, 33 bp, Homo sapien
atatcattagaactaccagcactcatattcccc

SEQ ID NO: 388148 - DNA, 33 bp, Homo sapien
atatcattagaactactagcactcatattcccc

SEQ ID NO: 388149 - DNA, 33 bp, Homo sapien
ctcactgtgatccttgcagctcaaaacacagct

SEQ ID NO: 388150 - DNA, 33 bp, Homo sapien
ctcactgtgatccttgtagctcaaaacacagct

SEQ ID NO: 388151 - DNA, 33 bp, Homo sapien
gcatcagcttattaagcatatggcaaagaatca

SEQ ID NO: 388152 - DNA, 33 bp, Homo sapien
gcatcagcttattaagtatatggcaaagaatca

SEQ ID NO: 388153 - DNA, 33 bp, Homo sapien
tctcatccccagtgtacagaacaccagcaatgt

SEQ ID NO: 388154 - DNA, 33 bp, Homo sapien
tctcatccccagtgtagagaacaccagcaatgt

SEQ ID NO: 388155 - DNA, 33 bp, Homo sapien
cacttcctggactacaagttttaggagcagctg

SEQ ID NO: 388156 - DNA, 33 bp, Homo sapien
cacttcctggactacacgttttaggagcagctg

SEQ ID NO: 388157 - DNA, 33 bp, Homo sapien
gtgtttttgctgaaagacttgttagtttccttc

SEQ ID NO: 388158 - DNA, 33 bp, Homo sapien
gtgtttttgctgaaagtcttgttagtttccttc

SEQ ID NO: 388159 - DNA, 33 bp, Homo sapien
gaatagttcccaaagcagcacctcccccagcaa

SEQ ID NO: 388160 - DNA, 33 bp, Homo sapien
gaatagttcccaaagcggcacctcccccagcaa

SEQ ID NO: 388161 - DNA, 33 bp, Homo sapien
agatgcctttttgatgaacgaagcaaccaaagc

SEQ ID NO: 388162 - DNA, 33 bp, Homo sapien
agatgcctttttgatggacgaagcaaccaaagc

SEQ ID NO: 388163 - DNA, 33 bp, Homo sapien
acctatgttatggaaagagagagctcaaaagag

SEQ ID NO: 388164 - DNA, 33 bp, Homo sapien
acctatgttatggaaatagagagctcaaaagag

SEQ ID NO: 388165 - DNA, 33 bp, Homo sapien
gaacttaccagaaagagaaagtcgttaccacaa

SEQ ID NO: 388166 - DNA, 33 bp, Homo sapien
gaacttaccagaaagataaagtcgttaccacaa

SEQ ID NO: 388167 - DNA, 33 bp, Homo sapien
tgacttgaggacacccaaaattatacaattatt

SEQ ID NO: 388168 - DNA, 33 bp, Homo sapien
tgacttgaggacacccgaaattatacaattatt

SEQ ID NO: 388169 - DNA, 33 bp, Homo sapien
atcaggactgattaatcatggagataaaagtat

SEQ ID NO: 388170 - DNA, 33 bp, Homo sapien
atcaggactgattaattatggagataaaagtat

SEQ ID NO: 388171 - DNA, 33 bp, Homo sapien
gcaaattcaagagaaacgtaatgatgggctaca

SEQ ID NO: 388172 - DNA, 33 bp, Homo sapien
gcaaattcaagagaaatgtaatgatgggctaca

SEQ ID NO: 388173 - DNA, 33 bp, Homo sapien
cagttttatggctttggacatatcattgattta

SEQ ID NO: 388174 - DNA, 33 bp, Homo sapien
cagttttatggctttgtacatatcattgattta

SEQ ID NO: 388175 - DNA, 33 bp, Homo sapien
gtacatgatttattgacgatgtgcgttcagtag

SEQ ID NO: 388176 - DNA, 33 bp, Homo sapien
gtacatgatttattgaggatgtgcgttcagtag

SEQ ID NO: 388177 - DNA, 33 bp, Homo sapien
caagacagaagctagccaagttcctcccaccct

SEQ ID NO: 388178 - DNA, 33 bp, Homo sapien
caagacagaagctagcgaagttcctcccaccct

SEQ ID NO: 388179 - DNA, 33 bp, Homo sapien
tctttgggttctaacacctttggtacatgtgaa

SEQ ID NO: 388180 - DNA, 33 bp, Homo sapien
tctttgggttctaacatctttggtacatgtgaa

SEQ ID NO: 388181 - DNA, 33 bp, Homo sapien
aaatcaaggccttcaacccactttccaggaggc

SEQ ID NO: 388182 - DNA, 33 bp, Homo sapien
aaatcaaggccttcaatccactttccaggaggc

SEQ ID NO: 388183 - DNA, 33 bp, Homo sapien
caggtttctcagaaccacaagctcataagtaag

SEQ ID NO: 388184 - DNA, 33 bp, Homo sapien
caggtttctcagaaccgcaagctcataagtaag

SEQ ID NO: 388185 - DNA, 33 bp, Homo sapien
caattcttctgcgatacgaacggaatctttgag

SEQ ID NO: 388186 - DNA, 33 bp, Homo sapien
caattcttctgcgataggaacggaatctttgag

SEQ ID NO: 388187 - DNA, 33 bp, Homo sapien
agatagtaatgatccacccgagggcaccaggct

SEQ ID NO: 388188 - DNA, 33 bp, Homo sapien
agatagtaatgatccagccgagggcaccaggct

SEQ ID NO: 388189 - DNA, 33 bp, Homo sapien
taagatactccactagaaaatccaccccaagac

SEQ ID NO: 388190 - DNA, 33 bp, Homo sapien
taagatactccactaggaaatccaccccaagac

SEQ ID NO: 388191 - DNA, 33 bp, Homo sapien
aagtgttctgaagggcaactcattaatatttta

SEQ ID NO: 388192 - DNA, 33 bp, Homo sapien
aagtgttctgaagggccactcattaatatttta

SEQ ID NO: 388193 - DNA, 33 bp, Homo sapien
tgtgactataaattaaagaggctgactttatgt

SEQ ID NO: 388194 - DNA, 33 bp, Homo sapien
tgtgactataaattaatgaggctgactttatgt

SEQ ID NO: 388195 - DNA, 33 bp, Homo sapien
ccaaaccaccagattgaatctccacaggagtcc

SEQ ID NO: 388196 - DNA, 33 bp, Homo sapien
ccaaaccaccagattggatctccacaggagtcc

SEQ ID NO: 388197 - DNA, 33 bp, Homo sapien
gcatgctgtgttcatcaacttgaagccataaga

SEQ ID NO: 388198 - DNA, 33 bp, Homo sapien
gcatgctgtgttcatcgacttgaagccataaga

SEQ ID NO: 388199 - DNA, 33 bp, Homo sapien
gtcaacatatgtttcccagacgtcgtttgaaat

SEQ ID NO: 388200 - DNA, 33 bp, Homo sapien
gtcaacatatgtttcctagacgtcgtttgaaat

SEQ ID NO: 388201 - DNA, 33 bp, Homo sapien
actccttttgtgggaaaagtcttaacagtctgc

SEQ ID NO: 388202 - DNA, 33 bp, Homo sapien
actccttttgtgggaacagtcttaacagtctgc

SEQ ID NO: 388203 - DNA, 33 bp, Homo sapien
acatgcacccataacaactggtttctttgcttc

SEQ ID NO: 388204 - DNA, 33 bp, Homo sapien
acatgcacccataacacctggtttctttgcttc

SEQ ID NO: 388205 - DNA, 33 bp, Homo sapien
aacacagaaacttgaaacattaaccagaacaaa

SEQ ID NO: 388206 - DNA, 33 bp, Homo sapien
aacacagaaacttgaaccattaaccagaacaaa

SEQ ID NO: 388207 - DNA, 33 bp, Homo sapien
tataattaaaccccacaatacgtaagagataaa

SEQ ID NO: 388208 - DNA, 33 bp, Homo sapien
tataattaaaccccacgatacgtaagagataaa

SEQ ID NO: 388209 - DNA, 33 bp, Homo sapien
ctacacagacatgcatcacacaaattcacagac

SEQ ID NO: 388210 - DNA, 33 bp, Homo sapien
ctacacagacatgcattacacaaattcacagac

SEQ ID NO: 388211 - DNA, 33 bp, Homo sapien
atggaaatgcaaatacagactctgaagggattt

SEQ ID NO: 388212 - DNA, 33 bp, Homo sapien
atggaaatgcaaatacggactctgaagggattt

SEQ ID NO: 388213 - DNA, 33 bp, Homo sapien
gttaatgaaaaggagacaaaaaccaagacacgg

SEQ ID NO: 388214 - DNA, 33 bp, Homo sapien
gttaatgaaaaggagagaaaaaccaagacacgg

SEQ ID NO: 388215 - DNA, 33 bp, Homo sapien
gatttatcaagtcccagtaagaactatgcatat

SEQ ID NO: 388216 - DNA, 33 bp, Homo sapien
gatttatcaagtcccattaagaactatgcatat

SEQ ID NO: 388217 - DNA, 33 bp, Homo sapien
aaataaatggaatagacgctggccagagataaa

SEQ ID NO: 388218 - DNA, 33 bp, Homo sapien
aaataaatggaatagatgctggccagagataaa

SEQ ID NO: 388219 - DNA, 33 bp, Homo sapien
ccgcagaagccttctcacgcctgttacggaaag

SEQ ID NO: 388220 - DNA, 33 bp, Homo sapien
ccgcagaagccttctcgcgcctgttacggaaag

SEQ ID NO: 388221 - DNA, 33 bp, Homo sapien
ataaagttcgagtaccagcattcttaatttaat

SEQ ID NO: 388222 - DNA, 33 bp, Homo sapien
ataaagttcgagtaccggcattcttaatttaat

SEQ ID NO: 388223 - DNA, 33 bp, Homo sapien
atcttaacgaatcttgaaacagctctagataag

SEQ ID NO: 388224 - DNA, 33 bp, Homo sapien
atcttaacgaatcttgcaacagctctagataag

SEQ ID NO: 388225 - DNA, 33 bp, Homo sapien
cttagaacatttgtaacctgtctttcaaatggt

SEQ ID NO: 388226 - DNA, 33 bp, Homo sapien
cttagaacatttgtaatctgtctttcaaatggt

SEQ ID NO: 388227 - DNA, 33 bp, Homo sapien
ctatgaacaaattgaactatttctttccaggaa

SEQ ID NO: 388228 - DNA, 33 bp, Homo sapien
ctatgaacaaattgaagtatttctttccaggaa

SEQ ID NO: 388229 - DNA, 33 bp, Homo sapien
atttatatcttgaagacgtcatagaaacttact

SEQ ID NO: 388230 - DNA, 33 bp, Homo sapien
atttatatcttgaagaggtcatagaaacttact

SEQ ID NO: 388231 - DNA, 33 bp, Homo sapien
gtgaaatggactagggcattcagagagcgttct

SEQ ID NO: 388232 - DNA, 33 bp, Homo sapien
gtgaaatggactagggtattcagagagcgttct

SEQ ID NO: 388233 - DNA, 33 bp, Homo sapien
aggagaaggatgtcaccggttaacttcatattt

SEQ ID NO: 388234 - DNA, 33 bp, Homo sapien
aggagaaggatgtcactggttaacttcatattt

SEQ ID NO: 388235 - DNA, 33 bp, Homo sapien
ttaaatcttccagtaaatgtacaaacaagttct

SEQ ID NO: 388236 - DNA, 33 bp, Homo sapien
ttaaatcttccagtaactgtacaaacaagttct

SEQ ID NO: 388237 - DNA, 33 bp, Homo sapien
aaagtgtatagcacaacgattggttcttagtaa

SEQ ID NO: 388238 - DNA, 33 bp, Homo sapien
aaagtgtatagcacaatgattggttcttagtaa

SEQ ID NO: 388239 - DNA, 33 bp, Homo sapien
aacattggattcctcacgaatgcgggacttaat

SEQ ID NO: 388240 - DNA, 33 bp, Homo sapien
aacattggattcctcatgaatgcgggacttaat

SEQ ID NO: 388241 - DNA, 33 bp, Homo sapien
ggacttaattatcaaaagaagcgaggtgagcat

SEQ ID NO: 388242 - DNA, 33 bp, Homo sapien
ggacttaattatcaaaggaagcgaggtgagcat

SEQ ID NO: 388243 - DNA, 33 bp, Homo sapien
tttgatttcgagcctaacatcagttaatttctc

SEQ ID NO: 388244 - DNA, 33 bp, Homo sapien
tttgatttcgagcctatcatcagttaatttctc

SEQ ID NO: 388245 - DNA, 33 bp, Homo sapien
cttagattgcattggacaaatgtacacacacaa

SEQ ID NO: 388246 - DNA, 33 bp, Homo sapien
cttagattgcattggataaatgtacacacacaa

SEQ ID NO: 388247 - DNA, 33 bp, Homo sapien
gtgactcagtaacgaccctatttgcggtgcgtt

SEQ ID NO: 388248 - DNA, 33 bp, Homo sapien
gtgactcagtaacgacgctatttgcggtgcgtt

SEQ ID NO: 388249 - DNA, 33 bp, Homo sapien
ttagttaaacgttatcgcaaattgctctctcca

SEQ ID NO: 388250 - DNA, 33 bp, Homo sapien
ttagttaaacgttatctcaaattgctctctcca

SEQ ID NO: 388251 - DNA, 33 bp, Homo sapien
gtatgtcagacaagaaaaccacatttatagaat

SEQ ID NO: 388252 - DNA, 33 bp, Homo sapien
gtatgtcagacaagaacaccacatttatagaat

SEQ ID NO: 388253 - DNA, 33 bp, Homo sapien
gtcattcgcattttggaattatgacaaatagtg

SEQ ID NO: 388254 - DNA, 33 bp, Homo sapien
gtcattcgcattttgggattatgacaaatagtg

SEQ ID NO: 388255 - DNA, 33 bp, Homo sapien
agaacaaccatacttacaacaacacatattaca

SEQ ID NO: 388256 - DNA, 33 bp, Homo sapien
agaacaaccatacttagaacaacacatattaca

SEQ ID NO: 388257 - DNA, 33 bp, Homo sapien
tgtcatctggcaaacacggtactagccactaaa

SEQ ID NO: 388258 - DNA, 33 bp, Homo sapien
tgtcatctggcaaacatggtactagccactaaa

SEQ ID NO: 388259 - DNA, 33 bp, Homo sapien
tgttgtgccaaaatacccagcaagtgttggaat

SEQ ID NO: 388260 - DNA, 33 bp, Homo sapien
tgttgtgccaaaatactcagcaagtgttggaat

SEQ ID NO: 388261 - DNA, 33 bp, Homo sapien
ttaatagcaggaaaaaatgtcgaaggaaaaatg

SEQ ID NO: 388262 - DNA, 33 bp, Homo sapien
ttaatagcaggaaaaattgtcgaaggaaaaatg

SEQ ID NO: 388263 - DNA, 33 bp, Homo sapien
acagaggatgaccatacgaagaggcagcaaggg

SEQ ID NO: 388264 - DNA, 33 bp, Homo sapien
acagaggatgaccatatgaagaggcagcaaggg

SEQ ID NO: 388265 - DNA, 33 bp, Homo sapien
aggcaggggaatgaccgccttgctacattctac

SEQ ID NO: 388266 - DNA, 33 bp, Homo sapien
aggcaggggaatgacctccttgctacattctac

SEQ ID NO: 388267 - DNA, 33 bp, Homo sapien
atcttacgttcttttcaaaaggaaggctaatta

SEQ ID NO: 388268 - DNA, 33 bp, Homo sapien
atcttacgttcttttctaaaggaaggctaatta

SEQ ID NO: 388269 - DNA, 33 bp, Homo sapien
acaatgcattgggggaaaaaacacttagccttt

SEQ ID NO: 388270 - DNA, 33 bp, Homo sapien
acaatgcattgggggagaaaacacttagccttt

SEQ ID NO: 388271 - DNA, 33 bp, Homo sapien
cctaaggaatcttatacactggaatgagatggt

SEQ ID NO: 388272 - DNA, 33 bp, Homo sapien
cctaaggaatcttatatactggaatgagatggt

SEQ ID NO: 388273 - DNA, 33 bp, Homo sapien
tgtaacctcttgacgaacttcaatcttaatcat

SEQ ID NO: 388274 - DNA, 33 bp, Homo sapien
tgtaacctcttgacgaccttcaatcttaatcat

SEQ ID NO: 388275 - DNA, 33 bp, Homo sapien
ttgtatccatgtaagacaattctctcccctgac

SEQ ID NO: 388276 - DNA, 33 bp, Homo sapien
ttgtatccatgtaagataattctctcccctgac

SEQ ID NO: 388277 - DNA, 33 bp, Homo sapien
aagagccattattaaaataggaattgcaagaag

SEQ ID NO: 388278 - DNA, 33 bp, Homo sapien
aagagccattattaaactaggaattgcaagaag

SEQ ID NO: 388279 - DNA, 33 bp, Homo sapien
tagaaacgtgttccacaactggcccctcaaaat

SEQ ID NO: 388280 - DNA, 33 bp, Homo sapien
tagaaacgtgttccacgactggcccctcaaaat

SEQ ID NO: 388281 - DNA, 33 bp, Homo sapien
aattgtgggtctccctaagaacaatggcagcca

SEQ ID NO: 388282 - DNA, 33 bp, Homo sapien
aattgtgggtctccctcagaacaatggcagcca

SEQ ID NO: 388283 - DNA, 33 bp, Homo sapien
gtttagaaaaagctaactattcaaggcacagaa

SEQ ID NO: 388284 - DNA, 33 bp, Homo sapien
gtttagaaaaagctaagtattcaaggcacagaa

SEQ ID NO: 388285 - DNA, 33 bp, Homo sapien
cacccaaacctactgacaataaattgggggaga

SEQ ID NO: 388286 - DNA, 33 bp, Homo sapien
cacccaaacctactgagaataaattgggggaga

SEQ ID NO: 388287 - DNA, 33 bp, Homo sapien
ctgagaaagcttcttaacctctccaagacttga

SEQ ID NO: 388288 - DNA, 33 bp, Homo sapien
ctgagaaagcttcttagcctctccaagacttga

SEQ ID NO: 388289 - DNA, 33 bp, Homo sapien
tttattcatttgtccactcattcatttgttcag

SEQ ID NO: 388290 - DNA, 33 bp, Homo sapien
tttattcatttgtccattcattcatttgttcag

SEQ ID NO: 388291 - DNA, 33 bp, Homo sapien
gttaatatcaggtgaaaatttttaggacgtgca

SEQ ID NO: 388292 - DNA, 33 bp, Homo sapien
gttaatatcaggtgaagatttttaggacgtgca

SEQ ID NO: 388293 - DNA, 33 bp, Homo sapien
agtgaatgtctccaaacaactgggaaattgcac

SEQ ID NO: 388294 - DNA, 33 bp, Homo sapien
agtgaatgtctccaaataactgggaaattgcac

SEQ ID NO: 388295 - DNA, 33 bp, Homo sapien
tttaacaagtcctcagcagattctgactcatgc

SEQ ID NO: 388296 - DNA, 33 bp, Homo sapien
tttaacaagtcctcaggagattctgactcatgc

SEQ ID NO: 388297 - DNA, 33 bp, Homo sapien
accctgctacttaatagatgtgtaatctgggtg

SEQ ID NO: 388298 - DNA, 33 bp, Homo sapien
accctgctacttaatatatgtgtaatctgggtg

SEQ ID NO: 388299 - DNA, 33 bp, Homo sapien
tattcagaaatccatacattgtgtttgcctttt

SEQ ID NO: 388300 - DNA, 33 bp, Homo sapien
tattcagaaatccatagattgtgtttgcctttt

SEQ ID NO: 388301 - DNA, 33 bp, Homo sapien
aatgtgggtggaaagaagagataggtctcagag

SEQ ID NO: 388302 - DNA, 33 bp, Homo sapien
aatgtgggtggaaagaggagataggtctcagag

SEQ ID NO: 388303 - DNA, 33 bp, Homo sapien
gtgcagctgcctgtgacggagactaactgattt

SEQ ID NO: 388304 - DNA, 33 bp, Homo sapien
gtgcagctgcctgtgatggagactaactgattt

SEQ ID NO: 388305 - DNA, 33 bp, Homo sapien
agagaaagagccacaaaggttttgagagaactt

SEQ ID NO: 388306 - DNA, 33 bp, Homo sapien
agagaaagagccacaagggttttgagagaactt

SEQ ID NO: 388307 - DNA, 33 bp, Homo sapien
atggcctgacttaaagaaagtttttctagttat

SEQ ID NO: 388308 - DNA, 33 bp, Homo sapien
atggcctgacttaaaggaagtttttctagttat

SEQ ID NO: 388309 - DNA, 33 bp, Homo sapien
ttgtgtctcagtttcaaggtagttactggaatt

SEQ ID NO: 388310 - DNA, 33 bp, Homo sapien
ttgtgtctcagtttcagggtagttactggaatt

SEQ ID NO: 388311 - DNA, 33 bp, Homo sapien
tttgcttccatgacaaactcctctcagattcca

SEQ ID NO: 388312 - DNA, 33 bp, Homo sapien
tttgcttccatgacaatctcctctcagattcca

SEQ ID NO: 388313 - DNA, 33 bp, Homo sapien
tctcttgggttgcaaacgagaagactgctgtac

SEQ ID NO: 388314 - DNA, 33 bp, Homo sapien
tctcttgggttgcaaaggagaagactgctgtac

SEQ ID NO: 388315 - DNA, 33 bp, Homo sapien
attgactggcacatatgaggtgtcttatttaag

SEQ ID NO: 388316 - DNA, 33 bp, Homo sapien
attgactggcacatattaggtgtcttatttaag

SEQ ID NO: 388317 - DNA, 33 bp, Homo sapien
ctcaaatatgccctcaagatttttttggacatt

SEQ ID NO: 388318 - DNA, 33 bp, Homo sapien
ctcaaatatgccctcatgatttttttggacatt

SEQ ID NO: 388319 - DNA, 33 bp, Homo sapien
gaatcctcagccttaaaaggaggtttatagcag

SEQ ID NO: 388320 - DNA, 33 bp, Homo sapien
gaatcctcagccttaataggaggtttatagcag

SEQ ID NO: 388321 - DNA, 33 bp, Homo sapien
atagctgaagaaatcaaatctcaacaaggtgac

SEQ ID NO: 388322 - DNA, 33 bp, Homo sapien
atagctgaagaaatcatatctcaacaaggtgac

SEQ ID NO: 388323 - DNA, 33 bp, Homo sapien
atcagcagcttctttcactcctggataaattct

SEQ ID NO: 388324 - DNA, 33 bp, Homo sapien
atcagcagcttctttcgctcctggataaattct

SEQ ID NO: 388325 - DNA, 33 bp, Homo sapien
ggtagcctggtacatagagtgcatttagggcat

SEQ ID NO: 388326 - DNA, 33 bp, Homo sapien
ggtagcctggtacatatagtgcatttagggcat

SEQ ID NO: 388327 - DNA, 33 bp, Homo sapien
ttcaggctggaagttgcaagaaatgataatagg

SEQ ID NO: 388328 - DNA, 33 bp, Homo sapien
ttcaggctggaagttggaagaaatgataatagg

SEQ ID NO: 388329 - DNA, 33 bp, Homo sapien
cagggatgtgtttatacagcaatttacaagcta

SEQ ID NO: 388330 - DNA, 33 bp, Homo sapien
cagggatgtgtttatagagcaatttacaagcta

SEQ ID NO: 388331 - DNA, 33 bp, Homo sapien
ccaaccaataaccaaaaaacctagtgcagccaa

SEQ ID NO: 388332 - DNA, 33 bp, Homo sapien
ccaaccaataaccaaagaacctagtgcagccaa

SEQ ID NO: 388333 - DNA, 33 bp, Homo sapien
tgccctcatccaggcgcccttgtggtactaaat

SEQ ID NO: 388334 - DNA, 33 bp, Homo sapien
tgccctcatccaggcggccttgtggtactaaat

SEQ ID NO: 388335 - DNA, 33 bp, Homo sapien
atggttacaacaaaaaatttcaggacaggcttc

SEQ ID NO: 388336 - DNA, 33 bp, Homo sapien
atggttacaacaaaaactttcaggacaggcttc

SEQ ID NO: 388337 - DNA, 33 bp, Homo sapien
ttgcaagagtcttgacaacaatgccctgggaag

SEQ ID NO: 388338 - DNA, 33 bp, Homo sapien
ttgcaagagtcttgacgacaatgccctgggaag

SEQ ID NO: 388339 - DNA, 33 bp, Homo sapien
gcaatggcaagtcctaaaaaaattatcatcaaa

SEQ ID NO: 388340 - DNA, 33 bp, Homo sapien
gcaatggcaagtcctacaaaaattatcatcaaa

SEQ ID NO: 388341 - DNA, 33 bp, Homo sapien
tgctggagccagagaactgaaaagaaatagtcc

SEQ ID NO: 388342 - DNA, 33 bp, Homo sapien
tgctggagccagagaagtgaaaagaaatagtcc

SEQ ID NO: 388343 - DNA, 33 bp, Homo sapien
atgtgcaaactggagactaggtctttgctagga

SEQ ID NO: 388344 - DNA, 33 bp, Homo sapien
atgtgcaaactggagagtaggtctttgctagga

SEQ ID NO: 388345 - DNA, 33 bp, Homo sapien
gagtagaactggttggccaggacataaaactga

SEQ ID NO: 388346 - DNA, 33 bp, Homo sapien
gagtagaactggttggtcaggacataaaactga

SEQ ID NO: 388347 - DNA, 33 bp, Homo sapien
cttccttctttatcgccacactgggaggcccac

SEQ ID NO: 388348 - DNA, 33 bp, Homo sapien
cttccttctttatcgctacactgggaggcccac

SEQ ID NO: 388349 - DNA, 33 bp, Homo sapien
cacactttgaatagcacctttctatttgcacct

SEQ ID NO: 388350 - DNA, 33 bp, Homo sapien
cacactttgaatagcagctttctatttgcacct

SEQ ID NO: 388351 - DNA, 33 bp, Homo sapien
gatgagtattgaaggacgtaacatccgggtaca

SEQ ID NO: 388352 - DNA, 33 bp, Homo sapien
gatgagtattgaaggaggtaacatccgggtaca

SEQ ID NO: 388353 - DNA, 33 bp, Homo sapien
gatgttaagtatacggaagtcttttccaggata

SEQ ID NO: 388354 - DNA, 33 bp, Homo sapien
gatgttaagtatacgggagtcttttccaggata

SEQ ID NO: 388355 - DNA, 33 bp, Homo sapien
atgaaaataactttaaatggaaacgttgatatt

SEQ ID NO: 388356 - DNA, 33 bp, Homo sapien
atgaaaataactttaattggaaacgttgatatt

SEQ ID NO: 388357 - DNA, 33 bp, Homo sapien
ctgctattcttgggataaaccctaaagtcttga

SEQ ID NO: 388358 - DNA, 33 bp, Homo sapien
ctgctattcttgggatgaaccctaaagtcttga

SEQ ID NO: 388359 - DNA, 33 bp, Homo sapien
tactttgcagcttttcgccaggagcggagcttg

SEQ ID NO: 388360 - DNA, 33 bp, Homo sapien
tactttgcagcttttctccaggagcggagcttg

SEQ ID NO: 388361 - DNA, 33 bp, Homo sapien
aatttgtcctgagactaaaacatatgggtaatt

SEQ ID NO: 388362 - DNA, 33 bp, Homo sapien
aatttgtcctgagacttaaacatatgggtaatt

SEQ ID NO: 388363 - DNA, 33 bp, Homo sapien
catacaaatcaaagaccaggtgcatgggatctt

SEQ ID NO: 388364 - DNA, 33 bp, Homo sapien
catacaaatcaaagacgaggtgcatgggatctt

SEQ ID NO: 388365 - DNA, 33 bp, Homo sapien
atgtgatctaggaaaaataacttcttctggcta

SEQ ID NO: 388366 - DNA, 33 bp, Homo sapien
atgtgatctaggaaaagtaacttcttctggcta

SEQ ID NO: 388367 - DNA, 33 bp, Homo sapien
aactacagatcgtctccataccttgcactcatt

SEQ ID NO: 388368 - DNA, 33 bp, Homo sapien
aactacagatcgtctctataccttgcactcatt

SEQ ID NO: 388369 - DNA, 33 bp, Homo sapien
gaaagcatcaagcaacaatggccataatagaaa

SEQ ID NO: 388370 - DNA, 33 bp, Homo sapien
gaaagcatcaagcaacgatggccataatagaaa

SEQ ID NO: 388371 - DNA, 33 bp, Homo sapien
ttaaggtattcagtagcaaagatcacattaaac

SEQ ID NO: 388372 - DNA, 33 bp, Homo sapien
ttaaggtattcagtaggaaagatcacattaaac

SEQ ID NO: 388373 - DNA, 33 bp, Homo sapien
gcctctagcggaatcaaaatgaattatttcatc

SEQ ID NO: 388374 - DNA, 33 bp, Homo sapien
gcctctagcggaatcagaatgaattatttcatc

SEQ ID NO: 388375 - DNA, 33 bp, Homo sapien
aagtacaaaaatgaacactgccagaagtcattt

SEQ ID NO: 388376 - DNA, 33 bp, Homo sapien
aagtacaaaaatgaacgctgccagaagtcattt

SEQ ID NO: 388377 - DNA, 33 bp, Homo sapien
tgggaccaggcagccacggaagttttctgagcc

SEQ ID NO: 388378 - DNA, 33 bp, Homo sapien
tgggaccaggcagccatggaagttttctgagcc

SEQ ID NO: 388379 - DNA, 33 bp, Homo sapien
aatgatgagtaggacaagttttagaaggcatag

SEQ ID NO: 388380 - DNA, 33 bp, Homo sapien
aatgatgagtaggacacgttttagaaggcatag

SEQ ID NO: 388381 - DNA, 33 bp, Homo sapien
agagctagaagacaacaacataaatgatgagta

SEQ ID NO: 388382 - DNA, 33 bp, Homo sapien
agagctagaagacaactacataaatgatgagta

SEQ ID NO: 388383 - DNA, 33 bp, Homo sapien
gttagttttctaagaacacagaggctttagatt

SEQ ID NO: 388384 - DNA, 33 bp, Homo sapien
gttagttttctaagaagacagaggctttagatt

SEQ ID NO: 388385 - DNA, 33 bp, Homo sapien
atcaacttttagtagaaatagcagattccttcc

SEQ ID NO: 388386 - DNA, 33 bp, Homo sapien
atcaacttttagtagacatagcagattccttcc

SEQ ID NO: 388387 - DNA, 33 bp, Homo sapien
ttcctctctctggttacgaccccacaaatatct

SEQ ID NO: 388388 - DNA, 33 bp, Homo sapien
ttcctctctctggttatgaccccacaaatatct

SEQ ID NO: 388389 - DNA, 33 bp, Homo sapien
agaggaagtacgtacactatgattatgatagta

SEQ ID NO: 388390 - DNA, 33 bp, Homo sapien
agaggaagtacgtacattatgattatgatagta

SEQ ID NO: 388391 - DNA, 33 bp, Homo sapien
ataaggaaatattgaacgatccgctgggatatt

SEQ ID NO: 388392 - DNA, 33 bp, Homo sapien
ataaggaaatattgaatgatccgctgggatatt

SEQ ID NO: 388393 - DNA, 33 bp, Homo sapien
aaacatacatggtcctaaccttgcagagaagtc

SEQ ID NO: 388394 - DNA, 33 bp, Homo sapien
aaacatacatggtcctgaccttgcagagaagtc

SEQ ID NO: 388395 - DNA, 33 bp, Homo sapien
gtccaagtgagttttggataaagtctgagtccc

SEQ ID NO: 388396 - DNA, 33 bp, Homo sapien
gtccaagtgagttttgtataaagtctgagtccc

SEQ ID NO: 388397 - DNA, 33 bp, Homo sapien
agaatactaaaacataagctgtagcgtcaccct

SEQ ID NO: 388398 - DNA, 33 bp, Homo sapien
agaatactaaaacatatgctgtagcgtcaccct

SEQ ID NO: 388399 - DNA, 33 bp, Homo sapien
tgacccagacacattcaatgatactgatggttc

SEQ ID NO: 388400 - DNA, 33 bp, Homo sapien
tgacccagacacattccatgatactgatggttc

SEQ ID NO: 388401 - DNA, 33 bp, Homo sapien
ttgcacttagccagggaaaatttgagattagaa

SEQ ID NO: 388402 - DNA, 33 bp, Homo sapien
ttgcacttagccaggggaaatttgagattagaa

SEQ ID NO: 388403 - DNA, 33 bp, Homo sapien
ttttttcctagatgataaattggcagactatgg

SEQ ID NO: 388404 - DNA, 33 bp, Homo sapien
ttttttcctagatgatgaattggcagactatgg

SEQ ID NO: 388405 - DNA, 33 bp, Homo sapien
tctctgaatatataccactttagccagaaatcc

SEQ ID NO: 388406 - DNA, 33 bp, Homo sapien
tctctgaatatataccgctttagccagaaatcc

SEQ ID NO: 388407 - DNA, 33 bp, Homo sapien
agtacttaatcatgcacccaaatatcaatgagg

SEQ ID NO: 388408 - DNA, 33 bp, Homo sapien
agtacttaatcatgcatccaaatatcaatgagg

SEQ ID NO: 388409 - DNA, 33 bp, Homo sapien
attgtgttctcagatcacattcggaaaggcaaa

SEQ ID NO: 388410 - DNA, 33 bp, Homo sapien
attgtgttctcagatcgcattcggaaaggcaaa

SEQ ID NO: 388411 - DNA, 33 bp, Homo sapien
tagttagtccaattgtcaagtggcaaaaattag

SEQ ID NO: 388412 - DNA, 33 bp, Homo sapien
tagttagtccaattgttaagtggcaaaaattag

SEQ ID NO: 388413 - DNA, 33 bp, Homo sapien
aattttgcatctgttgaatgtctgttcttaaca

SEQ ID NO: 388414 - DNA, 33 bp, Homo sapien
aattttgcatctgttgcatgtctgttcttaaca

SEQ ID NO: 388415 - DNA, 33 bp, Homo sapien
tatctcaaatgctcaagtctttaattataaaat

SEQ ID NO: 388416 - DNA, 33 bp, Homo sapien
tatctcaaatgctcaattctttaattataaaat

SEQ ID NO: 388417 - DNA, 33 bp, Homo sapien
caaaaaaacgagcctcagaatggcaggaagtac

SEQ ID NO: 388418 - DNA, 33 bp, Homo sapien
caaaaaaacgagcctcggaatggcaggaagtac

SEQ ID NO: 388419 - DNA, 33 bp, Homo sapien
gaagctgcattcttaacaagggacctgggtgat

SEQ ID NO: 388420 - DNA, 33 bp, Homo sapien
gaagctgcattcttaataagggacctgggtgat

SEQ ID NO: 388421 - DNA, 33 bp, Homo sapien
aactatttccttcataacacatattttaccatc

SEQ ID NO: 388422 - DNA, 33 bp, Homo sapien
aactatttccttcatatcacatattttaccatc

SEQ ID NO: 388423 - DNA, 33 bp, Homo sapien
gcacaatgaatgaaacacaacgcctataataaa

SEQ ID NO: 388424 - DNA, 33 bp, Homo sapien
gcacaatgaatgaaacgcaacgcctataataaa

SEQ ID NO: 388425 - DNA, 33 bp, Homo sapien
tgtggaaacctattaacctctgctgttccaccc

SEQ ID NO: 388426 - DNA, 33 bp, Homo sapien
tgtggaaacctattaatctctgctgttccaccc

SEQ ID NO: 388427 - DNA, 33 bp, Homo sapien
ggcatagatatttccacagaacaatgattcaac

SEQ ID NO: 388428 - DNA, 33 bp, Homo sapien
ggcatagatatttccagagaacaatgattcaac

SEQ ID NO: 388429 - DNA, 33 bp, Homo sapien
atagtcagtacctcaacgtcacagagccagccg

SEQ ID NO: 388430 - DNA, 33 bp, Homo sapien
atagtcagtacctcaaggtcacagagccagccg

SEQ ID NO: 388431 - DNA, 33 bp, Homo sapien
gacggacacagattataaattttttagacagac

SEQ ID NO: 388432 - DNA, 33 bp, Homo sapien
gacggacacagattatcaattttttagacagac

SEQ ID NO: 388433 - DNA, 33 bp, Homo sapien
ttgcaatcagagaggacagggccagactcaagt

SEQ ID NO: 388434 - DNA, 33 bp, Homo sapien
ttgcaatcagagaggagagggccagactcaagt

SEQ ID NO: 388435 - DNA, 33 bp, Homo sapien
cccagctgcatcataaacagatgaaatgaaaaa

SEQ ID NO: 388436 - DNA, 33 bp, Homo sapien
cccagctgcatcataaccagatgaaatgaaaaa

SEQ ID NO: 388437 - DNA, 33 bp, Homo sapien
tacagatgacaagactaaggaacagagtttaag

SEQ ID NO: 388438 - DNA, 33 bp, Homo sapien
tacagatgacaagactgaggaacagagtttaag

SEQ ID NO: 388439 - DNA, 33 bp, Homo sapien
atgcaaaaaggttacactgagacatacactatt

SEQ ID NO: 388440 - DNA, 33 bp, Homo sapien
atgcaaaaaggttacattgagacatacactatt

SEQ ID NO: 388441 - DNA, 33 bp, Homo sapien
atagtctagtggtagaaatgcaaaaatagcccc

SEQ ID NO: 388442 - DNA, 33 bp, Homo sapien
atagtctagtggtagagatgcaaaaatagcccc

SEQ ID NO: 388443 - DNA, 33 bp, Homo sapien
aaacattgctgcacaaattaaagacctaaatga

SEQ ID NO: 388444 - DNA, 33 bp, Homo sapien
aaacattgctgcacaacttaaagacctaaatga

SEQ ID NO: 388445 - DNA, 33 bp, Homo sapien
agacagatgattaaaacgcaaaatgaatcgata

SEQ ID NO: 388446 - DNA, 33 bp, Homo sapien
agacagatgattaaaatgcaaaatgaatcgata

SEQ ID NO: 388447 - DNA, 33 bp, Homo sapien
accaatgaccactataacaatagtacccacaag

SEQ ID NO: 388448 - DNA, 33 bp, Homo sapien
accaatgaccactataccaatagtacccacaag

SEQ ID NO: 388449 - DNA, 33 bp, Homo sapien
aaatatgcatcaggaaatctagcgtctcagtaa

SEQ ID NO: 388450 - DNA, 33 bp, Homo sapien
aaatatgcatcaggaactctagcgtctcagtaa

SEQ ID NO: 388451 - DNA, 33 bp, Homo sapien
atttctgaatgacaacaaaatcttttcttacac

SEQ ID NO: 388452 - DNA, 33 bp, Homo sapien
atttctgaatgacaacgaaatcttttcttacac

SEQ ID NO: 388453 - DNA, 33 bp, Homo sapien
agtgatcttttgctggaacgtgttaattgaaga

SEQ ID NO: 388454 - DNA, 33 bp, Homo sapien
agtgatcttttgctgggacgtgttaattgaaga

SEQ ID NO: 388455 - DNA, 33 bp, Homo sapien
attaagtgttgctccacatcactgatgttccat

SEQ ID NO: 388456 - DNA, 33 bp, Homo sapien
attaagtgttgctccatatcactgatgttccat

SEQ ID NO: 388457 - DNA, 33 bp, Homo sapien
tccagttgtttcagaaaggcatataaaaggtac

SEQ ID NO: 388458 - DNA, 33 bp, Homo sapien
tccagttgtttcagaagggcatataaaaggtac

SEQ ID NO: 388459 - DNA, 33 bp, Homo sapien
ggctgaaagaacattacgattaggaaaatctct

SEQ ID NO: 388460 - DNA, 33 bp, Homo sapien
ggctgaaagaacattaggattaggaaaatctct

SEQ ID NO: 388461 - DNA, 33 bp, Homo sapien
aaggacacatgggccaatggcaaagatggaaac

SEQ ID NO: 388462 - DNA, 33 bp, Homo sapien
aaggacacatgggccagtggcaaagatggaaac

SEQ ID NO: 388463 - DNA, 33 bp, Homo sapien
ttgtgttctttggtcactccagctaattccact

SEQ ID NO: 388464 - DNA, 33 bp, Homo sapien
ttgtgttctttggtcattccagctaattccact

SEQ ID NO: 388465 - DNA, 33 bp, Homo sapien
cctccatccctggacaaaattgggcatactctt

SEQ ID NO: 388466 - DNA, 33 bp, Homo sapien
cctccatccctggacacaattgggcatactctt

SEQ ID NO: 388467 - DNA, 33 bp, Homo sapien
cgagcattcatttctccgactattaaaaatgga

SEQ ID NO: 388468 - DNA, 33 bp, Homo sapien
cgagcattcatttctctgactattaaaaatgga

SEQ ID NO: 388469 - DNA, 33 bp, Homo sapien
acaagttggagaagacacacctttgcctatggg

SEQ ID NO: 388470 - DNA, 33 bp, Homo sapien
acaagttggagaagacgcacctttgcctatggg

SEQ ID NO: 388471 - DNA, 33 bp, Homo sapien
gatcagcattaataaccaagactaccgctctga

SEQ ID NO: 388472 - DNA, 33 bp, Homo sapien
gatcagcattaataacgaagactaccgctctga

SEQ ID NO: 388473 - DNA, 33 bp, Homo sapien
aatatgtacataacaccggttaccactgactat

SEQ ID NO: 388474 - DNA, 33 bp, Homo sapien
aatatgtacataacactggttaccactgactat

SEQ ID NO: 388475 - DNA, 33 bp, Homo sapien
acacagcttggaaatacaatggcaaagcaaatt

SEQ ID NO: 388476 - DNA, 33 bp, Homo sapien
acacagcttggaaatagaatggcaaagcaaatt

SEQ ID NO: 388477 - DNA, 33 bp, Homo sapien
aagaaactgtcctcaacaaactcattctctagt

SEQ ID NO: 388478 - DNA, 33 bp, Homo sapien
aagaaactgtcctcaagaaactcattctctagt

SEQ ID NO: 388479 - DNA, 33 bp, Homo sapien
catgttaaagcctataacaccaaagtgaaggag

SEQ ID NO: 388480 - DNA, 33 bp, Homo sapien
catgttaaagcctataccaccaaagtgaaggag

SEQ ID NO: 388481 - DNA, 33 bp, Homo sapien
agatgtggaaactactcaggctataagaaacta

SEQ ID NO: 388482 - DNA, 33 bp, Homo sapien
agatgtggaaactacttaggctataagaaacta

SEQ ID NO: 388483 - DNA, 33 bp, Homo sapien
attttcccagagcaccacagttaaatcacccct

SEQ ID NO: 388484 - DNA, 33 bp, Homo sapien
attttcccagagcaccgcagttaaatcacccct

SEQ ID NO: 388485 - DNA, 33 bp, Homo sapien
gccttaaaaacacaaccgcttctttccagccaa

SEQ ID NO: 388486 - DNA, 33 bp, Homo sapien
gccttaaaaacacaactgcttctttccagccaa

SEQ ID NO: 388487 - DNA, 33 bp, Homo sapien
ccagtagccctaagaaatccataggctccattc

SEQ ID NO: 388488 - DNA, 33 bp, Homo sapien
ccagtagccctaagaagtccataggctccattc

SEQ ID NO: 388489 - DNA, 33 bp, Homo sapien
atccaaacattaggtcggaatcgcatatattat

SEQ ID NO: 388490 - DNA, 33 bp, Homo sapien
atccaaacattaggtctgaatcgcatatattat

SEQ ID NO: 388491 - DNA, 33 bp, Homo sapien
attggcattgggaacacagaaagtgtggttttg

SEQ ID NO: 388492 - DNA, 33 bp, Homo sapien
attggcattgggaacatagaaagtgtggttttg

SEQ ID NO: 388493 - DNA, 33 bp, Homo sapien
catttgaatggttgcagggaaagccaaattgcc

SEQ ID NO: 388494 - DNA, 33 bp, Homo sapien
catttgaatggttgcatggaaagccaaattgcc

SEQ ID NO: 388495 - DNA, 33 bp, Homo sapien
aaattcctttttctccactgaggaacagatctt

SEQ ID NO: 388496 - DNA, 33 bp, Homo sapien
aaattcctttttctccgctgaggaacagatctt

SEQ ID NO: 388497 - DNA, 33 bp, Homo sapien
tattaaaggggcttgaaataattccttgcacgc

SEQ ID NO: 388498 - DNA, 33 bp, Homo sapien
tattaaaggggcttgagataattccttgcacgc

SEQ ID NO: 388499 - DNA, 33 bp, Homo sapien
aacactgggtaaatgcagcatcagtgactaaga

SEQ ID NO: 388500 - DNA, 33 bp, Homo sapien
aacactgggtaaatgcggcatcagtgactaaga

SEQ ID NO: 388501 - DNA, 33 bp, Homo sapien
gatggaaactcccatgcattagccaagtacatt

SEQ ID NO: 388502 - DNA, 33 bp, Homo sapien
gatggaaactcccatgtattagccaagtacatt

SEQ ID NO: 388503 - DNA, 33 bp, Homo sapien
tagaaatctatgacaacggcttcttggtgattg

SEQ ID NO: 388504 - DNA, 33 bp, Homo sapien
tagaaatctatgacaatggcttcttggtgattg

SEQ ID NO: 388505 - DNA, 33 bp, Homo sapien
acaccatcttaaatcaagagccaacatcgcact

SEQ ID NO: 388506 - DNA, 33 bp, Homo sapien
acaccatcttaaatcacgagccaacatcgcact

SEQ ID NO: 388507 - DNA, 33 bp, Homo sapien
gggccaccaggactcaactgccaggtatgaata

SEQ ID NO: 388508 - DNA, 33 bp, Homo sapien
gggccaccaggactcacctgccaggtatgaata

SEQ ID NO: 388509 - DNA, 33 bp, Homo sapien
ctgccattgatgctaaagaagtctgggctggag

SEQ ID NO: 388510 - DNA, 33 bp, Homo sapien
ctgccattgatgctaaggaagtctgggctggag

SEQ ID NO: 388511 - DNA, 33 bp, Homo sapien
cgagcgaagggaagcacggttatgaggaactgc

SEQ ID NO: 388512 - DNA, 33 bp, Homo sapien
cgagcgaagggaagcatggttatgaggaactgc

SEQ ID NO: 388513 - DNA, 33 bp, Homo sapien
ctctctcaggactgcacaatcagatgggaaatc

SEQ ID NO: 388514 - DNA, 33 bp, Homo sapien
ctctctcaggactgcagaatcagatgggaaatc

SEQ ID NO: 388515 - DNA, 33 bp, Homo sapien
tttgtaccattgagataacattgactttgggta

SEQ ID NO: 388516 - DNA, 33 bp, Homo sapien
tttgtaccattgagatcacattgactttgggta

SEQ ID NO: 388517 - DNA, 33 bp, Homo sapien
cagttgataagtggagccaaagggtctgtgatt

SEQ ID NO: 388518 - DNA, 33 bp, Homo sapien
cagttgataagtggaggcaaagggtctgtgatt

SEQ ID NO: 388519 - DNA, 33 bp, Homo sapien
gcaataggcacagaaacaagatccattgatttg

SEQ ID NO: 388520 - DNA, 33 bp, Homo sapien
gcaataggcacagaaagaagatccattgatttg

SEQ ID NO: 388521 - DNA, 33 bp, Homo sapien
gacttctctctatgcccgattattggtagggct

SEQ ID NO: 388522 - DNA, 33 bp, Homo sapien
gacttctctctatgcctgattattggtagggct

SEQ ID NO: 388523 - DNA, 33 bp, Homo sapien
gtgccctgggctcaagaaaacactttggatctc

SEQ ID NO: 388524 - DNA, 33 bp, Homo sapien
gtgccctgggctcaaggaaacactttggatctc

SEQ ID NO: 388525 - DNA, 33 bp, Homo sapien
actgtagcaatgacaaataagaagttatcatca

SEQ ID NO: 388526 - DNA, 33 bp, Homo sapien
actgtagcaatgacaagtaagaagttatcatca

SEQ ID NO: 388527 - DNA, 33 bp, Homo sapien
actttgattttgcttgcatattcagaaagttgc

SEQ ID NO: 388528 - DNA, 33 bp, Homo sapien
actttgattttgcttggatattcagaaagttgc

SEQ ID NO: 388529 - DNA, 33 bp, Homo sapien
agttgcattatttgtcaagtaatcacaaaagaa

SEQ ID NO: 388530 - DNA, 33 bp, Homo sapien
agttgcattatttgtccagtaatcacaaaagaa

SEQ ID NO: 388531 - DNA, 33 bp, Homo sapien
cctggaggtctgatgaaggataaggtctctacg

SEQ ID NO: 388532 - DNA, 33 bp, Homo sapien
cctggaggtctgatgagggataaggtctctacg

SEQ ID NO: 388533 - DNA, 33 bp, Homo sapien
aaaaagggaagaattaaaataatcacctatgta

SEQ ID NO: 388534 - DNA, 33 bp, Homo sapien
aaaaagggaagaattagaataatcacctatgta

SEQ ID NO: 388535 - DNA, 33 bp, Homo sapien
tgctctggaatgataaaaatgttttggaactag

SEQ ID NO: 388536 - DNA, 33 bp, Homo sapien
tgctctggaatgataacaatgttttggaactag

SEQ ID NO: 388537 - DNA, 33 bp, Homo sapien
gagagcctgttgtacactacagttgagagccat

SEQ ID NO: 388538 - DNA, 33 bp, Homo sapien
gagagcctgttgtacagtacagttgagagccat

SEQ ID NO: 388539 - DNA, 33 bp, Homo sapien
tgaacagactaaggcaccacttcaagtctcagg

SEQ ID NO: 388540 - DNA, 33 bp, Homo sapien
tgaacagactaaggcatcacttcaagtctcagg

SEQ ID NO: 388541 - DNA, 33 bp, Homo sapien
accataaggaaacggaatacaaagaggcaaatt

SEQ ID NO: 388542 - DNA, 33 bp, Homo sapien
accataaggaaacggagtacaaagaggcaaatt

SEQ ID NO: 388543 - DNA, 33 bp, Homo sapien
catccagctccagaaactggaatggctctgcag

SEQ ID NO: 388544 - DNA, 33 bp, Homo sapien
catccagctccagaaattggaatggctctgcag

SEQ ID NO: 388545 - DNA, 33 bp, Homo sapien
accaggagtcaacaaaggtttcctctgaaggac

SEQ ID NO: 388546 - DNA, 33 bp, Homo sapien
accaggagtcaacaaatgtttcctctgaaggac

SEQ ID NO: 388547 - DNA, 33 bp, Homo sapien
atttggctaatgagaaaacagatacttaaagag

SEQ ID NO: 388548 - DNA, 33 bp, Homo sapien
atttggctaatgagaagacagatacttaaagag

SEQ ID NO: 388549 - DNA, 33 bp, Homo sapien
agcaaactagggctagcaggaaaaatccagctc

SEQ ID NO: 388550 - DNA, 33 bp, Homo sapien
agcaaactagggctagtaggaaaaatccagctc

SEQ ID NO: 388551 - DNA, 33 bp, Homo sapien
cagggagctctagaacaatgcctatggggtcat

SEQ ID NO: 388552 - DNA, 33 bp, Homo sapien
cagggagctctagaacgatgcctatggggtcat

SEQ ID NO: 388553 - DNA, 33 bp, Homo sapien
gtcaagaagatcttgaaattctgcagcaggttt

SEQ ID NO: 388554 - DNA, 33 bp, Homo sapien
gtcaagaagatcttgagattctgcagcaggttt

SEQ ID NO: 388555 - DNA, 33 bp, Homo sapien
atggaatgaatatggggaaaaatttgtgtcact

SEQ ID NO: 388556 - DNA, 33 bp, Homo sapien
atggaatgaatatgggtaaaaatttgtgtcact

SEQ ID NO: 388557 - DNA, 33 bp, Homo sapien
aagaaaagtggcacaaactgggtggcctaaaac

SEQ ID NO: 388558 - DNA, 33 bp, Homo sapien
aagaaaagtggcacaagctgggtggcctaaaac

SEQ ID NO: 388559 - DNA, 33 bp, Homo sapien
gtttccagacccttcaactaccttgccgaatac

SEQ ID NO: 388560 - DNA, 33 bp, Homo sapien
gtttccagacccttcagctaccttgccgaatac

SEQ ID NO: 388561 - DNA, 33 bp, Homo sapien
ggtgctacaatttcccagagtcctggagaagac

SEQ ID NO: 388562 - DNA, 33 bp, Homo sapien
ggtgctacaatttcccggagtcctggagaagac

SEQ ID NO: 388563 - DNA, 33 bp, Homo sapien
agttgctcagcacctaagaagagtttctaaact

SEQ ID NO: 388564 - DNA, 33 bp, Homo sapien
agttgctcagcacctacgaagagtttctaaact

SEQ ID NO: 388565 - DNA, 33 bp, Homo sapien
cttgtatgtaaagttgcagctgcttcttatagg

SEQ ID NO: 388566 - DNA, 33 bp, Homo sapien
cttgtatgtaaagttgtagctgcttcttatagg

SEQ ID NO: 388567 - DNA, 33 bp, Homo sapien
tggtttactgaatgaccagttcttggttttttg

SEQ ID NO: 388568 - DNA, 33 bp, Homo sapien
tggtttactgaatgactagttcttggttttttg

SEQ ID NO: 388569 - DNA, 33 bp, Homo sapien
attgaattgggaacagaatgtacgacaaacttt

SEQ ID NO: 388570 - DNA, 33 bp, Homo sapien
attgaattgggaacaggatgtacgacaaacttt

SEQ ID NO: 388571 - DNA, 33 bp, Homo sapien
aagcacagaggtctataagggtaaaagcaaatt

SEQ ID NO: 388572 - DNA, 33 bp, Homo sapien
aagcacagaggtctatgagggtaaaagcaaatt

SEQ ID NO: 388573 - DNA, 33 bp, Homo sapien
tagaggagcttgttccacatactttatttctct

SEQ ID NO: 388574 - DNA, 33 bp, Homo sapien
tagaggagcttgttccgcatactttatttctct

SEQ ID NO: 388575 - DNA, 33 bp, Homo sapien
tgctggccctgaccacaagaaggctgagctgtg

SEQ ID NO: 388576 - DNA, 33 bp, Homo sapien
tgctggccctgaccactagaaggctgagctgtg

SEQ ID NO: 388577 - DNA, 33 bp, Homo sapien
tgaactcatagccgacactgctgtaactcatgt

SEQ ID NO: 388578 - DNA, 33 bp, Homo sapien
tgaactcatagccgacgctgctgtaactcatgt

SEQ ID NO: 388579 - DNA, 33 bp, Homo sapien
taattaatgacactaacgaatgtgcagtttcag

SEQ ID NO: 388580 - DNA, 33 bp, Homo sapien
taattaatgacactaatgaatgtgcagtttcag

SEQ ID NO: 388581 - DNA, 33 bp, Homo sapien
cttcacattactgttacgatgaggataaaagct

SEQ ID NO: 388582 - DNA, 33 bp, Homo sapien
cttcacattactgttaggatgaggataaaagct

SEQ ID NO: 388583 - DNA, 33 bp, Homo sapien
tttaagcaaaggaagccacctgcttcaatgaag

SEQ ID NO: 388584 - DNA, 33 bp, Homo sapien
tttaagcaaaggaagcgacctgcttcaatgaag

SEQ ID NO: 388585 - DNA, 33 bp, Homo sapien
agccaaattatactcaaaacagtcaaatggata

SEQ ID NO: 388586 - DNA, 33 bp, Homo sapien
agccaaattatactcataacagtcaaatggata

SEQ ID NO: 388587 - DNA, 33 bp, Homo sapien
tctctctcaacgtggaagcagtgttgcaaagtg

SEQ ID NO: 388588 - DNA, 33 bp, Homo sapien
tctctctcaacgtggaggcagtgttgcaaagtg

SEQ ID NO: 388589 - DNA, 33 bp, Homo sapien
accacaaatgatagaacggatccaaaaaatcag

SEQ ID NO: 388590 - DNA, 33 bp, Homo sapien
accacaaatgatagaatggatccaaaaaatcag

SEQ ID NO: 388591 - DNA, 33 bp, Homo sapien
acactctgaagaagaaaaatggtgccattgcaa

SEQ ID NO: 388592 - DNA, 33 bp, Homo sapien
acactctgaagaagaagaatggtgccattgcaa

SEQ ID NO: 388593 - DNA, 33 bp, Homo sapien
agaccgtaatcatgcaaagaggatagggaaata

SEQ ID NO: 388594 - DNA, 33 bp, Homo sapien
agaccgtaatcatgcacagaggatagggaaata

SEQ ID NO: 388595 - DNA, 33 bp, Homo sapien
atgacacattcaacaacctctcttccgaacctg

SEQ ID NO: 388596 - DNA, 33 bp, Homo sapien
atgacacattcaacaatctctcttccgaacctg

SEQ ID NO: 388597 - DNA, 33 bp, Homo sapien
tggataaagggaaaaagtgaccaatgcagaaaa

SEQ ID NO: 388598 - DNA, 33 bp, Homo sapien
tggataaagggaaaaattgaccaatgcagaaaa

SEQ ID NO: 388599 - DNA, 33 bp, Homo sapien
aaggctaggagaactacatgacaataatgattt

SEQ ID NO: 388600 - DNA, 33 bp, Homo sapien
aaggctaggagaactagatgacaataatgattt

SEQ ID NO: 388601 - DNA, 33 bp, Homo sapien
gcatggtctctgccaaatagctcatgagctttt

SEQ ID NO: 388602 - DNA, 33 bp, Homo sapien
gcatggtctctgccaactagctcatgagctttt

SEQ ID NO: 388603 - DNA, 33 bp, Homo sapien
agctagaaaaatgttaagaagggagatgttctc

SEQ ID NO: 388604 - DNA, 33 bp, Homo sapien
agctagaaaaatgttaggaagggagatgttctc

SEQ ID NO: 388605 - DNA, 33 bp, Homo sapien
tttgaagttttgcacacagactctcagatcctc

SEQ ID NO: 388606 - DNA, 33 bp, Homo sapien
tttgaagttttgcacatagactctcagatcctc

SEQ ID NO: 388607 - DNA, 33 bp, Homo sapien
aaacttcatgatttgacaacaacatacatttgt

SEQ ID NO: 388608 - DNA, 33 bp, Homo sapien
aaacttcatgatttgagaacaacatacatttgt

SEQ ID NO: 388609 - DNA, 33 bp, Homo sapien
agcaacattaacacaacaagtaatacctagaca

SEQ ID NO: 388610 - DNA, 33 bp, Homo sapien
agcaacattaacacaagaagtaatacctagaca

SEQ ID NO: 388611 - DNA, 33 bp, Homo sapien
tgaattttctgcctgaatactcttagtagtctt

SEQ ID NO: 388612 - DNA, 33 bp, Homo sapien
tgaattttctgcctgagtactcttagtagtctt

SEQ ID NO: 388613 - DNA, 33 bp, Homo sapien
tgctaatgaggttggacattttttcagattaag

SEQ ID NO: 388614 - DNA, 33 bp, Homo sapien
tgctaatgaggttggatattttttcagattaag

SEQ ID NO: 388615 - DNA, 33 bp, Homo sapien
gcgttttaacaatatcactctttttgtgacaga

SEQ ID NO: 388616 - DNA, 33 bp, Homo sapien
gcgttttaacaatatcgctctttttgtgacaga

SEQ ID NO: 388617 - DNA, 33 bp, Homo sapien
gatagaaagctttgcactctactcattcaaacc

SEQ ID NO: 388618 - DNA, 33 bp, Homo sapien
gatagaaagctttgcagtctactcattcaaacc

SEQ ID NO: 388619 - DNA, 33 bp, Homo sapien
tgagcgagtgaatgaaaactttttatgttatcc

SEQ ID NO: 388620 - DNA, 33 bp, Homo sapien
tgagcgagtgaatgaatactttttatgttatcc

SEQ ID NO: 388621 - DNA, 33 bp, Homo sapien
tacaatgcacttagacaatagatttttcaaaca

SEQ ID NO: 388622 - DNA, 33 bp, Homo sapien
tacaatgcacttagactatagatttttcaaaca

SEQ ID NO: 388623 - DNA, 33 bp, Homo sapien
tttgggagcagtgacaagtctagagagtcaaaa

SEQ ID NO: 388624 - DNA, 33 bp, Homo sapien
tttgggagcagtgacaggtctagagagtcaaaa

SEQ ID NO: 388625 - DNA, 33 bp, Homo sapien
tttgtaaggctttgaaactttaattggcctcta

SEQ ID NO: 388626 - DNA, 33 bp, Homo sapien
tttgtaaggctttgaacctttaattggcctcta

SEQ ID NO: 388627 - DNA, 33 bp, Homo sapien
atcctaatatttatgaactccccccatatctcc

SEQ ID NO: 388628 - DNA, 33 bp, Homo sapien
atcctaatatttatgatctccccccatatctcc

SEQ ID NO: 388629 - DNA, 33 bp, Homo sapien
cctgcggttttatgacaatgcttagcaatgagt

SEQ ID NO: 388630 - DNA, 33 bp, Homo sapien
cctgcggttttatgaccatgcttagcaatgagt

SEQ ID NO: 388631 - DNA, 33 bp, Homo sapien
cgtaccaagtggaaacacgggtgcccagagatt

SEQ ID NO: 388632 - DNA, 33 bp, Homo sapien
cgtaccaagtggaaacgcgggtgcccagagatt

SEQ ID NO: 388633 - DNA, 33 bp, Homo sapien
tacagtgtttcattcaaaaggggttcccaaatt

SEQ ID NO: 388634 - DNA, 33 bp, Homo sapien
tacagtgtttcattcagaaggggttcccaaatt

SEQ ID NO: 388635 - DNA, 33 bp, Homo sapien
agaacaaacagcattcccaaggccttcattaaa

SEQ ID NO: 388636 - DNA, 33 bp, Homo sapien
agaacaaacagcattctcaaggccttcattaaa

SEQ ID NO: 388637 - DNA, 33 bp, Homo sapien
caaaaacaggtacataaagcagtagtgtgaaag

SEQ ID NO: 388638 - DNA, 33 bp, Homo sapien
caaaaacaggtacatatagcagtagtgtgaaag

SEQ ID NO: 388639 - DNA, 33 bp, Homo sapien
ttgtgtgactttcaagactacatcataaaatgt

SEQ ID NO: 388640 - DNA, 33 bp, Homo sapien
ttgtgtgactttcaaggctacatcataaaatgt

SEQ ID NO: 388641 - DNA, 33 bp, Homo sapien
caatccagtcctgcagaagagctgtcagaaagt

SEQ ID NO: 388642 - DNA, 33 bp, Homo sapien
caatccagtcctgcagtagagctgtcagaaagt

SEQ ID NO: 388643 - DNA, 33 bp, Homo sapien
gattccgtgctactgaagtccaaatttagtttg

SEQ ID NO: 388644 - DNA, 33 bp, Homo sapien
gattccgtgctactgacgtccaaatttagtttg

SEQ ID NO: 388645 - DNA, 33 bp, Homo sapien
agatgaagctaaagcacaaatgggatgatggtt

SEQ ID NO: 388646 - DNA, 33 bp, Homo sapien
agatgaagctaaagcagaaatgggatgatggtt

SEQ ID NO: 388647 - DNA, 33 bp, Homo sapien
aataagaatatcccacagtaaacagtgtgtttg

SEQ ID NO: 388648 - DNA, 33 bp, Homo sapien
aataagaatatcccacggtaaacagtgtgtttg

SEQ ID NO: 388649 - DNA, 33 bp, Homo sapien
agctcatgatggttaccgctattccggccactc

SEQ ID NO: 388650 - DNA, 33 bp, Homo sapien
agctcatgatggttactgctattccggccactc

SEQ ID NO: 388651 - DNA, 33 bp, Homo sapien
agattgagctgtgtatcaaataggacagcatct

SEQ ID NO: 388652 - DNA, 33 bp, Homo sapien
agattgagctgtgtattaaataggacagcatct

SEQ ID NO: 388653 - DNA, 33 bp, Homo sapien
agcatccaggctagaactgtgctgataatgacc

SEQ ID NO: 388654 - DNA, 33 bp, Homo sapien
agcatccaggctagaattgtgctgataatgacc

SEQ ID NO: 388655 - DNA, 33 bp, Homo sapien
atagtccacatgtccaggagcaacttatttaag

SEQ ID NO: 388656 - DNA, 33 bp, Homo sapien
atagtccacatgtccatgagcaacttatttaag

SEQ ID NO: 388657 - DNA, 33 bp, Homo sapien
tgacctaaaagactaacagtttgccttgcacgt

SEQ ID NO: 388658 - DNA, 33 bp, Homo sapien
tgacctaaaagactaagagtttgccttgcacgt

SEQ ID NO: 388659 - DNA, 33 bp, Homo sapien
ttagactgacacataacagagactcagcaaata

SEQ ID NO: 388660 - DNA, 33 bp, Homo sapien
ttagactgacacataatagagactcagcaaata

SEQ ID NO: 388661 - DNA, 33 bp, Homo sapien
agtgtctcagataatcaaggacagtatatacat

SEQ ID NO: 388662 - DNA, 33 bp, Homo sapien
agtgtctcagataatctaggacagtatatacat

SEQ ID NO: 388663 - DNA, 33 bp, Homo sapien
atctgaacataagtgacgctatggatatgtgtg

SEQ ID NO: 388664 - DNA, 33 bp, Homo sapien
atctgaacataagtgatgctatggatatgtgtg

SEQ ID NO: 388665 - DNA, 33 bp, Homo sapien
tgaaagcagtgagagaaaaaaatgaaatatact

SEQ ID NO: 388666 - DNA, 33 bp, Homo sapien
tgaaagcagtgagagacaaaaatgaaatatact

SEQ ID NO: 388667 - DNA, 33 bp, Homo sapien
tcataaaaggtgattacgttcaagaaggcattg

SEQ ID NO: 388668 - DNA, 33 bp, Homo sapien
tcataaaaggtgattatgttcaagaaggcattg

SEQ ID NO: 388669 - DNA, 33 bp, Homo sapien
acaagcttcagaaagacaaagagcatgcagcat

SEQ ID NO: 388670 - DNA, 33 bp, Homo sapien
acaagcttcagaaagataaagagcatgcagcat

SEQ ID NO: 388671 - DNA, 33 bp, Homo sapien
aggttttaaaaggaccactcatgttgctatagt

SEQ ID NO: 388672 - DNA, 33 bp, Homo sapien
aggttttaaaaggaccgctcatgttgctatagt

SEQ ID NO: 388673 - DNA, 33 bp, Homo sapien
agtgcagttaactaaaaacttccagatctcccc

SEQ ID NO: 388674 - DNA, 33 bp, Homo sapien
agtgcagttaactaaatacttccagatctcccc

SEQ ID NO: 388675 - DNA, 33 bp, Homo sapien
gggagcaggtggacacaagcaaacaggttaaag

SEQ ID NO: 388676 - DNA, 33 bp, Homo sapien
gggagcaggtggacacgagcaaacaggttaaag

SEQ ID NO: 388677 - DNA, 33 bp, Homo sapien
cttctactctgaagaaaacgccagggttaatta

SEQ ID NO: 388678 - DNA, 33 bp, Homo sapien
cttctactctgaagaacacgccagggttaatta

SEQ ID NO: 388679 - DNA, 33 bp, Homo sapien
tctggttggttgaggaaggaatcataggagtgt

SEQ ID NO: 388680 - DNA, 33 bp, Homo sapien
tctggttggttgaggatggaatcataggagtgt

SEQ ID NO: 388681 - DNA, 33 bp, Homo sapien
acttgggcacgagcaaaaacgaggactatgaag

SEQ ID NO: 388682 - DNA, 33 bp, Homo sapien
acttgggcacgagcaacaacgaggactatgaag

SEQ ID NO: 388683 - DNA, 33 bp, Homo sapien
aactccagactctttcacgcaccctcttgtgat

SEQ ID NO: 388684 - DNA, 33 bp, Homo sapien
aactccagactctttcgcgcaccctcttgtgat

SEQ ID NO: 388685 - DNA, 33 bp, Homo sapien
caactcagacagacctaaagggaaaatgtttgc

SEQ ID NO: 388686 - DNA, 33 bp, Homo sapien
caactcagacagacctgaagggaaaatgtttgc

SEQ ID NO: 388687 - DNA, 33 bp, Homo sapien
ttctgggctgtagtgacagtctttccacagaaa

SEQ ID NO: 388688 - DNA, 33 bp, Homo sapien
ttctgggctgtagtgatagtctttccacagaaa

SEQ ID NO: 388689 - DNA, 33 bp, Homo sapien
ataaagtcttcagatacagaggcccatgacatc

SEQ ID NO: 388690 - DNA, 33 bp, Homo sapien
ataaagtcttcagatagagaggcccatgacatc

SEQ ID NO: 388691 - DNA, 33 bp, Homo sapien
gcaaacagccttccaaactcaggcaataaaata

SEQ ID NO: 388692 - DNA, 33 bp, Homo sapien
gcaaacagccttccaacctcaggcaataaaata

SEQ ID NO: 388693 - DNA, 33 bp, Homo sapien
cttcatagtgttcagacccgtaccgacacagcc

SEQ ID NO: 388694 - DNA, 33 bp, Homo sapien
cttcatagtgttcagatccgtaccgacacagcc

SEQ ID NO: 388695 - DNA, 33 bp, Homo sapien
ggtagtagaaataataccactaagtataataca

SEQ ID NO: 388696 - DNA, 33 bp, Homo sapien
ggtagtagaaataatatcactaagtataataca

SEQ ID NO: 388697 - DNA, 33 bp, Homo sapien
agaaagaagaaatgacaagaactctttctcttt

SEQ ID NO: 388698 - DNA, 33 bp, Homo sapien
agaaagaagaaatgaccagaactctttctcttt

SEQ ID NO: 388699 - DNA, 33 bp, Homo sapien
taaaatagcaagaagacgaagagatggtgttat

SEQ ID NO: 388700 - DNA, 33 bp, Homo sapien
taaaatagcaagaagaggaagagatggtgttat

SEQ ID NO: 388701 - DNA, 33 bp, Homo sapien
gagatggtgttatgaaccaagaagatgggcagg

SEQ ID NO: 388702 - DNA, 33 bp, Homo sapien
gagatggtgttatgaatcaagaagatgggcagg

SEQ ID NO: 388703 - DNA, 33 bp, Homo sapien
agaatatatcaagaaaagtttgacagagtagta

SEQ ID NO: 388704 - DNA, 33 bp, Homo sapien
agaatatatcaagaaatgtttgacagagtagta

SEQ ID NO: 388705 - DNA, 33 bp, Homo sapien
ttcctgaaagactccaaaatgaaccagaacacc

SEQ ID NO: 388706 - DNA, 33 bp, Homo sapien
ttcctgaaagactccataatgaaccagaacacc

SEQ ID NO: 388707 - DNA, 33 bp, Homo sapien
atggtcctcagaggaacaaattgcattttcatt

SEQ ID NO: 388708 - DNA, 33 bp, Homo sapien
atggtcctcagaggaagaaattgcattttcatt

SEQ ID NO: 388709 - DNA, 33 bp, Homo sapien
tgcacaagaaaagtacactttgagctgttttgg

SEQ ID NO: 388710 - DNA, 33 bp, Homo sapien
tgcacaagaaaagtactctttgagctgttttgg

SEQ ID NO: 388711 - DNA, 33 bp, Homo sapien
ttgtgatccagcgacccagcgggaaaaggacat

SEQ ID NO: 388712 - DNA, 33 bp, Homo sapien
ttgtgatccagcgaccgagcgggaaaaggacat

SEQ ID NO: 388713 - DNA, 33 bp, Homo sapien
aggaaattgagcttcacgttctgttacataatg

SEQ ID NO: 388714 - DNA, 33 bp, Homo sapien
aggaaattgagcttcatgttctgttacataatg

SEQ ID NO: 388715 - DNA, 33 bp, Homo sapien
gaaagacaacgtcccaataataacattcaagct

SEQ ID NO: 388716 - DNA, 33 bp, Homo sapien
gaaagacaacgtcccagtaataacattcaagct

SEQ ID NO: 388717 - DNA, 33 bp, Homo sapien
acataagttgaagcaaatgtcccaattcagtgt

SEQ ID NO: 388718 - DNA, 33 bp, Homo sapien
acataagttgaagcaagtgtcccaattcagtgt

SEQ ID NO: 388719 - DNA, 33 bp, Homo sapien
atctgtttaaaacaaacgtcaacttgcagaaga

SEQ ID NO: 388720 - DNA, 33 bp, Homo sapien
atctgtttaaaacaaatgtcaacttgcagaaga

SEQ ID NO: 388721 - DNA, 33 bp, Homo sapien
agaggaagcatttttacgggattgtgatgcgta

SEQ ID NO: 388722 - DNA, 33 bp, Homo sapien
agaggaagcatttttatgggattgtgatgcgta

SEQ ID NO: 388723 - DNA, 33 bp, Homo sapien
tgaagggaatatgttccgaaaaggagctaaatc

SEQ ID NO: 388724 - DNA, 33 bp, Homo sapien
tgaagggaatatgttctgaaaaggagctaaatc

SEQ ID NO: 388725 - DNA, 33 bp, Homo sapien
ttttcatgattaccacaagaagagccattttag

SEQ ID NO: 388726 - DNA, 33 bp, Homo sapien
ttttcatgattaccaccagaagagccattttag

SEQ ID NO: 388727 - DNA, 33 bp, Homo sapien
tgaaagctctgattaacatacaacacagagctc

SEQ ID NO: 388728 - DNA, 33 bp, Homo sapien
tgaaagctctgattaatatacaacacagagctc

SEQ ID NO: 388729 - DNA, 33 bp, Homo sapien
agaccaaaagaaattaccttgcactacagtgtg

SEQ ID NO: 388730 - DNA, 33 bp, Homo sapien
agaccaaaagaaattatcttgcactacagtgtg

SEQ ID NO: 388731 - DNA, 33 bp, Homo sapien
gcataaaacgcactgacgggagaacccaactgc

SEQ ID NO: 388732 - DNA, 33 bp, Homo sapien
gcataaaacgcactgatgggagaacccaactgc

SEQ ID NO: 388733 - DNA, 33 bp, Homo sapien
ctgtcagctattgaatcagcttgacatcctgac

SEQ ID NO: 388734 - DNA, 33 bp, Homo sapien
ctgtcagctattgaatgagcttgacatcctgac

SEQ ID NO: 388735 - DNA, 33 bp, Homo sapien
ccagtatttctgtaaacacctattatttgtatt

SEQ ID NO: 388736 - DNA, 33 bp, Homo sapien
ccagtatttctgtaaagacctattatttgtatt

SEQ ID NO: 388737 - DNA, 33 bp, Homo sapien
caccccctttgatctacaattttactcctagca

SEQ ID NO: 388738 - DNA, 33 bp, Homo sapien
caccccctttgatctataattttactcctagca

SEQ ID NO: 388739 - DNA, 33 bp, Homo sapien
cactacttaggatgcaaaataaaactgctcgtc

SEQ ID NO: 388740 - DNA, 33 bp, Homo sapien
cactacttaggatgcacaataaaactgctcgtc

SEQ ID NO: 388741 - DNA, 33 bp, Homo sapien
cacagtgaatattcaacaaatgtttgcttttgc

SEQ ID NO: 388742 - DNA, 33 bp, Homo sapien
cacagtgaatattcaataaatgtttgcttttgc

SEQ ID NO: 388743 - DNA, 33 bp, Homo sapien
cctcacatcatcaagccacacaattataaggag

SEQ ID NO: 388744 - DNA, 33 bp, Homo sapien
cctcacatcatcaagcgacacaattataaggag

SEQ ID NO: 388745 - DNA, 33 bp, Homo sapien
ggggaataggagtttacggtggaaagaagagag

SEQ ID NO: 388746 - DNA, 33 bp, Homo sapien
ggggaataggagtttatggtggaaagaagagag

SEQ ID NO: 388747 - DNA, 33 bp, Homo sapien
tctaattccagacggaacttgcaggtggcaatc

SEQ ID NO: 388748 - DNA, 33 bp, Homo sapien
tctaattccagacggaccttgcaggtggcaatc

SEQ ID NO: 388749 - DNA, 33 bp, Homo sapien
tagagcacgtgtgcaacgcagtgtagagtaaag

SEQ ID NO: 388750 - DNA, 33 bp, Homo sapien
tagagcacgtgtgcaatgcagtgtagagtaaag

SEQ ID NO: 388751 - DNA, 33 bp, Homo sapien
atctcagtaaagggcaccttctccattttgggc

SEQ ID NO: 388752 - DNA, 33 bp, Homo sapien
atctcagtaaagggcatcttctccattttgggc

SEQ ID NO: 388753 - DNA, 33 bp, Homo sapien
tgaactccccctagagaaaggcagctatggtaa

SEQ ID NO: 388754 - DNA, 33 bp, Homo sapien
tgaactccccctagagcaaggcagctatggtaa

SEQ ID NO: 388755 - DNA, 33 bp, Homo sapien
ccctgagcaaagaatccccatgaggccatccca

SEQ ID NO: 388756 - DNA, 33 bp, Homo sapien
ccctgagcaaagaatctccatgaggccatccca

SEQ ID NO: 388757 - DNA, 33 bp, Homo sapien
aactattgtgttcaccccaggagtcagaaatgc

SEQ ID NO: 388758 - DNA, 33 bp, Homo sapien
aactattgtgttcaccgcaggagtcagaaatgc

SEQ ID NO: 388759 - DNA, 33 bp, Homo sapien
ggtaaagtttaggaaacgctggattagactgaa

SEQ ID NO: 388760 - DNA, 33 bp, Homo sapien
ggtaaagtttaggaaatgctggattagactgaa

SEQ ID NO: 388761 - DNA, 33 bp, Homo sapien
tgggccggagaagagcaaacacagcagtggcac

SEQ ID NO: 388762 - DNA, 33 bp, Homo sapien
tgggccggagaagagccaacacagcagtggcac

SEQ ID NO: 388763 - DNA, 33 bp, Homo sapien
actccagatgtcatcaaatttccaaacatgtgc

SEQ ID NO: 388764 - DNA, 33 bp, Homo sapien
actccagatgtcatcagatttccaaacatgtgc

SEQ ID NO: 388765 - DNA, 33 bp, Homo sapien
tatagacaattttgaaaaatacccagaaacagc

SEQ ID NO: 388766 - DNA, 33 bp, Homo sapien
tatagacaattttgaacaatacccagaaacagc

SEQ ID NO: 388767 - DNA, 33 bp, Homo sapien
atgccatgctctctcacaagagaatcactagtg

SEQ ID NO: 388768 - DNA, 33 bp, Homo sapien
atgccatgctctctcagaagagaatcactagtg

SEQ ID NO: 388769 - DNA, 33 bp, Homo sapien
actcacaggtaaaagcagcatcctgagttgcaa

SEQ ID NO: 388770 - DNA, 33 bp, Homo sapien
actcacaggtaaaagcggcatcctgagttgcaa

SEQ ID NO: 388771 - DNA, 33 bp, Homo sapien
aggacatcatgaacgaaatagaactgttgtgtc

SEQ ID NO: 388772 - DNA, 33 bp, Homo sapien
aggacatcatgaacgagatagaactgttgtgtc

SEQ ID NO: 388773 - DNA, 33 bp, Homo sapien
catagcctgaattttacaatggggaaagttcag

SEQ ID NO: 388774 - DNA, 33 bp, Homo sapien
catagcctgaattttataatggggaaagttcag

SEQ ID NO: 388775 - DNA, 33 bp, Homo sapien
cttaaccaatagtgaccacattaatacttatgc

SEQ ID NO: 388776 - DNA, 33 bp, Homo sapien
cttaaccaatagtgacgacattaatacttatgc

SEQ ID NO: 388777 - DNA, 33 bp, Homo sapien
tacacaattattagtacagttgttggcataaag

SEQ ID NO: 388778 - DNA, 33 bp, Homo sapien
tacacaattattagtagagttgttggcataaag

SEQ ID NO: 388779 - DNA, 33 bp, Homo sapien
ctcctcaactaaagataaacctctctggagctc

SEQ ID NO: 388780 - DNA, 33 bp, Homo sapien
ctcctcaactaaagatgaacctctctggagctc

SEQ ID NO: 388781 - DNA, 33 bp, Homo sapien
acaaccccagagaaaaagccgagtgctggctcc

SEQ ID NO: 388782 - DNA, 33 bp, Homo sapien
acaaccccagagaaaaggccgagtgctggctcc

SEQ ID NO: 388783 - DNA, 33 bp, Homo sapien
tctccctttcttcaaacactgcaaatccactaa

SEQ ID NO: 388784 - DNA, 33 bp, Homo sapien
tctccctttcttcaaatactgcaaatccactaa

SEQ ID NO: 388785 - DNA, 33 bp, Homo sapien
ttccttaggatatatacaaattctgtcaatatc

SEQ ID NO: 388786 - DNA, 33 bp, Homo sapien
ttccttaggatatatagaaattctgtcaatatc

SEQ ID NO: 388787 - DNA, 33 bp, Homo sapien
tacctgcagggatgccagactcatcaagggtgg

SEQ ID NO: 388788 - DNA, 33 bp, Homo sapien
tacctgcagggatgccggactcatcaagggtgg

SEQ ID NO: 388789 - DNA, 33 bp, Homo sapien
ggtcattgttgatggccctgtgtaattggtaaa

SEQ ID NO: 388790 - DNA, 33 bp, Homo sapien
ggtcattgttgatggctctgtgtaattggtaaa

SEQ ID NO: 388791 - DNA, 33 bp, Homo sapien
tttgttcttgttctggcagactcatgtatttgc

SEQ ID NO: 388792 - DNA, 33 bp, Homo sapien
tttgttcttgttctgggagactcatgtatttgc

SEQ ID NO: 388793 - DNA, 33 bp, Homo sapien
aatgggaacaatcaaaatgatggtactggcctc

SEQ ID NO: 388794 - DNA, 33 bp, Homo sapien
aatgggaacaatcaaactgatggtactggcctc

SEQ ID NO: 388795 - DNA, 33 bp, Homo sapien
ggatgagctaataggcacagagagatccatgac

SEQ ID NO: 388796 - DNA, 33 bp, Homo sapien
ggatgagctaataggcgcagagagatccatgac

SEQ ID NO: 388797 - DNA, 33 bp, Homo sapien
gtcccagtcacgtgtacgcaagttttctttagg

SEQ ID NO: 388798 - DNA, 33 bp, Homo sapien
gtcccagtcacgtgtatgcaagttttctttagg

SEQ ID NO: 388799 - DNA, 33 bp, Homo sapien
accactgattgagagcactaagagaaacgcaag

SEQ ID NO: 388800 - DNA, 33 bp, Homo sapien
accactgattgagagcgctaagagaaacgcaag

SEQ ID NO: 388801 - DNA, 33 bp, Homo sapien
cctgggaggtagtgatcaattctggataaaagg

SEQ ID NO: 388802 - DNA, 33 bp, Homo sapien
cctgggaggtagtgatgaattctggataaaagg

SEQ ID NO: 388803 - DNA, 33 bp, Homo sapien
agaagtgctgctttacaatatgaactcacttag

SEQ ID NO: 388804 - DNA, 33 bp, Homo sapien
agaagtgctgctttacgatatgaactcacttag

SEQ ID NO: 388805 - DNA, 33 bp, Homo sapien
gtgctctgactggaacaggcctttcttcctcct

SEQ ID NO: 388806 - DNA, 33 bp, Homo sapien
gtgctctgactggaacgggcctttcttcctcct

SEQ ID NO: 388807 - DNA, 33 bp, Homo sapien
cccaaccaaatgtgtcaatggctcctgattacc

SEQ ID NO: 388808 - DNA, 33 bp, Homo sapien
cccaaccaaatgtgtcgatggctcctgattacc

SEQ ID NO: 388809 - DNA, 33 bp, Homo sapien
caactagaaaaagcaacttaattataaccatga

SEQ ID NO: 388810 - DNA, 33 bp, Homo sapien
caactagaaaaagcaatttaattataaccatga

SEQ ID NO: 388811 - DNA, 33 bp, Homo sapien
gacacaaaaggctacaaactgcacgtttccatt

SEQ ID NO: 388812 - DNA, 33 bp, Homo sapien
gacacaaaaggctacatactgcacgtttccatt

SEQ ID NO: 388813 - DNA, 33 bp, Homo sapien
aaaacttgactgcagcacgcaatttgctcatca

SEQ ID NO: 388814 - DNA, 33 bp, Homo sapien
aaaacttgactgcagcgcgcaatttgctcatca

SEQ ID NO: 388815 - DNA, 33 bp, Homo sapien
ttgtttgcaaagtacaaagtttgtgtctaggtt

SEQ ID NO: 388816 - DNA, 33 bp, Homo sapien
ttgtttgcaaagtacagagtttgtgtctaggtt

SEQ ID NO: 388817 - DNA, 33 bp, Homo sapien
tttcctattttccagaaatgtagcatgcaccat

SEQ ID NO: 388818 - DNA, 33 bp, Homo sapien
tttcctattttccagatatgtagcatgcaccat

SEQ ID NO: 388819 - DNA, 33 bp, Homo sapien
catgttcaatgacaaccgaaagccaagcagaag

SEQ ID NO: 388820 - DNA, 33 bp, Homo sapien
catgttcaatgacaactgaaagccaagcagaag

SEQ ID NO: 388821 - DNA, 33 bp, Homo sapien
tgagtaaggcaagacacagtttagggaagaaaa

SEQ ID NO: 388822 - DNA, 33 bp, Homo sapien
tgagtaaggcaagacagagtttagggaagaaaa

SEQ ID NO: 388823 - DNA, 33 bp, Homo sapien
tgttctagaagtgaaacctgagacgattttaaa

SEQ ID NO: 388824 - DNA, 33 bp, Homo sapien
tgttctagaagtgaaagctgagacgattttaaa

SEQ ID NO: 388825 - DNA, 33 bp, Homo sapien
ggaaaaaactcagttccaggcaacaagaacacc

SEQ ID NO: 388826 - DNA, 33 bp, Homo sapien
ggaaaaaactcagttcgaggcaacaagaacacc

SEQ ID NO: 388827 - DNA, 33 bp, Homo sapien
agctaggaggcaaagacataggtaacatttgct

SEQ ID NO: 388828 - DNA, 33 bp, Homo sapien
agctaggaggcaaagagataggtaacatttgct

SEQ ID NO: 388829 - DNA, 33 bp, Homo sapien
tcaagaacacatgataagaggcatagcagggga

SEQ ID NO: 388830 - DNA, 33 bp, Homo sapien
tcaagaacacatgataggaggcatagcagggga

SEQ ID NO: 388831 - DNA, 33 bp, Homo sapien
gatgccggagatcaaagtatgctggggtatttg

SEQ ID NO: 388832 - DNA, 33 bp, Homo sapien
gatgccggagatcaaattatgctggggtatttg

SEQ ID NO: 388833 - DNA, 33 bp, Homo sapien
gtttgactcatcccaaaagctcaccagtgcttc

SEQ ID NO: 388834 - DNA, 33 bp, Homo sapien
gtttgactcatcccaacagctcaccagtgcttc

SEQ ID NO: 388835 - DNA, 33 bp, Homo sapien
tgcacaatttcgtccacgagaagcactagatga

SEQ ID NO: 388836 - DNA, 33 bp, Homo sapien
tgcacaatttcgtccatgagaagcactagatga

SEQ ID NO: 388837 - DNA, 33 bp, Homo sapien
ctaaagctgcacctaactaaactgagccatgca

SEQ ID NO: 388838 - DNA, 33 bp, Homo sapien
ctaaagctgcacctaagtaaactgagccatgca

SEQ ID NO: 388839 - DNA, 33 bp, Homo sapien
acttggttcaaagataaggacataacttggtaa

SEQ ID NO: 388840 - DNA, 33 bp, Homo sapien
acttggttcaaagatatggacataacttggtaa

SEQ ID NO: 388841 - DNA, 33 bp, Homo sapien
tgttttcatacagttaacctgtttacacacatt

SEQ ID NO: 388842 - DNA, 33 bp, Homo sapien
tgttttcatacagttatcctgtttacacacatt

SEQ ID NO: 388843 - DNA, 33 bp, Homo sapien
ttaataaaaacaggacgctctgttaagcactca

SEQ ID NO: 388844 - DNA, 33 bp, Homo sapien
ttaataaaaacaggactctctgttaagcactca

SEQ ID NO: 388845 - DNA, 33 bp, Homo sapien
ctcagtatggcactgcagaatagagacgtcaac

SEQ ID NO: 388846 - DNA, 33 bp, Homo sapien
ctcagtatggcactgcggaatagagacgtcaac

SEQ ID NO: 388847 - DNA, 33 bp, Homo sapien
gattagagctcatcaaaggttcagagggacctt

SEQ ID NO: 388848 - DNA, 33 bp, Homo sapien
gattagagctcatcaatggttcagagggacctt

SEQ ID NO: 388849 - DNA, 33 bp, Homo sapien
tcctacttggggggacagatggaaacacctttt

SEQ ID NO: 388850 - DNA, 33 bp, Homo sapien
tcctacttggggggacggatggaaacacctttt

SEQ ID NO: 388851 - DNA, 33 bp, Homo sapien
tcagaccatgaccagaactgtggagtcactaag

SEQ ID NO: 388852 - DNA, 33 bp, Homo sapien
tcagaccatgaccagagctgtggagtcactaag

SEQ ID NO: 388853 - DNA, 33 bp, Homo sapien
agaccataaccaccaacaataccccaactaatc

SEQ ID NO: 388854 - DNA, 33 bp, Homo sapien
agaccataaccaccaataataccccaactaatc

SEQ ID NO: 388855 - DNA, 33 bp, Homo sapien
accctcctttctagagcatttcctgttggagtc

SEQ ID NO: 388856 - DNA, 33 bp, Homo sapien
accctcctttctagagtatttcctgttggagtc

SEQ ID NO: 388857 - DNA, 33 bp, Homo sapien
tgtacaaagaaggagcacagtatcttggagagt

SEQ ID NO: 388858 - DNA, 33 bp, Homo sapien
tgtacaaagaaggagcgcagtatcttggagagt

SEQ ID NO: 388859 - DNA, 33 bp, Homo sapien
gaagcttagggcaccaagtatgctcatgagtag

SEQ ID NO: 388860 - DNA, 33 bp, Homo sapien
gaagcttagggcaccaggtatgctcatgagtag

SEQ ID NO: 388861 - DNA, 33 bp, Homo sapien
gggcttcttagaaaaacgtttgactctagggtt

SEQ ID NO: 388862 - DNA, 33 bp, Homo sapien
gggcttcttagaaaaatgtttgactctagggtt

SEQ ID NO: 388863 - DNA, 33 bp, Homo sapien
tggagaaatgcctgagcaagaggaaatgaagta

SEQ ID NO: 388864 - DNA, 33 bp, Homo sapien
tggagaaatgcctgagtaagaggaaatgaagta

SEQ ID NO: 388865 - DNA, 33 bp, Homo sapien
ctagctttaaattgaaaacaccgtagcagcagg

SEQ ID NO: 388866 - DNA, 33 bp, Homo sapien
ctagctttaaattgaagacaccgtagcagcagg

SEQ ID NO: 388867 - DNA, 33 bp, Homo sapien
ccacaaaagtgagaaacatggcaaccaagaata

SEQ ID NO: 388868 - DNA, 33 bp, Homo sapien
ccacaaaagtgagaaagatggcaaccaagaata

SEQ ID NO: 388869 - DNA, 33 bp, Homo sapien
atgcacaaaacttcccagagcttttctagaata

SEQ ID NO: 388870 - DNA, 33 bp, Homo sapien
atgcacaaaacttcccggagcttttctagaata

SEQ ID NO: 388871 - DNA, 33 bp, Homo sapien
agacagacaaggtctaagcttacagaaaaacat

SEQ ID NO: 388872 - DNA, 33 bp, Homo sapien
agacagacaaggtctaggcttacagaaaaacat

SEQ ID NO: 388873 - DNA, 33 bp, Homo sapien
aggttgataacttgcgaactgtcatctctttgt

SEQ ID NO: 388874 - DNA, 33 bp, Homo sapien
aggttgataacttgcgcactgtcatctctttgt

SEQ ID NO: 388875 - DNA, 33 bp, Homo sapien
tagcttttccatcctcaagtcttgtttgccttg

SEQ ID NO: 388876 - DNA, 33 bp, Homo sapien
tagcttttccatcctcgagtcttgtttgccttg

SEQ ID NO: 388877 - DNA, 33 bp, Homo sapien
tgatgtggagttagtaccatctgcattttactg

SEQ ID NO: 388878 - DNA, 33 bp, Homo sapien
tgatgtggagttagtagcatctgcattttactg

SEQ ID NO: 388879 - DNA, 33 bp, Homo sapien
ctggacaatagatgtaacctttgtttttttgtt

SEQ ID NO: 388880 - DNA, 33 bp, Homo sapien
ctggacaatagatgtagcctttgtttttttgtt

SEQ ID NO: 388881 - DNA, 33 bp, Homo sapien
cttgatgccatctgacactttggcgattgtgag

SEQ ID NO: 388882 - DNA, 33 bp, Homo sapien
cttgatgccatctgacgctttggcgattgtgag

SEQ ID NO: 388883 - DNA, 33 bp, Homo sapien
cctgcattctgggataggatcgcattctaatca

SEQ ID NO: 388884 - DNA, 33 bp, Homo sapien
cctgcattctgggatatgatcgcattctaatca

SEQ ID NO: 388885 - DNA, 33 bp, Homo sapien
gaactgagattctacccataaaagtactggttt

SEQ ID NO: 388886 - DNA, 33 bp, Homo sapien
gaactgagattctacctataaaagtactggttt

SEQ ID NO: 388887 - DNA, 33 bp, Homo sapien
ttgttaatgtatgtgacagacaagaattaaacc

SEQ ID NO: 388888 - DNA, 33 bp, Homo sapien
ttgttaatgtatgtgatagacaagaattaaacc

SEQ ID NO: 388889 - DNA, 33 bp, Homo sapien
gactcccatgtaagtgcaaagacagactagaag

SEQ ID NO: 388890 - DNA, 33 bp, Homo sapien
gactcccatgtaagtgtaaagacagactagaag

SEQ ID NO: 388891 - DNA, 33 bp, Homo sapien
actttgctgatgaaccaagaattcttcccagta

SEQ ID NO: 388892 - DNA, 33 bp, Homo sapien
actttgctgatgaaccgagaattcttcccagta

SEQ ID NO: 388893 - DNA, 33 bp, Homo sapien
gtttagagaacatccacgagagaaaaccagaag

SEQ ID NO: 388894 - DNA, 33 bp, Homo sapien
gtttagagaacatccatgagagaaaaccagaag

SEQ ID NO: 388895 - DNA, 33 bp, Homo sapien
agaaacaattgactgactacaatgatcagtgct

SEQ ID NO: 388896 - DNA, 33 bp, Homo sapien
agaaacaattgactgattacaatgatcagtgct

SEQ ID NO: 388897 - DNA, 33 bp, Homo sapien
agatcattagtatacaagacttttgtccaagag

SEQ ID NO: 388898 - DNA, 33 bp, Homo sapien
agatcattagtatacaggacttttgtccaagag

SEQ ID NO: 388899 - DNA, 33 bp, Homo sapien
tcttggttaaaatcaacagaagtgtcaggtcac

SEQ ID NO: 388900 - DNA, 33 bp, Homo sapien
tcttggttaaaatcaagagaagtgtcaggtcac

SEQ ID NO: 388901 - DNA, 33 bp, Homo sapien
tctgtgaggaactcaaagggaatagagaggaaa

SEQ ID NO: 388902 - DNA, 33 bp, Homo sapien
tctgtgaggaactcaacgggaatagagaggaaa

SEQ ID NO: 388903 - DNA, 33 bp, Homo sapien
aagataatatgttcaactaagtaaaaccattta

SEQ ID NO: 388904 - DNA, 33 bp, Homo sapien
aagataatatgttcaagtaagtaaaaccattta

SEQ ID NO: 388905 - DNA, 33 bp, Homo sapien
cagacggttgaaccaacatttaagccagtcatc

SEQ ID NO: 388906 - DNA, 33 bp, Homo sapien
cagacggttgaaccaatatttaagccagtcatc

SEQ ID NO: 388907 - DNA, 33 bp, Homo sapien
gggctagatgcagaaacatcagctgagaggtac

SEQ ID NO: 388908 - DNA, 33 bp, Homo sapien
gggctagatgcagaaatatcagctgagaggtac

SEQ ID NO: 388909 - DNA, 33 bp, Homo sapien
tcaacagaaggacaacaaaggtcacacaagggt

SEQ ID NO: 388910 - DNA, 33 bp, Homo sapien
tcaacagaaggacaacgaaggtcacacaagggt

SEQ ID NO: 388911 - DNA, 33 bp, Homo sapien
gtcaggaagaaataatcagtgggataggctctc

SEQ ID NO: 388912 - DNA, 33 bp, Homo sapien
gtcaggaagaaataattagtgggataggctctc

SEQ ID NO: 388913 - DNA, 33 bp, Homo sapien
aaatgtggcaatattccccttccggtattactt

SEQ ID NO: 388914 - DNA, 33 bp, Homo sapien
aaatgtggcaatattctccttccggtattactt

SEQ ID NO: 388915 - DNA, 33 bp, Homo sapien
ttattgcatttacagtcaatggaatgtgtgctt

SEQ ID NO: 388916 - DNA, 33 bp, Homo sapien
ttattgcatttacagttaatggaatgtgtgctt

SEQ ID NO: 388917 - DNA, 33 bp, Homo sapien
cagtgactgcaaagatgacaaaaaggaaggcaa

SEQ ID NO: 388918 - DNA, 33 bp, Homo sapien
cagtgactgcaaagattacaaaaaggaaggcaa

SEQ ID NO: 388919 - DNA, 33 bp, Homo sapien
attggtgaaatgttagaccctaagtctggtgga

SEQ ID NO: 388920 - DNA, 33 bp, Homo sapien
attggtgaaatgttaggccctaagtctggtgga

SEQ ID NO: 388921 - DNA, 33 bp, Homo sapien
atgggtcggcaataaacactgaaactggtaaaa

SEQ ID NO: 388922 - DNA, 33 bp, Homo sapien
atgggtcggcaataaatactgaaactggtaaaa

SEQ ID NO: 388923 - DNA, 33 bp, Homo sapien
ctgtaccctgcacacaataggttctcaagaaat

SEQ ID NO: 388924 - DNA, 33 bp, Homo sapien
ctgtaccctgcacacactaggttctcaagaaat

SEQ ID NO: 388925 - DNA, 33 bp, Homo sapien
ccaggattgcatccgacatgctcaccatcgtat

SEQ ID NO: 388926 - DNA, 33 bp, Homo sapien
ccaggattgcatccgatatgctcaccatcgtat

SEQ ID NO: 388927 - DNA, 33 bp, Homo sapien
taccctgagaacagcaataatgcacaaacatta

SEQ ID NO: 388928 - DNA, 33 bp, Homo sapien
taccctgagaacagcagtaatgcacaaacatta

SEQ ID NO: 388929 - DNA, 33 bp, Homo sapien
cagcccaagaatgaggaaactgaatgtgggaag

SEQ ID NO: 388930 - DNA, 33 bp, Homo sapien
cagcccaagaatgaggtaactgaatgtgggaag

SEQ ID NO: 388931 - DNA, 33 bp, Homo sapien
gagactttgtggttgaagaagatgtctctgtct

SEQ ID NO: 388932 - DNA, 33 bp, Homo sapien
gagactttgtggttgatgaagatgtctctgtct

SEQ ID NO: 388933 - DNA, 33 bp, Homo sapien
tgcactatctaccaaccatatatctatcatcaa

SEQ ID NO: 388934 - DNA, 33 bp, Homo sapien
tgcactatctaccaacgatatatctatcatcaa

SEQ ID NO: 388935 - DNA, 33 bp, Homo sapien
aaggagggtttgtaagcctatggggatccattt

SEQ ID NO: 388936 - DNA, 33 bp, Homo sapien
aaggagggtttgtaagtctatggggatccattt

SEQ ID NO: 388937 - DNA, 33 bp, Homo sapien
atcccacagcactttgcagagacctaaaggaga

SEQ ID NO: 388938 - DNA, 33 bp, Homo sapien
atcccacagcactttgtagagacctaaaggaga

SEQ ID NO: 388939 - DNA, 33 bp, Homo sapien
ctgtgccattatcccccatttcaataaatggca

SEQ ID NO: 388940 - DNA, 33 bp, Homo sapien
ctgtgccattatcccctatttcaataaatggca

SEQ ID NO: 388941 - DNA, 33 bp, Homo sapien
ttctgatctgatcacaagggaattaaaatagaa

SEQ ID NO: 388942 - DNA, 33 bp, Homo sapien
ttctgatctgatcacaggggaattaaaatagaa

SEQ ID NO: 388943 - DNA, 33 bp, Homo sapien
atcttgcatctcagaaatgaagcctacttgatc

SEQ ID NO: 388944 - DNA, 33 bp, Homo sapien
atcttgcatctcagaattgaagcctacttgatc

SEQ ID NO: 388945 - DNA, 33 bp, Homo sapien
cttctttattcactgcccccagtaagagtctca

SEQ ID NO: 388946 - DNA, 33 bp, Homo sapien
cttctttattcactgctcccagtaagagtctca

SEQ ID NO: 388947 - DNA, 33 bp, Homo sapien
ggggttgtagtgagaaccaatagttaaaatacg

SEQ ID NO: 388948 - DNA, 33 bp, Homo sapien
ggggttgtagtgagaatcaatagttaaaatacg

SEQ ID NO: 388949 - DNA, 33 bp, Homo sapien
taaaaccatcgctgtaggacacttttaggtgga

SEQ ID NO: 388950 - DNA, 33 bp, Homo sapien
taaaaccatcgctgtatgacacttttaggtgga

SEQ ID NO: 388951 - DNA, 33 bp, Homo sapien
ctgataagcctacatcaacaggtcgttatcacc

SEQ ID NO: 388952 - DNA, 33 bp, Homo sapien
ctgataagcctacatcgacaggtcgttatcacc

SEQ ID NO: 388953 - DNA, 33 bp, Homo sapien
ggttttgtgtgcttaaccctggttctaaagcca

SEQ ID NO: 388954 - DNA, 33 bp, Homo sapien
ggttttgtgtgcttaatcctggttctaaagcca

SEQ ID NO: 388955 - DNA, 33 bp, Homo sapien
gtatagtcgtggacaagtcctgaagagcttccc

SEQ ID NO: 388956 - DNA, 33 bp, Homo sapien
gtatagtcgtggacaattcctgaagagcttccc

SEQ ID NO: 388957 - DNA, 33 bp, Homo sapien
tggacaatgaaatcagaatgttatatcattttc

SEQ ID NO: 388958 - DNA, 33 bp, Homo sapien
tggacaatgaaatcaggatgttatatcattttc

SEQ ID NO: 388959 - DNA, 33 bp, Homo sapien
caaccaaactgaagcgccgagaaaggaacaaat

SEQ ID NO: 388960 - DNA, 33 bp, Homo sapien
caaccaaactgaagcgtcgagaaaggaacaaat

SEQ ID NO: 388961 - DNA, 33 bp, Homo sapien
cgaatccttgtcctcaatatttagttgagaaaa

SEQ ID NO: 388962 - DNA, 33 bp, Homo sapien
cgaatccttgtcctcagtatttagttgagaaaa

SEQ ID NO: 388963 - DNA, 33 bp, Homo sapien
ctgtaagaaatattaaatgacagatatgaaacc

SEQ ID NO: 388964 - DNA, 33 bp, Homo sapien
ctgtaagaaatattaagtgacagatatgaaacc

SEQ ID NO: 388965 - DNA, 33 bp, Homo sapien
gaattttagatggctgcacgcactgagtggtgt

SEQ ID NO: 388966 - DNA, 33 bp, Homo sapien
gaattttagatggctggacgcactgagtggtgt

SEQ ID NO: 388967 - DNA, 33 bp, Homo sapien
attgcctgagaaaatgcatcctattggagcacc

SEQ ID NO: 388968 - DNA, 33 bp, Homo sapien
attgcctgagaaaatgtatcctattggagcacc

SEQ ID NO: 388969 - DNA, 33 bp, Homo sapien
acttatgaccacaagacagaaataaatgataag

SEQ ID NO: 388970 - DNA, 33 bp, Homo sapien
acttatgaccacaagatagaaataaatgataag

SEQ ID NO: 388971 - DNA, 33 bp, Homo sapien
acagtgtcctgccaaaatgcagtctgccttgca

SEQ ID NO: 388972 - DNA, 33 bp, Homo sapien
acagtgtcctgccaaagtgcagtctgccttgca

SEQ ID NO: 388973 - DNA, 33 bp, Homo sapien
tcagggtgaacatgagccaactttgttccttca

SEQ ID NO: 388974 - DNA, 33 bp, Homo sapien
tcagggtgaacatgagtcaactttgttccttca

SEQ ID NO: 388975 - DNA, 33 bp, Homo sapien
tctatctttaggaggcaatactccagggttaaa

SEQ ID NO: 388976 - DNA, 33 bp, Homo sapien
tctatctttaggaggccatactccagggttaaa

SEQ ID NO: 388977 - DNA, 33 bp, Homo sapien
gcatttatctcagtgaacaaacgggtgactttg

SEQ ID NO: 388978 - DNA, 33 bp, Homo sapien
gcatttatctcagtgagcaaacgggtgactttg

SEQ ID NO: 388979 - DNA, 33 bp, Homo sapien
gcatgattctcaacacaaacaatggtggtgtta

SEQ ID NO: 388980 - DNA, 33 bp, Homo sapien
gcatgattctcaacacgaacaatggtggtgtta

SEQ ID NO: 388981 - DNA, 33 bp, Homo sapien
gaacaatgggacttaaggataaatctgcctttc

SEQ ID NO: 388982 - DNA, 33 bp, Homo sapien
gaacaatgggacttaatgataaatctgcctttc

SEQ ID NO: 388983 - DNA, 33 bp, Homo sapien
gattttcagctctgccagagtggagagagatca

SEQ ID NO: 388984 - DNA, 33 bp, Homo sapien
gattttcagctctgccggagtggagagagatca

SEQ ID NO: 388985 - DNA, 33 bp, Homo sapien
tgcatgcatcctgaatcaattttatctccccca

SEQ ID NO: 388986 - DNA, 33 bp, Homo sapien
tgcatgcatcctgaatgaattttatctccccca

SEQ ID NO: 388987 - DNA, 33 bp, Homo sapien
atatggaagtatgtcaaaagggtctatctgatt

SEQ ID NO: 388988 - DNA, 33 bp, Homo sapien
atatggaagtatgtcagaagggtctatctgatt

SEQ ID NO: 388989 - DNA, 33 bp, Homo sapien
gtgcaagtcttgcacacaatggaaaacgcaaac

SEQ ID NO: 388990 - DNA, 33 bp, Homo sapien
gtgcaagtcttgcacagaatggaaaacgcaaac

SEQ ID NO: 388991 - DNA, 33 bp, Homo sapien
taactgacaatgtaaacggtagagtagagagac

SEQ ID NO: 388992 - DNA, 33 bp, Homo sapien
taactgacaatgtaaatggtagagtagagagac

SEQ ID NO: 388993 - DNA, 33 bp, Homo sapien
agtgctagaaacttcccgagatggttagaaggg

SEQ ID NO: 388994 - DNA, 33 bp, Homo sapien
agtgctagaaacttcctgagatggttagaaggg

SEQ ID NO: 388995 - DNA, 33 bp, Homo sapien
agaagttttgagagtgaacctccttgtcttgtt

SEQ ID NO: 388996 - DNA, 33 bp, Homo sapien
agaagttttgagagtggacctccttgtcttgtt

SEQ ID NO: 388997 - DNA, 33 bp, Homo sapien
actgaaaaggtctttgaagcaatgacacctcag

SEQ ID NO: 388998 - DNA, 33 bp, Homo sapien
actgaaaaggtctttggagcaatgacacctcag

SEQ ID NO: 388999 - DNA, 33 bp, Homo sapien
ccttcgtgatgtgaaccgtcactagaaccacat

SEQ ID NO: 389000 - DNA, 33 bp, Homo sapien
ccttcgtgatgtgaactgtcactagaaccacat

SEQ ID NO: 389001 - DNA, 33 bp, Homo sapien
gtcaaaagttttgactgaaggattctaacatat

SEQ ID NO: 389002 - DNA, 33 bp, Homo sapien
gtcaaaagttttgacttaaggattctaacatat

SEQ ID NO: 389003 - DNA, 33 bp, Homo sapien
acccaagtaatttgaacgtaggctaaagacaaa

SEQ ID NO: 389004 - DNA, 33 bp, Homo sapien
acccaagtaatttgaatgtaggctaaagacaaa

SEQ ID NO: 389005 - DNA, 33 bp, Homo sapien
agaaaactcaaaaatgaaatacaagcaaaacca

SEQ ID NO: 389006 - DNA, 33 bp, Homo sapien
agaaaactcaaaaatggaatacaagcaaaacca

SEQ ID NO: 389007 - DNA, 33 bp, Homo sapien
gaaacgatacaaacaccaagaaacctggataaa

SEQ ID NO: 389008 - DNA, 33 bp, Homo sapien
gaaacgatacaaacactaagaaacctggataaa

SEQ ID NO: 389009 - DNA, 33 bp, Homo sapien
tctttcagttatcacactcctgtagtctgttgt

SEQ ID NO: 389010 - DNA, 33 bp, Homo sapien
tctttcagttatcacagtcctgtagtctgttgt

SEQ ID NO: 389011 - DNA, 33 bp, Homo sapien
agaacagaactcaagaagagaatggtagtttca

SEQ ID NO: 389012 - DNA, 33 bp, Homo sapien
agaacagaactcaagaggagaatggtagtttca

SEQ ID NO: 389013 - DNA, 33 bp, Homo sapien
ttgttcttcgtagtgactatggcattgtgaaag

SEQ ID NO: 389014 - DNA, 33 bp, Homo sapien
ttgttcttcgtagtgattatggcattgtgaaag

SEQ ID NO: 389015 - DNA, 33 bp, Homo sapien
gcagctttatccaaaacagcacagctgcaaact

SEQ ID NO: 389016 - DNA, 33 bp, Homo sapien
gcagctttatccaaaatagcacagctgcaaact

SEQ ID NO: 389017 - DNA, 33 bp, Homo sapien
tccttctggcttaaaactgtctctgcactgacc

SEQ ID NO: 389018 - DNA, 33 bp, Homo sapien
tccttctggcttaaaattgtctctgcactgacc

SEQ ID NO: 389019 - DNA, 33 bp, Homo sapien
atcactttggttcagaactctaaaatggaggga

SEQ ID NO: 389020 - DNA, 33 bp, Homo sapien
atcactttggttcagagctctaaaatggaggga

SEQ ID NO: 389021 - DNA, 33 bp, Homo sapien
ccaaattgcaattcctaagacctcaataaaaac

SEQ ID NO: 389022 - DNA, 33 bp, Homo sapien
ccaaattgcaattcctgagacctcaataaaaac

SEQ ID NO: 389023 - DNA, 33 bp, Homo sapien
gggacacatctgtgacaagcttattaaaaatcc

SEQ ID NO: 389024 - DNA, 33 bp, Homo sapien
gggacacatctgtgacgagcttattaaaaatcc

SEQ ID NO: 389025 - DNA, 33 bp, Homo sapien
gactaagaggaattcaataatggtcaaatgaat

SEQ ID NO: 389026 - DNA, 33 bp, Homo sapien
gactaagaggaattcagtaatggtcaaatgaat

SEQ ID NO: 389027 - DNA, 33 bp, Homo sapien
aaagagtatgagtagactaaacgaaatgtggtg

SEQ ID NO: 389028 - DNA, 33 bp, Homo sapien
aaagagtatgagtagattaaacgaaatgtggtg

SEQ ID NO: 389029 - DNA, 33 bp, Homo sapien
gggaatatgtctagaactgagttaaaatacaga

SEQ ID NO: 389030 - DNA, 33 bp, Homo sapien
gggaatatgtctagaagtgagttaaaatacaga

SEQ ID NO: 389031 - DNA, 33 bp, Homo sapien
aggtttggataacctacgctcatttagcaggaa

SEQ ID NO: 389032 - DNA, 33 bp, Homo sapien
aggtttggataacctatgctcatttagcaggaa

SEQ ID NO: 389033 - DNA, 33 bp, Homo sapien
tgtctttcagatctccactatgaataactacag

SEQ ID NO: 389034 - DNA, 33 bp, Homo sapien
tgtctttcagatctccgctatgaataactacag

SEQ ID NO: 389035 - DNA, 33 bp, Homo sapien
agaagcagtaagaagacgccacgtttggagcaa

SEQ ID NO: 389036 - DNA, 33 bp, Homo sapien
agaagcagtaagaagatgccacgtttggagcaa

SEQ ID NO: 389037 - DNA, 33 bp, Homo sapien
acctccagggttcaagaccttcttatgcctccg

SEQ ID NO: 389038 - DNA, 33 bp, Homo sapien
acctccagggttcaagcccttcttatgcctccg

SEQ ID NO: 389039 - DNA, 33 bp, Homo sapien
agaataaccatgatcactaaacctctaaatgtg

SEQ ID NO: 389040 - DNA, 33 bp, Homo sapien
agaataaccatgatcagtaaacctctaaatgtg

SEQ ID NO: 389041 - DNA, 33 bp, Homo sapien
cagacttcaagtccaacctaccttaagcaaatt

SEQ ID NO: 389042 - DNA, 33 bp, Homo sapien
cagacttcaagtccaagctaccttaagcaaatt

SEQ ID NO: 389043 - DNA, 33 bp, Homo sapien
ccgttctgtgatatgaataatcattaagctgct

SEQ ID NO: 389044 - DNA, 33 bp, Homo sapien
ccgttctgtgatatgagtaatcattaagctgct

SEQ ID NO: 389045 - DNA, 33 bp, Homo sapien
acggggagtgcaaagccacaaatccaaattcaa

SEQ ID NO: 389046 - DNA, 33 bp, Homo sapien
acggggagtgcaaagctacaaatccaaattcaa

SEQ ID NO: 389047 - DNA, 33 bp, Homo sapien
tataactcaccatatcaccgctgtctgattggc

SEQ ID NO: 389048 - DNA, 33 bp, Homo sapien
tataactcaccatatcgccgctgtctgattggc

SEQ ID NO: 389049 - DNA, 33 bp, Homo sapien
tctcttcccctgcagccattagattttcttctc

SEQ ID NO: 389050 - DNA, 33 bp, Homo sapien
tctcttcccctgcagcgattagattttcttctc

SEQ ID NO: 389051 - DNA, 33 bp, Homo sapien
aataaaaaactgcccaccttcttcagagactat

SEQ ID NO: 389052 - DNA, 33 bp, Homo sapien
aataaaaaactgcccatcttcttcagagactat

SEQ ID NO: 389053 - DNA, 33 bp, Homo sapien
agactataaccactcacggactttcatactcta

SEQ ID NO: 389054 - DNA, 33 bp, Homo sapien
agactataaccactcatggactttcatactcta

SEQ ID NO: 389055 - DNA, 33 bp, Homo sapien
catgattgacaattacacaatatagacaatcat

SEQ ID NO: 389056 - DNA, 33 bp, Homo sapien
catgattgacaattacgcaatatagacaatcat

SEQ ID NO: 389057 - DNA, 33 bp, Homo sapien
gaataaaagtggacaaagactgaagctttatga

SEQ ID NO: 389058 - DNA, 33 bp, Homo sapien
gaataaaagtggacaaggactgaagctttatga

SEQ ID NO: 389059 - DNA, 33 bp, Homo sapien
tgcgaggtctgaagaaagaagaggaaagacaga

SEQ ID NO: 389060 - DNA, 33 bp, Homo sapien
tgcgaggtctgaagaaggaagaggaaagacaga

SEQ ID NO: 389061 - DNA, 33 bp, Homo sapien
aatcttcattatagggaattcagtgtttggctt

SEQ ID NO: 389062 - DNA, 33 bp, Homo sapien
aatcttcattataggggattcagtgtttggctt

SEQ ID NO: 389063 - DNA, 33 bp, Homo sapien
gtattaagtataatgcaagtattccaaaatctg

SEQ ID NO: 389064 - DNA, 33 bp, Homo sapien
gtattaagtataatgcgagtattccaaaatctg

SEQ ID NO: 389065 - DNA, 33 bp, Homo sapien
tcccctcaattccatacggcgatactgtttaag

SEQ ID NO: 389066 - DNA, 33 bp, Homo sapien
tcccctcaattccatatggcgatactgtttaag

SEQ ID NO: 389067 - DNA, 33 bp, Homo sapien
gatgagggatactcaacctgtataacaactatt

SEQ ID NO: 389068 - DNA, 33 bp, Homo sapien
gatgagggatactcaatctgtataacaactatt

SEQ ID NO: 389069 - DNA, 33 bp, Homo sapien
taaaaacaatgcaggacccaatgaggaaggagc

SEQ ID NO: 389070 - DNA, 33 bp, Homo sapien
taaaaacaatgcaggatccaatgaggaaggagc

SEQ ID NO: 389071 - DNA, 33 bp, Homo sapien
aatgacctcgatacccaagtagtgagcacagta

SEQ ID NO: 389072 - DNA, 33 bp, Homo sapien
aatgacctcgatacccgagtagtgagcacagta

SEQ ID NO: 389073 - DNA, 33 bp, Homo sapien
tacaagcagtgtctcacctcacctacacctgaa

SEQ ID NO: 389074 - DNA, 33 bp, Homo sapien
tacaagcagtgtctcatctcacctacacctgaa

SEQ ID NO: 389075 - DNA, 33 bp, Homo sapien
gtgagtcaagaaacccaatgattccaagcaagg

SEQ ID NO: 389076 - DNA, 33 bp, Homo sapien
gtgagtcaagaaacccgatgattccaagcaagg

SEQ ID NO: 389077 - DNA, 33 bp, Homo sapien
gttttctggataggcacgagacttagttttaag

SEQ ID NO: 389078 - DNA, 33 bp, Homo sapien
gttttctggataggcaggagacttagttttaag

SEQ ID NO: 389079 - DNA, 33 bp, Homo sapien
caacatcccctttgccacctttattgccatgtt

SEQ ID NO: 389080 - DNA, 33 bp, Homo sapien
caacatcccctttgccgcctttattgccatgtt

SEQ ID NO: 389081 - DNA, 33 bp, Homo sapien
tcaaagagatagcggagaattctgcaggaaaga

SEQ ID NO: 389082 - DNA, 33 bp, Homo sapien
tcaaagagatagcggataattctgcaggaaaga

SEQ ID NO: 389083 - DNA, 33 bp, Homo sapien
gtggtttatgatggtgcagcctgtactctgtct

SEQ ID NO: 389084 - DNA, 33 bp, Homo sapien
gtggtttatgatggtgtagcctgtactctgtct

SEQ ID NO: 389085 - DNA, 33 bp, Homo sapien
gtctctataatgggtacgctgaatttcacatta

SEQ ID NO: 389086 - DNA, 33 bp, Homo sapien
gtctctataatgggtatgctgaatttcacatta

SEQ ID NO: 389087 - DNA, 33 bp, Homo sapien
acttgttagagttgaaaaaattctggctcggca

SEQ ID NO: 389088 - DNA, 33 bp, Homo sapien
acttgttagagttgaagaaattctggctcggca

SEQ ID NO: 389089 - DNA, 33 bp, Homo sapien
cataattctttgcacacagtagatactcaaaaa

SEQ ID NO: 389090 - DNA, 33 bp, Homo sapien
cataattctttgcacatagtagatactcaaaaa

SEQ ID NO: 389091 - DNA, 33 bp, Homo sapien
ggcacaccttcaatagaattgtttctgatcaca

SEQ ID NO: 389092 - DNA, 33 bp, Homo sapien
ggcacaccttcaataggattgtttctgatcaca

SEQ ID NO: 389093 - DNA, 33 bp, Homo sapien
gatgatgcccgctgtaccagtgaggttcaatga

SEQ ID NO: 389094 - DNA, 33 bp, Homo sapien
gatgatgcccgctgtatcagtgaggttcaatga

SEQ ID NO: 389095 - DNA, 33 bp, Homo sapien
gatggccccatgtgataaagaaccatgcaacag

SEQ ID NO: 389096 - DNA, 33 bp, Homo sapien
gatggccccatgtgatcaagaaccatgcaacag

SEQ ID NO: 389097 - DNA, 33 bp, Homo sapien
gacatagcctcctagacggcatcatgacagagc

SEQ ID NO: 389098 - DNA, 33 bp, Homo sapien
gacatagcctcctagatggcatcatgacagagc

SEQ ID NO: 389099 - DNA, 33 bp, Homo sapien
gctgcccagagtaagaataggtgtagcactgtg

SEQ ID NO: 389100 - DNA, 33 bp, Homo sapien
gctgcccagagtaagagtaggtgtagcactgtg

SEQ ID NO: 389101 - DNA, 33 bp, Homo sapien
tgtggctcattttaccaagaacacagaagagag

SEQ ID NO: 389102 - DNA, 33 bp, Homo sapien
tgtggctcattttacctagaacacagaagagag

SEQ ID NO: 389103 - DNA, 33 bp, Homo sapien
acccctggaaagaagacgacagaggtcttggca

SEQ ID NO: 389104 - DNA, 33 bp, Homo sapien
acccctggaaagaagatgacagaggtcttggca

SEQ ID NO: 389105 - DNA, 33 bp, Homo sapien
cttgaaatcttcttggaatcttatccaggctct

SEQ ID NO: 389106 - DNA, 33 bp, Homo sapien
cttgaaatcttcttgggatcttatccaggctct

SEQ ID NO: 389107 - DNA, 33 bp, Homo sapien
ggcagacatgaggagacaagtaggaagttcaag

SEQ ID NO: 389108 - DNA, 33 bp, Homo sapien
ggcagacatgaggagataagtaggaagttcaag

SEQ ID NO: 389109 - DNA, 33 bp, Homo sapien
agggctcctgatggataatagtgtctgtccatt

SEQ ID NO: 389110 - DNA, 33 bp, Homo sapien
agggctcctgatggatcatagtgtctgtccatt

SEQ ID NO: 389111 - DNA, 33 bp, Homo sapien
aaggggtcatgaataaaaacatcagctctaaat

SEQ ID NO: 389112 - DNA, 33 bp, Homo sapien
aaggggtcatgaataataacatcagctctaaat

SEQ ID NO: 389113 - DNA, 33 bp, Homo sapien
tcttattagatacttaccacaattcctaattct

SEQ ID NO: 389114 - DNA, 33 bp, Homo sapien
tcttattagatacttatcacaattcctaattct

SEQ ID NO: 389115 - DNA, 33 bp, Homo sapien
taaagccattccttcaacctacactggtgaccg

SEQ ID NO: 389116 - DNA, 33 bp, Homo sapien
taaagccattccttcatcctacactggtgaccg

SEQ ID NO: 389117 - DNA, 33 bp, Homo sapien
tagttttgttcaggaccacagactgagaactac

SEQ ID NO: 389118 - DNA, 33 bp, Homo sapien
tagttttgttcaggacgacagactgagaactac

SEQ ID NO: 389119 - DNA, 33 bp, Homo sapien
tgtgcgcagaagcagcagattaacggaagaaca

SEQ ID NO: 389120 - DNA, 33 bp, Homo sapien
tgtgcgcagaagcagccgattaacggaagaaca

SEQ ID NO: 389121 - DNA, 33 bp, Homo sapien
gggaaggtgagtccccaacttgcttgagcatag

SEQ ID NO: 389122 - DNA, 33 bp, Homo sapien
gggaaggtgagtccccgacttgcttgagcatag

SEQ ID NO: 389123 - DNA, 33 bp, Homo sapien
ggggactcaccttcccagcactggtactgcacc

SEQ ID NO: 389124 - DNA, 33 bp, Homo sapien
ggggactcaccttcccggcactggtactgcacc

SEQ ID NO: 389125 - DNA, 33 bp, Homo sapien
aatcctgcgtctatcagggtaccacatgcccac

SEQ ID NO: 389126 - DNA, 33 bp, Homo sapien
aatcctgcgtctatcatggtaccacatgcccac

SEQ ID NO: 389127 - DNA, 33 bp, Homo sapien
cacagcagttcccccaatggaagctccaattaa

SEQ ID NO: 389128 - DNA, 33 bp, Homo sapien
cacagcagttcccccagtggaagctccaattaa

SEQ ID NO: 389129 - DNA, 33 bp, Homo sapien
tctgcaacagccacacagtatccctggagaggt

SEQ ID NO: 389130 - DNA, 33 bp, Homo sapien
tctgcaacagccacacggtatccctggagaggt

SEQ ID NO: 389131 - DNA, 33 bp, Homo sapien
tctagctggatgtgaaaggatgttcaatacaca

SEQ ID NO: 389132 - DNA, 33 bp, Homo sapien
tctagctggatgtgaatggatgttcaatacaca

SEQ ID NO: 389133 - DNA, 33 bp, Homo sapien
catttaagcctcacacagatcccatgaggtaag

SEQ ID NO: 389134 - DNA, 33 bp, Homo sapien
catttaagcctcacacggatcccatgaggtaag

SEQ ID NO: 389135 - DNA, 33 bp, Homo sapien
agggagacagacaactaagctgtttaagccaca

SEQ ID NO: 389136 - DNA, 33 bp, Homo sapien
agggagacagacaacttagctgtttaagccaca

SEQ ID NO: 389137 - DNA, 33 bp, Homo sapien
tcccctctctgattcaacacattattcatcacc

SEQ ID NO: 389138 - DNA, 33 bp, Homo sapien
tcccctctctgattcaccacattattcatcacc

SEQ ID NO: 389139 - DNA, 33 bp, Homo sapien
aagtagtggataaggacggtcagttctgagctt

SEQ ID NO: 389140 - DNA, 33 bp, Homo sapien
aagtagtggataaggatggtcagttctgagctt

SEQ ID NO: 389141 - DNA, 33 bp, Homo sapien
catacaagagctggacaagatgactcacaccta

SEQ ID NO: 389142 - DNA, 33 bp, Homo sapien
catacaagagctggacgagatgactcacaccta

SEQ ID NO: 389143 - DNA, 33 bp, Homo sapien
tcttcaggagtcagggcattgattcaccaattc

SEQ ID NO: 389144 - DNA, 33 bp, Homo sapien
tcttcaggagtcagggtattgattcaccaattc

SEQ ID NO: 389145 - DNA, 33 bp, Homo sapien
ccccttcccaaaatcactcaaggaaaaggatcc

SEQ ID NO: 389146 - DNA, 33 bp, Homo sapien
ccccttcccaaaatcattcaaggaaaaggatcc

SEQ ID NO: 389147 - DNA, 33 bp, Homo sapien
tgaatgaatggatacacggactaatttacattt

SEQ ID NO: 389148 - DNA, 33 bp, Homo sapien
tgaatgaatggatacatggactaatttacattt

SEQ ID NO: 389149 - DNA, 33 bp, Homo sapien
ctccaggcaggaggaccattggccatttattga

SEQ ID NO: 389150 - DNA, 33 bp, Homo sapien
ctccaggcaggaggactattggccatttattga

SEQ ID NO: 389151 - DNA, 33 bp, Homo sapien
acttactgtgtatgtacatggcttcacagccag

SEQ ID NO: 389152 - DNA, 33 bp, Homo sapien
acttactgtgtatgtatatggcttcacagccag

SEQ ID NO: 389153 - DNA, 33 bp, Homo sapien
actgaacaagccaacaatgagaagacaaccttc

SEQ ID NO: 389154 - DNA, 33 bp, Homo sapien
actgaacaagccaacagtgagaagacaaccttc

SEQ ID NO: 389155 - DNA, 33 bp, Homo sapien
catttagtactgccaaccaggtgattccaatgt

SEQ ID NO: 389156 - DNA, 33 bp, Homo sapien
catttagtactgccaatcaggtgattccaatgt

SEQ ID NO: 389157 - DNA, 33 bp, Homo sapien
ttatttttgcaccaaccaaataataaagacagt

SEQ ID NO: 389158 - DNA, 33 bp, Homo sapien
ttatttttgcaccaacgaaataataaagacagt

SEQ ID NO: 389159 - DNA, 33 bp, Homo sapien
cccatctgtcaatagggaggcttgatgtagagg

SEQ ID NO: 389160 - DNA, 33 bp, Homo sapien
cccatctgtcaataggtaggcttgatgtagagg

SEQ ID NO: 389161 - DNA, 33 bp, Homo sapien
atttgttgtgttaaaacataccactgaaataat

SEQ ID NO: 389162 - DNA, 33 bp, Homo sapien
atttgttgtgttaaaatataccactgaaataat

SEQ ID NO: 389163 - DNA, 33 bp, Homo sapien
tgagatttgcaaggaacaaaacattcaaaccgt

SEQ ID NO: 389164 - DNA, 33 bp, Homo sapien
tgagatttgcaaggaagaaaacattcaaaccgt

SEQ ID NO: 389165 - DNA, 33 bp, Homo sapien
ggatttgccaatttcaccacccataaacccctc

SEQ ID NO: 389166 - DNA, 33 bp, Homo sapien
ggatttgccaatttcatcacccataaacccctc

SEQ ID NO: 389167 - DNA, 33 bp, Homo sapien
gtggatataagtctgaaaaaggacacatatcaa

SEQ ID NO: 389168 - DNA, 33 bp, Homo sapien
gtggatataagtctgagaaaggacacatatcaa

SEQ ID NO: 389169 - DNA, 33 bp, Homo sapien
attggatgaacagccacgtcccatgaaatcagc

SEQ ID NO: 389170 - DNA, 33 bp, Homo sapien
attggatgaacagccatgtcccatgaaatcagc

SEQ ID NO: 389171 - DNA, 33 bp, Homo sapien
ccactactggaggtgactacgggttaggctctg

SEQ ID NO: 389172 - DNA, 33 bp, Homo sapien
ccactactggaggtgagtacgggttaggctctg

SEQ ID NO: 389173 - DNA, 33 bp, Homo sapien
cctttccactcagtgacattaaactctctcaga

SEQ ID NO: 389174 - DNA, 33 bp, Homo sapien
cctttccactcagtgatattaaactctctcaga

SEQ ID NO: 389175 - DNA, 33 bp, Homo sapien
ctgaagacaaagtcacaacgccaagatgacctt

SEQ ID NO: 389176 - DNA, 33 bp, Homo sapien
ctgaagacaaagtcacgacgccaagatgacctt

SEQ ID NO: 389177 - DNA, 33 bp, Homo sapien
ttccaatggtaatgcaaataaccctgaactaga

SEQ ID NO: 389178 - DNA, 33 bp, Homo sapien
ttccaatggtaatgcagataaccctgaactaga

SEQ ID NO: 389179 - DNA, 33 bp, Homo sapien
agggttggggaggccactcagtttacacgttaa

SEQ ID NO: 389180 - DNA, 33 bp, Homo sapien
agggttggggaggccattcagtttacacgttaa

SEQ ID NO: 389181 - DNA, 33 bp, Homo sapien
ggattatcctgttcaccgggctccaccccattc

SEQ ID NO: 389182 - DNA, 33 bp, Homo sapien
ggattatcctgttcactgggctccaccccattc

SEQ ID NO: 389183 - DNA, 33 bp, Homo sapien
ctacagtgaacaaaccaagactaaccaacccca

SEQ ID NO: 389184 - DNA, 33 bp, Homo sapien
ctacagtgaacaaaccgagactaaccaacccca

SEQ ID NO: 389185 - DNA, 33 bp, Homo sapien
gttcactgtagagtggccatgagtacctgagga

SEQ ID NO: 389186 - DNA, 33 bp, Homo sapien
gttcactgtagagtggtcatgagtacctgagga

SEQ ID NO: 389187 - DNA, 33 bp, Homo sapien
cactaccatatgccagccgcttaggggaaacca

SEQ ID NO: 389188 - DNA, 33 bp, Homo sapien
cactaccatatgccaggcgcttaggggaaacca

SEQ ID NO: 389189 - DNA, 33 bp, Homo sapien
aattagtctcttcaccccccagtcagggcccac

SEQ ID NO: 389190 - DNA, 33 bp, Homo sapien
aattagtctcttcacctcccagtcagggcccac

SEQ ID NO: 389191 - DNA, 33 bp, Homo sapien
gacagtgaaaattccaccctgtcttgcctggaa

SEQ ID NO: 389192 - DNA, 33 bp, Homo sapien
gacagtgaaaattccatcctgtcttgcctggaa

SEQ ID NO: 389193 - DNA, 33 bp, Homo sapien
agggtgggatggcatcaacaacagattagaggc

SEQ ID NO: 389194 - DNA, 33 bp, Homo sapien
agggtgggatggcatcgacaacagattagaggc

SEQ ID NO: 389195 - DNA, 33 bp, Homo sapien
ggacagtttaggaagactagtgaaatacagagc

SEQ ID NO: 389196 - DNA, 33 bp, Homo sapien
ggacagtttaggaagattagtgaaatacagagc

SEQ ID NO: 389197 - DNA, 33 bp, Homo sapien
agaattaaggaggaaaacaactggatgctaatt

SEQ ID NO: 389198 - DNA, 33 bp, Homo sapien
agaattaaggaggaaatcaactggatgctaatt

SEQ ID NO: 389199 - DNA, 33 bp, Homo sapien
cagagctgtcaagggccagaagaatataattaa

SEQ ID NO: 389200 - DNA, 33 bp, Homo sapien
cagagctgtcaagggctagaagaatataattaa

SEQ ID NO: 389201 - DNA, 33 bp, Homo sapien
aactctgccaaataatcactccctccagcagac

SEQ ID NO: 389202 - DNA, 33 bp, Homo sapien
aactctgccaaataatgactccctccagcagac

SEQ ID NO: 389203 - DNA, 33 bp, Homo sapien
gatatagtctccaaagcaggtttacctgtagtc

SEQ ID NO: 389204 - DNA, 33 bp, Homo sapien
gatatagtctccaaagtaggtttacctgtagtc

SEQ ID NO: 389205 - DNA, 33 bp, Homo sapien
ttcttccagatacaaacgtaattggacatggtt

SEQ ID NO: 389206 - DNA, 33 bp, Homo sapien
ttcttccagatacaaatgtaattggacatggtt

SEQ ID NO: 389207 - DNA, 33 bp, Homo sapien
catctacatggaagaacagcatttccacagacg

SEQ ID NO: 389208 - DNA, 33 bp, Homo sapien
catctacatggaagaagagcatttccacagacg

SEQ ID NO: 389209 - DNA, 33 bp, Homo sapien
agctaaagggttaataactgatcattttttcct

SEQ ID NO: 389210 - DNA, 33 bp, Homo sapien
agctaaagggttaatagctgatcattttttcct

SEQ ID NO: 389211 - DNA, 33 bp, Homo sapien
gagcaagactgcttcccgatagatttgagtgat

SEQ ID NO: 389212 - DNA, 33 bp, Homo sapien
gagcaagactgcttccggatagatttgagtgat

SEQ ID NO: 389213 - DNA, 33 bp, Homo sapien
gctggatgatcatctacctgtctgccaagaatg

SEQ ID NO: 389214 - DNA, 33 bp, Homo sapien
gctggatgatcatctatctgtctgccaagaatg

SEQ ID NO: 389215 - DNA, 33 bp, Homo sapien
tagcacagataattgaagaagcacctattaacc

SEQ ID NO: 389216 - DNA, 33 bp, Homo sapien
tagcacagataattgacgaagcacctattaacc

SEQ ID NO: 389217 - DNA, 33 bp, Homo sapien
gttaactttaggtctacgtatttctataacttt

SEQ ID NO: 389218 - DNA, 33 bp, Homo sapien
gttaactttaggtctatgtatttctataacttt

SEQ ID NO: 389219 - DNA, 33 bp, Homo sapien
agtaggaaatgtcagtcaatgcacacagtgaca

SEQ ID NO: 389220 - DNA, 33 bp, Homo sapien
agtaggaaatgtcagtgaatgcacacagtgaca

SEQ ID NO: 389221 - DNA, 33 bp, Homo sapien
tatgtgctgaagatacagagataataaggactg

SEQ ID NO: 389222 - DNA, 33 bp, Homo sapien
tatgtgctgaagatacggagataataaggactg

SEQ ID NO: 389223 - DNA, 33 bp, Homo sapien
gacattaagtcatcaagtaactgcttctccagt

SEQ ID NO: 389224 - DNA, 33 bp, Homo sapien
gacattaagtcatcaattaactgcttctccagt

SEQ ID NO: 389225 - DNA, 33 bp, Homo sapien
cctgttgcatcttctcagaattagctcccttac

SEQ ID NO: 389226 - DNA, 33 bp, Homo sapien
cctgttgcatcttctcggaattagctcccttac

SEQ ID NO: 389227 - DNA, 33 bp, Homo sapien
cataaacgccacagcacatatagaaacagcatc

SEQ ID NO: 389228 - DNA, 33 bp, Homo sapien
cataaacgccacagcatatatagaaacagcatc

SEQ ID NO: 389229 - DNA, 33 bp, Homo sapien
attcaggtcaggtgaacagatattaaactgtct

SEQ ID NO: 389230 - DNA, 33 bp, Homo sapien
attcaggtcaggtgaatagatattaaactgtct

SEQ ID NO: 389231 - DNA, 33 bp, Homo sapien
tctctctttcctcacacattttattgttgtaac

SEQ ID NO: 389232 - DNA, 33 bp, Homo sapien
tctctctttcctcacatattttattgttgtaac

SEQ ID NO: 389233 - DNA, 33 bp, Homo sapien
tcactgcgtgccctcacctaaaacagcatgaaa

SEQ ID NO: 389234 - DNA, 33 bp, Homo sapien
tcactgcgtgccctcatctaaaacagcatgaaa

SEQ ID NO: 389235 - DNA, 33 bp, Homo sapien
ctatcaggttgttacacatttgtactggataag

SEQ ID NO: 389236 - DNA, 33 bp, Homo sapien
ctatcaggttgttacatatttgtactggataag

SEQ ID NO: 389237 - DNA, 33 bp, Homo sapien
ccagaactcctcaacaaaagaagagccagaaaa

SEQ ID NO: 389238 - DNA, 33 bp, Homo sapien
ccagaactcctcaacagaagaagagccagaaaa

SEQ ID NO: 389239 - DNA, 33 bp, Homo sapien
taaatgtggctgtagacgttggaggctagggag

SEQ ID NO: 389240 - DNA, 33 bp, Homo sapien
taaatgtggctgtagatgttggaggctagggag

SEQ ID NO: 389241 - DNA, 33 bp, Homo sapien
actttgatattttacacgatagcaattcccact

SEQ ID NO: 389242 - DNA, 33 bp, Homo sapien
actttgatattttacatgatagcaattcccact

SEQ ID NO: 389243 - DNA, 33 bp, Homo sapien
attttatgcaatgtcaaatttctaatcaattta

SEQ ID NO: 389244 - DNA, 33 bp, Homo sapien
attttatgcaatgtcagatttctaatcaattta

SEQ ID NO: 389245 - DNA, 33 bp, Homo sapien
aaggggtatgtcctggaaagattttgacaccca

SEQ ID NO: 389246 - DNA, 33 bp, Homo sapien
aaggggtatgtcctgggaagattttgacaccca

SEQ ID NO: 389247 - DNA, 33 bp, Homo sapien
aagaagtgtatgataccatagaaggattaagta

SEQ ID NO: 389248 - DNA, 33 bp, Homo sapien
aagaagtgtatgatacgatagaaggattaagta

SEQ ID NO: 389249 - DNA, 33 bp, Homo sapien
gacaagctgagcacatcatatactcctacctct

SEQ ID NO: 389250 - DNA, 33 bp, Homo sapien
gacaagctgagcacattatatactcctacctct

SEQ ID NO: 389251 - DNA, 33 bp, Homo sapien
tattctcagctctggaaggagagggaacgagcc

SEQ ID NO: 389252 - DNA, 33 bp, Homo sapien
tattctcagctctggagggagagggaacgagcc

SEQ ID NO: 389253 - DNA, 33 bp, Homo sapien
aaacacgggatcaagaccattagagatttatag

SEQ ID NO: 389254 - DNA, 33 bp, Homo sapien
aaacacgggatcaagatcattagagatttatag

SEQ ID NO: 389255 - DNA, 33 bp, Homo sapien
tggagagaacaatcaaggctggttcaaacgaaa

SEQ ID NO: 389256 - DNA, 33 bp, Homo sapien
tggagagaacaatcaatgctggttcaaacgaaa

SEQ ID NO: 389257 - DNA, 33 bp, Homo sapien
tttcttaatagcttctcactttcttatctcttc

SEQ ID NO: 389258 - DNA, 33 bp, Homo sapien
tttcttaatagcttctgactttcttatctcttc

SEQ ID NO: 389259 - DNA, 33 bp, Homo sapien
acctctgcaggaaaaaaaccttgagattcctga

SEQ ID NO: 389260 - DNA, 33 bp, Homo sapien
acctctgcaggaaaaagaccttgagattcctga

SEQ ID NO: 389261 - DNA, 33 bp, Homo sapien
ctcaggacattggtaccgcatctccccctaaca

SEQ ID NO: 389262 - DNA, 33 bp, Homo sapien
ctcaggacattggtactgcatctccccctaaca

SEQ ID NO: 389263 - DNA, 33 bp, Homo sapien
cagaactcacattaagaagcttgaatttcatcc

SEQ ID NO: 389264 - DNA, 33 bp, Homo sapien
cagaactcacattaaggagcttgaatttcatcc

SEQ ID NO: 389265 - DNA, 33 bp, Homo sapien
ttaaaaaatgctttgacgtgcaatgaccaaaaa

SEQ ID NO: 389266 - DNA, 33 bp, Homo sapien
ttaaaaaatgctttgatgtgcaatgaccaaaaa

SEQ ID NO: 389267 - DNA, 33 bp, Homo sapien
atcttatggaacagaaaaagaatgatgcatgcc

SEQ ID NO: 389268 - DNA, 33 bp, Homo sapien
atcttatggaacagaataagaatgatgcatgcc

SEQ ID NO: 389269 - DNA, 33 bp, Homo sapien
gtactaagggaaatacgccagtcgcaaaaagct

SEQ ID NO: 389270 - DNA, 33 bp, Homo sapien
gtactaagggaaatactccagtcgcaaaaagct

SEQ ID NO: 389271 - DNA, 33 bp, Homo sapien
ctcaggacaagatgtcagaagaagtcagttctc

SEQ ID NO: 389272 - DNA, 33 bp, Homo sapien
ctcaggacaagatgtcggaagaagtcagttctc

SEQ ID NO: 389273 - DNA, 33 bp, Homo sapien
cccaagcaccagataccatgctggaggccttat

SEQ ID NO: 389274 - DNA, 33 bp, Homo sapien
cccaagcaccagatactatgctggaggccttat

SEQ ID NO: 389275 - DNA, 33 bp, Homo sapien
gttcttcactggacagaatattttggagaccct

SEQ ID NO: 389276 - DNA, 33 bp, Homo sapien
gttcttcactggacagtatattttggagaccct

SEQ ID NO: 389277 - DNA, 33 bp, Homo sapien
cactgcacaccccaaacgccaggacgagcgctg

SEQ ID NO: 389278 - DNA, 33 bp, Homo sapien
cactgcacaccccaaatgccaggacgagcgctg

SEQ ID NO: 389279 - DNA, 33 bp, Homo sapien
aaacctctctaagcaacgtgctttgttcaatgg

SEQ ID NO: 389280 - DNA, 33 bp, Homo sapien
aaacctctctaagcaatgtgctttgttcaatgg

SEQ ID NO: 389281 - DNA, 33 bp, Homo sapien
gcaagctgttcattcaaccaaactatgtctgtt

SEQ ID NO: 389282 - DNA, 33 bp, Homo sapien
gcaagctgttcattcatccaaactatgtctgtt

SEQ ID NO: 389283 - DNA, 33 bp, Homo sapien
ccagccctcctaatcaacctgcccgatcactgt

SEQ ID NO: 389284 - DNA, 33 bp, Homo sapien
ccagccctcctaatcaccctgcccgatcactgt

SEQ ID NO: 389285 - DNA, 33 bp, Homo sapien
tcccaggattgtgagaataaatgacatggtata

SEQ ID NO: 389286 - DNA, 33 bp, Homo sapien
tcccaggattgtgagagtaaatgacatggtata

SEQ ID NO: 389287 - DNA, 33 bp, Homo sapien
tcagcacattttcaaacggagtatgtcattccc

SEQ ID NO: 389288 - DNA, 33 bp, Homo sapien
tcagcacattttcaaagggagtatgtcattccc

SEQ ID NO: 389289 - DNA, 33 bp, Homo sapien
actcttgtatggttccacctaaggaaaaatgaa

SEQ ID NO: 389290 - DNA, 33 bp, Homo sapien
actcttgtatggttccgcctaaggaaaaatgaa

SEQ ID NO: 389291 - DNA, 33 bp, Homo sapien
gctacagcgaagagatcacatgaggaagtcaag

SEQ ID NO: 389292 - DNA, 33 bp, Homo sapien
gctacagcgaagagatgacatgaggaagtcaag

SEQ ID NO: 389293 - DNA, 33 bp, Homo sapien
atggcagtggaattgagtacagagagggctgct

SEQ ID NO: 389294 - DNA, 33 bp, Homo sapien
atggcagtggaattgattacagagagggctgct

SEQ ID NO: 389295 - DNA, 33 bp, Homo sapien
cttttgtccttacttcccgacgtcagccaagtt

SEQ ID NO: 389296 - DNA, 33 bp, Homo sapien
cttttgtccttacttcgcgacgtcagccaagtt

SEQ ID NO: 389297 - DNA, 33 bp, Homo sapien
gttgatgcttgaaaaacggcagctggttgtgtc

SEQ ID NO: 389298 - DNA, 33 bp, Homo sapien
gttgatgcttgaaaaatggcagctggttgtgtc

SEQ ID NO: 389299 - DNA, 33 bp, Homo sapien
aataataaaatctccacctgagtccaaagccct

SEQ ID NO: 389300 - DNA, 33 bp, Homo sapien
aataataaaatctccatctgagtccaaagccct

SEQ ID NO: 389301 - DNA, 33 bp, Homo sapien
tccgtgttcattttcccctcctccagtagaatg

SEQ ID NO: 389302 - DNA, 33 bp, Homo sapien
tccgtgttcattttcctctcctccagtagaatg

SEQ ID NO: 389303 - DNA, 33 bp, Homo sapien
gaagccacagtttgcacataaagcaagctgagg

SEQ ID NO: 389304 - DNA, 33 bp, Homo sapien
gaagccacagtttgcagataaagcaagctgagg

SEQ ID NO: 389305 - DNA, 33 bp, Homo sapien
ctaccgaggagaaaaaagtaccagtgtattgtg

SEQ ID NO: 389306 - DNA, 33 bp, Homo sapien
ctaccgaggagaaaaaggtaccagtgtattgtg

SEQ ID NO: 389307 - DNA, 33 bp, Homo sapien
caacagccaagtcactaagggaggccagcagat

SEQ ID NO: 389308 - DNA, 33 bp, Homo sapien
caacagccaagtcactgagggaggccagcagat

SEQ ID NO: 389309 - DNA, 33 bp, Homo sapien
cagggcatctgtgcaacccacttttatggcctc

SEQ ID NO: 389310 - DNA, 33 bp, Homo sapien
cagggcatctgtgcaatccacttttatggcctc

SEQ ID NO: 389311 - DNA, 33 bp, Homo sapien
cccagaagggtctctgcaagcaaggcgactgtc

SEQ ID NO: 389312 - DNA, 33 bp, Homo sapien
cccagaagggtctctggaagcaaggcgactgtc

SEQ ID NO: 389313 - DNA, 33 bp, Homo sapien
ccttcccatcataaaagctgctgctcttaaggc

SEQ ID NO: 389314 - DNA, 33 bp, Homo sapien
ccttcccatcataaaatctgctgctcttaaggc

SEQ ID NO: 389315 - DNA, 33 bp, Homo sapien
ccttgtgtaaaaacaaactaggaattcacaagg

SEQ ID NO: 389316 - DNA, 33 bp, Homo sapien
ccttgtgtaaaaacaagctaggaattcacaagg

SEQ ID NO: 389317 - DNA, 33 bp, Homo sapien
ttaactgggagaagacagtctggcacagggaaa

SEQ ID NO: 389318 - DNA, 33 bp, Homo sapien
ttaactgggagaagacggtctggcacagggaaa

SEQ ID NO: 389319 - DNA, 33 bp, Homo sapien
ctcccaaagcactcaacagtaaatcaatagtgc

SEQ ID NO: 389320 - DNA, 33 bp, Homo sapien
ctcccaaagcactcaatagtaaatcaatagtgc

SEQ ID NO: 389321 - DNA, 33 bp, Homo sapien
tggcaggaggtccacagtgaaaagagatgtctg

SEQ ID NO: 389322 - DNA, 33 bp, Homo sapien
tggcaggaggtccacattgaaaagagatgtctg

SEQ ID NO: 389323 - DNA, 33 bp, Homo sapien
tgtgcctgagtagagaacagcccagagaaccca

SEQ ID NO: 389324 - DNA, 33 bp, Homo sapien
tgtgcctgagtagagatcagcccagagaaccca

SEQ ID NO: 389325 - DNA, 33 bp, Homo sapien
caaagaggacaacatactaacaatgctctagtc

SEQ ID NO: 389326 - DNA, 33 bp, Homo sapien
caaagaggacaacatagtaacaatgctctagtc

SEQ ID NO: 389327 - DNA, 33 bp, Homo sapien
taaaagcctaagaaggcaacaacgtgaatgccc

SEQ ID NO: 389328 - DNA, 33 bp, Homo sapien
taaaagcctaagaagggaacaacgtgaatgccc

SEQ ID NO: 389329 - DNA, 33 bp, Homo sapien
ttcgcctggggtaataaagtatcagaatcctct

SEQ ID NO: 389330 - DNA, 33 bp, Homo sapien
ttcgcctggggtaatacagtatcagaatcctct

SEQ ID NO: 389331 - DNA, 33 bp, Homo sapien
aagttggagagtaataactgctacataaatgat

SEQ ID NO: 389332 - DNA, 33 bp, Homo sapien
aagttggagagtaatacctgctacataaatgat

SEQ ID NO: 389333 - DNA, 33 bp, Homo sapien
ttcaaatgaggacgtaccttacaaaaagtcaac

SEQ ID NO: 389334 - DNA, 33 bp, Homo sapien
ttcaaatgaggacgtatcttacaaaaagtcaac

SEQ ID NO: 389335 - DNA, 33 bp, Homo sapien
ctgccgaatttcactcgaaggggttgttggaac

SEQ ID NO: 389336 - DNA, 33 bp, Homo sapien
ctgccgaatttcactctaaggggttgttggaac

SEQ ID NO: 389337 - DNA, 33 bp, Homo sapien
taagaacatggagacacaggctggccccaaaca

SEQ ID NO: 389338 - DNA, 33 bp, Homo sapien
taagaacatggagacataggctggccccaaaca

SEQ ID NO: 389339 - DNA, 33 bp, Homo sapien
ttcaccctggttcttacgagttatcgtgtctcc

SEQ ID NO: 389340 - DNA, 33 bp, Homo sapien
ttcaccctggttcttatgagttatcgtgtctcc

SEQ ID NO: 389341 - DNA, 33 bp, Homo sapien
ctggctgagaagcagaaaaatgaaaaaacattt

SEQ ID NO: 389342 - DNA, 33 bp, Homo sapien
ctggctgagaagcagagaaatgaaaaaacattt

SEQ ID NO: 389343 - DNA, 33 bp, Homo sapien
gtcatgtcctctgcccgaggtatttatcagcct

SEQ ID NO: 389344 - DNA, 33 bp, Homo sapien
gtcatgtcctctgccctaggtatttatcagcct

SEQ ID NO: 389345 - DNA, 33 bp, Homo sapien
ctgcttttccacgctcaagggtcactttgttat

SEQ ID NO: 389346 - DNA, 33 bp, Homo sapien
ctgcttttccacgctccagggtcactttgttat

SEQ ID NO: 389347 - DNA, 33 bp, Homo sapien
accttaataagccgaaatagctgtgaatcagtg

SEQ ID NO: 389348 - DNA, 33 bp, Homo sapien
accttaataagccgaagtagctgtgaatcagtg

SEQ ID NO: 389349 - DNA, 33 bp, Homo sapien
atcgtacattttacgaagaaggcatctgtagca

SEQ ID NO: 389350 - DNA, 33 bp, Homo sapien
atcgtacattttacgaggaaggcatctgtagca

SEQ ID NO: 389351 - DNA, 33 bp, Homo sapien
aagtcccgatttgcaacgcttgcccgtttctac

SEQ ID NO: 389352 - DNA, 33 bp, Homo sapien
aagtcccgatttgcaatgcttgcccgtttctac

SEQ ID NO: 389353 - DNA, 33 bp, Homo sapien
tttgacctggtgtcaacctctctgagactcggt

SEQ ID NO: 389354 - DNA, 33 bp, Homo sapien
tttgacctggtgtcaatctctctgagactcggt

SEQ ID NO: 389355 - DNA, 33 bp, Homo sapien
gacagttggctttgacagacagatgctggaggg

SEQ ID NO: 389356 - DNA, 33 bp, Homo sapien
gacagttggctttgacggacagatgctggaggg

SEQ ID NO: 389357 - DNA, 33 bp, Homo sapien
atatcagcaagtttcacactgagagagaaatgt

SEQ ID NO: 389358 - DNA, 33 bp, Homo sapien
atatcagcaagtttcagactgagagagaaatgt

SEQ ID NO: 389359 - DNA, 33 bp, Homo sapien
ttctgctacctcaacacagagctccgagacggc

SEQ ID NO: 389360 - DNA, 33 bp, Homo sapien
ttctgctacctcaacagagagctccgagacggc

SEQ ID NO: 389361 - DNA, 33 bp, Homo sapien
ttttggccagaaaaagcacccaagtctgtcttt

SEQ ID NO: 389362 - DNA, 33 bp, Homo sapien
ttttggccagaaaaagtacccaagtctgtcttt

SEQ ID NO: 389363 - DNA, 33 bp, Homo sapien
tttttaatctcacaaacggaaagtcatacagca

SEQ ID NO: 389364 - DNA, 33 bp, Homo sapien
tttttaatctcacaaatggaaagtcatacagca

SEQ ID NO: 389365 - DNA, 33 bp, Homo sapien
tctcttcctggtctggaaaatgcaggatccccc

SEQ ID NO: 389366 - DNA, 33 bp, Homo sapien
tctcttcctggtctggcaaatgcaggatccccc

SEQ ID NO: 389367 - DNA, 33 bp, Homo sapien
cagcttcagccatcaaacctctctacctccacc

SEQ ID NO: 389368 - DNA, 33 bp, Homo sapien
cagcttcagccatcaaccctctctacctccacc

SEQ ID NO: 389369 - DNA, 33 bp, Homo sapien
tttatggtagaattaacctgttgggccttagac

SEQ ID NO: 389370 - DNA, 33 bp, Homo sapien
tttatggtagaattaagctgttgggccttagac

SEQ ID NO: 389371 - DNA, 33 bp, Homo sapien
gagtacacgctgcatgaaagccagtctgagagc

SEQ ID NO: 389372 - DNA, 33 bp, Homo sapien
gagtacacgctgcatggaagccagtctgagagc

SEQ ID NO: 389373 - DNA, 33 bp, Homo sapien
acctaggctaaacatcacagcgggtgaaacaaa

SEQ ID NO: 389374 - DNA, 33 bp, Homo sapien
acctaggctaaacatcgcagcgggtgaaacaaa

SEQ ID NO: 389375 - DNA, 33 bp, Homo sapien
cgcagtttgggaagccactgtaatgcgtcattt

SEQ ID NO: 389376 - DNA, 33 bp, Homo sapien
cgcagtttgggaagccgctgtaatgcgtcattt

SEQ ID NO: 389377 - DNA, 33 bp, Homo sapien
aaatataccggcgctcaaaaaagtcctgatgca

SEQ ID NO: 389378 - DNA, 33 bp, Homo sapien
aaatataccggcgctccaaaaagtcctgatgca

SEQ ID NO: 389379 - DNA, 33 bp, Homo sapien
tacttcattgaggtaaaatccacacaccataaa

SEQ ID NO: 389380 - DNA, 33 bp, Homo sapien
tacttcattgaggtaagatccacacaccataaa

SEQ ID NO: 389381 - DNA, 33 bp, Homo sapien
gaggcaacactgtccccattatctgtgcacatt

SEQ ID NO: 389382 - DNA, 33 bp, Homo sapien
gaggcaacactgtcccgattatctgtgcacatt

SEQ ID NO: 389383 - DNA, 33 bp, Homo sapien
tcaacatcaacctaaaacccgctcataacctct

SEQ ID NO: 389384 - DNA, 33 bp, Homo sapien
tcaacatcaacctaaaccccgctcataacctct

SEQ ID NO: 389385 - DNA, 33 bp, Homo sapien
tctctgggtacaaactaaaaccacagactctga

SEQ ID NO: 389386 - DNA, 33 bp, Homo sapien
tctctgggtacaaactgaaaccacagactctga

SEQ ID NO: 389387 - DNA, 33 bp, Homo sapien
actgaaggagatgaaacgtaaaacctaggccaa

SEQ ID NO: 389388 - DNA, 33 bp, Homo sapien
actgaaggagatgaaatgtaaaacctaggccaa

SEQ ID NO: 389389 - DNA, 33 bp, Homo sapien
ctgacttgcaaaaacacaattaggttgaatgga

SEQ ID NO: 389390 - DNA, 33 bp, Homo sapien
ctgacttgcaaaaacataattaggttgaatgga

SEQ ID NO: 389391 - DNA, 33 bp, Homo sapien
ttctgtgactcttcaactggtggctttagcact

SEQ ID NO: 389392 - DNA, 33 bp, Homo sapien
ttctgtgactcttcaattggtggctttagcact

SEQ ID NO: 389393 - DNA, 33 bp, Homo sapien
tcaggctgtaattccaaaagttctagagtactt

SEQ ID NO: 389394 - DNA, 33 bp, Homo sapien
tcaggctgtaattccagaagttctagagtactt

SEQ ID NO: 389395 - DNA, 33 bp, Homo sapien
cagcactgtgttagccgggaaactccggggctg

SEQ ID NO: 389396 - DNA, 33 bp, Homo sapien
cagcactgtgttagcctggaaactccggggctg

SEQ ID NO: 389397 - DNA, 33 bp, Homo sapien
gcccggcactgtatccagcacttcatatgcact

SEQ ID NO: 389398 - DNA, 33 bp, Homo sapien
gcccggcactgtatccggcacttcatatgcact

SEQ ID NO: 389399 - DNA, 33 bp, Homo sapien
agatgaacggtggtgacggttgtgttacaacat

SEQ ID NO: 389400 - DNA, 33 bp, Homo sapien
agatgaacggtggtgatggttgtgttacaacat

SEQ ID NO: 389401 - DNA, 33 bp, Homo sapien
actcagcatccattacacactgactcccccttc

SEQ ID NO: 389402 - DNA, 33 bp, Homo sapien
actcagcatccattacgcactgactcccccttc

SEQ ID NO: 389403 - DNA, 33 bp, Homo sapien
tgtttcaaacatcagaacttttataatggcagg

SEQ ID NO: 389404 - DNA, 33 bp, Homo sapien
tgtttcaaacatcagagcttttataatggcagg

SEQ ID NO: 389405 - DNA, 33 bp, Homo sapien
atgaagtaggtgctcaaactcacggaatggctc

SEQ ID NO: 389406 - DNA, 33 bp, Homo sapien
atgaagtaggtgctcacactcacggaatggctc

SEQ ID NO: 389407 - DNA, 33 bp, Homo sapien
tgtccagacaccgcacagtaagcagatgcctgg

SEQ ID NO: 389408 - DNA, 33 bp, Homo sapien
tgtccagacaccgcacggtaagcagatgcctgg

SEQ ID NO: 389409 - DNA, 33 bp, Homo sapien
aagctggtcaaatacaaaatcccgggctcaata

SEQ ID NO: 389410 - DNA, 33 bp, Homo sapien
aagctggtcaaatacagaatcccgggctcaata

SEQ ID NO: 389411 - DNA, 33 bp, Homo sapien
ccatctgtgccttctcacctttgagcccagccc

SEQ ID NO: 389412 - DNA, 33 bp, Homo sapien
ccatctgtgccttctcgcctttgagcccagccc

SEQ ID NO: 389413 - DNA, 33 bp, Homo sapien
caaagacttggcaacacaccagagccggatata

SEQ ID NO: 389414 - DNA, 33 bp, Homo sapien
caaagacttggcaacagaccagagccggatata

SEQ ID NO: 389415 - DNA, 33 bp, Homo sapien
cagagcccagtgtaaaatgacaatgcaagctcc

SEQ ID NO: 389416 - DNA, 33 bp, Homo sapien
cagagcccagtgtaaagtgacaatgcaagctcc

SEQ ID NO: 389417 - DNA, 33 bp, Homo sapien
gtcttacacatattgacgtattacgcctcccta

SEQ ID NO: 389418 - DNA, 33 bp, Homo sapien
gtcttacacatattgatgtattacgcctcccta

SEQ ID NO: 389419 - DNA, 33 bp, Homo sapien
ttcagtgaaacattaacagctgagagagccagt

SEQ ID NO: 389420 - DNA, 33 bp, Homo sapien
ttcagtgaaacattaatagctgagagagccagt

SEQ ID NO: 389421 - DNA, 33 bp, Homo sapien
taatgtttcactgaaccactcggtcagtgccga

SEQ ID NO: 389422 - DNA, 33 bp, Homo sapien
taatgtttcactgaactactcggtcagtgccga

SEQ ID NO: 389423 - DNA, 33 bp, Homo sapien
ggccacggcattttcccctcgagtggagcctgg

SEQ ID NO: 389424 - DNA, 33 bp, Homo sapien
ggccacggcattttccgctcgagtggagcctgg

SEQ ID NO: 389425 - DNA, 33 bp, Homo sapien
ctgcggctgcccctaaaaggacagattgttgct

SEQ ID NO: 389426 - DNA, 33 bp, Homo sapien
ctgcggctgcccctaagaggacagattgttgct

SEQ ID NO: 389427 - DNA, 33 bp, Homo sapien
gattagagctcgcttacaagaggaaacaaacaa

SEQ ID NO: 389428 - DNA, 33 bp, Homo sapien
gattagagctcgcttataagaggaaacaaacaa

SEQ ID NO: 389429 - DNA, 33 bp, Homo sapien
gtacgacagaaaatcacggaagcaatagttgca

SEQ ID NO: 389430 - DNA, 33 bp, Homo sapien
gtacgacagaaaatcatggaagcaatagttgca

SEQ ID NO: 389431 - DNA, 33 bp, Homo sapien
aaagcaattggtgagacgcagcatggaagtctg

SEQ ID NO: 389432 - DNA, 33 bp, Homo sapien
aaagcaattggtgagaggcagcatggaagtctg

SEQ ID NO: 389433 - DNA, 33 bp, Homo sapien
ataacaccttcaattaaacagaaaccaggacaa

SEQ ID NO: 389434 - DNA, 33 bp, Homo sapien
ataacaccttcaattagacagaaaccaggacaa

SEQ ID NO: 389435 - DNA, 33 bp, Homo sapien
acagatagaaagtagcaaaacgagttaatgggt

SEQ ID NO: 389436 - DNA, 33 bp, Homo sapien
acagatagaaagtagcgaaacgagttaatgggt

SEQ ID NO: 389437 - DNA, 33 bp, Homo sapien
cagttttccgctgccgcatttcccattgagata

SEQ ID NO: 389438 - DNA, 33 bp, Homo sapien
cagttttccgctgccgtatttcccattgagata

SEQ ID NO: 389439 - DNA, 33 bp, Homo sapien
gtatacatagaattcacccattgtatgcagcat

SEQ ID NO: 389440 - DNA, 33 bp, Homo sapien
gtatacatagaattcatccattgtatgcagcat

SEQ ID NO: 389441 - DNA, 33 bp, Homo sapien
ttttgtggcagaatcacgatacgttgtatgggt

SEQ ID NO: 389442 - DNA, 33 bp, Homo sapien
ttttgtggcagaatcatgatacgttgtatgggt

SEQ ID NO: 389443 - DNA, 33 bp, Homo sapien
taagttccgggatacacgtgaagagcatgcagg

SEQ ID NO: 389444 - DNA, 33 bp, Homo sapien
taagttccgggatacatgtgaagagcatgcagg

SEQ ID NO: 389445 - DNA, 33 bp, Homo sapien
tacaatccctgtgcagacctgggtaaaatacct

SEQ ID NO: 389446 - DNA, 33 bp, Homo sapien
tacaatccctgtgcagccctgggtaaaatacct

SEQ ID NO: 389447 - DNA, 33 bp, Homo sapien
actgtcctgtgcactacagaacatttaacagcc

SEQ ID NO: 389448 - DNA, 33 bp, Homo sapien
actgtcctgtgcactatagaacatttaacagcc

SEQ ID NO: 389449 - DNA, 33 bp, Homo sapien
cagtccaggctacaaaaagtagaagaattgccc

SEQ ID NO: 389450 - DNA, 33 bp, Homo sapien
cagtccaggctacaaagagtagaagaattgccc

SEQ ID NO: 389451 - DNA, 33 bp, Homo sapien
tccctcccgacattcacagacaaccagctcctt

SEQ ID NO: 389452 - DNA, 33 bp, Homo sapien
tccctcccgacattcagagacaaccagctcctt

SEQ ID NO: 389453 - DNA, 33 bp, Homo sapien
tctgttgtttcggccacccaatttttggtattt

SEQ ID NO: 389454 - DNA, 33 bp, Homo sapien
tctgttgtttcggccatccaatttttggtattt

SEQ ID NO: 389455 - DNA, 33 bp, Homo sapien
ttaaatgaatggttaccgcatggcccagcaatt

SEQ ID NO: 389456 - DNA, 33 bp, Homo sapien
ttaaatgaatggttactgcatggcccagcaatt

SEQ ID NO: 389457 - DNA, 33 bp, Homo sapien
gttatttgcagcatcaatattggtgaatttgcc

SEQ ID NO: 389458 - DNA, 33 bp, Homo sapien
gttatttgcagcatcagtattggtgaatttgcc

SEQ ID NO: 389459 - DNA, 33 bp, Homo sapien
acaagtgataaaacaacagccctcaaactgcac

SEQ ID NO: 389460 - DNA, 33 bp, Homo sapien
acaagtgataaaacaagagccctcaaactgcac

SEQ ID NO: 389461 - DNA, 33 bp, Homo sapien
tttggatctccctcagaccttctcaccatgttc

SEQ ID NO: 389462 - DNA, 33 bp, Homo sapien
tttggatctccctcaggccttctcaccatgttc

SEQ ID NO: 389463 - DNA, 33 bp, Homo sapien
aatttctctggtccaacgccatctgatttctat

SEQ ID NO: 389464 - DNA, 33 bp, Homo sapien
aatttctctggtccaatgccatctgatttctat

SEQ ID NO: 389465 - DNA, 33 bp, Homo sapien
tttctcggttcccccaactctgagcctaggatc

SEQ ID NO: 389466 - DNA, 33 bp, Homo sapien
tttctcggttcccccatctctgagcctaggatc

SEQ ID NO: 389467 - DNA, 33 bp, Homo sapien
ggttaataagaccactcagaggacgtggttaat

SEQ ID NO: 389468 - DNA, 33 bp, Homo sapien
ggttaataagaccactgagaggacgtggttaat

SEQ ID NO: 389469 - DNA, 33 bp, Homo sapien
tgagtcttatttcagcacaaggtcaacaaggac

SEQ ID NO: 389470 - DNA, 33 bp, Homo sapien
tgagtcttatttcagcgcaaggtcaacaaggac

SEQ ID NO: 389471 - DNA, 33 bp, Homo sapien
aagagaaaggttctcaaaatacagacaactacc

SEQ ID NO: 389472 - DNA, 33 bp, Homo sapien
aagagaaaggttctcagaatacagacaactacc

SEQ ID NO: 389473 - DNA, 33 bp, Homo sapien
cagcgttgcttactgacctcagccaaggaccct

SEQ ID NO: 389474 - DNA, 33 bp, Homo sapien
cagcgttgcttactgatctcagccaaggaccct

SEQ ID NO: 389475 - DNA, 33 bp, Homo sapien
cagatccttatgtaccaacatgacaaaaactcc

SEQ ID NO: 389476 - DNA, 33 bp, Homo sapien
cagatccttatgtaccgacatgacaaaaactcc

SEQ ID NO: 389477 - DNA, 33 bp, Homo sapien
aaacaaaaataagcggcccccatcttaaatctt

SEQ ID NO: 389478 - DNA, 33 bp, Homo sapien
aaacaaaaataagcgggccccatcttaaatctt

SEQ ID NO: 389479 - DNA, 33 bp, Homo sapien
ccagcttgtagtagaaatcctcagtggggtgtg

SEQ ID NO: 389480 - DNA, 33 bp, Homo sapien
ccagcttgtagtagaagtcctcagtggggtgtg

SEQ ID NO: 389481 - DNA, 33 bp, Homo sapien
cgaactgagtgccatacaggatggtgaagcagc

SEQ ID NO: 389482 - DNA, 33 bp, Homo sapien
cgaactgagtgccatataggatggtgaagcagc

SEQ ID NO: 389483 - DNA, 33 bp, Homo sapien
aacttcttcaggaagacactaaggcacagggaa

SEQ ID NO: 389484 - DNA, 33 bp, Homo sapien
aacttcttcaggaagagactaaggcacagggaa

SEQ ID NO: 389485 - DNA, 33 bp, Homo sapien
cagttccttcagatcaatcagatttgctgagcc

SEQ ID NO: 389486 - DNA, 33 bp, Homo sapien
cagttccttcagatcagtcagatttgctgagcc

SEQ ID NO: 389487 - DNA, 33 bp, Homo sapien
gtggcaggtagagtcactaggagtcttgttcat

SEQ ID NO: 389488 - DNA, 33 bp, Homo sapien
gtggcaggtagagtcagtaggagtcttgttcat

SEQ ID NO: 389489 - DNA, 33 bp, Homo sapien
cattagattggcaaaaatctttaaccatgacag

SEQ ID NO: 389490 - DNA, 33 bp, Homo sapien
cattagattggcaaaattctttaaccatgacag

SEQ ID NO: 389491 - DNA, 33 bp, Homo sapien
agtaatgctgcaataaacaatccgataatatat

SEQ ID NO: 389492 - DNA, 33 bp, Homo sapien
agtaatgctgcaataagcaatccgataatatat

SEQ ID NO: 389493 - DNA, 33 bp, Homo sapien
aggtggcacacattcaataagtaggggctgctg

SEQ ID NO: 389494 - DNA, 33 bp, Homo sapien
aggtggcacacattcagtaagtaggggctgctg

SEQ ID NO: 389495 - DNA, 33 bp, Homo sapien
cagtcagtggttcatccaagatcatgcagctaa

SEQ ID NO: 389496 - DNA, 33 bp, Homo sapien
cagtcagtggttcatctaagatcatgcagctaa

SEQ ID NO: 389497 - DNA, 33 bp, Homo sapien
tcaatgatccactctaagaaatatgttttcccc

SEQ ID NO: 389498 - DNA, 33 bp, Homo sapien
tcaatgatccactctatgaaatatgttttcccc

SEQ ID NO: 389499 - DNA, 33 bp, Homo sapien
aactggattctagaccaacttgacctctaactg

SEQ ID NO: 389500 - DNA, 33 bp, Homo sapien
aactggattctagacccacttgacctctaactg

SEQ ID NO: 389501 - DNA, 33 bp, Homo sapien
tggtaacattccacataagaggtatttcaacct

SEQ ID NO: 389502 - DNA, 33 bp, Homo sapien
tggtaacattccacatgagaggtatttcaacct

SEQ ID NO: 389503 - DNA, 33 bp, Homo sapien
aaatgtaaagcatatacaagtagagagaatagc

SEQ ID NO: 389504 - DNA, 33 bp, Homo sapien
aaatgtaaagcatatagaagtagagagaatagc

SEQ ID NO: 389505 - DNA, 33 bp, Homo sapien
tttgcagcagacatcaagcagcgtatcaggtca

SEQ ID NO: 389506 - DNA, 33 bp, Homo sapien
tttgcagcagacatcacgcagcgtatcaggtca

SEQ ID NO: 389507 - DNA, 33 bp, Homo sapien
ggtacttaggctgtagaaaccatttggttctgg

SEQ ID NO: 389508 - DNA, 33 bp, Homo sapien
ggtacttaggctgtagcaaccatttggttctgg

SEQ ID NO: 389509 - DNA, 33 bp, Homo sapien
tagaagccatgaaagaggtctggaacacatcct

SEQ ID NO: 389510 - DNA, 33 bp, Homo sapien
tagaagccatgaaagatgtctggaacacatcct

SEQ ID NO: 389511 - DNA, 33 bp, Homo sapien
cgttctaaagatagaaaaagttatagctagtat

SEQ ID NO: 389512 - DNA, 33 bp, Homo sapien
cgttctaaagatagaagaagttatagctagtat

SEQ ID NO: 389513 - DNA, 33 bp, Homo sapien
ctgcgtcccaggggccaattcctgcaaacacgt

SEQ ID NO: 389514 - DNA, 33 bp, Homo sapien
ctgcgtcccaggggccgattcctgcaaacacgt

SEQ ID NO: 389515 - DNA, 33 bp, Homo sapien
atcttcgaaggcaagaagacgaaagaaatatcg

SEQ ID NO: 389516 - DNA, 33 bp, Homo sapien
atcttcgaaggcaagaggacgaaagaaatatcg

SEQ ID NO: 389517 - DNA, 33 bp, Homo sapien
caggccctggtgtctacatttagctgctccaaa

SEQ ID NO: 389518 - DNA, 33 bp, Homo sapien
caggccctggtgtctatatttagctgctccaaa

SEQ ID NO: 389519 - DNA, 33 bp, Homo sapien
tcatggaacgattgcagtctgccagatgccaga

SEQ ID NO: 389520 - DNA, 33 bp, Homo sapien
tcatggaacgattgcattctgccagatgccaga

SEQ ID NO: 389521 - DNA, 33 bp, Homo sapien
cctcaatgtgtgccttcaaaagaggcccgacat

SEQ ID NO: 389522 - DNA, 33 bp, Homo sapien
cctcaatgtgtgccttgaaaagaggcccgacat

SEQ ID NO: 389523 - DNA, 33 bp, Homo sapien
atgaactttgtcatccactcacggactttgttc

SEQ ID NO: 389524 - DNA, 33 bp, Homo sapien
atgaactttgtcatccgctcacggactttgttc

SEQ ID NO: 389525 - DNA, 33 bp, Homo sapien
agagctgttcttcccccctggtgggcgcagacc

SEQ ID NO: 389526 - DNA, 33 bp, Homo sapien
agagctgttcttcccctctggtgggcgcagacc

SEQ ID NO: 389527 - DNA, 33 bp, Homo sapien
cttgttgaagctttcacgctgtagaccaggaag

SEQ ID NO: 389528 - DNA, 33 bp, Homo sapien
cttgttgaagctttcatgctgtagaccaggaag

SEQ ID NO: 389529 - DNA, 33 bp, Homo sapien
atttgcaatacactaaaagatgggtttcttcat

SEQ ID NO: 389530 - DNA, 33 bp, Homo sapien
atttgcaatacactaatagatgggtttcttcat

SEQ ID NO: 389531 - DNA, 33 bp, Homo sapien
tttgttgacattccacaagctcatggggaagga

SEQ ID NO: 389532 - DNA, 33 bp, Homo sapien
tttgttgacattccacgagctcatggggaagga

SEQ ID NO: 389533 - DNA, 33 bp, Homo sapien
cctggctggggtcacaagttaacaaaatagctg

SEQ ID NO: 389534 - DNA, 33 bp, Homo sapien
cctggctggggtcacaggttaacaaaatagctg

SEQ ID NO: 389535 - DNA, 33 bp, Homo sapien
caccacagcaaaagccgctgcgagaatgtgcgc

SEQ ID NO: 389536 - DNA, 33 bp, Homo sapien
caccacagcaaaagcctctgcgagaatgtgcgc

SEQ ID NO: 389537 - DNA, 33 bp, Homo sapien
cggcagaggaagaaccacagcgaattttctgtt

SEQ ID NO: 389538 - DNA, 33 bp, Homo sapien
cggcagaggaagaaccgcagcgaattttctgtt

SEQ ID NO: 389539 - DNA, 33 bp, Homo sapien
gaagatttggttagacaatgcatggaaagcaat

SEQ ID NO: 389540 - DNA, 33 bp, Homo sapien
gaagatttggttagacgatgcatggaaagcaat

SEQ ID NO: 389541 - DNA, 33 bp, Homo sapien
ctttctggatcttaatcaagtctgtgctccgtg

SEQ ID NO: 389542 - DNA, 33 bp, Homo sapien
ctttctggatcttaatgaagtctgtgctccgtg

SEQ ID NO: 389543 - DNA, 33 bp, Homo sapien
ctgcctcccattgcacacttgaaccatcccagg

SEQ ID NO: 389544 - DNA, 33 bp, Homo sapien
ctgcctcccattgcacccttgaaccatcccagg

SEQ ID NO: 389545 - DNA, 33 bp, Homo sapien
cctcagatctggtttcaaaacacatcctagact

SEQ ID NO: 389546 - DNA, 33 bp, Homo sapien
cctcagatctggtttccaaacacatcctagact

SEQ ID NO: 389547 - DNA, 33 bp, Homo sapien
ctgttcttgtggctgcagaactggaaagaaatt

SEQ ID NO: 389548 - DNA, 33 bp, Homo sapien
ctgttcttgtggctgccgaactggaaagaaatt

SEQ ID NO: 389549 - DNA, 33 bp, Homo sapien
ctcctccaagatagtcacccaccagtggccagg

SEQ ID NO: 389550 - DNA, 33 bp, Homo sapien
ctcctccaagatagtcgcccaccagtggccagg

SEQ ID NO: 389551 - DNA, 33 bp, Homo sapien
cattctttttatagccacatcggattccacaga

SEQ ID NO: 389552 - DNA, 33 bp, Homo sapien
cattctttttatagccgcatcggattccacaga

SEQ ID NO: 389553 - DNA, 33 bp, Homo sapien
gcattttcttttctggaaactatttgtgcttct

SEQ ID NO: 389554 - DNA, 33 bp, Homo sapien
gcattttcttttctgggaactatttgtgcttct

SEQ ID NO: 389555 - DNA, 33 bp, Homo sapien
gtttggggagttggaccctcgagattgttactc

SEQ ID NO: 389556 - DNA, 33 bp, Homo sapien
gtttggggagttggactctcgagattgttactc

SEQ ID NO: 389557 - DNA, 33 bp, Homo sapien
cgttcctagccttgacgctgtaacagatttctt

SEQ ID NO: 389558 - DNA, 33 bp, Homo sapien
cgttcctagccttgactctgtaacagatttctt

SEQ ID NO: 389559 - DNA, 33 bp, Homo sapien
ctcagaattcttgcagactagcccagtgatatg

SEQ ID NO: 389560 - DNA, 33 bp, Homo sapien
ctcagaattcttgcagtctagcccagtgatatg

SEQ ID NO: 389561 - DNA, 33 bp, Homo sapien
cctactaacggagagtcaagtcgttggcagttc

SEQ ID NO: 389562 - DNA, 33 bp, Homo sapien
cctactaacggagagttaagtcgttggcagttc

SEQ ID NO: 389563 - DNA, 33 bp, Homo sapien
ataatacgacaacttaagagaaactatttactt

SEQ ID NO: 389564 - DNA, 33 bp, Homo sapien
ataatacgacaacttaggagaaactatttactt

SEQ ID NO: 389565 - DNA, 33 bp, Homo sapien
atgtgccctccagaaacggccagtttgcccatg

SEQ ID NO: 389566 - DNA, 33 bp, Homo sapien
atgtgccctccagaaatggccagtttgcccatg

SEQ ID NO: 389567 - DNA, 33 bp, Homo sapien
aggtacacacctggaacagatggctggcagttg

SEQ ID NO: 389568 - DNA, 33 bp, Homo sapien
aggtacacacctggaatagatggctggcagttg

SEQ ID NO: 389569 - DNA, 33 bp, Homo sapien
ttaatgcaacaaatcacgtctattctctgaatt

SEQ ID NO: 389570 - DNA, 33 bp, Homo sapien
ttaatgcaacaaatcaggtctattctctgaatt

SEQ ID NO: 389571 - DNA, 33 bp, Homo sapien
tgtggactaggaagacagaataattcagtgtcc

SEQ ID NO: 389572 - DNA, 33 bp, Homo sapien
tgtggactaggaagacggaataattcagtgtcc

SEQ ID NO: 389573 - DNA, 33 bp, Homo sapien
tcttgtatttattgaacgtaaccacttctgtct

SEQ ID NO: 389574 - DNA, 33 bp, Homo sapien
tcttgtatttattgaatgtaaccacttctgtct

SEQ ID NO: 389575 - DNA, 33 bp, Homo sapien
ccaaaatagtccattacgctaggggagaaaaaa

SEQ ID NO: 389576 - DNA, 33 bp, Homo sapien
ccaaaatagtccattatgctaggggagaaaaaa

SEQ ID NO: 389577 - DNA, 33 bp, Homo sapien
ctgttacccaaaaaagccaaggtatcataaatt

SEQ ID NO: 389578 - DNA, 33 bp, Homo sapien
ctgttacccaaaaaagtcaaggtatcataaatt

SEQ ID NO: 389579 - DNA, 33 bp, Homo sapien
tcacattattctcattgaatcttcatgtcagcc

SEQ ID NO: 389580 - DNA, 33 bp, Homo sapien
tcacattattctcatttaatcttcatgtcagcc

SEQ ID NO: 389581 - DNA, 33 bp, Homo sapien
cttccatctttcagaacgtgcctgttactagtc

SEQ ID NO: 389582 - DNA, 33 bp, Homo sapien
cttccatctttcagaatgtgcctgttactagtc

SEQ ID NO: 389583 - DNA, 33 bp, Homo sapien
ataagactcaggtgacacattcaaaataatgtt

SEQ ID NO: 389584 - DNA, 33 bp, Homo sapien
ataagactcaggtgacgcattcaaaataatgtt

SEQ ID NO: 389585 - DNA, 33 bp, Homo sapien
gctgagctcttggccccatgtgagtcatccttc

SEQ ID NO: 389586 - DNA, 33 bp, Homo sapien
gctgagctcttggcccgatgtgagtcatccttc

SEQ ID NO: 389587 - DNA, 33 bp, Homo sapien
cacggtgttggtattacgacatcaagttcagag

SEQ ID NO: 389588 - DNA, 33 bp, Homo sapien
cacggtgttggtattatgacatcaagttcagag

SEQ ID NO: 389589 - DNA, 33 bp, Homo sapien
caatcgaaacctgatcaaagaagtcaacgtcag

SEQ ID NO: 389590 - DNA, 33 bp, Homo sapien
caatcgaaacctgatcgaagaagtcaacgtcag

SEQ ID NO: 389591 - DNA, 33 bp, Homo sapien
tcccatttaaactgcacgtatttgttgggaaaa

SEQ ID NO: 389592 - DNA, 33 bp, Homo sapien
tcccatttaaactgcatgtatttgttgggaaaa

SEQ ID NO: 389593 - DNA, 33 bp, Homo sapien
aaggcagactcagagacgttcatatcaattgcc

SEQ ID NO: 389594 - DNA, 33 bp, Homo sapien
aaggcagactcagagaggttcatatcaattgcc

SEQ ID NO: 389595 - DNA, 33 bp, Homo sapien
tgtccttctaggagagcccctaatgcttcagca

SEQ ID NO: 389596 - DNA, 33 bp, Homo sapien
tgtccttctaggagaggccctaatgcttcagca

SEQ ID NO: 389597 - DNA, 33 bp, Homo sapien
tgatttcgttaattggcatagtgagatgttatt

SEQ ID NO: 389598 - DNA, 33 bp, Homo sapien
tgatttcgttaattggtatagtgagatgttatt

SEQ ID NO: 389599 - DNA, 33 bp, Homo sapien
agaataactttattaaatgatagtcagcatgta

SEQ ID NO: 389600 - DNA, 33 bp, Homo sapien
agaataactttattaagtgatagtcagcatgta

SEQ ID NO: 389601 - DNA, 33 bp, Homo sapien
cttacttgtaggatagcaattcacttgaagtaa

SEQ ID NO: 389602 - DNA, 33 bp, Homo sapien
cttacttgtaggatagtaattcacttgaagtaa

SEQ ID NO: 389603 - DNA, 33 bp, Homo sapien
caagtctggaaaagccaccgatttgttccctat

SEQ ID NO: 389604 - DNA, 33 bp, Homo sapien
caagtctggaaaagccgccgatttgttccctat

SEQ ID NO: 389605 - DNA, 33 bp, Homo sapien
tctctgccttcaaaaacttcagaggtggctggg

SEQ ID NO: 389606 - DNA, 33 bp, Homo sapien
tctctgccttcaaaaagttcagaggtggctggg

SEQ ID NO: 389607 - DNA, 33 bp, Homo sapien
tccaaatagactttcccgcagtgaggccaggaa

SEQ ID NO: 389608 - DNA, 33 bp, Homo sapien
tccaaatagactttcctgcagtgaggccaggaa

SEQ ID NO: 389609 - DNA, 33 bp, Homo sapien
taggttctctccatcagagcacactgaacttat

SEQ ID NO: 389610 - DNA, 33 bp, Homo sapien
taggttctctccatcatagcacactgaacttat

SEQ ID NO: 389611 - DNA, 33 bp, Homo sapien
tagttcataaaggaaacgatgagcagaattgct

SEQ ID NO: 389612 - DNA, 33 bp, Homo sapien
tagttcataaaggaaaggatgagcagaattgct

SEQ ID NO: 389613 - DNA, 33 bp, Homo sapien
catgacagaccatttaaacagactgtccttata

SEQ ID NO: 389614 - DNA, 33 bp, Homo sapien
catgacagaccatttacacagactgtccttata

SEQ ID NO: 389615 - DNA, 33 bp, Homo sapien
tccaagcgagtaaatccagacagagttcaggga

SEQ ID NO: 389616 - DNA, 33 bp, Homo sapien
tccaagcgagtaaatcgagacagagttcaggga

SEQ ID NO: 389617 - DNA, 33 bp, Homo sapien
ttggaagtggactgacgggttgactcgctggca

SEQ ID NO: 389618 - DNA, 33 bp, Homo sapien
ttggaagtggactgactggttgactcgctggca

SEQ ID NO: 389619 - DNA, 33 bp, Homo sapien
tgtatgcataagtagaagtgtctatctctgtat

SEQ ID NO: 389620 - DNA, 33 bp, Homo sapien
tgtatgcataagtagatgtgtctatctctgtat

SEQ ID NO: 389621 - DNA, 33 bp, Homo sapien
cctaaagcaggcagtgcaatagaatgcttaggg

SEQ ID NO: 389622 - DNA, 33 bp, Homo sapien
cctaaagcaggcagtggaatagaatgcttaggg

SEQ ID NO: 389623 - DNA, 33 bp, Homo sapien
aacttcatcgattgcccatatttatatgcatgc

SEQ ID NO: 389624 - DNA, 33 bp, Homo sapien
aacttcatcgattgcctatatttatatgcatgc

SEQ ID NO: 389625 - DNA, 33 bp, Homo sapien
ttgagcctgttgtggacaccatgtttttcactg

SEQ ID NO: 389626 - DNA, 33 bp, Homo sapien
ttgagcctgttgtggataccatgtttttcactg

SEQ ID NO: 389627 - DNA, 33 bp, Homo sapien
tgcatagacaaaggaacgtagagaatgattctg

SEQ ID NO: 389628 - DNA, 33 bp, Homo sapien
tgcatagacaaaggaatgtagagaatgattctg

SEQ ID NO: 389629 - DNA, 33 bp, Homo sapien
tttctgggctggaacacgtagtcccatgttgag

SEQ ID NO: 389630 - DNA, 33 bp, Homo sapien
tttctgggctggaacaggtagtcccatgttgag

SEQ ID NO: 389631 - DNA, 33 bp, Homo sapien
cccctaccacaaaaaaattacctgacctcaaat

SEQ ID NO: 389632 - DNA, 33 bp, Homo sapien
cccctaccacaaaaaatttacctgacctcaaat

SEQ ID NO: 389633 - DNA, 33 bp, Homo sapien
gacccgtcatctaggacaaagtatctcaacttc

SEQ ID NO: 389634 - DNA, 33 bp, Homo sapien
gacccgtcatctaggagaaagtatctcaacttc

SEQ ID NO: 389635 - DNA, 33 bp, Homo sapien
cttgaagaataggccaagtctgaatatatctcc

SEQ ID NO: 389636 - DNA, 33 bp, Homo sapien
cttgaagaataggccaggtctgaatatatctcc

SEQ ID NO: 389637 - DNA, 33 bp, Homo sapien
gaaagaaagttcacaaaagagattgcaaacatt

SEQ ID NO: 389638 - DNA, 33 bp, Homo sapien
gaaagaaagttcacaagagagattgcaaacatt

SEQ ID NO: 389639 - DNA, 33 bp, Homo sapien
gggaatgggtggggtaagtgagccctaatgact

SEQ ID NO: 389640 - DNA, 33 bp, Homo sapien
gggaatgggtggggtaggtgagccctaatgact

SEQ ID NO: 389641 - DNA, 33 bp, Homo sapien
agttatagcacacataaaatttgacagctgatt

SEQ ID NO: 389642 - DNA, 33 bp, Homo sapien
agttatagcacacatacaatttgacagctgatt

SEQ ID NO: 389643 - DNA, 33 bp, Homo sapien
aaacccatcaacttggaacaggcaatgactact

SEQ ID NO: 389644 - DNA, 33 bp, Homo sapien
aaacccatcaacttgggacaggcaatgactact

SEQ ID NO: 389645 - DNA, 33 bp, Homo sapien
tcacattctacagtgccatccatctcctaaaaa

SEQ ID NO: 389646 - DNA, 33 bp, Homo sapien
tcacattctacagtgcgatccatctcctaaaaa

SEQ ID NO: 389647 - DNA, 33 bp, Homo sapien
gcagctcagttaatcaatgaagaaatgcaagtg

SEQ ID NO: 389648 - DNA, 33 bp, Homo sapien
gcagctcagttaatcagtgaagaaatgcaagtg

SEQ ID NO: 389649 - DNA, 33 bp, Homo sapien
atgcaagtgtatgaacaagtgaaaaatggaaaa

SEQ ID NO: 389650 - DNA, 33 bp, Homo sapien
atgcaagtgtatgaacgagtgaaaaatggaaaa

SEQ ID NO: 389651 - DNA, 33 bp, Homo sapien
aattttggaaactatacaagcacatggaaatta

SEQ ID NO: 389652 - DNA, 33 bp, Homo sapien
aattttggaaactatataagcacatggaaatta

SEQ ID NO: 389653 - DNA, 33 bp, Homo sapien
atatctttggcaaaatcaatgtaatagtaactt

SEQ ID NO: 389654 - DNA, 33 bp, Homo sapien
atatctttggcaaaattaatgtaatagtaactt

SEQ ID NO: 389655 - DNA, 33 bp, Homo sapien
ttccaaaaaggcagagccaatcaaacagatttt

SEQ ID NO: 389656 - DNA, 33 bp, Homo sapien
ttccaaaaaggcagagtcaatcaaacagatttt

SEQ ID NO: 389657 - DNA, 33 bp, Homo sapien
gctttgtgatatatggaatctctagtaaaatct

SEQ ID NO: 389658 - DNA, 33 bp, Homo sapien
gctttgtgatatatgggatctctagtaaaatct

SEQ ID NO: 389659 - DNA, 33 bp, Homo sapien
ctgctcaataaactaaacacttccattggatct

SEQ ID NO: 389660 - DNA, 33 bp, Homo sapien
ctgctcaataaactaagcacttccattggatct

SEQ ID NO: 389661 - DNA, 33 bp, Homo sapien
taaacatatgttaccaccacatcaaacactaag

SEQ ID NO: 389662 - DNA, 33 bp, Homo sapien
taaacatatgttaccatcacatcaaacactaag

SEQ ID NO: 389663 - DNA, 33 bp, Homo sapien
catttgaagatagagacatgacaagtaaggtga

SEQ ID NO: 389664 - DNA, 33 bp, Homo sapien
catttgaagatagagatatgacaagtaaggtga

SEQ ID NO: 389665 - DNA, 33 bp, Homo sapien
agcaaggaaaagtccaagaatgatcccacagtc

SEQ ID NO: 389666 - DNA, 33 bp, Homo sapien
agcaaggaaaagtccaggaatgatcccacagtc

SEQ ID NO: 389667 - DNA, 33 bp, Homo sapien
agtcaggatatgaaccaggatctgttttactcc

SEQ ID NO: 389668 - DNA, 33 bp, Homo sapien
agtcaggatatgaaccgggatctgttttactcc

SEQ ID NO: 389669 - DNA, 33 bp, Homo sapien
atttgatgagctctctcaaggcaagaagcccaa

SEQ ID NO: 389670 - DNA, 33 bp, Homo sapien
atttgatgagctctctgaaggcaagaagcccaa

SEQ ID NO: 389671 - DNA, 33 bp, Homo sapien
gcaccagaaaaatctgcaatgtctcttagaatg

SEQ ID NO: 389672 - DNA, 33 bp, Homo sapien
gcaccagaaaaatctggaatgtctcttagaatg

SEQ ID NO: 389673 - DNA, 33 bp, Homo sapien
gaatgaggtgtcagcccacgaagacagggacag

SEQ ID NO: 389674 - DNA, 33 bp, Homo sapien
gaatgaggtgtcagcctacgaagacagggacag

SEQ ID NO: 389675 - DNA, 33 bp, Homo sapien
ttcttgtcaatgtctacggattaaaccagagca

SEQ ID NO: 389676 - DNA, 33 bp, Homo sapien
ttcttgtcaatgtctatggattaaaccagagca

SEQ ID NO: 389677 - DNA, 33 bp, Homo sapien
aaaataaataaataaacgtcatttgcaaagggc

SEQ ID NO: 389678 - DNA, 33 bp, Homo sapien
aaaataaataaataaaggtcatttgcaaagggc

SEQ ID NO: 389679 - DNA, 33 bp, Homo sapien
ccaaggaagtcagggaccaggcgcttgtctctg

SEQ ID NO: 389680 - DNA, 33 bp, Homo sapien
ccaaggaagtcagggagcaggcgcttgtctctg

SEQ ID NO: 389681 - DNA, 33 bp, Homo sapien
agtccttgctggctaacgagttgatcaatagga

SEQ ID NO: 389682 - DNA, 33 bp, Homo sapien
agtccttgctggctaatgagttgatcaatagga

SEQ ID NO: 389683 - DNA, 33 bp, Homo sapien
ctcatcagagaattgacgtgggtatctttgccc

SEQ ID NO: 389684 - DNA, 33 bp, Homo sapien
ctcatcagagaattgaggtgggtatctttgccc

SEQ ID NO: 389685 - DNA, 33 bp, Homo sapien
cagtaaatcagggatagcaattactgtgtagac

SEQ ID NO: 389686 - DNA, 33 bp, Homo sapien
cagtaaatcagggatatcaattactgtgtagac

SEQ ID NO: 389687 - DNA, 33 bp, Homo sapien
ccagaatgtcattccacaacgtggtctttatca

SEQ ID NO: 389688 - DNA, 33 bp, Homo sapien
ccagaatgtcattccagaacgtggtctttatca

SEQ ID NO: 389689 - DNA, 33 bp, Homo sapien
ctcccagttcccattaataatcttccgaccaaa

SEQ ID NO: 389690 - DNA, 33 bp, Homo sapien
ctcccagttcccattagtaatcttccgaccaaa

SEQ ID NO: 389691 - DNA, 33 bp, Homo sapien
tgagccccttgatgtcaccatacctgcagacct

SEQ ID NO: 389692 - DNA, 33 bp, Homo sapien
tgagccccttgatgtcgccatacctgcagacct

SEQ ID NO: 389693 - DNA, 33 bp, Homo sapien
cacagtccctctggaacaagatgaattaaaatc

SEQ ID NO: 389694 - DNA, 33 bp, Homo sapien
cacagtccctctggaagaagatgaattaaaatc

SEQ ID NO: 389695 - DNA, 33 bp, Homo sapien
aaaatctctctataataaaattctctgggcaat

SEQ ID NO: 389696 - DNA, 33 bp, Homo sapien
aaaatctctctataatgaaattctctgggcaat

SEQ ID NO: 389697 - DNA, 33 bp, Homo sapien
ttttggtaaggcttaaatgttcaggcaagaaat

SEQ ID NO: 389698 - DNA, 33 bp, Homo sapien
ttttggtaaggcttaactgttcaggcaagaaat

SEQ ID NO: 389699 - DNA, 33 bp, Homo sapien
agaagaaaagtatgacgattactaccacattca

SEQ ID NO: 389700 - DNA, 33 bp, Homo sapien
agaagaaaagtatgactattactaccacattca

SEQ ID NO: 389701 - DNA, 33 bp, Homo sapien
gaaactaccactatgactcaattatgccccact

SEQ ID NO: 389702 - DNA, 33 bp, Homo sapien
gaaactaccactatgattcaattatgccccact

SEQ ID NO: 389703 - DNA, 33 bp, Homo sapien
ttcatcctctcagccgaaggaatgtcaacccac

SEQ ID NO: 389704 - DNA, 33 bp, Homo sapien
ttcatcctctcagccgtaggaatgtcaacccac

SEQ ID NO: 389705 - DNA, 33 bp, Homo sapien
ggatgaaatttctgaacgggcactttgccgagt

SEQ ID NO: 389706 - DNA, 33 bp, Homo sapien
ggatgaaatttctgaatgggcactttgccgagt

SEQ ID NO: 389707 - DNA, 33 bp, Homo sapien
tcccatagcttcccaaaattatgacagtaacct

SEQ ID NO: 389708 - DNA, 33 bp, Homo sapien
tcccatagcttcccaacattatgacagtaacct

SEQ ID NO: 389709 - DNA, 33 bp, Homo sapien
gttccccttccaacacaatttatgtcaacctaa

SEQ ID NO: 389710 - DNA, 33 bp, Homo sapien
gttccccttccaacaccatttatgtcaacctaa

SEQ ID NO: 389711 - DNA, 33 bp, Homo sapien
ctcggaggttggtagactaagtgaccaaaattt

SEQ ID NO: 389712 - DNA, 33 bp, Homo sapien
ctcggaggttggtagattaagtgaccaaaattt

SEQ ID NO: 389713 - DNA, 33 bp, Homo sapien
gaggatgggagtctaggagggcatacttgcttt

SEQ ID NO: 389714 - DNA, 33 bp, Homo sapien
gaggatgggagtctagtagggcatacttgcttt

SEQ ID NO: 389715 - DNA, 33 bp, Homo sapien
agaaggaaactgggaaaaaccaaatgaccatca

SEQ ID NO: 389716 - DNA, 33 bp, Homo sapien
agaaggaaactgggaacaaccaaatgaccatca

SEQ ID NO: 389717 - DNA, 33 bp, Homo sapien
tttcaaacaatccagagaccaattttcctagaa

SEQ ID NO: 389718 - DNA, 33 bp, Homo sapien
tttcaaacaatccagataccaattttcctagaa

SEQ ID NO: 389719 - DNA, 33 bp, Homo sapien
tacaagatagtggtaacgttgtacctgctttca

SEQ ID NO: 389720 - DNA, 33 bp, Homo sapien
tacaagatagtggtaatgttgtacctgctttca

SEQ ID NO: 389721 - DNA, 33 bp, Homo sapien
ctaggaggcacattctgaaatctttctgacatc

SEQ ID NO: 389722 - DNA, 33 bp, Homo sapien
ctaggaggcacattcttaaatctttctgacatc

SEQ ID NO: 389723 - DNA, 33 bp, Homo sapien
ggtacatcccaaaccacgaatttcataacgctg

SEQ ID NO: 389724 - DNA, 33 bp, Homo sapien
ggtacatcccaaaccatgaatttcataacgctg

SEQ ID NO: 389725 - DNA, 33 bp, Homo sapien
gtaaattcatttaacaaatattggactcctcag

SEQ ID NO: 389726 - DNA, 33 bp, Homo sapien
gtaaattcatttaacagatattggactcctcag

SEQ ID NO: 389727 - DNA, 33 bp, Homo sapien
aaccaaaaagaatttgaaaagcaataatttagt

SEQ ID NO: 389728 - DNA, 33 bp, Homo sapien
aaccaaaaagaatttggaaagcaataatttagt

SEQ ID NO: 389729 - DNA, 33 bp, Homo sapien
ggcccagtgtcaagacgcagtatttattattga

SEQ ID NO: 389730 - DNA, 33 bp, Homo sapien
ggcccagtgtcaagactcagtatttattattga

SEQ ID NO: 389731 - DNA, 33 bp, Homo sapien
tctgtaaatgccaggaacatttgcgacgtcatt

SEQ ID NO: 389732 - DNA, 33 bp, Homo sapien
tctgtaaatgccaggatcatttgcgacgtcatt

SEQ ID NO: 389733 - DNA, 33 bp, Homo sapien
acaggtctccactgcacggttgtcacaatggtt

SEQ ID NO: 389734 - DNA, 33 bp, Homo sapien
acaggtctccactgcatggttgtcacaatggtt

SEQ ID NO: 389735 - DNA, 33 bp, Homo sapien
acattatctgcaggaaaataaagcaaggtggaa

SEQ ID NO: 389736 - DNA, 33 bp, Homo sapien
acattatctgcaggaagataaagcaaggtggaa

SEQ ID NO: 389737 - DNA, 33 bp, Homo sapien
ttcaaaccctagagcgcattctgtagtccatag

SEQ ID NO: 389738 - DNA, 33 bp, Homo sapien
ttcaaaccctagagcggattctgtagtccatag

SEQ ID NO: 389739 - DNA, 33 bp, Homo sapien
atggccacaagtcaaacatagagaatgacgcag

SEQ ID NO: 389740 - DNA, 33 bp, Homo sapien
atggccacaagtcaaatatagagaatgacgcag

SEQ ID NO: 389741 - DNA, 33 bp, Homo sapien
gacctctctgtgcaaacgatttttttttccaaa

SEQ ID NO: 389742 - DNA, 33 bp, Homo sapien
gacctctctgtgcaaatgatttttttttccaaa

SEQ ID NO: 389743 - DNA, 33 bp, Homo sapien
aaagacatattaaaaactgagaggtctctaggg

SEQ ID NO: 389744 - DNA, 33 bp, Homo sapien
aaagacatattaaaaagtgagaggtctctaggg

SEQ ID NO: 389745 - DNA, 33 bp, Homo sapien
tagggattttcttgaaactaccattaaagctac

SEQ ID NO: 389746 - DNA, 33 bp, Homo sapien
tagggattttcttgaacctaccattaaagctac

SEQ ID NO: 389747 - DNA, 33 bp, Homo sapien
tgtggttagtcaagtccatatctggaactcact

SEQ ID NO: 389748 - DNA, 33 bp, Homo sapien
tgtggttagtcaagtcgatatctggaactcact

SEQ ID NO: 389749 - DNA, 33 bp, Homo sapien
tgaattgatagaaaaaattgctctgtaataaaa

SEQ ID NO: 389750 - DNA, 33 bp, Homo sapien
tgaattgatagaaaaatttgctctgtaataaaa

SEQ ID NO: 389751 - DNA, 33 bp, Homo sapien
aattgacttacataaactactgccaatgtttaa

SEQ ID NO: 389752 - DNA, 33 bp, Homo sapien
aattgacttacataaattactgccaatgtttaa

SEQ ID NO: 389753 - DNA, 33 bp, Homo sapien
aattaaagaaagtcaaagcgagaccagcatata

SEQ ID NO: 389754 - DNA, 33 bp, Homo sapien
aattaaagaaagtcaaggcgagaccagcatata

SEQ ID NO: 389755 - DNA, 33 bp, Homo sapien
agtacttgatgaaccaaatggacacatgagata

SEQ ID NO: 389756 - DNA, 33 bp, Homo sapien
agtacttgatgaaccagatggacacatgagata

SEQ ID NO: 389757 - DNA, 33 bp, Homo sapien
gcggaaacagccaccaataaaagagcctcagct

SEQ ID NO: 389758 - DNA, 33 bp, Homo sapien
gcggaaacagccaccagtaaaagagcctcagct

SEQ ID NO: 389759 - DNA, 33 bp, Homo sapien
tgaaagggagctacaccatggaattcaggacct

SEQ ID NO: 389760 - DNA, 33 bp, Homo sapien
tgaaagggagctacactatggaattcaggacct

SEQ ID NO: 389761 - DNA, 33 bp, Homo sapien
ttcatggtcagccaaaaattcaagggaacccag

SEQ ID NO: 389762 - DNA, 33 bp, Homo sapien
ttcatggtcagccaaagattcaagggaacccag

SEQ ID NO: 389763 - DNA, 33 bp, Homo sapien
aggaggagaggtgaggaagatttgacacacaga

SEQ ID NO: 389764 - DNA, 33 bp, Homo sapien
aggaggagaggtgagggagatttgacacacaga

SEQ ID NO: 389765 - DNA, 33 bp, Homo sapien
tgttcagctttttctacgaacttgggattccct

SEQ ID NO: 389766 - DNA, 33 bp, Homo sapien
tgttcagctttttctatgaacttgggattccct

SEQ ID NO: 389767 - DNA, 33 bp, Homo sapien
acacaagtataagatgcacaatagccaaaaata

SEQ ID NO: 389768 - DNA, 33 bp, Homo sapien
acacaagtataagatgtacaatagccaaaaata

SEQ ID NO: 389769 - DNA, 33 bp, Homo sapien
gaaagttctctgaatggaaatgaacctagacct

SEQ ID NO: 389770 - DNA, 33 bp, Homo sapien
gaaagttctctgaatgtaaatgaacctagacct

SEQ ID NO: 389771 - DNA, 33 bp, Homo sapien
gatggttttctttaaacgcagatgcctcatttc

SEQ ID NO: 389772 - DNA, 33 bp, Homo sapien
gatggttttctttaaatgcagatgcctcatttc

SEQ ID NO: 389773 - DNA, 33 bp, Homo sapien
tggctgttgtataccaaaagaataggtacatga

SEQ ID NO: 389774 - DNA, 33 bp, Homo sapien
tggctgttgtataccagaagaataggtacatga

SEQ ID NO: 389775 - DNA, 33 bp, Homo sapien
tatcgacgacaacagacatctagcctgaggact

SEQ ID NO: 389776 - DNA, 33 bp, Homo sapien
tatcgacgacaacagatatctagcctgaggact

SEQ ID NO: 389777 - DNA, 33 bp, Homo sapien
cattgataagaaaaaacttactggcaagatagc

SEQ ID NO: 389778 - DNA, 33 bp, Homo sapien
cattgataagaaaaaatttactggcaagatagc

SEQ ID NO: 389779 - DNA, 33 bp, Homo sapien
aatgttttgaaagatacgccattcgcagtggct

SEQ ID NO: 389780 - DNA, 33 bp, Homo sapien
aatgttttgaaagataggccattcgcagtggct

SEQ ID NO: 389781 - DNA, 33 bp, Homo sapien
taaaaaggagcttgaactcatgtagcctaatgc

SEQ ID NO: 389782 - DNA, 33 bp, Homo sapien
taaaaaggagcttgaagtcatgtagcctaatgc

SEQ ID NO: 389783 - DNA, 33 bp, Homo sapien
gactgcttctgtgtacgcaagctcccatccgcc

SEQ ID NO: 389784 - DNA, 33 bp, Homo sapien
gactgcttctgtgtactcaagctcccatccgcc

SEQ ID NO: 389785 - DNA, 33 bp, Homo sapien
tgctggaagcgccacaacttctctatggacccc

SEQ ID NO: 389786 - DNA, 33 bp, Homo sapien
tgctggaagcgccacaccttctctatggacccc

SEQ ID NO: 389787 - DNA, 33 bp, Homo sapien
aaaaacaaatcagaacacagactggtacaacag

SEQ ID NO: 389788 - DNA, 33 bp, Homo sapien
aaaaacaaatcagaacccagactggtacaacag

SEQ ID NO: 389789 - DNA, 33 bp, Homo sapien
ttcttgatggatatagcagttggcaggaattgg

SEQ ID NO: 389790 - DNA, 33 bp, Homo sapien
ttcttgatggatatagtagttggcaggaattgg

SEQ ID NO: 389791 - DNA, 33 bp, Homo sapien
atgctaaattttgaaaagttaaagtgatatatg

SEQ ID NO: 389792 - DNA, 33 bp, Homo sapien
atgctaaattttgaaaggttaaagtgatatatg

SEQ ID NO: 389793 - DNA, 33 bp, Homo sapien
tctcaacacctatgaactacccagtatccttct

SEQ ID NO: 389794 - DNA, 33 bp, Homo sapien
tctcaacacctatgaattacccagtatccttct

SEQ ID NO: 389795 - DNA, 33 bp, Homo sapien
gatagtcactatactacccacaacagcaatgcc

SEQ ID NO: 389796 - DNA, 33 bp, Homo sapien
gatagtcactatactagccacaacagcaatgcc

SEQ ID NO: 389797 - DNA, 33 bp, Homo sapien
gacagctggaaggacacacaaatggttgagtgt

SEQ ID NO: 389798 - DNA, 33 bp, Homo sapien
gacagctggaaggacagacaaatggttgagtgt

SEQ ID NO: 389799 - DNA, 33 bp, Homo sapien
acatcaaatccatctcacaaaatgtgctccctc

SEQ ID NO: 389800 - DNA, 33 bp, Homo sapien
acatcaaatccatctcgcaaaatgtgctccctc

SEQ ID NO: 389801 - DNA, 33 bp, Homo sapien
cacttgacagttcccactatttcaatatttgta

SEQ ID NO: 389802 - DNA, 33 bp, Homo sapien
cacttgacagttcccagtatttcaatatttgta

SEQ ID NO: 389803 - DNA, 33 bp, Homo sapien
gggaaggatgtgaaaacatttcagttgtcttgg

SEQ ID NO: 389804 - DNA, 33 bp, Homo sapien
gggaaggatgtgaaaatatttcagttgtcttgg

SEQ ID NO: 389805 - DNA, 33 bp, Homo sapien
taattgtccagtatacactttctttttttacat

SEQ ID NO: 389806 - DNA, 33 bp, Homo sapien
taattgtccagtataccctttctttttttacat

SEQ ID NO: 389807 - DNA, 33 bp, Homo sapien
tgatatattaatcaacgcttcaggaaagcttct

SEQ ID NO: 389808 - DNA, 33 bp, Homo sapien
tgatatattaatcaactcttcaggaaagcttct

SEQ ID NO: 389809 - DNA, 33 bp, Homo sapien
ccaggttgacattcacaaattgacaaatgttat

SEQ ID NO: 389810 - DNA, 33 bp, Homo sapien
ccaggttgacattcactaattgacaaatgttat

SEQ ID NO: 389811 - DNA, 33 bp, Homo sapien
ccttttcaactctctacgaccctgtaaagatta

SEQ ID NO: 389812 - DNA, 33 bp, Homo sapien
ccttttcaactctctatgaccctgtaaagatta

SEQ ID NO: 389813 - DNA, 33 bp, Homo sapien
ggcagaggcaaaagctaaacagagctgattgga

SEQ ID NO: 389814 - DNA, 33 bp, Homo sapien
ggcagaggcaaaagctgaacagagctgattgga

SEQ ID NO: 389815 - DNA, 33 bp, Homo sapien
ggcatatcgatgcaaaggacccaaaaaataggg

SEQ ID NO: 389816 - DNA, 33 bp, Homo sapien
ggcatatcgatgcaaatgacccaaaaaataggg

SEQ ID NO: 389817 - DNA, 33 bp, Homo sapien
aagcatccagagaatcacacaaaacctgctcca

SEQ ID NO: 389818 - DNA, 33 bp, Homo sapien
aagcatccagagaatcgcacaaaacctgctcca

SEQ ID NO: 389819 - DNA, 33 bp, Homo sapien
gtaaatggcaaacacccaaataaaaatgtgcag

SEQ ID NO: 389820 - DNA, 33 bp, Homo sapien
gtaaatggcaaacacctaaataaaaatgtgcag

SEQ ID NO: 389821 - DNA, 33 bp, Homo sapien
caaaggaatgaaaaagcaatgtccaaaatattt

SEQ ID NO: 389822 - DNA, 33 bp, Homo sapien
caaaggaatgaaaaaggaatgtccaaaatattt

SEQ ID NO: 389823 - DNA, 33 bp, Homo sapien
gcaatggagagtacccaccaaagaacagggaaa

SEQ ID NO: 389824 - DNA, 33 bp, Homo sapien
gcaatggagagtacccgccaaagaacagggaaa

SEQ ID NO: 389825 - DNA, 33 bp, Homo sapien
tatgatccaaaaataccgccgctgggtatatat

SEQ ID NO: 389826 - DNA, 33 bp, Homo sapien
tatgatccaaaaatactgccgctgggtatatat

SEQ ID NO: 389827 - DNA, 33 bp, Homo sapien
atgaagtgaaaagaccacctacagcatgggaga

SEQ ID NO: 389828 - DNA, 33 bp, Homo sapien
atgaagtgaaaagaccgcctacagcatgggaga

SEQ ID NO: 389829 - DNA, 33 bp, Homo sapien
taataaagtctttatacatcctgttctcaactg

SEQ ID NO: 389830 - DNA, 33 bp, Homo sapien
taataaagtctttatatatcctgttctcaactg

SEQ ID NO: 389831 - DNA, 33 bp, Homo sapien
tactaccaaacattcaataaccagattcaataa

SEQ ID NO: 389832 - DNA, 33 bp, Homo sapien
tactaccaaacattcagtaaccagattcaataa

SEQ ID NO: 389833 - DNA, 33 bp, Homo sapien
agccagaacattggaaaaatcctcaagttaatt

SEQ ID NO: 389834 - DNA, 33 bp, Homo sapien
agccagaacattggaagaatcctcaagttaatt

SEQ ID NO: 389835 - DNA, 33 bp, Homo sapien
caaaaataagtagtcactcaaatgcttctgtta

SEQ ID NO: 389836 - DNA, 33 bp, Homo sapien
caaaaataagtagtcagtcaaatgcttctgtta

SEQ ID NO: 389837 - DNA, 33 bp, Homo sapien
atataggtacacagcaaaactggatcttcaaag

SEQ ID NO: 389838 - DNA, 33 bp, Homo sapien
atataggtacacagcagaactggatcttcaaag

SEQ ID NO: 389839 - DNA, 33 bp, Homo sapien
catggctcgccttttacattaattgcaaacacc

SEQ ID NO: 389840 - DNA, 33 bp, Homo sapien
catggctcgccttttatattaattgcaaacacc

SEQ ID NO: 389841 - DNA, 33 bp, Homo sapien
attcaagcctgtaagacgaaggaaattcagtct

SEQ ID NO: 389842 - DNA, 33 bp, Homo sapien
attcaagcctgtaagatgaaggaaattcagtct

SEQ ID NO: 389843 - DNA, 33 bp, Homo sapien
aatcttaagccactctaaaatataaagcttata

SEQ ID NO: 389844 - DNA, 33 bp, Homo sapien
aatcttaagccactctgaaatataaagcttata

SEQ ID NO: 389845 - DNA, 33 bp, Homo sapien
cagaacagtaaacttacctgcaaaagaagtcat

SEQ ID NO: 389846 - DNA, 33 bp, Homo sapien
cagaacagtaaacttagctgcaaaagaagtcat

SEQ ID NO: 389847 - DNA, 33 bp, Homo sapien
caactaatattctgaggcattgctggccatgcc

SEQ ID NO: 389848 - DNA, 33 bp, Homo sapien
caactaatattctgagtcattgctggccatgcc

SEQ ID NO: 389849 - DNA, 33 bp, Homo sapien
cacaccctgggcttccacaagtctgggcaaaga

SEQ ID NO: 389850 - DNA, 33 bp, Homo sapien
cacaccctgggcttcctcaagtctgggcaaaga

SEQ ID NO: 389851 - DNA, 33 bp, Homo sapien
caagtctgggcaaagaatatgaaaaggttatta

SEQ ID NO: 389852 - DNA, 33 bp, Homo sapien
caagtctgggcaaagagtatgaaaaggttatta

SEQ ID NO: 389853 - DNA, 33 bp, Homo sapien
ctcgtttttagctttaagagaaagccatacagg

SEQ ID NO: 389854 - DNA, 33 bp, Homo sapien
ctcgtttttagctttatgagaaagccatacagg

SEQ ID NO: 389855 - DNA, 33 bp, Homo sapien
gttcgtaagtcgtacacaactatagcataaaac

SEQ ID NO: 389856 - DNA, 33 bp, Homo sapien
gttcgtaagtcgtacataactatagcataaaac

SEQ ID NO: 389857 - DNA, 33 bp, Homo sapien
gacttcttttcaactacattatgttgctgacag

SEQ ID NO: 389858 - DNA, 33 bp, Homo sapien
gacttcttttcaactagattatgttgctgacag

SEQ ID NO: 389859 - DNA, 33 bp, Homo sapien
gacattttattattccaataaagcaacagagct

SEQ ID NO: 389860 - DNA, 33 bp, Homo sapien
gacattttattattcccataaagcaacagagct

SEQ ID NO: 389861 - DNA, 33 bp, Homo sapien
gcatgactacgtcccaatacaactttatgtatg

SEQ ID NO: 389862 - DNA, 33 bp, Homo sapien
gcatgactacgtcccagtacaactttatgtatg

SEQ ID NO: 389863 - DNA, 33 bp, Homo sapien
atctttgaggccactgaagccctgagttccaaa

SEQ ID NO: 389864 - DNA, 33 bp, Homo sapien
atctttgaggccactggagccctgagttccaaa

SEQ ID NO: 389865 - DNA, 33 bp, Homo sapien
tccaaaaatcccaggaaagaattgaagttaagg

SEQ ID NO: 389866 - DNA, 33 bp, Homo sapien
tccaaaaatcccaggagagaattgaagttaagg

SEQ ID NO: 389867 - DNA, 33 bp, Homo sapien
atttattttcaggcccagaacaaatttgactgg

SEQ ID NO: 389868 - DNA, 33 bp, Homo sapien
atttattttcaggcccggaacaaatttgactgg

SEQ ID NO: 389869 - DNA, 33 bp, Homo sapien
agagacacaggaactcactttccctttccaatt

SEQ ID NO: 389870 - DNA, 33 bp, Homo sapien
agagacacaggaactccctttccctttccaatt

SEQ ID NO: 389871 - DNA, 33 bp, Homo sapien
cagccctgatgataaccaaaggaaaaggacaga

SEQ ID NO: 389872 - DNA, 33 bp, Homo sapien
cagccctgatgataacgaaaggaaaaggacaga

SEQ ID NO: 389873 - DNA, 33 bp, Homo sapien
tggccccatcttcaagactctggcacagtctga

SEQ ID NO: 389874 - DNA, 33 bp, Homo sapien
tggccccatcttcaaggctctggcacagtctga

SEQ ID NO: 389875 - DNA, 33 bp, Homo sapien
taggggaacctgttggaacccatagcttttgtc

SEQ ID NO: 389876 - DNA, 33 bp, Homo sapien
taggggaacctgttgggacccatagcttttgtc

SEQ ID NO: 389877 - DNA, 33 bp, Homo sapien
gaagctcagggccacagtgaagatgctgcattg

SEQ ID NO: 389878 - DNA, 33 bp, Homo sapien
gaagctcagggccacattgaagatgctgcattg

SEQ ID NO: 389879 - DNA, 33 bp, Homo sapien
attagaaacaaggagacaaaatgaatgaggggt

SEQ ID NO: 389880 - DNA, 33 bp, Homo sapien
attagaaacaaggagagaaaatgaatgaggggt

SEQ ID NO: 389881 - DNA, 33 bp, Homo sapien
ggcaaagtgaggaaaacgaacagggaatgaagc

SEQ ID NO: 389882 - DNA, 33 bp, Homo sapien
ggcaaagtgaggaaaatgaacagggaatgaagc

SEQ ID NO: 389883 - DNA, 33 bp, Homo sapien
gaaacttagtggatcaagaagaaaatacactct

SEQ ID NO: 389884 - DNA, 33 bp, Homo sapien
gaaacttagtggatcatgaagaaaatacactct

SEQ ID NO: 389885 - DNA, 33 bp, Homo sapien
aagaatgagcaaagccactaatgaggtaggtgc

SEQ ID NO: 389886 - DNA, 33 bp, Homo sapien
aagaatgagcaaagcctctaatgaggtaggtgc

SEQ ID NO: 389887 - DNA, 33 bp, Homo sapien
acttgcataaaataaactaggtgcattcagcag

SEQ ID NO: 389888 - DNA, 33 bp, Homo sapien
acttgcataaaataaagtaggtgcattcagcag

SEQ ID NO: 389889 - DNA, 33 bp, Homo sapien
tatacaatcccggagaccaaatgctggtagaaa

SEQ ID NO: 389890 - DNA, 33 bp, Homo sapien
tatacaatcccggagatcaaatgctggtagaaa

SEQ ID NO: 389891 - DNA, 33 bp, Homo sapien
acctctgcttgggcaagttagatagcttttcat

SEQ ID NO: 389892 - DNA, 33 bp, Homo sapien
acctctgcttgggcaatttagatagcttttcat

SEQ ID NO: 389893 - DNA, 33 bp, Homo sapien
acattgaaaaggggtggatgagtttggtgtacc

SEQ ID NO: 389894 - DNA, 33 bp, Homo sapien
acattgaaaaggggtgtatgagtttggtgtacc

SEQ ID NO: 389895 - DNA, 33 bp, Homo sapien
aaggctcagagaggtaaggtaattttcccaggg

SEQ ID NO: 389896 - DNA, 33 bp, Homo sapien
aaggctcagagaggtagggtaattttcccaggg

SEQ ID NO: 389897 - DNA, 33 bp, Homo sapien
gagctttgtgtcacaacagaagacaacagaact

SEQ ID NO: 389898 - DNA, 33 bp, Homo sapien
gagctttgtgtcacaagagaagacaacagaact

SEQ ID NO: 389899 - DNA, 33 bp, Homo sapien
cacaactagggaagaacattagcaatcacctgg

SEQ ID NO: 389900 - DNA, 33 bp, Homo sapien
cacaactagggaagaatattagcaatcacctgg

SEQ ID NO: 389901 - DNA, 33 bp, Homo sapien
acatggtcatgttgcacaagaattcagtggcag

SEQ ID NO: 389902 - DNA, 33 bp, Homo sapien
acatggtcatgttgcagaagaattcagtggcag

SEQ ID NO: 389903 - DNA, 33 bp, Homo sapien
ctgtccaagaaaattaccacaggcctacaagac

SEQ ID NO: 389904 - DNA, 33 bp, Homo sapien
ctgtccaagaaaattagcacaggcctacaagac

SEQ ID NO: 389905 - DNA, 33 bp, Homo sapien
cagtgtaggtgactaacggagaaattgatccag

SEQ ID NO: 389906 - DNA, 33 bp, Homo sapien
cagtgtaggtgactaatggagaaattgatccag

SEQ ID NO: 389907 - DNA, 33 bp, Homo sapien
tgatgttgttcttgcactctatttataggagca

SEQ ID NO: 389908 - DNA, 33 bp, Homo sapien
tgatgttgttcttgcattctatttataggagca

SEQ ID NO: 389909 - DNA, 33 bp, Homo sapien
gacttcaaaggcatagaaaacccattgactctg

SEQ ID NO: 389910 - DNA, 33 bp, Homo sapien
gacttcaaaggcataggaaacccattgactctg

SEQ ID NO: 389911 - DNA, 33 bp, Homo sapien
ctaccccattgggttaacattgctctgttctca

SEQ ID NO: 389912 - DNA, 33 bp, Homo sapien
ctaccccattgggttagcattgctctgttctca

SEQ ID NO: 389913 - DNA, 33 bp, Homo sapien
aagatctggcctatggcaaaccttggcaggtgc

SEQ ID NO: 389914 - DNA, 33 bp, Homo sapien
aagatctggcctatgggaaaccttggcaggtgc

SEQ ID NO: 389915 - DNA, 33 bp, Homo sapien
gacacagacatccagggaagaagaccatgtgaa

SEQ ID NO: 389916 - DNA, 33 bp, Homo sapien
gacacagacatccaggtaagaagaccatgtgaa

SEQ ID NO: 389917 - DNA, 33 bp, Homo sapien
catcactgacctaggaaagcataaatgcagctg

SEQ ID NO: 389918 - DNA, 33 bp, Homo sapien
catcactgacctaggatagcataaatgcagctg

SEQ ID NO: 389919 - DNA, 33 bp, Homo sapien
agctgcttcttatccaatgacaggaacccattc

SEQ ID NO: 389920 - DNA, 33 bp, Homo sapien
agctgcttcttatccagtgacaggaacccattc

SEQ ID NO: 389921 - DNA, 33 bp, Homo sapien
cacttctgaatcaaaagtaggaattgcggtttg

SEQ ID NO: 389922 - DNA, 33 bp, Homo sapien
cacttctgaatcaaaattaggaattgcggtttg

SEQ ID NO: 389923 - DNA, 33 bp, Homo sapien
aatgaccacaagggcaatagggatagggtattc

SEQ ID NO: 389924 - DNA, 33 bp, Homo sapien
aatgaccacaagggcagtagggatagggtattc

SEQ ID NO: 389925 - DNA, 33 bp, Homo sapien
atataattttttcatcacaggggtaaagagcta

SEQ ID NO: 389926 - DNA, 33 bp, Homo sapien
atataattttttcatcgcaggggtaaagagcta

SEQ ID NO: 389927 - DNA, 33 bp, Homo sapien
catttctagctaagaaccactcaatggtatcct

SEQ ID NO: 389928 - DNA, 33 bp, Homo sapien
catttctagctaagaatcactcaatggtatcct

SEQ ID NO: 389929 - DNA, 33 bp, Homo sapien
tctttggcacctgacccggcaccgcatggatgc

SEQ ID NO: 389930 - DNA, 33 bp, Homo sapien
tctttggcacctgacctggcaccgcatggatgc

SEQ ID NO: 389931 - DNA, 33 bp, Homo sapien
cagaagttcatttttcaaaacatcatccttcat

SEQ ID NO: 389932 - DNA, 33 bp, Homo sapien
cagaagttcatttttcgaaacatcatccttcat

SEQ ID NO: 389933 - DNA, 33 bp, Homo sapien
tgcagagaattgctcaccccaatgggcttcttc

SEQ ID NO: 389934 - DNA, 33 bp, Homo sapien
tgcagagaattgctcatcccaatgggcttcttc

SEQ ID NO: 389935 - DNA, 33 bp, Homo sapien
gatgctgcttaaaagtcaagattcctggaactg

SEQ ID NO: 389936 - DNA, 33 bp, Homo sapien
gatgctgcttaaaagtgaagattcctggaactg

SEQ ID NO: 389937 - DNA, 33 bp, Homo sapien
gaggctgtggtaagaacgtggtggatgatattc

SEQ ID NO: 389938 - DNA, 33 bp, Homo sapien
gaggctgtggtaagaatgtggtggatgatattc

SEQ ID NO: 389939 - DNA, 33 bp, Homo sapien
ttggggtcaataattcaatcatcacatctctta

SEQ ID NO: 389940 - DNA, 33 bp, Homo sapien
ttggggtcaataattcgatcatcacatctctta

SEQ ID NO: 389941 - DNA, 33 bp, Homo sapien
tgtacagggcaaaatacagatgagcaatattta

SEQ ID NO: 389942 - DNA, 33 bp, Homo sapien
tgtacagggcaaaatatagatgagcaatattta

SEQ ID NO: 389943 - DNA, 33 bp, Homo sapien
agactcaaacctgtcaaatcagaatagaggaac

SEQ ID NO: 389944 - DNA, 33 bp, Homo sapien
agactcaaacctgtcacatcagaatagaggaac

SEQ ID NO: 389945 - DNA, 33 bp, Homo sapien
aagagacagtggcacaatattcaagagggtgac

SEQ ID NO: 389946 - DNA, 33 bp, Homo sapien
aagagacagtggcacagtattcaagagggtgac

SEQ ID NO: 389947 - DNA, 33 bp, Homo sapien
acagacaagtagaaaggaaaagaaaatgtaaat

SEQ ID NO: 389948 - DNA, 33 bp, Homo sapien
acagacaagtagaaagtaaaagaaaatgtaaat

SEQ ID NO: 389949 - DNA, 33 bp, Homo sapien
taacatatcccaatagaccccttagccctttgc

SEQ ID NO: 389950 - DNA, 33 bp, Homo sapien
taacatatcccaataggccccttagccctttgc

SEQ ID NO: 389951 - DNA, 33 bp, Homo sapien
atgggagtgcagggcaacatctcatcaaaagca

SEQ ID NO: 389952 - DNA, 33 bp, Homo sapien
atgggagtgcagggcagcatctcatcaaaagca

SEQ ID NO: 389953 - DNA, 33 bp, Homo sapien
atcttaggtaaatttggaggaatgcatacctaa

SEQ ID NO: 389954 - DNA, 33 bp, Homo sapien
atcttaggtaaatttgtaggaatgcatacctaa

SEQ ID NO: 389955 - DNA, 33 bp, Homo sapien
cctttcagagcctccaagtgtcgttggtgtctt

SEQ ID NO: 389956 - DNA, 33 bp, Homo sapien
cctttcagagcctccaggtgtcgttggtgtctt

SEQ ID NO: 389957 - DNA, 33 bp, Homo sapien
gccaagtcaagccttccctgaaaatgccgtgct

SEQ ID NO: 389958 - DNA, 33 bp, Homo sapien
gccaagtcaagccttctctgaaaatgccgtgct

SEQ ID NO: 389959 - DNA, 33 bp, Homo sapien
gttagtgatttatccccgacagccacagtacca

SEQ ID NO: 389960 - DNA, 33 bp, Homo sapien
gttagtgatttatccctgacagccacagtacca

SEQ ID NO: 389961 - DNA, 33 bp, Homo sapien
catggcatctagagggaagcaaattcttctccc

SEQ ID NO: 389962 - DNA, 33 bp, Homo sapien
catggcatctagagggtagcaaattcttctccc

SEQ ID NO: 389963 - DNA, 33 bp, Homo sapien
caaatcacctcagcaaactgagatcaaatgaat

SEQ ID NO: 389964 - DNA, 33 bp, Homo sapien
caaatcacctcagcaatctgagatcaaatgaat

SEQ ID NO: 389965 - DNA, 33 bp, Homo sapien
aagcttagtggaattacaaggcattggacttgt

SEQ ID NO: 389966 - DNA, 33 bp, Homo sapien
aagcttagtggaattataaggcattggacttgt

SEQ ID NO: 389967 - DNA, 33 bp, Homo sapien
attgttcagtaagaagactgatgttgccaccat

SEQ ID NO: 389968 - DNA, 33 bp, Homo sapien
attgttcagtaagaagcctgatgttgccaccat

SEQ ID NO: 389969 - DNA, 33 bp, Homo sapien
aggctgatgtttcagcagatttttatatcccag

SEQ ID NO: 389970 - DNA, 33 bp, Homo sapien
aggctgatgtttcagcggatttttatatcccag

SEQ ID NO: 389971 - DNA, 33 bp, Homo sapien
aacagaactatcaaacactgcttaaggtcattc

SEQ ID NO: 389972 - DNA, 33 bp, Homo sapien
aacagaactatcaaacgctgcttaaggtcattc

SEQ ID NO: 389973 - DNA, 33 bp, Homo sapien
gccactgtgctcaagaagtcacaaagtcctatg

SEQ ID NO: 389974 - DNA, 33 bp, Homo sapien
gccactgtgctcaagaggtcacaaagtcctatg

SEQ ID NO: 389975 - DNA, 33 bp, Homo sapien
tgtttagtgtctttcacgacttttacaagttta

SEQ ID NO: 389976 - DNA, 33 bp, Homo sapien
tgtttagtgtctttcaggacttttacaagttta

SEQ ID NO: 389977 - DNA, 33 bp, Homo sapien
ctgtccgtttcataatcagtgtgactactaagt

SEQ ID NO: 389978 - DNA, 33 bp, Homo sapien
ctgtccgtttcataatgagtgtgactactaagt

SEQ ID NO: 389979 - DNA, 33 bp, Homo sapien
ctaagtgactaatggccaacaacatggacagtg

SEQ ID NO: 389980 - DNA, 33 bp, Homo sapien
ctaagtgactaatggctaacaacatggacagtg

SEQ ID NO: 389981 - DNA, 33 bp, Homo sapien
cccctagcgcctgtaacagaatctcagctctac

SEQ ID NO: 389982 - DNA, 33 bp, Homo sapien
cccctagcgcctgtaagagaatctcagctctac

SEQ ID NO: 389983 - DNA, 33 bp, Homo sapien
gcaaggtcacaagaacacttaccagggcctgac

SEQ ID NO: 389984 - DNA, 33 bp, Homo sapien
gcaaggtcacaagaacgcttaccagggcctgac

SEQ ID NO: 389985 - DNA, 33 bp, Homo sapien
cagcactggggggtcacgctatttctttatagg

SEQ ID NO: 389986 - DNA, 33 bp, Homo sapien
cagcactggggggtcatgctatttctttatagg

SEQ ID NO: 389987 - DNA, 33 bp, Homo sapien
taatctcccgggtgaaataaacgtatggcagtt

SEQ ID NO: 389988 - DNA, 33 bp, Homo sapien
taatctcccgggtgaagtaaacgtatggcagtt

SEQ ID NO: 389989 - DNA, 33 bp, Homo sapien
attttttaaaaagcctcaagtcaagccgtccag

SEQ ID NO: 389990 - DNA, 33 bp, Homo sapien
attttttaaaaagcctgaagtcaagccgtccag

SEQ ID NO: 389991 - DNA, 33 bp, Homo sapien
tgaaatattttgtgtcagaaaccatgctaggca

SEQ ID NO: 389992 - DNA, 33 bp, Homo sapien
tgaaatattttgtgtccgaaaccatgctaggca

SEQ ID NO: 389993 - DNA, 33 bp, Homo sapien
cagatgaagaagaaaccgtcctggccaggacta

SEQ ID NO: 389994 - DNA, 33 bp, Homo sapien
cagatgaagaagaaactgtcctggccaggacta

SEQ ID NO: 389995 - DNA, 33 bp, Homo sapien
agtcaccaaataaaagccttctctaagtgatct

SEQ ID NO: 389996 - DNA, 33 bp, Homo sapien
agtcaccaaataaaaggcttctctaagtgatct

SEQ ID NO: 389997 - DNA, 33 bp, Homo sapien
catttcaggatcttatgaatcaacagaactgac

SEQ ID NO: 389998 - DNA, 33 bp, Homo sapien
catttcaggatcttattaatcaacagaactgac

SEQ ID NO: 389999 - DNA, 33 bp, Homo sapien
tgctgattggcaaggacgttttggatggacact

SEQ ID NO: 390000 - DNA, 33 bp, Homo sapien
tgctgattggcaaggatgttttggatggacact

SEQ ID NO: 390001 - DNA, 33 bp, Homo sapien
gcacagtataagggccccaaagcattgcacaga

SEQ ID NO: 390002 - DNA, 33 bp, Homo sapien
gcacagtataagggcctcaaagcattgcacaga

SEQ ID NO: 390003 - DNA, 33 bp, Homo sapien
atcacatggagtccaaatgacccttgacaatcc

SEQ ID NO: 390004 - DNA, 33 bp, Homo sapien
atcacatggagtccaagtgacccttgacaatcc

SEQ ID NO: 390005 - DNA, 33 bp, Homo sapien
aggccatgcttacacccgcattgccaacagtgt

SEQ ID NO: 390006 - DNA, 33 bp, Homo sapien
aggccatgcttacaccggcattgccaacagtgt

SEQ ID NO: 390007 - DNA, 33 bp, Homo sapien
aaaggcatgaatgcagcatcaggcgtgaaggaa

SEQ ID NO: 390008 - DNA, 33 bp, Homo sapien
aaaggcatgaatgcaggatcaggcgtgaaggaa

SEQ ID NO: 390009 - DNA, 33 bp, Homo sapien
gtctgcacaccctggacgtttctgaggctcctc

SEQ ID NO: 390010 - DNA, 33 bp, Homo sapien
gtctgcacaccctggaggtttctgaggctcctc

SEQ ID NO: 390011 - DNA, 33 bp, Homo sapien
cttgattaagtcaggaccacccagttaatctcc

SEQ ID NO: 390012 - DNA, 33 bp, Homo sapien
cttgattaagtcaggagcacccagttaatctcc

SEQ ID NO: 390013 - DNA, 33 bp, Homo sapien
caaatatatgatgcaacattcccattgtatatg

SEQ ID NO: 390014 - DNA, 33 bp, Homo sapien
caaatatatgatgcaatattcccattgtatatg

SEQ ID NO: 390015 - DNA, 33 bp, Homo sapien
tcaagtttttaccctgcagtctggctatcccag

SEQ ID NO: 390016 - DNA, 33 bp, Homo sapien
tcaagtttttaccctggagtctggctatcccag

SEQ ID NO: 390017 - DNA, 33 bp, Homo sapien
gtcttcccattgcaaaagccttaatcacaggca

SEQ ID NO: 390018 - DNA, 33 bp, Homo sapien
gtcttcccattgcaaatgccttaatcacaggca

SEQ ID NO: 390019 - DNA, 33 bp, Homo sapien
tgtgatgtgctttggcaaatgggataatgcaag

SEQ ID NO: 390020 - DNA, 33 bp, Homo sapien
tgtgatgtgctttggcgaatgggataatgcaag

SEQ ID NO: 390021 - DNA, 33 bp, Homo sapien
caaatgtgttaatcaactacaattagtcatacc

SEQ ID NO: 390022 - DNA, 33 bp, Homo sapien
caaatgtgttaatcaattacaattagtcatacc

SEQ ID NO: 390023 - DNA, 33 bp, Homo sapien
aaggtctttatagcaacgttgagagatagagga

SEQ ID NO: 390024 - DNA, 33 bp, Homo sapien
aaggtctttatagcaatgttgagagatagagga

SEQ ID NO: 390025 - DNA, 33 bp, Homo sapien
tggaagactgccttcacgctggaaaagggagag

SEQ ID NO: 390026 - DNA, 33 bp, Homo sapien
tggaagactgccttcatgctggaaaagggagag

SEQ ID NO: 390027 - DNA, 33 bp, Homo sapien
tgattgattgattaacaacacctgtagcttttg

SEQ ID NO: 390028 - DNA, 33 bp, Homo sapien
tgattgattgattaacgacacctgtagcttttg

SEQ ID NO: 390029 - DNA, 33 bp, Homo sapien
accatgacagggagtacagataggctgagaatt

SEQ ID NO: 390030 - DNA, 33 bp, Homo sapien
accatgacagggagtagagataggctgagaatt

SEQ ID NO: 390031 - DNA, 33 bp, Homo sapien
tgaaaatgaggatgataaaaacaaggcaggtaa

SEQ ID NO: 390032 - DNA, 33 bp, Homo sapien
tgaaaatgaggatgatcaaaacaaggcaggtaa

SEQ ID NO: 390033 - DNA, 33 bp, Homo sapien
gcattgtgaatatgcacaaggatgtgtacactg

SEQ ID NO: 390034 - DNA, 33 bp, Homo sapien
gcattgtgaatatgcataaggatgtgtacactg

SEQ ID NO: 390035 - DNA, 33 bp, Homo sapien
tgagagggtcagttcacatggagttgcagcact

SEQ ID NO: 390036 - DNA, 33 bp, Homo sapien
tgagagggtcagttcatatggagttgcagcact

SEQ ID NO: 390037 - DNA, 33 bp, Homo sapien
ttccaagttaacagagaaatcaaagaattggga

SEQ ID NO: 390038 - DNA, 33 bp, Homo sapien
ttccaagttaacagaggaatcaaagaattggga

SEQ ID NO: 390039 - DNA, 33 bp, Homo sapien
tcatataggcatattgcaggcagtgtgtgtgtg

SEQ ID NO: 390040 - DNA, 33 bp, Homo sapien
tcatataggcatattgtaggcagtgtgtgtgtg

SEQ ID NO: 390041 - DNA, 33 bp, Homo sapien
tactgcttgcctcacacatagttttacaggcaa

SEQ ID NO: 390042 - DNA, 33 bp, Homo sapien
tactgcttgcctcacagatagttttacaggcaa

SEQ ID NO: 390043 - DNA, 33 bp, Homo sapien
tagtggatgggcaaaacgaaggtaactaagcag

SEQ ID NO: 390044 - DNA, 33 bp, Homo sapien
tagtggatgggcaaaatgaaggtaactaagcag

SEQ ID NO: 390045 - DNA, 33 bp, Homo sapien
tccagctttttctgtcacatgactctcggctgg

SEQ ID NO: 390046 - DNA, 33 bp, Homo sapien
tccagctttttctgtcgcatgactctcggctgg

SEQ ID NO: 390047 - DNA, 33 bp, Homo sapien
tatacttgtaaaaataactatgtatgcacctga

SEQ ID NO: 390048 - DNA, 33 bp, Homo sapien
tatacttgtaaaaatatctatgtatgcacctga

SEQ ID NO: 390049 - DNA, 33 bp, Homo sapien
tgaagtgtgtaaaaaggctttgagaactagaag

SEQ ID NO: 390050 - DNA, 33 bp, Homo sapien
tgaagtgtgtaaaaagtctttgagaactagaag

SEQ ID NO: 390051 - DNA, 33 bp, Homo sapien
gataatatttccattacggtgtcatggtaaaga

SEQ ID NO: 390052 - DNA, 33 bp, Homo sapien
gataatatttccattatggtgtcatggtaaaga

SEQ ID NO: 390053 - DNA, 33 bp, Homo sapien
gaaaacgcatgtgcacccattggacctgtctgc

SEQ ID NO: 390054 - DNA, 33 bp, Homo sapien
gaaaacgcatgtgcacgcattggacctgtctgc

SEQ ID NO: 390055 - DNA, 33 bp, Homo sapien
ccctcctactctcaagaactctccttggtgtct

SEQ ID NO: 390056 - DNA, 33 bp, Homo sapien
ccctcctactctcaagtactctccttggtgtct

SEQ ID NO: 390057 - DNA, 33 bp, Homo sapien
gctgctaattgacatacaaaggaagtatgcaca

SEQ ID NO: 390058 - DNA, 33 bp, Homo sapien
gctgctaattgacatagaaaggaagtatgcaca

SEQ ID NO: 390059 - DNA, 33 bp, Homo sapien
attgatgaatttgaccggaaatgatctccttgt

SEQ ID NO: 390060 - DNA, 33 bp, Homo sapien
attgatgaatttgacctgaaatgatctccttgt

SEQ ID NO: 390061 - DNA, 33 bp, Homo sapien
gtgcactgtcgctataccctaattagtggcaga

SEQ ID NO: 390062 - DNA, 33 bp, Homo sapien
gtgcactgtcgctatagcctaattagtggcaga

SEQ ID NO: 390063 - DNA, 33 bp, Homo sapien
caagcatggtagatacagcagtgaatggtacag

SEQ ID NO: 390064 - DNA, 33 bp, Homo sapien
caagcatggtagatactgcagtgaatggtacag

SEQ ID NO: 390065 - DNA, 33 bp, Homo sapien
gtttttaggaccaaacaaaggaattattcaggg

SEQ ID NO: 390066 - DNA, 33 bp, Homo sapien
gtttttaggaccaaaccaaggaattattcaggg

SEQ ID NO: 390067 - DNA, 33 bp, Homo sapien
tctcctatgctattcacgggatagtgagtaagt

SEQ ID NO: 390068 - DNA, 33 bp, Homo sapien
tctcctatgctattcatgggatagtgagtaagt

SEQ ID NO: 390069 - DNA, 33 bp, Homo sapien
tttgtgtgggaagtgccctagttttgtaataaa

SEQ ID NO: 390070 - DNA, 33 bp, Homo sapien
tttgtgtgggaagtgctctagttttgtaataaa

SEQ ID NO: 390071 - DNA, 33 bp, Homo sapien
aattaagaaagaataaactagacaaatgtgcat

SEQ ID NO: 390072 - DNA, 33 bp, Homo sapien
aattaagaaagaataagctagacaaatgtgcat

SEQ ID NO: 390073 - DNA, 33 bp, Homo sapien
ataaattaaaatgacagcataagcggcaaagag

SEQ ID NO: 390074 - DNA, 33 bp, Homo sapien
ataaattaaaatgacatcataagcggcaaagag

SEQ ID NO: 390075 - DNA, 33 bp, Homo sapien
tgccatttttgagatccccaaaatagagattga

SEQ ID NO: 390076 - DNA, 33 bp, Homo sapien
tgccatttttgagatcgccaaaatagagattga

SEQ ID NO: 390077 - DNA, 33 bp, Homo sapien
aagtattgagtccaataaaatgtacaaaacaca

SEQ ID NO: 390078 - DNA, 33 bp, Homo sapien
aagtattgagtccaatgaaatgtacaaaacaca

SEQ ID NO: 390079 - DNA, 33 bp, Homo sapien
aaagtggctccaaacacaaattggcagtcaaat

SEQ ID NO: 390080 - DNA, 33 bp, Homo sapien
aaagtggctccaaacagaaattggcagtcaaat

SEQ ID NO: 390081 - DNA, 33 bp, Homo sapien
tgaatctccagggcaaggaaagataatggcaca

SEQ ID NO: 390082 - DNA, 33 bp, Homo sapien
tgaatctccagggcaatgaaagataatggcaca

SEQ ID NO: 390083 - DNA, 33 bp, Homo sapien
ttcaaaaaactcatggcccagcaagacagcatc

SEQ ID NO: 390084 - DNA, 33 bp, Homo sapien
ttcaaaaaactcatggtccagcaagacagcatc

SEQ ID NO: 390085 - DNA, 33 bp, Homo sapien
tgacagtggaactatccctttgacaaaaccaca

SEQ ID NO: 390086 - DNA, 33 bp, Homo sapien
tgacagtggaactatctctttgacaaaaccaca

SEQ ID NO: 390087 - DNA, 33 bp, Homo sapien
cagttatttcttaaggacattctctcaacaaat

SEQ ID NO: 390088 - DNA, 33 bp, Homo sapien
cagttatttcttaagggcattctctcaacaaat

SEQ ID NO: 390089 - DNA, 33 bp, Homo sapien
tactctgtttctttcactcccataccaatttcc

SEQ ID NO: 390090 - DNA, 33 bp, Homo sapien
tactctgtttctttcattcccataccaatttcc

SEQ ID NO: 390091 - DNA, 33 bp, Homo sapien
catcagaaattgcctccagcaaaaaaagagtcc

SEQ ID NO: 390092 - DNA, 33 bp, Homo sapien
catcagaaattgcctctagcaaaaaaagagtcc

SEQ ID NO: 390093 - DNA, 33 bp, Homo sapien
gggggccatgcaactacatagggccaaagaact

SEQ ID NO: 390094 - DNA, 33 bp, Homo sapien
gggggccatgcaactagatagggccaaagaact

SEQ ID NO: 390095 - DNA, 33 bp, Homo sapien
gcttttcagagtgttcaaggatcagggagcatg

SEQ ID NO: 390096 - DNA, 33 bp, Homo sapien
gcttttcagagtgttcgaggatcagggagcatg

SEQ ID NO: 390097 - DNA, 33 bp, Homo sapien
tcagaagccatgaatactaaggaaggtatgact

SEQ ID NO: 390098 - DNA, 33 bp, Homo sapien
tcagaagccatgaatattaaggaaggtatgact

SEQ ID NO: 390099 - DNA, 33 bp, Homo sapien
tgtgtttcctttataaccttcgctacccatttc

SEQ ID NO: 390100 - DNA, 33 bp, Homo sapien
tgtgtttcctttataagcttcgctacccatttc

SEQ ID NO: 390101 - DNA, 33 bp, Homo sapien
tcatactacagtcatactaaatttggacttgca

SEQ ID NO: 390102 - DNA, 33 bp, Homo sapien
tcatactacagtcatagtaaatttggacttgca

SEQ ID NO: 390103 - DNA, 33 bp, Homo sapien
gtaaacggttagagcacggttgtctaaatgttt

SEQ ID NO: 390104 - DNA, 33 bp, Homo sapien
gtaaacggttagagcatggttgtctaaatgttt

SEQ ID NO: 390105 - DNA, 33 bp, Homo sapien
atttcagcgattcccacgacagttttaccaatg

SEQ ID NO: 390106 - DNA, 33 bp, Homo sapien
atttcagcgattcccatgacagttttaccaatg

SEQ ID NO: 390107 - DNA, 33 bp, Homo sapien
ccctcccctgaagactcagctgctacccagaca

SEQ ID NO: 390108 - DNA, 33 bp, Homo sapien
ccctcccctgaagactgagctgctacccagaca

SEQ ID NO: 390109 - DNA, 33 bp, Homo sapien
actggatcagagattcaataaagtacctgagca

SEQ ID NO: 390110 - DNA, 33 bp, Homo sapien
actggatcagagattcgataaagtacctgagca

SEQ ID NO: 390111 - DNA, 33 bp, Homo sapien
gagggataaatagacaaccagcaagtgaacaaa

SEQ ID NO: 390112 - DNA, 33 bp, Homo sapien
gagggataaatagacatccagcaagtgaacaaa

SEQ ID NO: 390113 - DNA, 33 bp, Homo sapien
ctattttcaaaacacacgtagagttcattcact

SEQ ID NO: 390114 - DNA, 33 bp, Homo sapien
ctattttcaaaacacatgtagagttcattcact

SEQ ID NO: 390115 - DNA, 33 bp, Homo sapien
tggttgcgcttctgaccgctgttccacacactg

SEQ ID NO: 390116 - DNA, 33 bp, Homo sapien
tggttgcgcttctgactgctgttccacacactg

SEQ ID NO: 390117 - DNA, 33 bp, Homo sapien
tttcctaatttctacacgactcagtttccttat

SEQ ID NO: 390118 - DNA, 33 bp, Homo sapien
tttcctaatttctacatgactcagtttccttat

SEQ ID NO: 390119 - DNA, 33 bp, Homo sapien
cagttgcttaagaacacgaagagagactggaat

SEQ ID NO: 390120 - DNA, 33 bp, Homo sapien
cagttgcttaagaacatgaagagagactggaat

SEQ ID NO: 390121 - DNA, 33 bp, Homo sapien
aaatgtaacactcataggttgcagagattagga

SEQ ID NO: 390122 - DNA, 33 bp, Homo sapien
aaatgtaacactcatatgttgcagagattagga

SEQ ID NO: 390123 - DNA, 33 bp, Homo sapien
tgcaggtgagaccaccagaagtgcagtacttag

SEQ ID NO: 390124 - DNA, 33 bp, Homo sapien
tgcaggtgagaccaccggaagtgcagtacttag

SEQ ID NO: 390125 - DNA, 33 bp, Homo sapien
taatcatctgtagggactcaccaactttctcct

SEQ ID NO: 390126 - DNA, 33 bp, Homo sapien
taatcatctgtagggattcaccaactttctcct

SEQ ID NO: 390127 - DNA, 33 bp, Homo sapien
gttccaacttatcccacgtctttccataagctc

SEQ ID NO: 390128 - DNA, 33 bp, Homo sapien
gttccaacttatcccatgtctttccataagctc

SEQ ID NO: 390129 - DNA, 33 bp, Homo sapien
aagaggcgcgttgttacgctaaagccagcttct

SEQ ID NO: 390130 - DNA, 33 bp, Homo sapien
aagaggcgcgttgttatgctaaagccagcttct

SEQ ID NO: 390131 - DNA, 33 bp, Homo sapien
ctttgaaagaagttgcaatatttgttcagtaaa

SEQ ID NO: 390132 - DNA, 33 bp, Homo sapien
ctttgaaagaagttgctatatttgttcagtaaa

SEQ ID NO: 390133 - DNA, 33 bp, Homo sapien
gttgccagatacaataaaggatgtgcagttgaa

SEQ ID NO: 390134 - DNA, 33 bp, Homo sapien
gttgccagatacaatacaggatgtgcagttgaa

SEQ ID NO: 390135 - DNA, 33 bp, Homo sapien
gtttgtatgatgagtaagcaaggagaaggaaca

SEQ ID NO: 390136 - DNA, 33 bp, Homo sapien
gtttgtatgatgagtaggcaaggagaaggaaca

SEQ ID NO: 390137 - DNA, 33 bp, Homo sapien
aagcactgtctcattgaattctggcaacaatca

SEQ ID NO: 390138 - DNA, 33 bp, Homo sapien
aagcactgtctcattggattctggcaacaatca

SEQ ID NO: 390139 - DNA, 33 bp, Homo sapien
gtactcagaaagcagaaatcccattgtgtggca

SEQ ID NO: 390140 - DNA, 33 bp, Homo sapien
gtactcagaaagcagacatcccattgtgtggca

SEQ ID NO: 390141 - DNA, 33 bp, Homo sapien
tggcccgtgagccaagacctaaagcaaacatgg

SEQ ID NO: 390142 - DNA, 33 bp, Homo sapien
tggcccgtgagccaagtcctaaagcaaacatgg

SEQ ID NO: 390143 - DNA, 33 bp, Homo sapien
gatgtcctctaaagcaacttgtccttgtttgta

SEQ ID NO: 390144 - DNA, 33 bp, Homo sapien
gatgtcctctaaagcagcttgtccttgtttgta

SEQ ID NO: 390145 - DNA, 33 bp, Homo sapien
tccctggtctttgtggaatctatgtacaacctt

SEQ ID NO: 390146 - DNA, 33 bp, Homo sapien
tccctggtctttgtggtatctatgtacaacctt

SEQ ID NO: 390147 - DNA, 33 bp, Homo sapien
tcattacacgaacaagaacctggcactctgaaa

SEQ ID NO: 390148 - DNA, 33 bp, Homo sapien
tcattacacgaacaaggacctggcactctgaaa

SEQ ID NO: 390149 - DNA, 33 bp, Homo sapien
cattcatctattattgcataggctcatgttata

SEQ ID NO: 390150 - DNA, 33 bp, Homo sapien
cattcatctattattgtataggctcatgttata

SEQ ID NO: 390151 - DNA, 33 bp, Homo sapien
gtgaataaataataccccctgacacaaacacag

SEQ ID NO: 390152 - DNA, 33 bp, Homo sapien
gtgaataaataatacctcctgacacaaacacag

SEQ ID NO: 390153 - DNA, 33 bp, Homo sapien
tgcttcttgttcagagaataaaaattggtgtct

SEQ ID NO: 390154 - DNA, 33 bp, Homo sapien
tgcttcttgttcagagtataaaaattggtgtct

SEQ ID NO: 390155 - DNA, 33 bp, Homo sapien
gctagtgtggaagtcacgcttgtattaaacata

SEQ ID NO: 390156 - DNA, 33 bp, Homo sapien
gctagtgtggaagtcatgcttgtattaaacata

SEQ ID NO: 390157 - DNA, 33 bp, Homo sapien
ctgagcacgcagcagtaaaaatacagaaatgag

SEQ ID NO: 390158 - DNA, 33 bp, Homo sapien
ctgagcacgcagcagtgaaaatacagaaatgag

SEQ ID NO: 390159 - DNA, 33 bp, Homo sapien
ttttagcttactctcgaaaaagctcctactgat

SEQ ID NO: 390160 - DNA, 33 bp, Homo sapien
ttttagcttactctcgcaaaagctcctactgat

SEQ ID NO: 390161 - DNA, 33 bp, Homo sapien
tcacacagcactgcaaaataccttcatgctaat

SEQ ID NO: 390162 - DNA, 33 bp, Homo sapien
tcacacagcactgcaacataccttcatgctaat

SEQ ID NO: 390163 - DNA, 33 bp, Homo sapien
gactggcatatagtccagcagagataatgtatt

SEQ ID NO: 390164 - DNA, 33 bp, Homo sapien
gactggcatatagtccggcagagataatgtatt

SEQ ID NO: 390165 - DNA, 33 bp, Homo sapien
gtcttctatggcctggacatcacagactctcat

SEQ ID NO: 390166 - DNA, 33 bp, Homo sapien
gtcttctatggcctgggcatcacagactctcat

SEQ ID NO: 390167 - DNA, 33 bp, Homo sapien
tccggacttttctccactccagggaaggtgcca

SEQ ID NO: 390168 - DNA, 33 bp, Homo sapien
tccggacttttctccattccagggaaggtgcca

SEQ ID NO: 390169 - DNA, 33 bp, Homo sapien
ccttgtgagttcagtacaatttgtgttttcatt

SEQ ID NO: 390170 - DNA, 33 bp, Homo sapien
ccttgtgagttcagtagaatttgtgttttcatt

SEQ ID NO: 390171 - DNA, 33 bp, Homo sapien
agttcacctgtctgaacatttttttttagcaag

SEQ ID NO: 390172 - DNA, 33 bp, Homo sapien
agttcacctgtctgaatatttttttttagcaag

SEQ ID NO: 390173 - DNA, 33 bp, Homo sapien
acaaacagaagtcaccaaggctacacccaacat

SEQ ID NO: 390174 - DNA, 33 bp, Homo sapien
acaaacagaagtcaccgaggctacacccaacat

SEQ ID NO: 390175 - DNA, 33 bp, Homo sapien
gggggtgagctagaaacaggatccaggtccatg

SEQ ID NO: 390176 - DNA, 33 bp, Homo sapien
gggggtgagctagaaataggatccaggtccatg

SEQ ID NO: 390177 - DNA, 33 bp, Homo sapien
tctaacatctttttacccacttgaacctccaag

SEQ ID NO: 390178 - DNA, 33 bp, Homo sapien
tctaacatctttttactcacttgaacctccaag

SEQ ID NO: 390179 - DNA, 33 bp, Homo sapien
caagatcacagaataacaagtggtgagctggga

SEQ ID NO: 390180 - DNA, 33 bp, Homo sapien
caagatcacagaataataagtggtgagctggga

SEQ ID NO: 390181 - DNA, 33 bp, Homo sapien
atttacagagagctaacgtaatcaccaccacta

SEQ ID NO: 390182 - DNA, 33 bp, Homo sapien
atttacagagagctaatgtaatcaccaccacta

SEQ ID NO: 390183 - DNA, 33 bp, Homo sapien
tcctgttgctacctggaaaggctttaagaatca

SEQ ID NO: 390184 - DNA, 33 bp, Homo sapien
tcctgttgctacctgggaaggctttaagaatca

SEQ ID NO: 390185 - DNA, 33 bp, Homo sapien
tggagttgaaaacccaatggaatctggaaacac

SEQ ID NO: 390186 - DNA, 33 bp, Homo sapien
tggagttgaaaacccagtggaatctggaaacac

SEQ ID NO: 390187 - DNA, 33 bp, Homo sapien
ttgctaaattccttacaaataccttagcttctt

SEQ ID NO: 390188 - DNA, 33 bp, Homo sapien
ttgctaaattccttacgaataccttagcttctt

SEQ ID NO: 390189 - DNA, 33 bp, Homo sapien
ctgagttagataaaaactggttaatgttcatca

SEQ ID NO: 390190 - DNA, 33 bp, Homo sapien
ctgagttagataaaaagtggttaatgttcatca

SEQ ID NO: 390191 - DNA, 33 bp, Homo sapien
cgatgctttcattcaaacctatgaggtgcatct

SEQ ID NO: 390192 - DNA, 33 bp, Homo sapien
cgatgctttcattcaaccctatgaggtgcatct

SEQ ID NO: 390193 - DNA, 33 bp, Homo sapien
caaaggaaggagaaagcaatgatcaagatgata

SEQ ID NO: 390194 - DNA, 33 bp, Homo sapien
caaaggaaggagaaagtaatgatcaagatgata

SEQ ID NO: 390195 - DNA, 33 bp, Homo sapien
tttccatactcccagtaactcatacaagctttc

SEQ ID NO: 390196 - DNA, 33 bp, Homo sapien
tttccatactcccagtgactcatacaagctttc

SEQ ID NO: 390197 - DNA, 33 bp, Homo sapien
tctcattcatgatcaaccatctaaaattggctc

SEQ ID NO: 390198 - DNA, 33 bp, Homo sapien
tctcattcatgatcaagcatctaaaattggctc

SEQ ID NO: 390199 - DNA, 33 bp, Homo sapien
attccaacattttaaaccattttgaatggaaga

SEQ ID NO: 390200 - DNA, 33 bp, Homo sapien
attccaacattttaaagcattttgaatggaaga

SEQ ID NO: 390201 - DNA, 33 bp, Homo sapien
ctcttccttaggttcacatctggttttaagctc

SEQ ID NO: 390202 - DNA, 33 bp, Homo sapien
ctcttccttaggttcagatctggttttaagctc

SEQ ID NO: 390203 - DNA, 33 bp, Homo sapien
acattttgcagttaagaaaagtgaatctcaggg

SEQ ID NO: 390204 - DNA, 33 bp, Homo sapien
acattttgcagttaaggaaagtgaatctcaggg

SEQ ID NO: 390205 - DNA, 33 bp, Homo sapien
ttggaagtacagagaaagagcatctgccttgga

SEQ ID NO: 390206 - DNA, 33 bp, Homo sapien
ttggaagtacagagaatgagcatctgccttgga

SEQ ID NO: 390207 - DNA, 33 bp, Homo sapien
tttagagactggttaacggtgctacctgagtga

SEQ ID NO: 390208 - DNA, 33 bp, Homo sapien
tttagagactggttaatggtgctacctgagtga

SEQ ID NO: 390209 - DNA, 33 bp, Homo sapien
cttcttctcccaacaagccatctggtcaatctc

SEQ ID NO: 390210 - DNA, 33 bp, Homo sapien
cttcttctcccaacaatccatctggtcaatctc

SEQ ID NO: 390211 - DNA, 33 bp, Homo sapien
actgggcttaaatgtcaaatagcgcctgagagg

SEQ ID NO: 390212 - DNA, 33 bp, Homo sapien
actgggcttaaatgtccaatagcgcctgagagg

SEQ ID NO: 390213 - DNA, 33 bp, Homo sapien
catatacatcatatgactcaaatttgtcacagc

SEQ ID NO: 390214 - DNA, 33 bp, Homo sapien
catatacatcatatgattcaaatttgtcacagc

SEQ ID NO: 390215 - DNA, 33 bp, Homo sapien
ctgttgtaattgtcacccatcttgacaaggtgg

SEQ ID NO: 390216 - DNA, 33 bp, Homo sapien
ctgttgtaattgtcacgcatcttgacaaggtgg

SEQ ID NO: 390217 - DNA, 33 bp, Homo sapien
attcaagtagagacgacaacctgtgttaatatt

SEQ ID NO: 390218 - DNA, 33 bp, Homo sapien
attcaagtagagacgagaacctgtgttaatatt

SEQ ID NO: 390219 - DNA, 33 bp, Homo sapien
atgtatctgaagactacgttagtaaatttgttt

SEQ ID NO: 390220 - DNA, 33 bp, Homo sapien
atgtatctgaagactaggttagtaaatttgttt

SEQ ID NO: 390221 - DNA, 33 bp, Homo sapien
tcctttgtggtcactgaaagagcataggccacc

SEQ ID NO: 390222 - DNA, 33 bp, Homo sapien
tcctttgtggtcactgcaagagcataggccacc

SEQ ID NO: 390223 - DNA, 33 bp, Homo sapien
attgtaatgaggcaaacgtgacttcatgcagct

SEQ ID NO: 390224 - DNA, 33 bp, Homo sapien
attgtaatgaggcaaatgtgacttcatgcagct

SEQ ID NO: 390225 - DNA, 33 bp, Homo sapien
catattgctctctgtacggagaaaggtaatgca

SEQ ID NO: 390226 - DNA, 33 bp, Homo sapien
catattgctctctgtatggagaaaggtaatgca

SEQ ID NO: 390227 - DNA, 33 bp, Homo sapien
aatgtagattgtagaactgaaaacatttgtgtt

SEQ ID NO: 390228 - DNA, 33 bp, Homo sapien
aatgtagattgtagaattgaaaacatttgtgtt

SEQ ID NO: 390229 - DNA, 33 bp, Homo sapien
tactgtctccttaaaccgtgtactcttcaaggg

SEQ ID NO: 390230 - DNA, 33 bp, Homo sapien
tactgtctccttaaactgtgtactcttcaaggg

SEQ ID NO: 390231 - DNA, 33 bp, Homo sapien
aacctttgaaagtccacaggtaaactagattat

SEQ ID NO: 390232 - DNA, 33 bp, Homo sapien
aacctttgaaagtccataggtaaactagattat

SEQ ID NO: 390233 - DNA, 33 bp, Homo sapien
gcaggtagaaaaataacgcctggtaagatgcca

SEQ ID NO: 390234 - DNA, 33 bp, Homo sapien
gcaggtagaaaaataaggcctggtaagatgcca

SEQ ID NO: 390235 - DNA, 33 bp, Homo sapien
ttgcccagcactatcaccaatctgcaaaaagat

SEQ ID NO: 390236 - DNA, 33 bp, Homo sapien
ttgcccagcactatcagcaatctgcaaaaagat

SEQ ID NO: 390237 - DNA, 33 bp, Homo sapien
gcatggccactttgcagcaccaagagtgagctc

SEQ ID NO: 390238 - DNA, 33 bp, Homo sapien
gcatggccactttgcatcaccaagagtgagctc

SEQ ID NO: 390239 - DNA, 33 bp, Homo sapien
aggcctttctgggagaaatgatccaatgagggg

SEQ ID NO: 390240 - DNA, 33 bp, Homo sapien
aggcctttctgggagacatgatccaatgagggg

SEQ ID NO: 390241 - DNA, 33 bp, Homo sapien
agtcctctttttgatacgtggttttcaggtgct

SEQ ID NO: 390242 - DNA, 33 bp, Homo sapien
agtcctctttttgataggtggttttcaggtgct

SEQ ID NO: 390243 - DNA, 33 bp, Homo sapien
aacatggtgacccagcaagagtctcttttcaaa

SEQ ID NO: 390244 - DNA, 33 bp, Homo sapien
aacatggtgacccagcgagagtctcttttcaaa

SEQ ID NO: 390245 - DNA, 33 bp, Homo sapien
cagcactggcagtgaccaggaagcctgaccaag

SEQ ID NO: 390246 - DNA, 33 bp, Homo sapien
cagcactggcagtgacgaggaagcctgaccaag

SEQ ID NO: 390247 - DNA, 33 bp, Homo sapien
caacaggcttataatgcattttctttgcttgcc

SEQ ID NO: 390248 - DNA, 33 bp, Homo sapien
caacaggcttataatgtattttctttgcttgcc

SEQ ID NO: 390249 - DNA, 33 bp, Homo sapien
tatattgtggacagcaaagttatactgaagtgc

SEQ ID NO: 390250 - DNA, 33 bp, Homo sapien
tatattgtggacagcagagttatactgaagtgc

SEQ ID NO: 390251 - DNA, 33 bp, Homo sapien
acttcctggtcttcacagcctcaggtaatcctc

SEQ ID NO: 390252 - DNA, 33 bp, Homo sapien
acttcctggtcttcacggcctcaggtaatcctc

SEQ ID NO: 390253 - DNA, 33 bp, Homo sapien
gtccatggcatgataactggcagattcatttcc

SEQ ID NO: 390254 - DNA, 33 bp, Homo sapien
gtccatggcatgataattggcagattcatttcc

SEQ ID NO: 390255 - DNA, 33 bp, Homo sapien
tggttgaataagtaccgctttattttaagcttc

SEQ ID NO: 390256 - DNA, 33 bp, Homo sapien
tggttgaataagtacctctttattttaagcttc

SEQ ID NO: 390257 - DNA, 33 bp, Homo sapien
cacaactgtgttttcacgtacaagaattctgct

SEQ ID NO: 390258 - DNA, 33 bp, Homo sapien
cacaactgtgttttcatgtacaagaattctgct

SEQ ID NO: 390259 - DNA, 33 bp, Homo sapien
ctcttgaattctaaggcagtgctatctctagtc

SEQ ID NO: 390260 - DNA, 33 bp, Homo sapien
ctcttgaattctaaggtagtgctatctctagtc

SEQ ID NO: 390261 - DNA, 33 bp, Homo sapien
ccaggaaaggctatgcaaacagtcaagaacata

SEQ ID NO: 390262 - DNA, 33 bp, Homo sapien
ccaggaaaggctatgcgaacagtcaagaacata

SEQ ID NO: 390263 - DNA, 33 bp, Homo sapien
taagaaccactgcgctcagaactaggatatcca

SEQ ID NO: 390264 - DNA, 33 bp, Homo sapien
taagaaccactgcgctgagaactaggatatcca

SEQ ID NO: 390265 - DNA, 33 bp, Homo sapien
tctgaactgccacctgaagtagaagtaggaagt

SEQ ID NO: 390266 - DNA, 33 bp, Homo sapien
tctgaactgccacctgtagtagaagtaggaagt

SEQ ID NO: 390267 - DNA, 33 bp, Homo sapien
tttaagctagcggagacaggaaaaaaataccat

SEQ ID NO: 390268 - DNA, 33 bp, Homo sapien
tttaagctagcggagagaggaaaaaaataccat

SEQ ID NO: 390269 - DNA, 33 bp, Homo sapien
ctttctatgccttctccatcagtgttagtttca

SEQ ID NO: 390270 - DNA, 33 bp, Homo sapien
ctttctatgccttctcgatcagtgttagtttca

SEQ ID NO: 390271 - DNA, 33 bp, Homo sapien
gatcaatcgctgagaccggacaattagtgatct

SEQ ID NO: 390272 - DNA, 33 bp, Homo sapien
gatcaatcgctgagactggacaattagtgatct

SEQ ID NO: 390273 - DNA, 33 bp, Homo sapien
tgaccaatatatggcaaatgagagttctttggg

SEQ ID NO: 390274 - DNA, 33 bp, Homo sapien
tgaccaatatatggcagatgagagttctttggg

SEQ ID NO: 390275 - DNA, 33 bp, Homo sapien
taaatagggaactggaaagatgctcaggaagag

SEQ ID NO: 390276 - DNA, 33 bp, Homo sapien
taaatagggaactggatagatgctcaggaagag

SEQ ID NO: 390277 - DNA, 33 bp, Homo sapien
tgttttgtaaatgaagcccaaaggaacaatgga

SEQ ID NO: 390278 - DNA, 33 bp, Homo sapien
tgttttgtaaatgaagtccaaaggaacaatgga

SEQ ID NO: 390279 - DNA, 33 bp, Homo sapien
ttctggccctttggaacgactggctcaatttcc

SEQ ID NO: 390280 - DNA, 33 bp, Homo sapien
ttctggccctttggaaggactggctcaatttcc

SEQ ID NO: 390281 - DNA, 33 bp, Homo sapien
cctctctataatgacaactcctaaatctaagaa

SEQ ID NO: 390282 - DNA, 33 bp, Homo sapien
cctctctataatgacagctcctaaatctaagaa

SEQ ID NO: 390283 - DNA, 33 bp, Homo sapien
cgtacatcaagccaaacctgaacaaggatccag

SEQ ID NO: 390284 - DNA, 33 bp, Homo sapien
cgtacatcaagccaaatctgaacaaggatccag

SEQ ID NO: 390285 - DNA, 33 bp, Homo sapien
ggcaacaattaactggcagtttgtaggcttgtg

SEQ ID NO: 390286 - DNA, 33 bp, Homo sapien
ggcaacaattaactgggagtttgtaggcttgtg

SEQ ID NO: 390287 - DNA, 33 bp, Homo sapien
gcttttgtgcctttaacgcatatctcacctgtg

SEQ ID NO: 390288 - DNA, 33 bp, Homo sapien
gcttttgtgcctttaatgcatatctcacctgtg

SEQ ID NO: 390289 - DNA, 33 bp, Homo sapien
ccccacgagccaaaagcagtggatctagagtga

SEQ ID NO: 390290 - DNA, 33 bp, Homo sapien
ccccacgagccaaaaggagtggatctagagtga

SEQ ID NO: 390291 - DNA, 33 bp, Homo sapien
tactgtatgctagatacccttctaagtgcttga

SEQ ID NO: 390292 - DNA, 33 bp, Homo sapien
tactgtatgctagatatccttctaagtgcttga

SEQ ID NO: 390293 - DNA, 33 bp, Homo sapien
caagtggttacaacaaaattggtttacttgaaa

SEQ ID NO: 390294 - DNA, 33 bp, Homo sapien
caagtggttacaacaacattggtttacttgaaa

SEQ ID NO: 390295 - DNA, 33 bp, Homo sapien
catgaacaagtgcataataggtagataaataca

SEQ ID NO: 390296 - DNA, 33 bp, Homo sapien
catgaacaagtgcatagtaggtagataaataca

SEQ ID NO: 390297 - DNA, 33 bp, Homo sapien
attttgtttttggtcaaagatgtcaagatgcat

SEQ ID NO: 390298 - DNA, 33 bp, Homo sapien
attttgtttttggtcagagatgtcaagatgcat

SEQ ID NO: 390299 - DNA, 33 bp, Homo sapien
aagcttctgctgaacaagttaatctagctgagt

SEQ ID NO: 390300 - DNA, 33 bp, Homo sapien
aagcttctgctgaacaggttaatctagctgagt

SEQ ID NO: 390301 - DNA, 33 bp, Homo sapien
ctcattgaacaagcaactccatttagttccgtg

SEQ ID NO: 390302 - DNA, 33 bp, Homo sapien
ctcattgaacaagcaattccatttagttccgtg

SEQ ID NO: 390303 - DNA, 33 bp, Homo sapien
ttctcggctacatatgcattgctttgggaagtc

SEQ ID NO: 390304 - DNA, 33 bp, Homo sapien
ttctcggctacatatgtattgctttgggaagtc

SEQ ID NO: 390305 - DNA, 33 bp, Homo sapien
gcttgttttgaatgcaaatgtattagttcagat

SEQ ID NO: 390306 - DNA, 33 bp, Homo sapien
gcttgttttgaatgcagatgtattagttcagat

SEQ ID NO: 390307 - DNA, 33 bp, Homo sapien
acttctgcattctggccgacagggatgtcaacg

SEQ ID NO: 390308 - DNA, 33 bp, Homo sapien
acttctgcattctggctgacagggatgtcaacg

SEQ ID NO: 390309 - DNA, 33 bp, Homo sapien
accatgtccatgtatacagctgagcatggccaa

SEQ ID NO: 390310 - DNA, 33 bp, Homo sapien
accatgtccatgtatatagctgagcatggccaa

SEQ ID NO: 390311 - DNA, 33 bp, Homo sapien
catctgccttctgtgacggaaatttcttccaaa

SEQ ID NO: 390312 - DNA, 33 bp, Homo sapien
catctgccttctgtgatggaaatttcttccaaa

SEQ ID NO: 390313 - DNA, 33 bp, Homo sapien
cactttggttcctagaggcattcctactagttt

SEQ ID NO: 390314 - DNA, 33 bp, Homo sapien
cactttggttcctagatgcattcctactagttt

SEQ ID NO: 390315 - DNA, 33 bp, Homo sapien
catgtctcaggtcccaatagcagtttctatgac

SEQ ID NO: 390316 - DNA, 33 bp, Homo sapien
catgtctcaggtcccagtagcagtttctatgac

SEQ ID NO: 390317 - DNA, 33 bp, Homo sapien
ctccggtatttccttaaagcaacgtgagaaggg

SEQ ID NO: 390318 - DNA, 33 bp, Homo sapien
ctccggtatttccttatagcaacgtgagaaggg

SEQ ID NO: 390319 - DNA, 33 bp, Homo sapien
tcaggacccaagacaaactggcaaagaagggtc

SEQ ID NO: 390320 - DNA, 33 bp, Homo sapien
tcaggacccaagacaacctggcaaagaagggtc

SEQ ID NO: 390321 - DNA, 33 bp, Homo sapien
tctctattcgcttaacacagtggaaaaaaaggc

SEQ ID NO: 390322 - DNA, 33 bp, Homo sapien
tctctattcgcttaacgcagtggaaaaaaaggc

SEQ ID NO: 390323 - DNA, 33 bp, Homo sapien
tacacacatgaactttgaaagcacaaaccagta

SEQ ID NO: 390324 - DNA, 33 bp, Homo sapien
tacacacatgaacttttaaagcacaaaccagta

SEQ ID NO: 390325 - DNA, 33 bp, Homo sapien
actcagtaagctaatagtagaactcaggtctgt

SEQ ID NO: 390326 - DNA, 33 bp, Homo sapien
actcagtaagctaatattagaactcaggtctgt

SEQ ID NO: 390327 - DNA, 33 bp, Homo sapien
gaaggcattttagggggatatataattgacttc

SEQ ID NO: 390328 - DNA, 33 bp, Homo sapien
gaaggcattttaggggtatatataattgacttc

SEQ ID NO: 390329 - DNA, 33 bp, Homo sapien
ttgtagtccaagtgggaattgggtgccaagctc

SEQ ID NO: 390330 - DNA, 33 bp, Homo sapien
ttgtagtccaagtggggattgggtgccaagctc

SEQ ID NO: 390331 - DNA, 33 bp, Homo sapien
tgttgcaaaaaagactaaactgatgtgtttacc

SEQ ID NO: 390332 - DNA, 33 bp, Homo sapien
tgttgcaaaaaagactgaactgatgtgtttacc

SEQ ID NO: 390333 - DNA, 33 bp, Homo sapien
ccatattttgagattacgacaaaaaataattca

SEQ ID NO: 390334 - DNA, 33 bp, Homo sapien
ccatattttgagattatgacaaaaaataattca

SEQ ID NO: 390335 - DNA, 33 bp, Homo sapien
tagtgagtgctcacaggatgtagcggggacaac

SEQ ID NO: 390336 - DNA, 33 bp, Homo sapien
tagtgagtgctcacagtatgtagcggggacaac

SEQ ID NO: 390337 - DNA, 33 bp, Homo sapien
aggtttataaaaaggcaaagactgtattaaagt

SEQ ID NO: 390338 - DNA, 33 bp, Homo sapien
aggtttataaaaaggcgaagactgtattaaagt

SEQ ID NO: 390339 - DNA, 33 bp, Homo sapien
acacctaaacgacttacagcgactacaggaaca

SEQ ID NO: 390340 - DNA, 33 bp, Homo sapien
acacctaaacgacttagagcgactacaggaaca

SEQ ID NO: 390341 - DNA, 33 bp, Homo sapien
caatgaagcttttagaagtgatggatatattta

SEQ ID NO: 390342 - DNA, 33 bp, Homo sapien
caatgaagcttttagaggtgatggatatattta

SEQ ID NO: 390343 - DNA, 33 bp, Homo sapien
aagatgatttccaagcactgcagggcagggaga

SEQ ID NO: 390344 - DNA, 33 bp, Homo sapien
aagatgatttccaagctctgcagggcagggaga

SEQ ID NO: 390345 - DNA, 33 bp, Homo sapien
atataatggctgtaaactcagacctgatttcag

SEQ ID NO: 390346 - DNA, 33 bp, Homo sapien
atataatggctgtaaattcagacctgatttcag

SEQ ID NO: 390347 - DNA, 33 bp, Homo sapien
aaatgagaattattgacgagacgattaaagttc

SEQ ID NO: 390348 - DNA, 33 bp, Homo sapien
aaatgagaattattgaggagacgattaaagttc

SEQ ID NO: 390349 - DNA, 33 bp, Homo sapien
tagataaactctatgacaattgggtatgtatag

SEQ ID NO: 390350 - DNA, 33 bp, Homo sapien
tagataaactctatgagaattgggtatgtatag

SEQ ID NO: 390351 - DNA, 33 bp, Homo sapien
cttttgagtatcatggaaatattaaaaagatat

SEQ ID NO: 390352 - DNA, 33 bp, Homo sapien
cttttgagtatcatggtaatattaaaaagatat

SEQ ID NO: 390353 - DNA, 33 bp, Homo sapien
ggtggatgatgaaagccccaaccttctaaaaat

SEQ ID NO: 390354 - DNA, 33 bp, Homo sapien
ggtggatgatgaaagctccaaccttctaaaaat

SEQ ID NO: 390355 - DNA, 33 bp, Homo sapien
acgattgagtatctcactgaccgttggtgatca

SEQ ID NO: 390356 - DNA, 33 bp, Homo sapien
acgattgagtatctcagtgaccgttggtgatca

SEQ ID NO: 390357 - DNA, 33 bp, Homo sapien
cactgccttttttttggaaaatgcccgatttct

SEQ ID NO: 390358 - DNA, 33 bp, Homo sapien
cactgccttttttttgtaaaatgcccgatttct

SEQ ID NO: 390359 - DNA, 33 bp, Homo sapien
acttgcaaggccccacagagctcaccctaaggc

SEQ ID NO: 390360 - DNA, 33 bp, Homo sapien
acttgcaaggccccacggagctcaccctaaggc

SEQ ID NO: 390361 - DNA, 33 bp, Homo sapien
gtgaatgtgcatccccccaaagacaggcagtaa

SEQ ID NO: 390362 - DNA, 33 bp, Homo sapien
gtgaatgtgcatcccctcaaagacaggcagtaa

SEQ ID NO: 390363 - DNA, 33 bp, Homo sapien
gctttggaaggactaaagtaaaacacgcctgcg

SEQ ID NO: 390364 - DNA, 33 bp, Homo sapien
gctttggaaggactaaggtaaaacacgcctgcg

SEQ ID NO: 390365 - DNA, 33 bp, Homo sapien
aaacaatacattgtccagaagtaagggtggtcc

SEQ ID NO: 390366 - DNA, 33 bp, Homo sapien
aaacaatacattgtccggaagtaagggtggtcc

SEQ ID NO: 390367 - DNA, 33 bp, Homo sapien
tcaaactgagaagacactgagcaggtaagaaca

SEQ ID NO: 390368 - DNA, 33 bp, Homo sapien
tcaaactgagaagacattgagcaggtaagaaca

SEQ ID NO: 390369 - DNA, 33 bp, Homo sapien
ttcttctagcgcttcacagctgtattgacacat

SEQ ID NO: 390370 - DNA, 33 bp, Homo sapien
ttcttctagcgcttcatagctgtattgacacat

SEQ ID NO: 390371 - DNA, 33 bp, Homo sapien
ggtgggattattttcacggtcatggtaatatgc

SEQ ID NO: 390372 - DNA, 33 bp, Homo sapien
ggtgggattattttcatggtcatggtaatatgc

SEQ ID NO: 390373 - DNA, 33 bp, Homo sapien
tctatatcttgtcacagagaagtaccacacatt

SEQ ID NO: 390374 - DNA, 33 bp, Homo sapien
tctatatcttgtcacatagaagtaccacacatt

SEQ ID NO: 390375 - DNA, 33 bp, Homo sapien
agtttctctgctttcagccagaatcctaacaat

SEQ ID NO: 390376 - DNA, 33 bp, Homo sapien
agtttctctgctttcatccagaatcctaacaat

SEQ ID NO: 390377 - DNA, 33 bp, Homo sapien
aacaaccaaatcaatacccaaaaaataacaata

SEQ ID NO: 390378 - DNA, 33 bp, Homo sapien
aacaaccaaatcaatatccaaaaaataacaata

SEQ ID NO: 390379 - DNA, 33 bp, Homo sapien
agtgaaatgacctggacgttattgttatttttt

SEQ ID NO: 390380 - DNA, 33 bp, Homo sapien
agtgaaatgacctggatgttattgttatttttt

SEQ ID NO: 390381 - DNA, 33 bp, Homo sapien
taactcttgatgcactaaaggcaaactaccgga

SEQ ID NO: 390382 - DNA, 33 bp, Homo sapien
taactcttgatgcactgaaggcaaactaccgga

SEQ ID NO: 390383 - DNA, 33 bp, Homo sapien
agaccaagatttatacagagcattccctgtgaa

SEQ ID NO: 390384 - DNA, 33 bp, Homo sapien
agaccaagatttatacggagcattccctgtgaa

SEQ ID NO: 390385 - DNA, 33 bp, Homo sapien
ttaaggtcacatagcaactggatttaaactcca

SEQ ID NO: 390386 - DNA, 33 bp, Homo sapien
ttaaggtcacatagcacctggatttaaactcca

SEQ ID NO: 390387 - DNA, 33 bp, Homo sapien
ccctgctcctgttctccagatagaagtttccct

SEQ ID NO: 390388 - DNA, 33 bp, Homo sapien
ccctgctcctgttctctagatagaagtttccct

SEQ ID NO: 390389 - DNA, 33 bp, Homo sapien
ctcttgaggctcctcaagtagcaaagtctcatc

SEQ ID NO: 390390 - DNA, 33 bp, Homo sapien
ctcttgaggctcctcacgtagcaaagtctcatc

SEQ ID NO: 390391 - DNA, 33 bp, Homo sapien
atactgcctaaaattacgtgatatgccaaagtg

SEQ ID NO: 390392 - DNA, 33 bp, Homo sapien
atactgcctaaaattaggtgatatgccaaagtg

SEQ ID NO: 390393 - DNA, 33 bp, Homo sapien
gtaactgatttcctccagacttcgctcacaggc

SEQ ID NO: 390394 - DNA, 33 bp, Homo sapien
gtaactgatttcctccggacttcgctcacaggc

SEQ ID NO: 390395 - DNA, 33 bp, Homo sapien
tgcccataactggtaacagtggctccaagtgcc

SEQ ID NO: 390396 - DNA, 33 bp, Homo sapien
tgcccataactggtaagagtggctccaagtgcc

SEQ ID NO: 390397 - DNA, 33 bp, Homo sapien
tgtgattgatgtcatacgtgacaagtgtgatgg

SEQ ID NO: 390398 - DNA, 33 bp, Homo sapien
tgtgattgatgtcataggtgacaagtgtgatgg

SEQ ID NO: 390399 - DNA, 33 bp, Homo sapien
aaatttattatctggccctttgagaaagtttgc

SEQ ID NO: 390400 - DNA, 33 bp, Homo sapien
aaatttattatctggctctttgagaaagtttgc

SEQ ID NO: 390401 - DNA, 33 bp, Homo sapien
tccatctcttgtcacaaagctcaatttgcgtgt

SEQ ID NO: 390402 - DNA, 33 bp, Homo sapien
tccatctcttgtcacatagctcaatttgcgtgt

SEQ ID NO: 390403 - DNA, 33 bp, Homo sapien
gtgatgtcgaatgccaaataatacctgtttccc

SEQ ID NO: 390404 - DNA, 33 bp, Homo sapien
gtgatgtcgaatgccatataatacctgtttccc

SEQ ID NO: 390405 - DNA, 33 bp, Homo sapien
actcccattggttgtaggagtcaatgagtaaac

SEQ ID NO: 390406 - DNA, 33 bp, Homo sapien
actcccattggttgtatgagtcaatgagtaaac

SEQ ID NO: 390407 - DNA, 33 bp, Homo sapien
tccctgggaggataaacaattaatcaaaataca

SEQ ID NO: 390408 - DNA, 33 bp, Homo sapien
tccctgggaggataaagaattaatcaaaataca

SEQ ID NO: 390409 - DNA, 33 bp, Homo sapien
cgtgagaatccttccaaccttattctgttggcc

SEQ ID NO: 390410 - DNA, 33 bp, Homo sapien
cgtgagaatccttccacccttattctgttggcc

SEQ ID NO: 390411 - DNA, 33 bp, Homo sapien
cccgactgcatctgcacgatctgagtgagaaat

SEQ ID NO: 390412 - DNA, 33 bp, Homo sapien
cccgactgcatctgcatgatctgagtgagaaat

SEQ ID NO: 390413 - DNA, 33 bp, Homo sapien
agaacacatgggtatcaatgcaggatcacagtc

SEQ ID NO: 390414 - DNA, 33 bp, Homo sapien
agaacacatgggtatcgatgcaggatcacagtc

SEQ ID NO: 390415 - DNA, 33 bp, Homo sapien
tagtcagtttaagcagaagagcaaggtcgtgca

SEQ ID NO: 390416 - DNA, 33 bp, Homo sapien
tagtcagtttaagcaggagagcaaggtcgtgca

SEQ ID NO: 390417 - DNA, 33 bp, Homo sapien
agtgggaatatttctccactaaggaaagcagga

SEQ ID NO: 390418 - DNA, 33 bp, Homo sapien
agtgggaatatttctctactaaggaaagcagga

SEQ ID NO: 390419 - DNA, 33 bp, Homo sapien
aaaaaactaagagacactaggccacagaactat

SEQ ID NO: 390420 - DNA, 33 bp, Homo sapien
aaaaaactaagagacagtaggccacagaactat

SEQ ID NO: 390421 - DNA, 33 bp, Homo sapien
gaggttatgtaacgtcacctgaactgcagtctg

SEQ ID NO: 390422 - DNA, 33 bp, Homo sapien
gaggttatgtaacgtcccctgaactgcagtctg

SEQ ID NO: 390423 - DNA, 33 bp, Homo sapien
atcatgaaggaaataacgcaaggtcatatgata

SEQ ID NO: 390424 - DNA, 33 bp, Homo sapien
atcatgaaggaaataaggcaaggtcatatgata

SEQ ID NO: 390425 - DNA, 33 bp, Homo sapien
tccaacaccagctacaccattccatatggaaag

SEQ ID NO: 390426 - DNA, 33 bp, Homo sapien
tccaacaccagctacagcattccatatggaaag

SEQ ID NO: 390427 - DNA, 33 bp, Homo sapien
agttaatgcctgtatacgacattgaaagaacat

SEQ ID NO: 390428 - DNA, 33 bp, Homo sapien
agttaatgcctgtatatgacattgaaagaacat

SEQ ID NO: 390429 - DNA, 33 bp, Homo sapien
tggtgctttgaaatggaaaagatggcaatatct

SEQ ID NO: 390430 - DNA, 33 bp, Homo sapien
tggtgctttgaaatgggaaagatggcaatatct

SEQ ID NO: 390431 - DNA, 33 bp, Homo sapien
taaagcactgaaaatgaatgttataaatactaa

SEQ ID NO: 390432 - DNA, 33 bp, Homo sapien
taaagcactgaaaatgtatgttataaatactaa

SEQ ID NO: 390433 - DNA, 33 bp, Homo sapien
gagagacaggattttacagaatgccatcacctg

SEQ ID NO: 390434 - DNA, 33 bp, Homo sapien
gagagacaggattttatagaatgccatcacctg

SEQ ID NO: 390435 - DNA, 33 bp, Homo sapien
aaacagatggatatcaataacataaatgaaata

SEQ ID NO: 390436 - DNA, 33 bp, Homo sapien
aaacagatggatatcagtaacataaatgaaata

SEQ ID NO: 390437 - DNA, 33 bp, Homo sapien
acaaggaaaacatcacagagataaaatgagacc

SEQ ID NO: 390438 - DNA, 33 bp, Homo sapien
acaaggaaaacatcacggagataaaatgagacc

SEQ ID NO: 390439 - DNA, 33 bp, Homo sapien
tttgggcacaagttcgaaagtggtttcctccct

SEQ ID NO: 390440 - DNA, 33 bp, Homo sapien
tttgggcacaagttcggaagtggtttcctccct

SEQ ID NO: 390441 - DNA, 33 bp, Homo sapien
agaagaagaacttgatcacagtcacaggcaacc

SEQ ID NO: 390442 - DNA, 33 bp, Homo sapien
agaagaagaacttgatgacagtcacaggcaacc

SEQ ID NO: 390443 - DNA, 33 bp, Homo sapien
cttactgaaacatatgaaaatgctagtgctctg

SEQ ID NO: 390444 - DNA, 33 bp, Homo sapien
cttactgaaacatatggaaatgctagtgctctg

SEQ ID NO: 390445 - DNA, 33 bp, Homo sapien
tatcctagataactgaaactctagatggctatt

SEQ ID NO: 390446 - DNA, 33 bp, Homo sapien
tatcctagataactgatactctagatggctatt

SEQ ID NO: 390447 - DNA, 33 bp, Homo sapien
tttaaaagctcctaaaatgcagtgcagataaaa

SEQ ID NO: 390448 - DNA, 33 bp, Homo sapien
tttaaaagctcctaaagtgcagtgcagataaaa

SEQ ID NO: 390449 - DNA, 33 bp, Homo sapien
gacaacccaaaatataggcccagtgaaattcag

SEQ ID NO: 390450 - DNA, 33 bp, Homo sapien
gacaacccaaaatatatgcccagtgaaattcag

SEQ ID NO: 390451 - DNA, 33 bp, Homo sapien
ggatactgaccaacaaaaattgtctcagagctg

SEQ ID NO: 390452 - DNA, 33 bp, Homo sapien
ggatactgaccaacaacaattgtctcagagctg

SEQ ID NO: 390453 - DNA, 33 bp, Homo sapien
tttgggatggatctaaaaagtataacaaaacca

SEQ ID NO: 390454 - DNA, 33 bp, Homo sapien
tttgggatggatctaagaagtataacaaaacca

SEQ ID NO: 390455 - DNA, 33 bp, Homo sapien
ccagaggaggttctaccgacctagacgtaagcg

SEQ ID NO: 390456 - DNA, 33 bp, Homo sapien
ccagaggaggttctactgacctagacgtaagcg

SEQ ID NO: 390457 - DNA, 33 bp, Homo sapien
ggtccaagtgacatcactcccccgtcctcactc

SEQ ID NO: 390458 - DNA, 33 bp, Homo sapien
ggtccaagtgacatcattcccccgtcctcactc

SEQ ID NO: 390459 - DNA, 33 bp, Homo sapien
agtgtttgatctgagaactgaatgacaggaagc

SEQ ID NO: 390460 - DNA, 33 bp, Homo sapien
agtgtttgatctgagacctgaatgacaggaagc

SEQ ID NO: 390461 - DNA, 33 bp, Homo sapien
ggaaacaggtaagatacgaatgaatgaatgaga

SEQ ID NO: 390462 - DNA, 33 bp, Homo sapien
ggaaacaggtaagatatgaatgaatgaatgaga

SEQ ID NO: 390463 - DNA, 33 bp, Homo sapien
aggtctgactctcagtaaataagagacgaaaga

SEQ ID NO: 390464 - DNA, 33 bp, Homo sapien
aggtctgactctcagtgaataagagacgaaaga

SEQ ID NO: 390465 - DNA, 33 bp, Homo sapien
ctcgcctcttgacctacactcttgatttcatcc

SEQ ID NO: 390466 - DNA, 33 bp, Homo sapien
ctcgcctcttgacctatactcttgatttcatcc

SEQ ID NO: 390467 - DNA, 33 bp, Homo sapien
ttgtcaaagaccaatgcatcctggcaaaatgat

SEQ ID NO: 390468 - DNA, 33 bp, Homo sapien
ttgtcaaagaccaatgtatcctggcaaaatgat

SEQ ID NO: 390469 - DNA, 33 bp, Homo sapien
aagagcctaatgtgcactagacattttcaggtg

SEQ ID NO: 390470 - DNA, 33 bp, Homo sapien
aagagcctaatgtgcagtagacattttcaggtg

SEQ ID NO: 390471 - DNA, 33 bp, Homo sapien
gtaatgcagaaatgaacggaccgacagtttgga

SEQ ID NO: 390472 - DNA, 33 bp, Homo sapien
gtaatgcagaaatgaatggaccgacagtttgga

SEQ ID NO: 390473 - DNA, 33 bp, Homo sapien
tcaggagaggagtcagcaagtgccgggtggttc

SEQ ID NO: 390474 - DNA, 33 bp, Homo sapien
tcaggagaggagtcaggaagtgccgggtggttc

SEQ ID NO: 390475 - DNA, 33 bp, Homo sapien
gggatgggatggctgaagagacggcaggggcgg

SEQ ID NO: 390476 - DNA, 33 bp, Homo sapien
gggatgggatggctgaggagacggcaggggcgg

SEQ ID NO: 390477 - DNA, 33 bp, Homo sapien
aaatagaagcctgtaacacgtacccagagaacc

SEQ ID NO: 390478 - DNA, 33 bp, Homo sapien
aaatagaagcctgtaagacgtacccagagaacc

SEQ ID NO: 390479 - DNA, 33 bp, Homo sapien
ttacaaacttatcaaactgatatacagggatcg

SEQ ID NO: 390480 - DNA, 33 bp, Homo sapien
ttacaaacttatcaaagtgatatacagggatcg

SEQ ID NO: 390481 - DNA, 33 bp, Homo sapien
gattccttaaatgtgaaaagggtatacaggcct

SEQ ID NO: 390482 - DNA, 33 bp, Homo sapien
gattccttaaatgtgagaagggtatacaggcct

SEQ ID NO: 390483 - DNA, 33 bp, Homo sapien
accagtccttaaactcacttcactcatggaaca

SEQ ID NO: 390484 - DNA, 33 bp, Homo sapien
accagtccttaaactcgcttcactcatggaaca

SEQ ID NO: 390485 - DNA, 33 bp, Homo sapien
aacaagcggcagtgcacaaataaaagccacaaa

SEQ ID NO: 390486 - DNA, 33 bp, Homo sapien
aacaagcggcagtgcagaaataaaagccacaaa

SEQ ID NO: 390487 - DNA, 33 bp, Homo sapien
ctcaagacacgattgaaaacacagataggaagt

SEQ ID NO: 390488 - DNA, 33 bp, Homo sapien
ctcaagacacgattgacaacacagataggaagt

SEQ ID NO: 390489 - DNA, 33 bp, Homo sapien
tattctagcaccttacaaaaagccaccatccac

SEQ ID NO: 390490 - DNA, 33 bp, Homo sapien
tattctagcaccttacgaaaagccaccatccac

SEQ ID NO: 390491 - DNA, 33 bp, Homo sapien
ctgagaacatctgagaaagtttgtgcctaataa

SEQ ID NO: 390492 - DNA, 33 bp, Homo sapien
ctgagaacatctgagacagtttgtgcctaataa

SEQ ID NO: 390493 - DNA, 33 bp, Homo sapien
catcggtagtttctacaaggatggaagaacaat

SEQ ID NO: 390494 - DNA, 33 bp, Homo sapien
catcggtagtttctacgaggatggaagaacaat

SEQ ID NO: 390495 - DNA, 33 bp, Homo sapien
tagaagaataacgttacagttaccggctttact

SEQ ID NO: 390496 - DNA, 33 bp, Homo sapien
tagaagaataacgttagagttaccggctttact

SEQ ID NO: 390497 - DNA, 33 bp, Homo sapien
aataggtccactctaacggcttcctcttaactc

SEQ ID NO: 390498 - DNA, 33 bp, Homo sapien
aataggtccactctaatggcttcctcttaactc

SEQ ID NO: 390499 - DNA, 33 bp, Homo sapien
cgatgacatgtgcacaaattctattcccaaata

SEQ ID NO: 390500 - DNA, 33 bp, Homo sapien
cgatgacatgtgcacagattctattcccaaata

SEQ ID NO: 390501 - DNA, 33 bp, Homo sapien
tcagtcttacccatgccaatagctgaatatcag

SEQ ID NO: 390502 - DNA, 33 bp, Homo sapien
tcagtcttacccatgcgaatagctgaatatcag

SEQ ID NO: 390503 - DNA, 33 bp, Homo sapien
cgacttccctgaaagcagctctgaactaattac

SEQ ID NO: 390504 - DNA, 33 bp, Homo sapien
cgacttccctgaaagccgctctgaactaattac

SEQ ID NO: 390505 - DNA, 33 bp, Homo sapien
aggatgtgagcacacaagaacagtacctgctgc

SEQ ID NO: 390506 - DNA, 33 bp, Homo sapien
aggatgtgagcacacacgaacagtacctgctgc

SEQ ID NO: 390507 - DNA, 33 bp, Homo sapien
tcattttccaccattacatcctcagctcctggc

SEQ ID NO: 390508 - DNA, 33 bp, Homo sapien
tcattttccaccattatatcctcagctcctggc

SEQ ID NO: 390509 - DNA, 33 bp, Homo sapien
tagcttttgcctgtgactatgccacgctttgca

SEQ ID NO: 390510 - DNA, 33 bp, Homo sapien
tagcttttgcctgtgattatgccacgctttgca

SEQ ID NO: 390511 - DNA, 33 bp, Homo sapien
atgctccgtttttatgcatctgtcgatagccac

SEQ ID NO: 390512 - DNA, 33 bp, Homo sapien
atgctccgtttttatggatctgtcgatagccac

SEQ ID NO: 390513 - DNA, 33 bp, Homo sapien
gcacctgggaaaatgaagggcggctgtaagcca

SEQ ID NO: 390514 - DNA, 33 bp, Homo sapien
gcacctgggaaaatgacgggcggctgtaagcca

SEQ ID NO: 390515 - DNA, 33 bp, Homo sapien
attcaatttaggatacactcagataattcagga

SEQ ID NO: 390516 - DNA, 33 bp, Homo sapien
attcaatttaggatacgctcagataattcagga

SEQ ID NO: 390517 - DNA, 33 bp, Homo sapien
agagtaaaatgctttacaggggacttcaaggaa

SEQ ID NO: 390518 - DNA, 33 bp, Homo sapien
agagtaaaatgctttataggggacttcaaggaa

SEQ ID NO: 390519 - DNA, 33 bp, Homo sapien
gcagtccctaaagctaagtgattactctgtatg

SEQ ID NO: 390520 - DNA, 33 bp, Homo sapien
gcagtccctaaagctaggtgattactctgtatg

SEQ ID NO: 390521 - DNA, 33 bp, Homo sapien
aaaaatatattgtgcacggactagcctgattct

SEQ ID NO: 390522 - DNA, 33 bp, Homo sapien
aaaaatatattgtgcagggactagcctgattct

SEQ ID NO: 390523 - DNA, 33 bp, Homo sapien
gttgcagttttgtactcagctgtttcattgatg

SEQ ID NO: 390524 - DNA, 33 bp, Homo sapien
gttgcagttttgtacttagctgtttcattgatg

SEQ ID NO: 390525 - DNA, 33 bp, Homo sapien
tctgggcaaatataagccaaggaaccttttaca

SEQ ID NO: 390526 - DNA, 33 bp, Homo sapien
tctgggcaaatataaggcaaggaaccttttaca

SEQ ID NO: 390527 - DNA, 33 bp, Homo sapien
acattcacagagagctaacttgatttaccacat

SEQ ID NO: 390528 - DNA, 33 bp, Homo sapien
acattcacagagagctgacttgatttaccacat

SEQ ID NO: 390529 - DNA, 33 bp, Homo sapien
atagtgtgttccaagccctgggttaagtgcttt

SEQ ID NO: 390530 - DNA, 33 bp, Homo sapien
atagtgtgttccaagctctgggttaagtgcttt

SEQ ID NO: 390531 - DNA, 33 bp, Homo sapien
caggttacaggaggtaaggaactggaaagagat

SEQ ID NO: 390532 - DNA, 33 bp, Homo sapien
caggttacaggaggtagggaactggaaagagat

SEQ ID NO: 390533 - DNA, 33 bp, Homo sapien
aaggacaaatataaccggacttaatgttgtttg

SEQ ID NO: 390534 - DNA, 33 bp, Homo sapien
aaggacaaatataacctgacttaatgttgtttg

SEQ ID NO: 390535 - DNA, 33 bp, Homo sapien
ttaaatataaaccagaactcatgagcacattca

SEQ ID NO: 390536 - DNA, 33 bp, Homo sapien
ttaaatataaaccagacctcatgagcacattca

SEQ ID NO: 390537 - DNA, 33 bp, Homo sapien
gtcctgcggcatctacagaactggatgtaagca

SEQ ID NO: 390538 - DNA, 33 bp, Homo sapien
gtcctgcggcatctaccgaactggatgtaagca

SEQ ID NO: 390539 - DNA, 33 bp, Homo sapien
ttagaggctagaataacgtagcctctggggaag

SEQ ID NO: 390540 - DNA, 33 bp, Homo sapien
ttagaggctagaataatgtagcctctggggaag

SEQ ID NO: 390541 - DNA, 33 bp, Homo sapien
agtagcaaaaagtctccgaatggcacaatcggg

SEQ ID NO: 390542 - DNA, 33 bp, Homo sapien
agtagcaaaaagtctctgaatggcacaatcggg

SEQ ID NO: 390543 - DNA, 33 bp, Homo sapien
tcctccaggctagacaatctggaatcatccaga

SEQ ID NO: 390544 - DNA, 33 bp, Homo sapien
tcctccaggctagacactctggaatcatccaga

SEQ ID NO: 390545 - DNA, 33 bp, Homo sapien
ttaactgtcacctaaagtggagaaaatatatag

SEQ ID NO: 390546 - DNA, 33 bp, Homo sapien
ttaactgtcacctaaattggagaaaatatatag

SEQ ID NO: 390547 - DNA, 33 bp, Homo sapien
ctggagctaagagccacataaacataacaattt

SEQ ID NO: 390548 - DNA, 33 bp, Homo sapien
ctggagctaagagccatataaacataacaattt

SEQ ID NO: 390549 - DNA, 33 bp, Homo sapien
tgaagatggctttcaacaagactggggaaggga

SEQ ID NO: 390550 - DNA, 33 bp, Homo sapien
tgaagatggctttcaagaagactggggaaggga

SEQ ID NO: 390551 - DNA, 33 bp, Homo sapien
ttaagatgatgctacaaaaatagtaattgttag

SEQ ID NO: 390552 - DNA, 33 bp, Homo sapien
ttaagatgatgctacagaaatagtaattgttag

SEQ ID NO: 390553 - DNA, 33 bp, Homo sapien
ttgtaaatcttgcaagcatacaacgtttttgta

SEQ ID NO: 390554 - DNA, 33 bp, Homo sapien
ttgtaaatcttgcaagtatacaacgtttttgta

SEQ ID NO: 390555 - DNA, 33 bp, Homo sapien
ctcaaagagttgaacaaagaattatcatttgag

SEQ ID NO: 390556 - DNA, 33 bp, Homo sapien
ctcaaagagttgaacatagaattatcatttgag

SEQ ID NO: 390557 - DNA, 33 bp, Homo sapien
tgcgctgtagacacgacggacctgaggtcagaa

SEQ ID NO: 390558 - DNA, 33 bp, Homo sapien
tgcgctgtagacacgatggacctgaggtcagaa

SEQ ID NO: 390559 - DNA, 33 bp, Homo sapien
atctaattgacttcccaaagaataactgtgatc

SEQ ID NO: 390560 - DNA, 33 bp, Homo sapien
atctaattgacttcccgaagaataactgtgatc

SEQ ID NO: 390561 - DNA, 33 bp, Homo sapien
cttactgagccacaaccaaatgagtcccaacct

SEQ ID NO: 390562 - DNA, 33 bp, Homo sapien
cttactgagccacaacgaaatgagtcccaacct

SEQ ID NO: 390563 - DNA, 33 bp, Homo sapien
agtaaaataggttgtacagattgggccaaagcc

SEQ ID NO: 390564 - DNA, 33 bp, Homo sapien
agtaaaataggttgtatagattgggccaaagcc

SEQ ID NO: 390565 - DNA, 33 bp, Homo sapien
tgaatgagataattcacgtgaggctcttagaaa

SEQ ID NO: 390566 - DNA, 33 bp, Homo sapien
tgaatgagataattcatgtgaggctcttagaaa

SEQ ID NO: 390567 - DNA, 33 bp, Homo sapien
attgataagtattccacgtgaacactgcagaat

SEQ ID NO: 390568 - DNA, 33 bp, Homo sapien
attgataagtattccatgtgaacactgcagaat

SEQ ID NO: 390569 - DNA, 33 bp, Homo sapien
attgaagtcaaatttacctaccttctcatatac

SEQ ID NO: 390570 - DNA, 33 bp, Homo sapien
attgaagtcaaatttatctaccttctcatatac

SEQ ID NO: 390571 - DNA, 33 bp, Homo sapien
tcatcaaaatacatcactgagaaagtgaaaagg

SEQ ID NO: 390572 - DNA, 33 bp, Homo sapien
tcatcaaaatacatcattgagaaagtgaaaagg

SEQ ID NO: 390573 - DNA, 33 bp, Homo sapien
aaatcaggatgtaataagatagtgacagcttaa

SEQ ID NO: 390574 - DNA, 33 bp, Homo sapien
aaatcaggatgtaatacgatagtgacagcttaa

SEQ ID NO: 390575 - DNA, 33 bp, Homo sapien
atggtagtcaggagcacaggtttacaactgggc

SEQ ID NO: 390576 - DNA, 33 bp, Homo sapien
atggtagtcaggagcataggtttacaactgggc

SEQ ID NO: 390577 - DNA, 33 bp, Homo sapien
ctgtactgagttaggcaaggcggtcccggcaaa

SEQ ID NO: 390578 - DNA, 33 bp, Homo sapien
ctgtactgagttaggcgaggcggtcccggcaaa

SEQ ID NO: 390579 - DNA, 33 bp, Homo sapien
agcgaattgggaccaaacagctggctgtcatca

SEQ ID NO: 390580 - DNA, 33 bp, Homo sapien
agcgaattgggaccaagcagctggctgtcatca

SEQ ID NO: 390581 - DNA, 33 bp, Homo sapien
atagggatttcaactacgttctatcctcctcct

SEQ ID NO: 390582 - DNA, 33 bp, Homo sapien
atagggatttcaactatgttctatcctcctcct

SEQ ID NO: 390583 - DNA, 33 bp, Homo sapien
agtgagctgctaagagcaagaaagttctaagct

SEQ ID NO: 390584 - DNA, 33 bp, Homo sapien
agtgagctgctaagagtaagaaagttctaagct

SEQ ID NO: 390585 - DNA, 33 bp, Homo sapien
gcctgaatttctcataccactgttgaatagttg

SEQ ID NO: 390586 - DNA, 33 bp, Homo sapien
gcctgaatttctcatagcactgttgaatagttg

SEQ ID NO: 390587 - DNA, 33 bp, Homo sapien
tgatttgagacaaatacgtttaactctctcagc

SEQ ID NO: 390588 - DNA, 33 bp, Homo sapien
tgatttgagacaaatatgtttaactctctcagc

SEQ ID NO: 390589 - DNA, 33 bp, Homo sapien
caataataaatggactcaagtgtttgaaaataa

SEQ ID NO: 390590 - DNA, 33 bp, Homo sapien
caataataaatggactgaagtgtttgaaaataa

SEQ ID NO: 390591 - DNA, 33 bp, Homo sapien
tgaggcctattccaaagtgagtgttcagtaaag

SEQ ID NO: 390592 - DNA, 33 bp, Homo sapien
tgaggcctattccaaattgagtgttcagtaaag

SEQ ID NO: 390593 - DNA, 33 bp, Homo sapien
agggcacaatagtgaacgaaaaacttgctgcca

SEQ ID NO: 390594 - DNA, 33 bp, Homo sapien
agggcacaatagtgaaggaaaaacttgctgcca

SEQ ID NO: 390595 - DNA, 33 bp, Homo sapien
cctcaggtaatctgtaggcacgtgaaaatctga

SEQ ID NO: 390596 - DNA, 33 bp, Homo sapien
cctcaggtaatctgtatgcacgtgaaaatctga

SEQ ID NO: 390597 - DNA, 33 bp, Homo sapien
gaggattaattgctgactaatatatcctgagat

SEQ ID NO: 390598 - DNA, 33 bp, Homo sapien
gaggattaattgctgagtaatatatcctgagat

SEQ ID NO: 390599 - DNA, 33 bp, Homo sapien
gcatggctctggcttaactgcaaagcaaagtag

SEQ ID NO: 390600 - DNA, 33 bp, Homo sapien
gcatggctctggcttacctgcaaagcaaagtag

SEQ ID NO: 390601 - DNA, 33 bp, Homo sapien
tgctacctcctaaagacatgttcaacctttaaa

SEQ ID NO: 390602 - DNA, 33 bp, Homo sapien
tgctacctcctaaagatatgttcaacctttaaa

SEQ ID NO: 390603 - DNA, 33 bp, Homo sapien
gggtggtttctatcaacttctggtttcatctgc

SEQ ID NO: 390604 - DNA, 33 bp, Homo sapien
gggtggtttctatcaatttctggtttcatctgc

SEQ ID NO: 390605 - DNA, 33 bp, Homo sapien
atgtatcaacatgtatgaaatcattcccttgat

SEQ ID NO: 390606 - DNA, 33 bp, Homo sapien
atgtatcaacatgtattaaatcattcccttgat

SEQ ID NO: 390607 - DNA, 33 bp, Homo sapien
agatgtattgtgccgcaactaaaattatgttta

SEQ ID NO: 390608 - DNA, 33 bp, Homo sapien
agatgtattgtgccgcgactaaaattatgttta

SEQ ID NO: 390609 - DNA, 33 bp, Homo sapien
ctttcctcccacgtcaaagattctgtaaacata

SEQ ID NO: 390610 - DNA, 33 bp, Homo sapien
ctttcctcccacgtcacagattctgtaaacata

SEQ ID NO: 390611 - DNA, 33 bp, Homo sapien
aaaccaaaatacaaaactgctcacacccttcca

SEQ ID NO: 390612 - DNA, 33 bp, Homo sapien
aaaccaaaatacaaaattgctcacacccttcca

SEQ ID NO: 390613 - DNA, 33 bp, Homo sapien
gtttctctggccagaaagttggaaattcaacgg

SEQ ID NO: 390614 - DNA, 33 bp, Homo sapien
gtttctctggccagaaggttggaaattcaacgg

SEQ ID NO: 390615 - DNA, 33 bp, Homo sapien
ccttctttccagtacaagacaagttctgtttct

SEQ ID NO: 390616 - DNA, 33 bp, Homo sapien
ccttctttccagtacaggacaagttctgtttct

SEQ ID NO: 390617 - DNA, 33 bp, Homo sapien
tgctccagaatcaatacacagagagaaagagaa

SEQ ID NO: 390618 - DNA, 33 bp, Homo sapien
tgctccagaatcaatagacagagagaaagagaa

SEQ ID NO: 390619 - DNA, 33 bp, Homo sapien
tcctttttgtccaataacttctgtttctcaccc

SEQ ID NO: 390620 - DNA, 33 bp, Homo sapien
tcctttttgtccaatagcttctgtttctcaccc

SEQ ID NO: 390621 - DNA, 33 bp, Homo sapien
tctcagcaaagcgagaaagggtcctgcttgcag

SEQ ID NO: 390622 - DNA, 33 bp, Homo sapien
tctcagcaaagcgagagagggtcctgcttgcag

SEQ ID NO: 390623 - DNA, 33 bp, Homo sapien
cgaccaactctttctaaataatgcccacctgtg

SEQ ID NO: 390624 - DNA, 33 bp, Homo sapien
cgaccaactctttctatataatgcccacctgtg

SEQ ID NO: 390625 - DNA, 33 bp, Homo sapien
gtagaatcaggacaaccaggacctcaatactct

SEQ ID NO: 390626 - DNA, 33 bp, Homo sapien
gtagaatcaggacaactaggacctcaatactct

SEQ ID NO: 390627 - DNA, 33 bp, Homo sapien
agtgggctcatgtacaaaaaggaaaccagaagt

SEQ ID NO: 390628 - DNA, 33 bp, Homo sapien
agtgggctcatgtacagaaaggaaaccagaagt

SEQ ID NO: 390629 - DNA, 33 bp, Homo sapien
agttaacaagaaaccaatcccgttggcagggaa

SEQ ID NO: 390630 - DNA, 33 bp, Homo sapien
agttaacaagaaaccagtcccgttggcagggaa

SEQ ID NO: 390631 - DNA, 33 bp, Homo sapien
tacatggaaatttaggaagcttgtatcttgcct

SEQ ID NO: 390632 - DNA, 33 bp, Homo sapien
tacatggaaatttagggagcttgtatcttgcct

SEQ ID NO: 390633 - DNA, 33 bp, Homo sapien
atctagttatacctgaataaatggatcaaagga

SEQ ID NO: 390634 - DNA, 33 bp, Homo sapien
atctagttatacctgagtaaatggatcaaagga

SEQ ID NO: 390635 - DNA, 33 bp, Homo sapien
atccgcagcatctttaccctaggtcatccgagg

SEQ ID NO: 390636 - DNA, 33 bp, Homo sapien
atccgcagcatctttagcctaggtcatccgagg

SEQ ID NO: 390637 - DNA, 33 bp, Homo sapien
gatgatgttgaaattaagcaggaagatgtcaat

SEQ ID NO: 390638 - DNA, 33 bp, Homo sapien
gatgatgttgaaattacgcaggaagatgtcaat

SEQ ID NO: 390639 - DNA, 33 bp, Homo sapien
tcgaaagaattgtacaccaagtacccatatgtt

SEQ ID NO: 390640 - DNA, 33 bp, Homo sapien
tcgaaagaattgtacagcaagtacccatatgtt

SEQ ID NO: 390641 - DNA, 33 bp, Homo sapien
cccctgctctcaatcaatcgggcccaagaactc

SEQ ID NO: 390642 - DNA, 33 bp, Homo sapien
cccctgctctcaatcagtcgggcccaagaactc

SEQ ID NO: 390643 - DNA, 33 bp, Homo sapien
ttcattaggtagtgaacattctagtccaatttg

SEQ ID NO: 390644 - DNA, 33 bp, Homo sapien
ttcattaggtagtgaagattctagtccaatttg

SEQ ID NO: 390645 - DNA, 33 bp, Homo sapien
gattgcctactttataaggctgttgtaaaaact

SEQ ID NO: 390646 - DNA, 33 bp, Homo sapien
gattgcctactttatagggctgttgtaaaaact

SEQ ID NO: 390647 - DNA, 33 bp, Homo sapien
gcctcgcttcagacaacgcttttttttgttggt

SEQ ID NO: 390648 - DNA, 33 bp, Homo sapien
gcctcgcttcagacaatgcttttttttgttggt

SEQ ID NO: 390649 - DNA, 33 bp, Homo sapien
ggtgagaataattcaaagtggctgtgatgcaag

SEQ ID NO: 390650 - DNA, 33 bp, Homo sapien
ggtgagaataattcaacgtggctgtgatgcaag

SEQ ID NO: 390651 - DNA, 33 bp, Homo sapien
ccatcttgtgctcatgcattttccacttgccaa

SEQ ID NO: 390652 - DNA, 33 bp, Homo sapien
ccatcttgtgctcatggattttccacttgccaa

SEQ ID NO: 390653 - DNA, 33 bp, Homo sapien
gaacaacggatataaccgaaacgggctatctgg

SEQ ID NO: 390654 - DNA, 33 bp, Homo sapien
gaacaacggatataactgaaacgggctatctgg

SEQ ID NO: 390655 - DNA, 33 bp, Homo sapien
ggctatctggtgagcagaagttctacattaagt

SEQ ID NO: 390656 - DNA, 33 bp, Homo sapien
ggctatctggtgagcataagttctacattaagt

SEQ ID NO: 390657 - DNA, 33 bp, Homo sapien
atagaatgttcttcaaagaaaaaatgaaacaag

SEQ ID NO: 390658 - DNA, 33 bp, Homo sapien
atagaatgttcttcaaggaaaaaatgaaacaag

SEQ ID NO: 390659 - DNA, 33 bp, Homo sapien
ggtcttgcaatgacaactactcagtaagtattg

SEQ ID NO: 390660 - DNA, 33 bp, Homo sapien
ggtcttgcaatgacaagtactcagtaagtattg

SEQ ID NO: 390661 - DNA, 33 bp, Homo sapien
tgtcattgcaagacctgaggaatagaggggcta

SEQ ID NO: 390662 - DNA, 33 bp, Homo sapien
tgtcattgcaagaccttaggaatagaggggcta

SEQ ID NO: 390663 - DNA, 33 bp, Homo sapien
caaaaaatgacagatacagttagcttaaaacct

SEQ ID NO: 390664 - DNA, 33 bp, Homo sapien
caaaaaatgacagatatagttagcttaaaacct

SEQ ID NO: 390665 - DNA, 33 bp, Homo sapien
taacgtgacatacacagataactgctcaaagtt

SEQ ID NO: 390666 - DNA, 33 bp, Homo sapien
taacgtgacatacacatataactgctcaaagtt

SEQ ID NO: 390667 - DNA, 33 bp, Homo sapien
aagtaagatttagttgcaaataccaataattca

SEQ ID NO: 390668 - DNA, 33 bp, Homo sapien
aagtaagatttagttggaaataccaataattca

SEQ ID NO: 390669 - DNA, 33 bp, Homo sapien
ctatgctatcgctccacctttggagtgcagcct

SEQ ID NO: 390670 - DNA, 33 bp, Homo sapien
ctatgctatcgctccatctttggagtgcagcct

SEQ ID NO: 390671 - DNA, 33 bp, Homo sapien
ggtggatgtggaaaacagaagacggaacaattc

SEQ ID NO: 390672 - DNA, 33 bp, Homo sapien
ggtggatgtggaaaacggaagacggaacaattc

SEQ ID NO: 390673 - DNA, 33 bp, Homo sapien
gaaagggtggacggaacaaggtggatgtggaaa

SEQ ID NO: 390674 - DNA, 33 bp, Homo sapien
gaaagggtggacggaagaaggtggatgtggaaa

SEQ ID NO: 390675 - DNA, 33 bp, Homo sapien
ctgagggatgttgggacaatcacaaataacagg

SEQ ID NO: 390676 - DNA, 33 bp, Homo sapien
ctgagggatgttgggagaatcacaaataacagg

SEQ ID NO: 390677 - DNA, 33 bp, Homo sapien
cagcaccctgacaccaacataagctgtaactac

SEQ ID NO: 390678 - DNA, 33 bp, Homo sapien
cagcaccctgacaccatcataagctgtaactac

SEQ ID NO: 390679 - DNA, 33 bp, Homo sapien
agttaatatggtgcgacagtttaccatgtactg

SEQ ID NO: 390680 - DNA, 33 bp, Homo sapien
agttaatatggtgcgagagtttaccatgtactg

SEQ ID NO: 390681 - DNA, 33 bp, Homo sapien
taggatgtcatgaagaacttttgagaaattgct

SEQ ID NO: 390682 - DNA, 33 bp, Homo sapien
taggatgtcatgaagagcttttgagaaattgct

SEQ ID NO: 390683 - DNA, 33 bp, Homo sapien
aatatgcccctgtgaaatgtacctatgggagga

SEQ ID NO: 390684 - DNA, 33 bp, Homo sapien
aatatgcccctgtgaagtgtacctatgggagga

SEQ ID NO: 390685 - DNA, 33 bp, Homo sapien
aatccaccgccttttaagggttcagttgttctg

SEQ ID NO: 390686 - DNA, 33 bp, Homo sapien
aatccaccgccttttaggggttcagttgttctg

SEQ ID NO: 390687 - DNA, 33 bp, Homo sapien
aagcacaaaccaagccactttgtgctgaagaag

SEQ ID NO: 390688 - DNA, 33 bp, Homo sapien
aagcacaaaccaagcctctttgtgctgaagaag

SEQ ID NO: 390689 - DNA, 33 bp, Homo sapien
cacagtggtcactaaaagggatataactttaat

SEQ ID NO: 390690 - DNA, 33 bp, Homo sapien
cacagtggtcactaaaggggatataactttaat

SEQ ID NO: 390691 - DNA, 33 bp, Homo sapien
ctctcatctcggggaaacttttagagttgttgt

SEQ ID NO: 390692 - DNA, 33 bp, Homo sapien
ctctcatctcggggaatcttttagagttgttgt

SEQ ID NO: 390693 - DNA, 33 bp, Homo sapien
ctgaaatttgaggaccacttcagtagatacttc

SEQ ID NO: 390694 - DNA, 33 bp, Homo sapien
ctgaaatttgaggacctcttcagtagatacttc

SEQ ID NO: 390695 - DNA, 33 bp, Homo sapien
cccaatccagctataaaaccatttctccaaggg

SEQ ID NO: 390696 - DNA, 33 bp, Homo sapien
cccaatccagctataacaccatttctccaaggg

SEQ ID NO: 390697 - DNA, 33 bp, Homo sapien
ttagtccattttttgcactactgataaagacat

SEQ ID NO: 390698 - DNA, 33 bp, Homo sapien
ttagtccattttttgcgctactgataaagacat

SEQ ID NO: 390699 - DNA, 33 bp, Homo sapien
gcctggagcactacaacaggaggttagcgggcg

SEQ ID NO: 390700 - DNA, 33 bp, Homo sapien
gcctggagcactacaagaggaggttagcgggcg

SEQ ID NO: 390701 - DNA, 33 bp, Homo sapien
atgatgttgacagcgacgaggttttattggtta

SEQ ID NO: 390702 - DNA, 33 bp, Homo sapien
atgatgttgacagcgatgaggttttattggtta

SEQ ID NO: 390703 - DNA, 33 bp, Homo sapien
taccagctgggtaagacacagataacaactatg

SEQ ID NO: 390704 - DNA, 33 bp, Homo sapien
taccagctgggtaagatacagataacaactatg

SEQ ID NO: 390705 - DNA, 33 bp, Homo sapien
ttagctaggtgttaagcaccatccaatggacgg

SEQ ID NO: 390706 - DNA, 33 bp, Homo sapien
ttagctaggtgttaagtaccatccaatggacgg

SEQ ID NO: 390707 - DNA, 33 bp, Homo sapien
ttcgaaaactatagagaacacagccaaagatcc

SEQ ID NO: 390708 - DNA, 33 bp, Homo sapien
ttcgaaaactatagagtacacagccaaagatcc

SEQ ID NO: 390709 - DNA, 33 bp, Homo sapien
cagaagattgggagaggcagggatctttggctg

SEQ ID NO: 390710 - DNA, 33 bp, Homo sapien
cagaagattgggagagtcagggatctttggctg

SEQ ID NO: 390711 - DNA, 33 bp, Homo sapien
tcttattccaaggaaaagagtggaagatgaaaa

SEQ ID NO: 390712 - DNA, 33 bp, Homo sapien
tcttattccaaggaaacgagtggaagatgaaaa

SEQ ID NO: 390713 - DNA, 33 bp, Homo sapien
gagtaccagacaatgcacacttttcctatgttc

SEQ ID NO: 390714 - DNA, 33 bp, Homo sapien
gagtaccagacaatgcgcacttttcctatgttc

SEQ ID NO: 390715 - DNA, 33 bp, Homo sapien
tagtcaaaaccaattcacctaatgtctgcttca

SEQ ID NO: 390716 - DNA, 33 bp, Homo sapien
tagtcaaaaccaattcgcctaatgtctgcttca

SEQ ID NO: 390717 - DNA, 33 bp, Homo sapien
caagacatggtggcaactgaaaataaaggacaa

SEQ ID NO: 390718 - DNA, 33 bp, Homo sapien
caagacatggtggcaattgaaaataaaggacaa

SEQ ID NO: 390719 - DNA, 33 bp, Homo sapien
aatggaggcaaaggaacggctcttgcttgaggc

SEQ ID NO: 390720 - DNA, 33 bp, Homo sapien
aatggaggcaaaggaatggctcttgcttgaggc

SEQ ID NO: 390721 - DNA, 33 bp, Homo sapien
ccgcttctgtaaacaccgtacttgaccttcatg

SEQ ID NO: 390722 - DNA, 33 bp, Homo sapien
ccgcttctgtaaacactgtacttgaccttcatg

SEQ ID NO: 390723 - DNA, 33 bp, Homo sapien
gggaacggcttggtgacacagcacgcaaacacc

SEQ ID NO: 390724 - DNA, 33 bp, Homo sapien
gggaacggcttggtgatacagcacgcaaacacc

SEQ ID NO: 390725 - DNA, 33 bp, Homo sapien
atgtgtctttaccccaaaaaccacagaaacaat

SEQ ID NO: 390726 - DNA, 33 bp, Homo sapien
atgtgtctttaccccacaaaccacagaaacaat

SEQ ID NO: 390727 - DNA, 33 bp, Homo sapien
gtgagtcagacaactcagagtgtgccatctgac

SEQ ID NO: 390728 - DNA, 33 bp, Homo sapien
gtgagtcagacaactccgagtgtgccatctgac

SEQ ID NO: 390729 - DNA, 33 bp, Homo sapien
catgccagttgcgagccccaaaccctacctcct

SEQ ID NO: 390730 - DNA, 33 bp, Homo sapien
catgccagttgcgagctccaaaccctacctcct

SEQ ID NO: 390731 - DNA, 33 bp, Homo sapien
ggagggaagagtccgacgttttcattagaaaag

SEQ ID NO: 390732 - DNA, 33 bp, Homo sapien
ggagggaagagtccgatgttttcattagaaaag

SEQ ID NO: 390733 - DNA, 33 bp, Homo sapien
tacttctgagtgtttacagtttcagtgattctg

SEQ ID NO: 390734 - DNA, 33 bp, Homo sapien
tacttctgagtgtttatagtttcagtgattctg

SEQ ID NO: 390735 - DNA, 33 bp, Homo sapien
gttcattatgtcttcacctgcaaattgttggtg

SEQ ID NO: 390736 - DNA, 33 bp, Homo sapien
gttcattatgtcttcagctgcaaattgttggtg

SEQ ID NO: 390737 - DNA, 33 bp, Homo sapien
cccagctggtccatccactaacaaaagttcatt

SEQ ID NO: 390738 - DNA, 33 bp, Homo sapien
cccagctggtccatccgctaacaaaagttcatt

SEQ ID NO: 390739 - DNA, 33 bp, Homo sapien
gaggatgaaatatgtcaccaaatagtccctttc

SEQ ID NO: 390740 - DNA, 33 bp, Homo sapien
gaggatgaaatatgtcgccaaatagtccctttc

SEQ ID NO: 390741 - DNA, 33 bp, Homo sapien
aggctcagaagcctataaaagattcaactcctg

SEQ ID NO: 390742 - DNA, 33 bp, Homo sapien
aggctcagaagcctatgaaagattcaactcctg

SEQ ID NO: 390743 - DNA, 33 bp, Homo sapien
cgcacttatttaaaccagagttcagagaaagta

SEQ ID NO: 390744 - DNA, 33 bp, Homo sapien
cgcacttatttaaaccggagttcagagaaagta

SEQ ID NO: 390745 - DNA, 33 bp, Homo sapien
atggcagaatgcacacaaaacccttcaaattac

SEQ ID NO: 390746 - DNA, 33 bp, Homo sapien
atggcagaatgcacacgaaacccttcaaattac

SEQ ID NO: 390747 - DNA, 33 bp, Homo sapien
tggccattcatggcccaggaacattcatctcag

SEQ ID NO: 390748 - DNA, 33 bp, Homo sapien
tggccattcatggcccgggaacattcatctcag

SEQ ID NO: 390749 - DNA, 33 bp, Homo sapien
caaggcattgagcccgacactgatggaagagct

SEQ ID NO: 390750 - DNA, 33 bp, Homo sapien
caaggcattgagcccggcactgatggaagagct

SEQ ID NO: 390751 - DNA, 33 bp, Homo sapien
gcacaatggaaaataagggaaaggctcatggtg

SEQ ID NO: 390752 - DNA, 33 bp, Homo sapien
gcacaatggaaaataatggaaaggctcatggtg

SEQ ID NO: 390753 - DNA, 33 bp, Homo sapien
gagccaccttgacttaaagcagaacaaccaaag

SEQ ID NO: 390754 - DNA, 33 bp, Homo sapien
gagccaccttgacttacagcagaacaaccaaag

SEQ ID NO: 390755 - DNA, 33 bp, Homo sapien
atgacaaatgtttgaggaatcactgtgtgccag

SEQ ID NO: 390756 - DNA, 33 bp, Homo sapien
atgacaaatgtttgagtaatcactgtgtgccag

SEQ ID NO: 390757 - DNA, 33 bp, Homo sapien
gctctgtaaagaaaaacactctggtcagtgtcc

SEQ ID NO: 390758 - DNA, 33 bp, Homo sapien
gctctgtaaagaaaaatactctggtcagtgtcc

SEQ ID NO: 390759 - DNA, 33 bp, Homo sapien
taccactgcctgggaacttcactatggggatgt

SEQ ID NO: 390760 - DNA, 33 bp, Homo sapien
taccactgcctgggaagttcactatggggatgt

SEQ ID NO: 390761 - DNA, 33 bp, Homo sapien
ggttcaagatgccaaacaggagacctggagcca

SEQ ID NO: 390762 - DNA, 33 bp, Homo sapien
ggttcaagatgccaaagaggagacctggagcca

SEQ ID NO: 390763 - DNA, 33 bp, Homo sapien
tgaagcaataatgaccacagtgacagagaagag

SEQ ID NO: 390764 - DNA, 33 bp, Homo sapien
tgaagcaataatgaccgcagtgacagagaagag

SEQ ID NO: 390765 - DNA, 33 bp, Homo sapien
caggacaatgaccgaactgaagtgcatgaagca

SEQ ID NO: 390766 - DNA, 33 bp, Homo sapien
caggacaatgaccgaattgaagtgcatgaagca

SEQ ID NO: 390767 - DNA, 33 bp, Homo sapien
tggcgctattatgatgacaacacattcacctgc

SEQ ID NO: 390768 - DNA, 33 bp, Homo sapien
tggcgctattatgatggcaacacattcacctgc

SEQ ID NO: 390769 - DNA, 33 bp, Homo sapien
aatgtggctctaccccaattctaacccatctgt

SEQ ID NO: 390770 - DNA, 33 bp, Homo sapien
aatgtggctctacccctattctaacccatctgt

SEQ ID NO: 390771 - DNA, 33 bp, Homo sapien
caggaagaacctagaccgtaagcaggactctag

SEQ ID NO: 390772 - DNA, 33 bp, Homo sapien
caggaagaacctagactgtaagcaggactctag

SEQ ID NO: 390773 - DNA, 33 bp, Homo sapien
gtgatgacatgagtgcaatttttttaattccat

SEQ ID NO: 390774 - DNA, 33 bp, Homo sapien
gtgatgacatgagtgctatttttttaattccat

SEQ ID NO: 390775 - DNA, 33 bp, Homo sapien
acttcacttagaataagagtcttcaatcccatc

SEQ ID NO: 390776 - DNA, 33 bp, Homo sapien
acttcacttagaataatagtcttcaatcccatc

SEQ ID NO: 390777 - DNA, 33 bp, Homo sapien
attcactccttttgacggctgagtactattcta

SEQ ID NO: 390778 - DNA, 33 bp, Homo sapien
attcactccttttgactgctgagtactattcta

SEQ ID NO: 390779 - DNA, 33 bp, Homo sapien
tcacaagtgctttcaactccattgtacttgcag

SEQ ID NO: 390780 - DNA, 33 bp, Homo sapien
tcacaagtgctttcaagtccattgtacttgcag

SEQ ID NO: 390781 - DNA, 33 bp, Homo sapien
gggcaacaaagttcaaaaaccacaaatgctttg

SEQ ID NO: 390782 - DNA, 33 bp, Homo sapien
gggcaacaaagttcaagaaccacaaatgctttg

SEQ ID NO: 390783 - DNA, 33 bp, Homo sapien
gctcttgcagtcccaacgtattgcgatgcttcc

SEQ ID NO: 390784 - DNA, 33 bp, Homo sapien
gctcttgcagtcccaatgtattgcgatgcttcc

SEQ ID NO: 390785 - DNA, 33 bp, Homo sapien
agacagaggagcgaaacaggggatacggacagg

SEQ ID NO: 390786 - DNA, 33 bp, Homo sapien
agacagaggagcgaaagaggggatacggacagg

SEQ ID NO: 390787 - DNA, 33 bp, Homo sapien
tctctagactggaagacaagactcagctggcca

SEQ ID NO: 390788 - DNA, 33 bp, Homo sapien
tctctagactggaagagaagactcagctggcca

SEQ ID NO: 390789 - DNA, 33 bp, Homo sapien
gtgaatgggattagtccaaactcatagtgaaga

SEQ ID NO: 390790 - DNA, 33 bp, Homo sapien
gtgaatgggattagtctaaactcatagtgaaga

SEQ ID NO: 390791 - DNA, 33 bp, Homo sapien
agccatcatttaacgacgatgcgactctccagt

SEQ ID NO: 390792 - DNA, 33 bp, Homo sapien
agccatcatttaacgaggatgcgactctccagt

SEQ ID NO: 390793 - DNA, 33 bp, Homo sapien
cagccactccatgtgcaatctatgcttgttaac

SEQ ID NO: 390794 - DNA, 33 bp, Homo sapien
cagccactccatgtgcgatctatgcttgttaac

SEQ ID NO: 390795 - DNA, 33 bp, Homo sapien
taaagctggccctgccaccaatctggaaaaggg

SEQ ID NO: 390796 - DNA, 33 bp, Homo sapien
taaagctggccctgccgccaatctggaaaaggg

SEQ ID NO: 390797 - DNA, 33 bp, Homo sapien
gcaattttgtctcgtaaatttgcacattttccc

SEQ ID NO: 390798 - DNA, 33 bp, Homo sapien
gcaattttgtctcgtatatttgcacattttccc

SEQ ID NO: 390799 - DNA, 33 bp, Homo sapien
ctcattgcagaagacaaattctatttccttact

SEQ ID NO: 390800 - DNA, 33 bp, Homo sapien
ctcattgcagaagacagattctatttccttact

SEQ ID NO: 390801 - DNA, 33 bp, Homo sapien
gagaagtagagcgtccacatactttggagacta

SEQ ID NO: 390802 - DNA, 33 bp, Homo sapien
gagaagtagagcgtccgcatactttggagacta

SEQ ID NO: 390803 - DNA, 33 bp, Homo sapien
aacctatgctttccaacagtaaggccatcagcc

SEQ ID NO: 390804 - DNA, 33 bp, Homo sapien
aacctatgctttccaatagtaaggccatcagcc

SEQ ID NO: 390805 - DNA, 33 bp, Homo sapien
acgtggaactgggcaaataataaatacttgata

SEQ ID NO: 390806 - DNA, 33 bp, Homo sapien
acgtggaactgggcaactaataaatacttgata

SEQ ID NO: 390807 - DNA, 33 bp, Homo sapien
ttcatctcaggcacctaaagtcaaatctttcag

SEQ ID NO: 390808 - DNA, 33 bp, Homo sapien
ttcatctcaggcacctgaagtcaaatctttcag

SEQ ID NO: 390809 - DNA, 33 bp, Homo sapien
acacatatggaggtaccggttaaatgttatttc

SEQ ID NO: 390810 - DNA, 33 bp, Homo sapien
acacatatggaggtactggttaaatgttatttc

SEQ ID NO: 390811 - DNA, 33 bp, Homo sapien
aagaatgccaggccaacgataggattaagagct

SEQ ID NO: 390812 - DNA, 33 bp, Homo sapien
aagaatgccaggccaatgataggattaagagct

SEQ ID NO: 390813 - DNA, 33 bp, Homo sapien
agaagaaaaccacactaaagatgcaaccaaaga

SEQ ID NO: 390814 - DNA, 33 bp, Homo sapien
agaagaaaaccacactgaagatgcaaccaaaga

SEQ ID NO: 390815 - DNA, 33 bp, Homo sapien
gaagggaaaggagaacggaagaaggaaacagac

SEQ ID NO: 390816 - DNA, 33 bp, Homo sapien
gaagggaaaggagaactgaagaaggaaacagac

SEQ ID NO: 390817 - DNA, 33 bp, Homo sapien
tgttaatcattgatacaggaattggctttcacc

SEQ ID NO: 390818 - DNA, 33 bp, Homo sapien
tgttaatcattgatacgggaattggctttcacc

SEQ ID NO: 390819 - DNA, 33 bp, Homo sapien
gttattggtttgtccaatgaaaggatttataat

SEQ ID NO: 390820 - DNA, 33 bp, Homo sapien
gttattggtttgtccactgaaaggatttataat

SEQ ID NO: 390821 - DNA, 33 bp, Homo sapien
tggcaaggaagttatcaccagctttcactcttt

SEQ ID NO: 390822 - DNA, 33 bp, Homo sapien
tggcaaggaagttatcgccagctttcactcttt

SEQ ID NO: 390823 - DNA, 33 bp, Homo sapien
ctacagtccctgagtacaagaaacagagtgaaa

SEQ ID NO: 390824 - DNA, 33 bp, Homo sapien
ctacagtccctgagtataagaaacagagtgaaa

SEQ ID NO: 390825 - DNA, 33 bp, Homo sapien
aacaacggtctcacgaaagctggtatgagctgg

SEQ ID NO: 390826 - DNA, 33 bp, Homo sapien
aacaacggtctcacgagagctggtatgagctgg

SEQ ID NO: 390827 - DNA, 33 bp, Homo sapien
atgaattggagacagacatatccctaatatggg

SEQ ID NO: 390828 - DNA, 33 bp, Homo sapien
atgaattggagacagagatatccctaatatggg

SEQ ID NO: 390829 - DNA, 33 bp, Homo sapien
caattcatgtccattccaagacaatgctactgg

SEQ ID NO: 390830 - DNA, 33 bp, Homo sapien
caattcatgtccattctaagacaatgctactgg

SEQ ID NO: 390831 - DNA, 33 bp, Homo sapien
ctgtaacaccaacgtcaaagcttccaaatcctg

SEQ ID NO: 390832 - DNA, 33 bp, Homo sapien
ctgtaacaccaacgtcgaagcttccaaatcctg

SEQ ID NO: 390833 - DNA, 33 bp, Homo sapien
gatacagagtctcagaagttatgagttgggatt

SEQ ID NO: 390834 - DNA, 33 bp, Homo sapien
gatacagagtctcagaggttatgagttgggatt

SEQ ID NO: 390835 - DNA, 33 bp, Homo sapien
tgggcactatttcttacaactgtgtgtgaatca

SEQ ID NO: 390836 - DNA, 33 bp, Homo sapien
tgggcactatttcttataactgtgtgtgaatca

SEQ ID NO: 390837 - DNA, 33 bp, Homo sapien
ttttcttgtaaggataacgtgataattcatgta

SEQ ID NO: 390838 - DNA, 33 bp, Homo sapien
ttttcttgtaaggatagcgtgataattcatgta

SEQ ID NO: 390839 - DNA, 33 bp, Homo sapien
tttgtgtgaagaagaacgttccctgcctctagg

SEQ ID NO: 390840 - DNA, 33 bp, Homo sapien
tttgtgtgaagaagaatgttccctgcctctagg

SEQ ID NO: 390841 - DNA, 33 bp, Homo sapien
gttctctcaacacgacaacacagattttgcctt

SEQ ID NO: 390842 - DNA, 33 bp, Homo sapien
gttctctcaacacgaccacacagattttgcctt

SEQ ID NO: 390843 - DNA, 33 bp, Homo sapien
aactcacatgatcttaagagtatttgcagaagg

SEQ ID NO: 390844 - DNA, 33 bp, Homo sapien
aactcacatgatcttacgagtatttgcagaagg

SEQ ID NO: 390845 - DNA, 33 bp, Homo sapien
ttatattaatatattacatggatgtgcctgcac

SEQ ID NO: 390846 - DNA, 33 bp, Homo sapien
ttatattaatatattatatggatgtgcctgcac

SEQ ID NO: 390847 - DNA, 33 bp, Homo sapien
accgtctgcccagagtcaatcttagatagagag

SEQ ID NO: 390848 - DNA, 33 bp, Homo sapien
accgtctgcccagagttaatcttagatagagag

SEQ ID NO: 390849 - DNA, 33 bp, Homo sapien
ttagaaaattaggaacacctgcagaaaatggct

SEQ ID NO: 390850 - DNA, 33 bp, Homo sapien
ttagaaaattaggaacgcctgcagaaaatggct

SEQ ID NO: 390851 - DNA, 33 bp, Homo sapien
cctaccatgatgtccactaaagaatgggctacg

SEQ ID NO: 390852 - DNA, 33 bp, Homo sapien
cctaccatgatgtccagtaaagaatgggctacg

SEQ ID NO: 390853 - DNA, 33 bp, Homo sapien
agcatgcaggccccaacatatagcaggcgagca

SEQ ID NO: 390854 - DNA, 33 bp, Homo sapien
agcatgcaggccccaagatatagcaggcgagca

SEQ ID NO: 390855 - DNA, 33 bp, Homo sapien
ggtgctggaaacatgaaaggtaggtaagctgcc

SEQ ID NO: 390856 - DNA, 33 bp, Homo sapien
ggtgctggaaacatgagaggtaggtaagctgcc

SEQ ID NO: 390857 - DNA, 33 bp, Homo sapien
tgttcagtgtatggcccaacgcactttggggag

SEQ ID NO: 390858 - DNA, 33 bp, Homo sapien
tgttcagtgtatggcctaacgcactttggggag

SEQ ID NO: 390859 - DNA, 33 bp, Homo sapien
ggcttttaaatattcaatcgaaggcttactaaa

SEQ ID NO: 390860 - DNA, 33 bp, Homo sapien
ggcttttaaatattcagtcgaaggcttactaaa

SEQ ID NO: 390861 - DNA, 33 bp, Homo sapien
agttagataacagtcacaagatcagaaagcgaa

SEQ ID NO: 390862 - DNA, 33 bp, Homo sapien
agttagataacagtcagaagatcagaaagcgaa

SEQ ID NO: 390863 - DNA, 33 bp, Homo sapien
tgaatattaaaagacaataagccagttgtgtgt

SEQ ID NO: 390864 - DNA, 33 bp, Homo sapien
tgaatattaaaagacagtaagccagttgtgtgt

SEQ ID NO: 390865 - DNA, 33 bp, Homo sapien
agaccacatggggtaacgggcctccatgtctct

SEQ ID NO: 390866 - DNA, 33 bp, Homo sapien
agaccacatggggtaatgggcctccatgtctct

SEQ ID NO: 390867 - DNA, 33 bp, Homo sapien
ataataaatgtgtgcacagtttgacagccatat

SEQ ID NO: 390868 - DNA, 33 bp, Homo sapien
ataataaatgtgtgcatagtttgacagccatat

SEQ ID NO: 390869 - DNA, 33 bp, Homo sapien
cttctgtaactcatatcacatcaaataattcac

SEQ ID NO: 390870 - DNA, 33 bp, Homo sapien
cttctgtaactcatatgacatcaaataattcac

SEQ ID NO: 390871 - DNA, 33 bp, Homo sapien
gtgcagaagggattaacggttctccagtggacc

SEQ ID NO: 390872 - DNA, 33 bp, Homo sapien
gtgcagaagggattaatggttctccagtggacc

SEQ ID NO: 390873 - DNA, 33 bp, Homo sapien
gagtttcaagaacaaccattctgtgcagatcag

SEQ ID NO: 390874 - DNA, 33 bp, Homo sapien
gagtttcaagaacaactattctgtgcagatcag

SEQ ID NO: 390875 - DNA, 33 bp, Homo sapien
agcagattgtgcttaccgagctcactgtactat

SEQ ID NO: 390876 - DNA, 33 bp, Homo sapien
agcagattgtgcttactgagctcactgtactat

SEQ ID NO: 390877 - DNA, 33 bp, Homo sapien
aggcccatttaaaagcagccacaaaggggtaca

SEQ ID NO: 390878 - DNA, 33 bp, Homo sapien
aggcccatttaaaagcggccacaaaggggtaca

SEQ ID NO: 390879 - DNA, 33 bp, Homo sapien
acataaaagtgaagacaggttttaatgacatag

SEQ ID NO: 390880 - DNA, 33 bp, Homo sapien
acataaaagtgaagaccggttttaatgacatag

SEQ ID NO: 390881 - DNA, 33 bp, Homo sapien
cttaatgattcacccacactagtctatcatagg

SEQ ID NO: 390882 - DNA, 33 bp, Homo sapien
cttaatgattcacccatactagtctatcatagg

SEQ ID NO: 390883 - DNA, 33 bp, Homo sapien
atcactcagggtaggaaccaaataatgagtggc

SEQ ID NO: 390884 - DNA, 33 bp, Homo sapien
atcactcagggtaggagccaaataatgagtggc

SEQ ID NO: 390885 - DNA, 33 bp, Homo sapien
tccaaatcaaaattcaccctgggagcttgctta

SEQ ID NO: 390886 - DNA, 33 bp, Homo sapien
tccaaatcaaaattcatcctgggagcttgctta

SEQ ID NO: 390887 - DNA, 33 bp, Homo sapien
aatatatcaagcagaacttctcagagttggagt

SEQ ID NO: 390888 - DNA, 33 bp, Homo sapien
aatatatcaagcagaagttctcagagttggagt

SEQ ID NO: 390889 - DNA, 33 bp, Homo sapien
tgtctgaaggttgtcacataactatgttctcca

SEQ ID NO: 390890 - DNA, 33 bp, Homo sapien
tgtctgaaggttgtcagataactatgttctcca

SEQ ID NO: 390891 - DNA, 33 bp, Homo sapien
actcagatgcctaaaccatactccgaacctact

SEQ ID NO: 390892 - DNA, 33 bp, Homo sapien
actcagatgcctaaactatactccgaacctact

SEQ ID NO: 390893 - DNA, 33 bp, Homo sapien
atcattgaaccagactcaaagtagcagataaga

SEQ ID NO: 390894 - DNA, 33 bp, Homo sapien
atcattgaaccagactgaaagtagcagataaga

SEQ ID NO: 390895 - DNA, 33 bp, Homo sapien
agctttgggaatgagacataaaggagtcatatc

SEQ ID NO: 390896 - DNA, 33 bp, Homo sapien
agctttgggaatgagagataaaggagtcatatc

SEQ ID NO: 390897 - DNA, 33 bp, Homo sapien
tgcagtatagtataaacggagcttctatatgta

SEQ ID NO: 390898 - DNA, 33 bp, Homo sapien
tgcagtatagtataaatggagcttctatatgta

SEQ ID NO: 390899 - DNA, 33 bp, Homo sapien
ttaactaactcatcccacagttttcaaagagca

SEQ ID NO: 390900 - DNA, 33 bp, Homo sapien
ttaactaactcatcccgcagttttcaaagagca

SEQ ID NO: 390901 - DNA, 33 bp, Homo sapien
gtctggaggaccagagcatcgatgtgatcctac

SEQ ID NO: 390902 - DNA, 33 bp, Homo sapien
gtctggaggaccagagtatcgatgtgatcctac

SEQ ID NO: 390903 - DNA, 33 bp, Homo sapien
ttgcatccatattacaactgacatttgcagttg

SEQ ID NO: 390904 - DNA, 33 bp, Homo sapien
ttgcatccatattacagctgacatttgcagttg

SEQ ID NO: 390905 - DNA, 33 bp, Homo sapien
ccatgtggaaagtgaaccaagggctggatattt

SEQ ID NO: 390906 - DNA, 33 bp, Homo sapien
ccatgtggaaagtgaagcaagggctggatattt

SEQ ID NO: 390907 - DNA, 33 bp, Homo sapien
cagtactagcctatgacctgttaggaacctggc

SEQ ID NO: 390908 - DNA, 33 bp, Homo sapien
cagtactagcctatgagctgttaggaacctggc

SEQ ID NO: 390909 - DNA, 33 bp, Homo sapien
gaggcagccttgccaccggaagaaaatggcact

SEQ ID NO: 390910 - DNA, 33 bp, Homo sapien
gaggcagccttgccactggaagaaaatggcact

SEQ ID NO: 390911 - DNA, 33 bp, Homo sapien
taagttgacatgaaaacacaaatatccagttca

SEQ ID NO: 390912 - DNA, 33 bp, Homo sapien
taagttgacatgaaaagacaaatatccagttca

SEQ ID NO: 390913 - DNA, 33 bp, Homo sapien
gagcaggtgtgggaaaacaaattttagtcatga

SEQ ID NO: 390914 - DNA, 33 bp, Homo sapien
gagcaggtgtgggaaagcaaattttagtcatga

SEQ ID NO: 390915 - DNA, 33 bp, Homo sapien
tgttgttagtgcctggacaattaagtaccaaga

SEQ ID NO: 390916 - DNA, 33 bp, Homo sapien
tgttgttagtgcctggccaattaagtaccaaga

SEQ ID NO: 390917 - DNA, 33 bp, Homo sapien
ccatcttcttcagagcaatttcccaaacaaata

SEQ ID NO: 390918 - DNA, 33 bp, Homo sapien
ccatcttcttcagagcgatttcccaaacaaata

SEQ ID NO: 390919 - DNA, 33 bp, Homo sapien
ctagggaaagacagcactaccttaccttaaact

SEQ ID NO: 390920 - DNA, 33 bp, Homo sapien
ctagggaaagacagcagtaccttaccttaaact

SEQ ID NO: 390921 - DNA, 33 bp, Homo sapien
caagcatgaggagtccaaacctactgatttgtg

SEQ ID NO: 390922 - DNA, 33 bp, Homo sapien
caagcatgaggagtccgaacctactgatttgtg

SEQ ID NO: 390923 - DNA, 33 bp, Homo sapien
gaaggagaatcaagacactggaaacatatgccc

SEQ ID NO: 390924 - DNA, 33 bp, Homo sapien
gaaggagaatcaagaccctggaaacatatgccc

SEQ ID NO: 390925 - DNA, 33 bp, Homo sapien
tgtcacttccaatgcaaagtaaatgtggaaaat

SEQ ID NO: 390926 - DNA, 33 bp, Homo sapien
tgtcacttccaatgcacagtaaatgtggaaaat

SEQ ID NO: 390927 - DNA, 33 bp, Homo sapien
ttccctctattttaaactcttgattctatcatc

SEQ ID NO: 390928 - DNA, 33 bp, Homo sapien
ttccctctattttaaagtcttgattctatcatc

SEQ ID NO: 390929 - DNA, 33 bp, Homo sapien
gtgccttaaacaaagacatactgataaatcttt

SEQ ID NO: 390930 - DNA, 33 bp, Homo sapien
gtgccttaaacaaagagatactgataaatcttt

SEQ ID NO: 390931 - DNA, 33 bp, Homo sapien
tccaccatggatacaaagtttgttgtgataaga

SEQ ID NO: 390932 - DNA, 33 bp, Homo sapien
tccaccatggatacaatgtttgttgtgataaga

SEQ ID NO: 390933 - DNA, 33 bp, Homo sapien
gagggctctctgcagtcaatatcatatcagcta

SEQ ID NO: 390934 - DNA, 33 bp, Homo sapien
gagggctctctgcagtgaatatcatatcagcta

SEQ ID NO: 390935 - DNA, 33 bp, Homo sapien
aactcattcagctttaacacagtgggcctatgg

SEQ ID NO: 390936 - DNA, 33 bp, Homo sapien
aactcattcagctttatcacagtgggcctatgg

SEQ ID NO: 390937 - DNA, 33 bp, Homo sapien
cacacacactcagatgcaggcagacatatgtac

SEQ ID NO: 390938 - DNA, 33 bp, Homo sapien
cacacacactcagatgtaggcagacatatgtac

SEQ ID NO: 390939 - DNA, 33 bp, Homo sapien
gtgctgctccagatagacctacaaacatctgtc

SEQ ID NO: 390940 - DNA, 33 bp, Homo sapien
gtgctgctccagatagccctacaaacatctgtc

SEQ ID NO: 390941 - DNA, 33 bp, Homo sapien
gaagacattttcttcccatgagtccctgggaag

SEQ ID NO: 390942 - DNA, 33 bp, Homo sapien
gaagacattttcttcctatgagtccctgggaag

SEQ ID NO: 390943 - DNA, 33 bp, Homo sapien
cagtactccagtcaaactaggaacgttttgagt

SEQ ID NO: 390944 - DNA, 33 bp, Homo sapien
cagtactccagtcaaattaggaacgttttgagt

SEQ ID NO: 390945 - DNA, 33 bp, Homo sapien
gacaataatatcaacacaagtcaagacctttgg

SEQ ID NO: 390946 - DNA, 33 bp, Homo sapien
gacaataatatcaacagaagtcaagacctttgg

SEQ ID NO: 390947 - DNA, 33 bp, Homo sapien
gctgtttacaatttcggaggatttcacaacacc

SEQ ID NO: 390948 - DNA, 33 bp, Homo sapien
gctgtttacaatttcgtaggatttcacaacacc

SEQ ID NO: 390949 - DNA, 33 bp, Homo sapien
ttccttttttgccccaatacatacaaattaaag

SEQ ID NO: 390950 - DNA, 33 bp, Homo sapien
ttccttttttgccccagtacatacaaattaaag

SEQ ID NO: 390951 - DNA, 33 bp, Homo sapien
ggccgaggcctcaagaagacaggatattggagc

SEQ ID NO: 390952 - DNA, 33 bp, Homo sapien
ggccgaggcctcaagaggacaggatattggagc

SEQ ID NO: 390953 - DNA, 33 bp, Homo sapien
gaaaagtggaaaactgcagcaagaaagaaaaca

SEQ ID NO: 390954 - DNA, 33 bp, Homo sapien
gaaaagtggaaaactggagcaagaaagaaaaca

SEQ ID NO: 390955 - DNA, 33 bp, Homo sapien
acgtcaatgcatagaacggcctccacagcaaag

SEQ ID NO: 390956 - DNA, 33 bp, Homo sapien
acgtcaatgcatagaatggcctccacagcaaag

SEQ ID NO: 390957 - DNA, 33 bp, Homo sapien
tcctctaagcaggatcaatggacatggagctcg

SEQ ID NO: 390958 - DNA, 33 bp, Homo sapien
tcctctaagcaggatcgatggacatggagctcg

SEQ ID NO: 390959 - DNA, 33 bp, Homo sapien
aagatgatgtcacaccagagaatctgttatgag

SEQ ID NO: 390960 - DNA, 33 bp, Homo sapien
aagatgatgtcacaccggagaatctgttatgag

SEQ ID NO: 390961 - DNA, 33 bp, Homo sapien
ttagagaagatgtgaacggaagttgtgagactt

SEQ ID NO: 390962 - DNA, 33 bp, Homo sapien
ttagagaagatgtgaagggaagttgtgagactt

SEQ ID NO: 390963 - DNA, 33 bp, Homo sapien
acagtggttaagagagacagctttgaaaccaga

SEQ ID NO: 390964 - DNA, 33 bp, Homo sapien
acagtggttaagagaggcagctttgaaaccaga

SEQ ID NO: 390965 - DNA, 33 bp, Homo sapien
tcattatcaggcagaacaaatggaagctcactg

SEQ ID NO: 390966 - DNA, 33 bp, Homo sapien
tcattatcaggcagaagaaatggaagctcactg

SEQ ID NO: 390967 - DNA, 33 bp, Homo sapien
gtaactgcaagggggacagagaatatcatgttt

SEQ ID NO: 390968 - DNA, 33 bp, Homo sapien
gtaactgcaagggggatagagaatatcatgttt

SEQ ID NO: 390969 - DNA, 33 bp, Homo sapien
gctaaaaaatcatgaacatggatagggaacgca

SEQ ID NO: 390970 - DNA, 33 bp, Homo sapien
gctaaaaaatcatgaagatggatagggaacgca

SEQ ID NO: 390971 - DNA, 33 bp, Homo sapien
cttggtctctgtcagagtaggtgtcatgtctag

SEQ ID NO: 390972 - DNA, 33 bp, Homo sapien
cttggtctctgtcagattaggtgtcatgtctag

SEQ ID NO: 390973 - DNA, 33 bp, Homo sapien
tcctctcaaactcagaatcacctggcaaagtgg

SEQ ID NO: 390974 - DNA, 33 bp, Homo sapien
tcctctcaaactcagactcacctggcaaagtgg

SEQ ID NO: 390975 - DNA, 33 bp, Homo sapien
gctggggccttagctacccttgtaattttccca

SEQ ID NO: 390976 - DNA, 33 bp, Homo sapien
gctggggccttagctatccttgtaattttccca

SEQ ID NO: 390977 - DNA, 33 bp, Homo sapien
catacagctttgaatgcatacattatggggtct

SEQ ID NO: 390978 - DNA, 33 bp, Homo sapien
catacagctttgaatggatacattatggggtct

SEQ ID NO: 390979 - DNA, 33 bp, Homo sapien
atccctccattgctaccagtctggctcaatcca

SEQ ID NO: 390980 - DNA, 33 bp, Homo sapien
atccctccattgctacgagtctggctcaatcca

SEQ ID NO: 390981 - DNA, 33 bp, Homo sapien
atgacaggatgaccaccggcaaacaggacctcc

SEQ ID NO: 390982 - DNA, 33 bp, Homo sapien
atgacaggatgaccactggcaaacaggacctcc

SEQ ID NO: 390983 - DNA, 33 bp, Homo sapien
aggatgagagagttcacgtaaagccaacataga

SEQ ID NO: 390984 - DNA, 33 bp, Homo sapien
aggatgagagagttcaggtaaagccaacataga

SEQ ID NO: 390985 - DNA, 33 bp, Homo sapien
gacattatgcctatgtaaaagtaaagatggagt

SEQ ID NO: 390986 - DNA, 33 bp, Homo sapien
gacattatgcctatgtgaaagtaaagatggagt

SEQ ID NO: 390987 - DNA, 33 bp, Homo sapien
gaccagtgtatccgaaacttgagtgtacagcag

SEQ ID NO: 390988 - DNA, 33 bp, Homo sapien
gaccagtgtatccgaagcttgagtgtacagcag

SEQ ID NO: 390989 - DNA, 33 bp, Homo sapien
gttagaagtacaaaaaagcataatctcaggccc

SEQ ID NO: 390990 - DNA, 33 bp, Homo sapien
gttagaagtacaaaaatgcataatctcaggccc

SEQ ID NO: 390991 - DNA, 33 bp, Homo sapien
aaactcaatttgcaataataggctaaggagatt

SEQ ID NO: 390992 - DNA, 33 bp, Homo sapien
aaactcaatttgcaattataggctaaggagatt

SEQ ID NO: 390993 - DNA, 33 bp, Homo sapien
ccctttccagcattgcacattagaagtcttaaa

SEQ ID NO: 390994 - DNA, 33 bp, Homo sapien
ccctttccagcattgcgcattagaagtcttaaa

SEQ ID NO: 390995 - DNA, 33 bp, Homo sapien
acatttgtgagtcgataacgcatttgtaagtca

SEQ ID NO: 390996 - DNA, 33 bp, Homo sapien
acatttgtgagtcgattacgcatttgtaagtca

SEQ ID NO: 390997 - DNA, 33 bp, Homo sapien
gctgtgttggggacaacgttcagaatcctcatt

SEQ ID NO: 390998 - DNA, 33 bp, Homo sapien
gctgtgttggggacaaggttcagaatcctcatt

SEQ ID NO: 390999 - DNA, 33 bp, Homo sapien
gggacatatcagagaacaaaaggtactacatga

SEQ ID NO: 391000 - DNA, 33 bp, Homo sapien
gggacatatcagagaataaaaggtactacatga

SEQ ID NO: 391001 - DNA, 33 bp, Homo sapien
ttataaggtagatagtaacatcccacattacag

SEQ ID NO: 391002 - DNA, 33 bp, Homo sapien
ttataaggtagatagtgacatcccacattacag

SEQ ID NO: 391003 - DNA, 33 bp, Homo sapien
ctttatttgtggtccccgaagaaagaagatctc

SEQ ID NO: 391004 - DNA, 33 bp, Homo sapien
ctttatttgtggtcccggaagaaagaagatctc

SEQ ID NO: 391005 - DNA, 33 bp, Homo sapien
tatctcttcttgtgccgctcatgtttaagtatc

SEQ ID NO: 391006 - DNA, 33 bp, Homo sapien
tatctcttcttgtgcctctcatgtttaagtatc

SEQ ID NO: 391007 - DNA, 33 bp, Homo sapien
ccaggtcaaaagtgtgcatctgaagtcagactg

SEQ ID NO: 391008 - DNA, 33 bp, Homo sapien
ccaggtcaaaagtgtggatctgaagtcagactg

SEQ ID NO: 391009 - DNA, 33 bp, Homo sapien
gttaagataaagaggacagttcaactagtcagg

SEQ ID NO: 391010 - DNA, 33 bp, Homo sapien
gttaagataaagaggatagttcaactagtcagg

SEQ ID NO: 391011 - DNA, 33 bp, Homo sapien
gtagaggtaattaaaaatatgactgaggtagtc

SEQ ID NO: 391012 - DNA, 33 bp, Homo sapien
gtagaggtaattaaaagtatgactgaggtagtc

SEQ ID NO: 391013 - DNA, 33 bp, Homo sapien
agtaaaagctgtgtaactggataagattaataa

SEQ ID NO: 391014 - DNA, 33 bp, Homo sapien
agtaaaagctgtgtaagtggataagattaataa

SEQ ID NO: 391015 - DNA, 33 bp, Homo sapien
ctgtcgccattcacaaatgaggtgacatggagc

SEQ ID NO: 391016 - DNA, 33 bp, Homo sapien
ctgtcgccattcacaagtgaggtgacatggagc

SEQ ID NO: 391017 - DNA, 33 bp, Homo sapien
atctccccatcttccaatgcattcaggcactat

SEQ ID NO: 391018 - DNA, 33 bp, Homo sapien
atctccccatcttccagtgcattcaggcactat

SEQ ID NO: 391019 - DNA, 33 bp, Homo sapien
attacttggcacatcacggctgcataggcatta

SEQ ID NO: 391020 - DNA, 33 bp, Homo sapien
attacttggcacatcatggctgcataggcatta

SEQ ID NO: 391021 - DNA, 33 bp, Homo sapien
tgtttatccataaagaaccctaccaatggcagg

SEQ ID NO: 391022 - DNA, 33 bp, Homo sapien
tgtttatccataaagagccctaccaatggcagg

SEQ ID NO: 391023 - DNA, 33 bp, Homo sapien
gactgggatggtgaaactctttcttgattttgg

SEQ ID NO: 391024 - DNA, 33 bp, Homo sapien
gactgggatggtgaaagtctttcttgattttgg

SEQ ID NO: 391025 - DNA, 33 bp, Homo sapien
atactctactccaaaaagaaatgtttcagggca

SEQ ID NO: 391026 - DNA, 33 bp, Homo sapien
atactctactccaaaaggaaatgtttcagggca

SEQ ID NO: 391027 - DNA, 33 bp, Homo sapien
cccagtcatttctccaagttgtagcagactaga

SEQ ID NO: 391028 - DNA, 33 bp, Homo sapien
cccagtcatttctccatgttgtagcagactaga

SEQ ID NO: 391029 - DNA, 33 bp, Homo sapien
tgacctgttttcacacacttcttcctgtacaca

SEQ ID NO: 391030 - DNA, 33 bp, Homo sapien
tgacctgttttcacacgcttcttcctgtacaca

SEQ ID NO: 391031 - DNA, 33 bp, Homo sapien
aacaagttcgggagtacggcagagaacattgcc

SEQ ID NO: 391032 - DNA, 33 bp, Homo sapien
aacaagttcgggagtatggcagagaacattgcc

SEQ ID NO: 391033 - DNA, 33 bp, Homo sapien
tgtgcctgataatgacactgcctttgtagtcca

SEQ ID NO: 391034 - DNA, 33 bp, Homo sapien
tgtgcctgataatgaccctgcctttgtagtcca

SEQ ID NO: 391035 - DNA, 33 bp, Homo sapien
tgagaggatatctagaacctagccttcagaggg

SEQ ID NO: 391036 - DNA, 33 bp, Homo sapien
tgagaggatatctagagcctagccttcagaggg

SEQ ID NO: 391037 - DNA, 33 bp, Homo sapien
gaccttggcgagctccacagttcctttaatcac

SEQ ID NO: 391038 - DNA, 33 bp, Homo sapien
gaccttggcgagctccgcagttcctttaatcac

SEQ ID NO: 391039 - DNA, 33 bp, Homo sapien
tcatgtaaatgctaaaagtaaaacctgtattaa

SEQ ID NO: 391040 - DNA, 33 bp, Homo sapien
tcatgtaaatgctaaaggtaaaacctgtattaa

SEQ ID NO: 391041 - DNA, 33 bp, Homo sapien
ctaccaaagtggaagacgtgtaacctatcccta

SEQ ID NO: 391042 - DNA, 33 bp, Homo sapien
ctaccaaagtggaagatgtgtaacctatcccta

SEQ ID NO: 391043 - DNA, 33 bp, Homo sapien
taatggaaaagaggaaatatcagctatgtaaca

SEQ ID NO: 391044 - DNA, 33 bp, Homo sapien
taatggaaaagaggaagtatcagctatgtaaca

SEQ ID NO: 391045 - DNA, 33 bp, Homo sapien
acttgagactatataaatgaaaggaggcagaag

SEQ ID NO: 391046 - DNA, 33 bp, Homo sapien
acttgagactatataactgaaaggaggcagaag

SEQ ID NO: 391047 - DNA, 33 bp, Homo sapien
tagatacagtaaaaaaactagtggctcatgcct

SEQ ID NO: 391048 - DNA, 33 bp, Homo sapien
tagatacagtaaaaaatctagtggctcatgcct

SEQ ID NO: 391049 - DNA, 33 bp, Homo sapien
aatgcttgtggaaaaaatgaatgaatactactc

SEQ ID NO: 391050 - DNA, 33 bp, Homo sapien
aatgcttgtggaaaaagtgaatgaatactactc

SEQ ID NO: 391051 - DNA, 33 bp, Homo sapien
gagccacgtgacgttacgctgtttccgtttaag

SEQ ID NO: 391052 - DNA, 33 bp, Homo sapien
gagccacgtgacgttatgctgtttccgtttaag

SEQ ID NO: 391053 - DNA, 33 bp, Homo sapien
gggcttacatccaggcaagagagtctagcggca

SEQ ID NO: 391054 - DNA, 33 bp, Homo sapien
gggcttacatccaggcgagagagtctagcggca

SEQ ID NO: 391055 - DNA, 33 bp, Homo sapien
ttctaccctacaataacactgcttttccagatt

SEQ ID NO: 391056 - DNA, 33 bp, Homo sapien
ttctaccctacaataatactgcttttccagatt

SEQ ID NO: 391057 - DNA, 33 bp, Homo sapien
cagggcaaggtcctcaatagccactctgtaggg

SEQ ID NO: 391058 - DNA, 33 bp, Homo sapien
cagggcaaggtcctcagtagccactctgtaggg

SEQ ID NO: 391059 - DNA, 33 bp, Homo sapien
tgtgtaaagttggcttaaagatgcaggtaaaat

SEQ ID NO: 391060 - DNA, 33 bp, Homo sapien
tgtgtaaagttggcttgaagatgcaggtaaaat

SEQ ID NO: 391061 - DNA, 33 bp, Homo sapien
tatttattcacttgtgcatttggcaaatgttta

SEQ ID NO: 391062 - DNA, 33 bp, Homo sapien
tatttattcacttgtgtatttggcaaatgttta

SEQ ID NO: 391063 - DNA, 33 bp, Homo sapien
gaggcagtcgtggaaaatctccaggcacgttgc

SEQ ID NO: 391064 - DNA, 33 bp, Homo sapien
gaggcagtcgtggaaagtctccaggcacgttgc

SEQ ID NO: 391065 - DNA, 33 bp, Homo sapien
ccagtaccttgtcttcaaagaagaatgaacaac

SEQ ID NO: 391066 - DNA, 33 bp, Homo sapien
ccagtaccttgtcttccaagaagaatgaacaac

SEQ ID NO: 391067 - DNA, 33 bp, Homo sapien
cctggtcttagaggccaactagaggaccacgtg

SEQ ID NO: 391068 - DNA, 33 bp, Homo sapien
cctggtcttagaggccgactagaggaccacgtg

SEQ ID NO: 391069 - DNA, 33 bp, Homo sapien
gcctgattgatcagataaacaacgaagatctgg

SEQ ID NO: 391070 - DNA, 33 bp, Homo sapien
gcctgattgatcagatgaacaacgaagatctgg

SEQ ID NO: 391071 - DNA, 33 bp, Homo sapien
aaagtgtgacctaaccagaagagatcaaagccg

SEQ ID NO: 391072 - DNA, 33 bp, Homo sapien
aaagtgtgacctaaccggaagagatcaaagccg

SEQ ID NO: 391073 - DNA, 33 bp, Homo sapien
agcaattgtattgctaccacatttggattaggg

SEQ ID NO: 391074 - DNA, 33 bp, Homo sapien
agcaattgtattgctatcacatttggattaggg

SEQ ID NO: 391075 - DNA, 33 bp, Homo sapien
aacagtggtctaggtaacaacttgaagtataca

SEQ ID NO: 391076 - DNA, 33 bp, Homo sapien
aacagtggtctaggtagcaacttgaagtataca

SEQ ID NO: 391077 - DNA, 33 bp, Homo sapien
tgataagggtgtcagaaaatgggtctccctccc

SEQ ID NO: 391078 - DNA, 33 bp, Homo sapien
tgataagggtgtcagataatgggtctccctccc

SEQ ID NO: 391079 - DNA, 33 bp, Homo sapien
gagggcattatgaatacagagatgaacaacctt

SEQ ID NO: 391080 - DNA, 33 bp, Homo sapien
gagggcattatgaatatagagatgaacaacctt

SEQ ID NO: 391081 - DNA, 33 bp, Homo sapien
atcactgtggtgcctaccggggcaagacagaaa

SEQ ID NO: 391082 - DNA, 33 bp, Homo sapien
atcactgtggtgcctatcggggcaagacagaaa

SEQ ID NO: 391083 - DNA, 33 bp, Homo sapien
ttctttttcacgagaacagaatgtggctttcat

SEQ ID NO: 391084 - DNA, 33 bp, Homo sapien
ttctttttcacgagaatagaatgtggctttcat

SEQ ID NO: 391085 - DNA, 33 bp, Homo sapien
atgtgacccaagaaaacacgtgctctaaaaggc

SEQ ID NO: 391086 - DNA, 33 bp, Homo sapien
atgtgacccaagaaaagacgtgctctaaaaggc

SEQ ID NO: 391087 - DNA, 33 bp, Homo sapien
acataagagaggagaaagcagaggaaacaacac

SEQ ID NO: 391088 - DNA, 33 bp, Homo sapien
acataagagaggagaaggcagaggaaacaacac

SEQ ID NO: 391089 - DNA, 33 bp, Homo sapien
ccaaaagaagaaaatacgtcagtcataaaaata

SEQ ID NO: 391090 - DNA, 33 bp, Homo sapien
ccaaaagaagaaaatatgtcagtcataaaaata

SEQ ID NO: 391091 - DNA, 33 bp, Homo sapien
caaagagaagctgaaacggagaaatcaccatgc

SEQ ID NO: 391092 - DNA, 33 bp, Homo sapien
caaagagaagctgaaatggagaaatcaccatgc

SEQ ID NO: 391093 - DNA, 33 bp, Homo sapien
attcattgttccaacaagcaatttgagatactg

SEQ ID NO: 391094 - DNA, 33 bp, Homo sapien
attcattgttccaacacgcaatttgagatactg

SEQ ID NO: 391095 - DNA, 33 bp, Homo sapien
agaaagaaaatacctacggactgaggtttatta

SEQ ID NO: 391096 - DNA, 33 bp, Homo sapien
agaaagaaaatacctatggactgaggtttatta

SEQ ID NO: 391097 - DNA, 33 bp, Homo sapien
agaatcccaaaacgtgaagtccaggtcataaag

SEQ ID NO: 391098 - DNA, 33 bp, Homo sapien
agaatcccaaaacgtggagtccaggtcataaag

SEQ ID NO: 391099 - DNA, 33 bp, Homo sapien
cactaaggtgaggatacattgaattatccttcg

SEQ ID NO: 391100 - DNA, 33 bp, Homo sapien
cactaaggtgaggatagattgaattatccttcg

SEQ ID NO: 391101 - DNA, 33 bp, Homo sapien
ggccacctactaatagccagcatcaattcttta

SEQ ID NO: 391102 - DNA, 33 bp, Homo sapien
ggccacctactaataggcagcatcaattcttta

SEQ ID NO: 391103 - DNA, 33 bp, Homo sapien
gagactcgggagaacacatctcgaagttgtcct

SEQ ID NO: 391104 - DNA, 33 bp, Homo sapien
gagactcgggagaacatatctcgaagttgtcct

SEQ ID NO: 391105 - DNA, 33 bp, Homo sapien
aggaacaatgtttgaactgattttcttggttgg

SEQ ID NO: 391106 - DNA, 33 bp, Homo sapien
aggaacaatgtttgaattgattttcttggttgg

SEQ ID NO: 391107 - DNA, 33 bp, Homo sapien
aatgtgaactggttgacaagcttaaaaatggat

SEQ ID NO: 391108 - DNA, 33 bp, Homo sapien
aatgtgaactggttgagaagcttaaaaatggat

SEQ ID NO: 391109 - DNA, 33 bp, Homo sapien
cgttgaagtttaaatgaaagagtgtagagtctg

SEQ ID NO: 391110 - DNA, 33 bp, Homo sapien
cgttgaagtttaaatggaagagtgtagagtctg

SEQ ID NO: 391111 - DNA, 33 bp, Homo sapien
cactgaattattaagactagaaactccacggtt

SEQ ID NO: 391112 - DNA, 33 bp, Homo sapien
cactgaattattaagattagaaactccacggtt

SEQ ID NO: 391113 - DNA, 33 bp, Homo sapien
atttcctattcatgataacctagcccatgctct

SEQ ID NO: 391114 - DNA, 33 bp, Homo sapien
atttcctattcatgatgacctagcccatgctct

SEQ ID NO: 391115 - DNA, 33 bp, Homo sapien
caccctctgcttgcaaatccagagaagtcacta

SEQ ID NO: 391116 - DNA, 33 bp, Homo sapien
caccctctgcttgcaactccagagaagtcacta

SEQ ID NO: 391117 - DNA, 33 bp, Homo sapien
atatggttgaagtcatcagtttaatcatatctg

SEQ ID NO: 391118 - DNA, 33 bp, Homo sapien
atatggttgaagtcattagtttaatcatatctg

SEQ ID NO: 391119 - DNA, 33 bp, Homo sapien
atttttcccccatagcagctatcatagttttgg

SEQ ID NO: 391120 - DNA, 33 bp, Homo sapien
atttttcccccatagccgctatcatagttttgg

SEQ ID NO: 391121 - DNA, 33 bp, Homo sapien
tagtcaaataagcataataagaaagatagtaca

SEQ ID NO: 391122 - DNA, 33 bp, Homo sapien
tagtcaaataagcatagtaagaaagatagtaca

SEQ ID NO: 391123 - DNA, 33 bp, Homo sapien
gtcttagggtactgaaagttctgagaagcccta

SEQ ID NO: 391124 - DNA, 33 bp, Homo sapien
gtcttagggtactgaaggttctgagaagcccta

SEQ ID NO: 391125 - DNA, 33 bp, Homo sapien
attcatgttcactcccactcaatccccaggtca

SEQ ID NO: 391126 - DNA, 33 bp, Homo sapien
attcatgttcactcccgctcaatccccaggtca

SEQ ID NO: 391127 - DNA, 33 bp, Homo sapien
tatgatgctttgttaccacagccgttgcaaacg

SEQ ID NO: 391128 - DNA, 33 bp, Homo sapien
tatgatgctttgttacgacagccgttgcaaacg

SEQ ID NO: 391129 - DNA, 33 bp, Homo sapien
aatgaatgaatgaatacgctcaaagaaagggag

SEQ ID NO: 391130 - DNA, 33 bp, Homo sapien
aatgaatgaatgaatatgctcaaagaaagggag

SEQ ID NO: 391131 - DNA, 33 bp, Homo sapien
cctaataagtactatgaaagggcactgctgtta

SEQ ID NO: 391132 - DNA, 33 bp, Homo sapien
cctaataagtactatggaagggcactgctgtta

SEQ ID NO: 391133 - DNA, 33 bp, Homo sapien
gaccaagctccgttaacgacatgtgaaccgaga

SEQ ID NO: 391134 - DNA, 33 bp, Homo sapien
gaccaagctccgttaatgacatgtgaaccgaga

SEQ ID NO: 391135 - DNA, 33 bp, Homo sapien
taatgaaaacgctaccacattgaatttccaata

SEQ ID NO: 391136 - DNA, 33 bp, Homo sapien
taatgaaaacgctaccgcattgaatttccaata

SEQ ID NO: 391137 - DNA, 33 bp, Homo sapien
cttcatgtcagtgctcacattggtgcttcactg

SEQ ID NO: 391138 - DNA, 33 bp, Homo sapien
cttcatgtcagtgctcgcattggtgcttcactg

SEQ ID NO: 391139 - DNA, 33 bp, Homo sapien
gaatgggtgtttgaaacgtaagacacagcacac

SEQ ID NO: 391140 - DNA, 33 bp, Homo sapien
gaatgggtgtttgaaaggtaagacacagcacac

SEQ ID NO: 391141 - DNA, 33 bp, Homo sapien
ctgatagaaacagaacagaatactcttgcatgg

SEQ ID NO: 391142 - DNA, 33 bp, Homo sapien
ctgatagaaacagaacggaatactcttgcatgg

SEQ ID NO: 391143 - DNA, 33 bp, Homo sapien
tttctgtttctctccaggtcccttgatttgtga

SEQ ID NO: 391144 - DNA, 33 bp, Homo sapien
tttctgtttctctccatgtcccttgatttgtga

SEQ ID NO: 391145 - DNA, 33 bp, Homo sapien
caggcactcagggtgacatactctgcttgccct

SEQ ID NO: 391146 - DNA, 33 bp, Homo sapien
caggcactcagggtgagatactctgcttgccct

SEQ ID NO: 391147 - DNA, 33 bp, Homo sapien
tgcaaagactgtattccgaaaagttaaggaagc

SEQ ID NO: 391148 - DNA, 33 bp, Homo sapien
tgcaaagactgtattctgaaaagttaaggaagc

SEQ ID NO: 391149 - DNA, 33 bp, Homo sapien
tattattcactatcctcacccacagaactgctt

SEQ ID NO: 391150 - DNA, 33 bp, Homo sapien
tattattcactatccttacccacagaactgctt

SEQ ID NO: 391151 - DNA, 33 bp, Homo sapien
tcaaaacaactcacaacattattattcactatc

SEQ ID NO: 391152 - DNA, 33 bp, Homo sapien
tcaaaacaactcacaatattattattcactatc

SEQ ID NO: 391153 - DNA, 33 bp, Homo sapien
tgggttaactatcatcccctaaagtgacagcca

SEQ ID NO: 391154 - DNA, 33 bp, Homo sapien
tgggttaactatcatctcctaaagtgacagcca

SEQ ID NO: 391155 - DNA, 33 bp, Homo sapien
gaatgcaagcaatttcccctctgtcttctcagt

SEQ ID NO: 391156 - DNA, 33 bp, Homo sapien
gaatgcaagcaatttctcctctgtcttctcagt

SEQ ID NO: 391157 - DNA, 33 bp, Homo sapien
tttacaactgctggaaaagacactgttacagac

SEQ ID NO: 391158 - DNA, 33 bp, Homo sapien
tttacaactgctggaagagacactgttacagac

SEQ ID NO: 391159 - DNA, 33 bp, Homo sapien
tagtgcagcaattccaaattccttataatctag

SEQ ID NO: 391160 - DNA, 33 bp, Homo sapien
tagtgcagcaattccacattccttataatctag

SEQ ID NO: 391161 - DNA, 33 bp, Homo sapien
caacagggagtcatgcaaggttgtagagaagtg

SEQ ID NO: 391162 - DNA, 33 bp, Homo sapien
caacagggagtcatgcgaggttgtagagaagtg

SEQ ID NO: 391163 - DNA, 33 bp, Homo sapien
atgctgttggagttaactgtaagtagaaagttg

SEQ ID NO: 391164 - DNA, 33 bp, Homo sapien
atgctgttggagttaattgtaagtagaaagttg

SEQ ID NO: 391165 - DNA, 33 bp, Homo sapien
cagtggtatgtgctaaggaggagatgaaataaa

SEQ ID NO: 391166 - DNA, 33 bp, Homo sapien
cagtggtatgtgctaatgaggagatgaaataaa

SEQ ID NO: 391167 - DNA, 33 bp, Homo sapien
tgtgtgatttgcataacaaggcagtaccttaaa

SEQ ID NO: 391168 - DNA, 33 bp, Homo sapien
tgtgtgatttgcataataaggcagtaccttaaa

SEQ ID NO: 391169 - DNA, 33 bp, Homo sapien
ctggccgtcagcacacagtcttatgctatttgt

SEQ ID NO: 391170 - DNA, 33 bp, Homo sapien
ctggccgtcagcacacggtcttatgctatttgt

SEQ ID NO: 391171 - DNA, 33 bp, Homo sapien
gagaaaaagcagtgagaataacccggccacaga

SEQ ID NO: 391172 - DNA, 33 bp, Homo sapien
gagaaaaagcagtgagcataacccggccacaga

SEQ ID NO: 391173 - DNA, 33 bp, Homo sapien
aacagctgtggtgtaactggaatccatcttgtg

SEQ ID NO: 391174 - DNA, 33 bp, Homo sapien
aacagctgtggtgtaattggaatccatcttgtg

SEQ ID NO: 391175 - DNA, 33 bp, Homo sapien
agccaactttgattgcacttttctaaggggagg

SEQ ID NO: 391176 - DNA, 33 bp, Homo sapien
agccaactttgattgcgcttttctaaggggagg

SEQ ID NO: 391177 - DNA, 33 bp, Homo sapien
tgtaatcggctccacaaagttacatactggtca

SEQ ID NO: 391178 - DNA, 33 bp, Homo sapien
tgtaatcggctccacacagttacatactggtca

SEQ ID NO: 391179 - DNA, 33 bp, Homo sapien
aggagcactggatgagcagttgtttgaggtaag

SEQ ID NO: 391180 - DNA, 33 bp, Homo sapien
aggagcactggatgaggagttgtttgaggtaag

SEQ ID NO: 391181 - DNA, 33 bp, Homo sapien
gacagggcagctggacaagtgaaagtgaacctg

SEQ ID NO: 391182 - DNA, 33 bp, Homo sapien
gacagggcagctggacgagtgaaagtgaacctg

SEQ ID NO: 391183 - DNA, 33 bp, Homo sapien
tgctttcacaaggagaacagtaacaaaatcccc

SEQ ID NO: 391184 - DNA, 33 bp, Homo sapien
tgctttcacaaggagatcagtaacaaaatcccc

SEQ ID NO: 391185 - DNA, 33 bp, Homo sapien
ccaaatcataacaggccaataaactttttatat

SEQ ID NO: 391186 - DNA, 33 bp, Homo sapien
ccaaatcataacaggcgaataaactttttatat

SEQ ID NO: 391187 - DNA, 33 bp, Homo sapien
ggaagggctgagtacacaagatcacattcagtt

SEQ ID NO: 391188 - DNA, 33 bp, Homo sapien
ggaagggctgagtacagaagatcacattcagtt

SEQ ID NO: 391189 - DNA, 33 bp, Homo sapien
cttcctggtttgggtaaaaatttagcaactgaa

SEQ ID NO: 391190 - DNA, 33 bp, Homo sapien
cttcctggtttgggtacaaatttagcaactgaa

SEQ ID NO: 391191 - DNA, 33 bp, Homo sapien
tatgcattcatccactaagggacatttaggcag

SEQ ID NO: 391192 - DNA, 33 bp, Homo sapien
tatgcattcatccactgagggacatttaggcag

SEQ ID NO: 391193 - DNA, 33 bp, Homo sapien
ttatatgctgcgtataagtaatactctattatg

SEQ ID NO: 391194 - DNA, 33 bp, Homo sapien
ttatatgctgcgtataggtaatactctattatg

SEQ ID NO: 391195 - DNA, 33 bp, Homo sapien
tgaatgaatgaataaacggtcgatgcttgacaa

SEQ ID NO: 391196 - DNA, 33 bp, Homo sapien
tgaatgaatgaataaatggtcgatgcttgacaa

SEQ ID NO: 391197 - DNA, 33 bp, Homo sapien
agccaaccagcacatcaatcctgaatgacccct

SEQ ID NO: 391198 - DNA, 33 bp, Homo sapien
agccaaccagcacatcgatcctgaatgacccct

SEQ ID NO: 391199 - DNA, 33 bp, Homo sapien
ctaccatagtagcctcactgtaacttgattctc

SEQ ID NO: 391200 - DNA, 33 bp, Homo sapien
ctaccatagtagcctcgctgtaacttgattctc

SEQ ID NO: 391201 - DNA, 33 bp, Homo sapien
aaggattagcaatttaccagtccagtgccagta

SEQ ID NO: 391202 - DNA, 33 bp, Homo sapien
aaggattagcaatttatcagtccagtgccagta

SEQ ID NO: 391203 - DNA, 33 bp, Homo sapien
gcacaagtgtaacaagaaaaacaggataggtat

SEQ ID NO: 391204 - DNA, 33 bp, Homo sapien
gcacaagtgtaacaagcaaaacaggataggtat

SEQ ID NO: 391205 - DNA, 33 bp, Homo sapien
tcacttcatgagctgaacttcccagacttcggg

SEQ ID NO: 391206 - DNA, 33 bp, Homo sapien
tcacttcatgagctgaccttcccagacttcggg

SEQ ID NO: 391207 - DNA, 33 bp, Homo sapien
gtgtgtgtaatttaagccaaaatgacggaccct

SEQ ID NO: 391208 - DNA, 33 bp, Homo sapien
gtgtgtgtaatttaaggcaaaatgacggaccct

SEQ ID NO: 391209 - DNA, 33 bp, Homo sapien
ccctgtgttatctttgcagatccgtggtctcag

SEQ ID NO: 391210 - DNA, 33 bp, Homo sapien
ccctgtgttatctttggagatccgtggtctcag

SEQ ID NO: 391211 - DNA, 33 bp, Homo sapien
tgcagttatcccggtgacaacgccaatcatgtt

SEQ ID NO: 391212 - DNA, 33 bp, Homo sapien
tgcagttatcccggtgtcaacgccaatcatgtt

SEQ ID NO: 391213 - DNA, 33 bp, Homo sapien
ggttcctttagctgctcacttggcaactgaact

SEQ ID NO: 391214 - DNA, 33 bp, Homo sapien
ggttcctttagctgctgacttggcaactgaact

SEQ ID NO: 391215 - DNA, 33 bp, Homo sapien
taaatcccatctcttcaagactattcaatgaga

SEQ ID NO: 391216 - DNA, 33 bp, Homo sapien
taaatcccatctcttccagactattcaatgaga

SEQ ID NO: 391217 - DNA, 33 bp, Homo sapien
catttttacgtaaacaatcagactgaggaagca

SEQ ID NO: 391218 - DNA, 33 bp, Homo sapien
catttttacgtaaacagtcagactgaggaagca

SEQ ID NO: 391219 - DNA, 33 bp, Homo sapien
atgagcgatcagtttacgttgcccaggtgaaat

SEQ ID NO: 391220 - DNA, 33 bp, Homo sapien
atgagcgatcagtttatgttgcccaggtgaaat

SEQ ID NO: 391221 - DNA, 33 bp, Homo sapien
tggcatcccggagataaatctctgccgcagaac

SEQ ID NO: 391222 - DNA, 33 bp, Homo sapien
tggcatcccggagatacatctctgccgcagaac

SEQ ID NO: 391223 - DNA, 33 bp, Homo sapien
tctgcagcctttacaacttgcgctcgttgactg

SEQ ID NO: 391224 - DNA, 33 bp, Homo sapien
tctgcagcctttacaagttgcgctcgttgactg

SEQ ID NO: 391225 - DNA, 33 bp, Homo sapien
aagagggatgtcactccaggatgcgccaacgag

SEQ ID NO: 391226 - DNA, 33 bp, Homo sapien
aagagggatgtcactctaggatgcgccaacgag

SEQ ID NO: 391227 - DNA, 33 bp, Homo sapien
gctccttaggaaccacagaagtgacacttgtca

SEQ ID NO: 391228 - DNA, 33 bp, Homo sapien
gctccttaggaaccacggaagtgacacttgtca

SEQ ID NO: 391229 - DNA, 33 bp, Homo sapien
ataaaagactctcaacactcaaacattaaaaga

SEQ ID NO: 391230 - DNA, 33 bp, Homo sapien
ataaaagactctcaactctcaaacattaaaaga

SEQ ID NO: 391231 - DNA, 33 bp, Homo sapien
ccaaatggtgcttcaactcttaggtctttgaga

SEQ ID NO: 391232 - DNA, 33 bp, Homo sapien
ccaaatggtgcttcaagtcttaggtctttgaga

SEQ ID NO: 391233 - DNA, 33 bp, Homo sapien
taatgtttagtaatccaagtcagtttgcagaag

SEQ ID NO: 391234 - DNA, 33 bp, Homo sapien
taatgtttagtaatccgagtcagtttgcagaag

SEQ ID NO: 391235 - DNA, 33 bp, Homo sapien
ttctatttggtaggaaacctggactgagtgatg

SEQ ID NO: 391236 - DNA, 33 bp, Homo sapien
ttctatttggtaggaatcctggactgagtgatg

SEQ ID NO: 391237 - DNA, 33 bp, Homo sapien
acatgtgtaatttacacgcctggatgatgaaac

SEQ ID NO: 391238 - DNA, 33 bp, Homo sapien
acatgtgtaatttacatgcctggatgatgaaac

SEQ ID NO: 391239 - DNA, 33 bp, Homo sapien
acaaacttgcgttgaaacaaagtgacccttaag

SEQ ID NO: 391240 - DNA, 33 bp, Homo sapien
acaaacttgcgttgaatcaaagtgacccttaag

SEQ ID NO: 391241 - DNA, 33 bp, Homo sapien
tttggttttacccttgaatgtttttctggcaac

SEQ ID NO: 391242 - DNA, 33 bp, Homo sapien
tttggttttacccttgcatgtttttctggcaac

SEQ ID NO: 391243 - DNA, 33 bp, Homo sapien
agagaatggatttagaacagtttcttctgacta

SEQ ID NO: 391244 - DNA, 33 bp, Homo sapien
agagaatggatttagagcagtttcttctgacta

SEQ ID NO: 391245 - DNA, 33 bp, Homo sapien
aactggagaaagcacaggtctaatctccagagc

SEQ ID NO: 391246 - DNA, 33 bp, Homo sapien
aactggagaaagcacatgtctaatctccagagc

SEQ ID NO: 391247 - DNA, 33 bp, Homo sapien
taactatggcctataccctaatgttcagataaa

SEQ ID NO: 391248 - DNA, 33 bp, Homo sapien
taactatggcctatacgctaatgttcagataaa

SEQ ID NO: 391249 - DNA, 33 bp, Homo sapien
aatgtgcaagaaaggacccaacaaggcagcttt

SEQ ID NO: 391250 - DNA, 33 bp, Homo sapien
aatgtgcaagaaaggatccaacaaggcagcttt

SEQ ID NO: 391251 - DNA, 33 bp, Homo sapien
tgccatgggtttgtaaacagttgctcaagctgc

SEQ ID NO: 391252 - DNA, 33 bp, Homo sapien
tgccatgggtttgtaagcagttgctcaagctgc

SEQ ID NO: 391253 - DNA, 33 bp, Homo sapien
cccaccttcctctgcaacagaccgcttctttgc

SEQ ID NO: 391254 - DNA, 33 bp, Homo sapien
cccaccttcctctgcagcagaccgcttctttgc

SEQ ID NO: 391255 - DNA, 33 bp, Homo sapien
ggcttttcaagaaacaataacatagtctgcttt

SEQ ID NO: 391256 - DNA, 33 bp, Homo sapien
ggcttttcaagaaacagtaacatagtctgcttt

SEQ ID NO: 391257 - DNA, 33 bp, Homo sapien
taaaacatttgagggacctaaacctacccccag

SEQ ID NO: 391258 - DNA, 33 bp, Homo sapien
taaaacatttgagggagctaaacctacccccag

SEQ ID NO: 391259 - DNA, 33 bp, Homo sapien
ccctgcctctcaaacacagacaacctggggcat

SEQ ID NO: 391260 - DNA, 33 bp, Homo sapien
ccctgcctctcaaacagagacaacctggggcat

SEQ ID NO: 391261 - DNA, 33 bp, Homo sapien
cagacatgaggcaaatgatgtcaatcctatcat

SEQ ID NO: 391262 - DNA, 33 bp, Homo sapien
cagacatgaggcaaattatgtcaatcctatcat

SEQ ID NO: 391263 - DNA, 33 bp, Homo sapien
tggaggggctgatgaaagagaaactgcccgggg

SEQ ID NO: 391264 - DNA, 33 bp, Homo sapien
tggaggggctgatgaaggagaaactgcccgggg

SEQ ID NO: 391265 - DNA, 33 bp, Homo sapien
gtggcttgaaactgcaaacaaagcagatggtaa

SEQ ID NO: 391266 - DNA, 33 bp, Homo sapien
gtggcttgaaactgcagacaaagcagatggtaa

SEQ ID NO: 391267 - DNA, 33 bp, Homo sapien
tgacccttgctaactcacacactgaccctctct

SEQ ID NO: 391268 - DNA, 33 bp, Homo sapien
tgacccttgctaactcgcacactgaccctctct

SEQ ID NO: 391269 - DNA, 33 bp, Homo sapien
acagtacttcattataacaactcaatggattac

SEQ ID NO: 391270 - DNA, 33 bp, Homo sapien
acagtacttcattatagcaactcaatggattac

SEQ ID NO: 391271 - DNA, 33 bp, Homo sapien
gacagctgagacttcacgggaggcagtgacttg

SEQ ID NO: 391272 - DNA, 33 bp, Homo sapien
gacagctgagacttcaggggaggcagtgacttg

SEQ ID NO: 391273 - DNA, 33 bp, Homo sapien
ttgctgcaaataatgacatccccaggaaagaag

SEQ ID NO: 391274 - DNA, 33 bp, Homo sapien
ttgctgcaaataatgatatccccaggaaagaag

SEQ ID NO: 391275 - DNA, 33 bp, Homo sapien
tgcttactggaacaaacagctaacccatcagac

SEQ ID NO: 391276 - DNA, 33 bp, Homo sapien
tgcttactggaacaaatagctaacccatcagac

SEQ ID NO: 391277 - DNA, 33 bp, Homo sapien
actcgagggctctacaaccatttgccgggcggg

SEQ ID NO: 391278 - DNA, 33 bp, Homo sapien
actcgagggctctacagccatttgccgggcggg

SEQ ID NO: 391279 - DNA, 33 bp, Homo sapien
atggtacacccctaccagcattatggtatcttc

SEQ ID NO: 391280 - DNA, 33 bp, Homo sapien
atggtacacccctaccggcattatggtatcttc

SEQ ID NO: 391281 - DNA, 33 bp, Homo sapien
ttatcaacttatcacacatttatttagttctca

SEQ ID NO: 391282 - DNA, 33 bp, Homo sapien
ttatcaacttatcacatatttatttagttctca

SEQ ID NO: 391283 - DNA, 33 bp, Homo sapien
tgctaaaaagttgcaacaggtgtacatatattt

SEQ ID NO: 391284 - DNA, 33 bp, Homo sapien
tgctaaaaagttgcaataggtgtacatatattt

SEQ ID NO: 391285 - DNA, 33 bp, Homo sapien
aatgtccctagaatcccccagctcagggccata

SEQ ID NO: 391286 - DNA, 33 bp, Homo sapien
aatgtccctagaatcctccagctcagggccata

SEQ ID NO: 391287 - DNA, 33 bp, Homo sapien
ctgagccagaataaaactctcagtccctgaaaa

SEQ ID NO: 391288 - DNA, 33 bp, Homo sapien
ctgagccagaataaaagtctcagtccctgaaaa

SEQ ID NO: 391289 - DNA, 33 bp, Homo sapien
atgctatagagccaaaatctgcatgaagagaga

SEQ ID NO: 391290 - DNA, 33 bp, Homo sapien
atgctatagagccaaagtctgcatgaagagaga

SEQ ID NO: 391291 - DNA, 33 bp, Homo sapien
ctgagttcctataagacagagatcagctcttag

SEQ ID NO: 391292 - DNA, 33 bp, Homo sapien
ctgagttcctataagatagagatcagctcttag

SEQ ID NO: 391293 - DNA, 33 bp, Homo sapien
ttctaccctaatgacaccttctctttggactca

SEQ ID NO: 391294 - DNA, 33 bp, Homo sapien
ttctaccctaatgacagcttctctttggactca

SEQ ID NO: 391295 - DNA, 33 bp, Homo sapien
agtgccttatcaagtgcaagactcaccacccat

SEQ ID NO: 391296 - DNA, 33 bp, Homo sapien
agtgccttatcaagtgtaagactcaccacccat

SEQ ID NO: 391297 - DNA, 33 bp, Homo sapien
ggtggctttgggtggagcctctatgggtggtga

SEQ ID NO: 391298 - DNA, 33 bp, Homo sapien
ggtggctttgggtggatcctctatgggtggtga

SEQ ID NO: 391299 - DNA, 33 bp, Homo sapien
gggacagtcaaccagacgtgtgcttccacatgt

SEQ ID NO: 391300 - DNA, 33 bp, Homo sapien
gggacagtcaaccagatgtgtgcttccacatgt

SEQ ID NO: 391301 - DNA, 33 bp, Homo sapien
gtatttaattgcatagaaagccagtattccatt

SEQ ID NO: 391302 - DNA, 33 bp, Homo sapien
gtatttaattgcatagtaagccagtattccatt

SEQ ID NO: 391303 - DNA, 33 bp, Homo sapien
tcctgttttcaatgctaaagcaggcctgtccca

SEQ ID NO: 391304 - DNA, 33 bp, Homo sapien
tcctgttttcaatgctgaagcaggcctgtccca

SEQ ID NO: 391305 - DNA, 33 bp, Homo sapien
gtgaggataaagtagacggattcttgcaagcga

SEQ ID NO: 391306 - DNA, 33 bp, Homo sapien
gtgaggataaagtagatggattcttgcaagcga

SEQ ID NO: 391307 - DNA, 33 bp, Homo sapien
accccactgtcccctacgctgcagtgccttctg

SEQ ID NO: 391308 - DNA, 33 bp, Homo sapien
accccactgtcccctatgctgcagtgccttctg

SEQ ID NO: 391309 - DNA, 33 bp, Homo sapien
tgcaacgatctcattcaaactctgtcttgtcct

SEQ ID NO: 391310 - DNA, 33 bp, Homo sapien
tgcaacgatctcattcgaactctgtcttgtcct

SEQ ID NO: 391311 - DNA, 33 bp, Homo sapien
ctagatgtgtgtgagacggttgaccttcttgca

SEQ ID NO: 391312 - DNA, 33 bp, Homo sapien
ctagatgtgtgtgagatggttgaccttcttgca

SEQ ID NO: 391313 - DNA, 33 bp, Homo sapien
gatggtaacaactggcccctgcaaactgctatg

SEQ ID NO: 391314 - DNA, 33 bp, Homo sapien
gatggtaacaactggctcctgcaaactgctatg

SEQ ID NO: 391315 - DNA, 33 bp, Homo sapien
aaaatagccagaggtaagtgaaatcaaatgaga

SEQ ID NO: 391316 - DNA, 33 bp, Homo sapien
aaaatagccagaggtaggtgaaatcaaatgaga

SEQ ID NO: 391317 - DNA, 33 bp, Homo sapien
tcaaatgagagaagtccaaccttgcaaaactga

SEQ ID NO: 391318 - DNA, 33 bp, Homo sapien
tcaaatgagagaagtctaaccttgcaaaactga

SEQ ID NO: 391319 - DNA, 33 bp, Homo sapien
ggcgaatcagacaaaaccacactcaaatcttgg

SEQ ID NO: 391320 - DNA, 33 bp, Homo sapien
ggcgaatcagacaaaagcacactcaaatcttgg

SEQ ID NO: 391321 - DNA, 33 bp, Homo sapien
agccttgcaaaggagacgatagtgagactgaag

SEQ ID NO: 391322 - DNA, 33 bp, Homo sapien
agccttgcaaaggagatgatagtgagactgaag

SEQ ID NO: 391323 - DNA, 33 bp, Homo sapien
acagtttagcccagaacgaggtatctccaagtt

SEQ ID NO: 391324 - DNA, 33 bp, Homo sapien
acagtttagcccagaaggaggtatctccaagtt

SEQ ID NO: 391325 - DNA, 33 bp, Homo sapien
tttaaaatcacaattcaatgaaaagttcaacac

SEQ ID NO: 391326 - DNA, 33 bp, Homo sapien
tttaaaatcacaattcgatgaaaagttcaacac

SEQ ID NO: 391327 - DNA, 33 bp, Homo sapien
ctgacttgccagaagacgagaaaagaatccagc

SEQ ID NO: 391328 - DNA, 33 bp, Homo sapien
ctgacttgccagaagatgagaaaagaatccagc

SEQ ID NO: 391329 - DNA, 33 bp, Homo sapien
gttcattccatacatacgctttgaccaccttct

SEQ ID NO: 391330 - DNA, 33 bp, Homo sapien
gttcattccatacatatgctttgaccaccttct

SEQ ID NO: 391331 - DNA, 33 bp, Homo sapien
tgaacactggaaatcaatacacagggctgggaa

SEQ ID NO: 391332 - DNA, 33 bp, Homo sapien
tgaacactggaaatcagtacacagggctgggaa

SEQ ID NO: 391333 - DNA, 33 bp, Homo sapien
gggttatttccatcacggagtgctcagaatcac

SEQ ID NO: 391334 - DNA, 33 bp, Homo sapien
gggttatttccatcactgagtgctcagaatcac

SEQ ID NO: 391335 - DNA, 33 bp, Homo sapien
agaccacattcactgaccttcaagtcataatgc

SEQ ID NO: 391336 - DNA, 33 bp, Homo sapien
agaccacattcactgagcttcaagtcataatgc

SEQ ID NO: 391337 - DNA, 33 bp, Homo sapien
tgacttcttgaaagtgccaatatccatgctcag

SEQ ID NO: 391338 - DNA, 33 bp, Homo sapien
tgacttcttgaaagtggcaatatccatgctcag

SEQ ID NO: 391339 - DNA, 33 bp, Homo sapien
ggctttttctaagcagcagaaatggcgcttgga

SEQ ID NO: 391340 - DNA, 33 bp, Homo sapien
ggctttttctaagcagtagaaatggcgcttgga

SEQ ID NO: 391341 - DNA, 33 bp, Homo sapien
aggtaatctaggtctaaggttaaatttgctaca

SEQ ID NO: 391342 - DNA, 33 bp, Homo sapien
aggtaatctaggtctagggttaaatttgctaca

SEQ ID NO: 391343 - DNA, 33 bp, Homo sapien
ctccctcacatcgtaaatcatgcattgtgagtg

SEQ ID NO: 391344 - DNA, 33 bp, Homo sapien
ctccctcacatcgtaagtcatgcattgtgagtg

SEQ ID NO: 391345 - DNA, 33 bp, Homo sapien
ttgcctttcatgtaggcatgaccttctgtgact

SEQ ID NO: 391346 - DNA, 33 bp, Homo sapien
ttgcctttcatgtaggtatgaccttctgtgact

SEQ ID NO: 391347 - DNA, 33 bp, Homo sapien
gagacagaactcccaactgaaggaaatacacta

SEQ ID NO: 391348 - DNA, 33 bp, Homo sapien
gagacagaactcccaattgaaggaaatacacta

SEQ ID NO: 391349 - DNA, 33 bp, Homo sapien
tttttgtcccatgatgccataattttgttgtac

SEQ ID NO: 391350 - DNA, 33 bp, Homo sapien
tttttgtcccatgatgtcataattttgttgtac

SEQ ID NO: 391351 - DNA, 33 bp, Homo sapien
actgggccgcttttgacaagttgctaagcctct

SEQ ID NO: 391352 - DNA, 33 bp, Homo sapien
actgggccgcttttgataagttgctaagcctct

SEQ ID NO: 391353 - DNA, 33 bp, Homo sapien
gaccaacttttacctaccctgacaccaaggagc

SEQ ID NO: 391354 - DNA, 33 bp, Homo sapien
gaccaacttttacctatcctgacaccaaggagc

SEQ ID NO: 391355 - DNA, 33 bp, Homo sapien
aacgagaggagacgtacgagtggggtcttgaaa

SEQ ID NO: 391356 - DNA, 33 bp, Homo sapien
aacgagaggagacgtatgagtggggtcttgaaa

SEQ ID NO: 391357 - DNA, 33 bp, Homo sapien
tggcaaagttcacataactctaggcctctcagt

SEQ ID NO: 391358 - DNA, 33 bp, Homo sapien
tggcaaagttcacatatctctaggcctctcagt

SEQ ID NO: 391359 - DNA, 33 bp, Homo sapien
ggagtctcagaaccaaccatctggaggtctttg

SEQ ID NO: 391360 - DNA, 33 bp, Homo sapien
ggagtctcagaaccaatcatctggaggtctttg

SEQ ID NO: 391361 - DNA, 33 bp, Homo sapien
gactctgaggcacaaaccaacagctacgcaaat

SEQ ID NO: 391362 - DNA, 33 bp, Homo sapien
gactctgaggcacaaagcaacagctacgcaaat

SEQ ID NO: 391363 - DNA, 33 bp, Homo sapien
ctggatcctaggtaacaaaaatccaaaaccatc

SEQ ID NO: 391364 - DNA, 33 bp, Homo sapien
ctggatcctaggtaacgaaaatccaaaaccatc

SEQ ID NO: 391365 - DNA, 33 bp, Homo sapien
gaaaggcatcaggtacactcagttagtggctgc

SEQ ID NO: 391366 - DNA, 33 bp, Homo sapien
gaaaggcatcaggtaccctcagttagtggctgc

SEQ ID NO: 391367 - DNA, 33 bp, Homo sapien
gtcctcatggagctgacgtgcagaaaggaggca

SEQ ID NO: 391368 - DNA, 33 bp, Homo sapien
gtcctcatggagctgatgtgcagaaaggaggca

SEQ ID NO: 391369 - DNA, 33 bp, Homo sapien
ctgtagggcacaagggcagaaggagggcaacct

SEQ ID NO: 391370 - DNA, 33 bp, Homo sapien
ctgtagggcacaagggtagaaggagggcaacct

SEQ ID NO: 391371 - DNA, 33 bp, Homo sapien
tgtcagctctgcattcaaagtatataggaactc

SEQ ID NO: 391372 - DNA, 33 bp, Homo sapien
tgtcagctctgcattcgaagtatataggaactc

SEQ ID NO: 391373 - DNA, 33 bp, Homo sapien
tattcatcttgatatgaaaggactcaaaactga

SEQ ID NO: 391374 - DNA, 33 bp, Homo sapien
tattcatcttgatatggaaggactcaaaactga

SEQ ID NO: 391375 - DNA, 33 bp, Homo sapien
ggttagccttgaaagacgggtaggattcggatg

SEQ ID NO: 391376 - DNA, 33 bp, Homo sapien
ggttagccttgaaagatgggtaggattcggatg

SEQ ID NO: 391377 - DNA, 33 bp, Homo sapien
aatagattcctacatacgcacttatagcagaca

SEQ ID NO: 391378 - DNA, 33 bp, Homo sapien
aatagattcctacatatgcacttatagcagaca

SEQ ID NO: 391379 - DNA, 33 bp, Homo sapien
gttgctgaacattgtccacctgatatttcatcg

SEQ ID NO: 391380 - DNA, 33 bp, Homo sapien
gttgctgaacattgtctacctgatatttcatcg

SEQ ID NO: 391381 - DNA, 33 bp, Homo sapien
aatgttcagcaactgaaagctggaccagatctt

SEQ ID NO: 391382 - DNA, 33 bp, Homo sapien
aatgttcagcaactgagagctggaccagatctt

SEQ ID NO: 391383 - DNA, 33 bp, Homo sapien
ctaaccttccaaataactcatgagccctctgaa

SEQ ID NO: 391384 - DNA, 33 bp, Homo sapien
ctaaccttccaaataattcatgagccctctgaa

SEQ ID NO: 391385 - DNA, 33 bp, Homo sapien
tgggcttagctccatcagaacagttaggacact

SEQ ID NO: 391386 - DNA, 33 bp, Homo sapien
tgggcttagctccatcggaacagttaggacact

SEQ ID NO: 391387 - DNA, 33 bp, Homo sapien
cacatatccttcatcacgcaggtgagatgtccc

SEQ ID NO: 391388 - DNA, 33 bp, Homo sapien
cacatatccttcatcatgcaggtgagatgtccc

SEQ ID NO: 391389 - DNA, 33 bp, Homo sapien
ctaatgcctccctcctcacatcttgccatcacc

SEQ ID NO: 391390 - DNA, 33 bp, Homo sapien
ctaatgcctccctcctgacatcttgccatcacc

SEQ ID NO: 391391 - DNA, 33 bp, Homo sapien
acactgtgtgcgtatacaccgtgtcccgaatat

SEQ ID NO: 391392 - DNA, 33 bp, Homo sapien
acactgtgtgcgtatataccgtgtcccgaatat

SEQ ID NO: 391393 - DNA, 33 bp, Homo sapien
gaagtgtccccactgtaaaactagaaaaatcta

SEQ ID NO: 391394 - DNA, 33 bp, Homo sapien
gaagtgtccccactgtgaaactagaaaaatcta

SEQ ID NO: 391395 - DNA, 33 bp, Homo sapien
gggagctgcagaagcagtgacaactagataaac

SEQ ID NO: 391396 - DNA, 33 bp, Homo sapien
gggagctgcagaagcattgacaactagataaac

SEQ ID NO: 391397 - DNA, 33 bp, Homo sapien
attattattgtacagacgccattttgtgaatgt

SEQ ID NO: 391398 - DNA, 33 bp, Homo sapien
attattattgtacagatgccattttgtgaatgt

SEQ ID NO: 391399 - DNA, 33 bp, Homo sapien
ttatataaagctcaaacccaggcgaaattaatc

SEQ ID NO: 391400 - DNA, 33 bp, Homo sapien
ttatataaagctcaaagccaggcgaaattaatc

SEQ ID NO: 391401 - DNA, 33 bp, Homo sapien
cggtacaatctatggccccaaattccctctagg

SEQ ID NO: 391402 - DNA, 33 bp, Homo sapien
cggtacaatctatggctccaaattccctctagg

SEQ ID NO: 391403 - DNA, 33 bp, Homo sapien
tccccaagggttagataaggaaggatttgaatt

SEQ ID NO: 391404 - DNA, 33 bp, Homo sapien
tccccaagggttagattaggaaggatttgaatt

SEQ ID NO: 391405 - DNA, 33 bp, Homo sapien
cttcctgcccttgctcacttcccctttaacctt

SEQ ID NO: 391406 - DNA, 33 bp, Homo sapien
cttcctgcccttgctctcttcccctttaacctt

SEQ ID NO: 391407 - DNA, 33 bp, Homo sapien
gggaacatatgaggaaagcccaagtcttatgct

SEQ ID NO: 391408 - DNA, 33 bp, Homo sapien
gggaacatatgaggaaggcccaagtcttatgct

SEQ ID NO: 391409 - DNA, 33 bp, Homo sapien
gcacatatttccaagacgaccactggtcctttc

SEQ ID NO: 391410 - DNA, 33 bp, Homo sapien
gcacatatttccaagatgaccactggtcctttc

SEQ ID NO: 391411 - DNA, 33 bp, Homo sapien
gtagaattggtacaggccccttgtgatgctact

SEQ ID NO: 391412 - DNA, 33 bp, Homo sapien
gtagaattggtacaggtcccttgtgatgctact

SEQ ID NO: 391413 - DNA, 33 bp, Homo sapien
ctgttgcagttgtccagtcccttttattctgcc

SEQ ID NO: 391414 - DNA, 33 bp, Homo sapien
ctgttgcagttgtccattcccttttattctgcc

SEQ ID NO: 391415 - DNA, 33 bp, Homo sapien
tatgccaagtagtataaatgtgaggataaaatt

SEQ ID NO: 391416 - DNA, 33 bp, Homo sapien
tatgccaagtagtatagatgtgaggataaaatt

SEQ ID NO: 391417 - DNA, 33 bp, Homo sapien
acatagtacaacattgcacattcacgtatataa

SEQ ID NO: 391418 - DNA, 33 bp, Homo sapien
acatagtacaacattggacattcacgtatataa

SEQ ID NO: 391419 - DNA, 33 bp, Homo sapien
tctctttgcaatcacacaggaagtactgctctc

SEQ ID NO: 391420 - DNA, 33 bp, Homo sapien
tctctttgcaatcacataggaagtactgctctc

SEQ ID NO: 391421 - DNA, 33 bp, Homo sapien
catctctttgaagaacaaaggcactgcaggacc

SEQ ID NO: 391422 - DNA, 33 bp, Homo sapien
catctctttgaagaacgaaggcactgcaggacc

SEQ ID NO: 391423 - DNA, 33 bp, Homo sapien
atttcgactttacacacaggtgcccctacttac

SEQ ID NO: 391424 - DNA, 33 bp, Homo sapien
atttcgactttacacagaggtgcccctacttac

SEQ ID NO: 391425 - DNA, 33 bp, Homo sapien
cgaaattattcccacaatgaaactctggatctc

SEQ ID NO: 391426 - DNA, 33 bp, Homo sapien
cgaaattattcccacagtgaaactctggatctc

SEQ ID NO: 391427 - DNA, 33 bp, Homo sapien
agataatcacgtcacactcatggcaagaaaaaa

SEQ ID NO: 391428 - DNA, 33 bp, Homo sapien
agataatcacgtcacattcatggcaagaaaaaa

SEQ ID NO: 391429 - DNA, 33 bp, Homo sapien
caggatcaggtcatacgaaactgaaatgttgtt

SEQ ID NO: 391430 - DNA, 33 bp, Homo sapien
caggatcaggtcatactaaactgaaatgttgtt

SEQ ID NO: 391431 - DNA, 33 bp, Homo sapien
tagagaaagcagatcaatgagagcctggattgc

SEQ ID NO: 391432 - DNA, 33 bp, Homo sapien
tagagaaagcagatcagtgagagcctggattgc

SEQ ID NO: 391433 - DNA, 33 bp, Homo sapien
aacaaaatactggtacactttaagacattctag

SEQ ID NO: 391434 - DNA, 33 bp, Homo sapien
aacaaaatactggtacgctttaagacattctag

SEQ ID NO: 391435 - DNA, 33 bp, Homo sapien
tctacagtaatagttgccaaagcccttcctcac

SEQ ID NO: 391436 - DNA, 33 bp, Homo sapien
tctacagtaatagttggcaaagcccttcctcac

SEQ ID NO: 391437 - DNA, 33 bp, Homo sapien
gaactgtaagagaatacattcgtgttgtttgca

SEQ ID NO: 391438 - DNA, 33 bp, Homo sapien
gaactgtaagagaatagattcgtgttgtttgca

SEQ ID NO: 391439 - DNA, 33 bp, Homo sapien
agctttttaccatataaccattcattctgtctt

SEQ ID NO: 391440 - DNA, 33 bp, Homo sapien
agctttttaccatatagccattcattctgtctt

SEQ ID NO: 391441 - DNA, 33 bp, Homo sapien
gccagaaaaatgacagccaaggtataataaaca

SEQ ID NO: 391442 - DNA, 33 bp, Homo sapien
gccagaaaaatgacaggcaaggtataataaaca

SEQ ID NO: 391443 - DNA, 33 bp, Homo sapien
atggaggtcatacatgcatacaaagaggtgtac

SEQ ID NO: 391444 - DNA, 33 bp, Homo sapien
atggaggtcatacatggatacaaagaggtgtac

SEQ ID NO: 391445 - DNA, 33 bp, Homo sapien
caagaaggtaatcttaaaacaagcactaacttt

SEQ ID NO: 391446 - DNA, 33 bp, Homo sapien
caagaaggtaatcttagaacaagcactaacttt

SEQ ID NO: 391447 - DNA, 33 bp, Homo sapien
tgtacgacggaccccaaatggtctgtcaaaaat

SEQ ID NO: 391448 - DNA, 33 bp, Homo sapien
tgtacgacggaccccacatggtctgtcaaaaat

SEQ ID NO: 391449 - DNA, 33 bp, Homo sapien
cccgggagacgcgtgacagtgccctgtaaagcc

SEQ ID NO: 391450 - DNA, 33 bp, Homo sapien
cccgggagacgcgtgatagtgccctgtaaagcc

SEQ ID NO: 391451 - DNA, 33 bp, Homo sapien
atgaaccctggagccacatagcctgaggtttgg

SEQ ID NO: 391452 - DNA, 33 bp, Homo sapien
atgaaccctggagccagatagcctgaggtttgg

SEQ ID NO: 391453 - DNA, 33 bp, Homo sapien
agatgagacagggagacggctaaatagggacga

SEQ ID NO: 391454 - DNA, 33 bp, Homo sapien
agatgagacagggagatggctaaatagggacga

SEQ ID NO: 391455 - DNA, 33 bp, Homo sapien
gccacctatcatagtacagatccaagaaaggag

SEQ ID NO: 391456 - DNA, 33 bp, Homo sapien
gccacctatcatagtatagatccaagaaaggag

SEQ ID NO: 391457 - DNA, 33 bp, Homo sapien
ttgcccacagccataaaacaggtttgctcagag

SEQ ID NO: 391458 - DNA, 33 bp, Homo sapien
ttgcccacagccataagacaggtttgctcagag

SEQ ID NO: 391459 - DNA, 33 bp, Homo sapien
tgatctaataatggtcaaattctgtgtctctac

SEQ ID NO: 391460 - DNA, 33 bp, Homo sapien
tgatctaataatggtctaattctgtgtctctac

SEQ ID NO: 391461 - DNA, 33 bp, Homo sapien
gtgaatgagatgatacaggtgaaagcagctagc

SEQ ID NO: 391462 - DNA, 33 bp, Homo sapien
gtgaatgagatgatacgggtgaaagcagctagc

SEQ ID NO: 391463 - DNA, 33 bp, Homo sapien
ttaatacagcataaaaacaaattacgacctcca

SEQ ID NO: 391464 - DNA, 33 bp, Homo sapien
ttaatacagcataaaagcaaattacgacctcca

SEQ ID NO: 391465 - DNA, 33 bp, Homo sapien
tctatgggctgcctgcagaagagaggagtagag

SEQ ID NO: 391466 - DNA, 33 bp, Homo sapien
tctatgggctgcctgcggaagagaggagtagag

SEQ ID NO: 391467 - DNA, 33 bp, Homo sapien
ccccacgtagcaagcacaaccatcccctctgac

SEQ ID NO: 391468 - DNA, 33 bp, Homo sapien
ccccacgtagcaagcagaaccatcccctctgac

SEQ ID NO: 391469 - DNA, 33 bp, Homo sapien
ggattccttatgctgacgtgcaatttgatgcca

SEQ ID NO: 391470 - DNA, 33 bp, Homo sapien
ggattccttatgctgatgtgcaatttgatgcca

SEQ ID NO: 391471 - DNA, 33 bp, Homo sapien
cactttcagagcttccagcaactcagagaagac

SEQ ID NO: 391472 - DNA, 33 bp, Homo sapien
cactttcagagcttccggcaactcagagaagac

SEQ ID NO: 391473 - DNA, 33 bp, Homo sapien
attactgagcacccaaaagattctgcagttcca

SEQ ID NO: 391474 - DNA, 33 bp, Homo sapien
attactgagcacccaagagattctgcagttcca

SEQ ID NO: 391475 - DNA, 33 bp, Homo sapien
tctaaagagaggaaccacacatgcaaagacgca

SEQ ID NO: 391476 - DNA, 33 bp, Homo sapien
tctaaagagaggaaccgcacatgcaaagacgca

SEQ ID NO: 391477 - DNA, 33 bp, Homo sapien
ttattgtgattatagaagaagatgcctcggttc

SEQ ID NO: 391478 - DNA, 33 bp, Homo sapien
ttattgtgattatagaggaagatgcctcggttc

SEQ ID NO: 391479 - DNA, 33 bp, Homo sapien
tgcaagaagcagaggacggaaggacaacaggga

SEQ ID NO: 391480 - DNA, 33 bp, Homo sapien
tgcaagaagcagaggagggaaggacaacaggga

SEQ ID NO: 391481 - DNA, 33 bp, Homo sapien
taataaacttgccttcactttatggatttgcct

SEQ ID NO: 391482 - DNA, 33 bp, Homo sapien
taataaacttgccttcgctttatggatttgcct

SEQ ID NO: 391483 - DNA, 33 bp, Homo sapien
agcaggaggtgcgccccatggacttgaacccaa

SEQ ID NO: 391484 - DNA, 33 bp, Homo sapien
agcaggaggtgcgcccgatggacttgaacccaa

SEQ ID NO: 391485 - DNA, 33 bp, Homo sapien
tacttagggtgaggaaatcgataatgagccaat

SEQ ID NO: 391486 - DNA, 33 bp, Homo sapien
tacttagggtgaggaagtcgataatgagccaat

SEQ ID NO: 391487 - DNA, 33 bp, Homo sapien
attcagcactgggctacggaccctgccttgtcc

SEQ ID NO: 391488 - DNA, 33 bp, Homo sapien
attcagcactgggctatggaccctgccttgtcc

SEQ ID NO: 391489 - DNA, 33 bp, Homo sapien
aagaagacatagtcgcccatgtcctgcaagacc

SEQ ID NO: 391490 - DNA, 33 bp, Homo sapien
aagaagacatagtcgctcatgtcctgcaagacc

SEQ ID NO: 391491 - DNA, 33 bp, Homo sapien
gcaaacagaactgtccgctttcatggatgcctg

SEQ ID NO: 391492 - DNA, 33 bp, Homo sapien
gcaaacagaactgtcctctttcatggatgcctg

SEQ ID NO: 391493 - DNA, 33 bp, Homo sapien
agcttctcaaagccaaaaccatatcttagccat

SEQ ID NO: 391494 - DNA, 33 bp, Homo sapien
agcttctcaaagccaagaccatatcttagccat

SEQ ID NO: 391495 - DNA, 33 bp, Homo sapien
cttagccatcactctacccttcccggaccttgc

SEQ ID NO: 391496 - DNA, 33 bp, Homo sapien
cttagccatcactctatccttcccggaccttgc

SEQ ID NO: 391497 - DNA, 33 bp, Homo sapien
ttaacaccggcattacaagagaagcacagaacc

SEQ ID NO: 391498 - DNA, 33 bp, Homo sapien
ttaacaccggcattaccagagaagcacagaacc

SEQ ID NO: 391499 - DNA, 33 bp, Homo sapien
tgatgaatttgtgccacagaaaattttttgcta

SEQ ID NO: 391500 - DNA, 33 bp, Homo sapien
tgatgaatttgtgccatagaaaattttttgcta

SEQ ID NO: 391501 - DNA, 33 bp, Homo sapien
agaaccatcttgatacactatcacctacacaag

SEQ ID NO: 391502 - DNA, 33 bp, Homo sapien
agaaccatcttgataccctatcacctacacaag

SEQ ID NO: 391503 - DNA, 33 bp, Homo sapien
gaacatttggggcgcaatgactccgtgccagct

SEQ ID NO: 391504 - DNA, 33 bp, Homo sapien
gaacatttggggcgcattgactccgtgccagct

SEQ ID NO: 391505 - DNA, 33 bp, Homo sapien
tagcaaggtttgacaaccattagtccagagcag

SEQ ID NO: 391506 - DNA, 33 bp, Homo sapien
tagcaaggtttgacaagcattagtccagagcag

SEQ ID NO: 391507 - DNA, 33 bp, Homo sapien
atcagatcccagttgacagtttataggtacaga

SEQ ID NO: 391508 - DNA, 33 bp, Homo sapien
atcagatcccagttgatagtttataggtacaga

SEQ ID NO: 391509 - DNA, 33 bp, Homo sapien
tttaagcactagggcacgaaagaggccacaaat

SEQ ID NO: 391510 - DNA, 33 bp, Homo sapien
tttaagcactagggcatgaaagaggccacaaat

SEQ ID NO: 391511 - DNA, 33 bp, Homo sapien
gcttcacagagatcccaaggaaagaaaagacag

SEQ ID NO: 391512 - DNA, 33 bp, Homo sapien
gcttcacagagatcccgaggaaagaaaagacag

SEQ ID NO: 391513 - DNA, 33 bp, Homo sapien
actcagcgataacacacggatccttgagaccaa

SEQ ID NO: 391514 - DNA, 33 bp, Homo sapien
actcagcgataacacatggatccttgagaccaa

SEQ ID NO: 391515 - DNA, 33 bp, Homo sapien
attctgttttatgagcacaaaggaacacctatt

SEQ ID NO: 391516 - DNA, 33 bp, Homo sapien
attctgttttatgagcgcaaaggaacacctatt

SEQ ID NO: 391517 - DNA, 33 bp, Homo sapien
atgtcagtcatccccaagtcactaggaactagc

SEQ ID NO: 391518 - DNA, 33 bp, Homo sapien
atgtcagtcatccccaggtcactaggaactagc

SEQ ID NO: 391519 - DNA, 33 bp, Homo sapien
cctcctctgcctgtgaacgccgtctgacgggtc

SEQ ID NO: 391520 - DNA, 33 bp, Homo sapien
cctcctctgcctgtgagcgccgtctgacgggtc

SEQ ID NO: 391521 - DNA, 33 bp, Homo sapien
atctcaggcacgatcccatgagctcatgaatat

SEQ ID NO: 391522 - DNA, 33 bp, Homo sapien
atctcaggcacgatccgatgagctcatgaatat

SEQ ID NO: 391523 - DNA, 33 bp, Homo sapien
catgggagccagttcacggcatgccatctgcca

SEQ ID NO: 391524 - DNA, 33 bp, Homo sapien
catgggagccagttcagggcatgccatctgcca

SEQ ID NO: 391525 - DNA, 33 bp, Homo sapien
gtggagttctgtggagcacaggcctagtttgag

SEQ ID NO: 391526 - DNA, 33 bp, Homo sapien
gtggagttctgtggaggacaggcctagtttgag

SEQ ID NO: 391527 - DNA, 33 bp, Homo sapien
gattgcaatatagaaacatcatcatcctcttgc

SEQ ID NO: 391528 - DNA, 33 bp, Homo sapien
gattgcaatatagaaagatcatcatcctcttgc

SEQ ID NO: 391529 - DNA, 33 bp, Homo sapien
ggtctcaggtgattacaatgggtagccagaacc

SEQ ID NO: 391530 - DNA, 33 bp, Homo sapien
ggtctcaggtgattacgatgggtagccagaacc

SEQ ID NO: 391531 - DNA, 33 bp, Homo sapien
cagcgtggaactcatccctcagcctgtgcctac

SEQ ID NO: 391532 - DNA, 33 bp, Homo sapien
cagcgtggaactcatcgctcagcctgtgcctac

SEQ ID NO: 391533 - DNA, 33 bp, Homo sapien
tcagcaaacatgcagtcaatccgtggaactgag

SEQ ID NO: 391534 - DNA, 33 bp, Homo sapien
tcagcaaacatgcagtgaatccgtggaactgag

SEQ ID NO: 391535 - DNA, 33 bp, Homo sapien
tcctcagcgacaacacaaacccagtgtgctcag

SEQ ID NO: 391536 - DNA, 33 bp, Homo sapien
tcctcagcgacaacacgaacccagtgtgctcag

SEQ ID NO: 391537 - DNA, 33 bp, Homo sapien
ttcattgccccgttgaaggaacagccacaggtt

SEQ ID NO: 391538 - DNA, 33 bp, Homo sapien
ttcattgccccgttgacggaacagccacaggtt

SEQ ID NO: 391539 - DNA, 33 bp, Homo sapien
cacagccgaaaatgacagagcccagtcccagct

SEQ ID NO: 391540 - DNA, 33 bp, Homo sapien
cacagccgaaaatgacggagcccagtcccagct

SEQ ID NO: 391541 - DNA, 33 bp, Homo sapien
gcaatgaatgaacgcacagttttggaagatgct

SEQ ID NO: 391542 - DNA, 33 bp, Homo sapien
gcaatgaatgaacgcagagttttggaagatgct

SEQ ID NO: 391543 - DNA, 33 bp, Homo sapien
aggaccaggcaatcgccccagtctcacccaagc

SEQ ID NO: 391544 - DNA, 33 bp, Homo sapien
aggaccaggcaatcgctccagtctcacccaagc

SEQ ID NO: 391545 - DNA, 33 bp, Homo sapien
acagaacacagaaagcaacaacttcgatttcac

SEQ ID NO: 391546 - DNA, 33 bp, Homo sapien
acagaacacagaaagccacaacttcgatttcac

SEQ ID NO: 391547 - DNA, 33 bp, Homo sapien
gtagcatttccaacgcagaggctagaggtttag

SEQ ID NO: 391548 - DNA, 33 bp, Homo sapien
gtagcatttccaacgcggaggctagaggtttag

SEQ ID NO: 391549 - DNA, 33 bp, Homo sapien
ctcctgccgcagaacacatagtatggctgcgca

SEQ ID NO: 391550 - DNA, 33 bp, Homo sapien
ctcctgccgcagaacagatagtatggctgcgca

SEQ ID NO: 391551 - DNA, 33 bp, Homo sapien
acacagggcagccacacgtaaagcacgccagct

SEQ ID NO: 391552 - DNA, 33 bp, Homo sapien
acacagggcagccacaggtaaagcacgccagct

SEQ ID NO: 391553 - DNA, 33 bp, Homo sapien
caccagggtttactgacgcaagcatgccagcgg

SEQ ID NO: 391554 - DNA, 33 bp, Homo sapien
caccagggtttactgaggcaagcatgccagcgg

SEQ ID NO: 391555 - DNA, 33 bp, Homo sapien
ttccctgtgagctataaatgggcagcgggatcc

SEQ ID NO: 391556 - DNA, 33 bp, Homo sapien
ttccctgtgagctatatatgggcagcgggatcc

SEQ ID NO: 391557 - DNA, 33 bp, Homo sapien
ctgccccacccacaagactggtacattccaacc

SEQ ID NO: 391558 - DNA, 33 bp, Homo sapien
ctgccccacccacaaggctggtacattccaacc

SEQ ID NO: 391559 - DNA, 33 bp, Homo sapien
cttcagattaacccataaagatcagaatcaggt

SEQ ID NO: 391560 - DNA, 33 bp, Homo sapien
cttcagattaacccattaagatcagaatcaggt

SEQ ID NO: 391561 - DNA, 33 bp, Homo sapien
accctatgttcaagggccacagcatcttcccag

SEQ ID NO: 391562 - DNA, 33 bp, Homo sapien
accctatgttcaagggtcacagcatcttcccag

SEQ ID NO: 391563 - DNA, 33 bp, Homo sapien
agacgaggtttgcttccagggcctgggtaaaga

SEQ ID NO: 391564 - DNA, 33 bp, Homo sapien
agacgaggtttgcttctagggcctgggtaaaga

SEQ ID NO: 391565 - DNA, 33 bp, Homo sapien
aggaggcgggcccggaggctagtgaggacagag

SEQ ID NO: 391566 - DNA, 33 bp, Homo sapien
aggaggcgggcccggatgctagtgaggacagag

SEQ ID NO: 391567 - DNA, 33 bp, Homo sapien
acctctgcctaagtcactagggcatgttgagct

SEQ ID NO: 391568 - DNA, 33 bp, Homo sapien
acctctgcctaagtcattagggcatgttgagct

SEQ ID NO: 391569 - DNA, 33 bp, Homo sapien
accaactcagaggtccaaagtccagagtgtggt

SEQ ID NO: 391570 - DNA, 33 bp, Homo sapien
accaactcagaggtccgaagtccagagtgtggt

SEQ ID NO: 391571 - DNA, 33 bp, Homo sapien
gtcagagcacacccgaacaaaggagtacaagag

SEQ ID NO: 391572 - DNA, 33 bp, Homo sapien
gtcagagcacacccgagcaaaggagtacaagag

SEQ ID NO: 391573 - DNA, 33 bp, Homo sapien
aacaatgaacaccacaagaagccacataggtgc

SEQ ID NO: 391574 - DNA, 33 bp, Homo sapien
aacaatgaacaccacaggaagccacataggtgc

SEQ ID NO: 391575 - DNA, 33 bp, Homo sapien
aaaccctggtgtagaagtgtttatcttgtaact

SEQ ID NO: 391576 - DNA, 33 bp, Homo sapien
aaaccctggtgtagaattgtttatcttgtaact

SEQ ID NO: 391577 - DNA, 33 bp, Homo sapien
ggctgtcattccagaccatgaggatgggttggt

SEQ ID NO: 391578 - DNA, 33 bp, Homo sapien
ggctgtcattccagacgatgaggatgggttggt

SEQ ID NO: 391579 - DNA, 33 bp, Homo sapien
gggcaggaaaaccgcaataggaactcccaactt

SEQ ID NO: 391580 - DNA, 33 bp, Homo sapien
gggcaggaaaaccgcagtaggaactcccaactt

SEQ ID NO: 391581 - DNA, 33 bp, Homo sapien
tgccactgggaaatccaatctcaagcatatcca

SEQ ID NO: 391582 - DNA, 33 bp, Homo sapien
tgccactgggaaatccgatctcaagcatatcca

SEQ ID NO: 391583 - DNA, 33 bp, Homo sapien
ggacaagtctgcaataacctatgacccctaggc

SEQ ID NO: 391584 - DNA, 33 bp, Homo sapien
ggacaagtctgcaatatcctatgacccctaggc

SEQ ID NO: 391585 - DNA, 33 bp, Homo sapien
ccaaagatctcaagcacccgggaacgctgggtt

SEQ ID NO: 391586 - DNA, 33 bp, Homo sapien
ccaaagatctcaagcatccgggaacgctgggtt

SEQ ID NO: 391587 - DNA, 33 bp, Homo sapien
gggatgcctctctgtagggaaggccaagcttct

SEQ ID NO: 391588 - DNA, 33 bp, Homo sapien
gggatgcctctctgtatggaaggccaagcttct

SEQ ID NO: 391589 - DNA, 33 bp, Homo sapien
gatgaggatacgggccaccccaggtctgggttg

SEQ ID NO: 391590 - DNA, 33 bp, Homo sapien
gatgaggatacgggccgccccaggtctgggttg

SEQ ID NO: 391591 - DNA, 33 bp, Homo sapien
caagctgcctgtgcgcccgatacggatcaatca

SEQ ID NO: 391592 - DNA, 33 bp, Homo sapien
caagctgcctgtgcgcgcgatacggatcaatca

SEQ ID NO: 391593 - DNA, 33 bp, Homo sapien
ccggccaaagagcttaccacaaaatgcagcaat

SEQ ID NO: 391594 - DNA, 33 bp, Homo sapien
ccggccaaagagcttagcacaaaatgcagcaat

SEQ ID NO: 391595 - DNA, 33 bp, Homo sapien
tctgcacacaggagtccagctttgtttttgtgt

SEQ ID NO: 391596 - DNA, 33 bp, Homo sapien
tctgcacacaggagtcgagctttgtttttgtgt

SEQ ID NO: 391597 - DNA, 33 bp, Homo sapien
gaagctgtgtatcagacgccaccagcgcccacg

SEQ ID NO: 391598 - DNA, 33 bp, Homo sapien
gaagctgtgtatcagatgccaccagcgcccacg

SEQ ID NO: 391599 - DNA, 33 bp, Homo sapien
ccctttttccaaataacgttaacagtcacaggt

SEQ ID NO: 391600 - DNA, 33 bp, Homo sapien
ccctttttccaaataaggttaacagtcacaggt

SEQ ID NO: 391601 - DNA, 33 bp, Homo sapien
tggcacaacattgtgaatacttaaagccactgg

SEQ ID NO: 391602 - DNA, 33 bp, Homo sapien
tggcacaacattgtgagtacttaaagccactgg

SEQ ID NO: 391603 - DNA, 33 bp, Homo sapien
ccaccagcagtcacccacgttcatcacctgccc

SEQ ID NO: 391604 - DNA, 33 bp, Homo sapien
ccaccagcagtcacccgcgttcatcacctgccc

SEQ ID NO: 391605 - DNA, 33 bp, Homo sapien
gacagtgttaagttacagaatcaatgacattta

SEQ ID NO: 391606 - DNA, 33 bp, Homo sapien
gacagtgttaagttacggaatcaatgacattta

SEQ ID NO: 391607 - DNA, 33 bp, Homo sapien
actcagaatatgcgtcaatctaggtctctgggg

SEQ ID NO: 391608 - DNA, 33 bp, Homo sapien
actcagaatatgcgtcgatctaggtctctgggg

SEQ ID NO: 391609 - DNA, 33 bp, Homo sapien
ccctattctcataagacatgcattctcagtggc

SEQ ID NO: 391610 - DNA, 33 bp, Homo sapien
ccctattctcataagatatgcattctcagtggc

SEQ ID NO: 391611 - DNA, 33 bp, Homo sapien
gtggtcagggccctgccgactcgaagcccagct

SEQ ID NO: 391612 - DNA, 33 bp, Homo sapien
gtggtcagggccctgcggactcgaagcccagct

SEQ ID NO: 391613 - DNA, 33 bp, Homo sapien
acctattaaacacagaaccagttactgatcaaa

SEQ ID NO: 391614 - DNA, 33 bp, Homo sapien
acctattaaacacagatccagttactgatcaaa

SEQ ID NO: 391615 - DNA, 33 bp, Homo sapien
aaacttgcatgacagaaacgaatcttgtacatt

SEQ ID NO: 391616 - DNA, 33 bp, Homo sapien
aaacttgcatgacagagacgaatcttgtacatt

SEQ ID NO: 391617 - DNA, 33 bp, Homo sapien
ttgttaaatgtctgagaagtgaatcccagtttt

SEQ ID NO: 391618 - DNA, 33 bp, Homo sapien
ttgttaaatgtctgaggagtgaatcccagtttt

SEQ ID NO: 391619 - DNA, 33 bp, Homo sapien
ccctaatggaaacttgaacttgagtctctagag

SEQ ID NO: 391620 - DNA, 33 bp, Homo sapien
ccctaatggaaacttggacttgagtctctagag

SEQ ID NO: 391621 - DNA, 33 bp, Homo sapien
caaatgccattaaaaacctggctggtgatgaag

SEQ ID NO: 391622 - DNA, 33 bp, Homo sapien
caaatgccattaaaaagctggctggtgatgaag

SEQ ID NO: 391623 - DNA, 33 bp, Homo sapien
aaaataagggaacgcaacaagaaatcattgctg

SEQ ID NO: 391624 - DNA, 33 bp, Homo sapien
aaaataagggaacgcatcaagaaatcattgctg

SEQ ID NO: 391625 - DNA, 33 bp, Homo sapien
actccgtagcttcttaccagagttgtgagttta

SEQ ID NO: 391626 - DNA, 33 bp, Homo sapien
actccgtagcttcttatcagagttgtgagttta

SEQ ID NO: 391627 - DNA, 33 bp, Homo sapien
ggactgttttgtcacacgctggctgccgttctg

SEQ ID NO: 391628 - DNA, 33 bp, Homo sapien
ggactgttttgtcacaggctggctgccgttctg

SEQ ID NO: 391629 - DNA, 33 bp, Homo sapien
gcagcccaactttgcaccatatctagtgtgttg

SEQ ID NO: 391630 - DNA, 33 bp, Homo sapien
gcagcccaactttgcatcatatctagtgtgttg

SEQ ID NO: 391631 - DNA, 33 bp, Homo sapien
caactgaaacggttctgaattgaaattcctctg

SEQ ID NO: 391632 - DNA, 33 bp, Homo sapien
caactgaaacggttcttaattgaaattcctctg

SEQ ID NO: 391633 - DNA, 33 bp, Homo sapien
taactttataagctacagatgttaaatggtgag

SEQ ID NO: 391634 - DNA, 33 bp, Homo sapien
taactttataagctacggatgttaaatggtgag

SEQ ID NO: 391635 - DNA, 33 bp, Homo sapien
aaatgaaccactgaaacggaacacatacaagaa

SEQ ID NO: 391636 - DNA, 33 bp, Homo sapien
aaatgaaccactgaaatggaacacatacaagaa

SEQ ID NO: 391637 - DNA, 33 bp, Homo sapien
gtcagagaaagataaaaggagcaactgcaacat

SEQ ID NO: 391638 - DNA, 33 bp, Homo sapien
gtcagagaaagataaacggagcaactgcaacat

SEQ ID NO: 391639 - DNA, 33 bp, Homo sapien
attcacactcccgccaacagcaggttcgtgcca

SEQ ID NO: 391640 - DNA, 33 bp, Homo sapien
attcacactcccgccagcagcaggttcgtgcca

SEQ ID NO: 391641 - DNA, 33 bp, Homo sapien
ccaatttttggtatagcactaaacgcacaatga

SEQ ID NO: 391642 - DNA, 33 bp, Homo sapien
ccaatttttggtataggactaaacgcacaatga

SEQ ID NO: 391643 - DNA, 33 bp, Homo sapien
cttttaaaaaatttctcaagccaggtgtagtgg

SEQ ID NO: 391644 - DNA, 33 bp, Homo sapien
cttttaaaaaatttctgaagccaggtgtagtgg

SEQ ID NO: 391645 - DNA, 33 bp, Homo sapien
taaagactgggtttgacagcttagacttgccta

SEQ ID NO: 391646 - DNA, 33 bp, Homo sapien
taaagactgggtttgagagcttagacttgccta

SEQ ID NO: 391647 - DNA, 33 bp, Homo sapien
gagctctgcccggaaaagccaagtggagaggag

SEQ ID NO: 391648 - DNA, 33 bp, Homo sapien
gagctctgcccggaaaggccaagtggagaggag

SEQ ID NO: 391649 - DNA, 33 bp, Homo sapien
tggaggttaaaggagacgacggagatggagagc

SEQ ID NO: 391650 - DNA, 33 bp, Homo sapien
tggaggttaaaggagaggacggagatggagagc

SEQ ID NO: 391651 - DNA, 33 bp, Homo sapien
gacctttctcttactacgtcatcagaaaccaga

SEQ ID NO: 391652 - DNA, 33 bp, Homo sapien
gacctttctcttactatgtcatcagaaaccaga

SEQ ID NO: 391653 - DNA, 33 bp, Homo sapien
agggagacagaagagtaaaaaccagagagatgg

SEQ ID NO: 391654 - DNA, 33 bp, Homo sapien
agggagacagaagagtcaaaaccagagagatgg

SEQ ID NO: 391655 - DNA, 33 bp, Homo sapien
ctaatttaaaaaggaaacaacagctgcgtacac

SEQ ID NO: 391656 - DNA, 33 bp, Homo sapien
ctaatttaaaaaggaaccaacagctgcgtacac

SEQ ID NO: 391657 - DNA, 33 bp, Homo sapien
atgtgattaatgaacaccaaaaggctcattgca

SEQ ID NO: 391658 - DNA, 33 bp, Homo sapien
atgtgattaatgaacatcaaaaggctcattgca

SEQ ID NO: 391659 - DNA, 33 bp, Homo sapien
tcatcatcaccccgcaataatgaacaagctgag

SEQ ID NO: 391660 - DNA, 33 bp, Homo sapien
tcatcatcaccccgcagtaatgaacaagctgag

SEQ ID NO: 391661 - DNA, 33 bp, Homo sapien
aagagacaagtaaccacgaggaagaaagcaggg

SEQ ID NO: 391662 - DNA, 33 bp, Homo sapien
aagagacaagtaaccatgaggaagaaagcaggg

SEQ ID NO: 391663 - DNA, 33 bp, Homo sapien
cacaagacctttcacacgttatttcatttcatc

SEQ ID NO: 391664 - DNA, 33 bp, Homo sapien
cacaagacctttcacatgttatttcatttcatc

SEQ ID NO: 391665 - DNA, 33 bp, Homo sapien
ttctgcagtgggttaccaatacatccttgaacc

SEQ ID NO: 391666 - DNA, 33 bp, Homo sapien
ttctgcagtgggttacgaatacatccttgaacc

SEQ ID NO: 391667 - DNA, 33 bp, Homo sapien
tggagtgagattgtgaaacttggagcttgtgca

SEQ ID NO: 391668 - DNA, 33 bp, Homo sapien
tggagtgagattgtgagacttggagcttgtgca

SEQ ID NO: 391669 - DNA, 33 bp, Homo sapien
caagagcttctgggtaacataagggacctttca

SEQ ID NO: 391670 - DNA, 33 bp, Homo sapien
caagagcttctgggtagcataagggacctttca

SEQ ID NO: 391671 - DNA, 33 bp, Homo sapien
gacatggaatttctacccaacgcttatgggaat

SEQ ID NO: 391672 - DNA, 33 bp, Homo sapien
gacatggaatttctacgcaacgcttatgggaat

SEQ ID NO: 391673 - DNA, 33 bp, Homo sapien
aatctgatatcgtgtacgtatgagagtggtcag

SEQ ID NO: 391674 - DNA, 33 bp, Homo sapien
aatctgatatcgtgtatgtatgagagtggtcag

SEQ ID NO: 391675 - DNA, 33 bp, Homo sapien
agtggcatggcccacacaggagtttgctgttgg

SEQ ID NO: 391676 - DNA, 33 bp, Homo sapien
agtggcatggcccacataggagtttgctgttgg

SEQ ID NO: 391677 - DNA, 33 bp, Homo sapien
aatcttgcaggattaaacccgtgaaggagggag

SEQ ID NO: 391678 - DNA, 33 bp, Homo sapien
aatcttgcaggattaagcccgtgaaggagggag

SEQ ID NO: 391679 - DNA, 33 bp, Homo sapien
cctccagcatggagataactagtctgggaagcc

SEQ ID NO: 391680 - DNA, 33 bp, Homo sapien
cctccagcatggagatgactagtctgggaagcc

SEQ ID NO: 391681 - DNA, 33 bp, Homo sapien
caagggacagcacctacaattccccttgtttct

SEQ ID NO: 391682 - DNA, 33 bp, Homo sapien
caagggacagcacctataattccccttgtttct

SEQ ID NO: 391683 - DNA, 33 bp, Homo sapien
gtatttgcatactgagcctatgtaatttcatga

SEQ ID NO: 391684 - DNA, 33 bp, Homo sapien
gtatttgcatactgagtctatgtaatttcatga

SEQ ID NO: 391685 - DNA, 33 bp, Homo sapien
gaaccacacactagaaaagtgcctgtcaaactt

SEQ ID NO: 391686 - DNA, 33 bp, Homo sapien
gaaccacacactagaacagtgcctgtcaaactt

SEQ ID NO: 391687 - DNA, 33 bp, Homo sapien
attaaaatgctctgaaatggaaaaagaaattat

SEQ ID NO: 391688 - DNA, 33 bp, Homo sapien
attaaaatgctctgaagtggaaaaagaaattat

SEQ ID NO: 391689 - DNA, 33 bp, Homo sapien
tccttcctgcaatgaaaaagagcaagcgtcagc

SEQ ID NO: 391690 - DNA, 33 bp, Homo sapien
tccttcctgcaatgaagaagagcaagcgtcagc

SEQ ID NO: 391691 - DNA, 33 bp, Homo sapien
tcccctctccacctcaaatcacttataatcatt

SEQ ID NO: 391692 - DNA, 33 bp, Homo sapien
tcccctctccacctcagatcacttataatcatt

SEQ ID NO: 391693 - DNA, 33 bp, Homo sapien
atcaggaaggttcagcaagggtctgttattaaa

SEQ ID NO: 391694 - DNA, 33 bp, Homo sapien
atcaggaaggttcagcgagggtctgttattaaa

SEQ ID NO: 391695 - DNA, 33 bp, Homo sapien
caaaacctcttaagaaagtgaagaacagtcaac

SEQ ID NO: 391696 - DNA, 33 bp, Homo sapien
caaaacctcttaagaaggtgaagaacagtcaac

SEQ ID NO: 391697 - DNA, 33 bp, Homo sapien
cacctttcaatggggacaattacatcctgagca

SEQ ID NO: 391698 - DNA, 33 bp, Homo sapien
cacctttcaatggggataattacatcctgagca

SEQ ID NO: 391699 - DNA, 33 bp, Homo sapien
ataaagtcaatatggcaaagtgctagtaatgat

SEQ ID NO: 391700 - DNA, 33 bp, Homo sapien
ataaagtcaatatggccaagtgctagtaatgat

SEQ ID NO: 391701 - DNA, 33 bp, Homo sapien
tccttctggatttatccaattactgtcagctgc

SEQ ID NO: 391702 - DNA, 33 bp, Homo sapien
tccttctggatttatctaattactgtcagctgc

SEQ ID NO: 391703 - DNA, 33 bp, Homo sapien
caaagacctaccaaaacatggatgattctgaaa

SEQ ID NO: 391704 - DNA, 33 bp, Homo sapien
caaagacctaccaaaagatggatgattctgaaa

SEQ ID NO: 391705 - DNA, 33 bp, Homo sapien
cttgtgagtaaggtagaagctgcatggcttttt

SEQ ID NO: 391706 - DNA, 33 bp, Homo sapien
cttgtgagtaaggtaggagctgcatggcttttt

SEQ ID NO: 391707 - DNA, 33 bp, Homo sapien
ttattaggagccatcaaaaaggaccaaagagga

SEQ ID NO: 391708 - DNA, 33 bp, Homo sapien
ttattaggagccatcagaaaggaccaaagagga

SEQ ID NO: 391709 - DNA, 33 bp, Homo sapien
ctgccatgatcataaaagaccagttcccaggat

SEQ ID NO: 391710 - DNA, 33 bp, Homo sapien
ctgccatgatcataaacgaccagttcccaggat

SEQ ID NO: 391711 - DNA, 33 bp, Homo sapien
gtttagtctatctcaacttcaaatgcatgtcct

SEQ ID NO: 391712 - DNA, 33 bp, Homo sapien
gtttagtctatctcaagttcaaatgcatgtcct

SEQ ID NO: 391713 - DNA, 33 bp, Homo sapien
atcaagtaagactcaaccacaggccgcaagttt

SEQ ID NO: 391714 - DNA, 33 bp, Homo sapien
atcaagtaagactcaatcacaggccgcaagttt

SEQ ID NO: 391715 - DNA, 33 bp, Homo sapien
tgcagcgatgcattcacgtcagagagctaccaa

SEQ ID NO: 391716 - DNA, 33 bp, Homo sapien
tgcagcgatgcattcatgtcagagagctaccaa

SEQ ID NO: 391717 - DNA, 33 bp, Homo sapien
taccatgaacacagtaggggggaaacagcccca

SEQ ID NO: 391718 - DNA, 33 bp, Homo sapien
taccatgaacacagtatgggggaaacagcccca

SEQ ID NO: 391719 - DNA, 33 bp, Homo sapien
cagtaagacaaaggcaaccctcctaacaggcaa

SEQ ID NO: 391720 - DNA, 33 bp, Homo sapien
cagtaagacaaaggcatccctcctaacaggcaa

SEQ ID NO: 391721 - DNA, 33 bp, Homo sapien
aaagtacctcacaaaacaagatggtcaatcgtt

SEQ ID NO: 391722 - DNA, 33 bp, Homo sapien
aaagtacctcacaaaagaagatggtcaatcgtt

SEQ ID NO: 391723 - DNA, 33 bp, Homo sapien
gaaaataaatgtgatcaatttctggcttaaatt

SEQ ID NO: 391724 - DNA, 33 bp, Homo sapien
gaaaataaatgtgatccatttctggcttaaatt

SEQ ID NO: 391725 - DNA, 33 bp, Homo sapien
tgataagtgtatttagcagaatctgagagaact

SEQ ID NO: 391726 - DNA, 33 bp, Homo sapien
tgataagtgtatttagtagaatctgagagaact

SEQ ID NO: 391727 - DNA, 33 bp, Homo sapien
attagtttggctaacactgtactccctaaatga

SEQ ID NO: 391728 - DNA, 33 bp, Homo sapien
attagtttggctaacattgtactccctaaatga

SEQ ID NO: 391729 - DNA, 33 bp, Homo sapien
gatgccattcaaccacaggccccactgtcacga

SEQ ID NO: 391730 - DNA, 33 bp, Homo sapien
gatgccattcaaccacgggccccactgtcacga

SEQ ID NO: 391731 - DNA, 33 bp, Homo sapien
aacccagttccacttacgcacctggccaacctg

SEQ ID NO: 391732 - DNA, 33 bp, Homo sapien
aacccagttccacttatgcacctggccaacctg

SEQ ID NO: 391733 - DNA, 33 bp, Homo sapien
aaataaccaactgtaactctagaaaagctggac

SEQ ID NO: 391734 - DNA, 33 bp, Homo sapien
aaataaccaactgtaagtctagaaaagctggac

SEQ ID NO: 391735 - DNA, 33 bp, Homo sapien
atactaaagtgtgaacaacttccagcagagaga

SEQ ID NO: 391736 - DNA, 33 bp, Homo sapien
atactaaagtgtgaacgacttccagcagagaga

SEQ ID NO: 391737 - DNA, 33 bp, Homo sapien
ccgtgcctggtcgttacctttaaaaatataaag

SEQ ID NO: 391738 - DNA, 33 bp, Homo sapien
ccgtgcctggtcgttatctttaaaaatataaag

SEQ ID NO: 391739 - DNA, 33 bp, Homo sapien
gggaatatacccaaagaacagtaattcattcta

SEQ ID NO: 391740 - DNA, 33 bp, Homo sapien
gggaatatacccaaaggacagtaattcattcta

SEQ ID NO: 391741 - DNA, 33 bp, Homo sapien
gctgctaccttgttcacatttcgagctgggctg

SEQ ID NO: 391742 - DNA, 33 bp, Homo sapien
gctgctaccttgttcagatttcgagctgggctg

SEQ ID NO: 391743 - DNA, 33 bp, Homo sapien
catttggtactgatcagggagacggaatgctcc

SEQ ID NO: 391744 - DNA, 33 bp, Homo sapien
catttggtactgatcatggagacggaatgctcc

SEQ ID NO: 391745 - DNA, 33 bp, Homo sapien
ggctgtggggatacagacctcacatctctgcct

SEQ ID NO: 391746 - DNA, 33 bp, Homo sapien
ggctgtggggatacaggcctcacatctctgcct

SEQ ID NO: 391747 - DNA, 33 bp, Homo sapien
gtaaaaagaccatagagcccacagttccctgac

SEQ ID NO: 391748 - DNA, 33 bp, Homo sapien
gtaaaaagaccatagatcccacagttccctgac

SEQ ID NO: 391749 - DNA, 33 bp, Homo sapien
accttcatctttgtaccgtaagcatctgtgtct

SEQ ID NO: 391750 - DNA, 33 bp, Homo sapien
accttcatctttgtactgtaagcatctgtgtct

SEQ ID NO: 391751 - DNA, 33 bp, Homo sapien
ggcgtgaagctacgataacccacgagccggagt

SEQ ID NO: 391752 - DNA, 33 bp, Homo sapien
ggcgtgaagctacgatgacccacgagccggagt

SEQ ID NO: 391753 - DNA, 33 bp, Homo sapien
tgctcagggattgtacagtaagtctatttcaaa

SEQ ID NO: 391754 - DNA, 33 bp, Homo sapien
tgctcagggattgtacggtaagtctatttcaaa

SEQ ID NO: 391755 - DNA, 33 bp, Homo sapien
ggagttctgggaaataacttttactcagagaca

SEQ ID NO: 391756 - DNA, 33 bp, Homo sapien
ggagttctgggaaatagcttttactcagagaca

SEQ ID NO: 391757 - DNA, 33 bp, Homo sapien
tttcccagaactccagaaaacgccctgtgttta

SEQ ID NO: 391758 - DNA, 33 bp, Homo sapien
tttcccagaactccagcaaacgccctgtgttta

SEQ ID NO: 391759 - DNA, 33 bp, Homo sapien
tgctttatcactcacgaccatctgttgtttcag

SEQ ID NO: 391760 - DNA, 33 bp, Homo sapien
tgctttatcactcacgtccatctgttgtttcag

SEQ ID NO: 391761 - DNA, 33 bp, Homo sapien
ccagcagccaccggaacagggattggcaaggaa

SEQ ID NO: 391762 - DNA, 33 bp, Homo sapien
ccagcagccaccggaagagggattggcaaggaa

SEQ ID NO: 391763 - DNA, 33 bp, Homo sapien
acagtcttccagattacgctacagagaaaaatt

SEQ ID NO: 391764 - DNA, 33 bp, Homo sapien
acagtcttccagattatgctacagagaaaaatt

SEQ ID NO: 391765 - DNA, 33 bp, Homo sapien
caccccaacttcatgacagcacagaggctcccc

SEQ ID NO: 391766 - DNA, 33 bp, Homo sapien
caccccaacttcatgatagcacagaggctcccc

SEQ ID NO: 391767 - DNA, 33 bp, Homo sapien
ctgttccttccagaaactgccctctgcctcctg

SEQ ID NO: 391768 - DNA, 33 bp, Homo sapien
ctgttccttccagaaattgccctctgcctcctg

SEQ ID NO: 391769 - DNA, 33 bp, Homo sapien
tcaagacagagctaagcaaagagggtcagtcat

SEQ ID NO: 391770 - DNA, 33 bp, Homo sapien
tcaagacagagctaaggaaagagggtcagtcat

SEQ ID NO: 391771 - DNA, 33 bp, Homo sapien
cccacttataaatctacgtgtgtatttttctgg

SEQ ID NO: 391772 - DNA, 33 bp, Homo sapien
cccacttataaatctatgtgtgtatttttctgg

SEQ ID NO: 391773 - DNA, 33 bp, Homo sapien
cattctcccatccatccgatatgtctttatcaa

SEQ ID NO: 391774 - DNA, 33 bp, Homo sapien
cattctcccatccatctgatatgtctttatcaa

SEQ ID NO: 391775 - DNA, 33 bp, Homo sapien
agtggttattttatgagaatagtgacaagcctt

SEQ ID NO: 391776 - DNA, 33 bp, Homo sapien
agtggttattttatgataatagtgacaagcctt

SEQ ID NO: 391777 - DNA, 33 bp, Homo sapien
gagccagacttgggagaaatctgtcaaaaatat

SEQ ID NO: 391778 - DNA, 33 bp, Homo sapien
gagccagacttgggaggaatctgtcaaaaatat

SEQ ID NO: 391779 - DNA, 33 bp, Homo sapien
catttccatttcctgaaggatgaatttatcttg

SEQ ID NO: 391780 - DNA, 33 bp, Homo sapien
catttccatttcctgatggatgaatttatcttg

SEQ ID NO: 391781 - DNA, 33 bp, Homo sapien
agcatctcacgcaatacctacaggaactctgaa

SEQ ID NO: 391782 - DNA, 33 bp, Homo sapien
agcatctcacgcaatatctacaggaactctgaa

SEQ ID NO: 391783 - DNA, 33 bp, Homo sapien
gtggtcaaaaataagacctgctttctgctttca

SEQ ID NO: 391784 - DNA, 33 bp, Homo sapien
gtggtcaaaaataagatctgctttctgctttca

SEQ ID NO: 391785 - DNA, 33 bp, Homo sapien
gagggtgtgaaaacggacaggaaacttacaagg

SEQ ID NO: 391786 - DNA, 33 bp, Homo sapien
gagggtgtgaaaacggtcaggaaacttacaagg

SEQ ID NO: 391787 - DNA, 33 bp, Homo sapien
gcattagaaaggcagaatctcacgcccactcca

SEQ ID NO: 391788 - DNA, 33 bp, Homo sapien
gcattagaaaggcagattctcacgcccactcca

SEQ ID NO: 391789 - DNA, 33 bp, Homo sapien
acaaagagatggctccactcttgcattcagggt

SEQ ID NO: 391790 - DNA, 33 bp, Homo sapien
acaaagagatggctccgctcttgcattcagggt

SEQ ID NO: 391791 - DNA, 33 bp, Homo sapien
catgcacgagggagacactgaaacctccccagt

SEQ ID NO: 391792 - DNA, 33 bp, Homo sapien
catgcacgagggagacgctgaaacctccccagt

SEQ ID NO: 391793 - DNA, 33 bp, Homo sapien
ctataggctaaagacaagtaacagacatggcaa

SEQ ID NO: 391794 - DNA, 33 bp, Homo sapien
ctataggctaaagacaggtaacagacatggcaa

SEQ ID NO: 391795 - DNA, 33 bp, Homo sapien
aaaaagtgatatcgtacgatgctggccaggtcc

SEQ ID NO: 391796 - DNA, 33 bp, Homo sapien
aaaaagtgatatcgtatgatgctggccaggtcc

SEQ ID NO: 391797 - DNA, 33 bp, Homo sapien
caggaaagataacagacctcagggagctggcag

SEQ ID NO: 391798 - DNA, 33 bp, Homo sapien
caggaaagataacagatctcagggagctggcag

SEQ ID NO: 391799 - DNA, 33 bp, Homo sapien
tttgccttttccagaacgtcacacagttggaaa

SEQ ID NO: 391800 - DNA, 33 bp, Homo sapien
tttgccttttccagaatgtcacacagttggaaa

SEQ ID NO: 391801 - DNA, 33 bp, Homo sapien
caactctttcccacgccaatggatggttgtcca

SEQ ID NO: 391802 - DNA, 33 bp, Homo sapien
caactctttcccacgcgaatggatggttgtcca

SEQ ID NO: 391803 - DNA, 33 bp, Homo sapien
atttgctgaatgacagacaaacgttggctgagc

SEQ ID NO: 391804 - DNA, 33 bp, Homo sapien
atttgctgaatgacaggcaaacgttggctgagc

SEQ ID NO: 391805 - DNA, 33 bp, Homo sapien
cagaaggggaatccaacgctgccctccattctt

SEQ ID NO: 391806 - DNA, 33 bp, Homo sapien
cagaaggggaatccaatgctgccctccattctt

SEQ ID NO: 391807 - DNA, 33 bp, Homo sapien
actgctttctgctactcaggccgcaagcaggtc

SEQ ID NO: 391808 - DNA, 33 bp, Homo sapien
actgctttctgctactgaggccgcaagcaggtc

SEQ ID NO: 391809 - DNA, 33 bp, Homo sapien
cttcactcctctatctcaccaaaagttcaagtt

SEQ ID NO: 391810 - DNA, 33 bp, Homo sapien
cttcactcctctatctgaccaaaagttcaagtt

SEQ ID NO: 391811 - DNA, 33 bp, Homo sapien
ccaacattagagaatacaattggacatgagatt

SEQ ID NO: 391812 - DNA, 33 bp, Homo sapien
ccaacattagagaatagaattggacatgagatt

SEQ ID NO: 391813 - DNA, 33 bp, Homo sapien
gactgatgtgttcaaaagttgatactagttttt

SEQ ID NO: 391814 - DNA, 33 bp, Homo sapien
gactgatgtgttcaaaggttgatactagttttt

SEQ ID NO: 391815 - DNA, 33 bp, Homo sapien
cagtcagagtcctctacagaacttgctggaaca

SEQ ID NO: 391816 - DNA, 33 bp, Homo sapien
cagtcagagtcctctatagaacttgctggaaca

SEQ ID NO: 391817 - DNA, 33 bp, Homo sapien
gaaagcagttgagagacgtactggaatgagggg

SEQ ID NO: 391818 - DNA, 33 bp, Homo sapien
gaaagcagttgagagaggtactggaatgagggg

SEQ ID NO: 391819 - DNA, 33 bp, Homo sapien
tgtaaacacagagccaataggaaggcggttgaa

SEQ ID NO: 391820 - DNA, 33 bp, Homo sapien
tgtaaacacagagccagtaggaaggcggttgaa

SEQ ID NO: 391821 - DNA, 33 bp, Homo sapien
tgtgcagaactgtgtgcattttttctagggaga

SEQ ID NO: 391822 - DNA, 33 bp, Homo sapien
tgtgcagaactgtgtgtattttttctagggaga

SEQ ID NO: 391823 - DNA, 33 bp, Homo sapien
tttatttgaattctcaatgaatggtctcaggag

SEQ ID NO: 391824 - DNA, 33 bp, Homo sapien
tttatttgaattctcagtgaatggtctcaggag

SEQ ID NO: 391825 - DNA, 33 bp, Homo sapien
tgtgtgatagaacttgcaggaaatgttctatta

SEQ ID NO: 391826 - DNA, 33 bp, Homo sapien
tgtgtgatagaacttgtaggaaatgttctatta

SEQ ID NO: 391827 - DNA, 33 bp, Homo sapien
tcactttgagcagccacgtatgttcgggaaaga

SEQ ID NO: 391828 - DNA, 33 bp, Homo sapien
tcactttgagcagccaggtatgttcgggaaaga

SEQ ID NO: 391829 - DNA, 33 bp, Homo sapien
ggtgagtcaattgtagaagggccgcgggagcag

SEQ ID NO: 391830 - DNA, 33 bp, Homo sapien
ggtgagtcaattgtaggagggccgcgggagcag

SEQ ID NO: 391831 - DNA, 33 bp, Homo sapien
gtcacgagtagatttaagtcagtctgtcactct

SEQ ID NO: 391832 - DNA, 33 bp, Homo sapien
gtcacgagtagatttaggtcagtctgtcactct

SEQ ID NO: 391833 - DNA, 33 bp, Homo sapien
ctaaaaaaaaaatgaaagtgatggctattttag

SEQ ID NO: 391834 - DNA, 33 bp, Homo sapien
ctaaaaaaaaaatgaaggtgatggctattttag

SEQ ID NO: 391835 - DNA, 33 bp, Homo sapien
caatagtagaatgcccaaaacaaaactaacaga

SEQ ID NO: 391836 - DNA, 33 bp, Homo sapien
caatagtagaatgcccgaaacaaaactaacaga

SEQ ID NO: 391837 - DNA, 33 bp, Homo sapien
cttggcaaatagccacagaagaactactgacaa

SEQ ID NO: 391838 - DNA, 33 bp, Homo sapien
cttggcaaatagccacggaagaactactgacaa

SEQ ID NO: 391839 - DNA, 33 bp, Homo sapien
aaaaaacaacgccatgaagatcgttctgttcag

SEQ ID NO: 391840 - DNA, 33 bp, Homo sapien
aaaaaacaacgccatgcagatcgttctgttcag

SEQ ID NO: 391841 - DNA, 33 bp, Homo sapien
gaagctgagaagcattcggctgattctccccct

SEQ ID NO: 391842 - DNA, 33 bp, Homo sapien
gaagctgagaagcatttggctgattctccccct

SEQ ID NO: 391843 - DNA, 33 bp, Homo sapien
tcctcatctccttcaacgagcttgttgtccatc

SEQ ID NO: 391844 - DNA, 33 bp, Homo sapien
tcctcatctccttcaatgagcttgttgtccatc

SEQ ID NO: 391845 - DNA, 33 bp, Homo sapien
gagtccattcataagggatgttcagaatgggga

SEQ ID NO: 391846 - DNA, 33 bp, Homo sapien
gagtccattcataaggtatgttcagaatgggga

SEQ ID NO: 391847 - DNA, 33 bp, Homo sapien
ggcccatggaccatcacctgttcaccccttggt

SEQ ID NO: 391848 - DNA, 33 bp, Homo sapien
ggcccatggaccatcatctgttcaccccttggt

SEQ ID NO: 391849 - DNA, 33 bp, Homo sapien
aaggtggtatgggctgcaaaggctaacacgttt

SEQ ID NO: 391850 - DNA, 33 bp, Homo sapien
aaggtggtatgggctgtaaaggctaacacgttt

SEQ ID NO: 391851 - DNA, 33 bp, Homo sapien
gcacaacttgtgaacaaattgaaaccactgaat

SEQ ID NO: 391852 - DNA, 33 bp, Homo sapien
gcacaacttgtgaacatattgaaaccactgaat

SEQ ID NO: 391853 - DNA, 33 bp, Homo sapien
ttgttatggtcactcacagcgtcttgtatgttt

SEQ ID NO: 391854 - DNA, 33 bp, Homo sapien
ttgttatggtcactcagagcgtcttgtatgttt

SEQ ID NO: 391855 - DNA, 33 bp, Homo sapien
ggactgcaaaacgttccatggatggattctaga

SEQ ID NO: 391856 - DNA, 33 bp, Homo sapien
ggactgcaaaacgttctatggatggattctaga

SEQ ID NO: 391857 - DNA, 33 bp, Homo sapien
agctgcatagcagaaaataccactgctgtctgc

SEQ ID NO: 391858 - DNA, 33 bp, Homo sapien
agctgcatagcagaaagtaccactgctgtctgc

SEQ ID NO: 391859 - DNA, 33 bp, Homo sapien
caggaggatatttagcagatttcaaattgtttc

SEQ ID NO: 391860 - DNA, 33 bp, Homo sapien
caggaggatatttagcggatttcaaattgtttc

SEQ ID NO: 391861 - DNA, 33 bp, Homo sapien
aggcctagatccaaagaaaacaatcacctctag

SEQ ID NO: 391862 - DNA, 33 bp, Homo sapien
aggcctagatccaaagcaaacaatcacctctag

SEQ ID NO: 391863 - DNA, 33 bp, Homo sapien
ccagatctctaagtcacattactggccccaggg

SEQ ID NO: 391864 - DNA, 33 bp, Homo sapien
ccagatctctaagtcagattactggccccaggg

SEQ ID NO: 391865 - DNA, 33 bp, Homo sapien
gagggtcatgggattacgcatcagacctgaggc

SEQ ID NO: 391866 - DNA, 33 bp, Homo sapien
gagggtcatgggattatgcatcagacctgaggc

SEQ ID NO: 391867 - DNA, 33 bp, Homo sapien
gatcttcctaacccagaatccaaaatgctgcag

SEQ ID NO: 391868 - DNA, 33 bp, Homo sapien
gatcttcctaacccaggatccaaaatgctgcag

SEQ ID NO: 391869 - DNA, 33 bp, Homo sapien
gcaaagatgtagacacaacctaaacatccacca

SEQ ID NO: 391870 - DNA, 33 bp, Homo sapien
gcaaagatgtagacacgacctaaacatccacca

SEQ ID NO: 391871 - DNA, 33 bp, Homo sapien
caggtttgctggaggccatcactccctgtcacc

SEQ ID NO: 391872 - DNA, 33 bp, Homo sapien
caggtttgctggaggcgatcactccctgtcacc

SEQ ID NO: 391873 - DNA, 33 bp, Homo sapien
atttatactcaatataccggggtgcctgtttgc

SEQ ID NO: 391874 - DNA, 33 bp, Homo sapien
atttatactcaatatagcggggtgcctgtttgc

SEQ ID NO: 391875 - DNA, 33 bp, Homo sapien
gtccctggtaggcctggaacacctggcacgccc

SEQ ID NO: 391876 - DNA, 33 bp, Homo sapien
gtccctggtaggcctgtaacacctggcacgccc

SEQ ID NO: 391877 - DNA, 33 bp, Homo sapien
ttcctctgctgcttgacagaaagctcttttctt

SEQ ID NO: 391878 - DNA, 33 bp, Homo sapien
ttcctctgctgcttgagagaaagctcttttctt

SEQ ID NO: 391879 - DNA, 33 bp, Homo sapien
agagacgagcacaggacgagaaagcccttgcaa

SEQ ID NO: 391880 - DNA, 33 bp, Homo sapien
agagacgagcacaggatgagaaagcccttgcaa

SEQ ID NO: 391881 - DNA, 33 bp, Homo sapien
ctaaaataatgtctaacagtctgggattcctta

SEQ ID NO: 391882 - DNA, 33 bp, Homo sapien
ctaaaataatgtctaagagtctgggattcctta

SEQ ID NO: 391883 - DNA, 33 bp, Homo sapien
accaaaagttggttcaatgaaaagatcaacaaa

SEQ ID NO: 391884 - DNA, 33 bp, Homo sapien
accaaaagttggttcattgaaaagatcaacaaa

SEQ ID NO: 391885 - DNA, 33 bp, Homo sapien
tgcagtctgcttttcccctttaagtcctgaagc

SEQ ID NO: 391886 - DNA, 33 bp, Homo sapien
tgcagtctgcttttccgctttaagtcctgaagc

SEQ ID NO: 391887 - DNA, 33 bp, Homo sapien
aggtcccgtgaaggccagagaagtccaaaaggt

SEQ ID NO: 391888 - DNA, 33 bp, Homo sapien
aggtcccgtgaaggcccgagaagtccaaaaggt

SEQ ID NO: 391889 - DNA, 33 bp, Homo sapien
cctccacatatccccacgtgtatagaacatcca

SEQ ID NO: 391890 - DNA, 33 bp, Homo sapien
cctccacatatccccaggtgtatagaacatcca

SEQ ID NO: 391891 - DNA, 33 bp, Homo sapien
acacgatgctaaatgaaaagagacaatcacaaa

SEQ ID NO: 391892 - DNA, 33 bp, Homo sapien
acacgatgctaaatgagaagagacaatcacaaa

SEQ ID NO: 391893 - DNA, 33 bp, Homo sapien
gaggaaacatcagggcactagggtggattctgg

SEQ ID NO: 391894 - DNA, 33 bp, Homo sapien
gaggaaacatcagggcgctagggtggattctgg

SEQ ID NO: 391895 - DNA, 33 bp, Homo sapien
ggatcagtggatggaaaatgactgaggaaacat

SEQ ID NO: 391896 - DNA, 33 bp, Homo sapien
ggatcagtggatggaagatgactgaggaaacat

SEQ ID NO: 391897 - DNA, 33 bp, Homo sapien
gcttggcatcctgttacctggcaatcctcatca

SEQ ID NO: 391898 - DNA, 33 bp, Homo sapien
gcttggcatcctgttatctggcaatcctcatca

SEQ ID NO: 391899 - DNA, 33 bp, Homo sapien
attttcaaccgcagtcacttcttcctgttgcct

SEQ ID NO: 391900 - DNA, 33 bp, Homo sapien
attttcaaccgcagtcgcttcttcctgttgcct

SEQ ID NO: 391901 - DNA, 33 bp, Homo sapien
tgtctgcaattatatcaccctgatttcccaggc

SEQ ID NO: 391902 - DNA, 33 bp, Homo sapien
tgtctgcaattatatcgccctgatttcccaggc

SEQ ID NO: 391903 - DNA, 33 bp, Homo sapien
ctcctcctcatcatcccgcctgtgttagtgcct

SEQ ID NO: 391904 - DNA, 33 bp, Homo sapien
ctcctcctcatcatcctgcctgtgttagtgcct

SEQ ID NO: 391905 - DNA, 33 bp, Homo sapien
tcactgttttaaacaaagctgtagtgtgcactt

SEQ ID NO: 391906 - DNA, 33 bp, Homo sapien
tcactgttttaaacaatgctgtagtgtgcactt

SEQ ID NO: 391907 - DNA, 33 bp, Homo sapien
gaggggactctggtagaacctggaagtgatgct

SEQ ID NO: 391908 - DNA, 33 bp, Homo sapien
gaggggactctggtaggacctggaagtgatgct

SEQ ID NO: 391909 - DNA, 33 bp, Homo sapien
cacaaatttacaccccaatttattcacccattc

SEQ ID NO: 391910 - DNA, 33 bp, Homo sapien
cacaaatttacacccctatttattcacccattc

SEQ ID NO: 391911 - DNA, 33 bp, Homo sapien
ccaacgtatttcagcacggccctggacagttag

SEQ ID NO: 391912 - DNA, 33 bp, Homo sapien
ccaacgtatttcagcatggccctggacagttag

SEQ ID NO: 391913 - DNA, 33 bp, Homo sapien
tcactaagtggtcagtaaatcagcttcagtgga

SEQ ID NO: 391914 - DNA, 33 bp, Homo sapien
tcactaagtggtcagtgaatcagcttcagtgga

SEQ ID NO: 391915 - DNA, 33 bp, Homo sapien
ttcaagcatcttttcaggaggtcatgctgtagg

SEQ ID NO: 391916 - DNA, 33 bp, Homo sapien
ttcaagcatcttttcatgaggtcatgctgtagg

SEQ ID NO: 391917 - DNA, 33 bp, Homo sapien
cttcagagaaaaaagcacaggttccatgagagc

SEQ ID NO: 391918 - DNA, 33 bp, Homo sapien
cttcagagaaaaaagcccaggttccatgagagc

SEQ ID NO: 391919 - DNA, 33 bp, Homo sapien
gagagaatgttctacaagactgtgggttcacct

SEQ ID NO: 391920 - DNA, 33 bp, Homo sapien
gagagaatgttctacaggactgtgggttcacct

SEQ ID NO: 391921 - DNA, 33 bp, Homo sapien
tcctcttccctggaccactgcatacttttgtcc

SEQ ID NO: 391922 - DNA, 33 bp, Homo sapien
tcctcttccctggaccgctgcatacttttgtcc

SEQ ID NO: 391923 - DNA, 33 bp, Homo sapien
aacacgccacatagaaataaacagctgaaaccc

SEQ ID NO: 391924 - DNA, 33 bp, Homo sapien
aacacgccacatagaagtaaacagctgaaaccc

SEQ ID NO: 391925 - DNA, 33 bp, Homo sapien
atagtagatacagatacaggcacaattaattct

SEQ ID NO: 391926 - DNA, 33 bp, Homo sapien
atagtagatacagatataggcacaattaattct

SEQ ID NO: 391927 - DNA, 33 bp, Homo sapien
gatggcgccagaatataaacttgagtctcactc

SEQ ID NO: 391928 - DNA, 33 bp, Homo sapien
gatggcgccagaatatcaacttgagtctcactc

SEQ ID NO: 391929 - DNA, 33 bp, Homo sapien
cctcgtgaaggacaaacgatttaatacacggaa

SEQ ID NO: 391930 - DNA, 33 bp, Homo sapien
cctcgtgaaggacaaatgatttaatacacggaa

SEQ ID NO: 391931 - DNA, 33 bp, Homo sapien
tcccacctatcccataacagaagcttggcagct

SEQ ID NO: 391932 - DNA, 33 bp, Homo sapien
tcccacctatcccatagcagaagcttggcagct

SEQ ID NO: 391933 - DNA, 33 bp, Homo sapien
ggatatgtgatcccctcaagaggcacagaactt

SEQ ID NO: 391934 - DNA, 33 bp, Homo sapien
ggatatgtgatccccttaagaggcacagaactt

SEQ ID NO: 391935 - DNA, 33 bp, Homo sapien
ctcaatacatacttcccgaataaatgaagggca

SEQ ID NO: 391936 - DNA, 33 bp, Homo sapien
ctcaatacatacttcctgaataaatgaagggca

SEQ ID NO: 391937 - DNA, 33 bp, Homo sapien
gcttttcagttccaaacttgcagctgcgtttca

SEQ ID NO: 391938 - DNA, 33 bp, Homo sapien
gcttttcagttccaaatttgcagctgcgtttca

SEQ ID NO: 391939 - DNA, 33 bp, Homo sapien
actttaaaaatcctgacaaagaattggttttat

SEQ ID NO: 391940 - DNA, 33 bp, Homo sapien
actttaaaaatcctgagaaagaattggttttat

SEQ ID NO: 391941 - DNA, 33 bp, Homo sapien
gcatggaaagggaaggacaaaaaggcagtgttg

SEQ ID NO: 391942 - DNA, 33 bp, Homo sapien
gcatggaaagggaaggccaaaaaggcagtgttg

SEQ ID NO: 391943 - DNA, 33 bp, Homo sapien
tctggctagaattctacgctgcttataaaatgg

SEQ ID NO: 391944 - DNA, 33 bp, Homo sapien
tctggctagaattctatgctgcttataaaatgg

SEQ ID NO: 391945 - DNA, 33 bp, Homo sapien
tctgtccgttaatgcacgcgacaaacattttat

SEQ ID NO: 391946 - DNA, 33 bp, Homo sapien
tctgtccgttaatgcatgcgacaaacattttat

SEQ ID NO: 391947 - DNA, 33 bp, Homo sapien
tcttggtgctcttgaacgctacttccacatcac

SEQ ID NO: 391948 - DNA, 33 bp, Homo sapien
tcttggtgctcttgaatgctacttccacatcac

SEQ ID NO: 391949 - DNA, 33 bp, Homo sapien
attggcattggcattgaaacttctggtagagaa

SEQ ID NO: 391950 - DNA, 33 bp, Homo sapien
attggcattggcattgtaacttctggtagagaa

SEQ ID NO: 391951 - DNA, 33 bp, Homo sapien
ttgtgtatcagtttcaccttcaagcaaattcta

SEQ ID NO: 391952 - DNA, 33 bp, Homo sapien
ttgtgtatcagtttcatcttcaagcaaattcta

SEQ ID NO: 391953 - DNA, 33 bp, Homo sapien
tatccctttactcgaacattgtctatccactcc

SEQ ID NO: 391954 - DNA, 33 bp, Homo sapien
tatccctttactcgaatattgtctatccactcc

SEQ ID NO: 391955 - DNA, 33 bp, Homo sapien
ttagaacagaagttcacgctctccaagttgaca

SEQ ID NO: 391956 - DNA, 33 bp, Homo sapien
ttagaacagaagttcaggctctccaagttgaca

SEQ ID NO: 391957 - DNA, 33 bp, Homo sapien
gctgaccggctgagaggactggcaccaatagtg

SEQ ID NO: 391958 - DNA, 33 bp, Homo sapien
gctgaccggctgagagtactggcaccaatagtg

SEQ ID NO: 391959 - DNA, 33 bp, Homo sapien
ggaactaattcacaaaactaggaatgttcttaa

SEQ ID NO: 391960 - DNA, 33 bp, Homo sapien
ggaactaattcacaaatctaggaatgttcttaa

SEQ ID NO: 391961 - DNA, 33 bp, Homo sapien
agctgtgcggcgacagcaggaagatgcgaagga

SEQ ID NO: 391962 - DNA, 33 bp, Homo sapien
agctgtgcggcgacaggaggaagatgcgaagga

SEQ ID NO: 391963 - DNA, 33 bp, Homo sapien
accagccagggccaccgaactcttgttttctgc

SEQ ID NO: 391964 - DNA, 33 bp, Homo sapien
accagccagggccacctaactcttgttttctgc

SEQ ID NO: 391965 - DNA, 33 bp, Homo sapien
cagctgttgatccataccccttaggctttaatc

SEQ ID NO: 391966 - DNA, 33 bp, Homo sapien
cagctgttgatccatatcccttaggctttaatc

SEQ ID NO: 391967 - DNA, 33 bp, Homo sapien
ggataattgggagagccatcttccgtgattttg

SEQ ID NO: 391968 - DNA, 33 bp, Homo sapien
ggataattgggagagcgatcttccgtgattttg

SEQ ID NO: 391969 - DNA, 33 bp, Homo sapien
tagcccccacttgcaacctgctggataattggg

SEQ ID NO: 391970 - DNA, 33 bp, Homo sapien
tagcccccacttgcaatctgctggataattggg

SEQ ID NO: 391971 - DNA, 33 bp, Homo sapien
accctcatcagtgacacgctttatcatgccttt

SEQ ID NO: 391972 - DNA, 33 bp, Homo sapien
accctcatcagtgacaggctttatcatgccttt

SEQ ID NO: 391973 - DNA, 33 bp, Homo sapien
ctttcaaataccattcaaacaactctcctcaat

SEQ ID NO: 391974 - DNA, 33 bp, Homo sapien
ctttcaaataccattccaacaactctcctcaat

SEQ ID NO: 391975 - DNA, 33 bp, Homo sapien
caagttatgacatagaactcagcacggtgactg

SEQ ID NO: 391976 - DNA, 33 bp, Homo sapien
caagttatgacatagatctcagcacggtgactg

SEQ ID NO: 391977 - DNA, 33 bp, Homo sapien
tctcacgatactgcaactgcatgttcatgcgcc

SEQ ID NO: 391978 - DNA, 33 bp, Homo sapien
tctcacgatactgcaattgcatgttcatgcgcc

SEQ ID NO: 391979 - DNA, 33 bp, Homo sapien
agtgcctgaacctgatgaacgctatggtataaa

SEQ ID NO: 391980 - DNA, 33 bp, Homo sapien
agtgcctgaacctgattaacgctatggtataaa

SEQ ID NO: 391981 - DNA, 33 bp, Homo sapien
tcaaactccgagcttacgagatcctcccgcctc

SEQ ID NO: 391982 - DNA, 33 bp, Homo sapien
tcaaactccgagcttatgagatcctcccgcctc

SEQ ID NO: 391983 - DNA, 33 bp, Homo sapien
tggggctcctctggaaacattttgggagatagt

SEQ ID NO: 391984 - DNA, 33 bp, Homo sapien
tggggctcctctggaagcattttgggagatagt

SEQ ID NO: 391985 - DNA, 33 bp, Homo sapien
ctagatctaagcctcaagcatgggtcttcaccc

SEQ ID NO: 391986 - DNA, 33 bp, Homo sapien
ctagatctaagcctcaggcatgggtcttcaccc

SEQ ID NO: 391987 - DNA, 33 bp, Homo sapien
actgatctctgccatcagatgctgggtgaggta

SEQ ID NO: 391988 - DNA, 33 bp, Homo sapien
actgatctctgccatcggatgctgggtgaggta

SEQ ID NO: 391989 - DNA, 33 bp, Homo sapien
ccaaaatgctctcatcacttctggatggctaca

SEQ ID NO: 391990 - DNA, 33 bp, Homo sapien
ccaaaatgctctcatctcttctggatggctaca

SEQ ID NO: 391991 - DNA, 33 bp, Homo sapien
ttctttgagcctaaaactcgtttgtctcatacc

SEQ ID NO: 391992 - DNA, 33 bp, Homo sapien
ttctttgagcctaaaagtcgtttgtctcatacc

SEQ ID NO: 391993 - DNA, 33 bp, Homo sapien
ctgggtcatgaacaaacgggcagttgtttggcc

SEQ ID NO: 391994 - DNA, 33 bp, Homo sapien
ctgggtcatgaacaaatgggcagttgtttggcc

SEQ ID NO: 391995 - DNA, 33 bp, Homo sapien
aactcatgaggcacaaaaaaatcagaatagagg

SEQ ID NO: 391996 - DNA, 33 bp, Homo sapien
aactcatgaggcacaagaaaatcagaatagagg

SEQ ID NO: 391997 - DNA, 33 bp, Homo sapien
cctcatgagttacatacgacgtcctgcgcttca

SEQ ID NO: 391998 - DNA, 33 bp, Homo sapien
cctcatgagttacatatgacgtcctgcgcttca

SEQ ID NO: 391999 - DNA, 33 bp, Homo sapien
attttcatgcacagtacggtgaattttcaactt

SEQ ID NO: 392000 - DNA, 33 bp, Homo sapien
attttcatgcacagtagggtgaattttcaactt

SEQ ID NO: 392001 - DNA, 33 bp, Homo sapien
tgtgccttcatcactcgagtttaaaaccccaca

SEQ ID NO: 392002 - DNA, 33 bp, Homo sapien
tgtgccttcatcactctagtttaaaaccccaca

SEQ ID NO: 392003 - DNA, 33 bp, Homo sapien
gtttgagattcacaaactaatgtactaaaatcc

SEQ ID NO: 392004 - DNA, 33 bp, Homo sapien
gtttgagattcacaaagtaatgtactaaaatcc

SEQ ID NO: 392005 - DNA, 33 bp, Homo sapien
aaccaaagatagataacagcaagtgttggtgag

SEQ ID NO: 392006 - DNA, 33 bp, Homo sapien
aaccaaagatagataatagcaagtgttggtgag

SEQ ID NO: 392007 - DNA, 33 bp, Homo sapien
tgattaaaatgaaaaaaccctcataaacattat

SEQ ID NO: 392008 - DNA, 33 bp, Homo sapien
tgattaaaatgaaaaagccctcataaacattat

SEQ ID NO: 392009 - DNA, 33 bp, Homo sapien
attcagggctcagacgaaccacctgaagtctga

SEQ ID NO: 392010 - DNA, 33 bp, Homo sapien
attcagggctcagacggaccacctgaagtctga

SEQ ID NO: 392011 - DNA, 33 bp, Homo sapien
ccaaatttaggcaccaccatcttcaaagacttt

SEQ ID NO: 392012 - DNA, 33 bp, Homo sapien
ccaaatttaggcaccatcatcttcaaagacttt

SEQ ID NO: 392013 - DNA, 33 bp, Homo sapien
ttctggaactctgaaactatataggagtgccac

SEQ ID NO: 392014 - DNA, 33 bp, Homo sapien
ttctggaactctgaaagtatataggagtgccac

SEQ ID NO: 392015 - DNA, 33 bp, Homo sapien
agtctctggaaatgaacatctacactgctgaag

SEQ ID NO: 392016 - DNA, 33 bp, Homo sapien
agtctctggaaatgaatatctacactgctgaag

SEQ ID NO: 392017 - DNA, 33 bp, Homo sapien
ccatattatgaaacaaaggaacaacaacaacaa

SEQ ID NO: 392018 - DNA, 33 bp, Homo sapien
ccatattatgaaacaacggaacaacaacaacaa

SEQ ID NO: 392019 - DNA, 33 bp, Homo sapien
aacacgtcacttccacaggaacggttctctgac

SEQ ID NO: 392020 - DNA, 33 bp, Homo sapien
aacacgtcacttccacgggaacggttctctgac

SEQ ID NO: 392021 - DNA, 33 bp, Homo sapien
tgtgcttctctgcctgaaaaactccagctcaaa

SEQ ID NO: 392022 - DNA, 33 bp, Homo sapien
tgtgcttctctgcctggaaaactccagctcaaa

SEQ ID NO: 392023 - DNA, 33 bp, Homo sapien
tttgctttttaaggtgaacagaaacaccttgca

SEQ ID NO: 392024 - DNA, 33 bp, Homo sapien
tttgctttttaaggtggacagaaacaccttgca

SEQ ID NO: 392025 - DNA, 33 bp, Homo sapien
ttaaaatgtggaatgacacttgtttagtaaaat

SEQ ID NO: 392026 - DNA, 33 bp, Homo sapien
ttaaaatgtggaatgatacttgtttagtaaaat

SEQ ID NO: 392027 - DNA, 33 bp, Homo sapien
tatctcatgtaatcccaaagctctactatgaag

SEQ ID NO: 392028 - DNA, 33 bp, Homo sapien
tatctcatgtaatcccgaagctctactatgaag

SEQ ID NO: 392029 - DNA, 33 bp, Homo sapien
tgcgtatgatttcagaacttcacagaccctctg

SEQ ID NO: 392030 - DNA, 33 bp, Homo sapien
tgcgtatgatttcagagcttcacagaccctctg

SEQ ID NO: 392031 - DNA, 33 bp, Homo sapien
gaattcttcagtacaccctatttgtaggcatcc

SEQ ID NO: 392032 - DNA, 33 bp, Homo sapien
gaattcttcagtacactctatttgtaggcatcc

SEQ ID NO: 392033 - DNA, 33 bp, Homo sapien
aaagtgaaaagtgcaccgtatttcaagtctgaa

SEQ ID NO: 392034 - DNA, 33 bp, Homo sapien
aaagtgaaaagtgcactgtatttcaagtctgaa

SEQ ID NO: 392035 - DNA, 33 bp, Homo sapien
gttgtgtatttagatacccagttaccacagact

SEQ ID NO: 392036 - DNA, 33 bp, Homo sapien
gttgtgtatttagatatccagttaccacagact

SEQ ID NO: 392037 - DNA, 33 bp, Homo sapien
tgctaagctgataaaaaagcgcacctgcaggaa

SEQ ID NO: 392038 - DNA, 33 bp, Homo sapien
tgctaagctgataaaagagcgcacctgcaggaa

SEQ ID NO: 392039 - DNA, 33 bp, Homo sapien
gtcaaagtgattcagcaattaaatacattacag

SEQ ID NO: 392040 - DNA, 33 bp, Homo sapien
gtcaaagtgattcagcgattaaatacattacag

SEQ ID NO: 392041 - DNA, 33 bp, Homo sapien
tagtttacaaagaacacaggctcagaagctagc

SEQ ID NO: 392042 - DNA, 33 bp, Homo sapien
tagtttacaaagaacagaggctcagaagctagc

SEQ ID NO: 392043 - DNA, 33 bp, Homo sapien
caggaaactgatgccaaactttttctttgagag

SEQ ID NO: 392044 - DNA, 33 bp, Homo sapien
caggaaactgatgccagactttttctttgagag

SEQ ID NO: 392045 - DNA, 33 bp, Homo sapien
aacatcaaatacaaaacggctctatttgtgatg

SEQ ID NO: 392046 - DNA, 33 bp, Homo sapien
aacatcaaatacaaaatggctctatttgtgatg

SEQ ID NO: 392047 - DNA, 33 bp, Homo sapien
tcaatttggaagaacacacactatcttggttat

SEQ ID NO: 392048 - DNA, 33 bp, Homo sapien
tcaatttggaagaacagacactatcttggttat

SEQ ID NO: 392049 - DNA, 33 bp, Homo sapien
acaacaccagaatgtcaattacgggccagttat

SEQ ID NO: 392050 - DNA, 33 bp, Homo sapien
acaacaccagaatgtcgattacgggccagttat

SEQ ID NO: 392051 - DNA, 33 bp, Homo sapien
cagcatttatttgtgacacagcatgaactagtc

SEQ ID NO: 392052 - DNA, 33 bp, Homo sapien
cagcatttatttgtgagacagcatgaactagtc

SEQ ID NO: 392053 - DNA, 33 bp, Homo sapien
aagcatatttcagaaactgatgacatctagtga

SEQ ID NO: 392054 - DNA, 33 bp, Homo sapien
aagcatatttcagaaattgatgacatctagtga

SEQ ID NO: 392055 - DNA, 33 bp, Homo sapien
cagagtacaaaatagccataagctggcacatct

SEQ ID NO: 392056 - DNA, 33 bp, Homo sapien
cagagtacaaaatagctataagctggcacatct

SEQ ID NO: 392057 - DNA, 33 bp, Homo sapien
ccccagtgcatttttaggaattcactgccacaa

SEQ ID NO: 392058 - DNA, 33 bp, Homo sapien
ccccagtgcatttttatgaattcactgccacaa

SEQ ID NO: 392059 - DNA, 33 bp, Homo sapien
tgtgtgctctgagtcaaaaagagcaaagtagga

SEQ ID NO: 392060 - DNA, 33 bp, Homo sapien
tgtgtgctctgagtcagaaagagcaaagtagga

SEQ ID NO: 392061 - DNA, 33 bp, Homo sapien
tggtgatgcgggaatacgcttatggtatattaa

SEQ ID NO: 392062 - DNA, 33 bp, Homo sapien
tggtgatgcgggaatatgcttatggtatattaa

SEQ ID NO: 392063 - DNA, 33 bp, Homo sapien
tttccttcttgagccacagaagtaccagaaaaa

SEQ ID NO: 392064 - DNA, 33 bp, Homo sapien
tttccttcttgagccagagaagtaccagaaaaa

SEQ ID NO: 392065 - DNA, 33 bp, Homo sapien
ataagatgggaacggccagtctaaaagatgaat

SEQ ID NO: 392066 - DNA, 33 bp, Homo sapien
ataagatgggaacggctagtctaaaagatgaat

SEQ ID NO: 392067 - DNA, 33 bp, Homo sapien
ctgcagggagatgacaccgggtatgaaagggtg

SEQ ID NO: 392068 - DNA, 33 bp, Homo sapien
ctgcagggagatgacagcgggtatgaaagggtg

SEQ ID NO: 392069 - DNA, 33 bp, Homo sapien
aagctgtgcaagagccaagtgtctaccatgagt

SEQ ID NO: 392070 - DNA, 33 bp, Homo sapien
aagctgtgcaagagcccagtgtctaccatgagt

SEQ ID NO: 392071 - DNA, 33 bp, Homo sapien
atttagacgtgtgtaactgtatagagcatttcc

SEQ ID NO: 392072 - DNA, 33 bp, Homo sapien
atttagacgtgtgtaagtgtatagagcatttcc

SEQ ID NO: 392073 - DNA, 33 bp, Homo sapien
caaattccaccaaacagctaaagaagaaacaac

SEQ ID NO: 392074 - DNA, 33 bp, Homo sapien
caaattccaccaaacatctaaagaagaaacaac

SEQ ID NO: 392075 - DNA, 33 bp, Homo sapien
ctgcaggtgcaggcacacttactctcttattgg

SEQ ID NO: 392076 - DNA, 33 bp, Homo sapien
ctgcaggtgcaggcacgcttactctcttattgg

SEQ ID NO: 392077 - DNA, 33 bp, Homo sapien
acaattgtcacagttacctattgccacggtgat

SEQ ID NO: 392078 - DNA, 33 bp, Homo sapien
acaattgtcacagttagctattgccacggtgat

SEQ ID NO: 392079 - DNA, 33 bp, Homo sapien
tcatggccccttcgtccatcctcagagtgcatc

SEQ ID NO: 392080 - DNA, 33 bp, Homo sapien
tcatggccccttcgtctatcctcagagtgcatc

SEQ ID NO: 392081 - DNA, 33 bp, Homo sapien
gtgacatgggaagagcagcctgaattctcctgt

SEQ ID NO: 392082 - DNA, 33 bp, Homo sapien
gtgacatgggaagagcggcctgaattctcctgt

SEQ ID NO: 392083 - DNA, 33 bp, Homo sapien
cccaaaattcgcgtccacttggatcctcagaag

SEQ ID NO: 392084 - DNA, 33 bp, Homo sapien
cccaaaattcgcgtccgcttggatcctcagaag

SEQ ID NO: 392085 - DNA, 33 bp, Homo sapien
tgtgtgcactgtcactcaactaaagatgatact

SEQ ID NO: 392086 - DNA, 33 bp, Homo sapien
tgtgtgcactgtcactgaactaaagatgatact

SEQ ID NO: 392087 - DNA, 33 bp, Homo sapien
ctgtccaaaatggaagcctcgcctttctggggc

SEQ ID NO: 392088 - DNA, 33 bp, Homo sapien
ctgtccaaaatggaagtctcgcctttctggggc

SEQ ID NO: 392089 - DNA, 33 bp, Homo sapien
actacttgcacccacaacctgtctcagaatctg

SEQ ID NO: 392090 - DNA, 33 bp, Homo sapien
actacttgcacccacatcctgtctcagaatctg

SEQ ID NO: 392091 - DNA, 33 bp, Homo sapien
ctgagtggcatgacccacgttgattctagcctg

SEQ ID NO: 392092 - DNA, 33 bp, Homo sapien
ctgagtggcatgacccgcgttgattctagcctg

SEQ ID NO: 392093 - DNA, 33 bp, Homo sapien
agaaggaggaaatagacggaaagcactgccaga

SEQ ID NO: 392094 - DNA, 33 bp, Homo sapien
agaaggaggaaatagatggaaagcactgccaga

SEQ ID NO: 392095 - DNA, 33 bp, Homo sapien
gttagttgaggctcagaattattaaggtgtgtg

SEQ ID NO: 392096 - DNA, 33 bp, Homo sapien
gttagttgaggctcagcattattaaggtgtgtg

SEQ ID NO: 392097 - DNA, 33 bp, Homo sapien
cttgcagcccaggccaatgacgcaatgagcttc

SEQ ID NO: 392098 - DNA, 33 bp, Homo sapien
cttgcagcccaggccagtgacgcaatgagcttc

SEQ ID NO: 392099 - DNA, 33 bp, Homo sapien
ttaacattctgccaaaacaacacacgtgggttc

SEQ ID NO: 392100 - DNA, 33 bp, Homo sapien
ttaacattctgccaaagcaacacacgtgggttc

SEQ ID NO: 392101 - DNA, 33 bp, Homo sapien
tcatcccaccttttcacaactactcctgaccca

SEQ ID NO: 392102 - DNA, 33 bp, Homo sapien
tcatcccaccttttcataactactcctgaccca

SEQ ID NO: 392103 - DNA, 33 bp, Homo sapien
agcagcagactggtccaaggtggtggaattcct

SEQ ID NO: 392104 - DNA, 33 bp, Homo sapien
agcagcagactggtccgaggtggtggaattcct

SEQ ID NO: 392105 - DNA, 33 bp, Homo sapien
aattaaggttaaacgacgtcaacaggtgaagtc

SEQ ID NO: 392106 - DNA, 33 bp, Homo sapien
aattaaggttaaacgaggtcaacaggtgaagtc

SEQ ID NO: 392107 - DNA, 33 bp, Homo sapien
ctggtgtgggacctcacatgaagggggccacac

SEQ ID NO: 392108 - DNA, 33 bp, Homo sapien
ctggtgtgggacctcatatgaagggggccacac

SEQ ID NO: 392109 - DNA, 33 bp, Homo sapien
gtttatcagcatttacaagctcagtgtccctag

SEQ ID NO: 392110 - DNA, 33 bp, Homo sapien
gtttatcagcatttacgagctcagtgtccctag

SEQ ID NO: 392111 - DNA, 33 bp, Homo sapien
gctcttagtatagcacagattggattgcagaat

SEQ ID NO: 392112 - DNA, 33 bp, Homo sapien
gctcttagtatagcacggattggattgcagaat

SEQ ID NO: 392113 - DNA, 33 bp, Homo sapien
cacctcagtcctgggaagggcactctgagctct

SEQ ID NO: 392114 - DNA, 33 bp, Homo sapien
cacctcagtcctgggaggggcactctgagctct

SEQ ID NO: 392115 - DNA, 33 bp, Homo sapien
tgcctcagccgattcaaataagaggatgttcct

SEQ ID NO: 392116 - DNA, 33 bp, Homo sapien
tgcctcagccgattcacataagaggatgttcct

SEQ ID NO: 392117 - DNA, 33 bp, Homo sapien
cacgtgaaatgcatagaacaaagacatgtaaag

SEQ ID NO: 392118 - DNA, 33 bp, Homo sapien
cacgtgaaatgcataggacaaagacatgtaaag

SEQ ID NO: 392119 - DNA, 33 bp, Homo sapien
gtgttcgcttaccaaactcgcccccgctcacgg

SEQ ID NO: 392120 - DNA, 33 bp, Homo sapien
gtgttcgcttaccaaagtcgcccccgctcacgg

SEQ ID NO: 392121 - DNA, 33 bp, Homo sapien
gcttttcttgctcctcagactctctgctcctcc

SEQ ID NO: 392122 - DNA, 33 bp, Homo sapien
gcttttcttgctcctcggactctctgctcctcc

SEQ ID NO: 392123 - DNA, 33 bp, Homo sapien
tgtaggccatttcttacgatccagccacctgac

SEQ ID NO: 392124 - DNA, 33 bp, Homo sapien
tgtaggccatttcttaggatccagccacctgac

SEQ ID NO: 392125 - DNA, 33 bp, Homo sapien
attaacagcctagtcaccatttctgggcggggt

SEQ ID NO: 392126 - DNA, 33 bp, Homo sapien
attaacagcctagtcatcatttctgggcggggt

SEQ ID NO: 392127 - DNA, 33 bp, Homo sapien
aaaatgggatttgccacctgttctcaactcaag

SEQ ID NO: 392128 - DNA, 33 bp, Homo sapien
aaaatgggatttgccagctgttctcaactcaag

SEQ ID NO: 392129 - DNA, 33 bp, Homo sapien
ctgttctcaactcaaggcaggctctgtgtctgg

SEQ ID NO: 392130 - DNA, 33 bp, Homo sapien
ctgttctcaactcaagtcaggctctgtgtctgg

SEQ ID NO: 392131 - DNA, 33 bp, Homo sapien
ccattgccagcatctacgtttaggcttttgctc

SEQ ID NO: 392132 - DNA, 33 bp, Homo sapien
ccattgccagcatctaggtttaggcttttgctc

SEQ ID NO: 392133 - DNA, 33 bp, Homo sapien
agctggccaaatatacaacgcttttttcgagtg

SEQ ID NO: 392134 - DNA, 33 bp, Homo sapien
agctggccaaatatacgacgcttttttcgagtg

SEQ ID NO: 392135 - DNA, 33 bp, Homo sapien
ccaggacttgaatccaaatctgtgtcacttcag

SEQ ID NO: 392136 - DNA, 33 bp, Homo sapien
ccaggacttgaatccacatctgtgtcacttcag

SEQ ID NO: 392137 - DNA, 33 bp, Homo sapien
aatctaagggcacagcacatggttttttaacct

SEQ ID NO: 392138 - DNA, 33 bp, Homo sapien
aatctaagggcacagcgcatggttttttaacct

SEQ ID NO: 392139 - DNA, 33 bp, Homo sapien
tatagaataacgctgaagagctgaaatgaatct

SEQ ID NO: 392140 - DNA, 33 bp, Homo sapien
tatagaataacgctgaggagctgaaatgaatct

SEQ ID NO: 392141 - DNA, 33 bp, Homo sapien
gagatctttgatgggacggttccagctgctgtg

SEQ ID NO: 392142 - DNA, 33 bp, Homo sapien
gagatctttgatgggatggttccagctgctgtg

SEQ ID NO: 392143 - DNA, 33 bp, Homo sapien
tccttcatggctcttacggtttctggaacaaaa

SEQ ID NO: 392144 - DNA, 33 bp, Homo sapien
tccttcatggctcttatggtttctggaacaaaa

SEQ ID NO: 392145 - DNA, 33 bp, Homo sapien
agcgttggacgtggcaaagttctcttctgtttg

SEQ ID NO: 392146 - DNA, 33 bp, Homo sapien
agcgttggacgtggcacagttctcttctgtttg

SEQ ID NO: 392147 - DNA, 33 bp, Homo sapien
actcgggcttagaccccagttctgcgacttagc

SEQ ID NO: 392148 - DNA, 33 bp, Homo sapien
actcgggcttagaccctagttctgcgacttagc

SEQ ID NO: 392149 - DNA, 33 bp, Homo sapien
gacattctgtaatccacccatttcactcgtgtt

SEQ ID NO: 392150 - DNA, 33 bp, Homo sapien
gacattctgtaatccatccatttcactcgtgtt

SEQ ID NO: 392151 - DNA, 33 bp, Homo sapien
catatttgatgaaatacggtaattgcaaagccg

SEQ ID NO: 392152 - DNA, 33 bp, Homo sapien
catatttgatgaaatatggtaattgcaaagccg

SEQ ID NO: 392153 - DNA, 33 bp, Homo sapien
accctcggaaaggttccatcacggctccctctg

SEQ ID NO: 392154 - DNA, 33 bp, Homo sapien
accctcggaaaggttctatcacggctccctctg

SEQ ID NO: 392155 - DNA, 33 bp, Homo sapien
acccccagaagttaccagccctgttgaccgtga

SEQ ID NO: 392156 - DNA, 33 bp, Homo sapien
acccccagaagttaccggccctgttgaccgtga

SEQ ID NO: 392157 - DNA, 33 bp, Homo sapien
tttcgacgggttctgtaacaaatgtccacagac

SEQ ID NO: 392158 - DNA, 33 bp, Homo sapien
tttcgacgggttctgtgacaaatgtccacagac

SEQ ID NO: 392159 - DNA, 33 bp, Homo sapien
ggagtttcactctcaccatatggccttcctcta

SEQ ID NO: 392160 - DNA, 33 bp, Homo sapien
ggagtttcactctcactatatggccttcctcta

SEQ ID NO: 392161 - DNA, 33 bp, Homo sapien
ctctaaagacgagaaactccagcagaagaggag

SEQ ID NO: 392162 - DNA, 33 bp, Homo sapien
ctctaaagacgagaaattccagcagaagaggag

SEQ ID NO: 392163 - DNA, 33 bp, Homo sapien
agatggtgatgattgcaagagttaagggaaacg

SEQ ID NO: 392164 - DNA, 33 bp, Homo sapien
agatggtgatgattgcgagagttaagggaaacg

SEQ ID NO: 392165 - DNA, 33 bp, Homo sapien
catcctggccattcccaactggagcgctgcctg

SEQ ID NO: 392166 - DNA, 33 bp, Homo sapien
catcctggccattcccgactggagcgctgcctg

SEQ ID NO: 392167 - DNA, 33 bp, Homo sapien
gactaaccaatctccccctcattctagatgtat

SEQ ID NO: 392168 - DNA, 33 bp, Homo sapien
gactaaccaatctccctctcattctagatgtat

SEQ ID NO: 392169 - DNA, 33 bp, Homo sapien
aacaatagcgattgagaacatctgggagagaat

SEQ ID NO: 392170 - DNA, 33 bp, Homo sapien
aacaatagcgattgaggacatctgggagagaat

SEQ ID NO: 392171 - DNA, 33 bp, Homo sapien
cggcgtcacaaaagaacggcaataatgtgttga

SEQ ID NO: 392172 - DNA, 33 bp, Homo sapien
cggcgtcacaaaagaatggcaataatgtgttga

SEQ ID NO: 392173 - DNA, 33 bp, Homo sapien
aaacatttgccgaatgaacatgtggtgaggatt

SEQ ID NO: 392174 - DNA, 33 bp, Homo sapien
aaacatttgccgaatgtacatgtggtgaggatt

SEQ ID NO: 392175 - DNA, 33 bp, Homo sapien
gaacctacatcttctgcatctgtctgctcaaca

SEQ ID NO: 392176 - DNA, 33 bp, Homo sapien
gaacctacatcttctggatctgtctgctcaaca

SEQ ID NO: 392177 - DNA, 33 bp, Homo sapien
gttatctgtgggcccacgtacatcaaggccgta

SEQ ID NO: 392178 - DNA, 33 bp, Homo sapien
gttatctgtgggcccaggtacatcaaggccgta

SEQ ID NO: 392179 - DNA, 33 bp, Homo sapien
acatattagggtgacacatcatacttgagggct

SEQ ID NO: 392180 - DNA, 33 bp, Homo sapien
acatattagggtgacatatcatacttgagggct

SEQ ID NO: 392181 - DNA, 33 bp, Homo sapien
tggaattcagtgcagaataaggctgtgcccttg

SEQ ID NO: 392182 - DNA, 33 bp, Homo sapien
tggaattcagtgcagagtaaggctgtgcccttg

SEQ ID NO: 392183 - DNA, 33 bp, Homo sapien
gctttatttaacatgccgagaaagagcttaggt

SEQ ID NO: 392184 - DNA, 33 bp, Homo sapien
gctttatttaacatgcggagaaagagcttaggt

SEQ ID NO: 392185 - DNA, 33 bp, Homo sapien
cattttgtattaaacaaggaaactctaggaaga

SEQ ID NO: 392186 - DNA, 33 bp, Homo sapien
cattttgtattaaacagggaaactctaggaaga

SEQ ID NO: 392187 - DNA, 33 bp, Homo sapien
taacaatacatttagccctcaattacaagttaa

SEQ ID NO: 392188 - DNA, 33 bp, Homo sapien
taacaatacatttagctctcaattacaagttaa

SEQ ID NO: 392189 - DNA, 33 bp, Homo sapien
tggagaccagcttttagagttcactgaaatgtt

SEQ ID NO: 392190 - DNA, 33 bp, Homo sapien
tggagaccagcttttatagttcactgaaatgtt

SEQ ID NO: 392191 - DNA, 33 bp, Homo sapien
acttttgagtccgcccacattcccttgagtgtg

SEQ ID NO: 392192 - DNA, 33 bp, Homo sapien
acttttgagtccgcccgcattcccttgagtgtg

SEQ ID NO: 392193 - DNA, 33 bp, Homo sapien
ttctcctaggacctcaatatacactcattaata

SEQ ID NO: 392194 - DNA, 33 bp, Homo sapien
ttctcctaggacctcagtatacactcattaata

SEQ ID NO: 392195 - DNA, 33 bp, Homo sapien
aacgaccactctcgcacaatcacggtcttaaaa

SEQ ID NO: 392196 - DNA, 33 bp, Homo sapien
aacgaccactctcgcataatcacggtcttaaaa

SEQ ID NO: 392197 - DNA, 33 bp, Homo sapien
agtcttaggtttgacactgacatatggacactg

SEQ ID NO: 392198 - DNA, 33 bp, Homo sapien
agtcttaggtttgacattgacatatggacactg

SEQ ID NO: 392199 - DNA, 33 bp, Homo sapien
acagatgagaattttgcagagaagccatctaga

SEQ ID NO: 392200 - DNA, 33 bp, Homo sapien
acagatgagaattttgtagagaagccatctaga

SEQ ID NO: 392201 - DNA, 33 bp, Homo sapien
tccacagcagctattacaaaaaacactccaaga

SEQ ID NO: 392202 - DNA, 33 bp, Homo sapien
tccacagcagctattataaaaaacactccaaga

SEQ ID NO: 392203 - DNA, 33 bp, Homo sapien
gaccctgagcactgaaagttaggacggagcatg

SEQ ID NO: 392204 - DNA, 33 bp, Homo sapien
gaccctgagcactgaaggttaggacggagcatg

SEQ ID NO: 392205 - DNA, 33 bp, Homo sapien
gtctgaagctctgaggaaaccttcctttccagc

SEQ ID NO: 392206 - DNA, 33 bp, Homo sapien
gtctgaagctctgagggaaccttcctttccagc

SEQ ID NO: 392207 - DNA, 33 bp, Homo sapien
gtcttagctccctgccaaactgcgtgggcagct

SEQ ID NO: 392208 - DNA, 33 bp, Homo sapien
gtcttagctccctgccgaactgcgtgggcagct

SEQ ID NO: 392209 - DNA, 33 bp, Homo sapien
agtcacctcacacaagcacctggatttacactt

SEQ ID NO: 392210 - DNA, 33 bp, Homo sapien
agtcacctcacacaaggacctggatttacactt

SEQ ID NO: 392211 - DNA, 33 bp, Homo sapien
cacgcctcatgtatcacggagctcttctcttca

SEQ ID NO: 392212 - DNA, 33 bp, Homo sapien
cacgcctcatgtatcagggagctcttctcttca

SEQ ID NO: 392213 - DNA, 33 bp, Homo sapien
gatcaagagaattttaggagcaaggatgctttt

SEQ ID NO: 392214 - DNA, 33 bp, Homo sapien
gatcaagagaattttatgagcaaggatgctttt

SEQ ID NO: 392215 - DNA, 33 bp, Homo sapien
atttggttgattccaccgtctcgtagttgctct

SEQ ID NO: 392216 - DNA, 33 bp, Homo sapien
atttggttgattccactgtctcgtagttgctct

SEQ ID NO: 392217 - DNA, 33 bp, Homo sapien
tctaaaaggacattgaaatttcctgtgacttga

SEQ ID NO: 392218 - DNA, 33 bp, Homo sapien
tctaaaaggacattgacatttcctgtgacttga

SEQ ID NO: 392219 - DNA, 33 bp, Homo sapien
ctattgcttagtagtccgaaacagccaaaaatc

SEQ ID NO: 392220 - DNA, 33 bp, Homo sapien
ctattgcttagtagtctgaaacagccaaaaatc

SEQ ID NO: 392221 - DNA, 33 bp, Homo sapien
tgtttccctcaaaaaactgatctatgctgtggt

SEQ ID NO: 392222 - DNA, 33 bp, Homo sapien
tgtttccctcaaaaaattgatctatgctgtggt

SEQ ID NO: 392223 - DNA, 33 bp, Homo sapien
ttaagcgtcatgttcgcactcgggcaccccact

SEQ ID NO: 392224 - DNA, 33 bp, Homo sapien
ttaagcgtcatgttcgtactcgggcaccccact

SEQ ID NO: 392225 - DNA, 33 bp, Homo sapien
cagtattattgctttcactcccagttgagagat

SEQ ID NO: 392226 - DNA, 33 bp, Homo sapien
cagtattattgctttcgctcccagttgagagat

SEQ ID NO: 392227 - DNA, 33 bp, Homo sapien
gaccctattatcagagcagttcatacctttcaa

SEQ ID NO: 392228 - DNA, 33 bp, Homo sapien
gaccctattatcagagtagttcatacctttcaa

SEQ ID NO: 392229 - DNA, 33 bp, Homo sapien
tcagtaggattatcacaggaagtgacgcactac

SEQ ID NO: 392230 - DNA, 33 bp, Homo sapien
tcagtaggattatcacgggaagtgacgcactac

SEQ ID NO: 392231 - DNA, 33 bp, Homo sapien
aaacaaggaaaaatgcacctcttcgtccttgag

SEQ ID NO: 392232 - DNA, 33 bp, Homo sapien
aaacaaggaaaaatgcgcctcttcgtccttgag

SEQ ID NO: 392233 - DNA, 33 bp, Homo sapien
aattgtcctctgaagacgcgttcagttcagcag

SEQ ID NO: 392234 - DNA, 33 bp, Homo sapien
aattgtcctctgaagatgcgttcagttcagcag

SEQ ID NO: 392235 - DNA, 33 bp, Homo sapien
agcgttggcggagggaaaagaaagagacagtcc

SEQ ID NO: 392236 - DNA, 33 bp, Homo sapien
agcgttggcggagggagaagaaagagacagtcc

SEQ ID NO: 392237 - DNA, 33 bp, Homo sapien
ttcccctttcgttaaccagcgtgtgctcagaga

SEQ ID NO: 392238 - DNA, 33 bp, Homo sapien
ttcccctttcgttaactagcgtgtgctcagaga

SEQ ID NO: 392239 - DNA, 33 bp, Homo sapien
cattccgtattgctgacgggctactgcaaatag

SEQ ID NO: 392240 - DNA, 33 bp, Homo sapien
cattccgtattgctgatgggctactgcaaatag

SEQ ID NO: 392241 - DNA, 33 bp, Homo sapien
ttatttactctcaataacagcatcagatgaaat

SEQ ID NO: 392242 - DNA, 33 bp, Homo sapien
ttatttactctcaataccagcatcagatgaaat

SEQ ID NO: 392243 - DNA, 33 bp, Homo sapien
ttctcatcactctttgcaaggggccaacactct

SEQ ID NO: 392244 - DNA, 33 bp, Homo sapien
ttctcatcactctttgtaaggggccaacactct

SEQ ID NO: 392245 - DNA, 33 bp, Homo sapien
agtggtgctttgtcaacgcagcccaggaaagga

SEQ ID NO: 392246 - DNA, 33 bp, Homo sapien
agtggtgctttgtcaaggcagcccaggaaagga

SEQ ID NO: 392247 - DNA, 33 bp, Homo sapien
aacggcttgggattgcacttaccctacgtcgtt

SEQ ID NO: 392248 - DNA, 33 bp, Homo sapien
aacggcttgggattgcgcttaccctacgtcgtt

SEQ ID NO: 392249 - DNA, 33 bp, Homo sapien
cctacatggcaaggagaaactgaaacagtcggc

SEQ ID NO: 392250 - DNA, 33 bp, Homo sapien
cctacatggcaaggaggaactgaaacagtcggc

SEQ ID NO: 392251 - DNA, 33 bp, Homo sapien
cattcctttgatgaccaaattagcaagaaacgt

SEQ ID NO: 392252 - DNA, 33 bp, Homo sapien
cattcctttgatgacccaattagcaagaaacgt

SEQ ID NO: 392253 - DNA, 33 bp, Homo sapien
cagggctcacagagacacagttatgggagctcg

SEQ ID NO: 392254 - DNA, 33 bp, Homo sapien
cagggctcacagagacgcagttatgggagctcg

SEQ ID NO: 392255 - DNA, 33 bp, Homo sapien
aacttggttccttaacagcacgtttttcagtcc

SEQ ID NO: 392256 - DNA, 33 bp, Homo sapien
aacttggttccttaacggcacgtttttcagtcc

SEQ ID NO: 392257 - DNA, 33 bp, Homo sapien
accccctgaagctctacggggcacagatcaagc

SEQ ID NO: 392258 - DNA, 33 bp, Homo sapien
accccctgaagctctatggggcacagatcaagc

SEQ ID NO: 392259 - DNA, 33 bp, Homo sapien
ggcctgagccccctaaatctctccctgctacct

SEQ ID NO: 392260 - DNA, 33 bp, Homo sapien
ggcctgagccccctaattctctccctgctacct

SEQ ID NO: 392261 - DNA, 33 bp, Homo sapien
gctgcaaactgcttctaaattgccttctctttg

SEQ ID NO: 392262 - DNA, 33 bp, Homo sapien
gctgcaaactgcttctgaattgccttctctttg

SEQ ID NO: 392263 - DNA, 33 bp, Homo sapien
ctggccagggggatggaattttcgacgccgtct

SEQ ID NO: 392264 - DNA, 33 bp, Homo sapien
ctggccagggggatgggattttcgacgccgtct

SEQ ID NO: 392265 - DNA, 33 bp, Homo sapien
agctgtcagagtcaataacgataagcactaaac

SEQ ID NO: 392266 - DNA, 33 bp, Homo sapien
agctgtcagagtcaatcacgataagcactaaac

SEQ ID NO: 392267 - DNA, 33 bp, Homo sapien
cgacatgaaatacccaaaaccggcaatccgtag

SEQ ID NO: 392268 - DNA, 33 bp, Homo sapien
cgacatgaaatacccagaaccggcaatccgtag

SEQ ID NO: 392269 - DNA, 33 bp, Homo sapien
gaatttgggtcaaaacacaagacactgatgctg

SEQ ID NO: 392270 - DNA, 33 bp, Homo sapien
gaatttgggtcaaaacgcaagacactgatgctg

SEQ ID NO: 392271 - DNA, 33 bp, Homo sapien
gcagcctgagttcatacagccagaaaaagaact

SEQ ID NO: 392272 - DNA, 33 bp, Homo sapien
gcagcctgagttcatagagccagaaaaagaact

SEQ ID NO: 392273 - DNA, 33 bp, Homo sapien
aaaccccacatgttcaagaaatccaatgcaggc

SEQ ID NO: 392274 - DNA, 33 bp, Homo sapien
aaaccccacatgttcatgaaatccaatgcaggc

SEQ ID NO: 392275 - DNA, 33 bp, Homo sapien
aataaaatcaatggcaaactcctgcgctgggga

SEQ ID NO: 392276 - DNA, 33 bp, Homo sapien
aataaaatcaatggcagactcctgcgctgggga

SEQ ID NO: 392277 - DNA, 33 bp, Homo sapien
ttccacctaagttcacactgttcttttgagacc

SEQ ID NO: 392278 - DNA, 33 bp, Homo sapien
ttccacctaagttcacgctgttcttttgagacc

SEQ ID NO: 392279 - DNA, 33 bp, Homo sapien
ggtagaatatgggtgcgcttctccaaggtagat

SEQ ID NO: 392280 - DNA, 33 bp, Homo sapien
ggtagaatatgggtgctcttctccaaggtagat

SEQ ID NO: 392281 - DNA, 33 bp, Homo sapien
ggtccagaagcccttcccaagactcttcctgtt

SEQ ID NO: 392282 - DNA, 33 bp, Homo sapien
ggtccagaagcccttctcaagactcttcctgtt

SEQ ID NO: 392283 - DNA, 33 bp, Homo sapien
cttggtagcagtgttcaaattgtctaggtcatt

SEQ ID NO: 392284 - DNA, 33 bp, Homo sapien
cttggtagcagtgttccaattgtctaggtcatt

SEQ ID NO: 392285 - DNA, 33 bp, Homo sapien
acagcgccgattcatccgaaagacaaaacaacc

SEQ ID NO: 392286 - DNA, 33 bp, Homo sapien
acagcgccgattcatctgaaagacaaaacaacc

SEQ ID NO: 392287 - DNA, 33 bp, Homo sapien
ggttttctctactccaacagtcgctttggggcc

SEQ ID NO: 392288 - DNA, 33 bp, Homo sapien
ggttttctctactccagcagtcgctttggggcc

SEQ ID NO: 392289 - DNA, 33 bp, Homo sapien
catctggcacacagtaaggcccgtgaaactgct

SEQ ID NO: 392290 - DNA, 33 bp, Homo sapien
catctggcacacagtagggcccgtgaaactgct

SEQ ID NO: 392291 - DNA, 33 bp, Homo sapien
agcctagggggacatacaacagtatcagtggtg

SEQ ID NO: 392292 - DNA, 33 bp, Homo sapien
agcctagggggacatagaacagtatcagtggtg

SEQ ID NO: 392293 - DNA, 33 bp, Homo sapien
tctcctctgttatcccaccctctgcgggctgaa

SEQ ID NO: 392294 - DNA, 33 bp, Homo sapien
tctcctctgttatccctccctctgcgggctgaa

SEQ ID NO: 392295 - DNA, 33 bp, Homo sapien
gcctaaggtatctacaatctggtccttcacaga

SEQ ID NO: 392296 - DNA, 33 bp, Homo sapien
gcctaaggtatctacattctggtccttcacaga

SEQ ID NO: 392297 - DNA, 33 bp, Homo sapien
ttagacacgtgtcactaagaaggtaggcacgtc

SEQ ID NO: 392298 - DNA, 33 bp, Homo sapien
ttagacacgtgtcactgagaaggtaggcacgtc

SEQ ID NO: 392299 - DNA, 33 bp, Homo sapien
tgacttattcctgcaaagagaacctcagttttc

SEQ ID NO: 392300 - DNA, 33 bp, Homo sapien
tgacttattcctgcaaggagaacctcagttttc

SEQ ID NO: 392301 - DNA, 33 bp, Homo sapien
gaactgctgctccaaccggcaggcaaggacagg

SEQ ID NO: 392302 - DNA, 33 bp, Homo sapien
gaactgctgctccaactggcaggcaaggacagg

SEQ ID NO: 392303 - DNA, 33 bp, Homo sapien
cctgtaatacctctaaagtgtgcctcccctgta

SEQ ID NO: 392304 - DNA, 33 bp, Homo sapien
cctgtaatacctctaaggtgtgcctcccctgta

SEQ ID NO: 392305 - DNA, 33 bp, Homo sapien
atgccctaatcttgttgaaaagcggttacatta

SEQ ID NO: 392306 - DNA, 33 bp, Homo sapien
atgccctaatcttgtttaaaagcggttacatta

SEQ ID NO: 392307 - DNA, 33 bp, Homo sapien
ccacactgttggtagcgaggattcaaatccaag

SEQ ID NO: 392308 - DNA, 33 bp, Homo sapien
ccacactgttggtagctaggattcaaatccaag

SEQ ID NO: 392309 - DNA, 33 bp, Homo sapien
ttgaaaacagtgatgccaggccattgagtcagc

SEQ ID NO: 392310 - DNA, 33 bp, Homo sapien
ttgaaaacagtgatgctaggccattgagtcagc

SEQ ID NO: 392311 - DNA, 33 bp, Homo sapien
gcatggccccgttttacagatgagaagatggag

SEQ ID NO: 392312 - DNA, 33 bp, Homo sapien
gcatggccccgttttagagatgagaagatggag

SEQ ID NO: 392313 - DNA, 33 bp, Homo sapien
aatgacacaaggcttacgggctcaggtgctcag

SEQ ID NO: 392314 - DNA, 33 bp, Homo sapien
aatgacacaaggcttatgggctcaggtgctcag

SEQ ID NO: 392315 - DNA, 33 bp, Homo sapien
gaaagtcagagtcgcacaggatcggggaaacgt

SEQ ID NO: 392316 - DNA, 33 bp, Homo sapien
gaaagtcagagtcgcagaggatcggggaaacgt

SEQ ID NO: 392317 - DNA, 33 bp, Homo sapien
gctctgacactgagaacgggcacttccctgctc

SEQ ID NO: 392318 - DNA, 33 bp, Homo sapien
gctctgacactgagaatgggcacttccctgctc

SEQ ID NO: 392319 - DNA, 33 bp, Homo sapien
agcaccccgttggacccgattgaaggagaatgc

SEQ ID NO: 392320 - DNA, 33 bp, Homo sapien
agcaccccgttggacctgattgaaggagaatgc

SEQ ID NO: 392321 - DNA, 33 bp, Homo sapien
agaggagacagcagaaaaagccgcaggacagag

SEQ ID NO: 392322 - DNA, 33 bp, Homo sapien
agaggagacagcagaacaagccgcaggacagag

SEQ ID NO: 392323 - DNA, 33 bp, Homo sapien
tcttggagaggagacacaaccatcctgggaccc

SEQ ID NO: 392324 - DNA, 33 bp, Homo sapien
tcttggagaggagacagaaccatcctgggaccc

SEQ ID NO: 392325 - DNA, 33 bp, Homo sapien
ggccctgattgcaaacactaaccagttttcttc

SEQ ID NO: 392326 - DNA, 33 bp, Homo sapien
ggccctgattgcaaacgctaaccagttttcttc

SEQ ID NO: 392327 - DNA, 33 bp, Homo sapien
gtaaggcaagagaggaatacgcaccggttccat

SEQ ID NO: 392328 - DNA, 33 bp, Homo sapien
gtaaggcaagagaggagtacgcaccggttccat

SEQ ID NO: 392329 - DNA, 33 bp, Homo sapien
tatcagatcacaggacgcaatttttggtttgaa

SEQ ID NO: 392330 - DNA, 33 bp, Homo sapien
tatcagatcacaggactcaatttttggtttgaa

SEQ ID NO: 392331 - DNA, 33 bp, Homo sapien
taattaaactgtgaaacgacatctgcccggatc

SEQ ID NO: 392332 - DNA, 33 bp, Homo sapien
taattaaactgtgaaatgacatctgcccggatc

SEQ ID NO: 392333 - DNA, 33 bp, Homo sapien
tgattaaaaagccgaccgaactcactcgcttgc

SEQ ID NO: 392334 - DNA, 33 bp, Homo sapien
tgattaaaaagccgactgaactcactcgcttgc

SEQ ID NO: 392335 - DNA, 33 bp, Homo sapien
atgcatgctcacacacaaggcactcatatgtat

SEQ ID NO: 392336 - DNA, 33 bp, Homo sapien
atgcatgctcacacacgaggcactcatatgtat

SEQ ID NO: 392337 - DNA, 33 bp, Homo sapien
cacctcaagcacgtaacggaaatggaatcacac

SEQ ID NO: 392338 - DNA, 33 bp, Homo sapien
cacctcaagcacgtaatggaaatggaatcacac

SEQ ID NO: 392339 - DNA, 33 bp, Homo sapien
ccagggcaggtggcgcaactgtaaccgcccagg

SEQ ID NO: 392340 - DNA, 33 bp, Homo sapien
ccagggcaggtggcgcgactgtaaccgcccagg

SEQ ID NO: 392341 - DNA, 33 bp, Homo sapien
ttgcagaaaaccaggccaagattgactctctgc

SEQ ID NO: 392342 - DNA, 33 bp, Homo sapien
ttgcagaaaaccaggcgaagattgactctctgc

SEQ ID NO: 392343 - DNA, 33 bp, Homo sapien
gctttcagtgtgcatacctggactccctctccc

SEQ ID NO: 392344 - DNA, 33 bp, Homo sapien
gctttcagtgtgcatatctggactccctctccc

SEQ ID NO: 392345 - DNA, 33 bp, Homo sapien
ttagagaaggcatttacggctgatctaatcagt

SEQ ID NO: 392346 - DNA, 33 bp, Homo sapien
ttagagaaggcatttagggctgatctaatcagt

SEQ ID NO: 392347 - DNA, 33 bp, Homo sapien
atgaaggaaggactgacagaatatgtggtaggg

SEQ ID NO: 392348 - DNA, 33 bp, Homo sapien
atgaaggaaggactgatagaatatgtggtaggg

SEQ ID NO: 392349 - DNA, 33 bp, Homo sapien
caaaaaatcaatcagcacgaagggcgccaagca

SEQ ID NO: 392350 - DNA, 33 bp, Homo sapien
caaaaaatcaatcagcgcgaagggcgccaagca

SEQ ID NO: 392351 - DNA, 33 bp, Homo sapien
gctgacccatcttagacaccaggagaccgaggc

SEQ ID NO: 392352 - DNA, 33 bp, Homo sapien
gctgacccatcttagagaccaggagaccgaggc

SEQ ID NO: 392353 - DNA, 33 bp, Homo sapien
gaaaagcccagcaagactcggacaggcctgctc

SEQ ID NO: 392354 - DNA, 33 bp, Homo sapien
gaaaagcccagcaagattcggacaggcctgctc

SEQ ID NO: 392355 - DNA, 33 bp, Homo sapien
gtcatggcgacagctcaccctatcatctcaaac

SEQ ID NO: 392356 - DNA, 33 bp, Homo sapien
gtcatggcgacagctccccctatcatctcaaac

SEQ ID NO: 392357 - DNA, 33 bp, Homo sapien
aggggttagagcaggcaagagcccagtccctcc

SEQ ID NO: 392358 - DNA, 33 bp, Homo sapien
aggggttagagcaggcgagagcccagtccctcc

SEQ ID NO: 392359 - DNA, 33 bp, Homo sapien
gacactaaagttgtagcatctgaaatgagcccc

SEQ ID NO: 392360 - DNA, 33 bp, Homo sapien
gacactaaagttgtaggatctgaaatgagcccc

SEQ ID NO: 392361 - DNA, 33 bp, Homo sapien
aatccattcttcccccaaactcagcagaatgtg

SEQ ID NO: 392362 - DNA, 33 bp, Homo sapien
aatccattcttcccccgaactcagcagaatgtg

SEQ ID NO: 392363 - DNA, 33 bp, Homo sapien
atgataaccgcagcccgcactcacggaacactc

SEQ ID NO: 392364 - DNA, 33 bp, Homo sapien
atgataaccgcagccctcactcacggaacactc

SEQ ID NO: 392365 - DNA, 33 bp, Homo sapien
aaaactgacccccaaacagcaattcaaaaaggg

SEQ ID NO: 392366 - DNA, 33 bp, Homo sapien
aaaactgacccccaaagagcaattcaaaaaggg

SEQ ID NO: 392367 - DNA, 33 bp, Homo sapien
aggacctacagcagacaaagtgctaaataggac

SEQ ID NO: 392368 - DNA, 33 bp, Homo sapien
aggacctacagcagacgaagtgctaaataggac

SEQ ID NO: 392369 - DNA, 33 bp, Homo sapien
ttcttatgaagattaaatgaaaatgacaatgta

SEQ ID NO: 392370 - DNA, 33 bp, Homo sapien
ttcttatgaagattaagtgaaaatgacaatgta

SEQ ID NO: 392371 - DNA, 33 bp, Homo sapien
ctcagagtagccaaaacagtggtccaagaaaga

SEQ ID NO: 392372 - DNA, 33 bp, Homo sapien
ctcagagtagccaaaagagtggtccaagaaaga

SEQ ID NO: 392373 - DNA, 33 bp, Homo sapien
catggtcaccccgtaacatggccttatttgtaa

SEQ ID NO: 392374 - DNA, 33 bp, Homo sapien
catggtcaccccgtaatatggccttatttgtaa

SEQ ID NO: 392375 - DNA, 33 bp, Homo sapien
agctgctcagtgaagactccgaatatgcgtttt

SEQ ID NO: 392376 - DNA, 33 bp, Homo sapien
agctgctcagtgaagattccgaatatgcgtttt

SEQ ID NO: 392377 - DNA, 33 bp, Homo sapien
cctgccaggtgagagaccgcacttgcgtgcttc

SEQ ID NO: 392378 - DNA, 33 bp, Homo sapien
cctgccaggtgagagatcgcacttgcgtgcttc

SEQ ID NO: 392379 - DNA, 33 bp, Homo sapien
cagaaacaactgttcacaggcttcatggagcac

SEQ ID NO: 392380 - DNA, 33 bp, Homo sapien
cagaaacaactgttcataggcttcatggagcac

SEQ ID NO: 392381 - DNA, 33 bp, Homo sapien
aggagacaacgttctacaaatcaacaagagctg

SEQ ID NO: 392382 - DNA, 33 bp, Homo sapien
aggagacaacgttctataaatcaacaagagctg

SEQ ID NO: 392383 - DNA, 33 bp, Homo sapien
gtgggtttcctatccacgtattcatctagattt

SEQ ID NO: 392384 - DNA, 33 bp, Homo sapien
gtgggtttcctatccatgtattcatctagattt

SEQ ID NO: 392385 - DNA, 33 bp, Homo sapien
gtggacaggcactggcaagatgagtgaaaggtc

SEQ ID NO: 392386 - DNA, 33 bp, Homo sapien
gtggacaggcactggcgagatgagtgaaaggtc

SEQ ID NO: 392387 - DNA, 33 bp, Homo sapien
aaaattgctacctgaaacctcacagagcaccca

SEQ ID NO: 392388 - DNA, 33 bp, Homo sapien
aaaattgctacctgaagcctcacagagcaccca

SEQ ID NO: 392389 - DNA, 33 bp, Homo sapien
agagaaaagaaaggacacatggggccggcgaca

SEQ ID NO: 392390 - DNA, 33 bp, Homo sapien
agagaaaagaaaggacgcatggggccggcgaca

SEQ ID NO: 392391 - DNA, 33 bp, Homo sapien
cctttcttttctctgacggtgcttgtagccagg

SEQ ID NO: 392392 - DNA, 33 bp, Homo sapien
cctttcttttctctgatggtgcttgtagccagg

SEQ ID NO: 392393 - DNA, 33 bp, Homo sapien
catgtctctgtgtgaacgcaggcgctaatgaaa

SEQ ID NO: 392394 - DNA, 33 bp, Homo sapien
catgtctctgtgtgaatgcaggcgctaatgaaa

SEQ ID NO: 392395 - DNA, 33 bp, Homo sapien
ctacaaaaatgtttcaaatacaatgagctgtac

SEQ ID NO: 392396 - DNA, 33 bp, Homo sapien
ctacaaaaatgtttcatatacaatgagctgtac

SEQ ID NO: 392397 - DNA, 33 bp, Homo sapien
cagagacagatgcagacagcagaatgatgatgc

SEQ ID NO: 392398 - DNA, 33 bp, Homo sapien
cagagacagatgcagatagcagaatgatgatgc

SEQ ID NO: 392399 - DNA, 33 bp, Homo sapien
ttttcctaataccagcaccatctgctagcaatt

SEQ ID NO: 392400 - DNA, 33 bp, Homo sapien
ttttcctaataccagcgccatctgctagcaatt

SEQ ID NO: 392401 - DNA, 33 bp, Homo sapien
gaatactgctctctgacagaactttcttcttct

SEQ ID NO: 392402 - DNA, 33 bp, Homo sapien
gaatactgctctctgatagaactttcttcttct

SEQ ID NO: 392403 - DNA, 33 bp, Homo sapien
aaaggatgactgatgaagactttatagacattc

SEQ ID NO: 392404 - DNA, 33 bp, Homo sapien
aaaggatgactgatgaggactttatagacattc

SEQ ID NO: 392405 - DNA, 33 bp, Homo sapien
ccatttctcccagaaactcaagaccaacaggca

SEQ ID NO: 392406 - DNA, 33 bp, Homo sapien
ccatttctcccagaaagtcaagaccaacaggca

SEQ ID NO: 392407 - DNA, 33 bp, Homo sapien
cacctcctgtttgcccaacatcctgccccagcg

SEQ ID NO: 392408 - DNA, 33 bp, Homo sapien
cacctcctgtttgcccgacatcctgccccagcg

SEQ ID NO: 392409 - DNA, 33 bp, Homo sapien
tcgatgactcttacgacgagagcgatgaggagg

SEQ ID NO: 392410 - DNA, 33 bp, Homo sapien
tcgatgactcttacgatgagagcgatgaggagg

SEQ ID NO: 392411 - DNA, 33 bp, Homo sapien
ttcttgtaccagcgtacgattcttgcacagttg

SEQ ID NO: 392412 - DNA, 33 bp, Homo sapien
ttcttgtaccagcgtatgattcttgcacagttg

SEQ ID NO: 392413 - DNA, 33 bp, Homo sapien
caaccctcctgggaagccacagcaccaggcgga

SEQ ID NO: 392414 - DNA, 33 bp, Homo sapien
caaccctcctgggaagtcacagcaccaggcgga

SEQ ID NO: 392415 - DNA, 33 bp, Homo sapien
ttgaagcttacaaaataagaatgtgccatgcat

SEQ ID NO: 392416 - DNA, 33 bp, Homo sapien
ttgaagcttacaaaatgagaatgtgccatgcat

SEQ ID NO: 392417 - DNA, 33 bp, Homo sapien
agccctttttactgacaatgcacccaacctttt

SEQ ID NO: 392418 - DNA, 33 bp, Homo sapien
agccctttttactgacgatgcacccaacctttt

SEQ ID NO: 392419 - DNA, 33 bp, Homo sapien
gacaaaaaggggagcccagtgagttcataagca

SEQ ID NO: 392420 - DNA, 33 bp, Homo sapien
gacaaaaaggggagcctagtgagttcataagca

SEQ ID NO: 392421 - DNA, 33 bp, Homo sapien
tgccagcccaaaagtcagacacatgcttgagtg

SEQ ID NO: 392422 - DNA, 33 bp, Homo sapien
tgccagcccaaaagtcggacacatgcttgagtg

SEQ ID NO: 392423 - DNA, 33 bp, Homo sapien
agcctaggaaaataacaagttacagtgaagaca

SEQ ID NO: 392424 - DNA, 33 bp, Homo sapien
agcctaggaaaataacgagttacagtgaagaca

SEQ ID NO: 392425 - DNA, 33 bp, Homo sapien
ggactgcatgcccaagcctctcagcaggagccg

SEQ ID NO: 392426 - DNA, 33 bp, Homo sapien
ggactgcatgcccaagtctctcagcaggagccg

SEQ ID NO: 392427 - DNA, 33 bp, Homo sapien
gggcaccgggcgcgtccactagataggacccca

SEQ ID NO: 392428 - DNA, 33 bp, Homo sapien
gggcaccgggcgcgtctactagataggacccca

SEQ ID NO: 392429 - DNA, 33 bp, Homo sapien
gtgtgcatgtgtggtacgtatgtgtgcatgtgg

SEQ ID NO: 392430 - DNA, 33 bp, Homo sapien
gtgtgcatgtgtggtatgtatgtgtgcatgtgg

SEQ ID NO: 392431 - DNA, 33 bp, Homo sapien
gtctctcttaaacccacgctttacctggcatga

SEQ ID NO: 392432 - DNA, 33 bp, Homo sapien
gtctctcttaaacccatgctttacctggcatga

SEQ ID NO: 392433 - DNA, 33 bp, Homo sapien
gagctggatttccacacgggttacataggcggg

SEQ ID NO: 392434 - DNA, 33 bp, Homo sapien
gagctggatttccacatgggttacataggcggg

SEQ ID NO: 392435 - DNA, 33 bp, Homo sapien
gtgctctcagccttagccaccatatggagaccc

SEQ ID NO: 392436 - DNA, 33 bp, Homo sapien
gtgctctcagccttaggcaccatatggagaccc

SEQ ID NO: 392437 - DNA, 33 bp, Homo sapien
gttcctaagtgatgccgatacagaaggtcccgg

SEQ ID NO: 392438 - DNA, 33 bp, Homo sapien
gttcctaagtgatgcctatacagaaggtcccgg

SEQ ID NO: 392439 - DNA, 33 bp, Homo sapien
acccctccaggccttccatttcactagcagtgg

SEQ ID NO: 392440 - DNA, 33 bp, Homo sapien
acccctccaggccttctatttcactagcagtgg

SEQ ID NO: 392441 - DNA, 33 bp, Homo sapien
tggcccaagcctgttcccatcagtatctctcgc

SEQ ID NO: 392442 - DNA, 33 bp, Homo sapien
tggcccaagcctgttcgcatcagtatctctcgc

SEQ ID NO: 392443 - DNA, 33 bp, Homo sapien
aatagatgataaaatccgagtactttgtgcagg

SEQ ID NO: 392444 - DNA, 33 bp, Homo sapien
aatagatgataaaatcggagtactttgtgcagg

SEQ ID NO: 392445 - DNA, 33 bp, Homo sapien
ttgatcacagcccacccggtggattttgacatg

SEQ ID NO: 392446 - DNA, 33 bp, Homo sapien
ttgatcacagcccacctggtggattttgacatg

SEQ ID NO: 392447 - DNA, 33 bp, Homo sapien
atagaccaattatatcacgagaaggacaggaat

SEQ ID NO: 392448 - DNA, 33 bp, Homo sapien
atagaccaattatatcccgagaaggacaggaat

SEQ ID NO: 392449 - DNA, 33 bp, Homo sapien
gcacatttattgtagcaatgtctgaactttttt

SEQ ID NO: 392450 - DNA, 33 bp, Homo sapien
gcacatttattgtagcgatgtctgaactttttt

SEQ ID NO: 392451 - DNA, 33 bp, Homo sapien
tttccacacaggctacaagatattttatttaca

SEQ ID NO: 392452 - DNA, 33 bp, Homo sapien
tttccacacaggctaccagatattttatttaca

SEQ ID NO: 392453 - DNA, 33 bp, Homo sapien
tctcttgatgctgttacaagccgcccgttttca

SEQ ID NO: 392454 - DNA, 33 bp, Homo sapien
tctcttgatgctgttataagccgcccgttttca

SEQ ID NO: 392455 - DNA, 33 bp, Homo sapien
gccacagatacatcaaagcacaggcctgggaag

SEQ ID NO: 392456 - DNA, 33 bp, Homo sapien
gccacagatacatcaacgcacaggcctgggaag

SEQ ID NO: 392457 - DNA, 33 bp, Homo sapien
tagcgttttctccagaagcatgataccaagcat

SEQ ID NO: 392458 - DNA, 33 bp, Homo sapien
tagcgttttctccagaggcatgataccaagcat

SEQ ID NO: 392459 - DNA, 33 bp, Homo sapien
cttccgcatcactacacaagtgggagtggggtc

SEQ ID NO: 392460 - DNA, 33 bp, Homo sapien
cttccgcatcactacagaagtgggagtggggtc

SEQ ID NO: 392461 - DNA, 33 bp, Homo sapien
ctcatcatggtaagtcacttctgtgcagcatgt

SEQ ID NO: 392462 - DNA, 33 bp, Homo sapien
ctcatcatggtaagtcgcttctgtgcagcatgt

SEQ ID NO: 392463 - DNA, 33 bp, Homo sapien
ctctctgccgggcaccaaaacctactcatatca

SEQ ID NO: 392464 - DNA, 33 bp, Homo sapien
ctctctgccgggcaccgaaacctactcatatca

SEQ ID NO: 392465 - DNA, 33 bp, Homo sapien
gcagcagaagagccaacgtgcatggggattcca

SEQ ID NO: 392466 - DNA, 33 bp, Homo sapien
gcagcagaagagccaatgtgcatggggattcca

SEQ ID NO: 392467 - DNA, 33 bp, Homo sapien
ggagttgttttcagcaaagtcacaatgatagca

SEQ ID NO: 392468 - DNA, 33 bp, Homo sapien
ggagttgttttcagcagagtcacaatgatagca

SEQ ID NO: 392469 - DNA, 33 bp, Homo sapien
ccaaatttagagcaagcccctttgatagtgtat

SEQ ID NO: 392470 - DNA, 33 bp, Homo sapien
ccaaatttagagcaaggccctttgatagtgtat

SEQ ID NO: 392471 - DNA, 33 bp, Homo sapien
ggacattaatcgctagcatttggttcttcgcac

SEQ ID NO: 392472 - DNA, 33 bp, Homo sapien
ggacattaatcgctaggatttggttcttcgcac

SEQ ID NO: 392473 - DNA, 33 bp, Homo sapien
tgtgctgccgtgacagactccattcttcaggga

SEQ ID NO: 392474 - DNA, 33 bp, Homo sapien
tgtgctgccgtgacaggctccattcttcaggga

SEQ ID NO: 392475 - DNA, 33 bp, Homo sapien
tgaagacgaactgcagactcttagacaagtctt

SEQ ID NO: 392476 - DNA, 33 bp, Homo sapien
tgaagacgaactgcaggctcttagacaagtctt

SEQ ID NO: 392477 - DNA, 33 bp, Homo sapien
aaggggtgcccagatacaccagatctccccagc

SEQ ID NO: 392478 - DNA, 33 bp, Homo sapien
aaggggtgcccagatataccagatctccccagc

SEQ ID NO: 392479 - DNA, 33 bp, Homo sapien
ccgcttcaacatggaccgatttctgttgagcct

SEQ ID NO: 392480 - DNA, 33 bp, Homo sapien
ccgcttcaacatggacggatttctgttgagcct

SEQ ID NO: 392481 - DNA, 33 bp, Homo sapien
tgggatcatcagtgaacaaatcaaacattcctg

SEQ ID NO: 392482 - DNA, 33 bp, Homo sapien
tgggatcatcagtgaagaaatcaaacattcctg

SEQ ID NO: 392483 - DNA, 33 bp, Homo sapien
gtgagaagataaccacaacagcactgttccagg

SEQ ID NO: 392484 - DNA, 33 bp, Homo sapien
gtgagaagataaccacgacagcactgttccagg

SEQ ID NO: 392485 - DNA, 33 bp, Homo sapien
tttgaaaatccatgtaagttgagagtcacccca

SEQ ID NO: 392486 - DNA, 33 bp, Homo sapien
tttgaaaatccatgtaggttgagagtcacccca

SEQ ID NO: 392487 - DNA, 33 bp, Homo sapien
tgccagccagaaggcactgaaggagaaggagaa

SEQ ID NO: 392488 - DNA, 33 bp, Homo sapien
tgccagccagaaggcattgaaggagaaggagaa

SEQ ID NO: 392489 - DNA, 33 bp, Homo sapien
cacagagaagggggcccagcaaaagatcctgtc

SEQ ID NO: 392490 - DNA, 33 bp, Homo sapien
cacagagaagggggcctagcaaaagatcctgtc

SEQ ID NO: 392491 - DNA, 33 bp, Homo sapien
gtgacagggcaaggaaagaagaaaatgcataca

SEQ ID NO: 392492 - DNA, 33 bp, Homo sapien
gtgacagggcaaggaaggaagaaaatgcataca

SEQ ID NO: 392493 - DNA, 33 bp, Homo sapien
tcaccagtcacttagcaaaagatgacttcgtga

SEQ ID NO: 392494 - DNA, 33 bp, Homo sapien
tcaccagtcacttagcgaaagatgacttcgtga

SEQ ID NO: 392495 - DNA, 33 bp, Homo sapien
atacctattcagaatgcaaaaatgcctgttctg

SEQ ID NO: 392496 - DNA, 33 bp, Homo sapien
atacctattcagaatggaaaaatgcctgttctg

SEQ ID NO: 392497 - DNA, 33 bp, Homo sapien
tgggtgggacaggtaacaggatgagtcctggag

SEQ ID NO: 392498 - DNA, 33 bp, Homo sapien
tgggtgggacaggtaagaggatgagtcctggag

SEQ ID NO: 392499 - DNA, 33 bp, Homo sapien
ataatgtcctgcatccagcgggatggtgcccca

SEQ ID NO: 392500 - DNA, 33 bp, Homo sapien
ataatgtcctgcatccggcgggatggtgcccca

SEQ ID NO: 392501 - DNA, 33 bp, Homo sapien
ttcttatactctagaaaacatgaagacaaaagg

SEQ ID NO: 392502 - DNA, 33 bp, Homo sapien
ttcttatactctagaatacatgaagacaaaagg

SEQ ID NO: 392503 - DNA, 33 bp, Homo sapien
gccccaactgttgtcacgggaaacggtcaggaa

SEQ ID NO: 392504 - DNA, 33 bp, Homo sapien
gccccaactgttgtcatgggaaacggtcaggaa

SEQ ID NO: 392505 - DNA, 33 bp, Homo sapien
gtctctggaaggctagaaagttaatacgggacg

SEQ ID NO: 392506 - DNA, 33 bp, Homo sapien
gtctctggaaggctagcaagttaatacgggacg

SEQ ID NO: 392507 - DNA, 33 bp, Homo sapien
ccgttcatagaaggacacgacttgtcatcctgc

SEQ ID NO: 392508 - DNA, 33 bp, Homo sapien
ccgttcatagaaggacccgacttgtcatcctgc

SEQ ID NO: 392509 - DNA, 33 bp, Homo sapien
gatgaaaggagagacactgaggaaaattcaacc

SEQ ID NO: 392510 - DNA, 33 bp, Homo sapien
gatgaaaggagagacattgaggaaaattcaacc

SEQ ID NO: 392511 - DNA, 33 bp, Homo sapien
gtcctgagctgtaatacgatctcaggtggcaat

SEQ ID NO: 392512 - DNA, 33 bp, Homo sapien
gtcctgagctgtaatatgatctcaggtggcaat

SEQ ID NO: 392513 - DNA, 33 bp, Homo sapien
cacttgagctctgcagcaaaactcctcctttga

SEQ ID NO: 392514 - DNA, 33 bp, Homo sapien
cacttgagctctgcaggaaaactcctcctttga

SEQ ID NO: 392515 - DNA, 33 bp, Homo sapien
acagaaataaaaggaaaggactgcttatacaaa

SEQ ID NO: 392516 - DNA, 33 bp, Homo sapien
acagaaataaaaggaacggactgcttatacaaa

SEQ ID NO: 392517 - DNA, 33 bp, Homo sapien
agtttctgcctaaaccactattctagaactgcc

SEQ ID NO: 392518 - DNA, 33 bp, Homo sapien
agtttctgcctaaaccgctattctagaactgcc

SEQ ID NO: 392519 - DNA, 33 bp, Homo sapien
tgactccgtaattcaaaagatgtgaaatcagct

SEQ ID NO: 392520 - DNA, 33 bp, Homo sapien
tgactccgtaattcaagagatgtgaaatcagct

SEQ ID NO: 392521 - DNA, 33 bp, Homo sapien
aggttacatttataagacagggcatttgaaaac

SEQ ID NO: 392522 - DNA, 33 bp, Homo sapien
aggttacatttataagccagggcatttgaaaac

SEQ ID NO: 392523 - DNA, 33 bp, Homo sapien
cctccttaggcaagaacacatggcttttgtata

SEQ ID NO: 392524 - DNA, 33 bp, Homo sapien
cctccttaggcaagaatacatggcttttgtata

SEQ ID NO: 392525 - DNA, 33 bp, Homo sapien
gcgtgggattcaaatccagggctctgaacaaac

SEQ ID NO: 392526 - DNA, 33 bp, Homo sapien
gcgtgggattcaaatctagggctctgaacaaac

SEQ ID NO: 392527 - DNA, 33 bp, Homo sapien
tcttttggtttaaggcaattaaaatgcagatac

SEQ ID NO: 392528 - DNA, 33 bp, Homo sapien
tcttttggtttaaggcgattaaaatgcagatac

SEQ ID NO: 392529 - DNA, 33 bp, Homo sapien
gtttggaaaacactaaactaaggtaggaatgca

SEQ ID NO: 392530 - DNA, 33 bp, Homo sapien
gtttggaaaacactaatctaaggtaggaatgca

SEQ ID NO: 392531 - DNA, 33 bp, Homo sapien
ggtaatcagaggttggaagaatattgaagatgg

SEQ ID NO: 392532 - DNA, 33 bp, Homo sapien
ggtaatcagaggttgggagaatattgaagatgg

SEQ ID NO: 392533 - DNA, 33 bp, Homo sapien
agcgctggctagagacacagagtctgaggccct

SEQ ID NO: 392534 - DNA, 33 bp, Homo sapien
agcgctggctagagacgcagagtctgaggccct

SEQ ID NO: 392535 - DNA, 33 bp, Homo sapien
gctcctctccctgtagcagcacagcccgagata

SEQ ID NO: 392536 - DNA, 33 bp, Homo sapien
gctcctctccctgtagtagcacagcccgagata

SEQ ID NO: 392537 - DNA, 33 bp, Homo sapien
agagggtgtttgcaagcaaggccgagatgacct

SEQ ID NO: 392538 - DNA, 33 bp, Homo sapien
agagggtgtttgcaaggaaggccgagatgacct

SEQ ID NO: 392539 - DNA, 33 bp, Homo sapien
gagatggcaagaatccacttcccgcatattgaa

SEQ ID NO: 392540 - DNA, 33 bp, Homo sapien
gagatggcaagaatccgcttcccgcatattgaa

SEQ ID NO: 392541 - DNA, 33 bp, Homo sapien
agatgagaaggtgctcacatggagcgtccgggc

SEQ ID NO: 392542 - DNA, 33 bp, Homo sapien
agatgagaaggtgctcgcatggagcgtccgggc

SEQ ID NO: 392543 - DNA, 33 bp, Homo sapien
ctttacatgagttacacgcatcttcttctcctt

SEQ ID NO: 392544 - DNA, 33 bp, Homo sapien
ctttacatgagttacatgcatcttcttctcctt

SEQ ID NO: 392545 - DNA, 33 bp, Homo sapien
ggcaggggagaagttaagcgtgttaggcgccag

SEQ ID NO: 392546 - DNA, 33 bp, Homo sapien
ggcaggggagaagttacgcgtgttaggcgccag

SEQ ID NO: 392547 - DNA, 33 bp, Homo sapien
gagcgtgtactctctacgcctgttgatataaca

SEQ ID NO: 392548 - DNA, 33 bp, Homo sapien
gagcgtgtactctctaggcctgttgatataaca

SEQ ID NO: 392549 - DNA, 33 bp, Homo sapien
ccaccaggatggctaaaacataaacgactgaaa

SEQ ID NO: 392550 - DNA, 33 bp, Homo sapien
ccaccaggatggctaacacataaacgactgaaa

SEQ ID NO: 392551 - DNA, 33 bp, Homo sapien
tccagcaaccgtgctcccaagtgtttacccgaa

SEQ ID NO: 392552 - DNA, 33 bp, Homo sapien
tccagcaaccgtgctctcaagtgtttacccgaa

SEQ ID NO: 392553 - DNA, 33 bp, Homo sapien
acaacgactcctgcgaagacgtggggctgtgaa

SEQ ID NO: 392554 - DNA, 33 bp, Homo sapien
acaacgactcctgcgatgacgtggggctgtgaa

SEQ ID NO: 392555 - DNA, 33 bp, Homo sapien
gattcttaagtctcacacctagaaacggacaca

SEQ ID NO: 392556 - DNA, 33 bp, Homo sapien
gattcttaagtctcacgcctagaaacggacaca

SEQ ID NO: 392557 - DNA, 33 bp, Homo sapien
ccaagtctctctgcaacggaaaaagcagctctg

SEQ ID NO: 392558 - DNA, 33 bp, Homo sapien
ccaagtctctctgcaatggaaaaagcagctctg

SEQ ID NO: 392559 - DNA, 33 bp, Homo sapien
ttgacagctaacagaaacagtgtgagaggaaat

SEQ ID NO: 392560 - DNA, 33 bp, Homo sapien
ttgacagctaacagaaccagtgtgagaggaaat

SEQ ID NO: 392561 - DNA, 33 bp, Homo sapien
ctacgaaccatggtgcactgaggccactgaggg

SEQ ID NO: 392562 - DNA, 33 bp, Homo sapien
ctacgaaccatggtgcgctgaggccactgaggg

SEQ ID NO: 392563 - DNA, 33 bp, Homo sapien
ataagaaaagtgaaaacgtgaagttgaaaactg

SEQ ID NO: 392564 - DNA, 33 bp, Homo sapien
ataagaaaagtgaaaatgtgaagttgaaaactg

SEQ ID NO: 392565 - DNA, 33 bp, Homo sapien
ctttgtgcgattcttacaactttcctgtacatt

SEQ ID NO: 392566 - DNA, 33 bp, Homo sapien
ctttgtgcgattcttataactttcctgtacatt

SEQ ID NO: 392567 - DNA, 33 bp, Homo sapien
cctgtgcctgaatcgccgcagagcccattggaa

SEQ ID NO: 392568 - DNA, 33 bp, Homo sapien
cctgtgcctgaatcgctgcagagcccattggaa

SEQ ID NO: 392569 - DNA, 33 bp, Homo sapien
tcagttgggaattttccctggagagtggttttg

SEQ ID NO: 392570 - DNA, 33 bp, Homo sapien
tcagttgggaattttctctggagagtggttttg

SEQ ID NO: 392571 - DNA, 33 bp, Homo sapien
ccttccacattcagggacatcacgatagtggct

SEQ ID NO: 392572 - DNA, 33 bp, Homo sapien
ccttccacattcagggtcatcacgatagtggct

SEQ ID NO: 392573 - DNA, 33 bp, Homo sapien
acttccctgcaggtcacgagccagattctaata

SEQ ID NO: 392574 - DNA, 33 bp, Homo sapien
acttccctgcaggtcaggagccagattctaata

SEQ ID NO: 392575 - DNA, 33 bp, Homo sapien
attaattaccaggtcaaatcacttggagagaga

SEQ ID NO: 392576 - DNA, 33 bp, Homo sapien
attaattaccaggtcagatcacttggagagaga

SEQ ID NO: 392577 - DNA, 33 bp, Homo sapien
gttatttgtgagctaaataagaaaatgtttact

SEQ ID NO: 392578 - DNA, 33 bp, Homo sapien
gttatttgtgagctaattaagaaaatgtttact

SEQ ID NO: 392579 - DNA, 33 bp, Homo sapien
tccccagtgcctaaagcaacgcctgacctaaag

SEQ ID NO: 392580 - DNA, 33 bp, Homo sapien
tccccagtgcctaaaggaacgcctgacctaaag

SEQ ID NO: 392581 - DNA, 33 bp, Homo sapien
gcttactctgcagtgacgataatttccacgaac

SEQ ID NO: 392582 - DNA, 33 bp, Homo sapien
gcttactctgcagtgatgataatttccacgaac

SEQ ID NO: 392583 - DNA, 33 bp, Homo sapien
gctcagtgtggtaaacaaagatcggaacttggg

SEQ ID NO: 392584 - DNA, 33 bp, Homo sapien
gctcagtgtggtaaacgaagatcggaacttggg

SEQ ID NO: 392585 - DNA, 33 bp, Homo sapien
attccaatcctaaaagcccaacacactgtagca

SEQ ID NO: 392586 - DNA, 33 bp, Homo sapien
attccaatcctaaaagtccaacacactgtagca

SEQ ID NO: 392587 - DNA, 33 bp, Homo sapien
gctgcctaaattcacaagaaagagccctgacaa

SEQ ID NO: 392588 - DNA, 33 bp, Homo sapien
gctgcctaaattcacaggaaagagccctgacaa

SEQ ID NO: 392589 - DNA, 33 bp, Homo sapien
aaccactgatagccacagaggttaaacttgcag

SEQ ID NO: 392590 - DNA, 33 bp, Homo sapien
aaccactgatagccacggaggttaaacttgcag

SEQ ID NO: 392591 - DNA, 33 bp, Homo sapien
gttggggtggctaccacgttaagaccacgtttc

SEQ ID NO: 392592 - DNA, 33 bp, Homo sapien
gttggggtggctaccatgttaagaccacgtttc

SEQ ID NO: 392593 - DNA, 33 bp, Homo sapien
ggtgccttcatatagaagttagaaggaggaagg

SEQ ID NO: 392594 - DNA, 33 bp, Homo sapien
ggtgccttcatatagaggttagaaggaggaagg

SEQ ID NO: 392595 - DNA, 33 bp, Homo sapien
gcagcaagatgactgacggagcccagacaaaat

SEQ ID NO: 392596 - DNA, 33 bp, Homo sapien
gcagcaagatgactgatggagcccagacaaaat

SEQ ID NO: 392597 - DNA, 33 bp, Homo sapien
tgaatgcacaaatgaacgaatgggactcaatca

SEQ ID NO: 392598 - DNA, 33 bp, Homo sapien
tgaatgcacaaatgaatgaatgggactcaatca

SEQ ID NO: 392599 - DNA, 33 bp, Homo sapien
gagaaataaaggacccacggactggtggcctcc

SEQ ID NO: 392600 - DNA, 33 bp, Homo sapien
gagaaataaaggacccgcggactggtggcctcc

SEQ ID NO: 392601 - DNA, 33 bp, Homo sapien
cctcttttttattagccgagagcttgtcatgtt

SEQ ID NO: 392602 - DNA, 33 bp, Homo sapien
cctcttttttattagctgagagcttgtcatgtt

SEQ ID NO: 392603 - DNA, 33 bp, Homo sapien
cctggagagtttgttacgggtcagtcatccttg

SEQ ID NO: 392604 - DNA, 33 bp, Homo sapien
cctggagagtttgttatgggtcagtcatccttg

SEQ ID NO: 392605 - DNA, 33 bp, Homo sapien
ggggaatcaaagatctaaatcagagggtgcttt

SEQ ID NO: 392606 - DNA, 33 bp, Homo sapien
ggggaatcaaagatctcaatcagagggtgcttt

SEQ ID NO: 392607 - DNA, 33 bp, Homo sapien
gagaccgatgctccaaagcccagcctagtgcta

SEQ ID NO: 392608 - DNA, 33 bp, Homo sapien
gagaccgatgctccaacgcccagcctagtgcta

SEQ ID NO: 392609 - DNA, 33 bp, Homo sapien
gccgcgctgtcaaaaccctttccctagtgtaga

SEQ ID NO: 392610 - DNA, 33 bp, Homo sapien
gccgcgctgtcaaaactctttccctagtgtaga

SEQ ID NO: 392611 - DNA, 33 bp, Homo sapien
aaaactggtatcggaaagctgttctctaaaatg

SEQ ID NO: 392612 - DNA, 33 bp, Homo sapien
aaaactggtatcggaaggctgttctctaaaatg

SEQ ID NO: 392613 - DNA, 33 bp, Homo sapien
atccacaggtcctagacataagagcacaaacat

SEQ ID NO: 392614 - DNA, 33 bp, Homo sapien
atccacaggtcctagagataagagcacaaacat

SEQ ID NO: 392615 - DNA, 33 bp, Homo sapien
ggtcacatttaaccctcagggacgtggtgtgat

SEQ ID NO: 392616 - DNA, 33 bp, Homo sapien
ggtcacatttaaccctgagggacgtggtgtgat

SEQ ID NO: 392617 - DNA, 33 bp, Homo sapien
cgggttttatggtaccacgccacacatcgcata

SEQ ID NO: 392618 - DNA, 33 bp, Homo sapien
cgggttttatggtaccgcgccacacatcgcata

SEQ ID NO: 392619 - DNA, 33 bp, Homo sapien
taccataaaacccgtgaaataacagcagaggca

SEQ ID NO: 392620 - DNA, 33 bp, Homo sapien
taccataaaacccgtggaataacagcagaggca

SEQ ID NO: 392621 - DNA, 33 bp, Homo sapien
catcaaagtcgtcttgcagtctgttaaaatgca

SEQ ID NO: 392622 - DNA, 33 bp, Homo sapien
catcaaagtcgtcttggagtctgttaaaatgca

SEQ ID NO: 392623 - DNA, 33 bp, Homo sapien
caacagcaggtgaaagaaatctgtgctgttaga

SEQ ID NO: 392624 - DNA, 33 bp, Homo sapien
caacagcaggtgaaagcaatctgtgctgttaga

SEQ ID NO: 392625 - DNA, 33 bp, Homo sapien
ctacaaataaagacaactgggatgtaagtgatt

SEQ ID NO: 392626 - DNA, 33 bp, Homo sapien
ctacaaataaagacaagtgggatgtaagtgatt

SEQ ID NO: 392627 - DNA, 33 bp, Homo sapien
ttgtctttatttgtagaaagtccagtattgcat

SEQ ID NO: 392628 - DNA, 33 bp, Homo sapien
ttgtctttatttgtaggaagtccagtattgcat

SEQ ID NO: 392629 - DNA, 33 bp, Homo sapien
gtctaaacctaatcaactagtcacagacgctcc

SEQ ID NO: 392630 - DNA, 33 bp, Homo sapien
gtctaaacctaatcaagtagtcacagacgctcc

SEQ ID NO: 392631 - DNA, 33 bp, Homo sapien
gctctgagtctttttcaaacaactggggaaagt

SEQ ID NO: 392632 - DNA, 33 bp, Homo sapien
gctctgagtctttttccaacaactggggaaagt

SEQ ID NO: 392633 - DNA, 33 bp, Homo sapien
tgaatcgacaggggcgcatgaagtgaggatggg

SEQ ID NO: 392634 - DNA, 33 bp, Homo sapien
tgaatcgacaggggcgtatgaagtgaggatggg

SEQ ID NO: 392635 - DNA, 33 bp, Homo sapien
agaaggagtgggtgcaatcttcttatcaagtca

SEQ ID NO: 392636 - DNA, 33 bp, Homo sapien
agaaggagtgggtgcagtcttcttatcaagtca

SEQ ID NO: 392637 - DNA, 33 bp, Homo sapien
ggaagatcccttctaacctgcatgggcacaggg

SEQ ID NO: 392638 - DNA, 33 bp, Homo sapien
ggaagatcccttctaagctgcatgggcacaggg

SEQ ID NO: 392639 - DNA, 33 bp, Homo sapien
gttcaaatctctgttacaagaccctgaccctgg

SEQ ID NO: 392640 - DNA, 33 bp, Homo sapien
gttcaaatctctgttataagaccctgaccctgg

SEQ ID NO: 392641 - DNA, 33 bp, Homo sapien
tgctgtgcgcacaggaagatgttggattttgag

SEQ ID NO: 392642 - DNA, 33 bp, Homo sapien
tgctgtgcgcacaggaggatgttggattttgag

SEQ ID NO: 392643 - DNA, 33 bp, Homo sapien
caacaataacagctaacgcatcttcaccacttg

SEQ ID NO: 392644 - DNA, 33 bp, Homo sapien
caacaataacagctaatgcatcttcaccacttg

SEQ ID NO: 392645 - DNA, 33 bp, Homo sapien
gagaggcagtgatgacaggatctcaaagactga

SEQ ID NO: 392646 - DNA, 33 bp, Homo sapien
gagaggcagtgatgacgggatctcaaagactga

SEQ ID NO: 392647 - DNA, 33 bp, Homo sapien
aaggcagattcacatagcaggttgttccaaaca

SEQ ID NO: 392648 - DNA, 33 bp, Homo sapien
aaggcagattcacatatcaggttgttccaaaca

SEQ ID NO: 392649 - DNA, 33 bp, Homo sapien
cgtaaacagaaaccaccggtggaatgcagatgt

SEQ ID NO: 392650 - DNA, 33 bp, Homo sapien
cgtaaacagaaaccactggtggaatgcagatgt

SEQ ID NO: 392651 - DNA, 33 bp, Homo sapien
tgtggcacttttcgtacgtgtgactttggacac

SEQ ID NO: 392652 - DNA, 33 bp, Homo sapien
tgtggcacttttcgtatgtgtgactttggacac

SEQ ID NO: 392653 - DNA, 33 bp, Homo sapien
gacgtggaggacacccccgtgtgttgcttcaga

SEQ ID NO: 392654 - DNA, 33 bp, Homo sapien
gacgtggaggacaccctcgtgtgttgcttcaga

SEQ ID NO: 392655 - DNA, 33 bp, Homo sapien
gacacagaacgtgtctaaagggcaaagagcagg

SEQ ID NO: 392656 - DNA, 33 bp, Homo sapien
gacacagaacgtgtctgaagggcaaagagcagg

SEQ ID NO: 392657 - DNA, 33 bp, Homo sapien
tctgaggatgccctcacagatttagcccaccta

SEQ ID NO: 392658 - DNA, 33 bp, Homo sapien
tctgaggatgccctcatagatttagcccaccta

SEQ ID NO: 392659 - DNA, 33 bp, Homo sapien
aagatctaatgggtagaagtgactttgtgtaga

SEQ ID NO: 392660 - DNA, 33 bp, Homo sapien
aagatctaatgggtaggagtgactttgtgtaga

SEQ ID NO: 392661 - DNA, 33 bp, Homo sapien
tgccctctgtacttaacgcctctttgaaatatt

SEQ ID NO: 392662 - DNA, 33 bp, Homo sapien
tgccctctgtacttaatgcctctttgaaatatt

SEQ ID NO: 392663 - DNA, 33 bp, Homo sapien
ccacgtggtcctagaaacacaaggacggttctc

SEQ ID NO: 392664 - DNA, 33 bp, Homo sapien
ccacgtggtcctagaagcacaaggacggttctc

SEQ ID NO: 392665 - DNA, 33 bp, Homo sapien
agaacgctcaccgccactaggattttagcgctc

SEQ ID NO: 392666 - DNA, 33 bp, Homo sapien
agaacgctcaccgccagtaggattttagcgctc

SEQ ID NO: 392667 - DNA, 33 bp, Homo sapien
atgtggcctctgggaaagctgtgtactctcagg

SEQ ID NO: 392668 - DNA, 33 bp, Homo sapien
atgtggcctctgggaatgctgtgtactctcagg

SEQ ID NO: 392669 - DNA, 33 bp, Homo sapien
caaagcttagcactgaaaacagcagccgtgtaa

SEQ ID NO: 392670 - DNA, 33 bp, Homo sapien
caaagcttagcactgagaacagcagccgtgtaa

SEQ ID NO: 392671 - DNA, 33 bp, Homo sapien
aaatggcccaggctgcaaaaaaggggagcagca

SEQ ID NO: 392672 - DNA, 33 bp, Homo sapien
aaatggcccaggctgccaaaaaggggagcagca

SEQ ID NO: 392673 - DNA, 33 bp, Homo sapien
ccgtggacatttaaatcagagttaggtcccagt

SEQ ID NO: 392674 - DNA, 33 bp, Homo sapien
ccgtggacatttaaattagagttaggtcccagt

SEQ ID NO: 392675 - DNA, 33 bp, Homo sapien
tggcatgagaggggaacattgctccctcagttc

SEQ ID NO: 392676 - DNA, 33 bp, Homo sapien
tggcatgagaggggaagattgctccctcagttc

SEQ ID NO: 392677 - DNA, 33 bp, Homo sapien
atttctcagtcttcaaagcttatgatctttcta

SEQ ID NO: 392678 - DNA, 33 bp, Homo sapien
atttctcagtcttcaaggcttatgatctttcta

SEQ ID NO: 392679 - DNA, 33 bp, Homo sapien
tgctctgccacagaaaaaacgaagcctcaggcc

SEQ ID NO: 392680 - DNA, 33 bp, Homo sapien
tgctctgccacagaaagaacgaagcctcaggcc

SEQ ID NO: 392681 - DNA, 33 bp, Homo sapien
aaacagaggggaacccacagatgaaaaggatct

SEQ ID NO: 392682 - DNA, 33 bp, Homo sapien
aaacagaggggaacccgcagatgaaaaggatct

SEQ ID NO: 392683 - DNA, 33 bp, Homo sapien
gcaagtcttctgacaacccaagatgagggttcc

SEQ ID NO: 392684 - DNA, 33 bp, Homo sapien
gcaagtcttctgacaatccaagatgagggttcc

SEQ ID NO: 392685 - DNA, 33 bp, Homo sapien
gcttcctgggaacctacaaccgcatcagacgtt

SEQ ID NO: 392686 - DNA, 33 bp, Homo sapien
gcttcctgggaacctataaccgcatcagacgtt

SEQ ID NO: 392687 - DNA, 33 bp, Homo sapien
cctctgcctctcctccagaagaaacctatcctt

SEQ ID NO: 392688 - DNA, 33 bp, Homo sapien
cctctgcctctcctccggaagaaacctatcctt

SEQ ID NO: 392689 - DNA, 33 bp, Homo sapien
cacgggggagtcattaataataaccattcacat

SEQ ID NO: 392690 - DNA, 33 bp, Homo sapien
cacgggggagtcattagtaataaccattcacat

SEQ ID NO: 392691 - DNA, 33 bp, Homo sapien
agagcctccttagacactgaacaggctttgcaa

SEQ ID NO: 392692 - DNA, 33 bp, Homo sapien
agagcctccttagacattgaacaggctttgcaa

SEQ ID NO: 392693 - DNA, 33 bp, Homo sapien
gcacgcttgatgcctagctcccggctggggcgt

SEQ ID NO: 392694 - DNA, 33 bp, Homo sapien
gcacgcttgatgcctatctcccggctggggcgt

SEQ ID NO: 392695 - DNA, 33 bp, Homo sapien
tctaaaatacaaaacactggcaggaattctcat

SEQ ID NO: 392696 - DNA, 33 bp, Homo sapien
tctaaaatacaaaacagtggcaggaattctcat

SEQ ID NO: 392697 - DNA, 33 bp, Homo sapien
tctgtttagatcttggaatcatttttaaaattg

SEQ ID NO: 392698 - DNA, 33 bp, Homo sapien
tctgtttagatcttgggatcatttttaaaattg

SEQ ID NO: 392699 - DNA, 33 bp, Homo sapien
ttcagtctctaaccatgaagtctgatgctaatc

SEQ ID NO: 392700 - DNA, 33 bp, Homo sapien
ttcagtctctaaccattaagtctgatgctaatc

SEQ ID NO: 392701 - DNA, 33 bp, Homo sapien
atttttaatggacaaaataatgacagttttaaa

SEQ ID NO: 392702 - DNA, 33 bp, Homo sapien
atttttaatggacaaattaatgacagttttaaa

SEQ ID NO: 392703 - DNA, 33 bp, Homo sapien
aaaagtccgagccacacacgtaatttaaaattt

SEQ ID NO: 392704 - DNA, 33 bp, Homo sapien
aaaagtccgagccacatacgtaatttaaaattt

SEQ ID NO: 392705 - DNA, 33 bp, Homo sapien
cctgtatcgttcatcacggaaattgagtcattc

SEQ ID NO: 392706 - DNA, 33 bp, Homo sapien
cctgtatcgttcatcatggaaattgagtcattc

SEQ ID NO: 392707 - DNA, 33 bp, Homo sapien
ctcatcattaactgtgcattcatatcacccagg

SEQ ID NO: 392708 - DNA, 33 bp, Homo sapien
ctcatcattaactgtgtattcatatcacccagg

SEQ ID NO: 392709 - DNA, 33 bp, Homo sapien
attgaggttaattagacaccagtgattctcatc

SEQ ID NO: 392710 - DNA, 33 bp, Homo sapien
attgaggttaattagagaccagtgattctcatc

SEQ ID NO: 392711 - DNA, 33 bp, Homo sapien
ctaatctattgattctcaaagtgaggtcccaga

SEQ ID NO: 392712 - DNA, 33 bp, Homo sapien
ctaatctattgattctgaaagtgaggtcccaga

SEQ ID NO: 392713 - DNA, 33 bp, Homo sapien
catgcaccagtgcagacggtctcgggttcaagc

SEQ ID NO: 392714 - DNA, 33 bp, Homo sapien
catgcaccagtgcagatggtctcgggttcaagc

SEQ ID NO: 392715 - DNA, 33 bp, Homo sapien
ctgggggatagagaaacaatggaggagtctgga

SEQ ID NO: 392716 - DNA, 33 bp, Homo sapien
ctgggggatagagaaagaatggaggagtctgga

SEQ ID NO: 392717 - DNA, 33 bp, Homo sapien
acgtcatactagtcagcattcattcagttttaa

SEQ ID NO: 392718 - DNA, 33 bp, Homo sapien
acgtcatactagtcaggattcattcagttttaa

SEQ ID NO: 392719 - DNA, 33 bp, Homo sapien
agatgtttaaaagtgcacaaagtatgttaaaaa

SEQ ID NO: 392720 - DNA, 33 bp, Homo sapien
agatgtttaaaagtgcgcaaagtatgttaaaaa

SEQ ID NO: 392721 - DNA, 33 bp, Homo sapien
ggtgagccccattccacgtcacaaagagctgct

SEQ ID NO: 392722 - DNA, 33 bp, Homo sapien
ggtgagccccattccatgtcacaaagagctgct

SEQ ID NO: 392723 - DNA, 33 bp, Homo sapien
tgcatatgcatctacccatatacataattgcat

SEQ ID NO: 392724 - DNA, 33 bp, Homo sapien
tgcatatgcatctacctatatacataattgcat

SEQ ID NO: 392725 - DNA, 33 bp, Homo sapien
tgggggcattgtactgcaggtaaattattcctc

SEQ ID NO: 392726 - DNA, 33 bp, Homo sapien
tgggggcattgtactggaggtaaattattcctc

SEQ ID NO: 392727 - DNA, 33 bp, Homo sapien
gctgtggcacataataagtgcgaatgatgaaat

SEQ ID NO: 392728 - DNA, 33 bp, Homo sapien
gctgtggcacataataggtgcgaatgatgaaat

SEQ ID NO: 392729 - DNA, 33 bp, Homo sapien
gttcctccgaggtggaccatcctgacttgttct

SEQ ID NO: 392730 - DNA, 33 bp, Homo sapien
gttcctccgaggtggatcatcctgacttgttct

SEQ ID NO: 392731 - DNA, 33 bp, Homo sapien
ttacataattgcctaaatcgtttgttgtcgttt

SEQ ID NO: 392732 - DNA, 33 bp, Homo sapien
ttacataattgcctaagtcgtttgttgtcgttt

SEQ ID NO: 392733 - DNA, 33 bp, Homo sapien
aaaacgtcttcctctgaaaaaggaggtcgctag

SEQ ID NO: 392734 - DNA, 33 bp, Homo sapien
aaaacgtcttcctctgtaaaaggaggtcgctag

SEQ ID NO: 392735 - DNA, 33 bp, Homo sapien
aaacactccagaatacagggctttaagaacaga

SEQ ID NO: 392736 - DNA, 33 bp, Homo sapien
aaacactccagaatacggggctttaagaacaga

SEQ ID NO: 392737 - DNA, 33 bp, Homo sapien
aaaatctaatccttcaccaaatagttaagaaca

SEQ ID NO: 392738 - DNA, 33 bp, Homo sapien
aaaatctaatccttcagcaaatagttaagaaca

SEQ ID NO: 392739 - DNA, 33 bp, Homo sapien
aaccccagagcaaccactacaagtgtaaagcac

SEQ ID NO: 392740 - DNA, 33 bp, Homo sapien
aaccccagagcaaccagtacaagtgtaaagcac

SEQ ID NO: 392741 - DNA, 33 bp, Homo sapien
ttttttttactattacacctgcatgttttaaaa

SEQ ID NO: 392742 - DNA, 33 bp, Homo sapien
ttttttttactattactcctgcatgttttaaaa

SEQ ID NO: 392743 - DNA, 33 bp, Homo sapien
tcatttctcttcaagaactttgaacttttcccc

SEQ ID NO: 392744 - DNA, 33 bp, Homo sapien
tcatttctcttcaagagctttgaacttttcccc

SEQ ID NO: 392745 - DNA, 33 bp, Homo sapien
ccttttaaatacttcacggctagaactgggacc

SEQ ID NO: 392746 - DNA, 33 bp, Homo sapien
ccttttaaatacttcagggctagaactgggacc

SEQ ID NO: 392747 - DNA, 33 bp, Homo sapien
ccttcaccagtattgacgatttgtctccatcaa

SEQ ID NO: 392748 - DNA, 33 bp, Homo sapien
ccttcaccagtattgatgatttgtctccatcaa

SEQ ID NO: 392749 - DNA, 33 bp, Homo sapien
agctgttcaattttcacaccgaatttaaaggac

SEQ ID NO: 392750 - DNA, 33 bp, Homo sapien
agctgttcaattttcataccgaatttaaaggac

SEQ ID NO: 392751 - DNA, 33 bp, Homo sapien
ccctcaggcagagaacagatgggaaccgaatac

SEQ ID NO: 392752 - DNA, 33 bp, Homo sapien
ccctcaggcagagaacggatgggaaccgaatac

SEQ ID NO: 392753 - DNA, 33 bp, Homo sapien
taagcagtagaagcagacatttgcattagccag

SEQ ID NO: 392754 - DNA, 33 bp, Homo sapien
taagcagtagaagcaggcatttgcattagccag

SEQ ID NO: 392755 - DNA, 33 bp, Homo sapien
acacacacacctactgaaagataaacttgggca

SEQ ID NO: 392756 - DNA, 33 bp, Homo sapien
acacacacacctactggaagataaacttgggca

SEQ ID NO: 392757 - DNA, 33 bp, Homo sapien
tgcccagcaaactcgaactcaccctgggcacgt

SEQ ID NO: 392758 - DNA, 33 bp, Homo sapien
tgcccagcaaactcgagctcaccctgggcacgt

SEQ ID NO: 392759 - DNA, 33 bp, Homo sapien
ccttctattcctctaacatacctctgcccactc

SEQ ID NO: 392760 - DNA, 33 bp, Homo sapien
ccttctattcctctaagatacctctgcccactc

SEQ ID NO: 392761 - DNA, 33 bp, Homo sapien
tcatctttctccactgcatggccgtctttcaaa

SEQ ID NO: 392762 - DNA, 33 bp, Homo sapien
tcatctttctccactggatggccgtctttcaaa

SEQ ID NO: 392763 - DNA, 33 bp, Homo sapien
agctgaggctgaaaaccggtgatttagatgttt

SEQ ID NO: 392764 - DNA, 33 bp, Homo sapien
agctgaggctgaaaactggtgatttagatgttt

SEQ ID NO: 392765 - DNA, 33 bp, Homo sapien
tccttcatcagaattaccaaggttctggtcagc

SEQ ID NO: 392766 - DNA, 33 bp, Homo sapien
tccttcatcagaattatcaaggttctggtcagc

SEQ ID NO: 392767 - DNA, 33 bp, Homo sapien
aattttatttataggaaaccagatgtctgtgtt

SEQ ID NO: 392768 - DNA, 33 bp, Homo sapien
aattttatttataggacaccagatgtctgtgtt

SEQ ID NO: 392769 - DNA, 33 bp, Homo sapien
gtgctgtaaaactctccagggaatgagaaccgc

SEQ ID NO: 392770 - DNA, 33 bp, Homo sapien
gtgctgtaaaactctctagggaatgagaaccgc

SEQ ID NO: 392771 - DNA, 33 bp, Homo sapien
ctctttcttagtaaacacagcaagacaaaacaa

SEQ ID NO: 392772 - DNA, 33 bp, Homo sapien
ctctttcttagtaaacgcagcaagacaaaacaa

SEQ ID NO: 392773 - DNA, 33 bp, Homo sapien
accttttacaagcatcaagcattatctcaggta

SEQ ID NO: 392774 - DNA, 33 bp, Homo sapien
accttttacaagcatcgagcattatctcaggta

SEQ ID NO: 392775 - DNA, 33 bp, Homo sapien
gcatttccttaagcatcagaagcccattttgtt

SEQ ID NO: 392776 - DNA, 33 bp, Homo sapien
gcatttccttaagcattagaagcccattttgtt

SEQ ID NO: 392777 - DNA, 33 bp, Homo sapien
tcatgggacaaaacgaacatccatcttctgtga

SEQ ID NO: 392778 - DNA, 33 bp, Homo sapien
tcatgggacaaaacgagcatccatcttctgtga

SEQ ID NO: 392779 - DNA, 33 bp, Homo sapien
gctctttccactttaccaagctccttccgtttc

SEQ ID NO: 392780 - DNA, 33 bp, Homo sapien
gctctttccactttacgaagctccttccgtttc

SEQ ID NO: 392781 - DNA, 33 bp, Homo sapien
tccaggaccatgtggcccccaagtctatgctct

SEQ ID NO: 392782 - DNA, 33 bp, Homo sapien
tccaggaccatgtggctcccaagtctatgctct

SEQ ID NO: 392783 - DNA, 33 bp, Homo sapien
acgttatctcattccactgctcattccgttgcc

SEQ ID NO: 392784 - DNA, 33 bp, Homo sapien
acgttatctcattccattgctcattccgttgcc

SEQ ID NO: 392785 - DNA, 33 bp, Homo sapien
catggtcaccctgatcccactcacaggaagctg

SEQ ID NO: 392786 - DNA, 33 bp, Homo sapien
catggtcaccctgatcgcactcacaggaagctg

SEQ ID NO: 392787 - DNA, 33 bp, Homo sapien
atacactgcaggtcaactcaaaatcactgttga

SEQ ID NO: 392788 - DNA, 33 bp, Homo sapien
atacactgcaggtcaagtcaaaatcactgttga

SEQ ID NO: 392789 - DNA, 33 bp, Homo sapien
tgaggagttcttaccactcagggattcagaggc

SEQ ID NO: 392790 - DNA, 33 bp, Homo sapien
tgaggagttcttaccattcagggattcagaggc

SEQ ID NO: 392791 - DNA, 33 bp, Homo sapien
ttaactcagtctcttaacttttttgatctcgat

SEQ ID NO: 392792 - DNA, 33 bp, Homo sapien
ttaactcagtctcttaccttttttgatctcgat

SEQ ID NO: 392793 - DNA, 33 bp, Homo sapien
cgagattcagcaaaagccctgcaaagagaaaaa

SEQ ID NO: 392794 - DNA, 33 bp, Homo sapien
cgagattcagcaaaagtcctgcaaagagaaaaa

SEQ ID NO: 392795 - DNA, 33 bp, Homo sapien
gtaccccttttgtgagaatgtgaactcctttga

SEQ ID NO: 392796 - DNA, 33 bp, Homo sapien
gtaccccttttgtgaggatgtgaactcctttga

SEQ ID NO: 392797 - DNA, 33 bp, Homo sapien
gagaagctaaagagaaacctgcatcctataaaa

SEQ ID NO: 392798 - DNA, 33 bp, Homo sapien
gagaagctaaagagaagcctgcatcctataaaa

SEQ ID NO: 392799 - DNA, 33 bp, Homo sapien
agcaacgggaatgagacggaatttcctattaaa

SEQ ID NO: 392800 - DNA, 33 bp, Homo sapien
agcaacgggaatgagatggaatttcctattaaa

SEQ ID NO: 392801 - DNA, 33 bp, Homo sapien
gagaacaagtgttgggaatccattcaggaatcc

SEQ ID NO: 392802 - DNA, 33 bp, Homo sapien
gagaacaagtgttggggatccattcaggaatcc

SEQ ID NO: 392803 - DNA, 33 bp, Homo sapien
ttgcctgggcctcagacccctcatccacaaaat

SEQ ID NO: 392804 - DNA, 33 bp, Homo sapien
ttgcctgggcctcagatccctcatccacaaaat

SEQ ID NO: 392805 - DNA, 33 bp, Homo sapien
tatgctgaacagtggacgcttctgctgtgtaag

SEQ ID NO: 392806 - DNA, 33 bp, Homo sapien
tatgctgaacagtggatgcttctgctgtgtaag

SEQ ID NO: 392807 - DNA, 33 bp, Homo sapien
ggtgaattgtgcaaaaatcaaaatgagccctgg

SEQ ID NO: 392808 - DNA, 33 bp, Homo sapien
ggtgaattgtgcaaaagtcaaaatgagccctgg

SEQ ID NO: 392809 - DNA, 33 bp, Homo sapien
acgcaattctaccttcacacaggccagccaaag

SEQ ID NO: 392810 - DNA, 33 bp, Homo sapien
acgcaattctaccttcgcacaggccagccaaag

SEQ ID NO: 392811 - DNA, 33 bp, Homo sapien
tgtcaactgagccaaacagtgacctaacctttc

SEQ ID NO: 392812 - DNA, 33 bp, Homo sapien
tgtcaactgagccaaatagtgacctaacctttc

SEQ ID NO: 392813 - DNA, 33 bp, Homo sapien
ccaaaaccaacggaaaagctccttctttctcta

SEQ ID NO: 392814 - DNA, 33 bp, Homo sapien
ccaaaaccaacggaaacgctccttctttctcta

SEQ ID NO: 392815 - DNA, 33 bp, Homo sapien
gaaaagtgtggattaacagaactgaaaaccttg

SEQ ID NO: 392816 - DNA, 33 bp, Homo sapien
gaaaagtgtggattaatagaactgaaaaccttg

SEQ ID NO: 392817 - DNA, 33 bp, Homo sapien
aagggatgactcagcaaaaagtttcctgagttt

SEQ ID NO: 392818 - DNA, 33 bp, Homo sapien
aagggatgactcagcacaaagtttcctgagttt

SEQ ID NO: 392819 - DNA, 33 bp, Homo sapien
cggcaggctgcttaggaatctcgggacttaagg

SEQ ID NO: 392820 - DNA, 33 bp, Homo sapien
cggcaggctgcttaggcatctcgggacttaagg

SEQ ID NO: 392821 - DNA, 33 bp, Homo sapien
ccttagtctttcattcaaccagttttccttttg

SEQ ID NO: 392822 - DNA, 33 bp, Homo sapien
ccttagtctttcattctaccagttttccttttg

SEQ ID NO: 392823 - DNA, 33 bp, Homo sapien
ttagaactgaaagaaactgtacaaagactctca

SEQ ID NO: 392824 - DNA, 33 bp, Homo sapien
ttagaactgaaagaaagtgtacaaagactctca

SEQ ID NO: 392825 - DNA, 33 bp, Homo sapien
cgtgggcaagggaacaaatgacttcgcagaatt

SEQ ID NO: 392826 - DNA, 33 bp, Homo sapien
cgtgggcaagggaacagatgacttcgcagaatt

SEQ ID NO: 392827 - DNA, 33 bp, Homo sapien
ttgtgatttagtgaaacagaagctcaaatttgg

SEQ ID NO: 392828 - DNA, 33 bp, Homo sapien
ttgtgatttagtgaaatagaagctcaaatttgg

SEQ ID NO: 392829 - DNA, 33 bp, Homo sapien
gggtaggaactcagctcaatttcaagttccaga

SEQ ID NO: 392830 - DNA, 33 bp, Homo sapien
gggtaggaactcagcttaatttcaagttccaga

SEQ ID NO: 392831 - DNA, 33 bp, Homo sapien
taggcaatgtgccacaatccttcatctctgacc

SEQ ID NO: 392832 - DNA, 33 bp, Homo sapien
taggcaatgtgccacagtccttcatctctgacc

SEQ ID NO: 392833 - DNA, 33 bp, Homo sapien
actgcaaatgccgattcaacctcaatacagaaa

SEQ ID NO: 392834 - DNA, 33 bp, Homo sapien
actgcaaatgccgatttaacctcaatacagaaa

SEQ ID NO: 392835 - DNA, 33 bp, Homo sapien
gcttgagtttaaatccagagtctgctacctctt

SEQ ID NO: 392836 - DNA, 33 bp, Homo sapien
gcttgagtttaaatcctgagtctgctacctctt

SEQ ID NO: 392837 - DNA, 33 bp, Homo sapien
agtgcaattgtttggcagaattgagcaattcct

SEQ ID NO: 392838 - DNA, 33 bp, Homo sapien
agtgcaattgtttggcggaattgagcaattcct

SEQ ID NO: 392839 - DNA, 33 bp, Homo sapien
tccaggagtatgagtacgtgagtttcgaatgga

SEQ ID NO: 392840 - DNA, 33 bp, Homo sapien
tccaggagtatgagtatgtgagtttcgaatgga

SEQ ID NO: 392841 - DNA, 33 bp, Homo sapien
ctgcagttctgcaccaacaatgggaaaaaaagc

SEQ ID NO: 392842 - DNA, 33 bp, Homo sapien
ctgcagttctgcaccaccaatgggaaaaaaagc

SEQ ID NO: 392843 - DNA, 33 bp, Homo sapien
tcctcaccctgcgaataatctcacatttctgaa

SEQ ID NO: 392844 - DNA, 33 bp, Homo sapien
tcctcaccctgcgaattatctcacatttctgaa

SEQ ID NO: 392845 - DNA, 33 bp, Homo sapien
gttttgaaacctttctaactgaaaacaggatca

SEQ ID NO: 392846 - DNA, 33 bp, Homo sapien
gttttgaaacctttcttactgaaaacaggatca

SEQ ID NO: 392847 - DNA, 33 bp, Homo sapien
agagtctgttcccagaatccacacaaaatttca

SEQ ID NO: 392848 - DNA, 33 bp, Homo sapien
agagtctgttcccagagtccacacaaaatttca

SEQ ID NO: 392849 - DNA, 33 bp, Homo sapien
tccagggatgcttttggagctggtcacagaggg

SEQ ID NO: 392850 - DNA, 33 bp, Homo sapien
tccagggatgcttttgtagctggtcacagaggg

SEQ ID NO: 392851 - DNA, 33 bp, Homo sapien
acattcagtgctcaaaaaaaaaagtgttttatg

SEQ ID NO: 392852 - DNA, 33 bp, Homo sapien
acattcagtgctcaaagaaaaaagtgttttatg

SEQ ID NO: 392853 - DNA, 33 bp, Homo sapien
ggacatcactgaacaaaactgggcaactctggg

SEQ ID NO: 392854 - DNA, 33 bp, Homo sapien
ggacatcactgaacaacactgggcaactctggg

SEQ ID NO: 392855 - DNA, 33 bp, Homo sapien
tgggcagaaataactaccctcacctcagagcac

SEQ ID NO: 392856 - DNA, 33 bp, Homo sapien
tgggcagaaataactatcctcacctcagagcac

SEQ ID NO: 392857 - DNA, 33 bp, Homo sapien
ttatgggatttctgtaaggtggaatttcctgga

SEQ ID NO: 392858 - DNA, 33 bp, Homo sapien
ttatgggatttctgtagggtggaatttcctgga

SEQ ID NO: 392859 - DNA, 33 bp, Homo sapien
gggccacctgcttccacgatatgggtttcaggc

SEQ ID NO: 392860 - DNA, 33 bp, Homo sapien
gggccacctgcttccaggatatgggtttcaggc

SEQ ID NO: 392861 - DNA, 33 bp, Homo sapien
tggaaagagtaaagaacggccccatctgaaacc

SEQ ID NO: 392862 - DNA, 33 bp, Homo sapien
tggaaagagtaaagaatggccccatctgaaacc

SEQ ID NO: 392863 - DNA, 33 bp, Homo sapien
attattctttgtgaacggacagtaaaactcttt

SEQ ID NO: 392864 - DNA, 33 bp, Homo sapien
attattctttgtgaactgacagtaaaactcttt

SEQ ID NO: 392865 - DNA, 33 bp, Homo sapien
ctggatgttttcttaccgcctttcacaaagagt

SEQ ID NO: 392866 - DNA, 33 bp, Homo sapien
ctggatgttttcttactgcctttcacaaagagt

SEQ ID NO: 392867 - DNA, 33 bp, Homo sapien
ttagtggagtctccaaaccacctcagatttttt

SEQ ID NO: 392868 - DNA, 33 bp, Homo sapien
ttagtggagtctccaacccacctcagatttttt

SEQ ID NO: 392869 - DNA, 33 bp, Homo sapien
acactaggatggatcaatgaattatgggatagg

SEQ ID NO: 392870 - DNA, 33 bp, Homo sapien
acactaggatggatcagtgaattatgggatagg

SEQ ID NO: 392871 - DNA, 33 bp, Homo sapien
acgtgacaatagctaaaaattattgggctcatt

SEQ ID NO: 392872 - DNA, 33 bp, Homo sapien
acgtgacaatagctaacaattattgggctcatt

SEQ ID NO: 392873 - DNA, 33 bp, Homo sapien
ggtgctctctatttcccacatgcacagagagga

SEQ ID NO: 392874 - DNA, 33 bp, Homo sapien
ggtgctctctatttccgacatgcacagagagga

SEQ ID NO: 392875 - DNA, 33 bp, Homo sapien
cttcaccttgattttacatatttgagcagaaac

SEQ ID NO: 392876 - DNA, 33 bp, Homo sapien
cttcaccttgattttagatatttgagcagaaac

SEQ ID NO: 392877 - DNA, 33 bp, Homo sapien
tgactgattgaatgaaactggttttggcaaatc

SEQ ID NO: 392878 - DNA, 33 bp, Homo sapien
tgactgattgaatgaagctggttttggcaaatc

SEQ ID NO: 392879 - DNA, 33 bp, Homo sapien
aaatggtcctgcttgacagagggaacatgggct

SEQ ID NO: 392880 - DNA, 33 bp, Homo sapien
aaatggtcctgcttgagagagggaacatgggct

SEQ ID NO: 392881 - DNA, 33 bp, Homo sapien
ggcttgactgaagtcacgggtctcatcattcct

SEQ ID NO: 392882 - DNA, 33 bp, Homo sapien
ggcttgactgaagtcaggggtctcatcattcct

SEQ ID NO: 392883 - DNA, 33 bp, Homo sapien
ctttcatgcgtgactgcatagaaccaggtacct

SEQ ID NO: 392884 - DNA, 33 bp, Homo sapien
ctttcatgcgtgactgtatagaaccaggtacct

SEQ ID NO: 392885 - DNA, 33 bp, Homo sapien
ttagggtcctgggtcaaaaagtagcctctcagt

SEQ ID NO: 392886 - DNA, 33 bp, Homo sapien
ttagggtcctgggtcagaaagtagcctctcagt

SEQ ID NO: 392887 - DNA, 33 bp, Homo sapien
actgaaagaagaatccagaaaaccacagttccc

SEQ ID NO: 392888 - DNA, 33 bp, Homo sapien
actgaaagaagaatcccgaaaaccacagttccc

SEQ ID NO: 392889 - DNA, 33 bp, Homo sapien
ctccttacaatttccaaatcaatagggctgggc

SEQ ID NO: 392890 - DNA, 33 bp, Homo sapien
ctccttacaatttccagatcaatagggctgggc

SEQ ID NO: 392891 - DNA, 33 bp, Homo sapien
caggctgctgtgccaacacccagtgcggcaggc

SEQ ID NO: 392892 - DNA, 33 bp, Homo sapien
caggctgctgtgccaatacccagtgcggcaggc

SEQ ID NO: 392893 - DNA, 33 bp, Homo sapien
aaaacaaaactgagtacctagacctttaggtgc

SEQ ID NO: 392894 - DNA, 33 bp, Homo sapien
aaaacaaaactgagtatctagacctttaggtgc

SEQ ID NO: 392895 - DNA, 33 bp, Homo sapien
ctgagacaatgtcctccctgttgctacctctat

SEQ ID NO: 392896 - DNA, 33 bp, Homo sapien
ctgagacaatgtcctctctgttgctacctctat

SEQ ID NO: 392897 - DNA, 33 bp, Homo sapien
accctgaggatgacacagtggtttgtatttaga

SEQ ID NO: 392898 - DNA, 33 bp, Homo sapien
accctgaggatgacacggtggtttgtatttaga

SEQ ID NO: 392899 - DNA, 33 bp, Homo sapien
cattgcccctagagtcaaacagaatctgttcat

SEQ ID NO: 392900 - DNA, 33 bp, Homo sapien
cattgcccctagagtccaacagaatctgttcat

SEQ ID NO: 392901 - DNA, 33 bp, Homo sapien
ctctttatccaaataaagtcagcttcacgggtt

SEQ ID NO: 392902 - DNA, 33 bp, Homo sapien
ctctttatccaaataaggtcagcttcacgggtt

SEQ ID NO: 392903 - DNA, 33 bp, Homo sapien
tggtgatctagaaaaactatgaccatttgaagt

SEQ ID NO: 392904 - DNA, 33 bp, Homo sapien
tggtgatctagaaaaagtatgaccatttgaagt

SEQ ID NO: 392905 - DNA, 33 bp, Homo sapien
ttttgcaaacacttctaacaactttaaatattt

SEQ ID NO: 392906 - DNA, 33 bp, Homo sapien
ttttgcaaacacttctgacaactttaaatattt

SEQ ID NO: 392907 - DNA, 33 bp, Homo sapien
aggatgggccatatccacaagtaaatgctttgt

SEQ ID NO: 392908 - DNA, 33 bp, Homo sapien
aggatgggccatatccgcaagtaaatgctttgt

SEQ ID NO: 392909 - DNA, 33 bp, Homo sapien
aaggggagcagatgtgcagcaccttaacctgga

SEQ ID NO: 392910 - DNA, 33 bp, Homo sapien
aaggggagcagatgtggagcaccttaacctgga

SEQ ID NO: 392911 - DNA, 33 bp, Homo sapien
agacactgaagcaatacacaggcgtactgtggc

SEQ ID NO: 392912 - DNA, 33 bp, Homo sapien
agacactgaagcaatagacaggcgtactgtggc

SEQ ID NO: 392913 - DNA, 33 bp, Homo sapien
gtttatggcaagagatcaatacctgcttgtttc

SEQ ID NO: 392914 - DNA, 33 bp, Homo sapien
gtttatggcaagagatgaatacctgcttgtttc

SEQ ID NO: 392915 - DNA, 33 bp, Homo sapien
gagtcataataaacaccgtatactatgccacca

SEQ ID NO: 392916 - DNA, 33 bp, Homo sapien
gagtcataataaacactgtatactatgccacca

SEQ ID NO: 392917 - DNA, 33 bp, Homo sapien
atgggaaggacaagaaagatagcacatcctgcc

SEQ ID NO: 392918 - DNA, 33 bp, Homo sapien
atgggaaggacaagaatgatagcacatcctgcc

SEQ ID NO: 392919 - DNA, 33 bp, Homo sapien
cagatgtgcaaaccgaagcccagggaggtgaag

SEQ ID NO: 392920 - DNA, 33 bp, Homo sapien
cagatgtgcaaaccgaggcccagggaggtgaag

SEQ ID NO: 392921 - DNA, 33 bp, Homo sapien
cagccttccagttctacacccagtgcgttccac

SEQ ID NO: 392922 - DNA, 33 bp, Homo sapien
cagccttccagttctatacccagtgcgttccac

SEQ ID NO: 392923 - DNA, 33 bp, Homo sapien
tgacctaaaattcacccagtcaccgaggcacag

SEQ ID NO: 392924 - DNA, 33 bp, Homo sapien
tgacctaaaattcacctagtcaccgaggcacag

SEQ ID NO: 392925 - DNA, 33 bp, Homo sapien
aggaattgagaactcaactctgtctccaaatgt

SEQ ID NO: 392926 - DNA, 33 bp, Homo sapien
aggaattgagaactcatctctgtctccaaatgt

SEQ ID NO: 392927 - DNA, 33 bp, Homo sapien
atgaatgggatggtcaagaagacacgtgcaggc

SEQ ID NO: 392928 - DNA, 33 bp, Homo sapien
atgaatgggatggtcaggaagacacgtgcaggc

SEQ ID NO: 392929 - DNA, 33 bp, Homo sapien
tcttcctggtttggccacaagctgctgtttcca

SEQ ID NO: 392930 - DNA, 33 bp, Homo sapien
tcttcctggtttggccgcaagctgctgtttcca

SEQ ID NO: 392931 - DNA, 33 bp, Homo sapien
tacacttagaaatccactgaaaatggctatgga

SEQ ID NO: 392932 - DNA, 33 bp, Homo sapien
tacacttagaaatccagtgaaaatggctatgga

SEQ ID NO: 392933 - DNA, 33 bp, Homo sapien
ctgttagaaacaaagaagtgctggtgtttagat

SEQ ID NO: 392934 - DNA, 33 bp, Homo sapien
ctgttagaaacaaagatgtgctggtgtttagat

SEQ ID NO: 392935 - DNA, 33 bp, Homo sapien
acagaaagtctcccaaagtccattcaaagagga

SEQ ID NO: 392936 - DNA, 33 bp, Homo sapien
acagaaagtctcccaatgtccattcaaagagga

SEQ ID NO: 392937 - DNA, 33 bp, Homo sapien
gctagaaatttgcctagatactggtgaaagcac

SEQ ID NO: 392938 - DNA, 33 bp, Homo sapien
gctagaaatttgcctatatactggtgaaagcac

SEQ ID NO: 392939 - DNA, 33 bp, Homo sapien
acaaatccaacgaaacacattcaaattgccaaa

SEQ ID NO: 392940 - DNA, 33 bp, Homo sapien
acaaatccaacgaaacgcattcaaattgccaaa

SEQ ID NO: 392941 - DNA, 33 bp, Homo sapien
attttctctggagaaagggactgcaaccaatct

SEQ ID NO: 392942 - DNA, 33 bp, Homo sapien
attttctctggagaaatggactgcaaccaatct

SEQ ID NO: 392943 - DNA, 33 bp, Homo sapien
atgaggggaatgagacaagccagacttggacct

SEQ ID NO: 392944 - DNA, 33 bp, Homo sapien
atgaggggaatgagacgagccagacttggacct

SEQ ID NO: 392945 - DNA, 33 bp, Homo sapien
gaacctccctgaactacgaggaagagcaggcca

SEQ ID NO: 392946 - DNA, 33 bp, Homo sapien
gaacctccctgaactatgaggaagagcaggcca

SEQ ID NO: 392947 - DNA, 33 bp, Homo sapien
taggagggttgtactgccagctaaagacttggt

SEQ ID NO: 392948 - DNA, 33 bp, Homo sapien
taggagggttgtactggcagctaaagacttggt

SEQ ID NO: 392949 - DNA, 33 bp, Homo sapien
cagcaaattccttagaagcagctcacatctaac

SEQ ID NO: 392950 - DNA, 33 bp, Homo sapien
cagcaaattccttagaggcagctcacatctaac

SEQ ID NO: 392951 - DNA, 33 bp, Homo sapien
aatagaaattgtacgccaacccaaatgggactg

SEQ ID NO: 392952 - DNA, 33 bp, Homo sapien
aatagaaattgtacgcgaacccaaatgggactg

SEQ ID NO: 392953 - DNA, 33 bp, Homo sapien
aggatgtgagagaccactgagggatgggacctt

SEQ ID NO: 392954 - DNA, 33 bp, Homo sapien
aggatgtgagagaccattgagggatgggacctt

SEQ ID NO: 392955 - DNA, 33 bp, Homo sapien
gggtttgttgaatagactatttcatcgcccagg

SEQ ID NO: 392956 - DNA, 33 bp, Homo sapien
gggtttgttgaatagattatttcatcgcccagg

SEQ ID NO: 392957 - DNA, 33 bp, Homo sapien
ccaggtgcgactgagaactagctgtgcctgact

SEQ ID NO: 392958 - DNA, 33 bp, Homo sapien
ccaggtgcgactgagacctagctgtgcctgact

SEQ ID NO: 392959 - DNA, 33 bp, Homo sapien
agaaattgtaagcacacacttgttagtgaggtt

SEQ ID NO: 392960 - DNA, 33 bp, Homo sapien
agaaattgtaagcacagacttgttagtgaggtt

SEQ ID NO: 392961 - DNA, 33 bp, Homo sapien
taaccattgcacccaccgacacctcaaagccaa

SEQ ID NO: 392962 - DNA, 33 bp, Homo sapien
taaccattgcacccactgacacctcaaagccaa

SEQ ID NO: 392963 - DNA, 33 bp, Homo sapien
aggctaaaacatcttacagacaaaatctcattt

SEQ ID NO: 392964 - DNA, 33 bp, Homo sapien
aggctaaaacatcttatagacaaaatctcattt

SEQ ID NO: 392965 - DNA, 33 bp, Homo sapien
ataaaatcttcatagccaagtggttaaccaagg

SEQ ID NO: 392966 - DNA, 33 bp, Homo sapien
ataaaatcttcatagcgaagtggttaaccaagg

SEQ ID NO: 392967 - DNA, 33 bp, Homo sapien
ccagacctgagcaagcaaaacttctgggattca

SEQ ID NO: 392968 - DNA, 33 bp, Homo sapien
ccagacctgagcaagcgaaacttctgggattca

SEQ ID NO: 392969 - DNA, 33 bp, Homo sapien
tttgttttctaagttaccaatttcctttcctct

SEQ ID NO: 392970 - DNA, 33 bp, Homo sapien
tttgttttctaagttagcaatttcctttcctct

SEQ ID NO: 392971 - DNA, 33 bp, Homo sapien
tacatttcaccgggaactcatcccactgggcac

SEQ ID NO: 392972 - DNA, 33 bp, Homo sapien
tacatttcaccgggaagtcatcccactgggcac

SEQ ID NO: 392973 - DNA, 33 bp, Homo sapien
ggcctgagtataccatcactgtgacccatggct

SEQ ID NO: 392974 - DNA, 33 bp, Homo sapien
ggcctgagtataccatgactgtgacccatggct

SEQ ID NO: 392975 - DNA, 33 bp, Homo sapien
agagtcctgcaggcgaccatgataaggctggca

SEQ ID NO: 392976 - DNA, 33 bp, Homo sapien
agagtcctgcaggcgatcatgataaggctggca

SEQ ID NO: 392977 - DNA, 33 bp, Homo sapien
ccctgtctccttatcaatacctgtaacttgtct

SEQ ID NO: 392978 - DNA, 33 bp, Homo sapien
ccctgtctccttatcagtacctgtaacttgtct

SEQ ID NO: 392979 - DNA, 33 bp, Homo sapien
caagggaatgctgcgaaaccactcttgaggagt

SEQ ID NO: 392980 - DNA, 33 bp, Homo sapien
caagggaatgctgcgacaccactcttgaggagt

SEQ ID NO: 392981 - DNA, 33 bp, Homo sapien
ttagacttgaatttgacagtattgaagacagag

SEQ ID NO: 392982 - DNA, 33 bp, Homo sapien
ttagacttgaatttgagagtattgaagacagag

SEQ ID NO: 392983 - DNA, 33 bp, Homo sapien
taagctcttgaaaggacaagaaaaggaatttgt

SEQ ID NO: 392984 - DNA, 33 bp, Homo sapien
taagctcttgaaaggagaagaaaaggaatttgt

SEQ ID NO: 392985 - DNA, 33 bp, Homo sapien
gtggaggagataataactggcttaggacaaatt

SEQ ID NO: 392986 - DNA, 33 bp, Homo sapien
gtggaggagataataattggcttaggacaaatt

SEQ ID NO: 392987 - DNA, 33 bp, Homo sapien
taaattcctgaacacaaaacatgactccatagt

SEQ ID NO: 392988 - DNA, 33 bp, Homo sapien
taaattcctgaacacacaacatgactccatagt

SEQ ID NO: 392989 - DNA, 33 bp, Homo sapien
gtgagaaatcagccaaagaggttgatcgagtgg

SEQ ID NO: 392990 - DNA, 33 bp, Homo sapien
gtgagaaatcagccaacgaggttgatcgagtgg

SEQ ID NO: 392991 - DNA, 33 bp, Homo sapien
aagagaaggaaaggtgcaaaagtagaagacatc

SEQ ID NO: 392992 - DNA, 33 bp, Homo sapien
aagagaaggaaaggtggaaaagtagaagacatc

SEQ ID NO: 392993 - DNA, 33 bp, Homo sapien
aagaagacagcaaatcacacgcatttccaagaa

SEQ ID NO: 392994 - DNA, 33 bp, Homo sapien
aagaagacagcaaatcgcacgcatttccaagaa

SEQ ID NO: 392995 - DNA, 33 bp, Homo sapien
tttgaaatgcagaagaaatactctagggctcag

SEQ ID NO: 392996 - DNA, 33 bp, Homo sapien
tttgaaatgcagaagacatactctagggctcag

SEQ ID NO: 392997 - DNA, 33 bp, Homo sapien
cttctgcatttcaaagacataattgatgtttgc

SEQ ID NO: 392998 - DNA, 33 bp, Homo sapien
cttctgcatttcaaaggcataattgatgtttgc

SEQ ID NO: 392999 - DNA, 33 bp, Homo sapien
tcctttctcaagctcaatctggctgcttccaat

SEQ ID NO: 393000 - DNA, 33 bp, Homo sapien
tcctttctcaagctcagtctggctgcttccaat

SEQ ID NO: 393001 - DNA, 33 bp, Homo sapien
cggttctggattccagcctagtgcttattcctc

SEQ ID NO: 393002 - DNA, 33 bp, Homo sapien
cggttctggattccagtctagtgcttattcctc

SEQ ID NO: 393003 - DNA, 33 bp, Homo sapien
tccctggctgtagatcccagatgctggcagact

SEQ ID NO: 393004 - DNA, 33 bp, Homo sapien
tccctggctgtagatctcagatgctggcagact

SEQ ID NO: 393005 - DNA, 33 bp, Homo sapien
tagaaacaggaagtaccaatgtgaatcatacag

SEQ ID NO: 393006 - DNA, 33 bp, Homo sapien
tagaaacaggaagtactaatgtgaatcatacag

SEQ ID NO: 393007 - DNA, 33 bp, Homo sapien
tagtgaagaaaggggcagaaaaagttagtgtca

SEQ ID NO: 393008 - DNA, 33 bp, Homo sapien
tagtgaagaaaggggctgaaaaagttagtgtca

SEQ ID NO: 393009 - DNA, 33 bp, Homo sapien
gccacacctgagggtaaagaggtctggaggatc

SEQ ID NO: 393010 - DNA, 33 bp, Homo sapien
gccacacctgagggtagagaggtctggaggatc

SEQ ID NO: 393011 - DNA, 33 bp, Homo sapien
acaggttcctagtcaacgaaggtttgttcagac

SEQ ID NO: 393012 - DNA, 33 bp, Homo sapien
acaggttcctagtcaatgaaggtttgttcagac

SEQ ID NO: 393013 - DNA, 33 bp, Homo sapien
cccaagacatctcgcacgtgcaaacaccatgca

SEQ ID NO: 393014 - DNA, 33 bp, Homo sapien
cccaagacatctcgcatgtgcaaacaccatgca

SEQ ID NO: 393015 - DNA, 33 bp, Homo sapien
cgccaaagcagcttaacccctgaagaatgtgca

SEQ ID NO: 393016 - DNA, 33 bp, Homo sapien
cgccaaagcagcttaagccctgaagaatgtgca

SEQ ID NO: 393017 - DNA, 33 bp, Homo sapien
taatgactgcacacaaagaggcaaatggaagat

SEQ ID NO: 393018 - DNA, 33 bp, Homo sapien
taatgactgcacacaaggaggcaaatggaagat

SEQ ID NO: 393019 - DNA, 33 bp, Homo sapien
cagtttcagatttgccaaaaaattgtgaatata

SEQ ID NO: 393020 - DNA, 33 bp, Homo sapien
cagtttcagatttgccgaaaaattgtgaatata

SEQ ID NO: 393021 - DNA, 33 bp, Homo sapien
tggtataattagtgaacaaatactgacacatta

SEQ ID NO: 393022 - DNA, 33 bp, Homo sapien
tggtataattagtgaagaaatactgacacatta

SEQ ID NO: 393023 - DNA, 33 bp, Homo sapien
tgagcccctgcgcatagatacatactcaagaca

SEQ ID NO: 393024 - DNA, 33 bp, Homo sapien
tgagcccctgcgcatatatacatactcaagaca

SEQ ID NO: 393025 - DNA, 33 bp, Homo sapien
taatgtcacctgcccaaaacaattgttggatag

SEQ ID NO: 393026 - DNA, 33 bp, Homo sapien
taatgtcacctgcccagaacaattgttggatag

SEQ ID NO: 393027 - DNA, 33 bp, Homo sapien
catcacttctgcaatccccactgtagcccggag

SEQ ID NO: 393028 - DNA, 33 bp, Homo sapien
catcacttctgcaatcgccactgtagcccggag

SEQ ID NO: 393029 - DNA, 33 bp, Homo sapien
tctctccaaaccattaagacccctcttctccca

SEQ ID NO: 393030 - DNA, 33 bp, Homo sapien
tctctccaaaccattaggacccctcttctccca

SEQ ID NO: 393031 - DNA, 33 bp, Homo sapien
gtggctggaaacaagacagggacaaggacaagg

SEQ ID NO: 393032 - DNA, 33 bp, Homo sapien
gtggctggaaacaagagagggacaaggacaagg

SEQ ID NO: 393033 - DNA, 33 bp, Homo sapien
ttttctgcaaaaggccacatagtaaatagttta

SEQ ID NO: 393034 - DNA, 33 bp, Homo sapien
ttttctgcaaaaggccgcatagtaaatagttta

SEQ ID NO: 393035 - DNA, 33 bp, Homo sapien
caaacattgattcataagagctggggtatcaat

SEQ ID NO: 393036 - DNA, 33 bp, Homo sapien
caaacattgattcataggagctggggtatcaat

SEQ ID NO: 393037 - DNA, 33 bp, Homo sapien
cagaggaggaaaaaaacagcgtgtctgaagagg

SEQ ID NO: 393038 - DNA, 33 bp, Homo sapien
cagaggaggaaaaaaatagcgtgtctgaagagg

SEQ ID NO: 393039 - DNA, 33 bp, Homo sapien
agagccagagaaaaaaatgaatggatgaggctg

SEQ ID NO: 393040 - DNA, 33 bp, Homo sapien
agagccagagaaaaaactgaatggatgaggctg

SEQ ID NO: 393041 - DNA, 33 bp, Homo sapien
gccccagaggctcaccaacgatgtgggcgcaaa

SEQ ID NO: 393042 - DNA, 33 bp, Homo sapien
gccccagaggctcaccgacgatgtgggcgcaaa

SEQ ID NO: 393043 - DNA, 33 bp, Homo sapien
agattcaactctaagacgttttatgcagtgatg

SEQ ID NO: 393044 - DNA, 33 bp, Homo sapien
agattcaactctaagatgttttatgcagtgatg

SEQ ID NO: 393045 - DNA, 33 bp, Homo sapien
ttgtgaaatggaaatacacttctgctctattgc

SEQ ID NO: 393046 - DNA, 33 bp, Homo sapien
ttgtgaaatggaaatatacttctgctctattgc

SEQ ID NO: 393047 - DNA, 33 bp, Homo sapien
agtcccaaagcccgtgcactgcttgccggtgtt

SEQ ID NO: 393048 - DNA, 33 bp, Homo sapien
agtcccaaagcccgtgtactgcttgccggtgtt

SEQ ID NO: 393049 - DNA, 33 bp, Homo sapien
cttcctcaccacaagaaggataggttttcagaa

SEQ ID NO: 393050 - DNA, 33 bp, Homo sapien
cttcctcaccacaagatggataggttttcagaa

SEQ ID NO: 393051 - DNA, 33 bp, Homo sapien
gcaccctggttaacaaaactatgcagggtgtgg

SEQ ID NO: 393052 - DNA, 33 bp, Homo sapien
gcaccctggttaacaagactatgcagggtgtgg

SEQ ID NO: 393053 - DNA, 33 bp, Homo sapien
atcaacccttgaaaagacatagaggcaccttca

SEQ ID NO: 393054 - DNA, 33 bp, Homo sapien
atcaacccttgaaaagtcatagaggcaccttca

SEQ ID NO: 393055 - DNA, 33 bp, Homo sapien
atgtaaaactgagaatcatcatggcagtagata

SEQ ID NO: 393056 - DNA, 33 bp, Homo sapien
atgtaaaactgagaatgatcatggcagtagata

SEQ ID NO: 393057 - DNA, 33 bp, Homo sapien
tcaggggactgtgccaacaaagagctttgtctt

SEQ ID NO: 393058 - DNA, 33 bp, Homo sapien
tcaggggactgtgccagcaaagagctttgtctt

SEQ ID NO: 393059 - DNA, 33 bp, Homo sapien
tattatgagggttaaaagtatcagtgagcagaa

SEQ ID NO: 393060 - DNA, 33 bp, Homo sapien
tattatgagggttaaaggtatcagtgagcagaa

SEQ ID NO: 393061 - DNA, 33 bp, Homo sapien
acagctaacactgggacggaggtgcttatcatg

SEQ ID NO: 393062 - DNA, 33 bp, Homo sapien
acagctaacactgggagggaggtgcttatcatg

SEQ ID NO: 393063 - DNA, 33 bp, Homo sapien
attgtcctgaagccagccgattacctaagagca

SEQ ID NO: 393064 - DNA, 33 bp, Homo sapien
attgtcctgaagccaggcgattacctaagagca

SEQ ID NO: 393065 - DNA, 33 bp, Homo sapien
gagaggccacaggatggaacagccagggtgtgt

SEQ ID NO: 393066 - DNA, 33 bp, Homo sapien
gagaggccacaggatgtaacagccagggtgtgt

SEQ ID NO: 393067 - DNA, 33 bp, Homo sapien
agcttggttaaataaacggtagtagactaaata

SEQ ID NO: 393068 - DNA, 33 bp, Homo sapien
agcttggttaaataaatggtagtagactaaata

SEQ ID NO: 393069 - DNA, 33 bp, Homo sapien
cgagtatagcaaggaaagagtgtgtatatctta

SEQ ID NO: 393070 - DNA, 33 bp, Homo sapien
cgagtatagcaaggaatgagtgtgtatatctta

SEQ ID NO: 393071 - DNA, 33 bp, Homo sapien
acaaggatggaaatacaatgttcgtggatgtga

SEQ ID NO: 393072 - DNA, 33 bp, Homo sapien
acaaggatggaaatacgatgttcgtggatgtga

SEQ ID NO: 393073 - DNA, 33 bp, Homo sapien
tccaaagcatttgacaaacacaaattctcccaa

SEQ ID NO: 393074 - DNA, 33 bp, Homo sapien
tccaaagcatttgacagacacaaattctcccaa

SEQ ID NO: 393075 - DNA, 33 bp, Homo sapien
ccacctggcaagcccacagttggacagctccct

SEQ ID NO: 393076 - DNA, 33 bp, Homo sapien
ccacctggcaagcccatagttggacagctccct

SEQ ID NO: 393077 - DNA, 33 bp, Homo sapien
accaacacaatttaataagttgtaacgttgtcc

SEQ ID NO: 393078 - DNA, 33 bp, Homo sapien
accaacacaatttaatgagttgtaacgttgtcc

SEQ ID NO: 393079 - DNA, 33 bp, Homo sapien
aagataaagcatgacaactcgatggacaacgtt

SEQ ID NO: 393080 - DNA, 33 bp, Homo sapien
aagataaagcatgacagctcgatggacaacgtt

SEQ ID NO: 393081 - DNA, 33 bp, Homo sapien
cttctggagactctgacggagggtgtgttccag

SEQ ID NO: 393082 - DNA, 33 bp, Homo sapien
cttctggagactctgatggagggtgtgttccag

SEQ ID NO: 393083 - DNA, 33 bp, Homo sapien
tggagaaatgcctttacaagccggggaatgcca

SEQ ID NO: 393084 - DNA, 33 bp, Homo sapien
tggagaaatgcctttagaagccggggaatgcca

SEQ ID NO: 393085 - DNA, 33 bp, Homo sapien
ctacctgaggaagtccactatgcttgcttgtgg

SEQ ID NO: 393086 - DNA, 33 bp, Homo sapien
ctacctgaggaagtccgctatgcttgcttgtgg

SEQ ID NO: 393087 - DNA, 33 bp, Homo sapien
caggtagaaagcagcccagcaatttactccttg

SEQ ID NO: 393088 - DNA, 33 bp, Homo sapien
caggtagaaagcagccgagcaatttactccttg

SEQ ID NO: 393089 - DNA, 33 bp, Homo sapien
aagccccctcctgttaccgccactcacaggtca

SEQ ID NO: 393090 - DNA, 33 bp, Homo sapien
aagccccctcctgttatcgccactcacaggtca

SEQ ID NO: 393091 - DNA, 33 bp, Homo sapien
agggtgagtggtttacccagtttggcacaactg

SEQ ID NO: 393092 - DNA, 33 bp, Homo sapien
agggtgagtggtttactcagtttggcacaactg

SEQ ID NO: 393093 - DNA, 33 bp, Homo sapien
catttaaagccacaaaaaaacttgatatggtct

SEQ ID NO: 393094 - DNA, 33 bp, Homo sapien
catttaaagccacaaagaaacttgatatggtct

SEQ ID NO: 393095 - DNA, 33 bp, Homo sapien
ttacagaagaactccacgaacaccgagaagaag

SEQ ID NO: 393096 - DNA, 33 bp, Homo sapien
ttacagaagaactccatgaacaccgagaagaag

SEQ ID NO: 393097 - DNA, 33 bp, Homo sapien
agcacttttccaaacacgatttgtgaagaggtg

SEQ ID NO: 393098 - DNA, 33 bp, Homo sapien
agcacttttccaaacaggatttgtgaagaggtg

SEQ ID NO: 393099 - DNA, 33 bp, Homo sapien
gctgtgacgagaagccacaagtacaataccccg

SEQ ID NO: 393100 - DNA, 33 bp, Homo sapien
gctgtgacgagaagccgcaagtacaataccccg

SEQ ID NO: 393101 - DNA, 33 bp, Homo sapien
agagggggccatgtccaaaacaggcatcactgc

SEQ ID NO: 393102 - DNA, 33 bp, Homo sapien
agagggggccatgtccgaaacaggcatcactgc

SEQ ID NO: 393103 - DNA, 33 bp, Homo sapien
actgctgggtggctccactcatcttccttaccc

SEQ ID NO: 393104 - DNA, 33 bp, Homo sapien
actgctgggtggctcctctcatcttccttaccc

SEQ ID NO: 393105 - DNA, 33 bp, Homo sapien
acatttagattggggacgacctcatctggtttg

SEQ ID NO: 393106 - DNA, 33 bp, Homo sapien
acatttagattggggatgacctcatctggtttg

SEQ ID NO: 393107 - DNA, 33 bp, Homo sapien
catggacagttctgcccggaaagatggtgatac

SEQ ID NO: 393108 - DNA, 33 bp, Homo sapien
catggacagttctgcctggaaagatggtgatac

SEQ ID NO: 393109 - DNA, 33 bp, Homo sapien
caacctcagaggctacaactgccggcggggttg

SEQ ID NO: 393110 - DNA, 33 bp, Homo sapien
caacctcagaggctacgactgccggcggggttg

SEQ ID NO: 393111 - DNA, 33 bp, Homo sapien
ttcttaacaattttgaaggagtgaggaaggagg

SEQ ID NO: 393112 - DNA, 33 bp, Homo sapien
ttcttaacaattttgagggagtgaggaaggagg

SEQ ID NO: 393113 - DNA, 33 bp, Homo sapien
tgccattcttattgctcacagggccacacatcc

SEQ ID NO: 393114 - DNA, 33 bp, Homo sapien
tgccattcttattgctgacagggccacacatcc

SEQ ID NO: 393115 - DNA, 33 bp, Homo sapien
atttttggaacaatagaataaaaaccttgtata

SEQ ID NO: 393116 - DNA, 33 bp, Homo sapien
atttttggaacaataggataaaaaccttgtata

SEQ ID NO: 393117 - DNA, 33 bp, Homo sapien
tgacttctgagaagaactgagacccgagcagct

SEQ ID NO: 393118 - DNA, 33 bp, Homo sapien
tgacttctgagaagaattgagacccgagcagct

SEQ ID NO: 393119 - DNA, 33 bp, Homo sapien
agagccaggtattagaagagagaagactgagag

SEQ ID NO: 393120 - DNA, 33 bp, Homo sapien
agagccaggtattagatgagagaagactgagag

SEQ ID NO: 393121 - DNA, 33 bp, Homo sapien
cacttccacatttccactctaacggcccctgcg

SEQ ID NO: 393122 - DNA, 33 bp, Homo sapien
cacttccacatttccattctaacggcccctgcg

SEQ ID NO: 393123 - DNA, 33 bp, Homo sapien
aactgcttttctttctcactcttgcattacctg

SEQ ID NO: 393124 - DNA, 33 bp, Homo sapien
aactgcttttctttctgactcttgcattacctg

SEQ ID NO: 393125 - DNA, 33 bp, Homo sapien
aaaatgcaggaagacaagatacatcaaatgcct

SEQ ID NO: 393126 - DNA, 33 bp, Homo sapien
aaaatgcaggaagacaggatacatcaaatgcct

SEQ ID NO: 393127 - DNA, 33 bp, Homo sapien
ttttatgggatttgccacttaagcctaatgtat

SEQ ID NO: 393128 - DNA, 33 bp, Homo sapien
ttttatgggatttgccgcttaagcctaatgtat

SEQ ID NO: 393129 - DNA, 33 bp, Homo sapien
taaaagtcatagctaaatatgtttcacagcaaa

SEQ ID NO: 393130 - DNA, 33 bp, Homo sapien
taaaagtcatagctaactatgtttcacagcaaa

SEQ ID NO: 393131 - DNA, 33 bp, Homo sapien
cagatggtaacgagacgccagggacaatctgcc

SEQ ID NO: 393132 - DNA, 33 bp, Homo sapien
cagatggtaacgagactccagggacaatctgcc

SEQ ID NO: 393133 - DNA, 33 bp, Homo sapien
accccagcactttctcaagacacgtggctctgc

SEQ ID NO: 393134 - DNA, 33 bp, Homo sapien
accccagcactttctccagacacgtggctctgc

SEQ ID NO: 393135 - DNA, 33 bp, Homo sapien
tccaaagacagaaaataatcttacaatagcacc

SEQ ID NO: 393136 - DNA, 33 bp, Homo sapien
tccaaagacagaaaatcatcttacaatagcacc

SEQ ID NO: 393137 - DNA, 33 bp, Homo sapien
tatcatctgtctccaacgtttttaggttgtcag

SEQ ID NO: 393138 - DNA, 33 bp, Homo sapien
tatcatctgtctccaatgtttttaggttgtcag

SEQ ID NO: 393139 - DNA, 33 bp, Homo sapien
gcgcgtcatctgagaaatcacttggtgagggct

SEQ ID NO: 393140 - DNA, 33 bp, Homo sapien
gcgcgtcatctgagaagtcacttggtgagggct

SEQ ID NO: 393141 - DNA, 33 bp, Homo sapien
ccaagtgggcttaacacggacactgccctgggg

SEQ ID NO: 393142 - DNA, 33 bp, Homo sapien
ccaagtgggcttaacatggacactgccctgggg

SEQ ID NO: 393143 - DNA, 33 bp, Homo sapien
tggagactagaggttacgtctgtatacagccat

SEQ ID NO: 393144 - DNA, 33 bp, Homo sapien
tggagactagaggttatgtctgtatacagccat

SEQ ID NO: 393145 - DNA, 33 bp, Homo sapien
aaccatgagtgtactgaacattctgcatttact

SEQ ID NO: 393146 - DNA, 33 bp, Homo sapien
aaccatgagtgtactggacattctgcatttact

SEQ ID NO: 393147 - DNA, 33 bp, Homo sapien
ccaggaacccaaatgaatatggaggatacatct

SEQ ID NO: 393148 - DNA, 33 bp, Homo sapien
ccaggaacccaaatgagtatggaggatacatct

SEQ ID NO: 393149 - DNA, 33 bp, Homo sapien
taatggtgatgctgccaaaggtgatgatggtga

SEQ ID NO: 393150 - DNA, 33 bp, Homo sapien
taatggtgatgctgccgaaggtgatgatggtga

SEQ ID NO: 393151 - DNA, 33 bp, Homo sapien
ttaaacagtatgaagcacattaaactatttcat

SEQ ID NO: 393152 - DNA, 33 bp, Homo sapien
ttaaacagtatgaagcccattaaactatttcat

SEQ ID NO: 393153 - DNA, 33 bp, Homo sapien
agtagcagtgggaatgaagggcaatttacagca

SEQ ID NO: 393154 - DNA, 33 bp, Homo sapien
agtagcagtgggaatgcagggcaatttacagca

SEQ ID NO: 393155 - DNA, 33 bp, Homo sapien
gagtgtccaaccgtggcaatggaagggactggg

SEQ ID NO: 393156 - DNA, 33 bp, Homo sapien
gagtgtccaaccgtgggaatggaagggactggg

SEQ ID NO: 393157 - DNA, 33 bp, Homo sapien
gctcccaagtcgaaaacaggttcatgtttggtt

SEQ ID NO: 393158 - DNA, 33 bp, Homo sapien
gctcccaagtcgaaaagaggttcatgtttggtt

SEQ ID NO: 393159 - DNA, 33 bp, Homo sapien
tcataacgttgagggacagaagacagatacaaa

SEQ ID NO: 393160 - DNA, 33 bp, Homo sapien
tcataacgttgagggagagaagacagatacaaa

SEQ ID NO: 393161 - DNA, 33 bp, Homo sapien
aaaagattcacccacaatggcctcacaaagtac

SEQ ID NO: 393162 - DNA, 33 bp, Homo sapien
aaaagattcacccacagtggcctcacaaagtac

SEQ ID NO: 393163 - DNA, 33 bp, Homo sapien
atttttcaaatcactgcaggaaagcatattctt

SEQ ID NO: 393164 - DNA, 33 bp, Homo sapien
atttttcaaatcactgtaggaaagcatattctt

SEQ ID NO: 393165 - DNA, 33 bp, Homo sapien
agaataagcactttcaggggttacttgactctt

SEQ ID NO: 393166 - DNA, 33 bp, Homo sapien
agaataagcactttcatgggttacttgactctt

SEQ ID NO: 393167 - DNA, 33 bp, Homo sapien
aatcaaaaccctagcaccacattttacaaaatg

SEQ ID NO: 393168 - DNA, 33 bp, Homo sapien
aatcaaaaccctagcagcacattttacaaaatg

SEQ ID NO: 393169 - DNA, 33 bp, Homo sapien
cataacacgaatcttcaaaagaacggtacagaa

SEQ ID NO: 393170 - DNA, 33 bp, Homo sapien
cataacacgaatcttcgaaagaacggtacagaa

SEQ ID NO: 393171 - DNA, 33 bp, Homo sapien
ggccccactttccagagaaaaattaagacccag

SEQ ID NO: 393172 - DNA, 33 bp, Homo sapien
ggccccactttccagataaaaattaagacccag

SEQ ID NO: 393173 - DNA, 33 bp, Homo sapien
tgtgttctttataaaacatcacccccatccttc

SEQ ID NO: 393174 - DNA, 33 bp, Homo sapien
tgtgttctttataaaatatcacccccatccttc

SEQ ID NO: 393175 - DNA, 33 bp, Homo sapien
cagggaattcagaaagcccagaataccagagaa

SEQ ID NO: 393176 - DNA, 33 bp, Homo sapien
cagggaattcagaaagtccagaataccagagaa

SEQ ID NO: 393177 - DNA, 33 bp, Homo sapien
gagtggaaagacacaccgcaggggagctgccag

SEQ ID NO: 393178 - DNA, 33 bp, Homo sapien
gagtggaaagacacactgcaggggagctgccag

SEQ ID NO: 393179 - DNA, 33 bp, Homo sapien
tagtgactctggcccaagaaaaatatgcagcat

SEQ ID NO: 393180 - DNA, 33 bp, Homo sapien
tagtgactctggcccaggaaaaatatgcagcat

SEQ ID NO: 393181 - DNA, 33 bp, Homo sapien
gtttacccaatcaataacttttcccgtcaaaga

SEQ ID NO: 393182 - DNA, 33 bp, Homo sapien
gtttacccaatcaatagcttttcccgtcaaaga

SEQ ID NO: 393183 - DNA, 33 bp, Homo sapien
attcaaacgttaaaaacctctctcatcagcctc

SEQ ID NO: 393184 - DNA, 33 bp, Homo sapien
attcaaacgttaaaaatctctctcatcagcctc

SEQ ID NO: 393185 - DNA, 33 bp, Homo sapien
aagttctcagcagttcaatttcacatcatcagt

SEQ ID NO: 393186 - DNA, 33 bp, Homo sapien
aagttctcagcagttcgatttcacatcatcagt

SEQ ID NO: 393187 - DNA, 33 bp, Homo sapien
actccatcgctctacacccgttgcattgtcttt

SEQ ID NO: 393188 - DNA, 33 bp, Homo sapien
actccatcgctctacagccgttgcattgtcttt

SEQ ID NO: 393189 - DNA, 33 bp, Homo sapien
cacaggctgtggaccacgagttctgatttcagg

SEQ ID NO: 393190 - DNA, 33 bp, Homo sapien
cacaggctgtggaccatgagttctgatttcagg

SEQ ID NO: 393191 - DNA, 33 bp, Homo sapien
tgtgctctacggctacaggttcagccctggttt

SEQ ID NO: 393192 - DNA, 33 bp, Homo sapien
tgtgctctacggctacgggttcagccctggttt

SEQ ID NO: 393193 - DNA, 33 bp, Homo sapien
ccctctgttccagccacctggggcttcttgatg

SEQ ID NO: 393194 - DNA, 33 bp, Homo sapien
ccctctgttccagccatctggggcttcttgatg

SEQ ID NO: 393195 - DNA, 33 bp, Homo sapien
tacccaacctggatggaaggtcagagaatgcca

SEQ ID NO: 393196 - DNA, 33 bp, Homo sapien
tacccaacctggatgggaggtcagagaatgcca

SEQ ID NO: 393197 - DNA, 33 bp, Homo sapien
ggctggccctgtgatacgatgagcagaatgtag

SEQ ID NO: 393198 - DNA, 33 bp, Homo sapien
ggctggccctgtgatatgatgagcagaatgtag

SEQ ID NO: 393199 - DNA, 33 bp, Homo sapien
aagtcagattgtgaaaactttgcttcaacagtc

SEQ ID NO: 393200 - DNA, 33 bp, Homo sapien
aagtcagattgtgaaacctttgcttcaacagtc

SEQ ID NO: 393201 - DNA, 33 bp, Homo sapien
aaataccagcgcagtcactcttctctggagtcc

SEQ ID NO: 393202 - DNA, 33 bp, Homo sapien
aaataccagcgcagtcgctcttctctggagtcc

SEQ ID NO: 393203 - DNA, 33 bp, Homo sapien
cttcacatcctggtgactatttttactgggaag

SEQ ID NO: 393204 - DNA, 33 bp, Homo sapien
cttcacatcctggtgattatttttactgggaag

SEQ ID NO: 393205 - DNA, 33 bp, Homo sapien
tgacacaaaagagaccacaaacattttggggaa

SEQ ID NO: 393206 - DNA, 33 bp, Homo sapien
tgacacaaaagagaccgcaaacattttggggaa

SEQ ID NO: 393207 - DNA, 33 bp, Homo sapien
gagctgtctgggcgagacacttagtttagaagt

SEQ ID NO: 393208 - DNA, 33 bp, Homo sapien
gagctgtctgggcgaggcacttagtttagaagt

SEQ ID NO: 393209 - DNA, 33 bp, Homo sapien
ggcctcatttgcaagcagagagggctgaacaga

SEQ ID NO: 393210 - DNA, 33 bp, Homo sapien
ggcctcatttgcaagctgagagggctgaacaga

SEQ ID NO: 393211 - DNA, 33 bp, Homo sapien
caggtagcattgggaacagggaggcttttcacc

SEQ ID NO: 393212 - DNA, 33 bp, Homo sapien
caggtagcattgggaagagggaggcttttcacc

SEQ ID NO: 393213 - DNA, 33 bp, Homo sapien
acctaaaataaccaaacaccacatgaagcacgg

SEQ ID NO: 393214 - DNA, 33 bp, Homo sapien
acctaaaataaccaaataccacatgaagcacgg

SEQ ID NO: 393215 - DNA, 33 bp, Homo sapien
ctgatggtcagggccaacttgttttgtttgttt

SEQ ID NO: 393216 - DNA, 33 bp, Homo sapien
ctgatggtcagggccaccttgttttgtttgttt

SEQ ID NO: 393217 - DNA, 33 bp, Homo sapien
tgcccatagagcaagcacgtctttctttctttc

SEQ ID NO: 393218 - DNA, 33 bp, Homo sapien
tgcccatagagcaagcccgtctttctttctttc

SEQ ID NO: 393219 - DNA, 33 bp, Homo sapien
gttttgattattgcaactctattaatgctaata

SEQ ID NO: 393220 - DNA, 33 bp, Homo sapien
gttttgattattgcaattctattaatgctaata

SEQ ID NO: 393221 - DNA, 33 bp, Homo sapien
aaaagtccaaattcaactgttgctgggtttggt

SEQ ID NO: 393222 - DNA, 33 bp, Homo sapien
aaaagtccaaattcaagtgttgctgggtttggt

SEQ ID NO: 393223 - DNA, 33 bp, Homo sapien
tgaaccagtgagttggaaaacactctatgaaag

SEQ ID NO: 393224 - DNA, 33 bp, Homo sapien
tgaaccagtgagttgggaaacactctatgaaag

SEQ ID NO: 393225 - DNA, 33 bp, Homo sapien
cgttccagctgctgccaagagcctgggtatttg

SEQ ID NO: 393226 - DNA, 33 bp, Homo sapien
cgttccagctgctgccgagagcctgggtatttg

SEQ ID NO: 393227 - DNA, 33 bp, Homo sapien
agccttcatccatacaaggttgcaacgccccat

SEQ ID NO: 393228 - DNA, 33 bp, Homo sapien
agccttcatccatacagggttgcaacgccccat

SEQ ID NO: 393229 - DNA, 33 bp, Homo sapien
gttctgtgtgatgtcacggtcccatagcttagt

SEQ ID NO: 393230 - DNA, 33 bp, Homo sapien
gttctgtgtgatgtcatggtcccatagcttagt

SEQ ID NO: 393231 - DNA, 33 bp, Homo sapien
ggcggtcacgattccccattgtaccaaagaggg

SEQ ID NO: 393232 - DNA, 33 bp, Homo sapien
ggcggtcacgattccctattgtaccaaagaggg

SEQ ID NO: 393233 - DNA, 33 bp, Homo sapien
gctagtttctggcacccaaagcaggaccacagc

SEQ ID NO: 393234 - DNA, 33 bp, Homo sapien
gctagtttctggcacctaaagcaggaccacagc

SEQ ID NO: 393235 - DNA, 33 bp, Homo sapien
gataaatacttcaaaagggtgttccaggacaag

SEQ ID NO: 393236 - DNA, 33 bp, Homo sapien
gataaatacttcaaaatggtgttccaggacaag

SEQ ID NO: 393237 - DNA, 33 bp, Homo sapien
aagcaccatccttacaaaagctctggcagaaga

SEQ ID NO: 393238 - DNA, 33 bp, Homo sapien
aagcaccatccttacataagctctggcagaaga

SEQ ID NO: 393239 - DNA, 33 bp, Homo sapien
gaaccacgaggatcaacgtccagaaccctcttt

SEQ ID NO: 393240 - DNA, 33 bp, Homo sapien
gaaccacgaggatcaatgtccagaaccctcttt

SEQ ID NO: 393241 - DNA, 33 bp, Homo sapien
cctggctgtgtgttaaagtggaactcctggccc

SEQ ID NO: 393242 - DNA, 33 bp, Homo sapien
cctggctgtgtgttaaggtggaactcctggccc

SEQ ID NO: 393243 - DNA, 33 bp, Homo sapien
agggtcccattttcaccgaagctcacccttctc

SEQ ID NO: 393244 - DNA, 33 bp, Homo sapien
agggtcccattttcactgaagctcacccttctc

SEQ ID NO: 393245 - DNA, 33 bp, Homo sapien
tcaacctctcaagacaacatccaaagccagcgt

SEQ ID NO: 393246 - DNA, 33 bp, Homo sapien
tcaacctctcaagacagcatccaaagccagcgt

SEQ ID NO: 393247 - DNA, 33 bp, Homo sapien
agctcagacggtaccaccttccagaggcctccc

SEQ ID NO: 393248 - DNA, 33 bp, Homo sapien
agctcagacggtaccatcttccagaggcctccc

SEQ ID NO: 393249 - DNA, 33 bp, Homo sapien
tgaggtgctttctcaacagaccaagacaggatg

SEQ ID NO: 393250 - DNA, 33 bp, Homo sapien
tgaggtgctttctcaatagaccaagacaggatg

SEQ ID NO: 393251 - DNA, 33 bp, Homo sapien
tgctgttttgagcctgcatttaaaacacgaggc

SEQ ID NO: 393252 - DNA, 33 bp, Homo sapien
tgctgttttgagcctgtatttaaaacacgaggc

SEQ ID NO: 393253 - DNA, 33 bp, Homo sapien
taccaacactgggagacacgtagagaaacagac

SEQ ID NO: 393254 - DNA, 33 bp, Homo sapien
taccaacactgggagagacgtagagaaacagac

SEQ ID NO: 393255 - DNA, 33 bp, Homo sapien
gtgtacagtggagaagaattctagtgtcaggcc

SEQ ID NO: 393256 - DNA, 33 bp, Homo sapien
gtgtacagtggagaaggattctagtgtcaggcc

SEQ ID NO: 393257 - DNA, 33 bp, Homo sapien
gtatcgactccacaacaagtcagagtgcagtgg

SEQ ID NO: 393258 - DNA, 33 bp, Homo sapien
gtatcgactccacaaccagtcagagtgcagtgg

SEQ ID NO: 393259 - DNA, 33 bp, Homo sapien
tgcaatttctcggacaaaccaactcacgtcttc

SEQ ID NO: 393260 - DNA, 33 bp, Homo sapien
tgcaatttctcggacagaccaactcacgtcttc

SEQ ID NO: 393261 - DNA, 33 bp, Homo sapien
ttgggaaggttgaagaaatccagttgcgtgagc

SEQ ID NO: 393262 - DNA, 33 bp, Homo sapien
ttgggaaggttgaagatatccagttgcgtgagc

SEQ ID NO: 393263 - DNA, 33 bp, Homo sapien
aaggaattagcccaagcctcagagtttatggga

SEQ ID NO: 393264 - DNA, 33 bp, Homo sapien
aaggaattagcccaagtctcagagtttatggga

SEQ ID NO: 393265 - DNA, 33 bp, Homo sapien
ataaatgactacgaatcaggtgcagtggatact

SEQ ID NO: 393266 - DNA, 33 bp, Homo sapien
ataaatgactacgaattaggtgcagtggatact

SEQ ID NO: 393267 - DNA, 33 bp, Homo sapien
accaccaaagaacttacgtaatcaaaccccacc

SEQ ID NO: 393268 - DNA, 33 bp, Homo sapien
accaccaaagaacttaggtaatcaaaccccacc

SEQ ID NO: 393269 - DNA, 33 bp, Homo sapien
accatgaatccggaacaaccacattgaggacct

SEQ ID NO: 393270 - DNA, 33 bp, Homo sapien
accatgaatccggaaccaccacattgaggacct

SEQ ID NO: 393271 - DNA, 33 bp, Homo sapien
ctgcctagttactccacgttgagaaccccagct

SEQ ID NO: 393272 - DNA, 33 bp, Homo sapien
ctgcctagttactccaggttgagaaccccagct

SEQ ID NO: 393273 - DNA, 33 bp, Homo sapien
tttgtggtgaataacacgggtctggagttgaat

SEQ ID NO: 393274 - DNA, 33 bp, Homo sapien
tttgtggtgaataacatgggtctggagttgaat

SEQ ID NO: 393275 - DNA, 33 bp, Homo sapien
ccaaagaaatcaaaacaaaggaggaagtcaaga

SEQ ID NO: 393276 - DNA, 33 bp, Homo sapien
ccaaagaaatcaaaacgaaggaggaagtcaaga

SEQ ID NO: 393277 - DNA, 33 bp, Homo sapien
ttctgccttcaaagaacttcatatgcagacagg

SEQ ID NO: 393278 - DNA, 33 bp, Homo sapien
ttctgccttcaaagaagttcatatgcagacagg

SEQ ID NO: 393279 - DNA, 33 bp, Homo sapien
gggggtagaggaaacacctgaacacatctatgt

SEQ ID NO: 393280 - DNA, 33 bp, Homo sapien
gggggtagaggaaacatctgaacacatctatgt

SEQ ID NO: 393281 - DNA, 33 bp, Homo sapien
gtttcaccatttggtacccttgaattgacacag

SEQ ID NO: 393282 - DNA, 33 bp, Homo sapien
gtttcaccatttggtatccttgaattgacacag

SEQ ID NO: 393283 - DNA, 33 bp, Homo sapien
ttgctgcttgggactcacataagcaaggataga

SEQ ID NO: 393284 - DNA, 33 bp, Homo sapien
ttgctgcttgggactcgcataagcaaggataga

SEQ ID NO: 393285 - DNA, 33 bp, Homo sapien
ttttcatgggttggaaagcaaatctctcctcca

SEQ ID NO: 393286 - DNA, 33 bp, Homo sapien
ttttcatgggttggaaggcaaatctctcctcca

SEQ ID NO: 393287 - DNA, 33 bp, Homo sapien
tatccctgataaaaacaggcccttacattcctt

SEQ ID NO: 393288 - DNA, 33 bp, Homo sapien
tatccctgataaaaacgggcccttacattcctt

SEQ ID NO: 393289 - DNA, 33 bp, Homo sapien
agactataggtgaaaaacaggtgtgaaaatcct

SEQ ID NO: 393290 - DNA, 33 bp, Homo sapien
agactataggtgaaaatcaggtgtgaaaatcct

SEQ ID NO: 393291 - DNA, 33 bp, Homo sapien
gccaattcccataatgaatgtcctccgatatac

SEQ ID NO: 393292 - DNA, 33 bp, Homo sapien
gccaattcccataatggatgtcctccgatatac

SEQ ID NO: 393293 - DNA, 33 bp, Homo sapien
tgggaaagtgagtggcacaattcagttcaagtc

SEQ ID NO: 393294 - DNA, 33 bp, Homo sapien
tgggaaagtgagtggcgcaattcagttcaagtc

SEQ ID NO: 393295 - DNA, 33 bp, Homo sapien
ttctttttactcaggcaactgattgtgatgccc

SEQ ID NO: 393296 - DNA, 33 bp, Homo sapien
ttctttttactcaggctactgattgtgatgccc

SEQ ID NO: 393297 - DNA, 33 bp, Homo sapien
actccatcatctccaaataaagacaaaataagg

SEQ ID NO: 393298 - DNA, 33 bp, Homo sapien
actccatcatctccaagtaaagacaaaataagg

SEQ ID NO: 393299 - DNA, 33 bp, Homo sapien
gctctcctgcatacaaccggaaacacaccagcc

SEQ ID NO: 393300 - DNA, 33 bp, Homo sapien
gctctcctgcatacaatcggaaacacaccagcc

SEQ ID NO: 393301 - DNA, 33 bp, Homo sapien
gcaatactgatagaaacccaattcatcttatgt

SEQ ID NO: 393302 - DNA, 33 bp, Homo sapien
gcaatactgatagaaagccaattcatcttatgt

SEQ ID NO: 393303 - DNA, 33 bp, Homo sapien
gcagcctgcatggaaacgtcattctgtctcccg

SEQ ID NO: 393304 - DNA, 33 bp, Homo sapien
gcagcctgcatggaaatgtcattctgtctcccg

SEQ ID NO: 393305 - DNA, 33 bp, Homo sapien
aaaccctagaaactctcagagcctccctagtgg

SEQ ID NO: 393306 - DNA, 33 bp, Homo sapien
aaaccctagaaactctgagagcctccctagtgg

SEQ ID NO: 393307 - DNA, 33 bp, Homo sapien
aaagactcaagagtggaaacgttaagaaaaagc

SEQ ID NO: 393308 - DNA, 33 bp, Homo sapien
aaagactcaagagtggcaacgttaagaaaaagc

SEQ ID NO: 393309 - DNA, 33 bp, Homo sapien
gggtatgggagacagaaatccaatcacttccct

SEQ ID NO: 393310 - DNA, 33 bp, Homo sapien
gggtatgggagacagagatccaatcacttccct

SEQ ID NO: 393311 - DNA, 33 bp, Homo sapien
ctttgaatcctacctcaaaatcaacatgaaaag

SEQ ID NO: 393312 - DNA, 33 bp, Homo sapien
ctttgaatcctacctccaaatcaacatgaaaag

SEQ ID NO: 393313 - DNA, 33 bp, Homo sapien
ttaacatctgaatgccaagcctcgtcctgttac

SEQ ID NO: 393314 - DNA, 33 bp, Homo sapien
ttaacatctgaatgccgagcctcgtcctgttac

SEQ ID NO: 393315 - DNA, 33 bp, Homo sapien
ctaagattgatgtagccagtcaacaagtcaatg

SEQ ID NO: 393316 - DNA, 33 bp, Homo sapien
ctaagattgatgtagctagtcaacaagtcaatg

SEQ ID NO: 393317 - DNA, 33 bp, Homo sapien
aacagtgctgaagcacacttcatgtgaacgttg

SEQ ID NO: 393318 - DNA, 33 bp, Homo sapien
aacagtgctgaagcacgcttcatgtgaacgttg

SEQ ID NO: 393319 - DNA, 33 bp, Homo sapien
ctcgttcagctggttaagtgtgcgtgatatttt

SEQ ID NO: 393320 - DNA, 33 bp, Homo sapien
ctcgttcagctggttatgtgtgcgtgatatttt

SEQ ID NO: 393321 - DNA, 33 bp, Homo sapien
tgactctcagatcttacatttaatttagtccac

SEQ ID NO: 393322 - DNA, 33 bp, Homo sapien
tgactctcagatcttagatttaatttagtccac

SEQ ID NO: 393323 - DNA, 33 bp, Homo sapien
cttgataaataaattacaaagtcgtcccatggg

SEQ ID NO: 393324 - DNA, 33 bp, Homo sapien
cttgataaataaattagaaagtcgtcccatggg

SEQ ID NO: 393325 - DNA, 33 bp, Homo sapien
tcccaggtacaacaaaacagcaaattccactca

SEQ ID NO: 393326 - DNA, 33 bp, Homo sapien
tcccaggtacaacaaaccagcaaattccactca

SEQ ID NO: 393327 - DNA, 33 bp, Homo sapien
caacccaccacacttacgtttctcttcttctag

SEQ ID NO: 393328 - DNA, 33 bp, Homo sapien
caacccaccacacttatgtttctcttcttctag

SEQ ID NO: 393329 - DNA, 33 bp, Homo sapien
ttaggtgaaatggaccaagtaccttgaaagata

SEQ ID NO: 393330 - DNA, 33 bp, Homo sapien
ttaggtgaaatggaccgagtaccttgaaagata

SEQ ID NO: 393331 - DNA, 33 bp, Homo sapien
cctcaaatgtaaactaaggatggcatccctcct

SEQ ID NO: 393332 - DNA, 33 bp, Homo sapien
cctcaaatgtaaactacggatggcatccctcct

SEQ ID NO: 393333 - DNA, 33 bp, Homo sapien
tggttccaaagaagaagcgtggttgtgagttgc

SEQ ID NO: 393334 - DNA, 33 bp, Homo sapien
tggttccaaagaagaatcgtggttgtgagttgc

SEQ ID NO: 393335 - DNA, 33 bp, Homo sapien
agacgcgcttggaataagtcattccctcaggcc

SEQ ID NO: 393336 - DNA, 33 bp, Homo sapien
agacgcgcttggaataggtcattccctcaggcc

SEQ ID NO: 393337 - DNA, 33 bp, Homo sapien
gtttatgcctcttgcccgaagtccctgtgaaat

SEQ ID NO: 393338 - DNA, 33 bp, Homo sapien
gtttatgcctcttgccggaagtccctgtgaaat

SEQ ID NO: 393339 - DNA, 33 bp, Homo sapien
catccttcctctcaccaactcaacctaatagat

SEQ ID NO: 393340 - DNA, 33 bp, Homo sapien
catccttcctctcacctactcaacctaatagat

SEQ ID NO: 393341 - DNA, 33 bp, Homo sapien
gatgaaactggacactcaaggcagacataggaa

SEQ ID NO: 393342 - DNA, 33 bp, Homo sapien
gatgaaactggacacttaaggcagacataggaa

SEQ ID NO: 393343 - DNA, 33 bp, Homo sapien
atttcaaaacacaggaccataagttatctattt

SEQ ID NO: 393344 - DNA, 33 bp, Homo sapien
atttcaaaacacaggatcataagttatctattt

SEQ ID NO: 393345 - DNA, 33 bp, Homo sapien
ctcttccattccacacaagattgacatgcactg

SEQ ID NO: 393346 - DNA, 33 bp, Homo sapien
ctcttccattccacacgagattgacatgcactg

SEQ ID NO: 393347 - DNA, 33 bp, Homo sapien
aagactcacagaggtcaagtgaattcctgaagg

SEQ ID NO: 393348 - DNA, 33 bp, Homo sapien
aagactcacagaggtcgagtgaattcctgaagg

SEQ ID NO: 393349 - DNA, 33 bp, Homo sapien
tcccatatacttcaaaccatctgtaggttactt

SEQ ID NO: 393350 - DNA, 33 bp, Homo sapien
tcccatatacttcaaatcatctgtaggttactt

SEQ ID NO: 393351 - DNA, 33 bp, Homo sapien
aaaatcaaacccaatacaagtaacagtgcaaca

SEQ ID NO: 393352 - DNA, 33 bp, Homo sapien
aaaatcaaacccaatagaagtaacagtgcaaca

SEQ ID NO: 393353 - DNA, 33 bp, Homo sapien
ttgaattgtgtcacccacatagttatgctcaag

SEQ ID NO: 393354 - DNA, 33 bp, Homo sapien
ttgaattgtgtcacccgcatagttatgctcaag

SEQ ID NO: 393355 - DNA, 33 bp, Homo sapien
ctggttctcttctatacgttgtccctggcccct

SEQ ID NO: 393356 - DNA, 33 bp, Homo sapien
ctggttctcttctatatgttgtccctggcccct

SEQ ID NO: 393357 - DNA, 33 bp, Homo sapien
tctcctttgtttctcccgcaaatgttttcatta

SEQ ID NO: 393358 - DNA, 33 bp, Homo sapien
tctcctttgtttctcctgcaaatgttttcatta

SEQ ID NO: 393359 - DNA, 33 bp, Homo sapien
tttgccaaggtagttaccacttactgccatggt

SEQ ID NO: 393360 - DNA, 33 bp, Homo sapien
tttgccaaggtagttatcacttactgccatggt

SEQ ID NO: 393361 - DNA, 33 bp, Homo sapien
tggcttgtcatgggaaaatcacatgtaaccacc

SEQ ID NO: 393362 - DNA, 33 bp, Homo sapien
tggcttgtcatgggaacatcacatgtaaccacc

SEQ ID NO: 393363 - DNA, 33 bp, Homo sapien
ttaaaaccgaacatgacgtaaacatggaaaata

SEQ ID NO: 393364 - DNA, 33 bp, Homo sapien
ttaaaaccgaacatgatgtaaacatggaaaata

SEQ ID NO: 393365 - DNA, 33 bp, Homo sapien
catgaaatgggaaatgcagatatacattattga

SEQ ID NO: 393366 - DNA, 33 bp, Homo sapien
catgaaatgggaaatggagatatacattattga

SEQ ID NO: 393367 - DNA, 33 bp, Homo sapien
agacaattcactaaggccataaaagtaaagtgc

SEQ ID NO: 393368 - DNA, 33 bp, Homo sapien
agacaattcactaaggtcataaaagtaaagtgc

SEQ ID NO: 393369 - DNA, 33 bp, Homo sapien
ctcagtcctcacacgacgccctgcagcaatcct

SEQ ID NO: 393370 - DNA, 33 bp, Homo sapien
ctcagtcctcacacgatgccctgcagcaatcct

SEQ ID NO: 393371 - DNA, 33 bp, Homo sapien
gccaagtaatggtgtgcatggatgctttactta

SEQ ID NO: 393372 - DNA, 33 bp, Homo sapien
gccaagtaatggtgtgtatggatgctttactta

SEQ ID NO: 393373 - DNA, 33 bp, Homo sapien
gaacccctgtaaagtaacgactaatatcccgtc

SEQ ID NO: 393374 - DNA, 33 bp, Homo sapien
gaacccctgtaaagtagcgactaatatcccgtc

SEQ ID NO: 393375 - DNA, 33 bp, Homo sapien
aagccagaagagcacaatgagttgggagcttct

SEQ ID NO: 393376 - DNA, 33 bp, Homo sapien
aagccagaagagcacagtgagttgggagcttct

SEQ ID NO: 393377 - DNA, 33 bp, Homo sapien
aaatccataggacaaaatttgaccatgaattta

SEQ ID NO: 393378 - DNA, 33 bp, Homo sapien
aaatccataggacaaattttgaccatgaattta

SEQ ID NO: 393379 - DNA, 33 bp, Homo sapien
gaaagatcagatgacactgaaaatattcacggc

SEQ ID NO: 393380 - DNA, 33 bp, Homo sapien
gaaagatcagatgacattgaaaatattcacggc

SEQ ID NO: 393381 - DNA, 33 bp, Homo sapien
ctgtaccctgaagatactagtacctgccatgcc

SEQ ID NO: 393382 - DNA, 33 bp, Homo sapien
ctgtaccctgaagatattagtacctgccatgcc

SEQ ID NO: 393383 - DNA, 33 bp, Homo sapien
attttaaaaacttagactacgtgtccaacacca

SEQ ID NO: 393384 - DNA, 33 bp, Homo sapien
attttaaaaacttagattacgtgtccaacacca

SEQ ID NO: 393385 - DNA, 33 bp, Homo sapien
tgtacctacgtacccacacatctctatcacctg

SEQ ID NO: 393386 - DNA, 33 bp, Homo sapien
tgtacctacgtacccagacatctctatcacctg

SEQ ID NO: 393387 - DNA, 33 bp, Homo sapien
ttgccacatcatcggccaagaatgacataagct

SEQ ID NO: 393388 - DNA, 33 bp, Homo sapien
ttgccacatcatcggctaagaatgacataagct

SEQ ID NO: 393389 - DNA, 33 bp, Homo sapien
ccaacagtcagacacaataactttttatttctt

SEQ ID NO: 393390 - DNA, 33 bp, Homo sapien
ccaacagtcagacacagtaactttttatttctt

SEQ ID NO: 393391 - DNA, 33 bp, Homo sapien
actgcattccactaacacagcttcattctctag

SEQ ID NO: 393392 - DNA, 33 bp, Homo sapien
actgcattccactaacgcagcttcattctctag

SEQ ID NO: 393393 - DNA, 33 bp, Homo sapien
aaccccatctgaccaacgcccagccctctgagt

SEQ ID NO: 393394 - DNA, 33 bp, Homo sapien
aaccccatctgaccaatgcccagccctctgagt

SEQ ID NO: 393395 - DNA, 33 bp, Homo sapien
cttcctagaagatgtaccttttgtctactgcaa

SEQ ID NO: 393396 - DNA, 33 bp, Homo sapien
cttcctagaagatgtagcttttgtctactgcaa

SEQ ID NO: 393397 - DNA, 33 bp, Homo sapien
catcttgacaaagactcaggttaacagtggctt

SEQ ID NO: 393398 - DNA, 33 bp, Homo sapien
catcttgacaaagactgaggttaacagtggctt

SEQ ID NO: 393399 - DNA, 33 bp, Homo sapien
gctgttgtgcgccctcaagccgtggttgttagg

SEQ ID NO: 393400 - DNA, 33 bp, Homo sapien
gctgttgtgcgccctcgagccgtggttgttagg

SEQ ID NO: 393401 - DNA, 33 bp, Homo sapien
tcatggaaaatgagaaatatacacatggcaatc

SEQ ID NO: 393402 - DNA, 33 bp, Homo sapien
tcatggaaaatgagaattatacacatggcaatc

SEQ ID NO: 393403 - DNA, 33 bp, Homo sapien
gtgacaagggatgaaacgatattgacatgttgt

SEQ ID NO: 393404 - DNA, 33 bp, Homo sapien
gtgacaagggatgaaatgatattgacatgttgt

SEQ ID NO: 393405 - DNA, 33 bp, Homo sapien
taaagttacaggaaaagaaaaagagaaagaggg

SEQ ID NO: 393406 - DNA, 33 bp, Homo sapien
taaagttacaggaaaataaaaagagaaagaggg

SEQ ID NO: 393407 - DNA, 33 bp, Homo sapien
gggtctgccacgaatacagagtgattcttgcaa

SEQ ID NO: 393408 - DNA, 33 bp, Homo sapien
gggtctgccacgaatagagagtgattcttgcaa

SEQ ID NO: 393409 - DNA, 33 bp, Homo sapien
agactgatcttcaatcacagttagtaaaaccca

SEQ ID NO: 393410 - DNA, 33 bp, Homo sapien
agactgatcttcaatcgcagttagtaaaaccca

SEQ ID NO: 393411 - DNA, 33 bp, Homo sapien
tcagtggcaaaccatcaaaagagccaggagaca

SEQ ID NO: 393412 - DNA, 33 bp, Homo sapien
tcagtggcaaaccatccaaagagccaggagaca

SEQ ID NO: 393413 - DNA, 33 bp, Homo sapien
aaagaaacgtagatgaagcaacaggtacctaac

SEQ ID NO: 393414 - DNA, 33 bp, Homo sapien
aaagaaacgtagatgaggcaacaggtacctaac

SEQ ID NO: 393415 - DNA, 33 bp, Homo sapien
aaaataaacgtttctaagtccagattaatgtta

SEQ ID NO: 393416 - DNA, 33 bp, Homo sapien
aaaataaacgtttctacgtccagattaatgtta

SEQ ID NO: 393417 - DNA, 33 bp, Homo sapien
tcctaatagtaaacgggaaatcatttttctgtg

SEQ ID NO: 393418 - DNA, 33 bp, Homo sapien
tcctaatagtaaacggtaaatcatttttctgtg

SEQ ID NO: 393419 - DNA, 33 bp, Homo sapien
gaaatcaactgtcacagcttcatacaaaacaaa

SEQ ID NO: 393420 - DNA, 33 bp, Homo sapien
gaaatcaactgtcacatcttcatacaaaacaaa

SEQ ID NO: 393421 - DNA, 33 bp, Homo sapien
tttgtgttttaagatacgtattacagaagagtc

SEQ ID NO: 393422 - DNA, 33 bp, Homo sapien
tttgtgttttaagatatgtattacagaagagtc

SEQ ID NO: 393423 - DNA, 33 bp, Homo sapien
tgggtagaggaaaaaacatgtttacaattagca

SEQ ID NO: 393424 - DNA, 33 bp, Homo sapien
tgggtagaggaaaaaagatgtttacaattagca

SEQ ID NO: 393425 - DNA, 33 bp, Homo sapien
atctgtggagccagcacagcgatggccctgcct

SEQ ID NO: 393426 - DNA, 33 bp, Homo sapien
atctgtggagccagcatagcgatggccctgcct

SEQ ID NO: 393427 - DNA, 33 bp, Homo sapien
gatactgggacccagcagattcaaaggaagagc

SEQ ID NO: 393428 - DNA, 33 bp, Homo sapien
gatactgggacccagctgattcaaaggaagagc

SEQ ID NO: 393429 - DNA, 33 bp, Homo sapien
gggattgaagggcctgcagaacagaatcacaag

SEQ ID NO: 393430 - DNA, 33 bp, Homo sapien
gggattgaagggcctggagaacagaatcacaag

SEQ ID NO: 393431 - DNA, 33 bp, Homo sapien
gatggaaacacctccactgatggtctggagaca

SEQ ID NO: 393432 - DNA, 33 bp, Homo sapien
gatggaaacacctccattgatggtctggagaca

SEQ ID NO: 393433 - DNA, 33 bp, Homo sapien
ccccacagccgtttgacgacaacttcacatcgg

SEQ ID NO: 393434 - DNA, 33 bp, Homo sapien
ccccacagccgtttgatgacaacttcacatcgg

SEQ ID NO: 393435 - DNA, 33 bp, Homo sapien
tgcagtctttcactcaatagaacatggccaaga

SEQ ID NO: 393436 - DNA, 33 bp, Homo sapien
tgcagtctttcactcagtagaacatggccaaga

SEQ ID NO: 393437 - DNA, 33 bp, Homo sapien
aagaaggaaaaatcagcctctccataaagcatg

SEQ ID NO: 393438 - DNA, 33 bp, Homo sapien
aagaaggaaaaatcaggctctccataaagcatg

SEQ ID NO: 393439 - DNA, 33 bp, Homo sapien
aatgatccaaaccacactgggctggaaaaattg

SEQ ID NO: 393440 - DNA, 33 bp, Homo sapien
aatgatccaaaccacagtgggctggaaaaattg

SEQ ID NO: 393441 - DNA, 33 bp, Homo sapien
ctctcggagtgtttaacgtgctgactctctaat

SEQ ID NO: 393442 - DNA, 33 bp, Homo sapien
ctctcggagtgtttaatgtgctgactctctaat

SEQ ID NO: 393443 - DNA, 33 bp, Homo sapien
ccccatctatacactgcccaaactcagcaaatc

SEQ ID NO: 393444 - DNA, 33 bp, Homo sapien
ccccatctatacactgtccaaactcagcaaatc

SEQ ID NO: 393445 - DNA, 33 bp, Homo sapien
cttctttcccacactaagccattcacagacacc

SEQ ID NO: 393446 - DNA, 33 bp, Homo sapien
cttctttcccacactatgccattcacagacacc

SEQ ID NO: 393447 - DNA, 33 bp, Homo sapien
aaggctaacttggtgaatcacaaccttacaagg

SEQ ID NO: 393448 - DNA, 33 bp, Homo sapien
aaggctaacttggtgattcacaaccttacaagg

SEQ ID NO: 393449 - DNA, 33 bp, Homo sapien
gcccaatgaggtaagcactgttactgtgtccac

SEQ ID NO: 393450 - DNA, 33 bp, Homo sapien
gcccaatgaggtaagcgctgttactgtgtccac

SEQ ID NO: 393451 - DNA, 33 bp, Homo sapien
ctgcttctgtgcattaagtcgttctgttcctgt

SEQ ID NO: 393452 - DNA, 33 bp, Homo sapien
ctgcttctgtgcattaggtcgttctgttcctgt

SEQ ID NO: 393453 - DNA, 33 bp, Homo sapien
cccgcctgatctaagaacttgctgatgtctgca

SEQ ID NO: 393454 - DNA, 33 bp, Homo sapien
cccgcctgatctaagagcttgctgatgtctgca

SEQ ID NO: 393455 - DNA, 33 bp, Homo sapien
gacctgggttctagcacctttttgacttgagaa

SEQ ID NO: 393456 - DNA, 33 bp, Homo sapien
gacctgggttctagcagctttttgacttgagaa

SEQ ID NO: 393457 - DNA, 33 bp, Homo sapien
agtagttactgagcacaatgagtagttactaag

SEQ ID NO: 393458 - DNA, 33 bp, Homo sapien
agtagttactgagcaccatgagtagttactaag

SEQ ID NO: 393459 - DNA, 33 bp, Homo sapien
ggacaatgacttcatcaagcctggtagtaatta

SEQ ID NO: 393460 - DNA, 33 bp, Homo sapien
ggacaatgacttcatcgagcctggtagtaatta

SEQ ID NO: 393461 - DNA, 33 bp, Homo sapien
tttaaaatcttctgcacgtcttgtcaaattatt

SEQ ID NO: 393462 - DNA, 33 bp, Homo sapien
tttaaaatcttctgcatgtcttgtcaaattatt

SEQ ID NO: 393463 - DNA, 33 bp, Homo sapien
cctctcctccaccttaaacatctagaaaacgcc

SEQ ID NO: 393464 - DNA, 33 bp, Homo sapien
cctctcctccaccttagacatctagaaaacgcc

SEQ ID NO: 393465 - DNA, 33 bp, Homo sapien
cttgcatgcacatataagctctttctttctgat

SEQ ID NO: 393466 - DNA, 33 bp, Homo sapien
cttgcatgcacatatacgctctttctttctgat

SEQ ID NO: 393467 - DNA, 33 bp, Homo sapien
ctcctgaatagagcgccgccaattcataggagg

SEQ ID NO: 393468 - DNA, 33 bp, Homo sapien
ctcctgaatagagcgctgccaattcataggagg

SEQ ID NO: 393469 - DNA, 33 bp, Homo sapien
atctctcttaaatccaataaagatctggctgca

SEQ ID NO: 393470 - DNA, 33 bp, Homo sapien
atctctcttaaatccagtaaagatctggctgca

SEQ ID NO: 393471 - DNA, 33 bp, Homo sapien
gattataaccactccagctatcaatgccgcctt

SEQ ID NO: 393472 - DNA, 33 bp, Homo sapien
gattataaccactccatctatcaatgccgcctt

SEQ ID NO: 393473 - DNA, 33 bp, Homo sapien
acaggaagaagcttccaatgccttgtggatttg

SEQ ID NO: 393474 - DNA, 33 bp, Homo sapien
acaggaagaagcttccgatgccttgtggatttg

SEQ ID NO: 393475 - DNA, 33 bp, Homo sapien
cctgagttttcacagccttagaaatgagatgtt

SEQ ID NO: 393476 - DNA, 33 bp, Homo sapien
cctgagttttcacagctttagaaatgagatgtt

SEQ ID NO: 393477 - DNA, 33 bp, Homo sapien
ccatgctacagctggacgaactgggcttcagca

SEQ ID NO: 393478 - DNA, 33 bp, Homo sapien
ccatgctacagctggaggaactgggcttcagca

SEQ ID NO: 393479 - DNA, 33 bp, Homo sapien
gcctatgcccaggaataaacaaggaatagctta

SEQ ID NO: 393480 - DNA, 33 bp, Homo sapien
gcctatgcccaggaatgaacaaggaatagctta

SEQ ID NO: 393481 - DNA, 33 bp, Homo sapien
ggcttagatgataaaacataagcgtcatatcgg

SEQ ID NO: 393482 - DNA, 33 bp, Homo sapien
ggcttagatgataaaatataagcgtcatatcgg

SEQ ID NO: 393483 - DNA, 33 bp, Homo sapien
gtggtttgagtcccagcaggaggcttctgaaga

SEQ ID NO: 393484 - DNA, 33 bp, Homo sapien
gtggtttgagtcccaggaggaggcttctgaaga

SEQ ID NO: 393485 - DNA, 33 bp, Homo sapien
tcccaatttcggacaactgaaaacactaaggcc

SEQ ID NO: 393486 - DNA, 33 bp, Homo sapien
tcccaatttcggacaattgaaaacactaaggcc

SEQ ID NO: 393487 - DNA, 33 bp, Homo sapien
ggaccaggggcaggcaagttagaagctcccatc

SEQ ID NO: 393488 - DNA, 33 bp, Homo sapien
ggaccaggggcaggcacgttagaagctcccatc

SEQ ID NO: 393489 - DNA, 33 bp, Homo sapien
aaatggtcctcagacacggtggactgcggcttt

SEQ ID NO: 393490 - DNA, 33 bp, Homo sapien
aaatggtcctcagacatggtggactgcggcttt

SEQ ID NO: 393491 - DNA, 33 bp, Homo sapien
gcctcctttacagatacagatgtcaagacagat

SEQ ID NO: 393492 - DNA, 33 bp, Homo sapien
gcctcctttacagatagagatgtcaagacagat

SEQ ID NO: 393493 - DNA, 33 bp, Homo sapien
tagcaagtcacagaccaggcttcaaacccagaa

SEQ ID NO: 393494 - DNA, 33 bp, Homo sapien
tagcaagtcacagaccgggcttcaaacccagaa

SEQ ID NO: 393495 - DNA, 33 bp, Homo sapien
atctgctggagacccacaagaaaaaggtagccc

SEQ ID NO: 393496 - DNA, 33 bp, Homo sapien
atctgctggagacccataagaaaaaggtagccc

SEQ ID NO: 393497 - DNA, 33 bp, Homo sapien
ctgaagtcttctccatcagagtcattttggtgc

SEQ ID NO: 393498 - DNA, 33 bp, Homo sapien
ctgaagtcttctccatgagagtcattttggtgc

SEQ ID NO: 393499 - DNA, 33 bp, Homo sapien
gcagatgacttactgggcagtcacgctgtcgca

SEQ ID NO: 393500 - DNA, 33 bp, Homo sapien
gcagatgacttactggtcagtcacgctgtcgca

SEQ ID NO: 393501 - DNA, 33 bp, Homo sapien
ctcatcctgtaataaactgtaactatgagtagg

SEQ ID NO: 393502 - DNA, 33 bp, Homo sapien
ctcatcctgtaataaattgtaactatgagtagg

SEQ ID NO: 393503 - DNA, 33 bp, Homo sapien
ccacagtcacttctgaaaccaactacaaagttt

SEQ ID NO: 393504 - DNA, 33 bp, Homo sapien
ccacagtcacttctgataccaactacaaagttt

SEQ ID NO: 393505 - DNA, 33 bp, Homo sapien
gacaggagagcagagacaggtagttgcagatga

SEQ ID NO: 393506 - DNA, 33 bp, Homo sapien
gacaggagagcagagataggtagttgcagatga

SEQ ID NO: 393507 - DNA, 33 bp, Homo sapien
ttggcttggagatggaacactttactcttagct

SEQ ID NO: 393508 - DNA, 33 bp, Homo sapien
ttggcttggagatggatcactttactcttagct

SEQ ID NO: 393509 - DNA, 33 bp, Homo sapien
ctccctctaataagaaagcttgtggcttcattt

SEQ ID NO: 393510 - DNA, 33 bp, Homo sapien
ctccctctaataagaatgcttgtggcttcattt

SEQ ID NO: 393511 - DNA, 33 bp, Homo sapien
aaatgtctacaaaatcaatttcagaaaactcag

SEQ ID NO: 393512 - DNA, 33 bp, Homo sapien
aaatgtctacaaaatccatttcagaaaactcag

SEQ ID NO: 393513 - DNA, 33 bp, Homo sapien
tgtttttagtagagtcaaggtatcaccattttg

SEQ ID NO: 393514 - DNA, 33 bp, Homo sapien
tgtttttagtagagtcgaggtatcaccattttg

SEQ ID NO: 393515 - DNA, 33 bp, Homo sapien
cctaattgatccttagaaagacaaacagttggt

SEQ ID NO: 393516 - DNA, 33 bp, Homo sapien
cctaattgatccttaggaagacaaacagttggt

SEQ ID NO: 393517 - DNA, 33 bp, Homo sapien
ctcagaattcaaagcacgttacactaaagtgac

SEQ ID NO: 393518 - DNA, 33 bp, Homo sapien
ctcagaattcaaagcaggttacactaaagtgac

SEQ ID NO: 393519 - DNA, 33 bp, Homo sapien
actgagttccagtgaaattcaccgcaacaggca

SEQ ID NO: 393520 - DNA, 33 bp, Homo sapien
actgagttccagtgaagttcaccgcaacaggca

SEQ ID NO: 393521 - DNA, 33 bp, Homo sapien
ggagtcaggactgtcaaatgcaatggattccat

SEQ ID NO: 393522 - DNA, 33 bp, Homo sapien
ggagtcaggactgtcagatgcaatggattccat

SEQ ID NO: 393523 - DNA, 33 bp, Homo sapien
ttgaaaaaatcataagaccctgtagacactgta

SEQ ID NO: 393524 - DNA, 33 bp, Homo sapien
ttgaaaaaatcataaggccctgtagacactgta

SEQ ID NO: 393525 - DNA, 33 bp, Homo sapien
agacatattttgtcaactgattttaccctgtgc

SEQ ID NO: 393526 - DNA, 33 bp, Homo sapien
agacatattttgtcaattgattttaccctgtgc

SEQ ID NO: 393527 - DNA, 33 bp, Homo sapien
ggtttcagaatggcaacgtggcctgcttaaggt

SEQ ID NO: 393528 - DNA, 33 bp, Homo sapien
ggtttcagaatggcaatgtggcctgcttaaggt

SEQ ID NO: 393529 - DNA, 33 bp, Homo sapien
ccagcatgaactctcaccgcttttcaatcaact

SEQ ID NO: 393530 - DNA, 33 bp, Homo sapien
ccagcatgaactctcatcgcttttcaatcaact

SEQ ID NO: 393531 - DNA, 33 bp, Homo sapien
gcagagtcattttacaatctgctgggcctgact

SEQ ID NO: 393532 - DNA, 33 bp, Homo sapien
gcagagtcattttacactctgctgggcctgact

SEQ ID NO: 393533 - DNA, 33 bp, Homo sapien
tggtgtatggcaaacactcgacaggtaaataga

SEQ ID NO: 393534 - DNA, 33 bp, Homo sapien
tggtgtatggcaaacagtcgacaggtaaataga

SEQ ID NO: 393535 - DNA, 33 bp, Homo sapien
cccagttgggcagcgcaatgggaaggagcccac

SEQ ID NO: 393536 - DNA, 33 bp, Homo sapien
cccagttgggcagcgcgatgggaaggagcccac

SEQ ID NO: 393537 - DNA, 33 bp, Homo sapien
tgaagtgggaaatccacgttgctggagaagcca

SEQ ID NO: 393538 - DNA, 33 bp, Homo sapien
tgaagtgggaaatccaggttgctggagaagcca

SEQ ID NO: 393539 - DNA, 33 bp, Homo sapien
caccagccaggtgagaaagaagatcggtgacaa

SEQ ID NO: 393540 - DNA, 33 bp, Homo sapien
caccagccaggtgagagagaagatcggtgacaa

SEQ ID NO: 393541 - DNA, 33 bp, Homo sapien
aggagacctccgtaaacgtccttccagcataga

SEQ ID NO: 393542 - DNA, 33 bp, Homo sapien
aggagacctccgtaaatgtccttccagcataga

SEQ ID NO: 393543 - DNA, 33 bp, Homo sapien
gggtcgtgagtacacagagtggaatatgaacgc

SEQ ID NO: 393544 - DNA, 33 bp, Homo sapien
gggtcgtgagtacacatagtggaatatgaacgc

SEQ ID NO: 393545 - DNA, 33 bp, Homo sapien
ggtcagtttctcataacggtggttgcattttct

SEQ ID NO: 393546 - DNA, 33 bp, Homo sapien
ggtcagtttctcataatggtggttgcattttct

SEQ ID NO: 393547 - DNA, 33 bp, Homo sapien
cacatgactcatctaacacgtgttttttggtga

SEQ ID NO: 393548 - DNA, 33 bp, Homo sapien
cacatgactcatctaatacgtgttttttggtga

SEQ ID NO: 393549 - DNA, 33 bp, Homo sapien
cagaggatgtttagagacgtgaaactcctctgt

SEQ ID NO: 393550 - DNA, 33 bp, Homo sapien
cagaggatgtttagagccgtgaaactcctctgt

SEQ ID NO: 393551 - DNA, 33 bp, Homo sapien
tctgtgagctagttcaagatctcaaacaaaagg

SEQ ID NO: 393552 - DNA, 33 bp, Homo sapien
tctgtgagctagttcatgatctcaaacaaaagg

SEQ ID NO: 393553 - DNA, 33 bp, Homo sapien
tcacgtcacaggtaccagcggtttagggcttgg

SEQ ID NO: 393554 - DNA, 33 bp, Homo sapien
tcacgtcacaggtaccggcggtttagggcttgg

SEQ ID NO: 393555 - DNA, 33 bp, Homo sapien
caggaagagcaggtaaactctcaccactgtttc

SEQ ID NO: 393556 - DNA, 33 bp, Homo sapien
caggaagagcaggtaacctctcaccactgtttc

SEQ ID NO: 393557 - DNA, 33 bp, Homo sapien
tactttttctcttacaaccttcacagttctgca

SEQ ID NO: 393558 - DNA, 33 bp, Homo sapien
tactttttctcttacacccttcacagttctgca

SEQ ID NO: 393559 - DNA, 33 bp, Homo sapien
cctctgcaccatataacacctggaaatgctgtc

SEQ ID NO: 393560 - DNA, 33 bp, Homo sapien
cctctgcaccatataatacctggaaatgctgtc

SEQ ID NO: 393561 - DNA, 33 bp, Homo sapien
ttttataaactgttaacacaacattcaaatggg

SEQ ID NO: 393562 - DNA, 33 bp, Homo sapien
ttttataaactgttaagacaacattcaaatggg

SEQ ID NO: 393563 - DNA, 33 bp, Homo sapien
aacagaaaaccaacatcaaacatgagtagtgtc

SEQ ID NO: 393564 - DNA, 33 bp, Homo sapien
aacagaaaaccaacatgaaacatgagtagtgtc

SEQ ID NO: 393565 - DNA, 33 bp, Homo sapien
ggggttttccagctcacggagtgtttgtgccaa

SEQ ID NO: 393566 - DNA, 33 bp, Homo sapien
ggggttttccagctcatggagtgtttgtgccaa

SEQ ID NO: 393567 - DNA, 33 bp, Homo sapien
ggttactgagatctcgcaaggtggtgaccgcac

SEQ ID NO: 393568 - DNA, 33 bp, Homo sapien
ggttactgagatctcggaaggtggtgaccgcac

SEQ ID NO: 393569 - DNA, 33 bp, Homo sapien
ccttttgaatctcccacagttttatctggaggg

SEQ ID NO: 393570 - DNA, 33 bp, Homo sapien
ccttttgaatctcccagagttttatctggaggg

SEQ ID NO: 393571 - DNA, 33 bp, Homo sapien
tgggggctctgagataagcttgtcactgagagg

SEQ ID NO: 393572 - DNA, 33 bp, Homo sapien
tgggggctctgagatacgcttgtcactgagagg

SEQ ID NO: 393573 - DNA, 33 bp, Homo sapien
ccgagttgtggttttccaatcacattctatctt

SEQ ID NO: 393574 - DNA, 33 bp, Homo sapien
ccgagttgtggttttctaatcacattctatctt

SEQ ID NO: 393575 - DNA, 33 bp, Homo sapien
ctccccacaatactcacagaggacttctaaaca

SEQ ID NO: 393576 - DNA, 33 bp, Homo sapien
ctccccacaatactcagagaggacttctaaaca

SEQ ID NO: 393577 - DNA, 33 bp, Homo sapien
cttgaactactagactcaagtgattcgtctgcc

SEQ ID NO: 393578 - DNA, 33 bp, Homo sapien
cttgaactactagactgaagtgattcgtctgcc

SEQ ID NO: 393579 - DNA, 33 bp, Homo sapien
aaatacaggaagtgaactaaaagttagtttagc

SEQ ID NO: 393580 - DNA, 33 bp, Homo sapien
aaatacaggaagtgaattaaaagttagtttagc

SEQ ID NO: 393581 - DNA, 33 bp, Homo sapien
gcctgaggtgtcagaaacagatcagaggaagtc

SEQ ID NO: 393582 - DNA, 33 bp, Homo sapien
gcctgaggtgtcagaaccagatcagaggaagtc

SEQ ID NO: 393583 - DNA, 33 bp, Homo sapien
catgcatggaaaagaaggacaaatgattgttgt

SEQ ID NO: 393584 - DNA, 33 bp, Homo sapien
catgcatggaaaagaatgacaaatgattgttgt

SEQ ID NO: 393585 - DNA, 33 bp, Homo sapien
caacaccccatttgaacatctttccgtggactt

SEQ ID NO: 393586 - DNA, 33 bp, Homo sapien
caacaccccatttgaagatctttccgtggactt

SEQ ID NO: 393587 - DNA, 33 bp, Homo sapien
acacgtcctcagaaagcccctgatggaaccggg

SEQ ID NO: 393588 - DNA, 33 bp, Homo sapien
acacgtcctcagaaagtccctgatggaaccggg

SEQ ID NO: 393589 - DNA, 33 bp, Homo sapien
ctagctaactcatacacgtcacgtttctgcagc

SEQ ID NO: 393590 - DNA, 33 bp, Homo sapien
ctagctaactcatacatgtcacgtttctgcagc

SEQ ID NO: 393591 - DNA, 33 bp, Homo sapien
ttatgacctaatcttgaaagtactgtggcatca

SEQ ID NO: 393592 - DNA, 33 bp, Homo sapien
ttatgacctaatcttggaagtactgtggcatca

SEQ ID NO: 393593 - DNA, 33 bp, Homo sapien
cttacagaaaatatgacaggccagtctatcaaa

SEQ ID NO: 393594 - DNA, 33 bp, Homo sapien
cttacagaaaatatgagaggccagtctatcaaa

SEQ ID NO: 393595 - DNA, 33 bp, Homo sapien
agaacggtttctgggacgaaggagagaaggtag

SEQ ID NO: 393596 - DNA, 33 bp, Homo sapien
agaacggtttctgggaggaaggagagaaggtag

SEQ ID NO: 393597 - DNA, 33 bp, Homo sapien
gcctcaaacccattcacgccagaagatttccca

SEQ ID NO: 393598 - DNA, 33 bp, Homo sapien
gcctcaaacccattcatgccagaagatttccca

SEQ ID NO: 393599 - DNA, 33 bp, Homo sapien
gagggtgtctgacagaccatcctaggtgatgtg

SEQ ID NO: 393600 - DNA, 33 bp, Homo sapien
gagggtgtctgacagatcatcctaggtgatgtg

SEQ ID NO: 393601 - DNA, 33 bp, Homo sapien
tacttgaaactgtgagaagaaacaagtgcacgg

SEQ ID NO: 393602 - DNA, 33 bp, Homo sapien
tacttgaaactgtgaggagaaacaagtgcacgg

SEQ ID NO: 393603 - DNA, 33 bp, Homo sapien
tcaagtccagtgttaacgtggcccaacctgtct

SEQ ID NO: 393604 - DNA, 33 bp, Homo sapien
tcaagtccagtgttaatgtggcccaacctgtct

SEQ ID NO: 393605 - DNA, 33 bp, Homo sapien
agagagaacgagcctgaatacagcagatgtagg

SEQ ID NO: 393606 - DNA, 33 bp, Homo sapien
agagagaacgagcctggatacagcagatgtagg

SEQ ID NO: 393607 - DNA, 33 bp, Homo sapien
cagcgcctgaaggggcaaagcctattccccgag

SEQ ID NO: 393608 - DNA, 33 bp, Homo sapien
cagcgcctgaaggggcgaagcctattccccgag

SEQ ID NO: 393609 - DNA, 33 bp, Homo sapien
gcttggagcatagttcgctctttctgtgggtac

SEQ ID NO: 393610 - DNA, 33 bp, Homo sapien
gcttggagcatagttctctctttctgtgggtac

SEQ ID NO: 393611 - DNA, 33 bp, Homo sapien
aaaatgagtctcccataaagtgatgagcctccc

SEQ ID NO: 393612 - DNA, 33 bp, Homo sapien
aaaatgagtctcccatgaagtgatgagcctccc

SEQ ID NO: 393613 - DNA, 33 bp, Homo sapien
tgagcatgtgtgactgaacgaatgggcaggatc

SEQ ID NO: 393614 - DNA, 33 bp, Homo sapien
tgagcatgtgtgactggacgaatgggcaggatc

SEQ ID NO: 393615 - DNA, 33 bp, Homo sapien
ctggtcagtctagaacagcacaaatgtcttcaa

SEQ ID NO: 393616 - DNA, 33 bp, Homo sapien
ctggtcagtctagaacggcacaaatgtcttcaa

SEQ ID NO: 393617 - DNA, 33 bp, Homo sapien
ctcagctagacagttcacacctcaacaaggcag

SEQ ID NO: 393618 - DNA, 33 bp, Homo sapien
ctcagctagacagttcgcacctcaacaaggcag

SEQ ID NO: 393619 - DNA, 33 bp, Homo sapien
catggttaagtgctacagggaaatcaaagaatc

SEQ ID NO: 393620 - DNA, 33 bp, Homo sapien
catggttaagtgctacggggaaatcaaagaatc

SEQ ID NO: 393621 - DNA, 33 bp, Homo sapien
aggcaaggaactgccaaaggccgagggcgacac

SEQ ID NO: 393622 - DNA, 33 bp, Homo sapien
aggcaaggaactgccagaggccgagggcgacac

SEQ ID NO: 393623 - DNA, 33 bp, Homo sapien
ctgatttctgtgtttaccacccagtttcaactt

SEQ ID NO: 393624 - DNA, 33 bp, Homo sapien
ctgatttctgtgtttatcacccagtttcaactt

SEQ ID NO: 393625 - DNA, 33 bp, Homo sapien
attgctgaagcgctcacggtcattcttttcttt

SEQ ID NO: 393626 - DNA, 33 bp, Homo sapien
attgctgaagcgctcatggtcattcttttcttt

SEQ ID NO: 393627 - DNA, 33 bp, Homo sapien
catctccaaaagattacaggagtcagcttgtta

SEQ ID NO: 393628 - DNA, 33 bp, Homo sapien
catctccaaaagattataggagtcagcttgtta

SEQ ID NO: 393629 - DNA, 33 bp, Homo sapien
aaaatctagcgtagaaatgcatcaaactcgatt

SEQ ID NO: 393630 - DNA, 33 bp, Homo sapien
aaaatctagcgtagaagtgcatcaaactcgatt

SEQ ID NO: 393631 - DNA, 33 bp, Homo sapien
tggaacagtctgttgccgacagtatggcaagat

SEQ ID NO: 393632 - DNA, 33 bp, Homo sapien
tggaacagtctgttgctgacagtatggcaagat

SEQ ID NO: 393633 - DNA, 33 bp, Homo sapien
atgagacaatgcacccagctataaccacctttt

SEQ ID NO: 393634 - DNA, 33 bp, Homo sapien
atgagacaatgcacccggctataaccacctttt

SEQ ID NO: 393635 - DNA, 33 bp, Homo sapien
ttagctcactgcccaaccaaaataataatcacc

SEQ ID NO: 393636 - DNA, 33 bp, Homo sapien
ttagctcactgcccaatcaaaataataatcacc

SEQ ID NO: 393637 - DNA, 33 bp, Homo sapien
gcaggaggatgaccacaaagagtgcgggagcag

SEQ ID NO: 393638 - DNA, 33 bp, Homo sapien
gcaggaggatgaccacgaagagtgcgggagcag

SEQ ID NO: 393639 - DNA, 33 bp, Homo sapien
ccgtttcctcaactgtaaacatcttatcaccac

SEQ ID NO: 393640 - DNA, 33 bp, Homo sapien
ccgtttcctcaactgtgaacatcttatcaccac

SEQ ID NO: 393641 - DNA, 33 bp, Homo sapien
cggtgtatcttacaacaaacggtgactaggatt

SEQ ID NO: 393642 - DNA, 33 bp, Homo sapien
cggtgtatcttacaacgaacggtgactaggatt

SEQ ID NO: 393643 - DNA, 33 bp, Homo sapien
tgttaattttaatcagcctctgggcacacttgg

SEQ ID NO: 393644 - DNA, 33 bp, Homo sapien
tgttaattttaatcagtctctgggcacacttgg

SEQ ID NO: 393645 - DNA, 33 bp, Homo sapien; identical to SEQ ID NO: 393643

SEQ ID NO: 393646 - DNA, 33 bp, Homo sapien; identical to SEQ ID NO: 393644

SEQ ID NO: 393647 - DNA, 33 bp, Homo sapien
agtatgactcacagtcaccaaaaagtaggaaaa

SEQ ID NO: 393648 - DNA, 33 bp, Homo sapien
agtatgactcacagtcgccaaaaagtaggaaaa

SEQ ID NO: 393649 - DNA, 33 bp, Homo sapien
gaagtcagcaaggagacaagatgccatcctgct

SEQ ID NO: 393650 - DNA, 33 bp, Homo sapien
gaagtcagcaaggagagaagatgccatcctgct

SEQ ID NO: 393651 - DNA, 33 bp, Homo sapien
gaataaggaagtgattaaagtttgccgaggccg

SEQ ID NO: 393652 - DNA, 33 bp, Homo sapien
gaataaggaagtgattgaagtttgccgaggccg

SEQ ID NO: 393653 - DNA, 33 bp, Homo sapien
tcataatagctttctcccacacttccagaggat

SEQ ID NO: 393654 - DNA, 33 bp, Homo sapien
tcataatagctttctctcacacttccagaggat

SEQ ID NO: 393655 - DNA, 33 bp, Homo sapien
tgacaagaaatgaactaaggctacgtggataca

SEQ ID NO: 393656 - DNA, 33 bp, Homo sapien
tgacaagaaatgaactcaggctacgtggataca

SEQ ID NO: 393657 - DNA, 33 bp, Homo sapien
tttccgtggcagttgcactattttacatcctca

SEQ ID NO: 393658 - DNA, 33 bp, Homo sapien
tttccgtggcagttgcgctattttacatcctca

SEQ ID NO: 393659 - DNA, 33 bp, Homo sapien
tttcctgtaagggctgcacagtgaagatttttg

SEQ ID NO: 393660 - DNA, 33 bp, Homo sapien
tttcctgtaagggctggacagtgaagatttttg

SEQ ID NO: 393661 - DNA, 33 bp, Homo sapien
tgaaaatcttaaggcccatgtctgaattctaag

SEQ ID NO: 393662 - DNA, 33 bp, Homo sapien
tgaaaatcttaaggcctatgtctgaattctaag

SEQ ID NO: 393663 - DNA, 33 bp, Homo sapien
tgaagaaacagagaggaaaggtgccggctacaa

SEQ ID NO: 393664 - DNA, 33 bp, Homo sapien
tgaagaaacagagagggaaggtgccggctacaa

SEQ ID NO: 393665 - DNA, 33 bp, Homo sapien
acagctgagacctaaaacctggatatctccagg

SEQ ID NO: 393666 - DNA, 33 bp, Homo sapien
acagctgagacctaaaccctggatatctccagg

SEQ ID NO: 393667 - DNA, 33 bp, Homo sapien
cccattctacctcccccagatggttctgaagcg

SEQ ID NO: 393668 - DNA, 33 bp, Homo sapien
cccattctacctccccgagatggttctgaagcg

SEQ ID NO: 393669 - DNA, 33 bp, Homo sapien
ggggcactgttgagggccattttatcaagacac

SEQ ID NO: 393670 - DNA, 33 bp, Homo sapien
ggggcactgttgagggtcattttatcaagacac

SEQ ID NO: 393671 - DNA, 33 bp, Homo sapien
taaatgtctgggttgacggtgcaacagttgact

SEQ ID NO: 393672 - DNA, 33 bp, Homo sapien
taaatgtctgggttgatggtgcaacagttgact

SEQ ID NO: 393673 - DNA, 33 bp, Homo sapien
tcagcacccgattaagccatagaacattctaga

SEQ ID NO: 393674 - DNA, 33 bp, Homo sapien
tcagcacccgattaaggcatagaacattctaga

SEQ ID NO: 393675 - DNA, 33 bp, Homo sapien
cacagagcagctgagaataacaagggactgagg

SEQ ID NO: 393676 - DNA, 33 bp, Homo sapien
cacagagcagctgagagtaacaagggactgagg

SEQ ID NO: 393677 - DNA, 33 bp, Homo sapien
tgtctctgaaactcctcagaatatctgggggtg

SEQ ID NO: 393678 - DNA, 33 bp, Homo sapien
tgtctctgaaactcctgagaatatctgggggtg

SEQ ID NO: 393679 - DNA, 33 bp, Homo sapien
acaactctaaatatgacgagctctcaactgtga

SEQ ID NO: 393680 - DNA, 33 bp, Homo sapien
acaactctaaatatgatgagctctcaactgtga

SEQ ID NO: 393681 - DNA, 33 bp, Homo sapien
aaagatgagtaccctccagtctgcttaattcct

SEQ ID NO: 393682 - DNA, 33 bp, Homo sapien
aaagatgagtaccctctagtctgcttaattcct

SEQ ID NO: 393683 - DNA, 33 bp, Homo sapien
actgagatcaatctgggcacgcttaggccccgg

SEQ ID NO: 393684 - DNA, 33 bp, Homo sapien
actgagatcaatctggtcacgcttaggccccgg

SEQ ID NO: 393685 - DNA, 33 bp, Homo sapien
agcaagctttctggaaaatcctcctcctttgag

SEQ ID NO: 393686 - DNA, 33 bp, Homo sapien
agcaagctttctggaagatcctcctcctttgag

SEQ ID NO: 393687 - DNA, 33 bp, Homo sapien
actcagcgatacgaagaagtggactcatgcagc

SEQ ID NO: 393688 - DNA, 33 bp, Homo sapien
actcagcgatacgaaggagtggactcatgcagc

SEQ ID NO: 393689 - DNA, 33 bp, Homo sapien
cgatagcagtaacttacgcatactccaagaaca

SEQ ID NO: 393690 - DNA, 33 bp, Homo sapien
cgatagcagtaacttatgcatactccaagaaca

SEQ ID NO: 393691 - DNA, 33 bp, Homo sapien
ccgatggcccaaacaccgagagaggaagtcgga

SEQ ID NO: 393692 - DNA, 33 bp, Homo sapien
ccgatggcccaaacactgagagaggaagtcgga

SEQ ID NO: 393693 - DNA, 33 bp, Homo sapien
gttccacaggaaaataaataacactgagaaggg

SEQ ID NO: 393694 - DNA, 33 bp, Homo sapien
gttccacaggaaaatacataacactgagaaggg

SEQ ID NO: 393695 - DNA, 33 bp, Homo sapien
cagcctgggtgtgaagaatgtgagaggaggaac

SEQ ID NO: 393696 - DNA, 33 bp, Homo sapien
cagcctgggtgtgaaggatgtgagaggaggaac

SEQ ID NO: 393697 - DNA, 33 bp, Homo sapien
ctggtggccttcgacaagaacgtgtgataaatc

SEQ ID NO: 393698 - DNA, 33 bp, Homo sapien
ctggtggccttcgacaggaacgtgtgataaatc

SEQ ID NO: 393699 - DNA, 33 bp, Homo sapien
gcggctccgggaaaacactgtcaccgcaaacca

SEQ ID NO: 393700 - DNA, 33 bp, Homo sapien
gcggctccgggaaaacgctgtcaccgcaaacca

SEQ ID NO: 393701 - DNA, 33 bp, Homo sapien
tattcagaacacgtaacgagtgcagtgcaggca

SEQ ID NO: 393702 - DNA, 33 bp, Homo sapien
tattcagaacacgtaatgagtgcagtgcaggca

SEQ ID NO: 393703 - DNA, 33 bp, Homo sapien
gaaagccccgtgaacacagcgagaaggagcccg

SEQ ID NO: 393704 - DNA, 33 bp, Homo sapien
gaaagccccgtgaacagagcgagaaggagcccg

SEQ ID NO: 393705 - DNA, 33 bp, Homo sapien
acggcatgaatgagccagagaaagtgatgctga

SEQ ID NO: 393706 - DNA, 33 bp, Homo sapien
acggcatgaatgagccggagaaagtgatgctga

SEQ ID NO: 393707 - DNA, 33 bp, Homo sapien
tagtatgttaattcagacggctatgcatggttg

SEQ ID NO: 393708 - DNA, 33 bp, Homo sapien
tagtatgttaattcaggcggctatgcatggttg

SEQ ID NO: 393709 - DNA, 33 bp, Homo sapien
gggttggcaggataagacggcaagttttgatcc

SEQ ID NO: 393710 - DNA, 33 bp, Homo sapien
gggttggcaggataagtcggcaagttttgatcc

SEQ ID NO: 393711 - DNA, 33 bp, Homo sapien
agctttgtagcaaaaccgactgtccaactctat

SEQ ID NO: 393712 - DNA, 33 bp, Homo sapien
agctttgtagcaaaactgactgtccaactctat

SEQ ID NO: 393713 - DNA, 33 bp, Homo sapien
ctgtgccaccgggagacgcagcggcgatttcct

SEQ ID NO: 393714 - DNA, 33 bp, Homo sapien
ctgtgccaccgggagatgcagcggcgatttcct

SEQ ID NO: 393715 - DNA, 33 bp, Homo sapien
actcaatttaacaacacctttttgaacgagtgg

SEQ ID NO: 393716 - DNA, 33 bp, Homo sapien
actcaatttaacaacatctttttgaacgagtgg

SEQ ID NO: 393717 - DNA, 33 bp, Homo sapien
cagcacagttctacacagaccttctctggccca

SEQ ID NO: 393718 - DNA, 33 bp, Homo sapien
cagcacagttctacacggaccttctctggccca

SEQ ID NO: 393719 - DNA, 33 bp, Homo sapien
ccatcttagagtctctcacgctcggacattctc

SEQ ID NO: 393720 - DNA, 33 bp, Homo sapien
ccatcttagagtctctgacgctcggacattctc

SEQ ID NO: 393721 - DNA, 33 bp, Homo sapien
cctgcttaatgcactgacacttttgggtgcttt

SEQ ID NO: 393722 - DNA, 33 bp, Homo sapien
cctgcttaatgcactggcacttttgggtgcttt

SEQ ID NO: 393723 - DNA, 33 bp, Homo sapien
gtcaaattctccatgcagcagcagccagccggg

SEQ ID NO: 393724 - DNA, 33 bp, Homo sapien
gtcaaattctccatgcggcagcagccagccggg

SEQ ID NO: 393725 - DNA, 33 bp, Homo sapien
agttcccgaaattatccaggcacattctgtgcg

SEQ ID NO: 393726 - DNA, 33 bp, Homo sapien
agttcccgaaattatcgaggcacattctgtgcg

SEQ ID NO: 393727 - DNA, 33 bp, Homo sapien
tgagtcgtgttatttgaaaggcggtggggatcc

SEQ ID NO: 393728 - DNA, 33 bp, Homo sapien
tgagtcgtgttatttggaaggcggtggggatcc

SEQ ID NO: 393729 - DNA, 33 bp, Homo sapien
ggtgtcaattcagttcacaataatgctaggccc

SEQ ID NO: 393730 - DNA, 33 bp, Homo sapien
ggtgtcaattcagttcccaataatgctaggccc

SEQ ID NO: 393731 - DNA, 33 bp, Homo sapien
ataacgtccatgcataaccaggagagggctgtt

SEQ ID NO: 393732 - DNA, 33 bp, Homo sapien
ataacgtccatgcatagccaggagagggctgtt

SEQ ID NO: 393733 - DNA, 33 bp, Homo sapien
aagctcccacgacaccagaagcacatactaagg

SEQ ID NO: 393734 - DNA, 33 bp, Homo sapien
aagctcccacgacaccggaagcacatactaagg

SEQ ID NO: 393735 - DNA, 33 bp, Homo sapien
cacctgcttaggctaccgacttttttttacact

SEQ ID NO: 393736 - DNA, 33 bp, Homo sapien
cacctgcttaggctactgacttttttttacact

SEQ ID NO: 393737 - DNA, 33 bp, Homo sapien
ctctcgctaattctgacaaatctctcatgaatc

SEQ ID NO: 393738 - DNA, 33 bp, Homo sapien
ctctcgctaattctgataaatctctcatgaatc

SEQ ID NO: 393739 - DNA, 33 bp, Homo sapien
gccatgtgtggtaggaagtcactgtggacttgg

SEQ ID NO: 393740 - DNA, 33 bp, Homo sapien
gccatgtgtggtaggaggtcactgtggacttgg

SEQ ID NO: 393741 - DNA, 33 bp, Homo sapien
gatcctgctgggtatcactatgtgaagaggcca

SEQ ID NO: 393742 - DNA, 33 bp, Homo sapien
gatcctgctgggtatccctatgtgaagaggcca

SEQ ID NO: 393743 - DNA, 33 bp, Homo sapien
tgacaaggtcgcctaacgatgtgttgtttccca

SEQ ID NO: 393744 - DNA, 33 bp, Homo sapien
tgacaaggtcgcctaatgatgtgttgtttccca

SEQ ID NO: 393745 - DNA, 33 bp, Homo sapien
gatgtctcaacacacaaaagggaagtaaaaaca

SEQ ID NO: 393746 - DNA, 33 bp, Homo sapien
gatgtctcaacacacagaagggaagtaaaaaca

SEQ ID NO: 393747 - DNA, 33 bp, Homo sapien
tgtatggtccgtcgtgaacagaaacatcgtgag

SEQ ID NO: 393748 - DNA, 33 bp, Homo sapien
tgtatggtccgtcgtggacagaaacatcgtgag

SEQ ID NO: 393749 - DNA, 33 bp, Homo sapien
ctgtgttttaccctaacctctccttgtaccctc

SEQ ID NO: 393750 - DNA, 33 bp, Homo sapien
ctgtgttttaccctaatctctccttgtaccctc

SEQ ID NO: 393751 - DNA, 33 bp, Homo sapien
tctggcaaaaagaagacagtgaagcacataatg

SEQ ID NO: 393752 - DNA, 33 bp, Homo sapien
tctggcaaaaagaagagagtgaagcacataatg

SEQ ID NO: 393753 - DNA, 33 bp, Homo sapien
ccatgcccggagctcaacttctcatctggcttc

SEQ ID NO: 393754 - DNA, 33 bp, Homo sapien
ccatgcccggagctcagcttctcatctggcttc

SEQ ID NO: 393755 - DNA, 33 bp, Homo sapien
gtgcagagaaagatcaacgcatcaggtgaccac

SEQ ID NO: 393756 - DNA, 33 bp, Homo sapien
gtgcagagaaagatcatcgcatcaggtgaccac

SEQ ID NO: 393757 - DNA, 33 bp, Homo sapien
ggggctgggccctgtacatcgcctggttctgct

SEQ ID NO: 393758 - DNA, 33 bp, Homo sapien
ggggctgggccctgtagatcgcctggttctgct

SEQ ID NO: 393759 - DNA, 33 bp, Homo sapien
cctggaccaaagttgacatccccagtccacctc

SEQ ID NO: 393760 - DNA, 33 bp, Homo sapien
cctggaccaaagttgatatccccagtccacctc

SEQ ID NO: 393761 - DNA, 33 bp, Homo sapien
ctctatgtctacaataccagaaaggacacctgg

SEQ ID NO: 393762 - DNA, 33 bp, Homo sapien
ctctatgtctacaatatcagaaaggacacctgg

SEQ ID NO: 393763 - DNA, 33 bp, Homo sapien
tgttttatcaccccaaatagaaactctagacca

SEQ ID NO: 393764 - DNA, 33 bp, Homo sapien
tgttttatcaccccaagtagaaactctagacca

SEQ ID NO: 393765 - DNA, 33 bp, Homo sapien
ccgtgtcttctttatcactgatctcagaagaag

SEQ ID NO: 393766 - DNA, 33 bp, Homo sapien
ccgtgtcttctttatcgctgatctcagaagaag

SEQ ID NO: 393767 - DNA, 33 bp, Homo sapien
aacattctgtaagatacctgatgcaaagatagg

SEQ ID NO: 393768 - DNA, 33 bp, Homo sapien
aacattctgtaagatatctgatgcaaagatagg

SEQ ID NO: 393769 - DNA, 33 bp, Homo sapien
ctgtctagccatggaactagttcgcactgaaac

SEQ ID NO: 393770 - DNA, 33 bp, Homo sapien
ctgtctagccatggaagtagttcgcactgaaac

SEQ ID NO: 393771 - DNA, 33 bp, Homo sapien
ggaaattgttgactaacgactttataagtcatg

SEQ ID NO: 393772 - DNA, 33 bp, Homo sapien
ggaaattgttgactaatgactttataagtcatg

SEQ ID NO: 393773 - DNA, 33 bp, Homo sapien
tccctggtggagaacccgacttcccatctcctc

SEQ ID NO: 393774 - DNA, 33 bp, Homo sapien
tccctggtggagaacctgacttcccatctcctc

SEQ ID NO: 393775 - DNA, 33 bp, Homo sapien
agacagtgctgccatcaattgcttatgtctgcc

SEQ ID NO: 393776 - DNA, 33 bp, Homo sapien
agacagtgctgccatcgattgcttatgtctgcc

SEQ ID NO: 393777 - DNA, 33 bp, Homo sapien
aaaaccatcctcaagaaaacaacaatccaaagg

SEQ ID NO: 393778 - DNA, 33 bp, Homo sapien
aaaaccatcctcaagacaacaacaatccaaagg

SEQ ID NO: 393779 - DNA, 33 bp, Homo sapien
gggaccccgctgacaacgttgatccaaaatcat

SEQ ID NO: 393780 - DNA, 33 bp, Homo sapien
gggaccccgctgacaaggttgatccaaaatcat

SEQ ID NO: 393781 - DNA, 33 bp, Homo sapien
accccagaagcggaaaggatgatccaggtgcct

SEQ ID NO: 393782 - DNA, 33 bp, Homo sapien
accccagaagcggaaatgatgatccaggtgcct

SEQ ID NO: 393783 - DNA, 33 bp, Homo sapien
tttgtattttagtagacggtttctccgtgttgg

SEQ ID NO: 393784 - DNA, 33 bp, Homo sapien
tttgtattttagtagagggtttctccgtgttgg

SEQ ID NO: 393785 - DNA, 33 bp, Homo sapien
aatttcacaaaggggccattgccgtgtacccag

SEQ ID NO: 393786 - DNA, 33 bp, Homo sapien
aatttcacaaaggggctattgccgtgtacccag

SEQ ID NO: 393787 - DNA, 33 bp, Homo sapien
catacaggacttgccccagaacaggaaacccaa

SEQ ID NO: 393788 - DNA, 33 bp, Homo sapien
catacaggacttgcccgagaacaggaaacccaa

SEQ ID NO: 393789 - DNA, 33 bp, Homo sapien
gctgttatctcatcccgggctggaatctggtca

SEQ ID NO: 393790 - DNA, 33 bp, Homo sapien
gctgttatctcatccctggctggaatctggtca

SEQ ID NO: 393791 - DNA, 33 bp, Homo sapien
aaaaagggacggaaaaatcaagtcttctgagac

SEQ ID NO: 393792 - DNA, 33 bp, Homo sapien
aaaaagggacggaaaagtcaagtcttctgagac

SEQ ID NO: 393793 - DNA, 33 bp, Homo sapien
acctcctgctctgggacgtggacatgcctcaag

SEQ ID NO: 393794 - DNA, 33 bp, Homo sapien
acctcctgctctgggaggtggacatgcctcaag

SEQ ID NO: 393795 - DNA, 33 bp, Homo sapien
caggacgagggattcccgaaaaccaggctactg

SEQ ID NO: 393796 - DNA, 33 bp, Homo sapien
caggacgagggattccggaaaaccaggctactg

SEQ ID NO: 393797 - DNA, 33 bp, Homo sapien
ggacgatgtctccccaggaacgcagtgtccctg

SEQ ID NO: 393798 - DNA, 33 bp, Homo sapien
ggacgatgtctccccatgaacgcagtgtccctg

SEQ ID NO: 393799 - DNA, 33 bp, Homo sapien
ctccatctccacattcccatgttccccacgctg

SEQ ID NO: 393800 - DNA, 33 bp, Homo sapien
ctccatctccacattctcatgttccccacgctg

SEQ ID NO: 393801 - DNA, 33 bp, Homo sapien
gtgccgtgtgctgggaaagaatcaaaggacggg

SEQ ID NO: 393802 - DNA, 33 bp, Homo sapien
gtgccgtgtgctgggacagaatcaaaggacggg

SEQ ID NO: 393803 - DNA, 33 bp, Homo sapien
tgtgtcagtccacgtcaacagagaacacaggtg

SEQ ID NO: 393804 - DNA, 33 bp, Homo sapien
tgtgtcagtccacgtcgacagagaacacaggtg

SEQ ID NO: 393805 - DNA, 33 bp, Homo sapien
agggcaaacacgcaaacaccggttgcagagctg

SEQ ID NO: 393806 - DNA, 33 bp, Homo sapien
agggcaaacacgcaaagaccggttgcagagctg

SEQ ID NO: 393807 - DNA, 33 bp, Homo sapien
cacgcctcttgtggtgaacatcacttacgcttc

SEQ ID NO: 393808 - DNA, 33 bp, Homo sapien
cacgcctcttgtggtggacatcacttacgcttc

SEQ ID NO: 393809 - DNA, 33 bp, Homo sapien
gtcatcggggaaataaacgacgtcaagcacagt

SEQ ID NO: 393810 - DNA, 33 bp, Homo sapien
gtcatcggggaaataagcgacgtcaagcacagt

SEQ ID NO: 393811 - DNA, 33 bp, Homo sapien
aagctccaccaaactcactcagagtcacgaaat

SEQ ID NO: 393812 - DNA, 33 bp, Homo sapien
aagctccaccaaactccctcagagtcacgaaat

SEQ ID NO: 393813 - DNA, 33 bp, Homo sapien
gcagcccatttttccaagttctcggtcctctcc

SEQ ID NO: 393814 - DNA, 33 bp, Homo sapien
gcagcccatttttccaggttctcggtcctctcc

SEQ ID NO: 393815 - DNA, 33 bp, Homo sapien
tccaagagtcctgataaaagcagacaaataaaa

SEQ ID NO: 393816 - DNA, 33 bp, Homo sapien
tccaagagtcctgatacaagcagacaaataaaa

SEQ ID NO: 393817 - DNA, 33 bp, Homo sapien
agtaattttgagaacaatagttgtcatggatac

SEQ ID NO: 393818 - DNA, 33 bp, Homo sapien
agtaattttgagaacagtagttgtcatggatac

SEQ ID NO: 393819 - DNA, 33 bp, Homo sapien
ccgggttgacaaaagtaaccatcatgactctgc

SEQ ID NO: 393820 - DNA, 33 bp, Homo sapien
ccgggttgacaaaagttaccatcatgactctgc

SEQ ID NO: 393821 - DNA, 33 bp, Homo sapien
ttgcccgaaatcagtcggaagtggaacgtacaa

SEQ ID NO: 393822 - DNA, 33 bp, Homo sapien
ttgcccgaaatcagtctgaagtggaacgtacaa

SEQ ID NO: 393823 - DNA, 33 bp, Homo sapien
gacaggaactcccactcaaagatgagactaagt

SEQ ID NO: 393824 - DNA, 33 bp, Homo sapien
gacaggaactcccacttaaagatgagactaagt

SEQ ID NO: 393825 - DNA, 33 bp, Homo sapien
acgcaggtttagtgtcaccacataagtttcatg

SEQ ID NO: 393826 - DNA, 33 bp, Homo sapien
acgcaggtttagtgtcgccacataagtttcatg

SEQ ID NO: 393827 - DNA, 33 bp, Homo sapien
ggcccctcagtcaggccatgtggtttctgcttc

SEQ ID NO: 393828 - DNA, 33 bp, Homo sapien
ggcccctcagtcaggctatgtggtttctgcttc

SEQ ID NO: 393829 - DNA, 33 bp, Homo sapien
tttccaggttaagatacagaagacctacaacag

SEQ ID NO: 393830 - DNA, 33 bp, Homo sapien
tttccaggttaagatatagaagacctacaacag

SEQ ID NO: 393831 - DNA, 33 bp, Homo sapien
ataatgtgggaataaaaacacctttgctatttt

SEQ ID NO: 393832 - DNA, 33 bp, Homo sapien
ataatgtgggaataaagacacctttgctatttt

SEQ ID NO: 393833 - DNA, 33 bp, Homo sapien
ttgtagtctagatggaagcgtgcagctgggaga

SEQ ID NO: 393834 - DNA, 33 bp, Homo sapien
ttgtagtctagatggatgcgtgcagctgggaga

SEQ ID NO: 393835 - DNA, 33 bp, Homo sapien
gtgtcacagtataaacaggtgtgagttgaggcc

SEQ ID NO: 393836 - DNA, 33 bp, Homo sapien
gtgtcacagtataaaccggtgtgagttgaggcc

SEQ ID NO: 393837 - DNA, 33 bp, Homo sapien
tatttacaaaaatgaacgccagtatataagaat

SEQ ID NO: 393838 - DNA, 33 bp, Homo sapien
tatttacaaaaatgaatgccagtatataagaat

SEQ ID NO: 393839 - DNA, 33 bp, Homo sapien
ccaggctggactcaaactcctgtactcaaggga

SEQ ID NO: 393840 - DNA, 33 bp, Homo sapien
ccaggctggactcaaattcctgtactcaaggga

SEQ ID NO: 393841 - DNA, 33 bp, Homo sapien
aatggccactgataaccccgctattttcaacaa

SEQ ID NO: 393842 - DNA, 33 bp, Homo sapien
aatggccactgataacgccgctattttcaacaa

SEQ ID NO: 393843 - DNA, 33 bp, Homo sapien
gagactgtctcactcactgaaggacgtctcaac

SEQ ID NO: 393844 - DNA, 33 bp, Homo sapien
gagactgtctcactcattgaaggacgtctcaac

SEQ ID NO: 393845 - DNA, 33 bp, Homo sapien
aaaaccaaccctccaaataaccactgcaccaga

SEQ ID NO: 393846 - DNA, 33 bp, Homo sapien
aaaaccaaccctccaagtaaccactgcaccaga

SEQ ID NO: 393847 - DNA, 33 bp, Homo sapien
aggatcttcaaggaaaaaaaaggtatatttggt

SEQ ID NO: 393848 - DNA, 33 bp, Homo sapien
aggatcttcaaggaaagaaaaggtatatttggt

SEQ ID NO: 393849 - DNA, 33 bp, Homo sapien
ggccgttgtattctcaagatttgccgggtgact

SEQ ID NO: 393850 - DNA, 33 bp, Homo sapien
ggccgttgtattctcacgatttgccgggtgact

SEQ ID NO: 393851 - DNA, 33 bp, Homo sapien
cctgtaaatgaaacgaatactccttatcttatt

SEQ ID NO: 393852 - DNA, 33 bp, Homo sapien
cctgtaaatgaaacgagtactccttatcttatt

SEQ ID NO: 393853 - DNA, 33 bp, Homo sapien; identical to SEQ ID NO: 393851

SEQ ID NO: 393854 - DNA, 33 bp, Homo sapien; identical to SEQ ID NO: 393852

SEQ ID NO: 393855 - DNA, 33 bp, Homo sapien
ggagcacgtcattttgcagagaccattcgtact

SEQ ID NO: 393856 - DNA, 33 bp, Homo sapien
ggagcacgtcattttgtagagaccattcgtact

SEQ ID NO: 393857 - DNA, 33 bp, Homo sapien
acacaaagaaatggacacggctgttttaagttc

SEQ ID NO: 393858 - DNA, 33 bp, Homo sapien
acacaaagaaatggacgcggctgttttaagttc

SEQ ID NO: 393859 - DNA, 33 bp, Homo sapien
gcacctgtcgaacataacatgctggactccctc

SEQ ID NO: 393860 - DNA, 33 bp, Homo sapien
gcacctgtcgaacatagcatgctggactccctc

SEQ ID NO: 393861 - DNA, 33 bp, Homo sapien
tgggacgtgcagggcccgctcaaagagcaccaa

SEQ ID NO: 393862 - DNA, 33 bp, Homo sapien
tgggacgtgcagggccggctcaaagagcaccaa

SEQ ID NO: 393863 - DNA, 33 bp, Homo sapien
cacctgtaaatactgacagcttcatttctggtt

SEQ ID NO: 393864 - DNA, 33 bp, Homo sapien
cacctgtaaatactgatagcttcatttctggtt

SEQ ID NO: 393865 - DNA, 33 bp, Homo sapien
tgacgtgggacacagacatgcagcgtgatcctg

SEQ ID NO: 393866 - DNA, 33 bp, Homo sapien
tgacgtgggacacagatatgcagcgtgatcctg

SEQ ID NO: 393867 - DNA, 33 bp, Homo sapien
aggtttctgtacagccccagagaccagcaaggt

SEQ ID NO: 393868 - DNA, 33 bp, Homo sapien
aggtttctgtacagcctcagagaccagcaaggt

SEQ ID NO: 393869 - DNA, 33 bp, Homo sapien
ccgagtcaggcaacgaaggcacagagaggttag

SEQ ID NO: 393870 - DNA, 33 bp, Homo sapien
ccgagtcaggcaacgacggcacagagaggttag

SEQ ID NO: 393871 - DNA, 33 bp, Homo sapien
actgatgacggccccactcttggtgttaaagaa

SEQ ID NO: 393872 - DNA, 33 bp, Homo sapien
actgatgacggccccattcttggtgttaaagaa

SEQ ID NO: 393873 - DNA, 33 bp, Homo sapien
ggccctgggacatagacgcggaggcagagatta

SEQ ID NO: 393874 - DNA, 33 bp, Homo sapien
ggccctgggacatagatgcggaggcagagatta

SEQ ID NO: 393875 - DNA, 33 bp, Homo sapien
gtcaagctggtgtttacagtggccatgccattt

SEQ ID NO: 393876 - DNA, 33 bp, Homo sapien
gtcaagctggtgtttagagtggccatgccattt

SEQ ID NO: 393877 - DNA, 33 bp, Homo sapien
ttctttggaataaacgccccaagagtgtcattg

SEQ ID NO: 393878 - DNA, 33 bp, Homo sapien
ttctttggaataaacgtcccaagagtgtcattg

SEQ ID NO: 393879 - DNA, 33 bp, Homo sapien
tttgaaacgagcaaaaacaaacagtgactcagt

SEQ ID NO: 393880 - DNA, 33 bp, Homo sapien
tttgaaacgagcaaaatcaaacagtgactcagt

SEQ ID NO: 393881 - DNA, 33 bp, Homo sapien
aatagacacttcatcaaagattgcaaagaggta

SEQ ID NO: 393882 - DNA, 33 bp, Homo sapien
aatagacacttcatcacagattgcaaagaggta

SEQ ID NO: 393883 - DNA, 33 bp, Homo sapien
cgccatcattcaacgcaaacatgcgtatttcac

SEQ ID NO: 393884 - DNA, 33 bp, Homo sapien
cgccatcattcaacgcgaacatgcgtatttcac

SEQ ID NO: 393885 - DNA, 33 bp, Homo sapien
tcaccagaggccgagacgaccctaaggctaacc

SEQ ID NO: 393886 - DNA, 33 bp, Homo sapien
tcaccagaggccgagatgaccctaaggctaacc

SEQ ID NO: 393887 - DNA, 33 bp, Homo sapien
gtgccagcactttgtacgggcatggcacccagc

SEQ ID NO: 393888 - DNA, 33 bp, Homo sapien
gtgccagcactttgtatgggcatggcacccagc

SEQ ID NO: 393889 - DNA, 33 bp, Homo sapien
gcacaactgaaagccacgaaggggatgaaaggc

SEQ ID NO: 393890 - DNA, 33 bp, Homo sapien
gcacaactgaaagccatgaaggggatgaaaggc

SEQ ID NO: 393891 - DNA, 33 bp, Homo sapien
gaacgtacccttaacacgggctccagcaatccc

SEQ ID NO: 393892 - DNA, 33 bp, Homo sapien
gaacgtacccttaacatgggctccagcaatccc

SEQ ID NO: 393893 - DNA, 33 bp, Homo sapien
ttggagtctccaccaacacagccgaggactcag

SEQ ID NO: 393894 - DNA, 33 bp, Homo sapien
ttggagtctccaccaagacagccgaggactcag

SEQ ID NO: 393895 - DNA, 33 bp, Homo sapien
atggcttactgagaacagctagaaaaactctat

SEQ ID NO: 393896 - DNA, 33 bp, Homo sapien
atggcttactgagaacggctagaaaaactctat

SEQ ID NO: 393897 - DNA, 33 bp, Homo sapien
gtaggtgtggttcagtcaaggatgtagcgatga

SEQ ID NO: 393898 - DNA, 33 bp, Homo sapien
gtaggtgtggttcagttaaggatgtagcgatga

SEQ ID NO: 393899 - DNA, 33 bp, Homo sapien
attttgaaattattagccaggtatgatggcatg

SEQ ID NO: 393900 - DNA, 33 bp, Homo sapien
attttgaaattattagtcaggtatgatggcatg

SEQ ID NO: 393901 - DNA, 33 bp, Homo sapien
gaagacatggaaggaaaaacgccctgtaacgat

SEQ ID NO: 393902 - DNA, 33 bp, Homo sapien
gaagacatggaaggaacaacgccctgtaacgat

SEQ ID NO: 393903 - DNA, 33 bp, Homo sapien
tttccaaataaacccaccttctgaggttgcagg

SEQ ID NO: 393904 - DNA, 33 bp, Homo sapien
tttccaaataaacccatcttctgaggttgcagg

SEQ ID NO: 393905 - DNA, 33 bp, Homo sapien
ggcccctggctgtctcactctcacgctgcacac

SEQ ID NO: 393906 - DNA, 33 bp, Homo sapien
ggcccctggctgtctccctctcacgctgcacac

SEQ ID NO: 393907 - DNA, 33 bp, Homo sapien
tacttaagtatttagcaaagaacttctgggaat

SEQ ID NO: 393908 - DNA, 33 bp, Homo sapien
tacttaagtatttagcgaagaacttctgggaat

SEQ ID NO: 393909 - DNA, 33 bp, Homo sapien
cttgggctcattgtccaagattttttatttctc

SEQ ID NO: 393910 - DNA, 33 bp, Homo sapien
cttgggctcattgtcccagattttttatttctc

SEQ ID NO: 393911 - DNA, 33 bp, Homo sapien
agtgcctcaacagtccaagacaggtttattttg

SEQ ID NO: 393912 - DNA, 33 bp, Homo sapien
agtgcctcaacagtccgagacaggtttattttg

SEQ ID NO: 393913 - DNA, 33 bp, Homo sapien
gagccaaccaccttcacctaaaccaaaggacag

SEQ ID NO: 393914 - DNA, 33 bp, Homo sapien
gagccaaccaccttcatctaaaccaaaggacag

SEQ ID NO: 393915 - DNA, 33 bp, Homo sapien
ttaaacttggaaattcacctctacatttttatt

SEQ ID NO: 393916 - DNA, 33 bp, Homo sapien
ttaaacttggaaattcgcctctacatttttatt

SEQ ID NO: 393917 - DNA, 33 bp, Homo sapien
gatgttggtgaaaaaacgactgaaatcagaacc

SEQ ID NO: 393918 - DNA, 33 bp, Homo sapien
gatgttggtgaaaaaatgactgaaatcagaacc

SEQ ID NO: 393919 - DNA, 33 bp, Homo sapien
gctcactccacgggaaaattctccaggctgctt

SEQ ID NO: 393920 - DNA, 33 bp, Homo sapien
gctcactccacgggaagattctccaggctgctt

SEQ ID NO: 393921 - DNA, 33 bp, Homo sapien
caagagaaaaacaagaagcagaggaaagcagcc

SEQ ID NO: 393922 - DNA, 33 bp, Homo sapien
caagagaaaaacaagaggcagaggaaagcagcc

SEQ ID NO: 393923 - DNA, 33 bp, Homo sapien
caatttgtctacccaactctcctgtcaacggac

SEQ ID NO: 393924 - DNA, 33 bp, Homo sapien
caatttgtctacccaagtctcctgtcaacggac

SEQ ID NO: 393925 - DNA, 33 bp, Homo sapien
ttttgctgtcacagtgaaactgctctgagcatc

SEQ ID NO: 393926 - DNA, 33 bp, Homo sapien
ttttgctgtcacagtgtaactgctctgagcatc

SEQ ID NO: 393927 - DNA, 33 bp, Homo sapien
gctacgtgatcaccataaagtcagcgctggcca

SEQ ID NO: 393928 - DNA, 33 bp, Homo sapien
gctacgtgatcaccatgaagtcagcgctggcca

SEQ ID NO: 393929 - DNA, 33 bp, Homo sapien
aaacagctgcatccaacgtgctgcaccagggct

SEQ ID NO: 393930 - DNA, 33 bp, Homo sapien
aaacagctgcatccaatgtgctgcaccagggct

SEQ ID NO: 393931 - DNA, 33 bp, Homo sapien
tcccacaggtcttgtcaccagaaatcaagtcct

SEQ ID NO: 393932 - DNA, 33 bp, Homo sapien
tcccacaggtcttgtccccagaaatcaagtcct

SEQ ID NO: 393933 - DNA, 33 bp, Homo sapien
ctggcttaggatagaggatggcagcaccgagca

SEQ ID NO: 393934 - DNA, 33 bp, Homo sapien
ctggcttaggatagagtatggcagcaccgagca

SEQ ID NO: 393935 - DNA, 33 bp, Homo sapien
gtgaacggttaaaccacgacagaatatactttt

SEQ ID NO: 393936 - DNA, 33 bp, Homo sapien
gtgaacggttaaaccatgacagaatatactttt

SEQ ID NO: 393937 - DNA, 33 bp, Homo sapien
ctgctttctggggcacagcttgagagtcaatgc

SEQ ID NO: 393938 - DNA, 33 bp, Homo sapien
ctgctttctggggcacggcttgagagtcaatgc

SEQ ID NO: 393939 - DNA, 33 bp, Homo sapien
gacgccagcatagggcaatacccgtcaagccct

SEQ ID NO: 393940 - DNA, 33 bp, Homo sapien
gacgccagcatagggcgatacccgtcaagccct

SEQ ID NO: 393941 - DNA, 33 bp, Homo sapien
tcaaagactgagtccaacagaacgtgaaatgct

SEQ ID NO: 393942 - DNA, 33 bp, Homo sapien
tcaaagactgagtccatcagaacgtgaaatgct

SEQ ID NO: 393943 - DNA, 33 bp, Homo sapien
cagagtgagtgcagacaagtgactgtcgtcctc

SEQ ID NO: 393944 - DNA, 33 bp, Homo sapien
cagagtgagtgcagacgagtgactgtcgtcctc

SEQ ID NO: 393945 - DNA, 33 bp, Homo sapien
gcctgtctcggtttccacactggtaagatgaag

SEQ ID NO: 393946 - DNA, 33 bp, Homo sapien
gcctgtctcggtttccgcactggtaagatgaag

SEQ ID NO: 393947 - DNA, 33 bp, Homo sapien
ccaggtggggattcacaggtgacccagttgggt

SEQ ID NO: 393948 - DNA, 33 bp, Homo sapien
ccaggtggggattcacgggtgacccagttgggt

SEQ ID NO: 393949 - DNA, 33 bp, Homo sapien
gtcctcctgaagctgaaaagtgtcctgaccaac

SEQ ID NO: 393950 - DNA, 33 bp, Homo sapien
gtcctcctgaagctgagaagtgtcctgaccaac

SEQ ID NO: 393951 - DNA, 33 bp, Homo sapien
ctgagaaaaccgagttaaacgcccagctagagg

SEQ ID NO: 393952 - DNA, 33 bp, Homo sapien
ctgagaaaaccgagttcaacgcccagctagagg

SEQ ID NO: 393953 - DNA, 33 bp, Homo sapien
tctctaagtgccaccacagcgcctgcttccatg

SEQ ID NO: 393954 - DNA, 33 bp, Homo sapien
tctctaagtgccaccatagcgcctgcttccatg

SEQ ID NO: 393955 - DNA, 33 bp, Homo sapien
gacattctgaccgcaaccttgtgagggaatttg

SEQ ID NO: 393956 - DNA, 33 bp, Homo sapien
gacattctgaccgcaatcttgtgagggaatttg

SEQ ID NO: 393957 - DNA, 33 bp, Homo sapien
ttaaaaccatcacggaaactgacaattggacaa

SEQ ID NO: 393958 - DNA, 33 bp, Homo sapien
ttaaaaccatcacggagactgacaattggacaa

SEQ ID NO: 393959 - DNA, 33 bp, Homo sapien
cgcaggtgccctttgacgcagctaggcccacag

SEQ ID NO: 393960 - DNA, 33 bp, Homo sapien
cgcaggtgccctttgatgcagctaggcccacag

SEQ ID NO: 393961 - DNA, 33 bp, Homo sapien
taagctgtttgcacagaacatattttctttacc

SEQ ID NO: 393962 - DNA, 33 bp, Homo sapien
taagctgtttgcacaggacatattttctttacc

SEQ ID NO: 393963 - DNA, 33 bp, Homo sapien
gccgcccctctcccggcatcgttgtctatgtct

SEQ ID NO: 393964 - DNA, 33 bp, Homo sapien
gccgcccctctcccggtatcgttgtctatgtct

SEQ ID NO: 393965 - DNA, 33 bp, Homo sapien
ttccatttattaccaccgagcacttcatgaccc

SEQ ID NO: 393966 - DNA, 33 bp, Homo sapien
ttccatttattaccactgagcacttcatgaccc

SEQ ID NO: 393967 - DNA, 33 bp, Homo sapien
gacctcggctgaatcccgcttcccagctttggg

SEQ ID NO: 393968 - DNA, 33 bp, Homo sapien
gacctcggctgaatcctgcttcccagctttggg

SEQ ID NO: 393969 - DNA, 33 bp, Homo sapien
gggtgttactaatgtcaatagctaggcaagaga

SEQ ID NO: 393970 - DNA, 33 bp, Homo sapien
gggtgttactaatgtcgatagctaggcaagaga

SEQ ID NO: 393971 - DNA, 33 bp, Homo sapien
ctctgcctgctgcttcccctattcccaagaaca

SEQ ID NO: 393972 - DNA, 33 bp, Homo sapien
ctctgcctgctgcttcgcctattcccaagaaca

SEQ ID NO: 393973 - DNA, 33 bp, Homo sapien
ggtggttctggggagacactagacgtgcaggag

SEQ ID NO: 393974 - DNA, 33 bp, Homo sapien
ggtggttctggggagagactagacgtgcaggag

SEQ ID NO: 393975 - DNA, 33 bp, Homo sapien
gcgcgcctgagtcctccatttcaaaggaaacgc

SEQ ID NO: 393976 - DNA, 33 bp, Homo sapien
gcgcgcctgagtcctctatttcaaaggaaacgc

SEQ ID NO: 393977 - DNA, 33 bp, Homo sapien
actgggaagcttgaccagccagtcggcgttggc

SEQ ID NO: 393978 - DNA, 33 bp, Homo sapien
actgggaagcttgaccggccagtcggcgttggc

SEQ ID NO: 393979 - DNA, 33 bp, Homo sapien
acagcccacacatgaaatatctttaaatgtctc

SEQ ID NO: 393980 - DNA, 33 bp, Homo sapien
acagcccacacatgaagtatctttaaatgtctc

SEQ ID NO: 393981 - DNA, 33 bp, Homo sapien
cgagaagtcttgaggaaataaaggacaagaaaa

SEQ ID NO: 393982 - DNA, 33 bp, Homo sapien
cgagaagtcttgaggacataaaggacaagaaaa

SEQ ID NO: 393983 - DNA, 33 bp, Homo sapien
gatgtagtttgtgaacagatttcctaaccttga

SEQ ID NO: 393984 - DNA, 33 bp, Homo sapien
gatgtagtttgtgaacggatttcctaaccttga

SEQ ID NO: 393985 - DNA, 33 bp, Homo sapien
ttccgtcagccagactaaagagatttgcaaaaa

SEQ ID NO: 393986 - DNA, 33 bp, Homo sapien
ttccgtcagccagactgaagagatttgcaaaaa

SEQ ID NO: 393987 - DNA, 33 bp, Homo sapien
tcctcttcctgtgtccaacaaacccagagaact

SEQ ID NO: 393988 - DNA, 33 bp, Homo sapien
tcctcttcctgtgtccgacaaacccagagaact

SEQ ID NO: 393989 - DNA, 33 bp, Homo sapien
aggaaatgcaaggaaacgacccgacacactaga

SEQ ID NO: 393990 - DNA, 33 bp, Homo sapien
aggaaatgcaaggaaatgacccgacacactaga

SEQ ID NO: 393991 - DNA, 33 bp, Homo sapien
actgaaggcctcccaacgcaaggcagatataga

SEQ ID NO: 393992 - DNA, 33 bp, Homo sapien
actgaaggcctcccaatgcaaggcagatataga

SEQ ID NO: 393993 - DNA, 33 bp, Homo sapien
ggacccagaaatagaacacaatttacaatatag

SEQ ID NO: 393994 - DNA, 33 bp, Homo sapien
ggacccagaaatagaagacaatttacaatatag

SEQ ID NO: 393995 - DNA, 33 bp, Homo sapien
ccatctgccaggcaaaagacacatcccgggaaa

SEQ ID NO: 393996 - DNA, 33 bp, Homo sapien
ccatctgccaggcaaacgacacatcccgggaaa

SEQ ID NO: 393997 - DNA, 33 bp, Homo sapien
atgcaaatgaccacagaaagtttaaaggctctt

SEQ ID NO: 393998 - DNA, 33 bp, Homo sapien
atgcaaatgaccacaggaagtttaaaggctctt

SEQ ID NO: 393999 - DNA, 33 bp, Homo sapien
gctgtgtggtccaggtcaaggcccgaatgtgct

SEQ ID NO: 394000 - DNA, 33 bp, Homo sapien
gctgtgtggtccaggttaaggcccgaatgtgct

SEQ ID NO: 394001 - DNA, 33 bp, Homo sapien
atcagattggaggctacgggaaagcccagaggc

SEQ ID NO: 394002 - DNA, 33 bp, Homo sapien
atcagattggaggctatgggaaagcccagaggc

SEQ ID NO: 394003 - DNA, 33 bp, Homo sapien
cctgcagggtcatccccaatctcttccccaagt

SEQ ID NO: 394004 - DNA, 33 bp, Homo sapien
cctgcagggtcatccctaatctcttccccaagt

SEQ ID NO: 394005 - DNA, 33 bp, Homo sapien
aagtggacattgaacaagacgacaaccctgatg

SEQ ID NO: 394006 - DNA, 33 bp, Homo sapien
aagtggacattgaacaggacgacaaccctgatg

SEQ ID NO: 394007 - DNA, 33 bp, Homo sapien
gtccaggcggggcacaatatgcaggcagatctg

SEQ ID NO: 394008 - DNA, 33 bp, Homo sapien
gtccaggcggggcacagtatgcaggcagatctg

SEQ ID NO: 394009 - DNA, 33 bp, Homo sapien
acctctgacctgtggaagatgggaggggtgagc

SEQ ID NO: 394010 - DNA, 33 bp, Homo sapien
acctctgacctgtggaggatgggaggggtgagc

SEQ ID NO: 394011 - DNA, 33 bp, Homo sapien
caaccatccggtctgcaataccctggggcctcc

SEQ ID NO: 394012 - DNA, 33 bp, Homo sapien
caaccatccggtctgcgataccctggggcctcc

SEQ ID NO: 394013 - DNA, 33 bp, Homo sapien
atatattgaaatgtgaatagaattttgtgttga

SEQ ID NO: 394014 - DNA, 33 bp, Homo sapien
atatattgaaatgtgagtagaattttgtgttga

SEQ ID NO: 394015 - DNA, 33 bp, Homo sapien
taaatggtgacacttcgcagtgacaatcagcct

SEQ ID NO: 394016 - DNA, 33 bp, Homo sapien
taaatggtgacacttctcagtgacaatcagcct

SEQ ID NO: 394017 - DNA, 33 bp, Homo sapien
ccacacagggctgaccacactgaagagagttgc

SEQ ID NO: 394018 - DNA, 33 bp, Homo sapien
ccacacagggctgaccgcactgaagagagttgc

SEQ ID NO: 394019 - DNA, 33 bp, Homo sapien
caggtctgcactctgacctggaagcagctccgg

SEQ ID NO: 394020 - DNA, 33 bp, Homo sapien
caggtctgcactctgatctggaagcagctccgg

SEQ ID NO: 394021 - DNA, 33 bp, Homo sapien
cgcaaactgcggccctaacatcgcgaaccgtgg

SEQ ID NO: 394022 - DNA, 33 bp, Homo sapien
cgcaaactgcggccctgacatcgcgaaccgtgg

SEQ ID NO: 394023 - DNA, 33 bp, Homo sapien
aggcggggaacgctccaacaagtggagagaaat

SEQ ID NO: 394024 - DNA, 33 bp, Homo sapien
aggcggggaacgctccgacaagtggagagaaat

SEQ ID NO: 394025 - DNA, 33 bp, Homo sapien
ccggcctccagaccgagacagaatgcgtttctg

SEQ ID NO: 394026 - DNA, 33 bp, Homo sapien
ccggcctccagaccgatacagaatgcgtttctg

SEQ ID NO: 394027 - DNA, 33 bp, Homo sapien
tagccaagaaaggcgccgataaataatgaaaga

SEQ ID NO: 394028 - DNA, 33 bp, Homo sapien
tagccaagaaaggcgctgataaataatgaaaga

SEQ ID NO: 394029 - DNA, 33 bp, Homo sapien
cgagtgtgcatgtctcaagttcagattttggag

SEQ ID NO: 394030 - DNA, 33 bp, Homo sapien
cgagtgtgcatgtctcgagttcagattttggag

SEQ ID NO: 394031 - DNA, 33 bp, Homo sapien
gctgagacccacatcacgctaacatgacacggg

SEQ ID NO: 394032 - DNA, 33 bp, Homo sapien
gctgagacccacatcaggctaacatgacacggg

SEQ ID NO: 394033 - DNA, 33 bp, Homo sapien
cctcactttggagaaacgtggcaaccttgaatc

SEQ ID NO: 394034 - DNA, 33 bp, Homo sapien
cctcactttggagaaatgtggcaaccttgaatc

SEQ ID NO: 394035 - DNA, 33 bp, Homo sapien
gccagctcccgtgcacacttcagagataaggcc

SEQ ID NO: 394036 - DNA, 33 bp, Homo sapien
gccagctcccgtgcacgcttcagagataaggcc

SEQ ID NO: 394037 - DNA, 33 bp, Homo sapien
ggacgaaggggcagcaaatcatggttggtcttc

SEQ ID NO: 394038 - DNA, 33 bp, Homo sapien
ggacgaaggggcagcagatcatggttggtcttc

SEQ ID NO: 394039 - DNA, 33 bp, Homo sapien
agatcacagagtggataacaagagccactgtcc

SEQ ID NO: 394040 - DNA, 33 bp, Homo sapien
agatcacagagtggatgacaagagccactgtcc

SEQ ID NO: 394041 - DNA, 33 bp, Homo sapien
gcagtcggggacttcaagtggttccctttgggc

SEQ ID NO: 394042 - DNA, 33 bp, Homo sapien
gcagtcggggacttcatgtggttccctttgggc

SEQ ID NO: 394043 - DNA, 33 bp, Homo sapien
gcccattttactaggacggaccaggctcggaga

SEQ ID NO: 394044 - DNA, 33 bp, Homo sapien
gcccattttactaggagggaccaggctcggaga

SEQ ID NO: 394045 - DNA, 33 bp, Homo sapien
tgcctctttgcaagtaccttgaggcctaaaagg

SEQ ID NO: 394046 - DNA, 33 bp, Homo sapien
tgcctctttgcaagtatcttgaggcctaaaagg

SEQ ID NO: 394047 - DNA, 33 bp, Homo sapien
gcccgttcattccctcaacaaatagtgattggt

SEQ ID NO: 394048 - DNA, 33 bp, Homo sapien
gcccgttcattccctcgacaaatagtgattggt

SEQ ID NO: 394049 - DNA, 33 bp, Homo sapien
taccacggtgtgaaaaccgggccaggaggaagc

SEQ ID NO: 394050 - DNA, 33 bp, Homo sapien
taccacggtgtgaaaatcgggccaggaggaagc

SEQ ID NO: 394051 - DNA, 33 bp, Homo sapien
gcatgacgccgctaaaatctattcctgatgcgc

SEQ ID NO: 394052 - DNA, 33 bp, Homo sapien
gcatgacgccgctaaagtctattcctgatgcgc

SEQ ID NO: 394053 - DNA, 33 bp, Homo sapien
caagatgtgtttcaggaagccgtgctgtgactc

SEQ ID NO: 394054 - DNA, 33 bp, Homo sapien
caagatgtgtttcagggagccgtgctgtgactc

SEQ ID NO: 394055 - DNA, 33 bp, Homo sapien
cccaggtggaaccccacgtgtacctcttctccg

SEQ ID NO: 394056 - DNA, 33 bp, Homo sapien
cccaggtggaaccccatgtgtacctcttctccg

SEQ ID NO: 394057 - DNA, 33 bp, Homo sapien
ctcctcacaatattcacgtgctcttgtgtgttc

SEQ ID NO: 394058 - DNA, 33 bp, Homo sapien
ctcctcacaatattcatgtgctcttgtgtgttc

SEQ ID NO: 394059 - DNA, 33 bp, Homo sapien
taccaaaccacagatacgagaagcttggaaatg

SEQ ID NO: 394060 - DNA, 33 bp, Homo sapien
taccaaaccacagatatgagaagcttggaaatg

SEQ ID NO: 394061 - DNA, 33 bp, Homo sapien
tgcctggcaatgttcgcccatttctgtggtgta

SEQ ID NO: 394062 - DNA, 33 bp, Homo sapien
tgcctggcaatgttcgtccatttctgtggtgta

SEQ ID NO: 394063 - DNA, 33 bp, Homo sapien
ccttacccaggacaagactcgtgcctccgaacg

SEQ ID NO: 394064 - DNA, 33 bp, Homo sapien
ccttacccaggacaagcctcgtgcctccgaacg

SEQ ID NO: 394065 - DNA, 33 bp, Homo sapien
gccctcagactaggcaccttttcctggtgtgca

SEQ ID NO: 394066 - DNA, 33 bp, Homo sapien
gccctcagactaggcatcttttcctggtgtgca

SEQ ID NO: 394067 - DNA, 33 bp, Homo sapien
tttgaagagagagagcactttcacataacttga

SEQ ID NO: 394068 - DNA, 33 bp, Homo sapien
tttgaagagagagagcgctttcacataacttga

SEQ ID NO: 394069 - DNA, 33 bp, Homo sapien
agagagagagggaacactgaaaggaaatggaaa

SEQ ID NO: 394070 - DNA, 33 bp, Homo sapien
agagagagagggaacattgaaaggaaatggaaa

SEQ ID NO: 394071 - DNA, 33 bp, Homo sapien
agcttttaaaattcggaacccaagtgtcagctg

SEQ ID NO: 394072 - DNA, 33 bp, Homo sapien
agcttttaaaattcgggacccaagtgtcagctg

SEQ ID NO: 394073 - DNA, 33 bp, Homo sapien
cttagagaagagggaaagtccctggcgcctgag

SEQ ID NO: 394074 - DNA, 33 bp, Homo sapien
cttagagaagagggaacgtccctggcgcctgag

SEQ ID NO: 394075 - DNA, 33 bp, Homo sapien
atacgcagccaaaccgacaagcaaggctgaggg

SEQ ID NO: 394076 - DNA, 33 bp, Homo sapien
atacgcagccaaaccggcaagcaaggctgaggg

SEQ ID NO: 394077 - DNA, 33 bp, Homo sapien
gggccctatctgttaaacgaatggaggaggcag

SEQ ID NO: 394078 - DNA, 33 bp, Homo sapien
gggccctatctgttaatcgaatggaggaggcag

SEQ ID NO: 394079 - DNA, 33 bp, Homo sapien
ctggggatctccatccagcaagactgcgaacca

SEQ ID NO: 394080 - DNA, 33 bp, Homo sapien
ctggggatctccatccggcaagactgcgaacca

SEQ ID NO: 394081 - DNA, 33 bp, Homo sapien
agccaaaggccagccacgtatccaacgtgtaat

SEQ ID NO: 394082 - DNA, 33 bp, Homo sapien
agccaaaggccagccatgtatccaacgtgtaat

SEQ ID NO: 394083 - DNA, 33 bp, Homo sapien
gcgtatccgagaaccacaagcgtctcccctacc

SEQ ID NO: 394084 - DNA, 33 bp, Homo sapien
gcgtatccgagaaccataagcgtctcccctacc

SEQ ID NO: 394085 - DNA, 33 bp, Homo sapien
ctggacacccccatccacagaacggcccgtctg

SEQ ID NO: 394086 - DNA, 33 bp, Homo sapien
ctggacacccccatccgcagaacggcccgtctg

SEQ ID NO: 394087 - DNA, 33 bp, Homo sapien
ccattctgcgagtagcccttttactgtgttgat

SEQ ID NO: 394088 - DNA, 33 bp, Homo sapien
ccattctgcgagtagctcttttactgtgttgat

SEQ ID NO: 394089 - DNA, 33 bp, Homo sapien
agagtgttataagttaaggtcttacattaaggt

SEQ ID NO: 394090 - DNA, 33 bp, Homo sapien
agagtgttataagttatggtcttacattaaggt

SEQ ID NO: 394091 - DNA, 33 bp, Homo sapien
gttacgtaagagtacacctgcattcttttgcat

SEQ ID NO: 394092 - DNA, 33 bp, Homo sapien
gttacgtaagagtacagctgcattcttttgcat

SEQ ID NO: 394093 - DNA, 33 bp, Homo sapien
cggaaataattctactcacaatagcatcttggc

SEQ ID NO: 394094 - DNA, 33 bp, Homo sapien
cggaaataattctacttacaatagcatcttggc

SEQ ID NO: 394095 - DNA, 33 bp, Homo sapien
tgccctcacctggaacacattactgaggccctt

SEQ ID NO: 394096 - DNA, 33 bp, Homo sapien
tgccctcacctggaacgcattactgaggccctt

SEQ ID NO: 394097 - DNA, 33 bp, Homo sapien
atcccctcagctaggcaccttcttttgagtgtg

SEQ ID NO: 394098 - DNA, 33 bp, Homo sapien
atcccctcagctaggcgccttcttttgagtgtg

SEQ ID NO: 394099 - DNA, 33 bp, Homo sapien
tgttcgaccatctcgtcacaggttttgtttgct

SEQ ID NO: 394100 - DNA, 33 bp, Homo sapien
tgttcgaccatctcgtgacaggttttgtttgct

SEQ ID NO: 394101 - DNA, 33 bp, Homo sapien
gcattctgaggcttcacctgggacacattggat

SEQ ID NO: 394102 - DNA, 33 bp, Homo sapien
gcattctgaggcttcagctgggacacattggat

SEQ ID NO: 394103 - DNA, 33 bp, Homo sapien
ggagggcttgttacagcagagatgacaggccca

SEQ ID NO: 394104 - DNA, 33 bp, Homo sapien
ggagggcttgttacaggagagatgacaggccca

SEQ ID NO: 394105 - DNA, 33 bp, Homo sapien
gacctactatctatctcacagcacaatagggta

SEQ ID NO: 394106 - DNA, 33 bp, Homo sapien
gacctactatctatctgacagcacaatagggta

SEQ ID NO: 394107 - DNA, 33 bp, Homo sapien
acatataagagcgttaactggattgtttgtaac

SEQ ID NO: 394108 - DNA, 33 bp, Homo sapien
acatataagagcgttagctggattgtttgtaac

SEQ ID NO: 394109 - DNA, 33 bp, Homo sapien
ccctgccctgcagtcgcaacacggcctgcaggc

SEQ ID NO: 394110 - DNA, 33 bp, Homo sapien
ccctgccctgcagtcggaacacggcctgcaggc

SEQ ID NO: 394111 - DNA, 33 bp, Homo sapien
gtcctgcctcctgggaccctgatacatcttcca

SEQ ID NO: 394112 - DNA, 33 bp, Homo sapien
gtcctgcctcctgggatcctgatacatcttcca

SEQ ID NO: 394113 - DNA, 33 bp, Homo sapien
aactgaaaaatggccacgtccagttgacaccct

SEQ ID NO: 394114 - DNA, 33 bp, Homo sapien
aactgaaaaatggccatgtccagttgacaccct

SEQ ID NO: 394115 - DNA, 33 bp, Homo sapien
tggaaatggagcccacaactctgcagtgcatcc

SEQ ID NO: 394116 - DNA, 33 bp, Homo sapien
tggaaatggagcccacgactctgcagtgcatcc

SEQ ID NO: 394117 - DNA, 33 bp, Homo sapien
ccctttctgccactacaaagtgcttgacccttc

SEQ ID NO: 394118 - DNA, 33 bp, Homo sapien
ccctttctgccactacgaagtgcttgacccttc

SEQ ID NO: 394119 - DNA, 33 bp, Homo sapien
aggggtgtctctgagcaagtcccagcagctccg

SEQ ID NO: 394120 - DNA, 33 bp, Homo sapien
aggggtgtctctgagcgagtcccagcagctccg

SEQ ID NO: 394121 - DNA, 33 bp, Homo sapien
tgatgacagcgaaatacgtaaggctggctcaac

SEQ ID NO: 394122 - DNA, 33 bp, Homo sapien
tgatgacagcgaaatatgtaaggctggctcaac

SEQ ID NO: 394123 - DNA, 33 bp, Homo sapien
gtttttcatgatcaacagccactatgggaacac

SEQ ID NO: 394124 - DNA, 33 bp, Homo sapien
gtttttcatgatcaacggccactatgggaacac

SEQ ID NO: 394125 - DNA, 33 bp, Homo sapien
tctgaccagccaacaaaatagtcatcactggac

SEQ ID NO: 394126 - DNA, 33 bp, Homo sapien
tctgaccagccaacaagatagtcatcactggac

SEQ ID NO: 394127 - DNA, 33 bp, Homo sapien
tctcataaaattattgaaccaggctgggcgcca

SEQ ID NO: 394128 - DNA, 33 bp, Homo sapien
tctcataaaattattgcaccaggctgggcgcca

SEQ ID NO: 394129 - DNA, 33 bp, Homo sapien
ttcttttattgtgtaggacattcagcgtcaagg

SEQ ID NO: 394130 - DNA, 33 bp, Homo sapien
ttcttttattgtgtagtacattcagcgtcaagg

SEQ ID NO: 394131 - DNA, 33 bp, Homo sapien
tgctgacaccatcagacatgaacaagaatccca

SEQ ID NO: 394132 - DNA, 33 bp, Homo sapien
tgctgacaccatcagatatgaacaagaatccca

SEQ ID NO: 394133 - DNA, 33 bp, Homo sapien
acattaagtccaagccccttttcatatgaacaa

SEQ ID NO: 394134 - DNA, 33 bp, Homo sapien
acattaagtccaagcctcttttcatatgaacaa

SEQ ID NO: 394135 - DNA, 33 bp, Homo sapien
attccttggggtggaacgtgagccgttgagatg

SEQ ID NO: 394136 - DNA, 33 bp, Homo sapien
attccttggggtggaatgtgagccgttgagatg

SEQ ID NO: 394137 - DNA, 33 bp, Homo sapien
aatccatgcctataaagtccacaacagatgtct

SEQ ID NO: 394138 - DNA, 33 bp, Homo sapien
aatccatgcctataaattccacaacagatgtct

SEQ ID NO: 394139 - DNA, 33 bp, Homo sapien
cacaggagctacacgcaccacatcatggacaaa

SEQ ID NO: 394140 - DNA, 33 bp, Homo sapien
cacaggagctacacgcgccacatcatggacaaa

SEQ ID NO: 394141 - DNA, 33 bp, Homo sapien
aagtcaggtgcaatatcaggagatctgcacatt

SEQ ID NO: 394142 - DNA, 33 bp, Homo sapien
aagtcaggtgcaatattaggagatctgcacatt

SEQ ID NO: 394143 - DNA, 33 bp, Homo sapien
ttattcctgatgttgacgtgtaaatgatatcgt

SEQ ID NO: 394144 - DNA, 33 bp, Homo sapien
ttattcctgatgttgatgtgtaaatgatatcgt

SEQ ID NO: 394145 - DNA, 33 bp, Homo sapien
aaggatgggttgaaatcagtctggactaagtgt

SEQ ID NO: 394146 - DNA, 33 bp, Homo sapien
aaggatgggttgaaatgagtctggactaagtgt

SEQ ID NO: 394147 - DNA, 33 bp, Homo sapien
gcgcagcaacagaaaccggagacacagccagac

SEQ ID NO: 394148 - DNA, 33 bp, Homo sapien
gcgcagcaacagaaactggagacacagccagac

SEQ ID NO: 394149 - DNA, 33 bp, Homo sapien
tcaggactttttcgtaataaggctgtcataata

SEQ ID NO: 394150 - DNA, 33 bp, Homo sapien
tcaggactttttcgtagtaaggctgtcataata

SEQ ID NO: 394151 - DNA, 33 bp, Homo sapien
tagaaacggactttccaccaggcgtgttggctc

SEQ ID NO: 394152 - DNA, 33 bp, Homo sapien
tagaaacggactttccgccaggcgtgttggctc

SEQ ID NO: 394153 - DNA, 33 bp, Homo sapien
agctctagccccataacagaggaggcctcagga

SEQ ID NO: 394154 - DNA, 33 bp, Homo sapien
agctctagccccataagagaggaggcctcagga

SEQ ID NO: 394155 - DNA, 33 bp, Homo sapien
tattgaaatgttgaagaatacagggaaagagcc

SEQ ID NO: 394156 - DNA, 33 bp, Homo sapien
tattgaaatgttgaagtatacagggaaagagcc

SEQ ID NO: 394157 - DNA, 33 bp, Homo sapien
tgcagggacctcagcccattgatttgcatttat

SEQ ID NO: 394158 - DNA, 33 bp, Homo sapien
tgcagggacctcagcctattgatttgcatttat

SEQ ID NO: 394159 - DNA, 33 bp, Homo sapien
agcgagaatgagacgaaagaacccatttccaca

SEQ ID NO: 394160 - DNA, 33 bp, Homo sapien
agcgagaatgagacgagagaacccatttccaca

SEQ ID NO: 394161 - DNA, 33 bp, Homo sapien
agagagtagcctgaagccacaattagacagcag

SEQ ID NO: 394162 - DNA, 33 bp, Homo sapien
agagagtagcctgaagtcacaattagacagcag

SEQ ID NO: 394163 - DNA, 33 bp, Homo sapien
ctgatttcctgacttcgcccagctccttgcact

SEQ ID NO: 394164 - DNA, 33 bp, Homo sapien
ctgatttcctgacttctcccagctccttgcact

SEQ ID NO: 394165 - DNA, 33 bp, Homo sapien
ttgtcccccgtgtctccagtcgtctctcaacac

SEQ ID NO: 394166 - DNA, 33 bp, Homo sapien
ttgtcccccgtgtctctagtcgtctctcaacac

SEQ ID NO: 394167 - DNA, 33 bp, Homo sapien
gagttttcagagaacacaatgtcttcagagatg

SEQ ID NO: 394168 - DNA, 33 bp, Homo sapien
gagttttcagagaacagaatgtcttcagagatg

SEQ ID NO: 394169 - DNA, 33 bp, Homo sapien
ggcacagcgtcggccccatcctgtgcgcttcca

SEQ ID NO: 394170 - DNA, 33 bp, Homo sapien
ggcacagcgtcggccctatcctgtgcgcttcca

SEQ ID NO: 394171 - DNA, 33 bp, Homo sapien
agttctgagtgttttccagggctctgaacacag

SEQ ID NO: 394172 - DNA, 33 bp, Homo sapien
agttctgagtgttttctagggctctgaacacag

SEQ ID NO: 394173 - DNA, 33 bp, Homo sapien
cggcgttctacacagcaactagaagagctgaaa

SEQ ID NO: 394174 - DNA, 33 bp, Homo sapien
cggcgttctacacagcgactagaagagctgaaa

SEQ ID NO: 394175 - DNA, 33 bp, Homo sapien
agaataaatgtccatcaagttcacagctgccta

SEQ ID NO: 394176 - DNA, 33 bp, Homo sapien
agaataaatgtccatcgagttcacagctgccta

SEQ ID NO: 394177 - DNA, 33 bp, Homo sapien
cctgggccctgagtaaccgacggccggacttgc

SEQ ID NO: 394178 - DNA, 33 bp, Homo sapien
cctgggccctgagtaatcgacggccggacttgc

SEQ ID NO: 394179 - DNA, 33 bp, Homo sapien
atggttaccgggcacaacaagcttaagaatgac

SEQ ID NO: 394180 - DNA, 33 bp, Homo sapien
atggttaccgggcacatcaagcttaagaatgac

SEQ ID NO: 394181 - DNA, 33 bp, Homo sapien
gtttaacaggagaggccgacacttggcagggcc

SEQ ID NO: 394182 - DNA, 33 bp, Homo sapien
gtttaacaggagaggctgacacttggcagggcc

SEQ ID NO: 394183 - DNA, 33 bp, Homo sapien
gacctgcagggcaccacggtcaagggagaagct

SEQ ID NO: 394184 - DNA, 33 bp, Homo sapien
gacctgcagggcaccatggtcaagggagaagct

SEQ ID NO: 394185 - DNA, 33 bp, Homo sapien
gctagctgaattgttacgtgcaatagaggattc

SEQ ID NO: 394186 - DNA, 33 bp, Homo sapien
gctagctgaattgttatgtgcaatagaggattc

SEQ ID NO: 394187 - DNA, 33 bp, Homo sapien
ccatgtcggtcaccacaccgtccgtcaggatca

SEQ ID NO: 394188 - DNA, 33 bp, Homo sapien
ccatgtcggtcaccacgccgtccgtcaggatca

SEQ ID NO: 394189 - DNA, 33 bp, Homo sapien
ctggaggatgggacaacgcagttacctctggga

SEQ ID NO: 394190 - DNA, 33 bp, Homo sapien
ctggaggatgggacaaggcagttacctctggga

SEQ ID NO: 394191 - DNA, 33 bp, Homo sapien
gcagacagaggctgtacggacccattcctcact

SEQ ID NO: 394192 - DNA, 33 bp, Homo sapien
gcagacagaggctgtatggacccattcctcact

SEQ ID NO: 394193 - DNA, 33 bp, Homo sapien
agagcctgacccttgccgagaatagcctgggta

SEQ ID NO: 394194 - DNA, 33 bp, Homo sapien
agagcctgacccttgctgagaatagcctgggta

SEQ ID NO: 394195 - DNA, 33 bp, Homo sapien
ttttctcatgagaagaactttaatcctagtctg

SEQ ID NO: 394196 - DNA, 33 bp, Homo sapien
ttttctcatgagaagagctttaatcctagtctg

SEQ ID NO: 394197 - DNA, 33 bp, Homo sapien
tcaggatgcgtgaacaatgaccggctcgtggga

SEQ ID NO: 394198 - DNA, 33 bp, Homo sapien
tcaggatgcgtgaacactgaccggctcgtggga

SEQ ID NO: 394199 - DNA, 33 bp, Homo sapien
gatcctatcatttttacctctctcctccctaca

SEQ ID NO: 394200 - DNA, 33 bp, Homo sapien
gatcctatcatttttagctctctcctccctaca

SEQ ID NO: 394201 - DNA, 33 bp, Homo sapien
gcaaggtggtaactctaagacatcaaagagctg

SEQ ID NO: 394202 - DNA, 33 bp, Homo sapien
gcaaggtggtaactcttagacatcaaagagctg

SEQ ID NO: 394203 - DNA, 33 bp, Homo sapien
ggatttaatgtctcacaaatgaagggtcagagg

SEQ ID NO: 394204 - DNA, 33 bp, Homo sapien
ggatttaatgtctcacgaatgaagggtcagagg

SEQ ID NO: 394205 - DNA, 33 bp, Homo sapien
cctaacagctgccacaatgattaacttatggcc

SEQ ID NO: 394206 - DNA, 33 bp, Homo sapien
cctaacagctgccacagtgattaacttatggcc

SEQ ID NO: 394207 - DNA, 33 bp, Homo sapien
agtttctccccaaaaacgagtctggtgccttct

SEQ ID NO: 394208 - DNA, 33 bp, Homo sapien
agtttctccccaaaaaggagtctggtgccttct

SEQ ID NO: 394209 - DNA, 33 bp, Homo sapien
cacactcctcttgtccagactccagtgctcaag

SEQ ID NO: 394210 - DNA, 33 bp, Homo sapien
cacactcctcttgtccggactccagtgctcaag

SEQ ID NO: 394211 - DNA, 33 bp, Homo sapien
gcagccggtgtcatctaaacgaacagaaggata

SEQ ID NO: 394212 - DNA, 33 bp, Homo sapien
gcagccggtgtcatctgaacgaacagaaggata

SEQ ID NO: 394213 - DNA, 33 bp, Homo sapien
agttaaggaaatatctcaagaacagaaaggaac

SEQ ID NO: 394214 - DNA, 33 bp, Homo sapien
agttaaggaaatatctgaagaacagaaaggaac

SEQ ID NO: 394215 - DNA, 33 bp, Homo sapien
accttgtcctccaaaactctggggtcgtgcatt

SEQ ID NO: 394216 - DNA, 33 bp, Homo sapien
accttgtcctccaaaagtctggggtcgtgcatt

SEQ ID NO: 394217 - DNA, 33 bp, Homo sapien
tgaactgtccggccccaagtcactcagcgtttg

SEQ ID NO: 394218 - DNA, 33 bp, Homo sapien
tgaactgtccggccccgagtcactcagcgtttg

SEQ ID NO: 394219 - DNA, 33 bp, Homo sapien
tctgcaacaccaagaaatggctcaggcaactct

SEQ ID NO: 394220 - DNA, 33 bp, Homo sapien
tctgcaacaccaagaagtggctcaggcaactct

SEQ ID NO: 394221 - DNA, 33 bp, Homo sapien
aggtcagatgtgacgacagcaggcccatcaagg

SEQ ID NO: 394222 - DNA, 33 bp, Homo sapien
aggtcagatgtgacgagagcaggcccatcaagg

SEQ ID NO: 394223 - DNA, 33 bp, Homo sapien
ggagggcgcaatacacaaccccacgttcagggg

SEQ ID NO: 394224 - DNA, 33 bp, Homo sapien
ggagggcgcaatacacgaccccacgttcagggg

SEQ ID NO: 394225 - DNA, 33 bp, Homo sapien
gcacacagccaatggaaaagttgggagctggtg

SEQ ID NO: 394226 - DNA, 33 bp, Homo sapien
gcacacagccaatggagaagttgggagctggtg

SEQ ID NO: 394227 - DNA, 33 bp, Homo sapien
tatgacagggtctgaacaacagagaacttagaa

SEQ ID NO: 394228 - DNA, 33 bp, Homo sapien
tatgacagggtctgaataacagagaacttagaa

SEQ ID NO: 394229 - DNA, 33 bp, Homo sapien
gctgttccccaaaacaatggtctttctggaaga

SEQ ID NO: 394230 - DNA, 33 bp, Homo sapien
gctgttccccaaaacagtggtctttctggaaga

SEQ ID NO: 394231 - DNA, 33 bp, Homo sapien
gggacatggaggaaaacttccagtgcttaagca

SEQ ID NO: 394232 - DNA, 33 bp, Homo sapien
gggacatggaggaaaagttccagtgcttaagca

SEQ ID NO: 394233 - DNA, 33 bp, Homo sapien
tcctgcttccatgtgacggttttctgtaaaatc

SEQ ID NO: 394234 - DNA, 33 bp, Homo sapien
tcctgcttccatgtgatggttttctgtaaaatc

SEQ ID NO: 394235 - DNA, 33 bp, Homo sapien
caggagtcagggctgtaaatcgaggatcctgcc

SEQ ID NO: 394236 - DNA, 33 bp, Homo sapien
caggagtcagggctgtgaatcgaggatcctgcc

SEQ ID NO: 394237 - DNA, 33 bp, Homo sapien
ctgcagtagggtagcacgatgatggcttactgg

SEQ ID NO: 394238 - DNA, 33 bp, Homo sapien
ctgcagtagggtagcatgatgatggcttactgg

SEQ ID NO: 394239 - DNA, 33 bp, Homo sapien
gttaagaaccatgacacagtcacagcaaggcaa

SEQ ID NO: 394240 - DNA, 33 bp, Homo sapien
gttaagaaccatgacatagtcacagcaaggcaa

SEQ ID NO: 394241 - DNA, 33 bp, Homo sapien
ttatgctgggtgatcaagtattccagaaggaga

SEQ ID NO: 394242 - DNA, 33 bp, Homo sapien
ttatgctgggtgatcaggtattccagaaggaga

SEQ ID NO: 394243 - DNA, 33 bp, Homo sapien
tctggttcaagacagacgtaaaagaggtcctag

SEQ ID NO: 394244 - DNA, 33 bp, Homo sapien
tctggttcaagacagatgtaaaagaggtcctag

SEQ ID NO: 394245 - DNA, 33 bp, Homo sapien
atgaagatggccggagaaaaaagatacgttaaa

SEQ ID NO: 394246 - DNA, 33 bp, Homo sapien
atgaagatggccggaggaaaaagatacgttaaa

SEQ ID NO: 394247 - DNA, 33 bp, Homo sapien
ttattttaaaatagcactctgcaaacgtgtgca

SEQ ID NO: 394248 - DNA, 33 bp, Homo sapien
ttattttaaaatagcagtctgcaaacgtgtgca

SEQ ID NO: 394249 - DNA, 33 bp, Homo sapien
aggtccactgagcagacgatttcatggcttaga

SEQ ID NO: 394250 - DNA, 33 bp, Homo sapien
aggtccactgagcagatgatttcatggcttaga

SEQ ID NO: 394251 - DNA, 33 bp, Homo sapien
tgaggtaagatgtatacatgcgtctatatctaa

SEQ ID NO: 394252 - DNA, 33 bp, Homo sapien
tgaggtaagatgtatatatgcgtctatatctaa

SEQ ID NO: 394253 - DNA, 33 bp, Homo sapien
tacgtaggttgtatctcaataaagctgtcatgg

SEQ ID NO: 394254 - DNA, 33 bp, Homo sapien
tacgtaggttgtatcttaataaagctgtcatgg

SEQ ID NO: 394255 - DNA, 33 bp, Homo sapien
tctgatcgacgctacaatgaggatgaaccttga

SEQ ID NO: 394256 - DNA, 33 bp, Homo sapien
tctgatcgacgctacagtgaggatgaaccttga

SEQ ID NO: 394257 - DNA, 33 bp, Homo sapien
tctttaatgcagctcccagaaaatttaaattgg

SEQ ID NO: 394258 - DNA, 33 bp, Homo sapien
tctttaatgcagctcctagaaaatttaaattgg

SEQ ID NO: 394259 - DNA, 33 bp, Homo sapien
ccactggctacggctcccatcgttcttgttctt

SEQ ID NO: 394260 - DNA, 33 bp, Homo sapien
ccactggctacggctctcatcgttcttgttctt

SEQ ID NO: 394261 - DNA, 33 bp, Homo sapien
agcctacttccaatgaacgtgagatctgaaaga

SEQ ID NO: 394262 - DNA, 33 bp, Homo sapien
agcctacttccaatgaccgtgagatctgaaaga

SEQ ID NO: 394263 - DNA, 33 bp, Homo sapien
gggctgcgcaggacgcagcaggaagaaaggagg

SEQ ID NO: 394264 - DNA, 33 bp, Homo sapien
gggctgcgcaggacgcggcaggaagaaaggagg

SEQ ID NO: 394265 - DNA, 33 bp, Homo sapien
tcacttcctaaagataacaagcaggcactgccc

SEQ ID NO: 394266 - DNA, 33 bp, Homo sapien
tcacttcctaaagatatcaagcaggcactgccc

SEQ ID NO: 394267 - DNA, 33 bp, Homo sapien
gggctctctgcacaggaaactccagcactgaat

SEQ ID NO: 394268 - DNA, 33 bp, Homo sapien
gggctctctgcacagggaactccagcactgaat

SEQ ID NO: 394269 - DNA, 33 bp, Homo sapien
aggacagagctcctcacgtaaatctggttccaa

SEQ ID NO: 394270 - DNA, 33 bp, Homo sapien
aggacagagctcctcaggtaaatctggttccaa

SEQ ID NO: 394271 - DNA, 33 bp, Homo sapien
actgtctcattaaatacacatcctttagcctgg

SEQ ID NO: 394272 - DNA, 33 bp, Homo sapien
actgtctcattaaatatacatcctttagcctgg

SEQ ID NO: 394273 - DNA, 33 bp, Homo sapien
gtatgatattcaacaggaaacaggggcctcacc

SEQ ID NO: 394274 - DNA, 33 bp, Homo sapien
gtatgatattcaacagtaaacaggggcctcacc

SEQ ID NO: 394275 - DNA, 33 bp, Homo sapien
ttcaggccaatggcaacgctcccgtgggaatca

SEQ ID NO: 394276 - DNA, 33 bp, Homo sapien
ttcaggccaatggcaatgctcccgtgggaatca

SEQ ID NO: 394277 - DNA, 33 bp, Homo sapien
gaattttcatcataaaatgggccaagaacgaaa

SEQ ID NO: 394278 - DNA, 33 bp, Homo sapien
gaattttcatcataaattgggccaagaacgaaa

SEQ ID NO: 394279 - DNA, 33 bp, Homo sapien
ctgccatcaggacacgaattttttggccagaag

SEQ ID NO: 394280 - DNA, 33 bp, Homo sapien
ctgccatcaggacacggattttttggccagaag

SEQ ID NO: 394281 - DNA, 33 bp, Homo sapien
ttcgttcctcccgctcacggtccagctcctccc

SEQ ID NO: 394282 - DNA, 33 bp, Homo sapien
ttcgttcctcccgctcgcggtccagctcctccc

SEQ ID NO: 394283 - DNA, 33 bp, Homo sapien
ttgacgtcaccgaagaaaaaaaatccagcttag

SEQ ID NO: 394284 - DNA, 33 bp, Homo sapien
ttgacgtcaccgaagagaaaaaatccagcttag

SEQ ID NO: 394285 - DNA, 33 bp, Homo sapien
cagatggaggacatgcagaagaaggaggaccac

SEQ ID NO: 394286 - DNA, 33 bp, Homo sapien
cagatggaggacatgcggaagaaggaggaccac

SEQ ID NO: 394287 - DNA, 33 bp, Homo sapien
gcatcttatcttgagccgcagttatatgtgctg

SEQ ID NO: 394288 - DNA, 33 bp, Homo sapien
gcatcttatcttgagctgcagttatatgtgctg

SEQ ID NO: 394289 - DNA, 33 bp, Homo sapien
acttctttcttcctgtcaagctgcatttccagt

SEQ ID NO: 394290 - DNA, 33 bp, Homo sapien
acttctttcttcctgtgaagctgcatttccagt

SEQ ID NO: 394291 - DNA, 33 bp, Homo sapien
agtacacagagctaaccatgttatccctaccta

SEQ ID NO: 394292 - DNA, 33 bp, Homo sapien
agtacacagagctaacgatgttatccctaccta

SEQ ID NO: 394293 - DNA, 33 bp, Homo sapien
atgaaattattgtaccaggacataacagcaagc

SEQ ID NO: 394294 - DNA, 33 bp, Homo sapien
atgaaattattgtaccgggacataacagcaagc

SEQ ID NO: 394295 - DNA, 33 bp, Homo sapien
agaccatactcaccaaactttctagaggacata

SEQ ID NO: 394296 - DNA, 33 bp, Homo sapien
agaccatactcaccaacctttctagaggacata

SEQ ID NO: 394297 - DNA, 33 bp, Homo sapien; identical to SEQ ID NO: 394295

SEQ ID NO: 394298 - DNA, 33 bp, Homo sapien; identical to SEQ ID NO: 394296

SEQ ID NO: 394299 - DNA, 33 bp, Homo sapien
tattcaagcagacaagcagaattggtacaggaa

SEQ ID NO: 394300 - DNA, 33 bp, Homo sapien
tattcaagcagacaagtagaattggtacaggaa

SEQ ID NO: 394301 - DNA, 33 bp, Homo sapien; identical to SEQ ID NO: 394299

SEQ ID NO: 394302 - DNA, 33 bp, Homo sapien; identical to SEQ ID NO: 394300

SEQ ID NO: 394303 - DNA, 33 bp, Homo sapien
gaggttgaaaaatcaactggacgaatgatgtaa

SEQ ID NO: 394304 - DNA, 33 bp, Homo sapien
gaggttgaaaaatcaattggacgaatgatgtaa

SEQ ID NO: 394305 - DNA, 33 bp, Homo sapien; identical to SEQ ID NO: 394303

SEQ ID NO: 394306 - DNA, 33 bp, Homo sapien; identical to SEQ ID NO: 394304

SEQ ID NO: 394307 - DNA, 33 bp, Homo sapien
aggcgaagcaacctaacatccattgacaaatga

SEQ ID NO: 394308 - DNA, 33 bp, Homo sapien
aggcgaagcaacctaatatccattgacaaatga

SEQ ID NO: 394309 - DNA, 33 bp, Homo sapien
tggatgacacagaagagtccgatgaagaatgga

SEQ ID NO: 394310 - DNA, 33 bp, Homo sapien
tggatgacacagaagattccgatgaagaatgga

SEQ ID NO: 394311 - DNA, 33 bp, Homo sapien; identical to SEQ ID NO: 394309

SEQ ID NO: 394312 - DNA, 33 bp, Homo sapien; identical to SEQ ID NO: 394310

SEQ ID NO: 394313 - DNA, 33 bp, Homo sapien
aacggaagagctgggaggaggaacaaagggcag

SEQ ID NO: 394314 - DNA, 33 bp, Homo sapien
aacggaagagctgggatgaggaacaaagggcag

SEQ ID NO: 394315 - DNA, 33 bp, Homo sapien
atggttatcaagcttccagtttaataaacatga

SEQ ID NO: 394316 - DNA, 33 bp, Homo sapien
atggttatcaagcttctagtttaataaacatga

SEQ ID NO: 394317 - DNA, 33 bp, Homo sapien
gcccattctcaggaaacgcaatagccacggccc

SEQ ID NO: 394318 - DNA, 33 bp, Homo sapien
gcccattctcaggaaaggcaatagccacggccc

SEQ ID NO: 394319 - DNA, 33 bp, Homo sapien; identical to SEQ ID NO: 394317

SEQ ID NO: 394320 - DNA, 33 bp, Homo sapien; identical to SEQ ID NO: 394318

SEQ ID NO: 394321 - DNA, 33 bp, Homo sapien
taggcaggaattgagcacagtgtttgctaacat

SEQ ID NO: 394322 - DNA, 33 bp, Homo sapien
taggcaggaattgagcccagtgtttgctaacat

SEQ ID NO: 394323 - DNA, 33 bp, Homo sapien; identical to SEQ ID NO: 394321

SEQ ID NO: 394324 - DNA, 33 bp, Homo sapien; identical to SEQ ID NO: 394322

SEQ ID NO: 394325 - DNA, 33 bp, Homo sapien
agagcctaacattagcactaagcggcccttcac

SEQ ID NO: 394326 - DNA, 33 bp, Homo sapien
agagcctaacattagcgctaagcggcccttcac

SEQ ID NO: 394327 - DNA, 33 bp, Homo sapien
ccctcatatccctgagaccttcttgcagcataa

SEQ ID NO: 394328 - DNA, 33 bp, Homo sapien
ccctcatatccctgagcccttcttgcagcataa

SEQ ID NO: 394329 - DNA, 33 bp, Homo sapien
tagaaagctcctcttccgaacacttcaccagca

SEQ ID NO: 394330 - DNA, 33 bp, Homo sapien
tagaaagctcctcttctgaacacttcaccagca

SEQ ID NO: 394331 - DNA, 33 bp, Homo sapien
cctttaactcacacaacgttgttcttattctcc

SEQ ID NO: 394332 - DNA, 33 bp, Homo sapien
cctttaactcacacaaggttgttcttattctcc

SEQ ID NO: 394333 - DNA, 33 bp, Homo sapien
caaccttccagcggagccgttagggccattatg

SEQ ID NO: 394334 - DNA, 33 bp, Homo sapien
caaccttccagcggaggcgttagggccattatg

SEQ ID NO: 394335 - DNA, 33 bp, Homo sapien
ggaactggcactgttacagatggttggtgagaa

SEQ ID NO: 394336 - DNA, 33 bp, Homo sapien
ggaactggcactgttagagatggttggtgagaa

SEQ ID NO: 394337 - DNA, 33 bp, Homo sapien
ttggacaataatcacgaagcgtggtgaggccca

SEQ ID NO: 394338 - DNA, 33 bp, Homo sapien
ttggacaataatcacggagcgtggtgaggccca

SEQ ID NO: 394339 - DNA, 33 bp, Homo sapien
ggatctgtgtcccccccgcgtgtcatgtcgaat

SEQ ID NO: 394340 - DNA, 33 bp, Homo sapien
ggatctgtgtccccccggcgtgtcatgtcgaat

SEQ ID NO: 394341 - DNA, 33 bp, Homo sapien
tatgtgtgtagctaatcatagaaagggtacagt

SEQ ID NO: 394342 - DNA, 33 bp, Homo sapien
tatgtgtgtagctaattatagaaagggtacagt

SEQ ID NO: 394343 - DNA, 33 bp, Homo sapien
cttcagtgcggtctctaaattcttccctacaca

SEQ ID NO: 394344 - DNA, 33 bp, Homo sapien
cttcagtgcggtctctgaattcttccctacaca

SEQ ID NO: 394345 - DNA, 33 bp, Homo sapien
acaggccagatgccgaacgcgttactccttttg

SEQ ID NO: 394346 - DNA, 33 bp, Homo sapien
acaggccagatgccgaccgcgttactccttttg

SEQ ID NO: 394347 - DNA, 33 bp, Homo sapien
acctagagaggaaaaaggacttccaacgccaag

SEQ ID NO: 394348 - DNA, 33 bp, Homo sapien
acctagagaggaaaaatgacttccaacgccaag

SEQ ID NO: 394349 - DNA, 33 bp, Homo sapien
gggggactcctgggcccgacagtcttggcgttg

SEQ ID NO: 394350 - DNA, 33 bp, Homo sapien
gggggactcctgggccggacagtcttggcgttg

SEQ ID NO: 394351 - DNA, 33 bp, Homo sapien
gagacatcgctcagagacagaccctgtgaccag

SEQ ID NO: 394352 - DNA, 33 bp, Homo sapien
gagacatcgctcagaggcagaccctgtgaccag

SEQ ID NO: 394353 - DNA, 33 bp, Homo sapien
acccaacaaatagtcaactgaacacccatccaa

SEQ ID NO: 394354 - DNA, 33 bp, Homo sapien
acccaacaaatagtcagctgaacacccatccaa

SEQ ID NO: 394355 - DNA, 33 bp, Homo sapien
tcttcataagggcagcaatcaccctcatggcct

SEQ ID NO: 394356 - DNA, 33 bp, Homo sapien
tcttcataagggcagcgatcaccctcatggcct

SEQ ID NO: 394357 - DNA, 33 bp, Homo sapien
tcaccagggatccgaaatcaccagggatctgga

SEQ ID NO: 394358 - DNA, 33 bp, Homo sapien
tcaccagggatccgaattcaccagggatctgga

SEQ ID NO: 394359 - DNA, 33 bp, Homo sapien
gggtatcgtgctgttagcggacgcgatgctgct

SEQ ID NO: 394360 - DNA, 33 bp, Homo sapien
gggtatcgtgctgttatcggacgcgatgctgct

SEQ ID NO: 394361 - DNA, 33 bp, Homo sapien
ttcacagtggtcaatgaaagacaaaactcagtc

SEQ ID NO: 394362 - DNA, 33 bp, Homo sapien
ttcacagtggtcaatgcaagacaaaactcagtc

SEQ ID NO: 394363 - DNA, 33 bp, Homo sapien
caaagtaatagcgtaacgcacagcctcatattc

SEQ ID NO: 394364 - DNA, 33 bp, Homo sapien
caaagtaatagcgtaatgcacagcctcatattc

SEQ ID NO: 394365 - DNA, 33 bp, Homo sapien
gggagggcagaagtgaaggatctttgaaggaaa

SEQ ID NO: 394366 - DNA, 33 bp, Homo sapien
gggagggcagaagtgagggatctttgaaggaaa

SEQ ID NO: 394367 - DNA, 33 bp, Homo sapien
gcagcctgcagaaaagcccaagcaacagatgca

SEQ ID NO: 394368 - DNA, 33 bp, Homo sapien
gcagcctgcagaaaaggccaagcaacagatgca

SEQ ID NO: 394369 - DNA, 33 bp, Homo sapien
atttgcctcttgagaaaatcggcctggctgcca

SEQ ID NO: 394370 - DNA, 33 bp, Homo sapien
atttgcctcttgagaagatcggcctggctgcca

SEQ ID NO: 394371 - DNA, 33 bp, Homo sapien
aacatgccgacctgccaggaagacaagctgcac

SEQ ID NO: 394372 - DNA, 33 bp, Homo sapien
aacatgccgacctgccgggaagacaagctgcac

SEQ ID NO: 394373 - DNA, 33 bp, Homo sapien
cggagtagtttatccactagcaaaactcagggc

SEQ ID NO: 394374 - DNA, 33 bp, Homo sapien
cggagtagtttatccattagcaaaactcagggc

SEQ ID NO: 394375 - DNA, 33 bp, Homo sapien
gaccagaagataagaccgtccagtggactccaa

SEQ ID NO: 394376 - DNA, 33 bp, Homo sapien
gaccagaagataagactgtccagtggactccaa

SEQ ID NO: 394377 - DNA, 33 bp, Homo sapien
taattacagttatcaccattaacgaccatttgc

SEQ ID NO: 394378 - DNA, 33 bp, Homo sapien
taattacagttatcactattaacgaccatttgc

SEQ ID NO: 394379 - DNA, 33 bp, Homo sapien
atttctcagaggaaacaaggtgcggaacgtagc

SEQ ID NO: 394380 - DNA, 33 bp, Homo sapien
atttctcagaggaaacgaggtgcggaacgtagc

SEQ ID NO: 394381 - DNA, 33 bp, Homo sapien
ttctgtacatttgtgacaggataaaacccagag

SEQ ID NO: 394382 - DNA, 33 bp, Homo sapien
ttctgtacatttgtgagaggataaaacccagag

SEQ ID NO: 394383 - DNA, 33 bp, Homo sapien
atgaagggagacggaaagagccaaatgctgcag

SEQ ID NO: 394384 - DNA, 33 bp, Homo sapien
atgaagggagacggaaggagccaaatgctgcag

SEQ ID NO: 394385 - DNA, 33 bp, Homo sapien
gggttcttactgcatacgctgcttgctggtttc

SEQ ID NO: 394386 - DNA, 33 bp, Homo sapien
gggttcttactgcatatgctgcttgctggtttc

SEQ ID NO: 394387 - DNA, 33 bp, Homo sapien
aggggattttgaaggcagcaaagccattattct

SEQ ID NO: 394388 - DNA, 33 bp, Homo sapien
aggggattttgaaggccgcaaagccattattct

SEQ ID NO: 394389 - DNA, 33 bp, Homo sapien
gaggtaagaggttagacgggaactctgtacttt

SEQ ID NO: 394390 - DNA, 33 bp, Homo sapien
gaggtaagaggttagatgggaactctgtacttt

SEQ ID NO: 394391 - DNA, 33 bp, Homo sapien
agtagcccagagtgtactaagcgcggagtacca

SEQ ID NO: 394392 - DNA, 33 bp, Homo sapien
agtagcccagagtgtattaagcgcggagtacca

SEQ ID NO: 394393 - DNA, 33 bp, Homo sapien
tctgaattctgacagcccatgtccttgttaatg

SEQ ID NO: 394394 - DNA, 33 bp, Homo sapien
tctgaattctgacagctcatgtccttgttaatg

SEQ ID NO: 394395 - DNA, 33 bp, Homo sapien
gtgattggatgacattaaaaaaagaaaccagaa

SEQ ID NO: 394396 - DNA, 33 bp, Homo sapien
gtgattggatgacattgaaaaaagaaaccagaa

SEQ ID NO: 394397 - DNA, 33 bp, Homo sapien
tctcaccacgaacaaacattcagactgtgtacg

SEQ ID NO: 394398 - DNA, 33 bp, Homo sapien
tctcaccacgaacaaatattcagactgtgtacg

SEQ ID NO: 394399 - DNA, 33 bp, Homo sapien
caagccgttgagtgacgccaggatttagtctcc

SEQ ID NO: 394400 - DNA, 33 bp, Homo sapien
caagccgttgagtgactccaggatttagtctcc

SEQ ID NO: 394401 - DNA, 33 bp, Homo sapien
tgtattttctctcacaacttctttgggtcagga

SEQ ID NO: 394402 - DNA, 33 bp, Homo sapien
tgtattttctctcacagcttctttgggtcagga

SEQ ID NO: 394403 - DNA, 33 bp, Homo sapien
ctgtctctcaggtacaatcgattctcctcctgc

SEQ ID NO: 394404 - DNA, 33 bp, Homo sapien
ctgtctctcaggtacagtcgattctcctcctgc

SEQ ID NO: 394405 - DNA, 33 bp, Homo sapien
cttatttcatgggctacgaccgacaatacaatg

SEQ ID NO: 394406 - DNA, 33 bp, Homo sapien
cttatttcatgggctatgaccgacaatacaatg

SEQ ID NO: 394407 - DNA, 33 bp, Homo sapien
ccaacacaatgtcgacactcagtggttagagtg

SEQ ID NO: 394408 - DNA, 33 bp, Homo sapien
ccaacacaatgtcgactctcagtggttagagtg

SEQ ID NO: 394409 - DNA, 33 bp, Homo sapien
tctgcatctatggagacaattgtatgttctttc

SEQ ID NO: 394410 - DNA, 33 bp, Homo sapien
tctgcatctatggagataattgtatgttctttc

SEQ ID NO: 394411 - DNA, 33 bp, Homo sapien
tgttagtgcgtcaagggagtccactgcccccat

SEQ ID NO: 394412 - DNA, 33 bp, Homo sapien
tgttagtgcgtcaaggtagtccactgcccccat

SEQ ID NO: 394413 - DNA, 33 bp, Homo sapien
gcaggtgtggaccaaacgtcccggcacaaacct

SEQ ID NO: 394414 - DNA, 33 bp, Homo sapien
gcaggtgtggaccaaatgtcccggcacaaacct

SEQ ID NO: 394415 - DNA, 33 bp, Homo sapien
tttctgtttatttcccaaattttttgcaacaag

SEQ ID NO: 394416 - DNA, 33 bp, Homo sapien
tttctgtttatttccccaattttttgcaacaag

SEQ ID NO: 394417 - DNA, 33 bp, Homo sapien
atggagatacgtggaaccttaaagtttttgcat

SEQ ID NO: 394418 - DNA, 33 bp, Homo sapien
atggagatacgtggaagcttaaagtttttgcat

SEQ ID NO: 394419 - DNA, 33 bp, Homo sapien
acaaaaccaggacttcactcagaagaaaaataa

SEQ ID NO: 394420 - DNA, 33 bp, Homo sapien
acaaaaccaggacttcgctcagaagaaaaataa

SEQ ID NO: 394421 - DNA, 33 bp, Homo sapien
aggtggtccctgaacaagctgtgaacaaaagtg

SEQ ID NO: 394422 - DNA, 33 bp, Homo sapien
aggtggtccctgaacaggctgtgaacaaaagtg

SEQ ID NO: 394423 - DNA, 33 bp, Homo sapien
cataactatcattacaaggtcattattactatc

SEQ ID NO: 394424 - DNA, 33 bp, Homo sapien
cataactatcattacagggtcattattactatc

SEQ ID NO: 394425 - DNA, 33 bp, Homo sapien
aatacctggtgcatctcaagtgttcagaaaacg

SEQ ID NO: 394426 - DNA, 33 bp, Homo sapien
aatacctggtgcatctgaagtgttcagaaaacg

SEQ ID NO: 394427 - DNA, 33 bp, Homo sapien
tttgttttttttttccagatatcaagtcttgct

SEQ ID NO: 394428 - DNA, 33 bp, Homo sapien
tttgttttttttttccggatatcaagtcttgct

SEQ ID NO: 394429 - DNA, 33 bp, Homo sapien
aacttttgttagactacaactcatgcttttcta

SEQ ID NO: 394430 - DNA, 33 bp, Homo sapien
aacttttgttagactagaactcatgcttttcta

SEQ ID NO: 394431 - DNA, 33 bp, Homo sapien
tcttacataacaaccacagttaccaaaatcgag

SEQ ID NO: 394432 - DNA, 33 bp, Homo sapien
tcttacataacaaccagagttaccaaaatcgag

SEQ ID NO: 394433 - DNA, 33 bp, Homo sapien
cagtcaatactatgacagctttaaatcaactgc

SEQ ID NO: 394434 - DNA, 33 bp, Homo sapien
cagtcaatactatgacggctttaaatcaactgc

SEQ ID NO: 394435 - DNA, 33 bp, Homo sapien
gcagttaaccaaaaacaccattctgtaggatga

SEQ ID NO: 394436 - DNA, 33 bp, Homo sapien
gcagttaaccaaaaacgccattctgtaggatga

SEQ ID NO: 394437 - DNA, 33 bp, Homo sapien
tctggagcaagcagaccgattttcagaaacgca

SEQ ID NO: 394438 - DNA, 33 bp, Homo sapien
tctggagcaagcagacggattttcagaaacgca

SEQ ID NO: 394439 - DNA, 33 bp, Homo sapien
taggtgtctccaacaacgaagtcatgcacgcta

SEQ ID NO: 394440 - DNA, 33 bp, Homo sapien
taggtgtctccaacaaggaagtcatgcacgcta

SEQ ID NO: 394441 - DNA, 33 bp, Homo sapien
cccttcctcttgaccactgcataagttgccttt

SEQ ID NO: 394442 - DNA, 33 bp, Homo sapien
cccttcctcttgaccattgcataagttgccttt

SEQ ID NO: 394443 - DNA, 33 bp, Homo sapien
gagcctgggcctccaaagagaagaggtttactc

SEQ ID NO: 394444 - DNA, 33 bp, Homo sapien
gagcctgggcctccaacgagaagaggtttactc

SEQ ID NO: 394445 - DNA, 33 bp, Homo sapien
gggaaatgggcagtaacgatcacgggaaatttg

SEQ ID NO: 394446 - DNA, 33 bp, Homo sapien
gggaaatgggcagtaatgatcacgggaaatttg

SEQ ID NO: 394447 - DNA, 33 bp, Homo sapien
caccctaacttctcaactctcacttcaggatga

SEQ ID NO: 394448 - DNA, 33 bp, Homo sapien
caccctaacttctcaattctcacttcaggatga

SEQ ID NO: 394449 - DNA, 33 bp, Homo sapien
aggaattgacagggcagacaagatagacggttt

SEQ ID NO: 394450 - DNA, 33 bp, Homo sapien
aggaattgacagggcatacaagatagacggttt

SEQ ID NO: 394451 - DNA, 33 bp, Homo sapien
attccccaactttactaacacccaggtgaaatc

SEQ ID NO: 394452 - DNA, 33 bp, Homo sapien
attccccaactttacttacacccaggtgaaatc

SEQ ID NO: 394453 - DNA, 33 bp, Homo sapien
accgtgccatcgatctcaatgaaccgctgcatg

SEQ ID NO: 394454 - DNA, 33 bp, Homo sapien
accgtgccatcgatcttaatgaaccgctgcatg

SEQ ID NO: 394455 - DNA, 33 bp, Homo sapien
gattgtttggaggttacaggagagaaggcttga

SEQ ID NO: 394456 - DNA, 33 bp, Homo sapien
gattgtttggaggttataggagagaaggcttga

SEQ ID NO: 394457 - DNA, 33 bp, Homo sapien
atctctgtatctcttcaagcgtttttagcttca

SEQ ID NO: 394458 - DNA, 33 bp, Homo sapien
atctctgtatctcttccagcgtttttagcttca

SEQ ID NO: 394459 - DNA, 33 bp, Homo sapien
agcgtttttagcttcactctaacatagggagtc

SEQ ID NO: 394460 - DNA, 33 bp, Homo sapien
agcgtttttagcttcagtctaacatagggagtc

SEQ ID NO: 394461 - DNA, 33 bp, Homo sapien
tgcgcccagcctcttacatgagtgtttaacaac

SEQ ID NO: 394462 - DNA, 33 bp, Homo sapien
tgcgcccagcctcttatatgagtgtttaacaac

SEQ ID NO: 394463 - DNA, 33 bp, Homo sapien
caagcccagctgagacactatccttctggcggt

SEQ ID NO: 394464 - DNA, 33 bp, Homo sapien
caagcccagctgagacgctatccttctggcggt

SEQ ID NO: 394465 - DNA, 33 bp, Homo sapien
tcattaattcaatttcaaatcccacactgcagc

SEQ ID NO: 394466 - DNA, 33 bp, Homo sapien
tcattaattcaatttccaatcccacactgcagc

SEQ ID NO: 394467 - DNA, 33 bp, Homo sapien
ctccatgtcacagatgaaaagttaaatatcttg

SEQ ID NO: 394468 - DNA, 33 bp, Homo sapien
ctccatgtcacagatggaaagttaaatatcttg

SEQ ID NO: 394469 - DNA, 33 bp, Homo sapien
actgcaaagggcaaacaaaacacatctgtgggc

SEQ ID NO: 394470 - DNA, 33 bp, Homo sapien
actgcaaagggcaaacgaaacacatctgtgggc

SEQ ID NO: 394471 - DNA, 33 bp, Homo sapien
ctcctggaaggtaagaactgtatctttgtcatc

SEQ ID NO: 394472 - DNA, 33 bp, Homo sapien
ctcctggaaggtaagacctgtatctttgtcatc

SEQ ID NO: 394473 - DNA, 33 bp, Homo sapien
agtctcctagcaaaacagttcaaggatacagtc

SEQ ID NO: 394474 - DNA, 33 bp, Homo sapien
agtctcctagcaaaacggttcaaggatacagtc

SEQ ID NO: 394475 - DNA, 33 bp, Homo sapien
gagagcactgaaatctcaagtttgccatagatg

SEQ ID NO: 394476 - DNA, 33 bp, Homo sapien
gagagcactgaaatctgaagtttgccatagatg

SEQ ID NO: 394477 - DNA, 33 bp, Homo sapien
tccctactacattataaaaatcctttccacttt

SEQ ID NO: 394478 - DNA, 33 bp, Homo sapien
tccctactacattatacaaatcctttccacttt

SEQ ID NO: 394479 - DNA, 33 bp, Homo sapien
acaagttggcctgggaccttgtgccacccagag

SEQ ID NO: 394480 - DNA, 33 bp, Homo sapien
acaagttggcctgggatcttgtgccacccagag

SEQ ID NO: 394481 - DNA, 33 bp, Homo sapien
taacgttttgaaaataggatgtcatttaattct

SEQ ID NO: 394482 - DNA, 33 bp, Homo sapien
taacgttttgaaaatatgatgtcatttaattct

SEQ ID NO: 394483 - DNA, 33 bp, Homo sapien
gtgtaacatggaaataacaggtttagccaacct

SEQ ID NO: 394484 - DNA, 33 bp, Homo sapien
gtgtaacatggaaataccaggtttagccaacct

SEQ ID NO: 394485 - DNA, 33 bp, Homo sapien
gtaagtactcaacaggcatgagctttggaaagt

SEQ ID NO: 394486 - DNA, 33 bp, Homo sapien
gtaagtactcaacaggtatgagctttggaaagt

SEQ ID NO: 394487 - DNA, 33 bp, Homo sapien
tcatctacagcataagactaatagcttctaata

SEQ ID NO: 394488 - DNA, 33 bp, Homo sapien
tcatctacagcataaggctaatagcttctaata

SEQ ID NO: 394489 - DNA, 33 bp, Homo sapien
agcctgtttggttcaacaaaatgtgccaggccc

SEQ ID NO: 394490 - DNA, 33 bp, Homo sapien
agcctgtttggttcaataaaatgtgccaggccc

SEQ ID NO: 394491 - DNA, 33 bp, Homo sapien
agcattggctgatacaatctcacacaggagctc

SEQ ID NO: 394492 - DNA, 33 bp, Homo sapien
agcattggctgatacagtctcacacaggagctc

SEQ ID NO: 394493 - DNA, 33 bp, Homo sapien
gaggcaaacgcgtgccaagaggaatactggctc

SEQ ID NO: 394494 - DNA, 33 bp, Homo sapien
gaggcaaacgcgtgccgagaggaatactggctc

SEQ ID NO: 394495 - DNA, 33 bp, Homo sapien
gggagcagtgtttgcaacctcgttttagtttct

SEQ ID NO: 394496 - DNA, 33 bp, Homo sapien
gggagcagtgtttgcaccctcgttttagtttct

SEQ ID NO: 394497 - DNA, 33 bp, Homo sapien
gactaatgatattgagcaccttctcatgtgctt

SEQ ID NO: 394498 - DNA, 33 bp, Homo sapien
gactaatgatattgagtaccttctcatgtgctt

SEQ ID NO: 394499 - DNA, 33 bp, Homo sapien
ctgagtatatgagccactcctgagtcttgactt

SEQ ID NO: 394500 - DNA, 33 bp, Homo sapien
ctgagtatatgagccattcctgagtcttgactt

SEQ ID NO: 394501 - DNA, 33 bp, Homo sapien
atctcagggccaaaaaatccatctctcgaatgt

SEQ ID NO: 394502 - DNA, 33 bp, Homo sapien
atctcagggccaaaaagtccatctctcgaatgt

SEQ ID NO: 394503 - DNA, 33 bp, Homo sapien
cctgcattttcaaccagcctgtgctcctccttc

SEQ ID NO: 394504 - DNA, 33 bp, Homo sapien
cctgcattttcaaccatcctgtgctcctccttc

SEQ ID NO: 394505 - DNA, 33 bp, Homo sapien
ttgtgatctaggtctcaccctttttcctgttca

SEQ ID NO: 394506 - DNA, 33 bp, Homo sapien
ttgtgatctaggtctcgccctttttcctgttca

SEQ ID NO: 394507 - DNA, 33 bp, Homo sapien
aataggggtgcttaaacgcaaaccactctaata

SEQ ID NO: 394508 - DNA, 33 bp, Homo sapien
aataggggtgcttaaatgcaaaccactctaata

SEQ ID NO: 394509 - DNA, 33 bp, Homo sapien
gggtagaggctgttcaagtaccaaaaccccacc

SEQ ID NO: 394510 - DNA, 33 bp, Homo sapien
gggtagaggctgttcaggtaccaaaaccccacc

SEQ ID NO: 394511 - DNA, 33 bp, Homo sapien
caacaaaacaatgaaacacatatcaaaagggac

SEQ ID NO: 394512 - DNA, 33 bp, Homo sapien
caacaaaacaatgaaatacatatcaaaagggac

SEQ ID NO: 394513 - DNA, 33 bp, Homo sapien
aagcccttcgtgcctacgatctatccacacagt

SEQ ID NO: 394514 - DNA, 33 bp, Homo sapien
aagcccttcgtgcctatgatctatccacacagt

SEQ ID NO: 394515 - DNA, 33 bp, Homo sapien
caggctcctggatctcagaactagaaccacgcc

SEQ ID NO: 394516 - DNA, 33 bp, Homo sapien
caggctcctggatctcggaactagaaccacgcc

SEQ ID NO: 394517 - DNA, 33 bp, Homo sapien
tttcttttgtaaatagaacagacaatacccgtc

SEQ ID NO: 394518 - DNA, 33 bp, Homo sapien
tttcttttgtaaataggacagacaatacccgtc

SEQ ID NO: 394519 - DNA, 33 bp, Homo sapien
tctgctgtgttactgaagaacacctaacagtta

SEQ ID NO: 394520 - DNA, 33 bp, Homo sapien
tctgctgtgttactgatgaacacctaacagtta

SEQ ID NO: 394521 - DNA, 33 bp, Homo sapien
agtaaaacacacccacagtatcaaacccgggtg

SEQ ID NO: 394522 - DNA, 33 bp, Homo sapien
agtaaaacacacccacggtatcaaacccgggtg

SEQ ID NO: 394523 - DNA, 33 bp, Homo sapien
tcaatggaaaattttcaagtgtggtggtacgcg

SEQ ID NO: 394524 - DNA, 33 bp, Homo sapien
tcaatggaaaattttcgagtgtggtggtacgcg

SEQ ID NO: 394525 - DNA, 33 bp, Homo sapien
aagcgaagttgaaacacgaagacgatagttaac

SEQ ID NO: 394526 - DNA, 33 bp, Homo sapien
aagcgaagttgaaacatgaagacgatagttaac

SEQ ID NO: 394527 - DNA, 33 bp, Homo sapien
acaatagacacttgaacctctgcagatctcgaa

SEQ ID NO: 394528 - DNA, 33 bp, Homo sapien
acaatagacacttgaagctctgcagatctcgaa

SEQ ID NO: 394529 - DNA, 33 bp, Homo sapien
ccagcgtcactgaaacaaagccagcatgggctg

SEQ ID NO: 394530 - DNA, 33 bp, Homo sapien
ccagcgtcactgaaacgaagccagcatgggctg

SEQ ID NO: 394531 - DNA, 33 bp, Homo sapien
cgggccttgctgcggaaagcgggacctgcgggc

SEQ ID NO: 394532 - DNA, 33 bp, Homo sapien
cgggccttgctgcggagagcgggacctgcgggc

SEQ ID NO: 394533 - DNA, 33 bp, Homo sapien
ttggaggcaaagcggacgtttgatttgtagctt

SEQ ID NO: 394534 - DNA, 33 bp, Homo sapien
ttggaggcaaagcggatgtttgatttgtagctt

SEQ ID NO: 394535 - DNA, 33 bp, Homo sapien
cctgggctagggcatacggatggcgaatgaacc

SEQ ID NO: 394536 - DNA, 33 bp, Homo sapien
cctgggctagggcatatggatggcgaatgaacc

SEQ ID NO: 394537 - DNA, 33 bp, Homo sapien
tgtttgcattttaaaactgaatgaggcttggtg

SEQ ID NO: 394538 - DNA, 33 bp, Homo sapien
tgtttgcattttaaaattgaatgaggcttggtg

SEQ ID NO: 394539 - DNA, 33 bp, Homo sapien
tcagatgggaaggaaaagtaactatttgctttg

SEQ ID NO: 394540 - DNA, 33 bp, Homo sapien
tcagatgggaaggaaacgtaactatttgctttg

SEQ ID NO: 394541 - DNA, 33 bp, Homo sapien
ggaaacgagcttgaacaggcaatagcctcggag

SEQ ID NO: 394542 - DNA, 33 bp, Homo sapien
ggaaacgagcttgaaccggcaatagcctcggag

SEQ ID NO: 394543 - DNA, 33 bp, Homo sapien
aaaaaataccagctacgcagcctgtttattaag

SEQ ID NO: 394544 - DNA, 33 bp, Homo sapien
aaaaaataccagctactcagcctgtttattaag

SEQ ID NO: 394545 - DNA, 33 bp, Homo sapien
cgagaaaggatccgaaagcttggttttattttt

SEQ ID NO: 394546 - DNA, 33 bp, Homo sapien
cgagaaaggatccgaaggcttggttttattttt

SEQ ID NO: 394547 - DNA, 33 bp, Homo sapien
gaatatagagctgtagacctatacttcacatac

SEQ ID NO: 394548 - DNA, 33 bp, Homo sapien
gaatatagagctgtagtcctatacttcacatac

SEQ ID NO: 394549 - DNA, 33 bp, Homo sapien
gcagaaggacaaaagaatctatatttttagcca

SEQ ID NO: 394550 - DNA, 33 bp, Homo sapien
gcagaaggacaaaagactctatatttttagcca

SEQ ID NO: 394551 - DNA, 33 bp, Homo sapien
caaaaagtattctgcgaccctagcctggacctg

SEQ ID NO: 394552 - DNA, 33 bp, Homo sapien
caaaaagtattctgcggccctagcctggacctg

SEQ ID NO: 394553 - DNA, 33 bp, Homo sapien
tgttttttggcaaatcactttctgaacattatt

SEQ ID NO: 394554 - DNA, 33 bp, Homo sapien
tgttttttggcaaatccctttctgaacattatt

SEQ ID NO: 394555 - DNA, 33 bp, Homo sapien
cagtttgtaaatttcacattgggaaaacatagg

SEQ ID NO: 394556 - DNA, 33 bp, Homo sapien
cagtttgtaaatttcatattgggaaaacatagg

SEQ ID NO: 394557 - DNA, 33 bp, Homo sapien
aagaaatcttagagacagagaagatgatgtcag

SEQ ID NO: 394558 - DNA, 33 bp, Homo sapien
aagaaatcttagagacggagaagatgatgtcag

SEQ ID NO: 394559 - DNA, 33 bp, Homo sapien
acatggcctggaggcccgagtgtttgtacatga

SEQ ID NO: 394560 - DNA, 33 bp, Homo sapien
acatggcctggaggcctgagtgtttgtacatga

SEQ ID NO: 394561 - DNA, 33 bp, Homo sapien
tcaaaaagggcctctcaccgcgcacgcgctgca

SEQ ID NO: 394562 - DNA, 33 bp, Homo sapien
tcaaaaagggcctctctccgcgcacgcgctgca

SEQ ID NO: 394563 - DNA, 33 bp, Homo sapien
ccagggagcagggacccgacttgcagacgcatt

SEQ ID NO: 394564 - DNA, 33 bp, Homo sapien
ccagggagcagggacctgacttgcagacgcatt

SEQ ID NO: 394565 - DNA, 33 bp, Homo sapien
tgaaaagcagtagaagaaacagtcagagatgcc

SEQ ID NO: 394566 - DNA, 33 bp, Homo sapien
tgaaaagcagtagaaggaacagtcagagatgcc

SEQ ID NO: 394567 - DNA, 33 bp, Homo sapien
aaggcgatggagcgaaaaccaagggtgcacatg

SEQ ID NO: 394568 - DNA, 33 bp, Homo sapien
aaggcgatggagcgaagaccaagggtgcacatg

SEQ ID NO: 394569 - DNA, 33 bp, Homo sapien
cagggacagtgaagaccgaggcccggttctagc

SEQ ID NO: 394570 - DNA, 33 bp, Homo sapien
cagggacagtgaagactgaggcccggttctagc

SEQ ID NO: 394571 - DNA, 33 bp, Homo sapien
gagccagagtcccctgcaggcctttgaagtccc

SEQ ID NO: 394572 - DNA, 33 bp, Homo sapien
gagccagagtcccctggaggcctttgaagtccc

SEQ ID NO: 394573 - DNA, 33 bp, Homo sapien
gttatgtttggcaaagcagaaggcagagtctgg

SEQ ID NO: 394574 - DNA, 33 bp, Homo sapien
gttatgtttggcaaaggagaaggcagagtctgg

SEQ ID NO: 394575 - DNA, 33 bp, Homo sapien
ctgaggcagagatggcaataataagcacacatg

SEQ ID NO: 394576 - DNA, 33 bp, Homo sapien
ctgaggcagagatggcgataataagcacacatg

SEQ ID NO: 394577 - DNA, 33 bp, Homo sapien
taattccaggatgtgaaggaagtatgagacatt

SEQ ID NO: 394578 - DNA, 33 bp, Homo sapien
taattccaggatgtgacggaagtatgagacatt

SEQ ID NO: 394579 - DNA, 33 bp, Homo sapien
ctgccaggttttgagactccggtgaattgaacc

SEQ ID NO: 394580 - DNA, 33 bp, Homo sapien
ctgccaggttttgagagtccggtgaattgaacc

SEQ ID NO: 394581 - DNA, 33 bp, Homo sapien
ccacaagacttttctcaccaggtttagagggct

SEQ ID NO: 394582 - DNA, 33 bp, Homo sapien
ccacaagacttttctcgccaggtttagagggct

SEQ ID NO: 394583 - DNA, 33 bp, Homo sapien
gtgaggaggtcacgtacgcaacttgctgtcatc

SEQ ID NO: 394584 - DNA, 33 bp, Homo sapien
gtgaggaggtcacgtatgcaacttgctgtcatc

SEQ ID NO: 394585 - DNA, 33 bp, Homo sapien
atgtaatcctcttaacaattacttggtgaatag

SEQ ID NO: 394586 - DNA, 33 bp, Homo sapien
atgtaatcctcttaaccattacttggtgaatag

SEQ ID NO: 394587 - DNA, 33 bp, Homo sapien
agaaagtgctaagcgacgtgagccggagcaatc

SEQ ID NO: 394588 - DNA, 33 bp, Homo sapien
agaaagtgctaagcgatgtgagccggagcaatc

SEQ ID NO: 394589 - DNA, 33 bp, Homo sapien
gcaggcactgggataggcactttctctttcttt

SEQ ID NO: 394590 - DNA, 33 bp, Homo sapien
gcaggcactgggatagtcactttctctttcttt

SEQ ID NO: 394591 - DNA, 33 bp, Homo sapien
ctggtgtcgcactgtacagcgccctcgggccgg

SEQ ID NO: 394592 - DNA, 33 bp, Homo sapien
ctggtgtcgcactgtatagcgccctcgggccgg

SEQ ID NO: 394593 - DNA, 33 bp, Homo sapien
tgtcaccgtgccacacaaccgctccaggagcca

SEQ ID NO: 394594 - DNA, 33 bp, Homo sapien
tgtcaccgtgccacacgaccgctccaggagcca

SEQ ID NO: 394595 - DNA, 33 bp, Homo sapien
agggctacagcttagacactgggagaaagcctt

SEQ ID NO: 394596 - DNA, 33 bp, Homo sapien
agggctacagcttagagactgggagaaagcctt

SEQ ID NO: 394597 - DNA, 33 bp, Homo sapien
caggttttacctagcaatctggatttctggatt

SEQ ID NO: 394598 - DNA, 33 bp, Homo sapien
caggttttacctagcagtctggatttctggatt

SEQ ID NO: 394599 - DNA, 33 bp, Homo sapien
gcccctaactcttttagaacaacgtgctattta

SEQ ID NO: 394600 - DNA, 33 bp, Homo sapien
gcccctaactcttttataacaacgtgctattta

SEQ ID NO: 394601 - DNA, 33 bp, Homo sapien
cctttgttctctcttaagttttctccctctgtc

SEQ ID NO: 394602 - DNA, 33 bp, Homo sapien
cctttgttctctcttaggttttctccctctgtc

SEQ ID NO: 394603 - DNA, 33 bp, Homo sapien
agggagaggacagaaacgaaccgatggttgagg

SEQ ID NO: 394604 - DNA, 33 bp, Homo sapien
agggagaggacagaaatgaaccgatggttgagg

SEQ ID NO: 394605 - DNA, 33 bp, Homo sapien
agtataactatagtagacgtccgagggcccctt

SEQ ID NO: 394606 - DNA, 33 bp, Homo sapien
agtataactatagtagccgtccgagggcccctt

SEQ ID NO: 394607 - DNA, 33 bp, Homo sapien
tgcgaacttgtagagacaacatcaaataaagga

SEQ ID NO: 394608 - DNA, 33 bp, Homo sapien
tgcgaacttgtagagataacatcaaataaagga

SEQ ID NO: 394609 - DNA, 33 bp, Homo sapien
acaatgggctgtagcaactttgcgaacttgtag

SEQ ID NO: 394610 - DNA, 33 bp, Homo sapien
acaatgggctgtagcagctttgcgaacttgtag

SEQ ID NO: 394611 - DNA, 33 bp, Homo sapien
tactaaaaatataaaaatgagcctggtgtggtg

SEQ ID NO: 394612 - DNA, 33 bp, Homo sapien
tactaaaaatataaaagtgagcctggtgtggtg

SEQ ID NO: 394613 - DNA, 33 bp, Homo sapien
cctcagtaagtgaacacaattgtattggggtgt

SEQ ID NO: 394614 - DNA, 33 bp, Homo sapien
cctcagtaagtgaacagaattgtattggggtgt

SEQ ID NO: 394615 - DNA, 33 bp, Homo sapien
ggaacacgcccttgcgacctctctgtttcctgt

SEQ ID NO: 394616 - DNA, 33 bp, Homo sapien
ggaacacgcccttgcgtcctctctgtttcctgt

SEQ ID NO: 394617 - DNA, 33 bp, Homo sapien
acacaaacaggcaacaaatatgaaaaaaatgct

SEQ ID NO: 394618 - DNA, 33 bp, Homo sapien
acacaaacaggcaacacatatgaaaaaaatgct

SEQ ID NO: 394619 - DNA, 33 bp, Homo sapien
ctgattcttaaatgtacgcggaaatgcaaaaac

SEQ ID NO: 394620 - DNA, 33 bp, Homo sapien
ctgattcttaaatgtatgcggaaatgcaaaaac

SEQ ID NO: 394621 - DNA, 33 bp, Homo sapien
taattaggatggacaaataacaccaaactagct

SEQ ID NO: 394622 - DNA, 33 bp, Homo sapien
taattaggatggacaagtaacaccaaactagct

SEQ ID NO: 394623 - DNA, 33 bp, Homo sapien
attaatgttcctcttaccaaagcacacagggtc

SEQ ID NO: 394624 - DNA, 33 bp, Homo sapien
attaatgttcctcttatcaaagcacacagggtc

SEQ ID NO: 394625 - DNA, 33 bp, Homo sapien
gagaagcagtcttcaactggatacttctgaccc

SEQ ID NO: 394626 - DNA, 33 bp, Homo sapien
gagaagcagtcttcaattggatacttctgaccc

SEQ ID NO: 394627 - DNA, 33 bp, Homo sapien
tagttctactcaattaagatgagcaaaaggctg

SEQ ID NO: 394628 - DNA, 33 bp, Homo sapien
tagttctactcaattaggatgagcaaaaggctg

SEQ ID NO: 394629 - DNA, 33 bp, Homo sapien
agatagcttagatctacgtctctaggaggttga

SEQ ID NO: 394630 - DNA, 33 bp, Homo sapien
agatagcttagatctatgtctctaggaggttga

SEQ ID NO: 394631 - DNA, 33 bp, Homo sapien
tagccacatgatcataaaaaaatctctctctca

SEQ ID NO: 394632 - DNA, 33 bp, Homo sapien
tagccacatgatcatagaaaaatctctctctca

SEQ ID NO: 394633 - DNA, 33 bp, Homo sapien
ccagcccactcgcacaagacctggcctgttact

SEQ ID NO: 394634 - DNA, 33 bp, Homo sapien
ccagcccactcgcacacgacctggcctgttact

SEQ ID NO: 394635 - DNA, 33 bp, Homo sapien
aaaaaaagatctgatacggtccaaaggtctaat

SEQ ID NO: 394636 - DNA, 33 bp, Homo sapien
aaaaaaagatctgatatggtccaaaggtctaat

SEQ ID NO: 394637 - DNA, 33 bp, Homo sapien
gttttcaaggctaatccatcctggtgcaatcag

SEQ ID NO: 394638 - DNA, 33 bp, Homo sapien
gttttcaaggctaatcgatcctggtgcaatcag

SEQ ID NO: 394639 - DNA, 33 bp, Homo sapien
gcaatcagatctagaactggtacaggaacaaaa

SEQ ID NO: 394640 - DNA, 33 bp, Homo sapien
gcaatcagatctagaattggtacaggaacaaaa

SEQ ID NO: 394641 - DNA, 33 bp, Homo sapien
cagatggtcatctctgaatcaatgttagcggtc

SEQ ID NO: 394642 - DNA, 33 bp, Homo sapien
cagatggtcatctctgcatcaatgttagcggtc

SEQ ID NO: 394643 - DNA, 33 bp, Homo sapien
ggattaaatgagatgacccatacaaaggcagtc

SEQ ID NO: 394644 - DNA, 33 bp, Homo sapien
ggattaaatgagatgatccatacaaaggcagtc

SEQ ID NO: 394645 - DNA, 33 bp, Homo sapien
cttccctaaaagattgcagcgatgagaggagtt

SEQ ID NO: 394646 - DNA, 33 bp, Homo sapien
cttccctaaaagattggagcgatgagaggagtt

SEQ ID NO: 394647 - DNA, 33 bp, Homo sapien
ataagtgctaggaaaagaagcaaagcagacaag

SEQ ID NO: 394648 - DNA, 33 bp, Homo sapien
ataagtgctaggaaaataagcaaagcagacaag

SEQ ID NO: 394649 - DNA, 33 bp, Homo sapien
tatcagcttcttggagccatcgttactgctgat

SEQ ID NO: 394650 - DNA, 33 bp, Homo sapien
tatcagcttcttggaggcatcgttactgctgat

SEQ ID NO: 394651 - DNA, 33 bp, Homo sapien
cacaagttctcgactacgaaaaaaaatgcatag

SEQ ID NO: 394652 - DNA, 33 bp, Homo sapien
cacaagttctcgactatgaaaaaaaatgcatag

SEQ ID NO: 394653 - DNA, 33 bp, Homo sapien
ttactggtattaaggacgcctgccccagcctgt

SEQ ID NO: 394654 - DNA, 33 bp, Homo sapien
ttactggtattaaggatgcctgccccagcctgt

SEQ ID NO: 394655 - DNA, 33 bp, Homo sapien
tacctgtattgtaaaacaacatcaaagggctag

SEQ ID NO: 394656 - DNA, 33 bp, Homo sapien
tacctgtattgtaaaagaacatcaaagggctag

SEQ ID NO: 394657 - DNA, 33 bp, Homo sapien
atgggagtgtgtttcaatcctcaggtgtgcagg

SEQ ID NO: 394658 - DNA, 33 bp, Homo sapien
atgggagtgtgtttcattcctcaggtgtgcagg

SEQ ID NO: 394659 - DNA, 33 bp, Homo sapien
ccatctcagacaaacaaacaatccagctgggtt

SEQ ID NO: 394660 - DNA, 33 bp, Homo sapien
ccatctcagacaaacagacaatccagctgggtt

SEQ ID NO: 394661 - DNA, 33 bp, Homo sapien
ccagagtggctaaatgcatggattctgaagtca

SEQ ID NO: 394662 - DNA, 33 bp, Homo sapien
ccagagtggctaaatgtatggattctgaagtca

SEQ ID NO: 394663 - DNA, 33 bp, Homo sapien
tgctgaccttttcatgcaaacttgggtgatcaa

SEQ ID NO: 394664 - DNA, 33 bp, Homo sapien
tgctgaccttttcatgtaaacttgggtgatcaa

SEQ ID NO: 394665 - DNA, 33 bp, Homo sapien
cagacacacacggcaaacctccccctcaggcac

SEQ ID NO: 394666 - DNA, 33 bp, Homo sapien
cagacacacacggcaaccctccccctcaggcac

SEQ ID NO: 394667 - DNA, 33 bp, Homo sapien
cattaacagtgagtacagattttttaaagctct

SEQ ID NO: 394668 - DNA, 33 bp, Homo sapien
cattaacagtgagtacggattttttaaagctct

SEQ ID NO: 394669 - DNA, 33 bp, Homo sapien
ggtagaaagtggagaaacaaacactggaagcta

SEQ ID NO: 394670 - DNA, 33 bp, Homo sapien
ggtagaaagtggagaatcaaacactggaagcta

SEQ ID NO: 394671 - DNA, 33 bp, Homo sapien
atttttcttgcattccaaccttcatatctctaa

SEQ ID NO: 394672 - DNA, 33 bp, Homo sapien
atttttcttgcattccgaccttcatatctctaa

SEQ ID NO: 394673 - DNA, 33 bp, Homo sapien
ccttcaccaaggtacaaggccgtcatgcccagc

SEQ ID NO: 394674 - DNA, 33 bp, Homo sapien
ccttcaccaaggtacagggccgtcatgcccagc

SEQ ID NO: 394675 - DNA, 33 bp, Homo sapien
atgacttgatgaaaaactaactggaaataacaa

SEQ ID NO: 394676 - DNA, 33 bp, Homo sapien
atgacttgatgaaaaattaactggaaataacaa

SEQ ID NO: 394677 - DNA, 33 bp, Homo sapien
cctcattttgcaaaaaactatgtaagggaagtt

SEQ ID NO: 394678 - DNA, 33 bp, Homo sapien
cctcattttgcaaaaagctatgtaagggaagtt

SEQ ID NO: 394679 - DNA, 33 bp, Homo sapien
gctatgtcttgagaagcaacgtctgtaacagct

SEQ ID NO: 394680 - DNA, 33 bp, Homo sapien
gctatgtcttgagaagtaacgtctgtaacagct

SEQ ID NO: 394681 - DNA, 33 bp, Homo sapien
tgtgtgttatcttctaagccagtttttctgatt

SEQ ID NO: 394682 - DNA, 33 bp, Homo sapien
tgtgtgttatcttctacgccagtttttctgatt

SEQ ID NO: 394683 - DNA, 33 bp, Homo sapien
tacgggaaagagacctcagatcaattggatgcc

SEQ ID NO: 394684 - DNA, 33 bp, Homo sapien
tacgggaaagagaccttagatcaattggatgcc

SEQ ID NO: 394685 - DNA, 33 bp, Homo sapien
caggcactgtaccaggcaccgggagcccaccat

SEQ ID NO: 394686 - DNA, 33 bp, Homo sapien
caggcactgtaccaggtaccgggagcccaccat

SEQ ID NO: 394687 - DNA, 33 bp, Homo sapien
gcccagccttgactcacgtagccaaagagagtg

SEQ ID NO: 394688 - DNA, 33 bp, Homo sapien
gcccagccttgactcatgtagccaaagagagtg

SEQ ID NO: 394689 - DNA, 33 bp, Homo sapien
cgggtgcgatccagcacgagccccacgaccaac

SEQ ID NO: 394690 - DNA, 33 bp, Homo sapien
cgggtgcgatccagcatgagccccacgaccaac

SEQ ID NO: 394691 - DNA, 33 bp, Homo sapien
agctgaagctgagttacgaaggcgaagtcacca

SEQ ID NO: 394692 - DNA, 33 bp, Homo sapien
agctgaagctgagttatgaaggcgaagtcacca

SEQ ID NO: 394693 - DNA, 33 bp, Homo sapien
aggatcctgagaacacaaggcaaatctcaaagc

SEQ ID NO: 394694 - DNA, 33 bp, Homo sapien
aggatcctgagaacacgaggcaaatctcaaagc

SEQ ID NO: 394695 - DNA, 33 bp, Homo sapien
tgcctggttaccccccactctgtaaactgaggg

SEQ ID NO: 394696 - DNA, 33 bp, Homo sapien
tgcctggttaccccccgctctgtaaactgaggg

SEQ ID NO: 394697 - DNA, 33 bp, Homo sapien
atcttaagcagccttaccctggaatttttctca

SEQ ID NO: 394698 - DNA, 33 bp, Homo sapien
atcttaagcagccttatcctggaatttttctca

SEQ ID NO: 394699 - DNA, 33 bp, Homo sapien
tgggaatttatttgctcaagtcagtcattgaaa

SEQ ID NO: 394700 - DNA, 33 bp, Homo sapien
tgggaatttatttgctgaagtcagtcattgaaa

SEQ ID NO: 394701 - DNA, 33 bp, Homo sapien
tttcaatattggctgacggtgatctccctccag

SEQ ID NO: 394702 - DNA, 33 bp, Homo sapien
tttcaatattggctgatggtgatctccctccag

SEQ ID NO: 394703 - DNA, 33 bp, Homo sapien
gaagtttatagtgattaaacagcgagacatagt

SEQ ID NO: 394704 - DNA, 33 bp, Homo sapien
gaagtttatagtgatttaacagcgagacatagt

SEQ ID NO: 394705 - DNA, 33 bp, Homo sapien
cctctggctaagtgaaatgttacaggtggactt

SEQ ID NO: 394706 - DNA, 33 bp, Homo sapien
cctctggctaagtgaagtgttacaggtggactt

SEQ ID NO: 394707 - DNA, 33 bp, Homo sapien
gttggtaactttctgccatttaattgggaagcc

SEQ ID NO: 394708 - DNA, 33 bp, Homo sapien
gttggtaactttctgctatttaattgggaagcc

SEQ ID NO: 394709 - DNA, 33 bp, Homo sapien
ctgattgttgctttcacgtaaacagatgtcctt

SEQ ID NO: 394710 - DNA, 33 bp, Homo sapien
ctgattgttgctttcaggtaaacagatgtcctt

SEQ ID NO: 394711 - DNA, 33 bp, Homo sapien
cttaaagacattaacagagcacagacacatggg

SEQ ID NO: 394712 - DNA, 33 bp, Homo sapien
cttaaagacattaacatagcacagacacatggg

SEQ ID NO: 394713 - DNA, 33 bp, Homo sapien
ctacctaaagtcggaccgggcgctcattgcctg

SEQ ID NO: 394714 - DNA, 33 bp, Homo sapien
ctacctaaagtcggactgggcgctcattgcctg

SEQ ID NO: 394715 - DNA, 33 bp, Homo sapien
cctccggatcctgtccactcataccaggtatcc

SEQ ID NO: 394716 - DNA, 33 bp, Homo sapien
cctccggatcctgtcctctcataccaggtatcc

SEQ ID NO: 394717 - DNA, 33 bp, Homo sapien
taagcgattatgtccaatctcagtaatctgcac

SEQ ID NO: 394718 - DNA, 33 bp, Homo sapien
taagcgattatgtccattctcagtaatctgcac

SEQ ID NO: 394719 - DNA, 33 bp, Homo sapien
tggtgaggacttaatcagaacgctgaactatgt

SEQ ID NO: 394720 - DNA, 33 bp, Homo sapien
tggtgaggacttaatcggaacgctgaactatgt

SEQ ID NO: 394721 - DNA, 33 bp, Homo sapien
ctgtacatttaaaatacgtgcaatttggccggg

SEQ ID NO: 394722 - DNA, 33 bp, Homo sapien
ctgtacatttaaaataggtgcaatttggccggg

SEQ ID NO: 394723 - DNA, 33 bp, Homo sapien
aaacaacaaagggcaagggggaaagtcctgaga

SEQ ID NO: 394724 - DNA, 33 bp, Homo sapien
aaacaacaaagggcaatggggaaagtcctgaga

SEQ ID NO: 394725 - DNA, 33 bp, Homo sapien
ttaatctaccttgcacgatccgtctacctctct

SEQ ID NO: 394726 - DNA, 33 bp, Homo sapien
ttaatctaccttgcactatccgtctacctctct

SEQ ID NO: 394727 - DNA, 33 bp, Homo sapien
ttaggcttatatacaaatagtacgttattcctc

SEQ ID NO: 394728 - DNA, 33 bp, Homo sapien
ttaggcttatatacaagtagtacgttattcctc

SEQ ID NO: 394729 - DNA, 33 bp, Homo sapien
caaggatagcttcagcagactcctggaaacaag

SEQ ID NO: 394730 - DNA, 33 bp, Homo sapien
caaggatagcttcagcggactcctggaaacaag

SEQ ID NO: 394731 - DNA, 33 bp, Homo sapien
tctctttctacatcaactctttggtgggatctc

SEQ ID NO: 394732 - DNA, 33 bp, Homo sapien
tctctttctacatcaagtctttggtgggatctc

SEQ ID NO: 394733 - DNA, 33 bp, Homo sapien
cccccctcctcttggcaatcaggatccaaattt

SEQ ID NO: 394734 - DNA, 33 bp, Homo sapien
cccccctcctcttggctatcaggatccaaattt

SEQ ID NO: 394735 - DNA, 33 bp, Homo sapien
tcacctgggcctctaggatcagagcggattttg

SEQ ID NO: 394736 - DNA, 33 bp, Homo sapien
tcacctgggcctctagtatcagagcggattttg

SEQ ID NO: 394737 - DNA, 33 bp, Homo sapien
ccaaccaattgcatgcaaaaatcctgattccca

SEQ ID NO: 394738 - DNA, 33 bp, Homo sapien
ccaaccaattgcatgcgaaaatcctgattccca

SEQ ID NO: 394739 - DNA, 33 bp, Homo sapien
ccaaccaaatgagaaccggtaaaggctacttat

SEQ ID NO: 394740 - DNA, 33 bp, Homo sapien
ccaaccaaatgagaactggtaaaggctacttat

SEQ ID NO: 394741 - DNA, 33 bp, Homo sapien
gtccctgattcaaaaaatgttaagcaccactca

SEQ ID NO: 394742 - DNA, 33 bp, Homo sapien
gtccctgattcaaaaactgttaagcaccactca

SEQ ID NO: 394743 - DNA, 33 bp, Homo sapien
acaaagtatatttgcccgaaagggtcattgaga

SEQ ID NO: 394744 - DNA, 33 bp, Homo sapien
acaaagtatatttgcctgaaagggtcattgaga

SEQ ID NO: 394745 - DNA, 33 bp, Homo sapien
aggtgagaataaggagactccaagtgtggacaa

SEQ ID NO: 394746 - DNA, 33 bp, Homo sapien
aggtgagaataaggagtctccaagtgtggacaa

SEQ ID NO: 394747 - DNA, 33 bp, Homo sapien
gtcctccttgttaacaggcaacgctcagcacac

SEQ ID NO: 394748 - DNA, 33 bp, Homo sapien
gtcctccttgttaacatgcaacgctcagcacac

SEQ ID NO: 394749 - DNA, 33 bp, Homo sapien
tgacaactacgtgagcaagggtctttcccaaat

SEQ ID NO: 394750 - DNA, 33 bp, Homo sapien
tgacaactacgtgagctagggtctttcccaaat

SEQ ID NO: 394751 - DNA, 33 bp, Homo sapien
tcatttctggcttctcacagagcttgctggtgg

SEQ ID NO: 394752 - DNA, 33 bp, Homo sapien
tcatttctggcttctcgcagagcttgctggtgg

SEQ ID NO: 394753 - DNA, 33 bp, Homo sapien
gcctgctgggaggagacatggatgctagctgga

SEQ ID NO: 394754 - DNA, 33 bp, Homo sapien
gcctgctgggaggagatatggatgctagctgga

SEQ ID NO: 394755 - DNA, 33 bp, Homo sapien
ctgggtagaccgtcagacctggaagaccattgt

SEQ ID NO: 394756 - DNA, 33 bp, Homo sapien
ctgggtagaccgtcagccctggaagaccattgt

SEQ ID NO: 394757 - DNA, 33 bp, Homo sapien
tcccagcccatgaagactacagagcgtggaaga

SEQ ID NO: 394758 - DNA, 33 bp, Homo sapien
tcccagcccatgaagattacagagcgtggaaga

SEQ ID NO: 394759 - DNA, 33 bp, Homo sapien
agcttagcctacttcccgaggtggatgtgtgag

SEQ ID NO: 394760 - DNA, 33 bp, Homo sapien
agcttagcctacttcctgaggtggatgtgtgag

SEQ ID NO: 394761 - DNA, 33 bp, Homo sapien
ctgtgagtgcgcctcaccagaaccagttaagag

SEQ ID NO: 394762 - DNA, 33 bp, Homo sapien
ctgtgagtgcgcctcagcagaaccagttaagag

SEQ ID NO: 394763 - DNA, 33 bp, Homo sapien
aatcagaggtggaaaacagaaatggttgggata

SEQ ID NO: 394764 - DNA, 33 bp, Homo sapien
aatcagaggtggaaaagagaaatggttgggata

SEQ ID NO: 394765 - DNA, 33 bp, Homo sapien
gagctttctgtaaaacaggataataatctcttc

SEQ ID NO: 394766 - DNA, 33 bp, Homo sapien
gagctttctgtaaaacgggataataatctcttc

SEQ ID NO: 394767 - DNA, 33 bp, Homo sapien
atccatgtatacaggcaaaagtctctaagagga

SEQ ID NO: 394768 - DNA, 33 bp, Homo sapien
atccatgtatacaggcgaaagtctctaagagga

SEQ ID NO: 394769 - DNA, 33 bp, Homo sapien
tataggtagacagaaacgaaacggtgagaactg

SEQ ID NO: 394770 - DNA, 33 bp, Homo sapien
tataggtagacagaaatgaaacggtgagaactg

SEQ ID NO: 394771 - DNA, 33 bp, Homo sapien
ctcaccccacaggtcaatgacactagggttttc

SEQ ID NO: 394772 - DNA, 33 bp, Homo sapien
ctcaccccacaggtcagtgacactagggttttc

SEQ ID NO: 394773 - DNA, 33 bp, Homo sapien
gattgttctctttaaccagaggagcagtagcaa

SEQ ID NO: 394774 - DNA, 33 bp, Homo sapien
gattgttctctttaacgagaggagcagtagcaa

SEQ ID NO: 394775 - DNA, 33 bp, Homo sapien
caaggatgcacagtcactctgaagacacaggca

SEQ ID NO: 394776 - DNA, 33 bp, Homo sapien
caaggatgcacagtcagtctgaagacacaggca

SEQ ID NO: 394777 - DNA, 33 bp, Homo sapien
gaagggacctcatggacaaggcaattgtgactg

SEQ ID NO: 394778 - DNA, 33 bp, Homo sapien
gaagggacctcatggagaaggcaattgtgactg

SEQ ID NO: 394779 - DNA, 33 bp, Homo sapien
ggagaagtaaatgacaagatgaaatcagaaaag

SEQ ID NO: 394780 - DNA, 33 bp, Homo sapien
ggagaagtaaatgacaggatgaaatcagaaaag

SEQ ID NO: 394781 - DNA, 33 bp, Homo sapien
agtagtagtgtttgcacctttgaaaaatagagt

SEQ ID NO: 394782 - DNA, 33 bp, Homo sapien
agtagtagtgtttgcatctttgaaaaatagagt

SEQ ID NO: 394783 - DNA, 33 bp, Homo sapien
tgaggtcaccgaggaagggtagtatgtgccttt

SEQ ID NO: 394784 - DNA, 33 bp, Homo sapien
tgaggtcaccgaggaatggtagtatgtgccttt

SEQ ID NO: 394785 - DNA, 33 bp, Homo sapien
ctaaggactgaaaccacgatcccaaacacaaat

SEQ ID NO: 394786 - DNA, 33 bp, Homo sapien
ctaaggactgaaaccatgatcccaaacacaaat

SEQ ID NO: 394787 - DNA, 33 bp, Homo sapien
cgtatcagttttgagaaaattgacatcttaaca

SEQ ID NO: 394788 - DNA, 33 bp, Homo sapien
cgtatcagttttgagagaattgacatcttaaca

SEQ ID NO: 394789 - DNA, 33 bp, Homo sapien
ttacgcgtggcccaagacatttcttccatcgtg

SEQ ID NO: 394790 - DNA, 33 bp, Homo sapien
ttacgcgtggcccaaggcatttcttccatcgtg

SEQ ID NO: 394791 - DNA, 33 bp, Homo sapien
tctccccatgttgtcaaagcttctcttgaactc

SEQ ID NO: 394792 - DNA, 33 bp, Homo sapien
tctccccatgttgtcagagcttctcttgaactc

SEQ ID NO: 394793 - DNA, 33 bp, Homo sapien
ttacaatagggaaatgcatagagctagaaagta

SEQ ID NO: 394794 - DNA, 33 bp, Homo sapien
ttacaatagggaaatggatagagctagaaagta

SEQ ID NO: 394795 - DNA, 33 bp, Homo sapien
actgcataaggaaagaaggtaacaaattaaaga

SEQ ID NO: 394796 - DNA, 33 bp, Homo sapien
actgcataaggaaagagggtaacaaattaaaga

SEQ ID NO: 394797 - DNA, 33 bp, Homo sapien
gttatctctggaatgcaagtttaagcatgaaag

SEQ ID NO: 394798 - DNA, 33 bp, Homo sapien
gttatctctggaatgcgagtttaagcatgaaag

SEQ ID NO: 394799 - DNA, 33 bp, Homo sapien
gtttgcagttttggaaagaaaatgccaagaaag

SEQ ID NO: 394800 - DNA, 33 bp, Homo sapien
gtttgcagttttggaacgaaaatgccaagaaag

SEQ ID NO: 394801 - DNA, 33 bp, Homo sapien
cacacaaaggaactgacggatctgctggccagg

SEQ ID NO: 394802 - DNA, 33 bp, Homo sapien
cacacaaaggaactgatggatctgctggccagg

SEQ ID NO: 394803 - DNA, 33 bp, Homo sapien
ggtgagttctgtaaccactgtggaccagccatc

SEQ ID NO: 394804 - DNA, 33 bp, Homo sapien
ggtgagttctgtaaccgctgtggaccagccatc

SEQ ID NO: 394805 - DNA, 33 bp, Homo sapien
taactgtgtgctccatcatacctagtacagagt

SEQ ID NO: 394806 - DNA, 33 bp, Homo sapien
taactgtgtgctccattatacctagtacagagt

SEQ ID NO: 394807 - DNA, 33 bp, Homo sapien
atatgtggtttacaaacagattttcctagccta

SEQ ID NO: 394808 - DNA, 33 bp, Homo sapien
atatgtggtttacaaatagattttcctagccta

SEQ ID NO: 394809 - DNA, 33 bp, Homo sapien
aggtaaacatttttaacaatagcaacatcatta

SEQ ID NO: 394810 - DNA, 33 bp, Homo sapien
aggtaaacatttttaataatagcaacatcatta

SEQ ID NO: 394811 - DNA, 33 bp, Homo sapien
cacagagatctgaaaacctgctggagctccaga

SEQ ID NO: 394812 - DNA, 33 bp, Homo sapien
cacagagatctgaaaatctgctggagctccaga

SEQ ID NO: 394813 - DNA, 33 bp, Homo sapien
ctgatgtaactgaatacggtgctacttcaggtt

SEQ ID NO: 394814 - DNA, 33 bp, Homo sapien
ctgatgtaactgaatagggtgctacttcaggtt

SEQ ID NO: 394815 - DNA, 33 bp, Homo sapien
attacaccctcaagaacgatggcctggaactca

SEQ ID NO: 394816 - DNA, 33 bp, Homo sapien
attacaccctcaagaatgatggcctggaactca

SEQ ID NO: 394817 - DNA, 33 bp, Homo sapien
attttgcaaggcacaaatacttacctataagac

SEQ ID NO: 394818 - DNA, 33 bp, Homo sapien
attttgcaaggcacaattacttacctataagac

SEQ ID NO: 394819 - DNA, 33 bp, Homo sapien
ctctgcatagggcccaaccgagaggagatcaag

SEQ ID NO: 394820 - DNA, 33 bp, Homo sapien
ctctgcatagggcccatccgagaggagatcaag

SEQ ID NO: 394821 - DNA, 33 bp, Homo sapien
aatgccacattatttaaccaactaaactttcca

SEQ ID NO: 394822 - DNA, 33 bp, Homo sapien
aatgccacattatttacccaactaaactttcca

SEQ ID NO: 394823 - DNA, 33 bp, Homo sapien
gcactcggcctaaagacattttacccaagcgtt

SEQ ID NO: 394824 - DNA, 33 bp, Homo sapien
gcactcggcctaaagatattttacccaagcgtt

SEQ ID NO: 394825 - DNA, 33 bp, Homo sapien
acttaggcaaagtaaactagatgcatcactggt

SEQ ID NO: 394826 - DNA, 33 bp, Homo sapien
acttaggcaaagtaaagtagatgcatcactggt

SEQ ID NO: 394827 - DNA, 33 bp, Homo sapien
actgctaattccacaaccctgagtgtatgtcta

SEQ ID NO: 394828 - DNA, 33 bp, Homo sapien
actgctaattccacaatcctgagtgtatgtcta

SEQ ID NO: 394829 - DNA, 33 bp, Homo sapien
tcaaaatctcaatagcaagaataaggttttagc

SEQ ID NO: 394830 - DNA, 33 bp, Homo sapien
tcaaaatctcaatagcgagaataaggttttagc

SEQ ID NO: 394831 - DNA, 33 bp, Homo sapien
gttccaactgagtgatcagacagcaccaatgtg

SEQ ID NO: 394832 - DNA, 33 bp, Homo sapien
gttccaactgagtgattagacagcaccaatgtg

SEQ ID NO: 394833 - DNA, 33 bp, Homo sapien
aagaaagaaaagaaaacgccacctacataacac

SEQ ID NO: 394834 - DNA, 33 bp, Homo sapien
aagaaagaaaagaaaatgccacctacataacac

SEQ ID NO: 394835 - DNA, 33 bp, Homo sapien
cacaattaaagttacaactgtaggcctttcctc

SEQ ID NO: 394836 - DNA, 33 bp, Homo sapien
cacaattaaagttacacctgtaggcctttcctc

SEQ ID NO: 394837 - DNA, 33 bp, Homo sapien
gactgaatcttttaccccacagtttgctgactt

SEQ ID NO: 394838 - DNA, 33 bp, Homo sapien
gactgaatcttttaccgcacagtttgctgactt

SEQ ID NO: 394839 - DNA, 33 bp, Homo sapien
aagttttagcaagtaaatgaattcacaatgcaa

SEQ ID NO: 394840 - DNA, 33 bp, Homo sapien
aagttttagcaagtaagtgaattcacaatgcaa

SEQ ID NO: 394841 - DNA, 33 bp, Homo sapien
catagtgaaaaagataagagcctgatttaaaac

SEQ ID NO: 394842 - DNA, 33 bp, Homo sapien
catagtgaaaaagataggagcctgatttaaaac

SEQ ID NO: 394843 - DNA, 33 bp, Homo sapien
ttgcattatagcaggaataatttatgttcaaat

SEQ ID NO: 394844 - DNA, 33 bp, Homo sapien
ttgcattatagcaggagtaatttatgttcaaat

SEQ ID NO: 394845 - DNA, 33 bp, Homo sapien
acctgagccctgaccaatggcggaaaggaaaga

SEQ ID NO: 394846 - DNA, 33 bp, Homo sapien
acctgagccctgaccagtggcggaaaggaaaga

SEQ ID NO: 394847 - DNA, 33 bp, Homo sapien
gctataatgaaatcacaaaattacaagccagac

SEQ ID NO: 394848 - DNA, 33 bp, Homo sapien
gctataatgaaatcacgaaattacaagccagac

SEQ ID NO: 394849 - DNA, 33 bp, Homo sapien
tttggagggtgaattacatttcattgtgtatat

SEQ ID NO: 394850 - DNA, 33 bp, Homo sapien
tttggagggtgaattatatttcattgtgtatat

SEQ ID NO: 394851 - DNA, 33 bp, Homo sapien
attgtagtgtaacgaacctccagaatgcttttc

SEQ ID NO: 394852 - DNA, 33 bp, Homo sapien
attgtagtgtaacgaatctccagaatgcttttc

SEQ ID NO: 394853 - DNA, 33 bp, Homo sapien
cagtatcttcttctcaatgaagctttgttcttt

SEQ ID NO: 394854 - DNA, 33 bp, Homo sapien
cagtatcttcttctcagtgaagctttgttcttt

SEQ ID NO: 394855 - DNA, 33 bp, Homo sapien
tcagcaaagttataatcactacatatcacatac

SEQ ID NO: 394856 - DNA, 33 bp, Homo sapien
tcagcaaagttataatgactacatatcacatac

SEQ ID NO: 394857 - DNA, 33 bp, Homo sapien
ttaccaacatgacaaaatggatgtagtatggag

SEQ ID NO: 394858 - DNA, 33 bp, Homo sapien
ttaccaacatgacaaagtggatgtagtatggag

SEQ ID NO: 394859 - DNA, 33 bp, Homo sapien
ggtgttgaggataaaagaatgatacagttcagt

SEQ ID NO: 394860 - DNA, 33 bp, Homo sapien
ggtgttgaggataaaataatgatacagttcagt

SEQ ID NO: 394861 - DNA, 33 bp, Homo sapien
gagggtgagcagaaaaacagtgctaaagaatat

SEQ ID NO: 394862 - DNA, 33 bp, Homo sapien
gagggtgagcagaaaaccagtgctaaagaatat

SEQ ID NO: 394863 - DNA, 33 bp, Homo sapien
gaggccacgactgaagaagcaagtgtctgtgtc

SEQ ID NO: 394864 - DNA, 33 bp, Homo sapien
gaggccacgactgaagcagcaagtgtctgtgtc

SEQ ID NO: 394865 - DNA, 33 bp, Homo sapien
taaaaattttatctgaaagactcaacatatttg

SEQ ID NO: 394866 - DNA, 33 bp, Homo sapien
taaaaattttatctgagagactcaacatatttg

SEQ ID NO: 394867 - DNA, 33 bp, Homo sapien
agatttcttgaaggaaagttctaaggtggtaaa

SEQ ID NO: 394868 - DNA, 33 bp, Homo sapien
agatttcttgaaggaaggttctaaggtggtaaa

SEQ ID NO: 394869 - DNA, 33 bp, Homo sapien
atccaataacttggcacgtgataagagctagga

SEQ ID NO: 394870 - DNA, 33 bp, Homo sapien
atccaataacttggcatgtgataagagctagga

SEQ ID NO: 394871 - DNA, 33 bp, Homo sapien
tctctgtattagggaccggactgcccagacggc

SEQ ID NO: 394872 - DNA, 33 bp, Homo sapien
tctctgtattagggactggactgcccagacggc

SEQ ID NO: 394873 - DNA, 33 bp, Homo sapien
tgtgtgtaggcaataaacatcagaagtaggatg

SEQ ID NO: 394874 - DNA, 33 bp, Homo sapien
tgtgtgtaggcaataagcatcagaagtaggatg

SEQ ID NO: 394875 - DNA, 33 bp, Homo sapien
gccacggttctgtggcaatctaatacgccagcg

SEQ ID NO: 394876 - DNA, 33 bp, Homo sapien
gccacggttctgtggccatctaatacgccagcg

SEQ ID NO: 394877 - DNA, 33 bp, Homo sapien
ctaaaaataatgcagcccagagagatgggtgat

SEQ ID NO: 394878 - DNA, 33 bp, Homo sapien
ctaaaaataatgcagctcagagagatgggtgat

SEQ ID NO: 394879 - DNA, 33 bp, Homo sapien
tgtgaatgaaagtgagaatggctgcatagtccg

SEQ ID NO: 394880 - DNA, 33 bp, Homo sapien
tgtgaatgaaagtgaggatggctgcatagtccg

SEQ ID NO: 394881 - DNA, 33 bp, Homo sapien
gtggaacagggactctaaacagtatacagacag

SEQ ID NO: 394882 - DNA, 33 bp, Homo sapien
gtggaacagggactctcaacagtatacagacag

SEQ ID NO: 394883 - DNA, 33 bp, Homo sapien
cctttccctgtcttcccgcttatctgctaagct

SEQ ID NO: 394884 - DNA, 33 bp, Homo sapien
cctttccctgtcttcctgcttatctgctaagct

SEQ ID NO: 394885 - DNA, 33 bp, Homo sapien
ttcactaactacttaactatctgcactactgcc

SEQ ID NO: 394886 - DNA, 33 bp, Homo sapien
ttcactaactacttaattatctgcactactgcc

SEQ ID NO: 394887 - DNA, 33 bp, Homo sapien
atctgatcctgtaccacaaacataaggggagac

SEQ ID NO: 394888 - DNA, 33 bp, Homo sapien
atctgatcctgtaccagaaacataaggggagac

SEQ ID NO: 394889 - DNA, 33 bp, Homo sapien
tacctcgagtgaatatcacatttgagtcatttg

SEQ ID NO: 394890 - DNA, 33 bp, Homo sapien
tacctcgagtgaatattacatttgagtcatttg

SEQ ID NO: 394891 - DNA, 33 bp, Homo sapien
cttgcatcaatcccacaaagggagctgtatggt

SEQ ID NO: 394892 - DNA, 33 bp, Homo sapien
cttgcatcaatcccacgaagggagctgtatggt

SEQ ID NO: 394893 - DNA, 33 bp, Homo sapien
aagtttatgcagagtacagataactgaaagaga

SEQ ID NO: 394894 - DNA, 33 bp, Homo sapien
aagtttatgcagagtatagataactgaaagaga

SEQ ID NO: 394895 - DNA, 33 bp, Homo sapien
gtgtcaacggaaactcccagatattgctggtgg

SEQ ID NO: 394896 - DNA, 33 bp, Homo sapien
gtgtcaacggaaactctcagatattgctggtgg

SEQ ID NO: 394897 - DNA, 33 bp, Homo sapien
atctaattaggaggtaagactaacatacacgaa

SEQ ID NO: 394898 - DNA, 33 bp, Homo sapien
atctaattaggaggtaggactaacatacacgaa

SEQ ID NO: 394899 - DNA, 33 bp, Homo sapien
gataccctcgggcaaaaatggtaggcaatgcag

SEQ ID NO: 394900 - DNA, 33 bp, Homo sapien
gataccctcgggcaaacatggtaggcaatgcag

SEQ ID NO: 394901 - DNA, 33 bp, Homo sapien
aaggactgtttgagcacgggagattgaggctgc

SEQ ID NO: 394902 - DNA, 33 bp, Homo sapien
aaggactgtttgagcatgggagattgaggctgc

SEQ ID NO: 394903 - DNA, 33 bp, Homo sapien
ccaagaatatagccaaagtgctagttctgcacc

SEQ ID NO: 394904 - DNA, 33 bp, Homo sapien
ccaagaatatagccaaggtgctagttctgcacc

SEQ ID NO: 394905 - DNA, 33 bp, Homo sapien
actcatggtcagagagcatcaaaccacagaatt

SEQ ID NO: 394906 - DNA, 33 bp, Homo sapien
actcatggtcagagagtatcaaaccacagaatt

SEQ ID NO: 394907 - DNA, 33 bp, Homo sapien
caggttatccacactcaaggcagatccttcctg

SEQ ID NO: 394908 - DNA, 33 bp, Homo sapien
caggttatccacactcgaggcagatccttcctg

SEQ ID NO: 394909 - DNA, 33 bp, Homo sapien
cctcactttaccttccccaatgacatcaggtct

SEQ ID NO: 394910 - DNA, 33 bp, Homo sapien
cctcactttaccttcctcaatgacatcaggtct

SEQ ID NO: 394911 - DNA, 33 bp, Homo sapien
ttgcagctctgcggacagcacaaaccaccgttg

SEQ ID NO: 394912 - DNA, 33 bp, Homo sapien
ttgcagctctgcggacggcacaaaccaccgttg

SEQ ID NO: 394913 - DNA, 33 bp, Homo sapien
aagtttgagagcaagaaggaaacaaatggacag

SEQ ID NO: 394914 - DNA, 33 bp, Homo sapien
aagtttgagagcaagacggaaacaaatggacag

SEQ ID NO: 394915 - DNA, 33 bp, Homo sapien
attggctcatctggatcactgagactggacaat

SEQ ID NO: 394916 - DNA, 33 bp, Homo sapien
attggctcatctggattactgagactggacaat

SEQ ID NO: 394917 - DNA, 33 bp, Homo sapien
attgacaaatgataccagaaaaaatgactaaaa

SEQ ID NO: 394918 - DNA, 33 bp, Homo sapien
attgacaaatgataccggaaaaaatgactaaaa

SEQ ID NO: 394919 - DNA, 33 bp, Homo sapien
atttgaggttggagagacacgtctgagccagat

SEQ ID NO: 394920 - DNA, 33 bp, Homo sapien
atttgaggttggagaggcacgtctgagccagat

SEQ ID NO: 394921 - DNA, 33 bp, Homo sapien
agcccttaaatattgacgattttgttaagcttc

SEQ ID NO: 394922 - DNA, 33 bp, Homo sapien
agcccttaaatattgatgattttgttaagcttc

SEQ ID NO: 394923 - DNA, 33 bp, Homo sapien
tcatgtggtattttgcaattatgtgttaaccat

SEQ ID NO: 394924 - DNA, 33 bp, Homo sapien
tcatgtggtattttgcgattatgtgttaaccat

SEQ ID NO: 394925 - DNA, 33 bp, Homo sapien
cattcagatggttacaaaatttggctagagaat

SEQ ID NO: 394926 - DNA, 33 bp, Homo sapien
cattcagatggttacagaatttggctagagaat

SEQ ID NO: 394927 - DNA, 33 bp, Homo sapien
tttaataggttggttcacttcagaactaacttg

SEQ ID NO: 394928 - DNA, 33 bp, Homo sapien
tttaataggttggttcgcttcagaactaacttg

SEQ ID NO: 394929 - DNA, 33 bp, Homo sapien
tttatattatgtgctacgtattgtcttaaataa

SEQ ID NO: 394930 - DNA, 33 bp, Homo sapien
tttatattatgtgctaggtattgtcttaaataa

SEQ ID NO: 394931 - DNA, 33 bp, Homo sapien
gagtcagagttctcaccatagaagaagagggat

SEQ ID NO: 394932 - DNA, 33 bp, Homo sapien
gagtcagagttctcactatagaagaagagggat

SEQ ID NO: 394933 - DNA, 33 bp, Homo sapien
agaatggcattatacacacacaaaaaaatggtt

SEQ ID NO: 394934 - DNA, 33 bp, Homo sapien
agaatggcattatacatacacaaaaaaatggtt

SEQ ID NO: 394935 - DNA, 33 bp, Homo sapien
tcaccatcacattctaagataactacttccaaa

SEQ ID NO: 394936 - DNA, 33 bp, Homo sapien
tcaccatcacattctacgataactacttccaaa

SEQ ID NO: 394937 - DNA, 33 bp, Homo sapien
ctccaacctcacgtaccctaagaaatctgtctg

SEQ ID NO: 394938 - DNA, 33 bp, Homo sapien
ctccaacctcacgtactctaagaaatctgtctg

SEQ ID NO: 394939 - DNA, 33 bp, Homo sapien
ttgctcatatgaagaaaaaacaaggttaagtca

SEQ ID NO: 394940 - DNA, 33 bp, Homo sapien
ttgctcatatgaagaagaaacaaggttaagtca

SEQ ID NO: 394941 - DNA, 33 bp, Homo sapien
aaatgcacacttaaaaatatttccagccatatt

SEQ ID NO: 394942 - DNA, 33 bp, Homo sapien
aaatgcacacttaaaagtatttccagccatatt

SEQ ID NO: 394943 - DNA, 33 bp, Homo sapien
taagctaacagacataacattaaggagctaata

SEQ ID NO: 394944 - DNA, 33 bp, Homo sapien
taagctaacagacatatcattaaggagctaata

SEQ ID NO: 394945 - DNA, 33 bp, Homo sapien
gaaaagaaaaaaattccatccctgagtctgtca

SEQ ID NO: 394946 - DNA, 33 bp, Homo sapien
gaaaagaaaaaaattctatccctgagtctgtca

SEQ ID NO: 394947 - DNA, 33 bp, Homo sapien
ctcgtcttgcagggacagaactcatcttcctcc

SEQ ID NO: 394948 - DNA, 33 bp, Homo sapien
ctcgtcttgcagggacggaactcatcttcctcc

SEQ ID NO: 394949 - DNA, 33 bp, Homo sapien
ataggttccacttgcactctcaaaagtgttctg

SEQ ID NO: 394950 - DNA, 33 bp, Homo sapien
ataggttccacttgcagtctcaaaagtgttctg

SEQ ID NO: 394951 - DNA, 33 bp, Homo sapien
ggccaggcttctggaacgcaggagctgtcttcc

SEQ ID NO: 394952 - DNA, 33 bp, Homo sapien
ggccaggcttctggaaggcaggagctgtcttcc

SEQ ID NO: 394953 - DNA, 33 bp, Homo sapien
tatctgtctcctttaaatgatgctttatccatc

SEQ ID NO: 394954 - DNA, 33 bp, Homo sapien
tatctgtctcctttaagtgatgctttatccatc

SEQ ID NO: 394955 - DNA, 33 bp, Homo sapien
ccaagtggcagaggagaaagatctggtgaatgt

SEQ ID NO: 394956 - DNA, 33 bp, Homo sapien
ccaagtggcagaggaggaagatctggtgaatgt

SEQ ID NO: 394957 - DNA, 33 bp, Homo sapien
tcgtaagacttggttggagaattggctctgcca

SEQ ID NO: 394958 - DNA, 33 bp, Homo sapien
tcgtaagacttggttgtagaattggctctgcca

SEQ ID NO: 394959 - DNA, 33 bp, Homo sapien
atggggaaagatctagcaaatatgccttcattc

SEQ ID NO: 394960 - DNA, 33 bp, Homo sapien
atggggaaagatctagtaaatatgccttcattc

SEQ ID NO: 394961 - DNA, 33 bp, Homo sapien
cctgccactcacacaaggctacctcatcccttg

SEQ ID NO: 394962 - DNA, 33 bp, Homo sapien
cctgccactcacacaatgctacctcatcccttg

SEQ ID NO: 394963 - DNA, 33 bp, Homo sapien
ggaaagccaggcaccaacccattagcctgaatc

SEQ ID NO: 394964 - DNA, 33 bp, Homo sapien
ggaaagccaggcaccagcccattagcctgaatc

SEQ ID NO: 394965 - DNA, 33 bp, Homo sapien
ccttgagtaaaatggtaaagtacaggtcgcaga

SEQ ID NO: 394966 - DNA, 33 bp, Homo sapien
ccttgagtaaaatggtgaagtacaggtcgcaga

SEQ ID NO: 394967 - DNA, 33 bp, Homo sapien
gtctgtaaggctcctcagaacaccgcccaggag

SEQ ID NO: 394968 - DNA, 33 bp, Homo sapien
gtctgtaaggctcctcggaacaccgcccaggag

SEQ ID NO: 394969 - DNA, 33 bp, Homo sapien
tgagagcaagctgcaaaagtccagaaccagagc

SEQ ID NO: 394970 - DNA, 33 bp, Homo sapien
tgagagcaagctgcaacagtccagaaccagagc

SEQ ID NO: 394971 - DNA, 33 bp, Homo sapien
catcacacttgggcacacctcaccacccacact

SEQ ID NO: 394972 - DNA, 33 bp, Homo sapien
catcacacttgggcacgcctcaccacccacact

SEQ ID NO: 394973 - DNA, 33 bp, Homo sapien
caggaaaacagtgcaacgaagcctgagcacaca

SEQ ID NO: 394974 - DNA, 33 bp, Homo sapien
caggaaaacagtgcaatgaagcctgagcacaca

SEQ ID NO: 394975 - DNA, 33 bp, Homo sapien
tattttattgtagtacaactttgctcgaagctg

SEQ ID NO: 394976 - DNA, 33 bp, Homo sapien
tattttattgtagtacgactttgctcgaagctg

SEQ ID NO: 394977 - DNA, 33 bp, Homo sapien
aaagaaacggatttccagctgctgttataaaat

SEQ ID NO: 394978 - DNA, 33 bp, Homo sapien
aaagaaacggatttcccgctgctgttataaaat

SEQ ID NO: 394979 - DNA, 33 bp, Homo sapien
caggtgctgctaactcaaggaataaggtcagag

SEQ ID NO: 394980 - DNA, 33 bp, Homo sapien
caggtgctgctaactcgaggaataaggtcagag

SEQ ID NO: 394981 - DNA, 33 bp, Homo sapien
catacagcctcattcacgctcagaaacagttcc

SEQ ID NO: 394982 - DNA, 33 bp, Homo sapien
catacagcctcattcatgctcagaaacagttcc

SEQ ID NO: 394983 - DNA, 33 bp, Homo sapien
tcagaattggaatacaggaagcaagaacatgag

SEQ ID NO: 394984 - DNA, 33 bp, Homo sapien
tcagaattggaatacatgaagcaagaacatgag

SEQ ID NO: 394985 - DNA, 33 bp, Homo sapien
atgtgagacgttctacgaaacaactttgccagg

SEQ ID NO: 394986 - DNA, 33 bp, Homo sapien
atgtgagacgttctactaaacaactttgccagg

SEQ ID NO: 394987 - DNA, 33 bp, Homo sapien
ggacttgctctttggacagttgggatggtgacc

SEQ ID NO: 394988 - DNA, 33 bp, Homo sapien
ggacttgctctttggagagttgggatggtgacc

SEQ ID NO: 394989 - DNA, 33 bp, Homo sapien
ggcttggcttagccaacgacagtttccttcgtg

SEQ ID NO: 394990 - DNA, 33 bp, Homo sapien
ggcttggcttagccaatgacagtttccttcgtg

SEQ ID NO: 394991 - DNA, 33 bp, Homo sapien
attgtgagctaaaatgcagttaggaattgacag

SEQ ID NO: 394992 - DNA, 33 bp, Homo sapien
attgtgagctaaaatgtagttaggaattgacag

SEQ ID NO: 394993 - DNA, 33 bp, Homo sapien
cctgccctacaagctcaccacctttggtgcata

SEQ ID NO: 394994 - DNA, 33 bp, Homo sapien
cctgccctacaagctcgccacctttggtgcata

SEQ ID NO: 394995 - DNA, 33 bp, Homo sapien
actgccaggaaaattcgacctcttagagactca

SEQ ID NO: 394996 - DNA, 33 bp, Homo sapien
actgccaggaaaattctacctcttagagactca

SEQ ID NO: 394997 - DNA, 33 bp, Homo sapien
acaagttgctttaccccccagagtaagccctct

SEQ ID NO: 394998 - DNA, 33 bp, Homo sapien
acaagttgctttaccctccagagtaagccctct

SEQ ID NO: 394999 - DNA, 33 bp, Homo sapien
tggatgcttttggttacgaggccctggctgaga

SEQ ID NO: 395000 - DNA, 33 bp, Homo sapien
tggatgcttttggttatgaggccctggctgaga

SEQ ID NO: 395001 - DNA, 33 bp, Homo sapien
tcgggatgatgataaacttctggaaatggacaa

SEQ ID NO: 395002 - DNA, 33 bp, Homo sapien
tcgggatgatgataaagttctggaaatggacaa

SEQ ID NO: 395003 - DNA, 33 bp, Homo sapien
cttacatctgcatctacgtctgtttctctgtat

SEQ ID NO: 395004 - DNA, 33 bp, Homo sapien
cttacatctgcatctatgtctgtttctctgtat

SEQ ID NO: 395005 - DNA, 33 bp, Homo sapien
gagataacagaacctcactgagcactggccagc

SEQ ID NO: 395006 - DNA, 33 bp, Homo sapien
gagataacagaacctcgctgagcactggccagc

SEQ ID NO: 395007 - DNA, 33 bp, Homo sapien
agggtcatcagtgcccacatctccatgtctgtc

SEQ ID NO: 395008 - DNA, 33 bp, Homo sapien
agggtcatcagtgcccgcatctccatgtctgtc

SEQ ID NO: 395009 - DNA, 33 bp, Homo sapien
gtgctctccatagcgacgtgtgagacatgacgg

SEQ ID NO: 395010 - DNA, 33 bp, Homo sapien
gtgctctccatagcgatgtgtgagacatgacgg

SEQ ID NO: 395011 - DNA, 33 bp, Homo sapien
tgggattcttttcctccctagaagcacaggaga

SEQ ID NO: 395012 - DNA, 33 bp, Homo sapien
tgggattcttttcctctctagaagcacaggaga

SEQ ID NO: 395013 - DNA, 33 bp, Homo sapien
tgctcagccaggcccactgctcggttctgggga

SEQ ID NO: 395014 - DNA, 33 bp, Homo sapien
tgctcagccaggcccagtgctcggttctgggga

SEQ ID NO: 395015 - DNA, 33 bp, Homo sapien
tgttgaaatgattcacacagagcagtctgtaga

SEQ ID NO: 395016 - DNA, 33 bp, Homo sapien
tgttgaaatgattcacgcagagcagtctgtaga

SEQ ID NO: 395017 - DNA, 33 bp, Homo sapien
gtcctcatcggtaaaacgggcatctctacctgc

SEQ ID NO: 395018 - DNA, 33 bp, Homo sapien
gtcctcatcggtaaaatgggcatctctacctgc

SEQ ID NO: 395019 - DNA, 33 bp, Homo sapien
atacaacaaagaactaaccacaacattcacagt

SEQ ID NO: 395020 - DNA, 33 bp, Homo sapien
atacaacaaagaactacccacaacattcacagt

SEQ ID NO: 395021 - DNA, 33 bp, Homo sapien
ctatccaaccactttaactctcagctttaaaac

SEQ ID NO: 395022 - DNA, 33 bp, Homo sapien
ctatccaaccactttatctctcagctttaaaac

SEQ ID NO: 395023 - DNA, 33 bp, Homo sapien
acactgtgctgaatgactcactggctctgagta

SEQ ID NO: 395024 - DNA, 33 bp, Homo sapien
acactgtgctgaatgattcactggctctgagta

SEQ ID NO: 395025 - DNA, 33 bp, Homo sapien
caagttcatgagcctcactgtcccctactgagc

SEQ ID NO: 395026 - DNA, 33 bp, Homo sapien
caagttcatgagcctcgctgtcccctactgagc

SEQ ID NO: 395027 - DNA, 33 bp, Homo sapien
gagaaacagctccagacctagtgtggggcagac

SEQ ID NO: 395028 - DNA, 33 bp, Homo sapien
gagaaacagctccagatctagtgtggggcagac

SEQ ID NO: 395029 - DNA, 33 bp, Homo sapien
cttccagctttggcagaccctttgtgcccgctc

SEQ ID NO: 395030 - DNA, 33 bp, Homo sapien
cttccagctttggcaggccctttgtgcccgctc

SEQ ID NO: 395031 - DNA, 33 bp, Homo sapien
acactcatacaataaacgacaagaggaggtctg

SEQ ID NO: 395032 - DNA, 33 bp, Homo sapien
acactcatacaataaatgacaagaggaggtctg

SEQ ID NO: 395033 - DNA, 33 bp, Homo sapien
aacagatgtgtttccactgacggcaatcaggtt

SEQ ID NO: 395034 - DNA, 33 bp, Homo sapien
aacagatgtgtttccattgacggcaatcaggtt

SEQ ID NO: 395035 - DNA, 33 bp, Homo sapien
tgtcatcctcttttcaccttaactaagcattta

SEQ ID NO: 395036 - DNA, 33 bp, Homo sapien
tgtcatcctcttttcatcttaactaagcattta

SEQ ID NO: 395037 - DNA, 33 bp, Homo sapien
cttcttcccactcacacgcccatatcagaactg

SEQ ID NO: 395038 - DNA, 33 bp, Homo sapien
cttcttcccactcacatgcccatatcagaactg

SEQ ID NO: 395039 - DNA, 33 bp, Homo sapien
ggaataattatggcacaagaggactgaagtcac

SEQ ID NO: 395040 - DNA, 33 bp, Homo sapien
ggaataattatggcacgagaggactgaagtcac

SEQ ID NO: 395041 - DNA, 33 bp, Homo sapien
ggccttggtcataatgaaagagcagctgtattt

SEQ ID NO: 395042 - DNA, 33 bp, Homo sapien
ggccttggtcataatggaagagcagctgtattt

SEQ ID NO: 395043 - DNA, 33 bp, Homo sapien
attgaacctttcacaccggtgcctttttgggct

SEQ ID NO: 395044 - DNA, 33 bp, Homo sapien
attgaacctttcacactggtgcctttttgggct

SEQ ID NO: 395045 - DNA, 33 bp, Homo sapien
cagctgctcttccacactctggcctcatgacct

SEQ ID NO: 395046 - DNA, 33 bp, Homo sapien
cagctgctcttccacagtctggcctcatgacct

SEQ ID NO: 395047 - DNA, 33 bp, Homo sapien
cctagtcagaaatgtacgtaatccccacaatca

SEQ ID NO: 395048 - DNA, 33 bp, Homo sapien
cctagtcagaaatgtatgtaatccccacaatca

SEQ ID NO: 395049 - DNA, 33 bp, Homo sapien
tcgctagcctctacctaacgacttggccatctt

SEQ ID NO: 395050 - DNA, 33 bp, Homo sapien
tcgctagcctctacctgacgacttggccatctt

SEQ ID NO: 395051 - DNA, 33 bp, Homo sapien
tcctgggtcggagtcacggtctcttggagcaga

SEQ ID NO: 395052 - DNA, 33 bp, Homo sapien
tcctgggtcggagtcatggtctcttggagcaga

SEQ ID NO: 395053 - DNA, 33 bp, Homo sapien
acgaaaggaatcttgacgctgactgagccacga

SEQ ID NO: 395054 - DNA, 33 bp, Homo sapien
acgaaaggaatcttgatgctgactgagccacga

SEQ ID NO: 395055 - DNA, 33 bp, Homo sapien
gccagtggcaatcaacactgtgtgaatgatgtg

SEQ ID NO: 395056 - DNA, 33 bp, Homo sapien
gccagtggcaatcaacgctgtgtgaatgatgtg

SEQ ID NO: 395057 - DNA, 33 bp, Homo sapien
aaagaatacaaaggccaaaaacagtgcagaaac

SEQ ID NO: 395058 - DNA, 33 bp, Homo sapien
aaagaatacaaaggcccaaaacagtgcagaaac

SEQ ID NO: 395059 - DNA, 33 bp, Homo sapien
ttcaataattacttcaagtataagaaaatcaca

SEQ ID NO: 395060 - DNA, 33 bp, Homo sapien
ttcaataattacttcaggtataagaaaatcaca

SEQ ID NO: 395061 - DNA, 33 bp, Homo sapien
caagcctgtggtctaacggaaaatggagcctag

SEQ ID NO: 395062 - DNA, 33 bp, Homo sapien
caagcctgtggtctaatggaaaatggagcctag

SEQ ID NO: 395063 - DNA, 33 bp, Homo sapien
cctatacaggagtgaacctactcgtatcacgtt

SEQ ID NO: 395064 - DNA, 33 bp, Homo sapien
cctatacaggagtgaagctactcgtatcacgtt

SEQ ID NO: 395065 - DNA, 33 bp, Homo sapien
attaagggagtggaaacagggcctcaattacac

SEQ ID NO: 395066 - DNA, 33 bp, Homo sapien
attaagggagtggaaagagggcctcaattacac

SEQ ID NO: 395067 - DNA, 33 bp, Homo sapien
tagagtcacagaatgacgaagaagaaccaaacc

SEQ ID NO: 395068 - DNA, 33 bp, Homo sapien
tagagtcacagaatgatgaagaagaaccaaacc

SEQ ID NO: 395069 - DNA, 33 bp, Homo sapien
atccaacctgagcagcagaatctgttctatgcc

SEQ ID NO: 395070 - DNA, 33 bp, Homo sapien
atccaacctgagcagcggaatctgttctatgcc

SEQ ID NO: 395071 - DNA, 33 bp, Homo sapien
aagtcattccttattcacagttccgaggagtgg

SEQ ID NO: 395072 - DNA, 33 bp, Homo sapien
aagtcattccttattcgcagttccgaggagtgg

SEQ ID NO: 395073 - DNA, 33 bp, Homo sapien
ccttttctcattaatgaaacataacacttttaa

SEQ ID NO: 395074 - DNA, 33 bp, Homo sapien
ccttttctcattaatggaacataacacttttaa

SEQ ID NO: 395075 - DNA, 33 bp, Homo sapien
tgggcacgtggttgtccaaaagttgagacctaa

SEQ ID NO: 395076 - DNA, 33 bp, Homo sapien
tgggcacgtggttgtctaaaagttgagacctaa

SEQ ID NO: 395077 - DNA, 33 bp, Homo sapien
tgaaaagaaagaaggacgatgcatggaaagggt

SEQ ID NO: 395078 - DNA, 33 bp, Homo sapien
tgaaaagaaagaaggatgatgcatggaaagggt

SEQ ID NO: 395079 - DNA, 33 bp, Homo sapien
ggtattccaagttcacaagcaaagagtggattt

SEQ ID NO: 395080 - DNA, 33 bp, Homo sapien
ggtattccaagttcaccagcaaagagtggattt

SEQ ID NO: 395081 - DNA, 33 bp, Homo sapien
ttttggagtttgaatacgtgaatgtactcctta

SEQ ID NO: 395082 - DNA, 33 bp, Homo sapien
ttttggagtttgaatatgtgaatgtactcctta

SEQ ID NO: 395083 - DNA, 33 bp, Homo sapien
ggatgagcataaaagggattaaaatgactgctc

SEQ ID NO: 395084 - DNA, 33 bp, Homo sapien
ggatgagcataaaaggtattaaaatgactgctc

SEQ ID NO: 395085 - DNA, 33 bp, Homo sapien
tggacatctttctcccagctacaatggcctatg

SEQ ID NO: 395086 - DNA, 33 bp, Homo sapien
tggacatctttctcccggctacaatggcctatg

SEQ ID NO: 395087 - DNA, 33 bp, Homo sapien
ctacaaatccttagctcacaatcatgcctagaa

SEQ ID NO: 395088 - DNA, 33 bp, Homo sapien
ctacaaatccttagctgacaatcatgcctagaa

SEQ ID NO: 395089 - DNA, 33 bp, Homo sapien
gttcaaatgtgaatcacaactaatgactaaatt

SEQ ID NO: 395090 - DNA, 33 bp, Homo sapien
gttcaaatgtgaatcataactaatgactaaatt

SEQ ID NO: 395091 - DNA, 33 bp, Homo sapien
ggtgatatgcgcagagccaggattgaaaactag

SEQ ID NO: 395092 - DNA, 33 bp, Homo sapien
ggtgatatgcgcagagtcaggattgaaaactag

SEQ ID NO: 395093 - DNA, 33 bp, Homo sapien
tcgctatgttccccaacctgatcttgaactcct

SEQ ID NO: 395094 - DNA, 33 bp, Homo sapien
tcgctatgttccccaagctgatcttgaactcct

SEQ ID NO: 395095 - DNA, 33 bp, Homo sapien
agctggtagtctctacaacaattagtatgatct

SEQ ID NO: 395096 - DNA, 33 bp, Homo sapien
agctggtagtctctacgacaattagtatgatct

SEQ ID NO: 395097 - DNA, 33 bp, Homo sapien
attttacaaattcacccgctgtcaaacttatcc

SEQ ID NO: 395098 - DNA, 33 bp, Homo sapien
attttacaaattcacctgctgtcaaacttatcc

SEQ ID NO: 395099 - DNA, 33 bp, Homo sapien
cttcatggcttcttcagcatgaaaggggagagg

SEQ ID NO: 395100 - DNA, 33 bp, Homo sapien
cttcatggcttcttcatcatgaaaggggagagg

SEQ ID NO: 395101 - DNA, 33 bp, Homo sapien
caaagtattcctgtgaataatggtaaatattaa

SEQ ID NO: 395102 - DNA, 33 bp, Homo sapien
caaagtattcctgtgattaatggtaaatattaa

SEQ ID NO: 395103 - DNA, 33 bp, Homo sapien
atcatggaagtctcaaagtactgagagatgcat

SEQ ID NO: 395104 - DNA, 33 bp, Homo sapien
atcatggaagtctcaacgtactgagagatgcat

SEQ ID NO: 395105 - DNA, 33 bp, Homo sapien
aatggggtggtgctgaaaacaattctgcaggga

SEQ ID NO: 395106 - DNA, 33 bp, Homo sapien
aatggggtggtgctgagaacaattctgcaggga

SEQ ID NO: 395107 - DNA, 33 bp, Homo sapien
taatgttccatttgtaaaatctagatgatgagc

SEQ ID NO: 395108 - DNA, 33 bp, Homo sapien
taatgttccatttgtataatctagatgatgagc

SEQ ID NO: 395109 - DNA, 33 bp, Homo sapien
aggtcaataggactaactgtcattcaccccttt

SEQ ID NO: 395110 - DNA, 33 bp, Homo sapien
aggtcaataggactaattgtcattcaccccttt

SEQ ID NO: 395111 - DNA, 33 bp, Homo sapien
atggggtaaatgaacaagaagaggatgtagaag

SEQ ID NO: 395112 - DNA, 33 bp, Homo sapien
atggggtaaatgaacaggaagaggatgtagaag

SEQ ID NO: 395113 - DNA, 33 bp, Homo sapien
agcaaatggctaggacaatgagcaggtttccaa

SEQ ID NO: 395114 - DNA, 33 bp, Homo sapien
agcaaatggctaggacgatgagcaggtttccaa

SEQ ID NO: 395115 - DNA, 33 bp, Homo sapien
aatacgtgcccatgaccgtaccataatacaaag

SEQ ID NO: 395116 - DNA, 33 bp, Homo sapien
aatacgtgcccatgactgtaccataatacaaag

SEQ ID NO: 395117 - DNA, 33 bp, Homo sapien
agactgtagatgaaagaatttaacattggggtc

SEQ ID NO: 395118 - DNA, 33 bp, Homo sapien
agactgtagatgaaaggatttaacattggggtc

SEQ ID NO: 395119 - DNA, 33 bp, Homo sapien
ggcctacattggataccgtagtcaccagttacg

SEQ ID NO: 395120 - DNA, 33 bp, Homo sapien
ggcctacattggatactgtagtcaccagttacg

SEQ ID NO: 395121 - DNA, 33 bp, Homo sapien
ctcattatgactgttccatttgtaaaagtcgct

SEQ ID NO: 395122 - DNA, 33 bp, Homo sapien
ctcattatgactgttcgatttgtaaaagtcgct

SEQ ID NO: 395123 - DNA, 33 bp, Homo sapien
tgtcttacggctctaaccacaaacgagcccgtt

SEQ ID NO: 395124 - DNA, 33 bp, Homo sapien
tgtcttacggctctaagcacaaacgagcccgtt

SEQ ID NO: 395125 - DNA, 33 bp, Homo sapien
taagtactgggccagcaaagggcactgggaagg

SEQ ID NO: 395126 - DNA, 33 bp, Homo sapien
taagtactgggccagcgaagggcactgggaagg

SEQ ID NO: 395127 - DNA, 33 bp, Homo sapien; identical to SEQ ID NO: 395125

SEQ ID NO: 395128 - DNA, 33 bp, Homo sapien; identical to SEQ ID NO: 395126

SEQ ID NO: 395129 - DNA, 33 bp, Homo sapien
gtcaatagagcttgaaaatatgtcaatagcaac

SEQ ID NO: 395130 - DNA, 33 bp, Homo sapien
gtcaatagagcttgaagatatgtcaatagcaac

SEQ ID NO: 395131 - DNA, 33 bp, Homo sapien
acttgaggacagaatacgtttgattcattttca

SEQ ID NO: 395132 - DNA, 33 bp, Homo sapien
acttgaggacagaatatgtttgattcattttca

SEQ ID NO: 395133 - DNA, 33 bp, Homo sapien
tcgtctcctgtcccgcaagcgtgcagttccctg

SEQ ID NO: 395134 - DNA, 33 bp, Homo sapien
tcgtctcctgtcccgctagcgtgcagttccctg

SEQ ID NO: 395135 - DNA, 33 bp, Homo sapien; identical to SEQ ID NO: 395133

SEQ ID NO: 395136 - DNA, 33 bp, Homo sapien; identical to SEQ ID NO: 395134

SEQ ID NO: 395137 - DNA, 33 bp, Homo sapien
gatcataaaattgtaccatcacatgaaaacaca

SEQ ID NO: 395138 - DNA, 33 bp, Homo sapien
gatcataaaattgtactatcacatgaaaacaca

SEQ ID NO: 395139 - DNA, 33 bp, Homo sapien
tggtggataccaagtaacgctgtttcattgaat

SEQ ID NO: 395140 - DNA, 33 bp, Homo sapien
tggtggataccaagtagcgctgtttcattgaat

SEQ ID NO: 395141 - DNA, 33 bp, Homo sapien
gaccgtttaccaaatacgaagaatgtaaaaagg

SEQ ID NO: 395142 - DNA, 33 bp, Homo sapien
gaccgtttaccaaatatgaagaatgtaaaaagg

SEQ ID NO: 395143 - DNA, 33 bp, Homo sapien
gtgtccctgcaccccccgcatacacgtgctgtc

SEQ ID NO: 395144 - DNA, 33 bp, Homo sapien
gtgtccctgcaccccctgcatacacgtgctgtc

SEQ ID NO: 395145 - DNA, 33 bp, Homo sapien
aatgtaaggggaaggaagttgaagatttagatg

SEQ ID NO: 395146 - DNA, 33 bp, Homo sapien
aatgtaaggggaaggaggttgaagatttagatg

SEQ ID NO: 395147 - DNA, 33 bp, Homo sapien
ctgagggtgcctccaacggtagtgacgtaagca

SEQ ID NO: 395148 - DNA, 33 bp, Homo sapien
ctgagggtgcctccaatggtagtgacgtaagca

SEQ ID NO: 395149 - DNA, 33 bp, Homo sapien
agaggcaggccttatacggaatgcttctgtcgt

SEQ ID NO: 395150 - DNA, 33 bp, Homo sapien
agaggcaggccttatagggaatgcttctgtcgt

SEQ ID NO: 395151 - DNA, 33 bp, Homo sapien
cggtcataggccatgacggtcagcaagaagcag

SEQ ID NO: 395152 - DNA, 33 bp, Homo sapien
cggtcataggccatgatggtcagcaagaagcag

SEQ ID NO: 395153 - DNA, 33 bp, Homo sapien
ccacagaagttaagaggagacagggcaacagtt

SEQ ID NO: 395154 - DNA, 33 bp, Homo sapien
ccacagaagttaagagtagacagggcaacagtt

SEQ ID NO: 395155 - DNA, 33 bp, Homo sapien
cttccagctctcctgcgccagtgttcatctcaa

SEQ ID NO: 395156 - DNA, 33 bp, Homo sapien
cttccagctctcctgctccagtgttcatctcaa

SEQ ID NO: 395157 - DNA, 33 bp, Homo sapien
cgctctgcagagggcaaaaagaaagccttctcc

SEQ ID NO: 395158 - DNA, 33 bp, Homo sapien
cgctctgcagagggcagaaagaaagccttctcc

SEQ ID NO: 395159 - DNA, 33 bp, Homo sapien
tgactgatgcacccgacgtccagcagagatgtc

SEQ ID NO: 395160 - DNA, 33 bp, Homo sapien
tgactgatgcacccgatgtccagcagagatgtc

SEQ ID NO: 395161 - DNA, 33 bp, Homo sapien
agataaagatcatggggatcactcctatgaagg

SEQ ID NO: 395162 - DNA, 33 bp, Homo sapien
agataaagatcatgggtatcactcctatgaagg

SEQ ID NO: 395163 - DNA, 33 bp, Homo sapien
acagctgcaatattacaaatccgctcagctgag

SEQ ID NO: 395164 - DNA, 33 bp, Homo sapien
acagctgcaatattacgaatccgctcagctgag

SEQ ID NO: 395165 - DNA, 33 bp, Homo sapien
attagaatgagaaaaacttcctagacaaagtag

SEQ ID NO: 395166 - DNA, 33 bp, Homo sapien
attagaatgagaaaaagttcctagacaaagtag

SEQ ID NO: 395167 - DNA, 33 bp, Homo sapien
acctaaagaaggggcaatgccacagagccgaat

SEQ ID NO: 395168 - DNA, 33 bp, Homo sapien
acctaaagaaggggcagtgccacagagccgaat

SEQ ID NO: 395169 - DNA, 33 bp, Homo sapien
gtgtatgttcactcaagagtcaaaataccaggg

SEQ ID NO: 395170 - DNA, 33 bp, Homo sapien
gtgtatgttcactcaatagtcaaaataccaggg

SEQ ID NO: 395171 - DNA, 33 bp, Homo sapien
ttgcaaacagtggaatgagatattgttttctcc

SEQ ID NO: 395172 - DNA, 33 bp, Homo sapien
ttgcaaacagtggaattagatattgttttctcc

SEQ ID NO: 395173 - DNA, 33 bp, Homo sapien
cctgagatttatccccaaagactccttcaggcg

SEQ ID NO: 395174 - DNA, 33 bp, Homo sapien
cctgagatttatccccgaagactccttcaggcg

SEQ ID NO: 395175 - DNA, 33 bp, Homo sapien
accacagacagcatgtaaaaggcagacaggttc

SEQ ID NO: 395176 - DNA, 33 bp, Homo sapien
accacagacagcatgttaaaggcagacaggttc

SEQ ID NO: 395177 - DNA, 33 bp, Homo sapien
cacatttgccttcaagactgggtacctctggct

SEQ ID NO: 395178 - DNA, 33 bp, Homo sapien
cacatttgccttcaaggctgggtacctctggct

SEQ ID NO: 395179 - DNA, 33 bp, Homo sapien
ttcacctctgttttcactcattgctcttccaaa

SEQ ID NO: 395180 - DNA, 33 bp, Homo sapien
ttcacctctgttttcattcattgctcttccaaa

SEQ ID NO: 395181 - DNA, 33 bp, Homo sapien
ggaggaggcagccggcagaaattctagaactcc

SEQ ID NO: 395182 - DNA, 33 bp, Homo sapien
ggaggaggcagccggccgaaattctagaactcc

SEQ ID NO: 395183 - DNA, 33 bp, Homo sapien
tggcgctggtgagatccgacggggccctccgct

SEQ ID NO: 395184 - DNA, 33 bp, Homo sapien
tggcgctggtgagatctgacggggccctccgct

SEQ ID NO: 395185 - DNA, 33 bp, Homo sapien
attttcgcagaacactcagcagaccaagtgtca

SEQ ID NO: 395186 - DNA, 33 bp, Homo sapien
attttcgcagaacactgagcagaccaagtgtca

SEQ ID NO: 395187 - DNA, 33 bp, Homo sapien
caacagagtgtcaaaaggtagtgttaaattgct

SEQ ID NO: 395188 - DNA, 33 bp, Homo sapien
caacagagtgtcaaaatgtagtgttaaattgct

SEQ ID NO: 395189 - DNA, 33 bp, Homo sapien
ttaagttccctgtagacgctagatattagactt

SEQ ID NO: 395190 - DNA, 33 bp, Homo sapien
ttaagttccctgtagatgctagatattagactt

SEQ ID NO: 395191 - DNA, 33 bp, Homo sapien
ttcaacaccgtgtgtcaatggttgtagaagatt

SEQ ID NO: 395192 - DNA, 33 bp, Homo sapien
ttcaacaccgtgtgtctatggttgtagaagatt

SEQ ID NO: 395193 - DNA, 33 bp, Homo sapien
ctagagattggattgaaccagagcatacacaat

SEQ ID NO: 395194 - DNA, 33 bp, Homo sapien
ctagagattggattgacccagagcatacacaat

SEQ ID NO: 395195 - DNA, 33 bp, Homo sapien
ggctgagaaacctttcaattcatttagacttca

SEQ ID NO: 395196 - DNA, 33 bp, Homo sapien
ggctgagaaacctttcgattcatttagacttca

SEQ ID NO: 395197 - DNA, 33 bp, Homo sapien
atattttaacattctcaccacaaaaatgagttg

SEQ ID NO: 395198 - DNA, 33 bp, Homo sapien
atattttaacattctcgccacaaaaatgagttg

SEQ ID NO: 395199 - DNA, 33 bp, Homo sapien
gcaggggattcttctggatgtcacttagtaaaa

SEQ ID NO: 395200 - DNA, 33 bp, Homo sapien
gcaggggattcttctgtatgtcacttagtaaaa

SEQ ID NO: 395201 - DNA, 33 bp, Homo sapien
tggttatatgcaaagactcatttgttagtttgt

SEQ ID NO: 395202 - DNA, 33 bp, Homo sapien
tggttatatgcaaagattcatttgttagtttgt

SEQ ID NO: 395203 - DNA, 33 bp, Homo sapien
aaataagagctaagtcaagcttcaacagagtag

SEQ ID NO: 395204 - DNA, 33 bp, Homo sapien
aaataagagctaagtcgagcttcaacagagtag

SEQ ID NO: 395205 - DNA, 33 bp, Homo sapien
tagtcctttttcttccaaataaaacagtctgct

SEQ ID NO: 395206 - DNA, 33 bp, Homo sapien
tagtcctttttcttccgaataaaacagtctgct

SEQ ID NO: 395207 - DNA, 33 bp, Homo sapien
aataaatactactaccaattcctccagatggcg

SEQ ID NO: 395208 - DNA, 33 bp, Homo sapien
aataaatactactaccgattcctccagatggcg

SEQ ID NO: 395209 - DNA, 33 bp, Homo sapien
ttagtataaagacagacggcaaggatgatgaga

SEQ ID NO: 395210 - DNA, 33 bp, Homo sapien
ttagtataaagacagatggcaaggatgatgaga

SEQ ID NO: 395211 - DNA, 33 bp, Homo sapien
ttttaagagcagtaaccatggtgaattattaac

SEQ ID NO: 395212 - DNA, 33 bp, Homo sapien
ttttaagagcagtaactatggtgaattattaac

SEQ ID NO: 395213 - DNA, 33 bp, Homo sapien
tgtctgttttctcatcacatacgaagctgtttg

SEQ ID NO: 395214 - DNA, 33 bp, Homo sapien
tgtctgttttctcatcgcatacgaagctgtttg

SEQ ID NO: 395215 - DNA, 33 bp, Homo sapien
agcagattggaaatcaacaatggcctttcatca

SEQ ID NO: 395216 - DNA, 33 bp, Homo sapien
agcagattggaaatcagcaatggcctttcatca

SEQ ID NO: 395217 - DNA, 33 bp, Homo sapien
aaggatctttatatgccatctttggtggcccta

SEQ ID NO: 395218 - DNA, 33 bp, Homo sapien
aaggatctttatatgctatctttggtggcccta

SEQ ID NO: 395219 - DNA, 33 bp, Homo sapien
catataagtgaacatacaagttggtaaagacat

SEQ ID NO: 395220 - DNA, 33 bp, Homo sapien
catataagtgaacatataagttggtaaagacat

SEQ ID NO: 395221 - DNA, 33 bp, Homo sapien
cagtttaatcagagacagacaataacttcacct

SEQ ID NO: 395222 - DNA, 33 bp, Homo sapien
cagtttaatcagagaccgacaataacttcacct

SEQ ID NO: 395223 - DNA, 33 bp, Homo sapien
gaattaggctgatcggcaataatgatagtaaga

SEQ ID NO: 395224 - DNA, 33 bp, Homo sapien
gaattaggctgatcggtaataatgatagtaaga

SEQ ID NO: 395225 - DNA, 33 bp, Homo sapien
aataaaaggagactcacgggcttgaagtgatgt

SEQ ID NO: 395226 - DNA, 33 bp, Homo sapien
aataaaaggagactcaggggcttgaagtgatgt

SEQ ID NO: 395227 - DNA, 33 bp, Homo sapien
tgagtctccttttattcaaactgcttccaaagc

SEQ ID NO: 395228 - DNA, 33 bp, Homo sapien
tgagtctccttttattgaaactgcttccaaagc

SEQ ID NO: 395229 - DNA, 33 bp, Homo sapien
atcaggtagtcaattcaaaccactcagcagctt

SEQ ID NO: 395230 - DNA, 33 bp, Homo sapien
atcaggtagtcaattcgaaccactcagcagctt

SEQ ID NO: 395231 - DNA, 33 bp, Homo sapien
tgactgcaatcattaccctaacaaacagttgtg

SEQ ID NO: 395232 - DNA, 33 bp, Homo sapien
tgactgcaatcattacgctaacaaacagttgtg

SEQ ID NO: 395233 - DNA, 33 bp, Homo sapien
ctctgactgaaaccgcaccccgtggaaagcatc

SEQ ID NO: 395234 - DNA, 33 bp, Homo sapien
ctctgactgaaaccgcgccccgtggaaagcatc

SEQ ID NO: 395235 - DNA, 33 bp, Homo sapien
ggtatggtcatactccaagaaggtggtctgtag

SEQ ID NO: 395236 - DNA, 33 bp, Homo sapien
ggtatggtcatactccgagaaggtggtctgtag

SEQ ID NO: 395237 - DNA, 33 bp, Homo sapien
tgtttctccctaactccatgtccagtaacataa

SEQ ID NO: 395238 - DNA, 33 bp, Homo sapien
tgtttctccctaactctatgtccagtaacataa

SEQ ID NO: 395239 - DNA, 33 bp, Homo sapien
ttgcaatagcctttccagaacccatccatatcc

SEQ ID NO: 395240 - DNA, 33 bp, Homo sapien
ttgcaatagcctttccggaacccatccatatcc

SEQ ID NO: 395241 - DNA, 33 bp, Homo sapien
tcttagcatttcctccacccggagcagaggggc

SEQ ID NO: 395242 - DNA, 33 bp, Homo sapien
tcttagcatttcctccgcccggagcagaggggc

SEQ ID NO: 395243 - DNA, 33 bp, Homo sapien
tctcctccactccataccttctagtttgtcaca

SEQ ID NO: 395244 - DNA, 33 bp, Homo sapien
tctcctccactccatatcttctagtttgtcaca

SEQ ID NO: 395245 - DNA, 33 bp, Homo sapien
ataagaagaagtcaagaattgtgacaaactaga

SEQ ID NO: 395246 - DNA, 33 bp, Homo sapien
ataagaagaagtcaaggattgtgacaaactaga

SEQ ID NO: 395247 - DNA, 33 bp, Homo sapien
ccatgagctttatttgaaggccacgaggagggg

SEQ ID NO: 395248 - DNA, 33 bp, Homo sapien
ccatgagctttatttgcaggccacgaggagggg

SEQ ID NO: 395249 - DNA, 33 bp, Homo sapien
tttgtcaaaatacctacatttggatgcatgaag

SEQ ID NO: 395250 - DNA, 33 bp, Homo sapien
tttgtcaaaatacctatatttggatgcatgaag

SEQ ID NO: 395251 - DNA, 33 bp, Homo sapien
agtggaaacagtcaataatggattcatcttgcg

SEQ ID NO: 395252 - DNA, 33 bp, Homo sapien
agtggaaacagtcaattatggattcatcttgcg

SEQ ID NO: 395253 - DNA, 33 bp, Homo sapien
gtaaatctgcactttacggaagacaaacataga

SEQ ID NO: 395254 - DNA, 33 bp, Homo sapien
gtaaatctgcactttatggaagacaaacataga

SEQ ID NO: 395255 - DNA, 33 bp, Homo sapien
caatcacacgcacagaaaagagccttctggctg

SEQ ID NO: 395256 - DNA, 33 bp, Homo sapien
caatcacacgcacagagaagagccttctggctg

SEQ ID NO: 395257 - DNA, 33 bp, Homo sapien
ggagctagtttagctgaaagaaggctcagattg

SEQ ID NO: 395258 - DNA, 33 bp, Homo sapien
ggagctagtttagctggaagaaggctcagattg

SEQ ID NO: 395259 - DNA, 33 bp, Homo sapien
cttcttctttaactcaaaggcaattccatgctc

SEQ ID NO: 395260 - DNA, 33 bp, Homo sapien
cttcttctttaactcagaggcaattccatgctc

SEQ ID NO: 395261 - DNA, 33 bp, Homo sapien
tcattcattcaaaaacagaacagtatagccagg

SEQ ID NO: 395262 - DNA, 33 bp, Homo sapien
tcattcattcaaaaacggaacagtatagccagg

SEQ ID NO: 395263 - DNA, 33 bp, Homo sapien
gcacctgtgactaagaaagacctaataggtgtg

SEQ ID NO: 395264 - DNA, 33 bp, Homo sapien
gcacctgtgactaagagagacctaataggtgtg

SEQ ID NO: 395265 - DNA, 33 bp, Homo sapien
ccgaacaagaagacgacgtagacaaacatgaaa

SEQ ID NO: 395266 - DNA, 33 bp, Homo sapien
ccgaacaagaagacgatgtagacaaacatgaaa

SEQ ID NO: 395267 - DNA, 33 bp, Homo sapien
ttgcacagctcctcacaaagccaatttctgctc

SEQ ID NO: 395268 - DNA, 33 bp, Homo sapien
ttgcacagctcctcaccaagccaatttctgctc

SEQ ID NO: 395269 - DNA, 33 bp, Homo sapien
gcggccgtcgatgaagaccctgtttgtggacag

SEQ ID NO: 395270 - DNA, 33 bp, Homo sapien
gcggccgtcgatgaaggccctgtttgtggacag

SEQ ID NO: 395271 - DNA, 33 bp, Homo sapien
cccagaagtacagacaagaaggaaaatcattaa

SEQ ID NO: 395272 - DNA, 33 bp, Homo sapien
cccagaagtacagacaggaaggaaaatcattaa

SEQ ID NO: 395273 - DNA, 33 bp, Homo sapien
gaaatggccactgaaacacaagggtgacaccca

SEQ ID NO: 395274 - DNA, 33 bp, Homo sapien
gaaatggccactgaaatacaagggtgacaccca

SEQ ID NO: 395275 - DNA, 33 bp, Homo sapien
cctgcctcaggctgtacaggagacccgccccct

SEQ ID NO: 395276 - DNA, 33 bp, Homo sapien
cctgcctcaggctgtataggagacccgccccct

SEQ ID NO: 395277 - DNA, 33 bp, Homo sapien
ctcatcactcaatacccatctactgagtcctcc

SEQ ID NO: 395278 - DNA, 33 bp, Homo sapien
ctcatcactcaatacctatctactgagtcctcc

SEQ ID NO: 395279 - DNA, 33 bp, Homo sapien
agcaggtactcaaaaaaaaatgttaactgtcgt

SEQ ID NO: 395280 - DNA, 33 bp, Homo sapien
agcaggtactcaaaaagaaatgttaactgtcgt

SEQ ID NO: 395281 - DNA, 33 bp, Homo sapien
gctgctaacgaccccaatgacatccatgatgat

SEQ ID NO: 395282 - DNA, 33 bp, Homo sapien
gctgctaacgaccccagtgacatccatgatgat

SEQ ID NO: 395283 - DNA, 33 bp, Homo sapien
ccaaagctggaacgtaaagacgtgagtatcaca

SEQ ID NO: 395284 - DNA, 33 bp, Homo sapien
ccaaagctggaacgtagagacgtgagtatcaca

SEQ ID NO: 395285 - DNA, 33 bp, Homo sapien
agcactttttgtggtcaattgttgcaaattctt

SEQ ID NO: 395286 - DNA, 33 bp, Homo sapien
agcactttttgtggtcgattgttgcaaattctt

SEQ ID NO: 395287 - DNA, 33 bp, Homo sapien
acccaaaaaatcatgacagatgataaatgcttg

SEQ ID NO: 395288 - DNA, 33 bp, Homo sapien
acccaaaaaatcatgagagatgataaatgcttg

SEQ ID NO: 395289 - DNA, 33 bp, Homo sapien
tgaaaatggtgagggcaagattcaaacttaggc

SEQ ID NO: 395290 - DNA, 33 bp, Homo sapien
tgaaaatggtgagggcgagattcaaacttaggc

SEQ ID NO: 395291 - DNA, 33 bp, Homo sapien
cccagaagaaatcctcagaatgacctcagaaca

SEQ ID NO: 395292 - DNA, 33 bp, Homo sapien
cccagaagaaatcctcggaatgacctcagaaca

SEQ ID NO: 395293 - DNA, 33 bp, Homo sapien
atctccttagaggagacgaggttacagaggaag

SEQ ID NO: 395294 - DNA, 33 bp, Homo sapien
atctccttagaggagatgaggttacagaggaag

SEQ ID NO: 395295 - DNA, 33 bp, Homo sapien
acagatgtaatcccaccgtgcccagcctctcac

SEQ ID NO: 395296 - DNA, 33 bp, Homo sapien
acagatgtaatcccacggtgcccagcctctcac

SEQ ID NO: 395297 - DNA, 33 bp, Homo sapien
tctaaccagaggcttccagcatcacgggtagta

SEQ ID NO: 395298 - DNA, 33 bp, Homo sapien
tctaaccagaggcttctagcatcacgggtagta

SEQ ID NO: 395299 - DNA, 33 bp, Homo sapien
catggttttgtggacaaggaggagcccagtgat

SEQ ID NO: 395300 - DNA, 33 bp, Homo sapien
catggttttgtggacatggaggagcccagtgat

SEQ ID NO: 395301 - DNA, 33 bp, Homo sapien
tgtttcatattgcaacaaaaatgtcttcctagc

SEQ ID NO: 395302 - DNA, 33 bp, Homo sapien
tgtttcatattgcaacgaaaatgtcttcctagc

SEQ ID NO: 395303 - DNA, 33 bp, Homo sapien
tccctgattttgccgaaaactcgtgtggtttct

SEQ ID NO: 395304 - DNA, 33 bp, Homo sapien
tccctgattttgccgagaactcgtgtggtttct

SEQ ID NO: 395305 - DNA, 33 bp, Homo sapien
cctcttggtctctaggcagcatgcgtgtaagtc

SEQ ID NO: 395306 - DNA, 33 bp, Homo sapien
cctcttggtctctaggtagcatgcgtgtaagtc

SEQ ID NO: 395307 - DNA, 33 bp, Homo sapien
aatgcctgctgctttcaagtgatacagtttgga

SEQ ID NO: 395308 - DNA, 33 bp, Homo sapien
aatgcctgctgctttcgagtgatacagtttgga

SEQ ID NO: 395309 - DNA, 33 bp, Homo sapien
gtaaatcagacaacaacggaacaacagtcactg

SEQ ID NO: 395310 - DNA, 33 bp, Homo sapien
gtaaatcagacaacaatggaacaacagtcactg

SEQ ID NO: 395311 - DNA, 33 bp, Homo sapien
gagtgggtccagaccacaataatagactttaaa

SEQ ID NO: 395312 - DNA, 33 bp, Homo sapien
gagtgggtccagaccataataatagactttaaa

SEQ ID NO: 395313 - DNA, 33 bp, Homo sapien
aactctgctattaggacgacgatgcttcctgaa

SEQ ID NO: 395314 - DNA, 33 bp, Homo sapien
aactctgctattaggatgacgatgcttcctgaa

SEQ ID NO: 395315 - DNA, 33 bp, Homo sapien
tttggtccaaaagcagacattctgtaaaggagt

SEQ ID NO: 395316 - DNA, 33 bp, Homo sapien
tttggtccaaaagcaggcattctgtaaaggagt

SEQ ID NO: 395317 - DNA, 33 bp, Homo sapien
tgggatagctatgttacctgcaagacctctgtg

SEQ ID NO: 395318 - DNA, 33 bp, Homo sapien
tgggatagctatgttatctgcaagacctctgtg

SEQ ID NO: 395319 - DNA, 33 bp, Homo sapien
gctgagggtcatcacactgaatgtttggagagg

SEQ ID NO: 395320 - DNA, 33 bp, Homo sapien
gctgagggtcatcacagtgaatgtttggagagg

SEQ ID NO: 395321 - DNA, 33 bp, Homo sapien
agagggaggctgttaaaagagcagatgacattc

SEQ ID NO: 395322 - DNA, 33 bp, Homo sapien
agagggaggctgttaacagagcagatgacattc

SEQ ID NO: 395323 - DNA, 33 bp, Homo sapien
atttgaaagtcttcaactggtcctgcaaatgtc

SEQ ID NO: 395324 - DNA, 33 bp, Homo sapien
atttgaaagtcttcaattggtcctgcaaatgtc

SEQ ID NO: 395325 - DNA, 33 bp, Homo sapien
taatatctctaatatccctttttttgtggttgt

SEQ ID NO: 395326 - DNA, 33 bp, Homo sapien
taatatctctaatatctctttttttgtggttgt

SEQ ID NO: 395327 - DNA, 33 bp, Homo sapien
tcggcctcggccttgacgccaacactgactcct

SEQ ID NO: 395328 - DNA, 33 bp, Homo sapien
tcggcctcggccttgatgccaacactgactcct

SEQ ID NO: 395329 - DNA, 33 bp, Homo sapien
ccttccatcatcgtccggccttgttgatggtaa

SEQ ID NO: 395330 - DNA, 33 bp, Homo sapien
ccttccatcatcgtcctgccttgttgatggtaa

SEQ ID NO: 395331 - DNA, 33 bp, Homo sapien
aagcatgcagcgcagtaaacatccgcagagtga

SEQ ID NO: 395332 - DNA, 33 bp, Homo sapien
aagcatgcagcgcagtgaacatccgcagagtga

SEQ ID NO: 395333 - DNA, 33 bp, Homo sapien
gctttcgaccaaacaaacatatcagggtttctg

SEQ ID NO: 395334 - DNA, 33 bp, Homo sapien
gctttcgaccaaacaaccatatcagggtttctg

SEQ ID NO: 395335 - DNA, 33 bp, Homo sapien
tagtcttgggcccttacatccttcctagagtgt

SEQ ID NO: 395336 - DNA, 33 bp, Homo sapien
tagtcttgggcccttagatccttcctagagtgt

SEQ ID NO: 395337 - DNA, 33 bp, Homo sapien
gacagaactggcaacacgaagcctcagccgccc

SEQ ID NO: 395338 - DNA, 33 bp, Homo sapien
gacagaactggcaacatgaagcctcagccgccc

SEQ ID NO: 395339 - DNA, 33 bp, Homo sapien
gagccgaggcgagtgcaacacatgggccgtggc

SEQ ID NO: 395340 - DNA, 33 bp, Homo sapien
gagccgaggcgagtgcgacacatgggccgtggc

SEQ ID NO: 395341 - DNA, 33 bp, Homo sapien
tgtttcatacaggatgaaaaccggtgaattgta

SEQ ID NO: 395342 - DNA, 33 bp, Homo sapien
tgtttcatacaggatggaaaccggtgaattgta

SEQ ID NO: 395343 - DNA, 33 bp, Homo sapien
taccgcctatactctcaagttttatggatagtg

SEQ ID NO: 395344 - DNA, 33 bp, Homo sapien
taccgcctatactctctagttttatggatagtg

SEQ ID NO: 395345 - DNA, 33 bp, Homo sapien
caaagaaacttgctcagtaggagcttgcttact

SEQ ID NO: 395346 - DNA, 33 bp, Homo sapien
caaagaaacttgctcattaggagcttgcttact

SEQ ID NO: 395347 - DNA, 33 bp, Homo sapien
gttttccaaagcttcactattgccccgagaata

SEQ ID NO: 395348 - DNA, 33 bp, Homo sapien
gttttccaaagcttcattattgccccgagaata

SEQ ID NO: 395349 - DNA, 33 bp, Homo sapien
taaccaagagaaatacacactcgagtaacctta

SEQ ID NO: 395350 - DNA, 33 bp, Homo sapien
taaccaagagaaatacgcactcgagtaacctta

SEQ ID NO: 395351 - DNA, 33 bp, Homo sapien
aagtataccagtgtcacacagaggaaaatatgg

SEQ ID NO: 395352 - DNA, 33 bp, Homo sapien
aagtataccagtgtcatacagaggaaaatatgg

SEQ ID NO: 395353 - DNA, 33 bp, Homo sapien
aactgctgatcgaatacatgtggaaaaaaagta

SEQ ID NO: 395354 - DNA, 33 bp, Homo sapien
aactgctgatcgaatatatgtggaaaaaaagta

SEQ ID NO: 395355 - DNA, 33 bp, Homo sapien
tcaactgtgagacaagacccaaacaacaatctc

SEQ ID NO: 395356 - DNA, 33 bp, Homo sapien
tcaactgtgagacaaggcccaaacaacaatctc

SEQ ID NO: 395357 - DNA, 33 bp, Homo sapien
ctggttctggtgagcaagttttcgaaggtggtt

SEQ ID NO: 395358 - DNA, 33 bp, Homo sapien
ctggttctggtgagcaggttttcgaaggtggtt

SEQ ID NO: 395359 - DNA, 33 bp, Homo sapien
catgccaacaacacagaatcaggattaaggaaa

SEQ ID NO: 395360 - DNA, 33 bp, Homo sapien
catgccaacaacacagcatcaggattaaggaaa

SEQ ID NO: 395361 - DNA, 33 bp, Homo sapien
actggtaaagaaatgacatagtcagaaaggcat

SEQ ID NO: 395362 - DNA, 33 bp, Homo sapien
actggtaaagaaatgatatagtcagaaaggcat

SEQ ID NO: 395363 - DNA, 33 bp, Homo sapien
aagctctgatgagcaaaaggctatttacgtgat

SEQ ID NO: 395364 - DNA, 33 bp, Homo sapien
aagctctgatgagcaagaggctatttacgtgat

SEQ ID NO: 395365 - DNA, 33 bp, Homo sapien
atcactaggtttttccactgtaaagttgctatt

SEQ ID NO: 395366 - DNA, 33 bp, Homo sapien
atcactaggtttttccgctgtaaagttgctatt

SEQ ID NO: 395367 - DNA, 33 bp, Homo sapien
agacaattctgaaagacaagagatgctgcccgt

SEQ ID NO: 395368 - DNA, 33 bp, Homo sapien
agacaattctgaaagagaagagatgctgcccgt

SEQ ID NO: 395369 - DNA, 33 bp, Homo sapien
ttcttttttgaccataaccttcaacctttctgc

SEQ ID NO: 395370 - DNA, 33 bp, Homo sapien
ttcttttttgaccatagccttcaacctttctgc

SEQ ID NO: 395371 - DNA, 33 bp, Homo sapien
ctgcgcccggcaaaaaattttaattaatagaga

SEQ ID NO: 395372 - DNA, 33 bp, Homo sapien
ctgcgcccggcaaaaatttttaattaatagaga

SEQ ID NO: 395373 - DNA, 33 bp, Homo sapien
agctgctgagaaagaacgtatatccagatgcag

SEQ ID NO: 395374 - DNA, 33 bp, Homo sapien
agctgctgagaaagaatgtatatccagatgcag

SEQ ID NO: 395375 - DNA, 33 bp, Homo sapien
agaccagatgctcaagaaacacttggggatcag

SEQ ID NO: 395376 - DNA, 33 bp, Homo sapien
agaccagatgctcaaggaacacttggggatcag

SEQ ID NO: 395377 - DNA, 33 bp, Homo sapien
aggcagtgtggcccgaagcttaaaaagttactc

SEQ ID NO: 395378 - DNA, 33 bp, Homo sapien
aggcagtgtggcccgaggcttaaaaagttactc

SEQ ID NO: 395379 - DNA, 33 bp, Homo sapien
tgaaatcgtcgatgaacgggcactgtggggtgg

SEQ ID NO: 395380 - DNA, 33 bp, Homo sapien
tgaaatcgtcgatgaatgggcactgtggggtgg

SEQ ID NO: 395381 - DNA, 33 bp, Homo sapien
gaagggactacaacagaaaggaggtggagccaa

SEQ ID NO: 395382 - DNA, 33 bp, Homo sapien
gaagggactacaacaggaaggaggtggagccaa

SEQ ID NO: 395383 - DNA, 33 bp, Homo sapien
cgaaatagatttcgtacgccgggcacagtggct

SEQ ID NO: 395384 - DNA, 33 bp, Homo sapien
cgaaatagatttcgtaggccgggcacagtggct

SEQ ID NO: 395385 - DNA, 33 bp, Homo sapien
ccctgggaccagaaccaatctctgtcctccgcc

SEQ ID NO: 395386 - DNA, 33 bp, Homo sapien
ccctgggaccagaaccgatctctgtcctccgcc

SEQ ID NO: 395387 - DNA, 33 bp, Homo sapien
tgaacctggtgacagacggcctacctgccacgg

SEQ ID NO: 395388 - DNA, 33 bp, Homo sapien
tgaacctggtgacagatggcctacctgccacgg

SEQ ID NO: 395389 - DNA, 33 bp, Homo sapien
aattagattaagatgaaggtcaacatcaaggtc

SEQ ID NO: 395390 - DNA, 33 bp, Homo sapien
aattagattaagatgagggtcaacatcaaggtc

SEQ ID NO: 395391 - DNA, 33 bp, Homo sapien
tgtgcaacgactcggcgctggactacaacgagg

SEQ ID NO: 395392 - DNA, 33 bp, Homo sapien
tgtgcaacgactcggctctggactacaacgagg

SEQ ID NO: 395393 - DNA, 33 bp, Homo sapien
ctgctgagcagcgagtcacctgtttgttcgtct

SEQ ID NO: 395394 - DNA, 33 bp, Homo sapien
ctgctgagcagcgagttacctgtttgttcgtct

SEQ ID NO: 395395 - DNA, 33 bp, Homo sapien
ctgtaggactgggaccaccgtgcttcccacttc

SEQ ID NO: 395396 - DNA, 33 bp, Homo sapien
ctgtaggactgggaccgccgtgcttcccacttc

SEQ ID NO: 395397 - DNA, 33 bp, Homo sapien
cctgggttaaaacagcaagtcacagatccgaac

SEQ ID NO: 395398 - DNA, 33 bp, Homo sapien
cctgggttaaaacagcgagtcacagatccgaac

SEQ ID NO: 395399 - DNA, 33 bp, Homo sapien
atgaagcaaaaactgacggaaatgaagcgggga

SEQ ID NO: 395400 - DNA, 33 bp, Homo sapien
atgaagcaaaaactgatggaaatgaagcgggga

SEQ ID NO: 395401 - DNA, 33 bp, Homo sapien
tgtactggataaaaaaaaagattcgaccaggca

SEQ ID NO: 395402 - DNA, 33 bp, Homo sapien
tgtactggataaaaaacaagattcgaccaggca

SEQ ID NO: 395403 - DNA, 33 bp, Homo sapien
gagcccaggaacatgacaagagaagagacttgg

SEQ ID NO: 395404 - DNA, 33 bp, Homo sapien
gagcccaggaacatgagaagagaagagacttgg

SEQ ID NO: 395405 - DNA, 33 bp, Homo sapien
aagtcaatgagaataacggaggctgccccattc

SEQ ID NO: 395406 - DNA, 33 bp, Homo sapien
aagtcaatgagaataatggaggctgccccattc

SEQ ID NO: 395407 - DNA, 33 bp, Homo sapien
tcagaccacctctaagcagcatcattctgaaag

SEQ ID NO: 395408 - DNA, 33 bp, Homo sapien
tcagaccacctctaagtagcatcattctgaaag

SEQ ID NO: 395409 - DNA, 33 bp, Homo sapien
caaatgaacttcctcagggactgcgtgtgtgtg

SEQ ID NO: 395410 - DNA, 33 bp, Homo sapien
caaatgaacttcctcatggactgcgtgtgtgtg

SEQ ID NO: 395411 - DNA, 33 bp, Homo sapien
acttggaaactgggaaaatggcgacaaagcttt

SEQ ID NO: 395412 - DNA, 33 bp, Homo sapien
acttggaaactgggaagatggcgacaaagcttt

SEQ ID NO: 395413 - DNA, 33 bp, Homo sapien
aggtctccgtgctcagccaaagcgttgatctcc

SEQ ID NO: 395414 - DNA, 33 bp, Homo sapien
aggtctccgtgctcagtcaaagcgttgatctcc

SEQ ID NO: 395415 - DNA, 33 bp, Homo sapien
ggctgtgtttccaaaaatatctataaaaatcac

SEQ ID NO: 395416 - DNA, 33 bp, Homo sapien
ggctgtgtttccaaaagtatctataaaaatcac

SEQ ID NO: 395417 - DNA, 33 bp, Homo sapien
gaggaagtattctagcacaacaaaaaatgaatt

SEQ ID NO: 395418 - DNA, 33 bp, Homo sapien
gaggaagtattctagcgcaacaaaaaatgaatt

SEQ ID NO: 395419 - DNA, 33 bp, Homo sapien
catcagtaacacctaactgttgactgaatataa

SEQ ID NO: 395420 - DNA, 33 bp, Homo sapien
catcagtaacacctaattgttgactgaatataa

SEQ ID NO: 395421 - DNA, 33 bp, Homo sapien
tcccgagtgtttattacgtggctacacccagca

SEQ ID NO: 395422 - DNA, 33 bp, Homo sapien
tcccgagtgtttattatgtggctacacccagca

SEQ ID NO: 395423 - DNA, 33 bp, Homo sapien
taagactgatatgcaacgccctttgtggtttaa

SEQ ID NO: 395424 - DNA, 33 bp, Homo sapien
taagactgatatgcaaggccctttgtggtttaa

SEQ ID NO: 395425 - DNA, 33 bp, Homo sapien
ggtcatggtcagtctcactgagtccaggcttgc

SEQ ID NO: 395426 - DNA, 33 bp, Homo sapien
ggtcatggtcagtctccctgagtccaggcttgc

SEQ ID NO: 395427 - DNA, 33 bp, Homo sapien
caacacctcaaatctacgcacctttcaccatcc

SEQ ID NO: 395428 - DNA, 33 bp, Homo sapien
caacacctcaaatctatgcacctttcaccatcc

SEQ ID NO: 395429 - DNA, 33 bp, Homo sapien
gtaagtgccagggacaatactccttttgcagtg

SEQ ID NO: 395430 - DNA, 33 bp, Homo sapien
gtaagtgccagggacagtactccttttgcagtg

SEQ ID NO: 395431 - DNA, 33 bp, Homo sapien
gtggtgctacgtgaacaaagtggttggcacata

SEQ ID NO: 395432 - DNA, 33 bp, Homo sapien
gtggtgctacgtgaacgaagtggttggcacata

SEQ ID NO: 395433 - DNA, 33 bp, Homo sapien
gccacgtttccatcagaaggctgcctggtgagc

SEQ ID NO: 395434 - DNA, 33 bp, Homo sapien
gccacgtttccatcagtaggctgcctggtgagc

SEQ ID NO: 395435 - DNA, 33 bp, Homo sapien
actgtaaattagtaaactggcacctcatattgt

SEQ ID NO: 395436 - DNA, 33 bp, Homo sapien
actgtaaattagtaaattggcacctcatattgt

SEQ ID NO: 395437 - DNA, 33 bp, Homo sapien
gtctataggtctattacattgggcatttttcaa

SEQ ID NO: 395438 - DNA, 33 bp, Homo sapien
gtctataggtctattatattgggcatttttcaa

SEQ ID NO: 395439 - DNA, 33 bp, Homo sapien
tcagggaaggaagcgcaccctttacagcaagcc

SEQ ID NO: 395440 - DNA, 33 bp, Homo sapien
tcagggaaggaagcgcgccctttacagcaagcc

SEQ ID NO: 395441 - DNA, 33 bp, Homo sapien
gttgcctctgttgggaataagcagctctgctaa

SEQ ID NO: 395442 - DNA, 33 bp, Homo sapien
gttgcctctgttgggagtaagcagctctgctaa

SEQ ID NO: 395443 - DNA, 33 bp, Homo sapien
cacaaacatccttcaaagcttacacaaaataac

SEQ ID NO: 395444 - DNA, 33 bp, Homo sapien
cacaaacatccttcaaggcttacacaaaataac

SEQ ID NO: 395445 - DNA, 33 bp, Homo sapien
tgtacagtttgaaaacaagtataaagccatttc

SEQ ID NO: 395446 - DNA, 33 bp, Homo sapien
tgtacagtttgaaaacgagtataaagccatttc

SEQ ID NO: 395447 - DNA, 33 bp, Homo sapien
tctaactgtgaggcagactcttggcttccatca

SEQ ID NO: 395448 - DNA, 33 bp, Homo sapien
tctaactgtgaggcaggctcttggcttccatca

SEQ ID NO: 395449 - DNA, 33 bp, Homo sapien
cctttgtaaaggttccaaaaagctggagggaaa

SEQ ID NO: 395450 - DNA, 33 bp, Homo sapien
cctttgtaaaggttccgaaaagctggagggaaa

SEQ ID NO: 395451 - DNA, 33 bp, Homo sapien
cagataaattttgtgcagaagaacacttcaaaa

SEQ ID NO: 395452 - DNA, 33 bp, Homo sapien
cagataaattttgtgcggaagaacacttcaaaa

SEQ ID NO: 395453 - DNA, 33 bp, Homo sapien
ctgttggagggaggaaactagccaagatacggt

SEQ ID NO: 395454 - DNA, 33 bp, Homo sapien
ctgttggagggaggaagctagccaagatacggt

SEQ ID NO: 395455 - DNA, 33 bp, Homo sapien
ctcttggcctacacaacgagacacttcagtact

SEQ ID NO: 395456 - DNA, 33 bp, Homo sapien
ctcttggcctacacaatgagacacttcagtact

SEQ ID NO: 395457 - DNA, 33 bp, Homo sapien
gcgaagaatggttttacgatttgtccactgttg

SEQ ID NO: 395458 - DNA, 33 bp, Homo sapien
gcgaagaatggttttatgatttgtccactgttg

SEQ ID NO: 395459 - DNA, 33 bp, Homo sapien
ggtcagtgatggtgcacagagagctcatgactt

SEQ ID NO: 395460 - DNA, 33 bp, Homo sapien
ggtcagtgatggtgcatagagagctcatgactt

SEQ ID NO: 395461 - DNA, 33 bp, Homo sapien
gaggcttattacagtagcgtattggtattattt

SEQ ID NO: 395462 - DNA, 33 bp, Homo sapien
gaggcttattacagtatcgtattggtattattt

SEQ ID NO: 395463 - DNA, 33 bp, Homo sapien
actcatctaaagtccactatttagcagtatcac

SEQ ID NO: 395464 - DNA, 33 bp, Homo sapien
actcatctaaagtccattatttagcagtatcac

SEQ ID NO: 395465 - DNA, 33 bp, Homo sapien
tttacagactgaaaaagtgcccattccaccttc

SEQ ID NO: 395466 - DNA, 33 bp, Homo sapien
tttacagactgaaaaattgcccattccaccttc

SEQ ID NO: 395467 - DNA, 33 bp, Homo sapien
gtgcatgtctacattcaagctactgagactgag

SEQ ID NO: 395468 - DNA, 33 bp, Homo sapien
gtgcatgtctacattccagctactgagactgag

SEQ ID NO: 395469 - DNA, 33 bp, Homo sapien
aatatcagggaaattacctgttaggaatatata

SEQ ID NO: 395470 - DNA, 33 bp, Homo sapien
aatatcagggaaattatctgttaggaatatata

SEQ ID NO: 395471 - DNA, 33 bp, Homo sapien
agataacaataagcgcaatttccaccattaaac

SEQ ID NO: 395472 - DNA, 33 bp, Homo sapien
agataacaataagcgcgatttccaccattaaac

SEQ ID NO: 395473 - DNA, 33 bp, Homo sapien
atttcaatcagtagtacagcaaagttcactttg

SEQ ID NO: 395474 - DNA, 33 bp, Homo sapien
atttcaatcagtagtatagcaaagttcactttg

SEQ ID NO: 395475 - DNA, 33 bp, Homo sapien
aagttgatagaatgccaatgtgtttaaacatat

SEQ ID NO: 395476 - DNA, 33 bp, Homo sapien
aagttgatagaatgcccatgtgtttaaacatat

SEQ ID NO: 395477 - DNA, 33 bp, Homo sapien
gagatttagacaactgacagagaatctgggact

SEQ ID NO: 395478 - DNA, 33 bp, Homo sapien
gagatttagacaactggcagagaatctgggact

SEQ ID NO: 395479 - DNA, 33 bp, Homo sapien
tttagcacctagcctacagtctgaaccagctgg

SEQ ID NO: 395480 - DNA, 33 bp, Homo sapien
tttagcacctagcctagagtctgaaccagctgg

SEQ ID NO: 395481 - DNA, 33 bp, Homo sapien
ctaaaggatcattcccaaaacgtgccatgccct

SEQ ID NO: 395482 - DNA, 33 bp, Homo sapien
ctaaaggatcattcccgaaacgtgccatgccct

SEQ ID NO: 395483 - DNA, 33 bp, Homo sapien
ccacaataggccaatcaacaggaaaagaaagta

SEQ ID NO: 395484 - DNA, 33 bp, Homo sapien
ccacaataggccaatcgacaggaaaagaaagta

SEQ ID NO: 395485 - DNA, 33 bp, Homo sapien
tcctctcctcctcttcaaatcggttacagcctc

SEQ ID NO: 395486 - DNA, 33 bp, Homo sapien
tcctctcctcctcttcgaatcggttacagcctc

SEQ ID NO: 395487 - DNA, 33 bp, Homo sapien
gcaaaattccgtctcacgcacaaaaaaaaagaa

SEQ ID NO: 395488 - DNA, 33 bp, Homo sapien
gcaaaattccgtctcatgcacaaaaaaaaagaa

SEQ ID NO: 395489 - DNA, 33 bp, Homo sapien
tctagaatctgtgtcacgagaatggtgatcacc

SEQ ID NO: 395490 - DNA, 33 bp, Homo sapien
tctagaatctgtgtcatgagaatggtgatcacc

SEQ ID NO: 395491 - DNA, 33 bp, Homo sapien
ctgcgcctggcgctaaactgttctgagtactgc

SEQ ID NO: 395492 - DNA, 33 bp, Homo sapien
ctgcgcctggcgctaagctgttctgagtactgc

SEQ ID NO: 395493 - DNA, 33 bp, Homo sapien
gaattgccgaaattacagatggtcagacctcac

SEQ ID NO: 395494 - DNA, 33 bp, Homo sapien
gaattgccgaaattacggatggtcagacctcac

SEQ ID NO: 395495 - DNA, 33 bp, Homo sapien
ctctccctggctgggcaaacgtgtggaagttga

SEQ ID NO: 395496 - DNA, 33 bp, Homo sapien
ctctccctggctgggcgaacgtgtggaagttga

SEQ ID NO: 395497 - DNA, 33 bp, Homo sapien
agcccctgtacaaatcactaccaatcaagcagc

SEQ ID NO: 395498 - DNA, 33 bp, Homo sapien
agcccctgtacaaatcgctaccaatcaagcagc

SEQ ID NO: 395499 - DNA, 33 bp, Homo sapien
aactatgtaatgcttcaccctgaaaggcaagct

SEQ ID NO: 395500 - DNA, 33 bp, Homo sapien
aactatgtaatgcttcgccctgaaaggcaagct

SEQ ID NO: 395501 - DNA, 33 bp, Homo sapien
cgaacgcgagagtcaccggaaaagctaggaggg

SEQ ID NO: 395502 - DNA, 33 bp, Homo sapien
cgaacgcgagagtcactggaaaagctaggaggg

SEQ ID NO: 395503 - DNA, 33 bp, Homo sapien
cagagctgggagcataagagcttcacacacact

SEQ ID NO: 395504 - DNA, 33 bp, Homo sapien
cagagctgggagcataggagcttcacacacact

SEQ ID NO: 395505 - DNA, 33 bp, Homo sapien
actgcagtcctgcacaacttttatacacgaaaa

SEQ ID NO: 395506 - DNA, 33 bp, Homo sapien
actgcagtcctgcacagcttttatacacgaaaa

SEQ ID NO: 395507 - DNA, 33 bp, Homo sapien
actcattgtggaaaaactcaaagcatgtaagga

SEQ ID NO: 395508 - DNA, 33 bp, Homo sapien
actcattgtggaaaaagtcaaagcatgtaagga

SEQ ID NO: 395509 - DNA, 33 bp, Homo sapien
tgatcgataagacatacgagtggatatgggact

SEQ ID NO: 395510 - DNA, 33 bp, Homo sapien
tgatcgataagacatatgagtggatatgggact

SEQ ID NO: 395511 - DNA, 33 bp, Homo sapien
gttcctggcaccatcagacccaccgctccttag

SEQ ID NO: 395512 - DNA, 33 bp, Homo sapien
gttcctggcaccatcatacccaccgctccttag

SEQ ID NO: 395513 - DNA, 33 bp, Homo sapien
gttttgaaaattaagaaagacagctcacttcaa

SEQ ID NO: 395514 - DNA, 33 bp, Homo sapien
gttttgaaaattaagagagacagctcacttcaa

SEQ ID NO: 395515 - DNA, 33 bp, Homo sapien
acacacaggcagaggaaccggatctcatcctgc

SEQ ID NO: 395516 - DNA, 33 bp, Homo sapien
acacacaggcagaggagccggatctcatcctgc

SEQ ID NO: 395517 - DNA, 33 bp, Homo sapien
ggtcaaggcgtaaaagcactcaatccttatctg

SEQ ID NO: 395518 - DNA, 33 bp, Homo sapien
ggtcaaggcgtaaaagtactcaatccttatctg

SEQ ID NO: 395519 - DNA, 33 bp, Homo sapien
cagaccttcttcctacacattctccttgggtgt

SEQ ID NO: 395520 - DNA, 33 bp, Homo sapien
cagaccttcttcctacgcattctccttgggtgt

SEQ ID NO: 395521 - DNA, 33 bp, Homo sapien
aggtatgaaattagaaaatcatttgcttttgtt

SEQ ID NO: 395522 - DNA, 33 bp, Homo sapien
aggtatgaaattagaacatcatttgcttttgtt

SEQ ID NO: 395523 - DNA, 33 bp, Homo sapien
taaacaatgtgggagacgattaaaggccaccag

SEQ ID NO: 395524 - DNA, 33 bp, Homo sapien
taaacaatgtgggagatgattaaaggccaccag

SEQ ID NO: 395525 - DNA, 33 bp, Homo sapien
gcctgtttctggacctcagctatcttttttggg

SEQ ID NO: 395526 - DNA, 33 bp, Homo sapien
gcctgtttctggacctgagctatcttttttggg

SEQ ID NO: 395527 - DNA, 33 bp, Homo sapien
gagaaaccaatggtacagaaaactgaggcttag

SEQ ID NO: 395528 - DNA, 33 bp, Homo sapien
gagaaaccaatggtacggaaaactgaggcttag

SEQ ID NO: 395529 - DNA, 33 bp, Homo sapien
gaaagctgaaagtttgaacattggattatatta

SEQ ID NO: 395530 - DNA, 33 bp, Homo sapien
gaaagctgaaagtttggacattggattatatta

SEQ ID NO: 395531 - DNA, 33 bp, Homo sapien
taacaccagacagaaaactaattagatttattt

SEQ ID NO: 395532 - DNA, 33 bp, Homo sapien
taacaccagacagaaagctaattagatttattt

SEQ ID NO: 395533 - DNA, 33 bp, Homo sapien
ctctgcagcttttctcaaagtatgaaagtatct

SEQ ID NO: 395534 - DNA, 33 bp, Homo sapien
ctctgcagcttttctcgaagtatgaaagtatct

SEQ ID NO: 395535 - DNA, 33 bp, Homo sapien
gtcatacctatttgtaacgtcactggcaaatgt

SEQ ID NO: 395536 - DNA, 33 bp, Homo sapien
gtcatacctatttgtatcgtcactggcaaatgt

SEQ ID NO: 395537 - DNA, 33 bp, Homo sapien
ttgctgtcctggactacacgcaacatcacaggt

SEQ ID NO: 395538 - DNA, 33 bp, Homo sapien
ttgctgtcctggactatacgcaacatcacaggt

SEQ ID NO: 395539 - DNA, 33 bp, Homo sapien
ttctcacatggaaaataagactaatgatactat

SEQ ID NO: 395540 - DNA, 33 bp, Homo sapien
ttctcacatggaaaatgagactaatgatactat

SEQ ID NO: 395541 - DNA, 33 bp, Homo sapien
tgttccgagtgatttaacctatcctaatgactt

SEQ ID NO: 395542 - DNA, 33 bp, Homo sapien
tgttccgagtgatttagcctatcctaatgactt

SEQ ID NO: 395543 - DNA, 33 bp, Homo sapien
cagtgaagaatgccagaaacttccaattttctc

SEQ ID NO: 395544 - DNA, 33 bp, Homo sapien
cagtgaagaatgccaggaacttccaattttctc

SEQ ID NO: 395545 - DNA, 33 bp, Homo sapien
gaaatgaaaggcaacccaaataaacagagagtt

SEQ ID NO: 395546 - DNA, 33 bp, Homo sapien
gaaatgaaaggcaacctaaataaacagagagtt

SEQ ID NO: 395547 - DNA, 33 bp, Homo sapien
ttaccttagtatgacaagtcaacctcatatgga

SEQ ID NO: 395548 - DNA, 33 bp, Homo sapien
ttaccttagtatgacacgtcaacctcatatgga

SEQ ID NO: 395549 - DNA, 33 bp, Homo sapien
cagtgccatgtttctcaattggagacctacaac

SEQ ID NO: 395550 - DNA, 33 bp, Homo sapien
cagtgccatgtttctcgattggagacctacaac

SEQ ID NO: 395551 - DNA, 33 bp, Homo sapien
aatctctatataggacaaggtataaacactaac

SEQ ID NO: 395552 - DNA, 33 bp, Homo sapien
aatctctatataggacgaggtataaacactaac

SEQ ID NO: 395553 - DNA, 33 bp, Homo sapien
cccaggctttatctcaaattttgttagtgttta

SEQ ID NO: 395554 - DNA, 33 bp, Homo sapien
cccaggctttatctcacattttgttagtgttta

SEQ ID NO: 395555 - DNA, 33 bp, Homo sapien
aggctggcttttctcacggctttatcaccatgc

SEQ ID NO: 395556 - DNA, 33 bp, Homo sapien
aggctggcttttctcatggctttatcaccatgc

SEQ ID NO: 395557 - DNA, 33 bp, Homo sapien
tcttaaaataggtagactcaagatgtgccatgg

SEQ ID NO: 395558 - DNA, 33 bp, Homo sapien
tcttaaaataggtagattcaagatgtgccatgg

SEQ ID NO: 395559 - DNA, 33 bp, Homo sapien
ttacaatcatataaagccaaaattgtattttct

SEQ ID NO: 395560 - DNA, 33 bp, Homo sapien
ttacaatcatataaaggcaaaattgtattttct

SEQ ID NO: 395561 - DNA, 33 bp, Homo sapien
tgaacaaagtcagtcgaaaaaggtgacatagtg

SEQ ID NO: 395562 - DNA, 33 bp, Homo sapien
tgaacaaagtcagtcgtaaaaggtgacatagtg

SEQ ID NO: 395563 - DNA, 33 bp, Homo sapien
tgcatgaatgggtgacacttgcctcttgtgctt

SEQ ID NO: 395564 - DNA, 33 bp, Homo sapien
tgcatgaatgggtgacgcttgcctcttgtgctt

SEQ ID NO: 395565 - DNA, 33 bp, Homo sapien
agcgtattttattgcacctaaggcagcagtgat

SEQ ID NO: 395566 - DNA, 33 bp, Homo sapien
agcgtattttattgcatctaaggcagcagtgat

SEQ ID NO: 395567 - DNA, 33 bp, Homo sapien
ataggtgtaagattaccggcagtgtcatatgaa

SEQ ID NO: 395568 - DNA, 33 bp, Homo sapien
ataggtgtaagattactggcagtgtcatatgaa

SEQ ID NO: 395569 - DNA, 33 bp, Homo sapien
gattctctctgctctcacatctaagtaagcaag

SEQ ID NO: 395570 - DNA, 33 bp, Homo sapien
gattctctctgctctcgcatctaagtaagcaag

SEQ ID NO: 395571 - DNA, 33 bp, Homo sapien
ctttcccaagtccaataaaagggaacatggcaa

SEQ ID NO: 395572 - DNA, 33 bp, Homo sapien
ctttcccaagtccaatgaaagggaacatggcaa

SEQ ID NO: 395573 - DNA, 33 bp, Homo sapien
gaatgatgactgtataacttttatctctctttt

SEQ ID NO: 395574 - DNA, 33 bp, Homo sapien
gaatgatgactgtatatcttttatctctctttt

SEQ ID NO: 395575 - DNA, 33 bp, Homo sapien
acaagattggtttttgcaaatgtaaatctcatg

SEQ ID NO: 395576 - DNA, 33 bp, Homo sapien
acaagattggtttttgtaaatgtaaatctcatg

SEQ ID NO: 395577 - DNA, 33 bp, Homo sapien
atttatttctataaaacaggcgagatcaaagta

SEQ ID NO: 395578 - DNA, 33 bp, Homo sapien
atttatttctataaaataggcgagatcaaagta

SEQ ID NO: 395579 - DNA, 33 bp, Homo sapien
cgttgcaacacggagaagatattgtatatgcga

SEQ ID NO: 395580 - DNA, 33 bp, Homo sapien
cgttgcaacacggagaggatattgtatatgcga

SEQ ID NO: 395581 - DNA, 33 bp, Homo sapien
cgttaagatacttgccccttccttggttatcta

SEQ ID NO: 395582 - DNA, 33 bp, Homo sapien
cgttaagatacttgcctcttccttggttatcta

SEQ ID NO: 395583 - DNA, 33 bp, Homo sapien
aacaatttcagtcaacacttactgggtactatg

SEQ ID NO: 395584 - DNA, 33 bp, Homo sapien
aacaatttcagtcaacgcttactgggtactatg

SEQ ID NO: 395585 - DNA, 33 bp, Homo sapien
ctcaataagggagtaaatgtagataggtgaaga

SEQ ID NO: 395586 - DNA, 33 bp, Homo sapien
ctcaataagggagtaactgtagataggtgaaga

SEQ ID NO: 395587 - DNA, 33 bp, Homo sapien
aatgctgtagagacacagagatttttttgtttg

SEQ ID NO: 395588 - DNA, 33 bp, Homo sapien
aatgctgtagagacacggagatttttttgtttg

SEQ ID NO: 395589 - DNA, 33 bp, Homo sapien
cccaatatagttggaggccattattcagcctac

SEQ ID NO: 395590 - DNA, 33 bp, Homo sapien
cccaatatagttggagtccattattcagcctac

SEQ ID NO: 395591 - DNA, 33 bp, Homo sapien
ctggtcctgttactcgcagctgttatctcaaca

SEQ ID NO: 395592 - DNA, 33 bp, Homo sapien
ctggtcctgttactcgtagctgttatctcaaca

SEQ ID NO: 395593 - DNA, 33 bp, Homo sapien
tatctcaggctcatagaactataggtaaacttt

SEQ ID NO: 395594 - DNA, 33 bp, Homo sapien
tatctcaggctcataggactataggtaaacttt

SEQ ID NO: 395595 - DNA, 33 bp, Homo sapien
tggcctgtgtggccaacggaatgcagctgagta

SEQ ID NO: 395596 - DNA, 33 bp, Homo sapien
tggcctgtgtggccaatggaatgcagctgagta

SEQ ID NO: 395597 - DNA, 33 bp, Homo sapien
agtccaggtcaggaaaaatgcaggccagacgca

SEQ ID NO: 395598 - DNA, 33 bp, Homo sapien
agtccaggtcaggaaagatgcaggccagacgca

SEQ ID NO: 395599 - DNA, 33 bp, Homo sapien
cgcatcctgcttcagaacctgtactccgcagct

SEQ ID NO: 395600 - DNA, 33 bp, Homo sapien
cgcatcctgcttcagatcctgtactccgcagct

SEQ ID NO: 395601 - DNA, 33 bp, Homo sapien
tttatagcttgaagccaatataaggaatttcct

SEQ ID NO: 395602 - DNA, 33 bp, Homo sapien
tttatagcttgaagccgatataaggaatttcct

SEQ ID NO: 395603 - DNA, 33 bp, Homo sapien
tcgctcactccaataaatctcaataatgccttt

SEQ ID NO: 395604 - DNA, 33 bp, Homo sapien
tcgctcactccaataagtctcaataatgccttt

SEQ ID NO: 395605 - DNA, 33 bp, Homo sapien
ctgttctctttgatgccatctccacaatgggga

SEQ ID NO: 395606 - DNA, 33 bp, Homo sapien
ctgttctctttgatgctatctccacaatgggga

SEQ ID NO: 395607 - DNA, 33 bp, Homo sapien
gaatctgggtttgtcacaagctccctcaaatct

SEQ ID NO: 395608 - DNA, 33 bp, Homo sapien
gaatctgggtttgtcataagctccctcaaatct

SEQ ID NO: 395609 - DNA, 33 bp, Homo sapien
attattcaaagagcaggcatacttgggaagtag

SEQ ID NO: 395610 - DNA, 33 bp, Homo sapien
attattcaaagagcagtcatacttgggaagtag

SEQ ID NO: 395611 - DNA, 33 bp, Homo sapien
ggtcttgagaagagaacaggtaccccacagaag

SEQ ID NO: 395612 - DNA, 33 bp, Homo sapien
ggtcttgagaagagaataggtaccccacagaag

SEQ ID NO: 395613 - DNA, 33 bp, Homo sapien
tgtgctgtcatccatcagaggaagtgctttgaa

SEQ ID NO: 395614 - DNA, 33 bp, Homo sapien
tgtgctgtcatccatcggaggaagtgctttgaa

SEQ ID NO: 395615 - DNA, 33 bp, Homo sapien
tatccctctctagccaataagacctgcctcacc

SEQ ID NO: 395616 - DNA, 33 bp, Homo sapien
tatccctctctagccattaagacctgcctcacc

SEQ ID NO: 395617 - DNA, 33 bp, Homo sapien
ttgacatatgcacagaggatctcttttgattct

SEQ ID NO: 395618 - DNA, 33 bp, Homo sapien
ttgacatatgcacagatgatctcttttgattct

SEQ ID NO: 395619 - DNA, 33 bp, Homo sapien
ccagcttcatttgccaggttgcgtccaatatcc

SEQ ID NO: 395620 - DNA, 33 bp, Homo sapien
ccagcttcatttgccatgttgcgtccaatatcc

SEQ ID NO: 395621 - DNA, 33 bp, Homo sapien
ctgctaaggtgggtaacgcccgtgcagctcgac

SEQ ID NO: 395622 - DNA, 33 bp, Homo sapien
ctgctaaggtgggtaatgcccgtgcagctcgac

SEQ ID NO: 395623 - DNA, 33 bp, Homo sapien
cctcaaatcattattggagaccctattgaatag

SEQ ID NO: 395624 - DNA, 33 bp, Homo sapien
cctcaaatcattattgtagaccctattgaatag

SEQ ID NO: 395625 - DNA, 33 bp, Homo sapien
aaaatcagggtaataacgaaaaagcagtagggc

SEQ ID NO: 395626 - DNA, 33 bp, Homo sapien
aaaatcagggtaataatgaaaaagcagtagggc

SEQ ID NO: 395627 - DNA, 33 bp, Homo sapien
agcgtaggactcaaggcacaactcatttatatg

SEQ ID NO: 395628 - DNA, 33 bp, Homo sapien
agcgtaggactcaaggtacaactcatttatatg

SEQ ID NO: 395629 - DNA, 33 bp, Homo sapien
agcccaatagtttgccaccgttgccagatttgg

SEQ ID NO: 395630 - DNA, 33 bp, Homo sapien
agcccaatagtttgccgccgttgccagatttgg

SEQ ID NO: 395631 - DNA, 33 bp, Homo sapien
ggctgctgaggtctgaggagcggcttttttttt

SEQ ID NO: 395632 - DNA, 33 bp, Homo sapien
ggctgctgaggtctgatgagcggcttttttttt

SEQ ID NO: 395633 - DNA, 33 bp, Homo sapien
gtggtattccttgaagcagatgtggatgactgt

SEQ ID NO: 395634 - DNA, 33 bp, Homo sapien
gtggtattccttgaagtagatgtggatgactgt

SEQ ID NO: 395635 - DNA, 33 bp, Homo sapien
gcttcacactctgaagaaacatcctgacagtca

SEQ ID NO: 395636 - DNA, 33 bp, Homo sapien
gcttcacactctgaagcaacatcctgacagtca

SEQ ID NO: 395637 - DNA, 33 bp, Homo sapien
atacagagagccaagacggagaggagcaaagac

SEQ ID NO: 395638 - DNA, 33 bp, Homo sapien
atacagagagccaagatggagaggagcaaagac

SEQ ID NO: 395639 - DNA, 33 bp, Homo sapien
aatctagacacggctcaaggcgggtttccacct

SEQ ID NO: 395640 - DNA, 33 bp, Homo sapien
aatctagacacggctcgaggcgggtttccacct

SEQ ID NO: 395641 - DNA, 33 bp, Homo sapien
acagcaggcatcaataacacgcttgggccacac

SEQ ID NO: 395642 - DNA, 33 bp, Homo sapien
acagcaggcatcaataccacgcttgggccacac

SEQ ID NO: 395643 - DNA, 33 bp, Homo sapien
gttcccacaaaggataaccaggacccacctctc

SEQ ID NO: 395644 - DNA, 33 bp, Homo sapien
gttcccacaaaggatacccaggacccacctctc

SEQ ID NO: 395645 - DNA, 33 bp, Homo sapien
cgaaaggaggaaatgcaccaagtctctattcga

SEQ ID NO: 395646 - DNA, 33 bp, Homo sapien
cgaaaggaggaaatgcgccaagtctctattcga

SEQ ID NO: 395647 - DNA, 33 bp, Homo sapien
gtcatatctcatgtcacatctaccgggtgttct

SEQ ID NO: 395648 - DNA, 33 bp, Homo sapien
gtcatatctcatgtcatatctaccgggtgttct

SEQ ID NO: 395649 - DNA, 33 bp, Homo sapien
cgcccctcattgcacaaagctcccttgtctgga

SEQ ID NO: 395650 - DNA, 33 bp, Homo sapien
cgcccctcattgcacagagctcccttgtctgga

SEQ ID NO: 395651 - DNA, 33 bp, Homo sapien
gcagtcacacgggttccattacaacataaatta

SEQ ID NO: 395652 - DNA, 33 bp, Homo sapien
gcagtcacacgggttctattacaacataaatta

SEQ ID NO: 395653 - DNA, 33 bp, Homo sapien
tattacagtaaaaccagaaatttgatgttggta

SEQ ID NO: 395654 - DNA, 33 bp, Homo sapien
tattacagtaaaaccataaatttgatgttggta

SEQ ID NO: 395655 - DNA, 33 bp, Homo sapien
atccacaggcaaacaacaaggcaagacagccac

SEQ ID NO: 395656 - DNA, 33 bp, Homo sapien
atccacaggcaaacaagaaggcaagacagccac

SEQ ID NO: 395657 - DNA, 33 bp, Homo sapien
tacttctgctctagcagccttcttttttgacct

SEQ ID NO: 395658 - DNA, 33 bp, Homo sapien
tacttctgctctagcatccttcttttttgacct

SEQ ID NO: 395659 - DNA, 33 bp, Homo sapien
tggttagagccgtgtcacttcaccgtacactgc

SEQ ID NO: 395660 - DNA, 33 bp, Homo sapien
tggttagagccgtgtcgcttcaccgtacactgc

SEQ ID NO: 395661 - DNA, 33 bp, Homo sapien
gagtaagcaggtgtccaatcgtttgtcaaacca

SEQ ID NO: 395662 - DNA, 33 bp, Homo sapien
gagtaagcaggtgtccgatcgtttgtcaaacca

SEQ ID NO: 395663 - DNA, 33 bp, Homo sapien
ttaatctacaggggaacacctacttgttcttag

SEQ ID NO: 395664 - DNA, 33 bp, Homo sapien
ttaatctacaggggaatacctacttgttcttag

SEQ ID NO: 395665 - DNA, 33 bp, Homo sapien
ttcgaggttgttgctaactggctcaaacccacc

SEQ ID NO: 395666 - DNA, 33 bp, Homo sapien
ttcgaggttgttgctagctggctcaaacccacc

SEQ ID NO: 395667 - DNA, 33 bp, Homo sapien
gtatgctctcatctcacagtcttcgctcttttt

SEQ ID NO: 395668 - DNA, 33 bp, Homo sapien
gtatgctctcatctcatagtcttcgctcttttt

SEQ ID NO: 395669 - DNA, 33 bp, Homo sapien
aaacaaaaagcaaaccagaagtcagatattgtc

SEQ ID NO: 395670 - DNA, 33 bp, Homo sapien
aaacaaaaagcaaaccggaagtcagatattgtc

SEQ ID NO: 395671 - DNA, 33 bp, Homo sapien
ttcccagcgagtactacagctcataaaggcagt

SEQ ID NO: 395672 - DNA, 33 bp, Homo sapien
ttcccagcgagtactagagctcataaaggcagt

SEQ ID NO: 395673 - DNA, 33 bp, Homo sapien
actcttctgttaggtacaccttttgttcttttg

SEQ ID NO: 395674 - DNA, 33 bp, Homo sapien
actcttctgttaggtagaccttttgttcttttg

SEQ ID NO: 395675 - DNA, 33 bp, Homo sapien
gtgagaaaagaccttacgatgtgaacgtcaggg

SEQ ID NO: 395676 - DNA, 33 bp, Homo sapien
gtgagaaaagaccttaggatgtgaacgtcaggg

SEQ ID NO: 395677 - DNA, 33 bp, Homo sapien
tgagaggtcacttgagcatgggagtttaaggct

SEQ ID NO: 395678 - DNA, 33 bp, Homo sapien
tgagaggtcacttgagtatgggagtttaaggct

SEQ ID NO: 395679 - DNA, 33 bp, Homo sapien
agtggtttgtttaaggccacactgcagttagtg

SEQ ID NO: 395680 - DNA, 33 bp, Homo sapien
agtggtttgtttaaggtcacactgcagttagtg

SEQ ID NO: 395681 - DNA, 33 bp, Homo sapien
agtggcgtgatcacggaacactacagcctcgac

SEQ ID NO: 395682 - DNA, 33 bp, Homo sapien
agtggcgtgatcacgggacactacagcctcgac

SEQ ID NO: 395683 - DNA, 33 bp, Homo sapien
cccttttagtcccctcaacggctgtcatttctt

SEQ ID NO: 395684 - DNA, 33 bp, Homo sapien
cccttttagtcccctcgacggctgtcatttctt

SEQ ID NO: 395685 - DNA, 33 bp, Homo sapien
ttgcagaaggtgggaaatagttgtagttgcagt

SEQ ID NO: 395686 - DNA, 33 bp, Homo sapien
ttgcagaaggtgggaagtagttgtagttgcagt

SEQ ID NO: 395687 - DNA, 33 bp, Homo sapien
tcgtcacatctcccctgactcagtttttttgtt

SEQ ID NO: 395688 - DNA, 33 bp, Homo sapien
tcgtcacatctccccttactcagtttttttgtt

SEQ ID NO: 395689 - DNA, 33 bp, Homo sapien
agtactcacttgataccgggcattgttccacat

SEQ ID NO: 395690 - DNA, 33 bp, Homo sapien
agtactcacttgatactgggcattgttccacat

SEQ ID NO: 395691 - DNA, 33 bp, Homo sapien
tcatatctccttcacgacctaatatttgaccaa

SEQ ID NO: 395692 - DNA, 33 bp, Homo sapien
tcatatctccttcacggcctaatatttgaccaa

SEQ ID NO: 395693 - DNA, 33 bp, Homo sapien
tgctactataataaaaacagaagactgggacta

SEQ ID NO: 395694 - DNA, 33 bp, Homo sapien
tgctactataataaaagcagaagactgggacta

SEQ ID NO: 395695 - DNA, 33 bp, Homo sapien
ggagaattacctcaaccgtctcttgaccatgtc

SEQ ID NO: 395696 - DNA, 33 bp, Homo sapien
ggagaattacctcaactgtctcttgaccatgtc

SEQ ID NO: 395697 - DNA, 33 bp, Homo sapien
atttgacttagctagaccagattccttccaacc

SEQ ID NO: 395698 - DNA, 33 bp, Homo sapien
atttgacttagctagagcagattccttccaacc

SEQ ID NO: 395699 - DNA, 33 bp, Homo sapien
gcttcataaccctggacgtattcactaactccc

SEQ ID NO: 395700 - DNA, 33 bp, Homo sapien
gcttcataaccctggatgtattcactaactccc

SEQ ID NO: 395701 - DNA, 33 bp, Homo sapien
ggagaggtgcgggttacagtgagtagaaatcct

SEQ ID NO: 395702 - DNA, 33 bp, Homo sapien
ggagaggtgcgggttagagtgagtagaaatcct

SEQ ID NO: 395703 - DNA, 33 bp, Homo sapien
gcctgctaacagtgcccatgtttaaagtccaag

SEQ ID NO: 395704 - DNA, 33 bp, Homo sapien
gcctgctaacagtgccgatgtttaaagtccaag

SEQ ID NO: 395705 - DNA, 33 bp, Homo sapien
ttatgtataatatccacggttttgttgtattta

SEQ ID NO: 395706 - DNA, 33 bp, Homo sapien
ttatgtataatatccagggttttgttgtattta

SEQ ID NO: 395707 - DNA, 33 bp, Homo sapien
aggctgctgccaggtaagtcccagcagttgtca

SEQ ID NO: 395708 - DNA, 33 bp, Homo sapien
aggctgctgccaggtaggtcccagcagttgtca

SEQ ID NO: 395709 - DNA, 33 bp, Homo sapien
cgcccaagaatgccaccgatgcccagatcatct

SEQ ID NO: 395710 - DNA, 33 bp, Homo sapien
cgcccaagaatgccactgatgcccagatcatct

SEQ ID NO: 395711 - DNA, 33 bp, Homo sapien
gtggagaacatcaacaatactctgggccctgct

SEQ ID NO: 395712 - DNA, 33 bp, Homo sapien
gtggagaacatcaacagtactctgggccctgct

SEQ ID NO: 395713 - DNA, 33 bp, Homo sapien
gctccaagagtgaggcaaaactaaggaccagag

SEQ ID NO: 395714 - DNA, 33 bp, Homo sapien
gctccaagagtgaggcgaaactaaggaccagag

SEQ ID NO: 395715 - DNA, 33 bp, Homo sapien
gctggttccatgcttacggccactggacactgt

SEQ ID NO: 395716 - DNA, 33 bp, Homo sapien
gctggttccatgcttatggccactggacactgt

SEQ ID NO: 395717 - DNA, 33 bp, Homo sapien
ctccaactccaatccaaggggaatgagaaagaa

SEQ ID NO: 395718 - DNA, 33 bp, Homo sapien
ctccaactccaatccagggggaatgagaaagaa

SEQ ID NO: 395719 - DNA, 33 bp, Homo sapien
cggaatcagccttgcactcagctgtcatggcag

SEQ ID NO: 395720 - DNA, 33 bp, Homo sapien
cggaatcagccttgcattcagctgtcatggcag

SEQ ID NO: 395721 - DNA, 33 bp, Homo sapien
tctctgctaaaaatacaaacattagtcgggtgt

SEQ ID NO: 395722 - DNA, 33 bp, Homo sapien
tctctgctaaaaatacgaacattagtcgggtgt

SEQ ID NO: 395723 - DNA, 33 bp, Homo sapien
cgttcagtacatttgcaagtgacaaggaataaa

SEQ ID NO: 395724 - DNA, 33 bp, Homo sapien
cgttcagtacatttgcgagtgacaaggaataaa

SEQ ID NO: 395725 - DNA, 33 bp, Homo sapien
gcagcatctcttctccaatgtcccgatacactt

SEQ ID NO: 395726 - DNA, 33 bp, Homo sapien
gcagcatctcttctccgatgtcccgatacactt

SEQ ID NO: 395727 - DNA, 33 bp, Homo sapien
gcccagtgagttattgccaagttcctgttctgc

SEQ ID NO: 395728 - DNA, 33 bp, Homo sapien
gcccagtgagttattgtcaagttcctgttctgc

SEQ ID NO: 395729 - DNA, 33 bp, Homo sapien
aggtctcagaaatacagtggtgatataaaacaa

SEQ ID NO: 395730 - DNA, 33 bp, Homo sapien
aggtctcagaaatacattggtgatataaaacaa

SEQ ID NO: 395731 - DNA, 33 bp, Homo sapien
ccctctaggccatcaaatattggctgggtgcgg

SEQ ID NO: 395732 - DNA, 33 bp, Homo sapien
ccctctaggccatcaagtattggctgggtgcgg

SEQ ID NO: 395733 - DNA, 33 bp, Homo sapien
attgtctttctttggagctgctttccttttgtt

SEQ ID NO: 395734 - DNA, 33 bp, Homo sapien
attgtctttctttggatctgctttccttttgtt

SEQ ID NO: 395735 - DNA, 33 bp, Homo sapien
ggtccagctttgggctgaatggcagcacccacg

SEQ ID NO: 395736 - DNA, 33 bp, Homo sapien
ggtccagctttgggcttaatggcagcacccacg

SEQ ID NO: 395737 - DNA, 33 bp, Homo sapien
tggctcttggccccacccatcagtgtagaccca

SEQ ID NO: 395738 - DNA, 33 bp, Homo sapien
tggctcttggccccactcatcagtgtagaccca

SEQ ID NO: 395739 - DNA, 33 bp, Homo sapien
tcttccataatatgaaatctctgattagagtat

SEQ ID NO: 395740 - DNA, 33 bp, Homo sapien
tcttccataatatgaattctctgattagagtat

SEQ ID NO: 395741 - DNA, 33 bp, Homo sapien
gtgtcagttccaagatcaccacattgaagactt

SEQ ID NO: 395742 - DNA, 33 bp, Homo sapien
gtgtcagttccaagattaccacattgaagactt

SEQ ID NO: 395743 - DNA, 33 bp, Homo sapien
aagctctttgtgctacacctgaaaatgaggtgg

SEQ ID NO: 395744 - DNA, 33 bp, Homo sapien
aagctctttgtgctacgcctgaaaatgaggtgg

SEQ ID NO: 395745 - DNA, 33 bp, Homo sapien
tactgcccaggaaccaatgcaaaatttaattaa

SEQ ID NO: 395746 - DNA, 33 bp, Homo sapien
tactgcccaggaaccagtgcaaaatttaattaa

SEQ ID NO: 395747 - DNA, 33 bp, Homo sapien
attcagaaaacaaatcagatggttgtctctact

SEQ ID NO: 395748 - DNA, 33 bp, Homo sapien
attcagaaaacaaatcggatggttgtctctact

SEQ ID NO: 395749 - DNA, 33 bp, Homo sapien; identical to SEQ ID NO: 395747

SEQ ID NO: 395750 - DNA, 33 bp, Homo sapien; identical to SEQ ID NO: 395748

SEQ ID NO: 395751 - DNA, 33 bp, Homo sapien
aaaagttaggatgcaacaagaccagaaaatgta

SEQ ID NO: 395752 - DNA, 33 bp, Homo sapien
aaaagttaggatgcaataagaccagaaaatgta

SEQ ID NO: 395753 - DNA, 33 bp, Homo sapien
acttaatgcacaatcccaataaaaatgcaaagt

SEQ ID NO: 395754 - DNA, 33 bp, Homo sapien
acttaatgcacaatcctaataaaaatgcaaagt

SEQ ID NO: 395755 - DNA, 33 bp, Homo sapien
cgctttctaacagcccactctcttggaaactaa

SEQ ID NO: 395756 - DNA, 33 bp, Homo sapien
cgctttctaacagcccgctctcttggaaactaa

SEQ ID NO: 395757 - DNA, 33 bp, Homo sapien
tgttagcgctgagtgaagatgggcttttgctta

SEQ ID NO: 395758 - DNA, 33 bp, Homo sapien
tgttagcgctgagtgaggatgggcttttgctta

SEQ ID NO: 395759 - DNA, 33 bp, Homo sapien
tagtgctataccctggccatagtacagttaact

SEQ ID NO: 395760 - DNA, 33 bp, Homo sapien
tagtgctataccctggtcatagtacagttaact

SEQ ID NO: 395761 - DNA, 33 bp, Homo sapien
agatgtggtgtgggaacctgggcacgagagcac

SEQ ID NO: 395762 - DNA, 33 bp, Homo sapien
agatgtggtgtgggaatctgggcacgagagcac

SEQ ID NO: 395763 - DNA, 33 bp, Homo sapien
gaaagaggaatgaggcaaggtttccggtctttt

SEQ ID NO: 395764 - DNA, 33 bp, Homo sapien
gaaagaggaatgaggcgaggtttccggtctttt

SEQ ID NO: 395765 - DNA, 33 bp, Homo sapien
tgtctgtaagccatcaaaaagttcaggtcttaa

SEQ ID NO: 395766 - DNA, 33 bp, Homo sapien
tgtctgtaagccatcagaaagttcaggtcttaa

SEQ ID NO: 395767 - DNA, 33 bp, Homo sapien
ttcttttctgtttcaccgatctatttatgtatt

SEQ ID NO: 395768 - DNA, 33 bp, Homo sapien
ttcttttctgtttcactgatctatttatgtatt

SEQ ID NO: 395769 - DNA, 33 bp, Homo sapien
ggtgagtgtcagtcagaacatggagaactcaga

SEQ ID NO: 395770 - DNA, 33 bp, Homo sapien
ggtgagtgtcagtcaggacatggagaactcaga

SEQ ID NO: 395771 - DNA, 33 bp, Homo sapien
tcctaagaataagtcaaagattatcaaagccct

SEQ ID NO: 395772 - DNA, 33 bp, Homo sapien
tcctaagaataagtcagagattatcaaagccct

SEQ ID NO: 395773 - DNA, 33 bp, Homo sapien
actgccaatccagcagccagagtgatttttttt

SEQ ID NO: 395774 - DNA, 33 bp, Homo sapien
actgccaatccagcagtcagagtgatttttttt

SEQ ID NO: 395775 - DNA, 33 bp, Homo sapien
tgcatcctccaaaaccaggagtcctgctcatcc

SEQ ID NO: 395776 - DNA, 33 bp, Homo sapien
tgcatcctccaaaacccggagtcctgctcatcc

SEQ ID NO: 395777 - DNA, 33 bp, Homo sapien
atgctctacttgtgaacgtgtaacacacagaaa

SEQ ID NO: 395778 - DNA, 33 bp, Homo sapien
atgctctacttgtgaatgtgtaacacacagaaa

SEQ ID NO: 395779 - DNA, 33 bp, Homo sapien
aaagcagaaaactgaaaaaactcagatctttga

SEQ ID NO: 395780 - DNA, 33 bp, Homo sapien
aaagcagaaaactgaagaaactcagatctttga

SEQ ID NO: 395781 - DNA, 33 bp, Homo sapien
agttctggctatgcctcaaaaaaatttacactt

SEQ ID NO: 395782 - DNA, 33 bp, Homo sapien
agttctggctatgccttaaaaaaatttacactt

SEQ ID NO: 395783 - DNA, 33 bp, Homo sapien
cacagtgctatgagaccgaactttctaaaacgc

SEQ ID NO: 395784 - DNA, 33 bp, Homo sapien
cacagtgctatgagactgaactttctaaaacgc

SEQ ID NO: 395785 - DNA, 33 bp, Homo sapien
agctgatgagtatcaacaacacatacattttac

SEQ ID NO: 395786 - DNA, 33 bp, Homo sapien
agctgatgagtatcaagaacacatacattttac

SEQ ID NO: 395787 - DNA, 33 bp, Homo sapien
ttcctttggcttttcacacccagttcatctcag

SEQ ID NO: 395788 - DNA, 33 bp, Homo sapien
ttcctttggcttttcatacccagttcatctcag

SEQ ID NO: 395789 - DNA, 33 bp, Homo sapien
aaagctttacaaaatccctctggacttgctcac

SEQ ID NO: 395790 - DNA, 33 bp, Homo sapien
aaagctttacaaaatctctctggacttgctcac

SEQ ID NO: 395791 - DNA, 33 bp, Homo sapien
tgctttgtaatttaaccatgactgtgtttttcc

SEQ ID NO: 395792 - DNA, 33 bp, Homo sapien
tgctttgtaatttaactatgactgtgtttttcc

SEQ ID NO: 395793 - DNA, 33 bp, Homo sapien
cctatctatgtattcactcctaggcaagactgt

SEQ ID NO: 395794 - DNA, 33 bp, Homo sapien
cctatctatgtattcattcctaggcaagactgt

SEQ ID NO: 395795 - DNA, 33 bp, Homo sapien
aagaagatgaccacacagtaagtgcaggctgct

SEQ ID NO: 395796 - DNA, 33 bp, Homo sapien
aagaagatgaccacacggtaagtgcaggctgct

SEQ ID NO: 395797 - DNA, 33 bp, Homo sapien
ctctccccaggtgctagatttccagcagcacca

SEQ ID NO: 395798 - DNA, 33 bp, Homo sapien
ctctccccaggtgctatatttccagcagcacca

SEQ ID NO: 395799 - DNA, 33 bp, Homo sapien
atggaggtgtccaataagcaattagatacacaa

SEQ ID NO: 395800 - DNA, 33 bp, Homo sapien
atggaggtgtccaataggcaattagatacacaa

SEQ ID NO: 395801 - DNA, 33 bp, Homo sapien
actaattgaaactggactcaggagacctcatct

SEQ ID NO: 395802 - DNA, 33 bp, Homo sapien
actaattgaaactggattcaggagacctcatct

SEQ ID NO: 395803 - DNA, 33 bp, Homo sapien
accattccacacaagaatacatgaaggctgggc

SEQ ID NO: 395804 - DNA, 33 bp, Homo sapien
accattccacacaagagtacatgaaggctgggc

SEQ ID NO: 395805 - DNA, 33 bp, Homo sapien
gccggcgctctgacgacctaaggccagcgggcg

SEQ ID NO: 395806 - DNA, 33 bp, Homo sapien
gccggcgctctgacgatctaaggccagcgggcg

SEQ ID NO: 395807 - DNA, 33 bp, Homo sapien
atatgatgtgaagtacagcaatatcccaagttc

SEQ ID NO: 395808 - DNA, 33 bp, Homo sapien
atatgatgtgaagtacggcaatatcccaagttc

SEQ ID NO: 395809 - DNA, 33 bp, Homo sapien
aatgtcagaatccacaacgttaggctcacaatg

SEQ ID NO: 395810 - DNA, 33 bp, Homo sapien
aatgtcagaatccacatcgttaggctcacaatg

SEQ ID NO: 395811 - DNA, 33 bp, Homo sapien
gtcaaatactatacacaactttggtaatctaaa

SEQ ID NO: 395812 - DNA, 33 bp, Homo sapien
gtcaaatactatacacgactttggtaatctaaa

SEQ ID NO: 395813 - DNA, 33 bp, Homo sapien
aacacagaactatacacgactggcatatgagat

SEQ ID NO: 395814 - DNA, 33 bp, Homo sapien
aacacagaactatacatgactggcatatgagat

SEQ ID NO: 395815 - DNA, 33 bp, Homo sapien
aatttatccaacctgacgacagattttgaaagc

SEQ ID NO: 395816 - DNA, 33 bp, Homo sapien
aatttatccaacctgaggacagattttgaaagc

SEQ ID NO: 395817 - DNA, 33 bp, Homo sapien
tagacctattattgccagatcttccaattttct

SEQ ID NO: 395818 - DNA, 33 bp, Homo sapien
tagacctattattgccggatcttccaattttct

SEQ ID NO: 395819 - DNA, 33 bp, Homo sapien
ttggtaccatcttagccatgatttctgggtcag

SEQ ID NO: 395820 - DNA, 33 bp, Homo sapien
ttggtaccatcttagctatgatttctgggtcag

SEQ ID NO: 395821 - DNA, 33 bp, Homo sapien
acctggtgatgttaagcaattgactgtcttaga

SEQ ID NO: 395822 - DNA, 33 bp, Homo sapien
acctggtgatgttaagtaattgactgtcttaga

SEQ ID NO: 395823 - DNA, 33 bp, Homo sapien
atgactttttactcaactgaaaacactatcttt

SEQ ID NO: 395824 - DNA, 33 bp, Homo sapien
atgactttttactcaattgaaaacactatcttt

SEQ ID NO: 395825 - DNA, 33 bp, Homo sapien
atgttgccttattcagaaaaggggtctttacag

SEQ ID NO: 395826 - DNA, 33 bp, Homo sapien
atgttgccttattcagcaaaggggtctttacag

SEQ ID NO: 395827 - DNA, 33 bp, Homo sapien
aaggtccttacctaaccgcctagatggccccgc

SEQ ID NO: 395828 - DNA, 33 bp, Homo sapien
aaggtccttacctaactgcctagatggccccgc

SEQ ID NO: 395829 - DNA, 33 bp, Homo sapien
agaacttgaagggaaggctagcagtagtatgga

SEQ ID NO: 395830 - DNA, 33 bp, Homo sapien
agaacttgaagggaagtctagcagtagtatgga

SEQ ID NO: 395831 - DNA, 33 bp, Homo sapien
cgaactttctttctcccagtcttggaagcattc

SEQ ID NO: 395832 - DNA, 33 bp, Homo sapien
cgaactttctttctcctagtcttggaagcattc

SEQ ID NO: 395833 - DNA, 33 bp, Homo sapien
tgagaaagccctgagacctgccccacaggcatt

SEQ ID NO: 395834 - DNA, 33 bp, Homo sapien
tgagaaagccctgagagctgccccacaggcatt

SEQ ID NO: 395835 - DNA, 33 bp, Homo sapien
tttggacagtttcttacggcccctgtccaggaa

SEQ ID NO: 395836 - DNA, 33 bp, Homo sapien
tttggacagtttcttatggcccctgtccaggaa

SEQ ID NO: 395837 - DNA, 33 bp, Homo sapien
caggcggcagaaaatacggagacagctactgta

SEQ ID NO: 395838 - DNA, 33 bp, Homo sapien
caggcggcagaaaatatggagacagctactgta

SEQ ID NO: 395839 - DNA, 33 bp, Homo sapien
cacatcaggaaaatacagagacaggcggcagaa

SEQ ID NO: 395840 - DNA, 33 bp, Homo sapien
cacatcaggaaaatacggagacaggcggcagaa

SEQ ID NO: 395841 - DNA, 33 bp, Homo sapien
ttattgtagtccatgacactttgtctcttgttt

SEQ ID NO: 395842 - DNA, 33 bp, Homo sapien
ttattgtagtccatgatactttgtctcttgttt

SEQ ID NO: 395843 - DNA, 33 bp, Homo sapien
acattgtccgtactcaataagcttttgtgtaat

SEQ ID NO: 395844 - DNA, 33 bp, Homo sapien
acattgtccgtactcagtaagcttttgtgtaat

SEQ ID NO: 395845 - DNA, 33 bp, Homo sapien
gcaaccctgtaatgtcgcttcattgcttctggg

SEQ ID NO: 395846 - DNA, 33 bp, Homo sapien
gcaaccctgtaatgtctcttcattgcttctggg

SEQ ID NO: 395847 - DNA, 33 bp, Homo sapien
tcaggctggaccagacaactctgagtgatgaga

SEQ ID NO: 395848 - DNA, 33 bp, Homo sapien
tcaggctggaccagacgactctgagtgatgaga

SEQ ID NO: 395849 - DNA, 33 bp, Homo sapien
gacttggacaagtcgccgaattctctgggactc

SEQ ID NO: 395850 - DNA, 33 bp, Homo sapien
gacttggacaagtcgctgaattctctgggactc

SEQ ID NO: 395851 - DNA, 33 bp, Homo sapien
aaggcagggtggaaacagtgaaacttaaatgag

SEQ ID NO: 395852 - DNA, 33 bp, Homo sapien
aaggcagggtggaaacggtgaaacttaaatgag

SEQ ID NO: 395853 - DNA, 33 bp, Homo sapien
gagattgttcattaaaaaggagttacagtggga

SEQ ID NO: 395854 - DNA, 33 bp, Homo sapien
gagattgttcattaaagaggagttacagtggga

SEQ ID NO: 395855 - DNA, 33 bp, Homo sapien
atagagctttatttgaaacctatttggcaggtc

SEQ ID NO: 395856 - DNA, 33 bp, Homo sapien
atagagctttatttgatacctatttggcaggtc

SEQ ID NO: 395857 - DNA, 33 bp, Homo sapien
tcaaggaactgaatcaactagacaaggcagaga

SEQ ID NO: 395858 - DNA, 33 bp, Homo sapien
tcaaggaactgaatcagctagacaaggcagaga

SEQ ID NO: 395859 - DNA, 33 bp, Homo sapien
tacataaattagccgaaaatggtgtcaggcgcc

SEQ ID NO: 395860 - DNA, 33 bp, Homo sapien
tacataaattagccgagaatggtgtcaggcgcc

SEQ ID NO: 395861 - DNA, 33 bp, Homo sapien
agcaaaaagatgaaaaatagtatcaataagaat

SEQ ID NO: 395862 - DNA, 33 bp, Homo sapien
agcaaaaagatgaaaagtagtatcaataagaat

SEQ ID NO: 395863 - DNA, 33 bp, Homo sapien
tgacttctaactgcccaatctgaccaccatgct

SEQ ID NO: 395864 - DNA, 33 bp, Homo sapien
tgacttctaactgcccgatctgaccaccatgct

SEQ ID NO: 395865 - DNA, 33 bp, Homo sapien
ttgcagtacctgccaacggtgtccctcggcaac

SEQ ID NO: 395866 - DNA, 33 bp, Homo sapien
ttgcagtacctgccaatggtgtccctcggcaac

SEQ ID NO: 395867 - DNA, 33 bp, Homo sapien
tggatatttctttaacccaacagctgtaaagtg

SEQ ID NO: 395868 - DNA, 33 bp, Homo sapien
tggatatttctttaactcaacagctgtaaagtg

SEQ ID NO: 395869 - DNA, 33 bp, Homo sapien
tgtcatttttgacacacagaaaaaggtggctgt

SEQ ID NO: 395870 - DNA, 33 bp, Homo sapien
tgtcatttttgacacagagaaaaaggtggctgt

SEQ ID NO: 395871 - DNA, 33 bp, Homo sapien
gaggctgaaaacaggaagaataatcgaagatgt

SEQ ID NO: 395872 - DNA, 33 bp, Homo sapien
gaggctgaaaacaggaggaataatcgaagatgt

SEQ ID NO: 395873 - DNA, 33 bp, Homo sapien
agttttttaaaaggaccatggcaacttccttag

SEQ ID NO: 395874 - DNA, 33 bp, Homo sapien
agttttttaaaaggacgatggcaacttccttag

SEQ ID NO: 395875 - DNA, 33 bp, Homo sapien
cctaaggaccgagatacagggtttatatttggc

SEQ ID NO: 395876 - DNA, 33 bp, Homo sapien
cctaaggaccgagatatagggtttatatttggc

SEQ ID NO: 395877 - DNA, 33 bp, Homo sapien
tagaaggttgaagaaagtgaagttgattagatt

SEQ ID NO: 395878 - DNA, 33 bp, Homo sapien
tagaaggttgaagaaattgaagttgattagatt

SEQ ID NO: 395879 - DNA, 33 bp, Homo sapien
agcaacattgcatagaacaaggactttgataga

SEQ ID NO: 395880 - DNA, 33 bp, Homo sapien
agcaacattgcatagagcaaggactttgataga

SEQ ID NO: 395881 - DNA, 33 bp, Homo sapien
tctccacggtgctgaccaggtgtgtaggtccca

SEQ ID NO: 395882 - DNA, 33 bp, Homo sapien
tctccacggtgctgacgaggtgtgtaggtccca

SEQ ID NO: 395883 - DNA, 33 bp, Homo sapien
ctgctggaggaaaatcactgccatccatttctg

SEQ ID NO: 395884 - DNA, 33 bp, Homo sapien
ctgctggaggaaaatcgctgccatccatttctg

SEQ ID NO: 395885 - DNA, 33 bp, Homo sapien
atgcggtgccactttacccctcaaagaagcttt

SEQ ID NO: 395886 - DNA, 33 bp, Homo sapien
atgcggtgccactttatccctcaaagaagcttt

SEQ ID NO: 395887 - DNA, 33 bp, Homo sapien
acattccaacagctcacgttttttgagtgcttt

SEQ ID NO: 395888 - DNA, 33 bp, Homo sapien
acattccaacagctcatgttttttgagtgcttt

SEQ ID NO: 395889 - DNA, 33 bp, Homo sapien
attattctccctcaaaatacacagaatttcaca

SEQ ID NO: 395890 - DNA, 33 bp, Homo sapien
attattctccctcaaagtacacagaatttcaca

SEQ ID NO: 395891 - DNA, 33 bp, Homo sapien
atccatcagtgagaaacagattatgggaaaggt

SEQ ID NO: 395892 - DNA, 33 bp, Homo sapien
atccatcagtgagaaagagattatgggaaaggt

SEQ ID NO: 395893 - DNA, 33 bp, Homo sapien
agtggatcttctactacgtcaccttcctcacca

SEQ ID NO: 395894 - DNA, 33 bp, Homo sapien
agtggatcttctactatgtcaccttcctcacca

SEQ ID NO: 395895 - DNA, 33 bp, Homo sapien
cattcacctgtgtttacgaggatgagtttggtg

SEQ ID NO: 395896 - DNA, 33 bp, Homo sapien
cattcacctgtgtttatgaggatgagtttggtg

SEQ ID NO: 395897 - DNA, 33 bp, Homo sapien
aggtccaattgttgccagatcaccctatatttt

SEQ ID NO: 395898 - DNA, 33 bp, Homo sapien
aggtccaattgttgccggatcaccctatatttt

SEQ ID NO: 395899 - DNA, 33 bp, Homo sapien
actctctgatatcttccaagttgtccatttctt

SEQ ID NO: 395900 - DNA, 33 bp, Homo sapien
actctctgatatcttcgaagttgtccatttctt

SEQ ID NO: 395901 - DNA, 33 bp, Homo sapien
catcacctcatttaaccgtaatcactttccaaa

SEQ ID NO: 395902 - DNA, 33 bp, Homo sapien
catcacctcatttaactgtaatcactttccaaa

SEQ ID NO: 395903 - DNA, 33 bp, Homo sapien
ctgccctcatgaagaccaagactgcataagaat

SEQ ID NO: 395904 - DNA, 33 bp, Homo sapien
ctgccctcatgaagactaagactgcataagaat

SEQ ID NO: 395905 - DNA, 33 bp, Homo sapien
gtctgggccctgctcaacagtcaggtaatccca

SEQ ID NO: 395906 - DNA, 33 bp, Homo sapien
gtctgggccctgctcagcagtcaggtaatccca

SEQ ID NO: 395907 - DNA, 33 bp, Homo sapien
gagcacctgttcttgacgagtattaatgagcct

SEQ ID NO: 395908 - DNA, 33 bp, Homo sapien
gagcacctgttcttgatgagtattaatgagcct

SEQ ID NO: 395909 - DNA, 33 bp, Homo sapien
aatttagatgatattcaaatgagactttggact

SEQ ID NO: 395910 - DNA, 33 bp, Homo sapien
aatttagatgatattcgaatgagactttggact

SEQ ID NO: 395911 - DNA, 33 bp, Homo sapien
cagggtgaggggctgaggctctgactcgtactt

SEQ ID NO: 395912 - DNA, 33 bp, Homo sapien
cagggtgaggggctgatgctctgactcgtactt

SEQ ID NO: 395913 - DNA, 33 bp, Homo sapien
tgcaaaacacttgacaatgggcatgatctcctt

SEQ ID NO: 395914 - DNA, 33 bp, Homo sapien
tgcaaaacacttgacagtgggcatgatctcctt

SEQ ID NO: 395915 - DNA, 33 bp, Homo sapien
ataagcatggtgggttaaacatggaggcccatt

SEQ ID NO: 395916 - DNA, 33 bp, Homo sapien
ataagcatggtgggttgaacatggaggcccatt

SEQ ID NO: 395917 - DNA, 33 bp, Homo sapien
gtgtgcaccagagagcccttcattcagccatca

SEQ ID NO: 395918 - DNA, 33 bp, Homo sapien
gtgtgcaccagagagctcttcattcagccatca

SEQ ID NO: 395919 - DNA, 33 bp, Homo sapien
tggctaacttaagcaaagcaggatgtactgaca

SEQ ID NO: 395920 - DNA, 33 bp, Homo sapien
tggctaacttaagcaacgcaggatgtactgaca

SEQ ID NO: 395921 - DNA, 33 bp, Homo sapien
ttcaaaatttaaatcaagaggcgagaagatctg

SEQ ID NO: 395922 - DNA, 33 bp, Homo sapien
ttcaaaatttaaatcacgaggcgagaagatctg

SEQ ID NO: 395923 - DNA, 33 bp, Homo sapien
aaagtagggaaatgccacaatttatagatattt

SEQ ID NO: 395924 - DNA, 33 bp, Homo sapien
aaagtagggaaatgccgcaatttatagatattt

SEQ ID NO: 395925 - DNA, 33 bp, Homo sapien
gtccccagctatcaccacagaaatcctcggttt

SEQ ID NO: 395926 - DNA, 33 bp, Homo sapien
gtccccagctatcaccgcagaaatcctcggttt

SEQ ID NO: 395927 - DNA, 33 bp, Homo sapien
tttagttgtctctccacatgggaaaatctgatt

SEQ ID NO: 395928 - DNA, 33 bp, Homo sapien
tttagttgtctctccatatgggaaaatctgatt

SEQ ID NO: 395929 - DNA, 33 bp, Homo sapien
tactgtatagcaaatacgtttgaatattggaca

SEQ ID NO: 395930 - DNA, 33 bp, Homo sapien
tactgtatagcaaatatgtttgaatattggaca

SEQ ID NO: 395931 - DNA, 33 bp, Homo sapien
acaattcaggatcttacgttgcctttagttgtc

SEQ ID NO: 395932 - DNA, 33 bp, Homo sapien
acaattcaggatcttatgttgcctttagttgtc

SEQ ID NO: 395933 - DNA, 33 bp, Homo sapien
aggaaaagagccctcactaaatccaaatctgct

SEQ ID NO: 395934 - DNA, 33 bp, Homo sapien
aggaaaagagccctcattaaatccaaatctgct

SEQ ID NO: 395935 - DNA, 33 bp, Homo sapien
gccccacctcaggagccagaaatctaactctac

SEQ ID NO: 395936 - DNA, 33 bp, Homo sapien
gccccacctcaggagcgagaaatctaactctac

SEQ ID NO: 395937 - DNA, 33 bp, Homo sapien
tggtgaaggaatcacaactgaggtttagcagac

SEQ ID NO: 395938 - DNA, 33 bp, Homo sapien
tggtgaaggaatcacagctgaggtttagcagac

SEQ ID NO: 395939 - DNA, 33 bp, Homo sapien
tatacccaagggatttcaaataagagactcaag

SEQ ID NO: 395940 - DNA, 33 bp, Homo sapien
tatacccaagggatttgaaataagagactcaag

SEQ ID NO: 395941 - DNA, 33 bp, Homo sapien
gagtgcccaccacatacctgacgctgtaacagg

SEQ ID NO: 395942 - DNA, 33 bp, Homo sapien
gagtgcccaccacatatctgacgctgtaacagg

SEQ ID NO: 395943 - DNA, 33 bp, Homo sapien
taagcctctaagttcacgataatttgatgcagc

SEQ ID NO: 395944 - DNA, 33 bp, Homo sapien
taagcctctaagttcatgataatttgatgcagc

SEQ ID NO: 395945 - DNA, 33 bp, Homo sapien
acaggcctagctcaaaataaaggagcaaggcac

SEQ ID NO: 395946 - DNA, 33 bp, Homo sapien
acaggcctagctcaaagtaaaggagcaaggcac

SEQ ID NO: 395947 - DNA, 33 bp, Homo sapien
atgtggtaagtgtcacagcaaataggggaactc

SEQ ID NO: 395948 - DNA, 33 bp, Homo sapien
atgtggtaagtgtcacggcaaataggggaactc

SEQ ID NO: 395949 - DNA, 33 bp, Homo sapien
ctcacttagaagtccaagttaggccccttagat

SEQ ID NO: 395950 - DNA, 33 bp, Homo sapien
ctcacttagaagtccaggttaggccccttagat

SEQ ID NO: 395951 - DNA, 33 bp, Homo sapien
gatgatagcaacagtaaacatttacactgcaat

SEQ ID NO: 395952 - DNA, 33 bp, Homo sapien
gatgatagcaacagtacacatttacactgcaat

SEQ ID NO: 395953 - DNA, 33 bp, Homo sapien
atgaacaaccagaatccactgtgttggaaggac

SEQ ID NO: 395954 - DNA, 33 bp, Homo sapien
atgaacaaccagaatctactgtgttggaaggac

SEQ ID NO: 395955 - DNA, 33 bp, Homo sapien
caagaaataaatgctacctggaccacatcaata

SEQ ID NO: 395956 - DNA, 33 bp, Homo sapien
caagaaataaatgctatctggaccacatcaata

SEQ ID NO: 395957 - DNA, 33 bp, Homo sapien
gccattccagatagaaatcaaatgtgcagatct

SEQ ID NO: 395958 - DNA, 33 bp, Homo sapien
gccattccagatagaactcaaatgtgcagatct

SEQ ID NO: 395959 - DNA, 33 bp, Homo sapien
cttttaagcagtagaacgacatggtcaaatcta

SEQ ID NO: 395960 - DNA, 33 bp, Homo sapien
cttttaagcagtagaatgacatggtcaaatcta

SEQ ID NO: 395961 - DNA, 33 bp, Homo sapien
atgccaaaacgcacccaaactcaatacacaggg

SEQ ID NO: 395962 - DNA, 33 bp, Homo sapien
atgccaaaacgcacccgaactcaatacacaggg

SEQ ID NO: 395963 - DNA, 33 bp, Homo sapien
ccaggagatagtgcccaacactacacaatatag

SEQ ID NO: 395964 - DNA, 33 bp, Homo sapien
ccaggagatagtgcccgacactacacaatatag

SEQ ID NO: 395965 - DNA, 33 bp, Homo sapien
tgtatgtcaaatggaacggagaatatggagagt

SEQ ID NO: 395966 - DNA, 33 bp, Homo sapien
tgtatgtcaaatggaatggagaatatggagagt

SEQ ID NO: 395967 - DNA, 33 bp, Homo sapien
tggaggatgaaggtcacagagtttctggccctc

SEQ ID NO: 395968 - DNA, 33 bp, Homo sapien
tggaggatgaaggtcatagagtttctggccctc

SEQ ID NO: 395969 - DNA, 33 bp, Homo sapien
aagcctctgcagaaacagcttcctaaagtaaca

SEQ ID NO: 395970 - DNA, 33 bp, Homo sapien
aagcctctgcagaaacggcttcctaaagtaaca

SEQ ID NO: 395971 - DNA, 33 bp, Homo sapien
tatgcctcagaagtcagctatgtcctcctttgg

SEQ ID NO: 395972 - DNA, 33 bp, Homo sapien
tatgcctcagaagtcatctatgtcctcctttgg

SEQ ID NO: 395973 - DNA, 33 bp, Homo sapien
cccattgcatttttgaacttggatgcacctgct

SEQ ID NO: 395974 - DNA, 33 bp, Homo sapien
cccattgcatttttgagcttggatgcacctgct

SEQ ID NO: 395975 - DNA, 33 bp, Homo sapien
catagcttgtctcactcaaaacaaccaagatgg

SEQ ID NO: 395976 - DNA, 33 bp, Homo sapien
catagcttgtctcactgaaaacaaccaagatgg

SEQ ID NO: 395977 - DNA, 33 bp, Homo sapien
atttaaattcgaaacaaaagaagcaaatgaaac

SEQ ID NO: 395978 - DNA, 33 bp, Homo sapien
atttaaattcgaaacagaagaagcaaatgaaac

SEQ ID NO: 395979 - DNA, 33 bp, Homo sapien
agcaggtccttgtttaccttggtcattactgtg

SEQ ID NO: 395980 - DNA, 33 bp, Homo sapien
agcaggtccttgtttatcttggtcattactgtg

SEQ ID NO: 395981 - DNA, 33 bp, Homo sapien
tttcagaaatggtgaacgtttttgagaaatata

SEQ ID NO: 395982 - DNA, 33 bp, Homo sapien
tttcagaaatggtgaaggtttttgagaaatata

SEQ ID NO: 395983 - DNA, 33 bp, Homo sapien
acacgtaagtcctccagcaatgagttgtgataa

SEQ ID NO: 395984 - DNA, 33 bp, Homo sapien
acacgtaagtcctccatcaatgagttgtgataa

SEQ ID NO: 395985 - DNA, 33 bp, Homo sapien
ctccatcactctactcaaaagcaaaggttaggg

SEQ ID NO: 395986 - DNA, 33 bp, Homo sapien
ctccatcactctactcgaaagcaaaggttaggg

SEQ ID NO: 395987 - DNA, 33 bp, Homo sapien
tatatagtagacacgccgcaagtatttcatgaa

SEQ ID NO: 395988 - DNA, 33 bp, Homo sapien
tatatagtagacacgctgcaagtatttcatgaa

SEQ ID NO: 395989 - DNA, 33 bp, Homo sapien
atggagataccattaaccagaatatgaaacata

SEQ ID NO: 395990 - DNA, 33 bp, Homo sapien
atggagataccattaagcagaatatgaaacata

SEQ ID NO: 395991 - DNA, 33 bp, Homo sapien
cattttatgattgctccaatttaatgtcaccca

SEQ ID NO: 395992 - DNA, 33 bp, Homo sapien
cattttatgattgctctaatttaatgtcaccca

SEQ ID NO: 395993 - DNA, 33 bp, Homo sapien
ggtcacaggacatttacagagctgttagccatc

SEQ ID NO: 395994 - DNA, 33 bp, Homo sapien
ggtcacaggacatttatagagctgttagccatc

SEQ ID NO: 395995 - DNA, 33 bp, Homo sapien
agtattttcaaaaacactatcaccagataaaaa

SEQ ID NO: 395996 - DNA, 33 bp, Homo sapien
agtattttcaaaaacattatcaccagataaaaa

SEQ ID NO: 395997 - DNA, 33 bp, Homo sapien
agtggtcttttctaccacttagtattttcaaaa

SEQ ID NO: 395998 - DNA, 33 bp, Homo sapien
agtggtcttttctaccgcttagtattttcaaaa

SEQ ID NO: 395999 - DNA, 33 bp, Homo sapien
atagcactcagggcaacgttcccctcctcctgg

SEQ ID NO: 396000 - DNA, 33 bp, Homo sapien
atagcactcagggcaatgttcccctcctcctgg

SEQ ID NO: 396001 - DNA, 33 bp, Homo sapien
tgtcatgccaatcaacacagaatggccaggagg

SEQ ID NO: 396002 - DNA, 33 bp, Homo sapien
tgtcatgccaatcaacgcagaatggccaggagg

SEQ ID NO: 396003 - DNA, 33 bp, Homo sapien
acaatcacagggcgtgcaaacctaaagtcaagg

SEQ ID NO: 396004 - DNA, 33 bp, Homo sapien
acaatcacagggcgtggaaacctaaagtcaagg

SEQ ID NO: 396005 - DNA, 33 bp, Homo sapien
tattgcaaagatcaaacgaggtgttgcatgaaa

SEQ ID NO: 396006 - DNA, 33 bp, Homo sapien
tattgcaaagatcaaatgaggtgttgcatgaaa

SEQ ID NO: 396007 - DNA, 33 bp, Homo sapien
tcctcctaaacaacacgggaagtaggaagacaa

SEQ ID NO: 396008 - DNA, 33 bp, Homo sapien
tcctcctaaacaacactggaagtaggaagacaa

SEQ ID NO: 396009 - DNA, 33 bp, Homo sapien
tagatccattgtctcacgtcttacctaagttct

SEQ ID NO: 396010 - DNA, 33 bp, Homo sapien
tagatccattgtctcatgtcttacctaagttct

SEQ ID NO: 396011 - DNA, 33 bp, Homo sapien
atgtgcacactccccacactcttcacactcaca

SEQ ID NO: 396012 - DNA, 33 bp, Homo sapien
atgtgcacactccccatactcttcacactcaca

SEQ ID NO: 396013 - DNA, 33 bp, Homo sapien
tagccgttgttgtccacctcctccaatagaatg

SEQ ID NO: 396014 - DNA, 33 bp, Homo sapien
tagccgttgttgtccatctcctccaatagaatg

SEQ ID NO: 396015 - DNA, 33 bp, Homo sapien
tggatctcagagtttcaactcccacacatcagt

SEQ ID NO: 396016 - DNA, 33 bp, Homo sapien
tggatctcagagtttccactcccacacatcagt

SEQ ID NO: 396017 - DNA, 33 bp, Homo sapien
caggtattcagataaccaggtcactacatctga

SEQ ID NO: 396018 - DNA, 33 bp, Homo sapien
caggtattcagataactaggtcactacatctga

SEQ ID NO: 396019 - DNA, 33 bp, Homo sapien
atgcatatagacacaaacataaaacaggaaaca

SEQ ID NO: 396020 - DNA, 33 bp, Homo sapien
atgcatatagacacaagcataaaacaggaaaca

SEQ ID NO: 396021 - DNA, 33 bp, Homo sapien
tggatgaaaagttgaacagatgactggctgagt

SEQ ID NO: 396022 - DNA, 33 bp, Homo sapien
tggatgaaaagttgaatagatgactggctgagt

SEQ ID NO: 396023 - DNA, 33 bp, Homo sapien
gaacttctacttggaccctgagcaagtacttcc

SEQ ID NO: 396024 - DNA, 33 bp, Homo sapien
gaacttctacttggactctgagcaagtacttcc

SEQ ID NO: 396025 - DNA, 33 bp, Homo sapien
cctttctttgtgctagaagtggacaggaagtac

SEQ ID NO: 396026 - DNA, 33 bp, Homo sapien
cctttctttgtgctaggagtggacaggaagtac

SEQ ID NO: 396027 - DNA, 33 bp, Homo sapien
cgggtgactcagggcacagaatgagctctttgg

SEQ ID NO: 396028 - DNA, 33 bp, Homo sapien
cgggtgactcagggcagagaatgagctctttgg

SEQ ID NO: 396029 - DNA, 33 bp, Homo sapien
gaggcagtggcactgccgagaaattgtgacatt

SEQ ID NO: 396030 - DNA, 33 bp, Homo sapien
gaggcagtggcactgctgagaaattgtgacatt

SEQ ID NO: 396031 - DNA, 33 bp, Homo sapien
gtcacagaccctcaaacctacacgtccataatg

SEQ ID NO: 396032 - DNA, 33 bp, Homo sapien
gtcacagaccctcaaatctacacgtccataatg

SEQ ID NO: 396033 - DNA, 33 bp, Homo sapien
gagtttacggtaatccaatacagcaactacaga

SEQ ID NO: 396034 - DNA, 33 bp, Homo sapien
gagtttacggtaatccgatacagcaactacaga

SEQ ID NO: 396035 - DNA, 33 bp, Homo sapien
gtttaaaaccaactcaacatcatcaactttaaa

SEQ ID NO: 396036 - DNA, 33 bp, Homo sapien
gtttaaaaccaactcagcatcatcaactttaaa

SEQ ID NO: 396037 - DNA, 33 bp, Homo sapien
gaaacagagcaggagacggcccagtgttctctg

SEQ ID NO: 396038 - DNA, 33 bp, Homo sapien
gaaacagagcaggagatggcccagtgttctctg

SEQ ID NO: 396039 - DNA, 33 bp, Homo sapien
tgttccgaatcacacacgctgaaccttttgcct

SEQ ID NO: 396040 - DNA, 33 bp, Homo sapien
tgttccgaatcacacatgctgaaccttttgcct

SEQ ID NO: 396041 - DNA, 33 bp, Homo sapien
actcctgaaatcttcacggagcccaagaaatgg

SEQ ID NO: 396042 - DNA, 33 bp, Homo sapien
actcctgaaatcttcatggagcccaagaaatgg

SEQ ID NO: 396043 - DNA, 33 bp, Homo sapien
gaaatcaatgcaggagcaaagataagcttccag

SEQ ID NO: 396044 - DNA, 33 bp, Homo sapien
gaaatcaatgcaggaggaaagataagcttccag

SEQ ID NO: 396045 - DNA, 33 bp, Homo sapien
tgtgcctgaaagggcacaaagactctggcattt

SEQ ID NO: 396046 - DNA, 33 bp, Homo sapien
tgtgcctgaaagggcataaagactctggcattt

SEQ ID NO: 396047 - DNA, 33 bp, Homo sapien
agccttagataataaacggaagctaagtagaag

SEQ ID NO: 396048 - DNA, 33 bp, Homo sapien
agccttagataataaagggaagctaagtagaag

SEQ ID NO: 396049 - DNA, 33 bp, Homo sapien
ctggccaacttaagaaggaacacaacgtgtaag

SEQ ID NO: 396050 - DNA, 33 bp, Homo sapien
ctggccaacttaagaatgaacacaacgtgtaag

SEQ ID NO: 396051 - DNA, 33 bp, Homo sapien
agtaaggtaacttgtgcaagatcataaagtgta

SEQ ID NO: 396052 - DNA, 33 bp, Homo sapien
agtaaggtaacttgtgtaagatcataaagtgta

SEQ ID NO: 396053 - DNA, 33 bp, Homo sapien
gagcgctcagaagaaacatgctctgaacagccc

SEQ ID NO: 396054 - DNA, 33 bp, Homo sapien
gagcgctcagaagaaagatgctctgaacagccc

SEQ ID NO: 396055 - DNA, 33 bp, Homo sapien
gttaagaggccacctcaacacgactcacccatg

SEQ ID NO: 396056 - DNA, 33 bp, Homo sapien
gttaagaggccacctcgacacgactcacccatg

SEQ ID NO: 396057 - DNA, 33 bp, Homo sapien
catgggagagcaccacagattctgcaaagtggt

SEQ ID NO: 396058 - DNA, 33 bp, Homo sapien
catgggagagcaccacggattctgcaaagtggt

SEQ ID NO: 396059 - DNA, 33 bp, Homo sapien
ctttacagctctcacactcattatgcaaactta

SEQ ID NO: 396060 - DNA, 33 bp, Homo sapien
ctttacagctctcacattcattatgcaaactta

SEQ ID NO: 396061 - DNA, 33 bp, Homo sapien
cagattatactgccctaacctatactgatatat

SEQ ID NO: 396062 - DNA, 33 bp, Homo sapien
cagattatactgccctgacctatactgatatat

SEQ ID NO: 396063 - DNA, 33 bp, Homo sapien
ttgaacactgattagcagacaaatatctgtgca

SEQ ID NO: 396064 - DNA, 33 bp, Homo sapien
ttgaacactgattagcggacaaatatctgtgca

SEQ ID NO: 396065 - DNA, 33 bp, Homo sapien
accctgggcacagcaacggcgatcttctgatgg

SEQ ID NO: 396066 - DNA, 33 bp, Homo sapien
accctgggcacagcaatggcgatcttctgatgg

SEQ ID NO: 396067 - DNA, 33 bp, Homo sapien
cctctatcaccttctcacatttctttcaacatt

SEQ ID NO: 396068 - DNA, 33 bp, Homo sapien
cctctatcaccttctcgcatttctttcaacatt

SEQ ID NO: 396069 - DNA, 33 bp, Homo sapien
aaatgttggactctgacccttttcttttcttgc

SEQ ID NO: 396070 - DNA, 33 bp, Homo sapien
aaatgttggactctgagccttttcttttcttgc

SEQ ID NO: 396071 - DNA, 33 bp, Homo sapien
ggcagacagtcaggaaaaggctggtgctcatag

SEQ ID NO: 396072 - DNA, 33 bp, Homo sapien
ggcagacagtcaggaagaggctggtgctcatag

SEQ ID NO: 396073 - DNA, 33 bp, Homo sapien
tccactgtggccaagacgatccaacaggtgctc

SEQ ID NO: 396074 - DNA, 33 bp, Homo sapien
tccactgtggccaagatgatccaacaggtgctc

SEQ ID NO: 396075 - DNA, 33 bp, Homo sapien
ggcctgaagacataaagagctggaggaggaatg

SEQ ID NO: 396076 - DNA, 33 bp, Homo sapien
ggcctgaagacataaatagctggaggaggaatg

SEQ ID NO: 396077 - DNA, 33 bp, Homo sapien
gttaaggttttactgacataggcagagtcagag

SEQ ID NO: 396078 - DNA, 33 bp, Homo sapien
gttaaggttttactgatataggcagagtcagag

SEQ ID NO: 396079 - DNA, 33 bp, Homo sapien
ttaatgcacgtatattaaacatccatggaaaag

SEQ ID NO: 396080 - DNA, 33 bp, Homo sapien
ttaatgcacgtatatttaacatccatggaaaag

SEQ ID NO: 396081 - DNA, 33 bp, Homo sapien
acatacggatgcaaaaatattcatgacagatca

SEQ ID NO: 396082 - DNA, 33 bp, Homo sapien
acatacggatgcaaaagtattcatgacagatca

SEQ ID NO: 396083 - DNA, 33 bp, Homo sapien
ggagcaggccatcttacagcagggagaaatgga

SEQ ID NO: 396084 - DNA, 33 bp, Homo sapien
ggagcaggccatcttatagcagggagaaatgga

SEQ ID NO: 396085 - DNA, 33 bp, Homo sapien
tcactacagctgttggccatggataccatcacg

SEQ ID NO: 396086 - DNA, 33 bp, Homo sapien
tcactacagctgttgggcatggataccatcacg

SEQ ID NO: 396087 - DNA, 33 bp, Homo sapien
gacgcctgtgtgtggacaggtggtggctgagat

SEQ ID NO: 396088 - DNA, 33 bp, Homo sapien
gacgcctgtgtgtggataggtggtggctgagat

SEQ ID NO: 396089 - DNA, 33 bp, Homo sapien
caggctttcaaacctacgagcctgcagctcagc

SEQ ID NO: 396090 - DNA, 33 bp, Homo sapien
caggctttcaaacctatgagcctgcagctcagc

SEQ ID NO: 396091 - DNA, 33 bp, Homo sapien
gcttctttagcctgcacggcccaaactgaactc

SEQ ID NO: 396092 - DNA, 33 bp, Homo sapien
gcttctttagcctgcatggcccaaactgaactc

SEQ ID NO: 396093 - DNA, 33 bp, Homo sapien
gagatgaaattgtcagccaggctcttacccgac

SEQ ID NO: 396094 - DNA, 33 bp, Homo sapien
gagatgaaattgtcagtcaggctcttacccgac

SEQ ID NO: 396095 - DNA, 33 bp, Homo sapien
attagggtgaaaaaaaatccatagctctccctg

SEQ ID NO: 396096 - DNA, 33 bp, Homo sapien
attagggtgaaaaaaagtccatagctctccctg

SEQ ID NO: 396097 - DNA, 33 bp, Homo sapien
cctccagactgaataaagtgcccccaatccaat

SEQ ID NO: 396098 - DNA, 33 bp, Homo sapien
cctccagactgaataaggtgcccccaatccaat

SEQ ID NO: 396099 - DNA, 33 bp, Homo sapien
ccagctcaaggacctcaaagagaatagcagctc

SEQ ID NO: 396100 - DNA, 33 bp, Homo sapien
ccagctcaaggacctcgaagagaatagcagctc

SEQ ID NO: 396101 - DNA, 33 bp, Homo sapien
ttccctgaattcctccacactgaggttgcgagt

SEQ ID NO: 396102 - DNA, 33 bp, Homo sapien
ttccctgaattcctccgcactgaggttgcgagt

SEQ ID NO: 396103 - DNA, 33 bp, Homo sapien
cccagccaggtacgtacgctcctgagtagccaa

SEQ ID NO: 396104 - DNA, 33 bp, Homo sapien
cccagccaggtacgtatgctcctgagtagccaa

SEQ ID NO: 396105 - DNA, 33 bp, Homo sapien
gggcaagccagctttacatctcctgtaactttc

SEQ ID NO: 396106 - DNA, 33 bp, Homo sapien
gggcaagccagctttatatctcctgtaactttc

SEQ ID NO: 396107 - DNA, 33 bp, Homo sapien
gtctggagtcaggaaacggactggacttgaagc

SEQ ID NO: 396108 - DNA, 33 bp, Homo sapien
gtctggagtcaggaaatggactggacttgaagc

SEQ ID NO: 396109 - DNA, 33 bp, Homo sapien
gggcttgaggagttccgagaaattgagtgggag

SEQ ID NO: 396110 - DNA, 33 bp, Homo sapien
gggcttgaggagttcctagaaattgagtgggag

SEQ ID NO: 396111 - DNA, 33 bp, Homo sapien
cataatgaagacgccaaagggcatagcagggaa

SEQ ID NO: 396112 - DNA, 33 bp, Homo sapien
cataatgaagacgccagagggcatagcagggaa

SEQ ID NO: 396113 - DNA, 33 bp, Homo sapien
tgctataaaacactagaacttattcctcatatc

SEQ ID NO: 396114 - DNA, 33 bp, Homo sapien
tgctataaaacactaggacttattcctcatatc

SEQ ID NO: 396115 - DNA, 33 bp, Homo sapien
tattattttaaactgacgcatgataagtgtaca

SEQ ID NO: 396116 - DNA, 33 bp, Homo sapien
tattattttaaactgatgcatgataagtgtaca

SEQ ID NO: 396117 - DNA, 33 bp, Homo sapien
gcctgatgggcaaatacgcatcttgtggtttga

SEQ ID NO: 396118 - DNA, 33 bp, Homo sapien
gcctgatgggcaaatatgcatcttgtggtttga

SEQ ID NO: 396119 - DNA, 33 bp, Homo sapien
agggctgtatctccgcaattactggtactggtg

SEQ ID NO: 396120 - DNA, 33 bp, Homo sapien
agggctgtatctccgcgattactggtactggtg

SEQ ID NO: 396121 - DNA, 33 bp, Homo sapien
ctaaatcagccacagaaatagagaatgtcagag

SEQ ID NO: 396122 - DNA, 33 bp, Homo sapien
ctaaatcagccacagagatagagaatgtcagag

SEQ ID NO: 396123 - DNA, 33 bp, Homo sapien
cacatcatatactccacgaaagaagttacagta

SEQ ID NO: 396124 - DNA, 33 bp, Homo sapien
cacatcatatactccatgaaagaagttacagta

SEQ ID NO: 396125 - DNA, 33 bp, Homo sapien
tccagctgaataaatgccacgatgagaaagcaa

SEQ ID NO: 396126 - DNA, 33 bp, Homo sapien
tccagctgaataaatgtcacgatgagaaagcaa

SEQ ID NO: 396127 - DNA, 33 bp, Homo sapien
ggtgtcaaaatgggacacagaaaaatagcagtg

SEQ ID NO: 396128 - DNA, 33 bp, Homo sapien
ggtgtcaaaatgggacccagaaaaatagcagtg

SEQ ID NO: 396129 - DNA, 33 bp, Homo sapien
gccaagcctctccaaaatctccggagctcttcc

SEQ ID NO: 396130 - DNA, 33 bp, Homo sapien
gccaagcctctccaaagtctccggagctcttcc

SEQ ID NO: 396131 - DNA, 33 bp, Homo sapien
aatgaatatgcctaccaaagactgagaaatatt

SEQ ID NO: 396132 - DNA, 33 bp, Homo sapien
aatgaatatgcctacctaagactgagaaatatt

SEQ ID NO: 396133 - DNA, 33 bp, Homo sapien
ctgcatccatgcaaaaagatggttatgtgggca

SEQ ID NO: 396134 - DNA, 33 bp, Homo sapien
ctgcatccatgcaaaatgatggttatgtgggca

SEQ ID NO: 396135 - DNA, 33 bp, Homo sapien
gcacctgaacttttcacggtgggtcattgcagt

SEQ ID NO: 396136 - DNA, 33 bp, Homo sapien
gcacctgaacttttcatggtgggtcattgcagt

SEQ ID NO: 396137 - DNA, 33 bp, Homo sapien
cttgtttatacttaaaagcaattatctgtgggt

SEQ ID NO: 396138 - DNA, 33 bp, Homo sapien
cttgtttatacttaaaggcaattatctgtgggt

SEQ ID NO: 396139 - DNA, 33 bp, Homo sapien
aaaggaatgtctttgccagggcagaaggaaatt

SEQ ID NO: 396140 - DNA, 33 bp, Homo sapien
aaaggaatgtctttgcgagggcagaaggaaatt

SEQ ID NO: 396141 - DNA, 33 bp, Homo sapien
ctgccaacagcaaataccatcatttcaggccgt

SEQ ID NO: 396142 - DNA, 33 bp, Homo sapien
ctgccaacagcaaatatcatcatttcaggccgt

SEQ ID NO: 396143 - DNA, 33 bp, Homo sapien
caatgaataaaatgaaatgacagtctgtgagtg

SEQ ID NO: 396144 - DNA, 33 bp, Homo sapien
caatgaataaaatgaagtgacagtctgtgagtg

SEQ ID NO: 396145 - DNA, 33 bp, Homo sapien
aaacccaccccgacaccatgataaggcttccac

SEQ ID NO: 396146 - DNA, 33 bp, Homo sapien
aaacccaccccgacactatgataaggcttccac

SEQ ID NO: 396147 - DNA, 33 bp, Homo sapien
tgcttggccgctcttacgggagactggttgctt

SEQ ID NO: 396148 - DNA, 33 bp, Homo sapien
tgcttggccgctcttatgggagactggttgctt

SEQ ID NO: 396149 - DNA, 33 bp, Homo sapien
tgtggcaataatgctacgcaacacacactgtct

SEQ ID NO: 396150 - DNA, 33 bp, Homo sapien
tgtggcaataatgctatgcaacacacactgtct

SEQ ID NO: 396151 - DNA, 33 bp, Homo sapien
ctggctcttggtgctacaagcaaaggggcctcc

SEQ ID NO: 396152 - DNA, 33 bp, Homo sapien
ctggctcttggtgctataagcaaaggggcctcc

SEQ ID NO: 396153 - DNA, 33 bp, Homo sapien
ccttactacataataaatggaactgttaggttt

SEQ ID NO: 396154 - DNA, 33 bp, Homo sapien
ccttactacataataagtggaactgttaggttt

SEQ ID NO: 396155 - DNA, 33 bp, Homo sapien
tggccttgtctaacaccgtctgcctcacatact

SEQ ID NO: 396156 - DNA, 33 bp, Homo sapien
tggccttgtctaacactgtctgcctcacatact

SEQ ID NO: 396157 - DNA, 33 bp, Homo sapien
tcaggcaatctgtccacataaagaggcagagct

SEQ ID NO: 396158 - DNA, 33 bp, Homo sapien
tcaggcaatctgtccatataaagaggcagagct

SEQ ID NO: 396159 - DNA, 33 bp, Homo sapien
tccccatatccttaaactagaagagttaactca

SEQ ID NO: 396160 - DNA, 33 bp, Homo sapien
tccccatatccttaaagtagaagagttaactca

SEQ ID NO: 396161 - DNA, 33 bp, Homo sapien
ggactaaatgaattgacgtaggtaaagttctag

SEQ ID NO: 396162 - DNA, 33 bp, Homo sapien
ggactaaatgaattgatgtaggtaaagttctag

SEQ ID NO: 396163 - DNA, 33 bp, Homo sapien
tttcaaaaactgccacacggcactctacttcaa

SEQ ID NO: 396164 - DNA, 33 bp, Homo sapien
tttcaaaaactgccacgcggcactctacttcaa

SEQ ID NO: 396165 - DNA, 33 bp, Homo sapien
atggtccacattagacaaatcagattatcttgc

SEQ ID NO: 396166 - DNA, 33 bp, Homo sapien
atggtccacattagaccaatcagattatcttgc

SEQ ID NO: 396167 - DNA, 33 bp, Homo sapien
ctgtaattcttcattcacctccagtcttaggat

SEQ ID NO: 396168 - DNA, 33 bp, Homo sapien
ctgtaattcttcattcgcctccagtcttaggat

SEQ ID NO: 396169 - DNA, 33 bp, Homo sapien
catccatttgcagcaacggttcacgtagaagca

SEQ ID NO: 396170 - DNA, 33 bp, Homo sapien
catccatttgcagcaatggttcacgtagaagca

SEQ ID NO: 396171 - DNA, 33 bp, Homo sapien
tgggcaaaggaatgatcagacaatacctagaaa

SEQ ID NO: 396172 - DNA, 33 bp, Homo sapien
tgggcaaaggaatgattagacaatacctagaaa

SEQ ID NO: 396173 - DNA, 33 bp, Homo sapien
gagccaccagaacagcaaggagacagcttaggg

SEQ ID NO: 396174 - DNA, 33 bp, Homo sapien
gagccaccagaacagcgaggagacagcttaggg

SEQ ID NO: 396175 - DNA, 33 bp, Homo sapien
cagggttttcatccacaaagagatttttcaatt

SEQ ID NO: 396176 - DNA, 33 bp, Homo sapien
cagggttttcatccacgaagagatttttcaatt

SEQ ID NO: 396177 - DNA, 33 bp, Homo sapien
tgtggttcgttatcccagaagcaaggggacctc

SEQ ID NO: 396178 - DNA, 33 bp, Homo sapien
tgtggttcgttatcccggaagcaaggggacctc

SEQ ID NO: 396179 - DNA, 33 bp, Homo sapien
ctgcacactcatatgcacacacacatattggac

SEQ ID NO: 396180 - DNA, 33 bp, Homo sapien
ctgcacactcatatgcgcacacacatattggac

SEQ ID NO: 396181 - DNA, 33 bp, Homo sapien
ttccccaagttcttccagaatgcgtactacttg

SEQ ID NO: 396182 - DNA, 33 bp, Homo sapien
ttccccaagttcttccggaatgcgtactacttg

SEQ ID NO: 396183 - DNA, 33 bp, Homo sapien
ctcaggaaaggcaggagtcatagagccatcgtg

SEQ ID NO: 396184 - DNA, 33 bp, Homo sapien
ctcaggaaaggcaggattcatagagccatcgtg

SEQ ID NO: 396185 - DNA, 33 bp, Homo sapien
atgaggatgatgataacctccacttgggggcat

SEQ ID NO: 396186 - DNA, 33 bp, Homo sapien
atgaggatgatgataatctccacttgggggcat

SEQ ID NO: 396187 - DNA, 33 bp, Homo sapien
gttttcctcattttaccgacatatgtcttgaag

SEQ ID NO: 396188 - DNA, 33 bp, Homo sapien
gttttcctcattttacggacatatgtcttgaag

SEQ ID NO: 396189 - DNA, 33 bp, Homo sapien
gatttgggttggtgtcaaagtgtcactgggcag

SEQ ID NO: 396190 - DNA, 33 bp, Homo sapien
gatttgggttggtgtcgaagtgtcactgggcag

SEQ ID NO: 396191 - DNA, 33 bp, Homo sapien
tccagccctgctgacaaattggtctttggtgaa

SEQ ID NO: 396192 - DNA, 33 bp, Homo sapien
tccagccctgctgacagattggtctttggtgaa

SEQ ID NO: 396193 - DNA, 33 bp, Homo sapien
atacaaggaacacaccagagcccaatgtatggc

SEQ ID NO: 396194 - DNA, 33 bp, Homo sapien
atacaaggaacacaccggagcccaatgtatggc

SEQ ID NO: 396195 - DNA, 33 bp, Homo sapien
gaaattgcctgagtaactgctgacttgctgaac

SEQ ID NO: 396196 - DNA, 33 bp, Homo sapien
gaaattgcctgagtaagtgctgacttgctgaac

SEQ ID NO: 396197 - DNA, 33 bp, Homo sapien
cgtaattcagaaatcaggctcctcgagagttcc

SEQ ID NO: 396198 - DNA, 33 bp, Homo sapien
cgtaattcagaaatcatgctcctcgagagttcc

SEQ ID NO: 396199 - DNA, 33 bp, Homo sapien
ctggacagctctcttacaaactttttcctttcc

SEQ ID NO: 396200 - DNA, 33 bp, Homo sapien
ctggacagctctcttataaactttttcctttcc

SEQ ID NO: 396201 - DNA, 33 bp, Homo sapien
ggagtggaaagtgtaacagagggatgtctggtc

SEQ ID NO: 396202 - DNA, 33 bp, Homo sapien
ggagtggaaagtgtaagagagggatgtctggtc

SEQ ID NO: 396203 - DNA, 33 bp, Homo sapien
ttaagattttagaagcagacagtcctggtttga

SEQ ID NO: 396204 - DNA, 33 bp, Homo sapien
ttaagattttagaagctgacagtcctggtttga

SEQ ID NO: 396205 - DNA, 33 bp, Homo sapien
tcaatttaggggttgaactgataggcctggcag

SEQ ID NO: 396206 - DNA, 33 bp, Homo sapien
tcaatttaggggttgacctgataggcctggcag

SEQ ID NO: 396207 - DNA, 33 bp, Homo sapien
cctcccttaccacgtcacagtgaagtcattttt

SEQ ID NO: 396208 - DNA, 33 bp, Homo sapien
cctcccttaccacgtcgcagtgaagtcattttt

SEQ ID NO: 396209 - DNA, 33 bp, Homo sapien
gcctctccattctaacaccacggaagcactttc

SEQ ID NO: 396210 - DNA, 33 bp, Homo sapien
gcctctccattctaacgccacggaagcactttc

SEQ ID NO: 396211 - DNA, 33 bp, Homo sapien
ctctaaacattaaaaaacatgagtttacctcaa

SEQ ID NO: 396212 - DNA, 33 bp, Homo sapien
ctctaaacattaaaaaccatgagtttacctcaa

SEQ ID NO: 396213 - DNA, 33 bp, Homo sapien
ttccaagactgggaaactacacgaggaaggtgg

SEQ ID NO: 396214 - DNA, 33 bp, Homo sapien
ttccaagactgggaaagtacacgaggaaggtgg

SEQ ID NO: 396215 - DNA, 33 bp, Homo sapien
catgagctgttgagtccgacctagatctcttct

SEQ ID NO: 396216 - DNA, 33 bp, Homo sapien
catgagctgttgagtctgacctagatctcttct

SEQ ID NO: 396217 - DNA, 33 bp, Homo sapien
gatcagagtggtgggaaaaattacagggaaagg

SEQ ID NO: 396218 - DNA, 33 bp, Homo sapien
gatcagagtggtgggagaaattacagggaaagg

SEQ ID NO: 396219 - DNA, 33 bp, Homo sapien
gaaggctccgcatagcgctgggggagaatagct

SEQ ID NO: 396220 - DNA, 33 bp, Homo sapien
gaaggctccgcatagctctgggggagaatagct

SEQ ID NO: 396221 - DNA, 33 bp, Homo sapien
gtcaacaaaaccatgacagagccagagtgaaag

SEQ ID NO: 396222 - DNA, 33 bp, Homo sapien
gtcaacaaaaccatgagagagccagagtgaaag

SEQ ID NO: 396223 - DNA, 33 bp, Homo sapien
actgttttgcctgggaacaatgtaagttctgca

SEQ ID NO: 396224 - DNA, 33 bp, Homo sapien
actgttttgcctgggagcaatgtaagttctgca

SEQ ID NO: 396225 - DNA, 33 bp, Homo sapien
aatgttgaggttcagacaggaaatccaagtcat

SEQ ID NO: 396226 - DNA, 33 bp, Homo sapien
aatgttgaggttcagataggaaatccaagtcat

SEQ ID NO: 396227 - DNA, 33 bp, Homo sapien
cccatgatgatgtactaaggctccagatgtcaa

SEQ ID NO: 396228 - DNA, 33 bp, Homo sapien
cccatgatgatgtactgaggctccagatgtcaa

SEQ ID NO: 396229 - DNA, 33 bp, Homo sapien
acgaggccttctgtgacgcttcaaggcaaagga

SEQ ID NO: 396230 - DNA, 33 bp, Homo sapien
acgaggccttctgtgatgcttcaaggcaaagga

SEQ ID NO: 396231 - DNA, 33 bp, Homo sapien
caagtatcttgtgtcacggaaattttgcatata

SEQ ID NO: 396232 - DNA, 33 bp, Homo sapien
caagtatcttgtgtcatggaaattttgcatata

SEQ ID NO: 396233 - DNA, 33 bp, Homo sapien
gtttatggataaaacacagagaagttacgtcac

SEQ ID NO: 396234 - DNA, 33 bp, Homo sapien
gtttatggataaaacatagagaagttacgtcac

SEQ ID NO: 396235 - DNA, 33 bp, Homo sapien
taacctctgggcagcaacccacagttaagaagc

SEQ ID NO: 396236 - DNA, 33 bp, Homo sapien
taacctctgggcagcatcccacagttaagaagc

SEQ ID NO: 396237 - DNA, 33 bp, Homo sapien
cagacatagctgttgaaggcagggagaagtcat

SEQ ID NO: 396238 - DNA, 33 bp, Homo sapien
cagacatagctgttgagggcagggagaagtcat

SEQ ID NO: 396239 - DNA, 33 bp, Homo sapien
tgtgtgattccacttccatggggtatctggaat

SEQ ID NO: 396240 - DNA, 33 bp, Homo sapien
tgtgtgattccacttctatggggtatctggaat

SEQ ID NO: 396241 - DNA, 33 bp, Homo sapien
gctcagaggcaggcaaagacaatgcagtttgac

SEQ ID NO: 396242 - DNA, 33 bp, Homo sapien
gctcagaggcaggcaaggacaatgcagtttgac

SEQ ID NO: 396243 - DNA, 33 bp, Homo sapien
ttggtacacagaaggcgcataggctttgaggcc

SEQ ID NO: 396244 - DNA, 33 bp, Homo sapien
ttggtacacagaaggctcataggctttgaggcc

SEQ ID NO: 396245 - DNA, 33 bp, Homo sapien
agggtgtggagggagccgcataggtacggacgg

SEQ ID NO: 396246 - DNA, 33 bp, Homo sapien
agggtgtggagggagctgcataggtacggacgg

SEQ ID NO: 396247 - DNA, 33 bp, Homo sapien
caacttggctgcttcaacttaggccccaccacc

SEQ ID NO: 396248 - DNA, 33 bp, Homo sapien
caacttggctgcttcaccttaggccccaccacc

SEQ ID NO: 396249 - DNA, 33 bp, Homo sapien
actctgaaactcactcaataattaatccagtcg

SEQ ID NO: 396250 - DNA, 33 bp, Homo sapien
actctgaaactcactcgataattaatccagtcg

SEQ ID NO: 396251 - DNA, 33 bp, Homo sapien
ggtatgaatttgccagcattgctcctagctgtg

SEQ ID NO: 396252 - DNA, 33 bp, Homo sapien
ggtatgaatttgccaggattgctcctagctgtg

SEQ ID NO: 396253 - DNA, 33 bp, Homo sapien
ctctcatggtgttgtaccaacccttcagctccg

SEQ ID NO: 396254 - DNA, 33 bp, Homo sapien
ctctcatggtgttgtatcaacccttcagctccg

SEQ ID NO: 396255 - DNA, 33 bp, Homo sapien
gttcttgggcacactccatggttgattaaatat

SEQ ID NO: 396256 - DNA, 33 bp, Homo sapien
gttcttgggcacactctatggttgattaaatat

SEQ ID NO: 396257 - DNA, 33 bp, Homo sapien
ctgaaccccaaagatcaatccttaaggctacta

SEQ ID NO: 396258 - DNA, 33 bp, Homo sapien
ctgaaccccaaagatcgatccttaaggctacta

SEQ ID NO: 396259 - DNA, 33 bp, Homo sapien
tatggcttgaattggaagttttctacactgttg

SEQ ID NO: 396260 - DNA, 33 bp, Homo sapien
tatggcttgaattggaggttttctacactgttg

SEQ ID NO: 396261 - DNA, 33 bp, Homo sapien
ttgaggtttgtctgaaaggtttaatgttataaa

SEQ ID NO: 396262 - DNA, 33 bp, Homo sapien
ttgaggtttgtctgaacggtttaatgttataaa

SEQ ID NO: 396263 - DNA, 33 bp, Homo sapien
gccttgatttctcctgcactctgtagactcgag

SEQ ID NO: 396264 - DNA, 33 bp, Homo sapien
gccttgatttctcctgtactctgtagactcgag

SEQ ID NO: 396265 - DNA, 33 bp, Homo sapien
caatttttatagtgcacgaccgaacaagaaagg

SEQ ID NO: 396266 - DNA, 33 bp, Homo sapien
caatttttatagtgcatgaccgaacaagaaagg

SEQ ID NO: 396267 - DNA, 33 bp, Homo sapien
gttcgcagtacaatggcagagtcgagtcattgc

SEQ ID NO: 396268 - DNA, 33 bp, Homo sapien
gttcgcagtacaatggtagagtcgagtcattgc

SEQ ID NO: 396269 - DNA, 33 bp, Homo sapien
atttaggtccaactaacacctagtgagcgtctc

SEQ ID NO: 396270 - DNA, 33 bp, Homo sapien
atttaggtccaactaatacctagtgagcgtctc

SEQ ID NO: 396271 - DNA, 33 bp, Homo sapien
ttgttctgaatagtaccgagtggcatgccaaag

SEQ ID NO: 396272 - DNA, 33 bp, Homo sapien
ttgttctgaatagtactgagtggcatgccaaag

SEQ ID NO: 396273 - DNA, 33 bp, Homo sapien
gtgtcacacacacagcactagtcaatctttatg

SEQ ID NO: 396274 - DNA, 33 bp, Homo sapien
gtgtcacacacacagcgctagtcaatctttatg

SEQ ID NO: 396275 - DNA, 33 bp, Homo sapien
ttggaaacaagaaaaacctcaagaaggcaatag

SEQ ID NO: 396276 - DNA, 33 bp, Homo sapien
ttggaaacaagaaaaatctcaagaaggcaatag

SEQ ID NO: 396277 - DNA, 33 bp, Homo sapien
agtcaaaagaaatcaaaatagtattggtatact

SEQ ID NO: 396278 - DNA, 33 bp, Homo sapien
agtcaaaagaaatcaagatagtattggtatact

SEQ ID NO: 396279 - DNA, 33 bp, Homo sapien
agatggagctggagaacttagcctttaggatgc

SEQ ID NO: 396280 - DNA, 33 bp, Homo sapien
agatggagctggagaatttagcctttaggatgc

SEQ ID NO: 396281 - DNA, 33 bp, Homo sapien
aataaagattgtaaaaactcctaagaggaagaa

SEQ ID NO: 396282 - DNA, 33 bp, Homo sapien
aataaagattgtaaaagctcctaagaggaagaa

SEQ ID NO: 396283 - DNA, 33 bp, Homo sapien
attgccctaaaagaaaccactgcaattcccttt

SEQ ID NO: 396284 - DNA, 33 bp, Homo sapien
attgccctaaaagaaagcactgcaattcccttt

SEQ ID NO: 396285 - DNA, 33 bp, Homo sapien
cactaactactgtaaccaaccacaagaaagatc

SEQ ID NO: 396286 - DNA, 33 bp, Homo sapien
cactaactactgtaactaaccacaagaaagatc

SEQ ID NO: 396287 - DNA, 33 bp, Homo sapien
cttcaggtatcctcatcagtgcgagaatctgat

SEQ ID NO: 396288 - DNA, 33 bp, Homo sapien
cttcaggtatcctcattagtgcgagaatctgat

SEQ ID NO: 396289 - DNA, 33 bp, Homo sapien
tagataatagatacacaaatgataggagataga

SEQ ID NO: 396290 - DNA, 33 bp, Homo sapien
tagataatagatacacgaatgataggagataga

SEQ ID NO: 396291 - DNA, 33 bp, Homo sapien
ctctattagacactgcaagaaatgtgtgtagga

SEQ ID NO: 396292 - DNA, 33 bp, Homo sapien
ctctattagacactgcgagaaatgtgtgtagga

SEQ ID NO: 396293 - DNA, 33 bp, Homo sapien
tccttaattacagtaacaaatgcaactgttgta

SEQ ID NO: 396294 - DNA, 33 bp, Homo sapien
tccttaattacagtaagaaatgcaactgttgta

SEQ ID NO: 396295 - DNA, 33 bp, Homo sapien
ttatgttattgaaagcagagacctagagaatga

SEQ ID NO: 396296 - DNA, 33 bp, Homo sapien
ttatgttattgaaagctgagacctagagaatga

SEQ ID NO: 396297 - DNA, 33 bp, Homo sapien
gattccaatagtggcaactcctacgtggtcacc

SEQ ID NO: 396298 - DNA, 33 bp, Homo sapien
gattccaatagtggcacctcctacgtggtcacc

SEQ ID NO: 396299 - DNA, 33 bp, Homo sapien
aaggtgaggctccggcaacttgccctagatctg

SEQ ID NO: 396300 - DNA, 33 bp, Homo sapien
aaggtgaggctccggcgacttgccctagatctg

SEQ ID NO: 396301 - DNA, 33 bp, Homo sapien
gtcctcgtctgcaaaacagaaggtatagcagaa

SEQ ID NO: 396302 - DNA, 33 bp, Homo sapien
gtcctcgtctgcaaaatagaaggtatagcagaa

SEQ ID NO: 396303 - DNA, 33 bp, Homo sapien
acgaggacattgagacccagtggggagtgggaa

SEQ ID NO: 396304 - DNA, 33 bp, Homo sapien
acgaggacattgagactcagtggggagtgggaa

SEQ ID NO: 396305 - DNA, 33 bp, Homo sapien
cgattgcagccaagtaagaatctgaaaaacacg

SEQ ID NO: 396306 - DNA, 33 bp, Homo sapien
cgattgcagccaagtaggaatctgaaaaacacg

SEQ ID NO: 396307 - DNA, 33 bp, Homo sapien
gtgttcaaaccttcaacggcccagtgagccttt

SEQ ID NO: 396308 - DNA, 33 bp, Homo sapien
gtgttcaaaccttcaatggcccagtgagccttt

SEQ ID NO: 396309 - DNA, 33 bp, Homo sapien
gaacagcacatacacaaaggaatgcagtggcac

SEQ ID NO: 396310 - DNA, 33 bp, Homo sapien
gaacagcacatacacagaggaatgcagtggcac

SEQ ID NO: 396311 - DNA, 33 bp, Homo sapien
ttaaataaattggaccacagtgaaattgcacat

SEQ ID NO: 396312 - DNA, 33 bp, Homo sapien
ttaaataaattggaccgcagtgaaattgcacat

SEQ ID NO: 396313 - DNA, 33 bp, Homo sapien
cctttcataggcaaataaaccaggcccaaaccc

SEQ ID NO: 396314 - DNA, 33 bp, Homo sapien
cctttcataggcaaatgaaccaggcccaaaccc

SEQ ID NO: 396315 - DNA, 33 bp, Homo sapien
agtcacctctacactaaagacccacaggtaatt

SEQ ID NO: 396316 - DNA, 33 bp, Homo sapien
agtcacctctacactagagacccacaggtaatt

SEQ ID NO: 396317 - DNA, 33 bp, Homo sapien
aggccagagggagcctaaaatggagtcagcctc

SEQ ID NO: 396318 - DNA, 33 bp, Homo sapien
aggccagagggagcctgaaatggagtcagcctc

SEQ ID NO: 396319 - DNA, 33 bp, Homo sapien
aacctccatgctgaaacgcactagttgagtgag

SEQ ID NO: 396320 - DNA, 33 bp, Homo sapien
aacctccatgctgaaatgcactagttgagtgag

SEQ ID NO: 396321 - DNA, 33 bp, Homo sapien
gtgttgtaatctcaccgatgatctttggctgaa

SEQ ID NO: 396322 - DNA, 33 bp, Homo sapien
gtgttgtaatctcacctatgatctttggctgaa

SEQ ID NO: 396323 - DNA, 33 bp, Homo sapien
agatacatggctatgacgactggtaagttgtct

SEQ ID NO: 396324 - DNA, 33 bp, Homo sapien
agatacatggctatgatgactggtaagttgtct

SEQ ID NO: 396325 - DNA, 33 bp, Homo sapien
acctctgacataagctaagagagccaggtatgc

SEQ ID NO: 396326 - DNA, 33 bp, Homo sapien
acctctgacataagctgagagagccaggtatgc

SEQ ID NO: 396327 - DNA, 33 bp, Homo sapien
tctactgttgacaggactccagagtaaagaatc

SEQ ID NO: 396328 - DNA, 33 bp, Homo sapien
tctactgttgacaggattccagagtaaagaatc

SEQ ID NO: 396329 - DNA, 33 bp, Homo sapien
gcccagaggacacataccattttcttctgttcc

SEQ ID NO: 396330 - DNA, 33 bp, Homo sapien
gcccagaggacacatatcattttcttctgttcc

SEQ ID NO: 396331 - DNA, 33 bp, Homo sapien
ctgaccctgactttgaaatttcgtctgtaaaat

SEQ ID NO: 396332 - DNA, 33 bp, Homo sapien
ctgaccctgactttgagatttcgtctgtaaaat

SEQ ID NO: 396333 - DNA, 33 bp, Homo sapien
gagagaaaaatgaaacggtcttttgaagtcttc

SEQ ID NO: 396334 - DNA, 33 bp, Homo sapien
gagagaaaaatgaaactgtcttttgaagtcttc

SEQ ID NO: 396335 - DNA, 33 bp, Homo sapien
gagaggacagagacaacggaggggccagggaga

SEQ ID NO: 396336 - DNA, 33 bp, Homo sapien
gagaggacagagacaatggaggggccagggaga

SEQ ID NO: 396337 - DNA, 33 bp, Homo sapien
agtttaagtagcaacaaagtcagctgaggattt

SEQ ID NO: 396338 - DNA, 33 bp, Homo sapien
agtttaagtagcaacagagtcagctgaggattt

SEQ ID NO: 396339 - DNA, 33 bp, Homo sapien
catgtgtgggatggaccgggcaaaatccatgga

SEQ ID NO: 396340 - DNA, 33 bp, Homo sapien
catgtgtgggatggactgggcaaaatccatgga

SEQ ID NO: 396341 - DNA, 33 bp, Homo sapien
atggtgcatgagtgacaggcagccacagacact

SEQ ID NO: 396342 - DNA, 33 bp, Homo sapien
atggtgcatgagtgacgggcagccacagacact

SEQ ID NO: 396343 - DNA, 33 bp, Homo sapien
gtcagcctgtttattacaagacctgggacatgg

SEQ ID NO: 396344 - DNA, 33 bp, Homo sapien
gtcagcctgtttattagaagacctgggacatgg

SEQ ID NO: 396345 - DNA, 33 bp, Homo sapien
catcctgaccctcaaactcttccctttcacttt

SEQ ID NO: 396346 - DNA, 33 bp, Homo sapien
catcctgaccctcaaagtcttccctttcacttt

SEQ ID NO: 396347 - DNA, 33 bp, Homo sapien
ggatggtgcagctcaaacagagaggttccacct

SEQ ID NO: 396348 - DNA, 33 bp, Homo sapien
ggatggtgcagctcaatcagagaggttccacct

SEQ ID NO: 396349 - DNA, 33 bp, Homo sapien
gtagatcacccacggaaagaaaaggcagagctt

SEQ ID NO: 396350 - DNA, 33 bp, Homo sapien
gtagatcacccacggagagaaaaggcagagctt

SEQ ID NO: 396351 - DNA, 33 bp, Homo sapien
ctcagcatacacataacgaagtgggggctaaga

SEQ ID NO: 396352 - DNA, 33 bp, Homo sapien
ctcagcatacacataaggaagtgggggctaaga

SEQ ID NO: 396353 - DNA, 33 bp, Homo sapien
agaacgctggctgcagaagaagcaatgcgcctg

SEQ ID NO: 396354 - DNA, 33 bp, Homo sapien
agaacgctggctgcaggagaagcaatgcgcctg

SEQ ID NO: 396355 - DNA, 33 bp, Homo sapien
cctcacaaaccctaaactagtcacccagaaggg

SEQ ID NO: 396356 - DNA, 33 bp, Homo sapien
cctcacaaaccctaaattagtcacccagaaggg

SEQ ID NO: 396357 - DNA, 33 bp, Homo sapien
tgcccagctctctgacagtaactttgtaaacaa

SEQ ID NO: 396358 - DNA, 33 bp, Homo sapien
tgcccagctctctgacggtaactttgtaaacaa

SEQ ID NO: 396359 - DNA, 33 bp, Homo sapien
taggaagtacacaggacgtcaggtggaagcccc

SEQ ID NO: 396360 - DNA, 33 bp, Homo sapien
taggaagtacacaggatgtcaggtggaagcccc

SEQ ID NO: 396361 - DNA, 33 bp, Homo sapien
atttgaaatacagttaagttcatgtttctgttt

SEQ ID NO: 396362 - DNA, 33 bp, Homo sapien
atttgaaatacagttaggttcatgtttctgttt

SEQ ID NO: 396363 - DNA, 33 bp, Homo sapien
agtaaccgataagcacaagtcaaacagaatttg

SEQ ID NO: 396364 - DNA, 33 bp, Homo sapien
agtaaccgataagcacgagtcaaacagaatttg

SEQ ID NO: 396365 - DNA, 33 bp, Homo sapien
agccccctaagattccaaatgagtgtgaaggaa

SEQ ID NO: 396366 - DNA, 33 bp, Homo sapien
agccccctaagattccgaatgagtgtgaaggaa

SEQ ID NO: 396367 - DNA, 33 bp, Homo sapien
gcaatcaaccaatttaagaacagttcagaagct

SEQ ID NO: 396368 - DNA, 33 bp, Homo sapien
gcaatcaaccaatttaggaacagttcagaagct

SEQ ID NO: 396369 - DNA, 33 bp, Homo sapien
aatagcaccaagttatgaagaaaaggctagatt

SEQ ID NO: 396370 - DNA, 33 bp, Homo sapien
aatagcaccaagttattaagaaaaggctagatt

SEQ ID NO: 396371 - DNA, 33 bp, Homo sapien
tggaatctctcctggaaaagaaactgtcaccaa

SEQ ID NO: 396372 - DNA, 33 bp, Homo sapien
tggaatctctcctggataagaaactgtcaccaa

SEQ ID NO: 396373 - DNA, 33 bp, Homo sapien
caccttcctaaaaaaaagcatttcctctaataa

SEQ ID NO: 396374 - DNA, 33 bp, Homo sapien
caccttcctaaaaaaaggcatttcctctaataa

SEQ ID NO: 396375 - DNA, 33 bp, Homo sapien
gaaattgggaacttccaaagtgtggttgctttt

SEQ ID NO: 396376 - DNA, 33 bp, Homo sapien
gaaattgggaacttccgaagtgtggttgctttt

SEQ ID NO: 396377 - DNA, 33 bp, Homo sapien
aagtaaacctgtagcaacagaattcctcgattc

SEQ ID NO: 396378 - DNA, 33 bp, Homo sapien
aagtaaacctgtagcatcagaattcctcgattc

SEQ ID NO: 396379 - DNA, 33 bp, Homo sapien
attcctcgattcaagcaaggatctgccatttgg

SEQ ID NO: 396380 - DNA, 33 bp, Homo sapien
attcctcgattcaagccaggatctgccatttgg

SEQ ID NO: 396381 - DNA, 33 bp, Homo sapien
cttcacgttggaaaccactagaagggaatagca

SEQ ID NO: 396382 - DNA, 33 bp, Homo sapien
cttcacgttggaaaccgctagaagggaatagca

SEQ ID NO: 396383 - DNA, 33 bp, Homo sapien
ggaatacgtgggtgaacaaaatacaggaattat

SEQ ID NO: 396384 - DNA, 33 bp, Homo sapien
ggaatacgtgggtgaagaaaatacaggaattat

SEQ ID NO: 396385 - DNA, 33 bp, Homo sapien
tgctggtatatagataaaattgcgtactgggac

SEQ ID NO: 396386 - DNA, 33 bp, Homo sapien
tgctggtatatagatataattgcgtactgggac

SEQ ID NO: 396387 - DNA, 33 bp, Homo sapien
atgggccactatgtagaaattttaacagtgatc

SEQ ID NO: 396388 - DNA, 33 bp, Homo sapien
atgggccactatgtaggaattttaacagtgatc

SEQ ID NO: 396389 - DNA, 33 bp, Homo sapien
tggaagtttaaatataaatgctgattaaccaat

SEQ ID NO: 396390 - DNA, 33 bp, Homo sapien
tggaagtttaaatatacatgctgattaaccaat

SEQ ID NO: 396391 - DNA, 33 bp, Homo sapien
tcttcttggaaatcaactgtatgcctgattaaa

SEQ ID NO: 396392 - DNA, 33 bp, Homo sapien
tcttcttggaaatcaattgtatgcctgattaaa

SEQ ID NO: 396393 - DNA, 33 bp, Homo sapien
caattcacaggccttacgactataccctatcat

SEQ ID NO: 396394 - DNA, 33 bp, Homo sapien
caattcacaggccttaggactataccctatcat

SEQ ID NO: 396395 - DNA, 33 bp, Homo sapien
cctggttccagcggggaatatcgctgctaaaaa

SEQ ID NO: 396396 - DNA, 33 bp, Homo sapien
cctggttccagcgggggatatcgctgctaaaaa

SEQ ID NO: 396397 - DNA, 33 bp, Homo sapien
ttgagaccttcctagaccatacacattcttatt

SEQ ID NO: 396398 - DNA, 33 bp, Homo sapien
ttgagaccttcctagatcatacacattcttatt

SEQ ID NO: 396399 - DNA, 33 bp, Homo sapien
ttttttgtttggaatcacagtgtaaaatatatt

SEQ ID NO: 396400 - DNA, 33 bp, Homo sapien
ttttttgtttggaatcgcagtgtaaaatatatt

SEQ ID NO: 396401 - DNA, 33 bp, Homo sapien
ggtggggcttctggaacacttcctaagagggag

SEQ ID NO: 396402 - DNA, 33 bp, Homo sapien
ggtggggcttctggaatacttcctaagagggag

SEQ ID NO: 396403 - DNA, 33 bp, Homo sapien
tctgtgctttggatcacgtaagggacagatcct

SEQ ID NO: 396404 - DNA, 33 bp, Homo sapien
tctgtgctttggatcaggtaagggacagatcct

SEQ ID NO: 396405 - DNA, 33 bp, Homo sapien
gctgtcctattcttagcccacaatcccttcctc

SEQ ID NO: 396406 - DNA, 33 bp, Homo sapien
gctgtcctattcttagtccacaatcccttcctc

SEQ ID NO: 396407 - DNA, 33 bp, Homo sapien
gccacctcaccaggccaccagctgtagtttgta

SEQ ID NO: 396408 - DNA, 33 bp, Homo sapien
gccacctcaccaggccgccagctgtagtttgta

SEQ ID NO: 396409 - DNA, 33 bp, Homo sapien
tcaccaagcgctgctcaatctcaacgatcctct

SEQ ID NO: 396410 - DNA, 33 bp, Homo sapien
tcaccaagcgctgctcgatctcaacgatcctct

SEQ ID NO: 396411 - DNA, 33 bp, Homo sapien
ctgagtctggcctggacattgctgcctcgtcag

SEQ ID NO: 396412 - DNA, 33 bp, Homo sapien
ctgagtctggcctggatattgctgcctcgtcag

SEQ ID NO: 396413 - DNA, 33 bp, Homo sapien
gtcagtcaccaagtcacccaaatgtctcacatc

SEQ ID NO: 396414 - DNA, 33 bp, Homo sapien
gtcagtcaccaagtcatccaaatgtctcacatc

SEQ ID NO: 396415 - DNA, 33 bp, Homo sapien
agatgcccaaatgaataatcaggtgaacacact

SEQ ID NO: 396416 - DNA, 33 bp, Homo sapien
agatgcccaaatgaatgatcaggtgaacacact

SEQ ID NO: 396417 - DNA, 33 bp, Homo sapien
gagctgggtagttgagacacttctggcctgctt

SEQ ID NO: 396418 - DNA, 33 bp, Homo sapien
gagctgggtagttgagccacttctggcctgctt

SEQ ID NO: 396419 - DNA, 33 bp, Homo sapien
tgcaagtctcatgtccaagtccaaaatcaatgg

SEQ ID NO: 396420 - DNA, 33 bp, Homo sapien
tgcaagtctcatgtccgagtccaaaatcaatgg

SEQ ID NO: 396421 - DNA, 33 bp, Homo sapien
cttcaaaaatgaactcactagtattggaatagt

SEQ ID NO: 396422 - DNA, 33 bp, Homo sapien
cttcaaaaatgaactcgctagtattggaatagt

SEQ ID NO: 396423 - DNA, 33 bp, Homo sapien
ccgtatctctcacctcgattgttgtagtgatct

SEQ ID NO: 396424 - DNA, 33 bp, Homo sapien
ccgtatctctcacctctattgttgtagtgatct

SEQ ID NO: 396425 - DNA, 33 bp, Homo sapien
gttggcatatagttcaccagggatatagcagta

SEQ ID NO: 396426 - DNA, 33 bp, Homo sapien
gttggcatatagttcatcagggatatagcagta

SEQ ID NO: 396427 - DNA, 33 bp, Homo sapien
tcttttcaaagctctacctttgcatatacaagc

SEQ ID NO: 396428 - DNA, 33 bp, Homo sapien
tcttttcaaagctctatctttgcatatacaagc

SEQ ID NO: 396429 - DNA, 33 bp, Homo sapien
tctgcgcacagggaagacattcggccccgaact

SEQ ID NO: 396430 - DNA, 33 bp, Homo sapien
tctgcgcacagggaaggcattcggccccgaact

SEQ ID NO: 396431 - DNA, 33 bp, Homo sapien
atgggatccactgaccaggcaactgcaggtttg

SEQ ID NO: 396432 - DNA, 33 bp, Homo sapien
atgggatccactgacccggcaactgcaggtttg

SEQ ID NO: 396433 - DNA, 33 bp, Homo sapien
tcagcgaacgggtaacaggagaatgcgggccgg

SEQ ID NO: 396434 - DNA, 33 bp, Homo sapien
tcagcgaacgggtaacgggagaatgcgggccgg

SEQ ID NO: 396435 - DNA, 33 bp, Homo sapien
tctggaagagttgctgcaaggagactccaaatt

SEQ ID NO: 396436 - DNA, 33 bp, Homo sapien
tctggaagagttgctgtaaggagactccaaatt

SEQ ID NO: 396437 - DNA, 33 bp, Homo sapien
cccttttaggttgagacaatccaggcgtttgcc

SEQ ID NO: 396438 - DNA, 33 bp, Homo sapien
cccttttaggttgagataatccaggcgtttgcc

SEQ ID NO: 396439 - DNA, 33 bp, Homo sapien
atacagttgtagttgaagttcagggacacaaga

SEQ ID NO: 396440 - DNA, 33 bp, Homo sapien
atacagttgtagttgaggttcagggacacaaga

SEQ ID NO: 396441 - DNA, 33 bp, Homo sapien
agacaaaggatttgcaactgttatagactcacc

SEQ ID NO: 396442 - DNA, 33 bp, Homo sapien
agacaaaggatttgcagctgttatagactcacc

SEQ ID NO: 396443 - DNA, 33 bp, Homo sapien
ggagttagcatttctcaaatttgttgggatggt

SEQ ID NO: 396444 - DNA, 33 bp, Homo sapien
ggagttagcatttctcgaatttgttgggatggt

SEQ ID NO: 396445 - DNA, 33 bp, Homo sapien
cttccatttctgggctaaactagatacttttca

SEQ ID NO: 396446 - DNA, 33 bp, Homo sapien
cttccatttctgggctcaactagatacttttca

SEQ ID NO: 396447 - DNA, 33 bp, Homo sapien
cccttgaggcaatgtaagtaccagaagacagca

SEQ ID NO: 396448 - DNA, 33 bp, Homo sapien
cccttgaggcaatgtatgtaccagaagacagca

SEQ ID NO: 396449 - DNA, 33 bp, Homo sapien
ggctagatagtgaccaacagcgtgaatgaagcc

SEQ ID NO: 396450 - DNA, 33 bp, Homo sapien
ggctagatagtgaccagcagcgtgaatgaagcc

SEQ ID NO: 396451 - DNA, 33 bp, Homo sapien
tgctagcctaccttgcaacattgtgggtgatct

SEQ ID NO: 396452 - DNA, 33 bp, Homo sapien
tgctagcctaccttgcgacattgtgggtgatct

SEQ ID NO: 396453 - DNA, 33 bp, Homo sapien
catgaccttacaaaaaagattagagtaggtgag

SEQ ID NO: 396454 - DNA, 33 bp, Homo sapien
catgaccttacaaaaaggattagagtaggtgag

SEQ ID NO: 396455 - DNA, 33 bp, Homo sapien
aaactgtcaagttataaacatgtcactgtgatt

SEQ ID NO: 396456 - DNA, 33 bp, Homo sapien
aaactgtcaagttatatacatgtcactgtgatt

SEQ ID NO: 396457 - DNA, 33 bp, Homo sapien
taccagcgcaacactggataaccaggagaaacg

SEQ ID NO: 396458 - DNA, 33 bp, Homo sapien
taccagcgcaacactgtataaccaggagaaacg

SEQ ID NO: 396459 - DNA, 33 bp, Homo sapien
acatagtacatgctcaataaacttagcagcctc

SEQ ID NO: 396460 - DNA, 33 bp, Homo sapien
acatagtacatgctcagtaaacttagcagcctc

SEQ ID NO: 396461 - DNA, 33 bp, Homo sapien
gctcaagtctaagcctaaggataatgataacgt

SEQ ID NO: 396462 - DNA, 33 bp, Homo sapien
gctcaagtctaagcctgaggataatgataacgt

SEQ ID NO: 396463 - DNA, 33 bp, Homo sapien
tgcctggttcctgcaaagggtcctgtttaagct

SEQ ID NO: 396464 - DNA, 33 bp, Homo sapien
tgcctggttcctgcaacgggtcctgtttaagct

SEQ ID NO: 396465 - DNA, 33 bp, Homo sapien
aaaatctgcatttggaaaagttcactcaacagc

SEQ ID NO: 396466 - DNA, 33 bp, Homo sapien
aaaatctgcatttggagaagttcactcaacagc

SEQ ID NO: 396467 - DNA, 33 bp, Homo sapien
tgtaatccagacagcactataggaacatagtgc

SEQ ID NO: 396468 - DNA, 33 bp, Homo sapien
tgtaatccagacagcagtataggaacatagtgc

SEQ ID NO: 396469 - DNA, 33 bp, Homo sapien
ggtgtgagccaccataacttctccattttctct

SEQ ID NO: 396470 - DNA, 33 bp, Homo sapien
ggtgtgagccaccatatcttctccattttctct

SEQ ID NO: 396471 - DNA, 33 bp, Homo sapien
taattgaggaaagccaataacatggcagacacc

SEQ ID NO: 396472 - DNA, 33 bp, Homo sapien
taattgaggaaagccactaacatggcagacacc

SEQ ID NO: 396473 - DNA, 33 bp, Homo sapien
atgagagagattgagacgcatacacaggcaagc

SEQ ID NO: 396474 - DNA, 33 bp, Homo sapien
atgagagagattgagatgcatacacaggcaagc

SEQ ID NO: 396475 - DNA, 33 bp, Homo sapien
acattcaaacagccgacgaacatgtaaagaggt

SEQ ID NO: 396476 - DNA, 33 bp, Homo sapien
acattcaaacagccgatgaacatgtaaagaggt

SEQ ID NO: 396477 - DNA, 33 bp, Homo sapien
tcggtgtaatagctacagaactaaaaagcaatg

SEQ ID NO: 396478 - DNA, 33 bp, Homo sapien
tcggtgtaatagctaccgaactaaaaagcaatg

SEQ ID NO: 396479 - DNA, 33 bp, Homo sapien
gtgcagggccacggaactatctgcctgcctgag

SEQ ID NO: 396480 - DNA, 33 bp, Homo sapien
gtgcagggccacggaattatctgcctgcctgag

SEQ ID NO: 396481 - DNA, 33 bp, Homo sapien
aagaagatcaaggaagaatcccaccttgtgccc

SEQ ID NO: 396482 - DNA, 33 bp, Homo sapien
aagaagatcaaggaagcatcccaccttgtgccc

SEQ ID NO: 396483 - DNA, 33 bp, Homo sapien
gaaccctgtcaacacccactcctctgcaaacaa

SEQ ID NO: 396484 - DNA, 33 bp, Homo sapien
gaaccctgtcaacacctactcctctgcaaacaa

SEQ ID NO: 396485 - DNA, 33 bp, Homo sapien
cacgaaataggtctcacgcagggaaagctatgt

SEQ ID NO: 396486 - DNA, 33 bp, Homo sapien
cacgaaataggtctcaggcagggaaagctatgt

SEQ ID NO: 396487 - DNA, 33 bp, Homo sapien
gctgtttcctggcaggacaaatggtcagaaata

SEQ ID NO: 396488 - DNA, 33 bp, Homo sapien
gctgtttcctggcagggcaaatggtcagaaata

SEQ ID NO: 396489 - DNA, 33 bp, Homo sapien
agctatgacttactgacgggagccattgaaaca

SEQ ID NO: 396490 - DNA, 33 bp, Homo sapien
agctatgacttactgatgggagccattgaaaca

SEQ ID NO: 396491 - DNA, 33 bp, Homo sapien
agttgcttcatttgtaaattgtgaagaaaagta

SEQ ID NO: 396492 - DNA, 33 bp, Homo sapien
agttgcttcatttgtagattgtgaagaaaagta

SEQ ID NO: 396493 - DNA, 33 bp, Homo sapien
caagcctctctaaggaatccggagttgttatga

SEQ ID NO: 396494 - DNA, 33 bp, Homo sapien
caagcctctctaaggagtccggagttgttatga

SEQ ID NO: 396495 - DNA, 33 bp, Homo sapien
ccagtgctggaagaaaacaactttactgaggag

SEQ ID NO: 396496 - DNA, 33 bp, Homo sapien
ccagtgctggaagaaagcaactttactgaggag

SEQ ID NO: 396497 - DNA, 33 bp, Homo sapien
ttgatggtaatttgccgaagactagaatcctgg

SEQ ID NO: 396498 - DNA, 33 bp, Homo sapien
ttgatggtaatttgcctaagactagaatcctgg

SEQ ID NO: 396499 - DNA, 33 bp, Homo sapien
aatatttggcagaggacgtgagatttgaatagg

SEQ ID NO: 396500 - DNA, 33 bp, Homo sapien
aatatttggcagaggatgtgagatttgaatagg

SEQ ID NO: 396501 - DNA, 33 bp, Homo sapien
gagtgtctattacacacaagagtcctggaatag

SEQ ID NO: 396502 - DNA, 33 bp, Homo sapien
gagtgtctattacacataagagtcctggaatag

SEQ ID NO: 396503 - DNA, 33 bp, Homo sapien
gcgtaatcctattcccagacagaattacaagtg

SEQ ID NO: 396504 - DNA, 33 bp, Homo sapien
gcgtaatcctattcccggacagaattacaagtg

SEQ ID NO: 396505 - DNA, 33 bp, Homo sapien
ctgtaatctccttttccagcttttccaaatctg

SEQ ID NO: 396506 - DNA, 33 bp, Homo sapien
ctgtaatctccttttctagcttttccaaatctg

SEQ ID NO: 396507 - DNA, 33 bp, Homo sapien
tttgccaaagaactgaatcaggaatttgtacat

SEQ ID NO: 396508 - DNA, 33 bp, Homo sapien
tttgccaaagaactgagtcaggaatttgtacat

SEQ ID NO: 396509 - DNA, 33 bp, Homo sapien
cgtcactgttggcatcagagtcgttcagagcac

SEQ ID NO: 396510 - DNA, 33 bp, Homo sapien
cgtcactgttggcatcggagtcgttcagagcac

SEQ ID NO: 396511 - DNA, 33 bp, Homo sapien
atgggacgagggtagaaagtaagaagcactttt

SEQ ID NO: 396512 - DNA, 33 bp, Homo sapien
atgggacgagggtagacagtaagaagcactttt

SEQ ID NO: 396513 - DNA, 33 bp, Homo sapien
ctgcagctacctccaacattgaaagtttgtagt

SEQ ID NO: 396514 - DNA, 33 bp, Homo sapien
ctgcagctacctccaatattgaaagtttgtagt

SEQ ID NO: 396515 - DNA, 33 bp, Homo sapien
tgattggattggatcccgagggttctgccattc

SEQ ID NO: 396516 - DNA, 33 bp, Homo sapien
tgattggattggatcctgagggttctgccattc

SEQ ID NO: 396517 - DNA, 33 bp, Homo sapien
tctgggccctcaaatccaagtccagtgatcctg

SEQ ID NO: 396518 - DNA, 33 bp, Homo sapien
tctgggccctcaaatctaagtccagtgatcctg

SEQ ID NO: 396519 - DNA, 33 bp, Homo sapien
cttatcagtgtctcaacaacatcatcaaagact

SEQ ID NO: 396520 - DNA, 33 bp, Homo sapien
cttatcagtgtctcaataacatcatcaaagact

SEQ ID NO: 396521 - DNA, 33 bp, Homo sapien
ccacgttgcaaccttacgaggaaaaagctaaaa

SEQ ID NO: 396522 - DNA, 33 bp, Homo sapien
ccacgttgcaaccttatgaggaaaaagctaaaa

SEQ ID NO: 396523 - DNA, 33 bp, Homo sapien
atagaaccagcttctaagttcaggaaggaaacc

SEQ ID NO: 396524 - DNA, 33 bp, Homo sapien
atagaaccagcttctaggttcaggaaggaaacc

SEQ ID NO: 396525 - DNA, 33 bp, Homo sapien
aacatccaatcagagcaaatactgaggtagagg

SEQ ID NO: 396526 - DNA, 33 bp, Homo sapien
aacatccaatcagagccaatactgaggtagagg

SEQ ID NO: 396527 - DNA, 33 bp, Homo sapien
tgtgtggagagtttgaaagctgctagggccagg

SEQ ID NO: 396528 - DNA, 33 bp, Homo sapien
tgtgtggagagtttgagagctgctagggccagg

SEQ ID NO: 396529 - DNA, 33 bp, Homo sapien
ctgcaggctatacagcaaggatggtggcatctg

SEQ ID NO: 396530 - DNA, 33 bp, Homo sapien
ctgcaggctatacagcgaggatggtggcatctg

SEQ ID NO: 396531 - DNA, 33 bp, Homo sapien
tagagagtgagaaggaacatgatcttagaaaag

SEQ ID NO: 396532 - DNA, 33 bp, Homo sapien
tagagagtgagaaggagcatgatcttagaaaag

SEQ ID NO: 396533 - DNA, 33 bp, Homo sapien
tcagatctaaactcacaaacaaactaccgctca

SEQ ID NO: 396534 - DNA, 33 bp, Homo sapien
tcagatctaaactcacgaacaaactaccgctca

SEQ ID NO: 396535 - DNA, 33 bp, Homo sapien
tttgtgtctgaggtacaaataaaccccaaatca

SEQ ID NO: 396536 - DNA, 33 bp, Homo sapien
tttgtgtctgaggtacgaataaaccccaaatca

SEQ ID NO: 396537 - DNA, 33 bp, Homo sapien
ttctggggtaattcctcacatgggagtaggaga

SEQ ID NO: 396538 - DNA, 33 bp, Homo sapien
ttctggggtaattcctgacatgggagtaggaga

SEQ ID NO: 396539 - DNA, 33 bp, Homo sapien
tagtgacgagcagcccagaccgcatacattcag

SEQ ID NO: 396540 - DNA, 33 bp, Homo sapien
tagtgacgagcagcccggaccgcatacattcag

SEQ ID NO: 396541 - DNA, 33 bp, Homo sapien
tgagcagggctatgaaatgaagtgttttttcct

SEQ ID NO: 396542 - DNA, 33 bp, Homo sapien
tgagcagggctatgaactgaagtgttttttcct

SEQ ID NO: 396543 - DNA, 33 bp, Homo sapien
agcagaatggcccagaataggtctttttttttt

SEQ ID NO: 396544 - DNA, 33 bp, Homo sapien
agcagaatggcccagagtaggtctttttttttt

SEQ ID NO: 396545 - DNA, 33 bp, Homo sapien
agacacagcttaggcaaatctaggtcaagtttc

SEQ ID NO: 396546 - DNA, 33 bp, Homo sapien
agacacagcttaggcagatctaggtcaagtttc

SEQ ID NO: 396547 - DNA, 33 bp, Homo sapien
caagcaaatcattagcactgctctcagctactt

SEQ ID NO: 396548 - DNA, 33 bp, Homo sapien
caagcaaatcattagcgctgctctcagctactt

SEQ ID NO: 396549 - DNA, 33 bp, Homo sapien
tttcatgcaaaagaccaacccaggggtagtgat

SEQ ID NO: 396550 - DNA, 33 bp, Homo sapien
tttcatgcaaaagaccgacccaggggtagtgat

SEQ ID NO: 396551 - DNA, 33 bp, Homo sapien
gtggaagccgctctccactatccactcttcctt

SEQ ID NO: 396552 - DNA, 33 bp, Homo sapien
gtggaagccgctctccgctatccactcttcctt

SEQ ID NO: 396553 - DNA, 33 bp, Homo sapien
ggagggtttgagtccagtgcctctccatcttca

SEQ ID NO: 396554 - DNA, 33 bp, Homo sapien
ggagggtttgagtccattgcctctccatcttca

SEQ ID NO: 396555 - DNA, 33 bp, Homo sapien
ttacatataatttctaagggcctccttctataa

SEQ ID NO: 396556 - DNA, 33 bp, Homo sapien
ttacatataatttctaggggcctccttctataa

SEQ ID NO: 396557 - DNA, 33 bp, Homo sapien
gattcctttgctgcacgaatcccctgaaaaatc

SEQ ID NO: 396558 - DNA, 33 bp, Homo sapien
gattcctttgctgcactaatcccctgaaaaatc

SEQ ID NO: 396559 - DNA, 33 bp, Homo sapien
gcagagctgtggataacctggctccagagcagc

SEQ ID NO: 396560 - DNA, 33 bp, Homo sapien
gcagagctgtggataatctggctccagagcagc

SEQ ID NO: 396561 - DNA, 33 bp, Homo sapien
gtcctcttcagttgaaggatttgtgcatgtaat

SEQ ID NO: 396562 - DNA, 33 bp, Homo sapien
gtcctcttcagttgaatgatttgtgcatgtaat

SEQ ID NO: 396563 - DNA, 33 bp, Homo sapien
ggaaccaaagccatccactgcacgtctcaactg

SEQ ID NO: 396564 - DNA, 33 bp, Homo sapien
ggaaccaaagccatccgctgcacgtctcaactg

SEQ ID NO: 396565 - DNA, 33 bp, Homo sapien
cttttctcaaagcaaaatatgtattgttcatgt

SEQ ID NO: 396566 - DNA, 33 bp, Homo sapien
cttttctcaaagcaaagtatgtattgttcatgt

SEQ ID NO: 396567 - DNA, 33 bp, Homo sapien
cattccctgcagtgcaatacctatctcagccac

SEQ ID NO: 396568 - DNA, 33 bp, Homo sapien
cattccctgcagtgcagtacctatctcagccac

SEQ ID NO: 396569 - DNA, 33 bp, Homo sapien
acctgtcttcctttcactccagtgacctgacca

SEQ ID NO: 396570 - DNA, 33 bp, Homo sapien
acctgtcttcctttcattccagtgacctgacca

SEQ ID NO: 396571 - DNA, 33 bp, Homo sapien
tcgtacacatgcatacgcatacttacacatacc

SEQ ID NO: 396572 - DNA, 33 bp, Homo sapien
tcgtacacatgcatactcatacttacacatacc

SEQ ID NO: 396573 - DNA, 33 bp, Homo sapien
caagaacaagctgagaaaaccttccctacccct

SEQ ID NO: 396574 - DNA, 33 bp, Homo sapien
caagaacaagctgagagaaccttccctacccct

SEQ ID NO: 396575 - DNA, 33 bp, Homo sapien
acagttggcgctgccacgaagctccagagaggt

SEQ ID NO: 396576 - DNA, 33 bp, Homo sapien
acagttggcgctgccatgaagctccagagaggt

SEQ ID NO: 396577 - DNA, 33 bp, Homo sapien
tctttcaggagtcccaaattaatgcaggagtct

SEQ ID NO: 396578 - DNA, 33 bp, Homo sapien
tctttcaggagtcccagattaatgcaggagtct

SEQ ID NO: 396579 - DNA, 33 bp, Homo sapien
cctctaacagggatcgaagatgtgcagtaacaa

SEQ ID NO: 396580 - DNA, 33 bp, Homo sapien
cctctaacagggatcgcagatgtgcagtaacaa

SEQ ID NO: 396581 - DNA, 33 bp, Homo sapien
catacacacctgagacaacatctcccttcctcc

SEQ ID NO: 396582 - DNA, 33 bp, Homo sapien
catacacacctgagacgacatctcccttcctcc

SEQ ID NO: 396583 - DNA, 33 bp, Homo sapien
tgcacactcagctccacctgtgacagacaaagc

SEQ ID NO: 396584 - DNA, 33 bp, Homo sapien
tgcacactcagctccatctgtgacagacaaagc

SEQ ID NO: 396585 - DNA, 33 bp, Homo sapien
aacaagaggacttggaagaaaagagctgctata

SEQ ID NO: 396586 - DNA, 33 bp, Homo sapien
aacaagaggacttggaggaaaagagctgctata

SEQ ID NO: 396587 - DNA, 33 bp, Homo sapien
gcagaggaagcttctacgcgctagagaggatca

SEQ ID NO: 396588 - DNA, 33 bp, Homo sapien
gcagaggaagcttctatgcgctagagaggatca

SEQ ID NO: 396589 - DNA, 33 bp, Homo sapien
caattggttctcatcacggaatctccctctggc

SEQ ID NO: 396590 - DNA, 33 bp, Homo sapien
caattggttctcatcatggaatctccctctggc

SEQ ID NO: 396591 - DNA, 33 bp, Homo sapien
gggccagaagcccatccctccttgccaaatggt

SEQ ID NO: 396592 - DNA, 33 bp, Homo sapien
gggccagaagcccatctctccttgccaaatggt

SEQ ID NO: 396593 - DNA, 33 bp, Homo sapien
caactcggggaaaccagcaaggagtggggatat

SEQ ID NO: 396594 - DNA, 33 bp, Homo sapien
caactcggggaaaccatcaaggagtggggatat

SEQ ID NO: 396595 - DNA, 33 bp, Homo sapien
gcagtattgatgaagacagtatgggatctgtga

SEQ ID NO: 396596 - DNA, 33 bp, Homo sapien
gcagtattgatgaagagagtatgggatctgtga

SEQ ID NO: 396597 - DNA, 33 bp, Homo sapien
ggaagattggagctagaccagagcccttgactg

SEQ ID NO: 396598 - DNA, 33 bp, Homo sapien
ggaagattggagctagtccagagcccttgactg

SEQ ID NO: 396599 - DNA, 33 bp, Homo sapien
tttgaagaggataacacaaggcaagattaaaaa

SEQ ID NO: 396600 - DNA, 33 bp, Homo sapien
tttgaagaggataacataaggcaagattaaaaa

SEQ ID NO: 396601 - DNA, 33 bp, Homo sapien
aggatgagaacgatcactccttcctctgactca

SEQ ID NO: 396602 - DNA, 33 bp, Homo sapien
aggatgagaacgatcattccttcctctgactca

SEQ ID NO: 396603 - DNA, 33 bp, Homo sapien
gagggaatggtaaagacgccagagctcctcagc

SEQ ID NO: 396604 - DNA, 33 bp, Homo sapien
gagggaatggtaaagatgccagagctcctcagc

SEQ ID NO: 396605 - DNA, 33 bp, Homo sapien
ttgcccagtgatctcccgagttggagttgtgtg

SEQ ID NO: 396606 - DNA, 33 bp, Homo sapien
ttgcccagtgatctcctgagttggagttgtgtg

SEQ ID NO: 396607 - DNA, 33 bp, Homo sapien
agaagatggatttagacgttgctaggtgagggg

SEQ ID NO: 396608 - DNA, 33 bp, Homo sapien
agaagatggatttagatgttgctaggtgagggg

SEQ ID NO: 396609 - DNA, 33 bp, Homo sapien
gatttagccacaaaaaaaaatcaaagttgcttc

SEQ ID NO: 396610 - DNA, 33 bp, Homo sapien
gatttagccacaaaaagaaatcaaagttgcttc

SEQ ID NO: 396611 - DNA, 33 bp, Homo sapien
tggtgcagctgcgctacggcgaagacggcctgg

SEQ ID NO: 396612 - DNA, 33 bp, Homo sapien
tggtgcagctgcgctatggcgaagacggcctgg

SEQ ID NO: 396613 - DNA, 33 bp, Homo sapien
gaaggatgctgaaaggcaagctctagtgcaaga

SEQ ID NO: 396614 - DNA, 33 bp, Homo sapien
gaaggatgctgaaaggtaagctctagtgcaaga

SEQ ID NO: 396615 - DNA, 33 bp, Homo sapien
ataatctctctaggaacgaaactgctgggccat

SEQ ID NO: 396616 - DNA, 33 bp, Homo sapien
ataatctctctaggaatgaaactgctgggccat

SEQ ID NO: 396617 - DNA, 33 bp, Homo sapien
ccaaaaatagaaaaatgaagtgtggtgctacat

SEQ ID NO: 396618 - DNA, 33 bp, Homo sapien
ccaaaaatagaaaaattaagtgtggtgctacat

SEQ ID NO: 396619 - DNA, 33 bp, Homo sapien
aggagggttagaagagacgtttagagctactca

SEQ ID NO: 396620 - DNA, 33 bp, Homo sapien
aggagggttagaagaggcgtttagagctactca

SEQ ID NO: 396621 - DNA, 33 bp, Homo sapien
agattcgggccacatcaaagtcaggcatttcat

SEQ ID NO: 396622 - DNA, 33 bp, Homo sapien
agattcgggccacatcgaagtcaggcatttcat

SEQ ID NO: 396623 - DNA, 33 bp, Homo sapien
tccaagcaaaagtccaaaagattacttcagttt

SEQ ID NO: 396624 - DNA, 33 bp, Homo sapien
tccaagcaaaagtccagaagattacttcagttt

SEQ ID NO: 396625 - DNA, 33 bp, Homo sapien
gccccgaccaggtctgaacaatgcctggcgccc

SEQ ID NO: 396626 - DNA, 33 bp, Homo sapien
gccccgaccaggtctggacaatgcctggcgccc

SEQ ID NO: 396627 - DNA, 33 bp, Homo sapien
gaatttgtattccagggagtagtaggtatttct

SEQ ID NO: 396628 - DNA, 33 bp, Homo sapien
gaatttgtattccaggtagtagtaggtatttct

SEQ ID NO: 396629 - DNA, 33 bp, Homo sapien
cagagcccaagattacagatttgaaattaatac

SEQ ID NO: 396630 - DNA, 33 bp, Homo sapien
cagagcccaagattacggatttgaaattaatac

SEQ ID NO: 396631 - DNA, 33 bp, Homo sapien
cccatcatgggttctcaagtgttcgttctgatg

SEQ ID NO: 396632 - DNA, 33 bp, Homo sapien
cccatcatgggttctccagtgttcgttctgatg

SEQ ID NO: 396633 - DNA, 33 bp, Homo sapien
ttttgtattttttgcagtgaccgggttttgccc

SEQ ID NO: 396634 - DNA, 33 bp, Homo sapien
ttttgtattttttgcattgaccgggttttgccc

SEQ ID NO: 396635 - DNA, 33 bp, Homo sapien
tctctgctaccaaacaatgatagaaaggattgt

SEQ ID NO: 396636 - DNA, 33 bp, Homo sapien
tctctgctaccaaacagtgatagaaaggattgt

SEQ ID NO: 396637 - DNA, 33 bp, Homo sapien
tgagcatttgcttagaatcaggtgctattacta

SEQ ID NO: 396638 - DNA, 33 bp, Homo sapien
tgagcatttgcttagagtcaggtgctattacta

SEQ ID NO: 396639 - DNA, 33 bp, Homo sapien
agggagtgggtttgagaatgtggacggcagttt

SEQ ID NO: 396640 - DNA, 33 bp, Homo sapien
agggagtgggtttgaggatgtggacggcagttt

SEQ ID NO: 396641 - DNA, 33 bp, Homo sapien
aaacccataatgcccacagaatgtcaaatgagg

SEQ ID NO: 396642 - DNA, 33 bp, Homo sapien
aaacccataatgcccatagaatgtcaaatgagg

SEQ ID NO: 396643 - DNA, 33 bp, Homo sapien
ttagagaggatgaggaagtgaagggatgctgga

SEQ ID NO: 396644 - DNA, 33 bp, Homo sapien
ttagagaggatgaggacgtgaagggatgctgga

SEQ ID NO: 396645 - DNA, 33 bp, Homo sapien
atgggtagtagtatggaagaaatcggtaagagg

SEQ ID NO: 396646 - DNA, 33 bp, Homo sapien
atgggtagtagtatggcagaaatcggtaagagg

SEQ ID NO: 396647 - DNA, 33 bp, Homo sapien
tgcaggaggtgcttacacatgtttgtttctttg

SEQ ID NO: 396648 - DNA, 33 bp, Homo sapien
tgcaggaggtgcttacgcatgtttgtttctttg

SEQ ID NO: 396649 - DNA, 33 bp, Homo sapien
agaacaattgcagaaacagctaacctttgttga

SEQ ID NO: 396650 - DNA, 33 bp, Homo sapien
agaacaattgcagaaagagctaacctttgttga

SEQ ID NO: 396651 - DNA, 33 bp, Homo sapien
aactggactgtaaataagtttttgatgaagctg

SEQ ID NO: 396652 - DNA, 33 bp, Homo sapien
aactggactgtaaatatgtttttgatgaagctg

SEQ ID NO: 396653 - DNA, 33 bp, Homo sapien
atatgtgccgccaatacgagcaaagcaacagcc

SEQ ID NO: 396654 - DNA, 33 bp, Homo sapien
atatgtgccgccaatatgagcaaagcaacagcc

SEQ ID NO: 396655 - DNA, 33 bp, Homo sapien
gagaagctaacagatacgaaagactaacataga

SEQ ID NO: 396656 - DNA, 33 bp, Homo sapien
gagaagctaacagatatgaaagactaacataga

SEQ ID NO: 396657 - DNA, 33 bp, Homo sapien
tagtaaggaagataaaagtatcgctgaaagagt

SEQ ID NO: 396658 - DNA, 33 bp, Homo sapien
tagtaaggaagataaaggtatcgctgaaagagt

SEQ ID NO: 396659 - DNA, 33 bp, Homo sapien
aatacaagcgtgtgccactacctctggctaatt

SEQ ID NO: 396660 - DNA, 33 bp, Homo sapien
aatacaagcgtgtgcctctacctctggctaatt

SEQ ID NO: 396661 - DNA, 33 bp, Homo sapien
gtcaaacctgactcccggattgtctaccccagt

SEQ ID NO: 396662 - DNA, 33 bp, Homo sapien
gtcaaacctgactccctgattgtctaccccagt

SEQ ID NO: 396663 - DNA, 33 bp, Homo sapien
agaagtatccccagaccgtctaacatgctcaac

SEQ ID NO: 396664 - DNA, 33 bp, Homo sapien
agaagtatccccagactgtctaacatgctcaac

SEQ ID NO: 396665 - DNA, 33 bp, Homo sapien
tgtccagtttcttttacggattttgtagctata

SEQ ID NO: 396666 - DNA, 33 bp, Homo sapien
tgtccagtttcttttatggattttgtagctata

SEQ ID NO: 396667 - DNA, 33 bp, Homo sapien
caggaataataaaacaaccggaactcggatgct

SEQ ID NO: 396668 - DNA, 33 bp, Homo sapien
caggaataataaaacacccggaactcggatgct

SEQ ID NO: 396669 - DNA, 33 bp, Homo sapien
gtgctccatgcgcccaatcagaagaaagatatc

SEQ ID NO: 396670 - DNA, 33 bp, Homo sapien
gtgctccatgcgcccagtcagaagaaagatatc

SEQ ID NO: 396671 - DNA, 33 bp, Homo sapien
tttccaagtgcttgggccaggtagtgcttgctt

SEQ ID NO: 396672 - DNA, 33 bp, Homo sapien
tttccaagtgcttgggtcaggtagtgcttgctt

SEQ ID NO: 396673 - DNA, 33 bp, Homo sapien
accacagagatcaacactgacttggcgcgggag

SEQ ID NO: 396674 - DNA, 33 bp, Homo sapien
accacagagatcaacattgacttggcgcgggag

SEQ ID NO: 396675 - DNA, 33 bp, Homo sapien
gtacacggtttggctggaagaatgcacacagaa

SEQ ID NO: 396676 - DNA, 33 bp, Homo sapien
gtacacggtttggctgtaagaatgcacacagaa

SEQ ID NO: 396677 - DNA, 33 bp, Homo sapien
tataaccatgcacagaatatttaaataccttcc

SEQ ID NO: 396678 - DNA, 33 bp, Homo sapien
tataaccatgcacagagtatttaaataccttcc

SEQ ID NO: 396679 - DNA, 33 bp, Homo sapien
actagtgtaaggagaaggttttgaggaagtcac

SEQ ID NO: 396680 - DNA, 33 bp, Homo sapien
actagtgtaaggagaatgttttgaggaagtcac

SEQ ID NO: 396681 - DNA, 33 bp, Homo sapien
aaaatcagctatcacaaaacattcctggagatc

SEQ ID NO: 396682 - DNA, 33 bp, Homo sapien
aaaatcagctatcacagaacattcctggagatc

SEQ ID NO: 396683 - DNA, 33 bp, Homo sapien
ttcctcctggcaataaacctaaagcaataatga

SEQ ID NO: 396684 - DNA, 33 bp, Homo sapien
ttcctcctggcaataaccctaaagcaataatga

SEQ ID NO: 396685 - DNA, 33 bp, Homo sapien
aacttaagacttgtcacaagtgagctcataatt

SEQ ID NO: 396686 - DNA, 33 bp, Homo sapien
aacttaagacttgtcataagtgagctcataatt

SEQ ID NO: 396687 - DNA, 33 bp, Homo sapien
aaacagtgctctggtgcaactcaaattataatc

SEQ ID NO: 396688 - DNA, 33 bp, Homo sapien
aaacagtgctctggtgtaactcaaattataatc

SEQ ID NO: 396689 - DNA, 33 bp, Homo sapien
actaatattctaatgaggatacaatttgcagag

SEQ ID NO: 396690 - DNA, 33 bp, Homo sapien
actaatattctaatgatgatacaatttgcagag

SEQ ID NO: 396691 - DNA, 33 bp, Homo sapien
aaggaagtgggaagtaccaacgtatgaagggct

SEQ ID NO: 396692 - DNA, 33 bp, Homo sapien
aaggaagtgggaagtatcaacgtatgaagggct

SEQ ID NO: 396693 - DNA, 33 bp, Homo sapien
tgagatggaaggaatcggagactctaagtgacc

SEQ ID NO: 396694 - DNA, 33 bp, Homo sapien
tgagatggaaggaatctgagactctaagtgacc

SEQ ID NO: 396695 - DNA, 33 bp, Homo sapien
taaacactggtaaagacgctcagcctcattagg

SEQ ID NO: 396696 - DNA, 33 bp, Homo sapien
taaacactggtaaagatgctcagcctcattagg

SEQ ID NO: 396697 - DNA, 33 bp, Homo sapien
aggagggcagtgcacaatgaaatcaaggtgatc

SEQ ID NO: 396698 - DNA, 33 bp, Homo sapien
aggagggcagtgcacactgaaatcaaggtgatc

SEQ ID NO: 396699 - DNA, 33 bp, Homo sapien
cgcttggagagagccacgaaaggacagagggag

SEQ ID NO: 396700 - DNA, 33 bp, Homo sapien
cgcttggagagagccatgaaaggacagagggag

SEQ ID NO: 396701 - DNA, 33 bp, Homo sapien
acacattttcatcctcagagaaatgtgttccat

SEQ ID NO: 396702 - DNA, 33 bp, Homo sapien
acacattttcatcctccgagaaatgtgttccat

SEQ ID NO: 396703 - DNA, 33 bp, Homo sapien
ccctcattgtaacccactcattctttatactca

SEQ ID NO: 396704 - DNA, 33 bp, Homo sapien
ccctcattgtaacccattcattctttatactca

SEQ ID NO: 396705 - DNA, 33 bp, Homo sapien
cagctgggaaccaggcagatgaaaataaaattg

SEQ ID NO: 396706 - DNA, 33 bp, Homo sapien
cagctgggaaccaggcggatgaaaataaaattg

SEQ ID NO: 396707 - DNA, 33 bp, Homo sapien
ttttttcaaatcatatcacaaatgtgtattctc

SEQ ID NO: 396708 - DNA, 33 bp, Homo sapien
ttttttcaaatcatattacaaatgtgtattctc

SEQ ID NO: 396709 - DNA, 33 bp, Homo sapien
ttgtaatagttaaagaatagtgtggaggaaaca

SEQ ID NO: 396710 - DNA, 33 bp, Homo sapien
ttgtaatagttaaagattagtgtggaggaaaca

SEQ ID NO: 396711 - DNA, 33 bp, Homo sapien
tataaaggaatgttcaaaaaatcttggtgtctc

SEQ ID NO: 396712 - DNA, 33 bp, Homo sapien
tataaaggaatgttcagaaaatcttggtgtctc

SEQ ID NO: 396713 - DNA, 33 bp, Homo sapien
ccactattgccctgggacatattttaccttgaa

SEQ ID NO: 396714 - DNA, 33 bp, Homo sapien
ccactattgccctgggccatattttaccttgaa

SEQ ID NO: 396715 - DNA, 33 bp, Homo sapien
aggagaaggaggatgacgctaggtttcatcttc

SEQ ID NO: 396716 - DNA, 33 bp, Homo sapien
aggagaaggaggatgatgctaggtttcatcttc

SEQ ID NO: 396717 - DNA, 33 bp, Homo sapien
ggtttcatcttctatgacaatttcaaccagttg

SEQ ID NO: 396718 - DNA, 33 bp, Homo sapien
ggtttcatcttctatgtcaatttcaaccagttg

SEQ ID NO: 396719 - DNA, 33 bp, Homo sapien
tgcagttggttatcagcatctacagtagcaaag

SEQ ID NO: 396720 - DNA, 33 bp, Homo sapien
tgcagttggttatcagtatctacagtagcaaag

SEQ ID NO: 396721 - DNA, 33 bp, Homo sapien
ctcaggaggaccaggaaagaagccaacaggaca

SEQ ID NO: 396722 - DNA, 33 bp, Homo sapien
ctcaggaggaccaggagagaagccaacaggaca

SEQ ID NO: 396723 - DNA, 33 bp, Homo sapien
gaaacactgtgacaggcacaagaggacaaagtg

SEQ ID NO: 396724 - DNA, 33 bp, Homo sapien
gaaacactgtgacaggtacaagaggacaaagtg

SEQ ID NO: 396725 - DNA, 33 bp, Homo sapien
taggcagagaatatcccataagtagagaagaga

SEQ ID NO: 396726 - DNA, 33 bp, Homo sapien
taggcagagaatatcctataagtagagaagaga

SEQ ID NO: 396727 - DNA, 33 bp, Homo sapien
acgagctgtgagatctcagaccaattttttcat

SEQ ID NO: 396728 - DNA, 33 bp, Homo sapien
acgagctgtgagatcttagaccaattttttcat

SEQ ID NO: 396729 - DNA, 33 bp, Homo sapien
cagccgcatgcttggcggagcaggtgaatatca

SEQ ID NO: 396730 - DNA, 33 bp, Homo sapien
cagccgcatgcttggctgagcaggtgaatatca

SEQ ID NO: 396731 - DNA, 33 bp, Homo sapien
aacttcacctgggttcaaggagaccgtgttggg

SEQ ID NO: 396732 - DNA, 33 bp, Homo sapien
aacttcacctgggttcgaggagaccgtgttggg

SEQ ID NO: 396733 - DNA, 33 bp, Homo sapien
tggcattcagggttagcattctcacaagccaat

SEQ ID NO: 396734 - DNA, 33 bp, Homo sapien
tggcattcagggttagtattctcacaagccaat

SEQ ID NO: 396735 - DNA, 33 bp, Homo sapien
gcttccctcctctctaccacaacgggttggatg

SEQ ID NO: 396736 - DNA, 33 bp, Homo sapien
gcttccctcctctctagcacaacgggttggatg

SEQ ID NO: 396737 - DNA, 33 bp, Homo sapien
aaccagtggatgagatgaacccaatcagccggt

SEQ ID NO: 396738 - DNA, 33 bp, Homo sapien
aaccagtggatgagattaacccaatcagccggt

SEQ ID NO: 396739 - DNA, 33 bp, Homo sapien
tcttctaatatttaaacgttggcaagtgattca

SEQ ID NO: 396740 - DNA, 33 bp, Homo sapien
tcttctaatatttaaatgttggcaagtgattca

SEQ ID NO: 396741 - DNA, 33 bp, Homo sapien
ccttgccagctgatcaaaacacatctgcagatc

SEQ ID NO: 396742 - DNA, 33 bp, Homo sapien
ccttgccagctgatcagaacacatctgcagatc

SEQ ID NO: 396743 - DNA, 33 bp, Homo sapien
tgggattccaggaagaagccttcagaggggctg

SEQ ID NO: 396744 - DNA, 33 bp, Homo sapien
tgggattccaggaagaggccttcagaggggctg

SEQ ID NO: 396745 - DNA, 33 bp, Homo sapien
aggtctcagttcttccactgactagctggacat

SEQ ID NO: 396746 - DNA, 33 bp, Homo sapien
aggtctcagttcttccgctgactagctggacat

SEQ ID NO: 396747 - DNA, 33 bp, Homo sapien
tacttgatttctaaaactgtagtatagccatca

SEQ ID NO: 396748 - DNA, 33 bp, Homo sapien
tacttgatttctaaaattgtagtatagccatca

SEQ ID NO: 396749 - DNA, 33 bp, Homo sapien
gatggatgagcctccaatggaaaaaagacaaca

SEQ ID NO: 396750 - DNA, 33 bp, Homo sapien
gatggatgagcctccagtggaaaaaagacaaca

SEQ ID NO: 396751 - DNA, 33 bp, Homo sapien
cagatgcatcagggaaaatcacggagaactagg

SEQ ID NO: 396752 - DNA, 33 bp, Homo sapien
cagatgcatcagggaagatcacggagaactagg

SEQ ID NO: 396753 - DNA, 33 bp, Homo sapien
gggcaagccttcctcaaagatgtccctgcagcc

SEQ ID NO: 396754 - DNA, 33 bp, Homo sapien
gggcaagccttcctcagagatgtccctgcagcc

SEQ ID NO: 396755 - DNA, 33 bp, Homo sapien
cagcttggagaatacacgccaaaacaccagtga

SEQ ID NO: 396756 - DNA, 33 bp, Homo sapien
cagcttggagaatacaggccaaaacaccagtga

SEQ ID NO: 396757 - DNA, 33 bp, Homo sapien
tgctttgtacactggaaggtagaagaggggctg

SEQ ID NO: 396758 - DNA, 33 bp, Homo sapien
tgctttgtacactggacggtagaagaggggctg

SEQ ID NO: 396759 - DNA, 33 bp, Homo sapien
ccaggtcttcatttaagcttcacctctggtaga

SEQ ID NO: 396760 - DNA, 33 bp, Homo sapien
ccaggtcttcatttaatcttcacctctggtaga

SEQ ID NO: 396761 - DNA, 33 bp, Homo sapien
agcgaaatacagcgccagcaaacagggtctgaa

SEQ ID NO: 396762 - DNA, 33 bp, Homo sapien
agcgaaatacagcgccggcaaacagggtctgaa

SEQ ID NO: 396763 - DNA, 33 bp, Homo sapien
agctggagggtaaatacgctggagtgattggga

SEQ ID NO: 396764 - DNA, 33 bp, Homo sapien
agctggagggtaaatatgctggagtgattggga

SEQ ID NO: 396765 - DNA, 33 bp, Homo sapien
atcaaggacgacgctaaggtttttagtctaaat

SEQ ID NO: 396766 - DNA, 33 bp, Homo sapien
atcaaggacgacgctagggtttttagtctaaat

SEQ ID NO: 396767 - DNA, 33 bp, Homo sapien
gcggggccaggagctacgagtcggtacacctgt

SEQ ID NO: 396768 - DNA, 33 bp, Homo sapien
gcggggccaggagctatgagtcggtacacctgt

SEQ ID NO: 396769 - DNA, 33 bp, Homo sapien
tcccagcactttgctcgccatcctcccaggttc

SEQ ID NO: 396770 - DNA, 33 bp, Homo sapien
tcccagcactttgctctccatcctcccaggttc

SEQ ID NO: 396771 - DNA, 33 bp, Homo sapien
cccagctaattttgaactgttttagagtttcac

SEQ ID NO: 396772 - DNA, 33 bp, Homo sapien
cccagctaattttgaattgttttagagtttcac

SEQ ID NO: 396773 - DNA, 33 bp, Homo sapien
ctgccctgggaggatccaagcttccagtatcct

SEQ ID NO: 396774 - DNA, 33 bp, Homo sapien
ctgccctgggaggatctaagcttccagtatcct

SEQ ID NO: 396775 - DNA, 33 bp, Homo sapien
acatcagcaggcagatcatcgagtccgctgaga

SEQ ID NO: 396776 - DNA, 33 bp, Homo sapien
acatcagcaggcagattatcgagtccgctgaga

SEQ ID NO: 396777 - DNA, 33 bp, Homo sapien
agtagaacacaaagaactggatgaaagggatgt

SEQ ID NO: 396778 - DNA, 33 bp, Homo sapien
agtagaacacaaagaattggatgaaagggatgt

SEQ ID NO: 396779 - DNA, 33 bp, Homo sapien
tgtccagttaaagtcacgagttcttgttatcag

SEQ ID NO: 396780 - DNA, 33 bp, Homo sapien
tgtccagttaaagtcaggagttcttgttatcag

SEQ ID NO: 396781 - DNA, 33 bp, Homo sapien
tgcaacattatattccaggaaacgttatagctg

SEQ ID NO: 396782 - DNA, 33 bp, Homo sapien
tgcaacattatattccgggaaacgttatagctg

SEQ ID NO: 396783 - DNA, 33 bp, Homo sapien
tgcaggtacctgtcccagctgcggccgtttctg

SEQ ID NO: 396784 - DNA, 33 bp, Homo sapien
tgcaggtacctgtcccggctgcggccgtttctg

SEQ ID NO: 396785 - DNA, 33 bp, Homo sapien
tcccaattttatcctacgactttatctccaatg

SEQ ID NO: 396786 - DNA, 33 bp, Homo sapien
tcccaattttatcctaggactttatctccaatg

SEQ ID NO: 396787 - DNA, 33 bp, Homo sapien
aaccttggagataaccagacatgattaaggact

SEQ ID NO: 396788 - DNA, 33 bp, Homo sapien
aaccttggagataaccggacatgattaaggact

SEQ ID NO: 396789 - DNA, 33 bp, Homo sapien
gatcctgcatggactacagtgattccaatattc

SEQ ID NO: 396790 - DNA, 33 bp, Homo sapien
gatcctgcatggactagagtgattccaatattc

SEQ ID NO: 396791 - DNA, 33 bp, Homo sapien
atgacggggcccagagaaatgctcaggaactca

SEQ ID NO: 396792 - DNA, 33 bp, Homo sapien
atgacggggcccagagtaatgctcaggaactca

SEQ ID NO: 396793 - DNA, 33 bp, Homo sapien
gccctccacatagtcacgtcagggagctttagg

SEQ ID NO: 396794 - DNA, 33 bp, Homo sapien
gccctccacatagtcatgtcagggagctttagg

SEQ ID NO: 396795 - DNA, 33 bp, Homo sapien
gggctgagaggttccccatgcctcactcagttt

SEQ ID NO: 396796 - DNA, 33 bp, Homo sapien
gggctgagaggttccctatgcctcactcagttt

SEQ ID NO: 396797 - DNA, 33 bp, Homo sapien
ttgctttgttttcctacgcttgtttggcttgtg

SEQ ID NO: 396798 - DNA, 33 bp, Homo sapien
ttgctttgttttcctatgcttgtttggcttgtg

SEQ ID NO: 396799 - DNA, 33 bp, Homo sapien
tcagtttcgaacagtaaggtctcgaactttgat

SEQ ID NO: 396800 - DNA, 33 bp, Homo sapien
tcagtttcgaacagtatggtctcgaactttgat

SEQ ID NO: 396801 - DNA, 33 bp, Homo sapien
gttcactctggtaaaccctttgagagaagagcc

SEQ ID NO: 396802 - DNA, 33 bp, Homo sapien
gttcactctggtaaactctttgagagaagagcc

SEQ ID NO: 396803 - DNA, 33 bp, Homo sapien
gggtgatgtttctatgaacctctaagatccaca

SEQ ID NO: 396804 - DNA, 33 bp, Homo sapien
gggtgatgtttctatgtacctctaagatccaca

SEQ ID NO: 396805 - DNA, 33 bp, Homo sapien
ggcttaaatgagataacgtgcgtaattggctcc

SEQ ID NO: 396806 - DNA, 33 bp, Homo sapien
ggcttaaatgagataatgtgcgtaattggctcc

SEQ ID NO: 396807 - DNA, 33 bp, Homo sapien
attcactgtctccccaacttaagtagtgacagc

SEQ ID NO: 396808 - DNA, 33 bp, Homo sapien
attcactgtctccccaccttaagtagtgacagc

SEQ ID NO: 396809 - DNA, 33 bp, Homo sapien
aatattcatttgaagaccatgaccattaaattg

SEQ ID NO: 396810 - DNA, 33 bp, Homo sapien
aatattcatttgaagagcatgaccattaaattg

SEQ ID NO: 396811 - DNA, 33 bp, Homo sapien
aaataatctgccacataagaaaaccagggaagt

SEQ ID NO: 396812 - DNA, 33 bp, Homo sapien
aaataatctgccacatgagaaaaccagggaagt

SEQ ID NO: 396813 - DNA, 33 bp, Homo sapien
agactaatgaaatgacagggctgaaaagaaatg

SEQ ID NO: 396814 - DNA, 33 bp, Homo sapien
agactaatgaaatgacggggctgaaaagaaatg

SEQ ID NO: 396815 - DNA, 33 bp, Homo sapien
aagcctgaagcttgggaaagtcaggaaaaccgt

SEQ ID NO: 396816 - DNA, 33 bp, Homo sapien
aagcctgaagcttggggaagtcaggaaaaccgt

SEQ ID NO: 396817 - DNA, 33 bp, Homo sapien
atttaatatgcttcaacgaaagtgaaagaatga

SEQ ID NO: 396818 - DNA, 33 bp, Homo sapien
atttaatatgcttcaatgaaagtgaaagaatga

SEQ ID NO: 396819 - DNA, 33 bp, Homo sapien
gggcaatacaaagcataacaaaatatttaaggg

SEQ ID NO: 396820 - DNA, 33 bp, Homo sapien
gggcaatacaaagcatgacaaaatatttaaggg

SEQ ID NO: 396821 - DNA, 33 bp, Homo sapien
gaaacaactaattacacatgcataaaagtttgg

SEQ ID NO: 396822 - DNA, 33 bp, Homo sapien
gaaacaactaattacagatgcataaaagtttgg

SEQ ID NO: 396823 - DNA, 33 bp, Homo sapien
gacctgcctggaactcaagggagaggagtcctc

SEQ ID NO: 396824 - DNA, 33 bp, Homo sapien
gacctgcctggaactcgagggagaggagtcctc

SEQ ID NO: 396825 - DNA, 33 bp, Homo sapien
cgtcctcctcaccacaatggatctgctctgtac

SEQ ID NO: 396826 - DNA, 33 bp, Homo sapien
cgtcctcctcaccacactggatctgctctgtac

SEQ ID NO: 396827 - DNA, 33 bp, Homo sapien
tgtcggcctctctgtaccccgagcgtggcagtg

SEQ ID NO: 396828 - DNA, 33 bp, Homo sapien
tgtcggcctctctgtatcccgagcgtggcagtg

SEQ ID NO: 396829 - DNA, 33 bp, Homo sapien
ttgagaaattaaactggcaagaaaatctgctcg

SEQ ID NO: 396830 - DNA, 33 bp, Homo sapien
ttgagaaattaaactgtcaagaaaatctgctcg

SEQ ID NO: 396831 - DNA, 33 bp, Homo sapien
gccatcaccactatcaaatttggggcattttgg

SEQ ID NO: 396832 - DNA, 33 bp, Homo sapien
gccatcaccactatcatatttggggcattttgg

SEQ ID NO: 396833 - DNA, 33 bp, Homo sapien
tggggctgtacctcaaagcacaggatagcagaa

SEQ ID NO: 396834 - DNA, 33 bp, Homo sapien
tggggctgtacctcaaggcacaggatagcagaa

SEQ ID NO: 396835 - DNA, 33 bp, Homo sapien
gtgcctccaccccggtcaactctttcctgatgc

SEQ ID NO: 396836 - DNA, 33 bp, Homo sapien
gtgcctccaccccggtgaactctttcctgatgc

SEQ ID NO: 396837 - DNA, 33 bp, Homo sapien
gtatgcaatggaaagaaaaactgtgccacagaa

SEQ ID NO: 396838 - DNA, 33 bp, Homo sapien
gtatgcaatggaaagagaaactgtgccacagaa

SEQ ID NO: 396839 - DNA, 33 bp, Homo sapien
cttttctcttccaccacgtggctgatttatcgc

SEQ ID NO: 396840 - DNA, 33 bp, Homo sapien
cttttctcttccaccatgtggctgatttatcgc

SEQ ID NO: 396841 - DNA, 33 bp, Homo sapien
ctaggactgtgtcaacaatgtaagatttcaatc

SEQ ID NO: 396842 - DNA, 33 bp, Homo sapien
ctaggactgtgtcaacgatgtaagatttcaatc

SEQ ID NO: 396843 - DNA, 33 bp, Homo sapien
ctataaacacaattcaaagtggaactgatcaag

SEQ ID NO: 396844 - DNA, 33 bp, Homo sapien
ctataaacacaattcagagtggaactgatcaag

SEQ ID NO: 396845 - DNA, 33 bp, Homo sapien
tcttcctatcataaacacacacattaaccaaga

SEQ ID NO: 396846 - DNA, 33 bp, Homo sapien
tcttcctatcataaacgcacacattaaccaaga

SEQ ID NO: 396847 - DNA, 33 bp, Homo sapien
aattctattcttggccaattctcaatggattct

SEQ ID NO: 396848 - DNA, 33 bp, Homo sapien
aattctattcttggcccattctcaatggattct

SEQ ID NO: 396849 - DNA, 33 bp, Homo sapien
ctgagttatttggacaatatccgacaggctgtg

SEQ ID NO: 396850 - DNA, 33 bp, Homo sapien
ctgagttatttggacactatccgacaggctgtg

SEQ ID NO: 396851 - DNA, 33 bp, Homo sapien
acaaactgaatcaatacaaactgtcttacatgg

SEQ ID NO: 396852 - DNA, 33 bp, Homo sapien
acaaactgaatcaatataaactgtcttacatgg

SEQ ID NO: 396853 - DNA, 33 bp, Homo sapien
tgtgtattaatttgaaaagatggaaggtatttt

SEQ ID NO: 396854 - DNA, 33 bp, Homo sapien
tgtgtattaatttgaagagatggaaggtatttt

SEQ ID NO: 396855 - DNA, 33 bp, Homo sapien
aaaattaatcagagaacgacctgcaagggaaaa

SEQ ID NO: 396856 - DNA, 33 bp, Homo sapien
aaaattaatcagagaatgacctgcaagggaaaa

SEQ ID NO: 396857 - DNA, 33 bp, Homo sapien
ttccactgtttttggaactttgtcggcaaacag

SEQ ID NO: 396858 - DNA, 33 bp, Homo sapien
ttccactgtttttggagctttgtcggcaaacag

SEQ ID NO: 396859 - DNA, 33 bp, Homo sapien
gtaatgctctcctaaagaaagaatccctttaat

SEQ ID NO: 396860 - DNA, 33 bp, Homo sapien
gtaatgctctcctaaataaagaatccctttaat

SEQ ID NO: 396861 - DNA, 33 bp, Homo sapien
atgtaatggtttagaaaaatttacagcacgaga

SEQ ID NO: 396862 - DNA, 33 bp, Homo sapien
atgtaatggtttagaagaatttacagcacgaga

SEQ ID NO: 396863 - DNA, 33 bp, Homo sapien
tcagcacagtttaaaccaggttggagaaagata

SEQ ID NO: 396864 - DNA, 33 bp, Homo sapien
tcagcacagtttaaactaggttggagaaagata

SEQ ID NO: 396865 - DNA, 33 bp, Homo sapien
cttttcatcaccattacattttctacctggcta

SEQ ID NO: 396866 - DNA, 33 bp, Homo sapien
cttttcatcaccattatattttctacctggcta

SEQ ID NO: 396867 - DNA, 33 bp, Homo sapien
aatactgttaagaacaaaacagagagaccactg

SEQ ID NO: 396868 - DNA, 33 bp, Homo sapien
aatactgttaagaacagaacagagagaccactg

SEQ ID NO: 396869 - DNA, 33 bp, Homo sapien
aagtcatcatcagtctaaaaaagaggcccattt

SEQ ID NO: 396870 - DNA, 33 bp, Homo sapien
aagtcatcatcagtctgaaaaagaggcccattt

SEQ ID NO: 396871 - DNA, 33 bp, Homo sapien
gtttatgaagaccccactcacacacacttggag

SEQ ID NO: 396872 - DNA, 33 bp, Homo sapien
gtttatgaagaccccagtcacacacacttggag

SEQ ID NO: 396873 - DNA, 33 bp, Homo sapien
aggccgaattaacaacaatattgagtcttccaa

SEQ ID NO: 396874 - DNA, 33 bp, Homo sapien
aggccgaattaacaacgatattgagtcttccaa

SEQ ID NO: 396875 - DNA, 33 bp, Homo sapien
attctaaaagatggcaaagtctagagcatcacc

SEQ ID NO: 396876 - DNA, 33 bp, Homo sapien
attctaaaagatggcagagtctagagcatcacc

SEQ ID NO: 396877 - DNA, 33 bp, Homo sapien
aacccaagaatctacaaatacattccatgtttc

SEQ ID NO: 396878 - DNA, 33 bp, Homo sapien
aacccaagaatctacacatacattccatgtttc

SEQ ID NO: 396879 - DNA, 33 bp, Homo sapien
gtagaggaatgtgagacccagatgggacgaggt

SEQ ID NO: 396880 - DNA, 33 bp, Homo sapien
gtagaggaatgtgagagccagatgggacgaggt

SEQ ID NO: 396881 - DNA, 33 bp, Homo sapien
aggaaacttgtatctaccaccatgaacttgaca

SEQ ID NO: 396882 - DNA, 33 bp, Homo sapien
aggaaacttgtatctagcaccatgaacttgaca

SEQ ID NO: 396883 - DNA, 33 bp, Homo sapien
ggtaaatttgagaacaaataataggatacacac

SEQ ID NO: 396884 - DNA, 33 bp, Homo sapien
ggtaaatttgagaacagataataggatacacac

SEQ ID NO: 396885 - DNA, 33 bp, Homo sapien
gaaaaagtactgataaaatgtaagatgtcccaa

SEQ ID NO: 396886 - DNA, 33 bp, Homo sapien
gaaaaagtactgataatatgtaagatgtcccaa

SEQ ID NO: 396887 - DNA, 33 bp, Homo sapien
tcaagatcaagcacaaaggatgaaatacttacc

SEQ ID NO: 396888 - DNA, 33 bp, Homo sapien
tcaagatcaagcacaagggatgaaatacttacc

SEQ ID NO: 396889 - DNA, 33 bp, Homo sapien
tccagataatgctatacggaacagaagaatcac

SEQ ID NO: 396890 - DNA, 33 bp, Homo sapien
tccagataatgctatatggaacagaagaatcac

SEQ ID NO: 396891 - DNA, 33 bp, Homo sapien
aagtttccattttgagaccttaagttttggggg

SEQ ID NO: 396892 - DNA, 33 bp, Homo sapien
aagtttccattttgagcccttaagttttggggg

SEQ ID NO: 396893 - DNA, 33 bp, Homo sapien
ctggctgctagtttcaataatgagtttaaaata

SEQ ID NO: 396894 - DNA, 33 bp, Homo sapien
ctggctgctagtttcagtaatgagtttaaaata

SEQ ID NO: 396895 - DNA, 33 bp, Homo sapien
cactcctgtcgaagcccacgtgtatcatcacca

SEQ ID NO: 396896 - DNA, 33 bp, Homo sapien
cactcctgtcgaagcctacgtgtatcatcacca

SEQ ID NO: 396897 - DNA, 33 bp, Homo sapien
tcctttgaaacccagcccagtttgccacattct

SEQ ID NO: 396898 - DNA, 33 bp, Homo sapien
tcctttgaaacccagctcagtttgccacattct

SEQ ID NO: 396899 - DNA, 33 bp, Homo sapien
gacagctttgaaatgcgctaaagggctaagaag

SEQ ID NO: 396900 - DNA, 33 bp, Homo sapien
gacagctttgaaatgctctaaagggctaagaag

SEQ ID NO: 396901 - DNA, 33 bp, Homo sapien
ttcaagctgcccaagcaattctgatgtgcatac

SEQ ID NO: 396902 - DNA, 33 bp, Homo sapien
ttcaagctgcccaagcgattctgatgtgcatac

SEQ ID NO: 396903 - DNA, 33 bp, Homo sapien
ataaatatttgttgaacgaacacatatcgtcgg

SEQ ID NO: 396904 - DNA, 33 bp, Homo sapien
ataaatatttgttgaatgaacacatatcgtcgg

SEQ ID NO: 396905 - DNA, 33 bp, Homo sapien
ctccacatccaatctaactccaatcccagcttt

SEQ ID NO: 396906 - DNA, 33 bp, Homo sapien
ctccacatccaatctagctccaatcccagcttt

SEQ ID NO: 396907 - DNA, 33 bp, Homo sapien
aaaagtggacctcaaccaaggaagaggatagtt

SEQ ID NO: 396908 - DNA, 33 bp, Homo sapien
aaaagtggacctcaactaaggaagaggatagtt

SEQ ID NO: 396909 - DNA, 33 bp, Homo sapien
tctaagaggtcttggaaggtaaacctctcagag

SEQ ID NO: 396910 - DNA, 33 bp, Homo sapien
tctaagaggtcttggagggtaaacctctcagag

SEQ ID NO: 396911 - DNA, 33 bp, Homo sapien
ggcagagtagttgttacgtaatctcaggagagt

SEQ ID NO: 396912 - DNA, 33 bp, Homo sapien
ggcagagtagttgttatgtaatctcaggagagt

SEQ ID NO: 396913 - DNA, 33 bp, Homo sapien
tgaagggacaggttaaaggctgttctcatgcca

SEQ ID NO: 396914 - DNA, 33 bp, Homo sapien
tgaagggacaggttaacggctgttctcatgcca

SEQ ID NO: 396915 - DNA, 33 bp, Homo sapien
ttgagatacatcaggagcatttctatttcaggg

SEQ ID NO: 396916 - DNA, 33 bp, Homo sapien
ttgagatacatcaggatcatttctatttcaggg

SEQ ID NO: 396917 - DNA, 33 bp, Homo sapien
aggctcggaggcaaccagagtatgatgtcaccc

SEQ ID NO: 396918 - DNA, 33 bp, Homo sapien
aggctcggaggcaaccggagtatgatgtcaccc

SEQ ID NO: 396919 - DNA, 33 bp, Homo sapien
agccttgtccgtaatacgtgggaccctggtctg

SEQ ID NO: 396920 - DNA, 33 bp, Homo sapien
agccttgtccgtaatatgtgggaccctggtctg

SEQ ID NO: 396921 - DNA, 33 bp, Homo sapien
aaggcagctgcttatacagaacaaggaacgtgg

SEQ ID NO: 396922 - DNA, 33 bp, Homo sapien
aaggcagctgcttatagagaacaaggaacgtgg

SEQ ID NO: 396923 - DNA, 33 bp, Homo sapien
ggtttaatccaaagtcaagaggtggccctgggg

SEQ ID NO: 396924 - DNA, 33 bp, Homo sapien
ggtttaatccaaagtcgagaggtggccctgggg

SEQ ID NO: 396925 - DNA, 33 bp, Homo sapien
gaggaaaacctggtcaatctattttgccccttc

SEQ ID NO: 396926 - DNA, 33 bp, Homo sapien
gaggaaaacctggtcactctattttgccccttc

SEQ ID NO: 396927 - DNA, 33 bp, Homo sapien
ctcagaggttgggacactgccaggagataccgt

SEQ ID NO: 396928 - DNA, 33 bp, Homo sapien
ctcagaggttgggacattgccaggagataccgt

SEQ ID NO: 396929 - DNA, 33 bp, Homo sapien; identical to SEQ ID NO: 396927

SEQ ID NO: 396930 - DNA, 33 bp, Homo sapien; identical to SEQ ID NO: 396928

SEQ ID NO: 396931 - DNA, 33 bp, Homo sapien; identical to SEQ ID NO: 396927

SEQ ID NO: 396932 - DNA, 33 bp, Homo sapien; identical to SEQ ID NO: 396928

SEQ ID NO: 396933 - DNA, 33 bp, Homo sapien
ctagaagacagaggaacatgtaaaactggcttg

SEQ ID NO: 396934 - DNA, 33 bp, Homo sapien
ctagaagacagaggaatatgtaaaactggcttg

SEQ ID NO: 396935 - DNA, 33 bp, Homo sapien
gtgattattatacatcacatgcctatatcaaag

SEQ ID NO: 396936 - DNA, 33 bp, Homo sapien
gtgattattatacatcgcatgcctatatcaaag

SEQ ID NO: 396937 - DNA, 33 bp, Homo sapien
agctgaggaaagaaacgctgagcttgaggatat

SEQ ID NO: 396938 - DNA, 33 bp, Homo sapien
agctgaggaaagaaactctgagcttgaggatat

SEQ ID NO: 396939 - DNA, 33 bp, Homo sapien
ttgtcctttgatgctaaacctttgtcatccaca

SEQ ID NO: 396940 - DNA, 33 bp, Homo sapien
ttgtcctttgatgctagacctttgtcatccaca

SEQ ID NO: 396941 - DNA, 33 bp, Homo sapien
aaatgatctctagaggcccctttgacaattctt

SEQ ID NO: 396942 - DNA, 33 bp, Homo sapien
aaatgatctctagaggtccctttgacaattctt

SEQ ID NO: 396943 - DNA, 33 bp, Homo sapien
aaaaaagacactcttccacttggaaaattccaa

SEQ ID NO: 396944 - DNA, 33 bp, Homo sapien
aaaaaagacactcttcgacttggaaaattccaa

SEQ ID NO: 396945 - DNA, 33 bp, Homo sapien
ggttctgattttgaaaactttggctacaataaa

SEQ ID NO: 396946 - DNA, 33 bp, Homo sapien
ggttctgattttgaaacctttggctacaataaa

SEQ ID NO: 396947 - DNA, 33 bp, Homo sapien
acagtttggctaaagcaaaggatttgtgtagga

SEQ ID NO: 396948 - DNA, 33 bp, Homo sapien
acagtttggctaaagcgaaggatttgtgtagga

SEQ ID NO: 396949 - DNA, 33 bp, Homo sapien
gctgacaatgcaggcaagtcataggccgaattc

SEQ ID NO: 396950 - DNA, 33 bp, Homo sapien
gctgacaatgcaggcacgtcataggccgaattc

SEQ ID NO: 396951 - DNA, 33 bp, Homo sapien
gaatccgtttatatcacaccaatggcaggaaaa

SEQ ID NO: 396952 - DNA, 33 bp, Homo sapien
gaatccgtttatatcataccaatggcaggaaaa

SEQ ID NO: 396953 - DNA, 33 bp, Homo sapien
agaaattgccagaccacgaagatagtgtacatg

SEQ ID NO: 396954 - DNA, 33 bp, Homo sapien
agaaattgccagaccatgaagatagtgtacatg

SEQ ID NO: 396955 - DNA, 33 bp, Homo sapien
acctgagcatgtgtaggctaagcggaaggagca

SEQ ID NO: 396956 - DNA, 33 bp, Homo sapien
acctgagcatgtgtagtctaagcggaaggagca

SEQ ID NO: 396957 - DNA, 33 bp, Homo sapien
gtcagaaaagattctacaaagagaagcaggaag

SEQ ID NO: 396958 - DNA, 33 bp, Homo sapien
gtcagaaaagattctagaaagagaagcaggaag

SEQ ID NO: 396959 - DNA, 33 bp, Homo sapien
gtggcccagatggtctgaattaatccatgcaga

SEQ ID NO: 396960 - DNA, 33 bp, Homo sapien
gtggcccagatggtcttaattaatccatgcaga

SEQ ID NO: 396961 - DNA, 33 bp, Homo sapien
cttcagcctcctaaaactgttgtggctttagtg

SEQ ID NO: 396962 - DNA, 33 bp, Homo sapien
cttcagcctcctaaaagtgttgtggctttagtg

SEQ ID NO: 396963 - DNA, 33 bp, Homo sapien
tcccagccaaaatacacggtatggtagtggttc

SEQ ID NO: 396964 - DNA, 33 bp, Homo sapien
tcccagccaaaatacagggtatggtagtggttc

SEQ ID NO: 396965 - DNA, 33 bp, Homo sapien
ctcagacaagaagtacaggaaacactcctcaca

SEQ ID NO: 396966 - DNA, 33 bp, Homo sapien
ctcagacaagaagtacgggaaacactcctcaca

SEQ ID NO: 396967 - DNA, 33 bp, Homo sapien
cctttgccgccactggaaagctttgtcccagcc

SEQ ID NO: 396968 - DNA, 33 bp, Homo sapien
cctttgccgccactggtaagctttgtcccagcc

SEQ ID NO: 396969 - DNA, 33 bp, Homo sapien
agacctgcataccatacgtgaacaatgctgagc

SEQ ID NO: 396970 - DNA, 33 bp, Homo sapien
agacctgcataccatatgtgaacaatgctgagc

SEQ ID NO: 396971 - DNA, 33 bp, Homo sapien
gtgttctgattgacagcagccaggttcagtact

SEQ ID NO: 396972 - DNA, 33 bp, Homo sapien
gtgttctgattgacagtagccaggttcagtact

SEQ ID NO: 396973 - DNA, 33 bp, Homo sapien
ctgtcaataggtcatgaatcctccactttcttc

SEQ ID NO: 396974 - DNA, 33 bp, Homo sapien
ctgtcaataggtcatggatcctccactttcttc

SEQ ID NO: 396975 - DNA, 33 bp, Homo sapien
ttgatccttatgtaccaatatatcgtgatcttc

SEQ ID NO: 396976 - DNA, 33 bp, Homo sapien
ttgatccttatgtaccgatatatcgtgatcttc

SEQ ID NO: 396977 - DNA, 33 bp, Homo sapien
gtccctgcgcttaaccactaatctctgctgctc

SEQ ID NO: 396978 - DNA, 33 bp, Homo sapien
gtccctgcgcttaaccgctaatctctgctgctc

SEQ ID NO: 396979 - DNA, 33 bp, Homo sapien
ttcctgtggtccccccagagaagatggtgctgc

SEQ ID NO: 396980 - DNA, 33 bp, Homo sapien
ttcctgtggtcccccccgagaagatggtgctgc

SEQ ID NO: 396981 - DNA, 33 bp, Homo sapien
gtagcaggaaacctcacgtcagtgccactgggt

SEQ ID NO: 396982 - DNA, 33 bp, Homo sapien
gtagcaggaaacctcaggtcagtgccactgggt

SEQ ID NO: 396983 - DNA, 33 bp, Homo sapien
ctctgaaaggctgtccccttactggtaaatggt

SEQ ID NO: 396984 - DNA, 33 bp, Homo sapien
ctctgaaaggctgtccgcttactggtaaatggt

SEQ ID NO: 396985 - DNA, 33 bp, Homo sapien
ctctagccgcgcagctcaacccaggttaggatt

SEQ ID NO: 396986 - DNA, 33 bp, Homo sapien
ctctagccgcgcagctgaacccaggttaggatt

SEQ ID NO: 396987 - DNA, 33 bp, Homo sapien
tagaaaagtaacaacaaaccggctcaggcccca

SEQ ID NO: 396988 - DNA, 33 bp, Homo sapien
tagaaaagtaacaacagaccggctcaggcccca

SEQ ID NO: 396989 - DNA, 33 bp, Homo sapien
cttgcccagatcagacagcagtaaatctgtaag

SEQ ID NO: 396990 - DNA, 33 bp, Homo sapien
cttgcccagatcagacggcagtaaatctgtaag

SEQ ID NO: 396991 - DNA, 33 bp, Homo sapien
ataagaattcaacaacactatcagtcaacagga

SEQ ID NO: 396992 - DNA, 33 bp, Homo sapien
ataagaattcaacaactctatcagtcaacagga

SEQ ID NO: 396993 - DNA, 33 bp, Homo sapien
ggaagaaggcagcagaagacaagaaggagaaag

SEQ ID NO: 396994 - DNA, 33 bp, Homo sapien
ggaagaaggcagcagacgacaagaaggagaaag

SEQ ID NO: 396995 - DNA, 33 bp, Homo sapien
gaagtaatctgtccaacaaacccccgtgacacg

SEQ ID NO: 396996 - DNA, 33 bp, Homo sapien
gaagtaatctgtccaataaacccccgtgacacg

SEQ ID NO: 396997 - DNA, 33 bp, Homo sapien
acacgggtgatcctaacggaagtaccaggacac

SEQ ID NO: 396998 - DNA, 33 bp, Homo sapien
acacgggtgatcctaatggaagtaccaggacac

SEQ ID NO: 396999 - DNA, 33 bp, Homo sapien
agaaaattactgtgacaccatccaccaggcacc

SEQ ID NO: 397000 - DNA, 33 bp, Homo sapien
agaaaattactgtgacgccatccaccaggcacc

SEQ ID NO: 397001 - DNA, 33 bp, Homo sapien
ggagctcacattctaacggggctgggagttaca

SEQ ID NO: 397002 - DNA, 33 bp, Homo sapien
ggagctcacattctaatggggctgggagttaca

SEQ ID NO: 397003 - DNA, 33 bp, Homo sapien
cattttttgatgcacacgagaaaagccgcatct

SEQ ID NO: 397004 - DNA, 33 bp, Homo sapien
cattttttgatgcacatgagaaaagccgcatct

SEQ ID NO: 397005 - DNA, 33 bp, Homo sapien
caggctctttaaaaataagctatattggtctcc

SEQ ID NO: 397006 - DNA, 33 bp, Homo sapien
caggctctttaaaaatgagctatattggtctcc

SEQ ID NO: 397007 - DNA, 33 bp, Homo sapien
ctagcacagtactgaaagaataaagcaccttga

SEQ ID NO: 397008 - DNA, 33 bp, Homo sapien
ctagcacagtactgaaggaataaagcaccttga

SEQ ID NO: 397009 - DNA, 33 bp, Homo sapien
ctacagcatttggcaccactccttcttgaaaat

SEQ ID NO: 397010 - DNA, 33 bp, Homo sapien
ctacagcatttggcactactccttcttgaaaat

SEQ ID NO: 397011 - DNA, 33 bp, Homo sapien
gttctgttgaaagtctcaatctttttgtgtttt

SEQ ID NO: 397012 - DNA, 33 bp, Homo sapien
gttctgttgaaagtctgaatctttttgtgtttt

SEQ ID NO: 397013 - DNA, 33 bp, Homo sapien
tcattgtttccattgaagtttaaatttagcaag

SEQ ID NO: 397014 - DNA, 33 bp, Homo sapien
tcattgtttccattgaggtttaaatttagcaag

SEQ ID NO: 397015 - DNA, 33 bp, Homo sapien
atacacaatgttatacacctctttgacctagaa

SEQ ID NO: 397016 - DNA, 33 bp, Homo sapien
atacacaatgttatacgcctctttgacctagaa

SEQ ID NO: 397017 - DNA, 33 bp, Homo sapien
tgtcccttccactccggaactgtgagtagcaaa

SEQ ID NO: 397018 - DNA, 33 bp, Homo sapien
tgtcccttccactccgtaactgtgagtagcaaa

SEQ ID NO: 397019 - DNA, 33 bp, Homo sapien
ggctaaacttgtaaaagacatttgatttgttct

SEQ ID NO: 397020 - DNA, 33 bp, Homo sapien
ggctaaacttgtaaaatacatttgatttgttct

SEQ ID NO: 397021 - DNA, 33 bp, Homo sapien
ttaaaatgactgaaggaataaatagagaaccgt

SEQ ID NO: 397022 - DNA, 33 bp, Homo sapien
ttaaaatgactgaagggataaatagagaaccgt

SEQ ID NO: 397023 - DNA, 33 bp, Homo sapien
gaggtgagaaagtggaaatagcaggtgtagaca

SEQ ID NO: 397024 - DNA, 33 bp, Homo sapien
gaggtgagaaagtggagatagcaggtgtagaca

SEQ ID NO: 397025 - DNA, 33 bp, Homo sapien
ttctccatcgccccaaaaaaaagactgaggaca

SEQ ID NO: 397026 - DNA, 33 bp, Homo sapien
ttctccatcgccccaataaaaagactgaggaca

SEQ ID NO: 397027 - DNA, 33 bp, Homo sapien
tatccctttgcttcaccggaacgtattgaaaaa

SEQ ID NO: 397028 - DNA, 33 bp, Homo sapien
tatccctttgcttcactggaacgtattgaaaaa

SEQ ID NO: 397029 - DNA, 33 bp, Homo sapien
agccatcaagataacacgagtaacaatccagtg

SEQ ID NO: 397030 - DNA, 33 bp, Homo sapien
agccatcaagataacatgagtaacaatccagtg

SEQ ID NO: 397031 - DNA, 33 bp, Homo sapien
tttgatgtggggggaaattcacataaattatgt

SEQ ID NO: 397032 - DNA, 33 bp, Homo sapien
tttgatgtggggggaatttcacataaattatgt

SEQ ID NO: 397033 - DNA, 33 bp, Homo sapien
cagacgaaatcagaagacctgacaatggcaatc

SEQ ID NO: 397034 - DNA, 33 bp, Homo sapien
cagacgaaatcagaagccctgacaatggcaatc

SEQ ID NO: 397035 - DNA, 33 bp, Homo sapien
tataagatcatttctcaacttaggaggaaagca

SEQ ID NO: 397036 - DNA, 33 bp, Homo sapien
tataagatcatttctcgacttaggaggaaagca

SEQ ID NO: 397037 - DNA, 33 bp, Homo sapien
atggggaggaaagtgaatagttgtttagggtcg

SEQ ID NO: 397038 - DNA, 33 bp, Homo sapien
atggggaggaaagtgagtagttgtttagggtcg

SEQ ID NO: 397039 - DNA, 33 bp, Homo sapien
gaatgatgacagtgtgaaggatgacatgaaata

SEQ ID NO: 397040 - DNA, 33 bp, Homo sapien
gaatgatgacagtgtgcaggatgacatgaaata

SEQ ID NO: 397041 - DNA, 33 bp, Homo sapien
gacttcagtaccaggaacactgtattgatgaat

SEQ ID NO: 397042 - DNA, 33 bp, Homo sapien
gacttcagtaccaggagcactgtattgatgaat

SEQ ID NO: 397043 - DNA, 33 bp, Homo sapien
aatagatctgtccccacagagagcaggctccct

SEQ ID NO: 397044 - DNA, 33 bp, Homo sapien
aatagatctgtccccagagagagcaggctccct

SEQ ID NO: 397045 - DNA, 33 bp, Homo sapien
caaaccaactaggcccaaccacaacatgttgag

SEQ ID NO: 397046 - DNA, 33 bp, Homo sapien
caaaccaactaggcccgaccacaacatgttgag

SEQ ID NO: 397047 - DNA, 33 bp, Homo sapien
tgctctaatgtgtttaacaaggtataaaaagta

SEQ ID NO: 397048 - DNA, 33 bp, Homo sapien
tgctctaatgtgtttatcaaggtataaaaagta

SEQ ID NO: 397049 - DNA, 33 bp, Homo sapien
gactaaaacccattcactctgctcaatagaatc

SEQ ID NO: 397050 - DNA, 33 bp, Homo sapien
gactaaaacccattcattctgctcaatagaatc

SEQ ID NO: 397051 - DNA, 33 bp, Homo sapien
gtccactctacagtcacgataacggtaggaagt

SEQ ID NO: 397052 - DNA, 33 bp, Homo sapien
gtccactctacagtcatgataacggtaggaagt

SEQ ID NO: 397053 - DNA, 33 bp, Homo sapien
atctggactggagcagactatgggaggatgctg

SEQ ID NO: 397054 - DNA, 33 bp, Homo sapien
atctggactggagcaggctatgggaggatgctg

SEQ ID NO: 397055 - DNA, 33 bp, Homo sapien
tccattggccaggacaacttttgtttttaacct

SEQ ID NO: 397056 - DNA, 33 bp, Homo sapien
tccattggccaggacagcttttgtttttaacct

SEQ ID NO: 397057 - DNA, 33 bp, Homo sapien
cacaccaaccacataccgatcgcatttaaagct

SEQ ID NO: 397058 - DNA, 33 bp, Homo sapien
cacaccaaccacatactgatcgcatttaaagct

SEQ ID NO: 397059 - DNA, 33 bp, Homo sapien
agtgtcacaaatacaaaatgtactacagtttta

SEQ ID NO: 397060 - DNA, 33 bp, Homo sapien
agtgtcacaaatacaagatgtactacagtttta

SEQ ID NO: 397061 - DNA, 33 bp, Homo sapien
atgtgggcacttactccccggttatgactgttt

SEQ ID NO: 397062 - DNA, 33 bp, Homo sapien
atgtgggcacttactcgccggttatgactgttt

SEQ ID NO: 397063 - DNA, 33 bp, Homo sapien
tagccagaatataggcagatgaaaatttccaca

SEQ ID NO: 397064 - DNA, 33 bp, Homo sapien
tagccagaatataggccgatgaaaatttccaca

SEQ ID NO: 397065 - DNA, 33 bp, Homo sapien
agctagcacacctagacagaaaagaggcaggag

SEQ ID NO: 397066 - DNA, 33 bp, Homo sapien
agctagcacacctagatagaaaagaggcaggag

SEQ ID NO: 397067 - DNA, 33 bp, Homo sapien
gcttgtacctgttcacccaagaggcatcttcct

SEQ ID NO: 397068 - DNA, 33 bp, Homo sapien
gcttgtacctgttcactcaagaggcatcttcct

SEQ ID NO: 397069 - DNA, 33 bp, Homo sapien
taaagttgccgtctatcagatacgtattttaca

SEQ ID NO: 397070 - DNA, 33 bp, Homo sapien
taaagttgccgtctattagatacgtattttaca

SEQ ID NO: 397071 - DNA, 33 bp, Homo sapien
aatgctccagcaacagaccagcagctaggggca

SEQ ID NO: 397072 - DNA, 33 bp, Homo sapien
aatgctccagcaacaggccagcagctaggggca

SEQ ID NO: 397073 - DNA, 33 bp, Homo sapien
cactgacaacataggacgaaatgcagagactat

SEQ ID NO: 397074 - DNA, 33 bp, Homo sapien
cactgacaacataggatgaaatgcagagactat

SEQ ID NO: 397075 - DNA, 33 bp, Homo sapien
agatcgatataaaagacggtaacggccgggcgc

SEQ ID NO: 397076 - DNA, 33 bp, Homo sapien
agatcgatataaaagatggtaacggccgggcgc

SEQ ID NO: 397077 - DNA, 33 bp, Homo sapien
agttattttctggccccaaaagtctaactcatg

SEQ ID NO: 397078 - DNA, 33 bp, Homo sapien
agttattttctggccctaaaagtctaactcatg

SEQ ID NO: 397079 - DNA, 33 bp, Homo sapien
ggtaaattcatcaaaaacaatggatgcagattc

SEQ ID NO: 397080 - DNA, 33 bp, Homo sapien
ggtaaattcatcaaaagcaatggatgcagattc

SEQ ID NO: 397081 - DNA, 33 bp, Homo sapien
tattgggcacgtaacaatacatggctaaggttc

SEQ ID NO: 397082 - DNA, 33 bp, Homo sapien
tattgggcacgtaacagtacatggctaaggttc

SEQ ID NO: 397083 - DNA, 33 bp, Homo sapien
ccagctttgacattccacattccacatgcttct

SEQ ID NO: 397084 - DNA, 33 bp, Homo sapien
ccagctttgacattccgcattccacatgcttct

SEQ ID NO: 397085 - DNA, 33 bp, Homo sapien
agtaaaatgcccttaacgctctggccaaaccca

SEQ ID NO: 397086 - DNA, 33 bp, Homo sapien
agtaaaatgcccttaatgctctggccaaaccca

SEQ ID NO: 397087 - DNA, 33 bp, Homo sapien
aaccagagggtcaaagaaagtgtctctgctttg

SEQ ID NO: 397088 - DNA, 33 bp, Homo sapien
aaccagagggtcaaaggaagtgtctctgctttg

SEQ ID NO: 397089 - DNA, 33 bp, Homo sapien
agggcattctggaatgcagcggacctaatgtaa

SEQ ID NO: 397090 - DNA, 33 bp, Homo sapien
agggcattctggaatggagcggacctaatgtaa

SEQ ID NO: 397091 - DNA, 33 bp, Homo sapien
acccctcgctaatgccacattcaagtcccatca

SEQ ID NO: 397092 - DNA, 33 bp, Homo sapien
acccctcgctaatgccgcattcaagtcccatca

SEQ ID NO: 397093 - DNA, 33 bp, Homo sapien
gtacaatgttgtgaacagacttaatgccattga

SEQ ID NO: 397094 - DNA, 33 bp, Homo sapien
gtacaatgttgtgaacggacttaatgccattga

SEQ ID NO: 397095 - DNA, 33 bp, Homo sapien
gtgttaatgacttcaccggtcatttatctaatg

SEQ ID NO: 397096 - DNA, 33 bp, Homo sapien
gtgttaatgacttcactggtcatttatctaatg

SEQ ID NO: 397097 - DNA, 33 bp, Homo sapien
agtgcctcttctttaacggtaggtgaagttaac

SEQ ID NO: 397098 - DNA, 33 bp, Homo sapien
agtgcctcttctttaagggtaggtgaagttaac

SEQ ID NO: 397099 - DNA, 33 bp, Homo sapien
tagagaagagtgtgacaagtgtcatttgcacag

SEQ ID NO: 397100 - DNA, 33 bp, Homo sapien
tagagaagagtgtgacgagtgtcatttgcacag

SEQ ID NO: 397101 - DNA, 33 bp, Homo sapien
tcctttgtctgtcagaactgttttggaagtctc

SEQ ID NO: 397102 - DNA, 33 bp, Homo sapien
tcctttgtctgtcagagctgttttggaagtctc

SEQ ID NO: 397103 - DNA, 33 bp, Homo sapien
tgacagacaaaggactaaccgctttcacctacg

SEQ ID NO: 397104 - DNA, 33 bp, Homo sapien
tgacagacaaaggactgaccgctttcacctacg

SEQ ID NO: 397105 - DNA, 33 bp, Homo sapien
ccagcacctagcccagactcttggtaaatgtgt

SEQ ID NO: 397106 - DNA, 33 bp, Homo sapien
ccagcacctagcccaggctcttggtaaatgtgt

SEQ ID NO: 397107 - DNA, 33 bp, Homo sapien
cttcaacaagttgccaagttcatcttttatatc

SEQ ID NO: 397108 - DNA, 33 bp, Homo sapien
cttcaacaagttgccaggttcatcttttatatc

SEQ ID NO: 397109 - DNA, 33 bp, Homo sapien
ggtgatacatttggaaaagatttccactccaaa

SEQ ID NO: 397110 - DNA, 33 bp, Homo sapien
ggtgatacatttggaagagatttccactccaaa

SEQ ID NO: 397111 - DNA, 33 bp, Homo sapien
ctatcacaaaggaatcaacacattggcaggagg

SEQ ID NO: 397112 - DNA, 33 bp, Homo sapien
ctatcacaaaggaatcgacacattggcaggagg

SEQ ID NO: 397113 - DNA, 33 bp, Homo sapien
ccccaggatacaatccacggctccagtggcaat

SEQ ID NO: 397114 - DNA, 33 bp, Homo sapien
ccccaggatacaatccgcggctccagtggcaat

SEQ ID NO: 397115 - DNA, 33 bp, Homo sapien
gtctcagggactgcaaatatgtattcaggtgag

SEQ ID NO: 397116 - DNA, 33 bp, Homo sapien
gtctcagggactgcaactatgtattcaggtgag

SEQ ID NO: 397117 - DNA, 33 bp, Homo sapien
ctgtggctggtttttacactcttgctttattgt

SEQ ID NO: 397118 - DNA, 33 bp, Homo sapien
ctgtggctggtttttatactcttgctttattgt

SEQ ID NO: 397119 - DNA, 33 bp, Homo sapien
ggactcgggtcaaatccccgcagtatgatgcag

SEQ ID NO: 397120 - DNA, 33 bp, Homo sapien
ggactcgggtcaaatctccgcagtatgatgcag

SEQ ID NO: 397121 - DNA, 33 bp, Homo sapien
ctgagtcagttcatccagcagcgctcagctctg

SEQ ID NO: 397122 - DNA, 33 bp, Homo sapien
ctgagtcagttcatccggcagcgctcagctctg

SEQ ID NO: 397123 - DNA, 33 bp, Homo sapien
tatagcttcctagtgacgatcggccccactttg

SEQ ID NO: 397124 - DNA, 33 bp, Homo sapien
tatagcttcctagtgatgatcggccccactttg

SEQ ID NO: 397125 - DNA, 33 bp, Homo sapien
ctctgcctctcagagacagtgatggcagagaca

SEQ ID NO: 397126 - DNA, 33 bp, Homo sapien
ctctgcctctcagagatagtgatggcagagaca

SEQ ID NO: 397127 - DNA, 33 bp, Homo sapien
aagtcatttctggaaacagatcaatgtcttttg

SEQ ID NO: 397128 - DNA, 33 bp, Homo sapien
aagtcatttctggaaagagatcaatgtcttttg

SEQ ID NO: 397129 - DNA, 33 bp, Homo sapien
tagcctgctttccacacgtataagagagagcac

SEQ ID NO: 397130 - DNA, 33 bp, Homo sapien
tagcctgctttccacatgtataagagagagcac

SEQ ID NO: 397131 - DNA, 33 bp, Homo sapien
tccggtccaagttcacaggcttcccgaatcccc

SEQ ID NO: 397132 - DNA, 33 bp, Homo sapien
tccggtccaagttcacgggcttcccgaatcccc

SEQ ID NO: 397133 - DNA, 33 bp, Homo sapien
cccaacaatttctttaggatgtctctaagtcac

SEQ ID NO: 397134 - DNA, 33 bp, Homo sapien
cccaacaatttctttatgatgtctctaagtcac

SEQ ID NO: 397135 - DNA, 33 bp, Homo sapien
ggatctccatcacttccgaaattagaactttta

SEQ ID NO: 397136 - DNA, 33 bp, Homo sapien
ggatctccatcacttctgaaattagaactttta

SEQ ID NO: 397137 - DNA, 33 bp, Homo sapien
gcattaaacctactgacgctgtaaactctagat

SEQ ID NO: 397138 - DNA, 33 bp, Homo sapien
gcattaaacctactgatgctgtaaactctagat

SEQ ID NO: 397139 - DNA, 33 bp, Homo sapien
cacatcaatttccttacgacagattgtgctttc

SEQ ID NO: 397140 - DNA, 33 bp, Homo sapien
cacatcaatttccttaggacagattgtgctttc

SEQ ID NO: 397141 - DNA, 33 bp, Homo sapien
gacaagttctctgtaaacccagtggaagaaaac

SEQ ID NO: 397142 - DNA, 33 bp, Homo sapien
gacaagttctctgtaatcccagtggaagaaaac

SEQ ID NO: 397143 - DNA, 33 bp, Homo sapien
aaagtaacctgacagaaaatagaacaaaacatg

SEQ ID NO: 397144 - DNA, 33 bp, Homo sapien
aaagtaacctgacagagaatagaacaaaacatg

SEQ ID NO: 397145 - DNA, 33 bp, Homo sapien
tctttgcaaagtacaaagtgtcgtattcacttc

SEQ ID NO: 397146 - DNA, 33 bp, Homo sapien
tctttgcaaagtacaatgtgtcgtattcacttc

SEQ ID NO: 397147 - DNA, 33 bp, Homo sapien
ttgtatgagaagtcacaaatgctgaaataaaag

SEQ ID NO: 397148 - DNA, 33 bp, Homo sapien
ttgtatgagaagtcacgaatgctgaaataaaag

SEQ ID NO: 397149 - DNA, 33 bp, Homo sapien
aagtgagagagggctcacaaaacaccgacaaga

SEQ ID NO: 397150 - DNA, 33 bp, Homo sapien
aagtgagagagggctcgcaaaacaccgacaaga

SEQ ID NO: 397151 - DNA, 33 bp, Homo sapien
atcttgacgagataacaacttaaagctctctac

SEQ ID NO: 397152 - DNA, 33 bp, Homo sapien
atcttgacgagataaccacttaaagctctctac

SEQ ID NO: 397153 - DNA, 33 bp, Homo sapien
cagaaagacttgatcacgggtgacaaacgctga

SEQ ID NO: 397154 - DNA, 33 bp, Homo sapien
cagaaagacttgatcatgggtgacaaacgctga

SEQ ID NO: 397155 - DNA, 33 bp, Homo sapien
tactctgctttaagaaatattgtgtctcgttct

SEQ ID NO: 397156 - DNA, 33 bp, Homo sapien
tactctgctttaagaagtattgtgtctcgttct

SEQ ID NO: 397157 - DNA, 33 bp, Homo sapien
aggagaaatgaagttccgaacatttgaatgaat

SEQ ID NO: 397158 - DNA, 33 bp, Homo sapien
aggagaaatgaagttctgaacatttgaatgaat

SEQ ID NO: 397159 - DNA, 33 bp, Homo sapien
tgcttgagttgtggaaaaaaaagagctcattag

SEQ ID NO: 397160 - DNA, 33 bp, Homo sapien
tgcttgagttgtggaagaaaaagagctcattag

SEQ ID NO: 397161 - DNA, 33 bp, Homo sapien
ccatactgggatagagaatgagccaagtagtat

SEQ ID NO: 397162 - DNA, 33 bp, Homo sapien
ccatactgggatagaggatgagccaagtagtat

SEQ ID NO: 397163 - DNA, 33 bp, Homo sapien
gaaaagctatgctgtagcagtagaagagagtag

SEQ ID NO: 397164 - DNA, 33 bp, Homo sapien
gaaaagctatgctgtatcagtagaagagagtag

SEQ ID NO: 397165 - DNA, 33 bp, Homo sapien
atatgtgatgacagaaaccgggcacattcctgt

SEQ ID NO: 397166 - DNA, 33 bp, Homo sapien
atatgtgatgacagaagccgggcacattcctgt

SEQ ID NO: 397167 - DNA, 33 bp, Homo sapien
aattggcgtaaggaccaaaagagacattatgta

SEQ ID NO: 397168 - DNA, 33 bp, Homo sapien
aattggcgtaaggaccgaaagagacattatgta

SEQ ID NO: 397169 - DNA, 33 bp, Homo sapien
aaagagacattatgtacctttgaaagcgccatg

SEQ ID NO: 397170 - DNA, 33 bp, Homo sapien
aaagagacattatgtatctttgaaagcgccatg

SEQ ID NO: 397171 - DNA, 33 bp, Homo sapien
cttgtcctctaatgtcaatctgggaaaatgcca

SEQ ID NO: 397172 - DNA, 33 bp, Homo sapien
cttgtcctctaatgtcgatctgggaaaatgcca

SEQ ID NO: 397173 - DNA, 33 bp, Homo sapien
tactcttatgaatcctaaagttatcttgaaagg

SEQ ID NO: 397174 - DNA, 33 bp, Homo sapien
tactcttatgaatcctgaagttatcttgaaagg

SEQ ID NO: 397175 - DNA, 33 bp, Homo sapien
cacctttaaagtatcacgtggaaagtcgaaatt

SEQ ID NO: 397176 - DNA, 33 bp, Homo sapien
cacctttaaagtatcatgtggaaagtcgaaatt

SEQ ID NO: 397177 - DNA, 33 bp, Homo sapien
gttgactttttctgcccatgagtctgaacacga

SEQ ID NO: 397178 - DNA, 33 bp, Homo sapien
gttgactttttctgcctatgagtctgaacacga

SEQ ID NO: 397179 - DNA, 33 bp, Homo sapien
aggttgggtaatttaaaggaatctgtggtattt

SEQ ID NO: 397180 - DNA, 33 bp, Homo sapien
aggttgggtaatttaagggaatctgtggtattt

SEQ ID NO: 397181 - DNA, 33 bp, Homo sapien
ctactgcattagattaaataagtcacaagggca

SEQ ID NO: 397182 - DNA, 33 bp, Homo sapien
ctactgcattagattagataagtcacaagggca

SEQ ID NO: 397183 - DNA, 33 bp, Homo sapien
tactaattagtgcagcaaggtattaattattat

SEQ ID NO: 397184 - DNA, 33 bp, Homo sapien
tactaattagtgcagccaggtattaattattat

SEQ ID NO: 397185 - DNA, 33 bp, Homo sapien
tagttgtgacatctaacgttgcttacaagaaac

SEQ ID NO: 397186 - DNA, 33 bp, Homo sapien
tagttgtgacatctaatgttgcttacaagaaac

SEQ ID NO: 397187 - DNA, 33 bp, Homo sapien
accagaaagtcaggaaagtaatctgatatttga

SEQ ID NO: 397188 - DNA, 33 bp, Homo sapien
accagaaagtcaggaaggtaatctgatatttga

SEQ ID NO: 397189 - DNA, 33 bp, Homo sapien
tttaacttgatgcggccaccctgtatgatagga

SEQ ID NO: 397190 - DNA, 33 bp, Homo sapien
tttaacttgatgcggctaccctgtatgatagga

SEQ ID NO: 397191 - DNA, 33 bp, Homo sapien
tcccaggacaactgaccgtacttctaaacccag

SEQ ID NO: 397192 - DNA, 33 bp, Homo sapien
tcccaggacaactgactgtacttctaaacccag

SEQ ID NO: 397193 - DNA, 33 bp, Homo sapien
aagttcaaacgttgacacttcagcttaatccag

SEQ ID NO: 397194 - DNA, 33 bp, Homo sapien
aagttcaaacgttgacgcttcagcttaatccag

SEQ ID NO: 397195 - DNA, 33 bp, Homo sapien
tattttaatgttgacaataaattcacataaaaa

SEQ ID NO: 397196 - DNA, 33 bp, Homo sapien
tattttaatgttgacagtaaattcacataaaaa

SEQ ID NO: 397197 - DNA, 33 bp, Homo sapien
gccaatgtggctttgcacttgagaagagcaggt

SEQ ID NO: 397198 - DNA, 33 bp, Homo sapien
gccaatgtggctttgcgcttgagaagagcaggt

SEQ ID NO: 397199 - DNA, 33 bp, Homo sapien
tcagtctttgtctcatcagcattgaacacagct

SEQ ID NO: 397200 - DNA, 33 bp, Homo sapien
tcagtctttgtctcattagcattgaacacagct

SEQ ID NO: 397201 - DNA, 33 bp, Homo sapien
caacaacatcactgaaagaggtaggaagagaag

SEQ ID NO: 397202 - DNA, 33 bp, Homo sapien
caacaacatcactgaatgaggtaggaagagaag

SEQ ID NO: 397203 - DNA, 33 bp, Homo sapien
cgccacagctcagaggaaactaaggagatggag

SEQ ID NO: 397204 - DNA, 33 bp, Homo sapien
cgccacagctcagagggaactaaggagatggag

SEQ ID NO: 397205 - DNA, 33 bp, Homo sapien
tgtaagacattaactacaggggaaaatggatgt

SEQ ID NO: 397206 - DNA, 33 bp, Homo sapien
tgtaagacattaactataggggaaaatggatgt

SEQ ID NO: 397207 - DNA, 33 bp, Homo sapien
atgaaatatctagacccgaactagtagaactct

SEQ ID NO: 397208 - DNA, 33 bp, Homo sapien
atgaaatatctagacctgaactagtagaactct

SEQ ID NO: 397209 - DNA, 33 bp, Homo sapien
tccggattgacaggaggatcagatgagacaata

SEQ ID NO: 397210 - DNA, 33 bp, Homo sapien
tccggattgacaggagtatcagatgagacaata

SEQ ID NO: 397211 - DNA, 33 bp, Homo sapien
acactgctttttctcaaatcacattagcgtgta

SEQ ID NO: 397212 - DNA, 33 bp, Homo sapien
acactgctttttctcagatcacattagcgtgta

SEQ ID NO: 397213 - DNA, 33 bp, Homo sapien
agcgctgtttcctccactcagtatggtgttcgc

SEQ ID NO: 397214 - DNA, 33 bp, Homo sapien
agcgctgtttcctccattcagtatggtgttcgc

SEQ ID NO: 397215 - DNA, 33 bp, Homo sapien
tcaatcatattcaacaccggccgccagggactc

SEQ ID NO: 397216 - DNA, 33 bp, Homo sapien
tcaatcatattcaacatcggccgccagggactc

SEQ ID NO: 397217 - DNA, 33 bp, Homo sapien
tcaatccaaaatcgagaatatcatctttcttgg

SEQ ID NO: 397218 - DNA, 33 bp, Homo sapien
tcaatccaaaatcgagcatatcatctttcttgg

SEQ ID NO: 397219 - DNA, 33 bp, Homo sapien
actgttggctcacagaaagagtggagttctgag

SEQ ID NO: 397220 - DNA, 33 bp, Homo sapien
actgttggctcacagacagagtggagttctgag

SEQ ID NO: 397221 - DNA, 33 bp, Homo sapien
gctcacgacaaagctacgaagtggaaattacta

SEQ ID NO: 397222 - DNA, 33 bp, Homo sapien
gctcacgacaaagctatgaagtggaaattacta

SEQ ID NO: 397223 - DNA, 33 bp, Homo sapien
atttcatcctcaatgtcacaagaagccactaga

SEQ ID NO: 397224 - DNA, 33 bp, Homo sapien
atttcatcctcaatgtgacaagaagccactaga

SEQ ID NO: 397225 - DNA, 33 bp, Homo sapien
ttagttgcatgcaaatgaagaggtgggttattt

SEQ ID NO: 397226 - DNA, 33 bp, Homo sapien
ttagttgcatgcaaattaagaggtgggttattt

SEQ ID NO: 397227 - DNA, 33 bp, Homo sapien
gattaacaaggtcaaacgatataaggatatttg

SEQ ID NO: 397228 - DNA, 33 bp, Homo sapien
gattaacaaggtcaaaggatataaggatatttg

SEQ ID NO: 397229 - DNA, 33 bp, Homo sapien
aaatccacaaagagaacgaccaaggaacatttc

SEQ ID NO: 397230 - DNA, 33 bp, Homo sapien
aaatccacaaagagaatgaccaaggaacatttc

SEQ ID NO: 397231 - DNA, 33 bp, Homo sapien
tttctagccatactgaatactaaagatgagaaa

SEQ ID NO: 397232 - DNA, 33 bp, Homo sapien
tttctagccatactgagtactaaagatgagaaa

SEQ ID NO: 397233 - DNA, 33 bp, Homo sapien
ttgctttagaaagaaacatttttctcaggcact

SEQ ID NO: 397234 - DNA, 33 bp, Homo sapien
ttgctttagaaagaaagatttttctcaggcact

SEQ ID NO: 397235 - DNA, 33 bp, Homo sapien
aggtcaaataggaacagcggtgaatgaagttca

SEQ ID NO: 397236 - DNA, 33 bp, Homo sapien
aggtcaaataggaacatcggtgaatgaagttca

SEQ ID NO: 397237 - DNA, 33 bp, Homo sapien
aggtatagatgtgagcagaagttgtttcttctt

SEQ ID NO: 397238 - DNA, 33 bp, Homo sapien
aggtatagatgtgagcggaagttgtttcttctt

SEQ ID NO: 397239 - DNA, 33 bp, Homo sapien
gccagaaatgaagaaacttacctacaccagtga

SEQ ID NO: 397240 - DNA, 33 bp, Homo sapien
gccagaaatgaagaaagttacctacaccagtga

SEQ ID NO: 397241 - DNA, 33 bp, Homo sapien
cgttccacctgccaaacagtaacaggaactcct

SEQ ID NO: 397242 - DNA, 33 bp, Homo sapien
cgttccacctgccaaagagtaacaggaactcct

SEQ ID NO: 397243 - DNA, 33 bp, Homo sapien
actcctgccatagccactacgttacacagctct

SEQ ID NO: 397244 - DNA, 33 bp, Homo sapien
actcctgccatagccattacgttacacagctct

SEQ ID NO: 397245 - DNA, 33 bp, Homo sapien
caggataatctacccaccgtggcaatctggact

SEQ ID NO: 397246 - DNA, 33 bp, Homo sapien
caggataatctacccatcgtggcaatctggact

SEQ ID NO: 397247 - DNA, 33 bp, Homo sapien
atgcagcaaagtatgacaaccactaaaccagac

SEQ ID NO: 397248 - DNA, 33 bp, Homo sapien
atgcagcaaagtatgataaccactaaaccagac

SEQ ID NO: 397249 - DNA, 33 bp, Homo sapien
aaagacaagataaagacgtgcggcttgattgcc

SEQ ID NO: 397250 - DNA, 33 bp, Homo sapien
aaagacaagataaagatgtgcggcttgattgcc

SEQ ID NO: 397251 - DNA, 33 bp, Homo sapien
agtggtttaatgtcaacgattgttacagtttaa

SEQ ID NO: 397252 - DNA, 33 bp, Homo sapien
agtggtttaatgtcaatgattgttacagtttaa

SEQ ID NO: 397253 - DNA, 33 bp, Homo sapien
acagaaagactcctggacaatactagagagccc

SEQ ID NO: 397254 - DNA, 33 bp, Homo sapien
acagaaagactcctggccaatactagagagccc

SEQ ID NO: 397255 - DNA, 33 bp, Homo sapien
gtgaaaaaaatgaaaaacaacacagctttacat

SEQ ID NO: 397256 - DNA, 33 bp, Homo sapien
gtgaaaaaaatgaaaagcaacacagctttacat

SEQ ID NO: 397257 - DNA, 33 bp, Homo sapien
tttaggattattaactcaaacatctcttggagg

SEQ ID NO: 397258 - DNA, 33 bp, Homo sapien
tttaggattattaactgaaacatctcttggagg

SEQ ID NO: 397259 - DNA, 33 bp, Homo sapien
ttttttagaaattgaaatcataccaagtatcct

SEQ ID NO: 397260 - DNA, 33 bp, Homo sapien
ttttttagaaattgaagtcataccaagtatcct

SEQ ID NO: 397261 - DNA, 33 bp, Homo sapien
gattcatggaaaggggaataataagcttagctg

SEQ ID NO: 397262 - DNA, 33 bp, Homo sapien
gattcatggaaagggggataataagcttagctg

SEQ ID NO: 397263 - DNA, 33 bp, Homo sapien
aagaaagcaaattatcaagatggacacctattt

SEQ ID NO: 397264 - DNA, 33 bp, Homo sapien
aagaaagcaaattatcgagatggacacctattt

SEQ ID NO: 397265 - DNA, 33 bp, Homo sapien
ttctgctcttcatgcccataaggctgatccatg

SEQ ID NO: 397266 - DNA, 33 bp, Homo sapien
ttctgctcttcatgcctataaggctgatccatg

SEQ ID NO: 397267 - DNA, 33 bp, Homo sapien
ggaaggaaacgtgcccagcacatttggctgcgt

SEQ ID NO: 397268 - DNA, 33 bp, Homo sapien
ggaaggaaacgtgcccggcacatttggctgcgt

SEQ ID NO: 397269 - DNA, 33 bp, Homo sapien
aacattactgaaatcactctgttgtccaatcaa

SEQ ID NO: 397270 - DNA, 33 bp, Homo sapien
aacattactgaaatcagtctgttgtccaatcaa

SEQ ID NO: 397271 - DNA, 33 bp, Homo sapien
ccgagttgagtctctgaatcagggaaattagag

SEQ ID NO: 397272 - DNA, 33 bp, Homo sapien
ccgagttgagtctctggatcagggaaattagag

SEQ ID NO: 397273 - DNA, 33 bp, Homo sapien
tgactgtttctgataaaaaatgtattggccggg

SEQ ID NO: 397274 - DNA, 33 bp, Homo sapien
tgactgtttctgataataaatgtattggccggg

SEQ ID NO: 397275 - DNA, 33 bp, Homo sapien
ttgagaatatctgctacgtggaaaagtatctaa

SEQ ID NO: 397276 - DNA, 33 bp, Homo sapien
ttgagaatatctgctatgtggaaaagtatctaa

SEQ ID NO: 397277 - DNA, 33 bp, Homo sapien
agatgttgctcctttacatctgttgctagccca

SEQ ID NO: 397278 - DNA, 33 bp, Homo sapien
agatgttgctcctttatatctgttgctagccca

SEQ ID NO: 397279 - DNA, 33 bp, Homo sapien
cttccaaactctctacacttgatggcctatcca

SEQ ID NO: 397280 - DNA, 33 bp, Homo sapien
cttccaaactctctacgcttgatggcctatcca

SEQ ID NO: 397281 - DNA, 33 bp, Homo sapien
agtccataaagactgcacctgatgtatcaatta

SEQ ID NO: 397282 - DNA, 33 bp, Homo sapien
agtccataaagactgcgcctgatgtatcaatta

SEQ ID NO: 397283 - DNA, 33 bp, Homo sapien
cacccctggcacataacaaacattcgacaaaca

SEQ ID NO: 397284 - DNA, 33 bp, Homo sapien
cacccctggcacataataaacattcgacaaaca

SEQ ID NO: 397285 - DNA, 33 bp, Homo sapien
aggctttgaccccagacagagaaagagatcttt

SEQ ID NO: 397286 - DNA, 33 bp, Homo sapien
aggctttgaccccagatagagaaagagatcttt

SEQ ID NO: 397287 - DNA, 33 bp, Homo sapien
aacagagtggccaaagactgaaaacatttgtgt

SEQ ID NO: 397288 - DNA, 33 bp, Homo sapien
aacagagtggccaaaggctgaaaacatttgtgt

SEQ ID NO: 397289 - DNA, 33 bp, Homo sapien
gggacagaaataacgcacagggccgtccatcca

SEQ ID NO: 397290 - DNA, 33 bp, Homo sapien
gggacagaaataacgcgcagggccgtccatcca

SEQ ID NO: 397291 - DNA, 33 bp, Homo sapien
aataaaactttaaccacgtactgctcaaatttg

SEQ ID NO: 397292 - DNA, 33 bp, Homo sapien
aataaaactttaaccatgtactgctcaaatttg

SEQ ID NO: 397293 - DNA, 33 bp, Homo sapien
aaacactacagactataagatggttacttcctt

SEQ ID NO: 397294 - DNA, 33 bp, Homo sapien
aaacactacagactatgagatggttacttcctt

SEQ ID NO: 397295 - DNA, 33 bp, Homo sapien
ctaaggagaatgttaacttaaatctgggggaga

SEQ ID NO: 397296 - DNA, 33 bp, Homo sapien
ctaaggagaatgttaatttaaatctgggggaga

SEQ ID NO: 397297 - DNA, 33 bp, Homo sapien
ttaagcctcaggcacactccacaatctcttaca

SEQ ID NO: 397298 - DNA, 33 bp, Homo sapien
ttaagcctcaggcacagtccacaatctcttaca

SEQ ID NO: 397299 - DNA, 33 bp, Homo sapien
ggtcagccaaattcaacctgactgagatgggcc

SEQ ID NO: 397300 - DNA, 33 bp, Homo sapien
ggtcagccaaattcaagctgactgagatgggcc

SEQ ID NO: 397301 - DNA, 33 bp, Homo sapien
gtgagcttcacctaaacgagggagttgacactc

SEQ ID NO: 397302 - DNA, 33 bp, Homo sapien
gtgagcttcacctaaaggagggagttgacactc

SEQ ID NO: 397303 - DNA, 33 bp, Homo sapien
cctacttagctgtcaacccgccttccttcagtc

SEQ ID NO: 397304 - DNA, 33 bp, Homo sapien
cctacttagctgtcaatccgccttccttcagtc

SEQ ID NO: 397305 - DNA, 33 bp, Homo sapien
tctgtgcagagaactaagtatctccaagctgtt

SEQ ID NO: 397306 - DNA, 33 bp, Homo sapien
tctgtgcagagaactatgtatctccaagctgtt

SEQ ID NO: 397307 - DNA, 33 bp, Homo sapien
tgtgagtgaatagagacgatgataggatcttaa

SEQ ID NO: 397308 - DNA, 33 bp, Homo sapien
tgtgagtgaatagagatgatgataggatcttaa

SEQ ID NO: 397309 - DNA, 33 bp, Homo sapien
gtactttgccgttaaacagagctgggatgaact

SEQ ID NO: 397310 - DNA, 33 bp, Homo sapien
gtactttgccgttaaagagagctgggatgaact

SEQ ID NO: 397311 - DNA, 33 bp, Homo sapien
actccaccaactcgacagaggcacctggtggtt

SEQ ID NO: 397312 - DNA, 33 bp, Homo sapien
actccaccaactcgacggaggcacctggtggtt

SEQ ID NO: 397313 - DNA, 33 bp, Homo sapien
gagtgtgatatttgaccctctgaaaggtgccat

SEQ ID NO: 397314 - DNA, 33 bp, Homo sapien
gagtgtgatatttgactctctgaaaggtgccat

SEQ ID NO: 397315 - DNA, 33 bp, Homo sapien
ctcctgaattgggggacaaactatggttcattt

SEQ ID NO: 397316 - DNA, 33 bp, Homo sapien
ctcctgaattgggggataaactatggttcattt

SEQ ID NO: 397317 - DNA, 33 bp, Homo sapien
gtttgccatgaatgaaccacttgagctgagtat

SEQ ID NO: 397318 - DNA, 33 bp, Homo sapien
gtttgccatgaatgaagcacttgagctgagtat

SEQ ID NO: 397319 - DNA, 33 bp, Homo sapien
ttagcagactattagacaggtcataagaaatta

SEQ ID NO: 397320 - DNA, 33 bp, Homo sapien
ttagcagactattagataggtcataagaaatta

SEQ ID NO: 397321 - DNA, 33 bp, Homo sapien
tgcccaaagctcaaatcagaaagacagagttgt

SEQ ID NO: 397322 - DNA, 33 bp, Homo sapien
tgcccaaagctcaaattagaaagacagagttgt

SEQ ID NO: 397323 - DNA, 33 bp, Homo sapien
aggatccaaggcaacaagctgattaatgcgggt

SEQ ID NO: 397324 - DNA, 33 bp, Homo sapien
aggatccaaggcaacaggctgattaatgcgggt

SEQ ID NO: 397325 - DNA, 33 bp, Homo sapien
aatggttctgtctaaaaccgcgtgggaaacaag

SEQ ID NO: 397326 - DNA, 33 bp, Homo sapien
aatggttctgtctaaacccgcgtgggaaacaag

SEQ ID NO: 397327 - DNA, 33 bp, Homo sapien
tcaacatgggctaaatgatcacagtgccatgaa

SEQ ID NO: 397328 - DNA, 33 bp, Homo sapien
tcaacatgggctaaattatcacagtgccatgaa

SEQ ID NO: 397329 - DNA, 33 bp, Homo sapien
tgatagcataactcaaacttctcaaggccttac

SEQ ID NO: 397330 - DNA, 33 bp, Homo sapien
tgatagcataactcaaccttctcaaggccttac

SEQ ID NO: 397331 - DNA, 33 bp, Homo sapien
aaacaggagatgtatgaatggcagataaataat

SEQ ID NO: 397332 - DNA, 33 bp, Homo sapien
aaacaggagatgtatggatggcagataaataat

SEQ ID NO: 397333 - DNA, 33 bp, Homo sapien
aggtgttggttaagaagtccagtagctattcaa

SEQ ID NO: 397334 - DNA, 33 bp, Homo sapien
aggtgttggttaagaattccagtagctattcaa

SEQ ID NO: 397335 - DNA, 33 bp, Homo sapien
aaacgcatcatctctcaacaactttttctttcg

SEQ ID NO: 397336 - DNA, 33 bp, Homo sapien
aaacgcatcatctctcgacaactttttctttcg

SEQ ID NO: 397337 - DNA, 33 bp, Homo sapien
aaagtcatagctgatacagcatttgacttcctg

SEQ ID NO: 397338 - DNA, 33 bp, Homo sapien
aaagtcatagctgatatagcatttgacttcctg

SEQ ID NO: 397339 - DNA, 33 bp, Homo sapien
tagaacactaatagacaccatcaaattctagcc

SEQ ID NO: 397340 - DNA, 33 bp, Homo sapien
tagaacactaatagacgccatcaaattctagcc

SEQ ID NO: 397341 - DNA, 33 bp, Homo sapien
ccatgttaactagttacgtctgcaaagccccta

SEQ ID NO: 397342 - DNA, 33 bp, Homo sapien
ccatgttaactagttatgtctgcaaagccccta

SEQ ID NO: 397343 - DNA, 33 bp, Homo sapien
acactggcgctgaaagacacattctgggagagt

SEQ ID NO: 397344 - DNA, 33 bp, Homo sapien
acactggcgctgaaagccacattctgggagagt

SEQ ID NO: 397345 - DNA, 33 bp, Homo sapien
gtgtatgtgggggttacaggcattgcagctcct

SEQ ID NO: 397346 - DNA, 33 bp, Homo sapien
gtgtatgtgggggttagaggcattgcagctcct

SEQ ID NO: 397347 - DNA, 33 bp, Homo sapien
aaggtcacgctcctgacaaagatgcacagtcgt

SEQ ID NO: 397348 - DNA, 33 bp, Homo sapien
aaggtcacgctcctgagaaagatgcacagtcgt

SEQ ID NO: 397349 - DNA, 33 bp, Homo sapien
ggtctccatgaggcctgaaaacaggtgtactgg

SEQ ID NO: 397350 - DNA, 33 bp, Homo sapien
ggtctccatgaggccttaaaacaggtgtactgg

SEQ ID NO: 397351 - DNA, 33 bp, Homo sapien
cccacaaataggacacaaatgaatcaaagaaga

SEQ ID NO: 397352 - DNA, 33 bp, Homo sapien
cccacaaataggacacgaatgaatcaaagaaga

SEQ ID NO: 397353 - DNA, 33 bp, Homo sapien
gcatcttgttaagataaaaaacaaagcataagg

SEQ ID NO: 397354 - DNA, 33 bp, Homo sapien
gcatcttgttaagatagaaaacaaagcataagg

SEQ ID NO: 397355 - DNA, 33 bp, Homo sapien
actcagtaagtgtccactgagtccactatgtcc

SEQ ID NO: 397356 - DNA, 33 bp, Homo sapien
actcagtaagtgtccattgagtccactatgtcc

SEQ ID NO: 397357 - DNA, 33 bp, Homo sapien
gggaaggattggtcaacagttttggaggctact

SEQ ID NO: 397358 - DNA, 33 bp, Homo sapien
gggaaggattggtcaagagttttggaggctact

SEQ ID NO: 397359 - DNA, 33 bp, Homo sapien
gtacacaaatcacaaacgtacagcttcataaat

SEQ ID NO: 397360 - DNA, 33 bp, Homo sapien
gtacacaaatcacaaatgtacagcttcataaat

SEQ ID NO: 397361 - DNA, 33 bp, Homo sapien
aaacatttataaggaaacaaagtgccttgtgag

SEQ ID NO: 397362 - DNA, 33 bp, Homo sapien
aaacatttataaggaagcaaagtgccttgtgag

SEQ ID NO: 397363 - DNA, 33 bp, Homo sapien
gcacctgcctgacaaacgctgcttctgtggaat

SEQ ID NO: 397364 - DNA, 33 bp, Homo sapien
gcacctgcctgacaaatgctgcttctgtggaat

SEQ ID NO: 397365 - DNA, 33 bp, Homo sapien
caccagattatctaaccgaacacctcacggcga

SEQ ID NO: 397366 - DNA, 33 bp, Homo sapien
caccagattatctaactgaacacctcacggcga

SEQ ID NO: 397367 - DNA, 33 bp, Homo sapien
tagctctagactgcaacgagcctggaacagggc

SEQ ID NO: 397368 - DNA, 33 bp, Homo sapien
tagctctagactgcaatgagcctggaacagggc

SEQ ID NO: 397369 - DNA, 33 bp, Homo sapien
gagaatggaattgatacattgttacgcttagta

SEQ ID NO: 397370 - DNA, 33 bp, Homo sapien
gagaatggaattgatagattgttacgcttagta

SEQ ID NO: 397371 - DNA, 33 bp, Homo sapien
taggtgggttctcaaccgtggccaatttgtact

SEQ ID NO: 397372 - DNA, 33 bp, Homo sapien
taggtgggttctcaactgtggccaatttgtact

SEQ ID NO: 397373 - DNA, 33 bp, Homo sapien
atgatcagttcttaaacacagtgtgggaggaag

SEQ ID NO: 397374 - DNA, 33 bp, Homo sapien
atgatcagttcttaaatacagtgtgggaggaag

SEQ ID NO: 397375 - DNA, 33 bp, Homo sapien
aactgaagagacatccagaaagacacaatcggg

SEQ ID NO: 397376 - DNA, 33 bp, Homo sapien
aactgaagagacatccggaaagacacaatcggg

SEQ ID NO: 397377 - DNA, 33 bp, Homo sapien
ttctatactaggtgcactcttatttagtcatcg

SEQ ID NO: 397378 - DNA, 33 bp, Homo sapien
ttctatactaggtgcattcttatttagtcatcg

SEQ ID NO: 397379 - DNA, 33 bp, Homo sapien
acacccattaaggagacgtctgcaactgagcag

SEQ ID NO: 397380 - DNA, 33 bp, Homo sapien
acacccattaaggagatgtctgcaactgagcag

SEQ ID NO: 397381 - DNA, 33 bp, Homo sapien
tcatctgtcaccctaaaaatattgtctccagcc

SEQ ID NO: 397382 - DNA, 33 bp, Homo sapien
tcatctgtcaccctaagaatattgtctccagcc

SEQ ID NO: 397383 - DNA, 33 bp, Homo sapien
atggtgaatttctagcaccttaactggatgagg

SEQ ID NO: 397384 - DNA, 33 bp, Homo sapien
atggtgaatttctagccccttaactggatgagg

SEQ ID NO: 397385 - DNA, 33 bp, Homo sapien
gctcctctgtgtgggaacctgatataatccacc

SEQ ID NO: 397386 - DNA, 33 bp, Homo sapien
gctcctctgtgtgggagcctgatataatccacc

SEQ ID NO: 397387 - DNA, 33 bp, Homo sapien
tatgaatctaaaataactggcttcttgttgaag

SEQ ID NO: 397388 - DNA, 33 bp, Homo sapien
tatgaatctaaaataattggcttcttgttgaag

SEQ ID NO: 397389 - DNA, 33 bp, Homo sapien
ataagatttaaatgcgaatgaactgtgatagaa

SEQ ID NO: 397390 - DNA, 33 bp, Homo sapien
ataagatttaaatgcgtatgaactgtgatagaa

SEQ ID NO: 397391 - DNA, 33 bp, Homo sapien
cttggaaattcacgagcatgggcatggcaaatc

SEQ ID NO: 397392 - DNA, 33 bp, Homo sapien
cttggaaattcacgaggatgggcatggcaaatc

SEQ ID NO: 397393 - DNA, 33 bp, Homo sapien
agcagaggggtgatgcagaagtgtgaaggaatg

SEQ ID NO: 397394 - DNA, 33 bp, Homo sapien
agcagaggggtgatgcggaagtgtgaaggaatg

SEQ ID NO: 397395 - DNA, 33 bp, Homo sapien
gtacggagggatcggacgccacttcctcgggct

SEQ ID NO: 397396 - DNA, 33 bp, Homo sapien
gtacggagggatcggatgccacttcctcgggct

SEQ ID NO: 397397 - DNA, 33 bp, Homo sapien
cagaaagagctcttaagaagtacctcactggat

SEQ ID NO: 397398 - DNA, 33 bp, Homo sapien
cagaaagagctcttaataagtacctcactggat

SEQ ID NO: 397399 - DNA, 33 bp, Homo sapien
ggtttttcccatactgacaggagcacacactga

SEQ ID NO: 397400 - DNA, 33 bp, Homo sapien
ggtttttcccatactgtcaggagcacacactga

SEQ ID NO: 397401 - DNA, 33 bp, Homo sapien
cccgtttccatttccacatcataggtgcatcct

SEQ ID NO: 397402 - DNA, 33 bp, Homo sapien
cccgtttccatttccatatcataggtgcatcct

SEQ ID NO: 397403 - DNA, 33 bp, Homo sapien
tgactcactgttccaaccaatcaagacatcttc

SEQ ID NO: 397404 - DNA, 33 bp, Homo sapien
tgactcactgttccaagcaatcaagacatcttc

SEQ ID NO: 397405 - DNA, 33 bp, Homo sapien
aaccagcacaggagtacgctgtccccacaactc

SEQ ID NO: 397406 - DNA, 33 bp, Homo sapien
aaccagcacaggagtaggctgtccccacaactc

SEQ ID NO: 397407 - DNA, 33 bp, Homo sapien
cgtccatgttagtaaacgtagatccatggtata

SEQ ID NO: 397408 - DNA, 33 bp, Homo sapien
cgtccatgttagtaaatgtagatccatggtata

SEQ ID NO: 397409 - DNA, 33 bp, Homo sapien
tttcaagagtacgcaaaattcttatcctaaact

SEQ ID NO: 397410 - DNA, 33 bp, Homo sapien
tttcaagagtacgcaatattcttatcctaaact

SEQ ID NO: 397411 - DNA, 33 bp, Homo sapien
gctgcacaaagcggagcaacaggtgtttgggga

SEQ ID NO: 397412 - DNA, 33 bp, Homo sapien
gctgcacaaagcggaggaacaggtgtttgggga

SEQ ID NO: 397413 - DNA, 33 bp, Homo sapien
ggtagacccagtggtacggtcatcctggcttgt

SEQ ID NO: 397414 - DNA, 33 bp, Homo sapien
ggtagacccagtggtatggtcatcctggcttgt

SEQ ID NO: 397415 - DNA, 33 bp, Homo sapien
ttttctttatccaatccatagcattcttatatt

SEQ ID NO: 397416 - DNA, 33 bp, Homo sapien
ttttctttatccaatctatagcattcttatatt

SEQ ID NO: 397417 - DNA, 33 bp, Homo sapien
agtggagaaatctatgaaacactccaggcaaaa

SEQ ID NO: 397418 - DNA, 33 bp, Homo sapien
agtggagaaatctatggaacactccaggcaaaa

SEQ ID NO: 397419 - DNA, 33 bp, Homo sapien
agaaaataatatgtcaaaacctagttggattta

SEQ ID NO: 397420 - DNA, 33 bp, Homo sapien
agaaaataatatgtcagaacctagttggattta

SEQ ID NO: 397421 - DNA, 33 bp, Homo sapien
attgcatgaacttacaacatacggttaatacca

SEQ ID NO: 397422 - DNA, 33 bp, Homo sapien
attgcatgaacttacagcatacggttaatacca

SEQ ID NO: 397423 - DNA, 33 bp, Homo sapien
ccatgtgagaatacagaaagaaggcagctgact

SEQ ID NO: 397424 - DNA, 33 bp, Homo sapien
ccatgtgagaatacaggaagaaggcagctgact

SEQ ID NO: 397425 - DNA, 33 bp, Homo sapien
agttcatacactcatacacaaagcacttacaaa

SEQ ID NO: 397426 - DNA, 33 bp, Homo sapien
agttcatacactcatatacaaagcacttacaaa

SEQ ID NO: 397427 - DNA, 33 bp, Homo sapien
gaatggcatatcttcacaggttggttgggaaga

SEQ ID NO: 397428 - DNA, 33 bp, Homo sapien
gaatggcatatcttcataggttggttgggaaga

SEQ ID NO: 397429 - DNA, 33 bp, Homo sapien
ggccatgagtgtgcaccgaatatgtttatcaag

SEQ ID NO: 397430 - DNA, 33 bp, Homo sapien
ggccatgagtgtgcactgaatatgtttatcaag

SEQ ID NO: 397431 - DNA, 33 bp, Homo sapien
actttaatgttcatccaaaacctggggagcttg

SEQ ID NO: 397432 - DNA, 33 bp, Homo sapien
actttaatgttcatcccaaacctggggagcttg

SEQ ID NO: 397433 - DNA, 33 bp, Homo sapien
ctaaccagaattgcccaatgctctactcgtatg

SEQ ID NO: 397434 - DNA, 33 bp, Homo sapien
ctaaccagaattgcccgatgctctactcgtatg

SEQ ID NO: 397435 - DNA, 33 bp, Homo sapien
caaggccagtgaagacaaattttaccagtgcat

SEQ ID NO: 397436 - DNA, 33 bp, Homo sapien
caaggccagtgaagacgaattttaccagtgcat

SEQ ID NO: 397437 - DNA, 33 bp, Homo sapien
ctgagaatgcatctggaatagatccttatatat

SEQ ID NO: 397438 - DNA, 33 bp, Homo sapien
ctgagaatgcatctgggatagatccttatatat

SEQ ID NO: 397439 - DNA, 33 bp, Homo sapien
tgtgaaaatgaagaacagcaccatccaaaagta

SEQ ID NO: 397440 - DNA, 33 bp, Homo sapien
tgtgaaaatgaagaacggcaccatccaaaagta

SEQ ID NO: 397441 - DNA, 33 bp, Homo sapien
ggtctacatcgtgtacaccgttttttgtttgtt

SEQ ID NO: 397442 - DNA, 33 bp, Homo sapien
ggtctacatcgtgtactccgttttttgtttgtt

SEQ ID NO: 397443 - DNA, 33 bp, Homo sapien
ggctctggttcacacaatcacatggccaggtgg

SEQ ID NO: 397444 - DNA, 33 bp, Homo sapien
ggctctggttcacacagtcacatggccaggtgg

SEQ ID NO: 397445 - DNA, 33 bp, Homo sapien
ttaactctgtacgagaacaagagcttactatga

SEQ ID NO: 397446 - DNA, 33 bp, Homo sapien
ttaactctgtacgagagcaagagcttactatga

SEQ ID NO: 397447 - DNA, 33 bp, Homo sapien
aaacattacagtcaaaaagttgaaagccaaaaa

SEQ ID NO: 397448 - DNA, 33 bp, Homo sapien
aaacattacagtcaaacagttgaaagccaaaaa

SEQ ID NO: 397449 - DNA, 33 bp, Homo sapien
gtggccttttttctccagaaggcatgggtcagg

SEQ ID NO: 397450 - DNA, 33 bp, Homo sapien
gtggccttttttctccggaaggcatgggtcagg

SEQ ID NO: 397451 - DNA, 33 bp, Homo sapien
gagatcaggtgatcaaaggctcacattgcctga

SEQ ID NO: 397452 - DNA, 33 bp, Homo sapien
gagatcaggtgatcaagggctcacattgcctga

SEQ ID NO: 397453 - DNA, 33 bp, Homo sapien
aatattacctgtcccgccaaccgcatagggcag

SEQ ID NO: 397454 - DNA, 33 bp, Homo sapien
aatattacctgtcccgtcaaccgcatagggcag

SEQ ID NO: 397455 - DNA, 33 bp, Homo sapien
acctgtgaacaatctaagcaaacacctaggctg

SEQ ID NO: 397456 - DNA, 33 bp, Homo sapien
acctgtgaacaatctacgcaaacacctaggctg

SEQ ID NO: 397457 - DNA, 33 bp, Homo sapien
tctggagactccttacaacctgtgcagggcttt

SEQ ID NO: 397458 - DNA, 33 bp, Homo sapien
tctggagactccttacgacctgtgcagggcttt

SEQ ID NO: 397459 - DNA, 33 bp, Homo sapien
gtttctgtggatgggacgatgctacgggagaat

SEQ ID NO: 397460 - DNA, 33 bp, Homo sapien
gtttctgtggatgggatgatgctacgggagaat

SEQ ID NO: 397461 - DNA, 33 bp, Homo sapien
tgcaaggagtattcaaatgtgacagaggaaaca

SEQ ID NO: 397462 - DNA, 33 bp, Homo sapien
tgcaaggagtattcaagtgtgacagaggaaaca

SEQ ID NO: 397463 - DNA, 33 bp, Homo sapien
agagctggttgggctacgcaataatatgaataa

SEQ ID NO: 397464 - DNA, 33 bp, Homo sapien
agagctggttgggctatgcaataatatgaataa

SEQ ID NO: 397465 - DNA, 33 bp, Homo sapien
cttctcatcctaataacccccaccagtgtgttt

SEQ ID NO: 397466 - DNA, 33 bp, Homo sapien
cttctcatcctaataatccccaccagtgtgttt

SEQ ID NO: 397467 - DNA, 33 bp, Homo sapien
aggaacagaccaaagacgacattcagagggtcc

SEQ ID NO: 397468 - DNA, 33 bp, Homo sapien
aggaacagaccaaagatgacattcagagggtcc

SEQ ID NO: 397469 - DNA, 33 bp, Homo sapien
cagccctgcttgaggaatatcaaactgactccc

SEQ ID NO: 397470 - DNA, 33 bp, Homo sapien
cagccctgcttgaggagtatcaaactgactccc

SEQ ID NO: 397471 - DNA, 33 bp, Homo sapien
agtgctcctaatgtacccaagctgtgtgctgat

SEQ ID NO: 397472 - DNA, 33 bp, Homo sapien
agtgctcctaatgtacgcaagctgtgtgctgat

SEQ ID NO: 397473 - DNA, 33 bp, Homo sapien
tgctttctcttaagagccccagccaaagtgtca

SEQ ID NO: 397474 - DNA, 33 bp, Homo sapien
tgctttctcttaagagtcccagccaaagtgtca

SEQ ID NO: 397475 - DNA, 33 bp, Homo sapien
cactcctctgtgtggacagcaaacgtgagaata

SEQ ID NO: 397476 - DNA, 33 bp, Homo sapien
cactcctctgtgtggagagcaaacgtgagaata

SEQ ID NO: 397477 - DNA, 33 bp, Homo sapien
actgcagtctcgggcaatacttacctaatcttc

SEQ ID NO: 397478 - DNA, 33 bp, Homo sapien
actgcagtctcgggcattacttacctaatcttc

SEQ ID NO: 397479 - DNA, 33 bp, Homo sapien
gaaaatccacatcttacactgtacacaaaaatc

SEQ ID NO: 397480 - DNA, 33 bp, Homo sapien
gaaaatccacatcttatactgtacacaaaaatc

SEQ ID NO: 397481 - DNA, 33 bp, Homo sapien
atgaacaaaatcaaaaggtaacttatggaatgg

SEQ ID NO: 397482 - DNA, 33 bp, Homo sapien
atgaacaaaatcaaaatgtaacttatggaatgg

SEQ ID NO: 397483 - DNA, 33 bp, Homo sapien
tgacatattcacatacaattttttatcatacat

SEQ ID NO: 397484 - DNA, 33 bp, Homo sapien
tgacatattcacatacgattttttatcatacat

SEQ ID NO: 397485 - DNA, 33 bp, Homo sapien
gcgctggggagaacataaggactagaactcaga

SEQ ID NO: 397486 - DNA, 33 bp, Homo sapien
gcgctggggagaacatgaggactagaactcaga

SEQ ID NO: 397487 - DNA, 33 bp, Homo sapien
tagagcatccttgcacaaacacagatggtagag

SEQ ID NO: 397488 - DNA, 33 bp, Homo sapien
tagagcatccttgcacgaacacagatggtagag

SEQ ID NO: 397489 - DNA, 33 bp, Homo sapien
gggcatgaacaagacacagcttagtggagtgtt

SEQ ID NO: 397490 - DNA, 33 bp, Homo sapien
gggcatgaacaagacatagcttagtggagtgtt

SEQ ID NO: 397491 - DNA, 33 bp, Homo sapien
aggactccatcttcacacctgtcctggctcctg

SEQ ID NO: 397492 - DNA, 33 bp, Homo sapien
aggactccatcttcacgcctgtcctggctcctg

SEQ ID NO: 397493 - DNA, 33 bp, Homo sapien
atactatcaaagatcgacgaatgagatccaaac

SEQ ID NO: 397494 - DNA, 33 bp, Homo sapien
atactatcaaagatcggcgaatgagatccaaac

SEQ ID NO: 397495 - DNA, 33 bp, Homo sapien
tagaagtgctctctcccacctacacaaggaatg

SEQ ID NO: 397496 - DNA, 33 bp, Homo sapien
tagaagtgctctctccgacctacacaaggaatg

SEQ ID NO: 397497 - DNA, 33 bp, Homo sapien
tgaagagggctgtgaaaggggaacccagtatgc

SEQ ID NO: 397498 - DNA, 33 bp, Homo sapien
tgaagagggctgtgaacggggaacccagtatgc

SEQ ID NO: 397499 - DNA, 33 bp, Homo sapien
cctttctctgtttcccaaggtagccactctcct

SEQ ID NO: 397500 - DNA, 33 bp, Homo sapien
cctttctctgtttcccgaggtagccactctcct

SEQ ID NO: 397501 - DNA, 33 bp, Homo sapien
cttgggatcaagggtccagtcattggccttgga

SEQ ID NO: 397502 - DNA, 33 bp, Homo sapien
cttgggatcaagggtctagtcattggccttgga

SEQ ID NO: 397503 - DNA, 33 bp, Homo sapien
aagcacttagaatagaaatgggcgtagagagcc

SEQ ID NO: 397504 - DNA, 33 bp, Homo sapien
aagcacttagaatagagatgggcgtagagagcc

SEQ ID NO: 397505 - DNA, 33 bp, Homo sapien
aataaattacaggatcaagaagtagagggcaca

SEQ ID NO: 397506 - DNA, 33 bp, Homo sapien
aataaattacaggatccagaagtagagggcaca

SEQ ID NO: 397507 - DNA, 33 bp, Homo sapien
gcgaccagttaaaccccgagcctagcagtgctg

SEQ ID NO: 397508 - DNA, 33 bp, Homo sapien
gcgaccagttaaacccggagcctagcagtgctg

SEQ ID NO: 397509 - DNA, 33 bp, Homo sapien
acgcgagatagcatacacatttcacagtgagaa

SEQ ID NO: 397510 - DNA, 33 bp, Homo sapien
acgcgagatagcatacgcatttcacagtgagaa

SEQ ID NO: 397511 - DNA, 33 bp, Homo sapien
gctgggaattctcactcacatctgggtgtcaac

SEQ ID NO: 397512 - DNA, 33 bp, Homo sapien
gctgggaattctcactgacatctgggtgtcaac

SEQ ID NO: 397513 - DNA, 33 bp, Homo sapien
tgatacctgctgtttgaaaagagcttctccggc

SEQ ID NO: 397514 - DNA, 33 bp, Homo sapien
tgatacctgctgtttggaaagagcttctccggc

SEQ ID NO: 397515 - DNA, 33 bp, Homo sapien
atgatattaagtcaacagaacattcagcctgga

SEQ ID NO: 397516 - DNA, 33 bp, Homo sapien
atgatattaagtcaacggaacattcagcctgga

SEQ ID NO: 397517 - DNA, 33 bp, Homo sapien
aggatcactgaggggaactttctttgctgctag

SEQ ID NO: 397518 - DNA, 33 bp, Homo sapien
aggatcactgaggggacctttctttgctgctag

SEQ ID NO: 397519 - DNA, 33 bp, Homo sapien
ctgcaaccactgtgccactccggagtcttccgg

SEQ ID NO: 397520 - DNA, 33 bp, Homo sapien
ctgcaaccactgtgccgctccggagtcttccgg

SEQ ID NO: 397521 - DNA, 33 bp, Homo sapien
caaattgaaaataggccctctgtctatgcccat

SEQ ID NO: 397522 - DNA, 33 bp, Homo sapien
caaattgaaaataggctctctgtctatgcccat

SEQ ID NO: 397523 - DNA, 33 bp, Homo sapien
aatgtgccaggatataaggttaggtgaaggtta

SEQ ID NO: 397524 - DNA, 33 bp, Homo sapien
aatgtgccaggatatatggttaggtgaaggtta

SEQ ID NO: 397525 - DNA, 33 bp, Homo sapien
atggtttgacaactgaaggttcaagtccaacag

SEQ ID NO: 397526 - DNA, 33 bp, Homo sapien
atggtttgacaactgagggttcaagtccaacag

SEQ ID NO: 397527 - DNA, 33 bp, Homo sapien
ctctgcgggatcagacagcacgggaagcggctc

SEQ ID NO: 397528 - DNA, 33 bp, Homo sapien
ctctgcgggatcagacggcacgggaagcggctc

SEQ ID NO: 397529 - DNA, 33 bp, Homo sapien
tcaggtgcagagttccagagggtacagtcccca

SEQ ID NO: 397530 - DNA, 33 bp, Homo sapien
tcaggtgcagagttccggagggtacagtcccca

SEQ ID NO: 397531 - DNA, 33 bp, Homo sapien
cctcctacctacctcaataattcaataacacat

SEQ ID NO: 397532 - DNA, 33 bp, Homo sapien
cctcctacctacctcagtaattcaataacacat

SEQ ID NO: 397533 - DNA, 33 bp, Homo sapien
ggtaccgctcttgtagaaatataactacataag

SEQ ID NO: 397534 - DNA, 33 bp, Homo sapien
ggtaccgctcttgtaggaatataactacataag

SEQ ID NO: 397535 - DNA, 33 bp, Homo sapien
gctttatgactacttacaacttttgctattatc

SEQ ID NO: 397536 - DNA, 33 bp, Homo sapien
gctttatgactacttataacttttgctattatc

SEQ ID NO: 397537 - DNA, 33 bp, Homo sapien
gtagcctcagggaacccagattaaaggggagag

SEQ ID NO: 397538 - DNA, 33 bp, Homo sapien
gtagcctcagggaacctagattaaaggggagag

SEQ ID NO: 397539 - DNA, 33 bp, Homo sapien
gggcctgggatatgcactgaacttacgtgtttt

SEQ ID NO: 397540 - DNA, 33 bp, Homo sapien
gggcctgggatatgcattgaacttacgtgtttt

SEQ ID NO: 397541 - DNA, 33 bp, Homo sapien
atctccttgtcttggcaagatctgaccaaccca

SEQ ID NO: 397542 - DNA, 33 bp, Homo sapien
atctccttgtcttggcgagatctgaccaaccca

SEQ ID NO: 397543 - DNA, 33 bp, Homo sapien
aaatatgtcttgtcaccgagacaacaggtgctg

SEQ ID NO: 397544 - DNA, 33 bp, Homo sapien
aaatatgtcttgtcactgagacaacaggtgctg

SEQ ID NO: 397545 - DNA, 33 bp, Homo sapien
ataaagagacgagggaaagaccaagaagggggc

SEQ ID NO: 397546 - DNA, 33 bp, Homo sapien
ataaagagacgagggagagaccaagaagggggc

SEQ ID NO: 397547 - DNA, 33 bp, Homo sapien
ttggcaggtccagtagcagtagccaagtagtca

SEQ ID NO: 397548 - DNA, 33 bp, Homo sapien
ttggcaggtccagtagtagtagccaagtagtca

SEQ ID NO: 397549 - DNA, 33 bp, Homo sapien
aaaaggtgtgactttacgtgtataaattatgct

SEQ ID NO: 397550 - DNA, 33 bp, Homo sapien
aaaaggtgtgactttatgtgtataaattatgct

SEQ ID NO: 397551 - DNA, 33 bp, Homo sapien
tctcaaacgtcaaaaacggcattcaggatagag

SEQ ID NO: 397552 - DNA, 33 bp, Homo sapien
tctcaaacgtcaaaaatggcattcaggatagag

SEQ ID NO: 397553 - DNA, 33 bp, Homo sapien
cgcttctgtgaggtcaatcgaaagccaagccat

SEQ ID NO: 397554 - DNA, 33 bp, Homo sapien
cgcttctgtgaggtcagtcgaaagccaagccat

SEQ ID NO: 397555 - DNA, 33 bp, Homo sapien
gtggagctattgaagacaaacaactcaatttta

SEQ ID NO: 397556 - DNA, 33 bp, Homo sapien
gtggagctattgaagagaaacaactcaatttta

SEQ ID NO: 397557 - DNA, 33 bp, Homo sapien
gggacagactgaaatacagatcaggtttatgat

SEQ ID NO: 397558 - DNA, 33 bp, Homo sapien
gggacagactgaaatatagatcaggtttatgat

SEQ ID NO: 397559 - DNA, 33 bp, Homo sapien
tctctgctgatgaaacacaaatcctgggccacc

SEQ ID NO: 397560 - DNA, 33 bp, Homo sapien
tctctgctgatgaaacgcaaatcctgggccacc

SEQ ID NO: 397561 - DNA, 33 bp, Homo sapien
taatgctgagaatccacgaagagctggatggag

SEQ ID NO: 397562 - DNA, 33 bp, Homo sapien
taatgctgagaatccatgaagagctggatggag

SEQ ID NO: 397563 - DNA, 33 bp, Homo sapien
tagtagacagatgctaaaaaaaaaacaaccatg

SEQ ID NO: 397564 - DNA, 33 bp, Homo sapien
tagtagacagatgctacaaaaaaaacaaccatg

SEQ ID NO: 397565 - DNA, 33 bp, Homo sapien
caggaacccacaggcacagcgaaaacagccctc

SEQ ID NO: 397566 - DNA, 33 bp, Homo sapien
caggaacccacaggcagagcgaaaacagccctc

SEQ ID NO: 397567 - DNA, 33 bp, Homo sapien
cttgcttctcatgtccactcttgtcttttccta

SEQ ID NO: 397568 - DNA, 33 bp, Homo sapien
cttgcttctcatgtccgctcttgtcttttccta

SEQ ID NO: 397569 - DNA, 33 bp, Homo sapien
tgcatgcccaaatcacagtatgcgatagtgcac

SEQ ID NO: 397570 - DNA, 33 bp, Homo sapien
tgcatgcccaaatcacggtatgcgatagtgcac

SEQ ID NO: 397571 - DNA, 33 bp, Homo sapien
acaagttgttaatttcccagcaagcactggagc

SEQ ID NO: 397572 - DNA, 33 bp, Homo sapien
acaagttgttaatttctcagcaagcactggagc

SEQ ID NO: 397573 - DNA, 33 bp, Homo sapien
gtgctaaatagtcagccgctccaaaaacctttc

SEQ ID NO: 397574 - DNA, 33 bp, Homo sapien
gtgctaaatagtcagctgctccaaaaacctttc

SEQ ID NO: 397575 - DNA, 33 bp, Homo sapien
tctgatgccatccttcactactatatttctcac

SEQ ID NO: 397576 - DNA, 33 bp, Homo sapien
tctgatgccatccttcgctactatatttctcac

SEQ ID NO: 397577 - DNA, 33 bp, Homo sapien
aggcactgagagagaaaattaggaagacaacac

SEQ ID NO: 397578 - DNA, 33 bp, Homo sapien
aggcactgagagagaatattaggaagacaacac

SEQ ID NO: 397579 - DNA, 33 bp, Homo sapien
aggcagcacacagttcactggatttttgcattg

SEQ ID NO: 397580 - DNA, 33 bp, Homo sapien
aggcagcacacagttctctggatttttgcattg

SEQ ID NO: 397581 - DNA, 33 bp, Homo sapien
ttaaggaatgaggcaaacaccaccaggagaaag

SEQ ID NO: 397582 - DNA, 33 bp, Homo sapien
ttaaggaatgaggcaaccaccaccaggagaaag

SEQ ID NO: 397583 - DNA, 33 bp, Homo sapien
gcgtgtgggtgtacacaacagtgaaaggggata

SEQ ID NO: 397584 - DNA, 33 bp, Homo sapien
gcgtgtgggtgtacacgacagtgaaaggggata

SEQ ID NO: 397585 - DNA, 33 bp, Homo sapien
gtcagatttgcataaggacacaccacaaggctg

SEQ ID NO: 397586 - DNA, 33 bp, Homo sapien
gtcagatttgcataagtacacaccacaaggctg

SEQ ID NO: 397587 - DNA, 33 bp, Homo sapien
ggtctagagtggacccaaggccaagacactgag

SEQ ID NO: 397588 - DNA, 33 bp, Homo sapien
ggtctagagtggacccgaggccaagacactgag

SEQ ID NO: 397589 - DNA, 33 bp, Homo sapien
ttcagtctttctagataacacttgattttgaca

SEQ ID NO: 397590 - DNA, 33 bp, Homo sapien
ttcagtctttctagatcacacttgattttgaca

SEQ ID NO: 397591 - DNA, 33 bp, Homo sapien
tgcatctttggacgaaactagaaaagaagctga

SEQ ID NO: 397592 - DNA, 33 bp, Homo sapien
tgcatctttggacgaagctagaaaagaagctga

SEQ ID NO: 397593 - DNA, 33 bp, Homo sapien
tagggactgaagaagcacaagagagactgtgac

SEQ ID NO: 397594 - DNA, 33 bp, Homo sapien
tagggactgaagaagcgcaagagagactgtgac

SEQ ID NO: 397595 - DNA, 33 bp, Homo sapien
cattgccctgttttcagtatggcttgttacctg

SEQ ID NO: 397596 - DNA, 33 bp, Homo sapien
cattgccctgttttcattatggcttgttacctg

SEQ ID NO: 397597 - DNA, 33 bp, Homo sapien
tgcagtatgtaaacaagttgcctcattgccctg

SEQ ID NO: 397598 - DNA, 33 bp, Homo sapien
tgcagtatgtaaacaatttgcctcattgccctg

SEQ ID NO: 397599 - DNA, 33 bp, Homo sapien
tgatatcaccataggaccaccattgtgggaggt

SEQ ID NO: 397600 - DNA, 33 bp, Homo sapien
tgatatcaccataggatcaccattgtgggaggt

SEQ ID NO: 397601 - DNA, 33 bp, Homo sapien
ggccaagaacatccaacacaattttgaagaaga

SEQ ID NO: 397602 - DNA, 33 bp, Homo sapien
ggccaagaacatccaagacaattttgaagaaga

SEQ ID NO: 397603 - DNA, 33 bp, Homo sapien
caaggaggtagaacaacagaagctcatacgctg

SEQ ID NO: 397604 - DNA, 33 bp, Homo sapien
caaggaggtagaacaatagaagctcatacgctg

SEQ ID NO: 397605 - DNA, 33 bp, Homo sapien
gtacaagctgttaaaaccactaggaactgctgg

SEQ ID NO: 397606 - DNA, 33 bp, Homo sapien
gtacaagctgttaaaatcactaggaactgctgg

SEQ ID NO: 397607 - DNA, 33 bp, Homo sapien
ggagtgttagagccaaaaatgatggttgttggc

SEQ ID NO: 397608 - DNA, 33 bp, Homo sapien
ggagtgttagagccaagaatgatggttgttggc

SEQ ID NO: 397609 - DNA, 33 bp, Homo sapien
attaactttgaaactaccaggttcctgttataa

SEQ ID NO: 397610 - DNA, 33 bp, Homo sapien
attaactttgaaactatcaggttcctgttataa

SEQ ID NO: 397611 - DNA, 33 bp, Homo sapien
gtgagagatgggtaccaaatgtcagctctccat

SEQ ID NO: 397612 - DNA, 33 bp, Homo sapien
gtgagagatgggtaccgaatgtcagctctccat

SEQ ID NO: 397613 - DNA, 33 bp, Homo sapien
ccttcaggtctctacaacttctctaacactaac

SEQ ID NO: 397614 - DNA, 33 bp, Homo sapien
ccttcaggtctctacagcttctctaacactaac

SEQ ID NO: 397615 - DNA, 33 bp, Homo sapien
ccttctagatcaatcacatttctttcagtgcgt

SEQ ID NO: 397616 - DNA, 33 bp, Homo sapien
ccttctagatcaatcagatttctttcagtgcgt

SEQ ID NO: 397617 - DNA, 33 bp, Homo sapien
gaggaaacctagaccaaatacactctgcttctt

SEQ ID NO: 397618 - DNA, 33 bp, Homo sapien
gaggaaacctagaccagatacactctgcttctt

SEQ ID NO: 397619 - DNA, 33 bp, Homo sapien
gcccaaccacaggctcaaaatcctcatctgtga

SEQ ID NO: 397620 - DNA, 33 bp, Homo sapien
gcccaaccacaggctcgaaatcctcatctgtga

SEQ ID NO: 397621 - DNA, 33 bp, Homo sapien
gcactgggctctggacggtcatttccatgtcca

SEQ ID NO: 397622 - DNA, 33 bp, Homo sapien
gcactgggctctggactgtcatttccatgtcca

SEQ ID NO: 397623 - DNA, 33 bp, Homo sapien
gggaggagtttcagaaagtagtcgtggccttgg

SEQ ID NO: 397624 - DNA, 33 bp, Homo sapien
gggaggagtttcagaatgtagtcgtggccttgg

SEQ ID NO: 397625 - DNA, 33 bp, Homo sapien
tgaggttgaagatcagcaagttagaccaggttt

SEQ ID NO: 397626 - DNA, 33 bp, Homo sapien
tgaggttgaagatcaggaagttagaccaggttt

SEQ ID NO: 397627 - DNA, 33 bp, Homo sapien
gctggggtagtggaaaaccgtggagactcagtc

SEQ ID NO: 397628 - DNA, 33 bp, Homo sapien
gctggggtagtggaaagccgtggagactcagtc

SEQ ID NO: 397629 - DNA, 33 bp, Homo sapien
aagctggcagtattgacggagacccctctgtgt

SEQ ID NO: 397630 - DNA, 33 bp, Homo sapien
aagctggcagtattgatggagacccctctgtgt

SEQ ID NO: 397631 - DNA, 33 bp, Homo sapien
gactacaagtctgagaccataaatgtcaacagg

SEQ ID NO: 397632 - DNA, 33 bp, Homo sapien
gactacaagtctgagatcataaatgtcaacagg

SEQ ID NO: 397633 - DNA, 33 bp, Homo sapien
tagaattgcaagaaaacagattctgttgtttaa

SEQ ID NO: 397634 - DNA, 33 bp, Homo sapien
tagaattgcaagaaaatagattctgttgtttaa

SEQ ID NO: 397635 - DNA, 33 bp, Homo sapien
atggctgccgaaagacacccaggaggacaggtg

SEQ ID NO: 397636 - DNA, 33 bp, Homo sapien
atggctgccgaaagacgcccaggaggacaggtg

SEQ ID NO: 397637 - DNA, 33 bp, Homo sapien
accgtttggaacctacaaactccttctgtcatg

SEQ ID NO: 397638 - DNA, 33 bp, Homo sapien
accgtttggaacctactaactccttctgtcatg

SEQ ID NO: 397639 - DNA, 33 bp, Homo sapien
ggctttgggaagcttcaataaacatcatatttg

SEQ ID NO: 397640 - DNA, 33 bp, Homo sapien
ggctttgggaagcttcgataaacatcatatttg

SEQ ID NO: 397641 - DNA, 33 bp, Homo sapien
agctgctgtgagagccaatcatgtatctcatgt

SEQ ID NO: 397642 - DNA, 33 bp, Homo sapien
agctgctgtgagagccgatcatgtatctcatgt

SEQ ID NO: 397643 - DNA, 33 bp, Homo sapien
ctctcttgaacagaacagtatcaggtcaactgg

SEQ ID NO: 397644 - DNA, 33 bp, Homo sapien
ctctcttgaacagaacggtatcaggtcaactgg

SEQ ID NO: 397645 - DNA, 33 bp, Homo sapien
acaatagtagaacctaacgcatgaagttgttgt

SEQ ID NO: 397646 - DNA, 33 bp, Homo sapien
acaatagtagaacctagcgcatgaagttgttgt

SEQ ID NO: 397647 - DNA, 33 bp, Homo sapien
gtctggccaggtatgaccgttcttctgtatgta

SEQ ID NO: 397648 - DNA, 33 bp, Homo sapien
gtctggccaggtatgatcgttcttctgtatgta

SEQ ID NO: 397649 - DNA, 33 bp, Homo sapien
ggcatcagagtttgcaaataccaagttaggaaa

SEQ ID NO: 397650 - DNA, 33 bp, Homo sapien
ggcatcagagtttgcacataccaagttaggaaa

SEQ ID NO: 397651 - DNA, 33 bp, Homo sapien
cctcacgtgggtgtcaaaaagattaaggagaga

SEQ ID NO: 397652 - DNA, 33 bp, Homo sapien
cctcacgtgggtgtcagaaagattaaggagaga

SEQ ID NO: 397653 - DNA, 33 bp, Homo sapien
agcagatggaggtgtacgcttttcttagtatgt

SEQ ID NO: 397654 - DNA, 33 bp, Homo sapien
agcagatggaggtgtatgcttttcttagtatgt

SEQ ID NO: 397655 - DNA, 33 bp, Homo sapien
tggactgcaaaagaccccaaagctatgtgtaaa

SEQ ID NO: 397656 - DNA, 33 bp, Homo sapien
tggactgcaaaagacctcaaagctatgtgtaaa

SEQ ID NO: 397657 - DNA, 33 bp, Homo sapien
caaagctatgtgtaaaagaagtctctaaatcta

SEQ ID NO: 397658 - DNA, 33 bp, Homo sapien
caaagctatgtgtaaacgaagtctctaaatcta

SEQ ID NO: 397659 - DNA, 33 bp, Homo sapien
agagctcagagtgtaacggaggaaacagtcaaa

SEQ ID NO: 397660 - DNA, 33 bp, Homo sapien
agagctcagagtgtaatggaggaaacagtcaaa

SEQ ID NO: 397661 - DNA, 33 bp, Homo sapien
ctcaaaaactgtagtcaactggctgagagaacc

SEQ ID NO: 397662 - DNA, 33 bp, Homo sapien
ctcaaaaactgtagtcgactggctgagagaacc

SEQ ID NO: 397663 - DNA, 33 bp, Homo sapien
aggcttgctagcctaccgaacaggagaggaaag

SEQ ID NO: 397664 - DNA, 33 bp, Homo sapien
aggcttgctagcctactgaacaggagaggaaag

SEQ ID NO: 397665 - DNA, 33 bp, Homo sapien
gggtcaggtagaactcaagtgtatggcatgctg

SEQ ID NO: 397666 - DNA, 33 bp, Homo sapien
gggtcaggtagaactcgagtgtatggcatgctg

SEQ ID NO: 397667 - DNA, 33 bp, Homo sapien
ttccatggaggcccaacgccaggtttcttccgg

SEQ ID NO: 397668 - DNA, 33 bp, Homo sapien
ttccatggaggcccaatgccaggtttcttccgg

SEQ ID NO: 397669 - DNA, 33 bp, Homo sapien
actcggatgagcctaaccattggagtcttcatt

SEQ ID NO: 397670 - DNA, 33 bp, Homo sapien
actcggatgagcctaatcattggagtcttcatt

SEQ ID NO: 397671 - DNA, 33 bp, Homo sapien
acatggagttagagcaaatcagaggaaaccaga

SEQ ID NO: 397672 - DNA, 33 bp, Homo sapien
acatggagttagagcatatcagaggaaaccaga

SEQ ID NO: 397673 - DNA, 33 bp, Homo sapien
gctgggttaatgtttcacagaaagttgatcact

SEQ ID NO: 397674 - DNA, 33 bp, Homo sapien
gctgggttaatgtttcgcagaaagttgatcact

SEQ ID NO: 397675 - DNA, 33 bp, Homo sapien
caccttgcccggctcaatataactcattttaaa

SEQ ID NO: 397676 - DNA, 33 bp, Homo sapien
caccttgcccggctcagtataactcattttaaa

SEQ ID NO: 397677 - DNA, 33 bp, Homo sapien
cagggaagcagagatacatttgtatacacacag

SEQ ID NO: 397678 - DNA, 33 bp, Homo sapien
cagggaagcagagatatatttgtatacacacag

SEQ ID NO: 397679 - DNA, 33 bp, Homo sapien
agagaaatcccaagggaagtccaaagagaagtt

SEQ ID NO: 397680 - DNA, 33 bp, Homo sapien
agagaaatcccaagggcagtccaaagagaagtt

SEQ ID NO: 397681 - DNA, 33 bp, Homo sapien
ccaccctggtccagcgcaccctaatctctcact

SEQ ID NO: 397682 - DNA, 33 bp, Homo sapien
ccaccctggtccagcgtaccctaatctctcact

SEQ ID NO: 397683 - DNA, 33 bp, Homo sapien
gccatgccagtgcctcacaaggtacaatctaac

SEQ ID NO: 397684 - DNA, 33 bp, Homo sapien
gccatgccagtgcctcgcaaggtacaatctaac

SEQ ID NO: 397685 - DNA, 33 bp, Homo sapien
agtaggaggttgagaacagacttttgtccacag

SEQ ID NO: 397686 - DNA, 33 bp, Homo sapien
agtaggaggttgagaagagacttttgtccacag

SEQ ID NO: 397687 - DNA, 33 bp, Homo sapien
agtatatatacatccacagagagtattttgatc

SEQ ID NO: 397688 - DNA, 33 bp, Homo sapien
agtatatatacatccatagagagtattttgatc

SEQ ID NO: 397689 - DNA, 33 bp, Homo sapien
ctggcaaaacaaaaagaatgtcagtgcccgact

SEQ ID NO: 397690 - DNA, 33 bp, Homo sapien
ctggcaaaacaaaaaggatgtcagtgcccgact

SEQ ID NO: 397691 - DNA, 33 bp, Homo sapien
caagtatcataccgcaccctctggaacatcata

SEQ ID NO: 397692 - DNA, 33 bp, Homo sapien
caagtatcataccgcatcctctggaacatcata

SEQ ID NO: 397693 - DNA, 33 bp, Homo sapien
aacacacatacaaataccaaagaacaaaacaaa

SEQ ID NO: 397694 - DNA, 33 bp, Homo sapien
aacacacatacaaatagcaaagaacaaaacaaa

SEQ ID NO: 397695 - DNA, 33 bp, Homo sapien
tttattatgttaaaaaacaccataaataaagta

SEQ ID NO: 397696 - DNA, 33 bp, Homo sapien
tttattatgttaaaaaccaccataaataaagta

SEQ ID NO: 397697 - DNA, 33 bp, Homo sapien
gtgagcttgattccaaagacaatacaaaaccac

SEQ ID NO: 397698 - DNA, 33 bp, Homo sapien
gtgagcttgattccaaggacaatacaaaaccac

SEQ ID NO: 397699 - DNA, 33 bp, Homo sapien
gcccaatttctataaacatcgattcatcaattt

SEQ ID NO: 397700 - DNA, 33 bp, Homo sapien
gcccaatttctataaatatcgattcatcaattt

SEQ ID NO: 397701 - DNA, 33 bp, Homo sapien
actcttgagggacatcaaatagctgaaacaatt

SEQ ID NO: 397702 - DNA, 33 bp, Homo sapien
actcttgagggacatcgaatagctgaaacaatt

SEQ ID NO: 397703 - DNA, 33 bp, Homo sapien
atatagtttagaacacagatgaacttattggta

SEQ ID NO: 397704 - DNA, 33 bp, Homo sapien
atatagtttagaacacggatgaacttattggta

SEQ ID NO: 397705 - DNA, 33 bp, Homo sapien
ctgttttaccatagaaacttgctatagaaaaga

SEQ ID NO: 397706 - DNA, 33 bp, Homo sapien
ctgttttaccatagaagcttgctatagaaaaga

SEQ ID NO: 397707 - DNA, 33 bp, Homo sapien
acagctttacagagaaatgaagacttaagtaga

SEQ ID NO: 397708 - DNA, 33 bp, Homo sapien
acagctttacagagaagtgaagacttaagtaga

SEQ ID NO: 397709 - DNA, 33 bp, Homo sapien
tacttggagggttatggacatgttaaagggcaa

SEQ ID NO: 397710 - DNA, 33 bp, Homo sapien
tacttggagggttatgtacatgttaaagggcaa

SEQ ID NO: 397711 - DNA, 33 bp, Homo sapien
acatggctaccagaaaagataaaggttaacaac

SEQ ID NO: 397712 - DNA, 33 bp, Homo sapien
acatggctaccagaaaggataaaggttaacaac

SEQ ID NO: 397713 - DNA, 33 bp, Homo sapien
tctcccctgggaccaacacttctcttccagcct

SEQ ID NO: 397714 - DNA, 33 bp, Homo sapien
tctcccctgggaccaatacttctcttccagcct

SEQ ID NO: 397715 - DNA, 33 bp, Homo sapien
gcaaatcaacataatcagaatggatgagatcct

SEQ ID NO: 397716 - DNA, 33 bp, Homo sapien
gcaaatcaacataatcggaatggatgagatcct

SEQ ID NO: 397717 - DNA, 33 bp, Homo sapien
ttttgcaatttgtcaccgctgtcattcccaggc

SEQ ID NO: 397718 - DNA, 33 bp, Homo sapien
ttttgcaatttgtcactgctgtcattcccaggc

SEQ ID NO: 397719 - DNA, 33 bp, Homo sapien
aaacagaaagtcaacacgaatgggaagaaatgg

SEQ ID NO: 397720 - DNA, 33 bp, Homo sapien
aaacagaaagtcaacatgaatgggaagaaatgg

SEQ ID NO: 397721 - DNA, 33 bp, Homo sapien
cagttgtcccctttgacgattctccttgcaagc

SEQ ID NO: 397722 - DNA, 33 bp, Homo sapien
cagttgtcccctttgatgattctccttgcaagc

SEQ ID NO: 397723 - DNA, 33 bp, Homo sapien
aatacctactgctaaacggtggaaaaatgtaag

SEQ ID NO: 397724 - DNA, 33 bp, Homo sapien
aatacctactgctaaatggtggaaaaatgtaag

SEQ ID NO: 397725 - DNA, 33 bp, Homo sapien
ccatcttctgcatccaatacaacatccgctctt

SEQ ID NO: 397726 - DNA, 33 bp, Homo sapien
ccatcttctgcatccagtacaacatccgctctt

SEQ ID NO: 397727 - DNA, 33 bp, Homo sapien
tttccctgtttcactgcattttgccatatgggg

SEQ ID NO: 397728 - DNA, 33 bp, Homo sapien
tttccctgtttcactgtattttgccatatgggg

SEQ ID NO: 397729 - DNA, 33 bp, Homo sapien
gtgcttagtttccctgaaatgttatggagggag

SEQ ID NO: 397730 - DNA, 33 bp, Homo sapien
gtgcttagtttccctggaatgttatggagggag

SEQ ID NO: 397731 - DNA, 33 bp, Homo sapien
taagtatcagagaaaactgagtcattcagaaaa

SEQ ID NO: 397732 - DNA, 33 bp, Homo sapien
taagtatcagagaaaattgagtcattcagaaaa

SEQ ID NO: 397733 - DNA, 33 bp, Homo sapien
tcatgcacagtagccaaaaagttcatcggctga

SEQ ID NO: 397734 - DNA, 33 bp, Homo sapien
tcatgcacagtagccagaaagttcatcggctga

SEQ ID NO: 397735 - DNA, 33 bp, Homo sapien
ctggtgactagtgagcacccagcaaatattagc

SEQ ID NO: 397736 - DNA, 33 bp, Homo sapien
ctggtgactagtgagcgcccagcaaatattagc

SEQ ID NO: 397737 - DNA, 33 bp, Homo sapien
cagtgactgactccccaccatacgtcctgctca

SEQ ID NO: 397738 - DNA, 33 bp, Homo sapien
cagtgactgactccccgccatacgtcctgctca

SEQ ID NO: 397739 - DNA, 33 bp, Homo sapien
acgtgtttggtgagcacgtaggatagacccaat

SEQ ID NO: 397740 - DNA, 33 bp, Homo sapien
acgtgtttggtgagcaggtaggatagacccaat

SEQ ID NO: 397741 - DNA, 33 bp, Homo sapien
attttatctttcaggcaacgaaatacaagtttg

SEQ ID NO: 397742 - DNA, 33 bp, Homo sapien
attttatctttcaggcgacgaaatacaagtttg

SEQ ID NO: 397743 - DNA, 33 bp, Homo sapien
ctttttctacccccaactgattgagatcaatct

SEQ ID NO: 397744 - DNA, 33 bp, Homo sapien
ctttttctacccccaagtgattgagatcaatct

SEQ ID NO: 397745 - DNA, 33 bp, Homo sapien
ctgaaagcatcttaaacagtgatttgtgaagag

SEQ ID NO: 397746 - DNA, 33 bp, Homo sapien
ctgaaagcatcttaaatagtgatttgtgaagag

SEQ ID NO: 397747 - DNA, 33 bp, Homo sapien
ggacttggagtcaaaaaatgtttgttttagctc

SEQ ID NO: 397748 - DNA, 33 bp, Homo sapien
ggacttggagtcaaaagatgtttgttttagctc

SEQ ID NO: 397749 - DNA, 33 bp, Homo sapien
aaactgttaaacttaccgaatagctgtatgaat

SEQ ID NO: 397750 - DNA, 33 bp, Homo sapien
aaactgttaaacttactgaatagctgtatgaat

SEQ ID NO: 397751 - DNA, 33 bp, Homo sapien
cagatacactcttcataacatctttcaccaaaa

SEQ ID NO: 397752 - DNA, 33 bp, Homo sapien
cagatacactcttcatgacatctttcaccaaaa

SEQ ID NO: 397753 - DNA, 33 bp, Homo sapien
aacgtctaacaatacaatcgtgtgttgcttacc

SEQ ID NO: 397754 - DNA, 33 bp, Homo sapien
aacgtctaacaatacagtcgtgtgttgcttacc

SEQ ID NO: 397755 - DNA, 33 bp, Homo sapien
aaaggtcaagtaagtacattgaggtggtgaaga

SEQ ID NO: 397756 - DNA, 33 bp, Homo sapien
aaaggtcaagtaagtagattgaggtggtgaaga

SEQ ID NO: 397757 - DNA, 33 bp, Homo sapien
aaaaaaatacatctgaactatttggcacacttt

SEQ ID NO: 397758 - DNA, 33 bp, Homo sapien
aaaaaaatacatctgatctatttggcacacttt

SEQ ID NO: 397759 - DNA, 33 bp, Homo sapien
tttggtgatacagaaactgaaatactagagaat

SEQ ID NO: 397760 - DNA, 33 bp, Homo sapien
tttggtgatacagaaagtgaaatactagagaat

SEQ ID NO: 397761 - DNA, 33 bp, Homo sapien
tctgaaaagttcactacgtcagctttgtcaagt

SEQ ID NO: 397762 - DNA, 33 bp, Homo sapien
tctgaaaagttcactatgtcagctttgtcaagt

SEQ ID NO: 397763 - DNA, 33 bp, Homo sapien
agaggtactgtaaggacgcactttgtttttgat

SEQ ID NO: 397764 - DNA, 33 bp, Homo sapien
agaggtactgtaaggatgcactttgtttttgat

SEQ ID NO: 397765 - DNA, 33 bp, Homo sapien
cattattactgcattcaaagtatgaatttctac

SEQ ID NO: 397766 - DNA, 33 bp, Homo sapien
cattattactgcattcgaagtatgaatttctac

SEQ ID NO: 397767 - DNA, 33 bp, Homo sapien
ttggggactgtgttaacggctgaaaattcagaa

SEQ ID NO: 397768 - DNA, 33 bp, Homo sapien
ttggggactgtgttaagggctgaaaattcagaa

SEQ ID NO: 397769 - DNA, 33 bp, Homo sapien
gtgtcagttaagtttaaagtgcagctatttttc

SEQ ID NO: 397770 - DNA, 33 bp, Homo sapien
gtgtcagttaagtttatagtgcagctatttttc

SEQ ID NO: 397771 - DNA, 33 bp, Homo sapien
caacagtttggaaatactactagtggttcattt

SEQ ID NO: 397772 - DNA, 33 bp, Homo sapien
caacagtttggaaatattactagtggttcattt

SEQ ID NO: 397773 - DNA, 33 bp, Homo sapien
gcaaatccataagcaactctttcttacttactt

SEQ ID NO: 397774 - DNA, 33 bp, Homo sapien
gcaaatccataagcaattctttcttacttactt

SEQ ID NO: 397775 - DNA, 33 bp, Homo sapien
caatgcattcctagaaaacaatatcaacactca

SEQ ID NO: 397776 - DNA, 33 bp, Homo sapien
caatgcattcctagaagacaatatcaacactca

SEQ ID NO: 397777 - DNA, 33 bp, Homo sapien
aaaagatttaaaaatggcagaccaatataggat

SEQ ID NO: 397778 - DNA, 33 bp, Homo sapien
aaaagatttaaaaatgtcagaccaatataggat

SEQ ID NO: 397779 - DNA, 33 bp, Homo sapien
ctcatcaatgggagacggatttaaaacattatg

SEQ ID NO: 397780 - DNA, 33 bp, Homo sapien
ctcatcaatgggagactgatttaaaacattatg

SEQ ID NO: 397781 - DNA, 33 bp, Homo sapien
aagataccacaactgactactcacttaaaagga

SEQ ID NO: 397782 - DNA, 33 bp, Homo sapien
aagataccacaactgattactcacttaaaagga

SEQ ID NO: 397783 - DNA, 33 bp, Homo sapien
actttggttttcagtgccaacgaaagaagctta

SEQ ID NO: 397784 - DNA, 33 bp, Homo sapien
actttggttttcagtggcaacgaaagaagctta

SEQ ID NO: 397785 - DNA, 33 bp, Homo sapien
agaaaatccaagtgagcaaaaccaaggtaaaat

SEQ ID NO: 397786 - DNA, 33 bp, Homo sapien
agaaaatccaagtgagtaaaaccaaggtaaaat

SEQ ID NO: 397787 - DNA, 33 bp, Homo sapien
cacttaatattcaaaccgtctttttaactcagc

SEQ ID NO: 397788 - DNA, 33 bp, Homo sapien
cacttaatattcaaactgtctttttaactcagc

SEQ ID NO: 397789 - DNA, 33 bp, Homo sapien
tgggcgtataaaaacacatgggtgtctgaatca

SEQ ID NO: 397790 - DNA, 33 bp, Homo sapien
tgggcgtataaaaacagatgggtgtctgaatca

SEQ ID NO: 397791 - DNA, 33 bp, Homo sapien
ctctcttcctataggcagaaggccaaggtccca

SEQ ID NO: 397792 - DNA, 33 bp, Homo sapien
ctctcttcctataggcggaaggccaaggtccca

SEQ ID NO: 397793 - DNA, 33 bp, Homo sapien
ctagcaatgtgactccaagctagttccctcatc

SEQ ID NO: 397794 - DNA, 33 bp, Homo sapien
ctagcaatgtgactccgagctagttccctcatc

SEQ ID NO: 397795 - DNA, 33 bp, Homo sapien
gggatctcttgactgaacattcctttaacactt

SEQ ID NO: 397796 - DNA, 33 bp, Homo sapien
gggatctcttgactgagcattcctttaacactt

SEQ ID NO: 397797 - DNA, 33 bp, Homo sapien
ctataccattgttggaagaactggaaaaattta

SEQ ID NO: 397798 - DNA, 33 bp, Homo sapien
ctataccattgttggaggaactggaaaaattta

SEQ ID NO: 397799 - DNA, 33 bp, Homo sapien
attgtgcaactgctacagaggataatttagaaa

SEQ ID NO: 397800 - DNA, 33 bp, Homo sapien
attgtgcaactgctacggaggataatttagaaa

SEQ ID NO: 397801 - DNA, 33 bp, Homo sapien
tattttaatggttctacggtaccccacttatga

SEQ ID NO: 397802 - DNA, 33 bp, Homo sapien
tattttaatggttctatggtaccccacttatga

SEQ ID NO: 397803 - DNA, 33 bp, Homo sapien
cttaattaaggcaaacaggccagaaccttgctt

SEQ ID NO: 397804 - DNA, 33 bp, Homo sapien
cttaattaaggcaaacgggccagaaccttgctt

SEQ ID NO: 397805 - DNA, 33 bp, Homo sapien
caaagggacaaagaaaccatagttggctgttga

SEQ ID NO: 397806 - DNA, 33 bp, Homo sapien
caaagggacaaagaaatcatagttggctgttga

SEQ ID NO: 397807 - DNA, 33 bp, Homo sapien
caccaattttcctctcaatttggacatttttct

SEQ ID NO: 397808 - DNA, 33 bp, Homo sapien
caccaattttcctctccatttggacatttttct

SEQ ID NO: 397809 - DNA, 33 bp, Homo sapien
aagctttagtatatctcagaactacatgtgact

SEQ ID NO: 397810 - DNA, 33 bp, Homo sapien
aagctttagtatatctgagaactacatgtgact

SEQ ID NO: 397811 - DNA, 33 bp, Homo sapien
atagaaaacaagcaaaacaaccatgctctggtc

SEQ ID NO: 397812 - DNA, 33 bp, Homo sapien
atagaaaacaagcaaaccaaccatgctctggtc

SEQ ID NO: 397813 - DNA, 33 bp, Homo sapien
tgtgtttaaaaatgtacatataggccaggcgtg

SEQ ID NO: 397814 - DNA, 33 bp, Homo sapien
tgtgtttaaaaatgtatatataggccaggcgtg

SEQ ID NO: 397815 - DNA, 33 bp, Homo sapien
ggagctattttgaaaaaatttcctgacattaga

SEQ ID NO: 397816 - DNA, 33 bp, Homo sapien
ggagctattttgaaaacatttcctgacattaga

SEQ ID NO: 397817 - DNA, 33 bp, Homo sapien
gtaaaacagatgataaactctttcagaagagta

SEQ ID NO: 397818 - DNA, 33 bp, Homo sapien
gtaaaacagatgataatctctttcagaagagta

SEQ ID NO: 397819 - DNA, 33 bp, Homo sapien
aactgcagtgttctcaatagtgtatctaatgaa

SEQ ID NO: 397820 - DNA, 33 bp, Homo sapien
aactgcagtgttctcagtagtgtatctaatgaa

SEQ ID NO: 397821 - DNA, 33 bp, Homo sapien
gagttaggagaagttcgaatttctgacagcaac

SEQ ID NO: 397822 - DNA, 33 bp, Homo sapien
gagttaggagaagttctaatttctgacagcaac

SEQ ID NO: 397823 - DNA, 33 bp, Homo sapien
tatatgttggtttaagccgccaggtttgtggga

SEQ ID NO: 397824 - DNA, 33 bp, Homo sapien
tatatgttggtttaagtcgccaggtttgtggga

SEQ ID NO: 397825 - DNA, 33 bp, Homo sapien
cttcactcaaaaagaacgagtagtgccttccac

SEQ ID NO: 397826 - DNA, 33 bp, Homo sapien
cttcactcaaaaagaatgagtagtgccttccac

SEQ ID NO: 397827 - DNA, 33 bp, Homo sapien
ctttcctagatcagaaaaaacagtatctgacca

SEQ ID NO: 397828 - DNA, 33 bp, Homo sapien
ctttcctagatcagaagaaacagtatctgacca

SEQ ID NO: 397829 - DNA, 33 bp, Homo sapien
gcaacattttacatacacaagcatcaaactctg

SEQ ID NO: 397830 - DNA, 33 bp, Homo sapien
gcaacattttacatacgcaagcatcaaactctg

SEQ ID NO: 397831 - DNA, 33 bp, Homo sapien
acaattgtaagttttccaataatcaagtatcca

SEQ ID NO: 397832 - DNA, 33 bp, Homo sapien
acaattgtaagttttctaataatcaagtatcca

SEQ ID NO: 397833 - DNA, 33 bp, Homo sapien
tggatgtccaaagtaaccctagggaggagagct

SEQ ID NO: 397834 - DNA, 33 bp, Homo sapien
tggatgtccaaagtaatcctagggaggagagct

SEQ ID NO: 397835 - DNA, 33 bp, Homo sapien
tcttttagaagttcagactcagttgtcttttgc

SEQ ID NO: 397836 - DNA, 33 bp, Homo sapien
tcttttagaagttcagtctcagttgtcttttgc

SEQ ID NO: 397837 - DNA, 33 bp, Homo sapien
acttctaaaagaaagccgcaccaccgcggtctg

SEQ ID NO: 397838 - DNA, 33 bp, Homo sapien
acttctaaaagaaagctgcaccaccgcggtctg

SEQ ID NO: 397839 - DNA, 33 bp, Homo sapien
ctgttcagattttgtaccctcgatgcctattgc

SEQ ID NO: 397840 - DNA, 33 bp, Homo sapien
ctgttcagattttgtatcctcgatgcctattgc

SEQ ID NO: 397841 - DNA, 33 bp, Homo sapien
atagtccagatgaggacgggtgaaggggtttct

SEQ ID NO: 397842 - DNA, 33 bp, Homo sapien
atagtccagatgaggatgggtgaaggggtttct

SEQ ID NO: 397843 - DNA, 33 bp, Homo sapien
actctaattgaggccacgtaggtgctagcacag

SEQ ID NO: 397844 - DNA, 33 bp, Homo sapien
actctaattgaggccaggtaggtgctagcacag

SEQ ID NO: 397845 - DNA, 33 bp, Homo sapien
tttattggcaaaccaccgggcgccaggctctgt

SEQ ID NO: 397846 - DNA, 33 bp, Homo sapien
tttattggcaaaccactgggcgccaggctctgt

SEQ ID NO: 397847 - DNA, 33 bp, Homo sapien
aaaggtagttaattgaaaggctatcaactgggt

SEQ ID NO: 397848 - DNA, 33 bp, Homo sapien
aaaggtagttaattgagaggctatcaactgggt

SEQ ID NO: 397849 - DNA, 33 bp, Homo sapien
ctgcctcctgcacatcactgtaatgaaatcacc

SEQ ID NO: 397850 - DNA, 33 bp, Homo sapien
ctgcctcctgcacatcgctgtaatgaaatcacc

SEQ ID NO: 397851 - DNA, 33 bp, Homo sapien
cgacctcaccctcagtcaacaattctctgacat

SEQ ID NO: 397852 - DNA, 33 bp, Homo sapien
cgacctcaccctcagttaacaattctctgacat

SEQ ID NO: 397853 - DNA, 33 bp, Homo sapien
cattgaccacccagcaaccacatttaagaactg

SEQ ID NO: 397854 - DNA, 33 bp, Homo sapien
cattgaccacccagcacccacatttaagaactg

SEQ ID NO: 397855 - DNA, 33 bp, Homo sapien
ggaaatgatgtagaaacagatgagaagtcagtc

SEQ ID NO: 397856 - DNA, 33 bp, Homo sapien
ggaaatgatgtagaaagagatgagaagtcagtc

SEQ ID NO: 397857 - DNA, 33 bp, Homo sapien
ctgcatcccttctacactgatgggagcgatctt

SEQ ID NO: 397858 - DNA, 33 bp, Homo sapien
ctgcatcccttctacattgatgggagcgatctt

SEQ ID NO: 397859 - DNA, 33 bp, Homo sapien
ccaccctcttcttctcacggagatcctttgtga

SEQ ID NO: 397860 - DNA, 33 bp, Homo sapien
ccaccctcttcttctcgcggagatcctttgtga

SEQ ID NO: 397861 - DNA, 33 bp, Homo sapien
aggtgctcattctccacgagtgggtaaccctaa

SEQ ID NO: 397862 - DNA, 33 bp, Homo sapien
aggtgctcattctccatgagtgggtaaccctaa

SEQ ID NO: 397863 - DNA, 33 bp, Homo sapien
cctgctgcctgacccacagtaggtgctaataat

SEQ ID NO: 397864 - DNA, 33 bp, Homo sapien
cctgctgcctgacccatagtaggtgctaataat

SEQ ID NO: 397865 - DNA, 33 bp, Homo sapien
acgtctcagttgccgacaagaggcggagctgtg

SEQ ID NO: 397866 - DNA, 33 bp, Homo sapien
acgtctcagttgccgagaagaggcggagctgtg

SEQ ID NO: 397867 - DNA, 33 bp, Homo sapien
agcaaagagaatatgacgaaatatccccaaaca

SEQ ID NO: 397868 - DNA, 33 bp, Homo sapien
agcaaagagaatatgaggaaatatccccaaaca

SEQ ID NO: 397869 - DNA, 33 bp, Homo sapien
gcttcccacctcttcaccaagtgcctagcgcag

SEQ ID NO: 397870 - DNA, 33 bp, Homo sapien
gcttcccacctcttcatcaagtgcctagcgcag

SEQ ID NO: 397871 - DNA, 33 bp, Homo sapien
gctctctcctcctgtaccccgagtcctcaagct

SEQ ID NO: 397872 - DNA, 33 bp, Homo sapien
gctctctcctcctgtatcccgagtcctcaagct

SEQ ID NO: 397873 - DNA, 33 bp, Homo sapien
ttgacccactacgtgacgtgagaaagaagaatt

SEQ ID NO: 397874 - DNA, 33 bp, Homo sapien
ttgacccactacgtgatgtgagaaagaagaatt

SEQ ID NO: 397875 - DNA, 33 bp, Homo sapien
tcactgcagatacaatcaagataaggatcttga

SEQ ID NO: 397876 - DNA, 33 bp, Homo sapien
tcactgcagatacaattaagataaggatcttga

SEQ ID NO: 397877 - DNA, 33 bp, Homo sapien
tgggtcttccacaggaataatacatggtgttat

SEQ ID NO: 397878 - DNA, 33 bp, Homo sapien
tgggtcttccacaggagtaatacatggtgttat

SEQ ID NO: 397879 - DNA, 33 bp, Homo sapien
aactgtgtgccgtgagaaccctgcatccgggta

SEQ ID NO: 397880 - DNA, 33 bp, Homo sapien
aactgtgtgccgtgaggaccctgcatccgggta

SEQ ID NO: 397881 - DNA, 33 bp, Homo sapien
gatggatttcctgaaacgtgggactttcagtgc

SEQ ID NO: 397882 - DNA, 33 bp, Homo sapien
gatggatttcctgaaatgtgggactttcagtgc

SEQ ID NO: 397883 - DNA, 33 bp, Homo sapien
taaggcctctggtcaacgataggatattaataa

SEQ ID NO: 397884 - DNA, 33 bp, Homo sapien
taaggcctctggtcaatgataggatattaataa

SEQ ID NO: 397885 - DNA, 33 bp, Homo sapien
agttgcatttaagaaaagctatgaattcttccc

SEQ ID NO: 397886 - DNA, 33 bp, Homo sapien
agttgcatttaagaaaggctatgaattcttccc

SEQ ID NO: 397887 - DNA, 33 bp, Homo sapien
cctcacattgtctccacgtgtcaaaaatttggg

SEQ ID NO: 397888 - DNA, 33 bp, Homo sapien
cctcacattgtctccatgtgtcaaaaatttggg

SEQ ID NO: 397889 - DNA, 33 bp, Homo sapien
ggaggtgctcctggaaaccccaactgcaacttc

SEQ ID NO: 397890 - DNA, 33 bp, Homo sapien
ggaggtgctcctggaagccccaactgcaacttc

SEQ ID NO: 397891 - DNA, 33 bp, Homo sapien
agaccaatgaggtaggcatttggcattattcca

SEQ ID NO: 397892 - DNA, 33 bp, Homo sapien
agaccaatgaggtaggtatttggcattattcca

SEQ ID NO: 397893 - DNA, 33 bp, Homo sapien
caggctttcaacagggccatccagtcctacttt

SEQ ID NO: 397894 - DNA, 33 bp, Homo sapien
caggctttcaacagggtcatccagtcctacttt

SEQ ID NO: 397895 - DNA, 33 bp, Homo sapien
cctagaactgttaagaacatccaaatacctgtt

SEQ ID NO: 397896 - DNA, 33 bp, Homo sapien
cctagaactgttaagagcatccaaatacctgtt

SEQ ID NO: 397897 - DNA, 33 bp, Homo sapien
cagctcaggctattacacttctccctatttaac

SEQ ID NO: 397898 - DNA, 33 bp, Homo sapien
cagctcaggctattacgcttctccctatttaac

SEQ ID NO: 397899 - DNA, 33 bp, Homo sapien
tgtctctctgtatggccagaccctttggttttt

SEQ ID NO: 397900 - DNA, 33 bp, Homo sapien
tgtctctctgtatggctagaccctttggttttt

SEQ ID NO: 397901 - DNA, 33 bp, Homo sapien
gtcataatctggaaacgcttgggaaagcctaga

SEQ ID NO: 397902 - DNA, 33 bp, Homo sapien
gtcataatctggaaactcttgggaaagcctaga

SEQ ID NO: 397903 - DNA, 33 bp, Homo sapien
ttgctaagtaggagccaccaggacagtgatctc

SEQ ID NO: 397904 - DNA, 33 bp, Homo sapien
ttgctaagtaggagccgccaggacagtgatctc

SEQ ID NO: 397905 - DNA, 33 bp, Homo sapien
attctgtagcatccaaatagcagatctaggatg

SEQ ID NO: 397906 - DNA, 33 bp, Homo sapien
attctgtagcatccaagtagcagatctaggatg

SEQ ID NO: 397907 - DNA, 33 bp, Homo sapien
agggtgttggtggaaagttcttttccgtggcat

SEQ ID NO: 397908 - DNA, 33 bp, Homo sapien
agggtgttggtggaaatttcttttccgtggcat

SEQ ID NO: 397909 - DNA, 33 bp, Homo sapien
atcactaaagggttggacatacagggtatctcc

SEQ ID NO: 397910 - DNA, 33 bp, Homo sapien
atcactaaagggttgggcatacagggtatctcc

SEQ ID NO: 397911 - DNA, 33 bp, Homo sapien
ctcgtaggcattggaaattataactcaagccaa

SEQ ID NO: 397912 - DNA, 33 bp, Homo sapien
ctcgtaggcattggaacttataactcaagccaa

SEQ ID NO: 397913 - DNA, 33 bp, Homo sapien
ctcttcagaattcataagttgaagtcttttttt

SEQ ID NO: 397914 - DNA, 33 bp, Homo sapien
ctcttcagaattcatatgttgaagtcttttttt

SEQ ID NO: 397915 - DNA, 33 bp, Homo sapien
gccaagaatcagaaacaattcccaacggcttcc

SEQ ID NO: 397916 - DNA, 33 bp, Homo sapien
gccaagaatcagaaaccattcccaacggcttcc

SEQ ID NO: 397917 - DNA, 33 bp, Homo sapien
tgagaattgtaaaacaagaggcactcacgaata

SEQ ID NO: 397918 - DNA, 33 bp, Homo sapien
tgagaattgtaaaacaggaggcactcacgaata

SEQ ID NO: 397919 - DNA, 33 bp, Homo sapien
cccaacctgcaaaatccatatgctcagaagtct

SEQ ID NO: 397920 - DNA, 33 bp, Homo sapien
cccaacctgcaaaatctatatgctcagaagtct

SEQ ID NO: 397921 - DNA, 33 bp, Homo sapien
caccaggcatcatgctaacagctttacatgtag

SEQ ID NO: 397922 - DNA, 33 bp, Homo sapien
caccaggcatcatgctgacagctttacatgtag

SEQ ID NO: 397923 - DNA, 33 bp, Homo sapien
ggctgcaaaggtgaagaaccagtggacgagtga

SEQ ID NO: 397924 - DNA, 33 bp, Homo sapien
ggctgcaaaggtgaaggaccagtggacgagtga

SEQ ID NO: 397925 - DNA, 33 bp, Homo sapien
attttgaaaatgcaaacgcctgggccccaaacc

SEQ ID NO: 397926 - DNA, 33 bp, Homo sapien
attttgaaaatgcaaatgcctgggccccaaacc

SEQ ID NO: 397927 - DNA, 33 bp, Homo sapien
gctctcttcccacttacatttctctttcattgc

SEQ ID NO: 397928 - DNA, 33 bp, Homo sapien
gctctcttcccacttagatttctctttcattgc

SEQ ID NO: 397929 - DNA, 33 bp, Homo sapien
tggatggcactgctgccgaagaaagtgtaaagt

SEQ ID NO: 397930 - DNA, 33 bp, Homo sapien
tggatggcactgctgctgaagaaagtgtaaagt

SEQ ID NO: 397931 - DNA, 33 bp, Homo sapien
atagaaaaggaacagacaaggcaagagaagaaa

SEQ ID NO: 397932 - DNA, 33 bp, Homo sapien
atagaaaaggaacagagaaggcaagagaagaaa

SEQ ID NO: 397933 - DNA, 33 bp, Homo sapien
ttatctgtgcagtgacaatactatcacttacct

SEQ ID NO: 397934 - DNA, 33 bp, Homo sapien
ttatctgtgcagtgacgatactatcacttacct

SEQ ID NO: 397935 - DNA, 33 bp, Homo sapien
gtaactatactaaagactcagcccttgcccctg

SEQ ID NO: 397936 - DNA, 33 bp, Homo sapien
gtaactatactaaagattcagcccttgcccctg

SEQ ID NO: 397937 - DNA, 33 bp, Homo sapien
tgcagtgggatgttaacgtccttatttttcttg

SEQ ID NO: 397938 - DNA, 33 bp, Homo sapien
tgcagtgggatgttaatgtccttatttttcttg

SEQ ID NO: 397939 - DNA, 33 bp, Homo sapien
tactcaagtggccggcagactaaatcttagact

SEQ ID NO: 397940 - DNA, 33 bp, Homo sapien
tactcaagtggccggcggactaaatcttagact

SEQ ID NO: 397941 - DNA, 33 bp, Homo sapien
tgccttccaagtctccaaagtccattattccac

SEQ ID NO: 397942 - DNA, 33 bp, Homo sapien
tgccttccaagtctccgaagtccattattccac

SEQ ID NO: 397943 - DNA, 33 bp, Homo sapien
cttttccacacatcagaagccaggaggaggttg

SEQ ID NO: 397944 - DNA, 33 bp, Homo sapien
cttttccacacatcaggagccaggaggaggttg

SEQ ID NO: 397945 - DNA, 33 bp, Homo sapien
gcctgtgctccaccacggaagattctaataaag

SEQ ID NO: 397946 - DNA, 33 bp, Homo sapien
gcctgtgctccaccactgaagattctaataaag

SEQ ID NO: 397947 - DNA, 33 bp, Homo sapien
tggtggagcacaggcactgacattttttaaaag

SEQ ID NO: 397948 - DNA, 33 bp, Homo sapien
tggtggagcacaggcattgacattttttaaaag

SEQ ID NO: 397949 - DNA, 33 bp, Homo sapien
ataccaggcttcaatacgaaaaaaataaaataa

SEQ ID NO: 397950 - DNA, 33 bp, Homo sapien
ataccaggcttcaatatgaaaaaaataaaataa

SEQ ID NO: 397951 - DNA, 33 bp, Homo sapien
agcaaacaaagatttgcagatttctgattccag

SEQ ID NO: 397952 - DNA, 33 bp, Homo sapien
agcaaacaaagatttggagatttctgattccag

SEQ ID NO: 397953 - DNA, 33 bp, Homo sapien
agtgctttgaaatacacgaaacaatactgtttg

SEQ ID NO: 397954 - DNA, 33 bp, Homo sapien
agtgctttgaaatacatgaaacaatactgtttg

SEQ ID NO: 397955 - DNA, 33 bp, Homo sapien
accatcaagagaagaacaattgcaagtcttaca

SEQ ID NO: 397956 - DNA, 33 bp, Homo sapien
accatcaagagaagaataattgcaagtcttaca

SEQ ID NO: 397957 - DNA, 33 bp, Homo sapien
tttaaaaatgagcaaacgatttgaagagacatt

SEQ ID NO: 397958 - DNA, 33 bp, Homo sapien
tttaaaaatgagcaaaggatttgaagagacatt

SEQ ID NO: 397959 - DNA, 33 bp, Homo sapien
gaatatttctccgctcacttcttgtattgttta

SEQ ID NO: 397960 - DNA, 33 bp, Homo sapien
gaatatttctccgctcgcttcttgtattgttta

SEQ ID NO: 397961 - DNA, 33 bp, Homo sapien
ccagaggatatatcagcctgagggaagcagatc

SEQ ID NO: 397962 - DNA, 33 bp, Homo sapien
ccagaggatatatcaggctgagggaagcagatc

SEQ ID NO: 397963 - DNA, 33 bp, Homo sapien
gaatgacaacagaccacgcacctaagaagacaa

SEQ ID NO: 397964 - DNA, 33 bp, Homo sapien
gaatgacaacagaccatgcacctaagaagacaa

SEQ ID NO: 397965 - DNA, 33 bp, Homo sapien
cagtaaatgaaatcaggacaagatgacttctgt

SEQ ID NO: 397966 - DNA, 33 bp, Homo sapien
cagtaaatgaaatcagtacaagatgacttctgt

SEQ ID NO: 397967 - DNA, 33 bp, Homo sapien
acatatggagagcttcacaatcacaataatatg

SEQ ID NO: 397968 - DNA, 33 bp, Homo sapien
acatatggagagcttcgcaatcacaataatatg

SEQ ID NO: 397969 - DNA, 33 bp, Homo sapien
tacctagaaaccacgacgcttacactaatccta

SEQ ID NO: 397970 - DNA, 33 bp, Homo sapien
tacctagaaaccacgatgcttacactaatccta

SEQ ID NO: 397971 - DNA, 33 bp, Homo sapien
cagatgccttcattgcccccagaggaacttttt

SEQ ID NO: 397972 - DNA, 33 bp, Homo sapien
cagatgccttcattgctcccagaggaacttttt

SEQ ID NO: 397973 - DNA, 33 bp, Homo sapien
caccaaccttcacatacggtagaattgttgagt

SEQ ID NO: 397974 - DNA, 33 bp, Homo sapien
caccaaccttcacatatggtagaattgttgagt

SEQ ID NO: 397975 - DNA, 33 bp, Homo sapien
ttcacactcttttataaaaactacctgtgagga

SEQ ID NO: 397976 - DNA, 33 bp, Homo sapien
ttcacactcttttatataaactacctgtgagga

SEQ ID NO: 397977 - DNA, 33 bp, Homo sapien
tctacacagtcttcatgaaatcaatcactggag

SEQ ID NO: 397978 - DNA, 33 bp, Homo sapien
tctacacagtcttcattaaatcaatcactggag

SEQ ID NO: 397979 - DNA, 33 bp, Homo sapien
aatcacttctgtgaacactcctgcatcatcatt

SEQ ID NO: 397980 - DNA, 33 bp, Homo sapien
aatcacttctgtgaacgctcctgcatcatcatt

SEQ ID NO: 397981 - DNA, 33 bp, Homo sapien
agggctgagagagccacaacgaggagaggggag

SEQ ID NO: 397982 - DNA, 33 bp, Homo sapien
agggctgagagagccataacgaggagaggggag

SEQ ID NO: 397983 - DNA, 33 bp, Homo sapien
gctattcaaagaaatcactgctgcactgtagat

SEQ ID NO: 397984 - DNA, 33 bp, Homo sapien
gctattcaaagaaatccctgctgcactgtagat

SEQ ID NO: 397985 - DNA, 33 bp, Homo sapien
atacctacagggcccaaagatggctctagaccc

SEQ ID NO: 397986 - DNA, 33 bp, Homo sapien
atacctacagggcccagagatggctctagaccc

SEQ ID NO: 397987 - DNA, 33 bp, Homo sapien
aaatagtgtctaagaaatcagcccatcaacctg

SEQ ID NO: 397988 - DNA, 33 bp, Homo sapien
aaatagtgtctaagaagtcagcccatcaacctg

SEQ ID NO: 397989 - DNA, 33 bp, Homo sapien
cagcattcatgttaaaatagggatcatcagact

SEQ ID NO: 397990 - DNA, 33 bp, Homo sapien
cagcattcatgttaaagtagggatcatcagact

SEQ ID NO: 397991 - DNA, 33 bp, Homo sapien
gttccaccagccatgactactgcttcggttgga

SEQ ID NO: 397992 - DNA, 33 bp, Homo sapien
gttccaccagccatgattactgcttcggttgga

SEQ ID NO: 397993 - DNA, 33 bp, Homo sapien
aaggaagatctgggaaagtttacaagtgggaag

SEQ ID NO: 397994 - DNA, 33 bp, Homo sapien
aaggaagatctgggaaggtttacaagtgggaag

SEQ ID NO: 397995 - DNA, 33 bp, Homo sapien
caaaatgtactggggaaggacagataggaggct

SEQ ID NO: 397996 - DNA, 33 bp, Homo sapien
caaaatgtactggggagggacagataggaggct

SEQ ID NO: 397997 - DNA, 33 bp, Homo sapien
aacggtggagaaataacgtgtggcaaagaatta

SEQ ID NO: 397998 - DNA, 33 bp, Homo sapien
aacggtggagaaataatgtgtggcaaagaatta

SEQ ID NO: 397999 - DNA, 33 bp, Homo sapien
tgattttcctcctatacgacaggctgctgcttc

SEQ ID NO: 398000 - DNA, 33 bp, Homo sapien
tgattttcctcctatatgacaggctgctgcttc

SEQ ID NO: 398001 - DNA, 33 bp, Homo sapien
gatacccaccgagctacatctcccaatgtcagt

SEQ ID NO: 398002 - DNA, 33 bp, Homo sapien
gatacccaccgagctatatctcccaatgtcagt

SEQ ID NO: 398003 - DNA, 33 bp, Homo sapien
gctttccatgctgcagaacaatcttttcaccct

SEQ ID NO: 398004 - DNA, 33 bp, Homo sapien
gctttccatgctgcagtacaatcttttcaccct

SEQ ID NO: 398005 - DNA, 33 bp, Homo sapien
aaccatcgcagtatgaagctcatcattccaaac

SEQ ID NO: 398006 - DNA, 33 bp, Homo sapien
aaccatcgcagtatgaggctcatcattccaaac

SEQ ID NO: 398007 - DNA, 33 bp, Homo sapien
ctgagtatagccaagacgagttcattcagagaa

SEQ ID NO: 398008 - DNA, 33 bp, Homo sapien
ctgagtatagccaagatgagttcattcagagaa

SEQ ID NO: 398009 - DNA, 33 bp, Homo sapien
tctttgtatgaaattcaagttaatgcaaggaag

SEQ ID NO: 398010 - DNA, 33 bp, Homo sapien
tctttgtatgaaattccagttaatgcaaggaag

SEQ ID NO: 398011 - DNA, 33 bp, Homo sapien
tgacatcaggatcaaaagttctacatccacaag

SEQ ID NO: 398012 - DNA, 33 bp, Homo sapien
tgacatcaggatcaaaggttctacatccacaag

SEQ ID NO: 398013 - DNA, 33 bp, Homo sapien
tttccctgacacatacaatgttagtggatacag

SEQ ID NO: 398014 - DNA, 33 bp, Homo sapien
tttccctgacacatacgatgttagtggatacag

SEQ ID NO: 398015 - DNA, 33 bp, Homo sapien
tacaatttctatgtgacgttcatgagcatggga

SEQ ID NO: 398016 - DNA, 33 bp, Homo sapien
tacaatttctatgtgaggttcatgagcatggga

SEQ ID NO: 398017 - DNA, 33 bp, Homo sapien
aaggagaaggagaagactctaagactagtggtt

SEQ ID NO: 398018 - DNA, 33 bp, Homo sapien
aaggagaaggagaagattctaagactagtggtt

SEQ ID NO: 398019 - DNA, 33 bp, Homo sapien
agactagtggttcctacagtatgtcctccagaa

SEQ ID NO: 398020 - DNA, 33 bp, Homo sapien
agactagtggttcctatagtatgtcctccagaa

SEQ ID NO: 398021 - DNA, 33 bp, Homo sapien
tgggtatgagctgtggacatttcttaccttcaa

SEQ ID NO: 398022 - DNA, 33 bp, Homo sapien
tgggtatgagctgtggtcatttcttaccttcaa

SEQ ID NO: 398023 - DNA, 33 bp, Homo sapien
cccagacttcagcttacgcggtatgcctgcaac

SEQ ID NO: 398024 - DNA, 33 bp, Homo sapien
cccagacttcagcttatgcggtatgcctgcaac

SEQ ID NO: 398025 - DNA, 33 bp, Homo sapien
taaagcaaaagtccaactgggttccaaactctg

SEQ ID NO: 398026 - DNA, 33 bp, Homo sapien
taaagcaaaagtccaattgggttccaaactctg

SEQ ID NO: 398027 - DNA, 33 bp, Homo sapien
ggcaccttctcattcaccaaatctagttcagat

SEQ ID NO: 398028 - DNA, 33 bp, Homo sapien
ggcaccttctcattcatcaaatctagttcagat

SEQ ID NO: 398029 - DNA, 33 bp, Homo sapien
tgataacattataacaaatcactaatgtattag

SEQ ID NO: 398030 - DNA, 33 bp, Homo sapien
tgataacattataacagatcactaatgtattag

SEQ ID NO: 398031 - DNA, 33 bp, Homo sapien
tcctctctcttggtaaatctgtttatcaggtta

SEQ ID NO: 398032 - DNA, 33 bp, Homo sapien
tcctctctcttggtaagtctgtttatcaggtta

SEQ ID NO: 398033 - DNA, 33 bp, Homo sapien
tcattcccacaatccaaacacgttgattggttt

SEQ ID NO: 398034 - DNA, 33 bp, Homo sapien
tcattcccacaatccagacacgttgattggttt

SEQ ID NO: 398035 - DNA, 33 bp, Homo sapien
gtcctacaaaactgtccccaactttagatgcta

SEQ ID NO: 398036 - DNA, 33 bp, Homo sapien
gtcctacaaaactgtctccaactttagatgcta

SEQ ID NO: 398037 - DNA, 33 bp, Homo sapien
ctcacggtttcaaagacggtacaaaggtggggt

SEQ ID NO: 398038 - DNA, 33 bp, Homo sapien
ctcacggtttcaaagatggtacaaaggtggggt

SEQ ID NO: 398039 - DNA, 33 bp, Homo sapien
gattggttggggctgaaataaaattataaggag

SEQ ID NO: 398040 - DNA, 33 bp, Homo sapien
gattggttggggctgagataaaattataaggag

SEQ ID NO: 398041 - DNA, 33 bp, Homo sapien
cgtaaggtcattagacaattagatacaggatac

SEQ ID NO: 398042 - DNA, 33 bp, Homo sapien
cgtaaggtcattagactattagatacaggatac

SEQ ID NO: 398043 - DNA, 33 bp, Homo sapien
acaaaggacacacctcagaaatattataaaaca

SEQ ID NO: 398044 - DNA, 33 bp, Homo sapien
acaaaggacacacctcggaaatattataaaaca

SEQ ID NO: 398045 - DNA, 33 bp, Homo sapien
atggtgccaactgtcaagagaactcccctagct

SEQ ID NO: 398046 - DNA, 33 bp, Homo sapien
atggtgccaactgtcaggagaactcccctagct

SEQ ID NO: 398047 - DNA, 33 bp, Homo sapien
gggtgggtatgcgaaaaccaggtgataaataga

SEQ ID NO: 398048 - DNA, 33 bp, Homo sapien
gggtgggtatgcgaaagccaggtgataaataga

SEQ ID NO: 398049 - DNA, 33 bp, Homo sapien
tatctatgcaggcaaactctaggccccaaggct

SEQ ID NO: 398050 - DNA, 33 bp, Homo sapien
tatctatgcaggcaaattctaggccccaaggct

SEQ ID NO: 398051 - DNA, 33 bp, Homo sapien
gattggtgtttgactgaatagctgggaattcta

SEQ ID NO: 398052 - DNA, 33 bp, Homo sapien
gattggtgtttgactgcatagctgggaattcta

SEQ ID NO: 398053 - DNA, 33 bp, Homo sapien
ctctacatgactcttgaaacttgatttactcct

SEQ ID NO: 398054 - DNA, 33 bp, Homo sapien
ctctacatgactcttgcaacttgatttactcct

SEQ ID NO: 398055 - DNA, 33 bp, Homo sapien
atttcgcaaggtctccaacatatgtaagcatga

SEQ ID NO: 398056 - DNA, 33 bp, Homo sapien
atttcgcaaggtctccgacatatgtaagcatga

SEQ ID NO: 398057 - DNA, 33 bp, Homo sapien
ccctggctagcacagtaaaactctgtctctact

SEQ ID NO: 398058 - DNA, 33 bp, Homo sapien
ccctggctagcacagtgaaactctgtctctact

SEQ ID NO: 398059 - DNA, 33 bp, Homo sapien
cacccaaaagctttaaacaatactcgtgctttg

SEQ ID NO: 398060 - DNA, 33 bp, Homo sapien
cacccaaaagctttaatcaatactcgtgctttg

SEQ ID NO: 398061 - DNA, 33 bp, Homo sapien
tacaattcgagtaaaaattaactagctgccttc

SEQ ID NO: 398062 - DNA, 33 bp, Homo sapien
tacaattcgagtaaaacttaactagctgccttc

SEQ ID NO: 398063 - DNA, 33 bp, Homo sapien
ctataaaattaggccaactgtgcctctaaaact

SEQ ID NO: 398064 - DNA, 33 bp, Homo sapien
ctataaaattaggccacctgtgcctctaaaact

SEQ ID NO: 398065 - DNA, 33 bp, Homo sapien
aaataaggtcgtggataagctgtaggagaactg

SEQ ID NO: 398066 - DNA, 33 bp, Homo sapien
aaataaggtcgtggattagctgtaggagaactg

SEQ ID NO: 398067 - DNA, 33 bp, Homo sapien
caaactcaagaaagacacaaggaatcagtggat

SEQ ID NO: 398068 - DNA, 33 bp, Homo sapien
caaactcaagaaagacgcaaggaatcagtggat

SEQ ID NO: 398069 - DNA, 33 bp, Homo sapien
gttgggatttgagttacgtttataggaagtatt

SEQ ID NO: 398070 - DNA, 33 bp, Homo sapien
gttgggatttgagttatgtttataggaagtatt

SEQ ID NO: 398071 - DNA, 33 bp, Homo sapien
aacgacatgttagctgcagtagataggtcatgt

SEQ ID NO: 398072 - DNA, 33 bp, Homo sapien
aacgacatgttagctgtagtagataggtcatgt

SEQ ID NO: 398073 - DNA, 33 bp, Homo sapien
tcattttacttgcacacagaggaccttagtctt

SEQ ID NO: 398074 - DNA, 33 bp, Homo sapien
tcattttacttgcacagagaggaccttagtctt

SEQ ID NO: 398075 - DNA, 33 bp, Homo sapien
accacacttttctccactgcacgtacacacagc

SEQ ID NO: 398076 - DNA, 33 bp, Homo sapien
accacacttttctccattgcacgtacacacagc

SEQ ID NO: 398077 - DNA, 33 bp, Homo sapien
aaagcagctgacaaaaacgtgttgaatttcaag

SEQ ID NO: 398078 - DNA, 33 bp, Homo sapien
aaagcagctgacaaaagcgtgttgaatttcaag

SEQ ID NO: 398079 - DNA, 33 bp, Homo sapien
gtgttgagcaatcttaaagtctacttctgcagc

SEQ ID NO: 398080 - DNA, 33 bp, Homo sapien
gtgttgagcaatcttacagtctacttctgcagc

SEQ ID NO: 398081 - DNA, 33 bp, Homo sapien
ggtaggctgctggataagcaatgttggggctca

SEQ ID NO: 398082 - DNA, 33 bp, Homo sapien
ggtaggctgctggataggcaatgttggggctca

SEQ ID NO: 398083 - DNA, 33 bp, Homo sapien
ttacggacttgggaacaaaatctaaccttggct

SEQ ID NO: 398084 - DNA, 33 bp, Homo sapien
ttacggacttgggaaccaaatctaaccttggct

SEQ ID NO: 398085 - DNA, 33 bp, Homo sapien
tgcgctacaggcagaaaatataggcagaaataa

SEQ ID NO: 398086 - DNA, 33 bp, Homo sapien
tgcgctacaggcagaagatataggcagaaataa

SEQ ID NO: 398087 - DNA, 33 bp, Homo sapien
ttccgtatgccaagaaactaaaagaatgttcat

SEQ ID NO: 398088 - DNA, 33 bp, Homo sapien
ttccgtatgccaagaacctaaaagaatgttcat

SEQ ID NO: 398089 - DNA, 33 bp, Homo sapien
acagtggcaaaagtcacagaaggaacttgtata

SEQ ID NO: 398090 - DNA, 33 bp, Homo sapien
acagtggcaaaagtcatagaaggaacttgtata

SEQ ID NO: 398091 - DNA, 33 bp, Homo sapien
tgtattcatggttcagcattaattttgtttatt

SEQ ID NO: 398092 - DNA, 33 bp, Homo sapien
tgtattcatggttcagtattaattttgtttatt

SEQ ID NO: 398093 - DNA, 33 bp, Homo sapien
cccctcagacctcaccaaaggaaaagctatctg

SEQ ID NO: 398094 - DNA, 33 bp, Homo sapien
cccctcagacctcaccgaaggaaaagctatctg

SEQ ID NO: 398095 - DNA, 33 bp, Homo sapien
gcatttggggactctaacttggatagtctcttg

SEQ ID NO: 398096 - DNA, 33 bp, Homo sapien
gcatttggggactctagcttggatagtctcttg

SEQ ID NO: 398097 - DNA, 33 bp, Homo sapien
atagggaaagccagaaatgagcagaccatggtc

SEQ ID NO: 398098 - DNA, 33 bp, Homo sapien
atagggaaagccagaattgagcagaccatggtc

SEQ ID NO: 398099 - DNA, 33 bp, Homo sapien
gcagaattgaagaaagaaagccaagctggggtg

SEQ ID NO: 398100 - DNA, 33 bp, Homo sapien
gcagaattgaagaaaggaagccaagctggggtg

SEQ ID NO: 398101 - DNA, 33 bp, Homo sapien
tgggtgcactttggagaaattcacacttcacat

SEQ ID NO: 398102 - DNA, 33 bp, Homo sapien
tgggtgcactttggagcaattcacacttcacat

SEQ ID NO: 398103 - DNA, 33 bp, Homo sapien
tgctgacattgtaaaaatgtataacgatcacag

SEQ ID NO: 398104 - DNA, 33 bp, Homo sapien
tgctgacattgtaaaagtgtataacgatcacag

SEQ ID NO: 398105 - DNA, 33 bp, Homo sapien
gcacatcccttgctgccagaacgggtttggttt

SEQ ID NO: 398106 - DNA, 33 bp, Homo sapien
gcacatcccttgctgctagaacgggtttggttt

SEQ ID NO: 398107 - DNA, 33 bp, Homo sapien
atttcaggagaagaaacaaaatttggaaaagaa

SEQ ID NO: 398108 - DNA, 33 bp, Homo sapien
atttcaggagaagaaagaaaatttggaaaagaa

SEQ ID NO: 398109 - DNA, 33 bp, Homo sapien
tagctatgcaattttgaactaatcctataactt

SEQ ID NO: 398110 - DNA, 33 bp, Homo sapien
tagctatgcaattttgtactaatcctataactt

SEQ ID NO: 398111 - DNA, 33 bp, Homo sapien
ccccctcaagttcaccacctgattttattcagt

SEQ ID NO: 398112 - DNA, 33 bp, Homo sapien
ccccctcaagttcacctcctgattttattcagt

SEQ ID NO: 398113 - DNA, 33 bp, Homo sapien
tggtcacattgctcacggtcttcatgtcccttc

SEQ ID NO: 398114 - DNA, 33 bp, Homo sapien
tggtcacattgctcactgtcttcatgtcccttc

SEQ ID NO: 398115 - DNA, 33 bp, Homo sapien
tgtaaaggcaggtgacaagggttaccagactca

SEQ ID NO: 398116 - DNA, 33 bp, Homo sapien
tgtaaaggcaggtgacgagggttaccagactca

SEQ ID NO: 398117 - DNA, 33 bp, Homo sapien
cattctggaggagtcaatcttgctgtgagcctg

SEQ ID NO: 398118 - DNA, 33 bp, Homo sapien
cattctggaggagtcagtcttgctgtgagcctg

SEQ ID NO: 398119 - DNA, 33 bp, Homo sapien
tgctgcctgcatgcaacctaaatgggggccgcc

SEQ ID NO: 398120 - DNA, 33 bp, Homo sapien
tgctgcctgcatgcaatctaaatgggggccgcc

SEQ ID NO: 398121 - DNA, 33 bp, Homo sapien
tcaaaacaaggacagacggagaagacacagcag

SEQ ID NO: 398122 - DNA, 33 bp, Homo sapien
tcaaaacaaggacagatggagaagacacagcag

SEQ ID NO: 398123 - DNA, 33 bp, Homo sapien
acacagctcgacagaactgaacaggaatcaaaa

SEQ ID NO: 398124 - DNA, 33 bp, Homo sapien
acacagctcgacagaagtgaacaggaatcaaaa

SEQ ID NO: 398125 - DNA, 33 bp, Homo sapien
aatctaaccttctccacggtgtatgtcccctgt

SEQ ID NO: 398126 - DNA, 33 bp, Homo sapien
aatctaaccttctccatggtgtatgtcccctgt

SEQ ID NO: 398127 - DNA, 33 bp, Homo sapien
cttctgacttgagcccaggcatccttctgttca

SEQ ID NO: 398128 - DNA, 33 bp, Homo sapien
cttctgacttgagcccgggcatccttctgttca

SEQ ID NO: 398129 - DNA, 33 bp, Homo sapien
aatgcaagaatacaaacagcatgagaagaaaca

SEQ ID NO: 398130 - DNA, 33 bp, Homo sapien
aatgcaagaatacaaagagcatgagaagaaaca

SEQ ID NO: 398131 - DNA, 33 bp, Homo sapien
aaacagaaagggggaaatatctcaatgcaagaa

SEQ ID NO: 398132 - DNA, 33 bp, Homo sapien
aaacagaaagggggaagtatctcaatgcaagaa

SEQ ID NO: 398133 - DNA, 33 bp, Homo sapien
aatcacagccatcgtagatcctaaaagtagttt

SEQ ID NO: 398134 - DNA, 33 bp, Homo sapien
aatcacagccatcgtatatcctaaaagtagttt

SEQ ID NO: 398135 - DNA, 33 bp, Homo sapien
tgcaatacaacaggtaaactagcatgaattcag

SEQ ID NO: 398136 - DNA, 33 bp, Homo sapien
tgcaatacaacaggtagactagcatgaattcag

SEQ ID NO: 398137 - DNA, 33 bp, Homo sapien
ggggagagagaataaaaacacaggacaaggatg

SEQ ID NO: 398138 - DNA, 33 bp, Homo sapien
ggggagagagaataaacacacaggacaaggatg

SEQ ID NO: 398139 - DNA, 33 bp, Homo sapien
aaaatatcaatccatacagcaactggaaaaacc

SEQ ID NO: 398140 - DNA, 33 bp, Homo sapien
aaaatatcaatccatagagcaactggaaaaacc

SEQ ID NO: 398141 - DNA, 33 bp, Homo sapien
cattctaaagatggccaatatggaatcaaggag

SEQ ID NO: 398142 - DNA, 33 bp, Homo sapien
cattctaaagatggccgatatggaatcaaggag

SEQ ID NO: 398143 - DNA, 33 bp, Homo sapien
gagcctgggcatcctcagaagtactgacacact

SEQ ID NO: 398144 - DNA, 33 bp, Homo sapien
gagcctgggcatcctcggaagtactgacacact

SEQ ID NO: 398145 - DNA, 33 bp, Homo sapien
catggtcaaataggaacggaatccctaaatgaa

SEQ ID NO: 398146 - DNA, 33 bp, Homo sapien
catggtcaaataggaatggaatccctaaatgaa

SEQ ID NO: 398147 - DNA, 33 bp, Homo sapien
ttgagaccctggttccactctctgggaagcatg

SEQ ID NO: 398148 - DNA, 33 bp, Homo sapien
ttgagaccctggttccgctctctgggaagcatg

SEQ ID NO: 398149 - DNA, 33 bp, Homo sapien
acttgcttattttttgaatgtgataagggctgt

SEQ ID NO: 398150 - DNA, 33 bp, Homo sapien
acttgcttattttttggatgtgataagggctgt

SEQ ID NO: 398151 - DNA, 33 bp, Homo sapien
cctgcaaagaatgacaactatgcctcttctatt

SEQ ID NO: 398152 - DNA, 33 bp, Homo sapien
cctgcaaagaatgacagctatgcctcttctatt

SEQ ID NO: 398153 - DNA, 33 bp, Homo sapien
ccttatttgtatcataaaggaagttggatgaga

SEQ ID NO: 398154 - DNA, 33 bp, Homo sapien
ccttatttgtatcatagaggaagttggatgaga

SEQ ID NO: 398155 - DNA, 33 bp, Homo sapien
ttctagagctcgtgccattcaacctgccaaagc

SEQ ID NO: 398156 - DNA, 33 bp, Homo sapien
ttctagagctcgtgccgttcaacctgccaaagc

SEQ ID NO: 398157 - DNA, 33 bp, Homo sapien
taggcagtgaattctacggtctatcagaaacag

SEQ ID NO: 398158 - DNA, 33 bp, Homo sapien
taggcagtgaattctatggtctatcagaaacag

SEQ ID NO: 398159 - DNA, 33 bp, Homo sapien
catccgcagcaacgtaagacttcagggaaactt

SEQ ID NO: 398160 - DNA, 33 bp, Homo sapien
catccgcagcaacgtaggacttcagggaaactt

SEQ ID NO: 398161 - DNA, 33 bp, Homo sapien
ctgactctgcaccataaatgtcaaacaccaggt

SEQ ID NO: 398162 - DNA, 33 bp, Homo sapien
ctgactctgcaccatacatgtcaaacaccaggt

SEQ ID NO: 398163 - DNA, 33 bp, Homo sapien
cgggttgagagtgtggaactataagaaatagac

SEQ ID NO: 398164 - DNA, 33 bp, Homo sapien
cgggttgagagtgtgggactataagaaatagac

SEQ ID NO: 398165 - DNA, 33 bp, Homo sapien
ctgcctttctttcctccatgttcgctggaacct

SEQ ID NO: 398166 - DNA, 33 bp, Homo sapien
ctgcctttctttcctctatgttcgctggaacct

SEQ ID NO: 398167 - DNA, 33 bp, Homo sapien
ttgctgggcacatagaacactccttgtttttcc

SEQ ID NO: 398168 - DNA, 33 bp, Homo sapien
ttgctgggcacatagaccactccttgtttttcc

SEQ ID NO: 398169 - DNA, 33 bp, Homo sapien
aatttccacagttatccctcaaaaaacgatttc

SEQ ID NO: 398170 - DNA, 33 bp, Homo sapien
aatttccacagttatctctcaaaaaacgatttc

SEQ ID NO: 398171 - DNA, 33 bp, Homo sapien
accaagctcatttttccccttgatgttatgata

SEQ ID NO: 398172 - DNA, 33 bp, Homo sapien
accaagctcatttttctccttgatgttatgata

SEQ ID NO: 398173 - DNA, 33 bp, Homo sapien
tacacagtttccttccaacatggagttttcctc

SEQ ID NO: 398174 - DNA, 33 bp, Homo sapien
tacacagtttccttcccacatggagttttcctc

SEQ ID NO: 398175 - DNA, 33 bp, Homo sapien
aggctaacactgaaataatgcacaattttcagt

SEQ ID NO: 398176 - DNA, 33 bp, Homo sapien
aggctaacactgaaatgatgcacaattttcagt

SEQ ID NO: 398177 - DNA, 33 bp, Homo sapien
aactgtggttattacagggtaggaaaggtcgga

SEQ ID NO: 398178 - DNA, 33 bp, Homo sapien
aactgtggttattacatggtaggaaaggtcgga

SEQ ID NO: 398179 - DNA, 33 bp, Homo sapien
ttacagatgaagataacttagaaagcatgaatg

SEQ ID NO: 398180 - DNA, 33 bp, Homo sapien
ttacagatgaagataatttagaaagcatgaatg

SEQ ID NO: 398181 - DNA, 33 bp, Homo sapien
tgaatgccttttaacacctagaggaaaatgtgt

SEQ ID NO: 398182 - DNA, 33 bp, Homo sapien
tgaatgccttttaacatctagaggaaaatgtgt

SEQ ID NO: 398183 - DNA, 33 bp, Homo sapien
caccaatgtctcagtccaaaggcacatgataaa

SEQ ID NO: 398184 - DNA, 33 bp, Homo sapien
caccaatgtctcagtctaaaggcacatgataaa

SEQ ID NO: 398185 - DNA, 33 bp, Homo sapien
tagaaagtcctgaaaaagggtgtcagaactaat

SEQ ID NO: 398186 - DNA, 33 bp, Homo sapien
tagaaagtcctgaaaacgggtgtcagaactaat

SEQ ID NO: 398187 - DNA, 33 bp, Homo sapien
gaggcacacattttgcaagacaggaagtcataa

SEQ ID NO: 398188 - DNA, 33 bp, Homo sapien
gaggcacacattttgcgagacaggaagtcataa

SEQ ID NO: 398189 - DNA, 33 bp, Homo sapien
tacctcaataaatgcccagatatcttcttaaag

SEQ ID NO: 398190 - DNA, 33 bp, Homo sapien
tacctcaataaatgccgagatatcttcttaaag

SEQ ID NO: 398191 - DNA, 33 bp, Homo sapien
agaaggttaatagttaaattggacaaagtgact

SEQ ID NO: 398192 - DNA, 33 bp, Homo sapien
agaaggttaatagttagattggacaaagtgact

SEQ ID NO: 398193 - DNA, 33 bp, Homo sapien
agctaatgtggcagagaatgaggattatagaaa

SEQ ID NO: 398194 - DNA, 33 bp, Homo sapien
agctaatgtggcagaggatgaggattatagaaa

SEQ ID NO: 398195 - DNA, 33 bp, Homo sapien
tgcatcaagtcaaagtaaaaacatttaagagcc

SEQ ID NO: 398196 - DNA, 33 bp, Homo sapien
tgcatcaagtcaaagtgaaaacatttaagagcc

SEQ ID NO: 398197 - DNA, 33 bp, Homo sapien
acttccttgtggaaaccgtgaggcactgaggca

SEQ ID NO: 398198 - DNA, 33 bp, Homo sapien
acttccttgtggaaactgtgaggcactgaggca

SEQ ID NO: 398199 - DNA, 33 bp, Homo sapien
attgcagaaggttccacgaagagcaccagaatt

SEQ ID NO: 398200 - DNA, 33 bp, Homo sapien
attgcagaaggttccatgaagagcaccagaatt

SEQ ID NO: 398201 - DNA, 33 bp, Homo sapien
tttaaaaaagcaacaaagaacacattttccaaa

SEQ ID NO: 398202 - DNA, 33 bp, Homo sapien
tttaaaaaagcaacaatgaacacattttccaaa

SEQ ID NO: 398203 - DNA, 33 bp, Homo sapien
gtacatattttcatcacagaagagctcattgaa

SEQ ID NO: 398204 - DNA, 33 bp, Homo sapien
gtacatattttcatcatagaagagctcattgaa

SEQ ID NO: 398205 - DNA, 33 bp, Homo sapien
gaaaaatgcctccacaatgtattgactgtcctt

SEQ ID NO: 398206 - DNA, 33 bp, Homo sapien
gaaaaatgcctccacagtgtattgactgtcctt

SEQ ID NO: 398207 - DNA, 33 bp, Homo sapien
tgctatttacttaacactacagtatgccagtgt

SEQ ID NO: 398208 - DNA, 33 bp, Homo sapien
tgctatttacttaacattacagtatgccagtgt

SEQ ID NO: 398209 - DNA, 33 bp, Homo sapien
gttgaaaactactctaccatcatctatttaaag

SEQ ID NO: 398210 - DNA, 33 bp, Homo sapien
gttgaaaactactctatcatcatctatttaaag

SEQ ID NO: 398211 - DNA, 33 bp, Homo sapien
attttgaaagatttcaaacacataaaaagaaca

SEQ ID NO: 398212 - DNA, 33 bp, Homo sapien
attttgaaagatttcagacacataaaaagaaca

SEQ ID NO: 398213 - DNA, 33 bp, Homo sapien
tgggcataataagaaccagaggcacctacagca

SEQ ID NO: 398214 - DNA, 33 bp, Homo sapien
tgggcataataagaactagaggcacctacagca

SEQ ID NO: 398215 - DNA, 33 bp, Homo sapien
aaatgtttccaaacaaagagtgtcctgggatat

SEQ ID NO: 398216 - DNA, 33 bp, Homo sapien
aaatgtttccaaacaaggagtgtcctgggatat

SEQ ID NO: 398217 - DNA, 33 bp, Homo sapien
atccattatttttccaagttctcaaaacagagc

SEQ ID NO: 398218 - DNA, 33 bp, Homo sapien
atccattatttttccaggttctcaaaacagagc

SEQ ID NO: 398219 - DNA, 33 bp, Homo sapien
tctgggtgggtcatcaatagtgtccacttcaga

SEQ ID NO: 398220 - DNA, 33 bp, Homo sapien
tctgggtgggtcatcagtagtgtccacttcaga

SEQ ID NO: 398221 - DNA, 33 bp, Homo sapien
tacttaacttgagtaacggtgtcagttgcttaa

SEQ ID NO: 398222 - DNA, 33 bp, Homo sapien
tacttaacttgagtaatggtgtcagttgcttaa

SEQ ID NO: 398223 - DNA, 33 bp, Homo sapien
ggacttatgtttctcaagttctactaaatgcag

SEQ ID NO: 398224 - DNA, 33 bp, Homo sapien
ggacttatgtttctcaggttctactaaatgcag

SEQ ID NO: 398225 - DNA, 33 bp, Homo sapien
taagtccttccttccaacctcttcttccctttc

SEQ ID NO: 398226 - DNA, 33 bp, Homo sapien
taagtccttccttccaccctcttcttccctttc

SEQ ID NO: 398227 - DNA, 33 bp, Homo sapien
ggcatgtagatggacaatataggcagtgcagtg

SEQ ID NO: 398228 - DNA, 33 bp, Homo sapien
ggcatgtagatggacagtataggcagtgcagtg

SEQ ID NO: 398229 - DNA, 33 bp, Homo sapien
cttccttttagccaagccactgctcattagcac

SEQ ID NO: 398230 - DNA, 33 bp, Homo sapien
cttccttttagccaagtcactgctcattagcac

SEQ ID NO: 398231 - DNA, 33 bp, Homo sapien
aagttgaggaataaaactatacttgtttcttgg

SEQ ID NO: 398232 - DNA, 33 bp, Homo sapien
aagttgaggaataaaattatacttgtttcttgg

SEQ ID NO: 398233 - DNA, 33 bp, Homo sapien
atggtagaaagtgggacgtttggaaacagagct

SEQ ID NO: 398234 - DNA, 33 bp, Homo sapien
atggtagaaagtgggatgtttggaaacagagct

SEQ ID NO: 398235 - DNA, 33 bp, Homo sapien
gtaaaggttctcaccccgctgagcatttccttt

SEQ ID NO: 398236 - DNA, 33 bp, Homo sapien
gtaaaggttctcaccctgctgagcatttccttt

SEQ ID NO: 398237 - DNA, 33 bp, Homo sapien
atttgaacatctacggccaaacctcaatccttc

SEQ ID NO: 398238 - DNA, 33 bp, Homo sapien
atttgaacatctacggtcaaacctcaatccttc

SEQ ID NO: 398239 - DNA, 33 bp, Homo sapien
tcatttgcttcacttacgaggttcaaagaacta

SEQ ID NO: 398240 - DNA, 33 bp, Homo sapien
tcatttgcttcacttaggaggttcaaagaacta

SEQ ID NO: 398241 - DNA, 33 bp, Homo sapien
aattgtccaccaatatcaacacaaaatgaactg

SEQ ID NO: 398242 - DNA, 33 bp, Homo sapien
aattgtccaccaatattaacacaaaatgaactg

SEQ ID NO: 398243 - DNA, 33 bp, Homo sapien
attcacaagctgtccagagttagttcctgtggg

SEQ ID NO: 398244 - DNA, 33 bp, Homo sapien
attcacaagctgtccatagttagttcctgtggg

SEQ ID NO: 398245 - DNA, 33 bp, Homo sapien
tgtcatactgacactgaaggaccattgtcattc

SEQ ID NO: 398246 - DNA, 33 bp, Homo sapien
tgtcatactgacactgtaggaccattgtcattc

SEQ ID NO: 398247 - DNA, 33 bp, Homo sapien
gaagcatttggtgttaaggaaaaaacagatgga

SEQ ID NO: 398248 - DNA, 33 bp, Homo sapien
gaagcatttggtgttatggaaaaaacagatgga

SEQ ID NO: 398249 - DNA, 33 bp, Homo sapien
aacaacatgaattaacaggacaaaaatgaatga

SEQ ID NO: 398250 - DNA, 33 bp, Homo sapien
aacaacatgaattaacgggacaaaaatgaatga

SEQ ID NO: 398251 - DNA, 33 bp, Homo sapien
tcacctcttggcagccacttcagcacaattgag

SEQ ID NO: 398252 - DNA, 33 bp, Homo sapien
tcacctcttggcagccgcttcagcacaattgag

SEQ ID NO: 398253 - DNA, 33 bp, Homo sapien
tatgaaacacagccaccgtaaatatgcaaagta

SEQ ID NO: 398254 - DNA, 33 bp, Homo sapien
tatgaaacacagccactgtaaatatgcaaagta

SEQ ID NO: 398255 - DNA, 33 bp, Homo sapien
cgcatgtgggctcagaaaccgctggagcagagt

SEQ ID NO: 398256 - DNA, 33 bp, Homo sapien
cgcatgtgggctcagagaccgctggagcagagt

SEQ ID NO: 398257 - DNA, 33 bp, Homo sapien
ggcaaaatccctgctcaaggccattatttccat

SEQ ID NO: 398258 - DNA, 33 bp, Homo sapien
ggcaaaatccctgctcgaggccattatttccat

SEQ ID NO: 398259 - DNA, 33 bp, Homo sapien
ttttcaaaaaccttcaccagcggctgggcatgg

SEQ ID NO: 398260 - DNA, 33 bp, Homo sapien
ttttcaaaaaccttcatcagcggctgggcatgg

SEQ ID NO: 398261 - DNA, 33 bp, Homo sapien
cttttaccagcagtcaatatttactatgtgtaa

SEQ ID NO: 398262 - DNA, 33 bp, Homo sapien
cttttaccagcagtcagtatttactatgtgtaa

SEQ ID NO: 398263 - DNA, 33 bp, Homo sapien
aagacacctagtgacaaatggccaatctccaag

SEQ ID NO: 398264 - DNA, 33 bp, Homo sapien
aagacacctagtgacagatggccaatctccaag

SEQ ID NO: 398265 - DNA, 33 bp, Homo sapien
ctccatggaaaagttgaataaatgttagtgttg

SEQ ID NO: 398266 - DNA, 33 bp, Homo sapien
ctccatggaaaagttggataaatgttagtgttg

SEQ ID NO: 398267 - DNA, 33 bp, Homo sapien
ctccaagagcttttcaaaacggtctctgaggct

SEQ ID NO: 398268 - DNA, 33 bp, Homo sapien
ctccaagagcttttcagaacggtctctgaggct

SEQ ID NO: 398269 - DNA, 33 bp, Homo sapien
attggtacaaggttaaatacacacagagacaga

SEQ ID NO: 398270 - DNA, 33 bp, Homo sapien
attggtacaaggttaattacacacagagacaga

SEQ ID NO: 398271 - DNA, 33 bp, Homo sapien
gaaagtgcttcataaacggtaaagccctgcgtg

SEQ ID NO: 398272 - DNA, 33 bp, Homo sapien
gaaagtgcttcataaatggtaaagccctgcgtg

SEQ ID NO: 398273 - DNA, 33 bp, Homo sapien
agcagttgctttttaaatctcttcattttcaac

SEQ ID NO: 398274 - DNA, 33 bp, Homo sapien
agcagttgctttttaagtctcttcattttcaac

SEQ ID NO: 398275 - DNA, 33 bp, Homo sapien
ttgtactggagagtccagcaattgtctggtctg

SEQ ID NO: 398276 - DNA, 33 bp, Homo sapien
ttgtactggagagtcccgcaattgtctggtctg

SEQ ID NO: 398277 - DNA, 33 bp, Homo sapien
aagagtcaaatcaccactaaaagacaggactgg

SEQ ID NO: 398278 - DNA, 33 bp, Homo sapien
aagagtcaaatcaccattaaaagacaggactgg

SEQ ID NO: 398279 - DNA, 33 bp, Homo sapien
ccaatccttatgtagcactagatgtttctcttc

SEQ ID NO: 398280 - DNA, 33 bp, Homo sapien
ccaatccttatgtagcgctagatgtttctcttc

SEQ ID NO: 398281 - DNA, 33 bp, Homo sapien
gatgaataaaaattgaacaagtggtaatgtggg

SEQ ID NO: 398282 - DNA, 33 bp, Homo sapien
gatgaataaaaattgagcaagtggtaatgtggg

SEQ ID NO: 398283 - DNA, 33 bp, Homo sapien
atgacagcataaaaaaagaactcagtggaaaga

SEQ ID NO: 398284 - DNA, 33 bp, Homo sapien
atgacagcataaaaaaggaactcagtggaaaga

SEQ ID NO: 398285 - DNA, 33 bp, Homo sapien
gctgtcctgaagacgcagatcacagcaggtggc

SEQ ID NO: 398286 - DNA, 33 bp, Homo sapien
gctgtcctgaagacgcggatcacagcaggtggc

SEQ ID NO: 398287 - DNA, 33 bp, Homo sapien
tggcccacactttgggaaatgctgcaggtggaa

SEQ ID NO: 398288 - DNA, 33 bp, Homo sapien
tggcccacactttgggcaatgctgcaggtggaa

SEQ ID NO: 398289 - DNA, 33 bp, Homo sapien
tcctttgactcactaaacagaaattgcttttgt

SEQ ID NO: 398290 - DNA, 33 bp, Homo sapien
tcctttgactcactaaccagaaattgcttttgt

SEQ ID NO: 398291 - DNA, 33 bp, Homo sapien
agccttggagctcaaacggagattgttttgtca

SEQ ID NO: 398292 - DNA, 33 bp, Homo sapien
agccttggagctcaaatggagattgttttgtca

SEQ ID NO: 398293 - DNA, 33 bp, Homo sapien
cagggcatcaaacacacggtcataaactcactg

SEQ ID NO: 398294 - DNA, 33 bp, Homo sapien
cagggcatcaaacacatggtcataaactcactg

SEQ ID NO: 398295 - DNA, 33 bp, Homo sapien
tacccttgaatttgcccggaacttgcatgctac

SEQ ID NO: 398296 - DNA, 33 bp, Homo sapien
tacccttgaatttgcctggaacttgcatgctac

SEQ ID NO: 398297 - DNA, 33 bp, Homo sapien
cattgccacacaacagcctgtgaacacgttcct

SEQ ID NO: 398298 - DNA, 33 bp, Homo sapien
cattgccacacaacagtctgtgaacacgttcct

SEQ ID NO: 398299 - DNA, 33 bp, Homo sapien
ggaatgtgggaagacaagcctaggacaagtgtc

SEQ ID NO: 398300 - DNA, 33 bp, Homo sapien
ggaatgtgggaagacaggcctaggacaagtgtc

SEQ ID NO: 398301 - DNA, 33 bp, Homo sapien
gattctctgggttaaacggcctggatacttaac

SEQ ID NO: 398302 - DNA, 33 bp, Homo sapien
gattctctgggttaaatggcctggatacttaac

SEQ ID NO: 398303 - DNA, 33 bp, Homo sapien
cttcctggtagaagggcagctgtctacgctggc

SEQ ID NO: 398304 - DNA, 33 bp, Homo sapien
cttcctggtagaagggtagctgtctacgctggc

SEQ ID NO: 398305 - DNA, 33 bp, Homo sapien
tgaagcagtgtctggcaataggggccaagcctt

SEQ ID NO: 398306 - DNA, 33 bp, Homo sapien
tgaagcagtgtctggcgataggggccaagcctt

SEQ ID NO: 398307 - DNA, 33 bp, Homo sapien
agtagaggcaagggacagagaagaggaagcagt

SEQ ID NO: 398308 - DNA, 33 bp, Homo sapien
agtagaggcaagggacggagaagaggaagcagt

SEQ ID NO: 398309 - DNA, 33 bp, Homo sapien
aaatgtaccttcatacagcattaatatgactat

SEQ ID NO: 398310 - DNA, 33 bp, Homo sapien
aaatgtaccttcatacggcattaatatgactat

SEQ ID NO: 398311 - DNA, 33 bp, Homo sapien
tctgtgtcctcctctaactatccaaccctttcc

SEQ ID NO: 398312 - DNA, 33 bp, Homo sapien
tctgtgtcctcctctatctatccaaccctttcc

SEQ ID NO: 398313 - DNA, 33 bp, Homo sapien
ctaaagcaatttgttaacacatcctattggcta

SEQ ID NO: 398314 - DNA, 33 bp, Homo sapien
ctaaagcaatttgttaccacatcctattggcta

SEQ ID NO: 398315 - DNA, 33 bp, Homo sapien
tgcttgtggcaacggacagccttcctacatgag

SEQ ID NO: 398316 - DNA, 33 bp, Homo sapien
tgcttgtggcaacggatagccttcctacatgag

SEQ ID NO: 398317 - DNA, 33 bp, Homo sapien
tcttcttcctttaataccttccacaatcacttg

SEQ ID NO: 398318 - DNA, 33 bp, Homo sapien
tcttcttcctttaatatcttccacaatcacttg

SEQ ID NO: 398319 - DNA, 33 bp, Homo sapien
gaacccttggcttcacagaggctcaccatacac

SEQ ID NO: 398320 - DNA, 33 bp, Homo sapien
gaacccttggcttcacggaggctcaccatacac

SEQ ID NO: 398321 - DNA, 33 bp, Homo sapien
tccctctaagttgctacgcagatattagcatcc

SEQ ID NO: 398322 - DNA, 33 bp, Homo sapien
tccctctaagttgctatgcagatattagcatcc

SEQ ID NO: 398323 - DNA, 33 bp, Homo sapien
gatggcttcctgggacaactgcacgtggtggag

SEQ ID NO: 398324 - DNA, 33 bp, Homo sapien
gatggcttcctgggacgactgcacgtggtggag

SEQ ID NO: 398325 - DNA, 33 bp, Homo sapien
gaaatacagacttaaacggatttgagaaattca

SEQ ID NO: 398326 - DNA, 33 bp, Homo sapien
gaaatacagacttaaatggatttgagaaattca

SEQ ID NO: 398327 - DNA, 33 bp, Homo sapien
aggagtagccgtgggaagatgaaaacacatgga

SEQ ID NO: 398328 - DNA, 33 bp, Homo sapien
aggagtagccgtgggaggatgaaaacacatgga

SEQ ID NO: 398329 - DNA, 33 bp, Homo sapien
ataaggctaagttcatcataattcttactggag

SEQ ID NO: 398330 - DNA, 33 bp, Homo sapien
ataaggctaagttcatgataattcttactggag

SEQ ID NO: 398331 - DNA, 33 bp, Homo sapien
tttgttgtgcacatccactcttcctctctgggt

SEQ ID NO: 398332 - DNA, 33 bp, Homo sapien
tttgttgtgcacatccgctcttcctctctgggt

SEQ ID NO: 398333 - DNA, 33 bp, Homo sapien
acgctcagatcaggtaatacaaagtgtatggag

SEQ ID NO: 398334 - DNA, 33 bp, Homo sapien
acgctcagatcaggtagtacaaagtgtatggag

SEQ ID NO: 398335 - DNA, 33 bp, Homo sapien
cataacatggcctggacgcctcagacttctagg

SEQ ID NO: 398336 - DNA, 33 bp, Homo sapien
cataacatggcctggatgcctcagacttctagg

SEQ ID NO: 398337 - DNA, 33 bp, Homo sapien
tgatctacagtcagcacgtccaggaggaagcag

SEQ ID NO: 398338 - DNA, 33 bp, Homo sapien
tgatctacagtcagcatgtccaggaggaagcag

SEQ ID NO: 398339 - DNA, 33 bp, Homo sapien
ttgtaaagaatggtaaaaagctggaagcgatgg

SEQ ID NO: 398340 - DNA, 33 bp, Homo sapien
ttgtaaagaatggtaacaagctggaagcgatgg

SEQ ID NO: 398341 - DNA, 33 bp, Homo sapien
atgtctcggaaagaaacaaggctcctaaatcta

SEQ ID NO: 398342 - DNA, 33 bp, Homo sapien
atgtctcggaaagaaagaaggctcctaaatcta

SEQ ID NO: 398343 - DNA, 33 bp, Homo sapien
ccatgaaggaggaataccgaatttcgaacagac

SEQ ID NO: 398344 - DNA, 33 bp, Homo sapien
ccatgaaggaggaatatcgaatttcgaacagac

SEQ ID NO: 398345 - DNA, 33 bp, Homo sapien
ttccaacagcccagataagaagtggtgaggcct

SEQ ID NO: 398346 - DNA, 33 bp, Homo sapien
ttccaacagcccagatgagaagtggtgaggcct

SEQ ID NO: 398347 - DNA, 33 bp, Homo sapien
tataataaataacctacggccaaactgtggtat

SEQ ID NO: 398348 - DNA, 33 bp, Homo sapien
tataataaataacctatggccaaactgtggtat

SEQ ID NO: 398349 - DNA, 33 bp, Homo sapien
taaaagtgagattcccagctcaaagggtggata

SEQ ID NO: 398350 - DNA, 33 bp, Homo sapien
taaaagtgagattcccggctcaaagggtggata

SEQ ID NO: 398351 - DNA, 33 bp, Homo sapien
aaaaatgcgaattaaaatccaaatgtcatatta

SEQ ID NO: 398352 - DNA, 33 bp, Homo sapien
aaaaatgcgaattaaagtccaaatgtcatatta

SEQ ID NO: 398353 - DNA, 33 bp, Homo sapien
ctttaactttcttttcacttgtgtacaggagaa

SEQ ID NO: 398354 - DNA, 33 bp, Homo sapien
ctttaactttcttttcgcttgtgtacaggagaa

SEQ ID NO: 398355 - DNA, 33 bp, Homo sapien
catagccacagtgaaacatgccagaagggaggt

SEQ ID NO: 398356 - DNA, 33 bp, Homo sapien
catagccacagtgaaatatgccagaagggaggt

SEQ ID NO: 398357 - DNA, 33 bp, Homo sapien
cctgcttcatctgggcacagaaacatgaagatg

SEQ ID NO: 398358 - DNA, 33 bp, Homo sapien
cctgcttcatctgggcgcagaaacatgaagatg

SEQ ID NO: 398359 - DNA, 33 bp, Homo sapien
cagaatttaagtcaccactagaacattgaaagt

SEQ ID NO: 398360 - DNA, 33 bp, Homo sapien
cagaatttaagtcacctctagaacattgaaagt

SEQ ID NO: 398361 - DNA, 33 bp, Homo sapien
gaaaagctgaacatcacaggagaactgtatctt

SEQ ID NO: 398362 - DNA, 33 bp, Homo sapien
gaaaagctgaacatcagaggagaactgtatctt

SEQ ID NO: 398363 - DNA, 33 bp, Homo sapien
tttattttgaagctgcgcaacacaaggtcagca

SEQ ID NO: 398364 - DNA, 33 bp, Homo sapien
tttattttgaagctgctcaacacaaggtcagca

SEQ ID NO: 398365 - DNA, 33 bp, Homo sapien
gaaccaatcaatcagcaagaaattcctcaattg

SEQ ID NO: 398366 - DNA, 33 bp, Homo sapien
gaaccaatcaatcagcgagaaattcctcaattg

SEQ ID NO: 398367 - DNA, 33 bp, Homo sapien
tctgaacacttccataataatgatttatgttca

SEQ ID NO: 398368 - DNA, 33 bp, Homo sapien
tctgaacacttccatattaatgatttatgttca

SEQ ID NO: 398369 - DNA, 33 bp, Homo sapien
cattatcctggacaataagtaagagatagagaa

SEQ ID NO: 398370 - DNA, 33 bp, Homo sapien
cattatcctggacaatgagtaagagatagagaa

SEQ ID NO: 398371 - DNA, 33 bp, Homo sapien
gagtggttgaaatgaactgagttattactaact

SEQ ID NO: 398372 - DNA, 33 bp, Homo sapien
gagtggttgaaatgaattgagttattactaact

SEQ ID NO: 398373 - DNA, 33 bp, Homo sapien
agagcatggagtctgaacttacacttcatttca

SEQ ID NO: 398374 - DNA, 33 bp, Homo sapien
agagcatggagtctgatcttacacttcatttca

SEQ ID NO: 398375 - DNA, 33 bp, Homo sapien
tttaaaatgcctttaacgtttacaggattgtta

SEQ ID NO: 398376 - DNA, 33 bp, Homo sapien
tttaaaatgcctttaatgtttacaggattgtta

SEQ ID NO: 398377 - DNA, 33 bp, Homo sapien
agcttttgtggaggcaccataccgctttccaca

SEQ ID NO: 398378 - DNA, 33 bp, Homo sapien
agcttttgtggaggcagcataccgctttccaca

SEQ ID NO: 398379 - DNA, 33 bp, Homo sapien
gattacttattacaaacgcagagctgcttgccc

SEQ ID NO: 398380 - DNA, 33 bp, Homo sapien
gattacttattacaaatgcagagctgcttgccc

SEQ ID NO: 398381 - DNA, 33 bp, Homo sapien
tgcatcaaatggcaacaacaaccataaaaagag

SEQ ID NO: 398382 - DNA, 33 bp, Homo sapien
tgcatcaaatggcaaccacaaccataaaaagag

SEQ ID NO: 398383 - DNA, 33 bp, Homo sapien
gaatggggccaatctacctcttcaggagttctt

SEQ ID NO: 398384 - DNA, 33 bp, Homo sapien
gaatggggccaatctatctcttcaggagttctt

SEQ ID NO: 398385 - DNA, 33 bp, Homo sapien
cggggtcaaattcgaactgggggacgagcttgg

SEQ ID NO: 398386 - DNA, 33 bp, Homo sapien
cggggtcaaattcgaagtgggggacgagcttgg

SEQ ID NO: 398387 - DNA, 33 bp, Homo sapien
caagaaagaaaaaaagaaattctctgtgttcta

SEQ ID NO: 398388 - DNA, 33 bp, Homo sapien
caagaaagaaaaaaaggaattctctgtgttcta

SEQ ID NO: 398389 - DNA, 33 bp, Homo sapien
agtctctattctgcctcaacggcaaacctcagc

SEQ ID NO: 398390 - DNA, 33 bp, Homo sapien
agtctctattctgcctgaacggcaaacctcagc

SEQ ID NO: 398391 - DNA, 33 bp, Homo sapien
aaatatagattcgaaggctgtataagaattttc

SEQ ID NO: 398392 - DNA, 33 bp, Homo sapien
aaatatagattcgaagtctgtataagaattttc

SEQ ID NO: 398393 - DNA, 33 bp, Homo sapien
tggactcattatataacactatctccaaggtgt

SEQ ID NO: 398394 - DNA, 33 bp, Homo sapien
tggactcattatataagactatctccaaggtgt

SEQ ID NO: 398395 - DNA, 33 bp, Homo sapien
cttggctacatgaggacactacatctgaccaga

SEQ ID NO: 398396 - DNA, 33 bp, Homo sapien
cttggctacatgaggatactacatctgaccaga

SEQ ID NO: 398397 - DNA, 33 bp, Homo sapien
agaccctgacgacataaggccaggttgttccag

SEQ ID NO: 398398 - DNA, 33 bp, Homo sapien
agaccctgacgacatagggccaggttgttccag

SEQ ID NO: 398399 - DNA, 33 bp, Homo sapien
ccaggttgttccagccagaactcctgattgtaa

SEQ ID NO: 398400 - DNA, 33 bp, Homo sapien
ccaggttgttccagcctgaactcctgattgtaa

SEQ ID NO: 398401 - DNA, 33 bp, Homo sapien
tttttcttgtcctctgaatttcatatatggcag

SEQ ID NO: 398402 - DNA, 33 bp, Homo sapien
tttttcttgtcctctgcatttcatatatggcag

SEQ ID NO: 398403 - DNA, 33 bp, Homo sapien
aatattctaaggttataaagtcctcataaaata

SEQ ID NO: 398404 - DNA, 33 bp, Homo sapien
aatattctaaggttatgaagtcctcataaaata

SEQ ID NO: 398405 - DNA, 33 bp, Homo sapien
tgtggatacaatgacaagaaagttaggggagct

SEQ ID NO: 398406 - DNA, 33 bp, Homo sapien
tgtggatacaatgacaggaaagttaggggagct

SEQ ID NO: 398407 - DNA, 33 bp, Homo sapien
tcactcgggctagaccgcactgtctttttttgt

SEQ ID NO: 398408 - DNA, 33 bp, Homo sapien
tcactcgggctagacctcactgtctttttttgt

SEQ ID NO: 398409 - DNA, 33 bp, Homo sapien
atttgaatatactggacgtgttagttgaattag

SEQ ID NO: 398410 - DNA, 33 bp, Homo sapien
atttgaatatactggatgtgttagttgaattag

SEQ ID NO: 398411 - DNA, 33 bp, Homo sapien
tactgtgtaagttttacgcgtgcatgctcatgc

SEQ ID NO: 398412 - DNA, 33 bp, Homo sapien
tactgtgtaagttttatgcgtgcatgctcatgc

SEQ ID NO: 398413 - DNA, 33 bp, Homo sapien
ccagatacagtagttcaagaaagtgcagcagct

SEQ ID NO: 398414 - DNA, 33 bp, Homo sapien
ccagatacagtagttccagaaagtgcagcagct

SEQ ID NO: 398415 - DNA, 33 bp, Homo sapien
aatgacttctttcatcactaacattcctatgat

SEQ ID NO: 398416 - DNA, 33 bp, Homo sapien
aatgacttctttcatcgctaacattcctatgat

SEQ ID NO: 398417 - DNA, 33 bp, Homo sapien
gaaatttcaggtcgaactgtcaaatgctggagg

SEQ ID NO: 398418 - DNA, 33 bp, Homo sapien
gaaatttcaggtcgaattgtcaaatgctggagg

SEQ ID NO: 398419 - DNA, 33 bp, Homo sapien
cgctactgctgagtcacggatatcttttacctt

SEQ ID NO: 398420 - DNA, 33 bp, Homo sapien
cgctactgctgagtcatggatatcttttacctt

SEQ ID NO: 398421 - DNA, 33 bp, Homo sapien
gcccccaaaactctacaactggttcacatctct

SEQ ID NO: 398422 - DNA, 33 bp, Homo sapien
gcccccaaaactctacgactggttcacatctct

SEQ ID NO: 398423 - DNA, 33 bp, Homo sapien
gctttccttttagatacagatgtgtcctaccta

SEQ ID NO: 398424 - DNA, 33 bp, Homo sapien
gctttccttttagatatagatgtgtcctaccta

SEQ ID NO: 398425 - DNA, 33 bp, Homo sapien
tccatatagtcatccaactctttctgatatgaa

SEQ ID NO: 398426 - DNA, 33 bp, Homo sapien
tccatatagtcatccagctctttctgatatgaa

SEQ ID NO: 398427 - DNA, 33 bp, Homo sapien
cgtatctgcaagaccccgagttcaatcctgagt

SEQ ID NO: 398428 - DNA, 33 bp, Homo sapien
cgtatctgcaagacccggagttcaatcctgagt

SEQ ID NO: 398429 - DNA, 33 bp, Homo sapien
actgtgtaagacgtccaactaccctgctagagg

SEQ ID NO: 398430 - DNA, 33 bp, Homo sapien
actgtgtaagacgtccgactaccctgctagagg

SEQ ID NO: 398431 - DNA, 33 bp, Homo sapien
aaagggtgagtcctaacgcagaagcaaagctcc

SEQ ID NO: 398432 - DNA, 33 bp, Homo sapien
aaagggtgagtcctaatgcagaagcaaagctcc

SEQ ID NO: 398433 - DNA, 33 bp, Homo sapien
gtcaggactttgtacacacccatgaccttacca

SEQ ID NO: 398434 - DNA, 33 bp, Homo sapien
gtcaggactttgtacagacccatgaccttacca

SEQ ID NO: 398435 - DNA, 33 bp, Homo sapien
ggttgttcttcccacgaatccaaaggctgtaca

SEQ ID NO: 398436 - DNA, 33 bp, Homo sapien
ggttgttcttcccacggatccaaaggctgtaca

SEQ ID NO: 398437 - DNA, 33 bp, Homo sapien
aaggcaagggactctcaccctattcagacacat

SEQ ID NO: 398438 - DNA, 33 bp, Homo sapien
aaggcaagggactctcgccctattcagacacat

SEQ ID NO: 398439 - DNA, 33 bp, Homo sapien
agaagactgtcttccaacgttttcagggtaatt

SEQ ID NO: 398440 - DNA, 33 bp, Homo sapien
agaagactgtcttccagcgttttcagggtaatt

SEQ ID NO: 398441 - DNA, 33 bp, Homo sapien
tccgacaccagaagtaagaggaagaagcttttt

SEQ ID NO: 398442 - DNA, 33 bp, Homo sapien
tccgacaccagaagtaggaggaagaagcttttt

SEQ ID NO: 398443 - DNA, 33 bp, Homo sapien
attttcacagaagggacgacgttccatggagta

SEQ ID NO: 398444 - DNA, 33 bp, Homo sapien
attttcacagaagggatgacgttccatggagta

SEQ ID NO: 398445 - DNA, 33 bp, Homo sapien
gcatttctttagcttgaagccagagtcctagaa

SEQ ID NO: 398446 - DNA, 33 bp, Homo sapien
gcatttctttagcttgtagccagagtcctagaa

SEQ ID NO: 398447 - DNA, 33 bp, Homo sapien
actgttatcagagctaagttattcctgactttc

SEQ ID NO: 398448 - DNA, 33 bp, Homo sapien
actgttatcagagctatgttattcctgactttc

SEQ ID NO: 398449 - DNA, 33 bp, Homo sapien
gagtgtcctgaaatgaaagtgtcgcttttaagg

SEQ ID NO: 398450 - DNA, 33 bp, Homo sapien
gagtgtcctgaaatgagagtgtcgcttttaagg

SEQ ID NO: 398451 - DNA, 33 bp, Homo sapien
caggcctgcacagaacactggaggaaatacaaa

SEQ ID NO: 398452 - DNA, 33 bp, Homo sapien
caggcctgcacagaacgctggaggaaatacaaa

SEQ ID NO: 398453 - DNA, 33 bp, Homo sapien
ctcactaactagatgaagggatccatactccaa

SEQ ID NO: 398454 - DNA, 33 bp, Homo sapien
ctcactaactagatgaggggatccatactccaa

SEQ ID NO: 398455 - DNA, 33 bp, Homo sapien
aatacaatttagtccacaagaaatcataaaaca

SEQ ID NO: 398456 - DNA, 33 bp, Homo sapien
aatacaatttagtccataagaaatcataaaaca

SEQ ID NO: 398457 - DNA, 33 bp, Homo sapien
aaataggcctgaaaaaataagatagtgtcccta

SEQ ID NO: 398458 - DNA, 33 bp, Homo sapien
aaataggcctgaaaaagtaagatagtgtcccta

SEQ ID NO: 398459 - DNA, 33 bp, Homo sapien
tatttctgaaaatggacgtgtttggtcttcgtg

SEQ ID NO: 398460 - DNA, 33 bp, Homo sapien
tatttctgaaaatggatgtgtttggtcttcgtg

SEQ ID NO: 398461 - DNA, 33 bp, Homo sapien
taaattgtaaatcactcacctacttacaacttt

SEQ ID NO: 398462 - DNA, 33 bp, Homo sapien
taaattgtaaatcactgacctacttacaacttt

SEQ ID NO: 398463 - DNA, 33 bp, Homo sapien
atgaagtctctgctataaaagaatccctgggta

SEQ ID NO: 398464 - DNA, 33 bp, Homo sapien
atgaagtctctgctatgaaagaatccctgggta

SEQ ID NO: 398465 - DNA, 33 bp, Homo sapien
gtagttgggaaatgtacccttttagctgggtgc

SEQ ID NO: 398466 - DNA, 33 bp, Homo sapien
gtagttgggaaatgtagccttttagctgggtgc

SEQ ID NO: 398467 - DNA, 33 bp, Homo sapien
gtaggcaaatatttatcaacaagtaagggcaac

SEQ ID NO: 398468 - DNA, 33 bp, Homo sapien
gtaggcaaatatttatgaacaagtaagggcaac

SEQ ID NO: 398469 - DNA, 33 bp, Homo sapien
atgctgtttggataaaccatcatccaagtttga

SEQ ID NO: 398470 - DNA, 33 bp, Homo sapien
atgctgtttggataaatcatcatccaagtttga

SEQ ID NO: 398471 - DNA, 33 bp, Homo sapien
ctgacttcccatactcaccatactatctacacc

SEQ ID NO: 398472 - DNA, 33 bp, Homo sapien
ctgacttcccatactcgccatactatctacacc

SEQ ID NO: 398473 - DNA, 33 bp, Homo sapien
atgtcaatcttagcaccgaaatttttaagggtc

SEQ ID NO: 398474 - DNA, 33 bp, Homo sapien
atgtcaatcttagcactgaaatttttaagggtc

SEQ ID NO: 398475 - DNA, 33 bp, Homo sapien
ggcacaaagagatataaaagatgtatttcatgt

SEQ ID NO: 398476 - DNA, 33 bp, Homo sapien
ggcacaaagagatatagaagatgtatttcatgt

SEQ ID NO: 398477 - DNA, 33 bp, Homo sapien
aagaaacttcagctaacggaatacatttttctg

SEQ ID NO: 398478 - DNA, 33 bp, Homo sapien
aagaaacttcagctaatggaatacatttttctg

SEQ ID NO: 398479 - DNA, 33 bp, Homo sapien
tgagatgaacaaatacaaggcagtgtcctatga

SEQ ID NO: 398480 - DNA, 33 bp, Homo sapien
tgagatgaacaaatacgaggcagtgtcctatga

SEQ ID NO: 398481 - DNA, 33 bp, Homo sapien
tgcctttgtatggatcactttgtatgttaagcc

SEQ ID NO: 398482 - DNA, 33 bp, Homo sapien
tgcctttgtatggatcgctttgtatgttaagcc

SEQ ID NO: 398483 - DNA, 33 bp, Homo sapien
ctcaggtgtttgcactgaagaattacaacctag

SEQ ID NO: 398484 - DNA, 33 bp, Homo sapien
ctcaggtgtttgcacttaagaattacaacctag

SEQ ID NO: 398485 - DNA, 33 bp, Homo sapien
ttcttcaaaatcttaaagcattctagcatcaac

SEQ ID NO: 398486 - DNA, 33 bp, Homo sapien
ttcttcaaaatcttaacgcattctagcatcaac

SEQ ID NO: 398487 - DNA, 33 bp, Homo sapien
ctgtacaccactattgcatcttggaagtaaata

SEQ ID NO: 398488 - DNA, 33 bp, Homo sapien
ctgtacaccactattgtatcttggaagtaaata

SEQ ID NO: 398489 - DNA, 33 bp, Homo sapien
tttaatacaattcatcaattctcttttttcatt

SEQ ID NO: 398490 - DNA, 33 bp, Homo sapien
tttaatacaattcatctattctcttttttcatt

SEQ ID NO: 398491 - DNA, 33 bp, Homo sapien
attgattaatcttaccagagatttgtccactgt

SEQ ID NO: 398492 - DNA, 33 bp, Homo sapien
attgattaatcttaccggagatttgtccactgt

SEQ ID NO: 398493 - DNA, 33 bp, Homo sapien
gacaggagcgaaattccatctcaaaaagagaat

SEQ ID NO: 398494 - DNA, 33 bp, Homo sapien
gacaggagcgaaattctatctcaaaaagagaat

SEQ ID NO: 398495 - DNA, 33 bp, Homo sapien
tttgtagacatgaaagaaaggagatattacagt

SEQ ID NO: 398496 - DNA, 33 bp, Homo sapien
tttgtagacatgaaaggaaggagatattacagt

SEQ ID NO: 398497 - DNA, 33 bp, Homo sapien
taattattggccactgaagatgaggtcaaattt

SEQ ID NO: 398498 - DNA, 33 bp, Homo sapien
taattattggccactggagatgaggtcaaattt

SEQ ID NO: 398499 - DNA, 33 bp, Homo sapien
tccagtcttctctgtcaatctcctgcatcaggg

SEQ ID NO: 398500 - DNA, 33 bp, Homo sapien
tccagtcttctctgtccatctcctgcatcaggg

SEQ ID NO: 398501 - DNA, 33 bp, Homo sapien
aacaagatcctaaccacgtcctctgggagcagg

SEQ ID NO: 398502 - DNA, 33 bp, Homo sapien
aacaagatcctaaccatgtcctctgggagcagg

SEQ ID NO: 398503 - DNA, 33 bp, Homo sapien
aggccaaggaaggagacgagctttgtgtggaaa

SEQ ID NO: 398504 - DNA, 33 bp, Homo sapien
aggccaaggaaggagatgagctttgtgtggaaa

SEQ ID NO: 398505 - DNA, 33 bp, Homo sapien
tttctatggaaggaaacgaatctgccaaaggaa

SEQ ID NO: 398506 - DNA, 33 bp, Homo sapien
tttctatggaaggaaatgaatctgccaaaggaa

SEQ ID NO: 398507 - DNA, 33 bp, Homo sapien
aaaggaacgctaagagaagcacttggaaaatat

SEQ ID NO: 398508 - DNA, 33 bp, Homo sapien
aaaggaacgctaagagcagcacttggaaaatat

SEQ ID NO: 398509 - DNA, 33 bp, Homo sapien
caaaaaaaactagtaactaattcatgtcttagt

SEQ ID NO: 398510 - DNA, 33 bp, Homo sapien
caaaaaaaactagtaagtaattcatgtcttagt

SEQ ID NO: 398511 - DNA, 33 bp, Homo sapien
tgattgaggtaaaataggcatacataacacaaa

SEQ ID NO: 398512 - DNA, 33 bp, Homo sapien
tgattgaggtaaaatatgcatacataacacaaa

SEQ ID NO: 398513 - DNA, 33 bp, Homo sapien
ggaaacaactgattataaacaggaaaatgtcta

SEQ ID NO: 398514 - DNA, 33 bp, Homo sapien
ggaaacaactgattatcaacaggaaaatgtcta

SEQ ID NO: 398515 - DNA, 33 bp, Homo sapien
ccttggctaatagtaacgtatcagtagcagttc

SEQ ID NO: 398516 - DNA, 33 bp, Homo sapien
ccttggctaatagtaatgtatcagtagcagttc

SEQ ID NO: 398517 - DNA, 33 bp, Homo sapien
aagaagccttctcacaccatcccaggcagaatt

SEQ ID NO: 398518 - DNA, 33 bp, Homo sapien
aagaagccttctcacatcatcccaggcagaatt

SEQ ID NO: 398519 - DNA, 33 bp, Homo sapien
agagaaagaaagctcgaaggatgtgaaataaca

SEQ ID NO: 398520 - DNA, 33 bp, Homo sapien
agagaaagaaagctcggaggatgtgaaataaca

SEQ ID NO: 398521 - DNA, 33 bp, Homo sapien
atggagtagagaattaagtagaagttcagaagg

SEQ ID NO: 398522 - DNA, 33 bp, Homo sapien
atggagtagagaattaggtagaagttcagaagg

SEQ ID NO: 398523 - DNA, 33 bp, Homo sapien
gtgtctcagtgctgagaatcccagggtaaactg

SEQ ID NO: 398524 - DNA, 33 bp, Homo sapien
gtgtctcagtgctgaggatcccagggtaaactg

SEQ ID NO: 398525 - DNA, 33 bp, Homo sapien
gcaatagcacagggtaagtgagttctttcagcc

SEQ ID NO: 398526 - DNA, 33 bp, Homo sapien
gcaatagcacagggtacgtgagttctttcagcc

SEQ ID NO: 398527 - DNA, 33 bp, Homo sapien
ctccaagcgtcgtaacaagcttccaggtcaaag

SEQ ID NO: 398528 - DNA, 33 bp, Homo sapien
ctccaagcgtcgtaaccagcttccaggtcaaag

SEQ ID NO: 398529 - DNA, 33 bp, Homo sapien
tacacagtctgagacaacacgcagcagccgaaa

SEQ ID NO: 398530 - DNA, 33 bp, Homo sapien
tacacagtctgagacagcacgcagcagccgaaa

SEQ ID NO: 398531 - DNA, 33 bp, Homo sapien
cgatttatcttgaaataaaaagcatttgcatgg

SEQ ID NO: 398532 - DNA, 33 bp, Homo sapien
cgatttatcttgaaatgaaaagcatttgcatgg

SEQ ID NO: 398533 - DNA, 33 bp, Homo sapien
gtgcagaagttgattacgtgtgttgaagattca

SEQ ID NO: 398534 - DNA, 33 bp, Homo sapien
gtgcagaagttgattatgtgtgttgaagattca

SEQ ID NO: 398535 - DNA, 33 bp, Homo sapien
gtgagaactaaacaggaaagtgcaatatggagg

SEQ ID NO: 398536 - DNA, 33 bp, Homo sapien
gtgagaactaaacagggaagtgcaatatggagg

SEQ ID NO: 398537 - DNA, 33 bp, Homo sapien
gcttctcttggatgagaaactaggttgctgggg

SEQ ID NO: 398538 - DNA, 33 bp, Homo sapien
gcttctcttggatgaggaactaggttgctgggg

SEQ ID NO: 398539 - DNA, 33 bp, Homo sapien
caaggcctttggagcgcacactgttgagatcct

SEQ ID NO: 398540 - DNA, 33 bp, Homo sapien
caaggcctttggagcgtacactgttgagatcct

SEQ ID NO: 398541 - DNA, 33 bp, Homo sapien
atatatacgatagatacgtgtgctatatatgag

SEQ ID NO: 398542 - DNA, 33 bp, Homo sapien
atatatacgatagatatgtgtgctatatatgag

SEQ ID NO: 398543 - DNA, 33 bp, Homo sapien
atctctcttttaaagacgtgccttttctattcc

SEQ ID NO: 398544 - DNA, 33 bp, Homo sapien
atctctcttttaaagatgtgccttttctattcc

SEQ ID NO: 398545 - DNA, 33 bp, Homo sapien
aaatggctggctattcactatattttgcagaac

SEQ ID NO: 398546 - DNA, 33 bp, Homo sapien
aaatggctggctattcgctatattttgcagaac

SEQ ID NO: 398547 - DNA, 33 bp, Homo sapien
agatgtatgccacatcaaagtgtcttgcttaca

SEQ ID NO: 398548 - DNA, 33 bp, Homo sapien
agatgtatgccacatcgaagtgtcttgcttaca

SEQ ID NO: 398549 - DNA, 33 bp, Homo sapien
tataatcattgcaaagaaaaagcaaattactaa

SEQ ID NO: 398550 - DNA, 33 bp, Homo sapien
tataatcattgcaaaggaaaagcaaattactaa

SEQ ID NO: 398551 - DNA, 33 bp, Homo sapien
aattaaatgagatataaaagagaagttggttta

SEQ ID NO: 398552 - DNA, 33 bp, Homo sapien
aattaaatgagatatagaagagaagttggttta

SEQ ID NO: 398553 - DNA, 33 bp, Homo sapien
gccaatcacctcgaaaattatcctttctatagt

SEQ ID NO: 398554 - DNA, 33 bp, Homo sapien
gccaatcacctcgaaatttatcctttctatagt

SEQ ID NO: 398555 - DNA, 33 bp, Homo sapien
attagtagatttgtgcactgtacaattgcagcc

SEQ ID NO: 398556 - DNA, 33 bp, Homo sapien
attagtagatttgtgcgctgtacaattgcagcc

SEQ ID NO: 398557 - DNA, 33 bp, Homo sapien
aggaaaccaaagcctaaaatggtaaactgactt

SEQ ID NO: 398558 - DNA, 33 bp, Homo sapien
aggaaaccaaagcctagaatggtaaactgactt

SEQ ID NO: 398559 - DNA, 33 bp, Homo sapien
ccgtctaatagaaagacgttccatgccgcctgt

SEQ ID NO: 398560 - DNA, 33 bp, Homo sapien
ccgtctaatagaaagatgttccatgccgcctgt

SEQ ID NO: 398561 - DNA, 33 bp, Homo sapien
tttgtacctttggaatcatgtgccatgtacatg

SEQ ID NO: 398562 - DNA, 33 bp, Homo sapien
tttgtacctttggaattatgtgccatgtacatg

SEQ ID NO: 398563 - DNA, 33 bp, Homo sapien
aaggcaattttacaagacaactttgagagatgt

SEQ ID NO: 398564 - DNA, 33 bp, Homo sapien
aaggcaattttacaaggcaactttgagagatgt

SEQ ID NO: 398565 - DNA, 33 bp, Homo sapien
aggacttaaacctaagaccggcaactgtaaaaa

SEQ ID NO: 398566 - DNA, 33 bp, Homo sapien
aggacttaaacctaaggccggcaactgtaaaaa

SEQ ID NO: 398567 - DNA, 33 bp, Homo sapien
ccacatgaaatgtaaaaccttttgctcttgact

SEQ ID NO: 398568 - DNA, 33 bp, Homo sapien
ccacatgaaatgtaaagccttttgctcttgact

SEQ ID NO: 398569 - DNA, 33 bp, Homo sapien
gccagtgcatagtagacactagggaagtgttta

SEQ ID NO: 398570 - DNA, 33 bp, Homo sapien
gccagtgcatagtagatactagggaagtgttta

SEQ ID NO: 398571 - DNA, 33 bp, Homo sapien
tggtagctagagccacagaggaaaggcaggtgc

SEQ ID NO: 398572 - DNA, 33 bp, Homo sapien
tggtagctagagccacggaggaaaggcaggtgc

SEQ ID NO: 398573 - DNA, 33 bp, Homo sapien
cagggaagttcttctaaaagagagcttgatgag

SEQ ID NO: 398574 - DNA, 33 bp, Homo sapien
cagggaagttcttctagaagagagcttgatgag

SEQ ID NO: 398575 - DNA, 33 bp, Homo sapien
gctgtaaagaatgctcaatgaactgggatgcac

SEQ ID NO: 398576 - DNA, 33 bp, Homo sapien
gctgtaaagaatgctccatgaactgggatgcac

SEQ ID NO: 398577 - DNA, 33 bp, Homo sapien
attttatggtgtcagccaataaagcagatggga

SEQ ID NO: 398578 - DNA, 33 bp, Homo sapien
attttatggtgtcagctaataaagcagatggga

SEQ ID NO: 398579 - DNA, 33 bp, Homo sapien
aaaacgtacttgccccaatattattctcaccat

SEQ ID NO: 398580 - DNA, 33 bp, Homo sapien
aaaacgtacttgccccgatattattctcaccat

SEQ ID NO: 398581 - DNA, 33 bp, Homo sapien
gtggtggaacttgagacattgcaatttgggctt

SEQ ID NO: 398582 - DNA, 33 bp, Homo sapien
gtggtggaacttgagatattgcaatttgggctt

SEQ ID NO: 398583 - DNA, 33 bp, Homo sapien
gggaattaacctgcaacaaacaaatagagaaaa

SEQ ID NO: 398584 - DNA, 33 bp, Homo sapien
gggaattaacctgcaagaaacaaatagagaaaa

SEQ ID NO: 398585 - DNA, 33 bp, Homo sapien
aatatgaggaaatcccacctctatgaaaaatac

SEQ ID NO: 398586 - DNA, 33 bp, Homo sapien
aatatgaggaaatcccgcctctatgaaaaatac

SEQ ID NO: 398587 - DNA, 33 bp, Homo sapien
aagagttgctttgacacggaattgtgagctgca

SEQ ID NO: 398588 - DNA, 33 bp, Homo sapien
aagagttgctttgacatggaattgtgagctgca

SEQ ID NO: 398589 - DNA, 33 bp, Homo sapien
actgttaagaatagcccgaagcctgcctgattc

SEQ ID NO: 398590 - DNA, 33 bp, Homo sapien
actgttaagaatagcctgaagcctgcctgattc

SEQ ID NO: 398591 - DNA, 33 bp, Homo sapien
gtacacaccgatgctcaacaaagattgggtacc

SEQ ID NO: 398592 - DNA, 33 bp, Homo sapien
gtacacaccgatgctcgacaaagattgggtacc

SEQ ID NO: 398593 - DNA, 33 bp, Homo sapien
gtgcagtttgataagaacaccaatggcctggag

SEQ ID NO: 398594 - DNA, 33 bp, Homo sapien
gtgcagtttgataagagcaccaatggcctggag

SEQ ID NO: 398595 - DNA, 33 bp, Homo sapien
tgtttgactagatccacgtgactgattaaaaag

SEQ ID NO: 398596 - DNA, 33 bp, Homo sapien
tgtttgactagatccatgtgactgattaaaaag

SEQ ID NO: 398597 - DNA, 33 bp, Homo sapien
aaaagagaatactgaaagcggagagcaaactga

SEQ ID NO: 398598 - DNA, 33 bp, Homo sapien
aaaagagaatactgaaggcggagagcaaactga

SEQ ID NO: 398599 - DNA, 33 bp, Homo sapien
aagtgacttggcaaggaacagagcctggagtgg

SEQ ID NO: 398600 - DNA, 33 bp, Homo sapien
aagtgacttggcaagggacagagcctggagtgg

SEQ ID NO: 398601 - DNA, 33 bp, Homo sapien
cttatttagcgtatcacaacttagaccatcgga

SEQ ID NO: 398602 - DNA, 33 bp, Homo sapien
cttatttagcgtatcagaacttagaccatcgga

SEQ ID NO: 398603 - DNA, 33 bp, Homo sapien
ctcaggaatgaggttacgatgcttgcaaacaca

SEQ ID NO: 398604 - DNA, 33 bp, Homo sapien
ctcaggaatgaggttatgatgcttgcaaacaca

SEQ ID NO: 398605 - DNA, 33 bp, Homo sapien
accagggccttctaaaactcataaggataatat

SEQ ID NO: 398606 - DNA, 33 bp, Homo sapien
accagggccttctaaagctcataaggataatat

SEQ ID NO: 398607 - DNA, 33 bp, Homo sapien
ggtagggctcatcctcatattttctgttggagc

SEQ ID NO: 398608 - DNA, 33 bp, Homo sapien
ggtagggctcatcctcgtattttctgttggagc

SEQ ID NO: 398609 - DNA, 33 bp, Homo sapien
ctgggaaacagaggaacggagggaccaaccttt

SEQ ID NO: 398610 - DNA, 33 bp, Homo sapien
ctgggaaacagaggaatggagggaccaaccttt

SEQ ID NO: 398611 - DNA, 33 bp, Homo sapien
aaaggataagcaaaggaccgtatcaattctgtg

SEQ ID NO: 398612 - DNA, 33 bp, Homo sapien
aaaggataagcaaagggccgtatcaattctgtg

SEQ ID NO: 398613 - DNA, 33 bp, Homo sapien
gttttctcataacccaaacgaaatgcttcctaa

SEQ ID NO: 398614 - DNA, 33 bp, Homo sapien
gttttctcataacccatacgaaatgcttcctaa

SEQ ID NO: 398615 - DNA, 33 bp, Homo sapien
gatggattcgaaatggaatatgaaagccaggca

SEQ ID NO: 398616 - DNA, 33 bp, Homo sapien
gatggattcgaaatgggatatgaaagccaggca

SEQ ID NO: 398617 - DNA, 33 bp, Homo sapien
cctactattcaaactacgatgcaccctgccttt

SEQ ID NO: 398618 - DNA, 33 bp, Homo sapien
cctactattcaaactatgatgcaccctgccttt

SEQ ID NO: 398619 - DNA, 33 bp, Homo sapien
gtggataatatagtcacgtttcaaaaatttaaa

SEQ ID NO: 398620 - DNA, 33 bp, Homo sapien
gtggataatatagtcatgtttcaaaaatttaaa

SEQ ID NO: 398621 - DNA, 33 bp, Homo sapien
agtgatgctaggtttccagagatgctactgtcc

SEQ ID NO: 398622 - DNA, 33 bp, Homo sapien
agtgatgctaggtttctagagatgctactgtcc

SEQ ID NO: 398623 - DNA, 33 bp, Homo sapien
cacgaggccctcactgcaaactgtcagatgcag

SEQ ID NO: 398624 - DNA, 33 bp, Homo sapien
cacgaggccctcactggaaactgtcagatgcag

SEQ ID NO: 398625 - DNA, 33 bp, Homo sapien
attttccatttccctcactcaagagagcaaaaa

SEQ ID NO: 398626 - DNA, 33 bp, Homo sapien
attttccatttccctcgctcaagagagcaaaaa

SEQ ID NO: 398627 - DNA, 33 bp, Homo sapien
ttgctttatgaagaaactacctcaagaagacat

SEQ ID NO: 398628 - DNA, 33 bp, Homo sapien
ttgctttatgaagaaattacctcaagaagacat

SEQ ID NO: 398629 - DNA, 33 bp, Homo sapien
tgggatgaactcaaagccatctcaaaatacata

SEQ ID NO: 398630 - DNA, 33 bp, Homo sapien
tgggatgaactcaaaggcatctcaaaatacata

SEQ ID NO: 398631 - DNA, 33 bp, Homo sapien
tggctagacatcattgaatatacctaatgctta

SEQ ID NO: 398632 - DNA, 33 bp, Homo sapien
tggctagacatcattgtatatacctaatgctta

SEQ ID NO: 398633 - DNA, 33 bp, Homo sapien
acgtggatcagaaaccaaacagcactaaacagc

SEQ ID NO: 398634 - DNA, 33 bp, Homo sapien
acgtggatcagaaaccgaacagcactaaacagc

SEQ ID NO: 398635 - DNA, 33 bp, Homo sapien
gttatctagggtgatacgaaggaatccatgtta

SEQ ID NO: 398636 - DNA, 33 bp, Homo sapien
gttatctagggtgatatgaaggaatccatgtta

SEQ ID NO: 398637 - DNA, 33 bp, Homo sapien
ggaactgcctaactacaaatttctcagaacgta

SEQ ID NO: 398638 - DNA, 33 bp, Homo sapien
ggaactgcctaactacgaatttctcagaacgta

SEQ ID NO: 398639 - DNA, 33 bp, Homo sapien
atttagatttgtgtgaagtgcaccctgtgatgc

SEQ ID NO: 398640 - DNA, 33 bp, Homo sapien
atttagatttgtgtgatgtgcaccctgtgatgc

SEQ ID NO: 398641 - DNA, 33 bp, Homo sapien
ctttacgcctagaaaacattggagtcttgatga

SEQ ID NO: 398642 - DNA, 33 bp, Homo sapien
ctttacgcctagaaaagattggagtcttgatga

SEQ ID NO: 398643 - DNA, 33 bp, Homo sapien
aagtcaatgtcgatcactcttatcaagtctcat

SEQ ID NO: 398644 - DNA, 33 bp, Homo sapien
aagtcaatgtcgatcagtcttatcaagtctcat

SEQ ID NO: 398645 - DNA, 33 bp, Homo sapien
tacgataactatataacctttcctccaacttat

SEQ ID NO: 398646 - DNA, 33 bp, Homo sapien
tacgataactatataatctttcctccaacttat

SEQ ID NO: 398647 - DNA, 33 bp, Homo sapien
tttcaatctactaggaaggagtattatataaag

SEQ ID NO: 398648 - DNA, 33 bp, Homo sapien
tttcaatctactaggatggagtattatataaag

SEQ ID NO: 398649 - DNA, 33 bp, Homo sapien
tgttgaagctgagagagtaagttgtttgctcaa

SEQ ID NO: 398650 - DNA, 33 bp, Homo sapien
tgttgaagctgagagattaagttgtttgctcaa

SEQ ID NO: 398651 - DNA, 33 bp, Homo sapien
aaaatgctcaaaaatcaaactgatggggggcat

SEQ ID NO: 398652 - DNA, 33 bp, Homo sapien
aaaatgctcaaaaatcgaactgatggggggcat

SEQ ID NO: 398653 - DNA, 33 bp, Homo sapien
cttatcgtcagacaccacattatggaaatctac

SEQ ID NO: 398654 - DNA, 33 bp, Homo sapien
cttatcgtcagacaccgcattatggaaatctac

SEQ ID NO: 398655 - DNA, 33 bp, Homo sapien
cttgacacatacggggcagagctatttcatcac

SEQ ID NO: 398656 - DNA, 33 bp, Homo sapien
cttgacacatacggggtagagctatttcatcac

SEQ ID NO: 398657 - DNA, 33 bp, Homo sapien
actgttgctttacccacggatagtttatgaatg

SEQ ID NO: 398658 - DNA, 33 bp, Homo sapien
actgttgctttacccatggatagtttatgaatg

SEQ ID NO: 398659 - DNA, 33 bp, Homo sapien
aacgttgtgagaaatcacttcaaaccttttctc

SEQ ID NO: 398660 - DNA, 33 bp, Homo sapien
aacgttgtgagaaatcgcttcaaaccttttctc

SEQ ID NO: 398661 - DNA, 33 bp, Homo sapien
ccaatgccacaacatgactggaatgctcagaca

SEQ ID NO: 398662 - DNA, 33 bp, Homo sapien
ccaatgccacaacatggctggaatgctcagaca

SEQ ID NO: 398663 - DNA, 33 bp, Homo sapien
ctccaggttacttcatggtctcaaatagctatt

SEQ ID NO: 398664 - DNA, 33 bp, Homo sapien
ctccaggttacttcattgtctcaaatagctatt

SEQ ID NO: 398665 - DNA, 33 bp, Homo sapien
agagcttggtcacataacaattaccagcccaaa

SEQ ID NO: 398666 - DNA, 33 bp, Homo sapien
agagcttggtcacatagcaattaccagcccaaa

SEQ ID NO: 398667 - DNA, 33 bp, Homo sapien
ggcaagcgggtgcttccgaaagacacgaaaaga

SEQ ID NO: 398668 - DNA, 33 bp, Homo sapien
ggcaagcgggtgcttctgaaagacacgaaaaga

SEQ ID NO: 398669 - DNA, 33 bp, Homo sapien
tgtcaggcccaataggaacaggacttgaggtct

SEQ ID NO: 398670 - DNA, 33 bp, Homo sapien
tgtcaggcccaatagggacaggacttgaggtct

SEQ ID NO: 398671 - DNA, 33 bp, Homo sapien
gatattcagggttggaactatttatgcgtcaat

SEQ ID NO: 398672 - DNA, 33 bp, Homo sapien
gatattcagggttggacctatttatgcgtcaat

SEQ ID NO: 398673 - DNA, 33 bp, Homo sapien
cattcagtcgcaactccaatctcactaacttta

SEQ ID NO: 398674 - DNA, 33 bp, Homo sapien
cattcagtcgcaactctaatctcactaacttta

SEQ ID NO: 398675 - DNA, 33 bp, Homo sapien
catggtgagcatagaaacatctggcctagaaaa

SEQ ID NO: 398676 - DNA, 33 bp, Homo sapien
catggtgagcatagaagcatctggcctagaaaa

SEQ ID NO: 398677 - DNA, 33 bp, Homo sapien
atttaatctgtgaacaactctcagtccatgatt

SEQ ID NO: 398678 - DNA, 33 bp, Homo sapien
atttaatctgtgaacagctctcagtccatgatt

SEQ ID NO: 398679 - DNA, 33 bp, Homo sapien
ccccacagtcacatctcaatgcagttttgtctc

SEQ ID NO: 398680 - DNA, 33 bp, Homo sapien
ccccacagtcacatcttaatgcagttttgtctc

SEQ ID NO: 398681 - DNA, 33 bp, Homo sapien
aaattgtgggaagacacgaggcaagtgcaatat

SEQ ID NO: 398682 - DNA, 33 bp, Homo sapien
aaattgtgggaagacatgaggcaagtgcaatat

SEQ ID NO: 398683 - DNA, 33 bp, Homo sapien
ggcactatgaggaagacggtttttacactttgg

SEQ ID NO: 398684 - DNA, 33 bp, Homo sapien
ggcactatgaggaagatggtttttacactttgg

SEQ ID NO: 398685 - DNA, 33 bp, Homo sapien
aagaccatgagatccactcacacaataatgacc

SEQ ID NO: 398686 - DNA, 33 bp, Homo sapien
aagaccatgagatccattcacacaataatgacc

SEQ ID NO: 398687 - DNA, 33 bp, Homo sapien
tataaatatgctcataaagaagttcatcatttc

SEQ ID NO: 398688 - DNA, 33 bp, Homo sapien
tataaatatgctcatatagaagttcatcatttc

SEQ ID NO: 398689 - DNA, 33 bp, Homo sapien
tgtggagctactgacacatatcctgaaatttat

SEQ ID NO: 398690 - DNA, 33 bp, Homo sapien
tgtggagctactgacatatatcctgaaatttat

SEQ ID NO: 398691 - DNA, 33 bp, Homo sapien
gacaacctaaaaggacaactgattcctacttta

SEQ ID NO: 398692 - DNA, 33 bp, Homo sapien
gacaacctaaaaggacgactgattcctacttta

SEQ ID NO: 398693 - DNA, 33 bp, Homo sapien
tttagcacttttggtacgttttgattctcaact

SEQ ID NO: 398694 - DNA, 33 bp, Homo sapien
tttagcacttttggtatgttttgattctcaact

SEQ ID NO: 398695 - DNA, 33 bp, Homo sapien
atgctcacaactcaaaatacaaccaatgaaact

SEQ ID NO: 398696 - DNA, 33 bp, Homo sapien
atgctcacaactcaaactacaaccaatgaaact

SEQ ID NO: 398697 - DNA, 33 bp, Homo sapien
cgctgaaggagctatcacaaaatcccatgcctt

SEQ ID NO: 398698 - DNA, 33 bp, Homo sapien
cgctgaaggagctatctcaaaatcccatgcctt

SEQ ID NO: 398699 - DNA, 33 bp, Homo sapien
agctttgtgagtgagacagaattccttttgagg

SEQ ID NO: 398700 - DNA, 33 bp, Homo sapien
agctttgtgagtgagagagaattccttttgagg

SEQ ID NO: 398701 - DNA, 33 bp, Homo sapien
gagtactcagagaggacgaggtgaaaatgatga

SEQ ID NO: 398702 - DNA, 33 bp, Homo sapien
gagtactcagagaggatgaggtgaaaatgatga

SEQ ID NO: 398703 - DNA, 33 bp, Homo sapien
cataaatagccatccaagctgctgttcaacact

SEQ ID NO: 398704 - DNA, 33 bp, Homo sapien
cataaatagccatccaggctgctgttcaacact

SEQ ID NO: 398705 - DNA, 33 bp, Homo sapien
ggactcatctgatgctaagacgatgggaagaga

SEQ ID NO: 398706 - DNA, 33 bp, Homo sapien
ggactcatctgatgctcagacgatgggaagaga

SEQ ID NO: 398707 - DNA, 33 bp, Homo sapien
tttgcacagggctccacaaaatatgtagtgttc

SEQ ID NO: 398708 - DNA, 33 bp, Homo sapien
tttgcacagggctccataaaatatgtagtgttc

SEQ ID NO: 398709 - DNA, 33 bp, Homo sapien
ctagattccacgcttgcagctcggggctggaac

SEQ ID NO: 398710 - DNA, 33 bp, Homo sapien
ctagattccacgcttgtagctcggggctggaac

SEQ ID NO: 398711 - DNA, 33 bp, Homo sapien
caaaggaaagaacataaccttaaggcaacagta

SEQ ID NO: 398712 - DNA, 33 bp, Homo sapien
caaaggaaagaacatacccttaaggcaacagta

SEQ ID NO: 398713 - DNA, 33 bp, Homo sapien
cataaatgatataatgctgaattactggccacg

SEQ ID NO: 398714 - DNA, 33 bp, Homo sapien
cataaatgatataatgttgaattactggccacg

SEQ ID NO: 398715 - DNA, 33 bp, Homo sapien
ctttacccatgacttaatcatccagggtaccct

SEQ ID NO: 398716 - DNA, 33 bp, Homo sapien
ctttacccatgacttattcatccagggtaccct

SEQ ID NO: 398717 - DNA, 33 bp, Homo sapien
ggagaggaagttagaaactatgacctagagcag

SEQ ID NO: 398718 - DNA, 33 bp, Homo sapien
ggagaggaagttagaatctatgacctagagcag

SEQ ID NO: 398719 - DNA, 33 bp, Homo sapien
tgtctgagcagtacacagcgcaagggaattaat

SEQ ID NO: 398720 - DNA, 33 bp, Homo sapien
tgtctgagcagtacacggcgcaagggaattaat

SEQ ID NO: 398721 - DNA, 33 bp, Homo sapien
tctggtcagaaacctaatttttgtgctggccaa

SEQ ID NO: 398722 - DNA, 33 bp, Homo sapien
tctggtcagaaacctagtttttgtgctggccaa

SEQ ID NO: 398723 - DNA, 33 bp, Homo sapien
ccgtgaacaacctggacggaatgccagccttca

SEQ ID NO: 398724 - DNA, 33 bp, Homo sapien
ccgtgaacaacctggatggaatgccagccttca

SEQ ID NO: 398725 - DNA, 33 bp, Homo sapien
gaagtcaagcgaataacgggaaagaggcatacg

SEQ ID NO: 398726 - DNA, 33 bp, Homo sapien
gaagtcaagcgaataatgggaaagaggcatacg

SEQ ID NO: 398727 - DNA, 33 bp, Homo sapien
ctgcaagaaatcagacaccaagagatgctgcag

SEQ ID NO: 398728 - DNA, 33 bp, Homo sapien
ctgcaagaaatcagacgccaagagatgctgcag

SEQ ID NO: 398729 - DNA, 33 bp, Homo sapien
ccaacttgggtatctacgtggcctagaaggctt

SEQ ID NO: 398730 - DNA, 33 bp, Homo sapien
ccaacttgggtatctatgtggcctagaaggctt

SEQ ID NO: 398731 - DNA, 33 bp, Homo sapien
agcaaaggacaatcaactacctggagaatacag

SEQ ID NO: 398732 - DNA, 33 bp, Homo sapien
agcaaaggacaatcaattacctggagaatacag

SEQ ID NO: 398733 - DNA, 33 bp, Homo sapien
gagggtctcacagtataacagaggacacgagaa

SEQ ID NO: 398734 - DNA, 33 bp, Homo sapien
gagggtctcacagtatgacagaggacacgagaa

SEQ ID NO: 398735 - DNA, 33 bp, Homo sapien
atgtggatttccttccaagactgaacactagct

SEQ ID NO: 398736 - DNA, 33 bp, Homo sapien
atgtggatttccttcccagactgaacactagct

SEQ ID NO: 398737 - DNA, 33 bp, Homo sapien
acattgtcaaaaagtaggtgtaagggcatttta

SEQ ID NO: 398738 - DNA, 33 bp, Homo sapien
acattgtcaaaaagtatgtgtaagggcatttta

SEQ ID NO: 398739 - DNA, 33 bp, Homo sapien
aggaggcgcattttcacattctacttcatggtt

SEQ ID NO: 398740 - DNA, 33 bp, Homo sapien
aggaggcgcattttcatattctacttcatggtt

SEQ ID NO: 398741 - DNA, 33 bp, Homo sapien
tagggttttggggtcagaagaggagaaaccacc

SEQ ID NO: 398742 - DNA, 33 bp, Homo sapien
tagggttttggggtcataagaggagaaaccacc

SEQ ID NO: 398743 - DNA, 33 bp, Homo sapien
cattatcgctttaccacgaatataaaagtaata

SEQ ID NO: 398744 - DNA, 33 bp, Homo sapien
cattatcgctttaccatgaatataaaagtaata

SEQ ID NO: 398745 - DNA, 33 bp, Homo sapien
tttccgctttcaaaccagatgggtgttcaagac

SEQ ID NO: 398746 - DNA, 33 bp, Homo sapien
tttccgctttcaaaccggatgggtgttcaagac

SEQ ID NO: 398747 - DNA, 33 bp, Homo sapien
ctccccccgcttctgaagacaactcagcagttt

SEQ ID NO: 398748 - DNA, 33 bp, Homo sapien
ctccccccgcttctgatgacaactcagcagttt

SEQ ID NO: 398749 - DNA, 33 bp, Homo sapien
agggtcaaaattgccaatgctttattagacaga

SEQ ID NO: 398750 - DNA, 33 bp, Homo sapien
agggtcaaaattgccagtgctttattagacaga

SEQ ID NO: 398751 - DNA, 33 bp, Homo sapien
tgaaaacattgaattcactaagttgtatatgta

SEQ ID NO: 398752 - DNA, 33 bp, Homo sapien
tgaaaacattgaattcgctaagttgtatatgta

SEQ ID NO: 398753 - DNA, 33 bp, Homo sapien
cttcttcttaacgctgccaatgaaccagttagg

SEQ ID NO: 398754 - DNA, 33 bp, Homo sapien
cttcttcttaacgctggcaatgaaccagttagg

SEQ ID NO: 398755 - DNA, 33 bp, Homo sapien
cacaatggctaccaacagagaaaggcagaattc

SEQ ID NO: 398756 - DNA, 33 bp, Homo sapien
cacaatggctaccaacggagaaaggcagaattc

SEQ ID NO: 398757 - DNA, 33 bp, Homo sapien
atctcggcaatcaacaccgattgagagtcagta

SEQ ID NO: 398758 - DNA, 33 bp, Homo sapien
atctcggcaatcaacatcgattgagagtcagta

SEQ ID NO: 398759 - DNA, 33 bp, Homo sapien
aaatctaattactgaccggggtagggagagact

SEQ ID NO: 398760 - DNA, 33 bp, Homo sapien
aaatctaattactgactggggtagggagagact

SEQ ID NO: 398761 - DNA, 33 bp, Homo sapien
tgtagattcaaaagacagtcatgagcagtggaa

SEQ ID NO: 398762 - DNA, 33 bp, Homo sapien
tgtagattcaaaagactgtcatgagcagtggaa

SEQ ID NO: 398763 - DNA, 33 bp, Homo sapien
aagatttataaacacactgctgatatttgaggc

SEQ ID NO: 398764 - DNA, 33 bp, Homo sapien
aagatttataaacacattgctgatatttgaggc

SEQ ID NO: 398765 - DNA, 33 bp, Homo sapien
ataactatcacactggaataacataaaatcaca

SEQ ID NO: 398766 - DNA, 33 bp, Homo sapien
ataactatcacactgggataacataaaatcaca

SEQ ID NO: 398767 - DNA, 33 bp, Homo sapien
catttctgtccttatccacaagttcttaagttg

SEQ ID NO: 398768 - DNA, 33 bp, Homo sapien
catttctgtccttatctacaagttcttaagttg

SEQ ID NO: 398769 - DNA, 33 bp, Homo sapien
tcttcttgaattactaaaaacggcagttcattc

SEQ ID NO: 398770 - DNA, 33 bp, Homo sapien
tcttcttgaattactacaaacggcagttcattc

SEQ ID NO: 398771 - DNA, 33 bp, Homo sapien
atcaagtgttaatacacatatccacagcaaatg

SEQ ID NO: 398772 - DNA, 33 bp, Homo sapien
atcaagtgttaatacatatatccacagcaaatg

SEQ ID NO: 398773 - DNA, 33 bp, Homo sapien
atggtgtgttcacatcacggtcatcagtggggt

SEQ ID NO: 398774 - DNA, 33 bp, Homo sapien
atggtgtgttcacatcgcggtcatcagtggggt

SEQ ID NO: 398775 - DNA, 33 bp, Homo sapien
tttcctttccctaaaccggtattgctgttttga

SEQ ID NO: 398776 - DNA, 33 bp, Homo sapien
tttcctttccctaaactggtattgctgttttga

SEQ ID NO: 398777 - DNA, 33 bp, Homo sapien
atgtcagtgacattcaacttcagcaatgcttat

SEQ ID NO: 398778 - DNA, 33 bp, Homo sapien
atgtcagtgacattcatcttcagcaatgcttat

SEQ ID NO: 398779 - DNA, 33 bp, Homo sapien
ggcggcttttgttacacggttgcaaacctgttc

SEQ ID NO: 398780 - DNA, 33 bp, Homo sapien
ggcggcttttgttacatggttgcaaacctgttc

SEQ ID NO: 398781 - DNA, 33 bp, Homo sapien
cagattgttaaagctcaacattcatttaacttt

SEQ ID NO: 398782 - DNA, 33 bp, Homo sapien
cagattgttaaagctcgacattcatttaacttt

SEQ ID NO: 398783 - DNA, 33 bp, Homo sapien
acccaggagaaggagacgaaagtggattgccag

SEQ ID NO: 398784 - DNA, 33 bp, Homo sapien
acccaggagaaggagatgaaagtggattgccag

SEQ ID NO: 398785 - DNA, 33 bp, Homo sapien
ttgaagaaagaggaaacaccaataaatggaaca

SEQ ID NO: 398786 - DNA, 33 bp, Homo sapien
ttgaagaaagaggaaataccaataaatggaaca

SEQ ID NO: 398787 - DNA, 33 bp, Homo sapien
gttttagcttcaaagacggaaagagttgtggag

SEQ ID NO: 398788 - DNA, 33 bp, Homo sapien
gttttagcttcaaagatggaaagagttgtggag

SEQ ID NO: 398789 - DNA, 33 bp, Homo sapien
gtactctcttgattgactacttaattttatact

SEQ ID NO: 398790 - DNA, 33 bp, Homo sapien
gtactctcttgattgattacttaattttatact

SEQ ID NO: 398791 - DNA, 33 bp, Homo sapien
aaggcaatgagagaatgacctccaagatatttc

SEQ ID NO: 398792 - DNA, 33 bp, Homo sapien
aaggcaatgagagaattacctccaagatatttc

SEQ ID NO: 398793 - DNA, 33 bp, Homo sapien
tgtcccctttgagaaaaggcttagcatggatag

SEQ ID NO: 398794 - DNA, 33 bp, Homo sapien
tgtcccctttgagaaagggcttagcatggatag

SEQ ID NO: 398795 - DNA, 33 bp, Homo sapien
actaatcaatcctatacctgctgcagacaccac

SEQ ID NO: 398796 - DNA, 33 bp, Homo sapien
actaatcaatcctatatctgctgcagacaccac

SEQ ID NO: 398797 - DNA, 33 bp, Homo sapien
agaggacaagatgtgccaggttccgagagacag

SEQ ID NO: 398798 - DNA, 33 bp, Homo sapien
agaggacaagatgtgcgaggttccgagagacag

SEQ ID NO: 398799 - DNA, 33 bp, Homo sapien
ttatgtttctcaaaaacgccaaacttggccggg

SEQ ID NO: 398800 - DNA, 33 bp, Homo sapien
ttatgtttctcaaaaatgccaaacttggccggg

SEQ ID NO: 398801 - DNA, 33 bp, Homo sapien
gtgaccagactgtagcaaatggggaagacgtga

SEQ ID NO: 398802 - DNA, 33 bp, Homo sapien
gtgaccagactgtagcgaatggggaagacgtga

SEQ ID NO: 398803 - DNA, 33 bp, Homo sapien
agtttttatttgtgtaaatgctttaagaatcaa

SEQ ID NO: 398804 - DNA, 33 bp, Homo sapien
agtttttatttgtgtagatgctttaagaatcaa

SEQ ID NO: 398805 - DNA, 33 bp, Homo sapien
attgtagacacttgcaaatcaaaccaggtttct

SEQ ID NO: 398806 - DNA, 33 bp, Homo sapien
attgtagacacttgcagatcaaaccaggtttct

SEQ ID NO: 398807 - DNA, 33 bp, Homo sapien
tctaagcaggaaattagaagaggtttctcagga

SEQ ID NO: 398808 - DNA, 33 bp, Homo sapien
tctaagcaggaaattataagaggtttctcagga

SEQ ID NO: 398809 - DNA, 33 bp, Homo sapien
aattcacatactctgaactttttagtctccact

SEQ ID NO: 398810 - DNA, 33 bp, Homo sapien
aattcacatactctgagctttttagtctccact

SEQ ID NO: 398811 - DNA, 33 bp, Homo sapien
tcctcaagatccggaaaatgctgttggattatt

SEQ ID NO: 398812 - DNA, 33 bp, Homo sapien
tcctcaagatccggaatatgctgttggattatt

SEQ ID NO: 398813 - DNA, 33 bp, Homo sapien
ttctccattgcaaaatcatctgattccgcatgt

SEQ ID NO: 398814 - DNA, 33 bp, Homo sapien
ttctccattgcaaaatgatctgattccgcatgt

SEQ ID NO: 398815 - DNA, 33 bp, Homo sapien
agggattcttacctaaacacatggtcaagattc

SEQ ID NO: 398816 - DNA, 33 bp, Homo sapien
agggattcttacctaaccacatggtcaagattc

SEQ ID NO: 398817 - DNA, 33 bp, Homo sapien
tcagtaagcagttgacgcatggaaatatgggcc

SEQ ID NO: 398818 - DNA, 33 bp, Homo sapien
tcagtaagcagttgactcatggaaatatgggcc

SEQ ID NO: 398819 - DNA, 33 bp, Homo sapien
cttgcaaatatttcacaggacttaggtagcaat

SEQ ID NO: 398820 - DNA, 33 bp, Homo sapien
cttgcaaatatttcacgggacttaggtagcaat

SEQ ID NO: 398821 - DNA, 33 bp, Homo sapien
accaactttgactttaactgtggtccaaatgtc

SEQ ID NO: 398822 - DNA, 33 bp, Homo sapien
accaactttgactttagctgtggtccaaatgtc

SEQ ID NO: 398823 - DNA, 33 bp, Homo sapien
gatcagttatatgttaaactaactttgcagaaa

SEQ ID NO: 398824 - DNA, 33 bp, Homo sapien
gatcagttatatgttagactaactttgcagaaa

SEQ ID NO: 398825 - DNA, 33 bp, Homo sapien
tcaaagcgcagagaccccgcaactgcctgcttc

SEQ ID NO: 398826 - DNA, 33 bp, Homo sapien
tcaaagcgcagagacctcgcaactgcctgcttc

SEQ ID NO: 398827 - DNA, 33 bp, Homo sapien
gggctactcggaagagcccctaccaacaggaca

SEQ ID NO: 398828 - DNA, 33 bp, Homo sapien
gggctactcggaagagtccctaccaacaggaca

SEQ ID NO: 398829 - DNA, 33 bp, Homo sapien
aaatagataatgaaagcaagttaacaaggactc

SEQ ID NO: 398830 - DNA, 33 bp, Homo sapien
aaatagataatgaaaggaagttaacaaggactc

SEQ ID NO: 398831 - DNA, 33 bp, Homo sapien
ggagattatgcacttcaaaaggctggctgaata

SEQ ID NO: 398832 - DNA, 33 bp, Homo sapien
ggagattatgcacttcgaaaggctggctgaata

SEQ ID NO: 398833 - DNA, 33 bp, Homo sapien
aatgagcttaaaacaacgtcaagtctctaataa

SEQ ID NO: 398834 - DNA, 33 bp, Homo sapien
aatgagcttaaaacaatgtcaagtctctaataa

SEQ ID NO: 398835 - DNA, 33 bp, Homo sapien
gatatggtcagttacaatggttggtatcaaata

SEQ ID NO: 398836 - DNA, 33 bp, Homo sapien
gatatggtcagttacagtggttggtatcaaata

SEQ ID NO: 398837 - DNA, 33 bp, Homo sapien
ggtagaaagtccagcaaactcatgtcctaccat

SEQ ID NO: 398838 - DNA, 33 bp, Homo sapien
ggtagaaagtccagcagactcatgtcctaccat

SEQ ID NO: 398839 - DNA, 33 bp, Homo sapien
tatgaacacactaaaaactactacactgcacat

SEQ ID NO: 398840 - DNA, 33 bp, Homo sapien
tatgaacacactaaaacctactacactgcacat

SEQ ID NO: 398841 - DNA, 33 bp, Homo sapien
tcttagtaacattaggccagttctctatattgg

SEQ ID NO: 398842 - DNA, 33 bp, Homo sapien
tcttagtaacattagggcagttctctatattgg

SEQ ID NO: 398843 - DNA, 33 bp, Homo sapien
cccctattctgaaacccaaattgggtcatccaa

SEQ ID NO: 398844 - DNA, 33 bp, Homo sapien
cccctattctgaaacctaaattgggtcatccaa

SEQ ID NO: 398845 - DNA, 33 bp, Homo sapien
ggagtcaggtgataagccctcattttggcaagg

SEQ ID NO: 398846 - DNA, 33 bp, Homo sapien
ggagtcaggtgataagtcctcattttggcaagg

SEQ ID NO: 398847 - DNA, 33 bp, Homo sapien
tgttacccaggctggaacactgctctctctcag

SEQ ID NO: 398848 - DNA, 33 bp, Homo sapien
tgttacccaggctggaccactgctctctctcag

SEQ ID NO: 398849 - DNA, 33 bp, Homo sapien
ttccaaagcaagatggcatatgtaaatgttcaa

SEQ ID NO: 398850 - DNA, 33 bp, Homo sapien
ttccaaagcaagatggtatatgtaaatgttcaa

SEQ ID NO: 398851 - DNA, 33 bp, Homo sapien
catgcccaagctgacaacttcccttggtaaacc

SEQ ID NO: 398852 - DNA, 33 bp, Homo sapien
catgcccaagctgacaccttcccttggtaaacc

SEQ ID NO: 398853 - DNA, 33 bp, Homo sapien
aaacatgccttgttcacgtagcgcccctagtag

SEQ ID NO: 398854 - DNA, 33 bp, Homo sapien
aaacatgccttgttcaggtagcgcccctagtag

SEQ ID NO: 398855 - DNA, 33 bp, Homo sapien
cctctaatccagcaaaatgattccctgcacacc

SEQ ID NO: 398856 - DNA, 33 bp, Homo sapien
cctctaatccagcaaagtgattccctgcacacc

SEQ ID NO: 398857 - DNA, 33 bp, Homo sapien
caggcactgggccatacgagactctttctaggt

SEQ ID NO: 398858 - DNA, 33 bp, Homo sapien
caggcactgggccatatgagactctttctaggt

SEQ ID NO: 398859 - DNA, 33 bp, Homo sapien
cacatttgtgttcagaacctttattggattccc

SEQ ID NO: 398860 - DNA, 33 bp, Homo sapien
cacatttgtgttcagaccctttattggattccc

SEQ ID NO: 398861 - DNA, 33 bp, Homo sapien
attatcacaaggtaaacgtgaaagctgtgaaga

SEQ ID NO: 398862 - DNA, 33 bp, Homo sapien
attatcacaaggtaaatgtgaaagctgtgaaga

SEQ ID NO: 398863 - DNA, 33 bp, Homo sapien
gttaaaagtccaagatgagatgtagctcaggag

SEQ ID NO: 398864 - DNA, 33 bp, Homo sapien
gttaaaagtccaagattagatgtagctcaggag

SEQ ID NO: 398865 - DNA, 33 bp, Homo sapien
ctgtcattctggaagacgtgcagagcctctcac

SEQ ID NO: 398866 - DNA, 33 bp, Homo sapien
ctgtcattctggaagatgtgcagagcctctcac

SEQ ID NO: 398867 - DNA, 33 bp, Homo sapien
tctctacaagcattacaaggcagagaattaaga

SEQ ID NO: 398868 - DNA, 33 bp, Homo sapien
tctctacaagcattacgaggcagagaattaaga

SEQ ID NO: 398869 - DNA, 33 bp, Homo sapien
tggctcattttcattcaactcggagtctgaaga

SEQ ID NO: 398870 - DNA, 33 bp, Homo sapien
tggctcattttcattcgactcggagtctgaaga

SEQ ID NO: 398871 - DNA, 33 bp, Homo sapien
ctaatgtgatgcttaccaagtagtgctgatggg

SEQ ID NO: 398872 - DNA, 33 bp, Homo sapien
ctaatgtgatgcttactaagtagtgctgatggg

SEQ ID NO: 398873 - DNA, 33 bp, Homo sapien
taaaacgctcctgttcccaccagataagagctg

SEQ ID NO: 398874 - DNA, 33 bp, Homo sapien
taaaacgctcctgttctcaccagataagagctg

SEQ ID NO: 398875 - DNA, 33 bp, Homo sapien
aagggcttaatttgcacaagattacaaaattaa

SEQ ID NO: 398876 - DNA, 33 bp, Homo sapien
aagggcttaatttgcagaagattacaaaattaa

SEQ ID NO: 398877 - DNA, 33 bp, Homo sapien
aacagcattaagaggaaaaacagtctgataggc

SEQ ID NO: 398878 - DNA, 33 bp, Homo sapien
aacagcattaagaggagaaacagtctgataggc

SEQ ID NO: 398879 - DNA, 33 bp, Homo sapien
gcttttctctctcccactaagcgtgatcacttc

SEQ ID NO: 398880 - DNA, 33 bp, Homo sapien
gcttttctctctcccagtaagcgtgatcacttc

SEQ ID NO: 398881 - DNA, 33 bp, Homo sapien
ccacctccgtcattgacagtcatatttcaacat

SEQ ID NO: 398882 - DNA, 33 bp, Homo sapien
ccacctccgtcattgagagtcatatttcaacat

SEQ ID NO: 398883 - DNA, 33 bp, Homo sapien
atttcttatgagctacaactgtgctattcaaag

SEQ ID NO: 398884 - DNA, 33 bp, Homo sapien
atttcttatgagctaccactgtgctattcaaag

SEQ ID NO: 398885 - DNA, 33 bp, Homo sapien
aatgtaacaagagtaacagcggacatttattga

SEQ ID NO: 398886 - DNA, 33 bp, Homo sapien
aatgtaacaagagtaatagcggacatttattga

SEQ ID NO: 398887 - DNA, 33 bp, Homo sapien
ttatttcacggacatcactacatccataatctc

SEQ ID NO: 398888 - DNA, 33 bp, Homo sapien
ttatttcacggacatcgctacatccataatctc

SEQ ID NO: 398889 - DNA, 33 bp, Homo sapien
agctaagaatagccaacgtcaaagatgagtaag

SEQ ID NO: 398890 - DNA, 33 bp, Homo sapien
agctaagaatagccaatgtcaaagatgagtaag

SEQ ID NO: 398891 - DNA, 33 bp, Homo sapien
agatgagtaagatgtactaaactttaagatgta

SEQ ID NO: 398892 - DNA, 33 bp, Homo sapien
agatgagtaagatgtattaaactttaagatgta

SEQ ID NO: 398893 - DNA, 33 bp, Homo sapien
tttggagaggtaattacacagcaggcttctgca

SEQ ID NO: 398894 - DNA, 33 bp, Homo sapien
tttggagaggtaattatacagcaggcttctgca

SEQ ID NO: 398895 - DNA, 33 bp, Homo sapien
ccagaaagtgccagagacaggatatcttgacct

SEQ ID NO: 398896 - DNA, 33 bp, Homo sapien
ccagaaagtgccagaggcaggatatcttgacct

SEQ ID NO: 398897 - DNA, 33 bp, Homo sapien
tctttaacatttatgaacatggtatgctacgat

SEQ ID NO: 398898 - DNA, 33 bp, Homo sapien
tctttaacatttatgaccatggtatgctacgat

SEQ ID NO: 398899 - DNA, 33 bp, Homo sapien
ccctttcttcctcttgaaaaacagacaagaaac

SEQ ID NO: 398900 - DNA, 33 bp, Homo sapien
ccctttcttcctcttgcaaaacagacaagaaac

SEQ ID NO: 398901 - DNA, 33 bp, Homo sapien
agtctaatgtttctgcaatcatggaacctaaaa

SEQ ID NO: 398902 - DNA, 33 bp, Homo sapien
agtctaatgtttctgcgatcatggaacctaaaa

SEQ ID NO: 398903 - DNA, 33 bp, Homo sapien
ttgcctgttggaagtgccaaagaacctggggat

SEQ ID NO: 398904 - DNA, 33 bp, Homo sapien
ttgcctgttggaagtggcaaagaacctggggat

SEQ ID NO: 398905 - DNA, 33 bp, Homo sapien
tgctaggtcctgagtacctatgtttattgcatc

SEQ ID NO: 398906 - DNA, 33 bp, Homo sapien
tgctaggtcctgagtatctatgtttattgcatc

SEQ ID NO: 398907 - DNA, 33 bp, Homo sapien
ccaaccccaaacagcaaaagtgagcagactttt

SEQ ID NO: 398908 - DNA, 33 bp, Homo sapien
ccaaccccaaacagcacaagtgagcagactttt

SEQ ID NO: 398909 - DNA, 33 bp, Homo sapien
ggaaaattaccaacagaaaacaatacgagtaag

SEQ ID NO: 398910 - DNA, 33 bp, Homo sapien
ggaaaattaccaacaggaaacaatacgagtaag

SEQ ID NO: 398911 - DNA, 33 bp, Homo sapien
atctattatcaaattaacatccaaccagagcat

SEQ ID NO: 398912 - DNA, 33 bp, Homo sapien
atctattatcaaattatcatccaaccagagcat

SEQ ID NO: 398913 - DNA, 33 bp, Homo sapien
ttctctcttcaaaaccgaaaaggcgggcttcca

SEQ ID NO: 398914 - DNA, 33 bp, Homo sapien
ttctctcttcaaaacctaaaaggcgggcttcca

SEQ ID NO: 398915 - DNA, 33 bp, Homo sapien
aagacgtgttcacagaatctaacttgctatgga

SEQ ID NO: 398916 - DNA, 33 bp, Homo sapien
aagacgtgttcacagactctaacttgctatgga

SEQ ID NO: 398917 - DNA, 33 bp, Homo sapien
catacacgtgggagtacgcagtgatgagtaacc

SEQ ID NO: 398918 - DNA, 33 bp, Homo sapien
catacacgtgggagtaggcagtgatgagtaacc

SEQ ID NO: 398919 - DNA, 33 bp, Homo sapien
ccccctctgtcttaaacgcagaagctggtgttc

SEQ ID NO: 398920 - DNA, 33 bp, Homo sapien
ccccctctgtcttaaatgcagaagctggtgttc

SEQ ID NO: 398921 - DNA, 33 bp, Homo sapien
gtgtatacgccatacccatgcactttccaaaaa

SEQ ID NO: 398922 - DNA, 33 bp, Homo sapien
gtgtatacgccatacctatgcactttccaaaaa

SEQ ID NO: 398923 - DNA, 33 bp, Homo sapien
aaagtttgagaggtagcaggggaagagaactag

SEQ ID NO: 398924 - DNA, 33 bp, Homo sapien
aaagtttgagaggtagtaggggaagagaactag

SEQ ID NO: 398925 - DNA, 33 bp, Homo sapien
gatgtcagagaattacaaagaatggatgaagcc

SEQ ID NO: 398926 - DNA, 33 bp, Homo sapien
gatgtcagagaattacgaagaatggatgaagcc

SEQ ID NO: 398927 - DNA, 33 bp, Homo sapien
tcctttaactcacacaacaaagcggtaagtgat

SEQ ID NO: 398928 - DNA, 33 bp, Homo sapien
tcctttaactcacacagcaaagcggtaagtgat

SEQ ID NO: 398929 - DNA, 33 bp, Homo sapien
aaaatgagtgggaacacgcacatacaacacaac

SEQ ID NO: 398930 - DNA, 33 bp, Homo sapien
aaaatgagtgggaacatgcacatacaacacaac

SEQ ID NO: 398931 - DNA, 33 bp, Homo sapien
aataacaccaagaggcagagatcactggggcca

SEQ ID NO: 398932 - DNA, 33 bp, Homo sapien
aataacaccaagaggccgagatcactggggcca

SEQ ID NO: 398933 - DNA, 33 bp, Homo sapien
ctttgaattgttggaaagattttgtttctggct

SEQ ID NO: 398934 - DNA, 33 bp, Homo sapien
ctttgaattgttggaaggattttgtttctggct

SEQ ID NO: 398935 - DNA, 33 bp, Homo sapien
ggtcatgagcagttaaacctaaggaccaagtca

SEQ ID NO: 398936 - DNA, 33 bp, Homo sapien
ggtcatgagcagttaagcctaaggaccaagtca

SEQ ID NO: 398937 - DNA, 33 bp, Homo sapien
ctgccattgcaagttgcattggaaaatggggca

SEQ ID NO: 398938 - DNA, 33 bp, Homo sapien
ctgccattgcaagttgtattggaaaatggggca

SEQ ID NO: 398939 - DNA, 33 bp, Homo sapien
gatccagaatctgatagctgtggagcattcgct

SEQ ID NO: 398940 - DNA, 33 bp, Homo sapien
gatccagaatctgatatctgtggagcattcgct

SEQ ID NO: 398941 - DNA, 33 bp, Homo sapien
aaaatatttgatccaaacatttatccttcttta

SEQ ID NO: 398942 - DNA, 33 bp, Homo sapien
aaaatatttgatccaagcatttatccttcttta

SEQ ID NO: 398943 - DNA, 33 bp, Homo sapien
ataatcagaatcagaacagtggcttgttcttgg

SEQ ID NO: 398944 - DNA, 33 bp, Homo sapien
ataatcagaatcagaatagtggcttgttcttgg

SEQ ID NO: 398945 - DNA, 33 bp, Homo sapien
gtatttctaagccacaaactaaaagattatgaa

SEQ ID NO: 398946 - DNA, 33 bp, Homo sapien
gtatttctaagccacagactaaaagattatgaa

SEQ ID NO: 398947 - DNA, 33 bp, Homo sapien
aggtgaaggagtaaaaccctgctgcattctttc

SEQ ID NO: 398948 - DNA, 33 bp, Homo sapien
aggtgaaggagtaaaagcctgctgcattctttc

SEQ ID NO: 398949 - DNA, 33 bp, Homo sapien
ggatagaataaaaccaagaacttttctatattt

SEQ ID NO: 398950 - DNA, 33 bp, Homo sapien
ggatagaataaaaccaggaacttttctatattt

SEQ ID NO: 398951 - DNA, 33 bp, Homo sapien
gggagaatggtaagaacggaaaaactacctgtt

SEQ ID NO: 398952 - DNA, 33 bp, Homo sapien
gggagaatggtaagaatggaaaaactacctgtt

SEQ ID NO: 398953 - DNA, 33 bp, Homo sapien
attttattctgcaaaaaacaatgttaagagaat

SEQ ID NO: 398954 - DNA, 33 bp, Homo sapien
attttattctgcaaaatacaatgttaagagaat

SEQ ID NO: 398955 - DNA, 33 bp, Homo sapien
agaatgaagaaggcaagtaagagttagttccag

SEQ ID NO: 398956 - DNA, 33 bp, Homo sapien
agaatgaagaaggcaattaagagttagttccag

SEQ ID NO: 398957 - DNA, 33 bp, Homo sapien
agaagccttacatcaactccatacaactatcag

SEQ ID NO: 398958 - DNA, 33 bp, Homo sapien
agaagccttacatcaattccatacaactatcag

SEQ ID NO: 398959 - DNA, 33 bp, Homo sapien
cccttcaaggtggcctaaagtaagagaacttac

SEQ ID NO: 398960 - DNA, 33 bp, Homo sapien
cccttcaaggtggcctgaagtaagagaacttac

SEQ ID NO: 398961 - DNA, 33 bp, Homo sapien
ggaagagtttgtataacgagttgcttttggtac

SEQ ID NO: 398962 - DNA, 33 bp, Homo sapien
ggaagagtttgtataatgagttgcttttggtac

SEQ ID NO: 398963 - DNA, 33 bp, Homo sapien
atggaaagccttaaatcacttctcaaataaaaa

SEQ ID NO: 398964 - DNA, 33 bp, Homo sapien
atggaaagccttaaattacttctcaaataaaaa

SEQ ID NO: 398965 - DNA, 33 bp, Homo sapien
cttctcaaataaaaagccttcaaaaatcaatga

SEQ ID NO: 398966 - DNA, 33 bp, Homo sapien
cttctcaaataaaaaggcttcaaaaatcaatga

SEQ ID NO: 398967 - DNA, 33 bp, Homo sapien
ccctggtcttatgttgcaatgaaaaaattctta

SEQ ID NO: 398968 - DNA, 33 bp, Homo sapien
ccctggtcttatgttgtaatgaaaaaattctta

SEQ ID NO: 398969 - DNA, 33 bp, Homo sapien
actagcttgctttctaccttacaaaaattcatg

SEQ ID NO: 398970 - DNA, 33 bp, Homo sapien
actagcttgctttctagcttacaaaaattcatg

SEQ ID NO: 398971 - DNA, 33 bp, Homo sapien
ctaagctacatgagtcaaaagattatgtttcaa

SEQ ID NO: 398972 - DNA, 33 bp, Homo sapien
ctaagctacatgagtccaaagattatgtttcaa

SEQ ID NO: 398973 - DNA, 33 bp, Homo sapien
agggacagattgacaacgggttttcacttcaaa

SEQ ID NO: 398974 - DNA, 33 bp, Homo sapien
agggacagattgacaatgggttttcacttcaaa

SEQ ID NO: 398975 - DNA, 33 bp, Homo sapien
ataggatatgacaacaatctgccaaaagactgg

SEQ ID NO: 398976 - DNA, 33 bp, Homo sapien
ataggatatgacaacagtctgccaaaagactgg

SEQ ID NO: 398977 - DNA, 33 bp, Homo sapien
tgagatgaatgaccacggagttattgttccaac

SEQ ID NO: 398978 - DNA, 33 bp, Homo sapien
tgagatgaatgaccactgagttattgttccaac

SEQ ID NO: 398979 - DNA, 33 bp, Homo sapien
ttattgttccaacacaatcaatataatgcaacc

SEQ ID NO: 398980 - DNA, 33 bp, Homo sapien
ttattgttccaacacagtcaatataatgcaacc

SEQ ID NO: 398981 - DNA, 33 bp, Homo sapien
acttatggtactttccagagagggctaccagat

SEQ ID NO: 398982 - DNA, 33 bp, Homo sapien
acttatggtactttccggagagggctaccagat

SEQ ID NO: 398983 - DNA, 33 bp, Homo sapien
ttgaaacctgtggcagaatgtgttaggaccgtt

SEQ ID NO: 398984 - DNA, 33 bp, Homo sapien
ttgaaacctgtggcaggatgtgttaggaccgtt

SEQ ID NO: 398985 - DNA, 33 bp, Homo sapien
aattctggggaaacaaactgacctcttcatttg

SEQ ID NO: 398986 - DNA, 33 bp, Homo sapien
aattctggggaaacaacctgacctcttcatttg

SEQ ID NO: 398987 - DNA, 33 bp, Homo sapien
cctatcaatattgcaagcctatttttaagcctg

SEQ ID NO: 398988 - DNA, 33 bp, Homo sapien
cctatcaatattgcaatcctatttttaagcctg

SEQ ID NO: 398989 - DNA, 33 bp, Homo sapien
aacaggacttactcaacgcttcatttcttccca

SEQ ID NO: 398990 - DNA, 33 bp, Homo sapien
aacaggacttactcaatgcttcatttcttccca

SEQ ID NO: 398991 - DNA, 33 bp, Homo sapien
gagagcccatttgtagaaaatctacctgttggt

SEQ ID NO: 398992 - DNA, 33 bp, Homo sapien
gagagcccatttgtaggaaatctacctgttggt

SEQ ID NO: 398993 - DNA, 33 bp, Homo sapien
ctgtatgttgactagacgcagggaatgctacgt

SEQ ID NO: 398994 - DNA, 33 bp, Homo sapien
ctgtatgttgactagatgcagggaatgctacgt

SEQ ID NO: 398995 - DNA, 33 bp, Homo sapien
tgactattttgcattacaggacattttcctaag

SEQ ID NO: 398996 - DNA, 33 bp, Homo sapien
tgactattttgcattataggacattttcctaag

SEQ ID NO: 398997 - DNA, 33 bp, Homo sapien
ttagcaccagagtacaacttgcacctattatct

SEQ ID NO: 398998 - DNA, 33 bp, Homo sapien
ttagcaccagagtacatcttgcacctattatct

SEQ ID NO: 398999 - DNA, 33 bp, Homo sapien
tgagcaaaaattgcaggcaaaatgttccttctt

SEQ ID NO: 399000 - DNA, 33 bp, Homo sapien
tgagcaaaaattgcagtcaaaatgttccttctt

SEQ ID NO: 399001 - DNA, 33 bp, Homo sapien
tacggtgataccaagacatcagaaaacacaggc

SEQ ID NO: 399002 - DNA, 33 bp, Homo sapien
tacggtgataccaagagatcagaaaacacaggc

SEQ ID NO: 399003 - DNA, 33 bp, Homo sapien
attctaacatatgaaggccatacttttccagtt

SEQ ID NO: 399004 - DNA, 33 bp, Homo sapien
attctaacatatgaagtccatacttttccagtt

SEQ ID NO: 399005 - DNA, 33 bp, Homo sapien
ccttgttaaacgaaaaatctgttacactggtga

SEQ ID NO: 399006 - DNA, 33 bp, Homo sapien
ccttgttaaacgaaaagtctgttacactggtga

SEQ ID NO: 399007 - DNA, 33 bp, Homo sapien
ggagcattccagttgaaaactcagaggtgacta

SEQ ID NO: 399008 - DNA, 33 bp, Homo sapien
ggagcattccagttgataactcagaggtgacta

SEQ ID NO: 399009 - DNA, 33 bp, Homo sapien
gtaccaatgatactgccacctaagtactgagga

SEQ ID NO: 399010 - DNA, 33 bp, Homo sapien
gtaccaatgatactgctacctaagtactgagga

SEQ ID NO: 399011 - DNA, 33 bp, Homo sapien
gagcttagtgtatatacggcaaatgtttccatg

SEQ ID NO: 399012 - DNA, 33 bp, Homo sapien
gagcttagtgtatatatggcaaatgtttccatg

SEQ ID NO: 399013 - DNA, 33 bp, Homo sapien
ttgcagttcttcttcaacagtaagggggtcata

SEQ ID NO: 399014 - DNA, 33 bp, Homo sapien
ttgcagttcttcttcagcagtaagggggtcata

SEQ ID NO: 399015 - DNA, 33 bp, Homo sapien
catcctggtagcctccaaatgcctcatctccag

SEQ ID NO: 399016 - DNA, 33 bp, Homo sapien
catcctggtagcctccgaatgcctcatctccag

SEQ ID NO: 399017 - DNA, 33 bp, Homo sapien
atggttagagtagatacgccttggaagaaggga

SEQ ID NO: 399018 - DNA, 33 bp, Homo sapien
atggttagagtagatatgccttggaagaaggga

SEQ ID NO: 399019 - DNA, 33 bp, Homo sapien
agaagataaatgaatgacagagggttgtgtcct

SEQ ID NO: 399020 - DNA, 33 bp, Homo sapien
agaagataaatgaatggcagagggttgtgtcct

SEQ ID NO: 399021 - DNA, 33 bp, Homo sapien
tgtgtcctgtgcattgaaaatggacaacagagg

SEQ ID NO: 399022 - DNA, 33 bp, Homo sapien
tgtgtcctgtgcattggaaatggacaacagagg

SEQ ID NO: 399023 - DNA, 33 bp, Homo sapien
ccatggagcaacacccaaggaattttgagaaga

SEQ ID NO: 399024 - DNA, 33 bp, Homo sapien
ccatggagcaacacccgaggaattttgagaaga

SEQ ID NO: 399025 - DNA, 33 bp, Homo sapien
ggaaaatagcgccaagaaaatcacaaacaaata

SEQ ID NO: 399026 - DNA, 33 bp, Homo sapien
ggaaaatagcgccaaggaaatcacaaacaaata

SEQ ID NO: 399027 - DNA, 33 bp, Homo sapien
atttgtaattatgattcaaggattacagtggtc

SEQ ID NO: 399028 - DNA, 33 bp, Homo sapien
atttgtaattatgattgaaggattacagtggtc

SEQ ID NO: 399029 - DNA, 33 bp, Homo sapien
tgattggaagcactgacgtcccagcgtgtctta

SEQ ID NO: 399030 - DNA, 33 bp, Homo sapien
tgattggaagcactgatgtcccagcgtgtctta

SEQ ID NO: 399031 - DNA, 33 bp, Homo sapien
agctaaagggcctgcccagtacaagaggaaaga

SEQ ID NO: 399032 - DNA, 33 bp, Homo sapien
agctaaagggcctgcctagtacaagaggaaaga

SEQ ID NO: 399033 - DNA, 33 bp, Homo sapien
cacatagggagttcataatagattcagtttatt

SEQ ID NO: 399034 - DNA, 33 bp, Homo sapien
cacatagggagttcatgatagattcagtttatt

SEQ ID NO: 399035 - DNA, 33 bp, Homo sapien
caagtaattcagattacagagctaacacttcaa

SEQ ID NO: 399036 - DNA, 33 bp, Homo sapien
caagtaattcagattatagagctaacacttcaa

SEQ ID NO: 399037 - DNA, 33 bp, Homo sapien
gagacaacaatctataaaggcaaacacaggaga

SEQ ID NO: 399038 - DNA, 33 bp, Homo sapien
gagacaacaatctatagaggcaaacacaggaga

SEQ ID NO: 399039 - DNA, 33 bp, Homo sapien
cactgagctttataaaaacctgattcttacact

SEQ ID NO: 399040 - DNA, 33 bp, Homo sapien
cactgagctttataaagacctgattcttacact

SEQ ID NO: 399041 - DNA, 33 bp, Homo sapien
agaatgtaagtggtcaccaagagacaggtgagg

SEQ ID NO: 399042 - DNA, 33 bp, Homo sapien
agaatgtaagtggtcatcaagagacaggtgagg

SEQ ID NO: 399043 - DNA, 33 bp, Homo sapien
caacacagatagaactaaaaacatactattgaa

SEQ ID NO: 399044 - DNA, 33 bp, Homo sapien
caacacagatagaactgaaaacatactattgaa

SEQ ID NO: 399045 - DNA, 33 bp, Homo sapien
gatgtagaagtgactaggaactgcctccagtca

SEQ ID NO: 399046 - DNA, 33 bp, Homo sapien
gatgtagaagtgactatgaactgcctccagtca

SEQ ID NO: 399047 - DNA, 33 bp, Homo sapien
aactaaagaggggtaaccattacggatctcatc

SEQ ID NO: 399048 - DNA, 33 bp, Homo sapien
aactaaagaggggtaatcattacggatctcatc

SEQ ID NO: 399049 - DNA, 33 bp, Homo sapien
cagcttgacggctgcaaaaacttggtgctgggg

SEQ ID NO: 399050 - DNA, 33 bp, Homo sapien
cagcttgacggctgcagaaacttggtgctgggg

SEQ ID NO: 399051 - DNA, 33 bp, Homo sapien
tctaagcttccagaaccgtaagaaatgcatttc

SEQ ID NO: 399052 - DNA, 33 bp, Homo sapien
tctaagcttccagaactgtaagaaatgcatttc

SEQ ID NO: 399053 - DNA, 33 bp, Homo sapien
ctgacctggatcatgaccttctccttggaaagt

SEQ ID NO: 399054 - DNA, 33 bp, Homo sapien
ctgacctggatcatgagcttctccttggaaagt

SEQ ID NO: 399055 - DNA, 33 bp, Homo sapien
ctggacaaacttaatacagtcaggtggaagtca

SEQ ID NO: 399056 - DNA, 33 bp, Homo sapien
ctggacaaacttaatagagtcaggtggaagtca

SEQ ID NO: 399057 - DNA, 33 bp, Homo sapien
gagtctttgttatgtaaatggtgtaatatttgc

SEQ ID NO: 399058 - DNA, 33 bp, Homo sapien
gagtctttgttatgtacatggtgtaatatttgc

SEQ ID NO: 399059 - DNA, 33 bp, Homo sapien
agtaaaaccttccagacgtgctttgagtaatct

SEQ ID NO: 399060 - DNA, 33 bp, Homo sapien
agtaaaaccttccagatgtgctttgagtaatct

SEQ ID NO: 399061 - DNA, 33 bp, Homo sapien
ccaagttatcttgtcacaaggtatcactcccac

SEQ ID NO: 399062 - DNA, 33 bp, Homo sapien
ccaagttatcttgtcagaaggtatcactcccac

SEQ ID NO: 399063 - DNA, 33 bp, Homo sapien
aaaggagaagaagtgaagaaccaatgtctattc

SEQ ID NO: 399064 - DNA, 33 bp, Homo sapien
aaaggagaagaagtgaggaaccaatgtctattc

SEQ ID NO: 399065 - DNA, 33 bp, Homo sapien
acagtttgataactcacgctgttgatagcttgg

SEQ ID NO: 399066 - DNA, 33 bp, Homo sapien
acagtttgataactcatgctgttgatagcttgg

SEQ ID NO: 399067 - DNA, 33 bp, Homo sapien
ccttaaatcaacaggaaatattgtgaaacacct

SEQ ID NO: 399068 - DNA, 33 bp, Homo sapien
ccttaaatcaacaggacatattgtgaaacacct

SEQ ID NO: 399069 - DNA, 33 bp, Homo sapien
cacattttggtttctccgaagcgaagatgcata

SEQ ID NO: 399070 - DNA, 33 bp, Homo sapien
cacattttggtttctctgaagcgaagatgcata

SEQ ID NO: 399071 - DNA, 33 bp, Homo sapien
aaattaagtgaaaggaaaaacagaggaggttgt

SEQ ID NO: 399072 - DNA, 33 bp, Homo sapien
aaattaagtgaaaggacaaacagaggaggttgt

SEQ ID NO: 399073 - DNA, 33 bp, Homo sapien
ggccaccaaatcctgtgaatctgagctcaaaaa

SEQ ID NO: 399074 - DNA, 33 bp, Homo sapien
ggccaccaaatcctgttaatctgagctcaaaaa

SEQ ID NO: 399075 - DNA, 33 bp, Homo sapien
agggaatgatgatttcacccagagaaagtatgc

SEQ ID NO: 399076 - DNA, 33 bp, Homo sapien
agggaatgatgatttcgcccagagaaagtatgc

SEQ ID NO: 399077 - DNA, 33 bp, Homo sapien
acttcatttggcaaaacttaggttatgagctca

SEQ ID NO: 399078 - DNA, 33 bp, Homo sapien
acttcatttggcaaaagttaggttatgagctca

SEQ ID NO: 399079 - DNA, 33 bp, Homo sapien
tgtttccatgccacacactgaagcagtgatctc

SEQ ID NO: 399080 - DNA, 33 bp, Homo sapien
tgtttccatgccacacgctgaagcagtgatctc

SEQ ID NO: 399081 - DNA, 33 bp, Homo sapien
cattacgtttataatacaggtgtggtgaggtgt

SEQ ID NO: 399082 - DNA, 33 bp, Homo sapien
cattacgtttataatagaggtgtggtgaggtgt

SEQ ID NO: 399083 - DNA, 33 bp, Homo sapien
gatgggggaaagtacacatattatggatgcatt

SEQ ID NO: 399084 - DNA, 33 bp, Homo sapien
gatgggggaaagtacagatattatggatgcatt

SEQ ID NO: 399085 - DNA, 33 bp, Homo sapien
tcactaatgtttcaccaccaatttcttcctgca

SEQ ID NO: 399086 - DNA, 33 bp, Homo sapien
tcactaatgtttcacccccaatttcttcctgca

SEQ ID NO: 399087 - DNA, 33 bp, Homo sapien
ctgagtgaggaaaacaagaaggcatacactaga

SEQ ID NO: 399088 - DNA, 33 bp, Homo sapien
ctgagtgaggaaaacaggaaggcatacactaga

SEQ ID NO: 399089 - DNA, 33 bp, Homo sapien
atcttggaccagataaattagtaccacctataa

SEQ ID NO: 399090 - DNA, 33 bp, Homo sapien
atcttggaccagataagttagtaccacctataa

SEQ ID NO: 399091 - DNA, 33 bp, Homo sapien
cccatggtgggaaagactctgatgccttggata

SEQ ID NO: 399092 - DNA, 33 bp, Homo sapien
cccatggtgggaaagattctgatgccttggata

SEQ ID NO: 399093 - DNA, 33 bp, Homo sapien
gttatttgacaggccaaattaggggtaagttgt

SEQ ID NO: 399094 - DNA, 33 bp, Homo sapien
gttatttgacaggccagattaggggtaagttgt

SEQ ID NO: 399095 - DNA, 33 bp, Homo sapien
tgtgtggatgtatatacaaaaggtgagtgaaac

SEQ ID NO: 399096 - DNA, 33 bp, Homo sapien
tgtgtggatgtatatataaaaggtgagtgaaac

SEQ ID NO: 399097 - DNA, 33 bp, Homo sapien
ttgccttgctcctttacggatcttcaaggtgct

SEQ ID NO: 399098 - DNA, 33 bp, Homo sapien
ttgccttgctcctttatggatcttcaaggtgct

SEQ ID NO: 399099 - DNA, 33 bp, Homo sapien
cctagaaaaccaatgacatagcattaagccaag

SEQ ID NO: 399100 - DNA, 33 bp, Homo sapien
cctagaaaaccaatgagatagcattaagccaag

SEQ ID NO: 399101 - DNA, 33 bp, Homo sapien
ttctcaacttaataacagtaaaatggtgctgta

SEQ ID NO: 399102 - DNA, 33 bp, Homo sapien
ttctcaacttaataacggtaaaatggtgctgta

SEQ ID NO: 399103 - DNA, 33 bp, Homo sapien
tctcatctttaccagacctaaactagcttactt

SEQ ID NO: 399104 - DNA, 33 bp, Homo sapien
tctcatctttaccagagctaaactagcttactt

SEQ ID NO: 399105 - DNA, 33 bp, Homo sapien
attttcatcacccccacaagagacccccatgtc

SEQ ID NO: 399106 - DNA, 33 bp, Homo sapien
attttcatcacccccagaagagacccccatgtc

SEQ ID NO: 399107 - DNA, 33 bp, Homo sapien
agtagaaagttggaacccactcacattgctgtt

SEQ ID NO: 399108 - DNA, 33 bp, Homo sapien
agtagaaagttggaactcactcacattgctgtt

SEQ ID NO: 399109 - DNA, 33 bp, Homo sapien
ccacatggactacctcaagcttccttacagcac

SEQ ID NO: 399110 - DNA, 33 bp, Homo sapien
ccacatggactacctcgagcttccttacagcac

SEQ ID NO: 399111 - DNA, 33 bp, Homo sapien
gggcattttgctgcgcactgagtgaatagttct

SEQ ID NO: 399112 - DNA, 33 bp, Homo sapien
gggcattttgctgcgcgctgagtgaatagttct

SEQ ID NO: 399113 - DNA, 33 bp, Homo sapien
tagccttattatatcacagtacttgaagcacat

SEQ ID NO: 399114 - DNA, 33 bp, Homo sapien
tagccttattatatcagagtacttgaagcacat

SEQ ID NO: 399115 - DNA, 33 bp, Homo sapien
cactgaaatgagacagaaaatgaagagttgagt

SEQ ID NO: 399116 - DNA, 33 bp, Homo sapien
cactgaaatgagacaggaaatgaagagttgagt

SEQ ID NO: 399117 - DNA, 33 bp, Homo sapien
ctgcagtgtcccccagaagccagaagcaataat

SEQ ID NO: 399118 - DNA, 33 bp, Homo sapien
ctgcagtgtcccccaggagccagaagcaataat

SEQ ID NO: 399119 - DNA, 33 bp, Homo sapien
aaggaggcaagtgatgcagcctaattgcaaagt

SEQ ID NO: 399120 - DNA, 33 bp, Homo sapien
aaggaggcaagtgatggagcctaattgcaaagt

SEQ ID NO: 399121 - DNA, 33 bp, Homo sapien
gccagaaaatccggcaggtagataaaagtttga

SEQ ID NO: 399122 - DNA, 33 bp, Homo sapien
gccagaaaatccggcatgtagataaaagtttga

SEQ ID NO: 399123 - DNA, 33 bp, Homo sapien
acctttcaaattcctaggaaaaatgtggccaag

SEQ ID NO: 399124 - DNA, 33 bp, Homo sapien
acctttcaaattcctatgaaaaatgtggccaag

SEQ ID NO: 399125 - DNA, 33 bp, Homo sapien
tactgagcatttaccacagaacaaggtctgatg

SEQ ID NO: 399126 - DNA, 33 bp, Homo sapien
tactgagcatttaccatagaacaaggtctgatg

SEQ ID NO: 399127 - DNA, 33 bp, Homo sapien
aaagcactgtcagtaacggaaaaagaacaatca

SEQ ID NO: 399128 - DNA, 33 bp, Homo sapien
aaagcactgtcagtaatggaaaaagaacaatca

SEQ ID NO: 399129 - DNA, 33 bp, Homo sapien
gtatttttataaagcaactagagaaataaagca

SEQ ID NO: 399130 - DNA, 33 bp, Homo sapien
gtatttttataaagcagctagagaaataaagca

SEQ ID NO: 399131 - DNA, 33 bp, Homo sapien
tgtattgcgcctataactcagttttaaaacaag

SEQ ID NO: 399132 - DNA, 33 bp, Homo sapien
tgtattgcgcctataattcagttttaaaacaag

SEQ ID NO: 399133 - DNA, 33 bp, Homo sapien
tgttctgtaagttcacaggacaggaagcgctga

SEQ ID NO: 399134 - DNA, 33 bp, Homo sapien
tgttctgtaagttcacgggacaggaagcgctga

SEQ ID NO: 399135 - DNA, 33 bp, Homo sapien
agttgccttagggataccctgtgcttccatcct

SEQ ID NO: 399136 - DNA, 33 bp, Homo sapien
agttgccttagggatagcctgtgcttccatcct

SEQ ID NO: 399137 - DNA, 33 bp, Homo sapien
agctctgtcattttgcacttgtgtgagtgaagt

SEQ ID NO: 399138 - DNA, 33 bp, Homo sapien
agctctgtcattttgcgcttgtgtgagtgaagt

SEQ ID NO: 399139 - DNA, 33 bp, Homo sapien
ctagagatgaggacaacttacatgctccctctc

SEQ ID NO: 399140 - DNA, 33 bp, Homo sapien
ctagagatgaggacaatttacatgctccctctc

SEQ ID NO: 399141 - DNA, 33 bp, Homo sapien
ctgtatttttgaaatgcacaaagttgtttggga

SEQ ID NO: 399142 - DNA, 33 bp, Homo sapien
ctgtatttttgaaatggacaaagttgtttggga

SEQ ID NO: 399143 - DNA, 33 bp, Homo sapien
gctgaaattgtccagacttggctaaagaaaaga

SEQ ID NO: 399144 - DNA, 33 bp, Homo sapien
gctgaaattgtccagatttggctaaagaaaaga

SEQ ID NO: 399145 - DNA, 33 bp, Homo sapien
gaaaggacatttaacccctttgcgagcgtgcat

SEQ ID NO: 399146 - DNA, 33 bp, Homo sapien
gaaaggacatttaacctctttgcgagcgtgcat

SEQ ID NO: 399147 - DNA, 33 bp, Homo sapien
ccattaaagaaccataataatcaacagctccaa

SEQ ID NO: 399148 - DNA, 33 bp, Homo sapien
ccattaaagaaccatagtaatcaacagctccaa

SEQ ID NO: 399149 - DNA, 33 bp, Homo sapien
gttcatgaatgaaaaccatttgcttctctgaac

SEQ ID NO: 399150 - DNA, 33 bp, Homo sapien
gttcatgaatgaaaacgatttgcttctctgaac

SEQ ID NO: 399151 - DNA, 33 bp, Homo sapien
agatgaatataagcaacgtgggtgtcccaggtt

SEQ ID NO: 399152 - DNA, 33 bp, Homo sapien
agatgaatataagcaatgtgggtgtcccaggtt

SEQ ID NO: 399153 - DNA, 33 bp, Homo sapien
ggaacaaagaaaactaactcaaactcctcttac

SEQ ID NO: 399154 - DNA, 33 bp, Homo sapien
ggaacaaagaaaactatctcaaactcctcttac

SEQ ID NO: 399155 - DNA, 33 bp, Homo sapien
cctgttccttacttcccagcttctagtgcctgc

SEQ ID NO: 399156 - DNA, 33 bp, Homo sapien
cctgttccttacttcctagcttctagtgcctgc

SEQ ID NO: 399157 - DNA, 33 bp, Homo sapien
catagaaaacctttggaatgtggacaatgttcc

SEQ ID NO: 399158 - DNA, 33 bp, Homo sapien
catagaaaacctttgggatgtggacaatgttcc

SEQ ID NO: 399159 - DNA, 33 bp, Homo sapien
gaaagcgtatgtccccacaaagtcttatacagc

SEQ ID NO: 399160 - DNA, 33 bp, Homo sapien
gaaagcgtatgtccccgcaaagtcttatacagc

SEQ ID NO: 399161 - DNA, 33 bp, Homo sapien
tatatttcttcaggccacctttttggtgacagc

SEQ ID NO: 399162 - DNA, 33 bp, Homo sapien
tatatttcttcaggccccctttttggtgacagc

SEQ ID NO: 399163 - DNA, 33 bp, Homo sapien
tgattccttctcatccccattccacgtttagga

SEQ ID NO: 399164 - DNA, 33 bp, Homo sapien
tgattccttctcatcctcattccacgtttagga

SEQ ID NO: 399165 - DNA, 33 bp, Homo sapien
caggagacaagtcgccaaaaattctaggtaatg

SEQ ID NO: 399166 - DNA, 33 bp, Homo sapien
caggagacaagtcgcccaaaattctaggtaatg

SEQ ID NO: 399167 - DNA, 33 bp, Homo sapien
atcattttttactacccatttggcatgatttat

SEQ ID NO: 399168 - DNA, 33 bp, Homo sapien
atcattttttactaccgatttggcatgatttat

SEQ ID NO: 399169 - DNA, 33 bp, Homo sapien
aacaattaaaatgcaaacgttatttgggtaaat

SEQ ID NO: 399170 - DNA, 33 bp, Homo sapien
aacaattaaaatgcaagcgttatttgggtaaat

SEQ ID NO: 399171 - DNA, 33 bp, Homo sapien
gccatgtcattaccacgacagaaccaaggaggg

SEQ ID NO: 399172 - DNA, 33 bp, Homo sapien
gccatgtcattaccactacagaaccaaggaggg

SEQ ID NO: 399173 - DNA, 33 bp, Homo sapien
gtcttactggtgacataaacagccaattaacat

SEQ ID NO: 399174 - DNA, 33 bp, Homo sapien
gtcttactggtgacattaacagccaattaacat

SEQ ID NO: 399175 - DNA, 33 bp, Homo sapien
cccactgagacaaatgcaaaaggtgagtgacct

SEQ ID NO: 399176 - DNA, 33 bp, Homo sapien
cccactgagacaaatgtaaaaggtgagtgacct

SEQ ID NO: 399177 - DNA, 33 bp, Homo sapien
cataaataaaaaataaccacagcttctgggaat

SEQ ID NO: 399178 - DNA, 33 bp, Homo sapien
cataaataaaaaataatcacagcttctgggaat

SEQ ID NO: 399179 - DNA, 33 bp, Homo sapien
agatataaaggtaaaaatcttcagtgaaataga

SEQ ID NO: 399180 - DNA, 33 bp, Homo sapien
agatataaaggtaaaagtcttcagtgaaataga

SEQ ID NO: 399181 - DNA, 33 bp, Homo sapien
aggaagtggcaactcacctgggatctaaagaat

SEQ ID NO: 399182 - DNA, 33 bp, Homo sapien
aggaagtggcaactcagctgggatctaaagaat

SEQ ID NO: 399183 - DNA, 33 bp, Homo sapien
ccaaatccctgagtcacgtgagtttttttccct

SEQ ID NO: 399184 - DNA, 33 bp, Homo sapien
ccaaatccctgagtcatgtgagtttttttccct

SEQ ID NO: 399185 - DNA, 33 bp, Homo sapien
atggacactgaggtgaactatggattgatcaat

SEQ ID NO: 399186 - DNA, 33 bp, Homo sapien
atggacactgaggtgagctatggattgatcaat

SEQ ID NO: 399187 - DNA, 33 bp, Homo sapien
tcattcttcaacaacacagtctagtccttctat

SEQ ID NO: 399188 - DNA, 33 bp, Homo sapien
tcattcttcaacaacagagtctagtccttctat

SEQ ID NO: 399189 - DNA, 33 bp, Homo sapien
ccatagagcttccatacggcagaattagaatcc

SEQ ID NO: 399190 - DNA, 33 bp, Homo sapien
ccatagagcttccatagggcagaattagaatcc

SEQ ID NO: 399191 - DNA, 33 bp, Homo sapien
tatacagcaaaagctaactagtattctggatga

SEQ ID NO: 399192 - DNA, 33 bp, Homo sapien
tatacagcaaaagctatctagtattctggatga

SEQ ID NO: 399193 - DNA, 33 bp, Homo sapien
caaccacagaattctacaggactaggattaaca

SEQ ID NO: 399194 - DNA, 33 bp, Homo sapien
caaccacagaattctataggactaggattaaca

SEQ ID NO: 399195 - DNA, 33 bp, Homo sapien
aatgtgtcagatgagaagagaagatccacgagg

SEQ ID NO: 399196 - DNA, 33 bp, Homo sapien
aatgtgtcagatgagaggagaagatccacgagg

SEQ ID NO: 399197 - DNA, 33 bp, Homo sapien
tttccatggcagataaagagttgaaggcagtct

SEQ ID NO: 399198 - DNA, 33 bp, Homo sapien
tttccatggcagataaggagttgaaggcagtct

SEQ ID NO: 399199 - DNA, 33 bp, Homo sapien
agtactttacaaattacgggttcacagattatt

SEQ ID NO: 399200 - DNA, 33 bp, Homo sapien
agtactttacaaattatgggttcacagattatt

SEQ ID NO: 399201 - DNA, 33 bp, Homo sapien
agcatggcagaagatgaaaagttcaataaagaa

SEQ ID NO: 399202 - DNA, 33 bp, Homo sapien
agcatggcagaagatgcaaagttcaataaagaa

SEQ ID NO: 399203 - DNA, 33 bp, Homo sapien
tccaggaattgaggaaaggaattgacagaattt

SEQ ID NO: 399204 - DNA, 33 bp, Homo sapien
tccaggaattgaggaagggaattgacagaattt

SEQ ID NO: 399205 - DNA, 33 bp, Homo sapien
ggaagccaggacaagacgagtcactggaaggct

SEQ ID NO: 399206 - DNA, 33 bp, Homo sapien
ggaagccaggacaagatgagtcactggaaggct

SEQ ID NO: 399207 - DNA, 33 bp, Homo sapien
agatgtgattctcttacaagtttcttataactc

SEQ ID NO: 399208 - DNA, 33 bp, Homo sapien
agatgtgattctcttagaagtttcttataactc

SEQ ID NO: 399209 - DNA, 33 bp, Homo sapien
gttgagaaaaatgaacagcatcaggagttgaga

SEQ ID NO: 399210 - DNA, 33 bp, Homo sapien
gttgagaaaaatgaacggcatcaggagttgaga

SEQ ID NO: 399211 - DNA, 33 bp, Homo sapien
cattggtcaaatggcaagcaagtttacatcatt

SEQ ID NO: 399212 - DNA, 33 bp, Homo sapien
cattggtcaaatggcaggcaagtttacatcatt

SEQ ID NO: 399213 - DNA, 33 bp, Homo sapien
aagcttaactgcttgacgtttcagatctttgca

SEQ ID NO: 399214 - DNA, 33 bp, Homo sapien
aagcttaactgcttgatgtttcagatctttgca

SEQ ID NO: 399215 - DNA, 33 bp, Homo sapien
aaagagaggatattacagagttcttagtctacc

SEQ ID NO: 399216 - DNA, 33 bp, Homo sapien
aaagagaggatattacggagttcttagtctacc

SEQ ID NO: 399217 - DNA, 33 bp, Homo sapien
tgatcctgacatgtggacaattcactggaaaag

SEQ ID NO: 399218 - DNA, 33 bp, Homo sapien
tgatcctgacatgtgggcaattcactggaaaag

SEQ ID NO: 399219 - DNA, 33 bp, Homo sapien
agcccacaggtgaaggcccatactatctacttc

SEQ ID NO: 399220 - DNA, 33 bp, Homo sapien
agcccacaggtgaaggtccatactatctacttc

SEQ ID NO: 399221 - DNA, 33 bp, Homo sapien
gagaaagcctattagaagctaactttgaagaga

SEQ ID NO: 399222 - DNA, 33 bp, Homo sapien
gagaaagcctattagacgctaactttgaagaga

SEQ ID NO: 399223 - DNA, 33 bp, Homo sapien
gccaggcttacttatgcaggtcaggtaaggcca

SEQ ID NO: 399224 - DNA, 33 bp, Homo sapien
gccaggcttacttatgtaggtcaggtaaggcca

SEQ ID NO: 399225 - DNA, 33 bp, Homo sapien
cctgtatatatgactacggatttccaagtgagt

SEQ ID NO: 399226 - DNA, 33 bp, Homo sapien
cctgtatatatgactatggatttccaagtgagt

SEQ ID NO: 399227 - DNA, 33 bp, Homo sapien
ccaatcactggcttccaaagaccttgtatgctt

SEQ ID NO: 399228 - DNA, 33 bp, Homo sapien
ccaatcactggcttccgaagaccttgtatgctt

SEQ ID NO: 399229 - DNA, 33 bp, Homo sapien
gaagtagatcataaaaacttctttccagaggtg

SEQ ID NO: 399230 - DNA, 33 bp, Homo sapien
gaagtagatcataaaaccttctttccagaggtg

SEQ ID NO: 399231 - DNA, 33 bp, Homo sapien
agctgctaatccatcaatacaacaaattcaact

SEQ ID NO: 399232 - DNA, 33 bp, Homo sapien
agctgctaatccatcagtacaacaaattcaact

SEQ ID NO: 399233 - DNA, 33 bp, Homo sapien
agaaaggaggaaagcaaatgtgagaagtagtga

SEQ ID NO: 399234 - DNA, 33 bp, Homo sapien
agaaaggaggaaagcagatgtgagaagtagtga

SEQ ID NO: 399235 - DNA, 33 bp, Homo sapien
tgaaaaatgtgcatgacagttgaaaattcctct

SEQ ID NO: 399236 - DNA, 33 bp, Homo sapien
tgaaaaatgtgcatgatagttgaaaattcctct

SEQ ID NO: 399237 - DNA, 33 bp, Homo sapien
cacatattaatggttacgcttttactcctgcat

SEQ ID NO: 399238 - DNA, 33 bp, Homo sapien
cacatattaatggttatgcttttactcctgcat

SEQ ID NO: 399239 - DNA, 33 bp, Homo sapien
atgtcagctgctgcaacgctagtgaaaaagaca

SEQ ID NO: 399240 - DNA, 33 bp, Homo sapien
atgtcagctgctgcaatgctagtgaaaaagaca

SEQ ID NO: 399241 - DNA, 33 bp, Homo sapien
gtgaatacagacaaaacggtaaaccaatgagag

SEQ ID NO: 399242 - DNA, 33 bp, Homo sapien
gtgaatacagacaaaatggtaaaccaatgagag

SEQ ID NO: 399243 - DNA, 33 bp, Homo sapien
gttatgctgattaatacatgaggaaacaggagc

SEQ ID NO: 399244 - DNA, 33 bp, Homo sapien
gttatgctgattaatagatgaggaaacaggagc

SEQ ID NO: 399245 - DNA, 33 bp, Homo sapien
cataacgcctatgctacccaaatctcagggtta

SEQ ID NO: 399246 - DNA, 33 bp, Homo sapien
cataacgcctatgctatccaaatctcagggtta

SEQ ID NO: 399247 - DNA, 33 bp, Homo sapien
tctgggtgtctggttaccagttcagaagccgaa

SEQ ID NO: 399248 - DNA, 33 bp, Homo sapien
tctgggtgtctggttatcagttcagaagccgaa

SEQ ID NO: 399249 - DNA, 33 bp, Homo sapien
aaatgttcctcctggaaaagctgtattcccttc

SEQ ID NO: 399250 - DNA, 33 bp, Homo sapien
aaatgttcctcctggagaagctgtattcccttc

SEQ ID NO: 399251 - DNA, 33 bp, Homo sapien
agaggaatatgccaaaagaatggaacaaatgca

SEQ ID NO: 399252 - DNA, 33 bp, Homo sapien
agaggaatatgccaaaggaatggaacaaatgca

SEQ ID NO: 399253 - DNA, 33 bp, Homo sapien
tcacccttcaatagagcagtttaagcatttact

SEQ ID NO: 399254 - DNA, 33 bp, Homo sapien
tcacccttcaatagagtagtttaagcatttact

SEQ ID NO: 399255 - DNA, 33 bp, Homo sapien
tctaggtcttgttatagcctgtcctgctgtacc
